(19) United States
(12) Patent Application Publication
(10) Pub. No.: US 2022/0307033 A1
(43) Pub. Date: Sep. 29, 2022

(54) Treatment Of Liver Disease With Ring Finger Protein 213 (RNF213) Inhibitors

(71) Applicant: Regeneron Pharmaceuticals, Inc., Tarrytown, NY (US)

(72) Inventors: Luca Andrea Lotta, Tarrytown, NY (US); Niek Verweij, Tarrytown, NY (US); Manuel Allen Revez Ferreira, Tarrytown, NY (US); Aris Baras, Tarrytown, NY (US)

(21) Appl. No.: 17/683,468

(22) Filed: Mar. 1, 2022

Related U.S. Application Data
(60) Provisional application No. 63/155,327, filed on Mar. 2, 2021.
(60) Provisional application No. 63/159,027, filed on Mar. 10, 2021.

(51) Int. Cl. C12N 15/113; A61K 31/7088; A61K 38/46; C12Q 1/6883; A61P 1/16; C12N 15/11

(52) U.S. Cl. CPC C12N 15/1137; A61K 31/7088; A61K 38/465; C12Q 1/6883; A61P 1/16; C12N 15/111; C12Q 2600/106; C12Q 2600/158

(57) ABSTRACT

The present disclosure provides methods of treating subjects having a liver disease, and methods of identifying subjects having an increased risk of developing a liver disease.

### REFERENCE TO SEQUENCE LISTING

[0001] This application includes a Sequence Listing submitted electronically as a text file named 18923805901SEQ, created on Feb. 28, 2022, with a size of 13,777 kilobytes. The Sequence Listing is incorporated herein by reference.

### FIELD

[0002] The present disclosure relates generally to the treatment of subjects having a liver disease with Ring Finger Protein 213 (RNF213) inhibitors, and methods of identifying subjects having an increased risk of developing a liver disease.

### BACKGROUND

[0003] Chronic liver disease and cirrhosis are leading causes of morbidity and mortality in the United States accounting for 38,170 deaths (1.5% of total deaths) in 2014 (Kochanek et al., Nat'l. Vital Stat. Rep., 2016, 65, 1-122). The most common etiologies of cirrhosis in the U.S. are alcoholic liver disease, chronic hepatitis C, and nonalcoholic fatty liver disease (NAFLD), together accounting for about 80% of subjects awaiting liver transplant between 2004 and 2013 (Wong et al., Gastroenterology, 2015, 148, 547-555). The estimated prevalence of NAFLD in the U.S. is between 19 and 46 percent (Browning et al., Hepatology, 2004, 40, 1387-1395; Lazo et al., Am. J. Epidemiol., 2013, 178, 38-45; and Williams et al., Gastroenterology, 2011, 140, 124-131) and is rising over time (Younossi et al., Clin. Gastroenterol. Hepatol., 2011, 9, 524-530), likely in conjunction with increased rates of obesity, its primary risk factor (Cohen et al., Science, 2011, 332, 1519-1523). While significant advances have been made in the treatment of hepatitis C, there are currently no evidence-based treatments for alcoholic or nonalcoholic liver disease and cirrhosis.

[0004] Ring Finger Protein 213 (RNF213) is protein containing a C3HC4-type RING finger domain, which is a specialized type of Zn-finger that binds two atoms of zinc and is thought to be involved in mediating protein-protein interactions. The protein also contains an AAA domain, which is associated with ATPase activity. RNF213 is also known as E3 ubiquitin-protein ligase and is involved in angiogenesis and in the non-canonical Wnt signaling pathway in vascular development, where it acts by mediating ubiquitination and degradation of FLNA and NFATC2 downstream of RSPO3, leading to inhibition of the non-canonical Wnt signaling pathway and promoting vessel regression. In addition, RNF213 is a susceptibility gene for Moyamoya disease (MMD), a cerebrovascular disorder characterized by arterial occlusions and abnormal blood vessel generation. In addition, RNF213 plays a role in lipid metabolism modulating lipotoxicity, fat storage, and lipid droplet formation. RNF213^{-/-} MGI mouse show decreased body weight and leptin, increased food intake, increased glucose, and impaired insulin.

### SUMMARY

[0005] The present disclosure provides methods of treating a subject having liver disease, the methods comprising administering an RNF213 inhibitor to the subject.

[0006] The present disclosure also provides methods of treating a subject having fatty liver disease, the methods comprising administering an RNF213 inhibitor to the subject.

[0007] The present disclosure also provides methods of treating a subject having hepatocellular carcinoma, the methods comprising administering an RNF213 inhibitor to the subject.

[0008] The present disclosure also provides methods of treating a subject having liver cirrhosis, the methods comprising administering an RNF213 inhibitor to the subject.

[0009] The present disclosure also provides methods of treating a subject having liver fibrosis, the methods comprising administering an RNF213 inhibitor to the subject.

[0010] The present disclosure also provides methods of treating a subject having simple steatosis, steatohepatitis, or non-alcoholic steatohepatitis (NASH), the methods comprising administering an RNF213 inhibitor to the subject.

[0011] The present disclosure also provides methods of treating a subject with a therapeutic agent that treats or inhibits a liver disease, wherein the subject is suffering from a liver disease, the methods comprising the steps of: determining whether the subject has an RNF213 predicted loss-of-function or missense variant nucleic acid molecule encoding a human RNF213 polypeptide by: obtaining or having obtained a biological sample from the subject; and performing or having performed a genotyping assay on the biological sample to determine if the subject has a genotype comprising the RNF213 predicted loss-of-function or missense variant nucleic acid molecule; and when the subject is RNF213 reference, then administering or continuing to administer to the subject the therapeutic agent that treats or inhibits a liver disease in a standard dosage amount, and administering to the subject an RNF213 inhibitor; and when the subject is heterozygous for an RNF213 predicted loss-of-function or missense variant, then administering or continuing to administer to the subject the therapeutic agent that treats or inhibits a liver disease in an amount that is the same as or lower than a standard dosage amount, and administering to the subject an RNF213 inhibitor; wherein the presence of a genotype having the RNF213 predicted loss-of-function or missense variant nucleic acid molecule encoding the human RNF213 polypeptide indicates the subject has a reduced risk of developing a liver disease.

[0012] The present disclosure also provides methods of identifying a subject having an increased risk for developing a liver disease, wherein the methods comprise: determining or having determined the presence or absence of an RNF213 predicted loss-of-function or missense variant nucleic acid molecule encoding a human RNF213 polypeptide in a biological sample obtained from the subject; wherein: when the subject is RNF213 reference, then the subject has an increased risk for developing a liver disease; and when the subject is heterozygous for an RNF213 predicted loss-of-function or missense variant or homozygous for an RNF213 predicted loss-of-function or missense variant, then the subject has a decreased risk for developing a liver disease.

[0013] The present disclosure also provides therapeutic agents that treat or inhibit a liver disease for use in the treatment of a liver disease in a subject having: a genomic nucleic acid molecule having a nucleotide sequence encoding an RNF213 polypeptide, wherein the nucleotide sequence comprises: a guanine at a position corresponding to position 102,917 according to SEQ ID NO:2, or the complement thereof; a cytosine at a position corresponding to position 102,391 according to SEQ ID NO:3, or the complement thereof; or a thymine at a position corresponding to position 103,226 according to SEQ ID NO:4, or the complement thereof; an mRNA molecule having a nucleotide sequence encoding a human RNF213 polypeptide, wherein the nucleotide sequence comprises: a guanine at a position corresponding to position 11,887 according to SEQ ID NO:12, or the complement thereof; a guanine at a position corresponding to position 12,036 according to SEQ ID NO:13, or the complement thereof; a guanine at a position corresponding to position 2,685 according to SEQ ID NO:14, or the complement thereof; a guanine at a position corresponding to position 1,050 according to SEQ ID NO:15, or the complement thereof; a guanine at a position corresponding to position 438 according to SEQ ID NO:16, or the complement thereof; a guanine at a position corresponding to position 112 according to SEQ ID NO:17, or the complement thereof; a guanine at a position corresponding to position 84 according to SEQ ID NO:18, or the complement thereof; a cytosine at a position corresponding to position 11,655 according to SEQ ID NO:19, or the complement thereof; a cytosine at a position corresponding to position 11,804 according to SEQ ID NO:20, or the complement thereof; a cytosine at a position corresponding to position 2,453 according to SEQ ID NO:21, or the complement thereof; a cytosine at a position corresponding to position 818 according to SEQ ID NO:22, or the complement thereof; or a cytosine at a position corresponding to position 206 according to SEQ ID NO:23, or the complement thereof; or a cDNA molecule having a nucleotide sequence encoding a human RNF213 polypeptide, wherein the nucleotide sequence comprises: a guanine at a position corresponding to position 11,887 according to SEQ ID NO:31, or the complement thereof; a guanine at a position corresponding to position 12,036 according to SEQ ID NO:32, or the complement thereof; a guanine at a position corresponding to position 2,685 according to SEQ ID NO:33, or the complement thereof; a guanine at a position corresponding to position 1,050 according to SEQ ID NO:34, or the complement thereof; a guanine at a position corresponding to position 438 according to SEQ ID NO:35, or the complement thereof; a guanine at a position corresponding to position 112 according to SEQ ID NO:36, or the complement thereof; a guanine at a position corresponding to position 84 according to SEQ ID NO:37, or the complement thereof; a cytosine at a position corresponding to position 11,655 according to SEQ ID NO:38, or the complement thereof; a cytosine at a position corresponding to position 11,804 according to SEQ ID NO:39, or the complement thereof; a cytosine at a position corresponding to position 2,453 according to SEQ ID NO:40, or the complement thereof; a cytosine at a position corresponding to position 818 according to SEQ ID NO:41, or the complement thereof; or a cytosine at a position corresponding to position 206 according to SEQ ID NO:42, or the complement thereof.

[0014] The present disclosure also provides RNF213 inhibitors for use in the treatment of a liver disease in a subject having: a genomic nucleic acid molecule having a nucleotide sequence encoding a human Ring Finger Protein 213 polypeptide, wherein the nucleotide sequence comprises: a guanine at a position corresponding to position 102,917 according to SEQ ID NO:2, or the complement thereof; a cytosine at a position corresponding to position 102,391 according to SEQ ID NO:3, or the complement thereof; or a thymine at a position corresponding to position 103,226 according to SEQ ID NO:4, or the complement thereof; an mRNA molecule having a nucleotide sequence encoding a human RNF213 polypeptide, wherein the nucleotide sequence comprises: a guanine at a position corresponding to position 11,887 according to SEQ ID NO:12, or the complement thereof; a guanine at a position corresponding to position 12,036 according to SEQ ID NO:13, or the complement thereof; a guanine at a position corresponding to position 2,685 according to SEQ ID NO:14, or the complement thereof; a guanine at a position corresponding to position 1,050 according to SEQ ID NO:15, or the complement thereof; a guanine at a position corresponding to position 438 according to SEQ ID NO:16, or the complement thereof; a guanine at a position corresponding to position 112 according to SEQ ID NO:17, or the complement thereof; a guanine at a position corresponding to position 84 according to SEQ ID NO:18, or the complement thereof; a cytosine at a position corresponding to position 11,655 according to SEQ ID NO:19, or the complement thereof; a cytosine at a position corresponding to position 11,804 according to SEQ ID NO:20, or the complement thereof; a cytosine at a position corresponding to position 2,453 according to SEQ ID NO:21, or the complement thereof; a cytosine at a position corresponding to position 818 according to SEQ ID NO:22, or the complement thereof; or a cytosine at a position corresponding to position 206 according to SEQ ID NO:23, or the complement thereof; or a cDNA molecule having a nucleotide sequence encoding a human RNF213 polypeptide, wherein the nucleotide sequence comprises: a guanine at a position corresponding to position 11,887 according to SEQ ID NO:31, or the complement thereof; a guanine at a position corresponding to position 12,036 according to SEQ ID NO:32, or the complement thereof; a guanine at a position corresponding to position 2,685 according to SEQ ID NO:33, or the complement thereof; a guanine at a position corresponding to position 1,050 according to SEQ ID NO:34, or the complement thereof; a guanine at a position corresponding to position 438 according to SEQ ID NO:35, or the complement thereof; a guanine at a position corresponding to position 112 according to SEQ ID NO:36, or the complement thereof; a guanine at a position corresponding to position 84 according to SEQ ID NO:37, or the complement thereof; a cytosine at a position corresponding to position 11,655 according to SEQ ID NO:38, or the complement thereof; a cytosine at a position corresponding to position 11,804 according to SEQ ID NO:39, or the complement thereof; a cytosine at a position corresponding to position 2,453 according to SEQ ID NO:40, or the complement thereof; a cytosine at a position corresponding to position 818 according to SEQ ID NO:41, or the complement thereof; or a cytosine at a position corresponding to position 206 according to SEQ ID NO:42, or the complement thereof.

### DESCRIPTION

[0015] Various terms relating to aspects of the present disclosure are used throughout the specification and claims. Such terms are to be given their ordinary meaning in the art, unless otherwise indicated. Other specifically defined terms are to be construed in a manner consistent with the definitions provided herein.

[0016] Unless otherwise expressly stated, it is in no way intended that any method or aspect set forth herein be construed as requiring that its steps be performed in a specific order. Accordingly, where a method claim does not specifically state in the claims or descriptions that the steps are to be limited to a specific order, it is in no way intended that an order be inferred, in any respect. This holds for any possible non-expressed basis for interpretation, including matters of logic with respect to arrangement of steps or operational flow, plain meaning derived from grammatical organization or punctuation, or the number or type of aspects described in the specification.

[0017] As used herein, the singular forms “a,” “an” and “the” include plural referents unless the context clearly dictates otherwise.

[0018] As used herein, the term “about” means that the recited numerical value is approximate and small variations would not significantly affect the practice of the disclosed embodiments. Where a numerical value is used, unless indicated otherwise by the context, the term “about” means the numerical value can vary by ±10% and remain within the scope of the disclosed embodiments.

[0019] As used herein, the term “comprising” may be replaced with “consisting” or “consisting essentially of” in particular embodiments as desired.

[0020] As used herein, the term “isolated”, in regard to a nucleic acid molecule or a polypeptide, means that the nucleic acid molecule or polypeptide is in a condition other than its native environment, such as apart from blood and/or animal tissue. In some embodiments, an isolated nucleic acid molecule or polypeptide is substantially free of other nucleic acid molecules or other polypeptides, particularly other nucleic acid molecules or polypeptides of animal origin. In some embodiments, the nucleic acid molecule or polypeptide can be in a highly purified form, i.e., greater than 95% pure or greater than 99% pure. When used in this context, the term “isolated” does not exclude the presence of the same nucleic acid molecule or polypeptide in alternative physical forms, such as dimers or alternatively phosphorylated or derivatized forms.

[0021] As used herein, the terms “nucleic acid”, “nucleic acid molecule”, “nucleic acid sequence”, “polynucleotide”, or “oligonucleotide” can comprise a polymeric form of nucleotides of any length, can comprise DNA and/or RNA, and can be single-stranded, double-stranded, or multiple stranded. One strand of a nucleic acid also refers to its complement.

[0022] As used herein, the term “subject” includes any animal, including mammals. Mammals include, but are not limited to, farm animals (such as, for example, horse, cow, pig), companion animals (such as, for example, dog, cat), laboratory animals (such as, for example, mouse, rat, rabbits), and non-human primates. In some embodiments, the subject is a human. In some embodiments, the human is a patient under the care of a physician.

[0023] A rare variant in the RNF213 gene associated with a decreased risk of developing a liver disease in subjects has been identified in accordance with the present disclosure. For example, a genetic alteration that changes the adenine nucleotide of position 102,917 in the human RNF213 reference (see, SEQ ID NO:1) to guanine, or the guanine nucleotide of position 102,391 in the human RNF213 reference (see, SEQ ID NO:1) to cytosine, or the cytosine nucleotide of position 103,226 in the human RNF213 reference (see, SEQ ID NO:1) to thymine has been observed to indicate that the human having such an alteration may have a decreased risk of developing a liver disease. It is believed that no variants of the RNF213 gene or protein have any known association with a liver disease. Altogether, the genetic analyses described herein surprisingly indicate that the RNF213 gene and, in particular, variants in the RNF213 gene, associates with a decreased risk of developing a liver disease. Therefore, subjects that are RNF213 reference that have an increased risk of developing liver disease (such as, for example, fatty liver disease (including alcoholic fatty liver disease (AFLD) and NAFLD), hepatocellular carcinoma, liver cirrhosis, liver fibrosis, simple steatosis, steatohepatitis, non-alcoholic steatohepatitis (NASH), and parenchymal liver disease) may be treated such that liver disease is prevented, the symptoms thereof are reduced, and/or development of symptoms is repressed. Accordingly, the present disclosure provides methods of leveraging the identification of such variants in subjects to identify or stratify risk in such subjects of developing liver disease, or to diagnose subjects as having an increased risk of developing liver disease, such that subjects at risk or subjects with active disease may be treated accordingly.

[0024] It has been further observed in accordance with the present disclosure that an aggregate burden of certain variations in RNF213 associate with a lower risk of developing liver disease (such as, for example, fatty liver disease (including AFLD and NAFLD), hepatocellular carcinoma, liver cirrhosis, liver fibrosis, simple steatosis, steatohepatitis, non-alcoholic steatohepatitis (NASH), and parenchymal liver disease). Therefore, it is believed that humans having liver disease may be treated with molecules that inhibit RNF213. Accordingly, the present disclosure provides methods for leveraging the identification of such variants, and an aggregation burden of having such variants, in subjects to identify or stratify risk in such subjects of liver disease, or to diagnose subjects as having liver disease, such that subjects at risk or subjects with active disease may be treated.

[0025] For purposes of the present disclosure, any particular human can be categorized as having one of three RNF213 genotypes: i) RNF213 reference; ii) heterozygous for an RNF213 predicted loss-of-function or missense variant; or iii) homozygous for an RNF213 predicted loss-of-function or missense variant. A human is RNF213 reference when the human does not have a copy of an RNF213 predicted loss-of-function or missense variant nucleic acid molecule. A human is heterozygous for an RNF213 predicted loss-of-function or missense variant when the human has a single copy of an RNF213 predicted loss-of-function or missense variant nucleic acid molecule. As used herein, an RNF213 predicted loss-of-function variant nucleic acid molecule is any RNF213 nucleic acid molecule (such as, a genomic nucleic acid molecule, an mRNA molecule, or a cDNA molecule) encoding an RNF213 polypeptide having a partial loss-of-function, a complete loss-of-function, a predicted partial loss-of-function, or a predicted complete loss-of-function. A human who has an RNF213 polypeptide having a partial loss-of-function (or predicted partial loss-of-function) is hypomorphic for RNF213. The RNF213 predicted loss-of-function or missense variant nucleic acid molecule can be any nucleic acid molecule encoding RNF213 Glu3915Gly, Glu3964Gly, Glu822Gly, Glu350Gly, Glu146Gly, Glu37Gly, Glu28Gly, Val3838Leu, Val3887Leu, Val745Leu, Val273Leu, or Val69Leu. In some embodiments, the RNF213 predicted loss-of-function or missense variant nucleic acid molecule encodes RNF213 Glu3915Gly or Val3838Leu. A human is homozygous for an RNF213 predicted loss-of-function or missense variant when the human has two copies of an RNF213 predicted loss-of-function or missense variant nucleic acid molecule.

[0026] For subjects that are genotyped or determined to be RNF213 reference, such subjects have an increased risk of developing a liver disease (such as, for example, fatty liver disease (including AFLD and NAFLD), hepatocellular carcinoma, liver cirrhosis, liver fibrosis, simple steatosis, steatohepatitis, non-alcoholic steatohepatitis (NASH), and parenchymal liver disease). For subjects that are genotyped or determined to be either RNF213 reference or heterozygous for an RNF213 predicted loss-of-function or missense variant, such subjects can be treated with an RNF213 inhibitor.

[0027] In any of the embodiments described herein, the RNF213 predicted loss-of-function or missense variant nucleic acid molecule can be any RNF213 nucleic acid molecule (such as, for example, genomic nucleic acid molecule, mRNA molecule, or cDNA molecule) encoding an RNF213 polypeptide having a partial loss-of-function, a complete loss-of-function, a predicted partial loss-of-function, or a predicted complete loss-of-function. For example, the RNF213 predicted loss-of-function or missense variant nucleic acid molecule can be any nucleic acid molecule encoding RNF213 Glu3915Gly, Glu3964Gly, Glu822Gly, Glu350Gly, Glu146Gly, Glu37Gly, Glu28Gly, Val3838Leu, Val3887Leu, Val745Leu, Val273Leu, or Val69Leu. In some embodiments, the RNF213 predicted loss-of-function or missense variant nucleic acid molecule encodes RNF213 Glu3915Gly or Val3838Leu.

[0028] In any of the embodiments described herein, the RNF213 polypeptide can be any RNF213 polypeptide having a partial loss-of-function, a complete loss-of-function, a predicted partial loss-of-function, or a predicted complete loss-of-function. In any of the embodiments described herein, the RNF213 polypeptide can be any of the RNF213 polypeptides described herein including, for example, RNF213 Glu3915Gly, Glu3964Gly, Glu822Gly, Glu350Gly, Glu146Gly, Glu37Gly, Glu28Gly, Val3838Leu, Val3887Leu, Val745Leu, Val273Leu, or Val69Leu. In some embodiments, the RNF213 polypeptide is RNF213 Glu3915Gly or Val3838Leu.

[0029] In any of the embodiments described herein, the liver disease is a fatty liver disease, including AFLD and NAFLD, hepatocellular carcinoma, liver cirrhosis, liver fibrosis, simple steatosis, steatohepatitis, NASH, or parenchymal liver disease. In some embodiments, the liver disease is a fatty liver disease. In some embodiments, the liver disease is AFLD. In some embodiments, the liver disease is NAFLD. In some embodiments, the liver disease is hepatocellular carcinoma. In some embodiments, the liver disease is liver cirrhosis. In some embodiments, the liver disease is liver fibrosis. In some embodiments, the liver disease is simple steatosis. In some embodiments, the liver disease is steatohepatitis. In some embodiments, the liver disease is NASH. In some embodiments, the liver disease is parenchymal liver disease.

[0030] In some embodiments, the liver disease is liver damage, deposition of liver fat, liver inflammation, toxic liver disease, immune liver disease, or elevated alanine aminotransferase (ALT). In some embodiments, the liver disease is liver damage. In some embodiments, the liver damage is measured by elevation of liver enzymes. In some embodiments, the liver disease is deposition of liver fat. In some embodiments, the deposition of liver fat is identified by imaging, biopsy, or other procedure. In some embodiments, the liver disease is liver inflammation. In some embodiments, the liver inflammation is identified by biopsy, imaging, or other procedure. In some embodiments, the liver disease is toxic liver disease. In some embodiments, the liver disease is immune liver disease. In some embodiments, the liver disease is elevated ALT. In some embodiments, the liver disease is due to accumulation of metals, proteinaceous material, bile acids, or other irritant or pro-inflammatory materials. In some embodiments, the liver disease is due to accumulation of metals, such as iron. In some embodiments, the liver disease is due to accumulation of proteinaceous material, such as in alpha 1 antitrypsin deficiency. In some embodiments, the liver disease is due to accumulation of bile acids. In some embodiments, the liver disease is due to accumulation of an irritant. In some embodiments, the liver disease is due to accumulation of a pro-inflammatory material.

[0031] Symptoms of liver disease include, but are not limited to, enlarged liver, fatigue, pain in the upper right abdomen, abdominal swelling (ascites), enlarged blood vessels just beneath the skin's surface, enlarged breasts in men, enlarged spleen, red palms, and yellowing of the skin and eyes (jaundice), pruritus, dark urine color, pale stool color nausea or vomiting, loss of appetite, and tendency to bruise easily. Testing for liver diseases can involve blood tests, imaging of the liver, and biopsy of the liver. An individual is at increased risk of a liver disease if the subject has at least one known risk-factor (e.g., genetic factor such as a disease-causing mutation) placing individuals with that risk factor at a statistically significant greater risk of developing the disease than individuals without the risk factor. Risk factors for liver diseases are also well known and can include, for example, excessive alcohol use, obesity, high cholesterol, high levels of triglycerides in the blood, polycystic ovary syndrome, sleep apnea, type 2 diabetes, underactive thyroid (hypothyroidism), underactive pituitary gland (hypopituitarism), and metabolic syndromes including raised blood lipids.

[0032] The present disclosure provides methods of treating a subject having liver disease, the methods comprising administering an RNF213 inhibitor to the subject.

[0033] The present disclosure also provides methods of treating a subject having fatty liver disease (such as AFLD or NAFLD), the methods comprising administering an RNF213 inhibitor to the subject.

[0034] The present disclosure also provides methods of treating a subject having hepatocellular carcinoma, the methods comprising administering an RNF213 inhibitor to the subject.

[0035] The present disclosure also provides methods of treating a subject having liver cirrhosis, the methods comprising administering an RNF213 inhibitor to the subject.

[0036] The present disclosure also provides methods of treating a subject having liver fibrosis, the methods comprising administering an RNF213 inhibitor to the subject.

[0037] The present disclosure also provides methods of treating a subject having simple steatosis, steatohepatitis, or NASH, the methods comprising administering an RNF213 inhibitor to the subject.

[0038] In some embodiments, the RNF213 inhibitor comprises an inhibitory nucleic acid molecule. Examples of inhibitory nucleic acid molecules include, but are not limited to, antisense nucleic acid molecules, small interfering RNAs (siRNAs), and short hairpin RNAs (shRNAs). Such inhibitory nucleic acid molecules can be designed to target any region of an RNF213 nucleic acid molecule, such as an mRNA molecule. In some embodiments, the inhibitory nucleic acid molecules hybridize to a sequence within an RNF213 genomic nucleic acid molecule or mRNA molecule and decreases expression of the RNF213 polypeptide in a cell in the subject. In some embodiments, the RNF213 inhibitor comprises an antisense RNA that hybridizes to an RNF213 genomic nucleic acid molecule or mRNA molecule and decreases expression of the RNF213 polypeptide in a cell in the subject. In some embodiments, the RNF213 inhibitor comprises an siRNA that hybridizes to an RNF213 genomic nucleic acid molecule or mRNA molecule and decreases expression of the RNF213 polypeptide in a cell in the subject. In some embodiments, the RNF213 inhibitor comprises an shRNA that hybridizes to an RNF213 genomic nucleic acid molecule or mRNA molecule and decreases expression of the RNF213 polypeptide in a cell in the subject.

[0039] In some embodiments, the antisense nucleic acid molecules comprise or consist of any of the nucleotide sequences represented by SEQ ID NOs: 82-20602. In some embodiments, the siRNA molecules comprise or consist of any of the nucleotide sequences (sense and antisense strands) represented by SEQ ID NOs: 20603-64588 (e.g., the sense strand is, for example, SEQ ID NO:20603 and the corresponding antisense strand is SEQ ID NO:20604; the sense strand is, for example, SEQ ID NO:20605 and the corresponding antisense strand is SEQ ID NO:20606; etc.).

[0040] The inhibitory nucleic acid molecules disclosed herein can comprise RNA, DNA, or both RNA and DNA. The inhibitory nucleic acid molecules can also be linked or fused to a heterologous nucleic acid sequence, such as in a vector, or a heterologous label. For example, the inhibitory nucleic acid molecules disclosed herein can be within a vector or as an exogenous donor sequence comprising the inhibitory nucleic acid molecule and a heterologous nucleic acid sequence. The inhibitory nucleic acid molecules can also be linked or fused to a heterologous label. The label can be directly detectable (such as, for example, fluorophore) or indirectly detectable (such as, for example, hapten, enzyme, or fluorophore quencher). Such labels can be detectable by spectroscopic, photochemical, biochemical, immunochemical, or chemical means. Such labels include, for example, radiolabels, pigments, dyes, chromogens, spin labels, and fluorescent labels. The label can also be, for example, a chemiluminescent substance; a metal-containing substance; or an enzyme, where there occurs an enzyme-dependent secondary generation of signal. The term “label” can also refer to a “tag” or hapten that can bind selectively to a conjugated molecule such that the conjugated molecule, when added subsequently along with a substrate, is used to generate a detectable signal. For example, biotin can be used as a tag along with an avidin or streptavidin conjugate of horseradish peroxidate (HRP) to bind to the tag, and examined using a calorimetric substrate (such as, for example, tetramethylbenzidine (TMB)) or a fluorogenic substrate to detect the presence of HRP. Exemplary labels that can be used as tags to facilitate purification include, but are not limited to, myc, HA, FLAG or 3×FLAG, 6×His or polyhistidine, glutathione-S-transferase (GST), maltose binding protein, an epitope tag, or the Fc portion of immunoglobulin. Numerous labels include, for example, particles, fluorophores, haptens, enzymes and their calorimetric, fluorogenic and chemiluminescent substrates and other labels.

[0041] The disclosed inhibitory nucleic acid molecules can comprise, for example, nucleotides or non-natural or modified nucleotides, such as nucleotide analogs or nucleotide substitutes. Such nucleotides include a nucleotide that contains a modified base, sugar, or phosphate group, or that incorporates a non-natural moiety in its structure. Examples of non-natural nucleotides include, but are not limited to, dideoxynucleotides, biotinylated, aminated, deaminated, alkylated, benzylated, and fluorophor-labeled nucleotides.

[0042] The inhibitory nucleic acid molecules disclosed herein can also comprise one or more nucleotide analogs or substitutions. A nucleotide analog is a nucleotide which contains a modification to either the base, sugar, or phosphate moieties. Modifications to the base moiety include, but are not limited to, natural and synthetic modifications of A, C, G, and T/U, as well as different purine or pyrimidine bases such as, for example, pseudouridine, uracil-5-yl, hypoxanthin-9-yl (I), and 2-aminoadenin-9-yl. Modified bases include, but are not limited to, 5-methylcytosine (5-me-C), 5-hydroxymethyl cytosine, xanthine, hypoxanthine, 2-aminoadenine, 6-methyl and other alkyl derivatives of adenine and guanine, 2-propyl and other alkyl derivatives of adenine and guanine, 2-thiouracil, 2-thiothymine and 2-thiocytosine, 5-halouracil and cytosine, 5-propynyl uracil and cytosine, 6-azo uracil, cytosine and thymine, 5-uracil (pseudouracil), 4-thiouracil, 8-halo, 8-amino, 8-thiol, 8-thioalkyl, 8-hydroxyl and other 8-substituted adenines and guanines, 5-halo (such as, for example, 5-bromo), 5-trifluoromethyl and other 5-substituted uracils and cytosines, 7-methylguanine, 7-methyladenine, 8-azaguanine, 8-azaadenine, 7-deazaguanine, 7-deazaadenine, 3-deazaguanine, and 3-deazaadenine.

[0043] Nucleotide analogs can also include modifications of the sugar moiety. Modifications to the sugar moiety include, but are not limited to, natural modifications of the ribose and deoxy ribose as well as synthetic modifications. Sugar modifications include, but are not limited to, the following modifications at the 2′ position: OH; F; O—, S—, or N-alkyl; O—, S—, or N-alkenyl; O—, S- or N-alkynyl; or O-alkyl-O-alkyl, wherein the alkyl, alkenyl, and alkynyl may be substituted or unsubstituted C₁₋₁₀alkyl or C₂₋₁₀alkenyl, and C₂₋₁₀alkynyl. Exemplary 2′ sugar modifications also include, but are not limited to, —O[(CH₂)ₙO]ₘCH₃, —O(CH₂)ₙOCH₃, —O(CH₂)ₙNH₂, —O(CH₂)ₙCH₃, —O(CH₂)ₙ—ONH₂, and —O(CH₂)ₙON[(CH₂)ₙCH₃)]₂, where n and m, independently, are from 1 to about 10. Other modifications at the 2′ position include, but are not limited to, C₁₋₁₀alkyl, substituted lower alkyl, alkaryl, aralkyl, O-alkaryl or O-aralkyl, SH, SCH₃, OCN, Cl, Br, CN, CF₃, OCF₃, SOCH₃, SO₂CH₃, ONO₂, NO₂, N₃, NH₂, heterocycloalkyl, heterocycloalkaryl, aminoalkylamino, polyalkylamino, substituted silyl, an RNA cleaving group, a reporter group, an intercalator, a group for improving the pharmacokinetic properties of an oligonucleotide, or a group for improving the pharmacodynamic properties of an oligonucleotide, and other substituents having similar properties. Similar modifications may also be made at other positions on the sugar, particularly the 3′ position of the sugar on the 3′ terminal nucleotide or in 2′-5′ linked oligonucleotides and the 5′ position of 5′ terminal nucleotide. Modified sugars can also include those that contain modifications at the bridging ring oxygen, such as CH₂ and S. Nucleotide sugar analogs can also have sugar mimetics, such as cyclobutyl moieties in place of the pentofuranosyl sugar.

[0044] Nucleotide analogs can also be modified at the phosphate moiety. Modified phosphate moieties include, but are not limited to, those that can be modified so that the linkage between two nucleotides contains a phosphorothioate, chiral phosphorothioate, phosphorodithioate, phosphotriester, aminoalkylphosphotriester, methyl and other alkyl phosphonates including 3′-alkylene phosphonate and chiral phosphonates, phosphinates, phosphoramidates including 3′-amino phosphoramidate and aminoalkylphosphoramidates, thionophosphoramidates, thionoalkylphosphonates, thionoalkylphosphotriesters, and boranophosphates. These phosphate or modified phosphate linkage between two nucleotides can be through a 3′-5′ linkage or a 2′-5′ linkage, and the linkage can contain inverted polarity such as 3′-5′ to 5′-3′ or 2′-5′ to 5′-2′. Various salts, mixed salts, and free acid forms are also included. Nucleotide substitutes also include peptide nucleic acids (PNAs).

[0045] In some embodiments, the antisense nucleic acid molecules are gapmers, whereby the first one to seven nucleotides at the 5′ and 3′ ends each have 2′-methoxyethyl (2′-MOE) modifications. In some embodiments, the first five nucleotides at the 5′ and 3′ ends each have 2′-MOE modifications. In some embodiments, the first one to seven nucleotides at the 5′ and 3′ ends are RNA nucleotides. In some embodiments, the first five nucleotides at the 5′ and 3′ ends are RNA nucleotides. In some embodiments, each of the backbone linkages between the nucleotides is a phosphorothioate linkage.

[0046] In some embodiments, the siRNA molecules have termini modifications. In some embodiments, the 5′ end of the antisense strand is phosphorylated. In some embodiments, 5′-phosphate analogs that cannot be hydrolyzed, such as 5′-(E)-vinyl-phosphonate are used.

[0047] In some embodiments, the siRNA molecules have backbone modifications. In some embodiments, the modified phosphodiester groups that link consecutive ribose nucleosides have been shown to enhance the stability and in vivo bioavailability of siRNAs The non-ester groups (—OH, ═O) of the phosphodiester linkage can be replaced with sulfur, boron, or acetate to give phosphorothioate, boranophosphate, and phosphonoacetate linkages. In addition, substituting the phosphodiester group with a phosphotriester can facilitate cellular uptake of siRNAs and retention on serum components by eliminating their negative charge. In some embodiments, the siRNA molecules have sugar modifications. In some embodiments, the sugars are deprotonated (reaction catalyzed by exo- and endonucleases) whereby the 2′-hydroxyl can act as a nucleophile and attack the adjacent phosphorous in the phosphodiester bond. Such alternatives include 2′-O-methyl, 2′-O-methoxyethyl, and 2′-fluoro modifications.

[0048] In some embodiments, the siRNA molecules have base modifications. In some embodiments, the bases can be substituted with modified bases such as pseudouridine, 5′-methylcytidine, N₆-methyladenosine, inosine, and N₇-methylguanosine.

[0049] In some embodiments, the siRNA molecules are conjugated to lipids. Lipids can be conjugated to the 5′ or 3′ termini of siRNA to improve their in vivo bioavailability by allowing them to associate with serum lipoproteins. Representative lipids include, but are not limited to, cholesterol and vitamin E, and fatty acids, such as palmitate and tocopherol.

[0050] In some embodiments, a representative siRNA has the following formula: Sense: mN*mN*/i2FN/mN/i2FN/mN/i2FN/mN/i2FN/mN/i2FN/mN/i2FN/mN/i2FN/mN/i2FN/*mN*/32FN/Antisense:/52FN/*/i2FN/*mN/i2FN/mN/i2FN/mN/i2FN/mN/i2FN/mN/i2FN/mN/i2FN/mN/i2FN/mN/i2FN/mN*N*N wherein: “N” is the base; “2F” is a 2′-F modification; “m” is a 2′-O-methyl modification, “I” is an internal base; and “*” is a phosphorothioate backbone linkage.

[0051] The present disclosure also provides vectors comprising any one or more of the inhibitory nucleic acid molecules disclosed herein. In some embodiments, the vectors comprise any one or more of the inhibitory nucleic acid molecules disclosed herein and a heterologous nucleic acid. The vectors can be viral or nonviral vectors capable of transporting a nucleic acid molecule. In some embodiments, the vector is a plasmid or cosmid (such as, for example, a circular double-stranded DNA into which additional DNA segments can be ligated). In some embodiments, the vector is a viral vector, wherein additional DNA segments can be ligated into the viral genome. Expression vectors include, but are not limited to, plasmids, cosmids, retroviruses, adenoviruses, adeno-associated viruses (AAV), plant viruses such as cauliflower mosaic virus and tobacco mosaic virus, yeast artificial chromosomes (YACs), Epstein-Barr (EBV)-derived episomes, and other expression vectors known in the art.

[0052] The present disclosure also provides compositions comprising any one or more of the inhibitory nucleic acid molecules disclosed herein. In some embodiments, the composition is a pharmaceutical composition. In some embodiments, the compositions comprise a carrier and/or excipient. Examples of carriers include, but are not limited to, poly(lactic acid) (PLA) microspheres, poly(D,L-lactic-coglycolic-acid) (PLGA) microspheres, liposomes, micelles, inverse micelles, lipid cochleates, and lipid microtubules. A carrier may comprise a buffered salt solution such as PBS, HBSS, etc.

[0053] In some embodiments, the RNF213 inhibitor comprises a nuclease agent that induces one or more nicks or double-strand breaks at a recognition sequence(s) or a DNA-binding protein that binds to a recognition sequence within an RNF213 genomic nucleic acid molecule. The recognition sequence can be located within a coding region of the RNF213 gene, or within regulatory regions that influence the expression of the gene. A recognition sequence of the DNA-binding protein or nuclease agent can be located in an intron, an exon, a promoter, an enhancer, a regulatory region, or any non-protein coding region. The recognition sequence can include or be proximate to the start codon of the RNF213 gene. For example, the recognition sequence can be located about 10, about 20, about 30, about 40, about 50, about 100, about 200, about 300, about 400, about 500, or about 1,000 nucleotides from the start codon. As another example, two or more nuclease agents can be used, each targeting a nuclease recognition sequence including or proximate to the start codon. As another example, two nuclease agents can be used, one targeting a nuclease recognition sequence including or proximate to the start codon, and one targeting a nuclease recognition sequence including or proximate to the stop codon, wherein cleavage by the nuclease agents can result in deletion of the coding region between the two nuclease recognition sequences. Any nuclease agent that induces a nick or double-strand break into a desired recognition sequence can be used in the methods and compositions disclosed herein. Any DNA-binding protein that binds to a desired recognition sequence can be used in the methods and compositions disclosed herein.

[0054] Suitable nuclease agents and DNA-binding proteins for use herein include, but are not limited to, zinc finger protein or zinc finger nuclease (ZFN) pair, Transcription Activator-Like Effector (TALE) protein or Transcription Activator-Like Effector Nuclease (TALEN), or Clustered Regularly Interspersed Short Palindromic Repeats (CRISPR)/CRISPR-associated (Cas) systems. The length of the recognition sequence can vary, and includes, for example, recognition sequences that are about 30-36 bp for a zinc finger protein or ZFN pair, about 15-18 bp for each ZFN, about 36 bp for a TALE protein or TALEN, and about 20 bp for a CRISPR/Cas guide RNA.

[0055] In some embodiments, CRISPR/Cas systems can be used to modify an RNF213 genomic nucleic acid molecule within a cell. The methods and compositions disclosed herein can employ CRISPR-Cas systems by utilizing CRISPR complexes (comprising a guide RNA (gRNA) complexed with a Cas protein) for site-directed cleavage of RNF213 nucleic acid molecules.

[0056] Cas proteins generally comprise at least one RNA recognition or binding domain that can interact with gRNAs. Cas proteins can also comprise nuclease domains (such as, for example, DNase or RNase domains), DNA binding domains, helicase domains, protein-protein interaction domains, dimerization domains, and other domains. Suitable Cas proteins include, for example, a wild type Cas9 protein and a wild type Cpf1 protein (such as, for example, FnCpf1). A Cas protein can have full cleavage activity to create a double-strand break in an RNF213 genomic nucleic acid molecule or it can be a nickase that creates a single-strand break in an RNF213 genomic nucleic acid molecule. Additional examples of Cas proteins include, but are not limited to, Cas1, Cas1B, Cast, Cas3, Cas4, Cas5, Cas5e (CasD), Cas6, Cas6e, Cas6f, Cas7, Cas8a1, Cas8a2, Cas8b, Cas8c, Cas9 (Csn1 or Csx12), Cas10, Cas10d, CasF, CasG, CasH, Csy1, Csy2, Csy3, Cse1 (CasA), Cse2 (Cas6), Cse3 (CasE), Cse4 (CasC), Csc1, Csc2, Csa5, Csn2, Csm2, Csm3, Csm4, Csm5, Csm6, Cmr1, Cmr3, Cmr4, Cmr5, Cmr6, Csb1, Csb2, Csb3, Csx17, Csx14, Csx10, Csx16, CsaX, Csx3, Csx1, Csx15, Csf1, Csf2, Csf3, Csf4, and Cu1966, and homologs or modified versions thereof. Cas proteins can also be operably linked to heterologous polypeptides as fusion proteins. For example, a Cas protein can be fused to a cleavage domain, an epigenetic modification domain, a transcriptional activation domain, or a transcriptional repressor domain. Cas proteins can be provided in any form. For example, a Cas protein can be provided in the form of a protein, such as a Cas protein complexed with a gRNA. Alternately, a Cas protein can be provided in the form of a nucleic acid molecule encoding the Cas protein, such as an RNA or DNA.

[0057] In some embodiments, targeted genetic modifications of RNF213 genomic nucleic acid molecules can be generated by contacting a cell with a Cas protein and one or more gRNAs that hybridize to one or more gRNA recognition sequences within a target genomic locus in the RNF213 genomic nucleic acid molecule. For example, a gRNA recognition sequence can be located within a region of SEQ ID NO:1. The gRNA recognition sequence can also include or be proximate to a position corresponding to: position 102,917, position 102,391, or position 103,226 according to SEQ ID NO:1. For example, the gRNA recognition sequence can be located from about 1000, from about 500, from about 400, from about 300, from about 200, from about 100, from about 50, from about 45, from about 40, from about 35, from about 30, from about 25, from about 20, from about 15, from about 10, or from about 5 nucleotides of a position corresponding to: position 102,917, position 102,391, or position 103,226 according to SEQ ID NO:1. The gRNA recognition sequence can include or be proximate to the start codon of an RNF213 genomic nucleic acid molecule or the stop codon of an RNF213 genomic nucleic acid molecule. For example, the gRNA recognition sequence can be located from about 10, from about 20, from about 30, from about 40, from about 50, from about 100, from about 200, from about 300, from about 400, from about 500, or from about 1,000 nucleotides of the start codon or the stop codon.

[0058] The gRNA recognition sequences within a target genomic locus in an RNF213 genomic nucleic acid molecule are located near a Protospacer Adjacent Motif (PAM) sequence, which is a 2-6 base pair DNA sequence immediately following the DNA sequence targeted by the Cas9 nuclease. The canonical PAM is the sequence 5′-NGG-3′ where “N” is any nucleobase followed by two guanine (“G”) nucleobases. gRNAs can transport Cas9 to anywhere in the genome for gene editing, but no editing can occur at any site other than one at which Cas9 recognizes PAM. In addition, 5′-NGA-3′ can be a highly efficient non-canonical PAM for human cells. Generally, the PAM is about 2-6 nucleotides downstream of the DNA sequence targeted by the gRNA. The PAM can flank the gRNA recognition sequence. In some embodiments, the gRNA recognition sequence can be flanked on the 3′ end by the PAM. In some embodiments, the gRNA recognition sequence can be flanked on the 5′ end by the PAM. For example, the cleavage site of Cas proteins can be about 1 to about 10, about 2 to about 5 base pairs, or three base pairs upstream or downstream of the PAM sequence. In some embodiments (such as when Cas9 from S. pyogenes or a closely related Cas9 is used), the PAM sequence of the non-complementary strand can be 5′-NGG-3′, where N is any DNA nucleotide and is immediately 3′ of the gRNA recognition sequence of the non-complementary strand of the target DNA. As such, the PAM sequence of the complementary strand would be 5′-CCN-3′, where N is any DNA nucleotide and is immediately 5′ of the gRNA recognition sequence of the complementary strand of the target DNA.

[0059] A gRNA is an RNA molecule that binds to a Cas protein and targets the Cas protein to a specific location within an RNF213 genomic nucleic acid molecule. An exemplary gRNA is a gRNA effective to direct a Cas enzyme to bind to or cleave an RNF213 genomic nucleic acid molecule, wherein the gRNA comprises a DNA-targeting segment that hybridizes to a gRNA recognition sequence within the RNF213 genomic nucleic acid molecule that includes or is proximate to a position corresponding to: position 102,917, position 102,391, or position 103,226 according to SEQ ID NO:1. For example, a gRNA can be selected such that it hybridizes to a gRNA recognition sequence that is located from about 5, from about 10, from about 15, from about 20, from about 25, from about 30, from about 35, from about 40, from about 45, from about 50, from about 100, from about 200, from about 300, from about 400, from about 500, or from about 1,000 nucleotides of a position corresponding to: position 102,917, position 102,391, or position 103,226 according to SEQ ID NO:1. Other exemplary gRNAs comprise a DNA-targeting segment that hybridizes to a gRNA recognition sequence present within an RNF213 genomic nucleic acid molecule that includes or is proximate to the start codon or the stop codon. For example, a gRNA can be selected such that it hybridizes to a gRNA recognition sequence that is located from about 5, from about 10, from about 15, from about 20, from about 25, from about 30, from about 35, from about 40, from about 45, from about 50, from about 100, from about 200, from about 300, from about 400, from about 500, or from about 1,000 nucleotides of the start codon or located from about 5, from about 10, from about 15, from about 20, from about 25, from about 30, from about 35, from about 40, from about 45, from about 50, from about 100, from about 200, from about 300, from about 400, from about 500, or from about 1,000 nucleotides of the stop codon. Suitable gRNAs can comprise from about 17 to about 25 nucleotides, from about 17 to about 23 nucleotides, from about 18 to about 22 nucleotides, or from about 19 to about 21 nucleotides. In some embodiments, the gRNAs can comprise 20 nucleotides.

[0060] Examples of suitable gRNA recognition sequences located within the human RNF213 reference gene are set forth in Table 1 as SEQ ID NOs:62-81.

TABLE 1
Guide RNA Recognition Sequences Near
RNF213 Variation(s)

| | | SEQ |
|---|---|---|
| | | ID |
| Strand | gRNA Recognition Sequence | NO: |
| + | GTGGACCGATTTGCAGTACAGGG | 62 |
| − | GTGCTTTTTCGGTCCGGCAATGG | 63 |
| + | CACGTGGTACCATTGCCGGACGG | 64 |
| − | GAATCTGTAACGGCAGATGAAGG | 65 |
| − | TTGTTCCCGGAACGGTGAGAAGG | 66 |
| + | GGACCCTTGCTGCTACGAAAAGG | 67 |
| + | ATCCAATTCCCCGCGGAGCATGG | 68 |
| − | GTCGCCAACCTCGGTGGGCGCGG | 69 |
| + | CTCCACAATGGCGTCGGCCTCGG | 70 |
| − | AGGTCACGGTGAAACTCATCTGG | 71 |
| + | AGGGATTTACTACCGGCTTCCGG | 72 |
| + | AGTCGGTAAGAATGAACAAGGGG | 73 |
| − | TCCCGGATGACTCACCATAGAGG | 74 |
| + | CCCTTGCTGCTACGAAAAGGTGG | 75 |
| + | TTTGCGGGGCAGGATTCCCGAGG | 76 |
| + | ACAATGGCGTCGGCCTCGGAGGG | 77 |
| − | ACTCACTTCTTGGACGGTCCAGG | 78 |
| − | CTCCGAGGCCGACGCCATTGTGG | 79 |
| + | CACAATGGCGTCGGCCTCGGAGG | 80 |
| + | AATTCCCCGCGGAGCATGGCTGG | 81 |

[0061] The Cas protein and the gRNA form a complex, and the Cas protein cleaves the target RNF213 genomic nucleic acid molecule. The Cas protein can cleave the nucleic acid molecule at a site within or outside of the nucleic acid sequence present in the target RNF213 genomic nucleic acid molecule to which the DNA-targeting segment of a gRNA will bind. For example, formation of a CRISPR complex (comprising a gRNA hybridized to a gRNA recognition sequence and complexed with a Cas protein) can result in cleavage of one or both strands in or near (such as, for example, within 1, 2, 3, 4, 5, 6, 7, 8, 9, 10, 20, 50, or more base pairs from) the nucleic acid sequence present in the RNF213 genomic nucleic acid molecule to which a DNA-targeting segment of a gRNA will bind.

[0062] Such methods can result, for example, in an RNF213 genomic nucleic acid molecule in which a region of SEQ ID NO:1 is disrupted, the start codon is disrupted, the stop codon is disrupted, or the coding sequence is disrupted or deleted. Optionally, the cell can be further contacted with one or more additional gRNAs that hybridize to additional gRNA recognition sequences within the target genomic locus in the RNF213 genomic nucleic acid molecule. By contacting the cell with one or more additional gRNAs (such as, for example, a second gRNA that hybridizes to a second gRNA recognition sequence), cleavage by the Cas protein can create two or more double-strand breaks or two or more single-strand breaks.

[0063] In some embodiments, the methods of treatment further comprise detecting the presence or absence of an RNF213 predicted loss-of-function or missense variant nucleic acid molecule encoding a human RNF213 polypeptide in a biological sample from the subject. As used throughout the present disclosure, a “RNF213 predicted loss-of-function variant nucleic acid molecule” is any RNF213 nucleic acid molecule (such as, for example, genomic nucleic acid molecule, mRNA molecule, or cDNA molecule) encoding an RNF213 polypeptide having a partial loss-of-function, a complete loss-of-function, a predicted partial loss-of-function, or a predicted complete loss-of-function.

[0064] The present disclosure also provides methods of treating a subject with a therapeutic agent that treats or inhibits a liver disease, wherein the subject is suffering from a liver disease. In some embodiments, the methods comprise determining whether the subject has an RNF213 predicted loss-of-function or missense variant nucleic acid molecule encoding a human RNF213 polypeptide by obtaining or having obtained a biological sample from the subject, and performing or having performed a genotyping assay on the biological sample to determine if the subject has a genotype comprising the RNF213 predicted loss-of-function or missense variant nucleic acid molecule. When the subject is RNF213 reference, the therapeutic agent that treats or inhibits a liver disease is administered or continued to be administered to the subject in a standard dosage amount, and an RNF213 inhibitor is administered to the subject. When the subject is heterozygous for an RNF213 predicted loss-of-function or missense variant, the therapeutic agent that treats or inhibits a liver disease is administered or continued to be administered to the subject in an amount that is the same as or lower than a standard dosage amount, and an RNF213 inhibitor is administered to the subject. The presence of a genotype having the RNF213 predicted loss-of-function or missense variant nucleic acid molecule encoding the human RNF213 polypeptide indicates the subject has a reduced risk of developing a liver disease. In some embodiments, the subject is RNF213 reference. In some embodiments, the subject is heterozygous for an RNF213 predicted loss-of-function or missense variant.

[0065] In some embodiments, the methods comprise determining the subject's aggregate burden of having a plurality of RNF213 predicted loss-of-function or missense variant genomic nucleic acid molecules, RNF213 predicted loss-of-function or missense variant mRNA molecules, and/or RNF213 predicted loss-of-function or missense variant cDNA molecules produced from the mRNA molecules, by: performing or having performed a genotyping assay on a biological sample obtained from the subject to determine the subject's aggregate burden. When the subject has a lower aggregate burden, the subject is at a higher risk of developing a liver disease and the subject is administered or continued to be administered the therapeutic agent that treats or inhibits liver disease in a standard dosage amount. When the subject has a greater aggregate burden, the subject is at a lower risk of developing a liver disease and the subject is administered or continued to be administered the therapeutic agent that treats or inhibits liver disease in an amount that is the same as or lower than the standard dosage amount. The greater the aggregate burden, the lower the risk of developing liver disease.

[0066] For subjects that are genotyped or determined to be either RNF213 reference or heterozygous for an RNF213 predicted loss-of-function or missense variant, such subjects can be treated with an RNF213 inhibitor, as described herein.

[0067] Detecting the presence or absence of an RNF213 predicted loss-of-function or missense variant nucleic acid molecule in a biological sample from a subject and/or determining whether a subject has an RNF213 predicted loss-of-function or missense variant nucleic acid molecule can be carried out by any of the methods described herein. In some embodiments, these methods can be carried out in vitro. In some embodiments, these methods can be carried out in situ. In some embodiments, these methods can be carried out in vivo. In any of these embodiments, the nucleic acid molecule can be present within a cell obtained from the subject.

[0068] In some embodiments, when the subject is RNF213 reference, the subject is also administered a therapeutic agent that treats or inhibits liver disease in a standard dosage amount. In some embodiments, when the subject is heterozygous for an RNF213 predicted loss-of-function or missense variant, the subject is also administered a therapeutic agent that treats or inhibits liver disease in a dosage amount that is the same as or lower than a standard dosage amount.

[0069] In some embodiments, the treatment methods further comprise detecting the presence or absence of an RNF213 predicted loss-of-function polypeptide in a biological sample from the subject. In some embodiments, when the subject does not have an RNF213 predicted loss-of-function polypeptide, the subject is also administered a therapeutic agent that treats or inhibits liver disease in a standard dosage amount. In some embodiments, when the subject has an RNF213 predicted loss-of-function polypeptide, the subject is also administered a therapeutic agent that treats or inhibits liver disease in a dosage amount that is the same as or lower than a standard dosage amount.

[0070] The present disclosure also provides methods of treating a subject with a therapeutic agent that treats or inhibits liver disease, wherein the subject is suffering from liver disease. In some embodiments, the method comprises determining whether the subject has an RNF213 predicted loss-of-function polypeptide by obtaining or having obtained a biological sample from the subject, and performing or having performed an assay on the biological sample to determine if the subject has an RNF213 predicted loss-of-function polypeptide. When the subject does not have an RNF213 predicted loss-of-function polypeptide, the therapeutic agent that treats or inhibits liver disease is administered or continued to be administered to the subject in a standard dosage amount, and a GPAM inhibitor is administered to the subject. When the subject has an RNF213 predicted loss-of-function polypeptide, the therapeutic agent that treats or inhibits liver disease is administered or continued to be administered to the subject in an amount that is the same as or lower than a standard dosage amount, and an RNF213 inhibitor is administered to the subject. The presence of an RNF213 predicted loss-of-function polypeptide indicates the subject has a reduced risk of developing liver disease. In some embodiments, the subject has an RNF213 predicted loss-of-function polypeptide. In some embodiments, the subject does not have an RNF213 predicted loss-of-function polypeptide.

[0071] Detecting the presence or absence of an RNF213 predicted loss-of-function polypeptide in a biological sample from a subject and/or determining whether a subject has an RNF213 predicted loss-of-function polypeptide can be carried out by any of the methods described herein. In some embodiments, these methods can be carried out in vitro. In some embodiments, these methods can be carried out in situ. In some embodiments, these methods can be carried out in vivo. In any of these embodiments, the polypeptide can be present within a cell obtained from the subject.

[0072] Examples of therapeutic agents that treat or inhibit liver disease include, but are not limited to: Disulfiram, Naltrexone, Acamprosate, Prednisone, Prednisone, Azathioprine, Penicillamine, Trientine, Deferoxamine, Ciprofloxacin, Norofloxacin, Ceftriaxone, Ofloxacin, Amoxicillin-clavulanate, Phytonadione, Bumetanide, Furosemide, Hydrochlorothiazide, Chlorothiazide, Amiloride, Triamterene, Spironolactone, Octreotide, Atenolol, Metoprolol, Nadolol, Propranolol, Timolol, and Carvedilol.

[0073] Additional examples of liver disease therapeutic agents (e.g., for use in chronic hepatitis C treatment) include, but are not limited to, ribavirin, paritaprevir, simeprevir (Olysio), grazoprevir, ledipasvir, ombitasvir, elbasvir, daclatasvir (Daklinza), dasabuvir, ritonavir, sofosbuvir, velpatasvir, voxilaprevir, glecaprevir, pibrentasvir, peginterferon alfa-2a, peginterferon alfa-2b, and interferon alfa-2b.

[0074] Additional examples of liver disease therapeutic agents (e.g., for use in nonalcoholic fatty liver disease) include, but are not limited to, weight loss inducing agents such as orlistat or sibutramine; insulin sensitizing agents such as thiazolidinediones (TZDs), metformin, and meglitinides; lipid lowering agents such as statins, fibrates, and omega-3 fatty acids; 26orrespondin such as, vitamin E, betaine, N-Acetyl-cysteine, lecithin, silymarin, and beta-carotene; anti TNF agents such as pentoxifylline; probiotics, such as VSL #3; and cytoprotective agents such as ursodeoxycholic acid (UDCA). Other suitable treatments include ACE inhibitors/ARBs, oligofructose, and Incretin analogs.

[0075] Additional examples of liver disease therapeutic agents (e.g., for use in NASH) include, but are not limited to, OCALIVA® (obeticholic acid), Selonsertib, Elafibranor, Cenicriviroc, GR_MD_02, MGL_3196, IMM124E, arachidyl amido cholanoic acid (ARAMCHOL™), GS0976, Emricasan, Volixibat, NGM282, GS9674, Tropifexor, MN_001, LMB763, BI_1467335, MSDC_0602, PF_05221304, DF102, Saroglitazar, BMS986036, Lanifibranor, Semaglutide, Nitazoxanide, GRI_0621, EYP001, VK2809, Nalmefene, LIK066, MT_3995, Elobixibat, Namodenoson, Foralumab, SAR425899, Sotagliflozin, EDP_305, Isosabutate, Gemcabene, TERN_101, KBP_042, PF_06865571, DUR928, PF_06835919, NGM313, BMS_986171, Namacizumab, CER_209, ND_L02_s0201, RTU_1096, DRX_065, IONIS_DGAT2Rx, INT_767, NC_001, Seladepar, PXL770, TERN_201, NV556, AZD2693, SP_1373, VK0214, Hepastem, TGFTX4, RLBN1127, GKT_137831, RYI_018, CB4209-CB4211, and JH_0920.

[0076] In some embodiments, the dose of the therapeutic agents that treat or inhibit a liver disease can be reduced by about 10%, by about 20%, by about 30%, by about 40%, by about 50%, by about 60%, by about 70%, by about 80%, or by about 90% for subjects or subjects that are heterozygous for an RNF213 predicted loss-of-function or missense variant (i.e., a lower than the standard dosage amount) compared to subjects or subjects that are RNF213 reference (who may receive a standard dosage amount). In some embodiments, the dose of the therapeutic agents that treat or inhibit a liver disease can be reduced by about 10%, by about 20%, by about 30%, by about 40%, or by about 50%. In addition, the dose of therapeutic agents that treat or inhibit a liver disease in subjects or subjects that are heterozygous for an RNF213 predicted loss-of-function or missense variant can be administered less frequently compared to subjects or subjects that are RNF213 reference.

[0077] Administration of the therapeutic agents that treat or inhibit a liver disease and/or RNF213 inhibitors can be repeated, for example, after one day, two days, three days, five days, one week, two weeks, three weeks, one month, five weeks, six weeks, seven weeks, eight weeks, two months, or three months. The repeated administration can be at the same dose or at a different dose. The administration can be repeated once, twice, three times, four times, five times, six times, seven times, eight times, nine times, ten times, or more. For example, according to certain dosage regimens a subject can receive therapy for a prolonged period of time such as, for example, 6 months, 1 year, or more.

[0078] Administration of the therapeutic agents that treat or inhibit a liver disease and/or RNF213 inhibitors can occur by any suitable route including, but not limited to, parenteral, intravenous, oral, subcutaneous, intra-arterial, intracranial, intrathecal, intraperitoneal, topical, intranasal, or intramuscular. Pharmaceutical compositions for administration are desirably sterile and substantially isotonic and manufactured under GMP conditions. Pharmaceutical compositions can be provided in unit dosage form (i.e., the dosage for a single administration). Pharmaceutical compositions can be formulated using one or more physiologically and pharmaceutically acceptable carriers, diluents, excipients or auxiliaries. The formulation depends on the route of administration chosen. The term “pharmaceutically acceptable” means that the carrier, diluent, excipient, or auxiliary is compatible with the other ingredients of the formulation and not substantially deleterious to the recipient thereof.

[0079] The terms “treat”, “treating”, and “treatment” and “prevent”, “preventing”, and “prevention” as used herein, refer to eliciting the desired biological response, such as a therapeutic and prophylactic effect, respectively. In some embodiments, a therapeutic effect comprises one or more of a decrease/reduction in a liver disease, a decrease/reduction in the severity of a liver disease (such as, for example, a reduction or inhibition of development or a liver disease), a decrease/reduction in symptoms and liver disease-related effects, delaying the onset of symptoms and liver disease-related effects, reducing the severity of symptoms of liver disease-related effects, reducing the severity of an acute episode, reducing the number of symptoms and liver disease-related effects, reducing the latency of symptoms and liver disease-related effects, an amelioration of symptoms and liver disease-related effects, reducing secondary symptoms, reducing secondary infections, preventing relapse to a liver disease, decreasing the number or frequency of relapse episodes, increasing latency between symptomatic episodes, increasing time to sustained progression, expediting remission, inducing remission, augmenting remission, speeding recovery, or increasing efficacy of or decreasing resistance to alternative therapeutics, and/or an increased survival time of the affected host animal, following administration of the agent or composition comprising the agent. A prophylactic effect may comprise a complete or partial avoidance/inhibition or a delay of a liver disease development/progression (such as, for example, a complete or partial avoidance/inhibition or a delay), and an increased survival time of the affected host animal, following administration of a therapeutic protocol. Treatment of a liver disease encompasses the treatment of subjects already diagnosed as having any form of a liver disease at any clinical stage or manifestation, the delay of the onset or evolution or aggravation or deterioration of the symptoms or signs of a liver disease, and/or preventing and/or reducing the severity of a liver disease.

[0080] The present disclosure also provides methods of identifying a subject having an increased risk for developing liver disease. In some embodiments, the method comprises determining or having determined in a biological sample obtained from the subject the presence or absence of an RNF213 predicted loss-of-function or missense variant nucleic acid molecule (such as a genomic nucleic acid molecule, mRNA molecule, and/or cDNA molecule) encoding a human RNF213 polypeptide. When the subject lacks an RNF213 predicted loss-of-function or missense variant nucleic acid molecule (i.e., the subject is genotypically categorized as RNF213 reference), then the subject has an increased risk for developing liver disease. When the subject has an RNF213 predicted loss-of-function or missense variant nucleic acid molecule (i.e., the subject is heterozygous or homozygous for an RNF213 predicted loss-of-function or missense variant), then the subject has a decreased risk for developing liver disease.

[0081] Having a single copy of an RNF213 predicted loss-of-function or missense variant nucleic acid molecule is more protective of a subject from developing liver disease than having no copies of an RNF213 predicted loss-of-function or missense variant nucleic acid molecule. Without intending to be limited to any particular theory or mechanism of action, it is believed that a single copy of an RNF213 predicted loss-of-function or missense variant nucleic acid molecule (i.e., heterozygous for an RNF213 predicted loss-of-function or missense variant) is protective of a subject from developing liver disease, and it is also believed that having two copies of an RNF213 predicted loss-of-function or missense variant nucleic acid molecule (i.e., homozygous for an RNF213 predicted loss-of-function or missense variant) may be more protective of a subject from developing liver disease, relative to a subject with a single copy. Thus, in some embodiments, a single copy of an RNF213 predicted loss-of-function or missense variant nucleic acid molecule may not be completely protective, but instead, may be partially or incompletely protective of a subject from developing liver disease. While not desiring to be bound by any particular theory, there may be additional factors or molecules involved in the development of liver disease that are still present in a subject having a single copy of an RNF213 predicted loss-of-function or missense variant nucleic acid molecule, thus resulting in less than complete protection from the development of liver disease.

[0082] Determining whether a subject has an RNF213 predicted loss-of-function or missense variant nucleic acid molecule in a biological sample from a subject and/or determining whether a subject has an RNF213 predicted loss-of-function or missense variant nucleic acid molecule can be carried out by any of the methods described herein. In some embodiments, these methods can be carried out in vitro. In some embodiments, these methods can be carried out in situ. In some embodiments, these methods can be carried out in vivo. In any of these embodiments, the nucleic acid molecule can be present within a cell obtained from the subject.

[0083] The present disclosure also provides methods of identifying a subject having an increased risk of developing a liver disease wherein the methods comprise determining or having determined the subject's aggregate burden of having one or more RNF213 predicted loss-of-function or missense variant genomic nucleic acid molecules, mRNA molecules, or cDNA molecules described herein, and/or one or more RNF213 predicted loss-of-function variant polypeptides described herein. The greater the aggregate burden the subject has, the lower the risk for developing a liver disease. The lower the aggregate burden the subject has, the greater the risk for developing a liver disease.

[0084] In some embodiments, the methods can further comprise determining the subject's aggregate burden of having a predicted loss-of-function or missense variant RNF213 genomic nucleic acid molecule, mRNA molecule, or cDNA molecule produced from an mRNA molecule, and/or a predicted loss-of-function variant RNF213 polypeptide associated with a decreased risk of liver disease. The aggregate burden is the sum of all variants in the RNF213 gene, which can be carried out in an association analysis with liver disease. In some embodiments, the subject is homozygous for one or more predicted loss-of-function or missense variant RNF213 nucleic acid molecules associated with a decreased risk of developing liver disease. In some embodiments, the subject is heterozygous for one or more predicted loss-of-function or missense variant RNF213 nucleic acid molecules associated with a decreased risk of developing liver disease. The result of the association analysis suggests that loss-of-function and missense variants of RNF213 are associated with decreased risk of liver disease. In some embodiments, when a subject is identified as having an increased risk of developing a liver disease based on their aggregate burden, the subject is further treated with a therapeutic agent that treats or inhibits liver diseases and/or an RNF213 inhibitor, as described herein.

[0085] In some embodiments, the subject's aggregate burden of having any one or more RNF213 predicted loss-of-function or missense variant nucleic acid molecules represents a weighted sum of a plurality of any of the predicted loss-of-function or missense variant nucleic acid molecules. In some embodiments, the aggregate burden is calculated using at least about 2, at least about 3, at least about 4, at least about 5, at least about 10, at least about 20, at least about 30, at least about 40, at least about 50, at least about 60, at least about 70, at least about 80, at least about 100, at least about 120, at least about 150, at least about 200, at least about 250, at least about 300, at least about 400, at least about 500, at least about 1,000, at least about 10,000, at least about 100,000, or at least about or more than 1,000,000 genetic variants present in or around (up to 10 Mb) the RNF213 gene where the genetic burden is the number of alleles multiplied by the association estimate with liver disease or related outcome for each allele (e.g., a weighted polygenic burden score). This can include any genetic variants, regardless of their genomic annotation, in proximity to the RNF213 gene (up to 10 Mb around the gene) that show a non-zero association with liver-related traits in a genetic association analysis. In some embodiments, when the subject has an aggregate burden above a desired threshold score, the subject has a lower or decreased risk of developing a liver disease. In some embodiments, when the subject has an aggregate burden below a desired threshold score, the subject has a greater or increased risk of developing a liver disease.

[0086] In some embodiments, the aggregate burden may be divided into quintiles, e.g., top quintile, intermediate quintile, and bottom quintile, wherein the top quintile of aggregate burden corresponds to the lowest risk group and the bottom quintile of aggregate burden corresponds to the highest risk group. In some embodiments, a subject having a greater aggregate burden comprise the highest weighted aggregate burdens, including, but not limited to the top 10%, top 20%, top 30%, top 40%, or top 50% of aggregate burdens from a subject population. In some embodiments, the genetic variants comprise the genetic variants having association with a liver disease in the top 10%, top 20%, top 30%, top 40%, or top 50% of p-value range for the association. In some embodiments, each of the identified genetic variants comprise the genetic variants having association with a liver disease with p-value of no more than about 10⁻², about 10⁻³, about 10⁻⁴, about 10⁻⁵, about 10′, about 10⁻², about 10′, about 10⁻⁹, about 10⁻¹⁰, about 10⁻¹¹, about 10⁻¹², about 10⁻¹³, about 10⁻¹⁴, about or 10⁻¹⁵. In some embodiments, the identified genetic variants comprise the genetic variants having association with a liver disease with p-value of less than 5×10⁻⁸. In some embodiments, the identified genetic variants comprise genetic variants having association with a liver disease in high-risk subjects as compared to the rest of the reference population with odds ratio (OR) about 1.5 or greater, about 1.75 or greater, about 2.0 or greater, or about 2.25 or greater for the top 20% of the distribution; or about 1.5 or greater, about 1.75 or greater, about 2.0 or greater, about 2.25 or greater, about 2.5 or greater, or about 2.75 or greater. In some embodiments, the odds ratio (OR) may range from about 1.0 to about 1.5, from about 1.5 to about 2.0, from about 2.0 to about 2.5, from about 2.5 to about 3.0, from about 3.0 to about 3.5, from about 3.5 to about 4.0, from about 4.0 to about 4.5, from about 4.5 to about 5.0, from about 5.0 to about 5.5, from about 5.5 to about 6.0, from about 6.0 to about 6.5, from about 6.5 to about 7.0, or greater than 7.0. In some embodiments, high-risk subjects comprise subjects having aggregate burdens in the bottom decile, quintile, or tertile in a reference population. The threshold of the aggregate burden is determined on the basis of the nature of the intended practical application and the risk difference that would be considered meaningful for that practical application.

[0087] In some embodiments, when a subject is identified as having an increased risk of developing liver disease, the subject is further treated with a therapeutic agent that treats or inhibits liver disease and/or an RNF213 inhibitor, as described herein. For example, when the subject is RNF213 reference, and therefore has an increased risk for developing liver disease, the subject is administered an RNF213 inhibitor. In some embodiments, such a subject is also administered a therapeutic agent that treats or inhibits liver disease. In some embodiments, when the subject is heterozygous for an RNF213 predicted loss-of-function or missense variant, the subject is administered the therapeutic agent that treats or inhibits liver disease in a dosage amount that is the same as or lower than a standard dosage amount, and is also administered an RNF213 inhibitor. In some embodiments, the subject is RNF213 reference. In some embodiments, the subject is heterozygous for an RNF213 predicted loss-of-function or missense variant. Furthermore, when the subject has a lower aggregate burden for having an RNF213 predicted loss-of-function or missense variant nucleic acid molecule, and therefore has an increased risk for liver disease, the subject is administered a therapeutic agent that treats or inhibits liver disease. In some embodiments, when the subject has a lower aggregate burden for having an RNF213 predicted loss-of-function or missense variant nucleic acid molecule, the subject is administered the therapeutic agent that treats or inhibits liver disease in a dosage amount that is the same as or greater than the standard dosage amount administered to a subject who has a greater aggregate burden for having an RNF213 predicted loss-of-function or missense variant nucleic acid molecule.

[0088] The present disclosure also provides methods of detecting the presence or absence of an RNF213 predicted loss-of-function or missense variant genomic nucleic acid molecule in a biological sample from a subject, and/or an RNF213 predicted loss-of-function or missense variant mRNA molecule in a biological sample from a subject, and/or an RNF213 predicted loss-of-function or missense variant cDNA molecule produced from an mRNA molecule in a biological sample from a subject. It is understood that gene sequences within a population and mRNA molecules encoded by such genes can vary due to polymorphisms such as single-nucleotide polymorphisms. The sequences provided herein for the RNF213 variant genomic nucleic acid molecule, RNF213 variant mRNA molecule, and RNF213 variant cDNA molecule are only exemplary sequences. Other sequences for the RNF213 variant genomic nucleic acid molecule, variant mRNA molecule, and variant cDNA molecule are also possible.

[0089] The biological sample can be derived from any cell, tissue, or biological fluid from the subject. The biological sample may comprise any clinically relevant tissue, such as a bone marrow sample, a tumor biopsy, a fine needle aspirate, or a sample of bodily fluid, such as blood, gingival crevicular fluid, plasma, serum, lymph, ascitic fluid, cystic fluid, or urine. In some cases, the sample comprises a buccal swab. The biological sample used in the methods disclosed herein can vary based on the assay format, nature of the detection method, and the tissues, cells, or extracts that are used as the sample. A biological sample can be processed differently depending on the assay being employed. For example, when detecting any RNF213 variant nucleic acid molecule, preliminary processing designed to isolate or enrich the biological sample for the genomic DNA can be employed. A variety of techniques may be used for this purpose. When detecting the level of any RNF213 variant mRNA molecule, different techniques can be used enrich the biological sample with mRNA molecules. Various methods to detect the presence or level of an mRNA molecule or the presence of a particular variant genomic DNA locus can be used.

[0090] In some embodiments, detecting a human RNF213 predicted loss-of-function or missense variant nucleic acid molecule in a subject comprises assaying or genotyping a biological sample obtained from the subject to determine whether an RNF213 genomic nucleic acid molecule in the biological sample, and/or an RNF213 mRNA molecule in the biological sample, and/or an RNF213 cDNA molecule produced from an mRNA molecule in the biological sample, comprises one or more variations that cause a loss-of-function (partial or complete) or are predicted to cause a loss-of-function (partial or complete).

[0091] In some embodiments, the methods of detecting the presence or absence of an RNF213 predicted loss-of-function or missense variant nucleic acid molecule (such as, for example, a genomic nucleic acid molecule, an mRNA molecule, and/or a cDNA molecule produced from an mRNA molecule) in a subject, comprise performing an assay on a biological sample obtained from the subject. The assay determines whether a nucleic acid molecule in the biological sample comprises a particular nucleotide sequence.

[0092] In some embodiments, the nucleotide sequence comprises: a guanine at a position corresponding to position 102,917 according to SEQ ID NO:2 (for genomic nucleic acid molecules); a guanine at a position corresponding to: position 11,887 according to SEQ ID NO:12, position 12,036 according to SEQ ID NO:13, position 2,685 according to SEQ ID NO:14, position 1,050 according to SEQ ID NO:15, position 438 according to SEQ ID NO:16, position 112 according to SEQ ID NO:17, or position 84 according to SEQ ID NO:18 (for mRNA molecules); or a guanine at a position corresponding to: position 11,887 according to SEQ ID NO:31, position 12,036 according to SEQ ID NO:32, position 2,685 according to SEQ ID NO:33, position 1,050 according to SEQ ID NO:34, position 438 according to SEQ ID NO:35, position 112 according to SEQ ID NO:36, or position 84 according to SEQ ID NO:37 (for CDNA molecules).

[0093] In some embodiments, the nucleotide sequence comprises: a cytosine at a position corresponding to position 102,391 according to SEQ ID NO:3 (for genomic nucleic acid molecules); a cytosine at a position corresponding to: position 11,655 according to SEQ ID NO:19, position 11,804 according to SEQ ID NO:20, position 2,453 according to SEQ ID NO:21, position 818 according to SEQ ID NO:22, or position 206 according to SEQ ID NO:23, (for mRNA molecules); a cytosine at a position corresponding to: position 11,655 according to SEQ ID NO:38, position 11,804 according to SEQ ID NO:39, position 2,453 according to SEQ ID NO:40, position 818 according to SEQ ID NO:41, or position 206 according to SEQ ID NO:42 (for CDNA molecules).

[0094] In some embodiments, the nucleotide sequence comprises a thymine at a position corresponding to position 103,226 according to SEQ ID NO:4 (for genomic nucleic acid molecules).

[0095] In some embodiments, the nucleotide sequence comprises: a guanine at a position corresponding to position 102,917 according to SEQ ID NO:2, or the complement thereof; a cytosine at a position corresponding to position 102,391 according to SEQ ID NO:3, or the complement thereof; or a thymine at a position corresponding to position 103,226 according to SEQ ID NO:4, or the complement thereof.

[0096] In some embodiments, the nucleotide sequence comprises: a guanine at a position corresponding to position 11,887 according to SEQ ID NO:12, or the complement thereof; a guanine at a position corresponding to position 12,036 according to SEQ ID NO:13, or the complement thereof; a guanine at a position corresponding to position 2,685 according to SEQ ID NO:14, or the complement thereof; a guanine at a position corresponding to position 1,050 according to SEQ ID NO:15, or the complement thereof; a guanine at a position corresponding to position 438 according to SEQ ID NO:16, or the complement thereof; a guanine at a position corresponding to position 112 according to SEQ ID NO:17, or the complement thereof; a guanine at a position corresponding to position 84 according to SEQ ID NO:18, or the complement thereof; a cytosine at a position corresponding to position 11,655 according to SEQ ID NO:19, or the complement thereof; a cytosine at a position corresponding to position 11,804 according to SEQ ID NO:20, or the complement thereof; a cytosine at a position corresponding to position 2,453 according to SEQ ID NO:21, or the complement thereof; a cytosine at a position corresponding to position 818 according to SEQ ID NO:22, or the complement thereof; or a cytosine at a position corresponding to position 206 according to SEQ ID NO:23, or the complement thereof.

[0097] In some embodiments, the nucleotide sequence comprises: a guanine at a position corresponding to position 11,887 according to SEQ ID NO:31, or the complement thereof; a guanine at a position corresponding to position 12,036 according to SEQ ID NO:32, or the complement thereof; a guanine at a position corresponding to position 2,685 according to SEQ ID NO:33, or the complement thereof; a guanine at a position corresponding to position 1,050 according to SEQ ID NO:34, or the complement thereof; a guanine at a position corresponding to position 438 according to SEQ ID NO:35, or the complement thereof; a guanine at a position corresponding to position 112 according to SEQ ID NO:36, or the complement thereof; a guanine at a position corresponding to position 84 according to SEQ ID NO:37, or the complement thereof; a cytosine at a position corresponding to position 11,655 according to SEQ ID NO:38, or the complement thereof; a cytosine at a position corresponding to position 11,804 according to SEQ ID NO:39, or the complement thereof; a cytosine at a position corresponding to position 2,453 according to SEQ ID NO:40, or the complement thereof; a cytosine at a position corresponding to position 818 according to SEQ ID NO:41, or the complement thereof; or a cytosine at a position corresponding to position 206 according to SEQ ID NO:42, or the complement thereof.

[0098] In some embodiments, the biological sample comprises a cell or cell lysate. Such methods can further comprise, for example, obtaining a biological sample from the subject comprising an RNF213 genomic nucleic acid molecule or mRNA molecule, and if mRNA, optionally reverse transcribing the mRNA into cDNA. Such assays can comprise, for example determining the identity of these positions of the particular RNF213 nucleic acid molecule. In some embodiments, the method is an in vitro method.

[0099] In some embodiments, the determining step, detecting step, or genotyping assay comprises sequencing at least a portion of the nucleotide sequence of the RNF213 genomic nucleic acid molecule, the RNF213 mRNA molecule, or the RNF213 cDNA molecule in the biological sample, wherein the sequenced portion comprises one or more variations that cause a loss-of-function (partial or complete) or are predicted to cause a loss-of-function (partial or complete).

[0100] In some embodiments, the determining step, detecting step, or genotyping assay comprises sequencing at least a portion of: the nucleotide sequence of the RNF213 genomic nucleic acid molecule in the biological sample, wherein the sequenced portion comprises a position corresponding to position 102,917 according to SEQ ID NO:2, or the complement thereof; the nucleotide sequence of the RNF213 mRNA molecule in the biological sample, wherein the sequenced portion comprises a position corresponding to: position 11,887 according to SEQ ID NO:12, or the complement thereof; position 12,036 according to SEQ ID NO:13, or the complement thereof; position 2,685 according to SEQ ID NO:14, or the complement thereof; position 1,050 according to SEQ ID NO:15, or the complement thereof; position 438 according to SEQ ID NO:16, or the complement thereof; position 112 according to SEQ ID NO:17, or the complement thereof; or position 84 according to SEQ ID NO:18, or the complement thereof; and/or the nucleotide sequence of the RNF213 cDNA molecule produced from the mRNA in the biological sample, wherein the sequenced portion comprises a position corresponding to: position 11,887 according to SEQ ID NO:31, or the complement thereof; position 12,036 according to SEQ ID NO:32, or the complement thereof; position 2,685 according to SEQ ID NO:33, or the complement thereof; position 1,050 according to SEQ ID NO:34, or the complement thereof; position 438 according to SEQ ID NO:35, or the complement thereof; position 112 according to SEQ ID NO:36, or the complement thereof; or position 84 according to SEQ ID NO:37, or the complement thereof. When the sequenced portion of the RNF213 nucleic acid molecule in the biological sample comprises: a guanine at a position corresponding to position 102,917 according to SEQ ID NO:2; a guanine at a position corresponding to: position 11,887 according to SEQ ID NO:12, position 12,036 according to SEQ ID NO:13, position 2,685 according to SEQ ID NO:14, position 1,050 according to SEQ ID NO:15, position 438 according to SEQ ID NO:16, position 112 according to SEQ ID NO:17, or position 84 according to SEQ ID NO:18; or a guanine at a position corresponding to: position 11,887 according to SEQ ID NO:31, position 12,036 according to SEQ ID NO:32, position 2,685 according to SEQ ID NO:33, position 1,050 according to SEQ ID NO:34, position 438 according to SEQ ID NO:35, position 112 according to SEQ ID NO:36, or position 84 according to SEQ ID NO:37, then the RNF213 nucleic acid molecule in the biological sample is an RNF213 predicted loss-of-function or missense variant nucleic acid molecule.

[0101] In some embodiments, the determining step, detecting step, or genotyping assay comprises sequencing at least a portion of: the nucleotide sequence of the RNF213 genomic nucleic acid molecule in the biological sample, wherein the sequenced portion comprises a position corresponding to position 102,391 according to SEQ ID NO:3, or the complement thereof; the nucleotide sequence of the RNF213 mRNA molecule in the biological sample, wherein the sequenced portion comprises a position corresponding to: position 11,655 according to SEQ ID NO:19, or the complement thereof; position 11,804 according to SEQ ID NO:20, or the complement thereof; position 2,453 according to SEQ ID NO:21, or the complement thereof; position 818 according to SEQ ID NO:22, or the complement thereof; or position 206 according to SEQ ID NO:23, or the complement thereof; and/or the nucleotide sequence of the RNF213 cDNA molecule produced from the mRNA in the biological sample, wherein the sequenced portion comprises a position corresponding to: position 11,655 according to SEQ ID NO:38, or the complement thereof; position 11,804 according to SEQ ID NO:39, or the complement thereof; position 2,453 according to SEQ ID NO:40, or the complement thereof; position 818 according to SEQ ID NO:41, or the complement thereof; or position 206 according to SEQ ID NO:42, or the complement thereof. When the sequenced portion of the RNF213 nucleic acid molecule in the biological sample comprises: a cytosine at a position corresponding to position 102,391 according to SEQ ID NO:3; a cytosine at a position corresponding to: position 11,655 according to SEQ ID NO:19, position 11,804 according to SEQ ID NO:20, position 2,453 according to SEQ ID NO:21, position 818 according to SEQ ID NO:22, or position 206 according to SEQ ID NO:23; or a cytosine at a position corresponding to: position 11,655 according to SEQ ID NO:38, position 11,804 according to SEQ ID NO:39, position 2,453 according to SEQ ID NO:40, position 818 according to SEQ ID NO:41, or position 206 according to SEQ ID NO:42, then the RNF213 nucleic acid molecule in the biological sample is an RNF213 predicted loss-of-function or missense variant nucleic acid molecule.

[0102] In some embodiments, the determining step, detecting step, or genotyping assay comprises sequencing at least a portion of the nucleotide sequence of the RNF213 genomic nucleic acid molecule in the biological sample, wherein the sequenced portion comprises a position corresponding to position 103,226 according to SEQ ID NO:4, or the complement thereof. When the sequenced portion of the RNF213 nucleic acid molecule in the biological sample comprises a thymine at a position corresponding to position 103,226 according to SEQ ID NO:4, then the RNF213 nucleic acid molecule in the biological sample is an RNF213 predicted loss-of-function or missense variant nucleic acid molecule.

[0103] In some embodiments, the determining step, detecting step, or genotyping assay comprises sequencing at least a portion of the nucleotide sequence of the RNF213 genomic nucleic acid molecule in the biological sample, wherein the sequenced portion comprises a position corresponding to: position 102,917 according to SEQ ID NO:2, or the complement thereof; position 102,391 according to SEQ ID NO:3, or the complement thereof; or position 103,226 according to SEQ ID NO:4. When the sequenced portion of the RNF213 nucleic acid molecule in the biological sample comprises: a guanine at a position corresponding to position 102,917 according to SEQ ID NO:2, a cytosine at a position corresponding to position 102,391 according to SEQ ID NO:3, or a thymine at a position corresponding to position 103,226 according to SEQ ID NO:4, then the RNF213 nucleic acid molecule in the biological sample is an RNF213 predicted loss-of-function or missense variant nucleic acid molecule.

[0104] In some embodiments, the determining step, detecting step, or genotyping assay comprises sequencing at least a portion of the nucleotide sequence of the RNF213 mRNA molecule in the biological sample, wherein the sequenced portion comprises a position corresponding to: position 11,887 according to SEQ ID NO:12, or the complement thereof; position 12,036 according to SEQ ID NO:13, or the complement thereof; position 2,685 according to SEQ ID NO:14, or the complement thereof; position 1,050 according to SEQ ID NO:15, or the complement thereof; position 438 according to SEQ ID NO:16, or the complement thereof; position 112 according to SEQ ID NO:17, or the complement thereof; position 84 according to SEQ ID NO:18, or the complement thereof; position 11,655 according to SEQ ID NO:19, or the complement thereof; position 11,804 according to SEQ ID NO:20, or the complement thereof; position 2,453 according to SEQ ID NO:21, or the complement thereof; position 818 according to SEQ ID NO:22, or the complement thereof; or position 206 according to SEQ ID NO:23, or the complement thereof. When the sequenced portion of the RNF213 nucleic acid molecule in the biological sample comprises: a guanine at a position corresponding to position 11,887 according to SEQ ID NO:12; a guanine at a position corresponding to position 12,036 according to SEQ ID NO:13; a guanine at a position corresponding to position 2,685 according to SEQ ID NO:14; a guanine at a position corresponding to position 1,050 according to SEQ ID NO:15; a guanine at a position corresponding to position 438 according to SEQ ID NO:16; a guanine at a position corresponding to position 112 according to SEQ ID NO:17; a guanine at a position corresponding to position 84 according to SEQ ID NO:18; a cytosine at a position corresponding to position 11,655 according to SEQ ID NO:19; a cytosine at a position corresponding to position 11,804 according to SEQ ID NO:20; a cytosine at a position corresponding to position 2,453 according to SEQ ID NO:21; a cytosine at a position corresponding to position 818 according to SEQ ID NO:22; or a cytosine at a position corresponding to position 206 according to SEQ ID NO:23; then the RNF213 nucleic acid molecule in the biological sample is an RNF213 predicted loss-of-function or missense variant nucleic acid molecule.

[0105] In some embodiments, the determining step, detecting step, or genotyping assay comprises sequencing at least a portion of the nucleotide sequence of the RNF213 cDNA molecule produced from the mRNA molecule in the biological sample, wherein the sequenced portion comprises a position corresponding to: position 11,887 according to SEQ ID NO:31, or the complement thereof; position 12,036 according to SEQ ID NO:32, or the complement thereof; position 2,685 according to SEQ ID NO:33, or the complement thereof; position 1,050 according to SEQ ID NO:34, or the complement thereof; position 438 according to SEQ ID NO:35, or the complement thereof; position 112 according to SEQ ID NO:36, or the complement thereof; position 84 according to SEQ ID NO:37, or the complement thereof; position 11,655 according to SEQ ID NO:38, or the complement thereof; position 11,804 according to SEQ ID NO:39, or the complement thereof; position 2,453 according to SEQ ID NO:40, or the complement thereof; position 818 according to SEQ ID NO:41, or the complement thereof; or position 206 according to SEQ ID NO:42, or the complement thereof. When the sequenced portion of the RNF213 nucleic acid molecule in the biological sample comprises: a guanine at a position corresponding to position 11,887 according to SEQ ID NO:31; a guanine at a position corresponding to position 12,036 according to SEQ ID NO:32; a guanine at a position corresponding to position 2,685 according to SEQ ID NO:33; a guanine at a position corresponding to position 1,050 according to SEQ ID NO:34; a guanine at a position corresponding to position 438 according to SEQ ID NO:35; a guanine at a position corresponding to position 112 according to SEQ ID NO:36; a guanine at a position corresponding to position 84 according to SEQ ID NO:37]; a cytosine at a position corresponding to position 11,655 according to SEQ ID NO:38; a cytosine at a position corresponding to position 11,804 according to SEQ ID NO:39; a cytosine at a position corresponding to position 2,453 according to SEQ ID NO:40; a cytosine at a position corresponding to position 818 according to SEQ ID NO:41; or a cytosine at a position corresponding to position 206 according to SEQ ID NO:42; then the RNF213 nucleic acid molecule in the biological sample is an RNF213 predicted loss-of-function or missense variant nucleic acid molecule.

[0106] In some embodiments, the determining step, detecting step, or genotyping assay comprises: a) contacting the biological sample with a primer hybridizing to a portion of the nucleotide sequence of the RNF213: genomic nucleic acid molecule that is proximate to a position corresponding to position 102,917 according to SEQ ID NO:2; mRNA molecule that is proximate to a position corresponding to: position 11,887 according to SEQ ID NO:12, position 12,036 according to SEQ ID NO:13, position 2,685 according to SEQ ID NO:14, position 1,050 according to SEQ ID NO:15, position 438 according to SEQ ID NO:16, position 112 according to SEQ ID NO:17, or position 84 according to SEQ ID NO:18; and/or cDNA molecule that is proximate to a position corresponding to: position 11,887 according to SEQ ID NO:31, position 12,036 according to SEQ ID NO:32, position 2,685 according to SEQ ID NO:33, position 1,050 according to SEQ ID NO:34, position 438 according to SEQ ID NO:35, position 112 according to SEQ ID NO:36, or position 84 according to SEQ ID NO:37; b) extending the primer at least through the position of the nucleotide sequence of the RNF213: genomic nucleic acid molecule corresponding to position 102,917 according to SEQ ID NO:2; mRNA molecule corresponding to: position 11,887 according to SEQ ID NO:12, position 12,036 according to SEQ ID NO:13, position 2,685 according to SEQ ID NO:14, position 1,050 according to SEQ ID NO:15, position 438 according to SEQ ID NO:16, position 112 according to SEQ ID NO:17, or position 84 according to SEQ ID NO:18; and/or cDNA molecule corresponding to: position 11,887 according to SEQ ID NO:31, position 12,036 according to SEQ ID NO:32, position 2,685 according to SEQ ID NO:33, position 1,050 according to SEQ ID NO:34, position 438 according to SEQ ID NO:35, position 112 according to SEQ ID NO:36, or position 84 according to SEQ ID NO:37; and c) determining whether the extension product of the primer comprises a guanine at a position corresponding to: position 102,917 according to SEQ ID NO:2, position 11,887 according to SEQ ID NO:12, position 12,036 according to SEQ ID NO:13, position 2,685 according to SEQ ID NO:14, position 1,050 according to SEQ ID NO:15, position 438 according to SEQ ID NO:16, position 112 according to SEQ ID NO:17, or position 84 according to SEQ ID NO:18; or a guanine at a position corresponding to: position 11,887 according to SEQ ID NO:31, position 12,036 according to SEQ ID NO:32, position 2,685 according to SEQ ID NO:33, position 1,050 according to SEQ ID NO:34, position 438 according to SEQ ID NO:35, position 112 according to SEQ ID NO:36, or position 84 according to SEQ ID NO:37.

[0107] In some embodiments, the determining step, detecting step, or genotyping assay comprises: a) contacting the biological sample with a primer hybridizing to a portion of the nucleotide sequence of the RNF213: genomic nucleic acid molecule that is proximate to a position corresponding to position 102,391 according to SEQ ID NO:3; mRNA molecule that is proximate to a position corresponding to: position 11,655 according to SEQ ID NO:19, position 11,804 according to SEQ ID NO:20, position 2,453 according to SEQ ID NO:21, position 818 according to SEQ ID NO:22, or position 206 according to SEQ ID NO:23; and/or cDNA molecule that is proximate to a position corresponding to: position 11,655 according to SEQ ID NO:38, position 11,804 according to SEQ ID NO:39, position 2,453 according to SEQ ID NO:40, position 818 according to SEQ ID NO:41, or position 206 according to SEQ ID NO:42; b) extending the primer at least through the position of the nucleotide sequence of the RNF213: genomic nucleic acid molecule corresponding to position 102,391 according to SEQ ID NO:3; mRNA molecule corresponding to: position 11,655 according to SEQ ID NO:19, position 11,804 according to SEQ ID NO:20, position 2,453 according to SEQ ID NO:21, position 818 according to SEQ ID NO:22, or position 206 according to SEQ ID NO:23; and/or cDNA molecule corresponding to: position 11,655 according to SEQ ID NO:38, position 11,804 according to SEQ ID NO:39, position 2,453 according to SEQ ID NO:40, position 818 according to SEQ ID NO:41, or position 206 according to SEQ ID NO:42; and c) determining whether the extension product of the primer comprises: a cytosine at a position corresponding to position 102,391 according to SEQ ID NO:3; a cytosine at a position corresponding to position 11,655 according to SEQ ID NO:19, a cytosine at a position corresponding to position 11,804 according to SEQ ID NO:20, a cytosine at a position corresponding to position 2,453 according to SEQ ID NO:21, a cytosine at a position corresponding to position 818 according to SEQ ID NO:22, or a cytosine at a position corresponding to position 206 according to SEQ ID NO:23; or a cytosine at a position corresponding to position 11,655 according to SEQ ID NO:38, a cytosine at a position corresponding to position 11,804 according to SEQ ID NO:39, a cytosine at a position corresponding to position 2,453 according to SEQ ID NO:40, a cytosine at a position corresponding to position 818 according to SEQ ID NO:41, a cytosine at a position corresponding to position or 206 according to SEQ ID NO:42.

[0108] In some embodiments, the determining step, detecting step, or genotyping assay comprises: a) contacting the biological sample with a primer hybridizing to a portion of the nucleotide sequence of the RNF213 genomic nucleic acid molecule that is proximate to a position corresponding to position 103,226 according to SEQ ID NO:4; b) extending the primer at least through the position of the nucleotide sequence of the RNF213 genomic nucleic acid molecule corresponding to position 103,226 according to SEQ ID NO:4; and c) determining whether the extension product of the primer comprises a thymine at a position corresponding to position 103,226 according to SEQ ID NO:4.

[0109] In some embodiments, the determining step, detecting step, or genotyping assay comprises: a) contacting the biological sample with a primer hybridizing to a portion of the nucleotide sequence of the RNF213 genomic nucleic acid molecule that is proximate to a position corresponding to: position 102,917 according to SEQ ID NO:2, position 102,391 according to SEQ ID NO:3, or position 103,226 according to SEQ ID NO:4; b) extending the primer at least through the position of the nucleotide sequence of the RNF213 genomic nucleic acid molecule corresponding to: position 102,917 according to SEQ ID NO:2, position 102,391 according to SEQ ID NO:3, or position 103,226 according to SEQ ID NO:4; and c) determining whether the extension product of the primer comprises: a guanine at a position corresponding to position 102,917 according to SEQ ID NO:2, a cytosine at a position corresponding to position 102,391 according to SEQ ID NO:3, or a thymine at a position corresponding to position 103,226 according to SEQ ID NO:4.

[0110] In some embodiments, the determining step, detecting step, or genotyping assay comprises: a) contacting the biological sample with a primer hybridizing to a portion of the nucleotide sequence of the RNF213 mRNA molecule that is proximate to a position corresponding to: position 11,887 according to SEQ ID NO:12, position 12,036 according to SEQ ID NO:13, position 2,685 according to SEQ ID NO:14, position 1,050 according to SEQ ID NO:15, position 438 according to SEQ ID NO:16, position 112 according to SEQ ID NO:17, or position 84 according to SEQ ID NO:18, position 11,655 according to SEQ ID NO:19, position 11,804 according to SEQ ID NO:20, position 2,453 according to SEQ ID NO:21, position 818 according to SEQ ID NO:22, or position 206 according to SEQ ID NO:23; b) extending the primer at least through the position of the nucleotide sequence of the RNF213 mRNA molecule corresponding to: position 11,887 according to SEQ ID NO:12, position 12,036 according to SEQ ID NO:13, position 2,685 according to SEQ ID NO:14, position 1,050 according to SEQ ID NO:15, position 438 according to SEQ ID NO:16, position 112 according to SEQ ID NO:17, or position 84 according to SEQ ID NO:18, position 11,655 according to SEQ ID NO:19, position 11,804 according to SEQ ID NO:20, position 2,453 according to SEQ ID NO:21, position 818 according to SEQ ID NO:22, or position 206 according to SEQ ID NO:23; and c) determining whether the extension product of the primer comprises: a guanine at a position corresponding to position 11,887 according to SEQ ID NO:12, a guanine at a position corresponding to position 12,036 according to SEQ ID NO:13, a guanine at a position corresponding to position 2,685 according to SEQ ID NO:14, a guanine at a position corresponding to position 1,050 according to SEQ ID NO:15, a guanine at a position corresponding to position 438 according to SEQ ID NO:16, a guanine at a position corresponding to position 112 according to SEQ ID NO:17, a guanine at a position corresponding to position 84 according to SEQ ID NO:18, a cytosine at a position corresponding to position 11,655 according to SEQ ID NO:19, a cytosine at a position corresponding to position 11,804 according to SEQ ID NO:20, a cytosine at a position corresponding to position 2,453 according to SEQ ID NO:21, a cytosine at a position corresponding to position 818 according to SEQ ID NO:22, or a cytosine at a position corresponding to position 206 according to SEQ ID NO:23.

[0111] In some embodiments, the determining step, detecting step, or genotyping assay comprises: a) contacting the biological sample with a primer hybridizing to a portion of the nucleotide sequence of the RNF213 cDNA molecule that is proximate to a position corresponding to: position 11,887 according to SEQ ID NO:31, position 12,036 according to SEQ ID NO:32, position 2,685 according to SEQ ID NO:33, position 1,050 according to SEQ ID NO:34, position 438 according to SEQ ID NO:35, position 112 according to SEQ ID NO:36, position 84 according to SEQ ID NO:37, position 11,655 according to SEQ ID NO:38, position 11,804 according to SEQ ID NO:39, position 2,453 according to SEQ ID NO:40, position 818 according to SEQ ID NO:41, or position 206 according to SEQ ID NO:42; b) extending the primer at least through the position of the nucleotide sequence of the RNF213 CDNA molecule corresponding to: position 11,887 according to SEQ ID NO:31, position 12,036 according to SEQ ID NO:32, position 2,685 according to SEQ ID NO:33, position 1,050 according to SEQ ID NO:34, position 438 according to SEQ ID NO:35, position 112 according to SEQ ID NO:36, position 84 according to SEQ ID NO:37, position 11,655 according to SEQ ID NO:38, position 11,804 according to SEQ ID NO:39, position 2,453 according to SEQ ID NO:40, position 818 according to SEQ ID NO:41, or position 206 according to SEQ ID NO:42; and c) determining whether the extension product of the primer comprises: a guanine at a position corresponding to position 11,887 according to SEQ ID NO:31, a guanine at a position corresponding to position 12,036 according to SEQ ID NO:32, a guanine at a position corresponding to position 2,685 according to SEQ ID NO:33, a guanine at a position corresponding to position 1,050 according to SEQ ID NO:34, a guanine at a position corresponding to position 438 according to SEQ ID NO:35, a guanine at a position corresponding to position 112 according to SEQ ID NO:36, a guanine at a position corresponding to position 84 according to SEQ ID NO:37, a cytosine at a position corresponding to position 11,655 according to SEQ ID NO:38, a cytosine at a position corresponding to position 11,804 according to SEQ ID NO:39, a cytosine at a position corresponding to position 2,453 according to SEQ ID NO:40, a cytosine at a position corresponding to position 818 according to SEQ ID NO:41, or a cytosine at a position corresponding to position 206 according to SEQ ID NO:42.

[0112] In some embodiments, the assay comprises sequencing the entire nucleic acid molecule. In some embodiments, only an RNF213 genomic nucleic acid molecule is analyzed. In some embodiments, only an RNF213 mRNA is analyzed. In some embodiments, only an RNF213 cDNA obtained from RNF213 mRNA is analyzed.

[0113] In some embodiments, the determining step, detecting step, or genotyping assay comprises: a) amplifying at least a portion of the nucleic acid molecule that encodes the human RNF213 polypeptide, wherein the amplified portion comprises: i) a guanine at a position corresponding to position 102,917 according to SEQ ID NO:2, or the complement thereof; ii) a guanine at a position corresponding to position 11,887 according to SEQ ID NO:12, or the complement thereof; a guanine at a position corresponding to position 12,036 according to SEQ ID NO:13, or the complement thereof; a guanine at a position corresponding to position 2,685 according to SEQ ID NO:14, or the complement thereof; a guanine at a position corresponding to position 1,050 according to SEQ ID NO:15, or the complement thereof; a guanine at a position corresponding to position 438 according to SEQ ID NO:16, or the complement thereof; a guanine at a position corresponding to position 112 according to SEQ ID NO:17, or the complement thereof; a guanine at a position corresponding to position 84 according to SEQ ID NO:18, or the complement thereof; and/or iii) a guanine at a position corresponding to position 11,887 according to SEQ ID NO:31, or the complement thereof; a guanine at a position corresponding to position 12,036 according to SEQ ID NO:32, or the complement thereof; a guanine at a position corresponding to position 2,685 according to SEQ ID NO:33, or the complement thereof; a guanine at a position corresponding to position 1,050 according to SEQ ID NO:34, or the complement thereof; a guanine at a position corresponding to position 438 according to SEQ ID NO:35, or the complement thereof; a guanine at a position corresponding to position 112 according to SEQ ID NO:36, or the complement thereof; a guanine at a position corresponding to position 84 according to SEQ ID NO:37, or the complement thereof; b) labeling the amplified nucleic acid molecule with a detectable label; c) contacting the labeled nucleic acid molecule with a support comprising an alteration-specific probe, wherein the alteration-specific probe comprises a nucleotide sequence which hybridizes under stringent conditions to the nucleic acid sequence of the amplified nucleic acid molecule comprising: i) a guanine at a position corresponding to position 102,917 according to SEQ ID NO:2, or the complement thereof; ii) a guanine at a position corresponding to position 11,887 according to SEQ ID NO:12, or the complement thereof; a guanine at a position corresponding to position 12,036 according to SEQ ID NO:13, or the complement thereof; a guanine at a position corresponding to position 2,685 according to SEQ ID NO:14, or the complement thereof; a guanine at a position corresponding to position 1,050 according to SEQ ID NO:15, or the complement thereof; a guanine at a position corresponding to position 438 according to SEQ ID NO:16, or the complement thereof; a guanine at a position corresponding to position 112 according to SEQ ID NO:17, or the complement thereof; a guanine at a position corresponding to position 84 according to SEQ ID NO:18, or the complement thereof; and/or iii) a guanine at a position corresponding to position 11,887 according to SEQ ID NO:31, or the complement thereof; a guanine at a position corresponding to position 12,036 according to SEQ ID NO:32, or the complement thereof; a guanine at a position corresponding to position 2,685 according to SEQ ID NO:33, or the complement thereof; a guanine at a position corresponding to position 1,050 according to SEQ ID NO:34, or the complement thereof; a guanine at a position corresponding to position 438 according to SEQ ID NO:35, or the complement thereof; a guanine at a position corresponding to position 112 according to SEQ ID NO:36, or the complement thereof; or a guanine at a position corresponding to position 84 according to SEQ ID NO:37, or the complement thereof; and d) detecting the detectable label.

[0114] In some embodiments, the determining step, detecting step, or genotyping assay comprises: a) amplifying at least a portion of the nucleic acid molecule that encodes the human RNF213 polypeptide, wherein the amplified portion comprises: i) a cytosine at a position corresponding to position 102,391 according to SEQ ID NO:3, or the complement thereof; ii) a cytosine at a position corresponding to position 11,655 according to SEQ ID NO:19, or the complement thereof; a cytosine at a position corresponding to position 11,804 according to SEQ ID NO:20, or the complement thereof; a cytosine at a position corresponding to position 2,453 according to SEQ ID NO:21, or the complement thereof; a cytosine at a position corresponding to position 818 according to SEQ ID NO:22, or the complement thereof; or a cytosine at a position corresponding to position 206 according to SEQ ID NO:23, or the complement thereof; and/or iii) a cytosine at a position corresponding to position 11,655 according to SEQ ID NO:38, or the complement thereof; a cytosine at a position corresponding to position 11,804 according to SEQ ID NO:39, or the complement thereof; a cytosine at a position corresponding to position 2,453 according to SEQ ID NO:40, or the complement thereof; a cytosine at a position corresponding to position 818 according to SEQ ID NO:41, or the complement thereof; or a cytosine at a position corresponding to position 206 according to SEQ ID NO:42; b) labeling the amplified nucleic acid molecule with a detectable label; c) contacting the labeled nucleic acid molecule with a support comprising an alteration-specific probe, wherein the alteration-specific probe comprises a nucleotide sequence which hybridizes under stringent conditions to the nucleic acid sequence of the amplified nucleic acid molecule comprising: i) a cytosine at a position corresponding to position 102,391 according to SEQ ID NO:3, or the complement thereof; ii) a cytosine at a position corresponding to position 11,655 according to SEQ ID NO:19, or the complement thereof; a cytosine at a position corresponding to position 11,804 according to SEQ ID NO:20, or the complement thereof; a cytosine at a position corresponding to position 2,453 according to SEQ ID NO:21, or the complement thereof; a cytosine at a position corresponding to position 818 according to SEQ ID NO:22, or the complement thereof; or a cytosine at a position corresponding to position 206 according to SEQ ID NO:23, or the complement thereof; and/or iii) a cytosine at a position corresponding to position 11,655 according to SEQ ID NO:38, or the complement thereof; a cytosine at a position corresponding to position 11,804 according to SEQ ID NO:39, or the complement thereof; a cytosine at a position corresponding to position 2,453 according to SEQ ID NO:40, or the complement thereof; a cytosine at a position corresponding to position 818 according to SEQ ID NO:41, or the complement thereof; or a cytosine at a position corresponding to position 206 according to SEQ ID NO:42, or the complement thereof; and d) detecting the detectable label.

[0115] In some embodiments, the determining step, detecting step, or genotyping assay comprises: a) amplifying at least a portion of the nucleic acid molecule that encodes the human RNF213 polypeptide, wherein the amplified portion comprises a thymine at a position corresponding to position 103,226 according to SEQ ID NO:4, or the complement thereof; b) labeling the amplified nucleic acid molecule with a detectable label; c) contacting the labeled nucleic acid molecule with a support comprising an alteration-specific probe, wherein the alteration-specific probe comprises a nucleotide sequence which hybridizes under stringent conditions to the nucleic acid sequence of the amplified nucleic acid molecule comprising a thymine at a position corresponding to position 103,226 according to SEQ ID NO:4, or the complement thereof; and d) detecting the detectable label.

[0116] In some embodiments, the determining step, detecting step, or genotyping assay comprises: a) amplifying at least a portion of the nucleic acid molecule that encodes the human RNF213 polypeptide, wherein the amplified portion comprises: a guanine at a position corresponding to position 102,917 according to SEQ ID NO:2, or the complement thereof; a cytosine at a position corresponding to position 102,391 according to SEQ ID NO:3, or the complement thereof; or a thymine at a position corresponding to position 103,226 according to SEQ ID NO:4, or the complement thereof; b) labeling the amplified nucleic acid molecule with a detectable label; c) contacting the labeled nucleic acid molecule with a support comprising an alteration-specific probe, wherein the alteration-specific probe comprises a nucleotide sequence which hybridizes under stringent conditions to the nucleic acid sequence of the amplified nucleic acid molecule comprising: a guanine at a position corresponding to position 102,917 according to SEQ ID NO:2, or the complement thereof; a cytosine at a position corresponding to position 102,391 according to SEQ ID NO:3, or the complement thereof; or a thymine at a position corresponding to position 103,226 according to SEQ ID NO:4, or the complement thereof; and d) detecting the detectable label.

[0117] In some embodiments, the determining step, detecting step, or genotyping assay comprises: a) amplifying at least a portion of the nucleic acid molecule that encodes the human RNF213 polypeptide, wherein the amplified portion comprises: a guanine at a position corresponding to position 11,887 according to SEQ ID NO:12, or the complement thereof; a guanine at a position corresponding to position 12,036 according to SEQ ID NO:13, or the complement thereof; a guanine at a position corresponding to position 2,685 according to SEQ ID NO:14, or the complement thereof; a guanine at a position corresponding to position 1,050 according to SEQ ID NO:15, or the complement thereof; a guanine at a position corresponding to position 438 according to SEQ ID NO:16, or the complement thereof; a guanine at a position corresponding to position 112 according to SEQ ID NO:17, or the complement thereof; a guanine at a position corresponding to position 84 according to SEQ ID NO:18, or the complement thereof; a cytosine at a position corresponding to position 11,655 according to SEQ ID NO:19, or the complement thereof; a cytosine at a position corresponding to position 11,804 according to SEQ ID NO:20, or the complement thereof; a cytosine at a position corresponding to position 2,453 according to SEQ ID NO:21, or the complement thereof; a cytosine at a position corresponding to position 818 according to SEQ ID NO:22, or the complement thereof; or a cytosine at a position corresponding to position 206 according to SEQ ID NO:23, or the complement thereof; b) labeling the amplified nucleic acid molecule with a detectable label; c) contacting the labeled nucleic acid molecule with a support comprising an alteration-specific probe, wherein the alteration-specific probe comprises a nucleotide sequence which hybridizes under stringent conditions to the nucleic acid sequence of the amplified nucleic acid molecule comprising: a guanine at a position corresponding to position 11,887 according to SEQ ID NO:12, or the complement thereof; a guanine at a position corresponding to position 12,036 according to SEQ ID NO:13, or the complement thereof; a guanine at a position corresponding to position 2,685 according to SEQ ID NO:14, or the complement thereof; a guanine at a position corresponding to position 1,050 according to SEQ ID NO:15, or the complement thereof; a guanine at a position corresponding to position 438 according to SEQ ID NO:16, or the complement thereof; a guanine at a position corresponding to position 112 according to SEQ ID NO:17, or the complement thereof; a guanine at a position corresponding to position 84 according to SEQ ID NO:18, or the complement thereof; a cytosine at a position corresponding to position 11,655 according to SEQ ID NO:19, or the complement thereof; a cytosine at a position corresponding to position 11,804 according to SEQ ID NO:20, or the complement thereof; a cytosine at a position corresponding to position 2,453 according to SEQ ID NO:21, or the complement thereof; a cytosine at a position corresponding to position 818 according to SEQ ID NO:22, or the complement thereof; or a cytosine at a position corresponding to position 206 according to SEQ ID NO:23, or the complement thereof; and d) detecting the detectable label.

[0118] In some embodiments, the determining step, detecting step, or genotyping assay comprises: a) amplifying at least a portion of the nucleic acid molecule that encodes the human RNF213 polypeptide, wherein the amplified portion comprises: a guanine at a position corresponding to position 11,887 according to SEQ ID NO:31, or the complement thereof; a guanine at a position corresponding to position 12,036 according to SEQ ID NO:32, or the complement thereof; a guanine at a position corresponding to position 2,685 according to SEQ ID NO:33, or the complement thereof; a guanine at a position corresponding to position 1,050 according to SEQ ID NO:34, or the complement thereof; a guanine at a position corresponding to position 438 according to SEQ ID NO:35, or the complement thereof; a guanine at a position corresponding to position 112 according to SEQ ID NO:36, or the complement thereof; a guanine at a position corresponding to position 84 according to SEQ ID NO:37, or the complement thereof; a cytosine at a position corresponding to position 11,655 according to SEQ ID NO:38, or the complement thereof; a cytosine at a position corresponding to position 11,804 according to SEQ ID NO:39, or the complement thereof; a cytosine at a position corresponding to position 2,453 according to SEQ ID NO:40, or the complement thereof; a cytosine at a position corresponding to position 818 according to SEQ ID NO:41, or the complement thereof; or a cytosine at a position corresponding to position 206 according to SEQ ID NO:42, or the complement thereof; b) labeling the amplified nucleic acid molecule with a detectable label; c) contacting the labeled nucleic acid molecule with a support comprising an alteration-specific probe, wherein the alteration-specific probe comprises a nucleotide sequence which hybridizes under stringent conditions to the nucleic acid sequence of the amplified nucleic acid molecule comprising: a guanine at a position corresponding to position 11,887 according to SEQ ID NO:31, or the complement thereof; a guanine at a position corresponding to position 12,036 according to SEQ ID NO:32, or the complement thereof; a guanine at a position corresponding to position 2,685 according to SEQ ID NO:33, or the complement thereof; a guanine at a position corresponding to position 1,050 according to SEQ ID NO:34, or the complement thereof; a guanine at a position corresponding to position 438 according to SEQ ID NO:35, or the complement thereof; a guanine at a position corresponding to position 112 according to SEQ ID NO:36, or the complement thereof; a guanine at a position corresponding to position 84 according to SEQ ID NO:37, or the complement thereof; a cytosine at a position corresponding to position 11,655 according to SEQ ID NO:38, or the complement thereof; a cytosine at a position corresponding to position 11,804 according to SEQ ID NO:39, or the complement thereof; a cytosine at a position corresponding to position 2,453 according to SEQ ID NO:40, or the complement thereof; a cytosine at a position corresponding to position 818 according to SEQ ID NO:41, or the complement thereof; or a cytosine at a position corresponding to position 206 according to SEQ ID NO:42, or the complement thereof; and d) detecting the detectable label.

[0119] In some embodiments, the nucleic acid molecule is mRNA and the determining step further comprises reverse-transcribing the mRNA into a cDNA prior to the amplifying step.

[0120] In some embodiments, the determining step, detecting step, or genotyping assay comprises: contacting the nucleic acid molecule in the biological sample with an alteration-specific probe comprising a detectable label, wherein the alteration-specific probe comprises a nucleotide sequence which hybridizes under stringent conditions to the nucleotide sequence of the amplified nucleic acid molecule comprising: i) a guanine at a position corresponding to position 102,917 according to SEQ ID NO:2, or the complement thereof; ii) a guanine at a position corresponding to: position 11,887 according to SEQ ID NO:12, or the complement thereof; position 12,036 according to SEQ ID NO:13, or the complement thereof; position 2,685 according to SEQ ID NO:14, or the complement thereof; position 1,050 according to SEQ ID NO:15, or the complement thereof; position 438 according to SEQ ID NO:16, or the complement thereof; position 112 according to SEQ ID NO:17, or the complement thereof; position 84 according to SEQ ID NO:18, or the complement thereof; and/or iii) a guanine at a position corresponding to: position 11,887 according to SEQ ID NO:31, or the complement thereof; position 12,036 according to SEQ ID NO:32, or the complement thereof; position 2,685 according to SEQ ID NO:33, or the complement thereof; position 1,050 according to SEQ ID NO:34, or the complement thereof; position 438 according to SEQ ID NO:35, or the complement thereof; position 112 according to SEQ ID NO:36, or the complement thereof; or position 84 according to SEQ ID NO:37, or the complement thereof; and detecting the detectable label.

[0121] In some embodiments, the determining step, detecting step, or genotyping assay comprises: contacting the nucleic acid molecule in the biological sample with an alteration-specific probe comprising a detectable label, wherein the alteration-specific probe comprises a nucleotide sequence which hybridizes under stringent conditions to the nucleotide sequence of the amplified nucleic acid molecule comprising: i) a cytosine at a position corresponding to position 102,391 according to SEQ ID NO:3, or the complement thereof; ii) a cytosine at a position corresponding to: position 11,655 according to SEQ ID NO:19, or the complement thereof; position 11,804 according to SEQ ID NO:20, or the complement thereof; position 2,453 according to SEQ ID NO:21, or the complement thereof; position 818 according to SEQ ID NO:22, or the complement thereof; or position 206 according to SEQ ID NO:23, or the complement thereof; and/or iii) a cytosine at a position corresponding to: position 11,655 according to SEQ ID NO:38, or the complement thereof; position 11,804 according to SEQ ID NO:39, or the complement thereof; position 2,453 according to SEQ ID NO:40, or the complement thereof; position 818 according to SEQ ID NO:41, or the complement thereof; or position 206 according to SEQ ID NO:42, or the complement thereof; and detecting the detectable label.

[0122] In some embodiments, the determining step, detecting step, or genotyping assay comprises: contacting the nucleic acid molecule in the biological sample with an alteration-specific probe comprising a detectable label, wherein the alteration-specific probe comprises a nucleotide sequence which hybridizes under stringent conditions to the nucleotide sequence of the amplified nucleic acid molecule comprising a thymine at a position corresponding to position 103,226 according to SEQ ID NO:4, or the complement thereof; and detecting the detectable label.

[0123] In some embodiments, the determining step, detecting step, or genotyping assay comprises: contacting the nucleic acid molecule in the biological sample with an alteration-specific probe comprising a detectable label, wherein the alteration-specific probe comprises a nucleotide sequence which hybridizes under stringent conditions to the nucleotide sequence of the amplified nucleic acid molecule comprising: a guanine at a position corresponding to position 102,917 according to SEQ ID NO:2, or the complement thereof; a cytosine at a position corresponding to position 102,391 according to SEQ ID NO:3, or the complement thereof; or a thymine at a position corresponding to position 103,226 according to SEQ ID NO:4, or the complement thereof; and detecting the detectable label.

[0124] In some embodiments, the determining step, detecting step, or genotyping assay comprises: contacting the nucleic acid molecule in the biological sample with an alteration-specific probe comprising a detectable label, wherein the alteration-specific probe comprises a nucleotide sequence which hybridizes under stringent conditions to the nucleotide sequence of the amplified nucleic acid molecule comprising: a guanine at a position corresponding to position 11,887 according to SEQ ID NO:12, or the complement thereof; a guanine at a position corresponding to position 12,036 according to SEQ ID NO:13, or the complement thereof; a guanine at a position corresponding to position 2,685 according to SEQ ID NO:14, or the complement thereof; a guanine at a position corresponding to position 1,050 according to SEQ ID NO:15, or the complement thereof; a guanine at a position corresponding to position 438 according to SEQ ID NO:16, or the complement thereof; a guanine at a position corresponding to position 112 according to SEQ ID NO:17, or the complement thereof; a guanine at a position corresponding to position 84 according to SEQ ID NO:18, or the complement thereof; a cytosine at a position corresponding to position 11,655 according to SEQ ID NO:19, or the complement thereof; a cytosine at a position corresponding to position 11,804 according to SEQ ID NO:20, or the complement thereof; a cytosine at a position corresponding to position 2,453 according to SEQ ID NO:21, or the complement thereof; a cytosine at a position corresponding to position 818 according to SEQ ID NO:22, or the complement thereof; or a cytosine at a position corresponding to position 206 according to SEQ ID NO:23, or the complement thereof; and detecting the detectable label.

[0125] In some embodiments, the determining step, detecting step, or genotyping assay comprises: contacting the nucleic acid molecule in the biological sample with an alteration-specific probe comprising a detectable label, wherein the alteration-specific probe comprises a nucleotide sequence which hybridizes under stringent conditions to the nucleotide sequence of the amplified nucleic acid molecule comprising: a guanine at a position corresponding to position 11,887 according to SEQ ID NO:31, or the complement thereof; a guanine at a position corresponding to position 12,036 according to SEQ ID NO:32, or the complement thereof; a guanine at a position corresponding to position 2,685 according to SEQ ID NO:33, or the complement thereof; a guanine at a position corresponding to position 1,050 according to SEQ ID NO:34, or the complement thereof; a guanine at a position corresponding to position 438 according to SEQ ID NO:35, or the complement thereof; a guanine at a position corresponding to position 112 according to SEQ ID NO:36, or the complement thereof; a guanine at a position corresponding to position 84 according to SEQ ID NO:37, or the complement thereof; a cytosine at a position corresponding to position 11,655 according to SEQ ID NO:38, or the complement thereof; a cytosine at a position corresponding to position 11,804 according to SEQ ID NO:39, or the complement thereof; a cytosine at a position corresponding to position 2,453 according to SEQ ID NO:40, or the complement thereof; a cytosine at a position corresponding to position 818 according to SEQ ID NO:41, or the complement thereof; or a cytosine at a position corresponding to position 206 according to SEQ ID NO:42, or the complement thereof; and detecting the detectable label.

[0126] Alteration-specific polymerase chain reaction techniques can be used to detect mutations such as SNPs in a nucleic acid sequence. Alteration-specific primers can be used because the DNA polymerase will not extend when a mismatch with the template is present.

[0127] In some embodiments, the nucleic acid molecule in the sample is mRNA and the mRNA is reverse-transcribed into a cDNA prior to the amplifying step. In some embodiments, the nucleic acid molecule is present within a cell obtained from the subject.

[0128] In some embodiments, the assay comprises contacting the biological sample with a primer or probe, such as an alteration-specific primer or alteration-specific probe, that specifically hybridizes to an RNF213 variant genomic sequence, variant mRNA sequence, or variant cDNA sequence and not the corresponding RNF213 reference sequence under stringent conditions, and determining whether hybridization has occurred.

[0129] In some embodiments, the assay comprises RNA sequencing (RNA-Seq). In some embodiments, the assays also comprise reverse transcribing mRNA into cDNA, such as by the reverse transcriptase polymerase chain reaction (RT-PCR).

[0130] In some embodiments, the methods utilize probes and primers of sufficient nucleotide length to bind to the target nucleotide sequence and specifically detect and/or identify a polynucleotide comprising an RNF213 variant genomic nucleic acid molecule, variant mRNA molecule, or variant cDNA molecule. The hybridization conditions or reaction conditions can be determined by the operator to achieve this result. The nucleotide length may be any length that is sufficient for use in a detection method of choice, including any assay described or exemplified herein. Such probes and primers can hybridize specifically to a target nucleotide sequence under high stringency hybridization conditions. Probes and primers may have complete nucleotide sequence identity of contiguous nucleotides within the target nucleotide sequence, although probes differing from the target nucleotide sequence and that retain the ability to specifically detect and/or identify a target nucleotide sequence may be designed by conventional methods. Probes and primers can have about 80%, about 85%, about 90%, about 91%, about 92%, about 93%, about 94%, about 95%, about 96%, about 97%, about 98%, about 99%, or 100% sequence identity or complementarity with the nucleotide sequence of the target nucleic acid molecule.

[0131] In some embodiments, to determine whether an RNF213 nucleic acid molecule (genomic nucleic acid molecule, mRNA molecule, or cDNA molecule), or complement thereof, within a biological sample comprises a nucleotide sequence comprising: i) a guanine at a position corresponding to position 102,917 according to SEQ ID NO:2 (genomic nucleic acid molecule); ii) a guanine at a position corresponding to: position 11,887 according to SEQ ID NO:12, position 12,036 according to SEQ ID NO:13, position 2,685 according to SEQ ID NO:14, position 1,050 according to SEQ ID NO:15, position 438 according to SEQ ID NO:16, position 112 according to SEQ ID NO:17, or position 84 according to SEQ ID NO:18 (for mRNA molecules); or iii) a guanine at a position corresponding to: position 11,887 according to SEQ ID NO:31, position 12,036 according to SEQ ID NO:32, position 2,685 according to SEQ ID NO:33, position 1,050 according to SEQ ID NO:34, position 438 according to SEQ ID NO:35, position 112 according to SEQ ID NO:36, or position 84 according to SEQ ID NO:37 (for CDNA molecules), the biological sample can be subjected to an amplification method using a primer pair that includes a first primer derived from the 5′ flanking sequence adjacent to a guanine at a position corresponding to: position 102,917 according to SEQ ID NO:2, position 11,887 according to SEQ ID NO:12, position 12,036 according to SEQ ID NO:13, position 2,685 according to SEQ ID NO:14, position 1,050 according to SEQ ID NO:15, position 438 according to SEQ ID NO:16, position 112 according to SEQ ID NO:17, position 84 according to SEQ ID NO:18, position 11,887 according to SEQ ID NO:31, position 12,036 according to SEQ ID NO:32, position 2,685 according to SEQ ID NO:33, position 1,050 according to SEQ ID NO:34, position 438 according to SEQ ID NO:35, position 112 according to SEQ ID NO:36, or position 84 according to SEQ ID NO:37, and a second primer derived from the 3′ flanking sequence adjacent to a guanine at a position corresponding to: position 102,917 according to SEQ ID NO:2, position 11,887 according to SEQ ID NO:12, position 12,036 according to SEQ ID NO:13, position 2,685 according to SEQ ID NO:14, position 1,050 according to SEQ ID NO:15, position 438 according to SEQ ID NO:16, position 112 according to SEQ ID NO:17, position 84 according to SEQ ID NO:18, position 11,887 according to SEQ ID NO:31, position 12,036 according to SEQ ID NO:32, position 2,685 according to SEQ ID NO:33, position 1,050 according to SEQ ID NO:34, position 438 according to SEQ ID NO:35, position 112 according to SEQ ID NO:36, or position 84 according to SEQ ID NO:37 to produce an amplicon that is indicative of the presence of the SNP at positions encoding a guanine at a position corresponding to: position 102,917 according to SEQ ID NO:2, position 11,887 according to SEQ ID NO:12, position 12,036 according to SEQ ID NO:13, position 2,685 according to SEQ ID NO:14, position 1,050 according to SEQ ID NO:15, position 438 according to SEQ ID NO:16, position 112 according to SEQ ID NO:17, position 84 according to SEQ ID NO:18, position 11,887 according to SEQ ID NO:31, position 12,036 according to SEQ ID NO:32, position 2,685 according to SEQ ID NO:33, position 1,050 according to SEQ ID NO:34, position 438 according to SEQ ID NO:35, position 112 according to SEQ ID NO:36, or position 84 according to SEQ ID NO:37. In some embodiments, the amplicon may range in length from the combined length of the primer pairs plus one nucleotide base pair to any length of amplicon producible by a DNA amplification protocol. This distance can range from one nucleotide base pair up to the limits of the amplification reaction, or about twenty thousand nucleotide base pairs. Optionally, the primer pair flanks a region including positions comprising a guanine at a position corresponding to: position 102,917 according to SEQ ID NO:2, position 11,887 according to SEQ ID NO:12, position 12,036 according to SEQ ID NO:13, position 2,685 according to SEQ ID NO:14, position 1,050 according to SEQ ID NO:15, position 438 according to SEQ ID NO:16, position 112 according to SEQ ID NO:17, position 84 according to SEQ ID NO:18, position 11,887 according to SEQ ID NO:31, position 12,036 according to SEQ ID NO:32, position 2,685 according to SEQ ID NO:33, position 1,050 according to SEQ ID NO:34, position 438 according to SEQ ID NO:35, position 112 according to SEQ ID NO:36, or position 84 according to SEQ ID NO:37, and at least 1, 2, 3, 4, 5, 6, 7, 8, 9, 10, or more nucleotides on each side of positions comprising a guanine at a position corresponding to: position 102,917 according to SEQ ID NO:2, position 11,887 according to SEQ ID NO:12, position 12,036 according to SEQ ID NO:13, position 2,685 according to SEQ ID NO:14, position 1,050 according to SEQ ID NO:15, position 438 according to SEQ ID NO:16, position 112 according to SEQ ID NO:17, position 84 according to SEQ ID NO:18, position 11,887 according to SEQ ID NO:31, position 12,036 according to SEQ ID NO:32, position 2,685 according to SEQ ID NO:33, position 1,050 according to SEQ ID NO:34, position 438 according to SEQ ID NO:35, position 112 according to SEQ ID NO:36, or position 84 according to SEQ ID NO:37.

[0132] In some embodiments, to determine whether an RNF213 nucleic acid molecule (genomic nucleic acid molecule, mRNA molecule, or cDNA molecule), or complement thereof, within a biological sample comprises a nucleotide sequence comprising: i) a cytosine at a position corresponding to position 102,391 according to SEQ ID NO:3 (genomic nucleic acid molecule); ii) a cytosine at a position corresponding to: position 11,655 according to SEQ ID NO:19, position 11,804 according to SEQ ID NO:20, position 2,453 according to SEQ ID NO:21, position 818 according to SEQ ID NO:22, or position 206 according to SEQ ID NO:23 (for mRNA molecules); or iii) a cytosine at a position corresponding to: position 11,655 according to SEQ ID NO:38, position 11,804 according to SEQ ID NO:39, position 2,453 according to SEQ ID NO:40, position 818 according to SEQ ID NO:41, or position 206 according to SEQ ID NO:42 (for CDNA molecules), the biological sample can be subjected to an amplification method using a primer pair that includes a first primer derived from the 5′ flanking sequence adjacent to a cytosine at a position corresponding to: position 102,391 according to SEQ ID NO:3, position 11,655 according to SEQ ID NO:19, position 11,804 according to SEQ ID NO:20, position 2,453 according to SEQ ID NO:21, position 818 according to SEQ ID NO:22, position 206 according to SEQ ID NO:23, position 11,655 according to SEQ ID NO:38, position 11,804 according to SEQ ID NO:39, position 2,453 according to SEQ ID NO:40, position 818 according to SEQ ID NO:41, or position 206 according to SEQ ID NO:42, and a second primer derived from the 3′ flanking sequence adjacent to a cytosine at a position corresponding to: position 102,391 according to SEQ ID NO:3, position 11,655 according to SEQ ID NO:19, position 11,804 according to SEQ ID NO:20, position 2,453 according to SEQ ID NO:21, position 818 according to SEQ ID NO:22, position 206 according to SEQ ID NO:23, position 11,655 according to SEQ ID NO:38, position 11,804 according to SEQ ID NO:39, position 2,453 according to SEQ ID NO:40, position 818 according to SEQ ID NO:41, or position 206 according to SEQ ID NO:42 to produce an amplicon that is indicative of the presence of the SNP at positions encoding a cytosine at a position corresponding to: position 102,391 according to SEQ ID NO:3, position 11,655 according to SEQ ID NO:19, position 11,804 according to SEQ ID NO:20, position 2,453 according to SEQ ID NO:21, position 818 according to SEQ ID NO:22, position 206 according to SEQ ID NO:23, position 11,655 according to SEQ ID NO:38, position 11,804 according to SEQ ID NO:39, position 2,453 according to SEQ ID NO:40, position 818 according to SEQ ID NO:41, or position 206 according to SEQ ID NO:42. In some embodiments, the amplicon may range in length from the combined length of the primer pairs plus one nucleotide base pair to any length of amplicon producible by a DNA amplification protocol. This distance can range from one nucleotide base pair up to the limits of the amplification reaction, or about twenty thousand nucleotide base pairs. Optionally, the primer pair flanks a region including positions comprising a cytosine at a position corresponding to: position 102,391 according to SEQ ID NO:3, position 11,655 according to SEQ ID NO:19, position 11,804 according to SEQ ID NO:20, position 2,453 according to SEQ ID NO:21, position 818 according to SEQ ID NO:22, position 206 according to SEQ ID NO:23, position 11,655 according to SEQ ID NO:38, position 11,804 according to SEQ ID NO:39, position 2,453 according to SEQ ID NO:40, position 818 according to SEQ ID NO:41, or position 206 according to SEQ ID NO:42, and at least 1, 2, 3, 4, 5, 6, 7, 8, 9, 10, or more nucleotides on each side of positions comprising a cytosine at a position corresponding to: position 102,391 according to SEQ ID NO:3, position 11,655 according to SEQ ID NO:19, position 11,804 according to SEQ ID NO:20, position 2,453 according to SEQ ID NO:21, position 818 according to SEQ ID NO:22, position 206 according to SEQ ID NO:23, position 11,655 according to SEQ ID NO:38, position 11,804 according to SEQ ID NO:39, position 2,453 according to SEQ ID NO:40, position 818 according to SEQ ID NO:41, or position 206 according to SEQ ID NO:42.

[0133] In some embodiments, to determine whether an RNF213 nucleic acid molecule (genomic nucleic acid molecule, mRNA molecule, or cDNA molecule), or complement thereof, within a biological sample comprises a nucleotide sequence comprising a thymine at a position corresponding to position 103,226 according to SEQ ID NO:4 (genomic nucleic acid molecule), the biological sample can be subjected to an amplification method using a primer pair that includes a first primer derived from the 5′ flanking sequence adjacent to a thymine at a position corresponding to position 103,226 according to SEQ ID NO:4, and a second primer derived from the 3′ flanking sequence adjacent to a thymine at a position corresponding to position 103,226 according to SEQ ID NO:4 to produce an amplicon that is indicative of the presence of the SNP at positions encoding a thymine at a position corresponding to position 103,226 according to SEQ ID NO:4. In some embodiments, the amplicon may range in length from the combined length of the primer pairs plus one nucleotide base pair to any length of amplicon producible by a DNA amplification protocol. This distance can range from one nucleotide base pair up to the limits of the amplification reaction, or about twenty thousand nucleotide base pairs. Optionally, the primer pair flanks a region including positions comprising a thymine at a position corresponding to position 103,226 according to SEQ ID NO:4, and at least 1, 2, 3, 4, 5, 6, 7, 8, 9, 10, or more nucleotides on each side of positions comprising a thymine at a position corresponding to position 103,226 according to SEQ ID NO:4.

[0134] Similar amplicons can be generated from the mRNA and/or cDNA sequences. PCR primer pairs can be derived from a known sequence, for example, by using computer programs intended for that purpose, such as the PCR primer analysis tool in Vector NTI version 10 (Informax Inc., Bethesda Md.); PrimerSelect (DNASTAR Inc., Madison, Wis.); and Primer3 (Version 0.4.0.COPYRGT., 1991, Whitehead Institute for Biomedical Research, Cambridge, Mass.). Additionally, the sequence can be visually scanned and primers manually identified using known guidelines.

[0135] Illustrative examples of nucleic acid sequencing techniques include, but are not limited to, chain terminator (Sanger) sequencing and dye terminator sequencing. Other methods involve nucleic acid hybridization methods other than sequencing, including using labeled primers or probes directed against purified DNA, amplified DNA, and fixed cell preparations (fluorescence in situ hybridization (FISH)). In some methods, a target nucleic acid molecule may be amplified prior to or simultaneous with detection. Illustrative examples of nucleic acid amplification techniques include, but are not limited to, polymerase chain reaction (PCR), ligase chain reaction (LCR), strand displacement amplification (SDA), and nucleic acid sequence based amplification (NASBA). Other methods include, but are not limited to, ligase chain reaction, strand displacement amplification, and thermophilic SDA (tSDA).

[0136] In hybridization techniques, stringent conditions can be employed such that a probe or primer will specifically hybridize to its target. In some embodiments, a polynucleotide primer or probe under stringent conditions will hybridize to its target sequence to a detectably greater degree than to other non-target sequences, such as, at least 2-fold, at least 3-fold, at least 4-fold, or more over background, including over 10-fold over background. In some embodiments, a polynucleotide primer or probe under stringent conditions will hybridize to its target nucleotide sequence to a detectably greater degree than to other nucleotide sequences by at least 2-fold. In some embodiments, a polynucleotide primer or probe under stringent conditions will hybridize to its target nucleotide sequence to a detectably greater degree than to other nucleotide sequences by at least 3-fold. In some embodiments, a polynucleotide primer or probe under stringent conditions will hybridize to its target nucleotide sequence to a detectably greater degree than to other nucleotide sequences by at least 4-fold. In some embodiments, a polynucleotide primer or probe under stringent conditions will hybridize to its target nucleotide sequence to a detectably greater degree than to other nucleotide sequences by over 10-fold over background. Stringent conditions are sequence-dependent and will be different in different circumstances.

[0137] Appropriate stringency conditions which promote DNA hybridization, for example, 6× sodium chloride/sodium citrate (SSC) at about 45° C., followed by a wash of 2×SSC at 50° C., are known or can be found in Current Protocols in Molecular Biology, John Wiley & Sons, N.Y. (1989), 6.3.1-6.3.6. Typically, stringent conditions for hybridization and detection will be those in which the salt concentration is less than about 1.5 M Na⁺ ion, typically about 0.01 to 1.0 M Na⁺ ion concentration (or other salts) at pH 7.0 to 8.3 and the temperature is at least about 30° C. for short probes (such as, for example, 10 to 50 nucleotides) and at least about 60° C. for longer probes (such as, for example, greater than 50 nucleotides). Stringent conditions may also be achieved with the addition of destabilizing agents such as formamide. Optionally, wash buffers may comprise about 0.1% to about 1% SDS. Duration of hybridization is generally less than about 24 hours, usually about 4 to about 12 hours. The duration of the wash time will be at least a length of time sufficient to reach equilibrium.

[0138] The present disclosure also provides methods of detecting the presence of a human RNF213 predicted loss-of-function polypeptide comprising performing an assay on a biological sample obtained from a subject to determine whether an RNF213 polypeptide in the subject contains one or more variations that causes the polypeptide to have a loss-of-function (partial or complete) or predicted loss-of-function (partial or complete). The RNF213 predicted loss-of-function polypeptide can be any of the RNF213 variant polypeptides described herein. In some embodiments, the methods detect the presence of RNF213 Glu3915Gly, Glu3964Gly, Glu822Gly, Glu350Gly, Glu146Gly, Glu37Gly, Glu28Gly, Val3838Leu, Val3887Leu, Val745Leu, Val273Leu, or Val69Leu. In some embodiments, the methods detect the presence of RNF213 Glu3915Gly or Val3838Leu.

[0139] In some embodiments, the methods comprise performing an assay on a sample obtained from a subject to determine whether an RNF213 polypeptide in the sample comprises a glycine at a position corresponding to: position 3,915 according to SEQ ID NO:50, position 3,964 according to SEQ ID NO:51, position 822 according to SEQ ID NO:52, position 350 according to SEQ ID NO:53, position 146 according to SEQ ID NO:54, position 37 according to SEQ ID NO:55, or position 28 according to SEQ ID NO:56. In some embodiments, the methods comprise performing an assay on a sample obtained from a subject to determine whether an RNF213 polypeptide in the sample comprises a leucine at a position corresponding to: position 3,838 according to SEQ ID NO:57, position 3,887 according to SEQ ID NO:58, position 745 according to SEQ ID NO:59, position 273 according to SEQ ID NO:60, or position 69 according to SEQ ID NO:61.

[0140] In some embodiments, the detecting step comprises sequencing at least a portion of the polypeptide that comprises a position corresponding to: position 3,915 according to SEQ ID NO:50 or SEQ ID NO:43, position 3,964 according to SEQ ID NO:51 or SEQ ID NO:44, position 822 according to SEQ ID NO:52 or SEQ ID NO:45, position 350 according to SEQ ID NO:53 or SEQ ID NO:46, position 146 according to SEQ ID NO:54 or SEQ ID NO:47, position 37 according to SEQ ID NO:55 or SEQ ID NO:48, or position 28 according to SEQ ID NO:56 or SEQ ID NO:49. In some embodiments, the detecting step comprises sequencing at least a portion of the polypeptide that comprises a position corresponding to: position 3,838 according to SEQ ID NO:57 or SEQ ID NO:43, position 3,887 according to SEQ ID NO:58 or SEQ ID NO:44, position 745 according to SEQ ID NO:59 or SEQ ID NO:45, position 273 according to SEQ ID NO:60 or SEQ ID NO:46, or position 69 according to SEQ ID NO:61 or SEQ ID NO:47.

[0141] In some embodiments, the detecting step comprises an immunoassay for detecting the presence of a polypeptide that comprises a position corresponding to: position 3,915 according to SEQ ID NO:50 or SEQ ID NO:43, position 3,964 according to SEQ ID NO:51 or SEQ ID NO:44, position 822 according to SEQ ID NO:52 or SEQ ID NO:45, position 350 according to SEQ ID NO:53 or SEQ ID NO:46, position 146 according to SEQ ID NO:54 or SEQ ID NO:47, position 37 according to SEQ ID NO:55 or SEQ ID NO:48, or position 28 according to SEQ ID NO:56 or SEQ ID NO:49. In some embodiments, the detecting step comprises an immunoassay for detecting the presence of a polypeptide that comprises a position corresponding to: position 3,838 according to SEQ ID NO:57 or SEQ ID NO:43, position 3,887 according to SEQ ID NO:58 or SEQ ID NO:44, position 745 according to SEQ ID NO:59 or SEQ ID NO:45, position 273 according to SEQ ID NO:60 or SEQ ID NO:46, or position 69 according to SEQ ID NO:61 or SEQ ID NO:47.

[0142] In some embodiments, when the subject does not have an RNF213 predicted loss-of-function polypeptide, the subject has an increased risk for developing a liver disease. In some embodiments, when the subject has an RNF213 predicted loss-of-function polypeptide, the subject has a decreased risk for developing a liver disease.

[0143] The present disclosure also provides isolated nucleic acid molecules that hybridize to RNF213 variant genomic nucleic acid molecules, RNF213 variant mRNA molecules, and/or RNF213 variant cDNA molecules (such as any of the genomic variant nucleic acid molecules, mRNA variant molecules, and cDNA variant molecules disclosed herein). In some embodiments, the isolated nucleic acid molecules hybridize to a portion of the RNF213 nucleic acid molecule that includes a position corresponding to: position 102,917 according to SEQ ID NO:2, position 11,887 according to SEQ ID NO:12, position 12,036 according to SEQ ID NO:13, position 2,685 according to SEQ ID NO:14, position 1,050 according to SEQ ID NO:15, position 438 according to SEQ ID NO:16, position 112 according to SEQ ID NO:17, position 84 according to SEQ ID NO:18, position 11,887 according to SEQ ID NO:31, position 12,036 according to SEQ ID NO:32, position 2,685 according to SEQ ID NO:33, position 1,050 according to SEQ ID NO:34, position 438 according to SEQ ID NO:35, position 112 according to SEQ ID NO:36, or position 84 according to SEQ ID NO:37.

[0144] In some embodiments, the isolated nucleic acid molecules hybridize to a portion of the RNF213 nucleic acid molecule that includes a position corresponding to: position 102,391 according to SEQ ID NO:3, position 11,655 according to SEQ ID NO:19, position 11,804 according to SEQ ID NO:20, position 2,453 according to SEQ ID NO:21, position 818 according to SEQ ID NO:22, or position 206 according to SEQ ID NO:23, position 11,655 according to SEQ ID NO:38, position 11,804 according to SEQ ID NO:39, position 2,453 according to SEQ ID NO:40, position 818 according to SEQ ID NO:41, or position 206 according to SEQ ID NO:42.

[0145] In some embodiments, the isolated nucleic acid molecules hybridize to a portion of the RNF213 nucleic acid molecule that includes a position corresponding to position 103,226 according to SEQ ID NO:4.

[0146] In some embodiments, such isolated nucleic acid molecules comprise or consist of at least about 5, at least about 8, at least about 10, at least about 11, at least about 12, at least about 13, at least about 14, at least about 15, at least about 16, at least about 17, at least about 18, at least about 19, at least about 20, at least about 21, at least about 22, at least about 23, at least about 24, at least about 25, at least about 30, at least about 35, at least about 40, at least about 45, at least about 50, at least about 55, at least about 60, at least about 65, at least about 70, at least about 75, at least about 80, at least about 85, at least about 90, at least about 95, at least about 100, at least about 200, at least about 300, at least about 400, at least about 500, at least about 600, at least about 700, at least about 800, at least about 900, at least about 1000, at least about 2000, at least about 3000, at least about 4000, or at least about 5000 nucleotides. In some embodiments, such isolated nucleic acid molecules comprise or consist of at least about 5, at least about 8, at least about 10, at least about 11, at least about 12, at least about 13, at least about 14, at least about 15, at least about 16, at least about 17, at least about 18, at least about 19, at least about 20, at least about 21, at least about 22, at least about 23, at least about 24, or at least about 25 nucleotides. In some embodiments, the isolated nucleic acid molecules comprise or consist of at least about 18 nucleotides. In some embodiments, the isolated nucleic acid molecules comprise or consists of at least about 15 nucleotides. In some embodiments, the isolated nucleic acid molecules consist of or comprise from about 10 to about 35, from about 10 to about 30, from about 10 to about 25, from about 12 to about 30, from about 12 to about 28, from about 12 to about 24, from about 15 to about 30, from about 15 to about 25, from about 18 to about 30, from about 18 to about 25, from about 18 to about 24, or from about 18 to about 22 nucleotides. In some embodiments, the isolated nucleic acid molecules consist of or comprise from about 18 to about 30 nucleotides. In some embodiments, the isolated nucleic acid molecules comprise or consist of at least about 15 nucleotides to at least about 35 nucleotides.

[0147] In some embodiments, such isolated nucleic acid molecules hybridize to RNF213 variant nucleic acid molecules (such as genomic nucleic acid molecules, mRNA molecules, and/or cDNA molecules) under stringent conditions. Such nucleic acid molecules can be used, for example, as probes, primers, alteration-specific probes, or alteration-specific primers as described or exemplified herein, and include, without limitation primers, probes, antisense RNAs, shRNAs, and siRNAs, each of which is described in more detail elsewhere herein, and can be used in any of the methods described herein.

[0148] In some embodiments, the isolated nucleic acid molecules hybridize to at least about 15 contiguous nucleotides of a nucleic acid molecule that is at least about 70%, at least about 75%, at least about 80%, at least about 85%, at least about 90%, at least about 95%, at least about 96%, at least about 97%, at least about 98%, at least about 99%, or 100% identical to RNF213 variant genomic nucleic acid molecules, RNF213 variant mRNA molecules, and/or RNF213 variant cDNA molecules. In some embodiments, the isolated nucleic acid molecules consist of or comprise from about 15 to about 100 nucleotides, or from about 15 to about 35 nucleotides. In some embodiments, the isolated nucleic acid molecules consist of or comprise from about 15 to about 100 nucleotides. In some embodiments, the isolated nucleic acid molecules consist of or comprise from about 15 to about 35 nucleotides.

[0149] In some embodiments, the isolated alteration-specific probes or alteration-specific primers comprise at least about 15 nucleotides, wherein the alteration-specific probe or alteration-specific primer comprises a nucleotide sequence which is complementary to a portion of a nucleotide sequence encoding a human RNF213 polypeptide, wherein the portion comprises a position corresponding to: position 102,917 according to SEQ ID NO:2, or the complement thereof; position 11,887 according to SEQ ID NO:12, or the complement thereof; position 12,036 according to SEQ ID NO:13, or the complement thereof; position 2,685 according to SEQ ID NO:14, or the complement thereof; position 1,050 according to SEQ ID NO:15, or the complement thereof; position 438 according to SEQ ID NO:16, or the complement thereof; position 112 according to SEQ ID NO:17, or the complement thereof; position 84 according to SEQ ID NO:18, or the complement thereof; position 11,887 according to SEQ ID NO:31, or the complement thereof; position 12,036 according to SEQ ID NO:32, or the complement thereof; position 2,685 according to SEQ ID NO:33, or the complement thereof; position 1,050 according to SEQ ID NO:34, or the complement thereof; position 438 according to SEQ ID NO:35, or the complement thereof; position 112 according to SEQ ID NO:36, or the complement thereof; or position 84 according to SEQ ID NO:37, or the complement thereof. In some embodiments, the alteration-specific probe or alteration-specific primer comprises a nucleotide sequence which is complementary to a portion of a nucleotide sequence comprising positions corresponding to: positions 102,916-102,918 according to SEQ ID NO:2, or the complement thereof; positions 11,886-11,888 according to SEQ ID NO:12, or the complement thereof; positions 12,035-12,037 according to SEQ ID NO:13, or the complement thereof; positions 2,684-2,686 according to SEQ ID NO:14, or the complement thereof; positions 1,049-1,051 according to SEQ ID NO:15, or the complement thereof; positions 437-439 according to SEQ ID NO:16, or the complement thereof; positions 111-113 according to SEQ ID NO:17, or the complement thereof; positions 83-85 according to SEQ ID NO:18, or the complement thereof; positions 11,886-11,888 according to SEQ ID NO:31, or the complement thereof; positions 12,035-12,037 according to SEQ ID NO:32, or the complement thereof; positions 2,684-2,686 according to SEQ ID NO:33, or the complement thereof; positions 1,049-1,051 according to SEQ ID NO:34, or the complement thereof; positions 437-439 according to SEQ ID NO:35, or the complement thereof; or positions 111-113 according to SEQ ID NO:36, or the complement thereof; or positions 83-85 according to SEQ ID NO:37, the complement thereof.

[0150] In some embodiments, the isolated alteration-specific probes or alteration-specific primers comprise at least about 15 nucleotides, wherein the alteration-specific probe or alteration-specific primer comprises a nucleotide sequence which is complementary to a portion of a nucleotide sequence encoding a human RNF213 polypeptide, wherein the portion comprises a position corresponding to: position 102,391 according to SEQ ID NO:3, or the complement thereof; position 11,655 according to SEQ ID NO:19, or the complement thereof; position 11,804 according to SEQ ID NO:20, or the complement thereof; position 2,453 according to SEQ ID NO:21, or the complement thereof; position 818 according to SEQ ID NO:22, or the complement thereof; position 206 according to SEQ ID NO:23, or the complement thereof; position 11,655 according to SEQ ID NO:38, or the complement thereof; position 11,804 according to SEQ ID NO:39, or the complement thereof; position 2,453 according to SEQ ID NO:40, or the complement thereof; position 818 according to SEQ ID NO:41, or the complement thereof; or position 206 according to SEQ ID NO:42, or the complement thereof. In some embodiments, the alteration-specific probe or alteration-specific primer comprises a nucleotide sequence which is complementary to a portion of a nucleotide sequence comprising positions corresponding to: positions 102,391-102,393 according to SEQ ID NO:3, or the complement thereof; positions 11,655-11,657 according to SEQ ID NO:19, or the complement thereof; positions 11,804-11,806 according to SEQ ID NO:20, or the complement thereof; positions 2,453-2,455 according to SEQ ID NO:21, or the complement thereof; positions 818-820 according to SEQ ID NO:22, or the complement thereof; positions 206-208 according to SEQ ID NO:23, or the complement thereof; positions 11,655-11,657 according to SEQ ID NO:38, or the complement thereof; positions 11,804-11,806 according to SEQ ID NO:39, or the complement thereof; positions 2,453-2,455 according to SEQ ID NO:40, or the complement thereof; positions 818-820 according to SEQ ID NO:41, or the complement thereof; or positions 206-208 according to SEQ ID NO:42, or the complement thereof.

[0151] In some embodiments, the isolated alteration-specific probes or alteration-specific primers comprise at least about 15 nucleotides, wherein the alteration-specific probe or alteration-specific primer comprises a nucleotide sequence which is complementary to a portion of a nucleotide sequence encoding a human RNF213 polypeptide, wherein the portion comprises a position corresponding to position 103,226 according to SEQ ID NO:4, or the complement thereof.

[0152] In some embodiments, the alteration-specific probes and alteration-specific primers comprise DNA. In some embodiments, the alteration-specific probes and alteration-specific primers comprise RNA.

[0153] In some embodiments, the probes and primers described herein (including alteration-specific probes and alteration-specific primers) have a nucleotide sequence that specifically hybridizes to any of the nucleic acid molecules disclosed herein, or the complement thereof. In some embodiments, the probes and primers specifically hybridize to any of the nucleic acid molecules disclosed herein under stringent conditions.

[0154] In some embodiments, the primers, including alteration-specific primers, can be used in second generation sequencing or high throughput sequencing. In some instances, the primers, including alteration-specific primers, can be modified. In particular, the primers can comprise various modifications that are used at different steps of, for example, Massive Parallel Signature Sequencing (MPSS), Polony sequencing, and 454 Pyrosequencing. Modified primers can be used at several steps of the process, including biotinylated primers in the cloning step and fluorescently labeled primers used at the bead loading step and detection step. Polony sequencing is generally performed using a paired-end tags library wherein each molecule of DNA template is about 135 bp in length. Biotinylated primers are used at the bead loading step and emulsion PCR. Fluorescently labeled degenerate nonamer oligonucleotides are used at the detection step. An adaptor can contain a 5′-biotin tag for immobilization of the DNA library onto streptavidin-coated beads.

[0155] The probes and primers described herein can be used to detect a nucleotide variation within any of the RNF213 variant genomic nucleic acid molecules, RNF213 variant mRNA molecules, and/or RNF213 variant cDNA molecules disclosed herein. The primers described herein can be used to amplify RNF213 variant genomic nucleic acid molecules, RNF213 variant mRNA molecules, or RNF213 variant cDNA molecules, or a fragment thereof.

[0156] The present disclosure also provides pairs of primers comprising any of the primers described above. For example, if one of the primers' 3′-ends hybridizes to an adenine at a position corresponding to position 102,917 according to SEQ ID NO:1 (rather than guanine) in a particular RNF213 nucleic acid molecule, then the presence of the amplified fragment would indicate the presence of an RNF213 reference genomic nucleic acid molecule. Conversely, if one of the primers' 3′-ends hybridizes to a guanine at a position corresponding to position 102,917 according to SEQ ID NO:2 (rather than adenine) in a particular RNF213 nucleic acid molecule, then the presence of the amplified fragment would indicate the presence of the RNF213 variant genomic nucleic acid molecule. In some embodiments, the nucleotide of the primer complementary to the guanine at a position corresponding to position 102,917 according to SEQ ID NO:2 can be at the 3′ end of the primer.

[0157] If one of the primers' 3′-ends hybridizes to an adenine at a position corresponding to position 11,887 according to SEQ ID NO:5 (rather than guanine at position 11,887) in a particular RNF213 nucleic acid molecule, then the presence of the amplified fragment would indicate the presence of an RNF213 reference mRNA molecule. Conversely, if one of the primers' 3′-ends hybridizes to a guanine at a position corresponding to position 11,887 according to SEQ ID NO:12 (rather than adenine) in a particular RNF213 mRNA molecule, then the presence of the amplified fragment would indicate the presence of the RNF213 variant mRNA molecule. In some embodiments, the nucleotide of the primer complementary to the guanine at a position corresponding to position 11,887 according to SEQ ID NO:12 can be at the 3′ end of the primer.

[0158] If one of the primers' 3′-ends hybridizes to an adenine at a position corresponding to position 12,036 according to SEQ ID NO:6 (rather than guanine at position 12,036) in a particular RNF213 nucleic acid molecule, then the presence of the amplified fragment would indicate the presence of an RNF213 reference mRNA molecule. Conversely, if one of the primers' 3′-ends hybridizes to a guanine at a position corresponding to position 12,036 according to SEQ ID NO:13 (rather than adenine) in a particular RNF213 mRNA molecule, then the presence of the amplified fragment would indicate the presence of the RNF213 variant mRNA molecule. In some embodiments, the nucleotide of the primer complementary to the guanine at a position corresponding to position 12,036 according to SEQ ID NO:13 can be at the 3′ end of the primer.

[0159] If one of the primers' 3′-ends hybridizes to an adenine at a position corresponding to position 2,685 according to SEQ ID NO:7 (rather than guanine at position 2,685) in a particular RNF213 nucleic acid molecule, then the presence of the amplified fragment would indicate the presence of an RNF213 reference mRNA molecule. Conversely, if one of the primers' 3′-ends hybridizes to a guanine at a position corresponding to position 2,685 according to SEQ ID NO:14 (rather than adenine) in a particular RNF213 mRNA molecule, then the presence of the amplified fragment would indicate the presence of the RNF213 variant mRNA molecule. In some embodiments, the nucleotide of the primer complementary to the guanine at a position corresponding to position 2,685 according to SEQ ID NO:14 can be at the 3′ end of the primer.

[0160] If one of the primers' 3′-ends hybridizes to an adenine at a position corresponding to position 1,050 according to SEQ ID NO:8 (rather than guanine at position 1,050) in a particular RNF213 nucleic acid molecule, then the presence of the amplified fragment would indicate the presence of an RNF213 reference mRNA molecule. Conversely, if one of the primers' 3′-ends hybridizes to a guanine at a position corresponding to position 1,050 according to SEQ ID NO:15 (rather than adenine) in a particular RNF213 mRNA molecule, then the presence of the amplified fragment would indicate the presence of the RNF213 variant mRNA molecule. In some embodiments, the nucleotide of the primer complementary to the guanine at a position corresponding to position 1,050 according to SEQ ID NO:15 can be at the 3′ end of the primer.

[0161] If one of the primers' 3′-ends hybridizes to an adenine at a position corresponding to position 438 according to SEQ ID NO:9 (rather than guanine at position 438) in a particular RNF213 nucleic acid molecule, then the presence of the amplified fragment would indicate the presence of an RNF213 reference mRNA molecule. Conversely, if one of the primers' 3′-ends hybridizes to a guanine at a position corresponding to position 438 according to SEQ ID NO:16 (rather than adenine) in a particular RNF213 mRNA molecule, then the presence of the amplified fragment would indicate the presence of the RNF213 variant mRNA molecule. In some embodiments, the nucleotide of the primer complementary to the guanine at a position corresponding to position 438 according to SEQ ID NO:16 can be at the 3′ end of the primer.

[0162] If one of the primers' 3′-ends hybridizes to an adenine at a position corresponding to position 112 according to SEQ ID NO:10 (rather than guanine at position 112) in a particular RNF213 nucleic acid molecule, then the presence of the amplified fragment would indicate the presence of an RNF213 reference mRNA molecule. Conversely, if one of the primers' 3′-ends hybridizes to a guanine at a position corresponding to position 112 according to SEQ ID NO:17 (rather than adenine) in a particular RNF213 mRNA molecule, then the presence of the amplified fragment would indicate the presence of the RNF213 variant mRNA molecule. In some embodiments, the nucleotide of the primer complementary to the guanine at a position corresponding to position 112 according to SEQ ID NO:17 can be at the 3′ end of the primer.

[0163] If one of the primers' 3′-ends hybridizes to an adenine at a position corresponding to position 84 according to SEQ ID NO:11 (rather than guanine at position 84) in a particular RNF213 nucleic acid molecule, then the presence of the amplified fragment would indicate the presence of an RNF213 reference mRNA molecule. Conversely, if one of the primers' 3′-ends hybridizes to a guanine at a position corresponding to position 84 according to SEQ ID NO:18 (rather than adenine) in a particular RNF213 mRNA molecule, then the presence of the amplified fragment would indicate the presence of the RNF213 variant mRNA molecule. In some embodiments, the nucleotide of the primer complementary to the guanine at a position corresponding to position 84 according to SEQ ID NO:18 can be at the 3′ end of the primer.

[0164] If one of the primers' 3′-ends hybridizes to an adenine at a position corresponding to position 11,887 according to SEQ ID NO:24 (rather than guanine at position 11,887) in a particular RNF213 nucleic acid molecule, then the presence of the amplified fragment would indicate the presence of an RNF213 reference CDNA molecule. Conversely, if one of the primers' 3′-ends hybridizes to a guanine at a position corresponding to position 11,887 according to SEQ ID NO:31 (rather than adenine) in a particular RNF213 CDNA molecule, then the presence of the amplified fragment would indicate the presence of the RNF213 variant CDNA molecule. In some embodiments, the nucleotide of the primer complementary to the guanine at a position corresponding to position 11,887 according to SEQ ID NO:31 can be at the 3′ end of the primer.

[0165] If one of the primers' 3′-ends hybridizes to an adenine at a position corresponding to position 12,036 according to SEQ ID NO:25 (rather than guanine at position 12,036) in a particular RNF213 nucleic acid molecule, then the presence of the amplified fragment would indicate the presence of an RNF213 reference CDNA molecule. Conversely, if one of the primers' 3′-ends hybridizes to a guanine at a position corresponding to position 12,036 according to SEQ ID NO:32 (rather than adenine) in a particular RNF213 CDNA molecule, then the presence of the amplified fragment would indicate the presence of the RNF213 variant CDNA molecule. In some embodiments, the nucleotide of the primer complementary to the guanine at a position corresponding to position 12,036 according to SEQ ID NO:32 can be at the 3′ end of the primer.

[0166] If one of the primers' 3′-ends hybridizes to an adenine at a position corresponding to position 2,685 according to SEQ ID NO:26 (rather than guanine at position 2,685) in a particular RNF213 nucleic acid molecule, then the presence of the amplified fragment would indicate the presence of an RNF213 reference CDNA molecule. Conversely, if one of the primers' 3′-ends hybridizes to a guanine at a position corresponding to position 2,685 according to SEQ ID NO:33 (rather than adenine) in a particular RNF213 CDNA molecule, then the presence of the amplified fragment would indicate the presence of the RNF213 variant CDNA molecule. In some embodiments, the nucleotide of the primer complementary to the guanine at a position corresponding to position 2,685 according to SEQ ID NO:33 can be at the 3′ end of the primer.

[0167] If one of the primers' 3′-ends hybridizes to an adenine at a position corresponding to position 1,050 according to SEQ ID NO:27 (rather than guanine at position 1,050) in a particular RNF213 nucleic acid molecule, then the presence of the amplified fragment would indicate the presence of an RNF213 reference CDNA molecule. Conversely, if one of the primers' 3′-ends hybridizes to a guanine at a position corresponding to position 1,050 according to SEQ ID NO:34 (rather than adenine) in a particular RNF213 CDNA molecule, then the presence of the amplified fragment would indicate the presence of the RNF213 variant CDNA molecule. In some embodiments, the nucleotide of the primer complementary to the guanine at a position corresponding to position 1,050 according to SEQ ID NO:34 can be at the 3′ end of the primer.

[0168] If one of the primers' 3′-ends hybridizes to an adenine at a position corresponding to position 438 according to CDNA SEQ ID NO:28 (rather than guanine at position 438) in a particular RNF213 nucleic acid molecule, then the presence of the amplified fragment would indicate the presence of an RNF213 reference CDNA molecule. Conversely, if one of the primers' 3′-ends hybridizes to a guanine at a position corresponding to position 438 according to SEQ ID NO:35 (rather than adenine) in a particular RNF213 CDNA molecule, then the presence of the amplified fragment would indicate the presence of the RNF213 variant CDNA molecule. In some embodiments, the nucleotide of the primer complementary to the guanine at a position corresponding to position 438 according to SEQ ID NO:35 can be at the 3′ end of the primer.

[0169] If one of the primers' 3′-ends hybridizes to an adenine at a position corresponding to position 112 according to SEQ ID NO:29 (rather than guanine at position 112) in a particular RNF213 nucleic acid molecule, then the presence of the amplified fragment would indicate the presence of an RNF213 reference CDNA molecule. Conversely, if one of the primers' 3′-ends hybridizes to a guanine at a position corresponding to position 112 according to SEQ ID NO:36 (rather than adenine) in a particular RNF213 CDNA molecule, then the presence of the amplified fragment would indicate the presence of the RNF213 variant CDNA molecule. In some embodiments, the nucleotide of the primer complementary to the guanine at a position corresponding to position 112 according to SEQ ID NO:36 can be at the 3′ end of the primer.

[0170] If one of the primers' 3′-ends hybridizes to an adenine at a position corresponding to position 84 according to SEQ ID NO:30 (rather than guanine at position 84) in a particular RNF213 nucleic acid molecule, then the presence of the amplified fragment would indicate the presence of an RNF213 reference CDNA molecule. Conversely, if one of the primers' 3′-ends hybridizes to a guanine at a position corresponding to position 84 according to SEQ ID NO:37 (rather than adenine) in a particular RNF213 CDNA molecule, then the presence of the amplified fragment would indicate the presence of the RNF213 variant CDNA molecule. In some embodiments, the nucleotide of the primer complementary to the guanine at a position corresponding to position 84 according to SEQ ID NO:37 can be at the 3′ end of the primer.

[0171] The present disclosure also provides pairs of primers comprising any of the primers described above. For example, if one of the primers' 3′-ends hybridizes to a guanine at a position corresponding to position 102,391 according to SEQ ID NO:1 (rather than cytosine) in a particular RNF213 nucleic acid molecule, then the presence of the amplified fragment would indicate the presence of an RNF213 reference genomic nucleic acid molecule. Conversely, if one of the primers' 3′-ends hybridizes to a cytosine at a position corresponding to position 102,391 according to SEQ ID NO:3 (rather than guanine) in a particular RNF213 nucleic acid molecule, then the presence of the amplified fragment would indicate the presence of the RNF213 variant genomic nucleic acid molecule. In some embodiments, the nucleotide of the primer complementary to the cytosine at a position corresponding to position 102,391 according to SEQ ID NO:3 can be at the 3′ end of the primer.

[0172] If one of the primers' 3′-ends hybridizes to a guanine at a position corresponding to position 11,655 according to SEQ ID NO:5 (rather than cytosine at position 11,655) in a particular RNF213 nucleic acid molecule, then the presence of the amplified fragment would indicate the presence of an RNF213 reference mRNA molecule. Conversely, if one of the primers' 3′-ends hybridizes to a cytosine at a position corresponding to position 11,655 according to SEQ ID NO:19 (rather than guanine) in a particular RNF213 mRNA molecule, then the presence of the amplified fragment would indicate the presence of the RNF213 variant mRNA molecule. In some embodiments, the nucleotide of the primer complementary to the cytosine at a position corresponding to position 11,655 according to SEQ ID NO:19 can be at the 3′ end of the primer.

[0173] If one of the primers' 3′-ends hybridizes to a guanine at a position corresponding to position 11,804 according to SEQ ID NO:6 (rather than cytosine at position 11,804) in a particular RNF213 nucleic acid molecule, then the presence of the amplified fragment would indicate the presence of an RNF213 reference mRNA molecule. Conversely, if one of the primers' 3′-ends hybridizes to a cytosine at a position corresponding to position 11,804 according to SEQ ID NO:20 (rather than guanine) in a particular RNF213 mRNA molecule, then the presence of the amplified fragment would indicate the presence of the RNF213 variant mRNA molecule. In some embodiments, the nucleotide of the primer complementary to the cytosine at a position corresponding to position 11,804 according to SEQ ID NO:20 can be at the 3′ end of the primer.

[0174] If one of the primers' 3′-ends hybridizes to a guanine at a position corresponding to position 2,453 according to SEQ ID NO:7 (rather than cytosine at position 2,453) in a particular RNF213 nucleic acid molecule, then the presence of the amplified fragment would indicate the presence of an RNF213 reference mRNA molecule. Conversely, if one of the primers' 3′-ends hybridizes to a cytosine at a position corresponding to position 2,453 according to SEQ ID NO:21 (rather than guanine) in a particular RNF213 mRNA molecule, then the presence of the amplified fragment would indicate the presence of the RNF213 variant mRNA molecule. In some embodiments, the nucleotide of the primer complementary to the cytosine at a position corresponding to position 2,453 according to SEQ ID NO:21 can be at the 3′ end of the primer.

[0175] If one of the primers' 3′-ends hybridizes to a guanine at a position corresponding to position 818 according to SEQ ID NO:8 (rather than cytosine at position 818) in a particular RNF213 nucleic acid molecule, then the presence of the amplified fragment would indicate the presence of an RNF213 reference mRNA molecule. Conversely, if one of the primers' 3′-ends hybridizes to a cytosine at a position corresponding to position 818 according to SEQ ID NO:22 (rather than guanine) in a particular RNF213 mRNA molecule, then the presence of the amplified fragment would indicate the presence of the RNF213 variant mRNA molecule. In some embodiments, the nucleotide of the primer complementary to the cytosine at a position corresponding to position 818 according to SEQ ID NO:22 can be at the 3′ end of the primer.

[0176] If one of the primers' 3′-ends hybridizes to a guanine at a position corresponding to position 206 according to SEQ ID NO:9 (rather than cytosine at position 206) in a particular RNF213 nucleic acid molecule, then the presence of the amplified fragment would indicate the presence of an RNF213 reference mRNA molecule. Conversely, if one of the primers' 3′-ends hybridizes to a cytosine at a position corresponding to position 206 according to SEQ ID NO:23 (rather than guanine) in a particular RNF213 mRNA molecule, then the presence of the amplified fragment would indicate the presence of the RNF213 variant mRNA molecule. In some embodiments, the nucleotide of the primer complementary to the cytosine at a position corresponding to position 206 according to SEQ ID NO:23 can be at the 3′ end of the primer.

[0177] If one of the primers' 3′-ends hybridizes to an guanine at a position corresponding to position 11,655 according to SEQ ID NO:24 (rather than cytosine at position 11,655) in a particular RNF213 nucleic acid molecule, then the presence of the amplified fragment would indicate the presence of an RNF213 reference CDNA molecule. Conversely, if one of the primers' 3′-ends hybridizes to a cytosine at a position corresponding to position 11,655 according to SEQ ID NO:38 (rather than guanine) in a particular RNF213 CDNA molecule, then the presence of the amplified fragment would indicate the presence of the RNF213 variant CDNA molecule. In some embodiments, the nucleotide of the primer complementary to the cytosine at a position corresponding to position 11,655 according to SEQ ID NO:38 can be at the 3′ end of the primer.

[0178] If one of the primers' 3′-ends hybridizes to an guanine at a position corresponding to position 11,804 according to SEQ ID NO:25 (rather than cytosine at position 11,804) in a particular RNF213 nucleic acid molecule, then the presence of the amplified fragment would indicate the presence of an RNF213 reference CDNA molecule. Conversely, if one of the primers' 3′-ends hybridizes to a cytosine at a position corresponding to position 11,804 according to SEQ ID NO:39 (rather than guanine) in a particular RNF213 CDNA molecule, then the presence of the amplified fragment would indicate the presence of the RNF213 variant CDNA molecule. In some embodiments, the nucleotide of the primer complementary to the cytosine at a position corresponding to position 11,804 according to SEQ ID NO:39 can be at the 3′ end of the primer.

[0179] If one of the primers' 3′-ends hybridizes to an guanine at a position corresponding to position 2,453 according to SEQ ID NO:26 (rather than cytosine at position 2,453) in a particular RNF213 nucleic acid molecule, then the presence of the amplified fragment would indicate the presence of an RNF213 reference CDNA molecule. Conversely, if one of the primers' 3′-ends hybridizes to a cytosine at a position corresponding to position 2,453 according to SEQ ID NO:40 (rather than guanine) in a particular RNF213 CDNA molecule, then the presence of the amplified fragment would indicate the presence of the RNF213 variant CDNA molecule. In some embodiments, the nucleotide of the primer complementary to the cytosine at a position corresponding to position 2,453 according to SEQ ID NO:40 can be at the 3′ end of the primer.

[0180] If one of the primers' 3′-ends hybridizes to an guanine at a position corresponding to position 818 according to SEQ ID NO:27 (rather than cytosine at position 818) in a particular RNF213 nucleic acid molecule, then the presence of the amplified fragment would indicate the presence of an RNF213 reference CDNA molecule. Conversely, if one of the primers' 3′-ends hybridizes to a cytosine at a position corresponding to position 818 according to SEQ ID NO:41 (rather than guanine) in a particular RNF213 CDNA molecule, then the presence of the amplified fragment would indicate the presence of the RNF213 variant CDNA molecule. In some embodiments, the nucleotide of the primer complementary to the cytosine at a position corresponding to position 818 according to SEQ ID NO:41 can be at the 3′ end of the primer.

[0181] If one of the primers' 3′-ends hybridizes to an guanine at a position corresponding to position 206 according to SEQ ID NO:28 (rather than cytosine at position 206) in a particular RNF213 nucleic acid molecule, then the presence of the amplified fragment would indicate the presence of an RNF213 reference CDNA molecule. Conversely, if one of the primers' 3′-ends hybridizes to a cytosine at a position corresponding to position 206 according to SEQ ID NO:42 (rather than guanine) in a particular RNF213 CDNA molecule, then the presence of the amplified fragment would indicate the presence of the RNF213 variant CDNA molecule. In some embodiments, the nucleotide of the primer complementary to the cytosine at a position corresponding to position 206 according to SEQ ID NO:42 can be at the 3′ end of the primer.

[0182] The present disclosure also provides pairs of primers comprising any of the primers described above. For example, if one of the primers' 3′-ends hybridizes to an adenine at a position corresponding to position 103,226 according to SEQ ID NO:1 (rather than thymine) in a particular RNF213 nucleic acid molecule, then the presence of the amplified fragment would indicate the presence of an RNF213 reference genomic nucleic acid molecule. Conversely, if one of the primers' 3′-ends hybridizes to a thymine at a position corresponding to position 103,226 according to SEQ ID NO:4 (rather than adenine) in a particular RNF213 nucleic acid molecule, then the presence of the amplified fragment would indicate the presence of the RNF213 variant genomic nucleic acid molecule. In some embodiments, the nucleotide of the primer complementary to the thymine at a position corresponding to position 103,226 according to SEQ ID NO:4 can be at the 3′ end of the primer.

[0183] In the context of the disclosure “specifically hybridizes” means that the probe or primer (such as, for example, the alteration-specific probe or alteration-specific primer) does not hybridize to a nucleic acid sequence encoding an RNF213 reference genomic nucleic acid molecule, an RNF213 reference mRNA molecule, and/or an RNF213 reference cDNA molecule.

[0184] In some embodiments, the probes (such as, for example, an alteration-specific probe) comprise a label. In some embodiments, the label is a fluorescent label, a radiolabel, or biotin.

[0185] The present disclosure also provides supports comprising a substrate to which any one or more of the probes disclosed herein is attached. Solid supports are solid-state substrates or supports with which molecules, such as any of the probes disclosed herein, can be associated. A form of solid support is an array. Another form of solid support is an array detector. An array detector is a solid support to which multiple different probes have been coupled in an array, grid, or other organized pattern. A form for a solid-state substrate is a microtiter dish, such as a standard 96-well type. In some embodiments, a multiwell glass slide can be employed that normally contains one array per well.

[0186] The nucleotide sequence of an RNF213 reference genomic nucleic acid molecule is set forth in SEQ ID NO:1. Referring to SEQ ID NO:1, position 102,917 is an adenine. Referring to SEQ ID NO:1, position 102,391 is a guanine. Referring to SEQ ID NO:1, position 103,226 is a cytosine.

[0187] A variant genomic nucleic acid molecule of RNF213 exists, wherein the adenine, at position 102,917 is replaced with guanine. The nucleotide sequence of this RNF213 variant genomic nucleic acid molecule is set forth in SEQ ID NO:2.

[0188] Another variant genomic nucleic acid molecule of RNF213 exists, wherein the guanine at position 102,391 is replaced with cytosine. The nucleotide sequence of this RNF213 variant genomic nucleic acid molecule is set forth in SEQ ID NO:3.

[0189] Another variant genomic nucleic acid molecule of RNF213 exists, wherein the cytosine at position 103,226 is replaced with thymine. The nucleotide sequence of this RNF213 variant genomic nucleic acid molecule is set forth in SEQ ID NO:4.

[0190] The nucleotide sequence of an RNF213 reference mRNA molecule is set forth in SEQ ID NO:5. Referring to SEQ ID NO:5, position 11,887 is an adenine. Referring to SEQ ID NO:5, position 11,655 is a guanine. The nucleotide sequence of another RNF213 reference mRNA molecule is set forth in SEQ ID NO:6. Referring to SEQ ID NO:6, position 12,036 is an adenine. Referring to SEQ ID NO:6, position 11,804 is a guanine. The nucleotide sequence of another RNF213 reference mRNA molecule is set forth in SEQ ID NO:7. Referring to SEQ ID NO:7, position 2,685 is an adenine. Referring to SEQ ID NO:7, position 2,453 is a guanine. The nucleotide sequence of another RNF213 reference mRNA molecule is set forth in SEQ ID NO:8. Referring to SEQ ID NO:8, position 1,050 is an adenine. Referring to SEQ ID NO:8, position 818 is a guanine. The nucleotide sequence of another RNF213 reference mRNA molecule is set forth in SEQ ID NO:9. Referring to SEQ ID NO:9, position 438 is an adenine. Referring to SEQ ID NO:9, position 206 is a guanine. The nucleotide sequence of another RNF213 reference mRNA molecule is set forth in SEQ ID NO:10. Referring to SEQ ID NO:10, position 112 is an adenine. The nucleotide sequence of another RNF213 reference mRNA molecule is set forth in SEQ ID NO:11. Referring to SEQ ID NO:11, position 84 is an adenine.

[0191] A variant mRNA molecule of RNF213 exists, wherein the adenine at position 11,887 is replaced with guanine. The nucleotide sequence of this RNF213 variant mRNA molecule is set forth in SEQ ID NO:12.

[0192] Another variant mRNA molecule of RNF213 exists, wherein the adenine at position 12,036 is replaced with guanine. The nucleotide sequence of this RNF213 variant mRNA molecule is set forth in SEQ ID NO:13.

[0193] Another variant mRNA molecule of RNF213 exists, wherein the adenine at position 2,685 is replaced with guanine. The nucleotide sequence of this RNF213 variant mRNA molecule is set forth in SEQ ID NO:14.

[0194] Another variant mRNA molecule of RNF213 exists, wherein the adenine at position 1,050 is replaced with guanine. The nucleotide sequence of this RNF213 variant mRNA molecule is set forth in SEQ ID NO:15.

[0195] Another variant mRNA molecule of RNF213 exists, wherein the adenine at position 438 is replaced with guanine. The nucleotide sequence of this RNF213 variant mRNA molecule is set forth in SEQ ID NO:16.

[0196] Another variant mRNA molecule of RNF213 exists, wherein the adenine at position 112 is replaced with guanine. The nucleotide sequence of this RNF213 variant mRNA molecule is set forth in SEQ ID NO:17.

[0197] Another variant mRNA molecule of RNF213 exists, wherein the adenine at position 84 is replaced with guanine. The nucleotide sequence of this RNF213 variant mRNA molecule is set forth in SEQ ID NO:18.

[0198] A variant mRNA molecule of RNF213 exists, wherein the adenine at position 11,655 is replaced with cytosine. The nucleotide sequence of this RNF213 variant mRNA molecule is set forth in SEQ ID NO:19.

[0199] Another variant mRNA molecule of RNF213 exists, wherein the adenine at position 11,804 is replaced with cytosine. The nucleotide sequence of this RNF213 variant mRNA molecule is set forth in SEQ ID NO:20.

[0200] Another variant mRNA molecule of RNF213 exists, wherein the adenine at position 2,453 is replaced with cytosine. The nucleotide sequence of this RNF213 variant mRNA molecule is set forth in SEQ ID NO:21.

[0201] Another variant mRNA molecule of RNF213 exists, wherein the adenine at position 818 is replaced with cytosine. The nucleotide sequence of this RNF213 variant mRNA molecule is set forth in SEQ ID NO:22.

[0202] Another variant mRNA molecule of RNF213 exists, wherein the adenine at position 206 is replaced with cytosine. The nucleotide sequence of this RNF213 variant mRNA molecule is set forth in SEQ ID NO:23.

[0203] The nucleotide sequence of an RNF213 reference cDNA molecule is set forth in SEQ ID NO:24. Referring to SEQ ID NO:24, position 11,887 is an adenine. Referring to SEQ ID NO:24, position 11,655 is a guanine. The nucleotide sequence of another RNF213 reference cDNA molecule is set forth in SEQ ID NO:25. Referring to SEQ ID NO:25, position 12,036 is an adenine. Referring to SEQ ID NO:25, position 11,804 is a guanine. The nucleotide sequence of another RNF213 reference cDNA molecule is set forth in SEQ ID NO:26. Referring to SEQ ID NO:26, position 2,685 is an adenine. Referring to SEQ ID NO:26, position 2,453 is a guanine. The nucleotide sequence of another RNF213 reference cDNA molecule is set forth in SEQ ID NO:27. Referring to SEQ ID NO:27, position 1,050 is an adenine. Referring to SEQ ID NO:27, position 818 is a guanine. The nucleotide sequence of another RNF213 reference cDNA molecule is set forth in SEQ ID NO:28. Referring to SEQ ID NO:28, position 438 is an adenine. Referring to SEQ ID NO:28, position 206 is a guanine. The nucleotide sequence of another RNF213 reference cDNA molecule is set forth in SEQ ID NO:29. Referring to SEQ ID NO:29, position 112 is an adenine. The nucleotide sequence of another RNF213 reference cDNA molecule is set forth in SEQ ID NO:30. Referring to SEQ ID NO:30, position 84 is an adenine.

[0204] A variant cDNA molecule of RNF213 exists, wherein the adenine at position 11,887 is replaced with guanine. The nucleotide sequence of this RNF213 variant cDNA molecule is set forth in SEQ ID NO:31.

[0205] Another variant cDNA molecule of RNF213 exists, wherein the adenine at position 12,036 is replaced with guanine. The nucleotide sequence of this RNF213 variant cDNA molecule is set forth in SEQ ID NO:32.

[0206] Another variant cDNA molecule of RNF213 exists, wherein the adenine at position 2,685 is replaced with guanine. The nucleotide sequence of this RNF213 variant cDNA molecule is set forth in SEQ ID NO:33.

[0207] Another variant cDNA molecule of RNF213 exists, wherein the adenine at position 1,050 is replaced with guanine. The nucleotide sequence of this RNF213 variant cDNA molecule is set forth in SEQ ID NO:34.

[0208] Another variant cDNA molecule of RNF213 exists, wherein the adenine at position 438 is replaced with guanine. The nucleotide sequence of this RNF213 variant cDNA molecule is set forth in SEQ ID NO:35.

[0209] Another variant cDNA molecule of RNF213 exists, wherein the adenine at position 112 is replaced with guanine. The nucleotide sequence of this RNF213 variant cDNA molecule is set forth in SEQ ID NO:36.

[0210] Another variant cDNA molecule of RNF213 exists, wherein the adenine at position 84 is replaced with guanine. The nucleotide sequence of this RNF213 variant cDNA molecule is set forth in SEQ ID NO:37.

[0211] A variant cDNA molecule of RNF213 exists, wherein the adenine at position 11,655 is replaced with cytosine. The nucleotide sequence of this RNF213 variant cDNA molecule is set forth in SEQ ID NO:38.

[0212] Another variant cDNA molecule of RNF213 exists, wherein the adenine at position 11,804 is replaced with cytosine. The nucleotide sequence of this RNF213 variant cDNA molecule is set forth in SEQ ID NO:39.

[0213] Another variant cDNA molecule of RNF213 exists, wherein the adenine at position 2,453 is replaced with cytosine. The nucleotide sequence of this RNF213 variant cDNA molecule is set forth in SEQ ID NO:40.

[0214] Another variant cDNA molecule of RNF213 exists, wherein the adenine at position 818 is replaced with cytosine. The nucleotide sequence of this RNF213 variant cDNA molecule is set forth in SEQ ID NO:41.

[0215] Another variant cDNA molecule of RNF213 exists, wherein the adenine at position 206 is replaced with cytosine. The nucleotide sequence of this RNF213 variant cDNA molecule is set forth in SEQ ID NO:42.

[0216] The genomic nucleic acid molecules, mRNA molecules, and cDNA molecules can be from any organism. For example, the genomic nucleic acid molecules, mRNA molecules, and cDNA molecules can be human or an ortholog from another organism, such as a non-human mammal, a rodent, a mouse, or a rat. It is understood that gene sequences within a population can vary due to polymorphisms such as single-nucleotide polymorphisms. The examples provided herein are only exemplary sequences. Other sequences are also possible.

[0217] Also provided herein are functional polynucleotides that can interact with the disclosed nucleic acid molecules. Examples of functional polynucleotides include, but are not limited to, antisense molecules, aptamers, ribozymes, triplex forming molecules, and external guide sequences. The functional polynucleotides can act as effectors, inhibitors, modulators, and stimulators of a specific activity possessed by a target molecule, or the functional polynucleotides can possess a de novo activity independent of any other molecules.

[0218] The isolated nucleic acid molecules disclosed herein can comprise RNA, DNA, or both RNA and DNA. The isolated nucleic acid molecules can also be linked or fused to a heterologous nucleic acid sequence, such as in a vector, or a heterologous label. For example, the isolated nucleic acid molecules disclosed herein can be within a vector or as an exogenous donor sequence comprising the isolated nucleic acid molecule and a heterologous nucleic acid sequence. The isolated nucleic acid molecules can also be linked or fused to a heterologous label. The label can be directly detectable (such as, for example, fluorophore) or indirectly detectable (such as, for example, hapten, enzyme, or fluorophore quencher). Such labels can be detectable by spectroscopic, photochemical, biochemical, immunochemical, or chemical means. Such labels include, for example, radiolabels, pigments, dyes, chromogens, spin labels, and fluorescent labels. The label can also be, for example, a chemiluminescent substance; a metal-containing substance; or an enzyme, where there occurs an enzyme-dependent secondary generation of signal. The term “label” can also refer to a “tag” or hapten that can bind selectively to a conjugated molecule such that the conjugated molecule, when added subsequently along with a substrate, is used to generate a detectable signal. For example, biotin can be used as a tag along with an avidin or streptavidin conjugate of horseradish peroxidate (HRP) to bind to the tag, and examined using a calorimetric substrate (such as, for example, tetramethylbenzidine (TMB)) or a fluorogenic substrate to detect the presence of HRP. Exemplary labels that can be used as tags to facilitate purification include, but are not limited to, myc, HA, FLAG or 3×FLAG, 6×his or polyhistidine, glutathione-S-transferase (GST), maltose binding protein, an epitope tag, or the Fc portion of immunoglobulin. Numerous labels include, for example, particles, fluorophores, haptens, enzymes and their calorimetric, fluorogenic and chemiluminescent substrates and other labels.

[0219] The disclosed nucleic acid molecules can comprise, for example, nucleotides or non-natural or modified nucleotides, such as nucleotide analogs or nucleotide substitutes. Such nucleotides include a nucleotide that contains a modified base, sugar, or phosphate group, or that incorporates a non-natural moiety in its structure. Examples of non-natural nucleotides include, but are not limited to, dideoxynucleotides, biotinylated, aminated, deaminated, alkylated, benzylated, and fluorophor-labeled nucleotides.

[0220] The nucleic acid molecules disclosed herein can also comprise one or more nucleotide analogs or substitutions. A nucleotide analog is a nucleotide which contains a modification to either the base, sugar, or phosphate moieties. Modifications to the base moiety include, but are not limited to, natural and synthetic modifications of A, C, G, and T/U, as well as different purine or pyrimidine bases such as, for example, pseudouridine, uracil-5-yl, hypoxanthin-9-yl (I), and 2-aminoadenin-9-yl. Modified bases include, but are not limited to, 5-methylcytosine (5-me-C), 5-hydroxymethyl cytosine, xanthine, hypoxanthine, 2-aminoadenine, 6-methyl and other alkyl derivatives of adenine and guanine, 2-propyl and other alkyl derivatives of adenine and guanine, 2-thiouracil, 2-thiothymine and 2-thiocytosine, 5-halouracil and cytosine, 5-propynyl uracil and cytosine, 6-azo uracil, cytosine and thymine, 5-uracil (pseudouracil), 4-thiouracil, 8-halo, 8-amino, 8-thiol, 8-thioalkyl, 8-hydroxyl and other 8-substituted adenines and guanines, 5-halo (such as, for example, 5-bromo), 5-trifluoromethyl and other 5-substituted uracils and cytosines, 7-methylguanine, 7-methyladenine, 8-azaguanine, 8-azaadenine, 7-deazaguanine, 7-deazaadenine, 3-deazaguanine, and 3-deazaadenine.

[0221] Nucleotide analogs can also include modifications of the sugar moiety. Modifications to the sugar moiety include, but are not limited to, natural modifications of the ribose and deoxy ribose as well as synthetic modifications. Sugar modifications include, but are not limited to, the following modifications at the 2′ position: OH; F; O—, S—, or N-alkyl; O—, S—, or N-alkenyl; O—, S- or N-alkynyl; or O-alkyl-O-alkyl, wherein the alkyl, alkenyl, and alkynyl may be substituted or unsubstituted C₁₋₁₀alkyl or C₂₋₁₀alkenyl, and C₂₋₁₀alkynyl. Exemplary 2′ sugar modifications also include, but are not limited to, —O[(CH₂)ₙO]ₘCH₃, —O(CH 2)ₙOCH 3, —O(CH₂)ₙNH₂, —O(CH₂)ₙCH₃, —O(CH₂)ₙ—ONH₂, and —O(CH₂)ₙON[(CH₂)ₙCH₃)]₂, where n and m are from 1 to about 10. Other modifications at the 2′ position include, but are not limited to, C₁₋₁₀alkyl, substituted lower alkyl, alkaryl, aralkyl, O-alkaryl or O-aralkyl, SH, SCH₃, OCN, Cl, Br, CN, CF₃, OCF₃, SOCH₃, SO₂CH₃, ONO₂, NO₂, N₃, NH₂, heterocycloalkyl, heterocycloalkaryl, aminoalkylamino, polyalkylamino, substituted silyl, an RNA cleaving group, a reporter group, an intercalator, a group for improving the pharmacokinetic properties of an oligonucleotide, or a group for improving the pharmacodynamic properties of an oligonucleotide, and other substituents having similar properties. Similar modifications may also be made at other positions on the sugar, particularly the 3′ position of the sugar on the 3′ terminal nucleotide or in 2′-5′ linked oligonucleotides and the 5′ position of 5′ terminal nucleotide. Modified sugars can also include those that contain modifications at the bridging ring oxygen, such as CH₂ and S. Nucleotide sugar analogs can also have sugar mimetics, such as cyclobutyl moieties in place of the pentofuranosyl sugar.

[0222] Nucleotide analogs can also be modified at the phosphate moiety. Modified phosphate moieties include, but are not limited to, those that can be modified so that the linkage between two nucleotides contains a phosphorothioate, chiral phosphorothioate, phosphorodithioate, phosphotriester, aminoalkylphosphotriester, methyl and other alkyl phosphonates including 3′-alkylene phosphonate and chiral phosphonates, phosphinates, phosphoramidates including 3′-amino phosphoramidate and aminoalkylphosphoramidates, thionophosphoramidates, thionoalkylphosphonates, thionoalkylphosphotriesters, and boranophosphates. These phosphate or modified phosphate linkage between two nucleotides can be through a 3′-5′ linkage or a 2′-5′ linkage, and the linkage can contain inverted polarity such as 3′-5′ to 5′-3′ or 2′-5′ to 5′-2′. Various salts, mixed salts, and free acid forms are also included. Nucleotide substitutes also include peptide nucleic acids (PNAs).

[0223] The present disclosure also provides vectors comprising any one or more of the nucleic acid molecules disclosed herein. In some embodiments, the vectors comprise any one or more of the nucleic acid molecules disclosed herein and a heterologous nucleic acid. The vectors can be viral or nonviral vectors capable of transporting a nucleic acid molecule. In some embodiments, the vector is a plasmid or cosmid (such as, for example, a circular double-stranded DNA into which additional DNA segments can be ligated). In some embodiments, the vector is a viral vector, wherein additional DNA segments can be ligated into the viral genome. Expression vectors include, but are not limited to, plasmids, cosmids, retroviruses, adenoviruses, adeno-associated viruses (AAV), plant viruses such as cauliflower mosaic virus and tobacco mosaic virus, yeast artificial chromosomes (YACs), Epstein-Barr (EBV)-derived episomes, and other expression vectors known in the art.

[0224] Desired regulatory sequences for mammalian host cell expression can include, for example, viral elements that direct high levels of polypeptide expression in mammalian cells, such as promoters and/or enhancers derived from retroviral LTRs, cytomegalovirus (CMV) (such as, for example, CMV promoter/enhancer), Simian Virus 40 (SV40) (such as, for example, SV40 promoter/enhancer), adenovirus, (such as, for example, the adenovirus major late promoter (AdMLP)), polyoma and strong mammalian promoters such as native immunoglobulin and actin promoters. Methods of expressing polypeptides in bacterial cells or fungal cells (such as, for example, yeast cells) are also well known. A promoter can be, for example, a constitutively active promoter, a conditional promoter, an inducible promoter, a temporally restricted promoter (such as, for example, a developmentally regulated promoter), or a spatially restricted promoter (such as, for example, a cell-specific or tissue-specific promoter).

[0225] Percent identity (or percent complementarity) between particular stretches of nucleotide sequences within nucleic acid molecules or amino acid sequences within polypeptides can be determined routinely using BLAST programs (basic local alignment search tools) and PowerBLAST programs (Altschul et al., J. Mol. Biol., 1990, 215, 403-410; Zhang and Madden, Genome Res., 1997, 7, 649-656) or by using the Gap program (Wisconsin Sequence Analysis Package, Version 8 for Unix, Genetics Computer Group, University Research Park, Madison Wis.), using default settings, which uses the algorithm of Smith and Waterman (Adv. Appl. Math., 1981, 2, 482-489). Herein, if reference is made to percent sequence identity, the higher percentages of sequence identity are preferred over the lower ones.

[0226] The present disclosure also provides compositions comprising any one or more of the isolated nucleic acid molecules, genomic nucleic acid molecules, mRNA molecules, and/or cDNA molecules disclosed herein. In some embodiments, the composition is a pharmaceutical composition. In some embodiments, the compositions comprise a carrier and/or excipient. Examples of carriers include, but are not limited to, poly(lactic acid) (PLA) microspheres, poly(D,L-lactic-coglycolic-acid) (PLGA) microspheres, liposomes, micelles, inverse micelles, lipid cochleates, and lipid microtubules. A carrier may comprise a buffered salt solution such as PBS, HBSS, etc.

[0227] As used herein, the phrase “corresponding to” or grammatical variations thereof when used in the context of the numbering of a particular nucleotide or nucleotide sequence or position refers to the numbering of a specified reference sequence when the particular nucleotide or nucleotide sequence is compared to a reference sequence (such as, for example, SEQ ID NO:1, SEQ ID NO:5, or SEQ ID NO:24). In other words, the residue (such as, for example, nucleotide or amino acid) number or residue (such as, for example, nucleotide or amino acid) position of a particular polymer is designated with respect to the reference sequence rather than by the actual numerical position of the residue within the particular nucleotide or nucleotide sequence. For example, a particular nucleotide sequence can be aligned to a reference sequence by introducing gaps to optimize residue matches between the two sequences. In these cases, although the gaps are present, the numbering of the residue in the particular nucleotide or nucleotide sequence is made with respect to the reference sequence to which it has been aligned.

[0228] For example, a nucleic acid molecule comprising a nucleotide sequence encoding a human RNF213 polypeptide, wherein the nucleotide sequence comprises a guanine at a position corresponding to position 102,917 according to SEQ ID NO:2 means that if the nucleotide sequence of the RNF213 genomic nucleic acid molecule is aligned to the sequence of SEQ ID NO:2, the RNF213 sequence has a guanine residue at the position that corresponds to position 102,917 of SEQ ID NO:2. The same applies for mRNA molecules comprising a nucleotide sequence encoding a human RNF213 polypeptide, wherein the nucleotide sequence comprises a guanine at a position corresponding to position 11,887 according to SEQ ID NO:12, and cDNA molecules comprising a nucleotide sequence encoding a human RNF213 polypeptide, wherein the nucleotide sequence comprises a guanine at a position corresponding to position 11,887 according to SEQ ID NO:31. In other words, these phrases refer to a nucleic acid molecule encoding an RNF213 polypeptide, wherein the genomic nucleic acid molecule has a nucleotide sequence that comprises a guanine residue that is homologous to the guanine residue at position 102,917 of SEQ ID NO:2 (or wherein the mRNA molecule has a nucleotide sequence that comprises a guanine residue that is homologous to the guanine residue at position 11,887 of SEQ ID NO:12, or wherein the cDNA molecule has a nucleotide sequence that comprises a guanine residue that is homologous to the guanine residue at position 11,887 of SEQ ID NO:31). Herein, such a sequence is also referred to as “RNF213 sequence with the Glu3915Gly alteration” or “RNF213 sequence with the Glu3915Gly variation” referring to genomic nucleic acid molecules (or “RNF213 sequence with the A11887G alteration” or “RNF213 sequence with the A11887G variation” referring to mRNA molecules, and “RNF213 sequence with the A11887G alteration” or “RNF213 sequence with the A11887G variation” referring to cDNA molecules). The same can be carried out for all other molecules disclosed herein.

[0229] As described herein, a position within an RNF213 genomic nucleic acid molecule that corresponds to position 102,917 according to SEQ ID NO:2, for example, can be identified by performing a sequence alignment between the nucleotide sequence of a particular RNF213 nucleic acid molecule and the nucleotide sequence of SEQ ID NO:2. A variety of computational algorithms exist that can be used for performing a sequence alignment to identify a nucleotide position that corresponds to, for example, position 102,917 in SEQ ID NO:2. For example, by using the NCBI BLAST algorithm (Altschul et al., Nucleic Acids Res., 1997, 25, 3389-3402) or CLUSTALW software (Sievers and Higgins, Methods Mol. Biol., 2014, 1079, 105-116) sequence alignments may be performed. However, sequences can also be aligned manually.

[0230] The amino acid sequences of RNF213 reference polypeptides are set forth in SEQ ID NO:43 (Isoform 1), SEQ ID NO:44 (Isoform 2), SEQ ID NO:45 (Isoform 3), SEQ ID NO:46 (Isoform 4), SEQ ID NO:47 (Isoform 5), SEQ ID NO:48 (Isoform 6), and SEQ ID NO:49 (Isoform 7). Referring to SEQ ID NO:43 (Isoform 1), the RNF213 reference polypeptide is 5,207 amino acids in length. Referring to SEQ ID NO:43, position 3,915 is glutamic acid. Referring to SEQ ID NO:43, position 3,838 is valine. Referring to SEQ ID NO:44 (Isoform 2), the RNF213 reference polypeptide is 5,256 amino acids in length. Referring to SEQ ID NO:44, position 3,964 is glutamic acid. Referring to SEQ ID NO:44, position 3,887 is valine. Referring to SEQ ID NO:45 (Isoform 3), the RNF213 reference polypeptide is 2,114 amino acids in length. Referring to SEQ ID NO:45, position 822 is glutamic acid. Referring to SEQ ID NO:46 (Isoform 4), the RNF213 reference polypeptide is 1,642 amino acids in length. Referring to SEQ ID NO:46, position 350 is glutamic acid. Referring to SEQ ID NO:46, position 273 is valine. Referring to SEQ ID NO:47 (Isoform 5), the RNF213 reference polypeptide is 5,256 amino acids in length. Referring to SEQ ID NO:47, position 146 is glutamic acid. Referring to SEQ ID NO:44, position 69 is valine. Referring to SEQ ID NO:48 (Isoform 6), the RNF213 reference polypeptide is 37 amino acids in length. Referring to SEQ ID NO:49 (Isoform 7), the RNF213 reference polypeptide is 28 amino acids in length.

[0231] A set of RNF213 variant polypeptides exists, wherein the glutamic acid at the positions referred to above for the RNF213 reference polypeptides (referring to SEQ ID NO:43, SEQ ID NO:44, SEQ ID NO:45, SEQ ID NO:46, SEQ ID NO:47, SEQ ID NO:48, and SEQ ID NO:49) is replaced by glycine. Referring to SEQ ID NO:50 (Glu3915Gly; Isoform 1), position 3,915 is glycine. Referring to SEQ ID NO:51 (Glu3964Gly; Isoform 2), position 3,964 is glycine. Referring to SEQ ID NO:52 (Glu822Gly; Isoform 3), position 822 is glycine. Referring to SEQ ID NO:53 (Glu350Gly; Isoform 4), position 350 is glycine. Referring to SEQ ID NO:54 (Glu146Gly; Isoform 5), position 146 is glycine. Referring to SEQ ID NO:55 (Glu37Gly; Isoform 6), position 37 is glycine. Referring to SEQ ID NO:56 (Glu28Gly; Isoform 7), position 28 is glycine.

[0232] Another set of RNF213 variant polypeptides exists, wherein the valine at the positions referred to above for the RNF213 reference polypeptides (referring to SEQ ID NO:43, SEQ ID NO:44, SEQ ID NO:45, SEQ ID NO:46, SEQ ID NO:47, SEQ ID NO:48, and SEQ ID NO:49) is replaced by leucine. Referring to SEQ ID NO:57 (Val3838Leu; Isoform 1), position 3,838 is leucine. Referring to SEQ ID NO:58 Val3887Leu; Isoform 2), position 3,887 is leucine. Referring to SEQ ID NO:59 (Val745Leu; Isoform 3), position 745 is leucine. Referring to SEQ ID NO:60 (Val273Leu; Isoform 4), position 273 is leucine. Referring to SEQ ID NO:61 (Val69Leu; Isoform 5), position 69 is leucine.

[0233] The nucleotide and amino acid sequences listed in the accompanying sequence listing are shown using standard letter abbreviations for nucleotide bases, and three-letter code for amino acids. The nucleotide sequences follow the standard convention of beginning at the 5′ end of the sequence and proceeding forward (i.e., from left to right in each line) to the 3′ end. Only one strand of each nucleotide sequence is shown, but the complementary strand is understood to be included by any reference to the displayed strand. The amino acid sequence follows the standard convention of beginning at the amino terminus of the sequence and proceeding forward (i.e., from left to right in each line) to the carboxy terminus.

[0234] The present disclosure also provides therapeutic agents that treat or inhibit a liver disease for use in the treatment of a liver disease (or for use in the preparation of a medicament for treating a liver disease) in a subject, wherein the subject has any of the genomic nucleic acid molecules, mRNA molecules, and/or cDNA molecules encoding a human RNF213 polypeptide described herein. The therapeutic agents that treat or inhibit a liver disease can be any of the therapeutic agents that treat or inhibit a liver disease described herein.

[0235] In some embodiments, the subject comprises: i) a genomic nucleic acid molecule having a nucleotide sequence encoding a human RNF213 polypeptide, wherein the nucleotide sequence comprises a guanine at a position corresponding to position 102,917 according to SEQ ID NO:2, or the complement thereof; ii) an mRNA molecule having a nucleotide sequence encoding a human RNF213 polypeptide, wherein the nucleotide sequence comprises a guanine at a position corresponding to: position 11,887 according to SEQ ID NO:12, or the complement thereof; position 12,036 according to SEQ ID NO:13, or the complement thereof; position 2,685 according to SEQ ID NO:14, or the complement thereof; position 1,050 according to SEQ ID NO:15, or the complement thereof; position 438 according to SEQ ID NO:16, or the complement thereof; position 112 according to SEQ ID NO:17, or the complement thereof; or position 84 according to SEQ ID NO:18, or the complement thereof; or iii) an cDNA molecule having a nucleotide sequence encoding a human RNF213 polypeptide, wherein the nucleotide sequence comprises a guanine at a position corresponding to: position 11,887 according to SEQ ID NO:31, or the complement thereof; position 12,036 according to SEQ ID NO:32, or the complement thereof; position 2,685 according to SEQ ID NO:33, or the complement thereof; position 1,050 according to SEQ ID NO:34, or the complement thereof; position 438 according to SEQ ID NO:35, or the complement thereof; position 112 according to SEQ ID NO:36, or the complement thereof; or position 84 according to SEQ ID NO:37, or the complement thereof; or iv) an RNF213 polypeptide that comprises a glycine at a position corresponding to: position 3,915 according to SEQ ID NO:50, position 3,964 according to SEQ ID NO:51, position 822 according to SEQ ID NO:52, position 350 according to SEQ ID NO:53, position 146 according to SEQ ID NO:54, position 37 according to SEQ ID NO:55, or position 28 according to SEQ ID NO:56.

[0236] In some embodiments, the subject comprises: a genomic nucleic acid molecule having a nucleotide sequence encoding a human RNF213 polypeptide, wherein the nucleotide sequence comprises a guanine at a position corresponding to position 102,917 according to SEQ ID NO:2, or the complement thereof; an mRNA molecule having a nucleotide sequence encoding a human RNF213 polypeptide, wherein the nucleotide sequence comprises a guanine at a position corresponding to position 11,887 according to SEQ ID NO:12, or the complement thereof; a cDNA molecule having a nucleotide sequence encoding a human RNF213 polypeptide, wherein the nucleotide sequence comprises a guanine at a position corresponding to position 11,887 according to SEQ ID NO:31, or the complement thereof; or an RNF213 polypeptide that comprises a glycine at a position corresponding to position 3,915 according to SEQ ID NO:50.

[0237] In some embodiments, the subject comprises: i) a genomic nucleic acid molecule having a nucleotide sequence encoding a human RNF213 polypeptide, wherein the nucleotide sequence comprises a cytosine at a position corresponding to position 102,391 according to SEQ ID NO:3, or the complement thereof; ii) an mRNA molecule having a nucleotide sequence encoding a human RNF213 polypeptide, wherein the nucleotide sequence comprises a cytosine at a position corresponding to: position 11,655 according to SEQ ID NO:19, or the complement thereof; position 11,804 according to SEQ ID NO:20, or the complement thereof; position 2,453 according to SEQ ID NO:21, or the complement thereof; position 818 according to SEQ ID NO:22, or the complement thereof; or position 206 according to SEQ ID NO:23, or the complement thereof; iii) an CDNA molecule having a nucleotide sequence encoding a human RNF213 polypeptide, wherein the nucleotide sequence comprises a cytosine at a position corresponding to: position 11,655 according to SEQ ID NO:38, or the complement thereof; position 11,804 according to SEQ ID NO:39, or the complement thereof; position 2,453 according to SEQ ID NO:40, or the complement thereof; position 818 according to SEQ ID NO:41, or the complement thereof; or position 206 according to SEQ ID NO:42, or the complement thereof; or iv) an RNF213 polypeptide that comprises a leucine at a position corresponding to: position 3,838 according to SEQ ID NO:57, position 3,887 according to SEQ ID NO:58, position 745 according to SEQ ID NO:59, position 273 according to SEQ ID NO:60, or position 69 according to SEQ ID NO:61.

[0238] In some embodiments, the subject comprises: a genomic nucleic acid molecule having a nucleotide sequence encoding a human RNF213 polypeptide, wherein the nucleotide sequence comprises a cytosine at a position corresponding to position 102,391 according to SEQ ID NO:3, or the complement thereof; an mRNA molecule having a nucleotide sequence encoding a human RNF213 polypeptide, wherein the nucleotide sequence comprises a cytosine at a position corresponding to position 11,655 according to SEQ ID NO:19, or the complement thereof; a cDNA molecule having a nucleotide sequence encoding a human RNF213 polypeptide, wherein the nucleotide sequence comprises a cytosine at a position corresponding to position 11,655 according to SEQ ID NO:38, or the complement thereof; or an RNF213 polypeptide that comprises a leucine at a position corresponding to position 3,838 according to SEQ ID NO:57.

[0239] In some embodiments, the subject comprises a genomic nucleic acid molecule having a nucleotide sequence encoding a human RNF213 polypeptide, wherein the nucleotide sequence comprises a thymine at a position corresponding to position 103,226 according to SEQ ID NO:4, or the complement thereof.

[0240] The present disclosure also provides RNF213 inhibitors for use in the treatment of a liver disease (or for use in the preparation of a medicament for treating a liver disease) in a subject, wherein the subject has any of the genomic nucleic acid molecules, mRNA molecules, and/or cDNA molecules encoding a human RNF213 polypeptide described herein. The RNF213 inhibitors can be any of the RNF213 inhibitors described herein.

[0241] In some embodiments, the subject comprises: i) a genomic nucleic acid molecule having a nucleotide sequence encoding a human RNF213 polypeptide, wherein the nucleotide sequence comprises a guanine at a position corresponding to position 102,917 according to SEQ ID NO:2, or the complement thereof; ii) an mRNA molecule having a nucleotide sequence encoding a human RNF213 polypeptide, wherein the nucleotide sequence comprises a guanine at a position corresponding to: position 11,887 according to SEQ ID NO:12, or the complement thereof; position 12,036 according to SEQ ID NO:13, or the complement thereof; position 2,685 according to SEQ ID NO:14, or the complement thereof; position 1,050 according to SEQ ID NO:15, or the complement thereof; position 438 according to SEQ ID NO:16, or the complement thereof; position 112 according to SEQ ID NO:17, or the complement thereof; or position 84 according to SEQ ID NO:18, or the complement thereof; or iii) an cDNA molecule having a nucleotide sequence encoding a human RNF213 polypeptide, wherein the nucleotide sequence comprises a guanine at a position corresponding to: position 11,887 according to SEQ ID NO:31, or the complement thereof; position 12,036 according to SEQ ID NO:32, or the complement thereof; position 2,685 according to SEQ ID NO:33, or the complement thereof; position 1,050 according to SEQ ID NO:34, or the complement thereof; position 438 according to SEQ ID NO:35, or the complement thereof; position 112 according to SEQ ID NO:36, or the complement thereof; or position 84 according to SEQ ID NO:37, or the complement thereof; or iv) an RNF213 polypeptide that comprises a glycine at a position corresponding to: position 3,915 according to SEQ ID NO:50, position 3,964 according to SEQ ID NO:51, position 822 according to SEQ ID NO:52, position 350 according to SEQ ID NO:53, position 146 according to SEQ ID NO:54, position 37 according to SEQ ID NO:55, or position 28 according to SEQ ID NO:56.

[0242] In some embodiments, the subject comprises: a genomic nucleic acid molecule having a nucleotide sequence encoding a human RNF213 polypeptide, wherein the nucleotide sequence comprises a guanine at a position corresponding to position 102,917 according to SEQ ID NO:2, or the complement thereof; an mRNA molecule having a nucleotide sequence encoding a human RNF213 polypeptide, wherein the nucleotide sequence comprises a guanine at a position corresponding to position 11,887 according to SEQ ID NO:12, or the complement thereof; a cDNA molecule having a nucleotide sequence encoding a human RNF213 polypeptide, wherein the nucleotide sequence comprises a guanine at a position corresponding to position 11,887 according to SEQ ID NO:31, or the complement thereof; or an RNF213 polypeptide that comprises a glycine at a position corresponding to position 3,915 according to SEQ ID NO:50.

[0243] In some embodiments, the subject comprises: i) a genomic nucleic acid molecule having a nucleotide sequence encoding a human RNF213 polypeptide, wherein the nucleotide sequence comprises a cytosine at a position corresponding to position 102,391 according to SEQ ID NO:3, or the complement thereof; ii) an mRNA molecule having a nucleotide sequence encoding a human RNF213 polypeptide, wherein the nucleotide sequence comprises a cytosine at a position corresponding to: position 11,655 according to SEQ ID NO:19, or the complement thereof; position 11,804 according to SEQ ID NO:20, or the complement thereof; position 2,453 according to SEQ ID NO:21, or the complement thereof; position 818 according to SEQ ID NO:22, or the complement thereof; or position 206 according to SEQ ID NO:23, or the complement thereof; iii) an CDNA molecule having a nucleotide sequence encoding a human RNF213 polypeptide, wherein the nucleotide sequence comprises a cytosine at a position corresponding to: position 11,655 according to SEQ ID NO:38, or the complement thereof; position 11,804 according to SEQ ID NO:39, or the complement thereof; position 2,453 according to SEQ ID NO:40, or the complement thereof; position 818 according to SEQ ID NO:41, or the complement thereof; or position 206 according to SEQ ID NO:42, or the complement thereof; or iv) an RNF213 polypeptide that comprises a leucine at a position corresponding to: position 3,838 according to SEQ ID NO:57, position 3,887 according to SEQ ID NO:58, position 745 according to SEQ ID NO:59, position 273 according to SEQ ID NO:60, or position 69 according to SEQ ID NO:61.

[0244] In some embodiments, the subject comprises: a genomic nucleic acid molecule having a nucleotide sequence encoding a human RNF213 polypeptide, wherein the nucleotide sequence comprises a cytosine at a position corresponding to position 102,391 according to SEQ ID NO:3, or the complement thereof; an mRNA molecule having a nucleotide sequence encoding a human RNF213 polypeptide, wherein the nucleotide sequence comprises a cytosine at a position corresponding to position 11,655 according to SEQ ID NO:19, or the complement thereof; a cDNA molecule having a nucleotide sequence encoding a human RNF213 polypeptide, wherein the nucleotide sequence comprises a cytosine at a position corresponding to position 11,655 according to SEQ ID NO:38, or the complement thereof; or an RNF213 polypeptide that comprises a leucine at a position corresponding to position 3,838 according to SEQ ID NO:57.

[0245] In some embodiments, the subject comprises a genomic nucleic acid molecule having a nucleotide sequence encoding a human RNF213 polypeptide, wherein the nucleotide sequence comprises a thymine at a position corresponding to position 103,226 according to SEQ ID NO:4, or the complement thereof.

[0246] All patent documents, websites, other publications, accession numbers and the like cited above or below are incorporated by reference in their entirety for all purposes to the same extent as if each individual item were specifically and individually indicated to be so incorporated by reference. If different versions of a sequence are associated with an accession number at different times, the version associated with the accession number at the effective filing date of this application is meant. The effective filing date means the earlier of the actual filing date or filing date of a priority application referring to the accession number if applicable. Likewise, if different versions of a publication, website or the like are published at different times, the version most recently published at the effective filing date of the application is meant unless otherwise indicated. Any feature, step, element, embodiment, or aspect of the present disclosure can be used in combination with any other feature, step, element, embodiment, or aspect unless specifically indicated otherwise. Although the present disclosure has been described in some detail by way of illustration and example for purposes of clarity and understanding, it will be apparent that certain changes and modifications may be practiced within the scope of the appended claims.

[0247] The following examples are provided to describe the embodiments in greater detail. They are intended to illustrate, not to limit, the claimed embodiments. The following examples provide those of ordinary skill in the art with a disclosure and description of how the compounds, compositions, articles, devices and/or methods described herein are made and evaluated, and are intended to be purely exemplary and are not intended to limit the scope of any claims. Efforts have been made to ensure accuracy with respect to numbers (such as, for example, amounts, temperature, etc.), but some errors and deviations may be accounted for. Unless indicated otherwise, parts are parts by weight, temperature is in ° C. or is at ambient temperature, and pressure is at or near atmospheric.

### EXAMPLES

### Example 1: Loss of Function of the Gene Encoding RNF213 is Associated with Lower ALT, AST, and Protection Against Liver Disease

[0248] To identify genetic factors contributing to chronic liver disease, imputed genotype data, exome sequence data, and electronic health records were analyzed of 597,856 participants of European ancestry in the UK Biobank cohort (UKB), the Geisinger Health System MyCode Community Health Initiative cohort study (GHS) and Mount Sinai's BioMe Personalized Medicine Cohort (SINAI). A discovery analysis in UKB and GHS was performed to identify new genetic variants and genes associated with liver injury as measured by aspartate aminotransferase (AST) and alanine aminotransferase (ALT), which are widely used measures of liver damage. Statistically significant findings were subsequently evaluated for their relationship with a wide range of liver diseases in UKB, GHS, SINAI, The University of Pennsylvania Penn Medicine BioBank (UPENN-PMBB) and the Malmo Diet and Cancer Study (MDCS).

[0249] To discover protective genes for liver disease, a 2-step approach was adopted. In the first step, a genome wide analysis study of circulating AST and ALT levels was carried out to identify genes with common protein-coding variant associated at genome wide significance level with AST or ALT. In the second step, the association was determined between the burden of rare loss-of-function alleles in genes from step 1 and ALT or AST; to triangulate the evidence that the identified genes are causal.

[0250] In Step 1, the genome wide meta-analysis of AST and ALT using an imputed dataset of 11,914,698 variants in over 500,000 individuals of European ancestry identified 784 genome wide significant regions. One of the genome wide significant loci comprised the gene RNF213 and contained multiple associated coding variants driving the association signals at this locus. The strongest variant for AST was a missense variant in RNF213 rs61740658 (NP_001243000.2, Glu3915Gly). The strongest variant for ALT was an intronic variant rs36103733 (17:80364093:C:T) in perfect linkage disequilibrium with a missense variant in RNF213, rs35332090 (NP_001243000.2, Val3838Leu). After performing fine-mapping with the FINEMAP software, 2 additional coding variants in the 95% credible set of causal variants were identified: rs12944385 (NP_001243000.2, Lys4732Glu) with Posterior probability of 0.20 for ALT and 0.42 for AST, and rs72849841 (NP_066005.2, Pro729Leu) with posterior probability of 0.55 for AST. Association statistics for these variants are listed in Table 2.

TABLE 2
Multiple common coding variants in RNF213 are associated with
liver enzymes. Results are shown in standard deviation units

| | | Per allele beta | | Genotype counts, | |
|---|---|---|---|---|---|
| | | (95% confidence | | RR\|RA\|AA | |
| Genetic exposure | Outcome | interval) in SD | P-value | genotypes | AAF |
| p.Pro729Leu | ALT | −0.01 | 0.00049 | 427,883\|116,000\|8,003 | 0.1196 |
| | | (−0.01, −0.00) | | | |
| p.Pro729Leu | AST | −0.02 | 1.80E−10 | 425,799\|115,453\|7,962 | 0.1196 |
| | | (−0.02, −0.01) | | | |
| p.Glu3915Gly | ALT | −0.02 | 4.40E−10 | 468,399\|79,981\|3,506 | 0.07881 |
| | | (−0.03, −0.01) | | | |
| p.Glu3915Gly | AST | −0.03 | 4.40E−15 | 466,122\|79,608\|3,484 | 0.07882 |
| | | (−0.03, −0.02) | | | |
| 17:80364093:C:T | ALT | −0.02 | 2.20E−10 | 452,198\|94,573\|5,115 | 0.09495 |
| | | (−0.02, −0.01) | | | |
| 17:80364093:C:T | AST | −0.02 | 2.90E−14 | 449,995\|94,131\|5,088 | 0.09496 |
| | | (−0.03, −0.02) | | | |
| p.Val3838Leu | ALT | −0.02 | 6.00E−10 | 451,847\|94,898\|5,141 | 0.09529 |
| | | (−0.02, −0.01) | | | |
| p.Val3838Leu | AST | −0.02 | 2.80E−14 | 449,647\|94,452\|5,115 | 0.0953 |
| | | (−0.03, −0.02) | | | |
| p.Lys4732Glu | ALT | −0.04 | 7.10E−07 | 538,796\|13,002\|87 | 0.01194 |
| | | (−0.05, −0.02) | | | |
| p.Lys4732Glu | AST | −0.05 | 1.60E−08 | 536,195\|12,931\|87 | 0.01193 |
| | | (−0.06, −0.03) | | | |

[0251] RR indicates the number of individuals in the population studies carrying no alternative alleles; RA indicates the number of individuals carrying one or more heterozygous alternative alleles; AA indicates the number of individuals carrying one or more homozygous alternative alleles; The alternative allele is the allele causing loss of function or change in amino acid as coded following HGVS recommendations, for 17:80364093:C:T, C is the reference allele, T is the alternative and effect allele for which the summary statistics are reported. SD indicates standard deviation units; AAF indicates the alternative allele frequency.

[0252] In step 2, the association for the burden of rare (AAF<1%) predicted loss-of-function (pLOF) variants in RNF213 gene with ALT and AST was estimated using exome sequence data. In this analysis, 1,773 carriers of a pLOF variants in RNF213 had significantly reduced circulating AST and ALT levels as shown in Table 3.

TABLE 3
The burden of loss of function variants for RNF213 is significantly
associated with reduced circulating ALT and AST levels

| | | Per allele beta | | Genotype counts, | |
|---|---|---|---|---|---|
| | | (95% confidence | | RR\|RA\|AA | |
| Genetic exposure | Outcome | interval) | P-value | genotypes | AAF |
| RNF213 pLOF | ALT* | −0.10 | 1.60E−05 | 515,562\|1,772\|1 | 0.17% |
| | | (−0.14, −0.05) | | | |
| RNF213 pLOF | AST* | −0.07 | 0.00088 | 512,981\|1,755\|1 | 0.17% |
| | | (−0.12, −0.03) | | | |

*The associations were additionally corrected for the common fine-mapped signals for ALT or AST respectively to indicate statistical independence from results described in Table 1. RR indicates the number of individuals in the population studies carrying no alternative alleles; RA indicates the number of individuals carrying one or more heterozygous alternative alleles; AA indicates the number of individuals carrying one or more homozygous alternative alleles; The alternative allele is the allele causing loss of function or change in amino acid as coded following HGVS recommendations; SD indicates standard deviation units; AAF indicates the alternative allele frequency; pLOF indicates predicted loss of function.

[0253] The association between the burden of loss-of-function variants and AST or ALT was driven by multiple loss of function variants in RNF213 (see, Table 4). These results indicate the common coding alleles described in Table 3 are causing loss of function in RNF213.

TABLE 4
List of predicted loss-of-function variants in RNF213 included in the analysis - Chr:position:ref:alt
indicates the position of the genetic variant on chromosome (chr) with reference (ref) and
it's alternative (alt) allele on build 38 of the Human Genome Reference Consortium

| Variant, chr:position:ref:alt | Transcript IDs | Protein or cDNA change | AAF |
|---|---|---|---|
| 17:80263682:A:G | ENST00000582970, | hgvsp: p.Met1?, | 8.00E−06 |
| | ENST00000319921, | p.Met1?, | |
| | ENST00000508628 | p.Met1? | |
| 17:80287895:TGCCA:T | ENST00000582970, | hgvsp: p.Ser116fs, | 8.00E−06 |
| | ENST00000319921, | p.Ser116fs, | |
| | ENST00000508628 | p.Ser165fs | |
| 17:80288062:GCGACA:G | ENST00000582970, | hgvsp: p.Asp171fs, | 2.10E−05 |
| | ENST00000319921, | p.Asp171fs, | |
| | ENST00000508628 | p.Asp220fs | |
| 17:80288325:C:T | ENST00000582970, | hgvsp: p.Gln258*, | 1.43E−05 |
| | ENST00000319921, | p.Gln258*, | |
| | ENST00000508628 | p.Gln307* | |
| 17:80289797:CAAAA:C | ENST00000582970, | hgvsp: p.Lys359fs, | 8.00E−06 |
| | ENST00000319921, | p.Lys359fs, | |
| | ENST00000508628 | p.Lys408fs | |
| 17:80289797:C:CA | ENST00000582970, | hgvsp: p.Asn360fs, | 6.27E−06 |
| | ENST00000319921, | p.Asn360fs, | |
| | ENST00000508628 | p.Asn409fs | |
| 17:80290616:ATC:A | ENST00000582970, | hgvsp: p.Leu389fs, | 3.26E−06 |
| | ENST00000319921, | p.Leu389fs, | |
| | ENST00000508628 | p.Leu438fs | |
| 17:80290641:CT:C | ENST00000582970, | hgvsp: p.Asp396fs, | 8.00E−06 |
| | ENST00000319921, | p.Asp396fs, | |
| | ENST00000508628 | p.Asp445fs | |
| 17:80294733:C:G | ENST00000582970, | hgvsp: p.Tyr495*, | 1.39E−05 |
| | ENST00000319921, | p.Tyr495*, | |
| | ENST00000508628 | p.Tyr544* | |
| 17:80294917:G:T | ENST00000582970, | hgvsp: p.Glu557*, | 4.51E−05 |
| | ENST00000319921, | p.Glu557*, | |
| | ENST00000508628 | p.Glu606* | |
| 17:80294986:C:T | ENST00000582970, | hgvsp: p.Gln580*, | 1.60E−05 |
| | ENST00000319921, | p.Gln580*, | |
| | ENST00000508628 | p.Gln629* | |
| 17:80298324:G:A | ENST00000582970, | hgvsp: p.Trp672*, | 6.85E−06 |
| | ENST00000319921, | p.Trp672*, | |
| | ENST00000508628 | p.Trp721* | |
| 17:80298349:C:T | ENST00000582970, | hgvsp: p.Gln681*, | 2.78E−05 |
| | ENST00000319921, | p.Gln681*, | |
| | ENST00000508628 | p.Gln730* | |
| 17:80298375:CACCTGGCT:C | ENST00000582970, | hgvsp: p.Thr690fs, | 8.00E−06 |
| | ENST00000319921, | p.Thr690fs, | |
| | ENST00000508628 | p.Thr739fs | |
| 17:80307125:TAGGATGTTC:T | ENST00000582970, | hgvsp: p.Asp810fs, | 0.000165683 |
| | ENST00000319921, | p.Asp810fs, | |
| | ENST00000508628 | p.Asp859fs | |
| 17:80309117:GCCAGCCTTAT:G | ENST00000582970, | hgvsp: p.Pro868fs, | 8.00E−06 |
| | ENST00000319921, | p.Pro868fs, | |
| | ENST00000508628 | p.Pro917fs | |
| 17:80313090:AG:A | ENST00000582970, | hgvsp: p.Arg912fs, | 3.10E−05 |
| | ENST00000319921, | p.Arg912fs, | |
| | ENST00000508628 | p.Arg961fs | |
| 17:80313099:C:T | ENST00000582970, | hgvsp: p.Arg915*, | 8.13E−06 |
| | ENST00000319921, | p.Arg915*, | |
| | ENST00000508628 | p.Arg964* | |
| 17:80313162:A:AT | ENST00000582970, | hgvsp: p.Glu937fs, | 6.41E−06 |
| | ENST00000319921, | p.Glu937fs, | |
| | ENST00000508628 | p.Glu986fs | |
| 17:80317251:G:T | ENST00000582970, | hgvsp: p.Gly959*, | 3.75E−05 |
| | ENST00000319921, | p.Gly959*, | |
| | ENST00000508628 | p.Gly1008* | |
| 17:80319424:G:T | ENST00000319921 | hgvsp: p.Glu1046* | 8.00E−06 |
| 17:80319441:ACCCT:A | ENST00000319921 | hgvsp: p.Ser1053fs | 1.60E−05 |
| 17:80319479:A:G | ENST00000319921 | hgvsp: p.Ter1064Trpext*? | 6.86E−06 |
| 17:80340128:C:T | ENST00000582970, | hgvsp: p.Arg1921*, | 9.75E−06 |
| | ENST00000508628 | p.Arg1970* | |
| 17:80340178:C:A | ENST00000582970, | hgvsp: p.Cys1937*, | 8.00E−06 |
| | ENST00000508628 | p.Cys1986* | |
| 17:80340257:G:GC | ENST00000582970, | hgvsp: p.Gly1965fs, | 8.00E−06 |
| | ENST00000508628 | p.Gly2014fs | |
| 17:80343212:C:T | ENST00000582970, | hgvsp: p.Arg2024*, | 9.26E−06 |
| | ENST00000508628 | p.Arg2073* | |
| 17:80343877:GTTTCT:G | ENST00000582970, | hgvsp: p.Leu2070fs, | 1.77E−05 |
| | ENST00000508628 | p.Leu2119fs | |
| 17:80344720:A:T | ENST00000582970, | hgvsp: p.Lys2129*, | 6.85E−06 |
| | ENST00000508628 | p.Lys2178* | |
| 17:80345275:AC:A | ENST00000582970, | hgvsp: p.Met2315fs, | 8.00E−06 |
| | ENST00000508628 | p.Met2364fs | |
| 17:80345381:A:ACCTGTACCAGGGC | ENST00000582970, | hgvsp: p.Leu2354fs, | 2.71E−06 |
| | ENST00000508628 | p.Leu2403fs | |
| 17:80345812:G:T | ENST00000582970, | hgvsp: p.Glu2493*, | 6.85E−06 |
| | ENST00000508628 | p.Glu2542* | |
| 17:80346285:GT:G | ENST00000582970, | hgvsp: p.Phe2651fs, | 3.17E−06 |
| | ENST00000508628 | p.Phe2700fs | |
| 17:80346386:C:A | ENST00000582970, | hgvsp: p.Ser2684*, | 8.00E−06 |
| | ENST00000508628 | p.Ser2733* | |
| 17:80346627:CCT:C | ENST00000582970, | hgvsp: p.Phe2766fs, | 0 |
| | ENST00000508628 | p.Phe2815fs | |
| 17:80346635:TG:T | ENST00000582970, | hgvsp: p.Val2768fs, | 8.00E−06 |
| | ENST00000508628 | p.Val2817fs | |
| 17:80346804:GCAGTGCGCCCGCTT:G | ENST00000582970, | hgvsp: p.Gln2824fs, | 6.85E−06 |
| | ENST00000508628 | p.Gln2873fs | |
| 17:80346805:C:T | ENST00000582970, | hgvsp: p.Gln2824*, | 8.00E−06 |
| | ENST00000508628 | p.Gln2873* | |
| 17:80346838:CAG:C | ENST00000582970, | hgvsp: p.Gln2835fs, | 1.03E−05 |
| | ENST00000508628 | p.Gln2884fs | |
| 17:80347084:ATC:A | ENST00000582970, | hgvsp: p.Ile2917fs, | 8.00E−06 |
| | ENST00000508628 | p.Ile2966fs | |
| 17:80347089:C:A | ENST00000582970, | hgvsp: p.Cys2918*, | 1.03E−05 |
| | ENST00000508628 | p.Cys2967* | |
| 17:80347570:G:T | ENST00000582970, | hgvsp: p.Glu3079*, | 8.00E−06 |
| | ENST00000508628 | p.Glu3128* | |
| 17:80347638:GC:G | ENST00000582970, | hgvsp: p.Leu3102fs, | 2.64E−06 |
| | ENST00000508628 | p.Leu3151fs | |
| 17:80348255:CAG:C | ENST00000582970, | hgvsp: p.Asp3308fs, | 1.60E−05 |
| | ENST00000508628 | p.Asp3357fs | |
| 17:80349881:G:T | ENST00000582970, | hgvsp: p.Glu3355*, | 8.00E−06 |
| | ENST00000508628 | p.Glu3404* | |
| 17:80351683:A:G | ENST00000582970, | hgvsc: c.10185 − 2A > G, | 0.000367849 |
| | ENST00000508628 | c.10332 − 2A > G | |
| 17:80351716:C:T | ENST00000582970, | hgvsp: p.Arg3406*, | 7.12E−06 |
| | ENST00000508628 | p.Arg3455* | |
| 17:80352946:G:A | ENST00000582970, | hgvsp: p.Trp3437*, | 2.41E−06 |
| | ENST00000508628 | p.Trp3486* | |
| 17:80352981:AC:A | ENST00000582970, | hgvsp: p.Leu3450fs, | 8.00E−06 |
| | ENST00000508628 | p.Leu3499fs | |
| 17:80353018:TCA:T | ENST00000582970, | hgvsp: p.Thr3462fs, | 8.00E−06 |
| | ENST00000508628 | p.Thr3511fs | |
| 17:80353020:AC:A | ENST00000582970, | hgvsp: p.Ile3463fs, | 8.00E−06 |
| | ENST00000508628 | p.Ile3512fs | |
| 17:80353040:GC:G | ENST00000582970, | hgvsp: p.Gly3470fs, | 8.00E−06 |
| | ENST00000508628 | p.Gly3519fs | |
| 17:80353044:G:T | ENST00000582970, | hgvsp: p.Gly3470*, | 8.00E−06 |
| | ENST00000508628 | p.Gly3519* | |
| 17:80353049:CT:C | ENST00000582970, | hgvsp: p.Leu3472fs, | 0 |
| | ENST00000508628 | p.Leu3521fs | |
| 17:80353056:G:T | ENST00000582970, | hgvsp: p.Glu3474*, | 8.00E−06 |
| | ENST00000508628 | p.Glu3523* | |
| 17:80353060:G:A | ENST00000582970, | hgvsc: c.10423 + 1G > A, | 7.88E−06 |
| | ENST00000508628 | c.10570 + 1G > A | |
| 17:80353061:T:C | ENST00000582970, | hgvsc: c.10423 + 2T > C, | 8.00E−06 |
| | ENST00000508628 | c.10570 + 2T > C | |
| 17:80353614:CAG:C | ENST00000582970, | hgvsp: p.Glu3510fs, | 2.89E−05 |
| | ENST00000508628 | p.Glu3559fs | |
| 17:80354148:G:T | ENST00000582970, | hgvsp: p.Glu3570*, | 8.00E−06 |
| | ENST00000508628 | p.Glu3619* | |
| 17:80358480:G:C | ENST00000582970, | hgvsc: c.11054 + 1G > C, | 2.71E−06 |
| | ENST00000508628 | c.11201 + 1G > C | |
| 17:80360082:C:G | ENST00000582970, | hgvsp: p.Tyr3692*, | 1.72E−05 |
| | ENST00000508628 | p.Tyr3741* | |
| 17:80360190:C:A | ENST00000582970, | hgvsp: p.Tyr3728*, | 8.00E−06 |
| | ENST00000508628 | p.Tyr3777* | |
| 17:80360208:T:C | ENST00000582970, | hgvsc: c.11200 + 2T > C, | 8.00E−06 |
| | ENST00000508628 | c.H347 + 2T > C | |
| 17:80363608:G:C | ENST00000582970, | hgvsc: c.11569 − 1G > C, | 1.84E−05 |
| | ENST00000508628 | c.11716 − 1G > C | |
| 17:80363668:G:GC | ENST00000582970, | hgvsp: p.Ser3878fs, | 2.49E−05 |
| | ENST00000508628 | p.Ser3927fs | |
| 17:80363686:G:A | ENST00000582970, | hgvsp: p.Trp3882*, | 3.98E−06 |
| | ENST00000508628 | p.Trp3931* | |
| 17:80364554:G:GT | ENST00000582970, | hgvsc: c.11871 + 1_11871 + 2insT, | 8.00E−06 |
| | ENST00000508628 | c.12018 + 1_12018 + 2insT | |
| 17:80367754:C:T | ENST00000582970, | hgvsp: p.Arg3960*, | 5.44E−06 |
| | ENST00000508628 | p.Arg4009* | |
| 17:80367960:G:C | ENST00000582970, | hgvsc: c.11973 − 1G > C, | 3.22E−06 |
| | ENST00000508628 | c.12120 − 1G > C | |
| 17:80369622:GCT:G | ENST00000582970, | hgvsp: p.Leu4095fs, | 2.77E−05 |
| | ENST00000508628 | p.Leu4144fs | |
| 17:80371973:C:CAACT | ENST00000582970, | hgvsp: p.Cys4177fs, | 8.00E−06 |
| | ENST00000508628 | p.Cys4226fs | |
| 17:80372972:C:CA | ENST00000582970, | hgvsc: c.12752 − 3_12752 − 2insA, | 2.55E−06 |
| | ENST00000508628 | c.12899 − 3_12899 − 2insA | |
| 17:80372973:A:T | ENST00000582970, | hgvsc: c.12752 − 2A > T, | 0.000842726 |
| | ENST00000508628 | c.12899 − 2A > T | |
| 17:80372986:G:T | ENST00000582970, | hgvsp: p.Glu4255*, | 8.00E−06 |
| | ENST00000508628 | p.Glu4304* | |
| 17:80373146:AG:A | ENST00000582970, | hgvsp: p.Asp4309fs, | 8.00E−06 |
| | ENST00000508628 | p.Asp4358fs | |
| 17:80373153:TG:T | ENST00000582970, | hgvsp: p.Val4311fs, | 0 |
| | ENST00000508628 | p.Val4360fs | |
| 17:80373166:G:T | ENST00000582970, | hgvsc: c.12942 + 1G > T, | 8.00E−06 |
| | ENST00000508628 | c.13089 + 1G > T | |
| 17:80375769:A:AC | ENST00000582970, | hgvsp: p.Gln4364fs, | 1.00E−05 |
| | ENST00000508628 | p.Gln4413fs | |
| 17:80375834:C:G | ENST00000582970, | hgvsp: p.Tyr4383*, | 8.00E−06 |
| | ENST00000508628 | p.Tyr4432* | |
| 17:80376895:CA:C | ENST00000582970, | hgvsp: p.Thr4482fs, | 0.000132745 |
| | ENST00000508628 | p.Thr4531fs | |
| 17:80376962:C:G | ENST00000582970, | hgvsp: p.Tyr4503*, | 8.57E−05 |
| | ENST00000508628 | p.Tyr4552* | |
| 17:80376964:G:C | ENST00000582970, | hgvsc: c.13510 + 1G > C, | 1.83E−06 |
| | ENST00000508628 | c.13657 + 1G > C | |
| 17:80376964:G:A | ENST00000582970, | hgvsc: c.13510 + 1G > A, | 8.00E−06 |
| | ENST00000508628 | c.13657 + 1G > A | |
| 17:80379619:G:C | ENST00000582970, | hgvsc: c.13546 − 1G > C, | 2.71E−06 |
| | ENST00000508628 | c.13693 − 1G > C | |
| 17:80380829:A:G | ENST00000582970, | hgvsc: c.13641 − 2A > G, | 8.00E−06 |
| | ENST00000508628 | c.13788 − 2A > G | |
| 17:80380844:A:AT | ENST00000582970, | hgvsp: p.Arg4552fs, | 1.58E−05 |
| | ENST00000508628 | p.Arg4601fs | |
| 17:80380912:G:GC | ENST00000582970, | hgvsp: p.Val4577fs, | 1.83E−06 |
| | ENST00000508628 | p.Val4626fs | |
| 17:80381709:CA:C | ENST00000582970, | hgvsp: p.His4654fs, | 8.00E−06 |
| | ENST00000508628 | p.His4703fs | |
| 17:80381728:G:T | ENST00000582970, | hgvsc: c.13978 + 1G > T, | 8.00E−06 |
| | ENST00000508628 | c.14125 + 1G > T | |
| 17:80381728:G:A | ENST00000582970, | hgvsc: c.13978 + 1G > A, | 3.22E−06 |
| | ENST00000508628 | c.14125 + 1G > A | |
| 17:80383030:G:A | ENST00000582970, | hgvsp: p.Trp4677*, | 4.45E−06 |
| | ENST00000508628 | p.Trp4726* | |
| 17:80383685:TAA:T | ENST00000582970, | hgvsp: p.Lys4694fs, | 8.00E−06 |
| | ENST00000508628 | p.Lys4743fs | |
| 17:80383863:C:T | ENST00000582970, | hgvsp: p.Gln4753*, | 1.60E−05 |
| | ENST00000508628 | p.Gln4802* | |
| 17:80385109:TC:T | ENST00000582970, | hgvsp: p.Gln4799fs, | 5.03E−05 |
| | ENST00000508628 | p.Gln4848fs | |
| 17:80386249:G:T | ENST00000582970, | hgvsc: c.14540 − 1G > T, | 1.76E−06 |
| | ENST00000508628 | c.14687 − 1G > T | |
| 17:80386267:A:T | ENST00000582970, | hgvsp: p.Lys4853*, | 8.00E−06 |
| | ENST00000508628 | p.Lys4902* | |
| 17:80386374:TC:T | ENST00000582970, | hgvsp: p.Arg4889fs, | 8.00E−06 |
| | ENST00000508628 | p.Arg4938fs | |
| 17:80386763:CT:C | ENST00000582970, | hgvsp: p.Leu4932fs, | 8.49E−06 |
| | ENST00000508628 | p.Leu4981fs | |
| 17:80386865:CA:C | ENST00000582970, | hgvsp: p.Gln4966fs, | 8.00E−06 |
| | ENST00000508628 | p.Gln5015fs | |
| 17:80386865:C:T | ENST00000582970, | hgvsp: p.Gln4966*, | 2.71E−06 |
| | ENST00000508628 | p.Gln5015* | |
| 17:80389850:AAC:A | ENST00000582970, | hgvsp: p.Thr5075fs, | 3.59E−06 |
| | ENST00000508628 | p.Thr5124fs | |
| 17:80389868:G:A | ENST00000582970, | hgvsp: p.Trp5079*, | 1.45E−05 |
| | ENST00000508628 | p.Trp5128* | |
| 17:80389918:G:A | ENST00000582970, | hgvsc: c.15285 + 1G > A, | 4.87E−05 |
| | ENST00000508628 | c.15432 + 1G > A | |
| 17:80390010:A:G | ENST00000582970, | hgvsc: c.15286 − 2A > G, | 1.07E−05 |
| | ENST00000508628 | c.15433 − 2A > G | |
| 17:80393428:T:TA | ENST00000582970, | hgvsp: p.Leu5186fs, | 8.00E−06 |
| | ENST00000508628 | p.Leu5235fs | |
| 17:80393484:C:T | ENST00000582970, | hgvsp: p.Arg5204*, | 8.54E−06 |
| | ENST00000508628 | p.Arg5253* | |
| 17:80263721:A:AC | ENST00000582970, | hgvsp: p.Lys16fs, | 7.16E−06 |
| | ENST00000319921, | p.Lys16fs, | |
| | ENST00000508628 | p.Lys16fs | |
| 17:80263756:GC:G | ENST00000582970, | hgvsp: p.Pro26fs, | 6.00E−06 |
| | ENST00000319921, | p.Pro26fs, | |
| | ENST00000508628 | p.Pro26fs | |
| 17:80273317:A:AG | ENST00000582970, | hgvsp: p.Cys62fs, | 6.00E−06 |
| | ENST00000319921, | p.Cys62fs, | |
| | ENST00000508628 | p.Cys62fs | |
| 17:80289838:G:A | ENST00000582970, | hgvsc: c.1112 + 1G > A, | 7.73E−06 |
| | ENST00000319921, | c.1112 + 1G > A, | |
| | ENST00000508628 | c.1259 + 1G > A | |
| 17:80291794:CTGTT:C | ENST00000582970, | hgvsp: p.Leu480fs, | 1.70E−05 |
| | ENST00000319921, | p.Leu480fs, | |
| | ENST00000508628 | p.Leu529fs | |
| 17:80295556:G:A | ENST00000582970, | hgvsc: c.1756 − 1G > A, | 1.20E−05 |
| | ENST00000319921, | c.1756 − 1G > A, | |
| | ENST00000508628 | c.1903 − 1G > A | |
| 17:80298476:A:AG | ENST00000582970, | hgvsp: p.Leu725fs, | 6.00E−06 |
| | ENST00000319921, | p.Leu725fs, | |
| | ENST00000508628 | p.Leu774fs | |
| 17:80307182:C:CT | ENST00000582970, | hgvsp: p.Asp829fs, | 6.00E−06 |
| | ENST00000319921, | p.Asp829fs, | |
| | ENST00000508628 | p.Asp878fs | |
| 17:80313066:C:T | ENST00000582970, | hgvsp: p.Gln904*, | 1.20E−05 |
| | ENST00000319921, | p.Gln904*, | |
| | ENST00000508628 | p.Gln953* | |
| 17:80319205:C:T | ENST00000582970, | hgvsp: p.Gln973*, | 6.00E−06 |
| | ENST00000319921, | p.Gln973*, | |
| | ENST00000508628 | p.Gln1022* | |
| 17:80319441:AC:A | ENST00000319921 | hgvsp: p.Ser1053fs | 1.20E−05 |
| 17:80325033:C:T | ENST00000582970, | hgvsp: p.Gln1010*, | 6.00E−06 |
| | ENST00000508628 | p.Gln1059* | |
| 17:80328460:T:TC | ENST00000582970, | hgvsp: p.Lys1168fs, | 6.00E−06 |
| | ENST00000508628 | p.Lys1217fs | |
| 17:80332023:GCAGTAAGA:G | ENST00000582970, | hgvsp: p.Val1180fs, | 6.00E−06 |
| | ENST00000508628 | p.Val1229fs | |
| 17:80332503:C:T | ENST00000582970, | hgvsp: p.Arg1339*, | 4.81E−06 |
| | ENST00000508628 | p.Arg1388* | |
| 17:80334264:CT:C | ENST00000582970, | hgvsp: p.Gly1436fs, | 6.00E−06 |
| | ENST00000508628 | p.Gly1485fs | |
| 17:80337585:G:T | ENST00000582970, | hgvsc: c.4528 − 1G > T, | 1.17E−05 |
| | ENST00000508628 | c.4675 − 1G > T | |
| 17:80337832:G:GATTT | ENST00000582970, | hgvsp: p.Ser1558fs, | 1.20E−05 |
| | ENST00000508628 | p.Ser1607fs | |
| 17:80337836:TC:T | ENST00000582970, | hgvsp: p.Pro1559fs, | 6.00E−06 |
| | ENST00000508628 | p.Pro1608fs | |
| 17:80337923:G:T | ENST00000582970, | hgvsp: p.Glu1587*, | 6.00E−06 |
| | ENST00000508628 | p.Glu1636* | |
| 17:80339340:AC:A | ENST00000582970, | hgvsp: p.Leu1659fs, | 6.00E−06 |
| | ENST00000508628 | p.Leu1708fs | |
| 17:80339467:C:A | ENST00000582970, | hgvsp: p.Tyr1700*, | 6.00E−06 |
| | ENST00000508628 | p.Tyr1749* | |
| 17:80339519:A:T | ENST00000582970, | hgvsp: p.Lys1718*, | 1.20E−05 |
| | ENST00000508628 | p.Lys1767* | |
| 17:80339852:C:T | ENST00000582970, | hgvsp: p.Gln1829*, | 3.46E−06 |
| | ENST00000508628 | p.Gln1878* | |
| 17:80339981:G:GAGGA | ENST00000582970, | hgvsp: p.Val1874fs, | 3.35E−05 |
| | ENST00000508628 | p.Val1923fs | |
| 17:80339981:G:T | ENST00000582970, | hgvsp: p.Glu1872*, | 6.00E−06 |
| | ENST00000508628 | p.Glu1921* | |
| 17:80340018:TG:T | ENST00000582970, | hgvsp: p.Gly1885fs, | 6.00E−06 |
| | ENST00000508628 | p.Gly1934fs | |
| 17:80340129:GA:G | ENST00000582970, | hgvsp: p.Glu1922fs, | 6.00E−06 |
| | ENST00000508628 | p.Glu1971fs | |
| 17:80340224:C:T | ENST00000582970, | hgvsp: p.Gln1953*, | 6.00E−06 |
| | ENST00000508628 | p.Gln2002* | |
| 17:80340344:C:T | ENST00000582970, | hgvsp: p.Arg1993*, | 5.77E−06 |
| | ENST00000508628 | p.Arg2042* | |
| 17:80343242:C:T | ENST00000582970, | hgvsp: p.Arg2034*, | 9.38E−06 |
| | ENST00000508628 | p.Arg2083* | |
| 17:80344840:CAG:C | ENST00000582970, | hgvsp: p.Gln2169fs, | 1.88E−05 |
| | ENST00000508628 | p.Gln2218fs | |
| 17:80344852:C:T | ENST00000582970, | hgvsp: p.Arg2173*, | 8.07E−06 |
| | ENST00000508628 | p.Arg2222* | |
| 17:80345032:CTCTT:C | ENST00000582970, | hgvsp: p.Leu2233fs, | 6.00E−06 |
| | ENST00000508628 | p.Leu2282fs | |
| 17:80345787:G:GT | ENST00000582970, | hgvsp: p.Asp2487fs, | 1.77E−06 |
| | ENST00000508628 | p.Asp2536fs | |
| 17:80346221:CAG:C | ENST00000582970, | hgvsp: p.Glu2630fs, | 4.31E−06 |
| | ENST00000508628 | p.Glu2679fs | |
| 17:80346292:G:T | ENST00000582970, | hgvsp: p.Glu2653*, | 6.00E−06 |
| | ENST00000508628 | p.Glu2702* | |
| 17:80346722:TC:T | ENST00000582970, | hgvsp: p.Arg2797fs, | 1.77E−06 |
| | ENST00000508628 | p.Arg2846fs | |
| 17:80346926:TG:T | ENST00000582970, | hgvsp: p.Glu2865fs, | 6.00E−06 |
| | ENST00000508628 | p.Glu2914fs | |
| 17:80346949:G:GCCCC | ENST00000582970, | hgvsp: p.Asp2872fs, | 6.00E−06 |
| | ENST00000508628 | p.Asp2921fs | |
| 17:80347058:C:CA | ENST00000582970, | hgvsp: p.Glu2909fs, | 6.00E−06 |
| | ENST00000508628 | p.Glu2958fs | |
| 17:80347196:G:GT | ENST00000582970, | hgvsp: p.Asp2955fs, | 6.00E−06 |
| | ENST00000508628 | p.Asp3004fs | |
| 17:80347248:TAGAA:T | ENST00000582970, | hgvsp: p.Arg2972fs, | 6.00E−06 |
| | ENST00000508628 | p.Arg3021fs | |
| 17:80347295:TC:T | ENST00000582970, | hgvsp: p.Phe2987fs, | 6.00E−06 |
| | ENST00000508628 | p.Phe3036fs | |
| 17:80347906:C:CT | ENST00000582970, | hgvsp: p.Cys3192fs, | 2.62E−06 |
| | ENST00000508628 | p.Cys3241fs | |
| 17:80348200:CACAG:C | ENST00000582970, | hgvsp: p.Gln3291fs, | 6.00E−06 |
| | ENST00000508628 | p.Gln3340fs | |
| 17:80349805:CTG:C | ENST00000582970, | hgvsp: p.Cys3330fs, | 7.73E−06 |
| | ENST00000508628 | p.Cys3379fs | |
| 17:80349825:AG:A | ENST00000582970, | hgvsp: p.Val3337fs, | 6.00E−06 |
| | ENST00000508628 | p.Val3386fs | |
| 17:80349847:AC:A | ENST00000582970, | hgvsp: p.Thr3345fs, | 6.00E−06 |
| | ENST00000508628 | p.Thr3394fs | |
| 17:80349870:A:AG | ENST00000582970, | hgvsp: p.Phe3352fs, | 6.00E−06 |
| | ENST00000508628 | p.Phe3401fs | |
| 17:80350394:TA:T | ENST00000582970, | hgvsp: p.Ile3391fs, | 6.00E−06 |
| | ENST00000508628 | p.Ile3440fs | |
| 17:80351719:GA:G | ENST00000582970, | hgvsp: p.Asn3408fs, | 6.00E−06 |
| | ENST00000508628 | p.Asn3457fs | |
| 17:80351795:TC:T | ENST00000582970, | hgvsp: p.His3433fs, | 0 |
| | ENST00000508628 | p.His3482fs | |
| 17:80353644:CCT:C | ENST00000582970, | hgvsp: p.Ser3520fs, | 6.00E−06 |
| | ENST00000508628 | p.Ser3569fs | |
| 17:80358414:TC:T | ENST00000582970, | hgvsp: p.Leu3664fs, | 6.00E−06 |
| | ENST00000508628 | p.Leu3713fs | |
| 17:80360060:G:C | ENST00000582970, | hgvsc: c.11055 − 1G > C, | 1.80E−05 |
| | ENST00000508628 | c.11202 − 1G > C | |
| 17:80360144:G:A | ENST00000582970, | hgvsp: p.Trp3713*, | 1.77E−06 |
| | ENST00000508628 | p.Trp3762* | |
| 17:80363101:G:GT | ENST00000582970, | hgvsp: p.Leu3787fs, | 6.00E−06 |
| | ENST00000508628 | p.Leu3836fs | |
| 17:80363286:G:A | ENST00000582970, | hgvsp: p.Trp3847*, | 2.38E−05 |
| | ENST00000508628 | p.Trp3896* | |
| 17:80363727:T:TC | ENST00000582970, | hgvsp: p.Cys3897fs, | 6.00E−06 |
| | ENST00000508628 | p.Cys3946fs | |
| 17:80368092:G:GTT | ENST00000582970, | hgvsp: p.Leu4036fs, | 6.00E−06 |
| | ENST00000508628 | p.Leu4085fs | |
| 17:80369645:AG:A | ENST00000582970, | hgvsp: p.Arg4102fs, | 6.00E−06 |
| | ENST00000508628 | p.Arg4151fs | |
| 17:80369868:GT:G | ENST00000582970, | hgvsc: c.12425 + 2delT, | 0 |
| | ENST00000508628 | c.12572 + 2delT | |
| 17:80371986:G:A | ENST00000582970, | hgvsc: c.12537 + 1G > A, | 6.76E−06 |
| | ENST00000508628 | c.12684 + 1G > A | |
| 17:80372723:A:AG | ENST00000582970, | hgvsp: p.Gly4249fs, | 1.56E−05 |
| | ENST00000508628 | p.Gly4298fs | |
| 17:80372977:AT:A | ENST00000582970, | hgvsp: p.Met4252fs, | 0.001243 |
| | ENST00000508628 | p.Met4301fs | |
| 17:80375758:AG:A | ENST00000582970, | hgvsc: c.13075 − 1delG, | 0 |
| | ENST00000508628 | c.13222 − 1delG | |
| 17:80375759:G:T | ENST00000582970, | hgvsc: c.13075 − 1G > T, | 6.00E−06 |
| | ENST00000508628 | c.13222 − 1G > T | |
| 17:80375857:AC:A | ENST00000582970, | hgvsp: p.Thr4393fs, | 1.77E−06 |
| | ENST00000508628 | p.Thr4442fs | |
| 17:80376965:T:C | ENST00000582970, | hgvsc: c.13510 + 2T > C, | 6.00E−06 |
| | ENST00000508628 | c.13657 + 2T > C | |
| 17:80379716:T:C | ENST00000582970, | hgvsc: c.13640 + 2T > C, | 1.77E−06 |
| | ENST00000508628 | c.13787 + 2T > C | |
| 17:80380838:GCAGA:G | ENST00000582970, | hgvsp: p.Asp4551fs, | 6.00E−06 |
| | ENST00000508628 | p.Asp4600fs | |
| 17:80380988:G:T | ENST00000582970, | hgvsc: c.13797 + 1G > T, | 1.77E−06 |
| | ENST00000508628 | c.13944 + 1G > T | |
| 17:80385172:G:A | ENST00000582970, | hgvsc: c.14455 + 1G > A, | 6.00E−06 |
| | ENST00000508628 | c.14602 + 1G > A | |
| 17:80385549:C:T | ENST00000582970, | hgvsp: p.Gln4823*, | 6.00E−06 |
| | ENST00000508628 | p.Gln4872* | |
| 17:80386327:C:T | ENST00000582970, | hgvsp: p.Arg4873*, | 6.45E−06 |
| | ENST00000508628 | p.Arg4922* | |
| 17:80386747:GC:G | ENST00000582970, | hgvsp: p.Arg4927fs, | 6.00E−06 |
| | ENST00000508628 | p.Arg4976fs | |
| 17:80389215:C:CGA | ENST00000582970, | hgvsp: p.Leu5015fs, | 6.00E−06 |
| | ENST00000508628 | p.Leu5064fs | |
| 17:80389217:G:GC | ENST00000582970, | hgvsp: p.Gln5016fs, | 6.00E−06 |
| | ENST00000508628 | p.Gln5065fs | |
| 17:80389286:T:TG | ENST00000582970, | hgvsp: p.Gly5040fs, | 1.17E−05 |
| | ENST00000508628 | p.Gly5089fs | |
| 17:80389832:T:TAA | ENST00000582970, | hgvsp: p.Asn5068fs, | 6.00E−06 |
| | ENST00000508628 | p.Asn5117fs | |
| 17:80393452:TG:T | ENST00000582970, | hgvsp: p.Trp5194fs, | 6.00E−06 |
| | ENST00000508628 | p.Trp5243fs | |
| 17:80263675:AGGACCCAT:A | ENST00000582970, | hgvsp: p.Met1fs, | 1.00E−06 |
| | ENST00000319921, | p.Met1fs, | |
| | ENST00000508628 | p.Met1fs | |
| 17:80263739:C:T | ENST00000582970, | hgvsp: p.Gln20*, | 1.00E−06 |
| | ENST00000319921, | p.Gln20*, | |
| | ENST00000508628 | p.Gln20* | |
| 17:80263761:C:CTGCAG | ENST00000582970, | hgvsp: p.Ala29fs, | 1.00E−06 |
| | ENST00000319921, | p.Ala29fs, | |
| | ENST00000508628 | p.Ala29fs | |
| 17:80263778:GGT:G | ENST00000582970, | hgvsc: c.97 + 1_97 + 2delGT, | 1.00E−06 |
| | ENST00000319921, | c.97 + 1_97 + 2delGT, | |
| | ENST00000508628 | c.97 + 1_97 + 2delGT | |
| 17:80263779:GT:G | ENST00000582970, | hgvsc: c.97 + 2delT, | 3.83E−06 |
| | ENST00000319921, | c.97 + 2delT, | |
| | ENST00000508628 | c.97 + 2delT | |
| 17:80263779:G:C | ENST00000582970, | hgvsc: c.97 + 1G > C, | 1.00E−06 |
| | ENST00000319921, | c.97 + 1G > C, | |
| | ENST00000508628 | c.97 + 1G > C | |
| 17:80273364:C:CT | ENST00000582970, | hgvsp: p.Glu75fs, | 1.00E−06 |
| | ENST00000319921, | p.Glu75fs, | |
| | ENST00000508628 | p.Glu75fs | |
| 17:80273374:CT:C | ENST00000582970, | hgvsp: p.Cys78fs, | 1.00E−06 |
| | ENST00000319921, | p.Cys78fs, | |
| | ENST00000508628 | p.Cys78fs | |
| 17:80278790:T:TGCTGC | ENST00000508628 | hgvsp: p.Val99fs | 1.00E−06 |
| 17:80278815:G:T | ENST00000508628 | hgvsp: p.Glu105* | 1.00E−06 |
| 17:80278853:G:GTT | ENST00000508628 | hgvsp: p.Lys118fs | 1.00E−06 |
| 17:80278878:GC:G | ENST00000508628 | hgvsp: p.Ala127fs | 3.00E−06 |
| 17:80278901:CTG:C | ENST00000508628 | hgvsp: p.Cys134fs | 1.00E−06 |
| 17:80287813:A:G | ENST00000582970, | hgvsc: c.262 − 2A > G, | 1.00E−06 |
| | ENST00000319921, | c.262 − 2A > G, | |
| | ENST00000508628 | c.409 − 2A > G | |
| 17:80287918:T:A | ENST00000582970, | hgvsp: p.Leu122*, | 1.00E−06 |
| | ENST00000319921, | p.Leu122*, | |
| | ENST00000508628 | p.Leu171* | |
| 17:80287924:C:A | ENST00000582970, | hgvsp: p.Ser124*, | 1.00E−06 |
| | ENST00000319921, | p.Ser124*, | |
| | ENST00000508628 | p.Ser173* | |
| 17:80287947:G:GCCCT | ENST00000582970, | hgvsp: p.His135fs, | 3.00E−06 |
| | ENST00000319921, | p.His135fs, | |
| | ENST00000508628 | p.His184fs | |
| 17:80287952:GC:G | ENST00000582970, | hgvsp: p.His135fs, | 1.00E−06 |
| | ENST00000319921, | p.His135fs, | |
| | ENST00000508628 | p.His184fs | |
| 17:80287989:C:T | ENST00000582970, | hgvsp: p.Gln146*, | 3.00E−06 |
| | ENST00000319921, | p.Gln146*, | |
| | ENST00000508628 | p.Gln195* | |
| 17:80288076:C:T | ENST00000582970, | hgvsp: p.Gln175*, | 1.00E−06 |
| | ENST00000319921, | p.Gln175*, | |
| | ENST00000508628 | p.Gln224* | |
| 17:80288079:GC:G | ENST00000582970, | hgvsp: p.Gln177fs, | 1.00E−06 |
| | ENST00000319921, | p.Gln177fs, | |
| | ENST00000508628 | p.Gln226fs | |
| 17:80288082:C:T | ENST00000582970, | hgvsp: p.Gln177*, | 7.58E−06 |
| | ENST00000319921, | p.Gln177*, | |
| | ENST00000508628 | p.Gln226* | |
| 17:80288089:T:A | ENST00000582970, | hgvsp: p.Leu179*, | 4.00E−06 |
| | ENST00000319921, | p.Leu179*, | |
| | ENST00000508628 | p.Leu228* | |
| 17:80288124:CAG:C | ENST00000582970, | hgvsp: p.Ser192fs, | 2.80E−06 |
| | ENST00000319921, | p.Ser192fs, | |
| | ENST00000508628 | p.Ser241fs | |
| 17:80288186:T:TG | ENST00000582970, | hgvsp: p.Arg214fs, | 1.00E−06 |
| | ENST00000319921, | p.Arg214fs, | |
| | ENST00000508628 | p.Arg263fs | |
| 17:80288214:A:AC | ENST00000582970, | hgvsp: p.Gly222fs, | 1.00E−06 |
| | ENST00000319921, | p.Gly222fs, | |
| | ENST00000508628 | p.Gly271fs | |
| 17:80288238:G:T | ENST00000582970, | hgvsp: p.Glu229*, | 1.00E−06 |
| | ENST00000319921, | p.Glu229*, | |
| | ENST00000508628 | p.Glu278* | |
| 17:80288265:GC:G | ENST00000582970, | hgvsp: p.Gln239fs, | 1.00E−06 |
| | ENST00000319921, | p.Gln239fs, | |
| | ENST00000508628 | p.Gln288fs | |
| 17:80288337:C:T | ENST00000582970, | hgvsp: p.Gln262*, | 3.00E−06 |
| | ENST00000319921, | p.Gln262*, | |
| | ENST00000508628 | p.Gln311* | |
| 17:80288340:C:T | ENST00000582970, | hgvsp: p.Gln263*, | 1.00E−06 |
| | ENST00000319921, | p.Gln263*, | |
| | ENST00000508628 | p.Gln312* | |
| 17:80288688:TGAAAG:T | ENST00000582970, | hgvsp: p.Met289fs, | 1.00E−06 |
| | ENST00000319921, | p.Met289fs, | |
| | ENST00000508628 | p.Met338fs | |
| 17:80288714:C:T | ENST00000582970, | hgvsp: p.Gln298*, | 2.00E−06 |
| | ENST00000319921, | p.Gln298*, | |
| | ENST00000508628 | p.Gln347* | |
| 17:80288753:C:T | ENST00000582970, | hgvsp: p.Gln311*, | 1.00E−06 |
| | ENST00000319921, | p.Gln311*, | |
| | ENST00000508628 | p.Gln360* | |
| 17:80288756:G:A | ENST00000582970, | hgvsc: c.933 + 1G > A, | 3.00E−06 |
| | ENST00000319921, | c.933 + 1G > A, | |
| | ENST00000508628 | c.1080 + 1G > A | |
| 17:80289657:A:G | ENST00000582970, | hgvsc: c.934 − 2A > G, | 1.00E−06 |
| | ENST00000319921, | c.934 − 2A > G, | |
| | ENST00000508628 | c.1081 − 2A > G | |
| 17:80289698:GA:G | ENST00000582970, | hgvsp: p.Glu326fs, | 1.00E−06 |
| | ENST00000319921, | p.Glu326fs, | |
| | ENST00000508628 | p.Glu375fs | |
| 17:80289762:A:AC | ENST00000582970, | hgvsp: p.Arg347fs, | 1.00E−06 |
| | ENST00000319921, | p.Arg347fs, | |
| | ENST00000508628 | p.Arg396fs | |
| 17:80289788:G:T | ENST00000582970, | hgvsp: p.Glu355*, | 1.00E−06 |
| | ENST00000319921, | p.Glu355*, | |
| | ENST00000508628 | p.Glu404* | |
| 17:80289797:CA:C | ENST00000582970, | hgvsp: p.Asn360fs, | 1.00E−06 |
| | ENST00000319921, | p.Asn360fs, | |
| | ENST00000508628 | p.Asn409fs | |
| 17:80289820:CCAGGA:C | ENST00000582970, | hgvsp: p.Gln366fs, | 1.00E−06 |
| | ENST00000319921, | p.Gln366fs, | |
| | ENST00000508628 | p.Gln415fs | |
| 17:80289828:TG:T | ENST00000582970, | hgvsp: p.Lys369fs, | 1.00E−06 |
| | ENST00000319921, | p.Lys369fs, | |
| | ENST00000508628 | p.Lys418fs | |
| 17:80290568:A:T | ENST00000582970, | hgvsc: c.1113 − 2A > T, | 2.00E−06 |
| | ENST00000319921, | c.1113 − 2A > T, | |
| | ENST00000508628 | c.1260 − 2A > T | |
| 17:80290604:T:TA | ENST00000582970, | hgvsp: p.Phe383fs, | 1.00E−06 |
| | ENST00000319921, | p.Phe383fs, | |
| | ENST00000508628 | p.Phe432fs | |
| 17:80290651:TAA:T | ENST00000582970, | hgvsp: p.Lys399fs, | 1.00E−06 |
| | ENST00000319921, | p.Lys399fs, | |
| | ENST00000508628 | p.Lys448fs | |
| 17:80290689:C:CA | ENST00000582970, | hgvsp: p.Trp413fs, | 1.00E−06 |
| | ENST00000319921, | p.Trp413fs, | |
| | ENST00000508628 | p.Trp462fs | |
| 17:80290730:T:G | ENST00000582970, | hgvsc: c.1271 + 2T > G, | 1.00E−06 |
| | ENST00000319921, | c.1271 + 2T > G, | |
| | ENST00000508628 | c.1418 + 2T > G | |
| 17:80291626:A:G | ENST00000582970, | hgvsc: c.1272 − 2A > G, | 1.97E−06 |
| | ENST00000319921, | c.1272 − 2A > G, | |
| | ENST00000508628 | c.1419 − 2A > G | |
| 17:80291689:G:GA | ENST00000582970, | hgvsp: p.Asp445fs, | 1.00E−06 |
| | ENST00000319921, | p.Asp445fs, | |
| | ENST00000508628 | p.Asp494fs | |
| 17:80291754:C:G | ENST00000582970, | hgvsp: p.Tyr466*, | 7.35E−06 |
| | ENST00000319921, | p.Tyr466*, | |
| | ENST00000508628 | p.Tyr515* | |
| 17:80291764:C:T | ENST00000582970, | hgvsp: p.Gln470*, | 3.00E−06 |
| | ENST00000319921, | p.Gln470*, | |
| | ENST00000508628 | p.Gln519* | |
| 17:80291794:CTG:C | ENST00000582970, | hgvsp: p.Phe481fs, | 3.00E−06 |
| | ENST00000319921, | p.Phe481fs, | |
| | ENST00000508628 | p.Phe530fs | |
| 17:80291822:C:G | ENST00000582970, | hgvsp: p.Ser489*, | 4.00E−06 |
| | ENST00000319921, | p.Ser489*, | |
| | ENST00000508628 | p.Ser538* | |
| 17:80291829:T:C | ENST00000582970, | hgvsc: c.1471 + 2T > C, | 1.00E−06 |
| | ENST00000319921, | c.1471 + 2T > C, | |
| | ENST00000508628 | c.1618 + 2T > C | |
| 17:80294941:C:T | ENST00000582970, | hgvsp: p.Gln565*, | 1.00E−06 |
| | ENST00000319921, | p.Gln565*, | |
| | ENST00000508628 | p.Gln614* | |
| 17:80295004:G:A | ENST00000582970, | hgvsc: c.1755 + 1G > A, | 4.00E−06 |
| | ENST00000319921, | c.1755 + 1G > A, | |
| | ENST00000508628 | c.1902 + 1G > A | |
| 17:80295004:G:T | ENST00000582970, | hgvsc: c.1755 + 1G > T, | 1.00E−06 |
| | ENST00000319921, | c.1755 + 1G > T, | |
| | ENST00000508628 | c.1902 + 1G > T | |
| 17:80295555:A:T | ENST00000582970, | hgvsc: c.1756 − 2A > T, | 1.00E−06 |
| | ENST00000319921, | c.1756 − 2A > T, | |
| | ENST00000508628 | c.1903 − 2A > T | |
| 17:80295567:A:AC | ENST00000582970, | hgvsp: p.Leu590fs, | 1.00E−06 |
| | ENST00000319921, | p.Leu590fs, | |
| | ENST00000508628 | p.Leu639fs | |
| 17:80295568:C:G | ENST00000582970, | hgvsp: p.Tyr589*, | 8.00E−06 |
| | ENST00000319921, | p.Tyr589*, | |
| | ENST00000508628 | p.Tyr638* | |
| 17:80295741:TC:T | ENST00000582970, | hgvsp: p.Leu648fs, | 1.00E−06 |
| | ENST00000319921, | p.Leu648fs, | |
| | ENST00000508628 | p.Leu697fs | |
| 17:80295808:T:TC | ENST00000582970, | hgvsp: p.Gln670fs, | 1.96E−06 |
| | ENST00000319921, | p.Gln670fs, | |
| | ENST00000508628 | p.Gln719fs | |
| 17:80295813:GGTATTAT:G | ENST00000582970, | hgvsc: | 1.00E−06 |
| | ENST00000319921, | c.2012 + 1_2012 + 7delGTATTAT, | |
| | ENST00000508628 | c.2012 + 1_2012 + 7delGTATTAT, | |
| | | c.2159 + 1_2159 + 7delGTATTAT | |
| 17:80295814:GTAT:G | ENST00000582970, | hgvsc: | 3.57E−06 |
| | ENST00000319921, | c.2012 + 2_2012 + 4delTAT, | |
| | ENST00000508628 | c.2012 + 2_2012 + 4delTAT, | |
| | | c.2159 + 2_2159 + 4delTAT | |
| 17:80295814:G:A | ENST00000582970, | hgvsc: c.2012 + 1G > A, | 1.00E−06 |
| | ENST00000319921, | c.2012 + 1G > A, | |
| | ENST00000508628 | c.2159 + 1G > A | |
| 17:80298410:G:GTA | ENST00000582970, | hgvsp: p.Met702fs, | 1.00E−06 |
| | ENST00000319921, | p.Met702fs, | |
| | ENST00000508628 | p.Met751fs | |
| 17:80298469:G:GC | ENST00000582970, | hgvsp: p.Leu722fs, | 1.00E−06 |
| | ENST00000319921, | p.Leu722fs, | |
| | ENST00000508628 | p.Leu771fs | |
| 17:80306283:C:T | ENST00000582970, | hgvsp: p.Gln748*, | 7.00E−06 |
| | ENST00000319921, | p.Gln748*, | |
| | ENST00000508628 | p.Gln797* | |
| 17:80306419:C:G | ENST00000582970, | hgvsp: p.Ser793*, | 1.00E−06 |
| | ENST00000319921, | p.Ser793*, | |
| | ENST00000508628 | p.Ser842* | |
| 17:80307152:C:T | ENST00000582970, | hgvsp: p.Gln818*, | 1.00E−06 |
| | ENST00000319921, | p.Gln818*, | |
| | ENST00000508628 | p.Gln867* | |
| 17:80307176:C:T | ENST00000582970, | hgvsp: p.Arg826*, | 1.88E−06 |
| | ENST00000319921, | p.Arg826*, | |
| | ENST00000508628 | p.Arg875* | |
| 17:80307189:CT:C | ENST00000582970, | hgvsp: p.Tyr831fs, | 4.00E−06 |
| | ENST00000319921, | p.Tyr831fs, | |
| | ENST00000508628 | p.Tyr880fs | |
| 17:80309053:CTGTG:C | ENST00000582970, | hgvsp: p.Cys848fs, | 1.00E−06 |
| | ENST00000319921, | p.Cys848fs, | |
| | ENST00000508628 | p.Cys897fs | |
| 17:80313011:G:C | ENST00000582970, | hgvsc: c.2656 − 1G > C, | 1.00E−06 |
| | ENST00000319921, | c.2656 − 1G > C, | |
| | ENST00000508628 | c.2803 − 1G > C | |
| 17:80313024:CAG:C | ENST00000582970, | hgvsp: p.Asp892fs, | 2.91E−06 |
| | ENST00000319921, | p.Asp892fs, | |
| | ENST00000508628 | p.Asp941fs | |
| 17:80313082:C:CT | ENST00000582970, | hgvsp: p.Thr910fs, | 1.00E−06 |
| | ENST00000319921, | p.Thr910fs, | |
| | ENST00000508628 | p.Thr959fs | |
| 17:80313091:GGT:G | ENST00000582970, | hgvsp: p.Trp913fs, | 1.00E−06 |
| | ENST00000319921, | p.Trp913fs, | |
| | ENST00000508628 | p.Trp962fs | |
| 17:80313146:CACAT:C | ENST00000582970, | hgvsp: p.Tyr932fs, | 3.71E−06 |
| | ENST00000319921, | p.Tyr932fs, | |
| | ENST00000508628 | p.Tyr981fs | |
| 17:80317278:G:A | ENST00000582970, | hgvsc: c.2901 + 1G > A, | 1.00E−06 |
| | ENST00000319921, | c.2901 + 1G > A, | |
| | ENST00000508628 | c.3048 + 1G > A | |
| 17:80319373:C:T | ENST00000319921 | hgvsp: p.Gln1029* | 1.06E−05 |
| 17:80319422:CAG:C | ENST00000319921 | hgvsp: p.Glu1046fs | 2.00E−06 |
| 17:80319437:G:A | ENST00000319921 | hgvsp: p.Trp1050* | 1.00E−06 |
| 17:80325108:A:T | ENST00000582970, | hgvsp: p.Lys1035*, | 1.00E−06 |
| | ENST00000508628 | p.Lys1084* | |
| 17:80325116:GC:G | ENST00000582970, | hgvsp: p.Pro1038fs, | 1.00E−06 |
| | ENST00000508628 | p.Pro1087fs | |
| 17:80325166:T:A | ENST00000582970, | hgvsp: p.Leu1054*, | 5.00E−06 |
| | ENST00000508628 | p.Leu1103* | |
| 17:80325199:GT:G | ENST00000582970, | hgvsc: c.3193 + 2delT, | 1.00E−06 |
| | ENST00000508628 | c.3340 + 2delT | |
| 17:80327879:ACT:A | ENST00000582970, | hgvsp: p.Ser1087fs, | 1.00E−06 |
| | ENST00000508628 | p.Ser1136fs | |
| 17:80327967:GT:G | ENST00000582970, | hgvsp: p.Asp1118fs, | 4.00E−06 |
| | ENST00000508628 | p.Asp1167fs | |
| 17:80327981:G:A | ENST00000582970, | hgvsp: p.Trp1120*, | 1.00E−06 |
| | ENST00000508628 | p.Trp1169* | |
| 17:80327991:T:C | ENST00000582970, | hgvsc: c.3367 + 2T > C, | 3.00E−06 |
| | ENST00000508628 | c.3514 + 2T > C | |
| 17:80328326:A:G | ENST00000582970, | hgvsc: c.3368 − 2A > G, | 1.00E−06 |
| | ENST00000508628 | c.3515 − 2A > G | |
| 17:80328330:G:GA | ENST00000582970, | hgvsp: p.Ser1126fs, | 2.00E−06 |
| | ENST00000508628 | p.Ser1175fs | |
| 17:80328330:G:T | ENST00000582970, | hgvsp: p.Glu1124*, | 1.00E−06 |
| | ENST00000508628 | p.Glu1173* | |
| 17:80328396:G:T | ENST00000582970, | hgvsp: p.Glu1146*, | 1.00E−06 |
| | ENST00000508628 | p.Glu1195* | |
| 17:80328427:GT:G | ENST00000582970, | hgvsp: p.Cys1156fs, | 3.00E−06 |
| | ENST00000508628 | p.Cys1205fs | |
| 17:80328473:AC:A | ENST00000582970, | hgvsp: p.Gln1172fs, | 2.00E−06 |
| | ENST00000508628 | p.Gln1221fs | |
| 17:80332004:A:G | ENST00000582970, | hgvsc: c.3518 − 2A > G, | 1.00E−06 |
| | ENST00000508628 | c.3665 − 2A > G | |
| 17:80332005:G:A | ENST00000582970, | hgvsc: c.3518 − 1G > A, | 1.00E−06 |
| | ENST00000508628 | c.3665 − 1G > A | |
| 17:80332012:TTG:T | ENST00000582970, | hgvsp: p.Phe1175fs, | 1.00E−06 |
| | ENST00000508628 | p.Phe1224fs | |
| 17:80332036:CA:C | ENST00000582970, | hgvsp: p.Gln1184fs, | 1.00E−06 |
| | ENST00000508628 | p.Gln1233fs | |
| 17:80332038:C:T | ENST00000582970, | hgvsp: p.Gln1184*, | 1.00E−06 |
| | ENST00000508628 | p.Gln1233* | |
| 17:80332188:C:T | ENST00000582970, | hgvsp: p.Gln1234*, | 1.88E−06 |
| | ENST00000508628 | p.Gln1283* | |
| 17:80332224:GA:G | ENST00000582970, | hgvsp: p.Glu1246fs, | 1.00E−06 |
| | ENST00000508628 | p.Glu1295fs | |
| 17:80332231:A:AG | ENST00000582970, | hgvsp: p.Glu1249fs, | 1.00E−06 |
| | ENST00000508628 | p.Glu1298fs | |
| 17:80332250:AGAGTTGCT:A | ENST00000582970, | hgvsp: p.Leu1256fs, | 1.00E−06 |
| | ENST00000508628 | p.Leu1305fs | |
| 17:80332302:GA:G | ENST00000582970, | hgvsp: p.Glu1273fs, | 4.00E−06 |
| | ENST00000508628 | p.Glu1322fs | |
| 17:80332631:TG:T | ENST00000582970, | hgvsc: c.4143 + 1delG, | 1.00E−06 |
| | ENST00000508628 | c.4290 + 1delG | |
| 17:80332632:G:A | ENST00000582970, | hgvsc: c.4143 + 1G > A, | 1.00E−06 |
| | ENST00000508628 | c.4290 + 1G > A | |
| 17:80336159:A:C | ENST00000582970, | hgvsc: c.4310 − 2A > C, | 5.00E−06 |
| | ENST00000508628 | c.4457 − 2A > C | |
| 17:80337615:GAA:G | ENST00000582970, | hgvsp: p.Lys1520fs, | 1.00E−06 |
| | ENST00000508628 | p.Lys1569fs | |
| 17:80337636:TG:T | ENST00000582970, | hgvsp: p.Ser1528fs, | 2.00E−06 |
| | ENST00000508628 | p.Ser1577fs | |
| 17:80337832:G:A | ENST00000582970, | hgvsc: c.4669 − 1G > A, | 2.00E−06 |
| | ENST00000508628 | c.4816 − 1G > A | |
| 17:80337896:C:T | ENST00000582970, | hgvsp: p.Arg1578*, | 2.00E−06 |
| | ENST00000508628 | p.Arg1627* | |
| 17:80337977:G:T | ENST00000582970, | hgvsp: p.Glu1605*, | 1.00E−06 |
| | ENST00000508628 | p.Glu1654* | |
| 17:80339278:G:A | ENST00000582970, | hgvsp: p.Trp1637*, | 8.86E−06 |
| | ENST00000508628 | p.Trp1686* | |
| 17:80339450:C:T | ENST00000582970, | hgvsp: p.Arg1695*, | 2.09E−05 |
| | ENST00000508628 | p.Arg1744* | |
| 17:80339524:GC:G | ENST00000582970, | hgvsp: p.Pro1721fs, | 4.62E−06 |
| | ENST00000508628 | p.Pro1770fs | |
| 17:80339592:TA:T | ENST00000582970, | hgvsp: p.Arg1743fs, | 2.00E−06 |
| | ENST00000508628 | p.Arg1792fs | |
| 17:80339594:AG:A | ENST00000582970, | hgvsp: p.Ala1744fs, | 1.00E−06 |
| | ENST00000508628 | p.Ala1793fs | |
| 17:80339602:T:TG | ENST00000582970, | hgvsp: p.Val1746fs, | 1.00E−06 |
| | ENST00000508628 | p.Val1795fs | |
| 17:80339632:C:G | ENST00000582970, | hgvsp: p.Tyr1755*, | 1.00E−06 |
| | ENST00000508628 | p.Tyr1804* | |
| 17:80339654:G:T | ENST00000582970, | hgvsp: p.Glu1763*, | 1.00E−06 |
| | ENST00000508628 | p.Glu1812* | |
| 17:80339673:T:TTG | ENST00000582970, | hgvsp: p.Leu1769fs, | 2.00E−06 |
| | ENST00000508628 | p.Leu1818fs | |
| 17:80339728:G:GTGCCTTCC | ENST00000582970, | hgvsp: p.Asp1795fs, | 3.93E−06 |
| | ENST00000508628 | p.Asp1844fs | |
| 17:80339728:GTGCCTTCC:G | ENST00000582970, | hgvsp: p.Phe1792fs, | 1.00E−05 |
| | ENST00000508628 | p.Phe1841fs | |
| 17:80339741:T:TTCCTGCCC | ENST00000582970, | hgvsp: p.Asp1795fs, | 1.00E−06 |
| | ENST00000508628 | p.Asp1844fs | |
| 17:80339894:GC:G | ENST00000582970, | hgvsp: p.Ala1844fs, | 1.00E−06 |
| | ENST00000508628 | p.Ala1893fs | |
| 17:80339942:T:TA | ENST00000582970, | hgvsp: p.Tyr1859fs, | 8.00E−06 |
| | ENST00000508628 | p.Tyr1908fs | |
| 17:80340010:C:A | ENST00000582970, | hgvsp: p.Cys1881*, | 1.00E−06 |
| | ENST00000508628 | p.Cys1930* | |
| 17:80340110:CTG:C | ENST00000582970, | hgvsp: p.Cys1916fs, | 1.40E−05 |
| | ENST00000508628 | p.Cys1965fs | |
| 17:80340169:G:A | ENST00000582970, | hgvsp: p.Trp1934*, | 3.00E−06 |
| | ENST00000508628 | p.Trp1983* | |
| 17:80340253:C:A | ENST00000582970, | hgvsp: p.Tyr1962*, | 5.00E−06 |
| | ENST00000508628 | p.Tyr2011* | |
| 17:80340258:CA:C | ENST00000582970, | hgvsp: p.Gly1965fs, | 1.00E−06 |
| | ENST00000508628 | p.Gly2014fs | |
| 17:80340357:G:A | ENST00000582970, | hgvsc: c.5989 + 1G > A, | 1.00E−06 |
| | ENST00000508628 | c.6136 + 1G > A | |
| 17:80343267:TC:T | ENST00000582970, | hgvsp: p.Leu2043fs, | 1.00E−06 |
| | ENST00000508628 | p.Leu2092fs | |
| 17:80343278:C:T | ENST00000582970, | hgvsp: p.Gln2046*, | 1.00E−06 |
| | ENST00000508628 | p.Gln2095* | |
| 17:80343284:C:T | ENST00000582970, | hgvsp: p.Gln2048*, | 1.00E−06 |
| | ENST00000508628 | p.Gln2097* | |
| 17:80343286:GA:G | ENST00000582970, | hgvsp: p.Lys2049fs, | 1.00E−06 |
| | ENST00000508628 | p.Lys2098fs | |
| 17:80343297:TG:T | ENST00000582970, | hgvsp: p.Leu2053fs, | 1.00E−06 |
| | ENST00000508628 | p.Leu2102fs | |
| 17:80343856:G:T | ENST00000582970, | hgvsc: c.6184 − 1G > T, | 1.00E−06 |
| | ENST00000508628 | c.6331 − 1G > T | |
| 17:80343880:TC:T | ENST00000582970, | hgvsp: p.Leu2070fs, | 3.00E−06 |
| | ENST00000508628 | p.Leu2119fs | |
| 17:80343902:C:T | ENST00000582970, | hgvsp: p.Gln2077*, | 1.00E−06 |
| | ENST00000508628 | p.Gln2126* | |
| 17:80343907:C:G | ENST00000582970, | hgvsp: p.Tyr2078*, | 1.00E−06 |
| | ENST00000508628 | p.Tyr2127* | |
| 17:80343933:G:A | ENST00000582970, | hgvsp: p.Trp2087*, | 3.10E−05 |
| | ENST00000508628 | p.Trp2136* | |
| 17:80343951:AT:A | ENST00000582970, | hgvsp: p.Leu2094fs, | 1.88E−06 |
| | ENST00000508628 | p.Leu2143fs | |
| 17:80343953:TTGTA:T | ENST00000582970, | hgvsp: p.Tyr2095fs, | 2.00E−06 |
| | ENST00000508628 | p.Tyr2144fs | |
| 17:80344008:C:A | ENST00000582970, | hgvsp: p.Ser2112*, | 1.00E−06 |
| | ENST00000508628 | p.Ser2161* | |
| 17:80344695:G:GTT | ENST00000582970, | hgvsp: p.Phe2123fs, | 2.00E−06 |
| | ENST00000508628 | p.Phe2172fs | |
| 17:80344718:CA:C | ENST00000582970, | hgvsp: p.Val2130fs, | 1.00E−06 |
| | ENST00000508628 | p.Val2179fs | |
| 17:80344815:CA:C | ENST00000582970, | hgvsp: p.Ser2161fs, | 1.00E−06 |
| | ENST00000508628 | p.Ser2210fs | |
| 17:80344839:C:A | ENST00000582970, | hgvsp: p.Tyr2168*, | 3.00E−06 |
| | ENST00000508628 | p.Tyr2217* | |
| 17:80344950:C:A | ENST00000582970, | hgvsp: p.Cys2205*, | 1.00E−06 |
| | ENST00000508628 | p.Cys2254* | |
| 17:80344950:C:CG | ENST00000582970, | hgvsp: p.Val2207fs, | 1.00E−06 |
| | ENST00000508628 | p.Val2256fs | |
| 17:80344961:AC:A | ENST00000582970, | hgvsp: p.Pro2210fs, | 1.00E−06 |
| | ENST00000508628 | p.Pro2259fs | |
| 17:80345037:CT:C | ENST00000582970, | hgvsp: p.Cys2235fs, | 3.83E−06 |
| | ENST00000508628 | p.Cys2284fs | |
| 17:80345064:A:AC | ENST00000582970, | hgvsp: p.Leu2244fs, | 2.00E−06 |
| | ENST00000508628 | p.Leu2293fs | |
| 17:80345066:TGA:T | ENST00000582970, | hgvsp: p.Arg2245fs, | 3.71E−06 |
| | ENST00000508628 | p.Arg2294fs | |
| 17:80345250:C:A | ENST00000582970, | hgvsp: p.Tyr2305*, | 3.00E−06 |
| | ENST00000508628 | p.Tyr2354* | |
| 17:80345302:C:T | ENST00000582970, | hgvsp: p.Gln2323*, | 1.00E−06 |
| | ENST00000508628 | p.Gln2372* | |
| 17:80345359:AAG:A | ENST00000582970, | hgvsp: p.Asp2344fs, | 1.00E−06 |
| | ENST00000508628 | p.Asp2393fs | |
| 17:80345388:C:G | ENST00000582970, | hgvsp: p.Tyr2351*, | 1.00E−06 |
| | ENST00000508628 | p.Tyr2400* | |
| 17:80345458:G:T | ENST00000582970, | hgvsp: p.Glu2375*, | 4.00E−06 |
| | ENST00000508628 | p.Glu2424* | |
| 17:80345483:T:TC | ENST00000582970, | hgvsp: p.Gln2385fs, | 1.00E−06 |
| | ENST00000508628 | p.Gln2434fs | |
| 17:80345488:C:T | ENST00000582970, | hgvsp: p.Gln2385*, | 9.00E−06 |
| | ENST00000508628 | p.Gln2434* | |
| 17:80345797:G:T | ENST00000582970, | hgvsp: p.Glu2488*, | 1.00E−06 |
| | ENST00000508628 | p.Glu2537* | |
| 17:80345881:T:TC | ENST00000582970, | hgvsp: p.Gly2517fs, | 1.00E−06 |
| | ENST00000508628 | p.Gly2566fs | |
| 17:80345974:G:GT | ENST00000582970, | hgvsp: p.Ser2548fs, | 1.00E−06 |
| | ENST00000508628 | p.Ser2597fs | |
| 17:80346095:AC:A | ENST00000582970, | hgvsp: p.Asp2587fs, | 1.00E−06 |
| | ENST00000508628 | p.Asp2636fs | |
| 17:80346270:GAA:G | ENST00000582970, | hgvsp: p.Lys2646fs, | 1.88E−06 |
| | ENST00000508628 | p.Lys2695fs | |
| 17:80346351:CA:C | ENST00000582970, | hgvsp: p.Asn2674fs, | 3.00E−06 |
| | ENST00000508628 | p.Asn2723fs | |
| 17:80346384:G:A | ENST00000582970, | hgvsp: p.Trp2683*, | 3.00E−06 |
| | ENST00000508628 | p.Trp2732* | |
| 17:80346414:C:G | ENST00000582970, | hgvsp: p.Tyr2693*, | 1.00E−06 |
| | ENST00000508628 | p.Tyr2742* | |
| 17:80346455:TC:T | ENST00000582970, | hgvsp: p.Ile2707fs, | 1.00E−06 |
| | ENST00000508628 | p.Ile2756fs | |
| 17:80346484:GA:G | ENST00000582970, | hgvsp: p.Asp2717fs, | 3.00E−06 |
| | ENST00000508628 | p.Asp2766fs | |
| 17:80346624:TC:T | ENST00000582970, | hgvsp: p.Leu2765fs, | 1.00E−06 |
| | ENST00000508628 | p.Leu2814fs | |
| 17:80346632:TC:T | ENST00000582970, | hgvsp: p.Leu2767fs, | 1.00E−06 |
| | ENST00000508628 | p.Leu2816fs | |
| 17:80346781:CAG:C | ENST00000582970, | hgvsp: p.Gln2816fs, | 1.00E−06 |
| | ENST00000508628 | p.Gln2865fs | |
| 17:80346820:C:T | ENST00000582970, | hgvsp: p.Gln2829*, | 2.00E−06 |
| | ENST00000508628 | p.Gln2878* | |
| 17:80346846:C:A | ENST00000582970, | hgvsp: p.Tyr2837*, | 1.00E−06 |
| | ENST00000508628 | p.Tyr2886* | |
| 17:80346955:G:GC | ENST00000582970, | hgvsp: p.His2876fs, | 5.00E−06 |
| | ENST00000508628 | p.His2925fs | |
| 17:80347044:CA:C | ENST00000582970, | hgvsp: p.Ser2904fs, | 1.00E−06 |
| | ENST00000508628 | p.Ser2953fs | |
| 17:80347171:C:T | ENST00000582970, | hgvsp: p.Gln2946*, | 1.00E−06 |
| | ENST00000508628 | p.Gln2995* | |
| 17:80347178:AG:A | ENST00000582970, | hgvsp: p.Glu2949fs, | 1.00E−06 |
| | ENST00000508628 | p.Glu2998fs | |
| 17:80347180:G:T | ENST00000582970, | hgvsp: p.Glu2949*, | 1.00E−06 |
| | ENST00000508628 | p.Glu2998* | |
| 17:80347393:CAG:C | ENST00000582970, | hgvsp: p.Asn3021fs, | 2.00E−06 |
| | ENST00000508628 | p.Asn3070fs | |
| 17:80347435:C:T | ENST00000582970, | hgvsp: p.Gln3034*, | 2.00E−06 |
| | ENST00000508628 | p.Gln3083* | |
| 17:80347460:T:G | ENST00000582970, | hgvsp: p.Leu3042*, | 4.00E−06 |
| | ENST00000508628 | p.Leu3091* | |
| 17:80347573:TAC:T | ENST00000582970, | hgvsp: p.Thr3081fs, | 1.00E−06 |
| | ENST00000508628 | p.Thr3130fs | |
| 17:80347684:A:AGG | ENST00000582970, | hgvsp: p.Asn3117fs, | 1.00E−06 |
| | ENST00000508628 | p.Asn3166fs | |
| 17:80347689:G:GGTCC | ENST00000582970, | hgvsp: p.Tyr3119fs, | 1.00E−06 |
| | ENST00000508628 | p.Tyr3168fs | |
| 17:80347690:TA:T | ENST00000582970, | hgvsp: p.Tyr3119fs, | 1.00E−06 |
| | ENST00000508628 | p.Tyr3168fs | |
| 17:80347695:C:G | ENST00000582970, | hgvsp: p.Tyr3120*, | 1.00E−06 |
| | ENST00000508628 | p.Tyr3169* | |
| 17:80347807:TACAA:T | ENST00000582970, | hgvsp: p.Lys3159fs, | 1.00E−06 |
| | ENST00000508628 | p.Lys3208fs | |
| 17:80347815:CT:C | ENST00000582970, | hgvsp: p.Ile3163fs, | 1.00E−06 |
| | ENST00000508628 | p.Ile3212fs | |
| 17:80347884:G:A | ENST00000582970, | hgvsp: p.Trp3183*, | 2.00E−06 |
| | ENST00000508628 | p.Trp3232* | |
| 17:80347998:C:G | ENST00000582970, | hgvsp: p.Tyr3221*, | 1.00E−06 |
| | ENST00000508628 | p.Tyr3270* | |
| 17:80348105:TC:T | ENST00000582970, | hgvsp: p.Leu3258fs, | 1.00E−06 |
| | ENST00000508628 | p.Leu3307fs | |
| 17:80348180:G:A | ENST00000582970, | hgvsp: p.Trp3282*, | 2.00E−06 |
| | ENST00000508628 | p.Trp3331* | |
| 17:80348181:G:A | ENST00000582970, | hgvsp: p.Trp3282*, | 1.00E−06 |
| | ENST00000508628 | p.Trp3331* | |
| 17:80348196:C:A | ENST00000582970, | hgvsp: p.Tyr3287*, | 9.00E−06 |
| | ENST00000508628 | p.Tyr3336* | |
| 17:80349779:TTC:T | ENST00000582970, | hgvsp: p.Ser3322fs, | 1.00E−06 |
| | ENST00000508628 | p.Ser3371fs | |
| 17:80349905:C:T | ENST00000582970, | hgvsp: p.Arg3363*, | 9.00E−06 |
| | ENST00000508628 | p.Arg3412* | |
| 17:80349907:G:T | ENST00000582970, | hgvsc: c.10088 + 1G > T, | 1.00E−06 |
| | ENST00000508628 | c.10235 + 1G > T | |
| 17:80350338:A:AT | ENST00000582970, | hgvsp: p.Gln3378fs, | 1.00E−06 |
| | ENST00000508628 | p.Gln3427fs | |
| 17:80350377:C:T | ENST00000582970, | hgvsp: p.Gln3389*, | 1.00E−06 |
| | ENST00000508628 | p.Gln3438* | |
| 17:80350398:T:C | ENST00000582970, | hgvsc: c.10184 + 2T > C, | 1.00E−06 |
| | ENST00000508628 | c.10331 + 2T > C | |
| 17:80351684:G:A | ENST00000582970, | hgvsc: c.10185 − 1G > A, | 1.00E−06 |
| | ENST00000508628 | c.10332 − 1G > A | |
| 17:80352939:G:T | ENST00000582970, | hgvsc: c.10304 − 1G > T, | 1.96E−06 |
| | ENST00000508628 | c.10451 − 1G > T | |
| 17:80353029:C:T | ENST00000582970, | hgvsp: p.Gln3465*, | 2.00E−06 |
| | ENST00000508628 | p.Gln3514* | |
| 17:80353510:A:G | ENST00000582970, | hgvsc: c.10424 − 2A > G, | 1.00E−06 |
| | ENST00000508628 | c.10571 − 2A > G | |
| 17:80353510:A:C | ENST00000582970, | hgvsc: c.10424 − 2A > C, | 1.00E−06 |
| | ENST00000508628 | c.10571 − 2A > C | |
| 17:80354036:C:CA | ENST00000582970, | hgvsp: p.Thr3533fs, | 5.00E−06 |
| | ENST00000508628 | p.Thr3582fs | |
| 17:80354094:G:T | ENST00000582970, | hgvsp: p.Glu3552*, | 1.00E−06 |
| | ENST00000508628 | p.Glu3601* | |
| 17:80354483:T:A | ENST00000582970, | hgvsp: p.Leu3590*, | 2.91E−06 |
| | ENST00000508628 | p.Leu3639* | |
| 17:80354494:G:T | ENST00000582970, | hgvsp: p.Glu3594*, | 1.00E−06 |
| | ENST00000508628 | p.Glu3643* | |
| 17:80354495:AAG:A | ENST00000582970, | hgvsp: p.Ser3596fs, | 1.00E−06 |
| | ENST00000508628 | p.Ser3645fs | |
| 17:80354557:C:T | ENST00000582970, | hgvsp: p.Gln3615*, | 1.00E−06 |
| | ENST00000508628 | p.Gln3664* | |
| 17:80354575:AGGT:A | ENST00000582970, | hgvsp: p.Arg3621fs, | 1.00E−05 |
| | ENST00000508628 | p.Arg3670fs | |
| 17:80358299:G:A | ENST00000582970, | hgvsp: p.Trp3625*, | 1.00E−06 |
| | ENST00000508628 | p.Trp3674* | |
| 17:80358310:C:T | ENST00000582970, | hgvsp: p.Gln3629*, | 3.00E−06 |
| | ENST00000508628 | p.Gln3678* | |
| 17:80358357:CAG:C | ENST00000582970, | hgvsp: p.Asp3646fs, | 2.00E−06 |
| | ENST00000508628 | p.Asp3695fs | |
| 17:80358357:C:CA | ENST00000582970, | hgvsp: p.Arg3645fs, | 5.00E−06 |
| | ENST00000508628 | p.Arg3694fs | |
| 17:80358404:G:A | ENST00000582970, | hgvsp: p.Trp3660*, | 1.00E−06 |
| | ENST00000508628 | p.Trp3709* | |
| 17:80358438:C:CA | ENST00000582970, | hgvsp: p.Thr3672fs, | 2.00E−06 |
| | ENST00000508628 | p.Thr3721fs | |
| 17:80361759:C:CA | ENST00000582970, | hgvsp: p.Phe3743fs, | 3.00E−06 |
| | ENST00000508628 | p.Phe3792fs | |
| 17:80363098:CCA:C | ENST00000582970, | hgvsc: c.H356 − 3_11356 − 2delCA, | 7.00E−06 |
| | ENST00000508628 | c.H503 − 3_11503 − 2delCA | |
| 17:80363151:C:G | ENST00000582970, | hgvsp: p.Ser3802*, | 1.30E−05 |
| | ENST00000508628 | p.Ser3851* | |
| 17:80363158:GC:G | ENST00000582970, | hgvsp: p.Glu3806fs, | 8.00E−06 |
| | ENST00000508628 | p.Glu3855fs | |
| 17:80363185:G:A | ENST00000582970, | hgvsp: p.Trp3813*, | 1.00E−06 |
| | ENST00000508628 | p.Trp3862* | |
| 17:80363199:A:AG | ENST00000582970, | hgvsp: p.Tyr3818fs, | 2.00E−06 |
| | ENST00000508628 | p.Tyr3867fs | |
| 17:80363200:C:A | ENST00000582970, | hgvsp: p.Tyr3818*, | 2.00E−06 |
| | ENST00000508628 | p.Tyr3867* | |
| 17:80363608:G:A | ENST00000582970, | hgvsc: c.11569 − 1G > A, | 1.00E−06 |
| | ENST00000508628 | c.11716 − 1G > A | |
| 17:80363674:TC:T | ENST00000582970, | hgvsp: p.Gln3880fs, | 1.00E−06 |
| | ENST00000508628 | p.Gln3929fs | |
| 17:80363780:AG:A | ENST00000582970, | hgvsp: p.Glu3915fs, | 3.00E−06 |
| | ENST00000508628 | p.Glu3964fs | |
| 17:80364441:G:A | ENST00000582970, | hgvsp: p.Trp3920*, | 1.88E−06 |
| | ENST00000508628 | p.Trp3969* | |
| 17:80364539:TTCTTACTA:T | ENST00000582970, | hgvsp: p.Phe3953fs, | 1.00E−06 |
| | ENST00000508628 | p.Phe4002fs | |
| 17:80367764:C:CT | ENST00000582970, | hgvsp: p.Asp3964fs, | 1.00E−06 |
| | ENST00000508628 | p.Asp4013fs | |
| 17:80367765:T:TGACGTGAA | ENST00000582970, | hgvsp: p.His3968fs, | 1.00E−06 |
| | ENST00000508628 | p.His4017fs | |
| 17:80368024:C:A | ENST00000582970, | hgvsp: p.Cys4012*, | 1.00E−06 |
| | ENST00000508628 | p.Cys4061* | |
| 17:80368059:G:A | ENST00000582970, | hgvsp: p.Trp4024*, | 2.00E−06 |
| | ENST00000508628 | p.Trp4073* | |
| 17:80368090:C:A | ENST00000582970, | hgvsp: p.Tyr4034*, | 1.00E−06 |
| | ENST00000508628 | p.Tyr4083* | |
| 17:80369513:AAAAG:A | ENST00000582970, | hgvsp: p.Glu4056fs, | 1.00E−06 |
| | ENST00000508628 | p.Glu4105fs | |
| 17:80369542:AAC:A | ENST00000582970, | hgvsp: p.Asn4066fs, | 2.90E−06 |
| | ENST00000508628 | p.Asn4115fs | |
| 17:80369595:GC:G | ENST00000582970, | hgvsp: p.Pro4084fs, | 1.00E−06 |
| | ENST00000508628 | p.Pro4133fs | |
| 17:80369668:CA:C | ENST00000582970, | hgvsp: p.Gln4108fs, | 3.00E−06 |
| | ENST00000508628 | p.Gln4157fs | |
| 17:80369672:G:A | ENST00000582970, | hgvsc: c.12325 + 1G > A, | 4.00E−06 |
| | ENST00000508628 | c.12472 + 1G > A | |
| 17:80369673:T:G | ENST00000582970, | hgvsc: c.12325 + 2T > G, | 2.00E−06 |
| | ENST00000508628 | c.12472 + 2T > G | |
| 17:80369673:T:C | ENST00000582970, | hgvsc: c.12325 + 2T > C, | 3.00E−06 |
| | ENST00000508628 | c.12472 + 2T > C | |
| 17:80369787:ATC:A | ENST00000582970, | hgvsp: p.Pro4119fs, | 5.53E−06 |
| | ENST00000508628 | p.Pro4168fs | |
| 17:80369787:ATCTC:A | ENST00000582970, | hgvsp: p.Ser4118fs, | 2.00E−06 |
| | ENST00000508628 | p.Ser4167fs | |
| 17:80369869:T:A | ENST00000582970, | hgvsc: c.12425 + 2T > A, | 1.00E−06 |
| | ENST00000508628 | c.12572 + 2T > A | |
| 17:80371872:A:G | ENST00000582970, | hgvsc: c.12426 − 2A > G, | 1.88E−06 |
| | ENST00000508628 | c.12573 − 2A > G | |
| 17:80371887:AAAGATTAT:A | ENST00000582970, | hgvsp: p.Lys4147fs, | 1.00E−06 |
| | ENST00000508628 | p.Lys4196fs | |
| 17:80371899:C:T | ENST00000582970, | hgvsp: p.Gln4151*, | 1.00E−06 |
| | ENST00000508628 | p.Gln4200* | |
| 17:80371909:T:A | ENST00000582970, | hgvsp: p.Leu4154*, | 0 |
| | ENST00000508628 | p.Leu4203* | |
| 17:80371918:T:TA | ENST00000582970, | hgvsp: p.Lys4160fs, | 3.00E−06 |
| | ENST00000508628 | p.Lys4209fs | |
| 17:80371918:TAA:T | ENST00000582970, | hgvsp: p.Lys4159fs, | 0 |
| | ENST00000508628 | p.Lys4208fs | |
| 17:80371926:A:AAAGC | ENST00000582970, | hgvsp: p.Phe4162fs, | 2.00E−06 |
| | ENST00000508628 | p.Phe4211fs | |
| 17:80371929:GCATT:G | ENST00000582970, | hgvsp: p.Phe4162fs, | 1.00E−06 |
| | ENST00000508628 | p.Phe4211fs | |
| 17:80371945:AT:A | ENST00000582970, | hgvsp: p.Asp4166fs, | 2.00E−06 |
| | ENST00000508628 | p.Asp4215fs | |
| 17:80371946:TA:T | ENST00000582970, | hgvsp: p.Thr4168fs, | 0 |
| | ENST00000508628 | p.Thr4217fs | |
| 17:80371953:G:GAACT | ENST00000582970, | hgvsp: p.Tyr4171fs, | 1.00E−06 |
| | ENST00000508628 | p.Tyr4220fs | |
| 17:80371967:CT:C | ENST00000582970, | hgvsp: p.Phe4174fs, | 1.00E−06 |
| | ENST00000508628 | p.Phe4223fs | |
| 17:80371979:C:A | ENST00000582970, | hgvsp: p.Cys4177*, | 1.00E−06 |
| | ENST00000508628 | p.Cys4226* | |
| 17:80371981:TG:T | ENST00000582970, | hgvsp: p.Glu4179fs, | 0 |
| | ENST00000508628 | p.Glu4228fs | |
| 17:80371986:GT:G | ENST00000582970, | hgvsc: c.12537 + 2delT, | 1.00E−06 |
| | ENST00000508628 | c.12684 + 2delT | |
| 17:80371986:G:GT | ENST00000582970, | hgvsc: c.12537 + 1_12537 + 2insT, | 1.00E−06 |
| | ENST00000508628 | c.12684 + 1_12684 + 2insT | |
| 17:80372525:C:G | ENST00000582970, | hgvsp: p.Ser4181*, | 4.00E−06 |
| | ENST00000508628 | p.Ser4230* | |
| 17:80372525:C:A | ENST00000582970, | hgvsp: p.Ser4181*, | 1.00E−06 |
| | ENST00000508628 | p.Ser4230* | |
| 17:80372553:CAG:C | ENST00000582970, | hgvsp: p.Arg4191fs, | 1.00E−06 |
| | ENST00000508628 | p.Arg4240fs | |
| 17:80372607:T:A | ENST00000582970, | hgvsp: p.Tyr4208*, | 4.00E−06 |
| | ENST00000508628 | p.Tyr4257* | |
| 17:80372662:C:T | ENST00000582970, | hgvsp: p.Gln4227*, | 1.00E−06 |
| | ENST00000508628 | p.Gln4276* | |
| 17:80372736:C:T | ENST00000582970, | hgvsc: c.12751 + 2C > T, | 2.00E−06 |
| | ENST00000508628 | c.12898 + 2C > T | |
| 17:80372992:C:T | ENST00000582970, | hgvsp: p.Gln4257*, | 1.00E−06 |
| | ENST00000508628 | p.Gln4306* | |
| 17:80373059:TG:T | ENST00000582970, | hgvsp: p.Val4280fs, | 3.00E−06 |
| | ENST00000508628 | p.Val4329fs | |
| 17:80373135:G:A | ENST00000582970, | hgvsp: p.Trp4304*, | 1.00E−06 |
| | ENST00000508628 | p.Trp4353* | |
| 17:80373142:C:CA | ENST00000582970, | hgvsp: p.Pro4307fs, | 1.00E−06 |
| | ENST00000508628 | p.Pro4356fs | |
| 17:80374482:C:CA | ENST00000582970, | hgvsp: p.Met4324fs, | 2.90E−06 |
| | ENST00000508628 | p.Met4373fs | |
| 17:80374494:T:TAC | ENST00000582970, | hgvsp: p.Leu4328fs, | 1.00E−06 |
| | ENST00000508628 | p.Leu4377fs | |
| 17:80374512:G:T | ENST00000582970, | hgvsp: p.Glu4333*, | 8.00E−06 |
| | ENST00000508628 | p.Glu4382* | |
| 17:80374519:A:AG | ENST00000582970, | hgvsp: p.Ala4336fs, | 1.00E−06 |
| | ENST00000508628 | p.Ala4385fs | |
| 17:80374574:TAA:T | ENST00000582970, | hgvsp: p.Lys4354fs, | 1.00E−06 |
| | ENST00000508628 | p.Lys4403fs | |
| 17:80374587:AAG:A | ENST00000582970, | hgvsp: p.Lys4358fs, | 2.70E−05 |
| | ENST00000508628 | p.Lys4407fs | |
| 17:80375764:GC:G | ENST00000582970, | hgvsp: p.Cys4360fs, | 1.60E−05 |
| | ENST00000508628 | p.Cys4409fs | |
| 17:80375813:T:TA | ENST00000582970, | hgvsp: p.Arg4377fs, | 1.00E−06 |
| | ENST00000508628 | p.Arg4426fs | |
| 17:80375827:TTTTG:T | ENST00000582970, | hgvsp: p.Leu4382fs, | 1.00E−06 |
| | ENST00000508628 | p.Leu4431fs | |
| 17:80375854:T:TC | ENST00000582970, | hgvsp: p.His4391fs, | 1.88E−06 |
| | ENST00000508628 | p.His4440fs | |
| 17:80376435:TG:T | ENST00000582970, | hgvsp: p.Gly4441fs, | 1.00E−06 |
| | ENST00000508628 | p.Gly4490fs | |
| 17:80376544:G:T | ENST00000582970, | hgvsc: c.13428 + 1G > T, | 1.00E−06 |
| | ENST00000508628 | c.13575 + 1G > T | |
| 17:80376934:G:A | ENST00000582970, | hgvsp: p.Trp4494*, | 1.00E−06 |
| | ENST00000508628 | p.Trp4543* | |
| 17:80376959:G:A | ENST00000582970, | hgvsp: p.Trp4502*, | 1.00E−06 |
| | ENST00000508628 | p.Trp4551* | |
| 17:80377782:TG:T | ENST00000582970, | hgvsp: p.Cys4511fs, | 1.00E−06 |
| | ENST00000508628 | p.Cys4560fs | |
| 17:80377790:G:GC | ENST00000582970, | hgvsp: p.Gly4514fs, | 2.91E−06 |
| | ENST00000508628 | p.Gly4563fs | |
| 17:80379638:C:T | ENST00000582970, | hgvsp: p.Gln4522*, | 1.00E−06 |
| | ENST00000508628 | p.Gln4571* | |
| 17:80379708:TG:T | ENST00000582970, | hgvsp: p.Val4546fs, | 1.00E−06 |
| | ENST00000508628 | p.Val4595fs | |
| 17:80380830:G:A | ENST00000582970, | hgvsc: c.13641 − 1G > A, | 1.00E−06 |
| | ENST00000508628 | c.13788 − 1G > A | |
| 17:80380896:CAT:C | ENST00000582970, | hgvsp: p.Cys4570fs, | 1.00E−06 |
| | ENST00000508628 | p.Cys4619fs | |
| 17:80380914:C:CCCCAGTG | ENST00000582970, | hgvsp: p.Val4578fs, | 2.00E−06 |
| | ENST00000508628 | p.Val4627fs | |
| 17:80380917:C:CA | ENST00000582970, | hgvsp: p.Val4577fs, | 1.00E−06 |
| | ENST00000508628 | p.Val4626fs | |
| 17:80380982:TC:T | ENST00000582970, | hgvsp: p.Gln4599fs, | 1.00E−06 |
| | ENST00000508628 | p.Gln4648fs | |
| 17:80380988:G:A | ENST00000582970, | hgvsc: c.13797 + 1G > A, | 1.00E−06 |
| | ENST00000508628 | c.13944 + 1G > A | |
| 17:80381545:A:T | ENST00000582970, | hgvsc: c.13798 − 2A > T, | 1.00E−06 |
| | ENST00000508628 | c.13945 − 2A > T | |
| 17:80381545:A:C | ENST00000582970, | hgvsc: c.13798 − 2A > C, | 1.00E−06 |
| | ENST00000508628 | c.13945 − 2A > C | |
| 17:80381546:G:T | ENST00000582970, | hgvsc: c.13798 − 1G > T, | 1.00E−06 |
| | ENST00000508628 | c.13945 − 1G > T | |
| 17:80381601:C:CAGCACATCCT | ENST00000582970, | hgvsp: p.Lys4622fs, | 5.00E−06 |
| | ENST00000508628 | p.Lys4671fs | |
| 17:80381614:AG:A | ENST00000582970, | hgvsp: p.Asp4623fs, | 8.51E−06 |
| | ENST00000508628 | p.Asp4672fs | |
| 17:80381706:C:T | ENST00000582970, | hgvsp: p.Gln4653*, | 1.00E−06 |
| | ENST00000508628 | p.Gln4702* | |
| 17:80382978:G:A | ENST00000582970, | hgvsc: c.13979 − 1G > A, | 1.00E−06 |
| | ENST00000508628 | c.14126 − 1G > A | |
| 17:80382997:CAG:C | ENST00000582970, | hgvsp: p.Glu4667fs, | 1.00E−06 |
| | ENST00000508628 | p.Glu4716fs | |
| 17:80383014:G:T | ENST00000582970, | hgvsp: p.Glu4672*, | 1.00E−06 |
| | ENST00000508628 | p.Glu4721* | |
| 17:80383020:AG:A | ENST00000582970, | hgvsp: p.Asn4675fs, | 1.00E−06 |
| | ENST00000508628 | p.Asn4724fs | |
| 17:80383032:GA:G | ENST00000582970, | hgvsp: p.Lys4679fs, | 3.00E−06 |
| | ENST00000508628 | p.Lys4728fs | |
| 17:80383071:G:A | ENST00000582970, | hgvsc: c.14070 + 1G > A, | 1.00E−06 |
| | ENST00000508628 | c.14217 + 1G > A | |
| 17:80383719:CAAGAT:C | ENST00000582970, | hgvsp: p.Asp4706fs, | 1.00E−06 |
| | ENST00000508628 | p.Asp4755fs | |
| 17:80383788:C:CA | ENST00000582970, | hgvsp: p.His4728fs, | 1.00E−06 |
| | ENST00000508628 | p.His4777fs | |
| 17:80383853:TG:T | ENST00000582970, | hgvsp: p.Glu4750fs, | 1.00E−06 |
| | ENST00000508628 | p.Glu4799fs | |
| 17:80383861:TC:T | ENST00000582970, | hgvsp: p.Gln4753fs, | 1.00E−06 |
| | ENST00000508628 | p.Gln4802fs | |
| 17:80383878:C:T | ENST00000582970, | hgvsp: p.Gln4758*, | 1.00E−06 |
| | ENST00000508628 | p.Gln4807* | |
| 17:80383880:G:GA | ENST00000582970, | hgvsp: p.Asn4760fs, | 8.00E−06 |
| | ENST00000508628 | p.Asn4809fs | |
| 17:80383889:CAAAG:C | ENST00000582970, | hgvsp: p.Arg4764fs, | 2.00E−06 |
| | ENST00000508628 | p.Arg4813fs | |
| 17:80383929:G:T | ENST00000582970, | hgvsc: c.14322 + 1G > T, | 1.00E−06 |
| | ENST00000508628 | c.14469 + 1G > T | |
| 17:80383930:T:C | ENST00000582970, | hgvsc: c.14322 + 2T > C, | 4.00E−06 |
| | ENST00000508628 | c.14469 + 2T > C | |
| 17:80385087:C:T | ENST00000582970, | hgvsp: p.Gln4791*, | 1.00E−06 |
| | ENST00000508628 | p.Gln4840* | |
| 17:80385143:C:CA | ENST00000582970, | hgvsp: p.Arg4810fs, | 1.00E−06 |
| | ENST00000508628 | p.Arg4859fs | |
| 17:80385144:A:T | ENST00000582970, | hgvsp: p.Arg4810*, | 1.00E−06 |
| | ENST00000508628 | p.Arg4859* | |
| 17:80385568:TCA:T | ENST00000582970, | hgvsp: p.Thr4830fs, | 1.00E−06 |
| | ENST00000508628 | p.Thr4879fs | |
| 17:80385589:G:A | ENST00000582970, | hgvsp: p.Trp4836*, | 1.00E−06 |
| | ENST00000508628 | p.Trp4885* | |
| 17:80386248:A:C | ENST00000582970, | hgvsc: c.14540 − 2A > C, | 1.00E−06 |
| | ENST00000508628 | c. 14687 − 2A > C | |
| 17:80386256:TC:T | ENST00000582970, | hgvsp: p.Asn4850fs, | 4.00E−06 |
| | ENST00000508628 | p.Asn4899fs | |
| 17:80386301:CTG:C | ENST00000582970, | hgvsp: p.Glu4865fs, | 1.00E−06 |
| | ENST00000508628 | p.Glu4914fs | |
| 17:80386301:C:CT | ENST00000582970, | hgvsp: p.Glu4865fs, | 1.00E−06 |
| | ENST00000508628 | p.Glu4914fs | |
| 17:80386301:C:CTGAGTTTGAGATCCTCT | ENST00000582970, | hgvsp: p.Pro4871fs, | 1.00E−06 |
| | ENST00000508628 | p.Pro4920fs | |
| 17:80386304:AG:A | ENST00000582970, | hgvsp: p.Glu4865fs, | 1.00E−06 |
| | ENST00000508628 | p.Glu4914fs | |
| 17:80386309:G:T | ENST00000582970, | hgvsp: p.Glu4867*, | 1.00E−06 |
| | ENST00000508628 | p.Glu4916* | |
| 17:80386400:C:CCG | ENST00000582970, | hgvsp: p.Val4898fs, | 1.00E−06 |
| | ENST00000508628 | p.Val4947fs | |
| 17:80386431:G:A | ENST00000582970, | hgvsc: c.14720 + 1G > A, | 1.00E−06 |
| | ENST00000508628 | c.14867 + 1G > A | |
| 17:80386720:AC:A | ENST00000582970, | hgvsp: p.Leu4918fs, | 5.00E−06 |
| | ENST00000508628 | p.Leu4967fs | |
| 17:80386738:T:A | ENST00000582970, | hgvsp: p.Tyr4923*, | 1.00E−06 |
| | ENST00000508628 | p.Tyr4972* | |
| 17:80386766:A:AT | ENST00000582970, | hgvsp: p.Leu4934fs, | 1.00E−06 |
| | ENST00000508628 | p.Leu4983fs | |
| 17:80386786:C:G | ENST00000582970, | hgvsp: p.Tyr4939*, | 1.00E−06 |
| | ENST00000508628 | p.Tyr4988* | |
| 17:80386801:C:CAGAG | ENST00000582970, | hgvsp: p.Thr4947fs, | 1.00E−06 |
| | ENST00000508628 | p.Thr4996fs | |
| 17:80386838:C:T | ENST00000582970, | hgvsp: p.Gln4957*, | 1.00E−06 |
| | ENST00000508628 | p.Gln5006* | |
| 17:80386884:GC:G | ENST00000582970, | hgvsp: p.Leu4973fs, | 3.00E−06 |
| | ENST00000508628 | p.Leu5022fs | |
| 17:80388611:G:A | ENST00000582970, | hgvsc: c.14923 − 1G > A, | 1.00E−06 |
| | ENST00000508628 | c.15070 − 1G > A | |
| 17:80388678:A:T | ENST00000582970, | hgvsp: p.Lys4997*, | 1.00E−06 |
| | ENST00000508628 | p.Lys5046* | |
| 17:80388690:G:C | ENST00000582970, | hgvsc: c.15000 + 1G > C, | 2.00E−06 |
| | ENST00000508628 | c.15147 + 1G > C | |
| 17:80388690:G:A | ENST00000582970, | hgvsc: c.15000 + 1G > A, | 1.00E−06 |
| | ENST00000508628 | c.15147 + 1G > A | |
| 17:80389193:CA:C | ENST00000582970, | hgvsp: p.Ile5008fs, | 1.00E−06 |
| | ENST00000508628 | p.Ile5057fs | |
| 17:80389218:C:T | ENST00000582970, | hgvsp: p.Gln5016*, | 2.00E−06 |
| | ENST00000508628 | p.Gln5065* | |
| 17:80389339:T:TG | ENST00000582970, | hgvsp: p.Asp5058fs, | 1.00E−06 |
| | ENST00000508628 | p.Asp5107fs | |
| 17:80389897:C:T | ENST00000582970, | hgvsp: p.Gln5089*, | 8.00E−06 |
| | ENST00000508628 | p.Gln5138* | |
| 17:80390159:CA:C | ENST00000582970, | hgvsp: p.Thr5146fs, | 2.00E−06 |
| | ENST00000508628 | p.Thr5195fs | |
| 17:80390159:C:T | ENST00000582970, | hgvsp: p.Gln5145*, | 3.00E−06 |
| | ENST00000508628 | p.Gln5194* | |
| 17:80390174:G:T | ENST00000582970, | hgvsp: p.Glu5150*, | 3.00E−06 |
| | ENST00000508628 | p.Glu5199* | |
| 17:80390193:G:A | ENST00000582970, | hgvsp: p.Trp5156*, | 3.00E−06 |
| | ENST00000508628 | p.Trp5205* | |
| 17:80390197:G:A | ENST00000582970, | hgvsc: c.15470 + 1G > A, | 1.00E−06 |
| | ENST00000508628 | c.15617 + 1G > A | |
| 17:80390197:G:C | ENST00000582970, | hgvsc: c.15470 + 1G > C, | 1.00E−06 |
| | ENST00000508628 | c.15617 + 1G > C | |
| 17:80393347:TGA:T | ENST00000582970, | hgvsp: p.Asp5160fs, | 1.00E−06 |
| | ENST00000508628 | p.Asp5209fs | |
| 17:80393378:TAAAG:T | ENST00000582970, | hgvsp: p.Glu5170fs, | 1.00E−06 |
| | ENST00000508628 | p.Glu5219fs | |
| 17:80393428:TA:T | ENST00000582970, | hgvsp: p.Leu5186fs, | 1.00E−06 |
| | ENST00000508628 | p.Leu5235fs | |
| 17:80393487:G:T | ENST00000582970, | hgvsp: p.Glu5205*, | 1.00E−06 |
| | ENST00000508628 | p.Glu5254* | |
| 17:80393496:T:C | ENST00000582970, | hgvsp: p.Ter5208Glnext*?, | 7.00E−06 |
| | ENST00000508628 | p.Ter5257Glnext*? | |
| 17:80263684:G:A | ENST00000582970, | hgvsp: p.Met1?, | 1.60E−05 |
| | ENST00000319921, | p.Met1?, | |
| | ENST00000508628 | p.Met1? | |
| 17:80287998:C:T | ENST00000582970, | hgvsp: p.Gln149*, | 1.60E−05 |
| | ENST00000319921, | p.Gln149*, | |
| | ENST00000508628 | p.Gln198* | |
| 17:80288205:C:T | ENST00000582970, | hgvsp: p.Gln218*, | 1.60E−05 |
| | ENST00000319921, | p.Gln218*, | |
| | ENST00000508628 | p.Gln267* | |
| 17:80294958:AG:A | ENST00000582970, | hgvsp: p.Gly571fs, | 1.60E−05 |
| | ENST00000319921, | p.Gly571fs, | |
| | ENST00000508628 | p.Gly620fs | |
| 17:80294974:TGG:T | ENST00000582970, | hgvsp: p.Trp576fs, | 1.60E−05 |
| | ENST00000319921, | p.Trp576fs, | |
| | ENST00000508628 | p.Trp625fs | |
| 17:80295725:GA:G | ENST00000582970, | hgvsp: p.Asp642fs, | 1.60E−05 |
| | ENST00000319921, | p.Asp642fs, | |
| | ENST00000508628 | p.Asp691fs | |
| 17:80306337:CCT:C | ENST00000582970, | hgvsp: p.Leu767fs, | 1.31E−05 |
| | ENST00000319921, | p.Leu767fs, | |
| | ENST00000508628 | p.Leu816fs | |
| 17:80306470:T:A | ENST00000582970, | hgvsc: c.2427 + 2T > A, | 1.60E−05 |
| | ENST00000319921, | c.2427 + 2T > A, | |
| | ENST00000508628 | c.2574 + 2T > A | |
| 17:80309133:G:T | ENST00000582970, | hgvsp: p.Glu873*, | 1.60E−05 |
| | ENST00000319921, | p.Glu873*, | |
| | ENST00000508628 | p.Glu922* | |
| 17:80313037:CTG:C | ENST00000582970, | hgvsp: p.Gly895fs, | 1.60E−05 |
| | ENST00000319921, | p.Gly895fs, | |
| | ENST00000508628 | p.Gly944fs | |
| 17:80319422:C:CA | ENST00000319921 | hgvsp: p.Glu1046fs | 1.60E−05 |
| 17:80328329:GGA:G | ENST00000582970, | hgvsp: p.Glu1124fs, | 1.60E−05 |
| | ENST00000508628 | p.Glu1173fs | |
| 17:80339592:T:TA | ENST00000582970, | hgvsp: p.Arg1743fs, | 1.60E−05 |
| | ENST00000508628 | p.Arg1792fs | |
| 17:80339717:C:T | ENST00000582970, | hgvsp: p.Gln1784*, | 1.60E−05 |
| | ENST00000508628 | p.Gln1833* | |
| 17:80339912:A:AT | ENST00000582970, | hgvsp: p.Met1849fs, | 1.31E−05 |
| | ENST00000508628 | p.Met1898fs | |
| 17:80343176:C:T | ENST00000582970, | hgvsp: p.Gln2012*, | 1.60E−05 |
| | ENST00000508628 | p.Gln2061* | |
| 17:80343222:A:AC | ENST00000582970, | hgvsp: p.Gln2029fs, | 1.60E−05 |
| | ENST00000508628 | p.Gln2078fs | |
| 17:80345599:A:ACT | ENST00000582970, | hgvsp: p.Gly2423fs, | 1.60E−05 |
| | ENST00000508628 | p.Gly2472fs | |
| 17:80345622:TATTAA:T | ENST00000582970, | hgvsp: p.Lys2431fs, | 1.60E−05 |
| | ENST00000508628 | p.Lys2480fs | |
| 17:80346327:CTT:C | ENST00000582970, | hgvsp: p.Phe2665fs, | 1.60E−05 |
| | ENST00000508628 | p.Phe2714fs | |
| 17:80346963:CA:C | ENST00000582970, | hgvsp: p.Lys2878fs, | 1.60E−05 |
| | ENST00000508628 | p.Lys2927fs | |
| 17:80353580:G:T | ENST00000582970, | hgvsp: p.Glu3498*, | 1.60E−05 |
| | ENST00000508628 | p.Glu3547* | |
| 17:80363688:TAC:T | ENST00000582970, | hgvsp: p.Gln3884fs, | 1.31E−05 |
| | ENST00000508628 | p.Gln3933fs | |
| 17:80369769:AC:A | ENST00000582970, | hgvsp: p.His4110fs, | 1.60E−05 |
| | ENST00000508628 | p.His4159fs | |
| 17:80374495:A:AC | ENST00000582970, | hgvsp: p.Leu4328fs, | 1.60E−05 |
| | ENST00000508628 | p.Leu4377fs | |
| 17:80376954:C:CA | ENST00000582970, | hgvsp: p.His4501fs, | 1.31E−05 |
| | ENST00000508628 | p.His4550fs | |
| 17:80380891:G:GGTGACAT | ENST00000582970, | hgvsp: p.Arg4572fs, | 1.60E−05 |
| | ENST00000508628 | p.Arg4621fs | |
| 17:80381644:GAC:G | ENST00000582970, | hgvsp: p.His4633fs, | 1.60E−05 |
| | ENST00000508628 | p.His4682fs | |
| 17:80386345:T:TGA | ENST00000582970, | hgvsp: p.Cys4879fs, | 3.20E−05 |
| | ENST00000508628 | p.Cys4928fs | |
| 17:80273288:ATGGAGTG:A | ENST00000582970, | hgvsp: p.Glu50fs, | 1.10E−05 |
| | ENST00000319921, | p.Glu50fs, | |
| | ENST00000508628 | p.Glu50fs | |
| 17:80278763:G:A | ENST00000508628 | hgvsc: c.262 − 1G > A | 1.10E−05 |
| 17:80288756:G:C | ENST00000582970, | hgvsc: c.933 + 1G > C, | 3.40E−05 |
| | ENST00000319921, | c.933 + 1G > C, | |
| | ENST00000508628 | c.1080 + 1G > C | |
| 17:80290656:TC:T | ENST00000582970, | hgvsp: p.Phe401fs, | 1.10E−05 |
| | ENST00000319921, | p.Phe401fs, | |
| | ENST00000508628 | p.Phe450fs | |
| 17:80295630:T:A | ENST00000582970, | hgvsp: p.Leu610*, | 1.10E−05 |
| | ENST00000319921, | p.Leu610*, | |
| | ENST00000508628 | p.Leu659* | |
| 17:80298443:G:A | ENST00000582970, | hgvsp: p.Trp712*, | 1.10E−05 |
| | ENST00000319921, | p.Trp712*, | |
| | ENST00000508628 | p.Trp761* | |
| 17:80306351:G:GGT | ENST00000582970, | hgvsp: p.Met772fs, | 1.10E−05 |
| | ENST00000319921, | p.Met772fs, | |
| | ENST00000508628 | p.Met821fs | |
| 17:80306454:GT:G | ENST00000582970, | hgvsp: p.Val805fs, | 1.10E−05 |
| | ENST00000319921, | p.Val805fs, | |
| | ENST00000508628 | p.Val854fs | |
| 17:80313058:CA:C | ENST00000582970, | hgvsp: p.Val902fs, | 1.10E−05 |
| | ENST00000319921, | p.Val902fs, | |
| | ENST00000508628 | p.Val951fs | |
| 17:80313094:G:A | ENST00000582970, | hgvsp: p.Trp913*, | 3.40E−05 |
| | ENST00000319921, | p.Trp913*, | |
| | ENST00000508628 | p.Trp962* | |
| 17:80319333:G:A | ENST00000319921 | hgvsp: p.Trp1015* | 1.10E−05 |
| 17:80328330:GA:G | ENST00000582970, | hgvsp: p.Ser1126fs, | 1.10E−05 |
| | ENST00000508628 | p.Ser1175fs | |
| 17:80332452:A:T | ENST00000582970, | hgvsp: p.Lys1322*, | 1.10E−05 |
| | ENST00000508628 | p.Lys1371* | |
| 17:80332618:CTT:C | ENST00000582970, | hgvsp: p.Leu1378fs, | 1.10E−05 |
| | ENST00000508628 | p.Leu1427fs | |
| 17:80334156:G:T | ENST00000582970, | hgvsp: p.Glu1399*, | 1.10E−05 |
| | ENST00000508628 | p.Glu1448* | |
| 17:80339293:C:G | ENST00000582970, | hgvsp: p.Tyr1642*, | 1.10E−05 |
| | ENST00000508628 | p.Tyr1691* | |
| 17:80344930:C:T | ENST00000582970, | hgvsp: p.Gln2199*, | 1.10E−05 |
| | ENST00000508628 | p.Gln2248* | |
| 17:80344934:AT:A | ENST00000582970, | hgvsp: p.Phe2201fs, | 1.10E−05 |
| | ENST00000508628 | p.Phe2250fs | |
| 17:80345138:AC:A | ENST00000582970, | hgvsp: p.His2268fs, | 1.10E−05 |
| | ENST00000508628 | p.His2317fs | |
| 17:80346302:C:CG | ENST00000582970, | hgvsp: p.Met2657fs, | 1.10E−05 |
| | ENST00000508628 | p.Met2706fs | |
| 17:80346443:AT:A | ENST00000582970, | hgvsp: p.Arg2704fs, | 1.10E−05 |
| | ENST00000508628 | p.Arg2753fs | |
| 17:80347067:TAGAG:T | ENST00000582970, | hgvsp: p.Glu2912fs, | 1.10E−05 |
| | ENST00000508628 | p.Glu2961fs | |
| 17:80348287:G:A | ENST00000582970, | hgvsc: c.9951 + 1G > A, | 1.10E−05 |
| | ENST00000508628 | c.10098 + 1G > A | |
| 17:80349812:AT:A | ENST00000582970, | hgvsp: p.Leu3333fs, | 1.10E−05 |
| | ENST00000508628 | p.Leu3382fs | |
| 17:80351788:GT:G | ENST00000582970, | hgvsp: p.Val3430fs, | 1.10E−05 |
| | ENST00000508628 | p.Val3479fs | |
| 17:80353510:A:T | ENST00000582970, | hgvsc: c.10424 − 2A > T, | 1.10E−05 |
| | ENST00000508628 | c.10571 − 2A > T | |
| 17:80354503:C:T | ENST00000582970, | hgvsp: p.Gln3597*, | 1.10E−05 |
| | ENST00000508628 | p.Gln3646* | |
| 17:80354522:G:A | ENST00000582970, | hgvsp: p.Trp3603*, | 1.10E−05 |
| | ENST00000508628 | p.Trp3652* | |
| 17:80358405:G:A | ENST00000582970, | hgvsp: p.Trp3660*, | 1.10E−05 |
| | ENST00000508628 | p.Trp3709* | |
| 17:80363694:T:A | ENST00000582970, | hgvsp: p.Leu3885*, | 2.30E−05 |
| | ENST00000508628 | p.Leu3934* | |
| 17:80364501:G:GCGTC | ENST00000582970, | hgvsp: p.Pro3942fs, | 1.10E−05 |
| | ENST00000508628 | p.Pro3991fs | |
| 17:80364515:C:T | ENST00000582970, | hgvsp: p.Gln3945*, | 2.30E−05 |
| | ENST00000508628 | p.Gln3994* | |
| 17:80367754:CGA:C | ENST00000582970, | hgvsp: p.Asn3962fs, | 1.10E−05 |
| | ENST00000508628 | p.Asn4011fs | |
| 17:80371933:TCA:T | ENST00000582970, | hgvsp: p.Ile4163fs, | 1.10E−05 |
| | ENST00000508628 | p.Ile4212fs | |
| 17:80375795:C:G | ENST00000582970, | hgvsp: p.Tyr4370*, | 1.10E−05 |
| | ENST00000508628 | p.Tyr4419* | |
| 17:80382993:GAC:G | ENST00000582970, | hgvsp: p.Thr4666fs, | 1.10E−05 |
| | ENST00000508628 | p.Thr4715fs | |
| 17:80383072:T:C | ENST00000582970, | hgvsc: c.14070 + 2T > C, | 1.10E−05 |
| | ENST00000508628 | c.14217 + 2T > C | |
| 17:80385544:TG:T | ENST00000582970, | hgvsp: p.Arg4822fs, | 1.10E−05 |
| | ENST00000508628 | p.Arg4871fs | |
| 17:80393456:G:A | ENST00000582970, | hgvsp: p.Trp5194*, | 1.10E−05 |
| | ENST00000508628 | p.Trp5243* | |
| 17:80393480:G:A | ENST00000582970, | hgvsp: p.Trp5202*, | 1.10E−05 |
| | ENST00000508628 | p.Trp5251* | |
| 17:80273317:AG:A | ENST00000582970, | hgvsp: p.Gly60fs, | 1.70E−05 |
| | ENST00000319921, | p.Gly60fs, | |
| | ENST00000508628 | p.Gly60fs | |
| 17:80290689:C:G | ENST00000582970, | hgvsp: p.Ser411*, | 1.70E−05 |
| | ENST00000319921, | p.Ser411*, | |
| | ENST00000508628 | p.Ser460* | |
| 17:80313053:CCAAA:C | ENST00000582970, | hgvsp: p.Thr901fs, | 1.70E−05 |
| | ENST00000319921, | p.Thr901fs, | |
| | ENST00000508628 | p.Thr950fs | |
| 17:80327814:A:C | ENST00000582970, | hgvsc: c.3194 − 2A > C, | 0.00017 |
| | ENST00000508628 | c.3341 − 2A > C | |
| 17:80328326:A:AG | ENST00000582970, | hgvsc: c.3368 − 2_3368 − 1insG, | 1.70E−05 |
| | ENST00000508628 | c.3515 − 2_3515 − 1insG | |
| 17:80339214:T:TG | ENST00000582970, | hgvsp: p.Gln1617fs, | 0.000119 |
| | ENST00000508628 | p.Gln1666fs | |
| 17:80339640:GGA:G | ENST00000582970, | hgvsp: p.Arg1759fs, | 1.70E−05 |
| | ENST00000508628 | p.Arg1808fs | |
| 17:80343136:GTC:G | ENST00000582970, | hgvsp: p.Leu2000fs, | 0.000153 |
| | ENST00000508628 | p.Leu2049fs | |
| 17:80343304:TC:T | ENST00000582970, | hgvsp: p.His2055fs, | 1.70E−05 |
| | ENST00000508628 | p.His2104fs | |
| 17:80345571:T:A | ENST00000582970, | hgvsp: p.Cys2412*, | 5.10E−05 |
| | ENST00000508628 | p.Cys2461* | |
| 17:80345692:G:T | ENST00000582970, | hgvsp: p.Gly2453*, | 3.40E−05 |
| | ENST00000508628 | p.Gly2502* | |
| 17:80347528:C:T | ENST00000582970, | hgvsp: p.Gln3065*, | 5.10E−05 |
| | ENST00000508628 | p.Gln3114* | |
| 17:80349769:G:A | ENST00000582970, | hgvsc: c.9952 − 1G > A, | 1.70E−05 |
| | ENST00000508628 | c.10099 − 1G > A | |
| 17:80354564:CG:C | ENST00000582970, | hgvsp: p.Gly3618fs, | 5.10E−05 |
| | ENST00000508628 | p.Gly3667fs | |
| 17:80371948:AAACTG:A | ENST00000582970, | hgvsp: p.Glu4169fs, | 3.40E−05 |
| | ENST00000508628 | p.Glu4218fs | |
| 17:80372620:CG:C | ENST00000582970, | hgvsp: p.Gly4214fs, | 1.70E−05 |
| | ENST00000508628 | p.Gly4263fs | |
| 17:80372714:C:A | ENST00000582970, | hgvsp: p.Ser4244*, | 1.70E−05 |
| | ENST00000508628 | p.Ser4293* | |
| 17:80373015:GC:G | ENST00000582970, | hgvsp: p.Gln4265fs, | 1.70E−05 |
| | ENST00000508628 | p.Gln4314fs | |
| 17:80374457:G:A | ENST00000582970, | hgvsc: c.12943 − 1G > A, | 1.70E−05 |
| | ENST00000508628 | c.13090 − 1G > A | |
| 17:80374590:G:A | ENST00000582970, | hgvsc: c.13074 + 1G > A, | 1.70E−05 |
| | ENST00000508628 | c.13221 + 1G > A | |
| 17:80375871:G:C | ENST00000582970, | hgvsc: c.13185 + 1G > C, | 1.70E−05 |
| | ENST00000508628 | c.13332 + 1G > C | |
| 17:80376440:CG:C | ENST00000582970, | hgvsp: p.Val4443fs, | 1.70E−05 |
| | ENST00000508628 | p.Val4492fs | |
| 17:80376478:CTG:C | ENST00000582970, | hgvsp: p.Cys4456fs, | 3.40E−05 |
| | ENST00000508628 | p.Cys4505fs | |
| 17:80386300:ACT:A | ENST00000582970, | hgvsp: p.Thr4864fs, | 1.70E−05 |
| | ENST00000508628 | p.Thr4913fs | |
| 17:80386801:CAG:C | ENST00000582970, | hgvsp: p.Glu4946fs, | 1.70E−05 |
| | ENST00000508628 | p.Glu4995fs | |
| 17:80386848:TC:T | ENST00000582970, | hgvsp: p.Ile4960fs, | 1.70E−05 |
| | ENST00000508628 | p.Ile5009fs | |
| 17:80390041:C:G | ENST00000582970, | hgvsp: p.Tyr5105*, | 1.70E−05 |
| | ENST00000508628 | p.Tyr5154* | |
| 17:80393343:A:G | ENST00000582970, | hgvsc: c.15471 − 2A > G, | 1.70E−05 |
| | ENST00000508628 | c.15618 − 2A > G | |

[0254] Protein changes follow the recommendation of the Human Genome Variation Society and correspond to each to the Ensembl transcript IDs, hgvsp (protein change) is given in case of a protein coding variant, hgvsc (cDNA change) is given in case of a splice variant. AAF indicates the alternative allele frequency.

[0255] Table 5 shows that loss of function alleles in RNF213 are strongly associated with protection against liver diseases diagnoses, including parenchymal liver disease, alcoholic, non-alcoholic liver disease, liver fibrosis and cirrhosis of the liver. These results indicate that loss-of-function of RNF213 protects against chronic liver diseases.

TABLE 5
Associations between RNF213 pLOF and the most significant ALT associated
common coding variant Val3838Leu and various clinical diagnoses of liver
disease in a meta- analysis of the UKB, GHS, SINAI, MDCS and UPENN-PMBB

| | | Per allele | | | |
|---|---|---|---|---|---|
| | | Effect OR (95% | | Genotype counts, | |
| Genetic | | confidence | | RR\|RA\|AA | |
| exposure | Outcome | interval) | P-value | genotypes | AAF |
| pLOF | Alcoholic | 0.88 | 7.05E−01 | cases: | 0.00206 |
| | liver disease | (0.46, 1.70) | | 2,155\|8\|0 | |
| | | | | controls: | |
| | | | | 415,506\|1,521\|1 | |
| pLOF | Any liver | 0.78 | 1.30E−02 | cases: | 0.00242 |
| | disease | (0.65, 0.95) | | 26,764\|102\|0 | |
| | | | | controls: | |
| | | | | 466,358\|1,850\|2 | |
| pLOF | Liver cirrhosis | 0.65 | 4.30E−02 | cases: | 0.00277 |
| | | (0.43, 0.99) | | 4,554\|15\|0 | |
| | | | | controls: | |
| | | | | 444,787\|1,766\|2 | |
| pLOF | Alcoholic | 0.79 | 6.01E−01 | cases: | 0.00215 |
| | liver cirrhosis | (0.33, 1.90) | | 1,162\|4\|0 | |
| | | | | controls: | |
| | | | | 387,820\|1,383\|1 | |
| pLOF | Non alcoholic | 0.64 | 4.76E−02 | cases: | 0.00286 |
| | liver cirrhosis | (0.41, 1.00) | | 3,970\|13\|0 | |
| | | | | controls: | |
| | | | | 444,552\|1,764\|2 | |
| pLOF | Non-alcoholic | 0.72 | 4.53E−02 | cases: | 0.00243 |
| | fatty liver | (0.53, 0.99) | | 7,887\|28\|0 | |
| | disease and | | | controls: | |
| | steatosis | | | 413,423\|1,608\|2 | |
| | hepatitis | | | | |
| pLOF | Non alcoholic | 0.73 | 1.08E−02 | cases: | 0.00257 |
| | liver disease | (0.57, 0.93) | | 14,845\|54\|0 | |
| | | | | controls: | |
| | | | | 444,787\|1,766\|2 | |
| pLOF | Parenchymal | 0.77 | 2.94E−02 | cases: | 0.00248 |
| | liver disease | (0.61, 0.97) | | 16,984\|64\|0 | |
| | | | | controls: | |
| | | | | 438,672\|1,712\|2 | |
| p.Val3838Leu | Alcoholic | 0.96 | 4.43E−01 | cases: | 0.09731 |
| | liver disease | (0.87, 1.06) | | 1,791\|348\|24 | |
| | | | | controls: | |
| | | | | 341,045\|72,093\|3,890 | |
| p.Val3838Leu | Any liver | 0.97 | 4.64E−02 | cases: | 0.11008 |
| | disease | (0.94, 1.00) | | 21,406\|5,144\|320 | |
| | | | | controls: | |
| | | | | 378,557\|84,421\|5,239 | |
| p.Val3838Leu | Liver cirrhosis | 0.87 | 3.40E−05 | cases: | 0.12255 |
| | | (0.81, 0.93) | | 3,6521855165 | |
| | | | | controls: | |
| | | | | 360,859\|80,678\|5,025 | |
| p.Val3838Leu | Alcoholic | 0.87 | 4.63E−02 | cases: | 0.09922 |
| | liver cirrhosis | (0.76, 1.00) | | 978\|176\|12 | |
| | | | | controls: | |
| | | | | 318,031\|67,490\|3,683 | |
| p.Val3838Leu | Non alcoholic | 0.87 | 1.40E−04 | cases: | 0.12529 |
| | liver cirrhosis | (0.81, 0.93) | | 3,166\|761\|59 | |
| | | | | controls: | |
| | | | | 360,674\|80,629\|5,022 | |
| p.Val3838Leu | Non-alcoholic | 0.97 | 1.78E−01 | cases: | 0.10807 |
| | fatty liver | (0.92, 1.02) | | 6,340\|1,491\|84 | |
| | disease and | | | controls: | |
| | steatosis | | | 334,882\|75,382\|4,776 | |
| | hepatitis | | | | |
| p.Val3838Leu | Non alcoholic | 0.94 | 1.78E−03 | cases: | 0.11211 |
| | liver disease | (0.90, 0.98) | | 11,892\|2,830\|180 | |
| | | | | controls: | |
| | | | | 360,859\|80,678\|5,025 | |
| p.Val3838Leu | Parenchymal | 0.96 | 4.69E−02 | cases: | 0.10934 |
| | liver disease | (0.93, 1.00) | | 13,620\|3,236\|195 | |
| | | | | controls: | |
| | | | | 355,543\|79,818\|5,032 | |

[0256] RR indicates the number of individuals in the population studies carrying no alternative alleles; RA indicates the number of individuals carrying one or more heterozygous alternative alleles; AA indicates the number of individuals carrying one or more homozygous alternative alleles; The alternative allele is the allele causing loss of function or change in amino acid as coded following HGVS recommendations; The alternative allele is the allele causing loss of function or change in amino acid as coded following HGVS recommendations; OR indicates odds ratio; AAF indicates the alternative allele frequency.

### Participating Cohorts

[0257] Genetic association studies were performed in the United Kingdom Biobank (UKB) cohort (Sudlow et al., PLoS Med., 2015, 12, e1001779) and the DiscoverEHR cohort from the Geisinger Health System (GHS) MyCode Community Health Initiative (Carey et al., Genet. Med., 2016, 18, 906-13). UKB is a population-based cohort study of people aged between 40 and 69 years recruited through 22 testing centers in the UK between 2006-2010. Over 430,000 European ancestry participants from UKB with available whole-exome sequencing and clinical phenotype data were included. The GHS MyCode study Community Health Initiative is a health system-based cohort of patients from Central and Eastern Pennsylvania (USA) recruited in 2007-2019. Over 130,000 European ancestry participants from GHS with available whole-exome sequencing and clinical phenotype data were included. The associations with liver outcomes also included the Mount Sinai BioMe Biobank cohort (SINAI, Cell, 2019, 177, 58-69), The University of Pennsylvania Penn Medicine BioBank (UPENN-PMBB; (Park et al., 2020, doi:10.1038/s41436-019-0625-8)) and Malmo Diet and Cancer Study (MDCS) a Swedish population-based, prospective, observational cohort recruited between 1991 and 1996 (Berglund et al., 1993, doi:10.1111/j.1365-2796.1993.tb00647.x).

### Phenotype Definitions

[0258] Clinical laboratory measurements for ALT or AST were extracted from electronic health records (EHRs) of participants from GHS. Median values were calculated for all participants with two or more measurements. In UKB, ALT and AST were measured by IFCC (International Federation of Clinical Chemistry) analysis on a Beckman Coulter AU5800 at the baseline visit of the study; Hb1Ac was measured by HPLC using a Bio-Rad VARIANT II Turbo. Prior to genetic association analysis, continues phenotype values were transformed by the inverse standard normal function, applied within each ancestry group and separately in men and women. Disease outcomes were defined according to the International Classification of Diseases, Ninth and Tenth Revision (ICD-9 and ICD-10) using EHRs and self-reports when available and combined into single variables as described in Table 6.

TABLE 6
Definitions of liver disease outcomes in
UKB, GHS, SINAI, UPENN-PMBB and MALMO

| Liver disease | | Controls |
|---|---|---|
| outcome | Case definition | definition |
| Any liver disease | ICD10: | See footnote* |
| | K70, K71, K72, K73, K74, K75, | |
| | K76, K77, I81, I85, I982, | |
| | I983, I864, T864, Z944, C220 | |
| | UKB.OPCS4: G10, G144, J01 | |
| | UKB.f.20002: 1604, 1158, 1141 | |
| Parenchymal liver | ICD10: | See footnote* |
| disease | K70, K71, K72, K73, K74, K753, | |
| | K753, K752, K754, K758, | |
| | K759, K760, K767, K7681 | |
| | OPCS4: G10, G144, J01 | |
| | UKB.f.20002: 1604, 1158, 1141 | |
| Alcoholic liver | ICD10: K70 | See footnote* |
| disease | | |
| Non-alcoholic liver | ICD10: | See footnote* |
| disease | K721, K740, K741, K742, K746, | |
| | K758, K760 | |
| Liver cirrhosis (any | ICD10: | See footnote* |
| etiology) | K703, K704, K717, K721, K746 | |
| Alcoholic liver | ICD10: K703, K704 | See footnote* |
| cirrhosis | | |
| Non-alcoholic liver | ICD10: K746 | See footnote* |
| cirrhosis | | |
| NAFLD/NASH | ICD10: K760, K7581 | See footnote* |
| Viral hepatitis | ICD10: K746, K758, K760 | See footnote* |

*Participants were excluded from the control population if they were diagnosed with the “any liver disease” outcome codes (as defined in the table) or if they had elevated ALT >33 U/L for men and >25 U/L for women.

[0259] ICD10 indicates the 10th revision of the International Statistical Classification of Diseases and Related Health Problems; UKB.OPCS4 indicates Office of Population Censuses and Surveys (OPCS) Classification of Interventions and Procedures version 4 as used in the UK Biobank (UKB); UKB.f.20002 indicates self-reported non-cancer illness codes as used in UKB. UKB.f.20004 indicates self-reported medical procedures as used in UKB.

### Genotype Data

[0260] High coverage whole exome sequencing was performed as previously described (Science, 2016, 354:aaf6814; and Nature, 2020, 586, 749-756) and as summarized below. NimbleGen probes (VCRome; for part of the GHS cohort) or a modified version of the xGen design available from Integrated DNA Technologies (IDT; for the rest of GHS and other cohorts) were used for target sequence capture of the exome. A unique 6 base pair (bp) barcode (VCRome) or 10 bp barcode (IDT) was added to each DNA fragment during library preparation to facilitate multiplexed exome capture and sequencing. Equal amounts of sample were pooled prior to exome capture. Sequencing was performed using 75 bp paired-end reads on Illumina v4 HiSeq 2500 (for part of the GHS cohort) or NovaSeq (for the rest of GHS and other cohorts) instruments. Sequencing had a coverage depth (i.e., number of sequence-reads covering each nucleotide in the target areas of the genome) sufficient to provide greater than 20× coverage over 85% of targeted bases in 96% of VCRome samples and 20× coverage over 90% of targeted bases in 99% of IDT samples. Data processing steps included sample de-multiplexing using Illumina software, alignment to the GRCh38 Human Genome reference sequence including generation of binary alignment and mapping files (BAM), processing of BAM files (e.g., marking of duplicate reads and other read mapping evaluations). Variant calling was performed using the GLNexus system (DOI: 10.1101/343970). Variant mapping and annotation were based on the GRCh38 Human Genome reference sequence and Ensembl v85 gene definitions using the snpEff software. The snpEff predictions that involve protein-coding transcripts with an annotated start and stop were then combined into a single functional impact prediction by selecting the most deleterious functional effect class for each gene. The hierarchy (from most to least deleterious) for these annotations was frameshift, stop-gain, stop-loss, splice acceptor, splice donor, stop-lost, in-frame indel, missense, other annotations. Predicted LOF genetic variants included: a) insertions or deletions resulting in a frameshift, b) insertions, deletions or single nucleotide variants resulting in the introduction of a premature stop codon or in the loss of the transcription start site or stop site, and c) variants in donor or acceptor splice sites. Missense variants were classified for likely functional impact according to the number of in silico prediction algorithms that predicted deleteriousness using SIFT (Adzhubei et al., Nat. Methods, 2010, 7, 248-9) and Polyphen2_HVAR (Adzhubei et al., Nat. Methods, 2010, 7, 248-9), LRT (Chun et al., Genome Res., 2009, 19, 1553-61) and MutationTaster (Schwarz et al., Nat. Methods, 2010, 7, 575-6). For each gene, the alternative allele frequency (AAF) and functional annotation of each variant determined inclusion into these 7 gene burden exposures: 1) pLOF variants with AAF<1%; 2) pLOF or missense variants predicted deleterious by 5/5 algorithms with AAF<1%; 3) pLOF or missense variants predicted deleterious by 5/5 algorithms with AAF<0.1%; 4) pLOF or missense variants predicted deleterious by at least 1/5 algorithms with AAF<1%; 5) pLOF or missense variants predicted deleterious by at least 1/5 algorithms with AAF<0.1%; 6) pLOF or any missense with AAF<1%; 7) pLOF or any missense variants with AAF<0.1%.

### Association Analysis of Gene Burden of Rare Loss of Function Variation

[0261] Association between the burden of rare predicted loss-of-function or missense variants in a given gene and phenotype was examined by fitting a linear (for quantitative traits) or firth bias-corrected logistic (for binary traits) regression model adjusted for a polygenic score that approximates a genomic kinship matrix using REGENIE v1.0 (doi: “world wide web” at “doi.org/10.1101/2020.06.19.162354”). Analyses were stratified by ancestry and adjusted for age, age², sex, age-by-sex and age²-by-sex interaction terms, experimental batch-related covariates, 10 common variant-derived principal components, and 20 rare variant-derived principal components. Results across cohorts for each variant-phenotype association were combined using fixed effects inverse variance weighted meta-analysis. In gene burden tests, all individuals were labeled as heterozygotes if they carried one or more qualifying rare variant (as described above based on frequency and functional annotation) and as homozygotes if they carried any qualifying variant in the homozygous state. This “composite genotype” was then used to test for association.

### GWAS of Common Variants and Fine-Mapping Independent Signals

[0262] Associated common variants were identified by performing a genome-wide association study including over 12 million common-to-low-frequency genetic variants imputed using the Haplotype Reference Consortium panel. In the GHS study, imputation was performed separately in samples genotyped with the Illumina Human Omni Express Exome array (OMNI set) and the Global Screening array (GSA set). Dosage data from imputed variants were then merged across the two GHS sets, to obtain a combined dataset for association analysis. Genome-wide association analyses were performed in GHS and UKB separately by fitting whole genome regression models using REGENIE (Mbatchou et al., 2020, doi:10.1101/2020.06.19.162354). As described above for burden tests, within each cohort analyses were stratified by ancestry and adjusted for age, age², sex, age-by-sex and age²-by-sex interaction terms, experimental batch-related covariates, and 10 common variant-derived principal components. Results from the UKB and GHS analyses were then combined by inverse variance-weighted meta-analysis to obtain a genome-wide meta-analysis in the European subset of the discovery cohorts. To identify conditionally independent genetic association signals driven by common variants, fine-mapping was performed at genomic regions harboring genetic variants associated with each trait of interest at the genome-wide significance threshold of p<5×10⁻⁰⁸ using FINEMAP (Benner et al., 2016, doi:10.1093/bioinformatics/btw018). Linkage disequilibrium was estimated using genetic data from the exact set of individuals included in the genome-wide association analyses. Fine-mapping was performed separately in the meta-analysis of the European ancestry GHS and UKB cohorts. Fine-mapping identifies independent common variant signals and assigns a posterior probability of causal association for variants linked to a given independent signal. For each locus that was fine-mapped, the 95% credible set of causal variants (i.e., the minimal set of variants that capture the 95% posterior probability of causal association) were identified. The sentinel variant was defined as the variant with the highest posterior probability of causal association at each given independent signal.

[0263] Various modifications of the described subject matter, in addition to those described herein, will be apparent to those skilled in the art from the foregoing description. Such modifications are also intended to fall within the scope of the appended claims. Each reference (including, but not limited to, journal articles, U.S. and non-U.S. patents, patent application publications, international patent application publications, gene bank accession numbers, and the like) cited in the present application is incorporated herein by reference in its entirety and for all purposes.

What is claimed is:

1. A method of treating a subject having liver disease, the method comprising administering a Ring Finger Protein 213 (RNF213) inhibitor to the subject.

2. A method of treating a subject having fatty liver disease, the method comprising administering a Ring Finger Protein 213 (RNF213) inhibitor to the subject.

3. The method according to claim 2, wherein the fatty liver disease is alcoholic fatty liver disease (AFLD) or nonalcoholic fatty liver disease (NAFLD).

4. A method of treating a subject having hepatocellular carcinoma, the method comprising administering a Ring Finger Protein 213 (RNF213) inhibitor to the subject.

5. A method of treating a subject having liver cirrhosis, the method comprising administering a Ring Finger Protein 213 (RNF213) inhibitor to the subject.

6. A method of treating a subject having liver fibrosis, the method comprising administering a Ring Finger Protein 213 (RNF213) inhibitor to the subject.

7. A method of treating a subject having simple steatosis, steatohepatitis, or non-alcoholic steatohepatitis (NASH), the method comprising administering a Ring Finger Protein 213 (RNF213) inhibitor to the subject.

8. The method according to any one of claims 1 to 7, wherein the RNF213 inhibitor comprises an antisense nucleic acid molecule, a small interfering RNA (siRNA), or a short hairpin RNA (shRNA) that hybridizes to an RNF213 mRNA.

9. The method according to any one of claims 1 to 7, wherein the RNF213 inhibitor comprises a Cas protein and guide RNA (gRNA) that hybridizes to a gRNA recognition sequence within an RNF213 genomic nucleic acid molecule.

10. The method according to claim 9, wherein the Cas protein is Cas9 or Cpf1.

11. The method according to claim 9 or claim 10, wherein the gRNA recognition sequence includes or is proximate to a position corresponding to: position 102,917 according to SEQ ID NO:1, position 102,391 according to SEQ ID NO:1, or position 103,226 according to SEQ ID NO:1.

12. The method according to claim 9 or claim 10, wherein the gRNA recognition sequence is located from about 1000, from about 500, from about 400, from about 300, from about 200, from about 100, from about 50, from about 45, from about 40, from about 35, from about 30, from about 25, from about 20, from about 15, from about 10, or from about 5 nucleotides of a position corresponding to: position 102,917 according to SEQ ID NO:1, position 102,391 according to SEQ ID NO:1, or position 103,226 according to SEQ ID NO:1.

13. The method according to claim 9 or claim 10, wherein a Protospacer Adjacent Motif (PAM) sequence is about 2 to about 6 nucleotides downstream of the gRNA recognition sequence.

14. The method according to any one of claims 9 to 13, wherein the gRNA comprises from about 17 to about 23 nucleotides.

15. The method according to any one of claims 9 to 13, wherein the gRNA recognition sequence comprises a nucleotide sequence according to any one of SEQ ID NOS:62-81.

16. The method according to any one of claims 1 to 15, further comprising detecting the presence or absence of an RNF213 predicted loss-of-function or missense variant nucleic acid molecule encoding a human RNF213 polypeptide in a biological sample from the subject.

17. The method according to claim 16, wherein when the subject is RNF213 reference, the subject is also administered a therapeutic agent that treats or inhibits a liver disease in a standard dosage amount.

18. The method according to claim 16, wherein when the subject is heterozygous for an RNF213 predicted loss-of-function or missense variant, the subject is also administered a therapeutic agent that treats or inhibits a liver disease in a dosage amount that is the same as or lower than a standard dosage amount.

19. The method according to any one of claims 16 to 18, wherein the RNF213 predicted loss-of-function or missense variant nucleic acid molecule is a nucleic acid molecule encoding Glu3915Gly, Glu3964Gly, Glu822Gly, Glu350Gly, Glu146Gly, Glu37Gly, Glu28Gly, Val3838Leu, Val3887Leu, Val745Leu, Val273Leu, or Val69Leu.

20. The method according to any one of claims 16 to 18, wherein the RNF213 predicted loss-of-function or missense variant nucleic acid molecule is a nucleic acid molecule encoding Glu3915Gly or Val3838Leu.

21. The method according to claim 19, wherein the RNF213 predicted loss-of-function or missense variant nucleic acid molecule is:
a genomic nucleic acid molecule having a nucleotide sequence comprising: a guanine at a position corresponding to position 102,917 according to SEQ ID NO:2; a cytosine at a position corresponding to position 102,391 according to SEQ ID NO:3; or a thymine at a position corresponding to position 103,226 according to SEQ ID NO:4;
an mRNA molecule having a nucleotide sequence comprising: a guanine at a position corresponding to position 11,887 according to SEQ ID NO:12, a guanine at a position corresponding to position 12,036 according to SEQ ID NO:13, a guanine at a position corresponding to position 2,685 according to SEQ ID NO:14, a guanine at a position corresponding to position 1,050 according to SEQ ID NO:15, a guanine at a position corresponding to position 438 according to SEQ ID NO:16, a guanine at a position corresponding to position 112 according to SEQ ID NO:17, a guanine at a position corresponding to position 84 according to SEQ ID NO:18, a cytosine at a position corresponding to position 11,655 according to SEQ ID NO:19, a cytosine at a position corresponding to position 11,804 according to SEQ ID NO:20, a cytosine at a position corresponding to position 2,453 according to SEQ ID NO:21, a cytosine at a position corresponding to position 818 according to SEQ ID NO:22, or a cytosine at a position corresponding to position 206 according to SEQ ID NO:23; or
a cDNA molecule produced from an mRNA molecule, wherein the cDNA molecule has a nucleotide sequence comprising: a guanine at a position corresponding to position 11,887 according to SEQ ID NO:31, a guanine at a position corresponding to position 12,036 according to SEQ ID NO:32, a guanine at a position corresponding to position 2,685 according to SEQ ID NO:33, a guanine at a position corresponding to position 1,050 according to SEQ ID NO:34, a guanine at a position corresponding to position 438 according to SEQ ID NO:35, a guanine at a position corresponding to position 112 according to SEQ ID NO:36, a guanine at a position corresponding to position 84 according to SEQ ID NO:37, a cytosine at a position corresponding to position 11,655 according to SEQ ID NO:38, a cytosine at a position corresponding to position 11,804 according to SEQ ID NO:39, a cytosine at a position corresponding to position 2,453 according to SEQ ID NO:40, a cytosine at a position corresponding to position 818 according to SEQ ID NO:41, or a cytosine at a position corresponding to position 206 according to SEQ ID NO:42.

22. The method according to any one of claims 16 to 21, wherein the detecting step is carried out in vitro.

23. The method according to any one of claims 16 to 22, wherein the detecting step comprises sequencing at least a portion of the nucleotide sequence of the RNF213 genomic nucleic acid molecule in the biological sample, wherein the sequenced portion comprises a position corresponding to: position 102,917 according to SEQ ID NO:2, or the complement thereof; position 102,391 according to SEQ ID NO:3, or the complement thereof; or position 103,226 according to SEQ ID NO:4, or the complement thereof;
wherein when the sequenced portion of the RNF213 genomic nucleic acid molecule in the biological sample comprises: a guanine at a position corresponding to position 102,917 according to SEQ ID NO:2; a cytosine at a position corresponding to position 102,391 according to SEQ ID NO:3; or a thymine at a position corresponding to position 103,226 according to SEQ ID NO:4, then the RNF213 genomic nucleic acid molecule in the biological sample is an RNF213 predicted loss-of-function or missense variant genomic nucleic acid molecule.

24. The method according to any one of claims 16 to 22, wherein the detecting step comprises sequencing at least a portion of the nucleotide sequence of the RNF213 mRNA molecule in the biological sample, wherein the sequenced portion comprises a position corresponding to: position 11,887 according to SEQ ID NO:12, or the complement thereof; position 12,036 according to SEQ ID NO:13, or the complement thereof; position 2,685 according to SEQ ID NO:14, or the complement thereof; position 1,050 according to SEQ ID NO:15, or the complement thereof; position 438 according to SEQ ID NO:16, or the complement thereof; position 112 according to SEQ ID NO:17, or the complement thereof; or position 84 according to SEQ ID NO:18, or the complement thereof; position 11,655 according to SEQ ID NO:19, or the complement thereof; position 11,804 according to SEQ ID NO:20, or the complement thereof; position 2,453 according to SEQ ID NO:21, or the complement thereof; position 818 according to SEQ ID NO:22, or the complement thereof; or position 206 according to SEQ ID NO:23, or the complement thereof;
wherein when the sequenced portion of the RNF213 mRNA molecule in the biological sample comprises: a guanine at a position corresponding to position 11,887 according to SEQ ID NO:12; a guanine at a position corresponding to position 12,036 according to SEQ ID NO:13; a guanine at a position corresponding to position 2,685 according to SEQ ID NO:14; a guanine at a position corresponding to position 1,050 according to SEQ ID NO:15; a guanine at a position corresponding to position 438 according to SEQ ID NO:16; a guanine at a position corresponding to position 112 according to SEQ ID NO:17; a guanine at a position corresponding to position 84 according to SEQ ID NO:18; a cytosine at a position corresponding to position 11,655 according to SEQ ID NO:19; a cytosine at a position corresponding to position 11,804 according to SEQ ID NO:20; a cytosine at a position corresponding to position 2,453 according to SEQ ID NO:21; a cytosine at a position corresponding to position 818 according to SEQ ID NO:22; or a cytosine at a position corresponding to position 206 according to SEQ ID NO:23; then the RNF213 mRNA molecule in the biological sample is an RNF213 predicted loss-of-function or missense variant mRNA molecule.

25. The method according to any one of claims 16 to 22, wherein the detecting step comprises sequencing at least a portion of the nucleotide sequence of the RNF213 cDNA molecule produced from an mRNA molecule in the biological sample, wherein the sequenced portion comprises a position corresponding to: position 11,887 according to SEQ ID NO:31, or the complement thereof; position 12,036 according to SEQ ID NO:32, or the complement thereof; position 2,685 according to SEQ ID NO:33, or the complement thereof; position 1,050 according to SEQ ID NO:34, or the complement thereof; position 438 according to SEQ ID NO:35, or the complement thereof; position 112 according to SEQ ID NO:36, or the complement thereof; or position 84 according to SEQ ID NO:37, or the complement thereof; position 11,655 according to SEQ ID NO:38, or the complement thereof; position 11,804 according to SEQ ID NO:39, or the complement thereof; position 2,453 according to SEQ ID NO:40, or the complement thereof; position 818 according to SEQ ID NO:41, or the complement thereof; or position 206 according to SEQ ID NO:42, or the complement thereof;
wherein when the sequenced portion of the RNF213 cDNA molecule in the biological sample comprises: a guanine at a position corresponding to position 11,887 according to SEQ ID NO:31; a guanine at a position corresponding to position 12,036 according to SEQ ID NO:32; a guanine at a position corresponding to position 2,685 according to SEQ ID NO:33; a guanine at a position corresponding to position 1,050 according to SEQ ID NO:34; a guanine at a position corresponding to position 438 according to SEQ ID NO:35; a guanine at a position corresponding to position 112 according to SEQ ID NO:36; a guanine at a position corresponding to position 84 according to SEQ ID NO:37; a cytosine at a position corresponding to position 11,655 according to SEQ ID NO:38; a cytosine at a position corresponding to position 11,804 according to SEQ ID NO:39; a cytosine at a position corresponding to position 2,453 according to SEQ ID NO:40; a cytosine at a position corresponding to position 818 according to SEQ ID NO:41; or a cytosine at a position corresponding to position 206 according to SEQ ID NO:42; then the RNF213 cDNA molecule in the biological sample is an RNF213 predicted loss-of-function or missense variant cDNA molecule.

26. The method according to any one of claims 16 to 22, wherein the detecting step comprises:
a) contacting the biological sample with a primer hybridizing to a portion of the nucleotide sequence of the RNF213 genomic nucleic acid molecule that is proximate to a position corresponding to: position 102,917 according to SEQ ID NO:2, position 102,391 according to SEQ ID NO:3, or position 103,226 according to SEQ ID NO:4;
b) extending the primer at least through the position of the nucleotide sequence of the RNF213 genomic nucleic acid molecule corresponding to: position 102,917 according to SEQ ID NO:2, position 102,391 according to SEQ ID NO:3, or position 103,226 according to SEQ ID NO:4; and
c) determining whether the extension product of the primer comprises: a guanine at a position corresponding to position 102,917 according to SEQ ID NO:2, a cytosine at a position corresponding to position 102,391 according to SEQ ID NO:3, or a thymine at a position corresponding to position 103,226 according to SEQ ID NO:4.

27. The method according to any one of claims 16 to 22, wherein the detecting step comprises:
a) contacting the biological sample with a primer hybridizing to a portion of the nucleotide sequence of the RNF213 mRNA molecule that is proximate to a position corresponding to: position 11,887 according to SEQ ID NO:12, position 12,036 according to SEQ ID NO:13, position 2,685 according to SEQ ID NO:14, position 1,050 according to SEQ ID NO:15, position 438 according to SEQ ID NO:16, position 112 according to SEQ ID NO:17, position 84 according to SEQ ID NO:18, position 11,655 according to SEQ ID NO:19, position 11,804 according to SEQ ID NO:20, position 2,453 according to SEQ ID NO:21, position 818 according to SEQ ID NO:22, or position 206 according to SEQ ID NO:23;
b) extending the primer at least through the position of the nucleotide sequence of the RNF213 mRNA molecule corresponding to: position 11,887 according to SEQ ID NO:12, position 12,036 according to SEQ ID NO:13, position 2,685 according to SEQ ID NO:14, position 1,050 according to SEQ ID NO:15, position 438 according to SEQ ID NO:16, position 112 according to SEQ ID NO:17, position 84 according to SEQ ID NO:18, position 11,655 according to SEQ ID NO:19, position 11,804 according to SEQ ID NO:20, position 2,453 according to SEQ ID NO:21, position 818 according to SEQ ID NO:22, or position 206 according to SEQ ID NO:23; and
c) determining whether the extension product of the primer comprises: a guanine at a position corresponding to position 11,887 according to SEQ ID NO:12, a guanine at a position corresponding to position 12,036 according to SEQ ID NO:13, a guanine at a position corresponding to position 2,685 according to SEQ ID NO:14, a guanine at a position corresponding to position 1,050 according to SEQ ID NO:15, a guanine at a position corresponding to position 438 according to SEQ ID NO:16, a guanine at a position corresponding to position 112 according to SEQ ID NO:17, a guanine at a position corresponding to position 84 according to SEQ ID NO:18, a cytosine at a position corresponding to position 11,655 according to SEQ ID NO:19, a cytosine at a position corresponding to position 11,804 according to SEQ ID NO:20, a cytosine at a position corresponding to position 2,453 according to SEQ ID NO:21, a cytosine at a position corresponding to position 818 according to SEQ ID NO:22, or a cytosine at a position corresponding to position 206 according to SEQ ID NO:23.

28. The method according to any one of claims 16 to 22, wherein the detecting step comprises:
a) contacting the biological sample with a primer hybridizing to a portion of the nucleotide sequence of the RNF213 cDNA molecule that is proximate to a position corresponding to: position 11,887 according to SEQ ID NO:31, position 12,036 according to SEQ ID NO:32, position 2,685 according to SEQ ID NO:33, position 1,050 according to SEQ ID NO:34, position 438 according to SEQ ID NO:35, position 112 according to SEQ ID NO:36, position 84 according to SEQ ID NO:37, position 11,655 according to SEQ ID NO:38, position 11,804 according to SEQ ID NO:39, position 2,453 according to SEQ ID NO:40, position 818 according to SEQ ID NO:41, or position 206 according to SEQ ID NO:42;
b) extending the primer at least through the position of the nucleotide sequence of the RNF213 cDNA molecule corresponding to: position 11,887 according to SEQ ID NO:31, position 12,036 according to SEQ ID NO:32, position 2,685 according to SEQ ID NO:33, position 1,050 according to SEQ ID NO:34, position 438 according to SEQ ID NO:35, position 112 according to SEQ ID NO:36, position 84 according to SEQ ID NO:37, position 11,655 according to SEQ ID NO:38, position 11,804 according to SEQ ID NO:39, position 2,453 according to SEQ ID NO:40, position 818 according to SEQ ID NO:41, or position 206 according to SEQ ID NO:42; and
c) determining whether the extension product of the primer comprises: a guanine at a position corresponding to position 11,887 according to SEQ ID NO:31, a guanine at a position corresponding to position 12,036 according to SEQ ID NO:32, a guanine at a position corresponding to position 2,685 according to SEQ ID NO:33, a guanine at a position corresponding to position 1,050 according to SEQ ID NO:34, a guanine at a position corresponding to position 438 according to SEQ ID NO:35, a guanine at a position corresponding to position 112 according to SEQ ID NO:36, a guanine at a position corresponding to position 84 according to SEQ ID NO:37, a cytosine at a position corresponding to position 11,655 according to SEQ ID NO:38, a cytosine at a position corresponding to position 11,804 according to SEQ ID NO:39, a cytosine at a position corresponding to position 2,453 according to SEQ ID NO:40, a cytosine at a position corresponding to position 818 according to SEQ ID NO:41, or a cytosine at a position corresponding to position 206 according to SEQ ID NO:42.

29. The method according to any one of claims 23 to 28, wherein the detecting step comprises sequencing the entire nucleic acid molecule.

30. The method according to any one of claims 16 to 22, wherein the detecting step comprises:
a) amplifying at least a portion of the genomic nucleic acid molecule that encodes the human RNF213 polypeptide, wherein the portion comprises: a guanine at a position corresponding to position 102,917 according to SEQ ID NO:2, or the complement thereof; a cytosine at a position corresponding to position 102,391 according to SEQ ID NO:3, or the complement thereof; or a thymine at a position corresponding to position 103,226 according to SEQ ID NO:4, or the complement thereof;
b) labeling the amplified nucleic acid molecule with a detectable label;
c) contacting the labeled nucleic acid molecule with a support comprising an alteration-specific probe, wherein the alteration-specific probe comprises a nucleotide sequence which hybridizes under stringent conditions to the nucleic acid sequence of the amplified nucleic acid molecule comprising: a guanine at a position corresponding to position 102,917 according to SEQ ID NO:2, or the complement thereof; a cytosine at a position corresponding to position 102,391 according to SEQ ID NO:3, or the complement thereof; or a thymine at a position corresponding to position 103,226 according to SEQ ID NO:4, or the complement thereof; and
d) detecting the detectable label.

31. The method according to any one of claims 16 to 22, wherein the detecting step comprises:
a) amplifying at least a portion of the mRNA molecule that encodes the human RNF213 polypeptide, wherein the portion comprises: a guanine at a position corresponding to position 11,887 according to SEQ ID NO:12, or the complement thereof; a guanine at a position corresponding to position 12,036 according to SEQ ID NO:13, or the complement thereof; a guanine at a position corresponding to position 2,685 according to SEQ ID NO:14, or the complement thereof; a guanine at a position corresponding to position 1,050 according to SEQ ID NO:15, or the complement thereof; a guanine at a position corresponding to position 438 according to SEQ ID NO:16, or the complement thereof; a guanine at a position corresponding to position 112 according to SEQ ID NO:17, or the complement thereof; a guanine at a position corresponding to position 84 according to SEQ ID NO:18, or the complement thereof; a cytosine at a position corresponding to position 11,655 according to SEQ ID NO:19, or the complement thereof; a cytosine at a position corresponding to position 11,804 according to SEQ ID NO:20, or the complement thereof; a cytosine at a position corresponding to position 2,453 according to SEQ ID NO:21, or the complement thereof; a cytosine at a position corresponding to position 818 according to SEQ ID NO:22, or the complement thereof; or a cytosine at a position corresponding to position 206 according to SEQ ID NO:23, or the complement thereof;
b) labeling the amplified nucleic acid molecule with a detectable label;
c) contacting the labeled nucleic acid molecule with a support comprising an alteration-specific probe, wherein the alteration-specific probe comprises a nucleotide sequence which hybridizes under stringent conditions to the nucleic acid sequence of the amplified nucleic acid molecule comprising: a guanine at a position corresponding to position 11,887 according to SEQ ID NO:12, or the complement thereof; a guanine at a position corresponding to position 12,036 according to SEQ ID NO:13, or the complement thereof; a guanine at a position corresponding to position 2,685 according to SEQ ID NO:14, or the complement thereof; a guanine at a position corresponding to position 1,050 according to SEQ ID NO:15, or the complement thereof; a guanine at a position corresponding to position 438 according to SEQ ID NO:16, or the complement thereof; a guanine at a position corresponding to position 112 according to SEQ ID NO:17, or the complement thereof; a guanine at a position corresponding to position 84 according to SEQ ID NO:18, or the complement thereof; a cytosine at a position corresponding to position 11,655 according to SEQ ID NO:19, or the complement thereof; a cytosine at a position corresponding to position 11,804 according to SEQ ID NO:20, or the complement thereof; a cytosine at a position corresponding to position 2,453 according to SEQ ID NO:21, or the complement thereof; a cytosine at a position corresponding to position 818 according to SEQ ID NO:22, or the complement thereof; or a cytosine at a position corresponding to position 206 according to SEQ ID NO:23, or the complement thereof; and
d) detecting the detectable label.

32. The method according to any one of claims 16 to 22, wherein the detecting step comprises:
a) amplifying at least a portion of the cDNA molecule that encodes the human RNF213 polypeptide, wherein the portion comprises: a guanine at a position corresponding to position 11,887 according to SEQ ID NO:31, or the complement thereof; a guanine at a position corresponding to position 12,036 according to SEQ ID NO:32, or the complement thereof; a guanine at a position corresponding to position 2,685 according to SEQ ID NO:33, or the complement thereof; a guanine at a position corresponding to position 1,050 according to SEQ ID NO:34, or the complement thereof; a guanine at a position corresponding to position 438 according to SEQ ID NO:35, or the complement thereof; a guanine at a position corresponding to position 112 according to SEQ ID NO:36, or the complement thereof; a guanine at a position corresponding to position 84 according to SEQ ID NO:37, or the complement thereof; a cytosine at a position corresponding to position 11,655 according to SEQ ID NO:38, or the complement thereof; a cytosine at a position corresponding to position 11,804 according to SEQ ID NO:39, or the complement thereof; a cytosine at a position corresponding to position 2,453 according to SEQ ID NO:40, or the complement thereof; a cytosine at a position corresponding to position 818 according to SEQ ID NO:41, or the complement thereof; or a cytosine at a position corresponding to position 206 according to SEQ ID NO:42, or the complement thereof;
b) labeling the amplified nucleic acid molecule with a detectable label;
c) contacting the labeled nucleic acid molecule with a support comprising an alteration-specific probe, wherein the alteration-specific probe comprises a nucleotide sequence which hybridizes under stringent conditions to the nucleic acid sequence of the amplified nucleic acid molecule comprising: a guanine at a position corresponding to position 11,887 according to SEQ ID NO:31, or the complement thereof; a guanine at a position corresponding to position 12,036 according to SEQ ID NO:32, or the complement thereof; a guanine at a position corresponding to position 2,685 according to SEQ ID NO:33, or the complement thereof; a guanine at a position corresponding to position 1,050 according to SEQ ID NO:34, or the complement thereof; a guanine at a position corresponding to position 438 according to SEQ ID NO:35, or the complement thereof; a guanine at a position corresponding to position 112 according to SEQ ID NO:36, or the complement thereof; a guanine at a position corresponding to position 84 according to SEQ ID NO:37, or the complement thereof; a cytosine at a position corresponding to position 11,655 according to SEQ ID NO:38, or the complement thereof; a cytosine at a position corresponding to position 11,804 according to SEQ ID NO:39, or the complement thereof; a cytosine at a position corresponding to position 2,453 according to SEQ ID NO:40, or the complement thereof; a cytosine at a position corresponding to position 818 according to SEQ ID NO:41, or the complement thereof; or a cytosine at a position corresponding to position 206 according to SEQ ID NO:42, or the complement thereof; and
d) detecting the detectable label.

33. The method according to claim 32, wherein the nucleic acid molecule in the sample is mRNA and the mRNA is reverse-transcribed into cDNA prior to the amplifying step.

34. The method according to any one of claims 16 to 22, wherein the detecting step comprises:
contacting the genomic nucleic acid molecule in the biological sample with an alteration-specific probe comprising a detectable label, wherein the alteration-specific probe comprises a nucleotide sequence which hybridizes under stringent conditions to the nucleotide sequence of the amplified nucleic acid molecule comprising: a guanine at a position corresponding to position 102,917 according to SEQ ID NO:2, or the complement thereof; a cytosine at a position corresponding to position 102,391 according to SEQ ID NO:3, or the complement thereof; or a thymine at a position corresponding to position 103,226 according to SEQ ID NO:4, or the complement thereof; and
detecting the detectable label.

35. The method according to any one of claims 16 to 22, wherein the detecting step comprises:
contacting the mRNA molecule in the biological sample with an alteration-specific probe comprising a detectable label, wherein the alteration-specific probe comprises a nucleotide sequence which hybridizes under stringent conditions to the nucleotide sequence of the amplified nucleic acid molecule comprising: a guanine at a position corresponding to position 11,887 according to SEQ ID NO:12, or the complement thereof; a guanine at a position corresponding to position 12,036 according to SEQ ID NO:13, or the complement thereof; a guanine at a position corresponding to position 2,685 according to SEQ ID NO:14, or the complement thereof; a guanine at a position corresponding to position 1,050 according to SEQ ID NO:15, or the complement thereof; a guanine at a position corresponding to position 438 according to SEQ ID NO:16, or the complement thereof; a guanine at a position corresponding to position 112 according to SEQ ID NO:17, or the complement thereof; a guanine at a position corresponding to position 84 according to SEQ ID NO:18, or the complement thereof; a cytosine at a position corresponding to position 11,655 according to SEQ ID NO:19, or the complement thereof; a cytosine at a position corresponding to position 11,804 according to SEQ ID NO:20, or the complement thereof; a cytosine at a position corresponding to position 2,453 according to SEQ ID NO:21, or the complement thereof; a cytosine at a position corresponding to position 818 according to SEQ ID NO:22, or the complement thereof; or a cytosine at a position corresponding to position 206 according to SEQ ID NO:23, or the complement thereof; and
detecting the detectable label.

36. The method according to any one of claims 16 to 22, wherein the detecting step comprises:
contacting the cDNA molecule produced from an mRNA molecule in the biological sample with an alteration-specific probe comprising a detectable label, wherein the alteration-specific probe comprises a nucleotide sequence which hybridizes under stringent conditions to the nucleotide sequence of the amplified nucleic acid molecule comprising: a guanine at a position corresponding to position 11,887 according to SEQ ID NO:31, or the complement thereof; a guanine at a position corresponding to position 12,036 according to SEQ ID NO:32, or the complement thereof; a guanine at a position corresponding to position 2,685 according to SEQ ID NO:33, or the complement thereof; a guanine at a position corresponding to position 1,050 according to SEQ ID NO:34, or the complement thereof; a guanine at a position corresponding to position 438 according to SEQ ID NO:35, or the complement thereof; a guanine at a position corresponding to position 112 according to SEQ ID NO:36, or the complement thereof; a guanine at a position corresponding to position 84 according to SEQ ID NO:37, or the complement thereof; a cytosine at a position corresponding to position 11,655 according to SEQ ID NO:38, or the complement thereof; a cytosine at a position corresponding to position 11,804 according to SEQ ID NO:39, or the complement thereof; a cytosine at a position corresponding to position 2,453 according to SEQ ID NO:40, or the complement thereof; a cytosine at a position corresponding to position 818 according to SEQ ID NO:41, or the complement thereof; or a cytosine at a position corresponding to position 206 according to SEQ ID NO:42, or the complement thereof; and
detecting the detectable label.

37. A method of treating a subject with a therapeutic agent that treats or inhibits a liver disease, wherein the subject is suffering from a liver disease, the method comprising the steps of:
determining whether the subject has a Ring Finger Protein 213 (RNF213) predicted loss-of-function or missense variant nucleic acid molecule encoding a human RNF213 polypeptide by:
obtaining or having obtained a biological sample from the subject; and
performing or having performed a genotyping assay on the biological sample to determine if the subject has a genotype comprising the RNF213 predicted loss-of-function or missense variant nucleic acid molecule; and
when the subject is RNF213 reference, then administering or continuing to administer to the subject the therapeutic agent that treats or inhibits a liver disease in a standard dosage amount, and administering to the subject an RNF213 inhibitor; and
when the subject is heterozygous for an RNF213 predicted loss-of-function or missense variant, then administering or continuing to administer to the subject the therapeutic agent that treats or inhibits a liver disease in an amount that is the same as or lower than a standard dosage amount, and administering to the subject an RNF213 inhibitor;
wherein the presence of a genotype having the RNF213 predicted loss-of-function or missense variant nucleic acid molecule encoding the human RNF213 polypeptide indicates the subject has a reduced risk of developing a liver disease.

38. The method according to claim 37, wherein the subject is RNF213 reference, and the subject is administered or continued to be administered the therapeutic agent that treats or inhibits a liver disease in a standard dosage amount, and is administered an RNF213 inhibitor.

39. The method according to claim 37, wherein the subject is heterozygous for an RNF213 predicted loss-of-function or missense variant, and the subject is administered or continued to be administered the therapeutic agent that treats or inhibits a liver disease in an amount that is the same as or lower than a standard dosage amount, and is administered an RNF213 inhibitor.

40. The method according to any one of claims 37 to 39, wherein the RNF213 predicted loss-of-function or missense variant nucleic acid molecule is a nucleic acid molecule encoding Glu3915Gly, Glu3964Gly, Glu822Gly, Glu350Gly, Glu146Gly, Glu37Gly, Glu28Gly, Val3838Leu, Val3887Leu, Val745Leu, Val273Leu, or Val69Leu.

41. The method according to any one of claims 37 to 39, wherein the RNF213 predicted loss-of-function or missense variant nucleic acid molecule is a nucleic acid molecule encoding Glu3915Gly or Val3838Leu.

42. The method according to claim 40, wherein the RNF213 predicted loss-of-function or missense variant nucleic acid molecule is:
a genomic nucleic acid molecule having a nucleotide sequence comprising: a guanine at a position corresponding to position 102,917 according to SEQ ID NO:2, a cytosine at a position corresponding to position 102,391 according to SEQ ID NO:3, or a thymine at a position corresponding to position 103,226 according to SEQ ID NO:4;
an mRNA molecule having a nucleotide sequence comprising: a guanine at a position corresponding to position 11,887 according to SEQ ID NO:12, a guanine at a position corresponding to position 12,036 according to SEQ ID NO:13, a guanine at a position corresponding to position 2,685 according to SEQ ID NO:14, a guanine at a position corresponding to position 1,050 according to SEQ ID NO:15, a guanine at a position corresponding to position 438 according to SEQ ID NO:16, a guanine at a position corresponding to position 112 according to SEQ ID NO:17, a guanine at a position corresponding to position 84 according to SEQ ID NO:18, a cytosine at a position corresponding to position 11,655 according to SEQ ID NO:19, a cytosine at a position corresponding to position 11,804 according to SEQ ID NO:20, a cytosine at a position corresponding to position 2,453 according to SEQ ID NO:21, a cytosine at a position corresponding to position 818 according to SEQ ID NO:22, or a cytosine at a position corresponding to position 206 according to SEQ ID NO:23; or
a cDNA molecule produced from an mRNA molecule, wherein the cDNA molecule has a nucleotide sequence comprising: a guanine at a position corresponding to position 11,887 according to SEQ ID NO:31, a guanine at a position corresponding to position 12,036 according to SEQ ID NO:32, a guanine at a position corresponding to position 2,685 according to SEQ ID NO:33, a guanine at a position corresponding to position 1,050 according to SEQ ID NO:34, a guanine at a position corresponding to position 438 according to SEQ ID NO:35, a guanine at a position corresponding to position 112 according to SEQ ID NO:36, a guanine at a position corresponding to position 84 according to SEQ ID NO:37, a cytosine at a position corresponding to position 11,655 according to SEQ ID NO:38, a cytosine at a position corresponding to position 11,804 according to SEQ ID NO:39, a cytosine at a position corresponding to position 2,453 according to SEQ ID NO:40, a cytosine at a position corresponding to position 818 according to SEQ ID NO:41, or a cytosine at a position corresponding to position 206 according to SEQ ID NO:42.

43. The method according to any one of claims 37 to 42, wherein the genotyping assay comprises sequencing at least a portion of the nucleotide sequence of the RNF213 genomic nucleic acid molecule in the biological sample, wherein the sequenced portion comprises a position corresponding to: position 102,917 according to SEQ ID NO:2, or the complement thereof; position 102,391 according to SEQ ID NO:3, or the complement thereof; or position 103,226 according to SEQ ID NO:4, or the complement thereof;
wherein when the sequenced portion of the RNF213 genomic nucleic acid molecule in the biological sample comprises: a guanine at a position corresponding to position 102,917 according to SEQ ID NO:2, a cytosine at a position corresponding to position 102,391 according to SEQ ID NO:3, or a thymine at a position corresponding to position 103,226 according to SEQ ID NO:4, then the RNF213 genomic nucleic acid molecule in the biological sample is an RNF213 predicted loss-of-function or missense variant genomic nucleic acid molecule.

44. The method according to any one of claims 37 to 42, wherein the genotyping assay comprises sequencing at least a portion of the nucleotide sequence of the RNF213 mRNA molecule in the biological sample, wherein the sequenced portion comprises a position corresponding to: position 11,887 according to SEQ ID NO:12, or the complement thereof;
position 12,036 according to SEQ ID NO:13, or the complement thereof; position 2,685 according to SEQ ID NO:14, or the complement thereof; position 1,050 according to SEQ ID NO:15, or the complement thereof; position 438 according to SEQ ID NO:16, or the complement thereof; position 112 according to SEQ ID NO:17, or the complement thereof;
or position 84 according to SEQ ID NO:18, or the complement thereof; position 11,655 according to SEQ ID NO:19, or the complement thereof; position 11,804 according to SEQ ID NO:20, or the complement thereof; position 2,453 according to SEQ ID NO:21, or the complement thereof; position 818 according to SEQ ID NO:22, or the complement thereof;
or position 206 according to SEQ ID NO:23, or the complement thereof;
wherein when the sequenced portion of the RNF213 mRNA molecule in the biological sample comprises: a guanine at a position corresponding to position 11,887 according to SEQ ID NO:12, a guanine at a position corresponding to position 12,036 according to SEQ ID NO:13, a guanine at a position corresponding to position 2,685 according to SEQ ID NO:14, a guanine at a position corresponding to position 1,050 according to SEQ ID NO:15, a guanine at a position corresponding to position 438 according to SEQ ID NO:16, a guanine at a position corresponding to position 112 according to SEQ ID NO:17, a guanine at a position corresponding to position 84 according to SEQ ID NO:18, a cytosine at a position corresponding to position 11,655 according to SEQ ID NO:19, a cytosine at a position corresponding to position 11,804 according to SEQ ID NO:20, a cytosine at a position corresponding to position 2,453 according to SEQ ID NO:21, a cytosine at a position corresponding to position 818 according to SEQ ID NO:22, or a cytosine at a position corresponding to position 206 according to SEQ ID NO:23, then the RNF213 mRNA molecule in the biological sample is an RNF213 predicted loss-of-function or missense variant mRNA molecule.

45. The method according to any one of claims 37 to 42, wherein the genotyping assay comprises sequencing at least a portion of the nucleotide sequence of the RNF213 cDNA molecule in the biological sample, wherein the sequenced portion comprises a position corresponding to: position 11,887 according to SEQ ID NO:31, or the complement thereof;
position 12,036 according to SEQ ID NO:32, or the complement thereof; position 2,685 according to SEQ ID NO:33, or the complement thereof; position 1,050 according to SEQ ID NO:34, or the complement thereof; position 438 according to SEQ ID NO:35, or the complement thereof; position 112 according to SEQ ID NO:36, or the complement thereof;
position 84 according to SEQ ID NO:37, or the complement thereof; position 11,655 according to SEQ ID NO:38, or the complement thereof; position 11,804 according to SEQ ID NO:39, or the complement thereof; position 2,453 according to SEQ ID NO:40, or the complement thereof; position 818 according to SEQ ID NO:41, or the complement thereof;
or position 206 according to SEQ ID NO:42, or the complement thereof;
wherein when the sequenced portion of the RNF213 cDNA molecule in the biological sample comprises: a guanine at a position corresponding to position 11,887 according to SEQ ID NO:31, a guanine at a position corresponding to position 12,036 according to SEQ ID NO:32, a guanine at a position corresponding to position 2,685 according to SEQ ID NO:33, a guanine at a position corresponding to position 1,050 according to SEQ ID NO:34, a guanine at a position corresponding to position 438 according to SEQ ID NO:35, a guanine at a position corresponding to position 112 according to SEQ ID NO:36, a guanine at a position corresponding to position 84 according to SEQ ID NO:37, a cytosine at a position corresponding to position 11,655 according to SEQ ID NO:38, a cytosine at a position corresponding to position 11,804 according to SEQ ID NO:39, a cytosine at a position corresponding to position 2,453 according to SEQ ID NO:40, a cytosine at a position corresponding to position 818 according to SEQ ID NO:41, or a cytosine at a position corresponding to position 206 according to SEQ ID NO:42, then the RNF213 cDNA molecule in the biological sample is an RNF213 predicted loss-of-function or missense variant cDNA molecule.

46. The method according to any one of claims 37 to 42, wherein the genotyping assay comprises:
a) contacting the biological sample with a primer hybridizing to a portion of the nucleotide sequence of the RNF213 genomic nucleic acid molecule that is proximate to a position corresponding to: position 102,917 according to SEQ ID NO:2, position 102,391 according to SEQ ID NO:3, or position 103,226 according to SEQ ID NO:4;
b) extending the primer at least through the position of the nucleotide sequence of the RNF213 genomic nucleic acid molecule corresponding to: position 102,917 according to SEQ ID NO:2, position 102,391 according to SEQ ID NO:3, or position 103,226 according to SEQ ID NO:4; and
c) determining whether the extension product of the primer comprises: a guanine at a position corresponding to position 102,917 according to SEQ ID NO:2, a cytosine at a position corresponding to position 102,391 according to SEQ ID NO:3, or a thymine at a position corresponding to position 103,226 according to SEQ ID NO:4.

47. The method according to any one of claims 37 to 42, wherein the genotyping assay comprises:
a) contacting the biological sample with a primer hybridizing to a portion of the nucleotide sequence of the RNF213 mRNA molecule that is proximate to a position corresponding to: position 11,887 according to SEQ ID NO:12, position 12,036 according to SEQ ID NO:13, position 2,685 according to SEQ ID NO:14, position 1,050 according to SEQ ID NO:15, position 438 according to SEQ ID NO:16, position 112 according to SEQ ID NO:17, position 84 according to SEQ ID NO:18, position 11,655 according to SEQ ID NO:19, position 11,804 according to SEQ ID NO:20, position 2,453 according to SEQ ID NO:21, position 818 according to SEQ ID NO:22, or position 206 according to SEQ ID NO:23;
b) extending the primer at least through the position of the nucleotide sequence of the RNF213 mRNA molecule corresponding to: position 11,887 according to SEQ ID NO:12, position 12,036 according to SEQ ID NO:13, position 2,685 according to SEQ ID NO:14, position 1,050 according to SEQ ID NO:15, position 438 according to SEQ ID NO:16, position 112 according to SEQ ID NO:17, position 84 according to SEQ ID NO:18, position 11,655 according to SEQ ID NO:19, position 11,804 according to SEQ ID NO:20, position 2,453 according to SEQ ID NO:21, position 818 according to SEQ ID NO:22, or position 206 according to SEQ ID NO:23; and
c) determining whether the extension product of the primer comprises: a guanine at a position corresponding to position 11,887 according to SEQ ID NO:12, a guanine at a position corresponding to position 12,036 according to SEQ ID NO:13, a guanine at a position corresponding to position 2,685 according to SEQ ID NO:14, a guanine at a position corresponding to position 1,050 according to SEQ ID NO:15, a guanine at a position corresponding to position 438 according to SEQ ID NO:16, a guanine at a position corresponding to position 112 according to SEQ ID NO:17, a guanine at a position corresponding to position 84 according to SEQ ID NO:18, a cytosine at a position corresponding to position 11,655 according to SEQ ID NO:19, a cytosine at a position corresponding to position 11,804 according to SEQ ID NO:20, a cytosine at a position corresponding to position 2,453 according to SEQ ID NO:21, a cytosine at a position corresponding to position 818 according to SEQ ID NO:22, or a cytosine at a position corresponding to position 206 according to SEQ ID NO:23.

48. The method according to any one of claims 37 to 42, wherein the genotyping assay comprises:
a) contacting the biological sample with a primer hybridizing to a portion of the nucleotide sequence of the RNF213 cDNA molecule that is proximate to a position corresponding to: position 11,887 according to SEQ ID NO:31, position 12,036 according to SEQ ID NO:32, position 2,685 according to SEQ ID NO:33, position 1,050 according to SEQ ID NO:34, position 438 according to SEQ ID NO:35, position 112 according to SEQ ID NO:36, position 84 according to SEQ ID NO:37, position 11,655 according to SEQ ID NO:38, position 11,804 according to SEQ ID NO:39, position 2,453 according to SEQ ID NO:40, position 818 according to SEQ ID NO:41, or position 206 according to SEQ ID NO:42;
b) extending the primer at least through the position of the nucleotide sequence of the RNF213 cDNA molecule corresponding to: position 11,887 according to SEQ ID NO:31, position 12,036 according to SEQ ID NO:32, position 2,685 according to SEQ ID NO:33, position 1,050 according to SEQ ID NO:34, position 438 according to SEQ ID NO:35, position 112 according to SEQ ID NO:36, position 84 according to SEQ ID NO:37, position 11,655 according to SEQ ID NO:38, position 11,804 according to SEQ ID NO:39, position 2,453 according to SEQ ID NO:40, position 818 according to SEQ ID NO:41, or position 206 according to SEQ ID NO:42; and
c) determining whether the extension product of the primer comprises: a guanine at a position corresponding to position 11,887 according to SEQ ID NO:31, a guanine at a position corresponding to position 12,036 according to SEQ ID NO:32, a guanine at a position corresponding to position 2,685 according to SEQ ID NO:33, a guanine at a position corresponding to position 1,050 according to SEQ ID NO:34, a guanine at a position corresponding to position 438 according to SEQ ID NO:35, a guanine at a position corresponding to position 112 according to SEQ ID NO:36, a guanine at a position corresponding to position 84 according to SEQ ID NO:37, a cytosine at a position corresponding to position 11,655 according to SEQ ID NO:38, a cytosine at a position corresponding to position 11,804 according to SEQ ID NO:39, a cytosine at a position corresponding to position 2,453 according to SEQ ID NO:40, a cytosine at a position corresponding to position 818 according to SEQ ID NO:41, or a cytosine at a position corresponding to position 206 according to SEQ ID NO:42.

49. The method according to any one of claims 43 to 48, wherein the genotyping assay comprises sequencing the entire nucleic acid molecule.

50. The method according to any one of claims 37 to 42, wherein the genotyping assay comprises:
a) amplifying at least a portion of the genomic nucleic acid molecule that encodes the human RNF213 polypeptide, wherein the portion comprises: a guanine at a position corresponding to position 102,917 according to SEQ ID NO:2, or the complement thereof; a cytosine at a position corresponding to position 102,391 according to SEQ ID NO:3, or the complement thereof; or a thymine at a position corresponding to position 103,226 according to SEQ ID NO:4, or the complement thereof;
b) labeling the amplified nucleic acid molecule with a detectable label;
c) contacting the labeled nucleic acid molecule with a support comprising an alteration-specific probe, wherein the alteration-specific probe comprises a nucleotide sequence which hybridizes under stringent conditions to the nucleic acid sequence of the amplified nucleic acid molecule comprising: a guanine at a position corresponding to position 102,917 according to SEQ ID NO:2, or the complement thereof; a cytosine at a position corresponding to position 102,391 according to SEQ ID NO:3, or the complement thereof; or a thymine at a position corresponding to position 103,226 according to SEQ ID NO:4, or the complement thereof; and
d) detecting the detectable label.

51. The method according to any one of claims 37 to 42, wherein the genotyping assay comprises:
a) amplifying at least a portion of the mRNA molecule that encodes the human RNF213 polypeptide, wherein the portion comprises: a guanine at a position corresponding to position 11,887 according to SEQ ID NO:12, or the complement thereof; a guanine at a position corresponding to position 12,036 according to SEQ ID NO:13, or the complement thereof; a guanine at a position corresponding to position 2,685 according to SEQ ID NO:14, or the complement thereof; a guanine at a position corresponding to position 1,050 according to SEQ ID NO:15, or the complement thereof; a guanine at a position corresponding to position 438 according to SEQ ID NO:16, or the complement thereof; a guanine at a position corresponding to position 112 according to SEQ ID NO:17, or the complement thereof; a guanine at a position corresponding to position 84 according to SEQ ID NO:18, or the complement thereof; a cytosine at a position corresponding to position 11,655 according to SEQ ID NO:19, or the complement thereof; a cytosine at a position corresponding to position 11,804 according to SEQ ID NO:20, or the complement thereof; a cytosine at a position corresponding to position 2,453 according to SEQ ID NO:21, or the complement thereof; a cytosine at a position corresponding to position 818 according to SEQ ID NO:22, or the complement thereof; or a cytosine at a position corresponding to position 206 according to SEQ ID NO:23, or the complement thereof;
b) labeling the amplified nucleic acid molecule with a detectable label;
c) contacting the labeled nucleic acid molecule with a support comprising an alteration-specific probe, wherein the alteration-specific probe comprises a nucleotide sequence which hybridizes under stringent conditions to the nucleic acid sequence of the amplified nucleic acid molecule comprising: a guanine at a position corresponding to position 11,887 according to SEQ ID NO:12, or the complement thereof; a guanine at a position corresponding to position 12,036 according to SEQ ID NO:13, or the complement thereof; a guanine at a position corresponding to position 2,685 according to SEQ ID NO:14, or the complement thereof; a guanine at a position corresponding to position 1,050 according to SEQ ID NO:15, or the complement thereof; a guanine at a position corresponding to position 438 according to SEQ ID NO:16, or the complement thereof; a guanine at a position corresponding to position 112 according to SEQ ID NO:17, or the complement thereof; a guanine at a position corresponding to position 84 according to SEQ ID NO:18, or the complement thereof; a cytosine at a position corresponding to position 11,655 according to SEQ ID NO:19, or the complement thereof; a cytosine at a position corresponding to position 11,804 according to SEQ ID NO:20, or the complement thereof; a cytosine at a position corresponding to position 2,453 according to SEQ ID NO:21, or the complement thereof; a cytosine at a position corresponding to position 818 according to SEQ ID NO:22, or the complement thereof; or a cytosine at a position corresponding to position 206 according to SEQ ID NO:23, or the complement thereof; and
d) detecting the detectable label.

52. The method according to any one of claims 37 to 42, wherein the genotyping assay comprises:
a) amplifying at least a portion of the cDNA molecule that encodes the human RNF213 polypeptide, wherein the portion comprises: a guanine at a position corresponding to position 11,887 according to SEQ ID NO:31, or the complement thereof; a guanine at a position corresponding to position 12,036 according to SEQ ID NO:32, or the complement thereof; a guanine at a position corresponding to position 2,685 according to SEQ ID NO:33, or the complement thereof; a guanine at a position corresponding to position 1,050 according to SEQ ID NO:34, or the complement thereof; a guanine at a position corresponding to position 438 according to SEQ ID NO:35, or the complement thereof; a guanine at a position corresponding to position 112 according to SEQ ID NO:36, or the complement thereof; a guanine at a position corresponding to position 84 according to SEQ ID NO:37, or the complement thereof; a cytosine at a position corresponding to position 11,655 according to SEQ ID NO:38, or the complement thereof; a cytosine at a position corresponding to position 11,804 according to SEQ ID NO:39, or the complement thereof; a cytosine at a position corresponding to position 2,453 according to SEQ ID NO:40, or the complement thereof; a cytosine at a position corresponding to position 818 according to SEQ ID NO:41, or the complement thereof; or a cytosine at a position corresponding to position 206 according to SEQ ID NO:42, or the complement thereof;
b) labeling the amplified nucleic acid molecule with a detectable label;
c) contacting the labeled nucleic acid molecule with a support comprising an alteration-specific probe, wherein the alteration-specific probe comprises a nucleotide sequence which hybridizes under stringent conditions to the nucleic acid sequence of the amplified nucleic acid molecule comprising: a guanine at a position corresponding to position 11,887 according to SEQ ID NO:31, or the complement thereof; a guanine at a position corresponding to position 12,036 according to SEQ ID NO:32, or the complement thereof; a guanine at a position corresponding to position 2,685 according to SEQ ID NO:33, or the complement thereof; a guanine at a position corresponding to position 1,050 according to SEQ ID NO:34, or the complement thereof; a guanine at a position corresponding to position 438 according to SEQ ID NO:35, or the complement thereof; a guanine at a position corresponding to position 112 according to SEQ ID NO:36, or the complement thereof; a guanine at a position corresponding to position 84 according to SEQ ID NO:37, or the complement thereof; a cytosine at a position corresponding to position 11,655 according to SEQ ID NO:38, or the complement thereof; a cytosine at a position corresponding to position 11,804 according to SEQ ID NO:39, or the complement thereof; a cytosine at a position corresponding to position 2,453 according to SEQ ID NO:40, or the complement thereof; a cytosine at a position corresponding to position 818 according to SEQ ID NO:41, or the complement thereof; or a cytosine at a position corresponding to position 206 according to SEQ ID NO:42, or the complement thereof; and
d) detecting the detectable label.

53. The method according to claim 52, wherein the nucleic acid molecule in the sample is mRNA and the mRNA is reverse-transcribed into cDNA prior to the amplifying step.

54. The method according to any one of claims 37 to 42, wherein the genotyping assay comprises:
contacting the nucleic acid molecule in the biological sample with an alteration-specific probe comprising a detectable label, wherein the alteration-specific probe comprises a nucleotide sequence which hybridizes under stringent conditions to the nucleotide sequence of the amplified nucleic acid molecule comprising: a guanine at a position corresponding to position 102,917 according to SEQ ID NO:2, or the complement thereof; a cytosine at a position corresponding to position 102,391 according to SEQ ID NO:3, or the complement thereof; or a thymine at a position corresponding to position 103,226 according to SEQ ID NO:4, or the complement thereof; and
detecting the detectable label.

55. The method according to any one of claims 37 to 42, wherein the genotyping assay comprises:
contacting the nucleic acid molecule in the biological sample with an alteration-specific probe comprising a detectable label, wherein the alteration-specific probe comprises a nucleotide sequence which hybridizes under stringent conditions to the nucleotide sequence of the amplified nucleic acid molecule comprising: a guanine at a position corresponding to position 11,887 according to SEQ ID NO:12, or the complement thereof; a guanine at a position corresponding to position 12,036 according to SEQ ID NO:13, or the complement thereof; a guanine at a position corresponding to position 2,685 according to SEQ ID NO:14, or the complement thereof; a guanine at a position corresponding to position 1,050 according to SEQ ID NO:15, or the complement thereof; a guanine at a position corresponding to position 438 according to SEQ ID NO:16, or the complement thereof; a guanine at a position corresponding to position 112 according to SEQ ID NO:17, or the complement thereof; a guanine at a position corresponding to position 84 according to SEQ ID NO:18, or the complement thereof; a cytosine at a position corresponding to position 11,655 according to SEQ ID NO:19, or the complement thereof; a cytosine at a position corresponding to position 11,804 according to SEQ ID NO:20, or the complement thereof; a cytosine at a position corresponding to position 2,453 according to SEQ ID NO:21, or the complement thereof; a cytosine at a position corresponding to position 818 according to SEQ ID NO:22, or the complement thereof; or a cytosine at a position corresponding to position 206 according to SEQ ID NO:23; and
detecting the detectable label.

56. The method according to any one of claims 37 to 42, wherein the genotyping assay comprises:
contacting the cDNA molecule in the biological sample with an alteration-specific probe comprising a detectable label, wherein the alteration-specific probe comprises a nucleotide sequence which hybridizes under stringent conditions to the nucleotide sequence of the amplified nucleic acid molecule comprising: a guanine at a position corresponding to position 11,887 according to SEQ ID NO:31, or the complement thereof; a guanine at a position corresponding to position 12,036 according to SEQ ID NO:32, or the complement thereof; a guanine at a position corresponding to position 2,685 according to SEQ ID NO:33, or the complement thereof; a guanine at a position corresponding to position 1,050 according to SEQ ID NO:34, or the complement thereof; a guanine at a position corresponding to position 438 according to SEQ ID NO:35, or the complement thereof; a guanine at a position corresponding to position 112 according to SEQ ID NO:36, or the complement thereof; a guanine at a position corresponding to position 84 according to SEQ ID NO:37, or the complement thereof; a cytosine at a position corresponding to position 11,655 according to SEQ ID NO:38, or the complement thereof; a cytosine at a position corresponding to position 11,804 according to SEQ ID NO:39, or the complement thereof; a cytosine at a position corresponding to position 2,453 according to SEQ ID NO:40, or the complement thereof; a cytosine at a position corresponding to position 818 according to SEQ ID NO:41, or the complement thereof; or a cytosine at a position corresponding to position 206 according to SEQ ID NO:42, or the complement thereof; and
detecting the detectable label.

57. The method according to any one of claims 37 to 56, wherein the nucleic acid molecule is present within a cell obtained from the subject.

58. The method according to any one of claims 37 to 57, wherein the RNF213 inhibitor comprises an antisense nucleic acid molecule, a small interfering RNA (siRNA), or a short hairpin RNA (shRNA) that hybridizes to an RNF213 mRNA.

59. The method according to any one of claims 37 to 57, wherein the RNF213 inhibitor comprises a Cas protein and guide RNA (gRNA) that hybridizes to a gRNA recognition sequence within an RNF213 genomic nucleic acid molecule.

60. The method according to claim 59, wherein the Cas protein is Cas9 or Cpf1.

61. The method according to claim 59 or claim 60, wherein the gRNA recognition sequence includes or is proximate to a position corresponding to: position 102,917 according to SEQ ID NO:1, position 102,391 according to SEQ ID NO:1, or position 103,226 according to SEQ ID NO:1.

62. The method according to claim 59 or claim 60, wherein the gRNA recognition sequence is located from about 1000, from about 500, from about 400, from about 300, from about 200, from about 100, from about 50, from about 45, from about 40, from about 35, from about 30, from about 25, from about 20, from about 15, from about 10, or from about 5 nucleotides of a position corresponding to: position 102,917 according to SEQ ID NO:1, position 102,391 according to SEQ ID NO:1, or position 103,226 according to SEQ ID NO:1.

63. The method according to claim 59 or claim 60, wherein a Protospacer Adjacent Motif (PAM) sequence is about 2 to 6 nucleotides downstream of the gRNA recognition sequence.

64. The method according to any one of claims 59 to 63, wherein the gRNA comprises from about 17 to about 23 nucleotides.

65. The method according to any one of claims 59 to 64, wherein the gRNA recognition sequence comprises a nucleotide sequence according to any one of SEQ ID NOs:62-81.

66. A method of identifying a subject having an increased risk for developing a liver disease, wherein the method comprises:
determining or having determined the presence or absence of a Ring Finger Protein 213 (RNF213) predicted loss-of-function or missense variant nucleic acid molecule encoding a human RNF213 polypeptide in a biological sample obtained from the subject;
wherein:
when the subject is RNF213 reference, then the subject has an increased risk for developing a liver disease; and
when the subject is heterozygous for an RNF213 predicted loss-of-function or missense variant or homozygous for an RNF213 predicted loss-of-function or missense variant, then the subject has a decreased risk for developing a liver disease.

67. The method according to claim 66, wherein the RNF213 predicted loss-of-function or missense variant nucleic acid molecule is a nucleic acid molecule encoding Glu3915Gly, Glu3964Gly, Glu822Gly, Glu350Gly, Glu146Gly, Glu37Gly, Glu28Gly, Val3838Leu, Val3887Leu, Val745Leu, Val273Leu, or Val69Leu.

68. The method according to claim 66, wherein the RNF213 predicted loss-of-function or missense variant nucleic acid molecule is a nucleic acid molecule encoding Glu3915Gly or Val3838Leu.

69. The method according to claim 67, wherein the RNF213 predicted loss-of-function or missense variant nucleic acid molecule is:
a genomic nucleic acid molecule having a nucleotide sequence comprising: a guanine at a position corresponding to position 102,917 according to SEQ ID NO:2, a cytosine at a position corresponding to position 102,391 according to SEQ ID NO:3, or a thymine at a position corresponding to position 103,226 according to SEQ ID NO:4;
an mRNA molecule having a nucleotide sequence comprising: a guanine at a position corresponding to position 11,887 according to SEQ ID NO:12, a guanine at a position corresponding to position 12,036 according to SEQ ID NO:13, a guanine at a position corresponding to position 2,685 according to SEQ ID NO:14, a guanine at a position corresponding to position 1,050 according to SEQ ID NO:15, a guanine at a position corresponding to position 438 according to SEQ ID NO:16, a guanine at a position corresponding to position 112 according to SEQ ID NO:17, a guanine at a position corresponding to position 84 according to SEQ ID NO:18, a cytosine at a position corresponding to position 11,655 according to SEQ ID NO:19, a cytosine at a position corresponding to position 11,804 according to SEQ ID NO:20, a cytosine at a position corresponding to position 2,453 according to SEQ ID NO:21, a cytosine at a position corresponding to position 818 according to SEQ ID NO:22, or a cytosine at a position corresponding to position 206 according to SEQ ID NO:23; or
a cDNA molecule produced from an mRNA molecule, wherein the cDNA molecule has a nucleotide sequence comprising: a guanine at a position corresponding to position 11,887 according to SEQ ID NO:31, a guanine at a position corresponding to position 12,036 according to SEQ ID NO:32, a guanine at a position corresponding to position 2,685 according to SEQ ID NO:33, a guanine at a position corresponding to position 1,050 according to SEQ ID NO:34, a guanine at a position corresponding to position 438 according to SEQ ID NO:35, a guanine at a position corresponding to position 112 according to SEQ ID NO:36, a guanine at a position corresponding to position 84 according to SEQ ID NO:37, a cytosine at a position corresponding to position 11,655 according to SEQ ID NO:38, a cytosine at a position corresponding to position 11,804 according to SEQ ID NO:39, a cytosine at a position corresponding to position 2,453 according to SEQ ID NO:40, a cytosine at a position corresponding to position 818 according to SEQ ID NO:41, or a cytosine at a position corresponding to position 206 according to SEQ ID NO:42.

70. The method according to any one of claims 66 to 69, wherein the determining step is carried out in vitro.

71. The method according to any one of claims 66 to 70, wherein the determining step comprises sequencing at least a portion of the nucleotide sequence of the RNF213 genomic nucleic acid molecule in the biological sample, wherein the sequenced portion comprises a position corresponding to: position 102,917 according to SEQ ID NO:2, or the complement thereof; position 102,391 according to SEQ ID NO:3, or the complement thereof; or position 103,226 according to SEQ ID NO:4, or the complement thereof;
wherein when the sequenced portion of the RNF213 genomic nucleic acid molecule in the biological sample comprises: a guanine at a position corresponding to position 102,917 according to SEQ ID NO:2, a cytosine at a position corresponding to position 102,391 according to SEQ ID NO:3, or a thymine at a position corresponding to position 103,226 according to SEQ ID NO:4, then the RNF213 genomic nucleic acid molecule in the biological sample is an RNF213 predicted loss-of-function or missense variant genomic nucleic acid molecule.

72. The method according to any one of claims 66 to 70, wherein the determining step comprises sequencing at least a portion of the nucleotide sequence of the RNF213 mRNA molecule in the biological sample, wherein the sequenced portion comprises a position corresponding to: position 11,887 according to SEQ ID NO:12, or the complement thereof;
position 12,036 according to SEQ ID NO:13, or the complement thereof; position 2,685 according to SEQ ID NO:14, or the complement thereof; position 1,050 according to SEQ ID NO:15, or the complement thereof; position 438 according to SEQ ID NO:16, or the complement thereof; position 112 according to SEQ ID NO:17, or the complement thereof;
or position 84 according to SEQ ID NO:18, or the complement thereof; position 11,655 according to SEQ ID NO:19, or the complement thereof; position 11,804 according to SEQ ID NO:20, or the complement thereof; position 2,453 according to SEQ ID NO:21, or the complement thereof; position 818 according to SEQ ID NO:22, or the complement thereof;
or position 206 according to SEQ ID NO:23, or the complement thereof;
wherein when the sequenced portion of the RNF213 mRNA molecule in the biological sample comprises: a guanine at a position corresponding to position 11,887 according to SEQ ID NO:12, a guanine at a position corresponding to position 12,036 according to SEQ ID NO:13, a guanine at a position corresponding to position 2,685 according to SEQ ID NO:14, a guanine at a position corresponding to position 1,050 according to SEQ ID NO:15, a guanine at a position corresponding to position 438 according to SEQ ID NO:16, a guanine at a position corresponding to position 112 according to SEQ ID NO:17, a guanine at a position corresponding to position 84 according to SEQ ID NO:18, a cytosine at a position corresponding to position 11,655 according to SEQ ID NO:19, a cytosine at a position corresponding to position 11,804 according to SEQ ID NO:20, a cytosine at a position corresponding to position 2,453 according to SEQ ID NO:21, a cytosine at a position corresponding to position 818 according to SEQ ID NO:22, or a cytosine at a position corresponding to position 206 according to SEQ ID NO:23; then the RNF213 mRNA molecule in the biological sample is an RNF213 predicted loss-of-function or missense variant mRNA molecule.

73. The method according to any one of claims 66 to 70, wherein the determining step comprises sequencing at least a portion of the nucleotide sequence of the RNF213 cDNA molecule in the biological sample, wherein the sequenced portion comprises a position corresponding to: position 11,887 according to SEQ ID NO:31, or the complement thereof; position 12,036 according to SEQ ID NO:32, or the complement thereof; position 2,685 according to SEQ ID NO:33, or the complement thereof; position 1,050 according to SEQ ID NO:34, or the complement thereof; position 438 according to SEQ ID NO:35, or the complement thereof; position 112 according to SEQ ID NO:36, or the complement thereof;
position 84 according to SEQ ID NO:37, or the complement thereof; position 11,655 according to SEQ ID NO:38, or the complement thereof; position 11,804 according to SEQ ID NO:39, or the complement thereof; position 2,453 according to SEQ ID NO:40, or the complement thereof; position 818 according to SEQ ID NO:41, or the complement thereof; or position 206 according to SEQ ID NO:42, or the complement thereof;
wherein when the sequenced portion of the RNF213 cDNA molecule in the biological sample comprises: a guanine at a position corresponding to position 11,887 according to SEQ ID NO:31, a guanine at a position corresponding to position 12,036 according to SEQ ID NO:32, a guanine at a position corresponding to position 2,685 according to SEQ ID NO:33, a guanine at a position corresponding to position 1,050 according to SEQ ID NO:34, a guanine at a position corresponding to position 438 according to SEQ ID NO:35, a guanine at a position corresponding to position 112 according to SEQ ID NO:36, a guanine at a position corresponding to position 84 according to SEQ ID NO:37, a cytosine at a position corresponding to position 11,655 according to SEQ ID NO:38, a cytosine at a position corresponding to position 11,804 according to SEQ ID NO:39, a cytosine at a position corresponding to position 2,453 according to SEQ ID NO:40, a cytosine at a position corresponding to position 818 according to SEQ ID NO:41, or a cytosine at a position corresponding to position 206 according to SEQ ID NO:42; then the RNF213 cDNA molecule in the biological sample is an RNF213 predicted loss-of-function or missense variant cDNA molecule.

74. The method according to any one of claims 66 to 70, wherein the determining step comprises:
a) contacting the biological sample with a primer hybridizing to a portion of the nucleotide sequence of the RNF213 genomic nucleic acid molecule that is proximate to a position corresponding to: position 102,917 according to SEQ ID NO:2, position 102,391 according to SEQ ID NO:3, or position 103,226 according to SEQ ID NO:4;
b) extending the primer at least through the position of the nucleotide sequence of the RNF213 genomic nucleic acid molecule corresponding to: position 102,917 according to SEQ ID NO:2, position 102,391 according to SEQ ID NO:3, or position 103,226 according to SEQ ID NO:4; and
c) determining whether the extension product of the primer comprises: a guanine at a position corresponding to position 102,917 according to SEQ ID NO:2, a cytosine at a position corresponding to position 102,391 according to SEQ ID NO:3, or a thymine at a position corresponding to position 103,226 according to SEQ ID NO:4.

75. The method according to any one of claims 66 to 70, wherein the determining step comprises:
a) contacting the biological sample with a primer hybridizing to a portion of the nucleotide sequence of the RNF213 mRNA molecule that is proximate to a position corresponding to: position 11,887 according to SEQ ID NO:12, position 12,036 according to SEQ ID NO:13, position 2,685 according to SEQ ID NO:14, position 1,050 according to SEQ ID NO:15, position 438 according to SEQ ID NO:16, position 112 according to SEQ ID NO:17, position 84 according to SEQ ID NO:18, position 11,655 according to SEQ ID NO:19, position 11,804 according to SEQ ID NO:20, position 2,453 according to SEQ ID NO:21, position 818 according to SEQ ID NO:22, or position 206 according to SEQ ID NO:23;
b) extending the primer at least through the position of the nucleotide sequence of the RNF213 mRNA molecule corresponding to: position 11,887 according to SEQ ID NO:12, position 12,036 according to SEQ ID NO:13, position 2,685 according to SEQ ID NO:14, position 1,050 according to SEQ ID NO:15, position 438 according to SEQ ID NO:16, position 112 according to SEQ ID NO:17, position 84 according to SEQ ID NO:18, position 11,655 according to SEQ ID NO:19, position 11,804 according to SEQ ID NO:20, position 2,453 according to SEQ ID NO:21, position 818 according to SEQ ID NO:22, or position 206 according to SEQ ID NO:23; and
c) determining whether the extension product of the primer comprises: a guanine at a position corresponding to position 11,887 according to SEQ ID NO:12, a guanine at a position corresponding to position 12,036 according to SEQ ID NO:13, a guanine at a position corresponding to position 2,685 according to SEQ ID NO:14, a guanine at a position corresponding to position 1,050 according to SEQ ID NO:15, a guanine at a position corresponding to position 438 according to SEQ ID NO:16, a guanine at a position corresponding to position 112 according to SEQ ID NO:17, a guanine at a position corresponding to position 84 according to SEQ ID NO:18, a cytosine at a position corresponding to position 11,655 according to SEQ ID NO:19, a cytosine at a position corresponding to position 11,804 according to SEQ ID NO:20, a cytosine at a position corresponding to position 2,453 according to SEQ ID NO:21, a cytosine at a position corresponding to position 818 according to SEQ ID NO:22, or a cytosine at a position corresponding to position 206 according to SEQ ID NO:23.

76. The method according to any one of claims 66 to 70, wherein the determining step comprises:
a) contacting the biological sample with a primer hybridizing to a portion of the nucleotide sequence of the RNF213 cDNA molecule that is proximate to a position corresponding to: position 11,887 according to SEQ ID NO:31, position 12,036 according to SEQ ID NO:32, position 2,685 according to SEQ ID NO:33, position 1,050 according to SEQ ID NO:34, position 438 according to SEQ ID NO:35, position 112 according to SEQ ID NO:36, position 84 according to SEQ ID NO:37, position 11,655 according to SEQ ID NO:38, position 11,804 according to SEQ ID NO:39, position 2,453 according to SEQ ID NO:40, position 818 according to SEQ ID NO:41, or position 206 according to SEQ ID NO:42;
b) extending the primer at least through the position of the nucleotide sequence of the RNF213 cDNA molecule corresponding to: position 11,887 according to SEQ ID NO:31, position 12,036 according to SEQ ID NO:32, position 2,685 according to SEQ ID NO:33, position 1,050 according to SEQ ID NO:34, position 438 according to SEQ ID NO:35, position 112 according to SEQ ID NO:36, position 84 according to SEQ ID NO:37, position 11,655 according to SEQ ID NO:38, position 11,804 according to SEQ ID NO:39, position 2,453 according to SEQ ID NO:40, position 818 according to SEQ ID NO:41, position 206 according to SEQ ID NO:42; and
c) determining whether the extension product of the primer comprises: a guanine at a position corresponding to position 11,887 according to SEQ ID NO:31, a guanine at a position corresponding to position 12,036 according to SEQ ID NO:32, a guanine at a position corresponding to position 2,685 according to SEQ ID NO:33, a guanine at a position corresponding to position 1,050 according to SEQ ID NO:34, a guanine at a position corresponding to position 438 according to SEQ ID NO:35, a guanine at a position corresponding to position 112 according to SEQ ID NO:36, a guanine at a position corresponding to position 84 according to SEQ ID NO:37, a cytosine at a position corresponding to position 11,655 according to SEQ ID NO:38, a cytosine at a position corresponding to position 11,804 according to SEQ ID NO:39, a cytosine at a position corresponding to position 2,453 according to SEQ ID NO:40, a cytosine at a position corresponding to position 818 according to SEQ ID NO:41, or a cytosine at a position corresponding to position 206 according to SEQ ID NO:42.

77. The method according to any one of claims 71 to 76, wherein the determining step comprises sequencing the entire nucleic acid molecule.

78. The method according to any one of claims 66 to 70, wherein the determining step comprises:
a) amplifying at least a portion of the genomic nucleic acid molecule that encodes the human RNF213 polypeptide, wherein the portion comprises: a guanine at a position corresponding to position 102,917 according to SEQ ID NO:2, or the complement thereof; a cytosine at a position corresponding to position 102,391 according to SEQ ID NO:3, or the complement thereof; or a thymine at a position corresponding to position 103,226 according to SEQ ID NO:4, or the complement thereof;
b) labeling the amplified nucleic acid molecule with a detectable label;
c) contacting the labeled nucleic acid molecule with a support comprising an alteration-specific probe, wherein the alteration-specific probe comprises a nucleotide sequence which hybridizes under stringent conditions to the nucleic acid sequence of the amplified nucleic acid molecule comprising: a guanine at a position corresponding to position 102,917 according to SEQ ID NO:2, or the complement thereof; a cytosine at a position corresponding to position 102,391 according to SEQ ID NO:3, or the complement thereof; or a thymine at a position corresponding to position 103,226 according to SEQ ID NO:4, or the complement thereof; and
d) detecting the detectable label.

79. The method according to any one of claims 66 to 70, wherein the determining step comprises:
a) amplifying at least a portion of the mRNA molecule that encodes the human RNF213 polypeptide, wherein the portion comprises: a guanine at a position corresponding to position 11,887 according to SEQ ID NO:12, or the complement thereof; a guanine at a position corresponding to position 12,036 according to SEQ ID NO:13, or the complement thereof; a guanine at a position corresponding to position 2,685 according to SEQ ID NO:14, or the complement thereof; a guanine at a position corresponding to position 1,050 according to SEQ ID NO:15, or the complement thereof; a guanine at a position corresponding to position 438 according to SEQ ID NO:16, or the complement thereof; a guanine at a position corresponding to position 112 according to SEQ ID NO:17, or the complement thereof; a guanine at a position corresponding to position 84 according to SEQ ID NO:18, or the complement thereof; a cytosine at a position corresponding to position 11,655 according to SEQ ID NO:19, or the complement thereof; a cytosine at a position corresponding to position 11,804 according to SEQ ID NO:20, or the complement thereof; a cytosine at a position corresponding to position 2,453 according to SEQ ID NO:21, or the complement thereof; a cytosine at a position corresponding to position 818 according to SEQ ID NO:22, or the complement thereof; or a cytosine at a position corresponding to position 206 according to SEQ ID NO:23, or the complement thereof;
b) labeling the amplified nucleic acid molecule with a detectable label;
c) contacting the labeled nucleic acid molecule with a support comprising an alteration-specific probe, wherein the alteration-specific probe comprises a nucleotide sequence which hybridizes under stringent conditions to the nucleic acid sequence of the amplified nucleic acid molecule comprising: a guanine at a position corresponding to position 11,887 according to SEQ ID NO:12, or the complement thereof; a guanine at a position corresponding to position 12,036 according to SEQ ID NO:13, or the complement thereof; a guanine at a position corresponding to position 2,685 according to SEQ ID NO:14, or the complement thereof; a guanine at a position corresponding to position 1,050 according to SEQ ID NO:15, or the complement thereof; a guanine at a position corresponding to position 438 according to SEQ ID NO:16, or the complement thereof; a guanine at a position corresponding to position 112 according to SEQ ID NO:17, or the complement thereof; a guanine at a position corresponding to position 84 according to SEQ ID NO:18, or the complement thereof; a cytosine at a position corresponding to position 11,655 according to SEQ ID NO:19, or the complement thereof; a cytosine at a position corresponding to position 11,804 according to SEQ ID NO:20, or the complement thereof; a cytosine at a position corresponding to position 2,453 according to SEQ ID NO:21, or the complement thereof; a cytosine at a position corresponding to position 818 according to SEQ ID NO:22, or the complement thereof; or a cytosine at a position corresponding to position 206 according to SEQ ID NO:23, or the complement thereof; and
d) detecting the detectable label.

80. The method according to any one of claims 66 to 70, wherein the determining step comprises:
a) amplifying at least a portion of the cDNA molecule that encodes the human RNF213 polypeptide, wherein the portion comprises: a guanine at a position corresponding to position 11,887 according to SEQ ID NO:31, or the complement thereof; a guanine at a position corresponding to position 12,036 according to SEQ ID NO:32, or the complement thereof; a guanine at a position corresponding to position 2,685 according to SEQ ID NO:33, or the complement thereof; a guanine at a position corresponding to position 1,050 according to SEQ ID NO:34, or the complement thereof; a guanine at a position corresponding to position 438 according to SEQ ID NO:35, or the complement thereof; a guanine at a position corresponding to position 112 according to SEQ ID NO:36, or the complement thereof; a guanine at a position corresponding to position 84 according to SEQ ID NO:37, or the complement thereof; a cytosine at a position corresponding to position 11,655 according to SEQ ID NO:38, or the complement thereof; a cytosine at a position corresponding to position 11,804 according to SEQ ID NO:39, or the complement thereof; a cytosine at a position corresponding to position 2,453 according to SEQ ID NO:40, or the complement thereof; a cytosine at a position corresponding to position 818 according to SEQ ID NO:41, or the complement thereof; or a cytosine at a position corresponding to position 206 according to SEQ ID NO:42, or the complement thereof;
b) labeling the amplified nucleic acid molecule with a detectable label;
c) contacting the labeled nucleic acid molecule with a support comprising an alteration-specific probe, wherein the alteration-specific probe comprises a nucleotide sequence which hybridizes under stringent conditions to the nucleic acid sequence of the amplified nucleic acid molecule comprising: a guanine at a position corresponding to position 11,887 according to SEQ ID NO:31, or the complement thereof; a guanine at a position corresponding to position 12,036 according to SEQ ID NO:32, or the complement thereof; a guanine at a position corresponding to position 2,685 according to SEQ ID NO:33, or the complement thereof; a guanine at a position corresponding to position 1,050 according to SEQ ID NO:34, or the complement thereof; a guanine at a position corresponding to position 438 according to SEQ ID NO:35, or the complement thereof; a guanine at a position corresponding to position 112 according to SEQ ID NO:36, or the complement thereof; a guanine at a position corresponding to position 84 according to SEQ ID NO:37, or the complement thereof; a cytosine at a position corresponding to position 11,655 according to SEQ ID NO:38, or the complement thereof; a cytosine at a position corresponding to position 11,804 according to SEQ ID NO:39, or the complement thereof; a cytosine at a position corresponding to position 2,453 according to SEQ ID NO:40, or the complement thereof; a cytosine at a position corresponding to position 818 according to SEQ ID NO:41, or the complement thereof; or a cytosine at a position corresponding to position 206 according to SEQ ID NO:42, or the complement thereof; and
d) detecting the detectable label.

81. The method according to claim 80, wherein the nucleic acid molecule in the sample is mRNA and the mRNA is reverse-transcribed into cDNA prior to the amplifying step.

82. The method according to any one of claims 66 to 70, wherein the detecting step comprises:
contacting the genomic nucleic acid molecule in the biological sample with an alteration-specific probe comprising a detectable label, wherein the alteration-specific probe comprises a nucleotide sequence which hybridizes under stringent conditions to the nucleotide sequence of the amplified nucleic acid molecule comprising: a guanine at a position corresponding to position 102,917 according to SEQ ID NO:2, or the complement thereof; a cytosine at a position corresponding to position 102,391 according to SEQ ID NO:3, or the complement thereof; or a thymine at a position corresponding to position 103,226 according to SEQ ID NO:4, or the complement thereof; and
detecting the detectable label.

83. The method according to any one of claims 66 to 70, wherein the detecting step comprises:
contacting the mRNA molecule in the biological sample with an alteration-specific probe comprising a detectable label, wherein the alteration-specific probe comprises a nucleotide sequence which hybridizes under stringent conditions to the nucleotide sequence of the amplified nucleic acid molecule comprising: a guanine at a position corresponding to position 11,887 according to SEQ ID NO:12, or the complement thereof; a guanine at a position corresponding to position 12,036 according to SEQ ID NO:13, or the complement thereof; a guanine at a position corresponding to position 2,685 according to SEQ ID NO:14, or the complement thereof; a guanine at a position corresponding to position 1,050 according to SEQ ID NO:15, or the complement thereof; a guanine at a position corresponding to position 438 according to SEQ ID NO:16, or the complement thereof; a guanine at a position corresponding to position 112 according to SEQ ID NO:17, or the complement thereof; a guanine at a position corresponding to position 84 according to SEQ ID NO:18, or the complement thereof; a cytosine at a position corresponding to position 11,655 according to SEQ ID NO:19, or the complement thereof; a cytosine at a position corresponding to position 11,804 according to SEQ ID NO:20, or the complement thereof; a cytosine at a position corresponding to position 2,453 according to SEQ ID NO:21, or the complement thereof; a cytosine at a position corresponding to position 818 according to SEQ ID NO:22, or the complement thereof; or a cytosine at a position corresponding to position 206 according to SEQ ID NO:23, or the complement thereof; and
detecting the detectable label.

84. The method according to any one of claims 66 to 70, wherein the detecting step comprises:
contacting the cDNA molecule in the biological sample with an alteration-specific probe comprising a detectable label, wherein the alteration-specific probe comprises a nucleotide sequence which hybridizes under stringent conditions to the nucleotide sequence of the amplified nucleic acid molecule comprising: a guanine at a position corresponding to position 11,887 according to SEQ ID NO:31, or the complement thereof; a guanine at a position corresponding to position 12,036 according to SEQ ID NO:32, or the complement thereof; a guanine at a position corresponding to position 2,685 according to SEQ ID NO:33, or the complement thereof; a guanine at a position corresponding to position 1,050 according to SEQ ID NO:34, or the complement thereof; a guanine at a position corresponding to position 438 according to SEQ ID NO:35, or the complement thereof; a guanine at a position corresponding to position 112 according to SEQ ID NO:36, or the complement thereof; a guanine at a position corresponding to position 84 according to SEQ ID NO:37, or the complement thereof; a cytosine at a position corresponding to position 11,655 according to SEQ ID NO:38, or the complement thereof; a cytosine at a position corresponding to position 11,804 according to SEQ ID NO:39, or the complement thereof; a cytosine at a position corresponding to position 2,453 according to SEQ ID NO:40, or the complement thereof; a cytosine at a position corresponding to position 818 according to SEQ ID NO:41, or the complement thereof; or a cytosine at a position corresponding to position 206 according to SEQ ID NO:42, or the complement thereof; and
detecting the detectable label.

85. The method according to any one of claims 66 to 84, wherein the subject is RNF213 reference, and the subject is administered a therapeutic agent that treats or inhibits a liver disease in a standard dosage amount, and is administered an RNF213 inhibitor.

86. The method according to any one of claims 66 to 84, wherein the subject is heterozygous for an RNF213 predicted loss-of-function or missense variant, and the subject is administered a therapeutic agent that treats or inhibits a liver disease in an amount that is the same as or lower than a standard dosage amount, and is administered an RNF213 inhibitor.

87. A therapeutic agent that treats or inhibits a liver disease for use in the treatment of a liver disease in a subject having:
a genomic nucleic acid molecule having a nucleotide sequence encoding a human Ring Finger Protein 213 (RNF213) polypeptide, wherein the nucleotide sequence comprises: a guanine at a position corresponding to position 102,917 according to SEQ ID NO:2, or the complement thereof; a cytosine at a position corresponding to position 102,391 according to SEQ ID NO:3, or the complement thereof; or a thymine at a position corresponding to position 103,226 according to SEQ ID NO:4, or the complement thereof;
an mRNA molecule having a nucleotide sequence encoding a human RNF213 polypeptide, wherein the nucleotide sequence comprises: a guanine at a position corresponding to position 11,887 according to SEQ ID NO:12, or the complement thereof; a guanine at a position corresponding to position 12,036 according to SEQ ID NO:13, or the complement thereof; a guanine at a position corresponding to position 2,685 according to SEQ ID NO:14, or the complement thereof; a guanine at a position corresponding to position 1,050 according to SEQ ID NO:15, or the complement thereof; a guanine at a position corresponding to position 438 according to SEQ ID NO:16, or the complement thereof; a guanine at a position corresponding to position 112 according to SEQ ID NO:17, or the complement thereof; a guanine at a position corresponding to position 84 according to SEQ ID NO:18, or the complement thereof; a cytosine at a position corresponding to position 11,655 according to SEQ ID NO:19, or the complement thereof; a cytosine at a position corresponding to position 11,804 according to SEQ ID NO:20, or the complement thereof; a cytosine at a position corresponding to position 2,453 according to SEQ ID NO:21, or the complement thereof; a cytosine at a position corresponding to position 818 according to SEQ ID NO:22, or the complement thereof; or a cytosine at a position corresponding to position 206 according to SEQ ID NO:23, or the complement thereof; or
a cDNA molecule having a nucleotide sequence encoding a human RNF213 polypeptide, wherein the nucleotide sequence comprises: a guanine at a position corresponding to position 11,887 according to SEQ ID NO:31, or the complement thereof; a guanine at a position corresponding to position 12,036 according to SEQ ID NO:32, or the complement thereof; a guanine at a position corresponding to position 2,685 according to SEQ ID NO:33, or the complement thereof; a guanine at a position corresponding to position 1,050 according to SEQ ID NO:34, or the complement thereof; a guanine at a position corresponding to position 438 according to SEQ ID NO:35, or the complement thereof; a guanine at a position corresponding to position 112 according to SEQ ID NO:36, or the complement thereof; a guanine at a position corresponding to position 84 according to SEQ ID NO:37, or the complement thereof; a cytosine at a position corresponding to position 11,655 according to SEQ ID NO:38, or the complement thereof; a cytosine at a position corresponding to position 11,804 according to SEQ ID NO:39, or the complement thereof; a cytosine at a position corresponding to position 2,453 according to SEQ ID NO:40, or the complement thereof; a cytosine at a position corresponding to position 818 according to SEQ ID NO:41, or the complement thereof; or a cytosine at a position corresponding to position 206 according to SEQ ID NO:42, or the complement thereof.

88. A Ring Finger Protein 213 (RNF213) inhibitor for use in the treatment of a liver disease in a subject having:
a genomic nucleic acid molecule having a nucleotide sequence encoding a human Ring Finger Protein 213 polypeptide, wherein the nucleotide sequence comprises: a guanine at a position corresponding to position 102,917 according to SEQ ID NO:2, or the complement thereof; a cytosine at a position corresponding to position 102,391 according to SEQ ID NO:3, or the complement thereof; or a thymine at a position corresponding to position 103,226 according to SEQ ID NO:4, or the complement thereof;
an mRNA molecule having a nucleotide sequence encoding a human RNF213 polypeptide, wherein the nucleotide sequence comprises: a guanine at a position corresponding to position 11,887 according to SEQ ID NO:12, or the complement thereof; a guanine at a position corresponding to position 12,036 according to SEQ ID NO:13, or the complement thereof; a guanine at a position corresponding to position 2,685 according to SEQ ID NO:14, or the complement thereof; a guanine at a position corresponding to position 1,050 according to SEQ ID NO:15, or the complement thereof; a guanine at a position corresponding to position 438 according to SEQ ID NO:16, or the complement thereof; a guanine at a position corresponding to position 112 according to SEQ ID NO:17, or the complement thereof; a guanine at a position corresponding to position 84 according to SEQ ID NO:18, or the complement thereof; a cytosine at a position corresponding to position 11,655 according to SEQ ID NO:19, or the complement thereof; a cytosine at a position corresponding to position 11,804 according to SEQ ID NO:20, or the complement thereof; a cytosine at a position corresponding to position 2,453 according to SEQ ID NO:21, or the complement thereof; a cytosine at a position corresponding to position 818 according to SEQ ID NO:22, or the complement thereof; or a cytosine at a position corresponding to position 206 according to SEQ ID NO:23, or the complement thereof; or
a cDNA molecule having a nucleotide sequence encoding a human RNF213 polypeptide, wherein the nucleotide sequence comprises: a guanine at a position corresponding to position 11,887 according to SEQ ID NO:31, or the complement thereof; a guanine at a position corresponding to position 12,036 according to SEQ ID NO:32, or the complement thereof; a guanine at a position corresponding to position 2,685 according to SEQ ID NO:33, or the complement thereof; a guanine at a position corresponding to position 1,050 according to SEQ ID NO:34, or the complement thereof; a guanine at a position corresponding to position 438 according to SEQ ID NO:35, or the complement thereof; a guanine at a position corresponding to position 112 according to SEQ ID NO:36, or the complement thereof; a guanine at a position corresponding to position 84 according to SEQ ID NO:37, or the complement thereof; a cytosine at a position corresponding to position 11,655 according to SEQ ID NO:38, or the complement thereof; a cytosine at a position corresponding to position 11,804 according to SEQ ID NO:39, or the complement thereof; a cytosine at a position corresponding to position 2,453 according to SEQ ID NO:40, or the complement thereof; a cytosine at a position corresponding to position 818 according to SEQ ID NO:41, or the complement thereof; or a cytosine at a position corresponding to position 206 according to SEQ ID NO:42, or the complement thereof.

89. The RNF213 inhibitor according to claim 88, which is an antisense nucleic acid molecule, a small interfering RNA (siRNA), or a short hairpin RNA (shRNA) that hybridizes to an RNF213 mRNA.

90. The RNF213 inhibitor according to claim 88, which comprises a Cas protein and guide RNA (gRNA) that hybridizes to a gRNA recognition sequence within an RNF213 genomic nucleic acid molecule.

91. The RNF213 inhibitor according to claim 90, wherein the Cas protein is Cas9 or Cpf1.

92. The RNF213 inhibitor according to claim 90 or claim 91, wherein the gRNA recognition sequence includes or is proximate to: position 102,917 according to SEQ ID NO:1, position 102,391 according to SEQ ID NO:1, or position 103,226 according to SEQ ID NO:1.

93. The RNF213 inhibitor according to claim 90 or claim 91, wherein the gRNA recognition sequence is located from about 1000, from about 500, from about 400, from about 300, from about 200, from about 100, from about 50, from about 45, from about 40, from about 35, from about 30, from about 25, from about 20, from about 15, from about 10, or from about 5 nucleotides of a position corresponding to: position 102,917 according to SEQ ID NO:1, position 102,391 according to SEQ ID NO:1, or position 103,226 according to SEQ ID NO:1.

94. The RNF213 inhibitor according to claim 90 or claim 91, wherein a Protospacer Adjacent Motif (PAM) sequence is about 2 to about 6 nucleotides downstream of the gRNA recognition sequence.

95. The RNF213 inhibitor according to any one of claims 90 to 94, wherein the gRNA comprises from about 17 to about 23 nucleotides.

96. The RNF213 inhibitor according to any one of claims 90 to 95, wherein the gRNA recognition sequence comprises a nucleotide sequence according to any one of SEQ ID NOs:62-81.

The application's sequence listing, which the Patent Office published only in electronic form, follows.

SEQUENCE LISTING (64588 sequences)

SEQ ID NO: 1 - DNA, 137919 bp, homo sapien
cagcgcgcggcaggcggcgagctcgggggccgcaggtgcgagcgggcctggagagtctcccggggcggggagcgggctaggatacagtgggccccgcgggccggcgggccgggtcccggggagcggcgcctgcgtccggatgcccctcccggccgcctcttcctgccggctccaagtttcggtttcgccgccggggtgcccggtccagccccgcccgcggcgcccactgaccctgttccccggctgcgggaggggtcggggtgggggcagcgggcacgcctgggaccccggcgacatccccggagcgcagagcgcggaggaggctttgcgccccggcagtgctgcccccgggaagtggccggggcacggggggtgtagtggaaggggacagccggacccgggcctgcaggtccgcccgggaatcctgcgcctgtacgaatggcaacaacggaaaagtgaagttgcaaaaacagactcctaacttttacgagggaggcatcgccccgtctgaaccgcaccgcgcagcgtccttccgacttggcgaagtcgcccgagcgcggggctcaaggccagggtgggcacccctcccggatggctgcctgcaagccggcgggccgggccctgggggagtccagggcgggaggggaaggagctgtgcaaacatggtggtggcccttccctgcccccaccttgttgactttggttgtggttgggggatgggctttgatttgggtggcagtgtctgtgcttgggaaaaaatgtcagagaaaagacaggaagcggattgaatgcaacagtgttgggtgcctggggctctctcttgtgtcttccggcccctagagcagatggaacaataagatgctttagggggccgggcgcagtggctaatgcctgtaatcccaaaactttgggaggccaaggcgggtgggtcacctgaggtcgggagttcgagaccagcctggccaacatgaaaccccgtttctactaaaaacacaaaaaattagccgggtgtggtggcgcatgcctgtaactccacctacttgggagactgaggcgggagaatcgctagagcccgggaggcggaggttgcagtgagctgagattgcccactgtactccagcctgggtgaaactgtcaaacaaacaaaaaatgctttttggaggatttttcgagttttctggtctgtggttccccagtgtagcattggagaaggaaacacttcgggtggaaagaaagaggcctgggcggtggggagtcattgaaggtgtttgagggagggagtgtccactggtggttgtttcaggtagagtgtggaggggaggaggtacggtgggagccagggcttggctgtggcaggggtaggggagttttaaactctccttctactctgaaggagagataattttagtctctggaataaaagggcagcagacctggagaaaagggatgcaaattgtcccatacacctattgggaacctcatcaaagagaagactgcagaagacagatgattgatgtttttatggcattgggacaggggcttggggctggagaggggaggtgtgcagggttgtcttgttgtgcagataatcactcaggtgatctcagagctgctctcagaggaactggcgaggccgcaggcactcctcttgtgtgtccctgggaccgttcctagatccctctaggcagataatggggcctcagagagagcttctgctccattctgctgtttcatggtgtggatttcctttatagccttttacaaaaggatagcttcccagaactcctgagtatgtggttgctctgaatagccatctcaaaattgaccacagaatctgttttggggtggcatagattagtctcccacacaggtcaagccagggaaccccacccagtgcctccgtccctcgttcaggcccagcctgagtgagcccaccccagtgggaggagagggcagggccagggcagggagggggcctgagtgtcctcctggctgctgaaggcaccagtcagctgccgctccagccactgccccagtggagttctttggttccaagccagcagaagaaggtggtgggtgggccagtgtgccctgaggcttcttactggggagggagagagtcaggtcctccactgttaggtggccaagcgcccaaacgccatctccactctcaccctggatgcaagaagtgaccccggaggcctgagtcctggccttggtctggtttgatgccatccaccgcagaggctgttctgagggcaggtggtcagtgcagagtggcgcgctttgtggatggcagcctccccccattactaggaatctgactgccagcccagtagccctgggctgcctgctcaggccccatcacctgtggggcaggtgctttagtccccttaagaggatgaggagggtgaggcatcagcaggctgagcgccttgctcagggcaggccgtgggaccctgccgaacagcacgtggctgccccacgcctgcctggagcatcccctatccccacccagcccaacccatgttctcagcagcagggatggttctaggctggctgaatgagggaccagggcagagactgcaaaagcttgagagccaagggggcagcacagagcggggaggggctgggcttgggctgtgctcctgttgggtttccattaaccaggggaccagctgggctgctgtgatttcactttcgcagaaaatgaaactgaagccgtggtcacgtgacaggacatgtagtatatagcaggctgccagcgactcctgctcttgcttctggatctgcagggcagtcccagcaggacccatggagtgtccttcgtgccagcatgtctccaaggaggaaacccccaagttctgcagccagtgcggagagaggctgcctcctgcagcccccatagcaggtgaggcccaggggtgctggtggaggctggggcagtggggacccctggagatgtctcacctcccttccaggaaatggaaaccctgggcagcaggcagctcaggtggggccgaggtcctctgtggctactgaggctctgtggctctgaatagccatctcaaaagtgaccacagagtctgttttggggtggcatagattagtctcccacacaggtcaagccaggggaccaccacccagtgcttccgtccctcgttcaggcccggcctgagtgagcccacccgagtgggaggagagggcagggccagggcagggagaggacaaaacaagaagttttgtcggggtctttgctggaggttcctgcttttgaaaattttcagtttcatttcctagagagagctcacggtttttcttccccttgggaatgagaagtgtcgggctgagctgagggcttcatagagagtttcagagaatgctgcagggaagcagagtttgaggctctgcaggggttgagagctctgcctgggttagtttttgaggggccgtgagggggccccaggacctgtccaggcacctccctggctcgggaggccagtggagagacaggagcggggcagtgtcaggcgggccttgcctgctgagcatcttgagtccattctcaattttgttggcttctggggcctcagactggttcccctcctcccgggttttaaacaccaaccctaaaactagcagcccccagaccttcagcctttctgtgtccaaagcccagccccacctccactggtgagggcacctcattcttccagctgcttctatcggacccatcaccccggggccctctccttcctccatgacccacatgcagagggccctgctggtctccccgcctccacgctgcatgctgccttcctgcttcctgctcagcacagcagacagtcaaaccacagacccccttacaagatccgcccctgcccccgctgtaactcaggacaagcaggagcccttacggtggccacgaggtcctacatagacggctgcccaccccattcctcttggctccctctcctgtccccagagcccaccaccttctggcccttcctggatacaccaggtgtgcttccaccgcagggcctttgcaccacccttccccagagggcggcctggctccctccttcccctctttcagtctttgcccagctgctcgccatggggtctctccgatgttgtccttcaagggtgtgagccccagtccttccatgtttgtttgtttttttttttttttttagagggagtttttttgttcttgttgctctggctagagagcagtggcgaaatctcagctcactgcaacctctgcctcccgggttcaagtgattcttctgcctcagcctcccaagtagctgggactactggtacccaccaccactcccggctaatttctgtatttttagtagagatggggtttcaccatgttggccaggctggttttgaactcctgacctcaggtgatccacccgcctcggcctcacaaagtgctgggattataggcgtgagccaccgcgcccagcctaagggctccacttctattaataatagtgcggagagcactggtagtgcgcagcatgaactgtttctagaggcatgcaaagcaaatgcacttgagactcctaattcaccacttgtaagaggccaggaatttggtgactctgtacatgatgcttttgaacatttatcgaaaaccaagaaatacagtgatgctggctggttgcccccagcgtcactgagaaagtggtgaaaaggatgaactcagggattcgatgtctgggctgcagctctgcataaatgatctgagagtttcttagtgtgccctggatcagaatcttctctcctgtagccacagggttgaaattgtagaaaatcgagcaccagctctcacgcgattagctgagttaaaatgaaagctgagcttccaggcatgcagggcgtctgctgttaaagtgggggcacttaagccggatgccgtggttcacacctacaaccccagcatgtttgcaggccaaggtgggaggatcacttgagcctaggagtttgagaccagcctgggcaatgtagaaagactccatctctgtattacaagaaaaaaaaagtgaggacattgggtggcaaaggaagggatccttcaagttgggatggggacatgggaagcccatggccaggctggagacattgagttccaaatgatataaagttgagtcaggttgagtttagtagtgtgggcccactagcagagattatgcatttcatgttgcagctggtagagttaggaaggcctctgagtctttgtttggttggctgaaacatggatcaaaaggtggcccaccttactaggcgtggtggttcacgcctgtaatcccagcactttgggaggccgaggtgagtagatcgcttgagcccaggagttcgagagcagcctaagcaacatggtggagccccatctctacaaaaaaaaaaaagaaaaaaaaatacaagaattagctggagcaggaggatcacttgagcctgggaagtcgaggctgcagtaagccatgattgtcccactgcactccagcctgggtgacagagtgagaccctgtcttagaagaaaagaaaaggaaaaaaaaagccttacagtggtctctcagtgctcaaatgaaaagtctcttgcctctcactttattttttaaaattttatttcattgttttgagacagagtcttgctctgtcacccaggctggagtgcagtggtgccatttcagctcactgcaacctttacctcccaggttcaagtgatgttcctgcctcagcctcccaagtagcggggattacaggcgtgaggcaccaccctcagctattttttatatttttagtagagacggcgtttcaccatgttggccaggttggtatcaaactcctgacctcaagtgatgcgcccaccttggcctctcaaagtgctgggattacaggtgtgagccacccaccgcacctggcctcatgtctctcactttaaatcaagagttagacatgattaagcttcttgaggaaggcatgttgaaagctgagataggctgatagctaggcctcttgcaccaaatggttagccaagttgtaaatgcaaaggaaaagtttttgaaagaaattaaaagtgcccccagcactttgggaggctgaggtaggtggatcacctgaggtcaggagtttgagaccagcctggccaacgtggtgaaaccccgtctctactaaaaatgcaaaaattagctgggtgtggtggctcatgcctgtaatcccagcttcttgggaggctgaggcacaagaattgcttgaacccaggagacggaggttgcagtgagctgagattgtgccactgcactccagcctgggtgacaacagcgagactctgtctcaaaaaaaaaaaagaaaaaaaagagaccatcctggccaatatggtgaaaacccatgtctactaaaaatacaaaaattagctaggcatggtggcgtgtacctgtagtcccagctactcgggaggctgaggcaggagagaatcacttgaacccaggaggtggaggttgcagtgagccgagatcacgccactgcactccagcctggcgacagagcgagactccatcccaaaaaagaaaaaaagtgctactccaatgaacacacaaatgattagagagtgaaacagccttattgtgatatggagagagtttgcaatgtctggagaggtcaaaccagtcacaacattcccttaaaccacagccgaatccacagtaaagccctaactctcctgtagccacaattccacacaggctgacagagttgaggaggctgcagagaagatcttgaagctagcagagactggtttatgaggttttaggaaagcagtcatctccataacataaaagtgcaaggtgaagcagcgagtgctgctggagaagctgcagtaagttctccagatctggctaaggttattgatggaggtggctctactcaacagcagattttcttttctttttttttttttgagacagggtcttggtctgtctcccaggctggagtgcagtggctggtcctcagctcactgcaacctccgcctcccaggttcaagcaattctcctgcctcagcctcccaagtagctgggattacaggtgtgtgccaccacttccggctaatattgtattttttattagagatagggtttctccatattagcattgctggtctccaactccttgacctcaagtgatccccctgcctctgcctcccaaagtaccggggctataggcatgaaccattgcacctggccaattttattcttttttaaggccgagtagtgttccattatgtatatgtaccacattttcttcaacgtccattgttggatagttggtggattccatatcttggctattgtgaatcgtgctacagtgagcatgggtgtgcatggcaggattgctggagcccaggaggtcaacgctgcagtgagccgtgatcataccactgcactccagcctgggtcgacagtgagaccctgtctcagaaaaaaaaaaaaaaaaaaaaaaaaaggcagtactgcatccccggagggactgcagggattagtgccaccaccaagcactccaaagatgcaggggtggggattcccattcacctcccctatttggcctttgtggaagacgggtggatcttgggaatgaaaatgaatgatcgtaagcttaatcaaatggtgatttctcagcctccatagtcgtgtgagccaattctcctaatacatcctctctcatccatctgtttgtccatccatccatccatccatccatccgtttatctgtctatctatctgtcatctgtcttctatcaattatccatccatccattcatccatgtacctatccatccatcttatctatctatcctatctatccatctatctataagtctgtattagggttctctaaagggacagaactaataggatctatgtctgtaagaaagggagtgtattatggagaattggctcacacaatcacaaggtgaagtcccatggtaggccgtctgcaagctgggaaagaaagaagccagtagttgctcagtctgagtccaaaagcctcaaaagcagggaagccgacagtgtagccttcagtctgtggctgaagacccgagatccccctggcaaaccactggcgtaagtccaagtttccaaaggccaaagaacctgaagtgtgatgtccaagggcaagaggaacgtgaggaagcatccagcataggaggaagatgaaagccagaagactcagcgagccagcttaccccaccttctgcctgctttgttctagccacgctggcagctgactggatgctgcccacccacatagagggtgggtcttcctctcccaggccattgactcaaatgtcagtctcctctgacaacaccctcacagacacaaccagaacaatactttaccaactacctaggcatccttcaacccaatcaaattgacacctgatattaaccatcacaccgtctatccatccctctaccctatctgtccacctaccctatctatctatccacctatccatctgtcctatcatctatccatccatccatccattcatctattctatctatccatccatctattcatccatccattcatctattctatctatccatccatccattcatctattctatctatccatccatcctctttctattcatccattcatctatccatctattctatctgtccatccatctatactatctatccgtccatcctatctgtttatctatcatctgtctatccattcatctagcttatctatctattcatccatcaatctatccatccatccattcatctgttctatctatgtatctatcttatgtatctatccattcatctatcccatcttatctatccatcccatcttatctatccatccgtccatccatccatgtatctacctatctacctgtctacctacctacctacatattctatagttctgctctctggataaccctgttctatactgtgagtatttaatgagttaacatgtacattgtttaggaagtgctagttaagtatgtctcttatttctgaatccagctacttacttttatgacaataaaaatgtaaatgctggttggcaaatgacccacatgttacaggaggacataaaatagcacgaagtttcctcaccctgggccaggactgtcacattccccagagcaacactgtaaactggtgtgtcctcttctagacatctcctctgcgtgaatgtgtgcgcacacacacacacgttaatgtgagtggcagctcgtgccctgcgcatgccttgctactttcatgtacagtggctgaggcctctagtggaggacggacctcagcagcctccctggctctgccacccagcagggcctgactcagcaacaggcctatcctgggcacttcccttgtcctgctgttttgccgtgacataggctgctaggctgcatgcttgcacggagaccttgccctctgagccaggctggccgtctggaggacagattcccagccactagcctgctggcttcaggctggcacatttacaatgcaaatctcttcaaatcccctgcacaaagcttctctggccactcactggccgcgtctctgtgctccctgccttctagatttctattcagattctctccagcgttcagaatgatggatcttgtcaatctgtgccggtcgttgggtggaaatggcactgcagggcctccgttctgatttccttcatcagtaggcatggcaggcatctctttggaagttaagagaccacatgtatgtgtatttccttgagcggcctgtctgtctttagggaagctcgttttgctttggttggtccttatgattgttgggactgtttatactgggaacagcctgaaacccagctctcctaggcttgctcagcaagagaaacgtgctgggtcaccgttgcccaagtccaggcttgaggggttcaagtgtactagggctttgctccatttctctgatcctgacagctctgcccttctccactgccagctttgtctgcaggtggaggagaacagacagtggtttcccagcaccacctcatggtctttccaggatgcactgagtggcagaaaccccagtaagggtccagaagtatggatgcttccatacttcttgctggttggcccttcccttagtcaatcactagtgccagggtaaatatcggccctgattggattaggctagtcagggcccgcccctggtgggagggtaggttggtgggagggtaggttggtgggaggggcaggctcagaatccctggttgtaggtgaaacagcagctctcgaaggatggggccttgggtcgcctgttgcagatctttctccagctcttactttctggctgtgatgtttcatgtgtgtcttatgtatgtagacgtttagaggatttgttatcaattttgagtcctgctaaggaacttcacgaattcttgagctcttggctacgccaacactgagtactcaaagggaaaaaggtctgcgtggtccctgccctccagatctcagaggaggagagggcagtgacgaaaccaggtgctggaaacgggcgtggggatgaagtgtccagacaggggcgcagctgggactggcttggggccttggagaagggtctgtggggatcaggcagagggaaggttctgtacagaaaagcaggcttggcctggcaccatctggagtgtgtgtcagggagaggtggggtcgtccagacccaggattgaaaacagggactccttgaagggtgttttcgtccattttctgttgccataagagtacccgagcctgggtaattgaaaaagaaaaggccgggtgtggtggctcaagcctgtaatcccagcactttgggaggccgaggtgggcggatcacgaggtcaggagttcaagaccagcctgaccaacatggtgaaaccccgtctctactaaaaatacaaaaaaaattagctgggtgtggtggcgcatgcctgtaatcccagctactccagaggctgaggcaggagaatcacttgaacccaggaggtggaggttgcagtgagccgagattgcaccactgcactccagcctgggtgacagagcgagactccgtctcaaaaaagaagaaaaaagaaaagaggccgggtggggtggctcacacctgtaatcccagcactttgagagggcaagacgggtggatcatgaggtcaggagttcaagaccatcctggccaagatgctgaaacccctgtctctactaaaaacacaaaaattagccgggtgtggtggcatgcacctgtaatcccagctacttgggaggccgaggcaggagaattgcttgaacctgggaggcagaggttgcagtgagccaagattgtgcctctgcactccagcctgggcgacagagcaagactctgtctcaaaaaaaataataaaataaaataaaaaaagaaaaagaaaaaagaggtttatttagctcacagttctgcagactgagaagttcagggcctggccctgatgtctggtgagggcttttgtgccacatggcagagtaggccgacggggatgctgacagctgtgaaagactaagcctgatgggacatcttgacttcataacaacccacctggcgggtgctaatccattcccgaggggagtaaacaagcctctcaagagtaaacccatgaccgcaaacggcaccaagccattcgtgagggatttgccctcacgacccacagacctccccgcagccctgcctcccagcactggcatactggggatcaacatgagttttggtggggatggacaaagtgcgtccacaccacaatgaaggctagagtgagtgtggggctggcagagtgggtgctccatgctgtctgcatggcagctctgcatgggtgagaatctggaggcagagcagctgggcgggcagatgccttagtgccaggacaagggaagcagtttgagacccctgggccgccactgggagaatgcccaccctggggaagacaggaggaatgtctacagtaggggaggaaagcgtaacaggctctgttttagaggtgcccgaggtgcgctgacatcctagtacagagtcaggtgaatccactcgtggacattgggaggaagaggctggatgctaggacggcacagtctttctgtctgattcaccccttgttgtgctgaaactggggtccctggttccctcctacccacctggagcagaacccctaccctgctcatgttagcaggcccaatgcaggacctcggagggagaacagggtgaatctctccatgcactcgtggggaggatttctgtttttccttcctaacactcgcttctctctgagatctgacccttccttcatctgccgttacagattctgagaacaataactccacaatggcgtcggcctcggagggtgaaatggagtgtgggcaggagctgaaggaggaagggggcccgtgcttgttcccgggctcagacagttggcaagaaaaccccgaggagccctgttccaaagcctcctggaccgtccaagaagtgagtgcactgcctcggctcccctccgcccccgctcactctgcccaggaaaatctcactgcacagctgcccagctagcccccgaaaatgccaccatggcccagcccattgaacctgcccacagggcagcagcagagctgccccttctgcacctgattcatctctggctggagtctgtgggttccagaccccctggggcctccaccgtctttttttttttttttttttttttgagacagagtttcgctcttgttgcccaggctggagtgcagtggtgcgatctcggctcgctgcagcctccacctcctggtttcaagcaattctcctgcctcagcctcccaagtagctgggactacaggcatgcaccaccacgaccagctaatttttttgtatttagtagagacggggtttcaccatgttggtcaggttggtctcaaactcctgacctcaggagatccacccacctcggcctcccaaagtgctgggattacaggtgtgagccaccgcgcccggcctccaccttccttttctttctaccagacccaatactcgtgtgtctcccagaagctgtggctggggtggggcctgagcttctgccgtgtgtatctgtgtcccaagcttctgtgggtctctttgcattgagggtgcaagctcagaggtgccttgctgcttcggggcagggacctgagcgtccgctgggtgcgtgtcttgcgcttctgtaggcctctgcattgagggtgcgtgcccagaggggctttgaagctttgggtgtggggtgggtgctctggaaatgtgctggctggcaggttacccttcttggaagggtatggctgagccaccttttggctccctctggccttgaacagcctcttaggcgttagacaccaagagaatgcgtccttgttaagattcccagttggagcactaggcgaggctttcgaggggagcgtcctggacatgttcaaggagaatggttggaagagaagggctcctgggctctagcgcggcctgggaagacccagagggcagtgtcagctcccgggtttcttgctgggcacggagaaggggaagctgtctttctgtgtctgcactggggctggctttctgtctgtcgttccttgtaggtggcactccatggttgggctatggtgggaagtgatgcagccgcagtgctgtggtctgtggggggtgagtggggtgagtgtggggggtgagtggggtgtctgtggggggtgtggggtgagtgtgtggggtgagtggggtgagtgtggggggtgagtggggtgtctggggggggtgagtggggtgagtgtggggggtgagtggggtgtctgtggggggtgagtggggtgagtgtggggtgtgagtggggtgtctgtgggggatgagtggggtgagtggggggtgaggggggtgtctgtggggggtgagtggggggtgagtggggtgtgtgttggggggtgtgtgagtggtgtgaatgggatgtgtgtgtgttgggggtgtgtgagtggggtgtgagtggggtgtgtgtgttgggtgtgtgagtggggggtgtgtgtgttggggtgtgtgtgttggatgtgtgtgtatgtgttggggtatgtgagttggtgtgtgagtggggtgtgtgtgtgttgggggtgtgtgttggtgtgtgagttgggggtgtgtgagtggggtgtgttgggtgtgtgtgtgttgggtgtgtgcgtgttgggtgtgtgtgagtggtgtgtgtgtgttgggagtgtgtgtggggtgagtgggatgtgtgtgtatgttggggtgtgtgggagtggggtgtgtgtgtgcttgtgtcattcccttggagaataatcccttccagagcagccaaggccacccccaagcctggagcacatgggatgcggaaggtttgggtaactccctttttatgcctaatttggaactctgtcagagtgggaaagtggcagtacggatggtgttccttgaaaacattgaaggcaaatgaataaaccctttgccatctggggcaaacaataaacccgcccaaagacagaggaaaagctaagaattgagttacttgggggaataaaattttgaaaagtttccatgaataatgaggaatctagaaagccacacaaatgctcgagcaggacgcactcgaaaaagacctgagaagacctcagtgcaggctggaaggaaggctgagtgtgggaggagtgtcccaactcagggccagtctacagagactgagagagtattattttttctttattttattttatttttttttgagatggagtctcactcctttgcccaggctggagtgcagtggcgccatctcagctcaactgcaacctttgcctcccaggttcaagtgattgtcctacttcagcctccggagtagctgggactacaggcacccgccaccacgcctggctaattttttgtatttttggtagagacggggtttcaccatgttggccaggatggtctcgatctcctgaccttgtgatccacccgcctcggcctcccagaatgttgggattacaggcgtgagccaccatgcctggccagtttttttttttcttttttcttttccatgttttggctgtaggtgtttaaggaaatctctatcaaactactaattggcaacaagccaaaggaacatagactttatttatttatttatttatttattttttgttttatttatttatttatttatttttgagatggagtttcgctcctgttgccaagctagggtgcaatggcgtgaccttggctcacagcaacctccacctcccgggttcaagcgattctcctgcctcagcctcccagctagctgggattacaggcatgcaccaccatgtctggctaattttgtatttttagtagagacggggtttctccatgttggtcaggctggtcttgaactcctgacttcaggtgctctgcccacctcagcctcccaaagtgctgggattacgggcgtgagccaccacgcctgccctattttttatttattttttaatgttttaaatttttttactagtggaaatctgcttgaatttgtaaaatgtagagttgacacagaagatgtgaaaagaatgaagacattttctagggaatcttgaacaagagaaaaccgacatgaacaagagaacaataaaagaggccaggcgcggtggctcactgggtgactgtgagatccttcctcaaagagagagagagagaaggaaggaaggaaagacaataggaaatgttgatgaggatgtggagaaattggaagtgttgtacagtgttggtggaaatgttaaacgctgcagccgttaaggaagcagcaaggcagttgatccaaaagttacgcataaaattatcctaggccgggcgcggtggctcacacctgtcatcccagcactttgggaggctgaggtgggtggatcacgaggtcaggagattgtgaacatcctggccaacatggtgaaaccccgtctctactaaaaatacaaaaaaaaaaattagctgggcgtggtggcgtatgcctgtaatcccagctacttgggcggctgaggcaggagaatcacttgaacccgggagggggaggtttcagtgagccgagatcgcaccactgcactccagcctggcaacagagcgagactcactctcaaaacaaagcaaacaaaccaaaaaaaaaacaaaaaaagaatacgatatggatctgtgctgtagcctggatggaccccaaaaacatgctaaatgaaagaagccagatacaagaggccatgtatgattcctttgatatgaaatatccacgatagactcacccatggagacagaacacagattagtggttggctgggaggagtggggaggagggagtcattgctgtgggatttctttctgggatgaagaaaatgggaactagggccaggcccggtggcttctcacctgtaatcccagcacattgggaggctgaggcgggtggatcacttgaggtcaggagttcaagaccaacctgaccaacatggggaaaccccgtctctactaaaaatacaaaaagtagccgggtgtggtggtgcttgcctgtaatcccagctactcaggaggttgaggcaggagaattgcttgaacctaggaggcagaggttgcagtgagccgagattgagacaccgcactccagcctgggcgacagtgagactctgtctcaaaaaaaaaaaaaaaaaaaaaagcctaaatatccacatatccacacatgagagaagttcagagtgaatacacaggtgaatgccgatgggttgtctctggtgatgagtttacaggggcttttgcgcattttcccaatcccacagggagcctattgaattctgaagctgagagcagtgtatgcgtgaacggtgctctaagcgcagacgccgcattctaaccatggtgaggagggtgctaggagccaagggaggcggccccagaagctgagacagcgagctgcgtggccagcctcaccctgcagcagagtcaggtggtcagtcctcacctgcagtcatggggtgggtggagagggaaagggcgcacagagaggggcccgcgcctgtcccttggcacagccatcctccacttggcctctcctttggtggccgctggttgctgactaacagggtgtcctttgtgcattcttcctctggagaggctactgggcttggctgctgggttgtacttcctgtggtgagggaagaggagactgccggagccaggggtcatttgggttggaggcatcggcaggccaggaggctgctggtggagcttcctttcctcagcttcctgctgggcgtcttgctgtgaggtctcccggcgatgcccggtgtggtgtggaagggaggtgtcggatgagcatgcccgctacagggccagactgcccgcctccgcctctaggggcttgggaggcctggcctggctggccctggggtgcccgggcctgcctataccttctgggtcggtctctgcagtgcatctgtgctctgagcacaagccaaggcattcgtgtggaggcccggggcgccgggagcctggtagggtgctgggagcttggcagggtgccgtgagcctggcagggtgccgcctctggtgtgggcagttctcctcttacgtggacttgtcctgcacgtctgcaggagctgcttcttcgtcttcccacaccctcctgcccatgggccctggaggcagacggtgctgggaagctggtcagtgcccacatgtgggtgtccctgcctgggccttcccaagaggaggtggcccctgaggtggggtctttgcgagtctactggagctgtgcgtggggtgcacagccctgccctgtctgaagggggtcgtgtttcaacagggagctacatcagaggttttggtagatgctgctgtagacctcatatccgatgaatgggaagctgctaatgccatacccagcaagagaaggaagcaggatgcagccccgcttgaggccgccagcgtgccttctgcagactgtgagcaggtagtccgagtcaatagtttgggcagaatgctccctgccctggtgcatgctggcacagcctggcacggccacctcgcacttccggcccttgagtccctgccagtcgaggaaggctgcccaggatgggcgttttcgggtcacccttgggctgtgaaagagcaacgctgattcaggcttggctcttgtgactctgaggatgttttgctagtggtgaatttcagctttattgtgcttgcccttctggcccacatccttccacttgcctttttactccgtgcagctgtccccttggacacctggagaaacttaacctggctgcactcacctggctaaagctccaccagcaacacaggcttcaccacagagagcagcaggggagcccaagggggcttagagggccaggcccaggcaggtgggggcccgacccagcctctgcctgaacacaaggtcttggatggcgctcgccacgtgggggtgtagtggaagccctgctcagtttagtctctggtttttggaagttgaaatcctgactttttctctttttcttttctttctttctttcttttttttttgagacagagtctcgctctgtcgcccaagctggagtgcagtggcacgatctcagttcactgcaacctccgcgtgcagggttcaagcgattctcctgcctcaccctcctgagtagctgggattacaggcacctgccaccacgcccggctactttttttgtgtatttttagtagagacggggtttcaccatgttggccaggctggtctcgaactcctggcctcaaatgatccacccatcttggccttccaaaatgctgggattacagacgtgagccactgtgcctgccccaaatcctgactttttctatagcatttaggagtattacaggactcactaataatatcaaaaatgaaattaggtaacacatgtaatgaaaggacttttgcttttggggaaaagcaagggagcttcataccttgaagagtgatgcttgtgaagtttattacttttttgcagagggcgacggcctccctgccttccccgcaccgcgctccccccagcccctgcccatcgagatggtcatgtgttcattgaacggagacttaccgagcatccaccacgcctaggtcttaagtgtaggcagaagccttcaaggcaggcatgctctttcctctgtgggctggggcttggccgtgagcccactcctgcagctcctgggaaatgcaggcagcgtccacacggggctggacttagccagacctaaggcacagtgtgggtggagagctcattcacaatagcaacaaaaatgtgagaaggaacttgtaaaataaaggatggattcataggccatgcgaggagaagaaggctcgggctcagcagacagtgaagtccgtggagaggtgggcccttccccagagagaacatggaaggtttagcactgcagagatgtctgctgtcacccagaatgacacgggaacttaaccaactaattaatgtataacagtagtatagctctgaatgggtttggtgggttttgtttttgtttgttttgaggcagggtctcgccctgggtcccaggctggagcgcagtggcaaaatcatagctcactgcagccttgacttcctgggctcaagcaatcctcgtgcctcagcctcccgagtagctgggactacaggcgtgcaccaccacacccaattaatttttaaaatttttggtagagatggggtcttgctgtgttacccacgctggtctcaaactcctgggctcaagcaattctcccgccccagcctcccaaagtgcagggattacaggcataaaccaccaccctagcctcgttttgtatttttggaagttgacagattttaaactataaattggtgaggatacttaacagatgtgaggaggagaaatggatgggagatttatagtaaagctgtcaacgtacacgggtggaaacattcccacggagtaacagaggcgcgacctggggatgcgcacggagcatgagatgtgagctggagttagggcactgcatatgcggaccggagcgtgttggtcagggtgtatacacgggtgtggaaagtggggtgtctagaccatgggctcagcatttgggtaaaacacacacactccactcaccccagtcacacacaccccccgccacacataccccactcacacataccccactcacaccactcacacacacccccacaccccactcacaccactcacacacacccccacacataccctccacacacacataccccactcacaccactcacacacacccccacacacaccccactcacacacacctcaacacacataccccactcacaccactcacactcccccccacacacataccctccacacacacataccccactcacaccactcacacacgcccccacacacacaccccactcacacacacctcaacacacacacacaccccactcacaccacttacacacccccaagacaaacaccccattcacaccactcacacaccctgcaacatacaccccactcacaacactcacacaccccccaacatacatacaccccactcacacacacaccccaacacacacatgccccactcataccactcacacaccccccaagacaaacgccccactcacaccactcacacactgccaacacacacagccaactcacaccactcacacacacccccaacacacactccccactcaccccactcacacacaccccaacatacgcaagtcccactcacacccatctcatactcacactgaaacacacagtggtcccttgttgcccacagggggtcggttccaggaccgcggaggacgccaaaatccaaggatgcccagtcccagatatgaaacggcgtggcattggtacataacccacagcatccgcctgtacacttaattttttattttttttattttttgagacggattctctctcttttgcccaggctggagtgcaatggcgtgatctcggctccctgcaacctccgcctcctgggttcaagcgagtcccctgcctcagcctcccgagcagctgggactataggcgcctgccaccacacctggctaatttttgtatttttagtagagatggggttttgccatgttggctaggctggtttcaagctcctgacctcaaggaatccgcctgccttgacctcccaaagtattgggataacaggcctgagccactgaggccggcccccgacaccatgcactttaattcatctctagattccttaccacaggcatctgtatgacatagatgctgtatgaacagttgctacacggtgcggtgttgctctttgtgttctttgttattgttgtctcgttattttctgttttcttccccagtattttctgtctgtggttggctgaatctgtggctgcagagggccgactgtataccagcttgattcaatattttatttttattttttatttattattgttattattttttgagatggagtctcactctgtcgcccaggccggagtgcagtggcacaatctcggctcactgcaagctccgcctcccaggttcacgccattctcctgcctcagcctcccgagtagctgggactacaggcgcccaccaccacgcccagccaatttttttgtatttttgtagagatggggtttcaccgtgttagccaggatggtctggatctcctgaccttgtgatccacccgcctcggtctcccaaagtgctgggattacaggcgtgagccactgcacccggcctattattactatttttcaaggcagagtgttgctctgtctcccaggctggagtgcagtggtgcaatcttggctcactgcaacctctgcctcctaggttcaagtgatttctcctgcctcagcctctagagtagctgggattacaggtgtgtgccaccacgcctggctaatttttgtatttttagtagagatggggtttccccatgttggccaggctggtctcgaactcctgacctcaggtgatccgcccgcctcgttctctcaaagtgctgggattacaggtgtgagccaccacgcctggcctgattcaatattttaatgtaaaacagcatcctaaaagctctagaaaatgtagggggatatttataaaattatgtaaatacttctaagcctcaccccccgtaaaattataaataccgctatggttatgtagttcgagattctgggtcaaagaagactatgaaactgttcaatggaaaagcagacagcaggaggcactggcagcacagggcgcctaccagggcactcggccagtcctcaccgagaagtaagtggtccctaactcagggccaggtggcagttcacacgggaagagctgagggggtgagcctggggctgctgctccgaggtgtcagccctgcaggtgtgatgatgtcagatggttggttttgtttctattgaaaagaggttctgggatggcggcttgagggcagtggtcttccaggaactggatcacggtccctccaagggtctctcctgcagttgcgtctgcgcttactgcagtctttccacagccccgtgttgtgggcagagggagtgaggccaggcctggctcctgcctccagcctccccgggctctgcccaacctccgtgtgctgctgctgctgtttcttcctggctggccactcccctcctgcaaggcaggccctggggaggggtgctggcagctgttcctaaggtctgagccctttgctacatcaaggaaagaagcggtagggggcctgcatcttccatgctggtgggaggtggggggtggtcaggggcctgcctcagtgggctcctcctgttccgggctgtgactcggcggtccagagcctcaggattctccgtctatttctgccagagcctgattatgtcatcgaagctgctagagcatccatgaccttggcttattttcaactttcataattagggaaaaacttaatttgaggtttgattattttaaccattagaaatctttgggtaatggccaggcacagtggctcacacctgtaatcacagcactttgggaggccgaggtgggtggatcacctgaggtcaggagttcaagactagctggccaacatggtgaaaccccatctgtactaaaaatatgaaaattacggccgggcacagtagctcacgcctggaatcccagcactttgggaggccgaggcgggtggatcacctgaggtcagttcaagaccagcctggccaacatggtgaaaccccatctgtacaaaaatacaaaaaaaaaaaaattagccgggcatgatggcaggtgcctgtaatcccagctacttgggaggctgaggcaggataatcacctgagctggggaggcggaggttgcaatgggctcagatcatgccattgcactccagcctgggcaacaagagtgaaacttcgtctcaaaaaaaacaaaaacaaaaacaaaacaaaaatagctgggcgtggtggcatgtgcctgtaatcccagctactcaggaggctgaggcaggagaatggcatgaacccgggaaacagaggttgcagtgagctgagattgtgccactgcactccagcctgggtgacagagtgagactccatctcaaaaaaagaaaaaaaaaaaagcctttgaattgcaaataatggaaagcccagctccacctttctaatcccattgaggaagtttattatggacacacctgatgagccccgagcctgtaggtgaggcttggtgcaggcgtctccggccctgtctactctgccttccggacggctcccccactgagcctctcatcagctgtttcccgttactccctcgtgccacacagtggcttcccctgtgatccacctgctactctgtccttcaggggacaagacagcgcctcctctggtgattgattcctctggagagaggaagcgcttcctcaaatctcattggctctgattggctcacaggccaatcccccagtgggtccctatggccaggatgatagacatcagtggttgacaccagcccacgcacaagagctgcccttggggctagagtaaggctgatgttactcaaaccatgcagccgataacagggagagccaagggaccattccccaggatgggccatccagcgctgtcaccaggtggccacaaacacctgctgtgtgtggacagtgaccatgaccacagcatcactgatgggggccttgcgtgtaccaggcagtgtcctacaactctccgtgtgctttgtcccatttggtcaccctcagtgatgctctgatgtggacacatctgctgtctccactttaaagatggggaaactgaggcccacggtggctcagtgacccacctggggttgcccagccattgtagcatggggtgagctggatgggaactcaggcaggccctctaaacccagcccagacgccactgcatggcagccccggaggtaccaggcagctggccgggcagggacggcgtcatcgcctctccgaggggaggctgtcttcagggctgggaccccacctgccaggtctcctcagcacactgaggacgatgggtgcctgcagtgaagggttgtgcagcacctgcctgtttcttgacggcctcttgcttccccctctcagcaggtcccccggcagctgaccagcctgtcattcagaggctgatacctgctgatgacgccactctacagtgctgggccccagccccagactcttcttctgcagctgcttctgcagttgcttttttttttttgtgagatggagtcttgctctattgctcaggctggagtgcagttgcgtaatatcggctgaccgcagcctctgcctcccgggttcaagcaattctcctgcttcagcctcccaagtagctgggattgcaggtgcctgccaccacgcccagctaattttttgtgtttttagtagagatggggaggatctcaccatgttggccaggctggtggcgaactcctgacctccagtgatccgcctgcctcggcctcccaaagtgctaggattacaggcctgagccaccgcacctgacctattgttttatttttgagatggagtctcactctgtcgcccaggctggagtgcagtggccagatctcagtgaggccctgttttagagtcagcctgcgctgggagtgagtctcctctgtccacacccaaacgcaccaagtgtgccatttcagcagtggtgcttgctccctggaatgggaccaggtgctctcagcggtgtggtgggttggtggcctggggttggtgtcggacgcaggccggtgttggacgcaggccgagcgggaggctggagccaagctgtggcctggggagatgttatgggtcggagggtcggggggtgggggcgcctcctgtgctttgtgtacactgagcatgggtttcctctgaatttaaaaaggaggagaaaatcggaatttctggccctggttctggcaggaagtgtggccatgtgtgatagagaaggggttgcagtgtcggcctggcctcctggaagccctgggatgcagccctgtccagctgcggcctcgtcatgccctgggtgggtgggaacgcagcctcctccttgggccacacaggggccgaccgtcagccgaggggctcctgaagtggcagtgatgggatcctgtggcgcttcctcatccccttgttaccagttgctgaggagagggtggattagcccctgggctgcacctcagtgtgtgcaggtcttcccaggtatgtgggtgcaggaggtggggggcgtggagtgggcacaggttcacacctgctgcctggcagtttggggccctcatcacacaccaccaggtttcaggggatctacaagtcactttcctgtactgacctgatccacacgcacccctgagtactgccccctgggagatgcctgtggggtcccagggtcctggcagcctcctcccaccagccgcagtcctggttccaaaatggggaccgtacacctgaacctggatgtgcctttgagcctggctgtgcctgctgagggtgcggtgggagctgctactcattttttagtctcatccttctcatttcaaattttatgtacgaaatatttttatagaggtgcataaaacgtggaaagcctgtgtgtgctttctaatgttcaaaaccaggccaggcacggtggctcacgcgtgtaatcccacactttgggaggccaagatgggaggattgcctgagcctaggtgttggagaccagcctgagcaacatgggagactctgcctctacagagcattttttaaaaccagctgggaatggtggttcgcgcctgtaatcccaggaccttgggaggccgagatgggcagattgcctgagcctgagatttcaaaaccagcttgggcaacatggtgaaaccccgtttctacaaaaaacaaaccaacaaaaaattagctgggcgtagtgatgctcacctatagtctcagctactcaagaggttgatgggggaggatcacttgagcccaggaggtcaaggctacagtgagctgggtttgcaccctgcactccatcctgggcgacagagggagaccttgtctcaaataaataaataaatacaaatccatctcagtggatgtccaataagcagtgagcccgtgtgagggtctcagcccggccgtgaccgtgccgagtgtggcgagcgcttcaaggccacttgccccgaccctgcccaccccccacttttgtttcttaatttcattctttccaggaaattgcagatttaacagatgttaggtactttggtcgagccaagcttgatgtagttgaggaacggaagagaaagttggagggaaacacgggctagagtagagtaaatctaagaaataaagtgagtgtctctctttctgtttagagcaaaaagaagaaaaggaagaagaaaaagaaggggaacaagtccgcttcctcagagctggcttccttgcccctttctcctgccagcccctgtcacctgactttgctttcaaacccgtggcctcaggacacagccctgccccacagccaagcccagcagagtggccccactggccagccgagccagcccccaggcacagccaccacgccactggagggtgacggcctctccgcgcccaccgaggttggcgacagccccctgcaggcccaggctttgggagaggcaggagtggccacaggaagtgaggctcagagcagcccgcaattccaggaccacacggaaggggaggaccaggacgcttccatcccctctgggggcagaggcctgtcccaggaggggaccggtccccccacctctgctggtgaaggccattctaggactgaagatgctgcccaggagctcctgttgcctgagtcaaaaggaggcagctctgagcccgggacagaactgcagaccaccgagcaacaggcaggggcctcagcctctatggtgagtcatccgggagagatggcctgggagtggcactgagccctcggcacctgggctctgctgcaaggtgctggcgttgcttccctgccggggggaggggcgtcctctgggccctgctccctgggtgggagtcggagggctgcccctccactggggatgccagcccaccctgtccctcggcttgtggcagatgctgccccttaaaccattgagtcggagtcaccctggcccattttgtcaccttggctctggtgtttggggtctttcaggcagttgatgctgtagctgagccagccaatgcagttaaaggggccgggaaggaaatgaaagagaagacccagagaatgaaacagccaccagcaaccactcctcctttcaaaacacactgccaggtgcgtctccttcctgcctgccggctccaggaggccctctcctgcccacggctgcgcctctttcatttaattattcagcaaatatttaagtgctggggatatagccatgattcagacaaagctctggccttcggggtgctcacattccagcggagagagagtcaggaaaccgacttcagcggtgagaagagcgtggagggagggagagagggcacccaggtgggccccgaggtaccatggcacccacagcccgagtggccgggcgaggcctctcttaggaggtggtgagggatggtccccggaggtgtctgggaaggtcatgtgcagaggccctggggcagtgtggggtgggcctgttcccagagcggcagggacgccagtgcccccaggaggagttgggggaggagaggccaccaatgaggctggagagaggcgcctctggaggctgtgattagtggccccagcggcactggaaggtcccgagcggggaagggtcgtgaacattctggccgctgtaagaagcatcccctgtaggggtcaatgtggaggctgggccaggcgcggtagctcacacctataatcccagcactttgggaagcccaggcgggtgcatcacctgagttcaggagttcaagaccagcctggccaacatggtgaaaccccgtctctactaaaaatacaaaaattagccagccgtggtggcatgtgcctgtaatcccagctactcgggaggctgtcgcaggagaattgcttgagcctgggaggcggaggttgcagtgagctgagatcgcagtactgcactccagccttggtaataagagcgagactctgtctcagaaaaaaaaaaaaaaaagaaaatgtggaggccggccttcaaggtcagggtttggttccttgttccaggaagctgagaccaagaccaaggacgagatggctgctgctgaagaaaaagtcggtaagaatgaacaaggggagcctgaagacctcaagaagccagaggggaagaacagaagtgcagctgctgtgaaaaacgagaaggagcaaaaaaaccaggaagcagatgtccaggaagtgaaggcaaggtagggatgcccccgcaggggagcaaaggagaccctgcctgagagcccggcacaccctctccctgcacaactctcaggggatatccaggctgcccttctagtcagctgttttggcaagtttaactttgggggaaaaggggaccacttaggaggtggaggggggtgggcacctgtgccagtttcttgtttcctaatagcccctggggtcctggagccagcgtgggcctttgggaactcaggagaggggctgttctggcccagacacctgctggtgcctcccgccactgtccccagcacttcagaggtgggcagggagtggccacctcttcttcctccattttggaggcagtgaagagagacctccatggggggtggtgtgtcacacgtggacgtgcttgcatgtttgctagggtgtgataatgtgcattacgaacacaaggaccatgtgcctgtgtgtgtgcatgtgggtgtgtgcgtgtgcgttcacgtgtgtgtgcgcacgtgtgtgcgtgtgcatgtatgtgtgcgtgtgtgagtgcgtgcacgtgtgtgcgtgtacgtgtgcttgtgtgtgtgcgtgtgtgcgagtgtgcgcgtgtgtgcatgtgtgtgtgcgagtgcatgtgtgtgtgcacgtgtgtgtgcgcacgtgtgtgtgtgcgcgtgtgtgcatgcacatggcaggtggacagatctcacgggaatcagatttctgttttggttttccaccagcacgctgagcccgggtggaggagtcaccgtgttcttccacgccatcatctctcttcatttcccattcaatcctgacctccataaagtcttcatcagaggaggagaagaatttggggagtcaaaatgggacagcaatatctgtgagctgcactacaccaggtgagcgtgtctgtaggcttgggaggaatccctcagggaaggcataggatgcccagcctgtgacacgtagtttaaaaaaattttgttttttttttttctgagacggagtcttgctgtgtcacccaggctggagtgtggtggcaccatctcagctcactgcagcctccgcctcctgggttcaagcgattctcatgcctcagctcccaagtagctgggactacaggtgtgtaccaccacgcctggctaatttttgtatttttagtagagacggagtttctactaaatgctggctaggctagtctcaaactcctgacctcaggtgatccgcccgcctaggcctcccaaagtgctgggattacaggcatgagccactgcgcccagcctttaaataatttttatccagtgagttgatgacattcttcgggttctggaagatgaatatttcagacagctcttcctggccatgcattttggtgtcatattccatcatggacctttttctttttaaaagtattctttctttctttcttataatttttttttttttttttagagaggggatcttgctctgttgcctaggctggagtgcaatcatgactcactgcagcctcaatctcctgggccatcatgcccagctttgtttatctgagacagagtcttgctctgtcacccaggctggagtgcagtggtgggatcacaggtcaatgcagccttgacctcctggactcaagaagtcctcccgcctcagcctcccatggtgttgggatttcaggcatgggccactgaacccagccttgccacatcaacttatagctttgcactccatgctacgtttgagaataactaaaatttccggggtaggaattttggatagccaaccgtatcctgttcattcacagagacttgggtcatgaccgcgttcttgttgaaggcattgtctgcatttccaagaagcacctagataaatacattccttacaagtacgtcatttataatggggaatcttttgagtatgagttcatttacaagcaccagcagaagaagggcgagtacgtcaaccgctgtctgttcataaaatcttcacttctgggctcaggaggtaagtcgtggcagcaggctgtctgctcacccctccggagtgcaggtgccaatcccgcggtactggacgcgtctctctggagagcacagactttgcctgggcagtgaggtcctctttgctctgcattgaccccgccccagcctccaggttcagtgacactgactctgggttgtgtctctggttggttaaagatgtgttggcttctcctttgagctcagtgtgacttacctactcacttgcaggaggaaacatgcaaaggactttttgtttgtttgttttctgagacagagtctgtcgctcaggctggagtacagtggtgcgatctcggctcactgcaacctccgcctcccagggtcaagcagttctcctgtctcagcctcccgagtagctgggattacaggagcctgtcaccacccccagctaacttttgtatttttagagagacagggtttcaccatgttggaccttgacctcaggtgatctgccctcctcgacctcccgaagtgttgggattacaggtgtaagccactatgcccagccagaaaggatttttaattaagggaaaggagagaaaacgaagccagaagaagggctgcggctgggaacagaggggcagcaaaggcctgggagctgggtcagggacaagtgcagtgaccaggaggccactgggacttgtcccttctctagagattttcagatggttgactggagatgacatccagagccccgtctgcaggctcctgctggctgtcatcctcagcacatcagcccctctgcccatctgtcaatagacgcgggcgcttcccttctcgcagagccctctgcgccccttcatgcctctctcgggggtcccccacctgggttctctgtctgcaaacttgacagacagagatcaagacttgactgtgttgatcacctggactcccagtgccgcctcctcacctggggggtcctgggcttcccctcgctccccctccctgcacagtgaccctgaaactcaaggaagtgagctggggtcaactggttgttgctttcccttggcaaccagggcctccctgccccctggtgtccggtgtcttggaaacagttgttttactgtttatgttgttcatgtgttgttttaggcagatacagaagaatgtaaatttagtccctgtcactccaccttggacaaagacagaagtcctaagaactttatagagtatatattttttcgtttttgtaaacatatatatatattttttttctgagacaggatctcgctctgtcacccaagctggagtgcagtggcacgatctcggctcactacagcctcaaccaccagggctcagctgatcctccccctcagcccccccaagtagctgggcctacaggcgtgtgtcaccatgtctggcaaatttttcatatattttttttggagagactggtcttgctgtgttgcccagtctggtctcgaactcctgggctcaagcaatccgcccatcttggcctcccaaagtgctgggattaagacgtgagccactgtgcccagccaaacatgatttttactagctagagagtgtactctgagaacataagctttgaaagaataggcattagtccggtaattccatatataaatacatttaaatatggaattctatatatataaatatggaattcctgctctgataaatgccatggcattgatggctcggttaaaagggcacgtggtggctgggcgtggtggctcacgcctgtaatcccagcattttgggaggccgaggcgggcggatcacgaggtcaggagatcaagaccatcctggctaacacggtgaaaccccgtctctactaaaaatacaaaaaaattggccgggcgtcttggcagcgggcgcctgtagtcccagctactcgggaggctgaggcaggagaatggcgtgaacccgggaggcggagcttgcagtgagccaagatcgtgccactgcactccagcctgggcgacagagggagactcagtctaaaaaaaaaaaaacatgtgataggggatttgacctggaggtcggcagaagcttccacaaggaggtgatgaccgagttgagaactaaacagttgcaggccctgctgggcccagggtgcagagctggggtgggcgggcctgccagtctagacaactgtgggtcgaaagcatggcagggggctgaggaggcctgtccgggcgcttcccatttctgcctgatttttacttctgtttgtaggtcttcacgtggcctctgaccctgtcattgacatcttgggttttctaattattttacagtcaacctcactgggttttctgcaatgaggtctgcactcatatcgtttgcaatggagcctaagaacagtcacgaattcagcccttgccctgtgtcagccaccatgccaagggccatctgtgccagctgggcagcctgcaccttcctccaggggctgtgtcccgttcctagtacagaggaaaccaactcagtgattgaccaggacagtgctcacttgctagtggggggatgcggtttctgtatgacacattccacctccttgtgatgatgtttaaggaagttgttgatcaagtttgctgagctacatagttagagatccgttgcaagtctcaggcccgctgcatcccatgaccctgggctttccactcattactgtgggacgtctaggatgtctgtttgcacggggctggcctcagatgagaagtcagttggaggagtctggctgtcgtcagtgtgtgggtttttgcttttcccttcctcccttcctctgccccatttactccatatctgtaccagtcgtgatcagccttctaggctagtgtctaggtctccagggttttgatggtcttaggtaggctcttgttccttctgtccctcttagactggcatcagtactatgacatagtttatatgaagcctcatgggagactccagaaagtcatgaaccacatcacagacgggccgaggaaggacctggtgaaggggaagcagattgccgctgcgctcatgctggacagcaccttcagcatcctgcagacctgggacaccatcaacctgaacagcttcttcacccagttcgagcagttttgctttgtcctgcaacagcctatgatttatgaaggacaggcacagctgtggaccgatttgcagtacagggagaaagaggtatcaggcttgccaccagctgctctacctgctgggcaggagccacacctgacctgctagtggccggatgaccccttgactctgtgggccaggttgcaaatgggaatgtgtagaactttccagccttttctcctaccactgtctcttgggatttctctgccctcccccattttcctccttttactggttgtaatctcagccccaccccagcaccagtcctgagtcctcccctggccttggagggagagtggaaggaacggggcaccctctgtcactgcacctttacccacactgcggtgcagcctgggtgggtttcaggccggcctggagctgtttctgagctgaagctgagccctgatgagcctcaggggccctgcctgagccctcatgccagggtcttggctgcactgcagctcctcctgtggctctcacaggtgtggtggtggggcacggatggggtctgctgccctagctgtggtgctggggcagctctggacactgccggtgaattcaagtccatggttcatgcatcttcctcttctcccaccatcaggtgaagagatacctgtggcaacatctgaaaaaacacgtggtaccattgccggacggaaaaagcacggactttttgcctgtggactgcccagtgaggagtaaactgaaaacaggcctgattgtcctttttgtagtggaaaaaattgagcttttattagaaggcagcctggactggttgtgtcacctcctaacctcagatgccagctcaccagatgagtttcaccgtgacctaagccacatccttgggatacctcagaggtattattattttttgtcaaaatgttttttatagctattataatgattttctctgattgcaaaaataagtgcttgactagagtgactgaaagcacacaggcaagaaataaaaccacccgtgattttaccactcactgtggtcatgtcagtagtttttcctagcatctgtcttatttttattatattctgtcctctgttgaattccctgccttttgttttccccccagacggcgtctcactctgtggcccaggctggagtacagtggcgcaatcttggctcactgcagcctccacctcccaggtttaggcaattctcctgcttcagcctccttagtagcagggactacaggtgcacactaccacacatggctaatttttgtatttttagtagagaagggttttcaccattttggccaggctggtttcgaactcctgacctcaagtgatccacccacctcggcctcccaaagtgctaggattgtaggcgtgagccaccgtgctgggtctgaataccctgctttttgaagcttcgtgtggtatcatgagcagcctctgtgtgcgcgtgtttaggaggttgtggcgtgacgccagcctgaactcatcccctcaaggacatctgcagaagcagcgtgaatgttctccccatgcccctgcctgtgccgtgtctagttcaggaaacacagtgtgactgtcctgggcctgaaatgttcagtggtgagaaggcgatggcctttgacttggtacctgctcagaccccactgagctctgcactctctctgcgtgtgttgatttgaacgtgagaatgacattaggtagcctttcctgaccagcatgtcttatcacgacatctgcctctcagttttacacatttatttatttgttgttttgagacagtgtcttactctgttcccccagtctggagtgcagtggagcaatcagctcactgcagcttcagcctcacagactcaggtggttctcccacctcagcctcctgagtagctgggactgcagatacacaccaccacttccagctaatttttgtatttattgtagagacggggtttcaccatgttgccacggtggtcttgagctcctgaccttgtgatccgcctgcctcgacctcccaaagtgctgggattatagacatgagccactgtgcctggcctggttttacaaataaaaaacaaccaaataaacgccgcacattttgacaaagaggaggagtggaggcaaaggcaatgtacagagttagtgccggggcttaaagtatgaggaatcattaatatcttttgactgtaggagattcaccatgtattgtttataggctcaacccttacgtttaaaaagttgttttggggccgggcacggtggctcacgcctgtaatcccagcactttgggaggtcgaggcaggcggatcacaaggtcaggagttcgagaccagcctgaccaacatggtgaaacactgtctctactaaaaatacaaaatttagccgggcgtggtggtgcatgcctgtaatcccagctactcaggaggctgaggcaggagaatcacgtgaacccaggaggcggaggttgcagtgagccgagattgtgccactgcactccagcctgggcgacacagtgagacttcatctcaaaaaaaaaaaaaagttgttttggccgggcattatggctcacacctgtaatcccagtgctttgggaggctgaggcaggagggattgcttgagccaggagttcaggatcagtctgggaaacaaaaattaaaataaaaaatagagccggccaacacagtgaaaccctgtctctacaaaaaatacaaaaaactagccaggcatggtggcgggcacctgtagtcccagctactcgggaggctgaggcaggagaatggcgtgaacccgagaggcagagcttgcagtgagccaagatcgtgccactgcgctccagcctgggcaacagagtgagactccgtctcaaaaaaaaaaaaaaaaaaatgtagctagctgggtgtggtggtgcacctgtaattccagcactggagaggctgaggcaggaggatcccttgagcccaagagttcgaggttataatgatcgcaccaccgcgctgccttgatgacagagtgagactctgtctctaaacaatgaaaataaattttacaagttgctttatatttagatttactgttgccagatggcctgggttcaaaccccagctctgtcagtcaggaccctgcgttgactacttagccaggacccctgcttctgagatccctcccctgtcctgggagtttgttgtggggattcggtgagggcctgcaaaggagctgacgccctaggctgggggctgagggaagccctgtctcctgcgtgagttaaactctgctcagccacgcgcggtgctcctcttgctctgtgtgcacggtgcttgcttcctgttgggactccagactcccagggagatgactccctggccagctcagctcactgcgggatctttattcccttccagctggcggctgtacctggtgaacctgtgccaaagatgcatggacacaaggacgtacacctggctgggcgccctgcctgtcctgcactgctgtatggagctggccccgcggcacaaggatgcctggagacagcctgaggacacctgggccgctctggagggactctccttctcaccgttccgggaacaaatgctagatacgtaagtcgtagagttgtgcttatctacatgaatctgggaagactgactcctacattgtgcacccggagtcccggtgggctctgcagtgactccattcctgattctaatgacagaactaacacacgctcttttaacattttaagacatcaaaactgtcaagaataggctgtgcacagtggctcacgcctgtaatcccagcactttgggaggctgagacgggtggatcacctgaggtcaggagttcgagaccagcctggccaacatggtgaaaacccgtctgtacgaaaaataccaaaaaaaaaaaaaaaaaattagccaggtgtggtggcatgtgcttgtaatcccagctactctggaggctgaggtaggagaatcactagaacccgggaggtggaggttgcagtgagctgggatcatgctactgcactgtagcttgggcgacagagcgagactctgtctaaaacaaacaaacaaaaaactatcaagaatacagaaacaacttgtaacctcagaggcagccgttgttagcacggtggcatacctatttgtggttttgtccaaatatggattcgtgggtgttttatgtacttaaaagaacaacaacaaatgatgtgttatttattctggtttacaacctgatttttcctcttaacagtattttgtgaaccattttttccatcagcaaattcttgtctatgtcttagcgttccagccagagagagtgccagccttgtattgagccagttctctgttacaggacatttggttggttgtgcagtttcgttttttcagcgtgctttcataagcatccttagctttctctgtcccataacttcattgagatagattcctacaagtggaactgctaggtcaaaggcattgtgaactctaaaccatttatacctttgcataatgctggcttaaaggagaggaatattggcaatatatataatcctgatctctgattcaaatataatgacctctcctttatcacaagaaaatattaccagagaaagtttatttatttatttatttatttatttatttatttttaacttctaagttcaggagtacatgtgcaggtttgttatatagataaacttgtgttatggagtttttttgtacagattatttcatcatccaaatattaagcctagtacccattagctatttttcctgatcctctccctcttcccatcctccaccctctgataagccccagtgtgtgttgttcccctctatgtgtccctgtgttctcatcatttagctcccacttacaagtgagaacctgcggtatttggttctcgttcctgagttaatttgctaaggataatggcctccagctccatctatgttcctgcaaaggacatgatttcattcttttttatggctgcatagtattccatggtgtgtatgtaccacattttctttatccagtctactgttgatgggcattgagtttgattccatgtctttgctattgtgaattgtgcttcaatgaacatacatgggcatgtttctttataatagaacgatttatattgtttttggtatatacccagtaatgggattgctgcggtgaatggtatttgtggaattgccacactgtcttccgtaatggttgaactaatttacactcccaccaacagtgcataagcattcctttttctccgcaacctcaccagcatctgttatttttttaccttttaatagcagccattctgactggtgttaagatggtatctcactgttttttttttttaagagacagagtctggctctgtcacccaggctggagtgcagtggtgtgatctcagctcactgcagcctctgcctcctcggcacaagcgattctgctgggattggtagtgtgcgccaccacatgtggctaatttttgtctttttagtagagacagggttgcaccatgttggccaggctgttcttcaactcctgacctcaagtgatccacctgcctcggcctcccaaagttctaggattgcaggcatgagccaccacgcctggcctcattgtggtttttgttttgttttgtttgagatggagtttcgctttatcacccaggctggattgcagtggcacaatctcagctcactgtaacctctgcctcccaggttcaagtgattgtcctgcctcagtcttctgggtagctgggaccacaggcaccccaccatgcctggctaatttttgtatttttagtagagatggggtttcaccatgttggccaggctggtctcaaaccccagacctcaagtgatccgcccaccttggcctcccaaagtgctgggattgcatgtgtgagccaccatgcccggcctcattgtgattttgatttgcatttctctaatgatgagtgatgttgagctttttttcatatgcctgttagccacatgtatgtcttcttgtgaaaagtgtctgttcatgtcctttgcccactttttaatgaggttgcttgtttttttttcttgtaaatttgtgtatgttccttatagatgctggatattacacctttgtcagatgcatattttgcaaaaattttctcccattctgtgggtcatctgtttactctgttgatagtttcttttgctgtgcaaaagctcctcagtttaattagttcttatttgtcaatttttgcttttcttgtgattgcttttggtatttttgtcgtgaaatctttgcccattcctatgtctagaatggtattgcctaggtctgggcaaagattggagaaaaattatggagaagtccttaaaagcacaggcgacaaaagtaaagtgagataaatgggattacatcaaatcaaaaagcttctgtgcagcaaaggaaactatcaacagagtgaagagacagtccacggaatgggagaaaatatttgtcatctacacgttggatagggggatttaaggaactcaaacaagtgaacagaaaaactcagatctaaaaatggacaaatgagttgagtagtcatctaaaaagaagacacacaaataaccaacaggcatatgaaaaaatgatcagcatcattaattagggaaatgcaaatcaaaaccacaatgagatatggtcttacccaagttagaatagctgtgatcaaaaagacaaaaaataaatgccagtgaggatgtgggaaagagaaactctcatacagtgtaggaatgtaaattagtactgccactatggaggacagtataaaggttcctgaagaaactaaaaatagaactactgtatgatccagcaatcgtactgctggggatatatccaaagtaaaggaaatcagtatgttgaagagatagctgcactcctatatttatcgtaacactcaatagccataatatggaatcatcctgagtgtccacccgcagatgagtggatgaagaaagtgttgtctatatacacagtagaatactatttggccaccaaaaagaatgaaattctgtctttcgcagcaacatggacaagcttggaggagattacgttaagtgaaataagccaggcgcagaaagagaaatactgcatattcccactcatacgtggatgtgaaaagagttgatcttctagaaggagagagtagaatagtagttacgagaggcgaggaaggatggggagagggctagccaaaggttggctagtggatacaaaagtatggctagataggacgagtaagttctagggtcctagagcagtatggaacgactgtaatttacaatttattacgtttttcaaatagctggaagagtggagtttgaatgtttccaacacaaagaaataaatgtttgagatagatatgctaattaccctgatttgtacacattatacactgtatgcatatatattgtatccatatatttgtacagattacagactgtatactttgtacatagtatacattgtagacatatttatatgtatatacagtgcataaaatgtattctctgtatgcatttgtatacattatgtattgtatacatatatagaaatataacactgttccccataaatatgtacaattattatgtgtcagtttaaaaataataaaagcagctgggcttggtggctcatgcctataatcccagtactttgggaggcccaggcaggaggattgtttgaggccaggagttcaagaccagtctgggcacatagtaaaacccagtttctacaaaaaaacaaacaaaaaaaatagttaggcatggtggggtgtacctgcagtcccagctacttgggaggcttacatgagaggatcgcttgagccagggaggtcaaggctgcagtggtagaagtccagattccctagaagttgaaataaaagcatctttattttcagattcttgacaggtaaccacaaactttctctttaagtataatctctctgaaatactgaatactgggttatttaatagaacagtcataatgaccacagattaacccttctaagcaaaatagattaatttattttggccttgaaatggtctttctcttattaatgtgctagaatgtattcattcattcactggatgaatacttgaagagcaccttccttgtgccaggaagtactactcaaggcacagcgtgtacagcactgctcaaaacagacagctgctcctggccttgtggagcttgcattctagctggagaggcaggcagttaatacatcagtaagtcctattgatgagagagctctggaaattcctccttcccctagcctggaggctcaggccacagaatctgctaaggtctgaaggtagggtaggagaacagaggtaatgactgcagcactctgggccttgcagtgagaacaagacagtgaccatccaattgggaaaggggctggagaactgaaagagacgccccctcataaagcatgatgctcagagcctgccaaatgccaaagactggggacagcagaaaaaatgaggcagttgctctgtgcccctggatcccaacttctgctaaaggcagtgttacggtcttgcctttagaaggcgtaaaagcctttggaaaccaattctattccttttcttttttcttttcttttcttttttttttttttttgagacagtcctgctctgtcgcccaggctggagtacagtggcgcgatctctggtcactgcaaccttcgcctcccaggttcaagtgattcttgtgcctcagcctcccaagtagctgggactacaggtgcatgtcatcacacatcacatgtggctaatttttgtatttttagtggagatgggttttgccatgttggccaggctggtcttgaactcctggcctcaagtgatctgcccgcctcagccttccaaagtgctgggattacaggcgtgagccacccactgtgcctggccagccgttgggaaccaattctaattaaagctacaacaaagctgtagttcatctaaactattaactcagcccctgataacagaagaggccactagatgatcaagagagaaaacagtcaatatagtcagacccatggatggtccatatttacctagaaaggctagatatagtagaaatatagagtaccttttattattattgctatttttatgtacttatctttaaatatcttgaaaagtctgcagtagcattgttcctaaagatccaatcgttcaggtaaaagtggcctttagtatgcagtgaacctttattgatatgtttttcataacttctgttacttctagggagccttgctttatttcttttccattgtcaacattttgggtctccagtactgtgttccagaatcagcattatttaagggccttcgctgagcccacttgggctgtttgatcctggacactcgttaataataattaagaggcttggctgggtgcagtggctcacacctgtaatcccagcactttgggaggccaaggcaggtggatcacaaggtcaggagatcgagacaagcctggctaacacagtgaaaccccatctctactaaaaatacaaaaaatgagccgggcgtggtggcaggcgcctgtagtcacagctactggggaggctgaggcaggagaatggcgtgagcctggtaggcagagcttgcagtgagccgagatcacaccactgcactccagccaaggcaacagagtgagactccaacacaaataaataaataaataaataataataataataattaagaggcttaattattggggtatatcccttttattgtaaaatatacataatctccagtttaccatgttaactccttttcaaggcacagttccctggcaccaagcacattcacactgctgtgtagccgtcagcaccatccacctcccgaactcagcttccccagctgaaactccatccccatgaaacacgacctccacactccccctcctcctggtaaccactgttctcctctctgtctctaggattttgacttctctggggacctcacgtgagtggaatcacacaggatttgtccttttgtgtctgatttatttcactgagcataatgtcaagattcatccatctcaatgaattctttttgtgtatttatttatttatttgtagagatggaatcttgctatgttgcccaggttggtctcaaactgctggcctcaagctatccatcctcctgctttggcctcccaagttgtggggattacagacatgagccactgcacccagcagtgaactttttttttttttgagacagttttggtctcattgcctatgctggagtacaatggcacgatcttggctcaccgcaacctctgcctcctgggttcaagtgattctcctgcctcagcctcccaagtagctgggattacaggtgtgcgccaccacgcctggctaatttaggatttttagtagagacgggatttctccatgttggtcaggctggtcttgaactcccaacctcaggtgatctgcctgcctcggcctcccaaagtgctgggattacagacgtgagccactgcgcccggcctgattttattactattttttaatattactgctccttgtagaacagggctaccccataggagcatgcccagaatggccagcagtgaattcttattccgtattctgaattctatattaagttaattctccttttttctttccttttttttttttgagacagagtctcactctgttgcccaggctggagtgcagtggcgtgatctcggctcactgcaatctctgccgccggggctcaagtgattcttctgcctcagcctcctgagtagctgggattacaggattacaggcatgtgccaccatgcctggctgatttttgtatttttagtagagacgcagtttcaccgtgttggccaggctggttgcaaacttctaacctcaactgatccacctgcctcagcctcccaaagtgctgggattcaggcgtgagccaccacgcccggccattaagttaattctcagtaggttgttctgtacttttcatttgattcactgcatatttttgttttccacatagcctttattttattttttaaagtagagacagggcctcactaggttccccaggctggtttcaagctcctgggctcaagtgatcctcccgagtcagcctcccaagtattgggattcaggtgtgagccaccacgcctgccctcaagtagtatttaaatcatttttgaattcgggactgtttctgtccctccagcattggtttcctccattttccctcactgatctcactgcgtctcttttctccgtccctatttctcttatgcaggagttccctacttcagtttatgagagagaagcagcatttgctgagcatagacgagcctctcttccggtcctggtttagtctgctacctctgagtcacctggttatgtatatggaaaacttcattgagcacctgggtcgttttcctgctcatatcctggactgtctttcagggatttactaccggcttccgggacttgagcaagtcttgaatacgcaggtttgtgtctgaagtcggctctggagtcctggcttagcaaaagcagactagataactaaacatggaaagctcaggattcttattcctaaaaaacagacagtgggctgggtgcggtggctcacgcctgaatcccagcactttgggaggccgaggcgggcagatcacgaggtcaggagatcgagaccatcctggctaacacagtgaaaccccgtctctactaaaaatacaaaaaaattagctgggcgtggtggtgggtacctgtagtcccagctactcaggaggctgaggcaggagaatggtgtgaacccgggaggcggagcttgcagtgagccgagatcacgccgctgcactccagcctgggtgacagagcgagactccatctcaaaaaaaaaaaaaaaaagaaggcgtctcatgtgatgcacttcgtagctgccattcttcctttcacattttttggtggagaaaatggtataagtttaaatcctgagttttatctgtaaaagaggtaagattagtatgtgagcaccttaaaatttgtttgtaggaagaaaacaatgtataccatattgatgttggatttttttcagctctgttttagcaatgacagtggcattgtgattcaatcttttgtcctgtttttctttttttctctgccttaggatgttcaggatgttcagaacgttcagaacattttagaaatgctgttgcgactcctggacacttaccgggacaagtaagtggaaagcacgatgcagtctctccctcacatgcggcccccgggggcttcctctgacccctataattggccgtgacccacatgtgctgttgtaacagcaaggtcataaattaatatgtggcccacttctcttctcaggttattaatattgtcgtctgtttttttttttttttttttgagtcagagtcttactctgttgcccaggctggagtgcagtgacgcaatcttagctcactacaacttctatctcctggttcaagtgattctcctgtctcagcctcccgagtagctgggattacaggcgcaccccaccacgcccagctaatttttgtgtgttggtttgtttgtttgtttgtttttttgagatggagtctcactcttgttgcccaagctggagtgcaatggcaccatcttggctcactgcaacctctgcttcccaggttcaagtgattctccttcctcagcctcctgagtagctgggattacaggcgcatgccaccacgcctggctaatttttgtatttttagtagagatggggtttcaccatgttggccaggctggtcttgaacttctgacctcaggtgatccgcctgtctgggcctcccaaagtgctgggattacaggcgtgagccaccatgcctggccgtctgttttttttttttttttttttttaaagggaaataatagatatcagctgctaagatttgggtttatctccccctgatcttttttcctatacatttttcccttacttgtaaatagtcatgatactgcatatgcctggtgggcgttctgcatttttttaatacttagtcagtttaagataaaaatcaaaggtagctttatataattatccaaaatcatttgctcctgcaaatttgtgacctctgataccctgaggggtcagcagacagaatgcagaaccactgaaatgtgccagtgagcgatgggatgggtgttgtctgagctgttctctgagcggctcgggcacttccagtcttcgttcacctcctttgttcacgtctctgccgatgttgatccagcacctgtgacttgaggatcccccccacaagctccctatctccccaccactgtgtgtcacattctcagcccagggagtcctttcttacaccgccttcccagtcccctccatcaactctcctcttaagctcctcctaagtgtcctcttaagtctctcctgagtcccctcctgagtccctcccaaggctcctcctgagtccctcctaagcctccttctgagtccctcctaagcctcctcctaagtcccctcctgagtccctcctaaggctcctcccgagtccctaccgagtccctcctaaggctcctcctaagtccctgctctgtccatgtgtccctcagaaaacacaaaacccaggcccggcagagctggagccaattccacacgggctgcacgctcttctactatttctttctcttcctccctcctttctgtttctttctgaatattttttcaaatttatgtcatattttaatgtctagtaataaacatcccttgccttttttcacatcttggaacgcactgaggagtgtttggacttgctttggttagaacagttgagactacagagacaaaacaagaggactttgcttcctttttatcttagtcacaagttcaggactgactgagattttccagacgttaacctagataaggtcaaacaaatgccctgttggtagttattttgaaggaaggagctagtcatcaatggtaaccattttctggcttctcctaaatccttgccgggatttctcttaactctttgcggggcaggattcccgaggaggccttgtcaccatcctacctgactgtgtgtctgaaactgcatgaagccatctgcagcagcacaaagctacttaagttttacgagctgccagccttatctgccgagattgtctgcagaatgattagacttctatctctggtggtaagtggagtcaacacacaaggtatcacacccgggataggtgcggaatttcaagcagcctcaatttggaaaggaaacagactgattcccgggtgctgggatgagatggagcggtggtttcagcagtggacatttcttgtgcacctgcttgatgctgggttctgttctgggtgtggggggtgtcagtgggccagggtctgcccttctgccaccttgggctttcctgggagggaggcagggagttaatgtgtggccatcagctggtcatggggaaaccagagagctggcgcaggggctgggggtcaggcaacgccacgcggagaagacgacttttcttttttcttgattctgttgtttgcagagaactacggggaccattttcctcccaaaaaatacatgtccaaacatggtctttcccaccttcttgacattgtagcttgaatacagtaacaaaggccatagcgccacacatctgccccccgctgcatgtcgtgtcccaggtctgatggcaggatgacccggctcctccgtcccaaagaaagccactgttgtgacttctcccatggatcagttttttttttgttttttgttttttgttttttaagacggggtctcactctgtcacccaggctggagtgcagtggcgtgatctcggcttactgcaagctccgcctcctgggttcacgccattctcctgtctcaacctcccaagtagctgggactacagacgcctgccaccacgcctggctaatttttgtatttttagtagagatggggtttcaccgtgttagccaggatggtctcgatctcatgacctcatgatccgcctgccttggcctccaaagtgctgggattacaggcttaaaccaccacgcccagcctcccatggatcagttttacctgtcttccagctttgacctttctgcctccgactttccccactcacccccatgtctctgagctctgtctgtgtggtgcagagatcggcaattccttctttcccgtctctgtgcagttttcacccacttgagttcatgagtttcagtttgaaagtgatgtaaggtttaatgtttagactgatcatttgtttgtttttttgagatggagttttgctcttgttgcccaggctggagtgtagtggcgccatctcagctcactgcaatctccgcctcctaggttcaagtgattctcctgcctcagcctcccaagtggctgggactacaggtgtgcaccaccacacccagctaatttttgtatttttagtagagacagggtttcaccatgttggccaagctggtctcaaacgcctgacctcacgtgatccacctgccttggcctcccagagtgctgggattgccgatgtgagccactgcacccagcacaattttttttttttttgagacagagtttcactcttgttgcccaggctgtagtgcaatggcgtgatctcggctcaccacaacctccgcctcctgggttcaagtgattctcctgcctcagcctcccgagtagctgggattacaggcatgtgccactaaacccagctaattctgtatttttagtcgagacaggatttctacatgttggtcaggctggccttgaactcctgacctcaggtgattcgcctgcctcagcctcccaaagtgctaggattacaggcatgagctactgcacccggctgatcattttttttaatcttacttcaagttagaactgtgacgttagtgatagaaaacaattaagtgtatgttttaactttcttcctttcagttttcttgtgttaaagtaccacagacacagtttaagaataaatgtcattggtgagatgatcacgttctctggagtggctgctatttaaaccgccacaggcagctgccaacttccacataaactgtgtttaaggaatttgtcagttacttaggatttattttctacagaaataactatcttaaatgttggctgggatctcagataagtttaatccatattatggacaaaatactctctacctgtgccataaaagcaaacaaacaaacaaaaaacctttgcaatactaaaattaaacaaagcaaaaatacgtgacgcatgttgaagaaacttttaggtgtctgctgctgtgaaggctccagggttgacggacacttggagaacaaggtgcccgtgtcaggctccggaggtctgtgcagcctctgagcggtcattcagtttgttgttattggccatcgctgtccagccctgtgctgctggattgttctagaaggagctgtgccattggggggaccttcagcagtgcctgtttcgttttctgtcggcccccgccccctgcgtgctgtgctctagtcactcctgtgcccagccccctctgcgggctctctttcacagcagcacctgcatcctggtccctcttacatgctttgaaagctcctgcctgtatcttcccgccctggcccttcccaggtatagtgacgctgtgttcccctgcctgctgtgggcttttcctctctcccactctcgggcagccccgcccagcagcagccttgtcctcttgcccagctgcctcgaggcgtgggcctctcggtgcttccagtgagcacctgagcgtatccaggttctgtggctcctgacacttgcacgatgtgcggggctgtgcttaaaaaaaaagatcacacacttggctgggtgtagtagctcacacctgtaatcccagcactttggaaggccaaagcaggcagataaccagaggttaggagttcgagaccagcctggccaacatggtgaaaccctgtctctactaaaaaatacaaaaattagccaggtatggtggcatgcacttgtaatcccagctacttgggaggctgaagcaggaggatcacttgaacccaggaggtggaggttgcagtgagccaagatcgcgccactgtactccagcctgggttacagagtgagactctgtctcaaaaaaaagaaaaaaaagaaaaagaaaagaaaaagaccacacattaatccaggactgtggggctcctcccaggaggaggtggccctgacccctgacctgtatgcttcctgggaaatgtgcttctggggaggacagagggaggaggaaggagagggaggaagaggaaggcaggggagagaagggaggcattacaggaggctttgagcccaggggaagaggggttttccctctggtctggtgggtccggcacggaggcggggggagagcatgatgggagcacagtgggaaggggacccaggtttacctccgggtcaggagcctggctgtggtctggcatggaggcagggggagggcatgatgggagcacagtgggaaggggacccaggtttacctccgggtcaggagcctggctgtggtctggcatggaggcagggggagggcatgatgggagcacagtgggaaggggacccaggtttacctccgggtcaggagcctggctgtctcctgtgtctaaggaacaggcccgggagtctgcagggcccctctctggggcgtgcttttccccctcagtctcctgggcacagcctggggacctgctcattggcaggacagaggctgcctgggctttcgggggagcacacagatgccgttccctccctccctcttttctcccgtatctcccacgttcagggtgaacccagaaaaccctggggaatggaagtgctttgggaatgtgggcttctgccaaggcctgtggtccctccatcgtagccactccttgagcagcctgtgccagcagggaggagaggagggggtgcagcatctcgccgggaacctgagtccacagccgaggatgactgaccctccctcttgtgtgacaacaggattctgcaggacagagagatgaaactggaaataattcagtccaaacagtcttccaagggacccttgctgctacgaaaaggtggctccgagaagtttttacaaagaacatgctcacatcttcaggtgcctcattcacatacgtcaaggaaattgaggtaggcatttggccgaaggcttctgggtagggatgtgactgatcgtgattcctcatggcctcaaatcatggggtacaggctgctggccaggggcagttgttggccttcacctgagcctcagttcttcatctacaaaatggagttgctcctgtctacctggcagggtggctctgaggcagacagatgccgggtgcaaagtgctgctgcactgcctcgtgtcccctggccgggcacagtccctgtggtgatggaggtgtggaggtgatggtgatggttggtggtggtggtggtagaggtgatggtggtggaggtgatggtgatggttggtggtggtggtggtagaggtgatggtggtgaaggtgatggtgatggtggacgtaatggaggtgatggtggtgatggtggtcatggaggtggtggaggtgatggtggtggtggaggtgatggtgattgtggtggaggtgatggtggtgatggtgatggttgtggaggtgatggtggaggtaatggaggtgatggtggtggtgaaggggatggtggtgatggaggtggtggtggtggaggtgacaatggtgatgctggtggtggaggtggtggaggtactggaggtgatggtggtggtgaaggtgatggtggaggtaatggaggtgatggtggtggtggaggtgatggtggaggtactggaggtgatggtggtggtgaaggtgatggtggaggtactggaggtgatggtggtggtggtggtgatggtggaggtggtggaggtaatggaggtgatggtggtggtggaggtgatggtggaggtactggaggtgatggtggtggtgaaggtgatggtggaggtaatggaggtgatggtggtggtggtggtgatggtggaggtggtggaggtaatggaggtgatggtggtggtggaggtgatggtggaggtactggaggtgatggtggtggtgaaggtgatggtggaggtactggaggtgatggtggtggtgtaggtgatggtggaggtgatggtggtggtgaaggtgatggtggaggtaatggaggtgatggtggtggtgaaggtgatggtggaggtactggaggtgatggtggtaaaggtgatggtggaggtactggaggtgatggtggtggacgtgatggtggaggtaatggaggtgatggtggtggtggtggtggtggaggtactggaggtgatggcggtcgtggaggtgatggtggaggtaatggaggtggtggtggtggtggtggtggaggtactggaggtgatggtggaggtaatggaggtgatggtggtgatggtgatggtggaggtactggaggtgatggtggtggtggtggaggtaatggaggtgatggtggtggtgaaggtgatggtggaggtaatggaggtgatggtggtggtggtggtggtggtggaggtaatggaggtgatggtggtggtggtggtggtggtggaggtactggaggtgatggcggtcgtggaggtgatggtggaggtaatggaggtggtggtggtggtggtggtggaggtactggaggtgatggtggaggtaatggaggtgatggtggtgatggtgatggtggaggtactggaggtgatggtggtggtggtggaggtaatggaggtgatggtggtggtgaaggtgatggtggaggtaatggaggtgatggtggtggtggtggtggtggtggaggtaatggaggtgatggtggtggtggaggtgatggtggaggtactggaggtgatggtggtggtgaaggtgttggtggaggtactggaggtgatggtggtcgtgtaggtgatggtggaggtgatggtggtggtgaaggtgatggtggaggtactggaggtgatggtggtggtgaaggtgatggtggaggtaatggaggtgatggtggtggtgaaggtgatggtggaggtaatggaggtgatggtggtaaaggtgatggtggaggtactggaggtgatggtggtaaaggtgatggtggaggtaatggaggtgatggtggtggacgtgatggtggaggtaatggaggtgatggtggtggtggtggtggaggtactggaggtgatggtggtggacgtgatggtggaggtaatggaggtgatggtggtggtggtggtggaggtaatggaggtgatggtggtggtggtgatggtggaggtactagaggtgatggcggtcgtggaggtgatggtggaggtaatggaggtgatggtggtggtggtggtggtactggaggtgatggtggaggtaatggaggtgatggtggtggtggtggtggtactggaggtgatggtggaggtaatggaggtggtggtggtggtggtggtggaggtactggaggtgatggtggaggtactggaggtgatggtggtcgtggaggtgatggtggaggtaatggaggtgatggtggtggtggtggtggtactggaggtgatggtggtccgtggaggtgatggtggtggtggtaatggaggtgatggtggtggtactggaggtgatggtggtggtgaaggtgatggtagaggtaatggaagtgatggtggaggtactggaggtgatggtggtggtggtggaggtgacagtggtgatgctggtggtggtggtggtggtggtggtggtggtggaggtggtggtggtggtggtggtggtgatggtgatggtggtggtggtggtggtggaggtgatggtggaggtaatggaggtgatggtggtggtgaaggtgatggtggtgatggaggtggtggtggtggaggtgacagtggtgatgctggtggtggaggtggtggaggtactggaggtcatggtggtggtggaggtgatagtggtgaaggtgatggaggtggtggaggttatggagataatggtggtggtggaggtgatagatatttgaacatgcctgacctaagaaaagttcattttcatttttggctgggcactatggctgatgcctgtaaccccaactctttaggaagcctaggtggaagggtggcttgaacccaggaggtcagggctgcagtgagctatgactgtgccactgcactccaacccaggtgacggagcgagaccctgtctcttaaaatattttttttacagtgcattttcatgtgtttcaacctcctagtgtccctgccaaaaatattttaatctgaatcaaatcatggggaaattatgagacaaatcaggtcaaaagacagtttacaaaacagttggcctgaacttttcaaaactgtcaacatgttaaaagaaaaaagaaaaaaatgaccagggaactcttctagaaaagagatgtgataagtaaatgcagaaaagagacgtgataagtaagtacagcgtgtgtcccaggaggatctaggatccagtcaggacaggagctggagcacgagaggaacgggggtggagaccacttcctgggggcagagtgtcctcctctccacgttgcacgtcctgagtgggaaacctgcactggagttgcacagggaagggctagggtcttaggagaccctgcccaggtatgtagtggcaaggtgccatgatgcctgcaacttactttccaacggtttgggagagaaaatgctcatttgtgcagagtccgaagagggagcacagaggagagaggaagagtgaaagcagctgtgtgaagcgtgaatcgcacaggactggagttgaatgaatgtgggtggtggtgtgctattcttgcgacctttttgaaagttcaaaaattttcaaagtataacatgagagataagtcctttcagaataaaaagccggttgtgcagtaggaggaccagtagtggcccctggttgggtctctgattctagaaagccaacctgggctgctgtgaccggccactagcatggctgactgttgatgaaggttggggagagccctggtgttcgcggagtcccgcgctctctgtattgccgtaatgctctgtctttctcctttcatgggagtgtgccgtggcatttagtcgtgagagtgggtgtgacctgtgtgcgggttttgcaggtctggaggcggctggtggaaatccaattccccgcggagcatggctggaaggagtcgttgctgggagacatggaatggaggctcacaaaggtaccaaaagtttgggggcagtcttttcagggcgtgaaggcaagctggagaaccccagaccattagcgacagccaagagatctcagcagtgcctctctgtgggcagggatggggtgaatcacagctccgtgtttctgtttctgatccagcccttatagtctgtccctagaagagcgcttcggagtcttactgagaggacagagaagaacaagggcccaggatctcaccatcatgggggtgcgggatttttcctgaccccttcgttggacttgcgacagggatgctgtgtttacttggcccgccgtgctcaaccccttgtgggagggagcacgtgagtgagtgtggcatctggccagctgctttgggagctggcaggagcaagctccgtgcaggccctgcagcagtgcccagattgaggtgcctgcaacccccgaagctccagagggcatgttacagtgctctcttagctccgccgtctatggacagtagtgtgttatcagctcagtgggtcccttgccttgttgcctagggtggctgccctctgccagggccaatgtgacagcctcttttaggtacccacactcggtgggtcccaagctcttgtccagcatccaagaagaatggggtcacccggacacttgaaggatggtgaaggtggagaattttattaagcaatggaaatggctctccatggagaggggagctggagaggggatgggtcaggtggggaatcttcctctggtccaggtgtctggctggctcttccctgaagtcaggacgtctttccgaagttaaaccgtctctccttggaagtccagccatccctctgaagtcaagtcacctgtttccagtgaagctacttctctctcactaccaagtctggggtctttataggcacaagatagggggcagggtgggccctaggtagttttggaaaaagcaacattctattggtaaaaagacattactccgaaagaaccagtggggagagagtaggcacacggggatagaggttctcactttgggccatgggtttcaggcttttcggctcgaaggtggggttttgccagggacccgcccctgtctgcgtaggatttctctgcctcctgcctccatcaatggggccccaggcacaggaggggccaggcctgcccataggcaggaagtctaagtggcctgttggtgacaggaacctcatgacacacaagtggagaacacacagacatgcccctcatgctgaattaaggcctgaggctcaaggaaaattagtttttatgtgatatgagagttttatatgtaactttttttttttttgagacggggtctcgctctatcgcccaggctggagtgcagtggcgggatctcggctcactgcaaactccgcctcccgggttcacgccattctcctgcctcagcctcccgagtagctgggactacaggcgcccgccaccgcgcccagctatatttttgtattttttgtagagacggggtttcaccgtgttagccaggatggtctcgatctcctgacctcgtgatccacccgcctcagcctcccaaagtgctgggatgacaggcgtgagccaccgcgcccggcctatatgtaactgttaaatggatctttaaagggaaaagtcagaaacaaggaaaaatgacctatgtctcataacttacctgtttttgcaagccaggtgctttttctgcagagtgggaaaagagactcttttaaattttagcctttggtctactggtggggggcagggaggacatgctttgcgtgggccaggagaagcttaaaattgggggaaacagtaaaacagcaggaaagtaaaaatgatgaaagaattttcatcccatagagcactggagcgctgcatccgaaagctctgaaaccacccccctttgatttttgcaggaggaacccctctcccagatcactgcctactgcaatagttgctgggacaccaaaggcttagaggacagtgtggccaagaccttcgagaaatgcatcattgaagccgtgagctcagcctgccaggtgaacaatctctcctcctgggaaacggattcgggctcacagctgtgttctgccatgacccagctaagggctatgaagcacccgctgggtctcagctcctccgctaactcagagattgggaagtgggcaccctcctccctcgccaagggcaatggcgctgaaatctagttctctccggattcctcagtgtgctgcacagtccctgctgctcgcaccatcctgcatgtgttccatatggaatcacggccgtgcgcgtgtggcacaagtcacacgggcttgcaggccgttcctcagatggccctgtcatcactgtggctgctggtttgattgattgttaacacttgctcagtaggtgtgcgggaagagactccaaaggttgacagaacatttatggaagcaaaatatgtgaaatggaaaattgtatcaatttatttagctcttttcggcaaaggggaagagattgtgcccccctgtctcccaggaacagtctcgcaggcaatgccacatgaggaagctccctgctggccacggctgccctgctcacatttcctaattggacacttaacccctgtacaagcacagccttgcggccacaggggaagtccagaaacattgaggtcattgaattccggggaccaaggggttctaattttttaagtgactgatacctttgataaggttttcctttccctttttcgttaactctttgttgagatattgttcgtatgccatacggtacatctgtcaaaagttccagttcagcaggttttggggtagtcacagatatgtacagtcatcaccacagttaatgacagagcattttcatcacttcaaagagaaacccggcccctttagccatcatcctcctcccctctagtcacccactcccctctgcaggcataaacaattgctgaacataaacaactgcttctgtggctttctctgttctgactgtcatatgaatggaatcatatcatatgtggccttttgggtatggcttatttcactgagcataatgtttttttgttgttggtggtggtggttgtttgttgtttttgagacagagtttcactctttttgcccaggctggagtgcaatggtgcgatcctggctcaccgcaaccgctgcctcccgggttcaagtgattctcctgcctcagcctcccaagtgctggaattacagctactttttgtttaaagagtcttttaattgtttaaagaacaatgtgccgccacactcggttccttttgtatttttagaagagacagggtttctccatgttggtcaggctggtctcgaactcccgacctcaggtgatccacccaccttggcctcccgaagtgccgagattacaggtgtgagccaccgcgcccggccgagcataatgttttgaaagaccgctcaggctggacacggttgctcacgcctgtaatcacggcactttgggagcccaggagttcaagacaagcctgggtaacagagtaagaccctgtctctataaaaactaaaaaataaacaaaaaaaattagccaggcatggccgggcacacctgtggtcccagctacttgggaggctgaggtgggaggctcccttgggcccagaaggtcaaggcagcagtgagccatgatcacaccactgcacttcaacctgggggacagagcaagaccctgtctcaaaaagcaataacaacaaaagtccatccatattgtagcttgtgtccgtttacgttaagtattccttacccaaaatgcttgagaccagaagtgttttggatttcagatgttttcaaattttggaatatttgcatttacataatgagatgtcttccagatgggacccagagtctaaccacaaaattcacttgtttcatatacatcttatacacatagcctgaaggtaattttatacaatatttttaacaattttgtgcatgagacaaagtttgtattaagtatttgtatgttgaatttttcacttgtggcatcattatactcaaaaagtttggattttgtagtattttggatttggggattaggaatgctcaacctatatttcatttttttccatggccaaatattccccgtttatccatgtgtccattgacggccatctatgttgcttcttcggctattataaatctgctgatacaaacattagtgtacatatttatgtgtgggtgtatgtcttcatttctcctgggtgtatacctcgatgtagaattgctgaatcatatggtaactccatgtttaattgtttaaagaactgtccggccgagtcccacagcagctgaaccattttcaatccctccagcagcataggaggcttccaggttctccacatcctcactaacatgtgttgtctaactttttgattctagccatcctggtgggtatgaagtggtatctccttgtggtttttgtttgttttttgagatggagtcttgccctgtcacccaggctggagtgcagtggcgtgatcttggctcactgcgacacctccacctcctgggttcaagcaattctcctgcctcagtctctcgagtagctgggactacaggcatgtgccaccatgcccagctaatttttgtatttttggtagagacggggttttgccgtgtgggtcatgatggtctcgatctcttgacctcatgatccacatgccttggcctcccaaagtgctgggattacaggcgtgagccactgtgcccggcctcattgtggtttttaactgcatttctctgataactaatgatatcaagcatcttttcatatgcttattggatttgtctgtatcttctttggagaaatgtttattgagatattttgcccctcatcccccccacccccccttttttttttttttttttgagaaaaggtctcgctttgtcacccaggctggaatacaatggcacgatcacagctcactacagcctcaacctcctgggctgaagtggtcctcccactttagcctcccgagtagcagggactacaggcatgtgccaccatgttcagctaattaaaaaaaaaatttctgtgggccgggcatggtggctcatgcctgtagaccatcctggctaacacggtgacaccctgtctctactaaaaatacaaacaattagctgggcatggtggcatgtgcctgtagtcccagctgcttgggaggctgaggccagagaatcacttgaagccatgaggtggaggttgcagtgagctgagattgtgccactgcactccggcctgggcgacagagcgagactctgtctcaaaaaaaaaaattttttttcgtagagacagggtcttgagatgttgcccaggctggtcttgaactcctggactcacatgaacctccctccttggccttccaaagtgttgggattgaaggcatgagccaccgcacctggcctcttttgctcatttttaaattgggttgtctttttattatagagttgggagtctttattctatatacaagtcacttgtcagatatatgattgcaagtattttctcccattctatgtgttgttttttcacattcttattggtttcttttgaagcacagaagtctttaattttgaagaagttagcatatctgttttttcttttgttgcttgtacttttggtgtcaaagaatcctttgccaaatcctaggtgatgaagatttactcctatgtttatttatctctaaatgttttatagttttagctcttacatgtaggcctttgatccattttgagttcctttttatatatggtgtatatggtgtgaggtaagggttctgtttcattctcttgcatgtggacatccagttgtcccagcatttgttgaaaggactctacattccctgttgagtgatgttggcactcttgtcaaaaatctgttgacgatacatgtatggatttatttctagattttcaattctatgtggtgatctacttgcctatccttgtgtcagtaccacactgtttggactaccattgctttctagtaagttttgaaattgggatgtgtgagtcctcctactttgttcttatttttcaagattgttttggctattttgggtcccttgcaatttcataagaattttagaatcagtatgtcagtttccactgacaaggaagtcagctgggattctggtagggctggtattcaatgtatagatcagtttggagagcattgccatcttaacaaggttaagttggatttctttcattcaattagatttttttttttcccctgttagacagagtctcgccctgttgcccaagctggagtgcccaagtagctgggactacaggtgtccaccaccatgcctggctaatttttgtatttttagtagtttcaccatattggtcagggtggtctcgaactcctgacctcagatgatcaacccgccttgacctcccagagtcctgggattacaggcatgagccaccattcctggccaatttcttttaacaatgttttgtatttttcatagtttaaattttgcacttcttttgttaaatttctaagtacttttttttgggggggggtgctattgtaattggaattgttttctgaattctgtttccagattgttccttgctggtgtctagacacacagtgctccatgcgtcttgtatcctgcaacattgctgagctcatttggtagctcaaattgtgtgtgcgtgtgtgtgtgtgtgtgcatgagagagagaattaaattttctatacataagatcatatcatctgtgaatagagtttcacttcttccaatctggatgccttttatttctttctcttgcataactgccctggctagaacctccagtacaatgttgaatgaaagtattgaaagtggacatctttgtcttgttctgatcttaagagaaggtttcagtcttttgccaccaggtgtgatgtcaacgtgagcttttcatagatgccctttatcagtttgtggaagttcctttttgttcctcatttgttgaatgcttttttttctttaatcatagaagagagttggattttgtcaaatgcttttcccgtatctactgaaatgatcatgcgatattttcctaatgttattaactgatatttgatgttaaatcaacctttcatccctgagataaattacacttgatcgtggtgtatagttcctttaacatggggctggataaggttttcttttatccttttaaatgtcagaaagtatctattataaattaaccttgtggtttttactaattactgaaatgttttacagaaactttgaacctaaaggaagaaaaatattgtttctcggaggagaattaaaaagagaattaaaatgtatatgttgtttgtaggcagctttttaaaagaattatggtttaggaacataaaatatatgctatattaagggtttattcatttttggtatttttcatgatatgaaagtccaaaaaaaaatgtagaaactggcagccagaaggaaggagggtgactggttatgttggtgtgtgtttgtgtgtgtgtcttcacatctctggtgctggacacttaaggaggcagtatacaaggaaatgaaaattttcgaagaaatgtaaagtgttttactattttgctctttttgtggccttataaaacaagttacagtagatttcagaaatgctatcgagtaggtaatttgcttttgttatttcaaaacaaactaatgaaaaacttctaaatgtccctcttttattaattttcttgtagtctcagaccagtatccttcaggggttctcttactctgatttgcggaaatttggcatcgtcttgtctgctgtgatcactaagtcctggcctaggaccgcggacaacttcgatgacattttaaagcatctgctcacgttggcagatgtcaagcacgtcttcagattgtgtggtatgtttgcgggagtgctgggaacatcagctcaggcaaggtggtgtcttcctgattgggaaaggtgggaggcagaagatttgacatgatgatactgaattgggatgggctgatgtttgacaaaggctgcagtttggacagagagaccctggaaggctcagagtgtcttgcgttgtaaataataactaatgctaacagccactattcattgaatgcttgctgtaccctagcgactgtgctgggtcgcaagggaagtgcccttgaaacaacccttctgaaagtcccctttaaggcccccagttttcagatcaggaaacaaatggagaaggcaatgcgacttacctaaggtctcaaagattataagtagtaaaaactaaaatccagacccaggtatgtcttatttggagatcaatatagaatgtccaagccaacattgatgacctcaacagaaagtgaagtactgtgctgtctgatttccccccagccccccgcgccccaggtgttttgtggtcaaggagggagagagagagacattccatcctaaaaacgttagagtccagttggcgtgtgagaccttagattcatatctttcagtgagaaggcgctggatgtggaacagccaaaatcaatgctgagcttcctacacatcagggaagctgtggggatcaaataactgaattaatatgggagtgcacaagtaaaagctactctcttgaaaagatcatttttgtgttatttgtatttatttatttatttatttatttatttatttattttggagatggagtctcgctctctcacccaggctggagtgcagtgctgtgatctcagctcactgcaacctctgcctcccgggttcaagcgattctcctgcctcagcctcccaagtagctgggattacagatgtgagccactgtgcccagcagtttatttaattttaaaacaaggtcttctctgttgcgcaagttagcatgtagtagagtgatgccatcatcgctcaccgtaagcgctgacctcccgggctcacgtgatcctcctgcctcagcctcccaagtggctggcactccaggcgtgcaccaccatacccagcctgtttataagttggatagaattttttagagcactttgatgtgtacagaaaaattgagcagaaagtacagagagttgtcatctatctctgccaccatcacacgggcagtaccctgttagtaacatgcagcattagtgtggtgcttttgttacagctgagaagccaatattgataacactgttattaactaaagtccatagttcgttcctggtgttgtccattctctgaggtttggataaaccatggcctgtgtccaccattccagtatcgtgcagaatagttgcgctgcccctacaaaatcccatgctccacccctcccatttcctttagtcttttccagaatgtcctatggttggaatcttataggatgtcgcctttagactggcttccttcacttagtaatacgtatttatgtttcctccatgtcttttcatggcttgagagctaacttcgttttaccactgaataatattctattgtatggatgtgctaccattcgcttacccgttcacctcatgaaagacatcttggttgcttccaagtttttgcaatgattagtaaagctactatgtttgtttcttatggtgcagataagcttcatcttctcctaatattgtatggctctaatattactgggagagaaatcctaagtggttaaacaaaacatgtataaaaattctgccctctaaatttatcataaaatcagttccaagattttgcaagataatgaagttgtacagagtataaagttatcacatggctgtttctctctttgcatatgctatgaaagtgtctccctaagaccatcctgatagacattgctaggtatgtctgcatcctctggtgcagtttcttctgttgtaggtattcctagggcaggggctttttaaagaagattctgtgtattctatttaaaaaatatactcaggccatgtgaggtggttcatgcgtataatcctaatgttttgggaggccaaggcgggaggatctcttgagcccaggagtttgagaccagcctgggcaacaaagtgagaccctgttctctacaaaaaattttgaaagtttgccaggcatggtgctgtgcacctgtgttcctagctactcgggaggctgaggcaggaaaatgaggttacagtgggctatggttgtgccactgcactccagcctgggtgacagagagagaccctgtcaaaaaaaaaaaaaaaaggaagtcagtccatccgtatactgaaggggacgtgggttttaacctgagaaatgtgtctcccagctgattttggccattgcgggaagtcatcttcttggacaaggaagttgttcaggggatgaatctgggcaagacctaaccctcgtgggggaaagcagaagggagtggaatgattggcgcatctggagacactggccagccattgcctgtgtttgaggaagtgggggcagaacaagaggttatctggaattcccacggtaacggcaaagaggcaggaggtggggagcccactgtgttaactgtgttcttcatctattcaggaaccgacgagaaaatactagcaaatgtcacagaggatgccaagaggctgatagctgttgccgactctgtgttgacgaaagttgttggtgacctcctaagtggcacgattttagttggacaactggagctgattataaagcacaagaatcagtttcttgacatctggcaactgagtaagcatcgagtcgatacgcacttcaggctcctgaggcattaagtagctggaagacacgtttgtgtttgcgtgtgcatttttgtaaaggagataatcatcttagccttgataatgagtatctcttcttgctcataagttgataggggtggtttataattctcaagaacatcacgggaaagtgataaaataatggccatctcgaaaaagtgggtatgcgcaaaaccatcctagtccttctcctggtggcggggaaggtgcggcgctttcaaagcattgccatggaaaatggcatttgttgctgtattgggttactttattggtgttcttattttccaggggaaaaaagtctttcaccccaggatgaacaatgtgctgtggaggaagcactggattggagaagggaggaactgttacttctaaagaaagagaaaagatgtgttgatagtctcctgaagatgtgtgggaacgtgaaacatctgatacaaggtggtattcctgagaagtgaacaaagttgagggctctcaaagggttagaggagaacacagtaagaatggatcacagtagcagatctttattttggagagaaggctttaaaattttttttttaatttgcatttgctggggggatcgctttcacctcttttagattcttctttttggtatttatgtccacatttccaaataacatgcttaagtgtctcctggatttttccggagtcagcatgagctgctgacgcccgctgcagaagatgagggcttagagccacacatttctggtctgtgccctgcacacatcacctttccacctcctgttgcttcctgttttctcataacggagttgcatcattgtttagggttaaatcatcaggacccacacggatcacaagtgaaccacgaaagaaaccgtcatcattttacaatttttgcacaaactctctgttttccacagaattacatttcctgtcagatgctgttttcactgcgttaatgatacgctgttttcattgtattaatttctaattccatcgcaatctctgccgagtgtctgaatttccttgaagatcattggtttgacctttgaaaaggaacctgccaaccctgggctgcagacgtagggtggagtctccctccacctcctaggagcctttgcctggcacctgggttagacgtggttcccacgcccccctcccccgctactcactcctgcttcctctgttggcagagcacaccctcactggcttcctgagaaaagggcgtgtaagaggttaaaccctcgaatccttgtgtgtctaaagatgtctgtcctcttactaggtcagtcgctcggctaggtctagaattacagaccggaagtcattttccttctgaagtttcaatgtgctgcgccatcattgcctccacagtgtggctatgtatggagaagtccgatgcagtgccagttacacatccttcatgtgtgtgacctgttttctctttcttgaagctcttgagctctttctgttactcatattctgaaataataacgtgtcttggcctggatctatgttccatcgaggctgggcatgttggctcccacctgtaatcccagcacttcaggaggccaaggcaggaggactgcttgagtctaggagtttgagaccagcctgggcaacatagcaagaccccatctctaaaaaaaatacaaaaaaattagcaagacacggtggtgcatgcctgtattcccaactacttgggaggctgaggcaggaggatcacttgagcctgggaagtcgaggctgcagtgagccgaaatcacgccacaacactccagcttgggtgacagagtgggaccctgtctcaaaaaataaaatattttcagtcccctctattgggtattaataggtaggtctttcaactctagacatcaaaatccttgagttctgggaaattctcttgaatgatttaattttttcttctcttgctggaattcctgttaattggatatgggacctcctggatgatcatctaactgtcatcatttttctctcggattttctatctctgttttttgctctgctcttgagagatttattcagaaccaaactttctgcttaggttttcatgtcagctttcgtatatatatttaatgtagaggaattctttttctcggaatgttcctttttaaattctgtcctgttcttgttcacgttgcagcatcttcccttctgggttattcaccgttttgttttggaggttttgcttttcctggcatcatgtgctgcttcctccaggttcctttcacttgttgatttgttttgattttcctcctatgtctggacattcttgtttgtctgtgtttattaagagaaagccctcacaagtgggttggccctctgcggggtgctgccgtggggtgctgtggctcgacctggaagttggcctgtctcctgaagtcttctgtctcctgcctggagggtgtgggcctggctgccaggtttctgggagccaagagggagaagcgggctggcgggccttggcatcccgtgcgtggtcctcccatggcccgtgttctcagtgtggttctccgccacctccctctgtctcctgtgtttcacaccccatcctccttccccctgagattggataattcatgtcttctgttagcttcctgagaaaggggatgtgtctagaaaggccctttgttctgccatgtatctgtggcctccaatccacacgcccccctgcgttatcctttctagaaaatgaaccatctcttggctgctggggtgaagaagggggtccacctgctgtgtcagggcattggggtgacagttggtgtgctggatggaccatgtcttttttttgggacagagtcttgccctgttgtccaggctggagtgcagtggctcagtctcggctcactgcaacctctgcttcctgggttcaagtgaatcttgtgtctcagcctccctagtagctgagattacaggtgtccaccaccacgtccagctagttttttgtatttttagtggagatgggatttcatcatgttggccaggctggtcttgaactcctgacctcaagtgatccatccgcctcagcctcccaaagtgctgggattacgggcgtgagccactgtgcccagcctggaccgtgtcttaaacagactttgaacccagtcttccttatttcatcaccacctcccagtctgcagtgacctgcacaatgtgtgtctgctttttgggaatcctgtgacataaaactactcagctctcagtgttgcccactgggaccctaggactccatgttaccaggcctcatgtgtcatttaccactggttcagctcgttttcaacttctaaaattttgttcctgttatcctgttcgccattcctcctcctgtccttgtcagtttatgacttttttttttttttttgatatggagtctcactctgtcacccaggctggagtgcagtgacacagtctcagctcactgcaacctccacctcccaggttcaagtgattctcctgcctcagcctcctgagtagctgggattacaggtgcgctccaccacgcctggctaatttttgtatttttagtagagacagggttttgtcatgttggccaggctgctcatgaactcctgacctcaggtgatccgcccatctcagcgtcccaacgtgctgggtgggattacaggcatgagccactgcgcccaactagtttatgactttttaaatgcaatttatgttctgtcattggagtggggtttggcaaagagagtaaataggtgcgtgttttcccactgccatctttacccagaagtttatgatgctttctttatcatgaatattggttaacaaggccaagcggggagggaaagacctgtgaactcttcctgagaaagaaatcctagcagctgtgtgctcttgagttcgctcagagaagtgaggagagaaagtcttaggaaagtgaaataaaatggaatcatgattagagctttgacttctgacactttcttttcgcttctaaagtggactttggagtgcttgcagtaagacactcacaagacctcagcagtaaaagattaaatgacaccgtgacagtgagactgtccacctcctcgaactcgcagagggcaacgcattaccacctgagctcccaggtccaagaaatggctgggaagatagacttgctcagagacagccacatcttccagctcttctggcgggaagccgcagagccgctgagtgagcctaaggaggaccaggaagccgcagagttgctgagtgagcccgaagaagaatcagaaaggcacatccttgagcttgaagaggtgtatgactatttgtatcagccttcttacagaaagttcattaagttgcaccaggatctaaagtcaggagaggtcacccttgcagagattgatgtcatcttcaaggactttgtgaataaatacacggacctggattcagaacttaagatcatgtgcaccgtggaccaccaggaccaaagagattggatcaaggaccgagtcgaacagatcaaggaataccatcacctgcaccaggctgtccacgcagccaaggtcatcttgcaggtcaaagagagcctgggactgaacggtgacttcagtgttctcaacactttactaaattttgtaagttatttgctggggactgtgggggtttggaggggcgtcctgcctcagcctcttcaggagccatgggctttgtggctttgaaaaggggggcggatgacttagagcttccgtcaggggctcctgtgtgtgtggtacttgaggcctgaatatcccaagggctttgtttttacctttgttataaatagtaccactgctccttagccagagggagtttccttgggtctgcgtgaagatcaagaactcaggaaagggcaacaatcctcttttcataacgggcatttgtaaagggtcataggctctctctaggttacagaagccaaaaagcaaaacactttgtcggctgcccaactgcatctcccagttccacccaaaagcggtaaatcagttgtttctgttagagttaagaggtgactcttttgcttttttttttttgagatggagtctcgctctgtcgtccaggctggagtgcagtggcgcgatcttggctcactgcaagcttcgcctcccaggttcacgccattctcctgtctcagcctcccaagtagctgggaccacaggtgcccgcaaccacgcccggctaatttttttggtatttttttttttttttagcagagacagggtttcaccgtgttagccaggatggtctcgatctcctgacctcgtgatccacccaccgtggcctcccaaagtgctgggattacaggcgtgagccaccgtgcccggctgagtcttctgcttcttatgtttttaggtagaccgagataatgattagaatttagctgggcacagtggctcatgcctgtaatcccagcactttgggaggctgaggtgggcagatcacctgaggtgaggagttcgagaccagcctgaccaacatggagaaaccccatctctactaaaaatacaaaaattagccgggtgtggtgtcaggtgcctgtaatctcagctactagagaggctgaggcaggaggatcgcttgaaccacggaggcggaggttgcagtgaaccgagatcgtgccactgcactccagcctgggcgacagagtgagactcttatctcaaaaaaaaaaaccaaaaaaaaaacctggaatcccatccatttacacttgaaccctagtgcacgtcctcgaggaagcaactgctctgggcctttattgacaaagcagaaaaagcaacagtagttacttggcagggttatgtgaggaattgattttaaaatccactttattaaaatgcttagcagaatatcaggttcccaggaatcacagttcatcttgatcagggagaaacagccatgggggtttgatcatccaattcaggggtaagagcttggtgtgcctgttgtcacagcagtggcaaatctaggcattgagggagggtggggctgctgggacggtcagtgcttgcagctcacagattctggggttctggttaatgagttccagtccacagtagagctttttcttgcagactgataacttcgacgactttcgccgtgaaacactggaccagatcaaccaggagctcatccaggccaaaaagctgctccaggacatcagcgaggcccggtgcaaggggctgcaggctctgtccctgagaaaggagttcatctgctgggtccgggaggctcttggaggtaaaatcagcctttggggttgcgtggaagtgtggagaaagttttcagatggcgcactgtgtggcgttcctaaactctttggcaatacctccccttggccaaggactacgtaaagggcagaaagacgttgcctgcatgctttagggagatgggcactgatcatagagttcacaccggtacagtatttcccatgtgctgctgtaaaagccactcaccttgccacaccccgccacttcggaagctgtaaatggctcaggttccttttccttaaaatcttgcccccttcagctttttcttccagtagatttttactggaggacaaggagagttcctgcccacagagaggttttttttttttgtttgtttgtttttttgagacagagtctcgctctgtcgcccaggctggagtgcagtggcgtgatcttggctcactgcaagctctgcctcccgggttcacgccattctcttgcctcagcctcccgagtagctgggactacaggcgaccgccaccacgcccggctaattttttgtgtttttagtagagacggggtttcactgtgttagccaggatggtctcgatctcctgacctcgtgatcagcccgtcttggcctcccaaagtgctgggattacaggcatgagccactgcacctggcctttttttttttttgagacggagtttcgctcttgttgcccaggctggagtgcagtggtgcaatctcggctcactgcaacctccacctcctggattcaagcgattttcctgtctcagtctcctgagtagctgggattacaggcgcccgccaccacacccagctacttttttgtatttttagtagagatggggtttcaccgtgttggccaggctggtcttgaactcctgacctcaggtgatccacccatctcagcctcccaaagtgcaggcgtgagcaagtacaggcgtgagccaccgcgcctggccccacagagagatttttctcacttctccattgatgctgtgcgtttcttggcagcctcttcagttctgtggcttagatgtcgttggcagaggagagaggaagaggcagaggaggcaggaggggcacaggtggcagtgcaggtgtgctcgggggtctgggggccaccacctgctggatctcaggctctggctctcttgggagagccgctgctttcagtggtggactctctggtccacactgatgcacatccttcagtgagtaatttatctgaggggaatgatctgagtgtttcatagttaattgtgaacatgttatttacagctgagccttggtttctttttgtttaaatggtaatgttgtgtggattgaaggaaagagcatacacagaagtgcagtacagtgcctgggacattgaaattgctcaggaacggcaagatatcgtttagtgctattaacagacagtacaggctgggcgtggtggctcacacctgtaatctcagcactttgggaggccaagtcgtgtggatcacctgaggtcaggagttggagaccagcctgaccaacatggtgaaacctggtctctactaaaaatacaaaaaattagccaggcgtggtggtgggcgccagtaatcccagctacacgggaggctgaggcaagagaatcacttaaacctggaaggtggaggttgcagtgagccgagatcatgtcacttcactccagcttgggtgacagagtgagactctgtctcaaaaaaaaaaaaaaaaactacaaaagattaggtgttccggactcttactgaaagcagaaagtggacagaaccttaaaaattcatgaaatatccatttcagcttcagtaaggattactgcccaagaccgagtcttgtgctatcgtggaatagtcccacgctgaactcccctcttctcttccccaggcatcaatgagctgaaggtgtttgtggacctggcctccatctcagcgggggagaatgacattgatgtggaccgggtggcctgcttccatgacgctgtgcagggctacgcatccctgctatttaagctggaccccagcgtggacttcagtgcattcatgaagcatctgaaaaagctgtggaaggctctggataaggaccagtacctgcccaggaaactggtgagtcttattctgtctctaatgcagattttgttgaatagagcattgcttagcaacgttagggcagtgactgtggaaatggtggcacacctgtgtggtaggtttgtacacagccgttttcaatgatatttaaaaagcttttcttcataaatggaaattcaccatcttgttacctagaaagcaggatacaaaattacatgacacatagtaatctctaaggtgcaaaacacacgtggaaaaaagacagaagggaaatatgctgaaacgttgccaggagttttctctgaatggttgtaattgtcattttattctgttactttttgttattttctataattgatagaattttttatcagaaaaaagtaaacatttaaaattagccaggcatggtggtgtgcgcctgtaatcccagctactctggaggctgagacagaattgcttgaacccgggaggcagagatagcagtgaactgagatcacaccactgtactccagcctgagtgacaaagtgagactctgtctcaaaaaaaagaaaagaaaagaaaaaagtaaacatttaagtttaagtaaactacctgtagcagggtctgaattgacgtacgcagcttaactagatacctgggccagcctccggacggctgctctgcatgtgggtggaggaagaagtgacatatggaagggcaggtaaagctatcttcatttttctgctagaaagtcagcagagtttccaaacaaaaccctctgttgtgatttttcctaaacttctcttattgtacttggggaccacagaaggacactgaggacttgggactccacagccattgcttccagcgtcacccccagagggttctctgcattggggacctggcagaatgatggcgtctggtagagaggcaggcgggcggctgctcattcccctccactcctccacagatgtaagtcaagtgcccccatgtgccagccggggcaccaggcactggaggaaacgtggaacagcgagtacaaagcagcactgagtgacagatcatgttgtcagggtggcacctggtccagctggggcgctgggtgggcgactgcgtcctgagccctggggaagcgtggggagaaggctctgcagcgaggcagaggcgggaggccgaccacaggagggagaagggcaagatcctcgctccaaccgtggcccgtgttctctccttttgtccccatagtgtgactccgccaggaacttggaatggctgaagactgtgaatgagagtcatgggtctgtggaacgctcatccctgaccctggccacggccatcaaccaaagaggcatctatgtgatccaggcgcccaaaggtggccaaaaggtgagcggtccccagccctcggcgcagctgcggcccttctgcaggctgctgccagtccaggtcttctggccccaagaaagtgacttctaacctatgctcttcacagatttccccagacacggttctgcacttgatccttcctgagagccctggcagccacgaggagtcacgagagtactctttagaggaggtgaaggagcttttgaacaagttgatgctgatgtctggcaagaaggatcgtaacaacacggaagtggagaggttttcagaggtgagggcgcatctttgcagtggcgctaagctggtggtgtcatctcgtccgtgagggctgtgtactcccaagaaaacggaaaggatttgacttgggatttgactgataagaagggctctgctcttaggcccatggagagtagagttggcacatttgtagggtgcatggaactctagtccgcggccccagagaggtcttaaggcaggcaggcccctgggttagcagtccctccttacgatccgtaggatgaacgctgaagctggcagcctgtccaccgcactgagaaggaggttggtcacccagcaaatagcccttagaaagacacttgaattgcctctctcactctgtaaatcagcaagaatccaaataactaagatttagatggacaaaacagaagtaatcatattgagaatggtgtaccggtctaagtaatagtctctcaattttattataggttctttctctaaagttgatttgtactttacaaatggtatcctttatctctgctgggtgcagtggctcacacctgtaaagccagcactttgggagcccaaggtggaaggctcattttagcccaggagttcatgaccagcctgggcaacatagcgagaccctgtctcaaaaagtataaggtttttttttttcccaattaaaaaaaaaagataatttaaaaaaattaaaacagtccaggcatcatggttcacactttgggaggccgaggcgggcctatcacttgaggtcaggtgtttgagaccagcctggcgatatggtgaaaccccatctctactaaaattacaaaaattagccgggcatggtggcacgtgcctgtaatcccagctgctccggagactgaggcaggagaattgcttgaacccaggaggcagaggttgcagtgagccgagatcacaccactgcactccagcctgggcaacaatgcaagactccatctcaaaaaaaaattaaaaaaaaaaaaaaattaaaacaaatgataccatttatctctacaatgactctttccctgatgagagtgccatcttctcaggtgggttgtgtagatgaggagggaggccttgtgagcgcagatcatgcagtgggcctgtggacagggccgtcttttggcggtaggcctgtgtgctgttgcagagtagcgtgttaccctctcgcatggctctgtgagccaacctcatggttctgcctctccaggtcttctgcagtgtgcagaggctcagccaggccttcatcgacctgcactctgctgggaatatgctgttcaggacgtggatcgccatggcctactgctcccccaagcagggtgtgtccctccaaatggactttggcttggacctggtgacggagcttaaagaaggtggagatgtcactgagctgctggcagccctctgcaggcagatggagcacttccttgacagctggaagagatttgtgacccagaagcgaatggagcacttttacctgaacttctacacggcagagcagctggtttacctgagcactgagctcaggaagcagcccccgagtgatgccgccctaacgatgctatccttcatcaaaagcaactgcaccctgagggatgtcttaagggcctctgtggggtgtgggagtgaggccgccaggtaccgcatgaggagagtcatggaagagctcccgctgatgctcttatcagagttcagcctggtggacaagctgaggatcatcatggagcagtccatgaggtgccttcctgccttcctgcccgactgcctcgacctagagacccttggccactgtctggctcacctggcagggatgggtgggtctcccgtggagcgttgtctcccgagaggtctgcaggtcggccagcccaacctcgtcgtctgtggccactccgaggtgttgccagccgccctggctgtctacatgcaaaccccaagccagcccctgcccacttacgatgaggtgctgctctgcaccccggcaaccacctttgaggaggtggcactgttgctgcgccgctgcctgaccctgggctccctggggcacaaggtctacagcctgctgttcgcagatcagctgagctacgaggtggcacgccaagcggaggagcttttccacaatctgtgcacgcagcagcaccgagaagactaccagctcgtcatggtctgtgatggggactgggagcactgctacctcccctctgccttcagccagcacaaggtcttcgtcaccccccaggcacccctcgaggccatccaagcctacctggcaggtcactaccgggtcccgaagcagaccctgtcggcggcagccgtgttcaatgaccggctgtgtgttgggatcgtggcctcggagcgagcaggtgttggtaaggagagcggcagggtgggcaggccccgtctcccagggactgcccggggcccttcccccctccagcagatgaagcctgtctgcaggtggagaaaccgaggctcagggagggtgtgattcatctgtgggtgtcaatcagggtctgtgccagaaccaggcaccctggtcacctggtctcccacaatgggtattccctgggagccccattcccttcctcctctcagcaaacatctctgcagtgtactttgtggtttttttttttttttttttttttttttttgagacagagtcttgctctgtcacccaggctggagtacagtggcgtgatcttagctcactgcaacctccgttttctgggttcaagcaattatcctgcctcagcctcctgagtagctgggattacaggtacccaccgccatccctggctaatttatttttttttgttttttgttttttgtttttttgagacagagtctcactctgttgcccagattggagtacagtggcgtgatctcggctcactgcaaccttcgcctcccggattcaagcgattttcctgcctcagcctcccaagtagctaggactacaggcatgcaccagtacacccagctaatttttttatttttagtagagatgtggcttcaccgtgttagccaggatggtctcgatctcctgacctcatgatctgccctcctcggcctcccaaagtactgggatcacaggcatgagccaccgtgcccggcctaatttttgtatttttagcagagacagggtttcaccatgttggccagtctggtctcaaactcctgacctcaggtgatccgcccacctcagcctcccaaagtgctgggattacaggtgtgagccaccacgcccggcctgaagtttacttcttctgcccttaaatgccactggcctctttggggttgatgttggtcgtgtgagcaaggggaggtagaattgaagagaaagccatgcctcttgacccacccttcgtttgccatcttgtttcccttaaaaagaaatagtagcttctgttctgttgactttatcctatcaacagtacctcgtcctgttgggataaacattactcttcccctccctgctgaagcctctccttttgctgtgacttttattagctagtcactcaacacataatgacatttcagtcaacagcagaccacgtatatgaccacggtcccataagattagaaaactgtactttaaaaattagccaggcatggtggtgcatgcctgtgatcccagctactaggaaggctgacttgggaggatcgctccagcccaagaggtcgaggctgtggtgagctgcaaatacgacactgcactccagcctaggcaacggggcaaggccttggtcttttaaaaaaagagaaagaaagaaagaacaaaagattataataccatattttttactgtaccttttctacatttttatttttatttttgagatggagtctcactctgttgcccaggctggagtgcaatggcacgatctcggctcactgcagcctctgcctcctgggttcaagcgattctcctgcctcagcctcctgagtagctgggactacaggcacacgccaccacacctgactagtttttagtagagatggggtttcaccatgttggccaggctggtctcaaactcctgaccttgagtgatcacccgcctcagcctcccaaagtgctgggattacaggcctgagccaccgtgcctggcctgaatatgtttagatattcagatatttgccccgtgtcacagctccccactgtatgtaggatgcccccatgctgtcacggcttgcagcccaggggcaatgggctattccacctagctcgggtgtgtggtcggctctaccatctgggtttctgcaggcacactctgatgttcacagtgacagaatcatttcacaatgcatttttcagaacgtgtccctagtgctaagtggcgcgggactctgctttgcctgctgtcctgcggaggcaggaggtgaccaggagagtgagtaggtaacggctgggaaatgtgaaggttcaagagcgtattcttgaatctgatgttatgttgcatcagttttgaattttatacaaagagaagtaacttctagtggatctttatagattctcttactctttgtcctagccctgggacttaatttttctctctctctctctctctatttttatatatatacacacacatgctgtatatacatacactatatatattcgatacatattctatatagatttctatatatattctatatatttttacatatataatatatattctatatacttccatatatactatatatattctatatatacatatatagtatgtatatatatattatatatatattgtatgtatatatatattatatatatatattttttgagacagagtttcgctctgtcaccctaacgatgacaactgcaccctaagggatgtcttaagggatgcccaggctggagtgtagtggtgcaatctcagctcactacaacctccgcctcccgggttcaagcgattctcctgcctcagcctcctgagtagctgggattacaggtgcctgccaccacgcctggctaatttttttgtatttttagtagggacgggatttcaccacgttgaccaggctggctttgaactcctgacctcaagtgatccccccgcctcggcctcccaaagtgctaggattacaggtgtgagccaccactcccagccctaatttctgtattaatgttataggaaagtctctgtacgtgaagaggttgcacgacaaaatgaagatgcagttaaacgtgaaaaatgtgcctctgaaaacaattcgactgatcgaccctcaggtggatgagagccgagtcctgggcgccctgctgcccttcctggatgcgcagtatcagaaggtccccgtgctctttcacctggacgtgacctcctcagtaagtgccctccagcgtcagccgatggccacatcagtaaagacgtggtccccatgtctctgcgtgactcctccccgtgtatagaattccttgtttccacacgcacagtcctgtgaagcttaacagtgggaatgtgctctgagaagtgtgttgtcaggcagtttcctccttgtgtgaacgtcatggtgtgcgcttacactaacctagacgtagagcccactgcacacacaggctttatggtacacactgtcgctcctaggccgcaaacctgtgctgcatatggctgttctgaatcctggagccaattgtaaaacggtgtatttatgtgtctaaacataaaaatggtacagggaaatatagtattaggattttatggggctgcccttggagacatgggccgttgttggctgaaatgttgatgttgatcatcaggatcatcgtgacaaagagcaaaataaggaggggttacttagagttgggagaactcgccatcgtgtcgtgtgtttacacctcgtgcgattctgttcttaggtgcagactggaatttgggtgtttcttttcaagctcctcattttacaatacttaatggatataaatgggaaaatgtggcttcggaacccctgccatttgtatatcgttgaaatcctggaaaggaggacgtcagtgccgtcgaggagctcttcagcgctggtctgtactgtggggcgttttcgcctggcgtggggggctcttgggttctttctggtcttactgaagtggaatggcgcgtttaggagactccacatctttgccttacttagtgcagcagctgaatgcagtgttagtaaagaaaagcccatctttaaactcactttttaatcatgtctgggataaaagtactcttctgttaattagcagtgtcttcaatatttctgttcaattcaggcttcatgctgtatgcccagtctgaatcccagctgtgctctgaatctaggaaattcatctgttgaaagacctcacctttcctaatgccagctaagatgagaaggagatgtttgtcaaaaatttcttagcaaaagagagttttatgttcactcacatacataatacatgtatagcttagtggagaaacttagtttcaggaagttgggttagaaagtgatttcctggctcagaacgcagctcccacagcaatgccttacttaatgtgcaaaagatatgctgtggaaaaaaagactatacagaaagctacatattttcagtgcgtttttcataaaggtccatccaatatagataacgtggagggttaagacacaaaagcatttcttagaaagtcttcttgtaaccatttcattaatgtctctcctttccagcgtacacgtgtaccccagttcagttttcttgacatcttcccaaaagtcacctgcaggcctcccaaagaggtgatagacatggagctgagtgccctgaggagtgacacagagcctgggatggatctgtgggagttctgcagcgaaactttccaaagaccttaccagtatttaagacgattcaatcaaaaccaagacctagacacgtttcagtatcaagaaggctctgtcgaaggcaccccggaggaatgcctccagcatttcctgtttcactgcggggtaataaacccatcctggtcagagcttcggaactttgctcggttcctgaattatcagctcagagattgtgaggcctctctcttctgcaatccgagttttattggcgacacactgaggggcttcaagaagttcgtggtgaccttcatgatctttatggcaagagattttgccacaccatcactccacacctctgaccaaagcccggggaagcacatggtcaccatggatggggttagggaagaagatctagcgcccttctccctccggaagaggtgggagtcggagcctcacccatacgttttcttcaatgacgaccacacaaccatgacattcatcggcttccatctgcagcccaacatcaacggcagtgtcgatgccatcagtcacttgactgggaaggtcatcaagagagacgtcatgaccagggacctgtaccagggcctgctgctccagagggtgcccttcaatgtcgactttgataaactgcccagacacaagaaacttgagaggctctgcctgaccttagggatcccccaggccaccgaccccgacaaaacgtatgagctcacaaccgacaatatgcttaaaatccttgccatcgagatgcggttccggtgtgggatcccggttatcatcatgggagaaactggctgtgggaaaaccaggcttattaaattccttagcgacctgcggcgtggtggtaccaatgctgacaccataaagctggtcaaggtgcacggaggaacaactgcagacatgatctactccagagtcagggaggctgaaaatgtggccttcgccaataaggaccaacatcagttggacaccatcttgttttttgatgaagccaacacaacggaagctataagctgtatcaaagaagtcctgtgtgatcatatggtggatggccagcctctggctgaggactctggcctgcatattatagctgcctgcaatccataccggaagcactctgaggagatgatctgccgtttggagtcagctggtttgggctacagggttagtatggaggagacggccgacaggctgggctccattcctctgaggcagctggtataccgggtccatgctctgcccccgagcctgattcctctggtgtgggactttggacaactgagtgacgttgctgaaaagctctacatccagcagattgtccagagactggttgagtccatcagcctagatgaaaacgggactcgcgtgatcacagaagtcctctgcgcctctcagggtttcatgaggaaaacagaagatgagtgcagctttgtcagcctcagggacgtggagcgctgtgtgaaagttttcaggtggttccacgagcacagcgcgatgctcttagcgcagctgaatgcctttctctccaagtccagcgtcagcaaaaatcacaccgagagagatcccgtcctctggtcgttgatgctggccatcggggtgtgttaccatgcctctttagaaaagaaagactcatatcggaaagccatcgccaggttctttccgaaaccgtatgacgacagcaggctgcttctggatgaaataacacgggcacaggatctttttctggacggcgtacctctgaggaaaaccatcgccaagaacttggccttgaaggagaacgtcttcatgatggtcgtctgcatcgagctgaagattcccctcttcctggtggggaagcccggcagctccaagtctctcgccaagaccatcgtggcagacgccatgcagggcccggctgcctactcagatctcttccgcagcctgaagcaggtccacctggtgtccttccagtgcagcccgcactccaccccacagggcatcatcagcaccttccggcagtgcgcccgctttcagcaggggaaggacctgcagcagtacgtctctgtggtggtgttagatgaggtggggctggcggaagactcacccaaaatgcccctgaagactctgcacccgctgctggaagacggatgcattgaagacgatcccgccccccacaaaaaggtcggcttcgtgggcatctccaactgggcccttgaccctgccaagatgaaccggggcatttttgtgtcacgtggcagccccaacgagacagagctcatagagagcgccaagggcatctgctcctcagacatcctcgtccaggaccgagtccaagggtactttgcgtcctttgccaaagcctacgaaacggtgtgtaagcgccaggacaaggaattcttcgggcttcgtgactactacagcctcatcaaaatggtctttgctgcagcaaaggcttcaaatagaaagccttccccgcaagacattgcacaggctgtccttaggaacttcagtggcaaggatgacatccaagctttggacatctttctggccaatttgcccgaggccaagtgctcagaggaagtcagccccatgcagctgatcaaacagaacatctttgggccttctcagaaggtgccgggtggagagcaggaagatgctgagtcccgctacttactcgtgctgaccaaaaactacgtggcactgcagatcctgcagcagacattcttcgagggggaccagcagccggagattatttttggttctggtttccccaaggaccaagagtacacccagctctgcagaaacatcaatcgtgtgaagatctgcatggaaacaggcaagatggtgttgcttctcaacctgcagaacctctacgagagcctctacgacgcactcaaccagtactacgtccacctcggcggccagaagtacgtggacctcggtctggggacccaccgcgtcaaatgtcgggttcaccccaacttccgcctgattgtcattgaagagaaagacgtcgtgtacaaacactttcccatccccctcattaaccggctggagaagcactatctggatatcaacacggtgctggagaaatggcagaagagcatcgtggaggagctctgtgcgtgggtggagaagttcatcaatgtcaaagcacatcatttccagaagaggcacaaatacagcccctctgacgtcttcatcggctaccactcggacgcctgcgcgtctgtggtgctgcaggtcatagagaggcagggtccccgggccttgacggaggaacttcaccagaaggtgtctgaggaggccaaatcgatcctgctgaactgcgctacgcccgatgccgtggtccggctgagcgcctactcgctgggcgggttcgcagcggagtggctgtcgcaggagtactttcacagacagaggcacaactcctttgcagatttccttcaggcacacctgcacacggcagacctggagcgccacgccatcttcacagaggtgattgtctttctgcacttgtaccctatcccctgtcacccaagagtcctaaatccctcgtgtcaggattcaagattcttccccaggcagcggttagggatcctgcagggagatgctgagacgctgagctctcctccgcggtaagtgtggggagtaggtccagttaaccaggtgctgagtgcctggctctgtgcagtgcaccatgctggtaacagcaccatacacagtgttcacaccaacaaataaagtaccacgtcccaggactgggccaagggcactagggacgcacagatgaatctgtagcccttgtcctttgttagcattagggagcatggagagaccagcacatgaacagatgccatcaatatcatatgataaatgctgtgcttagaggcagcggggagcggtgcagaccaggatgcgagctcagatgagatgttccctaggagaagcccctcgccgatggggaagaatggccgggaagggattgtaggctgagggccttctgtgggcagagccgctgacagctcttagggttcaaggctgtagtgctgagatggggcgatgaggtgcagtcagagagaactactggaggccctcagtgactctgcagagccacatctcagccctatggagcgggcactggaggcacgcttgtctccctggctgggtgaagggagtctgatgaaaggctgttgtggaaaagacgggccggtagggaggccgctggaaccgtacaaaggagaggagcagatggaaccgagagatactcaggaggcaatttggcagggccaataccaccacccagtggggggatggggggtggaggggtccggggcgaccccctggattcctccttagatgagtggacattgcttcatcatgacagataccgcaggaacggacagcaggttgtgggaggctagtgatgatgtccgccggggacaggtttctatgcatcgtgcagctggacgtaggaatctgagctcagtggtgaggcagggattcctgggctagagcagcaggcctcgaggaacgtttcgacttgcactgtgatgggggagtgacctttgggacaggagaattgctgacatctgggggaaggggacagcaccaaccacgaactccatctgaaagcatgagtcgtactataacaggaaatggcatttgtgctgagccctaagggatcatgagaatctcaagtacggaccaagcaggcagagacacgggcctctggggaggagaggaaggcaccctcggggcagggtggggtcgtctctccaatgcctttggccctgtagggcctctcggccccagcgctgccgtgttttgggaaactcctttgggtttggattctgtgccgttgtgtggcaactgcaccgcgctgaacatcgcaggtttctaggatctgtctaaacctggcagcagacttgcaacctttccttgaagtctggcaagtaatttgcatttcttaactctgtagatcaccactttctccaggctgctaacaagtcacgactgtgaaattttagaatcagaggtcacaggcagggctccgaaacccacactcctgtggctgcagcagtttgacaccgagtactcattcctcaaagaagtccggtgaggttccctgccttccctgctgccctctccctccccagccgcagccgtgtggcttctgcgtggcgatggtacccgcgccggttaatgagcgccacagtcacgtgactgtgaaatagatccttgttaaatctctcccagcatccctctcatctccatcatcttctgcaacgcggtgtctggcctaacatcctcctccgagagcaccatcctcggacctcgttaggaggcattccttgggtttcctcccctggactatctgttcttactgaagaaaatcctacctgagtagctgtttctttgtagcctttatgtttcccatcactttggggaattttcttttccatttttttaagacagagaactcacttgaataacttcccttttctttcagaaactgtttaacgaatacagccaaatgtaaaatcctcatttttcagacagattttgaagatggaatccgtagcgcccagctcattgcctcagctaagtatgtttttagtatttttctcagaaactatgtaaaaaacccaaaacgtaggaagtcctagagaattttttccttgaagacagtatagtatcataatcagtatagaaataaaaataacaattcttcccccgcctcattcccccaagtgggattagggaaactgaagagagacaaaaagaaaaggccaataacattacaaaaatagtggaatgggcctgggcaacagagcaagacctcatttctaaaaaaataaaataattagccttccacagtgcacctctagtcccagctgctcagaaggctgaggtgggaggatcgcttgagcctgggaggtcaaggctgcagtgaactgcgatcccaccactgcagtccagcctaggggccagagcaagagcctgtcctccccacaaaaaaggtgaaatgcgagaggtgtaaataatggaacattaacaagctataaaaggatgcctttgaagcctgtgtttgtagacatgttttggtcattattaattttgaattatacaatttgaatttatttcaagttcgagggaaacaacagtaggtaaatgctttttttcctatttattggatatttttatagtgtttgtaggggaagtctgatgctcttagaattaactttgtgcctttattacttaaagtaaaagtgatttctggacctttttgaagcattggatgccatatttcagttcgtggcttaaatctcaacaagaaactggctttggccattggtcatctgaagggaatggcattgcgcacagaactctttgttgaaatggaaaggtccactgggtacaggggctgtttcctgtaatcctagctacttgggaagcagaggcaggaggatcgtttgaggccaggagtttgagaccaggctgggcaacacagcaagacccccatcgcttaagagaaaagaaggaatggaaagttcagctgtcctcacccttagctgcaccggggcaggcccattgaggagcacaagatagggtttctggtcaacgaaggaatgccacttcaaagcagaggacacaggaatggggaagaaaacgagccgctaagagaagatttctcatccccttgtgagagaagaaatcacgatcgcagggctctgaagtttatgtaaaactcatcggaacgggtggccgtgagaccgaaccaacagctcggagaacacccttctgcagctgcacagctttgctttgtttatttgcttgtttttgtgtgtgtgtttgtttttaaaataggtattcttttttttttctttaaataggtattctgttataaatgaaatcaacaaaatacgagaaaatgaggaccgtatcttcgtctatttcatcacaaaactgtcccgggtgggaagaggaacagcctatgtgggcttccacggaggtgagatcagaacatcagtcagggtatttatttatgtatttatttatttatttgtatctatttattttttgagatggagtcttgctctgtcaccaggctggagtgcagtggcgcgatctcagctcactacaacctcaatctcctgggttcaagcgattctcctgcctcagcctcccaagtagctggcattacaggcgtgcgccaccatgcccagctaatttttgtatgtttagtagtgacggggtttcaccacgttggcctagatggtctcaatccgttgacctcatgatccgctcgccccagcctcccaaagtgctgggattacaggtgtgagccaccgcacccagcccagtcagtgtatttatttaagtcatgttggaactgtttctcatttggttctgtgttgtacagtctgaaattagaatattattgttaacctcaagaggattctttccagatgcaattagatttcttaccactgattaccatgaaaacatgaatcctgggatgggaggctgcgtgcacctctcctggactgactctaggcaagctcctcacctcttagcatgtaggtcacacggcgtggagactcccgactcccgacagacactgtcaggaacgcaccgatacgcctgtttggcggggagggagagtggcgggggtcggactatcttcagatctctttttttccaaggaatggtcaccagctatttatgacatagaaaagttggtattccagaaacaggaaagtaagtttacttgaataatttcgtggagaatggaaggcagaccttgccagtgtcccccacccctcactaactgtgatacagcaaatacaacaatgcatgggtgaaagaaccacaggccttatccatgcgtccttcccacgctggccattgcaggtcttaccgttgctgcttatggtgaagctgtcgatgggcatagaatcgggtcgtgtatagtatcgggttgggtggtttctgcgcaggcccattccagggtttcggcttcagggtgccagtcattcattgcgcagcaagataatgacaagccagggtgtgcaatgtccctgcttagggctgagcagcagccgggaaagacacaaagacagttgtgggtggcttcactcttcacagggctgtggcagtctgtccacatcgatgacctccggagatccaccctcatggtttctgatgtgaccaggctgcagcatgtcaccatcagccagctgttcgcgcccggagacttgcctgagcgtgagtcacgaggcggagcccctgggggagcaggtggtggaagggcagatggcaggtgtggagcgtggcgtgcacatggcactaggagcagggccaccgtgtttcgtccctcggcaggagctcggggacacatctgcagaactgactggtggctcatcatagagcaccagggccgagcaggtgcgcttaccacaggctgaggtagagctctgtgagcaggccagccatggaagtgagcacctagaacacgccagagcccaggctggaaggaaggggctgccttgggggctgatcttcatgaccgtgatctctcatctggggacctagcaccacagcaggggccggggaagcctgcactcggaggctgagcacacagactcccagatggcaccgctgccagtccctgtgccaccttctgagtggtaacgcaatcacgtttgcttcgactgcagtgggcttggaacaccgggcggaagacggccatgaggaggcgatggagacggaggccagcacatcaggggaggtggcagaggtggcagaggaggccatggaaacagaaagttctgagaaggtgggaaaggaaacctctgaactcggaggcagtgatgtaagttctggttcttgggacctccccttgtgctgctggtgatgcttctgagctgcatctttaaacgcttttgcattgggagctagaggagtcgccgccgctgtgcaggggtgaggatggcgccccactttcctcacacagtgacggtcttgttgctggttactgggggtcaagggcatctgcaccggcagtttggggggtgcagggcggaggtcggcgtctcttctttgtccgtgaggaccgccgccctgtgctgtttgctgcattgagaccctcatcgcatacgggcggtttggcttttgcccactgtgtcagtggcagaaacggatgacccaaccgtctccaccaacaggtgtcgatcctggacaccaccaggctgctgagaagctgtgtgcagagcgccgtgggcatgctcagagaccagaacgagagctgcacgcgcaatatgcggagggtggtgctcctcctgggcctcttgaatgaggatgacgcgtgccacggtatgagcctccccacccctcttgcccctgcccccacgtgggctcttcctgaggagtgggcatcatttcactgtgtgttgggggacaccctctcaggtttccatggctcagcagaagcagtgacacagtgggaatctaagagcatctctcagattttgctctagaattggcctggccaacggacttcccttcctgggggaggtgggacagaagcactccggagccaacagctcagccacggccatgctgaacgtctgtttctgcctttgtacagcctctttcttgcgggtatccaagatgcgcctcagtgtctttttaaagaagcaagaagagagccagtttcaccctctggagtggttggcaagggaagcctgcaaccaggacgctctccaggaggcgggcacattcaggtactgtgactaaaggaagcaaggagtggctccaatctggtggcagcatggggacctgcctgcagggatcctctctccatccgggccatggggactgagctgtttctttccaaacctctcagccattcaaagctgtaaagtttttccccaagaagcacacagtaggtctggacagtggccaaatggcaggtgctggactcttcctctaatttcgtgtttacagtttttcatactaaaaacttaaaaaaagtaaaacatctgttcttagagtagaacatttaccgacattcatgttgataaccctagaaagggctgctgttttcagtcatgaagttaaaatgacgtgcagagcaggcaggggacaggcgggattttcccagtcctgctgtttgaagaatggtaacagcaaaaccaggacccagcagtatattcactgccatggttatttttctgtcacccatgagactaaccttgattatcttggatgtggccgtgtattgaggaaggaggggtgctctgggccccagacagagggtctctttaagacagactctcagacctcctgcctgaaagcctaagaaaccagtgacttggttatttgggcccagttttcccatctctaaaagacagcggactcctccatgagtccccttccaggtccaagcttctgtgccagtgataggttcgctttgggcctacagccaggtgtgatctgcaggagggaacgtgaggaagaagcggggtgaacggtaatgggggcttacaggggaagaagcggggtgaacgggaatgggagcttacaggggaagaagcggggtgaatgggaatgggggctcacggaggaagaagcggggtggatgggaatcggggctcacggaggaagaggggtgaccgggaatgggggctcacagaggaagaagcggggtgaccgggaatgggggcttacagggggaagaagcggggtggacgggaatgggggcttatggaggaagaagcggggtgagtgggaatgggggcttacaggggaagaagcggggtgagtgggaatgggggcttacaggggaagaagcggggtggacgggaatgggggcttacagggggaagaagcggggtgaccgggaatgggggcttacagaggaagaagcggggtggacgggaatgggggctcacggaggaagaagcggggtgaatgggaatgggggctcatggaggaaaaagcggggtgaccgggaatgggggcttacaggagaagaagcggggtgaacgggaatggggacttacagacaccttcctcgtgaccagagattttctgattctactttttctctagttatccttcgtttctctccttgtcacgccttctgaagggattttaggagatcagaaatattttcatttccctccgttcctccttgtggactctcttgatgcttttttttttttgagacggagtctcactctgtcgcccaggctggagtgcagtgatgcgatctcagctcactgaaacttccacctcctgggttcaagcgattctcctgcctcagactcctgagtagctgagactataggcacccaccaccacacccagctacttttggtatttttagtagaggcgagatttcaccatgttggccaggctggtctcaaactcctgacctcaggtgatccactcgcctcagcctcccgaagtgctgggattccaggcgtgagccagtgtgcccggcctgttgatgcttttgaatccctgactccactccccgggaccagccctgagtcactgaacctcctcagtctgctcttccccactctgctgttcacgcagcactaggcctggctccgtcgtgttctgtggtcaccgtgaggcctgcgcagccgctgagtggtggccagacccgcaccctcagctcacctgccccagggccagcagcaccctgactacctcgattcaccaccactgtgttctggggactggagtcctttgccctctcgggattaaacagcccaaatcctgagagtcctttgtgtcccgaactctgcctgcctgtccagatacagcagaaccaggctcagcggctccagatagggcggaaccaggctcggcggctcccgcctctcccagcgcttgtcccagcgcctgggttttccttctgccttttgtgttcgcgacacttttcctagtttgctgttttctccctctgtgcactgggatgctttattttcccaatagacattttaaaattcttgccaggttcctctgtactatatatttaaaaaatgtaggtatttctttttattctcttcaaaagagaggcttcgcttttcccccaacattaattaccttgtggggttttttttttttcgagacagagtctcactctcgtcccccatgctggagtgcaatggcgcgattttggctcactgcaacttctgcctcccgggttcaagcgattctcctgctcagcctcctgagtagctgggattacaggtgcctgccaccacgactgtaatttttgtatttttagtagagacgggatttcaccatgttggccaggctggtctcgaactcctgacctcaggtgatccgcccgcctcagcctcccaacgtgctgggattagacgtgagccaccgtgcccagccaccttttaattcttatcctttacacaagaattttgaaatagagctattattgttacatgtaaatatatacaacaaaatatatataacaacaaaatgtcttgtagttaaccaattatctttctgtctgcctatctgtgcattcatccatccctccgcctgcctgtccatccacccatctgtccgtccgcccatctatccatccacctgtctatcagacactcagatctagtgtacaaaaacatcaacaggaacaaatacttagttccagataaacatgtgccttcttgtttagtttgatctgggacaaattcattttggtctcttcatctgtattatagtctatctacaacagatttttaaaatatttattttttccaaatgaatcgtcataattttatttatttagagaacctcgatgacttgttctgaaaaatagttacatacaaaaattatgcagccttgcaaaaaataaagcagataagtgcggtggctcacacctgtaatcccaatactttgggaggccaaggcgggaggattacttgtgcccaggagtttgagaccagccagctagggcaacatagtgagaccccatctcaacaaaaaataaaataaaatttaaaaattagctgggcatggtggcactgggtgtgttgttcctgtctacttgcacggctgaggtgggaggatcgtttgagcccaggtattccaggttatgacgatctatgattgtgtcactacaccgcagttggcgtgacagagtgagaccctcacatacatgttttaaaaataaaaaagcaaacactacttcacccttccagtaacctaatgacagtttattagatgtagaattaagttccattccagttccgtctctaatcttagacatctttgtgagtctgttttctaggacttaaaaatgatggaaatgtcaagttattgctgtcgctgtagtgtggtaaatagtagactagttgttttgttaatgctcaagaaggaacaaaatgtcaaaaggtggcagaccgccactctggttcctctgacccgtggtggcccatctctcttctgtgctgcaggcacaccctctggaagcgggtccaaggtgctgtcacccctctgctggcgagcatgatatcattcatcgacagagacggcaacctagagttactgaccaggccagatactccgccctgggcaagagatctttggatgtttattttcagtgacacgatgcttctgaacattcctcttgtgatgaataatgaaaggtgagtggaaggctttctttccctggggagagaaactatcagaacacagcaggaccctaatatgctctcccaagtgctgggtgaaacgcagccctcaacttcagagcaacgttgacatgggtgctttctgcagtaacaataggaagtttggccgggcatggtggctcacgcctgtaatcccagcactttgggaggccgaggcaggtggatcatgaggtcaagagatcaagaccgtcctggccaacgtggtgaaaccccgtctctactaaaaatacaaaaattagctgggcgtggtggcgcgtgcctgtattcccagctatttgggaggctgaggcaggagaattgcttgaacctgggaggcggaggttgcagtgagccgagatggcgccactgcactccagcctggtgacagagcaagactctgtctcaaaaaaaaagaataggaagtttacgaagctctgagaaatttctgttttatctccaccctcctcatttccctgctttcagagcactggttctagccagacccagcatggcgtgacacggagacagtgcgctgcgaacagccccacaatctgtgctccttacccctgggatctgtgctccctccccgtccctcattccctggtggagcggcacagcccccacccccttccgcaggcctgatgatgtgcggctcaggctcagctcccaatagcttccacttcagctttcaggggcttcaattctggatgtagatttataaagaatatagaaataaatgtgcccaggctcggtggctcatgcctataaccccagcaatttagtaggctgaggcaggaaagtttcttgaacccaggggttgaagaccagcttgggcaacatagtgagaccccatcactacaaaaaatttaaaaattaggcataacgtggtgcgcacctgtagtcccagctactctagaagctgaggcgggaggattgcttgagcccaggagtttgaggtgagataggatcacaccactcactgcactctagcctgggtggtgacagagtgagactctatctcaaaaaaaaaaaaaaaaaaaaaaaaaaaagagtgagagagggagggagacagaaggaagaaagagaaagaaagagcgagagaaagagagaaagaaagtaaagaaagaaagagtgagagaaagaaagaaatggaatttgaattgccagtggaaacacttatttaaaagacaaggcgctgctgatgttcatgaagcaaagactctaacaagttgtgctctgtgttacaagttatcaaagccagacaggttcaggaaccagaagacttggttctgcccgagattttgggcaacacacttgacccctgtcagccttggtttgtttttgttttgcctgtgaaacaaagattgcataagacagttccctagttctgtcataacagaaaccctgtactgtgaaacagatcagcgccgtctgcctggcctgttggcccctttgtttttgaggtctgagaagagctggcatcagtggcagatcttatcttgtgttttgagtgacgtctcacaaaccctcttcttatcatccctcaccttattgcagacataaaggtgagatggcctacatcgtggtgcagaaccacatgaacctttccgagaacgcttccaacaacgtccctttcagctggaaaatcaaggactatctggaggagctgtgggtccaggctcagtacatcacagacgcagaaggtgaggctacctcaagacaggtcagattcagcacaggtgaatcacaaagggattgcctgacagtgaaaagcagatgggtggctagaattgcaaggtgaattttggagtttttagttttcacactttgtttgtgcagtaagcgtccaatttacgtcaccgcgtcattttaaagtttctgctgaaggagtgagaggccccggcgggaccagaaacctttcgatcctatggcagcaggagcctgtgagatggtttttagtgccgtgatggccagggatatggcgaaatggggtgtgttctggcaagaggaggactgtcgcctctatcagctggtcattcccattctgggccttctcagactggggcactggactcggaagatgcccccaggagaggcgttctcagaaggcacgagcgcctggagcatcccctactcccaggtgccccatcaggaggcacctcccagctgtgtctcccgagtcacagcccagacacagtgctgagctctgctgccagatgccagaagatttgccctagtccagaaaaaccaacgacaacgcaacacttttacaaaagccatctttcatacatgcaatagtcttttccacgtttacttatcgtaccatttggaagactcagggtggccttcttttctaggttaccattctgccactttttctcaaagcagtctctctcctcatgagcatattcctttctcaggacaataccccaactgaccctgcttttctatgacagcatgcgaattaggggctgcaccccgcccactagaagccagatctttctggcttgcatgctctgtgacccccagcccctgaagagcagcccacttgttcctaatttacttggacccgggggttcctgaagcatgctgtgacctgtagccatgcaacatacaatgtagccatgcaacatacaactcagtcttatctagatgtttctctttggggctagcttggctgtttctgacctaaatttgacactgtttccgccttcctttattttattccactggaaaaatatcctaggccaggcgcagtggttcacaacaccttgggaggccaaggccggcagatcacctgaggtcaggagttcgagaccagcctgaccaacatggtgaaaccccgtctctactaaaaatacaaaaaattagctgggtgtggtggtgcatgcctgtagtcccagctacttggtaggctgaggcaggagaatcacttgaacctgggaggcggaggttgcagtgagcagagatcacgctacccaccgcactccagcctgggcaacagagtaagactccatctccaaaaaaaaggaaaaagaaaaatatcctaaatgtctagacagtgactattccttcaattccctacaaaatcaggcagttggtacccctttgtctacgagctcccattcaacaaggcgtccccattccccttcactccggagccccctggaggcaggggagcgccatgacttagacgcactccaggccgctccttggtttcctctctgcaggactgcccaagaagttcgtggacatctttcagcagactcctctgggcaggtttcttgcccagctccatggagagccgcagcaggaacttcttcagtgttacttgaaggatttcattctcttgaccatgcgtgtgtcaacggaggaggaattaaaggtagatgtttagatactggctaagggtcaggtgtagagcttgcatgatggggactggatgcagacacggagacgtttcctcagctgcctggagctggtgctgtgaagtctgggaacagaacatggtcagcgaagggtgccggtgggtgaaggggtcgcccagtctcctctcaatattcagtgctacaccctcagtccaccgcccaggggctcctaaaacacggagctttctgtgaacatgagaagacctccaatttccttgacatagcttctttttaaatgttgagtttctcttgaaaaaaattaaatacgtaactaaccctacagggtaagaataaacaagtgaaattcaatagaaagtcatacttttgactacctaaaaattttaaacttcagtacataaaaaaggagagtgacaaatttaagaacatccttacagctaatatgactagaggttaatattcttaggaatcaataagaaaataccctaagttttaaaaaatgggtaaacgttataaaacaacaattttataatctcattaagcatatcaacatccaggaaacatttgaaaaattgcttagccttactattaatagcaaatcaacacaacagtttttagatatcatgtttacgtattcattttgcaaagctgatttttaaaaacaacagccgccggccagtgctgcaaagaaatagccaggccacgcggctgacagtgtagcgtgcacagtgggcgccctgcagggctgcgtggcagaacagttgagcaccttatccgatctgaactgctgactctgtcctgaggaaactactggagatgtggacaaatatttggttcacagggatgtccttttcagctttgcttcgaaaaataagaaatagtttaattgtccggaaatacaggatgggcaaattaaagtatggccgtatgatgggttattgagcagccattaaaaccatgtttttcaagtatactcagtcatagggaaagttcatgatgtcatgttcagtggcaaaaagcccagacgacacggtgaccttaacgtgggaggagaggcagatagaaaactggacagaagcaaacgggacagaatagcacacatggtttctaatttcctcttttatggttttccaatagttcggatttcccacggggaaaacataccatttttgtaatttaaaaatatattctaaaagcttttttgaatcccagtttctgcagatggctctgtggtcctgcactaggaaactgaaagcggcgtcagaagcgcccgaggaagaggtttccttaccgtgggtgcaccttgcctaccagcgtttcagaagccgtctgcagaacttttccagaatcctgaccatctaccctcaggttctccacagcctgatggaagcccgttggaaccatgagctggctggatgtgagatggtatggccctcctccgcctgccctgagcaagccttgtggtgcttccaactccactctgggaatggagagcttctggggctgtgttccaagtgggagatttcttcacaaggcacataccttagctgaattcagagatgttaaggacacatctcgctgacgcttctcacatcctagacaatgaaagtttaggtcgcaagcctgggacacaagtatacatgcagctaacagccggggcctctggtgggccggtgggaggggcaccgctcagccacgccctgctgtccgtctccccagaccctggacgcatttgccgcaatggcctgcacggagatgctgacaagaaacaccctgaagcccagtccccaggcgtggctacagttggtgaagaatctttccatgccgctggagctcatctgctccgatgagcacatgcaaggcagcgggagcctggcccaggctgtcatcagggaagtcaggtgagacccaggagccctcacccactgcttcatctggcgcgcgctcaccaggagcctgccaagtgccaggcatgtccatgagaagacgggcaggtgctcctgccatgggaggggctccgtcctcacccgttcactccgcatttgccgaacccttagtgagtgccaggcgtctcattagggtgctggagacacgagaggcggctgtgcattcagggagcgcactgtgtactggggccgtagaaaggcagacgggctattgtgatgccgtgtgagaaatgctgtggtagaaaggacaccccgggcgggcaggtgcacagagcaggacaggccctcagggccagagtccacttccctaaaggtgaggtgggacttgacaggcgcaggatcatgcagtgagcgggttgtggtggtaccccatgcagaggcatcacagtgggacaccgagtcccagctaagctgagcgtctgagagcgagagctgggggcgggccaggaagtatgtcacatagggcttgcttgtaatcccagccgctgggcctggaccccgggtcccgcatctcttctcccgtctccctcctcgtttcacccttgggttccttggtgggagccgagtgagtgagtgagtggcgccctcttttgacagagcccagtggagtcggattttctccaccgcactcttcgtggagcacgtgctcctaggaaccgagagccgcgtccccgagttacaggggctggtgaccgagcacgtcttcttactagacaaggtgagtacttgggctggcctcagcacatgcacggatccacccttttccgaaaggaagaacagcactgacagtgatctgcggctgggagacgctcttttggctctgaccgttttgtctagacatgcaaaggaaggtgatttcatcactaggccattacattttccatgtttaattgtttaattatttaccctctgctgattgctaagtcagagcatatcatttagaagtgattccaggaactgtgtgcagaaaggggctgacgcagggaacatgcttgtgaaaccttcggcagggattacctggcctttggagtgaccccagaacagaccactagcctggccatctgtggaagctgttaccattttcatagtcatggagacaaggatgtcagagaatgccaccggggtttggggtcttcaaaacagtgctgtcaacagaaccaaggaacaggaagccaccatgcctgtcactcaacacccttcataaagctactaatgtggggtggtctgcagaaagaaacctgtgaccctacagtgatgcccctctgtggccacgcagtggtgtccagcaacagtggccactcagccaaacacagcctcagcctctgcctcacccgcacccgtgaccttcacgtgagcacatccagagccctcaccgccagggggtctggaagaggcagcgctggctgtccgacctttggagcacaggaaggtttactaaaaggaggccagcatggatgctggatgtgttgactctgacctatcaaaacatcagcggcttagacacagtatcagctgatttcccacccaggatgggtatgagcagcccaaggctaaggtaccagctccccggaggctggcacggagtcaggtgcccacgctccgtcttgtcccttcattgtccctaatgttcagcttccaccccgtggcctggcgtcacagcctgtgggacagaaagcaggggaggtagaggacaggccgttttccttaagagcccaatcccggacacgcacacgccacaccagctcgtgtctcgtggtcctaaacttaggcactcggccttatctggttgcaagaaactgaggagtttttcgtggcatggtcatgttccaggtggaacttgagttcttctgctgaaggaaaaggcggagagaggatagtaggacacagccggtgccccccttccacccttttccccacacccacacagcatgcagcctctccaagtctcatcatgtctcggcgctctgggagatgcacagggctttcagccaggtccagcgtgggtcataagggccaggtgcccataaacccaaaggtaaaggagctggcccctgcctgctcacatgcccacaggatttgggaggttaggaacgtggggagggttttttttggcgataaaatggcctcagaaacttactgggtttctggtttatttccttccagtcagatctctgtgcaggtaaccacagccaaagaccttacctcgttagttttcctgctggaagcctgacttgtacccctacccagcccccgctgaagagcagcccttgggaccatttgaaacaagaggcttgggggaaagccctgccttccgccgtgaggctggctccctcggccgggcaggaagttgtcgacggaactgctgcaggatggcacgggtgggactgcgggcatggctggcttttagttgttttggatatgtaccttgaaggggaattcctggatcatttgataactctgtttaactttatgcagaggcactgtattgttttccacgggggctgcagcatctttcttacatccccaccagccaggcaccagggtctgaatttctccacatcatgggcaacacctgttactatctgatttttttcataatggccaccgtgataattcattgtggtttttatttgcatttctctaatgactagttatgatgagcatccttcatgtgcttgttgggcatttgctgtcttctctggagaaatgtccattcaagtcctttgcccatttttgaattgggttgttgattaacaaagttattaggatattaaaaatacacacatcacttccaagtaagattaatcccagcaattcaaggatggctcaaaataaaaaaaaaaaaatctgtaaatgtcatcagttatataaattaaaagataaactctatatgatcatttcaaaatgtagagagaaagcatttgataaaattatttggaaagaaatacccttgtcaaacttggaacaggaaggaactctccttgagctcacaatgcccaaggtagacataatattaagatgtctataccaacatcatgcctgcccatcaaattccattagtacagccattaaactatcttgtacagtgatgatgtgtattgcctaaaaaccagtgtttccacttctaactatatcctagagaaacttctcatttgctctcagacatatgcaagaatgttgaatacaggactgtcaggaattgcaaaaaacctaaatgcccattaaccagcagacaggtaactggtgtctttatcagtgggtacaggagtgatctggacctaaggtatcatgaagagaatgagttgcagaagcctttatacaacgtggtatcattgatatcaagttttaaaacattcaaaataataactccatgttcagatatgcttacagctatcctaaaagcagacatttagaaatatagttatctctggggagggacggagggatgtgaagttgtaactatatgcataatgttttgtttctctaaaaaatgatctatcgcagcagcttgggaggctgaaagaaaattttaaaaaatttaaaaattttaaaaaatgatctaaagcaaatattccataaatgctgagatttcttaaagcttggtggggggtatacagatggtcattattattacttaaagtttgaaatatcttagtgagagcggaggagaccttaaaagaaaaagaagagggaaaatcgtaacttgagaatgtagtcccctgacaagcagcataatcacaaaacgagcattcagagttcaagcgttaaacacaggatcacaaaggcctcgcaccccacaccccacacacacggcgcagccttggccctgaatgtggtgctccctctgtcgcccggcctggccgccctcagccctcccccctgctaatgactcctgtccctgcctttcttcagtgtcttcgagagaactctgacgtgaagacgcacgggccttttgaggccgtgatgcgcactctctgtgaatgcaaggagacagccagcaagaccctcagcaggtgagaccttaggtttggatctgtgaaggcgagaattctgaacctctcgtggttttcacttcttctggccagtttctctgcttcagaactgattgcccttcttggattctaggtttgggattcagccgtgctccatctgcctgggagatgcaaaggaccccgtctgtctgccctgcgaccacgtgcactgcctgcgctgcctcagggcctggtttgcctcagagcagatgatatgcccctactgtttaactgccttgccagacgaattctctccagctgtttcccaagcgcacaggtacaacaccctttctctcaagaaagcatcctttttttcattttccttttttggcaaacacaatattcagaaatataaactctattaaccttcatttggtagaaaacctgacctcagagaactatcataagagacgccacttacgtactttcataaatatctggtatctcaagattattctctccccaagacatacacatacagatttcagacaacaaattcagaggaactaagccagaaagtcttaacaaaggtcctcaccagaggcccaaggaatgtagacgccagtgtttttttttttttttttgagacagtgtttcactctgttgcccaggctggagtacagtggcacgatctcagctcactgcaaccttcacctcctgggttcaggcaattctcctgcctcagcctcccaagtagctgggattacaggcatgcaccaccatgcccggctaatttttgtatttttagtagagacagggtttcaccatgttggccaggctggtctcgaactcctgacctcaggtgatccacccgccttggcctcccaaagtgcagggattacaggcatgagtgaccacacctggccgacgccactggttttaatgcatcagtatcattcacagtcactgacctgaggatcaacccacttcttgtctagctttttggagctggttaaaagcagctctggctctctggactcagcaggcctcagcccggctctgtgagtggttggttttctttccttccccttccccccttctcaggcctcctaaaagtggggcaccaggcaagcccagtggatgggttctttgacatactttgggatattgaagggtattgttgccgggtccaaatgatcaaagtgtttccagaaagggatgcatgtaaatatcatctgctgaggttttgaagactagctctaacgggtgagaggagtgacttgaatctttcaatttaaaagtaaaatgccagccaggcatggtggctcacgcctgtaatcccagcactctgggaggccgaggtgtgtggatcacctgaggtcagcagttcgaaaccagcctggccaacacggtgaaaccccatctctactaaaaatacaaaattagccaggcgtgatggtgcgtgcctgtaatcccagctacttgggaggctgaggcaggaggatcacttgaacctgggaggtggaggttgcagtgagcggagatcgcgccactgtactccagcctgggcaacaagagtgaaactccgtctcaaaaaaaaaaaaaaaagtgaaatgctgtgcaaatctcaagtcattctgtaaggaggcatttgggaaacaccatccacctgtcttctgtttctcgtgttctaagggaagccattgaaaagcatgcccgcttccggcagatgtgcaacagtttcttcgtagacctggtgtccaccatttgcttcaaggacaacgctccgcctgagaaggaagtgattgagagcctgctctctctcctcttcgtccaaaaggggcgcttaagagatgctgcccagagtaggttgctttcttcctgtaaacctagcccctcatttcttcatctcgcttctgcatgtctcatgcagtgagctgcctttttctttctggtttaaggacactgtgaacacacaaaatctctctctccattcaatgatgttgtggataagactcctgtcatccgctcagtgatactgaaactgcttttgaagtacaggtaagaacaacatggagacttgcttctggaaagccctggctttttctcttcatcgcagcgttttgttaccaagtcttcttgtcgtgactagtagctagtacatgatcttggggagctttttcggtgagacacagcctggttacttgtactggttgtgtattctgacattttcacatataggcacatgagtttagtattcccacaagcacacgcatctagcaagaagccaacagtgccgtgaagggaccacagtggcgtgagggacatggaactcaagaggccagaatctgtggtgctgagcctggttccacagcagcgcaactttctgatttttcagatggtagcttagaatcctgctcaccctgaatgtcctagatgtctcctaagtttctattcccctgaacatgggctctatttccttggaaaggatgttgacatccaagaatagtatcacctgtggtacttgtatggatctaatattgcagttctcaaagtgttggtatggacccttgggtgtgaggtaggtctctgaggttaaaactattttaaaaattagattactaagataaatttgcccttttttaaaaaacatgttgatacttatgatgatgttacaaaaagcggtgatgagttaaactgctggcccctcacgtgaagacacagtagctggaggtattgttttcttcaccgccatgcacacgtggttttcttcatgccagtttcattttagttttactaaatcttgactcttgaggatttgacttttcaacgttttgtggaaatgggaagcacacacaaaacactcccactacacaccggagtagacagttgcctcacagaaaatcactcatgacaagccctgggttatcagccggctgctgtgttcatggaccgccacccgtgctgggaggaaggatgcacatgatacaggtgtccagggctgggcaggcctctcctggaaatcagcaaagtgagccagcctcagccaaacaactgacaatgttggttggtgatgataacattcaagcttttaagctgaaattaaaattttgaaaagcttatattctccactatgagcttgtgagcttttgaatacttaaagacattttggggcaatttgtggtgatattaatgaatatggatttttttttttaaaacgtagaatacaaatgtgtcaacctttacaagacctgcacagcccagtgaaccaatattttccaaatgaccaatgcctgatgtcatgaaatcatgtgggtcaaaaaagaaaaaaatctatttaaagtatgggcagacctttttgattttaacataattgactgaaaaatgcactgatacagtttcaggctccacattgcaactaacctctagacatgaccatttatcactgtgggcacagcattaaggaataatagccacaatcagctgcaaaaactattaaaatgttcctcgctattccgagtatatgaggacagattttcttcatgttctcccatatgctgcagcgatggggagcagggcaggcaggccgctgacttccaggagccaggccccagggccagcacaggaatggaagaccaaaccactcttctcacggattcatgttttggaaaatattttaaatgttatttaacatgtaatagctttattgttattttaaatgaatgtatatttttgaaaccttttgtttttaatgtctcataattcctaatatcataaatattgataatataacccacataaaagctcttcggggttctcaatttttaagactataaaggggtcctgaaaccaaagtttgaggacagctggtctaaaatgtgagttttatattcctccagtattatgctaaaaggttttccataaaatcttagaaaccacgtatatgtatgtatatgtttatacacacacacacacaggacagacgaccgatagatagatgctcttttttttagtaaggtatgtctccagatctgagagaaccaggaataatatttctctttctgcagctttcatgatgtaaaagattatattcaggaatatttgaccctgttaaaaaagaaagcattcataactgaagataaaactgaactgtacatgctcttcatcaactgcctggaggtaagtgaactctctcttccctgaatttcttttggaaactatctgaaccacatggtttaaaatttacagaatataattttagtcagtataattaacgaatgctctgttccgtgcagaaaagaagaaaggtttcaaagacgcggcttctgccttcagcaacgtatattttggcatttacttgcatatacatacaaaacagaacagcctaggagaatatactgccaaagttaacagtggttatcattgagtggggacattatggatactttttatcttcatatttttatatccaaaatttttataatgtaaataaattagataattttttttcctcataggttcacttttcccctccttcttgtccttaaaataaaaaggaatgttaggtttccataagtcaagaaatttacactgaaacctacagtaacattcttctatccttccttctccacagtcacattggcgactgtagaagcttggggcatccatgtttaaaaaaataatatccttttctttcttgttccttgttcctcaggattcaatacttgagaagaccagtgcttactccagaaatgatgaactgaaccacctagaagaggaaggtcgtttccttaaggcatattctccagcaagccggggccgagagcctgccaacgaggcctcggttgaatacctgcaagaggtggcccggatccgcctctgcctcgacagagctgcagatttcctctcggagcctgagggaggcccaggcaagtcttctctgccttgctttcctttgggtttaaagactccgttatttagaaattcaggaagtatgggaaactagttcttcgaatagactactactgggcttttctacatcccctctcccctggatgtgtttctgtgaatgcctgtgggtaggtccgatgccctctggttggccttgtgtcctacaataaatgccctaagtcaccagccactcacccgctttctcgttggcctctcagagatggccaaggagaagcagtgctacctgcagcaagtcaagcagttctgtatccgggtggagaacgactggcaccgggtgtacctggtgcggaagctcagcagccagcgggggatggagttcgtgcagggcctctccaagcccggccgcccgcaccagtgggtgtttcccaaggacgttgtcaagcagcaggtgagaagcggggccgggcagcacacaaacatgcacccccacagccccatacaccccaaacccacacacccccctaccctcacaccctaccccccccacaccccaccccctcacaccttccccaccacataccctcatacccccacacctcaccctcacacccccacacctcaccctcacacccagggatggtgccactgcttccgcgttccgcctgcccttagcatccccagagccaggaaggaaacctgccgcttgtctgtctggtcctttgtctctgtgcttcagctgatttgccccagcttgtgatcatgtttacactgcctgctgtagggccaaggtgagggcactcacctcagagcttctttaattaggcatcacttctaattgaatttcactcaaggaaagtagaacattcttgtggcctttgctttcagcgaattaaacgtagttcagcttgcaaggtgcgacctttttacctctggcaggcagagacaggcaagagcaagaactaggaatagaagaattgcagaagaggcttcaaggccaggctgggcacagtggctctcacctgtaattccagcactttgggaggccgaggcaggcggatcacttgtggtcaggagtttgtcaagaccagcctggccaacatggtgaaaccttgtctctacttcaaagaaaaaaaaaattagctggacatgatggtgggtgcttgtaatcccagctagtcgggaggctgaggcaggagaatcacttgaacccgggaggcagaggttgcagtgagccgagattgcaccactgcactccagcgcctgggcgatagagcgagactccgtctcaaaaaaaaaaaaaaaaaaaagaggcttcaaggcctctcagtggtcctttccagatacccagaaattaacaaattcttattgtccaggggatacaaaaatggtactaagaaccccggcactgtttgactaccacctggggtttagagttgacatgacttgagccacccggcctcaggtgtggtgcggtgcgccgcaaacggaggaagcaagcacctccccaggtagcgctgccgtcggcaggcattccctgcacttgcacctcttcgtctactgaggaggaagctccctgcgaagagggcaccagactgtcctgcctcaggccaggtcagggaatcccagcttggctgcctttaaacctcgaatgatcaaccacctggttcctgtacccgttcagacggttctttgcaagacattcctcccattgttcacccccaactaacctctgtattccaggggctgcggcaggaccacccaggccagatggataggtacctggtgtacggcgatgaatacaaggctctccgtgatgctgtggccaaagctgtcctcgagtgcaagccactgggcattaagactgctctgaaggtaggatgggcccgtggcttctctctgataccaggtggcatcccttggagcctgcatgttccctggtttatgtcaaatgatgcagggtgatggaccactgatgcagcccatcacgtgacactgtattggaagtcacgtgcccacagcctccagggcgcacctggctagtgtgcgtgaaccagtggctggaacaggacagctatgacagttgagctgggttgacagatttgctgtgtcttgctgatctgccaagtccatcagcagcgccttttgatttatgcccattacttcctttgagaccctgctggaaaacagtctaagaaagatgctgacacaactattaatagcaaaattcatacctagatgtattcataattcagatatgcatgtgtgtttaataaaaatacatatgttggtgtagtgtgggaagttaaaaaatataaagatgtttttagaatctaacctttaaattggtctggtcttgcttcctttttgagtccctgtgccaggaaaagaggaaatggaaaatcctctttctgctcagaagtttctaagaccagtgaaggagtcagaagaacagatggtgattccgttgcttctgtcattaagctggctgctaaatatgcgttgagtttaatctgagagtatttcaggaactttgtagcccaaaagttgctcgccagaagactgcccatgtggggcatgaccccaggtgtccaggcctggaaaaggctccttcccttttggtgggttgagggctgaggcatgtgaaaagtttcttttcacatgcaaacttcgtgggcctctggcccttaggtagatctggcaggcagcggtgcgggggcgtctatcctataatcctagcactttgggaggccgaggcatgcagatcacaaggtcaggagtttgagaccagcctggcaaacatggtgaaaccccgtgtctactaaaagaaaaaaaaaaagaattagccggacatggttgcgtgtgcctgtagtcccagctactcgggaggctgagttagaatcgcttgaacccgagaggcagaggttgcagtgagccgagatcatgccactgcactccagcctgggtgacagagcaagactccatctcaaaaaaaaaagatgtgttgagcttttaaattcttacttgatacccttgattttgcaggcctgcaagaccccccaaagccagcagtcagcctacttcctgttaacactgtttagagaggtggctattttgtacagatcccacaatgcaagcctccaccccacgccagaggtgagtaaccgcctgcagggctgtgttcaaagtctcagtatttggagggattttattgaatagaatgaaagttatcaacacaaatcataccataatttttttatctaggatagaggttctcaaccttgttatgtggaggaacacataaccaagctgtttaacccaaagcttgtagaattataatgaaaactaaagccaagaacataagataatgtttaacagaatagaatatcaaaattaatgcttacgtatgtggatgctgtgtttgtatatgcacaattctcttctctgaaaaatttccccctcaaatggtggtgatttctccatatttaccttgatatttgatgtgtatttggtgtcagtgtatgtctaagagcaattcacacaatattctttgatacatcttaatgttaagtttttttcctgtcagcaatgtgaagctgtgagcaaattcattggcgaatgcaagatcctttcacctcctgatatcagccgttttgcaacatcgctcgtggacaattctgtgccattgttgagggcggggcctagtgacagcaaccttgatggaacggtgacagaaatggccattcatgctgcagccgtccttctgtgtggacagaatgaactcttggagcccctaaagaatctggccttctccccagccaccatggcggtaagagtaggccacaattccatcggccttcactggaacaccccccagagcttgtcactgtagagaccgagctgcagctgtgggaactcttgagcatctttatctcctcagttctctgcctttgtgtcacctgattcttgagcacacaagatagtgacagacttgccttgccctttgttatttcacaggaagctgttctgttttcttcacagacagcttgagaagtccagcagaaggaaagcagagttccctttcttcctctaggcctcctgctgagcagcagcacccaggtgacaagctcacttatctagagctgtctctgtcttcttgtttttcagcatgcttttcttccaaccatgcctgaagacttgctggctcaagctcggaggtggaagggtctggagcgagtccactggtacagtaagtgttggggtctagatgaccccacactcctttgagcttcaaagggtgtccagatgctatgaagcattgggttcgacttggggtccacgtggtttgtgcctcagggtccaaaaccacctgcattctaccggtggcgtctgcagaagacgaatggcttgaaggagctggcactccgccggctagatgatccaaaccatttcatttctttgtcgtgtggaaaaggccctctgtgatgcacttctgttctctggaatatgccattttgggagaagggagggactgggaaccacatcagagacgcattcaaaggcccaccacaaaacaaagtttttgacacaaagctcttctgaaatatatgaaatatagaaccgggagactgactcatataacccatgacatgtaaattttgctgttgcctgagtaaatattttaaaactagtttttaaagttgttataaaatatgctcatgacaaaaaaaaaaaaatcaaggaaaatagaaaggtctagaatcctgtccaccttgcctccaaaagtacccctggtatgggcctatattctaattgctctttacttgataaaattaataaaattagactcagacatttttcactgacaacatacatttattaagcttcaggcaggtgtcatgtaacttaacaaattagcgtgggatgctctggacagtcattctcatattgtggtcagggccagagagtagagagttagctttcccttttcaatgtgggtcattgggtgaaacctcattagccaatgtgtgtcctgttctcttcacagcttgtcccaacggccatccttgctccgtgggagaggtgagtcttggtatttaagatagggtttgaggggtggcgtgcactcctgggttggaggagggggatcgtgggtcaggagagtgaggctctcggccttccaggagagcacaggctcaccgaggactgcccagggtgctctgagcagggcaatgccaatggcgctaagggtttctagcccagggcttctcagactcagcactgtggacgtggctctgcggcgtgggctgtcctgtgcactgcaggctgtctggcagtatgcctgacctcgagtccctggatgccaggagcacccactcctcccagtgtgacagctaaaaccagacattgacaaaggtcccctaggaaagaaaattgctactggttgggaactgctgctagccattctttctagccactgcagcatggggtcagtgagccttgtcttgatagaatggcaaggtgttgcctggaccacaggctgcattattagccctcagaggaggtgtggtccagatgccaaaggaaaaagccacgtgtaggctgtgcgccatgggggaagaactgttgattattcctctctggattcccaagcatctagcctagagccctccatacacagtatctgtacttgctgagcaagaggctggtgggttgagctgacacgtggtagttagttattagtattacttacttggttgagatatgtctggctctcttacccaggctggagtgcagagtgacatgatcatagctcactataaacattgaactcctgggctcaagcgatcctcccgcctcggcctcccaaagtgttgggattatgagccactgtgcccagcctgatacacgtcatttaataatgtatataagagatacggagggagaaaaactgttacatacacttcatttttctgagcttcaatcacttccttgtccatgaaatgaggacgctgaaatagagtctatccaagaatgctcccagctctgaaattctgtaactggtttggtgtgttatcagccgtgactctcagtatattgtggcacaatatctgattttgaaaaataagcctttggaagtagattatgtgattagatttttttaaataaaaaagtccaagccaggtgtggtaggtcacacctgtaatcccagcacttcaggaggctgaggcaggtggattgctagatcccaggagtttgagactggcccgggcaacatgttgaaaccccgtctctacaaaaaaacacaaagcatcagcagggcatggtggtgcatgcgtgcatgcgtgcatgcgtgtggtcccagctacttgggaggctaaggtaggaggattgcttgagcctggggaggtcaaggctgtagtgagccgtgatggtgccactgcactccagcctggaggacagagcgaggctctgtctcataaaaattgatatatgaaaaagtccaaatgaatataaggaagtcagtttggaagctcttctagtattcttggtattagatcatgaagtgccacaggctagtgtgatagatggagggatggaaaaagtgctgaatacaagaaaggaaggttgaattttatatatttgtctataaagtgtcactctgggaataaagcttaaattgtctcacttatttaaaaaacagttccagtttgcccacgtgcaacattagtgagtacctaccctgttcccatgggttctccacccacccgaaacaagcacacactgggacaatctgagggtgctcacgtctgccggtgataaggaggtgttcatttgcatgatggcatttgtgcataaaatggtactgctccagaagtggttctagtgccctgtcttcaccctagtgtggcaggccgatggaacagagcatctgcattgactgccatgcgccgattggaggcattgaccacaaacctcgggacggctttcatctggtcaagtatgtgggtcaggattctatttcctaagtactcaaactttggggtgttgggctgtttttattccagctgataaagtgatactcaagatagtactaattactccagtacatgtgggcctgtgtcatattgaatagcaatgccaaagtcccagcagtcacacagcagggaggcatctgatctgttgttggatccctgggccctgaaatgcaaagcaggctaccctttaacagctgttaatatgaatacaggtgtcttccttttgggccttgggtgcaccttctgtagaaatatgcatgacataaacagatgatctaattcacgaggacatctatgtctgcaggaccaaaacctgggcatccgtctgtctcagcagatgccatctcacttgccagcaatcttagctttctccattttttattttttgagaaaaatgaaggagacagacatagtcttatgaaataccagacttcagaatccaggtacaaatccgatcccacaatcccatgctgagatgaatgtggttctaaatgctcctttcagagagtgagtgggacctgcgtgggggcctcacattctgactgttccctgcagtcacagcttaaaatactttcatgttatctccagaaactgtcacagtgtcctccatcctctaatagttttgccactgagagcatcggccacactgcatctcctctctgccggactttagatcccggtttttcctttggggagatgagaacaatatggacacccatgggatgccgactgtcctcccaaactctagctgttcttagcccaaccgctcctctcctgacaaagacttcagtggaaaagacgggtccaggcctgcgtcttaacaccctgcccggggatcagcatcaataccacacagcgcagccacctgacgctgagaatgcggtcgggtctggtccaccggaaaggcgagtctatcatgagagagactcttaggaacatggtccaggctttgtggaacagcaagtactcttcacataactctcttctcagccgtaagcctcactccaagtgctgagaaagtgcagcgtgccaaagcggccagcctcagcctctgtcttgtgttctctcgttctttccagagacaaggcagacagaacgcagaccggccacgtgctgggcaacccgcagcggagagacgtggtgacatgtgaccgagggctgcccccagtggtcttcctccttatccggctactcactcacttggctctgcttctgggagcgtcccagagttcccaggtataacccagtgctgccaaacaatgggctcagttaagaacctgctttcgcttcttcccagggagtccttttgtcttgagtcctagctgccatctatgcgttttggagataattagtctacaaagtaatatacaagttatacatcttcatgtttccccctgtggcgtatgatggtatggggggaactactccccagattatacagaatccacttcaaattaacactctgtgtctctggtccacatctgggagtagagaggctgacatcttcattattttacctgtgtcttcattgtagctagggaagaaagagcacactgcataaccaagatggccaacagtacaatctggatattctttatctcactgtaacaacagaaaagccagcagccgttccgcttgctagccttcctttcacctggatcactccgccgttttcatcttagaaaccgccttccgactctatgctggtgctccactcccaatggcctctaccaggctcaccatcttctctacaaaccagatccccgctgaacactctgttccgttgcccccacaggctctgataaacatcattaagcctccagtgagggatccaaaaggctttctgcagcagcacatcctgaaggacctggagcagttggccaagatgctgggacacagtgccgacgagaccatcggcgtggtccacctcgtcctgcgcaggcttctccaagagcagcaccagctctctagcagaagtgaggaaaggggcaagggctgggcggggatcacacagcacaacggcagcgcaagcaggctcgctgtcttgtgggccaccccacacacagccagtctgagctctgtctgtgctgttgctggaaagaatgagagaacacacagagagaaaaccgtgtctagggaaggcgatgcctggggctggaaaaaggaagcactctgcttgcccagaggctggaaggagctgctctgttccctccattcacccctgcctggctaagacctgcggtattcgggagcgtctgcacgcaagtgttcagtgtgcatatatggggagtcttcagttccgaagtcagccccgtaggtcattcccctaccatgctgggagcacgtgtcgtccacacagagcgtgcgtgtcaaaggatcaatcaccatcacagttgtgtgctgatttattaaatgtttatatgtccacagttatgttaaaaaaaaaaagctataaaatattgtattcactgagctaactttctattttaaaaatttaaatccatacagaaagaaaaggtctgtaagacaacttagtaaaatggttatatggttatctgtgagtggtggaattaagagtgattttcttttgctaatctgcaaaaatcacaatgaccattgtgaggacaatgttaatttaaaataataacaataatagcaagaagaagtcctgccccatgacaagaaaatctgctcccacctcaggtacttctttgcctgaaactggcattcctatttattttccattttgaacaatctgattttattttaagcctcttattctggtgggatttcagcaaagtgagcacacccagagtcacactgatgaaatgacagaatcctggaagcaggtggacagttcccgcagcactccacatctgtgtggtctgcctcagggtttgggtggcagcagctgagacggctggcggtagcctgggccactcttactattgagctcaagttctgttctttcagtaatttttttcaaaatgggtctaagattacaattatgtaggatagaggaatttttagagattgatgttatcttcaaaaggtcattaagttggtggtaacaacaggaactacttcaaaatacttagattaatttagaaagctattacctcaaaacgagtgttatttctattaaacacttatttagggtttattatacgcagactgctgtgttctttgtgccttgggtaacctacacatttggagtttttttgtagggcttttaaattttgacacagaattgtcaactaaagaaatgaggaacaactgggaaaaggaaatcgcagctgtgatttctcctgaactggaggtaagcagtaagtgctgacagctgggttgctcctcggtccagaaaggaagggtcccggcgtctgctgaatgctccttgcctgttgcccctcgtagcggtgccagcaagagcctttgactgagccccagattccaatgctccccacctcgagtcactccatcctcctcctgtccccaagtgctcttccctcctacagctggtcatgaagtcagtccgaggaattcctgggaatccagcaagtgcaggcagtgtttttctctccattactttttacagcagaatgtaatgtacgaggtagagaaataaactatcacatatatacccattaaaaatgaactgacaatcatagattaattattcatctagcagccagaatgttagtaagagaaatataggtttctgaatctcattctgtttggggagacatacatctataaacaaacaacactgaaattagaagatcaaagggaatacctgattacatgctcagagcaggggacaaacgccctaatatgcagacacccactggtggagttactgggtgttacaatctgtttgtagcaatacctcacttccagaattttttttttcattttctccatccagcatctagataaaacccttcccaccatgaataatctcatcagccaagataagcgtatcagctctaaccctgtggccaaaataatatatggtgacccagtgaccttcctgccccacctgccccggaaaagtgtggtccattgctctaagatttggagctgcaggaaaagaattacagttgagtacctccagcacattgtggaacagaaaaatggcaaagaaagagtgcccatcctctggcatttcctgcagaaggtatgtctggcttactgtggctccctccctctttcggtgcagagttccccagcaggcctgaaggccctgggcttttacgtagtataatcattcttaacagactattccagtgctttggttttgaataggatgtagcagaagactcagggctagagatcttcatacatatcaaactgtatgattgccagaagcgtaaagtcacagacgaaatacacacccacgttgggattagcagtgacctgtggggaagctggaggccaggagaggacctcccctcatcactcagccagacagaaaaggatgcagctctttcccagccgctctgttcctctctgtccacaatgctggagcatgggcagatcaaacaaaactcctccctgtgcctaagcatcgaggcgtacgtggaagacgggagtgagtgggtgtgtgccggcggtgctggggtactggggagcagtcaagtgtactggccacatctgttggaattggaaatatactttcctaactttcacccatttgcactttcattttctacaacacattgtctaaacatttctctccatggactattatttgctgtctagcaaggatgaagacgagttggaaacttctgttggtcagttgaggagtatgagttcacaatgacaggaaggacttcctgtcaatactgtggcctctctctcagatgcagtttcactacgtcgaagatgcttagatcctaggtcttcggaaggacacccaggaataaggccagccctcgctgcctaagctctgggtctcttctttcagcagcttctctccgtacccagccagttacatgggcccaagggacagatttccttcatcagcctttgatggacgcggctgatgcgtcagctccatagaggctgggctccctcttcgccgccctccatttctagcacactgcactgtctgtagacttgtgggaagaacttttcccgttttcaagctccacgctgcatcacaggaaatgacactgaccagattaagctacaaatacaagtctcgcagccagtctcaaagtctgtaaccccaataacattttttaggtaaataaaaattgttactgggtggtcttcccttctccaggaagcagagctgaggctggtaaagttcctgcctgagattttggccttgcaaagggatctagtgaagcagttccagaacgtccagcaagttgaatacagctccatcagaggcttcctcagcaagcacagctcaggtgtggctctgctctgacaggaccaggactgtcccgcatttggcggttcgaaaggatcactgcataggggaacagggtggggcggaggggaggaggcgctgatgggtgctctatagcctaagcccttaccatgcggtgaagggtgcttgaaccccaaaaacatattagaagctttcgccacagctgaaaagcacctccctctctagctcctcaaactcggctcactccttcaaacagcacctcagacatgcttgtgactgcacaaagcaggaaagatgggctctcggcagagcatgtaactagggtggtttggccctttcagggggttgctatcatacggttcttaccaagtattctgttcaacagatgggttgaggcagctgcttcacaacaggatcacagtctttctgtccacatggaacaaactgaggagatcgcttgagacgaacggttagtatcctgtcccctgtaccactaagcgttccaggagagcctcgtctgaaagctcttctcgtcagcctgactcggcccatccctgtcaacacccagcactgtgtttgtttgtttttgagatggagtcttgctctgtcgccaggctggagtgcagtggcaccatctcggctcactgcaacctctgcctcccggattcaagcaattctcctgcctcagcccctagtagagacagggtttcaccatgttgcccaggctggtctcaaactcccaagctcaggcaatccacccgcctcggcctcccaaagtgctaggattacaagcgggagccactgcgcccagccagcactgttaacgcttaacttgtgtctcttttgatggtggtgtctggataagtaaaataatgtgtcaggaaaataaaccctcagtactcttcagtccctaaatatggcatcaaaagggagctgaaagcatttgaaactctatcagcatatgagatggggcagaaccgagacccggctcccggctgtgtgtggagctgatggcttctgcatccctcctccccacgcctagattctgtgaggagttggaactcctctctgcttaagcataaccctgtcgtttaaaggtgagatcaacctacccaaagactactgcagcactgacttggatctggacactgagtttgagatcctcttgccacgccgacggggcctgggcctctgtgctaccgctctcgtcagctacttgattcgcctacacaatgaaattgtctacgccgtggaaaaactctccaaggaaaacaacaggtttgtgcacgagccaccaggaagtggtgcctgctcagcccagagtccctaagcccagtggggcagacacaagcaagcttcagccccttccctaacagacactcactccttcagccgcccccaccagtgacccgccccatacttgggtagggttttccactgctccaactgtgagaaatgggagcctgctccctgcaacatagagccctaggcccgcatgcctggcctggacgctgagcgctgtctttctgcccctcagctattccgtggatgccgccgaggtcactgaactgcatgtcatcagttatgaagtggagcgggacctgactccactgattctctccaactgccagtaccaggtggaggagggcagagagaccgtgcaggagttcgatctggagaagattcagcggcagatcgtcagccgcttcctccagggcaagccccggctgagcctcaaggtagggctgactcctgccactgctgctcatttggtgtgtctgttgtgaacaagcagcccttggtgtgtttctcgagagagggaagcagcacctcaccctgcagtctggtctgtatctcctccctcacacctgcagctcccgaggccaccacgccacctgtatctccgggccgcagggctctcctgagccctctcctgcagggccatctgcacctcagtcccccaaggaactgttgaggtctttttttgaaacagggtctcactctgtcaccgaggctgcagggcagtggtgccaagcctccacctctgggctcaagcgatcctctcacatcagcttcccaaatagctgagatcacaagtgtgcaccaccatgcccagctaatttgtgtattttttggtagagatggggcttcaccacgttgcccggctggtctcgaactcttgggatcaagggatccacccgcctaggcctcccaaagtgctgggattataggcgtgagccactgcacccagctgattgttgaggtcttgattctaccagttaatggcaccaccacccccacagcccctcttccttcagcctccatgggtaacctgccagcagatgccattagctgtgccttctgtgtgtcctcacctgactgccaaagcccaccctgtagttaaaagcatcctgtacgttggactgctagccactcctaactggtgcccacctccaggttcttcagtccacggcctaaaacccacatctggctctcttcatcctgtgccggatggacctgcctggcctctcatggcatatgggataaagccgacactctgttgtctggtatgggaggccctgtagctcggcccagcccaaccttccagccctgcctccagccacttagcccatttccctgaactgcatcccgtgacctcatgcactgaagccacacagcaggcactttcccatctctgttctttgactggacgcacttgttccttccagctgcagtcatatctactgtacttatgtacggtaccacccgcaactgggccaggaactgtgagagcccatggattttttttttttttttttttttttgagacggagtctcgctctgtcacccaggctggattgcagtggcgcaatctcagcttgctgcaagctccacctcccgggttcactcatgccattctcctgccgcagcctcccgagtagctgggactacaggcgcccgccaccatgcccggctaatttttttgtatttttagtagagacggggtttcaccatgttagccaggatggtctcgatctcttgacttcgtgatctgcccgtctctgcctcccaaaggctgtttttaattcattctcacagccatttcctctggcagagtgactgcctgtgcatggtctgtgcctttagtggctgaatgaataaatgaatgggatatgcacaaatacctgttgccctagcgcctcctgtggcgaagcaggccacgatgatgtgacaatatcttgtcatgtaattggctgtgaggactccgctggattcccggttgtgttactatttccatagatggtgggttaatgacggagaggggcgctcttagccaagggatacacagggcagcgcggcactacgctgcagttttccggctgcagattctgtttgtcatctgctggaaatgtccacgatggatttaattttaaaaaacttttttctttcccaatttagggaatacccactctggtgtacagacacgactggaactatgaacatctctttatggacatcaagaacaaaatggcacaggtgatcccgataaacctgatcctgtgcacggggctttctgccttctcagtgtgtttccctccgtgttaggcctactccagccttgccccgggtgtttgctgtgagcccacagtttctgcggcctcccttacagagagcaagcaagacagcaaatcagcaagttttcttgtagagtaaaagcagattgacatcttgtgggtttgattcttaggaatgatgttgatgcatggccatgcctgctgaagcgggaagtccatggaaccgatttgttcctgctctccgcatgcgggtactgataggtagacctgtgtgtctccatggcctccaggaactgcctgcacaccgtgcgcccaagtgtcagctgttagagagttggccccccgcatgtggcttgggcagtgaaggggctcggctctcttaccaggtggtgagatgccagaaacccagcccacagacatccctctcctgcttttcatttcccaggactccctccccagctcggtcattagtgccatcagtggacagctgcagtcctacagcgatgcctgtgaagtgctgtctgtcgtagaagtcactctggggtttctgagcacagctggtggggatccaaacatgcagctgaatgtgtatactcaagacatcctgcaaatgggtgatcagacgattcacgtgttaaaggtgggtctcacaccgaaaaggaaatcagcacagcccctcaccctggtctcctgcttcccgcgagggataggagcattcagggagtgccactctaggcgctcctgaaaaggatggggagacaagaacaactgctcacccagtcagtccagcataaacaggacacaccagggacagtagagacagacacgcgctagaaatgccagcagtctagatagagcccaaatgtgactgagtacatgaggcccctgcaaacagcgtgatgtgagcgggctgtgaggtgccgcaggagggaactggtagataggacagagatggccttcacaaggagggagatcacattagtacagggcagaacgaagagaagaatgcctgtgtggagagcactcaggctccctggtgcacgacatgagtgggggtgtgagacctcagcccccactcaggaattctattccttctgcaggccttaaacagatgccagttaaaacacaccattgccctctggcagttcctgtctgctcataagtctgaacagctgctgcggctgcacaaagtaagtctggtctcttcctctctgctggacagagggactgcgctcccttctccctgcaggctttaatgcttcatttgctcttccgtcgttttaggagccatttggggaaatcagttcaaggtacaaagcggatctgagcccggaaaatgctaagctcctcagcacattcctaaatcagactggcctagacgccttcctgctagagctgcacgaaatgataatcttgaaactaaagaacccccaaacccaaaccgaggagcgcttccgccctcagtggaggtatggatttgcacacctatggggcggggcagacacaatgttgtgctgtctctcctgtgatcttctatagacacaaaaatagttcttttcttaccacagaatcccatttcctgctttttgtcattaccagggcacctgaggactggctttttggttttaatctctactgggttttctttaagcaattacacaagtgtttttcagacaagagtcttgccctgttacccaggctggagtgcagtggagtaatctcaactcactgcaaccttggctcactgcaacctctgcctcccaggttcaagcgagtctcatgcctcagcttcccaaatagctgggactacaggcgtgtaccaccatgcctggctaatttttgtatttttagtagagacagagtttcactgtgttggccaggctggtctcgaactcctggcctgaaatgatctgcccgctttggcctctcaaagtgctagaatgaaaaggcgtgagccactacacccagcctaaaagtcatatattctaattttataacaagtagactatgtcaaagagaggtacattttaaatttgatagaaaaagctatcctaggccgggtgtggaggcttaccctgtaatcccagcactttgggaggccgaggtgggtggatcacctgaggtcaggagttcaagaccagcctggccaactggtgaaactctgtttctactaaaaatacaaaaattagccaggcatggtggtacacacctgcagtcccacctactcaggaggctgaggcaggagaattgctttaacctgggaggtggagattgcagtgagctgagatcgcaccactgcactccagcctgggcaacagagggagacttcatctcaaaaacaaacaaaaaaaagaatagaaaaagctataccaatgtataaagagtgtatgagaatactcaacattggatattatccatcttttacatagttgccaatctaaaggccaaaatggtatctcattttcagttgtatttccccatttaccgtgaggctgaacatgttttttatatttatcacccatttgtatatcatcctctgaattgcctttatgttttattttttgagaccgtgtctcactcccacccaagctggagtgcagtggcgcaatcttggcttagtgcaaccgctgccttctgggttcaatcgattctcctgccttagcctccctagtagctgggattacaggtgccaaccatcacgcccagctaattttttctattttagtacagagacggggtttctccacgtggccaggctggtctcgagctcctgacctcaagtgattcacaagctttggccaccacacccagcctaaattacctcttcgtatctttttcttttgcgctttgtctctgtaatggttgtgagagctctttgcatagaacaggggttcatcttctctgccgtgtgccacagtgctctatttcagcctttaattttatgaagtcaaatctgacagaattttcctataaagggtctctatacaaaaacacttactaggatcttccttatcccaggattataaactagccttttttttttttttttttttttttttttgagatggagtcttgctgtgtcatccaggctagagtgcaatggtgtcatcttagctcactgcaacctctgcctcctgggttcaagcgattctcctgcctcagcctcccgagtagctgggactacaggcatgcacctgcccggctaatttttttgtacttttagtagagacgggtttcaccatgttgaccaggctggtctcgatctcctgacctcaagtgatctgcccgtctcggcctcccaaagtgctaggattacaggcgtgagccactgcgcccggcctgtcctctctcttcttgtgctttcacatacttgttttattcaccagtttatgtttaggtgtaaagtaaggatttaacttgatgttttcctgactagatcatcaaactccagtcttcctcaccaatatgtttcctatttgctatcttcctccattatgctatgtggcatataccatatacatttatgttctttcaactttttcaacaagtctttactagcctgtgcttttcatgtagataaaaaagatccctttcctagagaatttccagtctttgttaatgtgaaacatgtaatagaatacaaggttttttgaatggtgaggccttgtttatgcaaccctgtaaataaacatcaccttgctagagggcctaaagtcatgtgaaggggccagcacagggcttgctccgtgggcttctgtcgtgtttgtgtactgcatgtgggaagcagcagtcaggcaccagagccttgaacccaggatgctagtcccagttcaggagctcaggtcattgaccttaaactgctcctcaggatttctgggttttttttttttctcgctctgtcgcccaggctggagtgcagtggtgcaatctcggctcactgcaagctccacctcctgggttcaagtgattttcctgcctcagcctcccgagtagctgggattacaggcacccaccgccatgcctggctaatttttgtatttttactagagacagggtttctccatgttggctaggctggtctcgaactcctgacttcaagtgatccacctgcctcagcctcccaaagtgctaggattataggcgtgagccactgcgcctggcctaggattttaagtcttaacgagcattttggttctgctgatgacaacgggaaaaagtaacatgaggggactgattggtccccttatgttatatgggagcctttttttttgagacaggatctcactgtggcccaggctggagtgcagttgtgcaatctcagctcgctgtagcctccacctcctggactcaagtggtcctcccacctcagcctcctgagtagcttcggactataggcatacaccaccacgtgcccagctaatttttgtatttttgctagagacagggtttcgccatgttgcccaggctggtcttgaactcctgacctccactgacccacccacctcagcctcccacagtgctgggcttacacacgtgagccacacagtgctgggcttacacacgtgagccaccatgctgaggagactgttttaaatgctctcttctttggtttttcagcctgagagacactctcgtaagttacatgcaaactaaagaaagtgaaattcttcctgaaatggcatctcagttcccagaagagatactgctcgccagctgtgtctcagtgtggaaaacagctgctgtgctgaaatggaatcgagaaatgagatagaattatttcctcagctatctttggatgactttggagagaagactcctctctcctcgtctgcggcgtggacttgatcatggactggtgcctttgcattcagaaggagagctgtcagcgtagcaccgaattcaagaccaaggcgtgctacctgagctgacagctttttgaaagccgagctgtttctgaaccatgtacatacatgttctgaaactttctcatcattttatgagtactgttcattgagagatgacaatgaagattagatgaaattggaaataaaccaacattgtttacattccaggagacttgtagctcagccacacacgcagtaatgacctgtgcccgttcgcctctggcactgcccacccctctttttttttttcttctaattctgtactcacaaaagagaatctcattttcttctttcttccattcccttaaattctgagtactgtacatatatttctgggttcccacgatgatgtgaaaaactaccagactgttttttgtcttctcacaaagacaagaaaaatcagggcattttgtgagtgccttaagatcaaactaacaagatctgaccctctcccctcacagtgagccactgccccacttcagagggtaagagccaaaagcctcattgtgaaaggcactggacttggaccagggacaccatcagggccttggttttctcacgcataaaatggagagtggattaatcgccaaagattcttctgatctgacattttgaaattgtgagagaaactagatgactgtaaacttggtcacaggcctggttctggcagttctttgcggacttttttctagcattatgccaaataaacatgcagtctcagtgtgctctcgcatgtatgaatatctagtcctttctgtggttctcagccaagacataaaaactaggactcagagcacatacaaaaccagttatgtttcggaaagagggaaaagagtccccgagcccggatcttgtgctgcttttctcactgacgtgttgccttttttctttacaaaatctgctttgatacttaggacctctctggactaatttctcttcctagacagctcagcacagctattgatatgttagaggcagtatccttaatattcattctaaatgagttaacgacttaacttgaaattgggcctaaggagtgagaactacaaaaatacaaaatgcttgtccaggactcagccatgcacaccttgagcagcgccggcaggaggcacggaaggaactgtgctccgttctcctcactgtcatggtgccaccagtgtctgatgaagggcagagtgacccagactgcaggcagtaactgacttcacacagtccctggcatttagtcatctgtgattgttttatcactctggactgtgcagagccacctgccaccgagatctgcattccgactgcctatgaacgggtgtgggggccgggggctggcttgctgaagtcttcaacttgcactcggagctcctttgatacctcagagctggctgtcaggtggcagctcacacccagactcactggccacacctcagcagggggggagtcgagtgtcagtctctttctgtgaaggctttttttttcctttggcctgggaatttttcccatttttatgaaggggttttaaattgtttcattttgtgtgctgtgcttcaaagccttaactgtcaaatcttgcattatcttgtttgtacagaaatatactggcctagcagaggcaaaaaaaaaaaaaatgaattttattttacttgtcacacctgtcttaataaactggagttttgctgctaaagaactcttctctctgggggcagagcttctatttatggcacatagacatcagctaggcttttgggaatcgtttgtgttctttgtggaaatgtcctttagaagcacccatgaagtagtgtgttcagactgtgcacacagaaaacaggctctgccttcacatgtgagacggtggacttttcctctggacaaaatgacagcatcctggcgactccacagtggagctgagcgccactccctgtagccgatctgggactgaaacgcttacacctctgcctcagaaggagtcccccatgccctgcctgaaatgacttcactggacacagcggggctgcagctaacggggtacaggtaggagctaactaacttcacccctgagtccacttgcggggtaagagataaacagtaacccttccaggagcccactgacgttggagtgctaaaaatgccccttcagggggaaaactgcattttctcttccaaaaaggaaaggttcttccaggcgagaaacctgtggtctagaaccacagcaagaagaggaggcatgctggcctgcaccggaagactcactttgtctgccctgcgccagcctcacctcaccctgcagttcccgtttccgccatggatgcctcatcaccaaccctgaccttccccctcccaaccctttattcatcctcactcccactcatacccgcctccctggacagttccctgctgcagagttctttctgctttcagccctaccttggtggtgatttacctgaaaatcttcacaactgatcattatctccttctctttgagacctgactgaaaaaattaggtgtgcacacctgtaatcccagctacctgggaggctgaggtatgaggattgcttgagcctgggagtttgaggctgcagtgagctatgattgcaccactgcactccaacctgggtgacagagtgagaccctgtctcaaaaaaaaataaaataaggaccttattgtgtgtgcaaattatttgcctttcatgaatagttatgagactttgtgcatgtgttaaccgagacggccctgagctatttcagttactcctgtatgttcaggcaattccaatttagaaacaaacttccagtgataaatattgggaagaaaatgtcagctcagggccaagtaggtaaagccacccaagtctagccatgcacacaggcactagtgtgctgaaggaaaacacctctgatttgatacataaagtgtgaaggttgcataactggggaggtggctggagaaaacctgagcctcgagctgagtaacaatccaagccatgattagcatttatattgcattctgcattattctcatcctatcacgttcattaagttcaaccattaccattacgaatcccgtttccagctggaaaaacaagcgccaggaaagtgcatttcccccccaccccccccccccaaccagagcaactttggtcagaagtcacacctaatcaccctctctgcaggatatgctggggatagcccttttgaggaggtgggggtgtatgcgaaagcaacctggggccaaagcagggggaagcaggagagactggaggggccctgggtccagcaagtgctccaccaggctgcccctgctcaggtgctccacagcccataaaaaacgccttcagccctgctgtgcttcccctcacacctaaacttactataagggtcctaccttccccagtattccttcatgatcactgctacctgtgccctgaagcgcaacagaacctcaacccagaggacagccacttcctcagaacccacgatctttgccccatcgccacaggtccatgagtgactcctaattaccaaatccaagggctccttcaccctgaccactctggaacccaacaaagctgacacacagcccagcccagacaggcctgaatgtgggtcctggctctcccatttgccagttctacagccatgggcaagtggctcgacctctctaagcttcagtttcctcgtctgtgaaatatctgtcagtgctcttaagggaggagaccaccccacatattgtcttacgcccaatttctgcctccaaagagagaagtaaaaactaaaaggcagaaatgaaatccacaagcagacagcctgcaccacaccctgggcctggtagttaaagatcgacgcctgacctaatcagtgatgctatctatagattacagacattatatagaaaagcaccgtgaaaatccctgtcctgttctgttccgttctaattacgggtgcatgcagcccccagtcacgtaccccctgcttgctcaatcaatcacgaccctctcacgcagaccccttaagagttgtgagcccttaaaagggacaggaattgctcactcggggagctcagttgttggagacatgagtcttgccgaagcgcccggctgaataaagcccttctttaactcgtgtctgaggggttttctctgcagcttgtcctgctacatttcttggttccctgaccaggaatctaggtgattaatggatggttgaggcagcccctcagacggcttaggcctgccctgtggagcatccctgtggaggactccagccagcttgagcgacatggatcctgagagcgctctcaggcaggcaattgccccagtggaatgcctggccagagcagtgtgtagcaggcccccgaggaggatcaacgcagtggctgaacaccgggaaggaactgccacttggagtccagacatctgaaacttggtaagactggtctttggaacttgcccactccatttgaggggaagcgtggcctgatcacccacggcgtgcctgtactggcactctggtttttgtttttgacttgacttggattgcttgatactttggttttggttttgacctgacttggatatcctgatactctgattttggttttgattttggtttggtgtaaactgtaaaagtgtgtgtgtgccctttttacctgttctttgttttgtggtatgcgtgtagggtgagcgtaatgttttgtcttgaagaagcatgggtcaagcacaaagtaagaccaccccactaggaactatgctgaaaaatttcaggaaaggatttaagggagactatggagtactatgacaccaggaaaacttaaaactttgtgtaagatagactggccagcattagaggtaggttggccatcagagtgaagcctggacaggtcccttgtttcaaaggtatggcacaaggtaacctgtaagccagggtacccacaccagttcccgtacacagacacttggttacagctggttttagactccccacccgcccgccccaacagtggttgagagaacagcagcataagtggctggcagaggcaaggaaagaccagcagagagagaaagaggaagagacagacaaagagggagtcagagagagagagagaaagagacagaggcaaaaggaaagtcaaagagaaagagacagaaaatcaagaggaaaaaaa

SEQ ID NO: 2 - DNA, 137919 bp, homo sapien
cagcgcgcggcaggcggcgagctcgggggccgcaggtgcgagcgggcctggagagtctcccggggcggggagcgggctaggatacagtgggccccgcgggccggcgggccgggtcccggggagcggcgcctgcgtccggatgcccctcccggccgcctcttcctgccggctccaagtttcggtttcgccgccggggtgcccggtccagccccgcccgcggcgcccactgaccctgttccccggctgcgggaggggtcggggtgggggcagcgggcacgcctgggaccccggcgacatccccggagcgcagagcgcggaggaggctttgcgccccggcagtgctgcccccgggaagtggccggggcacggggggtgtagtggaaggggacagccggacccgggcctgcaggtccgcccgggaatcctgcgcctgtacgaatggcaacaacggaaaagtgaagttgcaaaaacagactcctaacttttacgagggaggcatcgccccgtctgaaccgcaccgcgcagcgtccttccgacttggcgaagtcgcccgagcgcggggctcaaggccagggtgggcacccctcccggatggctgcctgcaagccggcgggccgggccctgggggagtccagggcgggaggggaaggagctgtgcaaacatggtggtggcccttccctgcccccaccttgttgactttggttgtggttgggggatgggctttgatttgggtggcagtgtctgtgcttgggaaaaaatgtcagagaaaagacaggaagcggattgaatgcaacagtgttgggtgcctggggctctctcttgtgtcttccggcccctagagcagatggaacaataagatgctttagggggccgggcgcagtggctaatgcctgtaatcccaaaactttgggaggccaaggcgggtgggtcacctgaggtcgggagttcgagaccagcctggccaacatgaaaccccgtttctactaaaaacacaaaaaattagccgggtgtggtggcgcatgcctgtaactccacctacttgggagactgaggcgggagaatcgctagagcccgggaggcggaggttgcagtgagctgagattgcccactgtactccagcctgggtgaaactgtcaaacaaacaaaaaatgctttttggaggatttttcgagttttctggtctgtggttccccagtgtagcattggagaaggaaacacttcgggtggaaagaaagaggcctgggcggtggggagtcattgaaggtgtttgagggagggagtgtccactggtggttgtttcaggtagagtgtggaggggaggaggtacggtgggagccagggcttggctgtggcaggggtaggggagttttaaactctccttctactctgaaggagagataattttagtctctggaataaaagggcagcagacctggagaaaagggatgcaaattgtcccatacacctattgggaacctcatcaaagagaagactgcagaagacagatgattgatgtttttatggcattgggacaggggcttggggctggagaggggaggtgtgcagggttgtcttgttgtgcagataatcactcaggtgatctcagagctgctctcagaggaactggcgaggccgcaggcactcctcttgtgtgtccctgggaccgttcctagatccctctaggcagataatggggcctcagagagagcttctgctccattctgctgtttcatggtgtggatttcctttatagccttttacaaaaggatagcttcccagaactcctgagtatgtggttgctctgaatagccatctcaaaattgaccacagaatctgttttggggtggcatagattagtctcccacacaggtcaagccagggaaccccacccagtgcctccgtccctcgttcaggcccagcctgagtgagcccaccccagtgggaggagagggcagggccagggcagggagggggcctgagtgtcctcctggctgctgaaggcaccagtcagctgccgctccagccactgccccagtggagttctttggttccaagccagcagaagaaggtggtgggtgggccagtgtgccctgaggcttcttactggggagggagagagtcaggtcctccactgttaggtggccaagcgcccaaacgccatctccactctcaccctggatgcaagaagtgaccccggaggcctgagtcctggccttggtctggtttgatgccatccaccgcagaggctgttctgagggcaggtggtcagtgcagagtggcgcgctttgtggatggcagcctccccccattactaggaatctgactgccagcccagtagccctgggctgcctgctcaggccccatcacctgtggggcaggtgctttagtccccttaagaggatgaggagggtgaggcatcagcaggctgagcgccttgctcagggcaggccgtgggaccctgccgaacagcacgtggctgccccacgcctgcctggagcatcccctatccccacccagcccaacccatgttctcagcagcagggatggttctaggctggctgaatgagggaccagggcagagactgcaaaagcttgagagccaagggggcagcacagagcggggaggggctgggcttgggctgtgctcctgttgggtttccattaaccaggggaccagctgggctgctgtgatttcactttcgcagaaaatgaaactgaagccgtggtcacgtgacaggacatgtagtatatagcaggctgccagcgactcctgctcttgcttctggatctgcagggcagtcccagcaggacccatggagtgtccttcgtgccagcatgtctccaaggaggaaacccccaagttctgcagccagtgcggagagaggctgcctcctgcagcccccatagcaggtgaggcccaggggtgctggtggaggctggggcagtggggacccctggagatgtctcacctcccttccaggaaatggaaaccctgggcagcaggcagctcaggtggggccgaggtcctctgtggctactgaggctctgtggctctgaatagccatctcaaaagtgaccacagagtctgttttggggtggcatagattagtctcccacacaggtcaagccaggggaccaccacccagtgcttccgtccctcgttcaggcccggcctgagtgagcccacccgagtgggaggagagggcagggccagggcagggagaggacaaaacaagaagttttgtcggggtctttgctggaggttcctgcttttgaaaattttcagtttcatttcctagagagagctcacggtttttcttccccttgggaatgagaagtgtcgggctgagctgagggcttcatagagagtttcagagaatgctgcagggaagcagagtttgaggctctgcaggggttgagagctctgcctgggttagtttttgaggggccgtgagggggccccaggacctgtccaggcacctccctggctcgggaggccagtggagagacaggagcggggcagtgtcaggcgggccttgcctgctgagcatcttgagtccattctcaattttgttggcttctggggcctcagactggttcccctcctcccgggttttaaacaccaaccctaaaactagcagcccccagaccttcagcctttctgtgtccaaagcccagccccacctccactggtgagggcacctcattcttccagctgcttctatcggacccatcaccccggggccctctccttcctccatgacccacatgcagagggccctgctggtctccccgcctccacgctgcatgctgccttcctgcttcctgctcagcacagcagacagtcaaaccacagacccccttacaagatccgcccctgcccccgctgtaactcaggacaagcaggagcccttacggtggccacgaggtcctacatagacggctgcccaccccattcctcttggctccctctcctgtccccagagcccaccaccttctggcccttcctggatacaccaggtgtgcttccaccgcagggcctttgcaccacccttccccagagggcggcctggctccctccttcccctctttcagtctttgcccagctgctcgccatggggtctctccgatgttgtccttcaagggtgtgagccccagtccttccatgtttgtttgtttttttttttttttttagagggagtttttttgttcttgttgctctggctagagagcagtggcgaaatctcagctcactgcaacctctgcctcccgggttcaagtgattcttctgcctcagcctcccaagtagctgggactactggtacccaccaccactcccggctaatttctgtatttttagtagagatggggtttcaccatgttggccaggctggttttgaactcctgacctcaggtgatccacccgcctcggcctcacaaagtgctgggattataggcgtgagccaccgcgcccagcctaagggctccacttctattaataatagtgcggagagcactggtagtgcgcagcatgaactgtttctagaggcatgcaaagcaaatgcacttgagactcctaattcaccacttgtaagaggccaggaatttggtgactctgtacatgatgcttttgaacatttatcgaaaaccaagaaatacagtgatgctggctggttgcccccagcgtcactgagaaagtggtgaaaaggatgaactcagggattcgatgtctgggctgcagctctgcataaatgatctgagagtttcttagtgtgccctggatcagaatcttctctcctgtagccacagggttgaaattgtagaaaatcgagcaccagctctcacgcgattagctgagttaaaatgaaagctgagcttccaggcatgcagggcgtctgctgttaaagtgggggcacttaagccggatgccgtggttcacacctacaaccccagcatgtttgcaggccaaggtgggaggatcacttgagcctaggagtttgagaccagcctgggcaatgtagaaagactccatctctgtattacaagaaaaaaaaagtgaggacattgggtggcaaaggaagggatccttcaagttgggatggggacatgggaagcccatggccaggctggagacattgagttccaaatgatataaagttgagtcaggttgagtttagtagtgtgggcccactagcagagattatgcatttcatgttgcagctggtagagttaggaaggcctctgagtctttgtttggttggctgaaacatggatcaaaaggtggcccaccttactaggcgtggtggttcacgcctgtaatcccagcactttgggaggccgaggtgagtagatcgcttgagcccaggagttcgagagcagcctaagcaacatggtggagccccatctctacaaaaaaaaaaaagaaaaaaaaatacaagaattagctggagcaggaggatcacttgagcctgggaagtcgaggctgcagtaagccatgattgtcccactgcactccagcctgggtgacagagtgagaccctgtcttagaagaaaagaaaaggaaaaaaaaagccttacagtggtctctcagtgctcaaatgaaaagtctcttgcctctcactttattttttaaaattttatttcattgttttgagacagagtcttgctctgtcacccaggctggagtgcagtggtgccatttcagctcactgcaacctttacctcccaggttcaagtgatgttcctgcctcagcctcccaagtagcggggattacaggcgtgaggcaccaccctcagctattttttatatttttagtagagacggcgtttcaccatgttggccaggttggtatcaaactcctgacctcaagtgatgcgcccaccttggcctctcaaagtgctgggattacaggtgtgagccacccaccgcacctggcctcatgtctctcactttaaatcaagagttagacatgattaagcttcttgaggaaggcatgttgaaagctgagataggctgatagctaggcctcttgcaccaaatggttagccaagttgtaaatgcaaaggaaaagtttttgaaagaaattaaaagtgcccccagcactttgggaggctgaggtaggtggatcacctgaggtcaggagtttgagaccagcctggccaacgtggtgaaaccccgtctctactaaaaatgcaaaaattagctgggtgtggtggctcatgcctgtaatcccagcttcttgggaggctgaggcacaagaattgcttgaacccaggagacggaggttgcagtgagctgagattgtgccactgcactccagcctgggtgacaacagcgagactctgtctcaaaaaaaaaaaagaaaaaaaagagaccatcctggccaatatggtgaaaacccatgtctactaaaaatacaaaaattagctaggcatggtggcgtgtacctgtagtcccagctactcgggaggctgaggcaggagagaatcacttgaacccaggaggtggaggttgcagtgagccgagatcacgccactgcactccagcctggcgacagagcgagactccatcccaaaaaagaaaaaaagtgctactccaatgaacacacaaatgattagagagtgaaacagccttattgtgatatggagagagtttgcaatgtctggagaggtcaaaccagtcacaacattcccttaaaccacagccgaatccacagtaaagccctaactctcctgtagccacaattccacacaggctgacagagttgaggaggctgcagagaagatcttgaagctagcagagactggtttatgaggttttaggaaagcagtcatctccataacataaaagtgcaaggtgaagcagcgagtgctgctggagaagctgcagtaagttctccagatctggctaaggttattgatggaggtggctctactcaacagcagattttcttttctttttttttttttgagacagggtcttggtctgtctcccaggctggagtgcagtggctggtcctcagctcactgcaacctccgcctcccaggttcaagcaattctcctgcctcagcctcccaagtagctgggattacaggtgtgtgccaccacttccggctaatattgtattttttattagagatagggtttctccatattagcattgctggtctccaactccttgacctcaagtgatccccctgcctctgcctcccaaagtaccggggctataggcatgaaccattgcacctggccaattttattcttttttaaggccgagtagtgttccattatgtatatgtaccacattttcttcaacgtccattgttggatagttggtggattccatatcttggctattgtgaatcgtgctacagtgagcatgggtgtgcatggcaggattgctggagcccaggaggtcaacgctgcagtgagccgtgatcataccactgcactccagcctgggtcgacagtgagaccctgtctcagaaaaaaaaaaaaaaaaaaaaaaaaaggcagtactgcatccccggagggactgcagggattagtgccaccaccaagcactccaaagatgcaggggtggggattcccattcacctcccctatttggcctttgtggaagacgggtggatcttgggaatgaaaatgaatgatcgtaagcttaatcaaatggtgatttctcagcctccatagtcgtgtgagccaattctcctaatacatcctctctcatccatctgtttgtccatccatccatccatccatccatccgtttatctgtctatctatctgtcatctgtcttctatcaattatccatccatccattcatccatgtacctatccatccatcttatctatctatcctatctatccatctatctataagtctgtattagggttctctaaagggacagaactaataggatctatgtctgtaagaaagggagtgtattatggagaattggctcacacaatcacaaggtgaagtcccatggtaggccgtctgcaagctgggaaagaaagaagccagtagttgctcagtctgagtccaaaagcctcaaaagcagggaagccgacagtgtagccttcagtctgtggctgaagacccgagatccccctggcaaaccactggcgtaagtccaagtttccaaaggccaaagaacctgaagtgtgatgtccaagggcaagaggaacgtgaggaagcatccagcataggaggaagatgaaagccagaagactcagcgagccagcttaccccaccttctgcctgctttgttctagccacgctggcagctgactggatgctgcccacccacatagagggtgggtcttcctctcccaggccattgactcaaatgtcagtctcctctgacaacaccctcacagacacaaccagaacaatactttaccaactacctaggcatccttcaacccaatcaaattgacacctgatattaaccatcacaccgtctatccatccctctaccctatctgtccacctaccctatctatctatccacctatccatctgtcctatcatctatccatccatccatccattcatctattctatctatccatccatctattcatccatccattcatctattctatctatccatccatccattcatctattctatctatccatccatcctctttctattcatccattcatctatccatctattctatctgtccatccatctatactatctatccgtccatcctatctgtttatctatcatctgtctatccattcatctagcttatctatctattcatccatcaatctatccatccatccattcatctgttctatctatgtatctatcttatgtatctatccattcatctatcccatcttatctatccatcccatcttatctatccatccgtccatccatccatgtatctacctatctacctgtctacctacctacctacatattctatagttctgctctctggataaccctgttctatactgtgagtatttaatgagttaacatgtacattgtttaggaagtgctagttaagtatgtctcttatttctgaatccagctacttacttttatgacaataaaaatgtaaatgctggttggcaaatgacccacatgttacaggaggacataaaatagcacgaagtttcctcaccctgggccaggactgtcacattccccagagcaacactgtaaactggtgtgtcctcttctagacatctcctctgcgtgaatgtgtgcgcacacacacacacgttaatgtgagtggcagctcgtgccctgcgcatgccttgctactttcatgtacagtggctgaggcctctagtggaggacggacctcagcagcctccctggctctgccacccagcagggcctgactcagcaacaggcctatcctgggcacttcccttgtcctgctgttttgccgtgacataggctgctaggctgcatgcttgcacggagaccttgccctctgagccaggctggccgtctggaggacagattcccagccactagcctgctggcttcaggctggcacatttacaatgcaaatctcttcaaatcccctgcacaaagcttctctggccactcactggccgcgtctctgtgctccctgccttctagatttctattcagattctctccagcgttcagaatgatggatcttgtcaatctgtgccggtcgttgggtggaaatggcactgcagggcctccgttctgatttccttcatcagtaggcatggcaggcatctctttggaagttaagagaccacatgtatgtgtatttccttgagcggcctgtctgtctttagggaagctcgttttgctttggttggtccttatgattgttgggactgtttatactgggaacagcctgaaacccagctctcctaggcttgctcagcaagagaaacgtgctgggtcaccgttgcccaagtccaggcttgaggggttcaagtgtactagggctttgctccatttctctgatcctgacagctctgcccttctccactgccagctttgtctgcaggtggaggagaacagacagtggtttcccagcaccacctcatggtctttccaggatgcactgagtggcagaaaccccagtaagggtccagaagtatggatgcttccatacttcttgctggttggcccttcccttagtcaatcactagtgccagggtaaatatcggccctgattggattaggctagtcagggcccgcccctggtgggagggtaggttggtgggagggtaggttggtgggaggggcaggctcagaatccctggttgtaggtgaaacagcagctctcgaaggatggggccttgggtcgcctgttgcagatctttctccagctcttactttctggctgtgatgtttcatgtgtgtcttatgtatgtagacgtttagaggatttgttatcaattttgagtcctgctaaggaacttcacgaattcttgagctcttggctacgccaacactgagtactcaaagggaaaaaggtctgcgtggtccctgccctccagatctcagaggaggagagggcagtgacgaaaccaggtgctggaaacgggcgtggggatgaagtgtccagacaggggcgcagctgggactggcttggggccttggagaagggtctgtggggatcaggcagagggaaggttctgtacagaaaagcaggcttggcctggcaccatctggagtgtgtgtcagggagaggtggggtcgtccagacccaggattgaaaacagggactccttgaagggtgttttcgtccattttctgttgccataagagtacccgagcctgggtaattgaaaaagaaaaggccgggtgtggtggctcaagcctgtaatcccagcactttgggaggccgaggtgggcggatcacgaggtcaggagttcaagaccagcctgaccaacatggtgaaaccccgtctctactaaaaatacaaaaaaaattagctgggtgtggtggcgcatgcctgtaatcccagctactccagaggctgaggcaggagaatcacttgaacccaggaggtggaggttgcagtgagccgagattgcaccactgcactccagcctgggtgacagagcgagactccgtctcaaaaaagaagaaaaaagaaaagaggccgggtggggtggctcacacctgtaatcccagcactttgagagggcaagacgggtggatcatgaggtcaggagttcaagaccatcctggccaagatgctgaaacccctgtctctactaaaaacacaaaaattagccgggtgtggtggcatgcacctgtaatcccagctacttgggaggccgaggcaggagaattgcttgaacctgggaggcagaggttgcagtgagccaagattgtgcctctgcactccagcctgggcgacagagcaagactctgtctcaaaaaaaataataaaataaaataaaaaaagaaaaagaaaaaagaggtttatttagctcacagttctgcagactgagaagttcagggcctggccctgatgtctggtgagggcttttgtgccacatggcagagtaggccgacggggatgctgacagctgtgaaagactaagcctgatgggacatcttgacttcataacaacccacctggcgggtgctaatccattcccgaggggagtaaacaagcctctcaagagtaaacccatgaccgcaaacggcaccaagccattcgtgagggatttgccctcacgacccacagacctccccgcagccctgcctcccagcactggcatactggggatcaacatgagttttggtggggatggacaaagtgcgtccacaccacaatgaaggctagagtgagtgtggggctggcagagtgggtgctccatgctgtctgcatggcagctctgcatgggtgagaatctggaggcagagcagctgggcgggcagatgccttagtgccaggacaagggaagcagtttgagacccctgggccgccactgggagaatgcccaccctggggaagacaggaggaatgtctacagtaggggaggaaagcgtaacaggctctgttttagaggtgcccgaggtgcgctgacatcctagtacagagtcaggtgaatccactcgtggacattgggaggaagaggctggatgctaggacggcacagtctttctgtctgattcaccccttgttgtgctgaaactggggtccctggttccctcctacccacctggagcagaacccctaccctgctcatgttagcaggcccaatgcaggacctcggagggagaacagggtgaatctctccatgcactcgtggggaggatttctgtttttccttcctaacactcgcttctctctgagatctgacccttccttcatctgccgttacagattctgagaacaataactccacaatggcgtcggcctcggagggtgaaatggagtgtgggcaggagctgaaggaggaagggggcccgtgcttgttcccgggctcagacagttggcaagaaaaccccgaggagccctgttccaaagcctcctggaccgtccaagaagtgagtgcactgcctcggctcccctccgcccccgctcactctgcccaggaaaatctcactgcacagctgcccagctagcccccgaaaatgccaccatggcccagcccattgaacctgcccacagggcagcagcagagctgccccttctgcacctgattcatctctggctggagtctgtgggttccagaccccctggggcctccaccgtctttttttttttttttttttttttgagacagagtttcgctcttgttgcccaggctggagtgcagtggtgcgatctcggctcgctgcagcctccacctcctggtttcaagcaattctcctgcctcagcctcccaagtagctgggactacaggcatgcaccaccacgaccagctaatttttttgtatttagtagagacggggtttcaccatgttggtcaggttggtctcaaactcctgacctcaggagatccacccacctcggcctcccaaagtgctgggattacaggtgtgagccaccgcgcccggcctccaccttccttttctttctaccagacccaatactcgtgtgtctcccagaagctgtggctggggtggggcctgagcttctgccgtgtgtatctgtgtcccaagcttctgtgggtctctttgcattgagggtgcaagctcagaggtgccttgctgcttcggggcagggacctgagcgtccgctgggtgcgtgtcttgcgcttctgtaggcctctgcattgagggtgcgtgcccagaggggctttgaagctttgggtgtggggtgggtgctctggaaatgtgctggctggcaggttacccttcttggaagggtatggctgagccaccttttggctccctctggccttgaacagcctcttaggcgttagacaccaagagaatgcgtccttgttaagattcccagttggagcactaggcgaggctttcgaggggagcgtcctggacatgttcaaggagaatggttggaagagaagggctcctgggctctagcgcggcctgggaagacccagagggcagtgtcagctcccgggtttcttgctgggcacggagaaggggaagctgtctttctgtgtctgcactggggctggctttctgtctgtcgttccttgtaggtggcactccatggttgggctatggtgggaagtgatgcagccgcagtgctgtggtctgtggggggtgagtggggtgagtgtggggggtgagtggggtgtctgtggggggtgtggggtgagtgtgtggggtgagtggggtgagtgtggggggtgagtggggtgtctggggggggtgagtggggtgagtgtggggggtgagtggggtgtctgtggggggtgagtggggtgagtgtggggtgtgagtggggtgtctgtgggggatgagtggggtgagtggggggtgaggggggtgtctgtggggggtgagtggggggtgagtggggtgtgtgttggggggtgtgtgagtggtgtgaatgggatgtgtgtgtgttgggggtgtgtgagtggggtgtgagtggggtgtgtgtgttgggtgtgtgagtggggggtgtgtgtgttggggtgtgtgtgttggatgtgtgtgtatgtgttggggtatgtgagttggtgtgtgagtggggtgtgtgtgtgttgggggtgtgtgttggtgtgtgagttgggggtgtgtgagtggggtgtgttgggtgtgtgtgtgttgggtgtgtgcgtgttgggtgtgtgtgagtggtgtgtgtgtgttgggagtgtgtgtggggtgagtgggatgtgtgtgtatgttggggtgtgtgggagtggggtgtgtgtgtgcttgtgtcattcccttggagaataatcccttccagagcagccaaggccacccccaagcctggagcacatgggatgcggaaggtttgggtaactccctttttatgcctaatttggaactctgtcagagtgggaaagtggcagtacggatggtgttccttgaaaacattgaaggcaaatgaataaaccctttgccatctggggcaaacaataaacccgcccaaagacagaggaaaagctaagaattgagttacttgggggaataaaattttgaaaagtttccatgaataatgaggaatctagaaagccacacaaatgctcgagcaggacgcactcgaaaaagacctgagaagacctcagtgcaggctggaaggaaggctgagtgtgggaggagtgtcccaactcagggccagtctacagagactgagagagtattattttttctttattttattttatttttttttgagatggagtctcactcctttgcccaggctggagtgcagtggcgccatctcagctcaactgcaacctttgcctcccaggttcaagtgattgtcctacttcagcctccggagtagctgggactacaggcacccgccaccacgcctggctaattttttgtatttttggtagagacggggtttcaccatgttggccaggatggtctcgatctcctgaccttgtgatccacccgcctcggcctcccagaatgttgggattacaggcgtgagccaccatgcctggccagtttttttttttcttttttcttttccatgttttggctgtaggtgtttaaggaaatctctatcaaactactaattggcaacaagccaaaggaacatagactttatttatttatttatttatttattttttgttttatttatttatttatttatttttgagatggagtttcgctcctgttgccaagctagggtgcaatggcgtgaccttggctcacagcaacctccacctcccgggttcaagcgattctcctgcctcagcctcccagctagctgggattacaggcatgcaccaccatgtctggctaattttgtatttttagtagagacggggtttctccatgttggtcaggctggtcttgaactcctgacttcaggtgctctgcccacctcagcctcccaaagtgctgggattacgggcgtgagccaccacgcctgccctattttttatttattttttaatgttttaaatttttttactagtggaaatctgcttgaatttgtaaaatgtagagttgacacagaagatgtgaaaagaatgaagacattttctagggaatcttgaacaagagaaaaccgacatgaacaagagaacaataaaagaggccaggcgcggtggctcactgggtgactgtgagatccttcctcaaagagagagagagagaaggaaggaaggaaagacaataggaaatgttgatgaggatgtggagaaattggaagtgttgtacagtgttggtggaaatgttaaacgctgcagccgttaaggaagcagcaaggcagttgatccaaaagttacgcataaaattatcctaggccgggcgcggtggctcacacctgtcatcccagcactttgggaggctgaggtgggtggatcacgaggtcaggagattgtgaacatcctggccaacatggtgaaaccccgtctctactaaaaatacaaaaaaaaaaattagctgggcgtggtggcgtatgcctgtaatcccagctacttgggcggctgaggcaggagaatcacttgaacccgggagggggaggtttcagtgagccgagatcgcaccactgcactccagcctggcaacagagcgagactcactctcaaaacaaagcaaacaaaccaaaaaaaaaacaaaaaaagaatacgatatggatctgtgctgtagcctggatggaccccaaaaacatgctaaatgaaagaagccagatacaagaggccatgtatgattcctttgatatgaaatatccacgatagactcacccatggagacagaacacagattagtggttggctgggaggagtggggaggagggagtcattgctgtgggatttctttctgggatgaagaaaatgggaactagggccaggcccggtggcttctcacctgtaatcccagcacattgggaggctgaggcgggtggatcacttgaggtcaggagttcaagaccaacctgaccaacatggggaaaccccgtctctactaaaaatacaaaaagtagccgggtgtggtggtgcttgcctgtaatcccagctactcaggaggttgaggcaggagaattgcttgaacctaggaggcagaggttgcagtgagccgagattgagacaccgcactccagcctgggcgacagtgagactctgtctcaaaaaaaaaaaaaaaaaaaaaagcctaaatatccacatatccacacatgagagaagttcagagtgaatacacaggtgaatgccgatgggttgtctctggtgatgagtttacaggggcttttgcgcattttcccaatcccacagggagcctattgaattctgaagctgagagcagtgtatgcgtgaacggtgctctaagcgcagacgccgcattctaaccatggtgaggagggtgctaggagccaagggaggcggccccagaagctgagacagcgagctgcgtggccagcctcaccctgcagcagagtcaggtggtcagtcctcacctgcagtcatggggtgggtggagagggaaagggcgcacagagaggggcccgcgcctgtcccttggcacagccatcctccacttggcctctcctttggtggccgctggttgctgactaacagggtgtcctttgtgcattcttcctctggagaggctactgggcttggctgctgggttgtacttcctgtggtgagggaagaggagactgccggagccaggggtcatttgggttggaggcatcggcaggccaggaggctgctggtggagcttcctttcctcagcttcctgctgggcgtcttgctgtgaggtctcccggcgatgcccggtgtggtgtggaagggaggtgtcggatgagcatgcccgctacagggccagactgcccgcctccgcctctaggggcttgggaggcctggcctggctggccctggggtgcccgggcctgcctataccttctgggtcggtctctgcagtgcatctgtgctctgagcacaagccaaggcattcgtgtggaggcccggggcgccgggagcctggtagggtgctgggagcttggcagggtgccgtgagcctggcagggtgccgcctctggtgtgggcagttctcctcttacgtggacttgtcctgcacgtctgcaggagctgcttcttcgtcttcccacaccctcctgcccatgggccctggaggcagacggtgctgggaagctggtcagtgcccacatgtgggtgtccctgcctgggccttcccaagaggaggtggcccctgaggtggggtctttgcgagtctactggagctgtgcgtggggtgcacagccctgccctgtctgaagggggtcgtgtttcaacagggagctacatcagaggttttggtagatgctgctgtagacctcatatccgatgaatgggaagctgctaatgccatacccagcaagagaaggaagcaggatgcagccccgcttgaggccgccagcgtgccttctgcagactgtgagcaggtagtccgagtcaatagtttgggcagaatgctccctgccctggtgcatgctggcacagcctggcacggccacctcgcacttccggcccttgagtccctgccagtcgaggaaggctgcccaggatgggcgttttcgggtcacccttgggctgtgaaagagcaacgctgattcaggcttggctcttgtgactctgaggatgttttgctagtggtgaatttcagctttattgtgcttgcccttctggcccacatccttccacttgcctttttactccgtgcagctgtccccttggacacctggagaaacttaacctggctgcactcacctggctaaagctccaccagcaacacaggcttcaccacagagagcagcaggggagcccaagggggcttagagggccaggcccaggcaggtgggggcccgacccagcctctgcctgaacacaaggtcttggatggcgctcgccacgtgggggtgtagtggaagccctgctcagtttagtctctggtttttggaagttgaaatcctgactttttctctttttcttttctttctttctttcttttttttttgagacagagtctcgctctgtcgcccaagctggagtgcagtggcacgatctcagttcactgcaacctccgcgtgcagggttcaagcgattctcctgcctcaccctcctgagtagctgggattacaggcacctgccaccacgcccggctactttttttgtgtatttttagtagagacggggtttcaccatgttggccaggctggtctcgaactcctggcctcaaatgatccacccatcttggccttccaaaatgctgggattacagacgtgagccactgtgcctgccccaaatcctgactttttctatagcatttaggagtattacaggactcactaataatatcaaaaatgaaattaggtaacacatgtaatgaaaggacttttgcttttggggaaaagcaagggagcttcataccttgaagagtgatgcttgtgaagtttattacttttttgcagagggcgacggcctccctgccttccccgcaccgcgctccccccagcccctgcccatcgagatggtcatgtgttcattgaacggagacttaccgagcatccaccacgcctaggtcttaagtgtaggcagaagccttcaaggcaggcatgctctttcctctgtgggctggggcttggccgtgagcccactcctgcagctcctgggaaatgcaggcagcgtccacacggggctggacttagccagacctaaggcacagtgtgggtggagagctcattcacaatagcaacaaaaatgtgagaaggaacttgtaaaataaaggatggattcataggccatgcgaggagaagaaggctcgggctcagcagacagtgaagtccgtggagaggtgggcccttccccagagagaacatggaaggtttagcactgcagagatgtctgctgtcacccagaatgacacgggaacttaaccaactaattaatgtataacagtagtatagctctgaatgggtttggtgggttttgtttttgtttgttttgaggcagggtctcgccctgggtcccaggctggagcgcagtggcaaaatcatagctcactgcagccttgacttcctgggctcaagcaatcctcgtgcctcagcctcccgagtagctgggactacaggcgtgcaccaccacacccaattaatttttaaaatttttggtagagatggggtcttgctgtgttacccacgctggtctcaaactcctgggctcaagcaattctcccgccccagcctcccaaagtgcagggattacaggcataaaccaccaccctagcctcgttttgtatttttggaagttgacagattttaaactataaattggtgaggatacttaacagatgtgaggaggagaaatggatgggagatttatagtaaagctgtcaacgtacacgggtggaaacattcccacggagtaacagaggcgcgacctggggatgcgcacggagcatgagatgtgagctggagttagggcactgcatatgcggaccggagcgtgttggtcagggtgtatacacgggtgtggaaagtggggtgtctagaccatgggctcagcatttgggtaaaacacacacactccactcaccccagtcacacacaccccccgccacacataccccactcacacataccccactcacaccactcacacacacccccacaccccactcacaccactcacacacacccccacacataccctccacacacacataccccactcacaccactcacacacacccccacacacaccccactcacacacacctcaacacacataccccactcacaccactcacactcccccccacacacataccctccacacacacataccccactcacaccactcacacacgcccccacacacacaccccactcacacacacctcaacacacacacacaccccactcacaccacttacacacccccaagacaaacaccccattcacaccactcacacaccctgcaacatacaccccactcacaacactcacacaccccccaacatacatacaccccactcacacacacaccccaacacacacatgccccactcataccactcacacaccccccaagacaaacgccccactcacaccactcacacactgccaacacacacagccaactcacaccactcacacacacccccaacacacactccccactcaccccactcacacacaccccaacatacgcaagtcccactcacacccatctcatactcacactgaaacacacagtggtcccttgttgcccacagggggtcggttccaggaccgcggaggacgccaaaatccaaggatgcccagtcccagatatgaaacggcgtggcattggtacataacccacagcatccgcctgtacacttaattttttattttttttattttttgagacggattctctctcttttgcccaggctggagtgcaatggcgtgatctcggctccctgcaacctccgcctcctgggttcaagcgagtcccctgcctcagcctcccgagcagctgggactataggcgcctgccaccacacctggctaatttttgtatttttagtagagatggggttttgccatgttggctaggctggtttcaagctcctgacctcaaggaatccgcctgccttgacctcccaaagtattgggataacaggcctgagccactgaggccggcccccgacaccatgcactttaattcatctctagattccttaccacaggcatctgtatgacatagatgctgtatgaacagttgctacacggtgcggtgttgctctttgtgttctttgttattgttgtctcgttattttctgttttcttccccagtattttctgtctgtggttggctgaatctgtggctgcagagggccgactgtataccagcttgattcaatattttatttttattttttatttattattgttattattttttgagatggagtctcactctgtcgcccaggccggagtgcagtggcacaatctcggctcactgcaagctccgcctcccaggttcacgccattctcctgcctcagcctcccgagtagctgggactacaggcgcccaccaccacgcccagccaatttttttgtatttttgtagagatggggtttcaccgtgttagccaggatggtctggatctcctgaccttgtgatccacccgcctcggtctcccaaagtgctgggattacaggcgtgagccactgcacccggcctattattactatttttcaaggcagagtgttgctctgtctcccaggctggagtgcagtggtgcaatcttggctcactgcaacctctgcctcctaggttcaagtgatttctcctgcctcagcctctagagtagctgggattacaggtgtgtgccaccacgcctggctaatttttgtatttttagtagagatggggtttccccatgttggccaggctggtctcgaactcctgacctcaggtgatccgcccgcctcgttctctcaaagtgctgggattacaggtgtgagccaccacgcctggcctgattcaatattttaatgtaaaacagcatcctaaaagctctagaaaatgtagggggatatttataaaattatgtaaatacttctaagcctcaccccccgtaaaattataaataccgctatggttatgtagttcgagattctgggtcaaagaagactatgaaactgttcaatggaaaagcagacagcaggaggcactggcagcacagggcgcctaccagggcactcggccagtcctcaccgagaagtaagtggtccctaactcagggccaggtggcagttcacacgggaagagctgagggggtgagcctggggctgctgctccgaggtgtcagccctgcaggtgtgatgatgtcagatggttggttttgtttctattgaaaagaggttctgggatggcggcttgagggcagtggtcttccaggaactggatcacggtccctccaagggtctctcctgcagttgcgtctgcgcttactgcagtctttccacagccccgtgttgtgggcagagggagtgaggccaggcctggctcctgcctccagcctccccgggctctgcccaacctccgtgtgctgctgctgctgtttcttcctggctggccactcccctcctgcaaggcaggccctggggaggggtgctggcagctgttcctaaggtctgagccctttgctacatcaaggaaagaagcggtagggggcctgcatcttccatgctggtgggaggtggggggtggtcaggggcctgcctcagtgggctcctcctgttccgggctgtgactcggcggtccagagcctcaggattctccgtctatttctgccagagcctgattatgtcatcgaagctgctagagcatccatgaccttggcttattttcaactttcataattagggaaaaacttaatttgaggtttgattattttaaccattagaaatctttgggtaatggccaggcacagtggctcacacctgtaatcacagcactttgggaggccgaggtgggtggatcacctgaggtcaggagttcaagactagctggccaacatggtgaaaccccatctgtactaaaaatatgaaaattacggccgggcacagtagctcacgcctggaatcccagcactttgggaggccgaggcgggtggatcacctgaggtcagttcaagaccagcctggccaacatggtgaaaccccatctgtacaaaaatacaaaaaaaaaaaaattagccgggcatgatggcaggtgcctgtaatcccagctacttgggaggctgaggcaggataatcacctgagctggggaggcggaggttgcaatgggctcagatcatgccattgcactccagcctgggcaacaagagtgaaacttcgtctcaaaaaaaacaaaaacaaaaacaaaacaaaaatagctgggcgtggtggcatgtgcctgtaatcccagctactcaggaggctgaggcaggagaatggcatgaacccgggaaacagaggttgcagtgagctgagattgtgccactgcactccagcctgggtgacagagtgagactccatctcaaaaaaagaaaaaaaaaaaagcctttgaattgcaaataatggaaagcccagctccacctttctaatcccattgaggaagtttattatggacacacctgatgagccccgagcctgtaggtgaggcttggtgcaggcgtctccggccctgtctactctgccttccggacggctcccccactgagcctctcatcagctgtttcccgttactccctcgtgccacacagtggcttcccctgtgatccacctgctactctgtccttcaggggacaagacagcgcctcctctggtgattgattcctctggagagaggaagcgcttcctcaaatctcattggctctgattggctcacaggccaatcccccagtgggtccctatggccaggatgatagacatcagtggttgacaccagcccacgcacaagagctgcccttggggctagagtaaggctgatgttactcaaaccatgcagccgataacagggagagccaagggaccattccccaggatgggccatccagcgctgtcaccaggtggccacaaacacctgctgtgtgtggacagtgaccatgaccacagcatcactgatgggggccttgcgtgtaccaggcagtgtcctacaactctccgtgtgctttgtcccatttggtcaccctcagtgatgctctgatgtggacacatctgctgtctccactttaaagatggggaaactgaggcccacggtggctcagtgacccacctggggttgcccagccattgtagcatggggtgagctggatgggaactcaggcaggccctctaaacccagcccagacgccactgcatggcagccccggaggtaccaggcagctggccgggcagggacggcgtcatcgcctctccgaggggaggctgtcttcagggctgggaccccacctgccaggtctcctcagcacactgaggacgatgggtgcctgcagtgaagggttgtgcagcacctgcctgtttcttgacggcctcttgcttccccctctcagcaggtcccccggcagctgaccagcctgtcattcagaggctgatacctgctgatgacgccactctacagtgctgggccccagccccagactcttcttctgcagctgcttctgcagttgcttttttttttttgtgagatggagtcttgctctattgctcaggctggagtgcagttgcgtaatatcggctgaccgcagcctctgcctcccgggttcaagcaattctcctgcttcagcctcccaagtagctgggattgcaggtgcctgccaccacgcccagctaattttttgtgtttttagtagagatggggaggatctcaccatgttggccaggctggtggcgaactcctgacctccagtgatccgcctgcctcggcctcccaaagtgctaggattacaggcctgagccaccgcacctgacctattgttttatttttgagatggagtctcactctgtcgcccaggctggagtgcagtggccagatctcagtgaggccctgttttagagtcagcctgcgctgggagtgagtctcctctgtccacacccaaacgcaccaagtgtgccatttcagcagtggtgcttgctccctggaatgggaccaggtgctctcagcggtgtggtgggttggtggcctggggttggtgtcggacgcaggccggtgttggacgcaggccgagcgggaggctggagccaagctgtggcctggggagatgttatgggtcggagggtcggggggtgggggcgcctcctgtgctttgtgtacactgagcatgggtttcctctgaatttaaaaaggaggagaaaatcggaatttctggccctggttctggcaggaagtgtggccatgtgtgatagagaaggggttgcagtgtcggcctggcctcctggaagccctgggatgcagccctgtccagctgcggcctcgtcatgccctgggtgggtgggaacgcagcctcctccttgggccacacaggggccgaccgtcagccgaggggctcctgaagtggcagtgatgggatcctgtggcgcttcctcatccccttgttaccagttgctgaggagagggtggattagcccctgggctgcacctcagtgtgtgcaggtcttcccaggtatgtgggtgcaggaggtggggggcgtggagtgggcacaggttcacacctgctgcctggcagtttggggccctcatcacacaccaccaggtttcaggggatctacaagtcactttcctgtactgacctgatccacacgcacccctgagtactgccccctgggagatgcctgtggggtcccagggtcctggcagcctcctcccaccagccgcagtcctggttccaaaatggggaccgtacacctgaacctggatgtgcctttgagcctggctgtgcctgctgagggtgcggtgggagctgctactcattttttagtctcatccttctcatttcaaattttatgtacgaaatatttttatagaggtgcataaaacgtggaaagcctgtgtgtgctttctaatgttcaaaaccaggccaggcacggtggctcacgcgtgtaatcccacactttgggaggccaagatgggaggattgcctgagcctaggtgttggagaccagcctgagcaacatgggagactctgcctctacagagcattttttaaaaccagctgggaatggtggttcgcgcctgtaatcccaggaccttgggaggccgagatgggcagattgcctgagcctgagatttcaaaaccagcttgggcaacatggtgaaaccccgtttctacaaaaaacaaaccaacaaaaaattagctgggcgtagtgatgctcacctatagtctcagctactcaagaggttgatgggggaggatcacttgagcccaggaggtcaaggctacagtgagctgggtttgcaccctgcactccatcctgggcgacagagggagaccttgtctcaaataaataaataaatacaaatccatctcagtggatgtccaataagcagtgagcccgtgtgagggtctcagcccggccgtgaccgtgccgagtgtggcgagcgcttcaaggccacttgccccgaccctgcccaccccccacttttgtttcttaatttcattctttccaggaaattgcagatttaacagatgttaggtactttggtcgagccaagcttgatgtagttgaggaacggaagagaaagttggagggaaacacgggctagagtagagtaaatctaagaaataaagtgagtgtctctctttctgtttagagcaaaaagaagaaaaggaagaagaaaaagaaggggaacaagtccgcttcctcagagctggcttccttgcccctttctcctgccagcccctgtcacctgactttgctttcaaacccgtggcctcaggacacagccctgccccacagccaagcccagcagagtggccccactggccagccgagccagcccccaggcacagccaccacgccactggagggtgacggcctctccgcgcccaccgaggttggcgacagccccctgcaggcccaggctttgggagaggcaggagtggccacaggaagtgaggctcagagcagcccgcaattccaggaccacacggaaggggaggaccaggacgcttccatcccctctgggggcagaggcctgtcccaggaggggaccggtccccccacctctgctggtgaaggccattctaggactgaagatgctgcccaggagctcctgttgcctgagtcaaaaggaggcagctctgagcccgggacagaactgcagaccaccgagcaacaggcaggggcctcagcctctatggtgagtcatccgggagagatggcctgggagtggcactgagccctcggcacctgggctctgctgcaaggtgctggcgttgcttccctgccggggggaggggcgtcctctgggccctgctccctgggtgggagtcggagggctgcccctccactggggatgccagcccaccctgtccctcggcttgtggcagatgctgccccttaaaccattgagtcggagtcaccctggcccattttgtcaccttggctctggtgtttggggtctttcaggcagttgatgctgtagctgagccagccaatgcagttaaaggggccgggaaggaaatgaaagagaagacccagagaatgaaacagccaccagcaaccactcctcctttcaaaacacactgccaggtgcgtctccttcctgcctgccggctccaggaggccctctcctgcccacggctgcgcctctttcatttaattattcagcaaatatttaagtgctggggatatagccatgattcagacaaagctctggccttcggggtgctcacattccagcggagagagagtcaggaaaccgacttcagcggtgagaagagcgtggagggagggagagagggcacccaggtgggccccgaggtaccatggcacccacagcccgagtggccgggcgaggcctctcttaggaggtggtgagggatggtccccggaggtgtctgggaaggtcatgtgcagaggccctggggcagtgtggggtgggcctgttcccagagcggcagggacgccagtgcccccaggaggagttgggggaggagaggccaccaatgaggctggagagaggcgcctctggaggctgtgattagtggccccagcggcactggaaggtcccgagcggggaagggtcgtgaacattctggccgctgtaagaagcatcccctgtaggggtcaatgtggaggctgggccaggcgcggtagctcacacctataatcccagcactttgggaagcccaggcgggtgcatcacctgagttcaggagttcaagaccagcctggccaacatggtgaaaccccgtctctactaaaaatacaaaaattagccagccgtggtggcatgtgcctgtaatcccagctactcgggaggctgtcgcaggagaattgcttgagcctgggaggcggaggttgcagtgagctgagatcgcagtactgcactccagccttggtaataagagcgagactctgtctcagaaaaaaaaaaaaaaaagaaaatgtggaggccggccttcaaggtcagggtttggttccttgttccaggaagctgagaccaagaccaaggacgagatggctgctgctgaagaaaaagtcggtaagaatgaacaaggggagcctgaagacctcaagaagccagaggggaagaacagaagtgcagctgctgtgaaaaacgagaaggagcaaaaaaaccaggaagcagatgtccaggaagtgaaggcaaggtagggatgcccccgcaggggagcaaaggagaccctgcctgagagcccggcacaccctctccctgcacaactctcaggggatatccaggctgcccttctagtcagctgttttggcaagtttaactttgggggaaaaggggaccacttaggaggtggaggggggtgggcacctgtgccagtttcttgtttcctaatagcccctggggtcctggagccagcgtgggcctttgggaactcaggagaggggctgttctggcccagacacctgctggtgcctcccgccactgtccccagcacttcagaggtgggcagggagtggccacctcttcttcctccattttggaggcagtgaagagagacctccatggggggtggtgtgtcacacgtggacgtgcttgcatgtttgctagggtgtgataatgtgcattacgaacacaaggaccatgtgcctgtgtgtgtgcatgtgggtgtgtgcgtgtgcgttcacgtgtgtgtgcgcacgtgtgtgcgtgtgcatgtatgtgtgcgtgtgtgagtgcgtgcacgtgtgtgcgtgtacgtgtgcttgtgtgtgtgcgtgtgtgcgagtgtgcgcgtgtgtgcatgtgtgtgtgcgagtgcatgtgtgtgtgcacgtgtgtgtgcgcacgtgtgtgtgtgcgcgtgtgtgcatgcacatggcaggtggacagatctcacgggaatcagatttctgttttggttttccaccagcacgctgagcccgggtggaggagtcaccgtgttcttccacgccatcatctctcttcatttcccattcaatcctgacctccataaagtcttcatcagaggaggagaagaatttggggagtcaaaatgggacagcaatatctgtgagctgcactacaccaggtgagcgtgtctgtaggcttgggaggaatccctcagggaaggcataggatgcccagcctgtgacacgtagtttaaaaaaattttgttttttttttttctgagacggagtcttgctgtgtcacccaggctggagtgtggtggcaccatctcagctcactgcagcctccgcctcctgggttcaagcgattctcatgcctcagctcccaagtagctgggactacaggtgtgtaccaccacgcctggctaatttttgtatttttagtagagacggagtttctactaaatgctggctaggctagtctcaaactcctgacctcaggtgatccgcccgcctaggcctcccaaagtgctgggattacaggcatgagccactgcgcccagcctttaaataatttttatccagtgagttgatgacattcttcgggttctggaagatgaatatttcagacagctcttcctggccatgcattttggtgtcatattccatcatggacctttttctttttaaaagtattctttctttctttcttataatttttttttttttttttagagaggggatcttgctctgttgcctaggctggagtgcaatcatgactcactgcagcctcaatctcctgggccatcatgcccagctttgtttatctgagacagagtcttgctctgtcacccaggctggagtgcagtggtgggatcacaggtcaatgcagccttgacctcctggactcaagaagtcctcccgcctcagcctcccatggtgttgggatttcaggcatgggccactgaacccagccttgccacatcaacttatagctttgcactccatgctacgtttgagaataactaaaatttccggggtaggaattttggatagccaaccgtatcctgttcattcacagagacttgggtcatgaccgcgttcttgttgaaggcattgtctgcatttccaagaagcacctagataaatacattccttacaagtacgtcatttataatggggaatcttttgagtatgagttcatttacaagcaccagcagaagaagggcgagtacgtcaaccgctgtctgttcataaaatcttcacttctgggctcaggaggtaagtcgtggcagcaggctgtctgctcacccctccggagtgcaggtgccaatcccgcggtactggacgcgtctctctggagagcacagactttgcctgggcagtgaggtcctctttgctctgcattgaccccgccccagcctccaggttcagtgacactgactctgggttgtgtctctggttggttaaagatgtgttggcttctcctttgagctcagtgtgacttacctactcacttgcaggaggaaacatgcaaaggactttttgtttgtttgttttctgagacagagtctgtcgctcaggctggagtacagtggtgcgatctcggctcactgcaacctccgcctcccagggtcaagcagttctcctgtctcagcctcccgagtagctgggattacaggagcctgtcaccacccccagctaacttttgtatttttagagagacagggtttcaccatgttggaccttgacctcaggtgatctgccctcctcgacctcccgaagtgttgggattacaggtgtaagccactatgcccagccagaaaggatttttaattaagggaaaggagagaaaacgaagccagaagaagggctgcggctgggaacagaggggcagcaaaggcctgggagctgggtcagggacaagtgcagtgaccaggaggccactgggacttgtcccttctctagagattttcagatggttgactggagatgacatccagagccccgtctgcaggctcctgctggctgtcatcctcagcacatcagcccctctgcccatctgtcaatagacgcgggcgcttcccttctcgcagagccctctgcgccccttcatgcctctctcgggggtcccccacctgggttctctgtctgcaaacttgacagacagagatcaagacttgactgtgttgatcacctggactcccagtgccgcctcctcacctggggggtcctgggcttcccctcgctccccctccctgcacagtgaccctgaaactcaaggaagtgagctggggtcaactggttgttgctttcccttggcaaccagggcctccctgccccctggtgtccggtgtcttggaaacagttgttttactgtttatgttgttcatgtgttgttttaggcagatacagaagaatgtaaatttagtccctgtcactccaccttggacaaagacagaagtcctaagaactttatagagtatatattttttcgtttttgtaaacatatatatatattttttttctgagacaggatctcgctctgtcacccaagctggagtgcagtggcacgatctcggctcactacagcctcaaccaccagggctcagctgatcctccccctcagcccccccaagtagctgggcctacaggcgtgtgtcaccatgtctggcaaatttttcatatattttttttggagagactggtcttgctgtgttgcccagtctggtctcgaactcctgggctcaagcaatccgcccatcttggcctcccaaagtgctgggattaagacgtgagccactgtgcccagccaaacatgatttttactagctagagagtgtactctgagaacataagctttgaaagaataggcattagtccggtaattccatatataaatacatttaaatatggaattctatatatataaatatggaattcctgctctgataaatgccatggcattgatggctcggttaaaagggcacgtggtggctgggcgtggtggctcacgcctgtaatcccagcattttgggaggccgaggcgggcggatcacgaggtcaggagatcaagaccatcctggctaacacggtgaaaccccgtctctactaaaaatacaaaaaaattggccgggcgtcttggcagcgggcgcctgtagtcccagctactcgggaggctgaggcaggagaatggcgtgaacccgggaggcggagcttgcagtgagccaagatcgtgccactgcactccagcctgggcgacagagggagactcagtctaaaaaaaaaaaaacatgtgataggggatttgacctggaggtcggcagaagcttccacaaggaggtgatgaccgagttgagaactaaacagttgcaggccctgctgggcccagggtgcagagctggggtgggcgggcctgccagtctagacaactgtgggtcgaaagcatggcagggggctgaggaggcctgtccgggcgcttcccatttctgcctgatttttacttctgtttgtaggtcttcacgtggcctctgaccctgtcattgacatcttgggttttctaattattttacagtcaacctcactgggttttctgcaatgaggtctgcactcatatcgtttgcaatggagcctaagaacagtcacgaattcagcccttgccctgtgtcagccaccatgccaagggccatctgtgccagctgggcagcctgcaccttcctccaggggctgtgtcccgttcctagtacagaggaaaccaactcagtgattgaccaggacagtgctcacttgctagtggggggatgcggtttctgtatgacacattccacctccttgtgatgatgtttaaggaagttgttgatcaagtttgctgagctacatagttagagatccgttgcaagtctcaggcccgctgcatcccatgaccctgggctttccactcattactgtgggacgtctaggatgtctgtttgcacggggctggcctcagatgagaagtcagttggaggagtctggctgtcgtcagtgtgtgggtttttgcttttcccttcctcccttcctctgccccatttactccatatctgtaccagtcgtgatcagccttctaggctagtgtctaggtctccagggttttgatggtcttaggtaggctcttgttccttctgtccctcttagactggcatcagtactatgacatagtttatatgaagcctcatgggagactccagaaagtcatgaaccacatcacagacgggccgaggaaggacctggtgaaggggaagcagattgccgctgcgctcatgctggacagcaccttcagcatcctgcagacctgggacaccatcaacctgaacagcttcttcacccagttcgagcagttttgctttgtcctgcaacagcctatgatttatgaaggacaggcacagctgtggaccgatttgcagtacagggagaaagaggtatcaggcttgccaccagctgctctacctgctgggcaggagccacacctgacctgctagtggccggatgaccccttgactctgtgggccaggttgcaaatgggaatgtgtagaactttccagccttttctcctaccactgtctcttgggatttctctgccctcccccattttcctccttttactggttgtaatctcagccccaccccagcaccagtcctgagtcctcccctggccttggagggagagtggaaggaacggggcaccctctgtcactgcacctttacccacactgcggtgcagcctgggtgggtttcaggccggcctggagctgtttctgagctgaagctgagccctgatgagcctcaggggccctgcctgagccctcatgccagggtcttggctgcactgcagctcctcctgtggctctcacaggtgtggtggtggggcacggatggggtctgctgccctagctgtggtgctggggcagctctggacactgccggtgaattcaagtccatggttcatgcatcttcctcttctcccaccatcaggtgaagagatacctgtggcaacatctgaaaaaacacgtggtaccattgccggacggaaaaagcacggactttttgcctgtggactgcccagtgaggagtaaactgaaaacaggcctgattgtcctttttgtagtggaaaaaattgagcttttattagaaggcagcctggactggttgtgtcacctcctaacctcagatgccagctcaccagatgagtttcaccgtgacctaagccacatccttgggatacctcagaggtattattattttttgtcaaaatgttttttatagctattataatgattttctctgattgcaaaaataagtgcttgactagagtgactgaaagcacacaggcaagaaataaaaccacccgtgattttaccactcactgtggtcatgtcagtagtttttcctagcatctgtcttatttttattatattctgtcctctgttgaattccctgccttttgttttccccccagacggcgtctcactctgtggcccaggctggagtacagtggcgcaatcttggctcactgcagcctccacctcccaggtttaggcaattctcctgcttcagcctccttagtagcagggactacaggtgcacactaccacacatggctaatttttgtatttttagtagagaagggttttcaccattttggccaggctggtttcgaactcctgacctcaagtgatccacccacctcggcctcccaaagtgctaggattgtaggcgtgagccaccgtgctgggtctgaataccctgctttttgaagcttcgtgtggtatcatgagcagcctctgtgtgcgcgtgtttaggaggttgtggcgtgacgccagcctgaactcatcccctcaaggacatctgcagaagcagcgtgaatgttctccccatgcccctgcctgtgccgtgtctagttcaggaaacacagtgtgactgtcctgggcctgaaatgttcagtggtgagaaggcgatggcctttgacttggtacctgctcagaccccactgagctctgcactctctctgcgtgtgttgatttgaacgtgagaatgacattaggtagcctttcctgaccagcatgtcttatcacgacatctgcctctcagttttacacatttatttatttgttgttttgagacagtgtcttactctgttcccccagtctggagtgcagtggagcaatcagctcactgcagcttcagcctcacagactcaggtggttctcccacctcagcctcctgagtagctgggactgcagatacacaccaccacttccagctaatttttgtatttattgtagagacggggtttcaccatgttgccacggtggtcttgagctcctgaccttgtgatccgcctgcctcgacctcccaaagtgctgggattatagacatgagccactgtgcctggcctggttttacaaataaaaaacaaccaaataaacgccgcacattttgacaaagaggaggagtggaggcaaaggcaatgtacagagttagtgccggggcttaaagtatgaggaatcattaatatcttttgactgtaggagattcaccatgtattgtttataggctcaacccttacgtttaaaaagttgttttggggccgggcacggtggctcacgcctgtaatcccagcactttgggaggtcgaggcaggcggatcacaaggtcaggagttcgagaccagcctgaccaacatggtgaaacactgtctctactaaaaatacaaaatttagccgggcgtggtggtgcatgcctgtaatcccagctactcaggaggctgaggcaggagaatcacgtgaacccaggaggcggaggttgcagtgagccgagattgtgccactgcactccagcctgggcgacacagtgagacttcatctcaaaaaaaaaaaaaagttgttttggccgggcattatggctcacacctgtaatcccagtgctttgggaggctgaggcaggagggattgcttgagccaggagttcaggatcagtctgggaaacaaaaattaaaataaaaaatagagccggccaacacagtgaaaccctgtctctacaaaaaatacaaaaaactagccaggcatggtggcgggcacctgtagtcccagctactcgggaggctgaggcaggagaatggcgtgaacccgagaggcagagcttgcagtgagccaagatcgtgccactgcgctccagcctgggcaacagagtgagactccgtctcaaaaaaaaaaaaaaaaaaatgtagctagctgggtgtggtggtgcacctgtaattccagcactggagaggctgaggcaggaggatcccttgagcccaagagttcgaggttataatgatcgcaccaccgcgctgccttgatgacagagtgagactctgtctctaaacaatgaaaataaattttacaagttgctttatatttagatttactgttgccagatggcctgggttcaaaccccagctctgtcagtcaggaccctgcgttgactacttagccaggacccctgcttctgagatccctcccctgtcctgggagtttgttgtggggattcggtgagggcctgcaaaggagctgacgccctaggctgggggctgagggaagccctgtctcctgcgtgagttaaactctgctcagccacgcgcggtgctcctcttgctctgtgtgcacggtgcttgcttcctgttgggactccagactcccagggagatgactccctggccagctcagctcactgcgggatctttattcccttccagctggcggctgtacctggtgaacctgtgccaaagatgcatggacacaaggacgtacacctggctgggcgccctgcctgtcctgcactgctgtatggagctggccccgcggcacaaggatgcctggagacagcctgaggacacctgggccgctctggagggactctccttctcaccgttccgggaacaaatgctagatacgtaagtcgtagagttgtgcttatctacatgaatctgggaagactgactcctacattgtgcacccggagtcccggtgggctctgcagtgactccattcctgattctaatgacagaactaacacacgctcttttaacattttaagacatcaaaactgtcaagaataggctgtgcacagtggctcacgcctgtaatcccagcactttgggaggctgagacgggtggatcacctgaggtcaggagttcgagaccagcctggccaacatggtgaaaacccgtctgtacgaaaaataccaaaaaaaaaaaaaaaaaattagccaggtgtggtggcatgtgcttgtaatcccagctactctggaggctgaggtaggagaatcactagaacccgggaggtggaggttgcagtgagctgggatcatgctactgcactgtagcttgggcgacagagcgagactctgtctaaaacaaacaaacaaaaaactatcaagaatacagaaacaacttgtaacctcagaggcagccgttgttagcacggtggcatacctatttgtggttttgtccaaatatggattcgtgggtgttttatgtacttaaaagaacaacaacaaatgatgtgttatttattctggtttacaacctgatttttcctcttaacagtattttgtgaaccattttttccatcagcaaattcttgtctatgtcttagcgttccagccagagagagtgccagccttgtattgagccagttctctgttacaggacatttggttggttgtgcagtttcgttttttcagcgtgctttcataagcatccttagctttctctgtcccataacttcattgagatagattcctacaagtggaactgctaggtcaaaggcattgtgaactctaaaccatttatacctttgcataatgctggcttaaaggagaggaatattggcaatatatataatcctgatctctgattcaaatataatgacctctcctttatcacaagaaaatattaccagagaaagtttatttatttatttatttatttatttatttatttttaacttctaagttcaggagtacatgtgcaggtttgttatatagataaacttgtgttatggagtttttttgtacagattatttcatcatccaaatattaagcctagtacccattagctatttttcctgatcctctccctcttcccatcctccaccctctgataagccccagtgtgtgttgttcccctctatgtgtccctgtgttctcatcatttagctcccacttacaagtgagaacctgcggtatttggttctcgttcctgagttaatttgctaaggataatggcctccagctccatctatgttcctgcaaaggacatgatttcattcttttttatggctgcatagtattccatggtgtgtatgtaccacattttctttatccagtctactgttgatgggcattgagtttgattccatgtctttgctattgtgaattgtgcttcaatgaacatacatgggcatgtttctttataatagaacgatttatattgtttttggtatatacccagtaatgggattgctgcggtgaatggtatttgtggaattgccacactgtcttccgtaatggttgaactaatttacactcccaccaacagtgcataagcattcctttttctccgcaacctcaccagcatctgttatttttttaccttttaatagcagccattctgactggtgttaagatggtatctcactgttttttttttttaagagacagagtctggctctgtcacccaggctggagtgcagtggtgtgatctcagctcactgcagcctctgcctcctcggcacaagcgattctgctgggattggtagtgtgcgccaccacatgtggctaatttttgtctttttagtagagacagggttgcaccatgttggccaggctgttcttcaactcctgacctcaagtgatccacctgcctcggcctcccaaagttctaggattgcaggcatgagccaccacgcctggcctcattgtggtttttgttttgttttgtttgagatggagtttcgctttatcacccaggctggattgcagtggcacaatctcagctcactgtaacctctgcctcccaggttcaagtgattgtcctgcctcagtcttctgggtagctgggaccacaggcaccccaccatgcctggctaatttttgtatttttagtagagatggggtttcaccatgttggccaggctggtctcaaaccccagacctcaagtgatccgcccaccttggcctcccaaagtgctgggattgcatgtgtgagccaccatgcccggcctcattgtgattttgatttgcatttctctaatgatgagtgatgttgagctttttttcatatgcctgttagccacatgtatgtcttcttgtgaaaagtgtctgttcatgtcctttgcccactttttaatgaggttgcttgtttttttttcttgtaaatttgtgtatgttccttatagatgctggatattacacctttgtcagatgcatattttgcaaaaattttctcccattctgtgggtcatctgtttactctgttgatagtttcttttgctgtgcaaaagctcctcagtttaattagttcttatttgtcaatttttgcttttcttgtgattgcttttggtatttttgtcgtgaaatctttgcccattcctatgtctagaatggtattgcctaggtctgggcaaagattggagaaaaattatggagaagtccttaaaagcacaggcgacaaaagtaaagtgagataaatgggattacatcaaatcaaaaagcttctgtgcagcaaaggaaactatcaacagagtgaagagacagtccacggaatgggagaaaatatttgtcatctacacgttggatagggggatttaaggaactcaaacaagtgaacagaaaaactcagatctaaaaatggacaaatgagttgagtagtcatctaaaaagaagacacacaaataaccaacaggcatatgaaaaaatgatcagcatcattaattagggaaatgcaaatcaaaaccacaatgagatatggtcttacccaagttagaatagctgtgatcaaaaagacaaaaaataaatgccagtgaggatgtgggaaagagaaactctcatacagtgtaggaatgtaaattagtactgccactatggaggacagtataaaggttcctgaagaaactaaaaatagaactactgtatgatccagcaatcgtactgctggggatatatccaaagtaaaggaaatcagtatgttgaagagatagctgcactcctatatttatcgtaacactcaatagccataatatggaatcatcctgagtgtccacccgcagatgagtggatgaagaaagtgttgtctatatacacagtagaatactatttggccaccaaaaagaatgaaattctgtctttcgcagcaacatggacaagcttggaggagattacgttaagtgaaataagccaggcgcagaaagagaaatactgcatattcccactcatacgtggatgtgaaaagagttgatcttctagaaggagagagtagaatagtagttacgagaggcgaggaaggatggggagagggctagccaaaggttggctagtggatacaaaagtatggctagataggacgagtaagttctagggtcctagagcagtatggaacgactgtaatttacaatttattacgtttttcaaatagctggaagagtggagtttgaatgtttccaacacaaagaaataaatgtttgagatagatatgctaattaccctgatttgtacacattatacactgtatgcatatatattgtatccatatatttgtacagattacagactgtatactttgtacatagtatacattgtagacatatttatatgtatatacagtgcataaaatgtattctctgtatgcatttgtatacattatgtattgtatacatatatagaaatataacactgttccccataaatatgtacaattattatgtgtcagtttaaaaataataaaagcagctgggcttggtggctcatgcctataatcccagtactttgggaggcccaggcaggaggattgtttgaggccaggagttcaagaccagtctgggcacatagtaaaacccagtttctacaaaaaaacaaacaaaaaaaatagttaggcatggtggggtgtacctgcagtcccagctacttgggaggcttacatgagaggatcgcttgagccagggaggtcaaggctgcagtggtagaagtccagattccctagaagttgaaataaaagcatctttattttcagattcttgacaggtaaccacaaactttctctttaagtataatctctctgaaatactgaatactgggttatttaatagaacagtcataatgaccacagattaacccttctaagcaaaatagattaatttattttggccttgaaatggtctttctcttattaatgtgctagaatgtattcattcattcactggatgaatacttgaagagcaccttccttgtgccaggaagtactactcaaggcacagcgtgtacagcactgctcaaaacagacagctgctcctggccttgtggagcttgcattctagctggagaggcaggcagttaatacatcagtaagtcctattgatgagagagctctggaaattcctccttcccctagcctggaggctcaggccacagaatctgctaaggtctgaaggtagggtaggagaacagaggtaatgactgcagcactctgggccttgcagtgagaacaagacagtgaccatccaattgggaaaggggctggagaactgaaagagacgccccctcataaagcatgatgctcagagcctgccaaatgccaaagactggggacagcagaaaaaatgaggcagttgctctgtgcccctggatcccaacttctgctaaaggcagtgttacggtcttgcctttagaaggcgtaaaagcctttggaaaccaattctattccttttcttttttcttttcttttcttttttttttttttttgagacagtcctgctctgtcgcccaggctggagtacagtggcgcgatctctggtcactgcaaccttcgcctcccaggttcaagtgattcttgtgcctcagcctcccaagtagctgggactacaggtgcatgtcatcacacatcacatgtggctaatttttgtatttttagtggagatgggttttgccatgttggccaggctggtcttgaactcctggcctcaagtgatctgcccgcctcagccttccaaagtgctgggattacaggcgtgagccacccactgtgcctggccagccgttgggaaccaattctaattaaagctacaacaaagctgtagttcatctaaactattaactcagcccctgataacagaagaggccactagatgatcaagagagaaaacagtcaatatagtcagacccatggatggtccatatttacctagaaaggctagatatagtagaaatatagagtaccttttattattattgctatttttatgtacttatctttaaatatcttgaaaagtctgcagtagcattgttcctaaagatccaatcgttcaggtaaaagtggcctttagtatgcagtgaacctttattgatatgtttttcataacttctgttacttctagggagccttgctttatttcttttccattgtcaacattttgggtctccagtactgtgttccagaatcagcattatttaagggccttcgctgagcccacttgggctgtttgatcctggacactcgttaataataattaagaggcttggctgggtgcagtggctcacacctgtaatcccagcactttgggaggccaaggcaggtggatcacaaggtcaggagatcgagacaagcctggctaacacagtgaaaccccatctctactaaaaatacaaaaaatgagccgggcgtggtggcaggcgcctgtagtcacagctactggggaggctgaggcaggagaatggcgtgagcctggtaggcagagcttgcagtgagccgagatcacaccactgcactccagccaaggcaacagagtgagactccaacacaaataaataaataaataaataataataataataattaagaggcttaattattggggtatatcccttttattgtaaaatatacataatctccagtttaccatgttaactccttttcaaggcacagttccctggcaccaagcacattcacactgctgtgtagccgtcagcaccatccacctcccgaactcagcttccccagctgaaactccatccccatgaaacacgacctccacactccccctcctcctggtaaccactgttctcctctctgtctctaggattttgacttctctggggacctcacgtgagtggaatcacacaggatttgtccttttgtgtctgatttatttcactgagcataatgtcaagattcatccatctcaatgaattctttttgtgtatttatttatttatttgtagagatggaatcttgctatgttgcccaggttggtctcaaactgctggcctcaagctatccatcctcctgctttggcctcccaagttgtggggattacagacatgagccactgcacccagcagtgaactttttttttttttgagacagttttggtctcattgcctatgctggagtacaatggcacgatcttggctcaccgcaacctctgcctcctgggttcaagtgattctcctgcctcagcctcccaagtagctgggattacaggtgtgcgccaccacgcctggctaatttaggatttttagtagagacgggatttctccatgttggtcaggctggtcttgaactcccaacctcaggtgatctgcctgcctcggcctcccaaagtgctgggattacagacgtgagccactgcgcccggcctgattttattactattttttaatattactgctccttgtagaacagggctaccccataggagcatgcccagaatggccagcagtgaattcttattccgtattctgaattctatattaagttaattctccttttttctttccttttttttttttgagacagagtctcactctgttgcccaggctggagtgcagtggcgtgatctcggctcactgcaatctctgccgccggggctcaagtgattcttctgcctcagcctcctgagtagctgggattacaggattacaggcatgtgccaccatgcctggctgatttttgtatttttagtagagacgcagtttcaccgtgttggccaggctggttgcaaacttctaacctcaactgatccacctgcctcagcctcccaaagtgctgggattcaggcgtgagccaccacgcccggccattaagttaattctcagtaggttgttctgtacttttcatttgattcactgcatatttttgttttccacatagcctttattttattttttaaagtagagacagggcctcactaggttccccaggctggtttcaagctcctgggctcaagtgatcctcccgagtcagcctcccaagtattgggattcaggtgtgagccaccacgcctgccctcaagtagtatttaaatcatttttgaattcgggactgtttctgtccctccagcattggtttcctccattttccctcactgatctcactgcgtctcttttctccgtccctatttctcttatgcaggagttccctacttcagtttatgagagagaagcagcatttgctgagcatagacgagcctctcttccggtcctggtttagtctgctacctctgagtcacctggttatgtatatggaaaacttcattgagcacctgggtcgttttcctgctcatatcctggactgtctttcagggatttactaccggcttccgggacttgagcaagtcttgaatacgcaggtttgtgtctgaagtcggctctggagtcctggcttagcaaaagcagactagataactaaacatggaaagctcaggattcttattcctaaaaaacagacagtgggctgggtgcggtggctcacgcctgaatcccagcactttgggaggccgaggcgggcagatcacgaggtcaggagatcgagaccatcctggctaacacagtgaaaccccgtctctactaaaaatacaaaaaaattagctgggcgtggtggtgggtacctgtagtcccagctactcaggaggctgaggcaggagaatggtgtgaacccgggaggcggagcttgcagtgagccgagatcacgccgctgcactccagcctgggtgacagagcgagactccatctcaaaaaaaaaaaaaaaaagaaggcgtctcatgtgatgcacttcgtagctgccattcttcctttcacattttttggtggagaaaatggtataagtttaaatcctgagttttatctgtaaaagaggtaagattagtatgtgagcaccttaaaatttgtttgtaggaagaaaacaatgtataccatattgatgttggatttttttcagctctgttttagcaatgacagtggcattgtgattcaatcttttgtcctgtttttctttttttctctgccttaggatgttcaggatgttcagaacgttcagaacattttagaaatgctgttgcgactcctggacacttaccgggacaagtaagtggaaagcacgatgcagtctctccctcacatgcggcccccgggggcttcctctgacccctataattggccgtgacccacatgtgctgttgtaacagcaaggtcataaattaatatgtggcccacttctcttctcaggttattaatattgtcgtctgtttttttttttttttttttgagtcagagtcttactctgttgcccaggctggagtgcagtgacgcaatcttagctcactacaacttctatctcctggttcaagtgattctcctgtctcagcctcccgagtagctgggattacaggcgcaccccaccacgcccagctaatttttgtgtgttggtttgtttgtttgtttgtttttttgagatggagtctcactcttgttgcccaagctggagtgcaatggcaccatcttggctcactgcaacctctgcttcccaggttcaagtgattctccttcctcagcctcctgagtagctgggattacaggcgcatgccaccacgcctggctaatttttgtatttttagtagagatggggtttcaccatgttggccaggctggtcttgaacttctgacctcaggtgatccgcctgtctgggcctcccaaagtgctgggattacaggcgtgagccaccatgcctggccgtctgttttttttttttttttttttttaaagggaaataatagatatcagctgctaagatttgggtttatctccccctgatcttttttcctatacatttttcccttacttgtaaatagtcatgatactgcatatgcctggtgggcgttctgcatttttttaatacttagtcagtttaagataaaaatcaaaggtagctttatataattatccaaaatcatttgctcctgcaaatttgtgacctctgataccctgaggggtcagcagacagaatgcagaaccactgaaatgtgccagtgagcgatgggatgggtgttgtctgagctgttctctgagcggctcgggcacttccagtcttcgttcacctcctttgttcacgtctctgccgatgttgatccagcacctgtgacttgaggatcccccccacaagctccctatctccccaccactgtgtgtcacattctcagcccagggagtcctttcttacaccgccttcccagtcccctccatcaactctcctcttaagctcctcctaagtgtcctcttaagtctctcctgagtcccctcctgagtccctcccaaggctcctcctgagtccctcctaagcctccttctgagtccctcctaagcctcctcctaagtcccctcctgagtccctcctaaggctcctcccgagtccctaccgagtccctcctaaggctcctcctaagtccctgctctgtccatgtgtccctcagaaaacacaaaacccaggcccggcagagctggagccaattccacacgggctgcacgctcttctactatttctttctcttcctccctcctttctgtttctttctgaatattttttcaaatttatgtcatattttaatgtctagtaataaacatcccttgccttttttcacatcttggaacgcactgaggagtgtttggacttgctttggttagaacagttgagactacagagacaaaacaagaggactttgcttcctttttatcttagtcacaagttcaggactgactgagattttccagacgttaacctagataaggtcaaacaaatgccctgttggtagttattttgaaggaaggagctagtcatcaatggtaaccattttctggcttctcctaaatccttgccgggatttctcttaactctttgcggggcaggattcccgaggaggccttgtcaccatcctacctgactgtgtgtctgaaactgcatgaagccatctgcagcagcacaaagctacttaagttttacgagctgccagccttatctgccgagattgtctgcagaatgattagacttctatctctggtggtaagtggagtcaacacacaaggtatcacacccgggataggtgcggaatttcaagcagcctcaatttggaaaggaaacagactgattcccgggtgctgggatgagatggagcggtggtttcagcagtggacatttcttgtgcacctgcttgatgctgggttctgttctgggtgtggggggtgtcagtgggccagggtctgcccttctgccaccttgggctttcctgggagggaggcagggagttaatgtgtggccatcagctggtcatggggaaaccagagagctggcgcaggggctgggggtcaggcaacgccacgcggagaagacgacttttcttttttcttgattctgttgtttgcagagaactacggggaccattttcctcccaaaaaatacatgtccaaacatggtctttcccaccttcttgacattgtagcttgaatacagtaacaaaggccatagcgccacacatctgccccccgctgcatgtcgtgtcccaggtctgatggcaggatgacccggctcctccgtcccaaagaaagccactgttgtgacttctcccatggatcagttttttttttgttttttgttttttgttttttaagacggggtctcactctgtcacccaggctggagtgcagtggcgtgatctcggcttactgcaagctccgcctcctgggttcacgccattctcctgtctcaacctcccaagtagctgggactacagacgcctgccaccacgcctggctaatttttgtatttttagtagagatggggtttcaccgtgttagccaggatggtctcgatctcatgacctcatgatccgcctgccttggcctccaaagtgctgggattacaggcttaaaccaccacgcccagcctcccatggatcagttttacctgtcttccagctttgacctttctgcctccgactttccccactcacccccatgtctctgagctctgtctgtgtggtgcagagatcggcaattccttctttcccgtctctgtgcagttttcacccacttgagttcatgagtttcagtttgaaagtgatgtaaggtttaatgtttagactgatcatttgtttgtttttttgagatggagttttgctcttgttgcccaggctggagtgtagtggcgccatctcagctcactgcaatctccgcctcctaggttcaagtgattctcctgcctcagcctcccaagtggctgggactacaggtgtgcaccaccacacccagctaatttttgtatttttagtagagacagggtttcaccatgttggccaagctggtctcaaacgcctgacctcacgtgatccacctgccttggcctcccagagtgctgggattgccgatgtgagccactgcacccagcacaattttttttttttttgagacagagtttcactcttgttgcccaggctgtagtgcaatggcgtgatctcggctcaccacaacctccgcctcctgggttcaagtgattctcctgcctcagcctcccgagtagctgggattacaggcatgtgccactaaacccagctaattctgtatttttagtcgagacaggatttctacatgttggtcaggctggccttgaactcctgacctcaggtgattcgcctgcctcagcctcccaaagtgctaggattacaggcatgagctactgcacccggctgatcattttttttaatcttacttcaagttagaactgtgacgttagtgatagaaaacaattaagtgtatgttttaactttcttcctttcagttttcttgtgttaaagtaccacagacacagtttaagaataaatgtcattggtgagatgatcacgttctctggagtggctgctatttaaaccgccacaggcagctgccaacttccacataaactgtgtttaaggaatttgtcagttacttaggatttattttctacagaaataactatcttaaatgttggctgggatctcagataagtttaatccatattatggacaaaatactctctacctgtgccataaaagcaaacaaacaaacaaaaaacctttgcaatactaaaattaaacaaagcaaaaatacgtgacgcatgttgaagaaacttttaggtgtctgctgctgtgaaggctccagggttgacggacacttggagaacaaggtgcccgtgtcaggctccggaggtctgtgcagcctctgagcggtcattcagtttgttgttattggccatcgctgtccagccctgtgctgctggattgttctagaaggagctgtgccattggggggaccttcagcagtgcctgtttcgttttctgtcggcccccgccccctgcgtgctgtgctctagtcactcctgtgcccagccccctctgcgggctctctttcacagcagcacctgcatcctggtccctcttacatgctttgaaagctcctgcctgtatcttcccgccctggcccttcccaggtatagtgacgctgtgttcccctgcctgctgtgggcttttcctctctcccactctcgggcagccccgcccagcagcagccttgtcctcttgcccagctgcctcgaggcgtgggcctctcggtgcttccagtgagcacctgagcgtatccaggttctgtggctcctgacacttgcacgatgtgcggggctgtgcttaaaaaaaaagatcacacacttggctgggtgtagtagctcacacctgtaatcccagcactttggaaggccaaagcaggcagataaccagaggttaggagttcgagaccagcctggccaacatggtgaaaccctgtctctactaaaaaatacaaaaattagccaggtatggtggcatgcacttgtaatcccagctacttgggaggctgaagcaggaggatcacttgaacccaggaggtggaggttgcagtgagccaagatcgcgccactgtactccagcctgggttacagagtgagactctgtctcaaaaaaaagaaaaaaaagaaaaagaaaagaaaaagaccacacattaatccaggactgtggggctcctcccaggaggaggtggccctgacccctgacctgtatgcttcctgggaaatgtgcttctggggaggacagagggaggaggaaggagagggaggaagaggaaggcaggggagagaagggaggcattacaggaggctttgagcccaggggaagaggggttttccctctggtctggtgggtccggcacggaggcggggggagagcatgatgggagcacagtgggaaggggacccaggtttacctccgggtcaggagcctggctgtggtctggcatggaggcagggggagggcatgatgggagcacagtgggaaggggacccaggtttacctccgggtcaggagcctggctgtggtctggcatggaggcagggggagggcatgatgggagcacagtgggaaggggacccaggtttacctccgggtcaggagcctggctgtctcctgtgtctaaggaacaggcccgggagtctgcagggcccctctctggggcgtgcttttccccctcagtctcctgggcacagcctggggacctgctcattggcaggacagaggctgcctgggctttcgggggagcacacagatgccgttccctccctccctcttttctcccgtatctcccacgttcagggtgaacccagaaaaccctggggaatggaagtgctttgggaatgtgggcttctgccaaggcctgtggtccctccatcgtagccactccttgagcagcctgtgccagcagggaggagaggagggggtgcagcatctcgccgggaacctgagtccacagccgaggatgactgaccctccctcttgtgtgacaacaggattctgcaggacagagagatgaaactggaaataattcagtccaaacagtcttccaagggacccttgctgctacgaaaaggtggctccgagaagtttttacaaagaacatgctcacatcttcaggtgcctcattcacatacgtcaaggaaattgaggtaggcatttggccgaaggcttctgggtagggatgtgactgatcgtgattcctcatggcctcaaatcatggggtacaggctgctggccaggggcagttgttggccttcacctgagcctcagttcttcatctacaaaatggagttgctcctgtctacctggcagggtggctctgaggcagacagatgccgggtgcaaagtgctgctgcactgcctcgtgtcccctggccgggcacagtccctgtggtgatggaggtgtggaggtgatggtgatggttggtggtggtggtggtagaggtgatggtggtggaggtgatggtgatggttggtggtggtggtggtagaggtgatggtggtgaaggtgatggtgatggtggacgtaatggaggtgatggtggtgatggtggtcatggaggtggtggaggtgatggtggtggtggaggtgatggtgattgtggtggaggtgatggtggtgatggtgatggttgtggaggtgatggtggaggtaatggaggtgatggtggtggtgaaggggatggtggtgatggaggtggtggtggtggaggtgacaatggtgatgctggtggtggaggtggtggaggtactggaggtgatggtggtggtgaaggtgatggtggaggtaatggaggtgatggtggtggtggaggtgatggtggaggtactggaggtgatggtggtggtgaaggtgatggtggaggtactggaggtgatggtggtggtggtggtgatggtggaggtggtggaggtaatggaggtgatggtggtggtggaggtgatggtggaggtactggaggtgatggtggtggtgaaggtgatggtggaggtaatggaggtgatggtggtggtggtggtgatggtggaggtggtggaggtaatggaggtgatggtggtggtggaggtgatggtggaggtactggaggtgatggtggtggtgaaggtgatggtggaggtactggaggtgatggtggtggtgtaggtgatggtggaggtgatggtggtggtgaaggtgatggtggaggtaatggaggtgatggtggtggtgaaggtgatggtggaggtactggaggtgatggtggtaaaggtgatggtggaggtactggaggtgatggtggtggacgtgatggtggaggtaatggaggtgatggtggtggtggtggtggtggaggtactggaggtgatggcggtcgtggaggtgatggtggaggtaatggaggtggtggtggtggtggtggtggaggtactggaggtgatggtggaggtaatggaggtgatggtggtgatggtgatggtggaggtactggaggtgatggtggtggtggtggaggtaatggaggtgatggtggtggtgaaggtgatggtggaggtaatggaggtgatggtggtggtggtggtggtggtggaggtaatggaggtgatggtggtggtggtggtggtggtggaggtactggaggtgatggcggtcgtggaggtgatggtggaggtaatggaggtggtggtggtggtggtggtggaggtactggaggtgatggtggaggtaatggaggtgatggtggtgatggtgatggtggaggtactggaggtgatggtggtggtggtggaggtaatggaggtgatggtggtggtgaaggtgatggtggaggtaatggaggtgatggtggtggtggtggtggtggtggaggtaatggaggtgatggtggtggtggaggtgatggtggaggtactggaggtgatggtggtggtgaaggtgttggtggaggtactggaggtgatggtggtcgtgtaggtgatggtggaggtgatggtggtggtgaaggtgatggtggaggtactggaggtgatggtggtggtgaaggtgatggtggaggtaatggaggtgatggtggtggtgaaggtgatggtggaggtaatggaggtgatggtggtaaaggtgatggtggaggtactggaggtgatggtggtaaaggtgatggtggaggtaatggaggtgatggtggtggacgtgatggtggaggtaatggaggtgatggtggtggtggtggtggaggtactggaggtgatggtggtggacgtgatggtggaggtaatggaggtgatggtggtggtggtggtggaggtaatggaggtgatggtggtggtggtgatggtggaggtactagaggtgatggcggtcgtggaggtgatggtggaggtaatggaggtgatggtggtggtggtggtggtactggaggtgatggtggaggtaatggaggtgatggtggtggtggtggtggtactggaggtgatggtggaggtaatggaggtggtggtggtggtggtggtggaggtactggaggtgatggtggaggtactggaggtgatggtggtcgtggaggtgatggtggaggtaatggaggtgatggtggtggtggtggtggtactggaggtgatggtggtccgtggaggtgatggtggtggtggtaatggaggtgatggtggtggtactggaggtgatggtggtggtgaaggtgatggtagaggtaatggaagtgatggtggaggtactggaggtgatggtggtggtggtggaggtgacagtggtgatgctggtggtggtggtggtggtggtggtggtggtggaggtggtggtggtggtggtggtggtgatggtgatggtggtggtggtggtggtggaggtgatggtggaggtaatggaggtgatggtggtggtgaaggtgatggtggtgatggaggtggtggtggtggaggtgacagtggtgatgctggtggtggaggtggtggaggtactggaggtcatggtggtggtggaggtgatagtggtgaaggtgatggaggtggtggaggttatggagataatggtggtggtggaggtgatagatatttgaacatgcctgacctaagaaaagttcattttcatttttggctgggcactatggctgatgcctgtaaccccaactctttaggaagcctaggtggaagggtggcttgaacccaggaggtcagggctgcagtgagctatgactgtgccactgcactccaacccaggtgacggagcgagaccctgtctcttaaaatattttttttacagtgcattttcatgtgtttcaacctcctagtgtccctgccaaaaatattttaatctgaatcaaatcatggggaaattatgagacaaatcaggtcaaaagacagtttacaaaacagttggcctgaacttttcaaaactgtcaacatgttaaaagaaaaaagaaaaaaatgaccagggaactcttctagaaaagagatgtgataagtaaatgcagaaaagagacgtgataagtaagtacagcgtgtgtcccaggaggatctaggatccagtcaggacaggagctggagcacgagaggaacgggggtggagaccacttcctgggggcagagtgtcctcctctccacgttgcacgtcctgagtgggaaacctgcactggagttgcacagggaagggctagggtcttaggagaccctgcccaggtatgtagtggcaaggtgccatgatgcctgcaacttactttccaacggtttgggagagaaaatgctcatttgtgcagagtccgaagagggagcacagaggagagaggaagagtgaaagcagctgtgtgaagcgtgaatcgcacaggactggagttgaatgaatgtgggtggtggtgtgctattcttgcgacctttttgaaagttcaaaaattttcaaagtataacatgagagataagtcctttcagaataaaaagccggttgtgcagtaggaggaccagtagtggcccctggttgggtctctgattctagaaagccaacctgggctgctgtgaccggccactagcatggctgactgttgatgaaggttggggagagccctggtgttcgcggagtcccgcgctctctgtattgccgtaatgctctgtctttctcctttcatgggagtgtgccgtggcatttagtcgtgagagtgggtgtgacctgtgtgcgggttttgcaggtctggaggcggctggtggaaatccaattccccgcggagcatggctggaaggagtcgttgctgggagacatggaatggaggctcacaaaggtaccaaaagtttgggggcagtcttttcagggcgtgaaggcaagctggagaaccccagaccattagcgacagccaagagatctcagcagtgcctctctgtgggcagggatggggtgaatcacagctccgtgtttctgtttctgatccagcccttatagtctgtccctagaagagcgcttcggagtcttactgagaggacagagaagaacaagggcccaggatctcaccatcatgggggtgcgggatttttcctgaccccttcgttggacttgcgacagggatgctgtgtttacttggcccgccgtgctcaaccccttgtgggagggagcacgtgagtgagtgtggcatctggccagctgctttgggagctggcaggagcaagctccgtgcaggccctgcagcagtgcccagattgaggtgcctgcaacccccgaagctccagagggcatgttacagtgctctcttagctccgccgtctatggacagtagtgtgttatcagctcagtgggtcccttgccttgttgcctagggtggctgccctctgccagggccaatgtgacagcctcttttaggtacccacactcggtgggtcccaagctcttgtccagcatccaagaagaatggggtcacccggacacttgaaggatggtgaaggtggagaattttattaagcaatggaaatggctctccatggagaggggagctggagaggggatgggtcaggtggggaatcttcctctggtccaggtgtctggctggctcttccctgaagtcaggacgtctttccgaagttaaaccgtctctccttggaagtccagccatccctctgaagtcaagtcacctgtttccagtgaagctacttctctctcactaccaagtctggggtctttataggcacaagatagggggcagggtgggccctaggtagttttggaaaaagcaacattctattggtaaaaagacattactccgaaagaaccagtggggagagagtaggcacacggggatagaggttctcactttgggccatgggtttcaggcttttcggctcgaaggtggggttttgccagggacccgcccctgtctgcgtaggatttctctgcctcctgcctccatcaatggggccccaggcacaggaggggccaggcctgcccataggcaggaagtctaagtggcctgttggtgacaggaacctcatgacacacaagtggagaacacacagacatgcccctcatgctgaattaaggcctgaggctcaaggaaaattagtttttatgtgatatgagagttttatatgtaactttttttttttttgagacggggtctcgctctatcgcccaggctggagtgcagtggcgggatctcggctcactgcaaactccgcctcccgggttcacgccattctcctgcctcagcctcccgagtagctgggactacaggcgcccgccaccgcgcccagctatatttttgtattttttgtagagacggggtttcaccgtgttagccaggatggtctcgatctcctgacctcgtgatccacccgcctcagcctcccaaagtgctgggatgacaggcgtgagccaccgcgcccggcctatatgtaactgttaaatggatctttaaagggaaaagtcagaaacaaggaaaaatgacctatgtctcataacttacctgtttttgcaagccaggtgctttttctgcagagtgggaaaagagactcttttaaattttagcctttggtctactggtggggggcagggaggacatgctttgcgtgggccaggagaagcttaaaattgggggaaacagtaaaacagcaggaaagtaaaaatgatgaaagaattttcatcccatagagcactggagcgctgcatccgaaagctctgaaaccacccccctttgatttttgcaggaggaacccctctcccagatcactgcctactgcaatagttgctgggacaccaaaggcttagaggacagtgtggccaagaccttcgagaaatgcatcattgaagccgtgagctcagcctgccaggtgaacaatctctcctcctgggaaacggattcgggctcacagctgtgttctgccatgacccagctaagggctatgaagcacccgctgggtctcagctcctccgctaactcagagattgggaagtgggcaccctcctccctcgccaagggcaatggcgctgaaatctagttctctccggattcctcagtgtgctgcacagtccctgctgctcgcaccatcctgcatgtgttccatatggaatcacggccgtgcgcgtgtggcacaagtcacacgggcttgcaggccgttcctcagatggccctgtcatcactgtggctgctggtttgattgattgttaacacttgctcagtaggtgtgcgggaagagactccaaaggttgacagaacatttatggaagcaaaatatgtgaaatggaaaattgtatcaatttatttagctcttttcggcaaaggggaagagattgtgcccccctgtctcccaggaacagtctcgcaggcaatgccacatgaggaagctccctgctggccacggctgccctgctcacatttcctaattggacacttaacccctgtacaagcacagccttgcggccacaggggaagtccagaaacattgaggtcattgaattccggggaccaaggggttctaattttttaagtgactgatacctttgataaggttttcctttccctttttcgttaactctttgttgagatattgttcgtatgccatacggtacatctgtcaaaagttccagttcagcaggttttggggtagtcacagatatgtacagtcatcaccacagttaatgacagagcattttcatcacttcaaagagaaacccggcccctttagccatcatcctcctcccctctagtcacccactcccctctgcaggcataaacaattgctgaacataaacaactgcttctgtggctttctctgttctgactgtcatatgaatggaatcatatcatatgtggccttttgggtatggcttatttcactgagcataatgtttttttgttgttggtggtggtggttgtttgttgtttttgagacagagtttcactctttttgcccaggctggagtgcaatggtgcgatcctggctcaccgcaaccgctgcctcccgggttcaagtgattctcctgcctcagcctcccaagtgctggaattacagctactttttgtttaaagagtcttttaattgtttaaagaacaatgtgccgccacactcggttccttttgtatttttagaagagacagggtttctccatgttggtcaggctggtctcgaactcccgacctcaggtgatccacccaccttggcctcccgaagtgccgagattacaggtgtgagccaccgcgcccggccgagcataatgttttgaaagaccgctcaggctggacacggttgctcacgcctgtaatcacggcactttgggagcccaggagttcaagacaagcctgggtaacagagtaagaccctgtctctataaaaactaaaaaataaacaaaaaaaattagccaggcatggccgggcacacctgtggtcccagctacttgggaggctgaggtgggaggctcccttgggcccagaaggtcaaggcagcagtgagccatgatcacaccactgcacttcaacctgggggacagagcaagaccctgtctcaaaaagcaataacaacaaaagtccatccatattgtagcttgtgtccgtttacgttaagtattccttacccaaaatgcttgagaccagaagtgttttggatttcagatgttttcaaattttggaatatttgcatttacataatgagatgtcttccagatgggacccagagtctaaccacaaaattcacttgtttcatatacatcttatacacatagcctgaaggtaattttatacaatatttttaacaattttgtgcatgagacaaagtttgtattaagtatttgtatgttgaatttttcacttgtggcatcattatactcaaaaagtttggattttgtagtattttggatttggggattaggaatgctcaacctatatttcatttttttccatggccaaatattccccgtttatccatgtgtccattgacggccatctatgttgcttcttcggctattataaatctgctgatacaaacattagtgtacatatttatgtgtgggtgtatgtcttcatttctcctgggtgtatacctcgatgtagaattgctgaatcatatggtaactccatgtttaattgtttaaagaactgtccggccgagtcccacagcagctgaaccattttcaatccctccagcagcataggaggcttccaggttctccacatcctcactaacatgtgttgtctaactttttgattctagccatcctggtgggtatgaagtggtatctccttgtggtttttgtttgttttttgagatggagtcttgccctgtcacccaggctggagtgcagtggcgtgatcttggctcactgcgacacctccacctcctgggttcaagcaattctcctgcctcagtctctcgagtagctgggactacaggcatgtgccaccatgcccagctaatttttgtatttttggtagagacggggttttgccgtgtgggtcatgatggtctcgatctcttgacctcatgatccacatgccttggcctcccaaagtgctgggattacaggcgtgagccactgtgcccggcctcattgtggtttttaactgcatttctctgataactaatgatatcaagcatcttttcatatgcttattggatttgtctgtatcttctttggagaaatgtttattgagatattttgcccctcatcccccccacccccccttttttttttttttttttgagaaaaggtctcgctttgtcacccaggctggaatacaatggcacgatcacagctcactacagcctcaacctcctgggctgaagtggtcctcccactttagcctcccgagtagcagggactacaggcatgtgccaccatgttcagctaattaaaaaaaaaatttctgtgggccgggcatggtggctcatgcctgtagaccatcctggctaacacggtgacaccctgtctctactaaaaatacaaacaattagctgggcatggtggcatgtgcctgtagtcccagctgcttgggaggctgaggccagagaatcacttgaagccatgaggtggaggttgcagtgagctgagattgtgccactgcactccggcctgggcgacagagcgagactctgtctcaaaaaaaaaaattttttttcgtagagacagggtcttgagatgttgcccaggctggtcttgaactcctggactcacatgaacctccctccttggccttccaaagtgttgggattgaaggcatgagccaccgcacctggcctcttttgctcatttttaaattgggttgtctttttattatagagttgggagtctttattctatatacaagtcacttgtcagatatatgattgcaagtattttctcccattctatgtgttgttttttcacattcttattggtttcttttgaagcacagaagtctttaattttgaagaagttagcatatctgttttttcttttgttgcttgtacttttggtgtcaaagaatcctttgccaaatcctaggtgatgaagatttactcctatgtttatttatctctaaatgttttatagttttagctcttacatgtaggcctttgatccattttgagttcctttttatatatggtgtatatggtgtgaggtaagggttctgtttcattctcttgcatgtggacatccagttgtcccagcatttgttgaaaggactctacattccctgttgagtgatgttggcactcttgtcaaaaatctgttgacgatacatgtatggatttatttctagattttcaattctatgtggtgatctacttgcctatccttgtgtcagtaccacactgtttggactaccattgctttctagtaagttttgaaattgggatgtgtgagtcctcctactttgttcttatttttcaagattgttttggctattttgggtcccttgcaatttcataagaattttagaatcagtatgtcagtttccactgacaaggaagtcagctgggattctggtagggctggtattcaatgtatagatcagtttggagagcattgccatcttaacaaggttaagttggatttctttcattcaattagatttttttttttcccctgttagacagagtctcgccctgttgcccaagctggagtgcccaagtagctgggactacaggtgtccaccaccatgcctggctaatttttgtatttttagtagtttcaccatattggtcagggtggtctcgaactcctgacctcagatgatcaacccgccttgacctcccagagtcctgggattacaggcatgagccaccattcctggccaatttcttttaacaatgttttgtatttttcatagtttaaattttgcacttcttttgttaaatttctaagtacttttttttgggggggggtgctattgtaattggaattgttttctgaattctgtttccagattgttccttgctggtgtctagacacacagtgctccatgcgtcttgtatcctgcaacattgctgagctcatttggtagctcaaattgtgtgtgcgtgtgtgtgtgtgtgtgcatgagagagagaattaaattttctatacataagatcatatcatctgtgaatagagtttcacttcttccaatctggatgccttttatttctttctcttgcataactgccctggctagaacctccagtacaatgttgaatgaaagtattgaaagtggacatctttgtcttgttctgatcttaagagaaggtttcagtcttttgccaccaggtgtgatgtcaacgtgagcttttcatagatgccctttatcagtttgtggaagttcctttttgttcctcatttgttgaatgcttttttttctttaatcatagaagagagttggattttgtcaaatgcttttcccgtatctactgaaatgatcatgcgatattttcctaatgttattaactgatatttgatgttaaatcaacctttcatccctgagataaattacacttgatcgtggtgtatagttcctttaacatggggctggataaggttttcttttatccttttaaatgtcagaaagtatctattataaattaaccttgtggtttttactaattactgaaatgttttacagaaactttgaacctaaaggaagaaaaatattgtttctcggaggagaattaaaaagagaattaaaatgtatatgttgtttgtaggcagctttttaaaagaattatggtttaggaacataaaatatatgctatattaagggtttattcatttttggtatttttcatgatatgaaagtccaaaaaaaaatgtagaaactggcagccagaaggaaggagggtgactggttatgttggtgtgtgtttgtgtgtgtgtcttcacatctctggtgctggacacttaaggaggcagtatacaaggaaatgaaaattttcgaagaaatgtaaagtgttttactattttgctctttttgtggccttataaaacaagttacagtagatttcagaaatgctatcgagtaggtaatttgcttttgttatttcaaaacaaactaatgaaaaacttctaaatgtccctcttttattaattttcttgtagtctcagaccagtatccttcaggggttctcttactctgatttgcggaaatttggcatcgtcttgtctgctgtgatcactaagtcctggcctaggaccgcggacaacttcgatgacattttaaagcatctgctcacgttggcagatgtcaagcacgtcttcagattgtgtggtatgtttgcgggagtgctgggaacatcagctcaggcaaggtggtgtcttcctgattgggaaaggtgggaggcagaagatttgacatgatgatactgaattgggatgggctgatgtttgacaaaggctgcagtttggacagagagaccctggaaggctcagagtgtcttgcgttgtaaataataactaatgctaacagccactattcattgaatgcttgctgtaccctagcgactgtgctgggtcgcaagggaagtgcccttgaaacaacccttctgaaagtcccctttaaggcccccagttttcagatcaggaaacaaatggagaaggcaatgcgacttacctaaggtctcaaagattataagtagtaaaaactaaaatccagacccaggtatgtcttatttggagatcaatatagaatgtccaagccaacattgatgacctcaacagaaagtgaagtactgtgctgtctgatttccccccagccccccgcgccccaggtgttttgtggtcaaggagggagagagagagacattccatcctaaaaacgttagagtccagttggcgtgtgagaccttagattcatatctttcagtgagaaggcgctggatgtggaacagccaaaatcaatgctgagcttcctacacatcagggaagctgtggggatcaaataactgaattaatatgggagtgcacaagtaaaagctactctcttgaaaagatcatttttgtgttatttgtatttatttatttatttatttatttatttatttattttggagatggagtctcgctctctcacccaggctggagtgcagtgctgtgatctcagctcactgcaacctctgcctcccgggttcaagcgattctcctgcctcagcctcccaagtagctgggattacagatgtgagccactgtgcccagcagtttatttaattttaaaacaaggtcttctctgttgcgcaagttagcatgtagtagagtgatgccatcatcgctcaccgtaagcgctgacctcccgggctcacgtgatcctcctgcctcagcctcccaagtggctggcactccaggcgtgcaccaccatacccagcctgtttataagttggatagaattttttagagcactttgatgtgtacagaaaaattgagcagaaagtacagagagttgtcatctatctctgccaccatcacacgggcagtaccctgttagtaacatgcagcattagtgtggtgcttttgttacagctgagaagccaatattgataacactgttattaactaaagtccatagttcgttcctggtgttgtccattctctgaggtttggataaaccatggcctgtgtccaccattccagtatcgtgcagaatagttgcgctgcccctacaaaatcccatgctccacccctcccatttcctttagtcttttccagaatgtcctatggttggaatcttataggatgtcgcctttagactggcttccttcacttagtaatacgtatttatgtttcctccatgtcttttcatggcttgagagctaacttcgttttaccactgaataatattctattgtatggatgtgctaccattcgcttacccgttcacctcatgaaagacatcttggttgcttccaagtttttgcaatgattagtaaagctactatgtttgtttcttatggtgcagataagcttcatcttctcctaatattgtatggctctaatattactgggagagaaatcctaagtggttaaacaaaacatgtataaaaattctgccctctaaatttatcataaaatcagttccaagattttgcaagataatgaagttgtacagagtataaagttatcacatggctgtttctctctttgcatatgctatgaaagtgtctccctaagaccatcctgatagacattgctaggtatgtctgcatcctctggtgcagtttcttctgttgtaggtattcctagggcaggggctttttaaagaagattctgtgtattctatttaaaaaatatactcaggccatgtgaggtggttcatgcgtataatcctaatgttttgggaggccaaggcgggaggatctcttgagcccaggagtttgagaccagcctgggcaacaaagtgagaccctgttctctacaaaaaattttgaaagtttgccaggcatggtgctgtgcacctgtgttcctagctactcgggaggctgaggcaggaaaatgaggttacagtgggctatggttgtgccactgcactccagcctgggtgacagagagagaccctgtcaaaaaaaaaaaaaaaaggaagtcagtccatccgtatactgaaggggacgtgggttttaacctgagaaatgtgtctcccagctgattttggccattgcgggaagtcatcttcttggacaaggaagttgttcaggggatgaatctgggcaagacctaaccctcgtgggggaaagcagaagggagtggaatgattggcgcatctggagacactggccagccattgcctgtgtttgaggaagtgggggcagaacaagaggttatctggaattcccacggtaacggcaaagaggcaggaggtggggagcccactgtgttaactgtgttcttcatctattcaggaaccgacgagaaaatactagcaaatgtcacagaggatgccaagaggctgatagctgttgccgactctgtgttgacgaaagttgttggtgacctcctaagtggcacgattttagttggacaactggagctgattataaagcacaagaatcagtttcttgacatctggcaactgagtaagcatcgagtcgatacgcacttcaggctcctgaggcattaagtagctggaagacacgtttgtgtttgcgtgtgcatttttgtaaaggagataatcatcttagccttgataatgagtatctcttcttgctcataagttgataggggtggtttataattctcaagaacatcacgggaaagtgataaaataatggccatctcgaaaaagtgggtatgcgcaaaaccatcctagtccttctcctggtggcggggaaggtgcggcgctttcaaagcattgccatggaaaatggcatttgttgctgtattgggttactttattggtgttcttattttccaggggaaaaaagtctttcaccccaggatgaacaatgtgctgtggaggaagcactggattggagaagggaggaactgttacttctaaagaaagagaaaagatgtgttgatagtctcctgaagatgtgtgggaacgtgaaacatctgatacaaggtggtattcctgagaagtgaacaaagttgagggctctcaaagggttagaggagaacacagtaagaatggatcacagtagcagatctttattttggagagaaggctttaaaattttttttttaatttgcatttgctggggggatcgctttcacctcttttagattcttctttttggtatttatgtccacatttccaaataacatgcttaagtgtctcctggatttttccggagtcagcatgagctgctgacgcccgctgcagaagatgagggcttagagccacacatttctggtctgtgccctgcacacatcacctttccacctcctgttgcttcctgttttctcataacggagttgcatcattgtttagggttaaatcatcaggacccacacggatcacaagtgaaccacgaaagaaaccgtcatcattttacaatttttgcacaaactctctgttttccacagaattacatttcctgtcagatgctgttttcactgcgttaatgatacgctgttttcattgtattaatttctaattccatcgcaatctctgccgagtgtctgaatttccttgaagatcattggtttgacctttgaaaaggaacctgccaaccctgggctgcagacgtagggtggagtctccctccacctcctaggagcctttgcctggcacctgggttagacgtggttcccacgcccccctcccccgctactcactcctgcttcctctgttggcagagcacaccctcactggcttcctgagaaaagggcgtgtaagaggttaaaccctcgaatccttgtgtgtctaaagatgtctgtcctcttactaggtcagtcgctcggctaggtctagaattacagaccggaagtcattttccttctgaagtttcaatgtgctgcgccatcattgcctccacagtgtggctatgtatggagaagtccgatgcagtgccagttacacatccttcatgtgtgtgacctgttttctctttcttgaagctcttgagctctttctgttactcatattctgaaataataacgtgtcttggcctggatctatgttccatcgaggctgggcatgttggctcccacctgtaatcccagcacttcaggaggccaaggcaggaggactgcttgagtctaggagtttgagaccagcctgggcaacatagcaagaccccatctctaaaaaaaatacaaaaaaattagcaagacacggtggtgcatgcctgtattcccaactacttgggaggctgaggcaggaggatcacttgagcctgggaagtcgaggctgcagtgagccgaaatcacgccacaacactccagcttgggtgacagagtgggaccctgtctcaaaaaataaaatattttcagtcccctctattgggtattaataggtaggtctttcaactctagacatcaaaatccttgagttctgggaaattctcttgaatgatttaattttttcttctcttgctggaattcctgttaattggatatgggacctcctggatgatcatctaactgtcatcatttttctctcggattttctatctctgttttttgctctgctcttgagagatttattcagaaccaaactttctgcttaggttttcatgtcagctttcgtatatatatttaatgtagaggaattctttttctcggaatgttcctttttaaattctgtcctgttcttgttcacgttgcagcatcttcccttctgggttattcaccgttttgttttggaggttttgcttttcctggcatcatgtgctgcttcctccaggttcctttcacttgttgatttgttttgattttcctcctatgtctggacattcttgtttgtctgtgtttattaagagaaagccctcacaagtgggttggccctctgcggggtgctgccgtggggtgctgtggctcgacctggaagttggcctgtctcctgaagtcttctgtctcctgcctggagggtgtgggcctggctgccaggtttctgggagccaagagggagaagcgggctggcgggccttggcatcccgtgcgtggtcctcccatggcccgtgttctcagtgtggttctccgccacctccctctgtctcctgtgtttcacaccccatcctccttccccctgagattggataattcatgtcttctgttagcttcctgagaaaggggatgtgtctagaaaggccctttgttctgccatgtatctgtggcctccaatccacacgcccccctgcgttatcctttctagaaaatgaaccatctcttggctgctggggtgaagaagggggtccacctgctgtgtcagggcattggggtgacagttggtgtgctggatggaccatgtcttttttttgggacagagtcttgccctgttgtccaggctggagtgcagtggctcagtctcggctcactgcaacctctgcttcctgggttcaagtgaatcttgtgtctcagcctccctagtagctgagattacaggtgtccaccaccacgtccagctagttttttgtatttttagtggagatgggatttcatcatgttggccaggctggtcttgaactcctgacctcaagtgatccatccgcctcagcctcccaaagtgctgggattacgggcgtgagccactgtgcccagcctggaccgtgtcttaaacagactttgaacccagtcttccttatttcatcaccacctcccagtctgcagtgacctgcacaatgtgtgtctgctttttgggaatcctgtgacataaaactactcagctctcagtgttgcccactgggaccctaggactccatgttaccaggcctcatgtgtcatttaccactggttcagctcgttttcaacttctaaaattttgttcctgttatcctgttcgccattcctcctcctgtccttgtcagtttatgacttttttttttttttttgatatggagtctcactctgtcacccaggctggagtgcagtgacacagtctcagctcactgcaacctccacctcccaggttcaagtgattctcctgcctcagcctcctgagtagctgggattacaggtgcgctccaccacgcctggctaatttttgtatttttagtagagacagggttttgtcatgttggccaggctgctcatgaactcctgacctcaggtgatccgcccatctcagcgtcccaacgtgctgggtgggattacaggcatgagccactgcgcccaactagtttatgactttttaaatgcaatttatgttctgtcattggagtggggtttggcaaagagagtaaataggtgcgtgttttcccactgccatctttacccagaagtttatgatgctttctttatcatgaatattggttaacaaggccaagcggggagggaaagacctgtgaactcttcctgagaaagaaatcctagcagctgtgtgctcttgagttcgctcagagaagtgaggagagaaagtcttaggaaagtgaaataaaatggaatcatgattagagctttgacttctgacactttcttttcgcttctaaagtggactttggagtgcttgcagtaagacactcacaagacctcagcagtaaaagattaaatgacaccgtgacagtgagactgtccacctcctcgaactcgcagagggcaacgcattaccacctgagctcccaggtccaagaaatggctgggaagatagacttgctcagagacagccacatcttccagctcttctggcgggaagccgcagagccgctgagtgagcctaaggaggaccaggaagccgcagagttgctgagtgagcccgaagaagaatcagaaaggcacatccttgagcttgaagaggtgtatgactatttgtatcagccttcttacagaaagttcattaagttgcaccaggatctaaagtcaggagaggtcacccttgcagagattgatgtcatcttcaaggactttgtgaataaatacacggacctggattcagaacttaagatcatgtgcaccgtggaccaccaggaccaaagagattggatcaaggaccgagtcgaacagatcaaggaataccatcacctgcaccaggctgtccacgcagccaaggtcatcttgcaggtcaaagagagcctgggactgaacggtgacttcagtgttctcaacactttactaaattttgtaagttatttgctggggactgtgggggtttggaggggcgtcctgcctcagcctcttcaggagccatgggctttgtggctttgaaaaggggggcggatgacttagagcttccgtcaggggctcctgtgtgtgtggtacttgaggcctgaatatcccaagggctttgtttttacctttgttataaatagtaccactgctccttagccagagggagtttccttgggtctgcgtgaagatcaagaactcaggaaagggcaacaatcctcttttcataacgggcatttgtaaagggtcataggctctctctaggttacagaagccaaaaagcaaaacactttgtcggctgcccaactgcatctcccagttccacccaaaagcggtaaatcagttgtttctgttagagttaagaggtgactcttttgcttttttttttttgagatggagtctcgctctgtcgtccaggctggagtgcagtggcgcgatcttggctcactgcaagcttcgcctcccaggttcacgccattctcctgtctcagcctcccaagtagctgggaccacaggtgcccgcaaccacgcccggctaatttttttggtatttttttttttttttagcagagacagggtttcaccgtgttagccaggatggtctcgatctcctgacctcgtgatccacccaccgtggcctcccaaagtgctgggattacaggcgtgagccaccgtgcccggctgagtcttctgcttcttatgtttttaggtagaccgagataatgattagaatttagctgggcacagtggctcatgcctgtaatcccagcactttgggaggctgaggtgggcagatcacctgaggtgaggagttcgagaccagcctgaccaacatggagaaaccccatctctactaaaaatacaaaaattagccgggtgtggtgtcaggtgcctgtaatctcagctactagagaggctgaggcaggaggatcgcttgaaccacggaggcggaggttgcagtgaaccgagatcgtgccactgcactccagcctgggcgacagagtgagactcttatctcaaaaaaaaaaaccaaaaaaaaaacctggaatcccatccatttacacttgaaccctagtgcacgtcctcgaggaagcaactgctctgggcctttattgacaaagcagaaaaagcaacagtagttacttggcagggttatgtgaggaattgattttaaaatccactttattaaaatgcttagcagaatatcaggttcccaggaatcacagttcatcttgatcagggagaaacagccatgggggtttgatcatccaattcaggggtaagagcttggtgtgcctgttgtcacagcagtggcaaatctaggcattgagggagggtggggctgctgggacggtcagtgcttgcagctcacagattctggggttctggttaatgagttccagtccacagtagagctttttcttgcagactgataacttcgacgactttcgccgtgaaacactggaccagatcaaccaggagctcatccaggccaaaaagctgctccaggacatcagcgaggcccggtgcaaggggctgcaggctctgtccctgagaaaggagttcatctgctgggtccgggaggctcttggaggtaaaatcagcctttggggttgcgtggaagtgtggagaaagttttcagatggcgcactgtgtggcgttcctaaactctttggcaatacctccccttggccaaggactacgtaaagggcagaaagacgttgcctgcatgctttagggagatgggcactgatcatagagttcacaccggtacagtatttcccatgtgctgctgtaaaagccactcaccttgccacaccccgccacttcggaagctgtaaatggctcaggttccttttccttaaaatcttgcccccttcagctttttcttccagtagatttttactggaggacaaggagagttcctgcccacagagaggttttttttttttgtttgtttgtttttttgagacagagtctcgctctgtcgcccaggctggagtgcagtggcgtgatcttggctcactgcaagctctgcctcccgggttcacgccattctcttgcctcagcctcccgagtagctgggactacaggcgaccgccaccacgcccggctaattttttgtgtttttagtagagacggggtttcactgtgttagccaggatggtctcgatctcctgacctcgtgatcagcccgtcttggcctcccaaagtgctgggattacaggcatgagccactgcacctggcctttttttttttttgagacggagtttcgctcttgttgcccaggctggagtgcagtggtgcaatctcggctcactgcaacctccacctcctggattcaagcgattttcctgtctcagtctcctgagtagctgggattacaggcgcccgccaccacacccagctacttttttgtatttttagtagagatggggtttcaccgtgttggccaggctggtcttgaactcctgacctcaggtgatccacccatctcagcctcccaaagtgcaggcgtgagcaagtacaggcgtgagccaccgcgcctggccccacagagagatttttctcacttctccattgatgctgtgcgtttcttggcagcctcttcagttctgtggcttagatgtcgttggcagaggagagaggaagaggcagaggaggcaggaggggcacaggtggcagtgcaggtgtgctcgggggtctgggggccaccacctgctggatctcaggctctggctctcttgggagagccgctgctttcagtggtggactctctggtccacactgatgcacatccttcagtgagtaatttatctgaggggaatgatctgagtgtttcatagttaattgtgaacatgttatttacagctgagccttggtttctttttgtttaaatggtaatgttgtgtggattgaaggaaagagcatacacagaagtgcagtacagtgcctgggacattgaaattgctcaggaacggcaagatatcgtttagtgctattaacagacagtacaggctgggcgtggtggctcacacctgtaatctcagcactttgggaggccaagtcgtgtggatcacctgaggtcaggagttggagaccagcctgaccaacatggtgaaacctggtctctactaaaaatacaaaaaattagccaggcgtggtggtgggcgccagtaatcccagctacacgggaggctgaggcaagagaatcacttaaacctggaaggtggaggttgcagtgagccgagatcatgtcacttcactccagcttgggtgacagagtgagactctgtctcaaaaaaaaaaaaaaaaactacaaaagattaggtgttccggactcttactgaaagcagaaagtggacagaaccttaaaaattcatgaaatatccatttcagcttcagtaaggattactgcccaagaccgagtcttgtgctatcgtggaatagtcccacgctgaactcccctcttctcttccccaggcatcaatgagctgaaggtgtttgtggacctggcctccatctcagcgggggagaatgacattgatgtggaccgggtggcctgcttccatgacgctgtgcagggctacgcatccctgctatttaagctggaccccagcgtggacttcagtgcattcatgaagcatctgaaaaagctgtggaaggctctggataaggaccagtacctgcccaggaaactggtgagtcttattctgtctctaatgcagattttgttgaatagagcattgcttagcaacgttagggcagtgactgtggaaatggtggcacacctgtgtggtaggtttgtacacagccgttttcaatgatatttaaaaagcttttcttcataaatggaaattcaccatcttgttacctagaaagcaggatacaaaattacatgacacatagtaatctctaaggtgcaaaacacacgtggaaaaaagacagaagggaaatatgctgaaacgttgccaggagttttctctgaatggttgtaattgtcattttattctgttactttttgttattttctataattgatagaattttttatcagaaaaaagtaaacatttaaaattagccaggcatggtggtgtgcgcctgtaatcccagctactctggaggctgagacagaattgcttgaacccgggaggcagagatagcagtgaactgagatcacaccactgtactccagcctgagtgacaaagtgagactctgtctcaaaaaaaagaaaagaaaagaaaaaagtaaacatttaagtttaagtaaactacctgtagcagggtctgaattgacgtacgcagcttaactagatacctgggccagcctccggacggctgctctgcatgtgggtggaggaagaagtgacatatggaagggcaggtaaagctatcttcatttttctgctagaaagtcagcagagtttccaaacaaaaccctctgttgtgatttttcctaaacttctcttattgtacttggggaccacagaaggacactgaggacttgggactccacagccattgcttccagcgtcacccccagagggttctctgcattggggacctggcagaatgatggcgtctggtagagaggcaggcgggcggctgctcattcccctccactcctccacagatgtaagtcaagtgcccccatgtgccagccggggcaccaggcactggaggaaacgtggaacagcgagtacaaagcagcactgagtgacagatcatgttgtcagggtggcacctggtccagctggggcgctgggtgggcgactgcgtcctgagccctggggaagcgtggggagaaggctctgcagcgaggcagaggcgggaggccgaccacaggagggagaagggcaagatcctcgctccaaccgtggcccgtgttctctccttttgtccccatagtgtgactccgccaggaacttggaatggctgaagactgtgaatgagagtcatgggtctgtggaacgctcatccctgaccctggccacggccatcaaccaaagaggcatctatgtgatccaggcgcccaaaggtggccaaaaggtgagcggtccccagccctcggcgcagctgcggcccttctgcaggctgctgccagtccaggtcttctggccccaagaaagtgacttctaacctatgctcttcacagatttccccagacacggttctgcacttgatccttcctgagagccctggcagccacgaggagtcacgagagtactctttagaggaggtgaaggagcttttgaacaagttgatgctgatgtctggcaagaaggatcgtaacaacacggaagtggagaggttttcagaggtgagggcgcatctttgcagtggcgctaagctggtggtgtcatctcgtccgtgagggctgtgtactcccaagaaaacggaaaggatttgacttgggatttgactgataagaagggctctgctcttaggcccatggagagtagagttggcacatttgtagggtgcatggaactctagtccgcggccccagagaggtcttaaggcaggcaggcccctgggttagcagtccctccttacgatccgtaggatgaacgctgaagctggcagcctgtccaccgcactgagaaggaggttggtcacccagcaaatagcccttagaaagacacttgaattgcctctctcactctgtaaatcagcaagaatccaaataactaagatttagatggacaaaacagaagtaatcatattgagaatggtgtaccggtctaagtaatagtctctcaattttattataggttctttctctaaagttgatttgtactttacaaatggtatcctttatctctgctgggtgcagtggctcacacctgtaaagccagcactttgggagcccaaggtggaaggctcattttagcccaggagttcatgaccagcctgggcaacatagcgagaccctgtctcaaaaagtataaggtttttttttttcccaattaaaaaaaaaagataatttaaaaaaattaaaacagtccaggcatcatggttcacactttgggaggccgaggcgggcctatcacttgaggtcaggtgtttgagaccagcctggcgatatggtgaaaccccatctctactaaaattacaaaaattagccgggcatggtggcacgtgcctgtaatcccagctgctccggagactgaggcaggagaattgcttgaacccaggaggcagaggttgcagtgagccgagatcacaccactgcactccagcctgggcaacaatgcaagactccatctcaaaaaaaaattaaaaaaaaaaaaaaattaaaacaaatgataccatttatctctacaatgactctttccctgatgagagtgccatcttctcaggtgggttgtgtagatgaggagggaggccttgtgagcgcagatcatgcagtgggcctgtggacagggccgtcttttggcggtaggcctgtgtgctgttgcagagtagcgtgttaccctctcgcatggctctgtgagccaacctcatggttctgcctctccaggtcttctgcagtgtgcagaggctcagccaggccttcatcgacctgcactctgctgggaatatgctgttcaggacgtggatcgccatggcctactgctcccccaagcagggtgtgtccctccaaatggactttggcttggacctggtgacggagcttaaagaaggtggagatgtcactgagctgctggcagccctctgcaggcagatggagcacttccttgacagctggaagagatttgtgacccagaagcgaatggagcacttttacctgaacttctacacggcagagcagctggtttacctgagcactgagctcaggaagcagcccccgagtgatgccgccctaacgatgctatccttcatcaaaagcaactgcaccctgagggatgtcttaagggcctctgtggggtgtgggagtgaggccgccaggtaccgcatgaggagagtcatggaagagctcccgctgatgctcttatcagagttcagcctggtggacaagctgaggatcatcatggagcagtccatgaggtgccttcctgccttcctgcccgactgcctcgacctagagacccttggccactgtctggctcacctggcagggatgggtgggtctcccgtggagcgttgtctcccgagaggtctgcaggtcggccagcccaacctcgtcgtctgtggccactccgaggtgttgccagccgccctggctgtctacatgcaaaccccaagccagcccctgcccacttacgatgaggtgctgctctgcaccccggcaaccacctttgaggaggtggcactgttgctgcgccgctgcctgaccctgggctccctggggcacaaggtctacagcctgctgttcgcagatcagctgagctacgaggtggcacgccaagcggaggagcttttccacaatctgtgcacgcagcagcaccgagaagactaccagctcgtcatggtctgtgatggggactgggagcactgctacctcccctctgccttcagccagcacaaggtcttcgtcaccccccaggcacccctcgaggccatccaagcctacctggcaggtcactaccgggtcccgaagcagaccctgtcggcggcagccgtgttcaatgaccggctgtgtgttgggatcgtggcctcggagcgagcaggtgttggtaaggagagcggcagggtgggcaggccccgtctcccagggactgcccggggcccttcccccctccagcagatgaagcctgtctgcaggtggagaaaccgaggctcagggagggtgtgattcatctgtgggtgtcaatcagggtctgtgccagaaccaggcaccctggtcacctggtctcccacaatgggtattccctgggagccccattcccttcctcctctcagcaaacatctctgcagtgtactttgtggtttttttttttttttttttttttttttttgagacagagtcttgctctgtcacccaggctggagtacagtggcgtgatcttagctcactgcaacctccgttttctgggttcaagcaattatcctgcctcagcctcctgagtagctgggattacaggtacccaccgccatccctggctaatttatttttttttgttttttgttttttgtttttttgagacagagtctcactctgttgcccagattggagtacagtggcgtgatctcggctcactgcaaccttcgcctcccggattcaagcgattttcctgcctcagcctcccaagtagctaggactacaggcatgcaccagtacacccagctaatttttttatttttagtagagatgtggcttcaccgtgttagccaggatggtctcgatctcctgacctcatgatctgccctcctcggcctcccaaagtactgggatcacaggcatgagccaccgtgcccggcctaatttttgtatttttagcagagacagggtttcaccatgttggccagtctggtctcaaactcctgacctcaggtgatccgcccacctcagcctcccaaagtgctgggattacaggtgtgagccaccacgcccggcctgaagtttacttcttctgcccttaaatgccactggcctctttggggttgatgttggtcgtgtgagcaaggggaggtagaattgaagagaaagccatgcctcttgacccacccttcgtttgccatcttgtttcccttaaaaagaaatagtagcttctgttctgttgactttatcctatcaacagtacctcgtcctgttgggataaacattactcttcccctccctgctgaagcctctccttttgctgtgacttttattagctagtcactcaacacataatgacatttcagtcaacagcagaccacgtatatgaccacggtcccataagattagaaaactgtactttaaaaattagccaggcatggtggtgcatgcctgtgatcccagctactaggaaggctgacttgggaggatcgctccagcccaagaggtcgaggctgtggtgagctgcaaatacgacactgcactccagcctaggcaacggggcaaggccttggtcttttaaaaaaagagaaagaaagaaagaacaaaagattataataccatattttttactgtaccttttctacatttttatttttatttttgagatggagtctcactctgttgcccaggctggagtgcaatggcacgatctcggctcactgcagcctctgcctcctgggttcaagcgattctcctgcctcagcctcctgagtagctgggactacaggcacacgccaccacacctgactagtttttagtagagatggggtttcaccatgttggccaggctggtctcaaactcctgaccttgagtgatcacccgcctcagcctcccaaagtgctgggattacaggcctgagccaccgtgcctggcctgaatatgtttagatattcagatatttgccccgtgtcacagctccccactgtatgtaggatgcccccatgctgtcacggcttgcagcccaggggcaatgggctattccacctagctcgggtgtgtggtcggctctaccatctgggtttctgcaggcacactctgatgttcacagtgacagaatcatttcacaatgcatttttcagaacgtgtccctagtgctaagtggcgcgggactctgctttgcctgctgtcctgcggaggcaggaggtgaccaggagagtgagtaggtaacggctgggaaatgtgaaggttcaagagcgtattcttgaatctgatgttatgttgcatcagttttgaattttatacaaagagaagtaacttctagtggatctttatagattctcttactctttgtcctagccctgggacttaatttttctctctctctctctctctatttttatatatatacacacacatgctgtatatacatacactatatatattcgatacatattctatatagatttctatatatattctatatatttttacatatataatatatattctatatacttccatatatactatatatattctatatatacatatatagtatgtatatatatattatatatatattgtatgtatatatatattatatatatatattttttgagacagagtttcgctctgtcaccctaacgatgacaactgcaccctaagggatgtcttaagggatgcccaggctggagtgtagtggtgcaatctcagctcactacaacctccgcctcccgggttcaagcgattctcctgcctcagcctcctgagtagctgggattacaggtgcctgccaccacgcctggctaatttttttgtatttttagtagggacgggatttcaccacgttgaccaggctggctttgaactcctgacctcaagtgatccccccgcctcggcctcccaaagtgctaggattacaggtgtgagccaccactcccagccctaatttctgtattaatgttataggaaagtctctgtacgtgaagaggttgcacgacaaaatgaagatgcagttaaacgtgaaaaatgtgcctctgaaaacaattcgactgatcgaccctcaggtggatgagagccgagtcctgggcgccctgctgcccttcctggatgcgcagtatcagaaggtccccgtgctctttcacctggacgtgacctcctcagtaagtgccctccagcgtcagccgatggccacatcagtaaagacgtggtccccatgtctctgcgtgactcctccccgtgtatagaattccttgtttccacacgcacagtcctgtgaagcttaacagtgggaatgtgctctgagaagtgtgttgtcaggcagtttcctccttgtgtgaacgtcatggtgtgcgcttacactaacctagacgtagagcccactgcacacacaggctttatggtacacactgtcgctcctaggccgcaaacctgtgctgcatatggctgttctgaatcctggagccaattgtaaaacggtgtatttatgtgtctaaacataaaaatggtacagggaaatatagtattaggattttatggggctgcccttggagacatgggccgttgttggctgaaatgttgatgttgatcatcaggatcatcgtgacaaagagcaaaataaggaggggttacttagagttgggagaactcgccatcgtgtcgtgtgtttacacctcgtgcgattctgttcttaggtgcagactggaatttgggtgtttcttttcaagctcctcattttacaatacttaatggatataaatgggaaaatgtggcttcggaacccctgccatttgtatatcgttgaaatcctggaaaggaggacgtcagtgccgtcgaggagctcttcagcgctggtctgtactgtggggcgttttcgcctggcgtggggggctcttgggttctttctggtcttactgaagtggaatggcgcgtttaggagactccacatctttgccttacttagtgcagcagctgaatgcagtgttagtaaagaaaagcccatctttaaactcactttttaatcatgtctgggataaaagtactcttctgttaattagcagtgtcttcaatatttctgttcaattcaggcttcatgctgtatgcccagtctgaatcccagctgtgctctgaatctaggaaattcatctgttgaaagacctcacctttcctaatgccagctaagatgagaaggagatgtttgtcaaaaatttcttagcaaaagagagttttatgttcactcacatacataatacatgtatagcttagtggagaaacttagtttcaggaagttgggttagaaagtgatttcctggctcagaacgcagctcccacagcaatgccttacttaatgtgcaaaagatatgctgtggaaaaaaagactatacagaaagctacatattttcagtgcgtttttcataaaggtccatccaatatagataacgtggagggttaagacacaaaagcatttcttagaaagtcttcttgtaaccatttcattaatgtctctcctttccagcgtacacgtgtaccccagttcagttttcttgacatcttcccaaaagtcacctgcaggcctcccaaagaggtgatagacatggagctgagtgccctgaggagtgacacagagcctgggatggatctgtgggagttctgcagcgaaactttccaaagaccttaccagtatttaagacgattcaatcaaaaccaagacctagacacgtttcagtatcaagaaggctctgtcgaaggcaccccggaggaatgcctccagcatttcctgtttcactgcggggtaataaacccatcctggtcagagcttcggaactttgctcggttcctgaattatcagctcagagattgtgaggcctctctcttctgcaatccgagttttattggcgacacactgaggggcttcaagaagttcgtggtgaccttcatgatctttatggcaagagattttgccacaccatcactccacacctctgaccaaagcccggggaagcacatggtcaccatggatggggttagggaagaagatctagcgcccttctccctccggaagaggtgggagtcggagcctcacccatacgttttcttcaatgacgaccacacaaccatgacattcatcggcttccatctgcagcccaacatcaacggcagtgtcgatgccatcagtcacttgactgggaaggtcatcaagagagacgtcatgaccagggacctgtaccagggcctgctgctccagagggtgcccttcaatgtcgactttgataaactgcccagacacaagaaacttgagaggctctgcctgaccttagggatcccccaggccaccgaccccgacaaaacgtatgagctcacaaccgacaatatgcttaaaatccttgccatcgagatgcggttccggtgtgggatcccggttatcatcatgggagaaactggctgtgggaaaaccaggcttattaaattccttagcgacctgcggcgtggtggtaccaatgctgacaccataaagctggtcaaggtgcacggaggaacaactgcagacatgatctactccagagtcagggaggctgaaaatgtggccttcgccaataaggaccaacatcagttggacaccatcttgttttttgatgaagccaacacaacggaagctataagctgtatcaaagaagtcctgtgtgatcatatggtggatggccagcctctggctgaggactctggcctgcatattatagctgcctgcaatccataccggaagcactctgaggagatgatctgccgtttggagtcagctggtttgggctacagggttagtatggaggagacggccgacaggctgggctccattcctctgaggcagctggtataccgggtccatgctctgcccccgagcctgattcctctggtgtgggactttggacaactgagtgacgttgctgaaaagctctacatccagcagattgtccagagactggttgagtccatcagcctagatgaaaacgggactcgcgtgatcacagaagtcctctgcgcctctcagggtttcatgaggaaaacagaagatgagtgcagctttgtcagcctcagggacgtggagcgctgtgtgaaagttttcaggtggttccacgagcacagcgcgatgctcttagcgcagctgaatgcctttctctccaagtccagcgtcagcaaaaatcacaccgagagagatcccgtcctctggtcgttgatgctggccatcggggtgtgttaccatgcctctttagaaaagaaagactcatatcggaaagccatcgccaggttctttccgaaaccgtatgacgacagcaggctgcttctggatgaaataacacgggcacaggatctttttctggacggcgtacctctgaggaaaaccatcgccaagaacttggccttgaaggagaacgtcttcatgatggtcgtctgcatcgagctgaagattcccctcttcctggtggggaagcccggcagctccaagtctctcgccaagaccatcgtggcagacgccatgcagggcccggctgcctactcagatctcttccgcagcctgaagcaggtccacctggtgtccttccagtgcagcccgcactccaccccacagggcatcatcagcaccttccggcagtgcgcccgctttcagcaggggaaggacctgcagcagtacgtctctgtggtggtgttagatgaggtggggctggcggaagactcacccaaaatgcccctgaagactctgcacccgctgctggaagacggatgcattgaagacgatcccgccccccacaaaaaggtcggcttcgtgggcatctccaactgggcccttgaccctgccaagatgaaccggggcatttttgtgtcacgtggcagccccaacgagacagagctcatagagagcgccaagggcatctgctcctcagacatcctcgtccaggaccgagtccaagggtactttgcgtcctttgccaaagcctacgaaacggtgtgtaagcgccaggacaaggaattcttcgggcttcgtgactactacagcctcatcaaaatggtctttgctgcagcaaaggcttcaaatagaaagccttccccgcaagacattgcacaggctgtccttaggaacttcagtggcaaggatgacatccaagctttggacatctttctggccaatttgcccgaggccaagtgctcagaggaagtcagccccatgcagctgatcaaacagaacatctttgggccttctcagaaggtgccgggtggagagcaggaagatgctgagtcccgctacttactcgtgctgaccaaaaactacgtggcactgcagatcctgcagcagacattcttcgagggggaccagcagccggagattatttttggttctggtttccccaaggaccaagagtacacccagctctgcagaaacatcaatcgtgtgaagatctgcatggaaacaggcaagatggtgttgcttctcaacctgcagaacctctacgagagcctctacgacgcactcaaccagtactacgtccacctcggcggccagaagtacgtggacctcggtctggggacccaccgcgtcaaatgtcgggttcaccccaacttccgcctgattgtcattgaagagaaagacgtcgtgtacaaacactttcccatccccctcattaaccggctggagaagcactatctggatatcaacacggtgctggagaaatggcagaagagcatcgtggaggagctctgtgcgtgggtggagaagttcatcaatgtcaaagcacatcatttccagaagaggcacaaatacagcccctctgacgtcttcatcggctaccactcggacgcctgcgcgtctgtggtgctgcaggtcatagagaggcagggtccccgggccttgacggaggaacttcaccagaaggtgtctgaggaggccaaatcgatcctgctgaactgcgctacgcccgatgccgtggtccggctgagcgcctactcgctgggcgggttcgcagcggagtggctgtcgcaggagtactttcacagacagaggcacaactcctttgcagatttccttcaggcacacctgcacacggcagacctggagcgccacgccatcttcacagaggtgattgtctttctgcacttgtaccctatcccctgtcacccaagagtcctaaatccctcgtgtcaggattcaagattcttccccaggcagcggttagggatcctgcagggagatgctgagacgctgagctctcctccgcggtaagtgtggggagtaggtccagttaaccaggtgctgagtgcctggctctgtgcagtgcaccatgctggtaacagcaccatacacagtgttcacaccaacaaataaagtaccacgtcccaggactgggccaagggcactagggacgcacagatgaatctgtagcccttgtcctttgttagcattagggagcatggagagaccagcacatgaacagatgccatcaatatcatatgataaatgctgtgcttagaggcagcggggagcggtgcagaccaggatgcgagctcagatgagatgttccctaggagaagcccctcgccgatggggaagaatggccgggaagggattgtaggctgagggccttctgtgggcagagccgctgacagctcttagggttcaaggctgtagtgctgagatggggcgatgaggtgcagtcagagagaactactggaggccctcagtgactctgcagagccacatctcagccctatggagcgggcactggaggcacgcttgtctccctggctgggtgaagggagtctgatgaaaggctgttgtggaaaagacgggccggtagggaggccgctggaaccgtacaaaggagaggagcagatggaaccgagagatactcaggaggcaatttggcagggccaataccaccacccagtggggggatggggggtggaggggtccggggcgaccccctggattcctccttagatgagtggacattgcttcatcatgacagataccgcaggaacggacagcaggttgtgggaggctagtgatgatgtccgccggggacaggtttctatgcatcgtgcagctggacgtaggaatctgagctcagtggtgaggcagggattcctgggctagagcagcaggcctcgaggaacgtttcgacttgcactgtgatgggggagtgacctttgggacaggagaattgctgacatctgggggaaggggacagcaccaaccacgaactccatctgaaagcatgagtcgtactataacaggaaatggcatttgtgctgagccctaagggatcatgagaatctcaagtacggaccaagcaggcagagacacgggcctctggggaggagaggaaggcaccctcggggcagggtggggtcgtctctccaatgcctttggccctgtagggcctctcggccccagcgctgccgtgttttgggaaactcctttgggtttggattctgtgccgttgtgtggcaactgcaccgcgctgaacatcgcaggtttctaggatctgtctaaacctggcagcagacttgcaacctttccttgaagtctggcaagtaatttgcatttcttaactctgtagatcaccactttctccaggctgctaacaagtcacgactgtgaaattttagaatcagaggtcacaggcagggctccgaaacccacactcctgtggctgcagcagtttgacaccgagtactcattcctcaaagaagtccggtgaggttccctgccttccctgctgccctctccctccccagccgcagccgtgtggcttctgcgtggcgatggtacccgcgccggttaatgagcgccacagtcacgtgactgtgaaatagatccttgttaaatctctcccagcatccctctcatctccatcatcttctgcaacgcggtgtctggcctaacatcctcctccgagagcaccatcctcggacctcgttaggaggcattccttgggtttcctcccctggactatctgttcttactgaagaaaatcctacctgagtagctgtttctttgtagcctttatgtttcccatcactttggggaattttcttttccatttttttaagacagagaactcacttgaataacttcccttttctttcagaaactgtttaacgaatacagccaaatgtaaaatcctcatttttcagacagattttgaagatggaatccgtagcgcccagctcattgcctcagctaagtatgtttttagtatttttctcagaaactatgtaaaaaacccaaaacgtaggaagtcctagagaattttttccttgaagacagtatagtatcataatcagtatagaaataaaaataacaattcttcccccgcctcattcccccaagtgggattagggaaactgaagagagacaaaaagaaaaggccaataacattacaaaaatagtggaatgggcctgggcaacagagcaagacctcatttctaaaaaaataaaataattagccttccacagtgcacctctagtcccagctgctcagaaggctgaggtgggaggatcgcttgagcctgggaggtcaaggctgcagtgaactgcgatcccaccactgcagtccagcctaggggccagagcaagagcctgtcctccccacaaaaaaggtgaaatgcgagaggtgtaaataatggaacattaacaagctataaaaggatgcctttgaagcctgtgtttgtagacatgttttggtcattattaattttgaattatacaatttgaatttatttcaagttcgagggaaacaacagtaggtaaatgctttttttcctatttattggatatttttatagtgtttgtaggggaagtctgatgctcttagaattaactttgtgcctttattacttaaagtaaaagtgatttctggacctttttgaagcattggatgccatatttcagttcgtggcttaaatctcaacaagaaactggctttggccattggtcatctgaagggaatggcattgcgcacagaactctttgttgaaatggaaaggtccactgggtacaggggctgtttcctgtaatcctagctacttgggaagcagaggcaggaggatcgtttgaggccaggagtttgagaccaggctgggcaacacagcaagacccccatcgcttaagagaaaagaaggaatggaaagttcagctgtcctcacccttagctgcaccggggcaggcccattgaggagcacaagatagggtttctggtcaacgaaggaatgccacttcaaagcagaggacacaggaatggggaagaaaacgagccgctaagagaagatttctcatccccttgtgagagaagaaatcacgatcgcagggctctgaagtttatgtaaaactcatcggaacgggtggccgtgagaccgaaccaacagctcggagaacacccttctgcagctgcacagctttgctttgtttatttgcttgtttttgtgtgtgtgtttgtttttaaaataggtattcttttttttttctttaaataggtattctgttataaatgaaatcaacaaaatacgagaaaatgaggaccgtatcttcgtctatttcatcacaaaactgtcccgggtgggaagaggaacagcctatgtgggcttccacggaggtgagatcagaacatcagtcagggtatttatttatgtatttatttatttatttgtatctatttattttttgagatggagtcttgctctgtcaccaggctggagtgcagtggcgcgatctcagctcactacaacctcaatctcctgggttcaagcgattctcctgcctcagcctcccaagtagctggcattacaggcgtgcgccaccatgcccagctaatttttgtatgtttagtagtgacggggtttcaccacgttggcctagatggtctcaatccgttgacctcatgatccgctcgccccagcctcccaaagtgctgggattacaggtgtgagccaccgcacccagcccagtcagtgtatttatttaagtcatgttggaactgtttctcatttggttctgtgttgtacagtctgaaattagaatattattgttaacctcaagaggattctttccagatgcaattagatttcttaccactgattaccatgaaaacatgaatcctgggatgggaggctgcgtgcacctctcctggactgactctaggcaagctcctcacctcttagcatgtaggtcacacggcgtggagactcccgactcccgacagacactgtcaggaacgcaccgatacgcctgtttggcggggagggagagtggcgggggtcggactatcttcagatctctttttttccaaggaatggtcaccagctatttatgacatagaaaagttggtattccagaaacaggaaagtaagtttacttgaataatttcgtggagaatggaaggcagaccttgccagtgtcccccacccctcactaactgtgatacagcaaatacaacaatgcatgggtgaaagaaccacaggccttatccatgcgtccttcccacgctggccattgcaggtcttaccgttgctgcttatggtgaagctgtcgatgggcatagaatcgggtcgtgtatagtatcgggttgggtggtttctgcgcaggcccattccagggtttcggcttcagggtgccagtcattcattgcgcagcaagataatgacaagccagggtgtgcaatgtccctgcttagggctgagcagcagccgggaaagacacaaagacagttgtgggtggcttcactcttcacagggctgtggcagtctgtccacatcgatgacctccggagatccaccctcatggtttctgatgtgaccaggctgcagcatgtcaccatcagccagctgttcgcgcccggagacttgcctgagcgtgagtcacgaggcggagcccctgggggagcaggtggtggaagggcagatggcaggtgtggagcgtggcgtgcacatggcactaggagcagggccaccgtgtttcgtccctcggcaggagctcggggacacatctgcagaactgactggtggctcatcatagagcaccagggccgagcaggtgcgcttaccacaggctgaggtagagctctgtgagcaggccagccatggaagtgagcacctagaacacgccagagcccaggctggaaggaaggggctgccttgggggctgatcttcatgaccgtgatctctcatctggggacctagcaccacagcaggggccggggaagcctgcactcggaggctgagcacacagactcccagatggcaccgctgccagtccctgtgccaccttctgagtggtaacgcaatcacgtttgcttcgactgcagtgggcttggaacaccgggcggaagacggccatgaggaggcgatggagacggaggccagcacatcaggggaggtggcagaggtggcagaggaggccatggaaacagaaagttctgagaaggtgggaaaggaaacctctgaactcggaggcagtgatgtaagttctggttcttgggacctccccttgtgctgctggtgatgcttctgagctgcatctttaaacgcttttgcattgggagctagaggagtcgccgccgctgtgcaggggtgaggatggcgccccactttcctcacacagtgacggtcttgttgctggttactgggggtcaagggcatctgcaccggcagtttggggggtgcagggcggaggtcggcgtctcttctttgtccgtgaggaccgccgccctgtgctgtttgctgcattgagaccctcatcgcatacgggcggtttggcttttgcccactgtgtcagtggcagaaacggatgacccaaccgtctccaccaacaggtgtcgatcctggacaccaccaggctgctgagaagctgtgtgcagagcgccgtgggcatgctcagagaccagaacgagagctgcacgcgcaatatgcggagggtggtgctcctcctgggcctcttgaatgaggatgacgcgtgccacggtatgagcctccccacccctcttgcccctgcccccacgtgggctcttcctgaggagtgggcatcatttcactgtgtgttgggggacaccctctcaggtttccatggctcagcagaagcagtgacacagtgggaatctaagagcatctctcagattttgctctagaattggcctggccaacggacttcccttcctgggggaggtgggacagaagcactccggagccaacagctcagccacggccatgctgaacgtctgtttctgcctttgtacagcctctttcttgcgggtatccaagatgcgcctcagtgtctttttaaagaagcaagaagagagccagtttcaccctctggagtggttggcaagggaagcctgcaaccaggacgctctccaggaggcgggcacattcaggtactgtgactaaaggaagcaaggagtggctccaatctggtggcagcatggggacctgcctgcagggatcctctctccatccgggccatggggactgagctgtttctttccaaacctctcagccattcaaagctgtaaagtttttccccaagaagcacacagtaggtctggacagtggccaaatggcaggtgctggactcttcctctaatttcgtgtttacagtttttcatactaaaaacttaaaaaaagtaaaacatctgttcttagagtagaacatttaccgacattcatgttgataaccctagaaagggctgctgttttcagtcatgaagttaaaatgacgtgcagagcaggcaggggacaggcgggattttcccagtcctgctgtttgaagaatggtaacagcaaaaccaggacccagcagtatattcactgccatggttatttttctgtcacccatgagactaaccttgattatcttggatgtggccgtgtattgaggaaggaggggtgctctgggccccagacagagggtctctttaagacagactctcagacctcctgcctgaaagcctaagaaaccagtgacttggttatttgggcccagttttcccatctctaaaagacagcggactcctccatgagtccccttccaggtccaagcttctgtgccagtgataggttcgctttgggcctacagccaggtgtgatctgcaggagggaacgtgaggaagaagcggggtgaacggtaatgggggcttacaggggaagaagcggggtgaacgggaatgggagcttacaggggaagaagcggggtgaatgggaatgggggctcacggaggaagaagcggggtggatgggaatcggggctcacggaggaagaggggtgaccgggaatgggggctcacagaggaagaagcggggtgaccgggaatgggggcttacagggggaagaagcggggtggacgggaatgggggcttatggaggaagaagcggggtgagtgggaatgggggcttacaggggaagaagcggggtgagtgggaatgggggcttacaggggaagaagcggggtggacgggaatgggggcttacagggggaagaagcggggtgaccgggaatgggggcttacagaggaagaagcggggtggacgggaatgggggctcacggaggaagaagcggggtgaatgggaatgggggctcatggaggaaaaagcggggtgaccgggaatgggggcttacaggagaagaagcggggtgaacgggaatggggacttacagacaccttcctcgtgaccagagattttctgattctactttttctctagttatccttcgtttctctccttgtcacgccttctgaagggattttaggagatcagaaatattttcatttccctccgttcctccttgtggactctcttgatgcttttttttttttgagacggagtctcactctgtcgcccaggctggagtgcagtgatgcgatctcagctcactgaaacttccacctcctgggttcaagcgattctcctgcctcagactcctgagtagctgagactataggcacccaccaccacacccagctacttttggtatttttagtagaggcgagatttcaccatgttggccaggctggtctcaaactcctgacctcaggtgatccactcgcctcagcctcccgaagtgctgggattccaggcgtgagccagtgtgcccggcctgttgatgcttttgaatccctgactccactccccgggaccagccctgagtcactgaacctcctcagtctgctcttccccactctgctgttcacgcagcactaggcctggctccgtcgtgttctgtggtcaccgtgaggcctgcgcagccgctgagtggtggccagacccgcaccctcagctcacctgccccagggccagcagcaccctgactacctcgattcaccaccactgtgttctggggactggagtcctttgccctctcgggattaaacagcccaaatcctgagagtcctttgtgtcccgaactctgcctgcctgtccagatacagcagaaccaggctcagcggctccagatagggcggaaccaggctcggcggctcccgcctctcccagcgcttgtcccagcgcctgggttttccttctgccttttgtgttcgcgacacttttcctagtttgctgttttctccctctgtgcactgggatgctttattttcccaatagacattttaaaattcttgccaggttcctctgtactatatatttaaaaaatgtaggtatttctttttattctcttcaaaagagaggcttcgcttttcccccaacattaattaccttgtggggttttttttttttcgagacagagtctcactctcgtcccccatgctggagtgcaatggcgcgattttggctcactgcaacttctgcctcccgggttcaagcgattctcctgctcagcctcctgagtagctgggattacaggtgcctgccaccacgactgtaatttttgtatttttagtagagacgggatttcaccatgttggccaggctggtctcgaactcctgacctcaggtgatccgcccgcctcagcctcccaacgtgctgggattagacgtgagccaccgtgcccagccaccttttaattcttatcctttacacaagaattttgaaatagagctattattgttacatgtaaatatatacaacaaaatatatataacaacaaaatgtcttgtagttaaccaattatctttctgtctgcctatctgtgcattcatccatccctccgcctgcctgtccatccacccatctgtccgtccgcccatctatccatccacctgtctatcagacactcagatctagtgtacaaaaacatcaacaggaacaaatacttagttccagataaacatgtgccttcttgtttagtttgatctgggacaaattcattttggtctcttcatctgtattatagtctatctacaacagatttttaaaatatttattttttccaaatgaatcgtcataattttatttatttagagaacctcgatgacttgttctgaaaaatagttacatacaaaaattatgcagccttgcaaaaaataaagcagataagtgcggtggctcacacctgtaatcccaatactttgggaggccaaggcgggaggattacttgtgcccaggagtttgagaccagccagctagggcaacatagtgagaccccatctcaacaaaaaataaaataaaatttaaaaattagctgggcatggtggcactgggtgtgttgttcctgtctacttgcacggctgaggtgggaggatcgtttgagcccaggtattccaggttatgacgatctatgattgtgtcactacaccgcagttggcgtgacagagtgagaccctcacatacatgttttaaaaataaaaaagcaaacactacttcacccttccagtaacctaatgacagtttattagatgtagaattaagttccattccagttccgtctctaatcttagacatctttgtgagtctgttttctaggacttaaaaatgatggaaatgtcaagttattgctgtcgctgtagtgtggtaaatagtagactagttgttttgttaatgctcaagaaggaacaaaatgtcaaaaggtggcagaccgccactctggttcctctgacccgtggtggcccatctctcttctgtgctgcaggcacaccctctggaagcgggtccaaggtgctgtcacccctctgctggcgagcatgatatcattcatcgacagagacggcaacctagagttactgaccaggccagatactccgccctgggcaagagatctttggatgtttattttcagtgacacgatgcttctgaacattcctcttgtgatgaataatgaaaggtgagtggaaggctttctttccctggggagagaaactatcagaacacagcaggaccctaatatgctctcccaagtgctgggtgaaacgcagccctcaacttcagagcaacgttgacatgggtgctttctgcagtaacaataggaagtttggccgggcatggtggctcacgcctgtaatcccagcactttgggaggccgaggcaggtggatcatgaggtcaagagatcaagaccgtcctggccaacgtggtgaaaccccgtctctactaaaaatacaaaaattagctgggcgtggtggcgcgtgcctgtattcccagctatttgggaggctgaggcaggagaattgcttgaacctgggaggcggaggttgcagtgagccgagatggcgccactgcactccagcctggtgacagagcaagactctgtctcaaaaaaaaagaataggaagtttacgaagctctgagaaatttctgttttatctccaccctcctcatttccctgctttcagagcactggttctagccagacccagcatggcgtgacacggagacagtgcgctgcgaacagccccacaatctgtgctccttacccctgggatctgtgctccctccccgtccctcattccctggtggagcggcacagcccccacccccttccgcaggcctgatgatgtgcggctcaggctcagctcccaatagcttccacttcagctttcaggggcttcaattctggatgtagatttataaagaatatagaaataaatgtgcccaggctcggtggctcatgcctataaccccagcaatttagtaggctgaggcaggaaagtttcttgaacccaggggttgaagaccagcttgggcaacatagtgagaccccatcactacaaaaaatttaaaaattaggcataacgtggtgcgcacctgtagtcccagctactctagaagctgaggcgggaggattgcttgagcccaggagtttgaggtgagataggatcacaccactcactgcactctagcctgggtggtgacagagtgagactctatctcaaaaaaaaaaaaaaaaaaaaaaaaaaaagagtgagagagggagggagacagaaggaagaaagagaaagaaagagcgagagaaagagagaaagaaagtaaagaaagaaagagtgagagaaagaaagaaatggaatttgaattgccagtggaaacacttatttaaaagacaaggcgctgctgatgttcatgaagcaaagactctaacaagttgtgctctgtgttacaagttatcaaagccagacaggttcaggaaccagaagacttggttctgcccgagattttgggcaacacacttgacccctgtcagccttggtttgtttttgttttgcctgtgaaacaaagattgcataagacagttccctagttctgtcataacagaaaccctgtactgtgaaacagatcagcgccgtctgcctggcctgttggcccctttgtttttgaggtctgagaagagctggcatcagtggcagatcttatcttgtgttttgagtgacgtctcacaaaccctcttcttatcatccctcaccttattgcagacataaaggtgagatggcctacatcgtggtgcagaaccacatgaacctttccgagaacgcttccaacaacgtccctttcagctggaaaatcaaggactatctggaggagctgtgggtccaggctcagtacatcacagacgcagaaggtgaggctacctcaagacaggtcagattcagcacaggtgaatcacaaagggattgcctgacagtgaaaagcagatgggtggctagaattgcaaggtgaattttggagtttttagttttcacactttgtttgtgcagtaagcgtccaatttacgtcaccgcgtcattttaaagtttctgctgaaggagtgagaggccccggcgggaccagaaacctttcgatcctatggcagcaggagcctgtgagatggtttttagtgccgtgatggccagggatatggcgaaatggggtgtgttctggcaagaggaggactgtcgcctctatcagctggtcattcccattctgggccttctcagactggggcactggactcggaagatgcccccaggagaggcgttctcagaaggcacgagcgcctggagcatcccctactcccaggtgccccatcaggaggcacctcccagctgtgtctcccgagtcacagcccagacacagtgctgagctctgctgccagatgccagaagatttgccctagtccagaaaaaccaacgacaacgcaacacttttacaaaagccatctttcatacatgcaatagtcttttccacgtttacttatcgtaccatttggaagactcagggtggccttcttttctaggttaccattctgccactttttctcaaagcagtctctctcctcatgagcatattcctttctcaggacaataccccaactgaccctgcttttctatgacagcatgcgaattaggggctgcaccccgcccactagaagccagatctttctggcttgcatgctctgtgacccccagcccctgaagagcagcccacttgttcctaatttacttggacccgggggttcctgaagcatgctgtgacctgtagccatgcaacatacaatgtagccatgcaacatacaactcagtcttatctagatgtttctctttggggctagcttggctgtttctgacctaaatttgacactgtttccgccttcctttattttattccactggaaaaatatcctaggccaggcgcagtggttcacaacaccttgggaggccaaggccggcagatcacctgaggtcaggagttcgagaccagcctgaccaacatggtgaaaccccgtctctactaaaaatacaaaaaattagctgggtgtggtggtgcatgcctgtagtcccagctacttggtaggctgaggcaggagaatcacttgaacctgggaggcggaggttgcagtgagcagagatcacgctacccaccgcactccagcctgggcaacagagtaagactccatctccaaaaaaaaggaaaaagaaaaatatcctaaatgtctagacagtgactattccttcaattccctacaaaatcaggcagttggtacccctttgtctacgagctcccattcaacaaggcgtccccattccccttcactccggagccccctggaggcaggggagcgccatgacttagacgcactccaggccgctccttggtttcctctctgcaggactgcccaagaagttcgtggacatctttcagcagactcctctgggcaggtttcttgcccagctccatggagagccgcagcaggaacttcttcagtgttacttgaaggatttcattctcttgaccatgcgtgtgtcaacggaggaggaattaaaggtagatgtttagatactggctaagggtcaggtgtagagcttgcatgatggggactggatgcagacacggagacgtttcctcagctgcctggagctggtgctgtgaagtctgggaacagaacatggtcagcgaagggtgccggtgggtgaaggggtcgcccagtctcctctcaatattcagtgctacaccctcagtccaccgcccaggggctcctaaaacacggagctttctgtgaacatgagaagacctccaatttccttgacatagcttctttttaaatgttgagtttctcttgaaaaaaattaaatacgtaactaaccctacagggtaagaataaacaagtgaaattcaatagaaagtcatacttttgactacctaaaaattttaaacttcagtacataaaaaaggagagtgacaaatttaagaacatccttacagctaatatgactagaggttaatattcttaggaatcaataagaaaataccctaagttttaaaaaatgggtaaacgttataaaacaacaattttataatctcattaagcatatcaacatccaggaaacatttgaaaaattgcttagccttactattaatagcaaatcaacacaacagtttttagatatcatgtttacgtattcattttgcaaagctgatttttaaaaacaacagccgccggccagtgctgcaaagaaatagccaggccacgcggctgacagtgtagcgtgcacagtgggcgccctgcagggctgcgtggcagaacagttgagcaccttatccgatctgaactgctgactctgtcctgaggaaactactggagatgtggacaaatatttggttcacagggatgtccttttcagctttgcttcgaaaaataagaaatagtttaattgtccggaaatacaggatgggcaaattaaagtatggccgtatgatgggttattgagcagccattaaaaccatgtttttcaagtatactcagtcatagggaaagttcatgatgtcatgttcagtggcaaaaagcccagacgacacggtgaccttaacgtgggaggagaggcagatagaaaactggacagaagcaaacgggacagaatagcacacatggtttctaatttcctcttttatggttttccaatagttcggatttcccacggggaaaacataccatttttgtaatttaaaaatatattctaaaagcttttttgaatcccagtttctgcagatggctctgtggtcctgcactaggaaactgaaagcggcgtcagaagcgcccgaggaagaggtttccttaccgtgggtgcaccttgcctaccagcgtttcagaagccgtctgcagaacttttccagaatcctgaccatctaccctcaggttctccacagcctgatggaagcccgttggaaccatgagctggctggatgtgagatggtatggccctcctccgcctgccctgagcaagccttgtggtgcttccaactccactctgggaatggagagcttctggggctgtgttccaagtgggagatttcttcacaaggcacataccttagctgaattcagagatgttaaggacacatctcgctgacgcttctcacatcctagacaatgaaagtttaggtcgcaagcctgggacacaagtatacatgcagctaacagccggggcctctggtgggccggtgggaggggcaccgctcagccacgccctgctgtccgtctccccagaccctggacgcatttgccgcaatggcctgcacggagatgctgacaagaaacaccctgaagcccagtccccaggcgtggctacagttggtgaagaatctttccatgccgctggagctcatctgctccgatgagcacatgcaaggcagcgggagcctggcccaggctgtcatcaggggagtcaggtgagacccaggagccctcacccactgcttcatctggcgcgcgctcaccaggagcctgccaagtgccaggcatgtccatgagaagacgggcaggtgctcctgccatgggaggggctccgtcctcacccgttcactccgcatttgccgaacccttagtgagtgccaggcgtctcattagggtgctggagacacgagaggcggctgtgcattcagggagcgcactgtgtactggggccgtagaaaggcagacgggctattgtgatgccgtgtgagaaatgctgtggtagaaaggacaccccgggcgggcaggtgcacagagcaggacaggccctcagggccagagtccacttccctaaaggtgaggtgggacttgacaggcgcaggatcatgcagtgagcgggttgtggtggtaccccatgcagaggcatcacagtgggacaccgagtcccagctaagctgagcgtctgagagcgagagctgggggcgggccaggaagtatgtcacatagggcttgcttgtaatcccagccgctgggcctggaccccgggtcccgcatctcttctcccgtctccctcctcgtttcacccttgggttccttggtgggagccgagtgagtgagtgagtggcgccctcttttgacagagcccagtggagtcggattttctccaccgcactcttcgtggagcacgtgctcctaggaaccgagagccgcgtccccgagttacaggggctggtgaccgagcacgtcttcttactagacaaggtgagtacttgggctggcctcagcacatgcacggatccacccttttccgaaaggaagaacagcactgacagtgatctgcggctgggagacgctcttttggctctgaccgttttgtctagacatgcaaaggaaggtgatttcatcactaggccattacattttccatgtttaattgtttaattatttaccctctgctgattgctaagtcagagcatatcatttagaagtgattccaggaactgtgtgcagaaaggggctgacgcagggaacatgcttgtgaaaccttcggcagggattacctggcctttggagtgaccccagaacagaccactagcctggccatctgtggaagctgttaccattttcatagtcatggagacaaggatgtcagagaatgccaccggggtttggggtcttcaaaacagtgctgtcaacagaaccaaggaacaggaagccaccatgcctgtcactcaacacccttcataaagctactaatgtggggtggtctgcagaaagaaacctgtgaccctacagtgatgcccctctgtggccacgcagtggtgtccagcaacagtggccactcagccaaacacagcctcagcctctgcctcacccgcacccgtgaccttcacgtgagcacatccagagccctcaccgccagggggtctggaagaggcagcgctggctgtccgacctttggagcacaggaaggtttactaaaaggaggccagcatggatgctggatgtgttgactctgacctatcaaaacatcagcggcttagacacagtatcagctgatttcccacccaggatgggtatgagcagcccaaggctaaggtaccagctccccggaggctggcacggagtcaggtgcccacgctccgtcttgtcccttcattgtccctaatgttcagcttccaccccgtggcctggcgtcacagcctgtgggacagaaagcaggggaggtagaggacaggccgttttccttaagagcccaatcccggacacgcacacgccacaccagctcgtgtctcgtggtcctaaacttaggcactcggccttatctggttgcaagaaactgaggagtttttcgtggcatggtcatgttccaggtggaacttgagttcttctgctgaaggaaaaggcggagagaggatagtaggacacagccggtgccccccttccacccttttccccacacccacacagcatgcagcctctccaagtctcatcatgtctcggcgctctgggagatgcacagggctttcagccaggtccagcgtgggtcataagggccaggtgcccataaacccaaaggtaaaggagctggcccctgcctgctcacatgcccacaggatttgggaggttaggaacgtggggagggttttttttggcgataaaatggcctcagaaacttactgggtttctggtttatttccttccagtcagatctctgtgcaggtaaccacagccaaagaccttacctcgttagttttcctgctggaagcctgacttgtacccctacccagcccccgctgaagagcagcccttgggaccatttgaaacaagaggcttgggggaaagccctgccttccgccgtgaggctggctccctcggccgggcaggaagttgtcgacggaactgctgcaggatggcacgggtgggactgcgggcatggctggcttttagttgttttggatatgtaccttgaaggggaattcctggatcatttgataactctgtttaactttatgcagaggcactgtattgttttccacgggggctgcagcatctttcttacatccccaccagccaggcaccagggtctgaatttctccacatcatgggcaacacctgttactatctgatttttttcataatggccaccgtgataattcattgtggtttttatttgcatttctctaatgactagttatgatgagcatccttcatgtgcttgttgggcatttgctgtcttctctggagaaatgtccattcaagtcctttgcccatttttgaattgggttgttgattaacaaagttattaggatattaaaaatacacacatcacttccaagtaagattaatcccagcaattcaaggatggctcaaaataaaaaaaaaaaaatctgtaaatgtcatcagttatataaattaaaagataaactctatatgatcatttcaaaatgtagagagaaagcatttgataaaattatttggaaagaaatacccttgtcaaacttggaacaggaaggaactctccttgagctcacaatgcccaaggtagacataatattaagatgtctataccaacatcatgcctgcccatcaaattccattagtacagccattaaactatcttgtacagtgatgatgtgtattgcctaaaaaccagtgtttccacttctaactatatcctagagaaacttctcatttgctctcagacatatgcaagaatgttgaatacaggactgtcaggaattgcaaaaaacctaaatgcccattaaccagcagacaggtaactggtgtctttatcagtgggtacaggagtgatctggacctaaggtatcatgaagagaatgagttgcagaagcctttatacaacgtggtatcattgatatcaagttttaaaacattcaaaataataactccatgttcagatatgcttacagctatcctaaaagcagacatttagaaatatagttatctctggggagggacggagggatgtgaagttgtaactatatgcataatgttttgtttctctaaaaaatgatctatcgcagcagcttgggaggctgaaagaaaattttaaaaaatttaaaaattttaaaaaatgatctaaagcaaatattccataaatgctgagatttcttaaagcttggtggggggtatacagatggtcattattattacttaaagtttgaaatatcttagtgagagcggaggagaccttaaaagaaaaagaagagggaaaatcgtaacttgagaatgtagtcccctgacaagcagcataatcacaaaacgagcattcagagttcaagcgttaaacacaggatcacaaaggcctcgcaccccacaccccacacacacggcgcagccttggccctgaatgtggtgctccctctgtcgcccggcctggccgccctcagccctcccccctgctaatgactcctgtccctgcctttcttcagtgtcttcgagagaactctgacgtgaagacgcacgggccttttgaggccgtgatgcgcactctctgtgaatgcaaggagacagccagcaagaccctcagcaggtgagaccttaggtttggatctgtgaaggcgagaattctgaacctctcgtggttttcacttcttctggccagtttctctgcttcagaactgattgcccttcttggattctaggtttgggattcagccgtgctccatctgcctgggagatgcaaaggaccccgtctgtctgccctgcgaccacgtgcactgcctgcgctgcctcagggcctggtttgcctcagagcagatgatatgcccctactgtttaactgccttgccagacgaattctctccagctgtttcccaagcgcacaggtacaacaccctttctctcaagaaagcatcctttttttcattttccttttttggcaaacacaatattcagaaatataaactctattaaccttcatttggtagaaaacctgacctcagagaactatcataagagacgccacttacgtactttcataaatatctggtatctcaagattattctctccccaagacatacacatacagatttcagacaacaaattcagaggaactaagccagaaagtcttaacaaaggtcctcaccagaggcccaaggaatgtagacgccagtgtttttttttttttttttgagacagtgtttcactctgttgcccaggctggagtacagtggcacgatctcagctcactgcaaccttcacctcctgggttcaggcaattctcctgcctcagcctcccaagtagctgggattacaggcatgcaccaccatgcccggctaatttttgtatttttagtagagacagggtttcaccatgttggccaggctggtctcgaactcctgacctcaggtgatccacccgccttggcctcccaaagtgcagggattacaggcatgagtgaccacacctggccgacgccactggttttaatgcatcagtatcattcacagtcactgacctgaggatcaacccacttcttgtctagctttttggagctggttaaaagcagctctggctctctggactcagcaggcctcagcccggctctgtgagtggttggttttctttccttccccttccccccttctcaggcctcctaaaagtggggcaccaggcaagcccagtggatgggttctttgacatactttgggatattgaagggtattgttgccgggtccaaatgatcaaagtgtttccagaaagggatgcatgtaaatatcatctgctgaggttttgaagactagctctaacgggtgagaggagtgacttgaatctttcaatttaaaagtaaaatgccagccaggcatggtggctcacgcctgtaatcccagcactctgggaggccgaggtgtgtggatcacctgaggtcagcagttcgaaaccagcctggccaacacggtgaaaccccatctctactaaaaatacaaaattagccaggcgtgatggtgcgtgcctgtaatcccagctacttgggaggctgaggcaggaggatcacttgaacctgggaggtggaggttgcagtgagcggagatcgcgccactgtactccagcctgggcaacaagagtgaaactccgtctcaaaaaaaaaaaaaaaagtgaaatgctgtgcaaatctcaagtcattctgtaaggaggcatttgggaaacaccatccacctgtcttctgtttctcgtgttctaagggaagccattgaaaagcatgcccgcttccggcagatgtgcaacagtttcttcgtagacctggtgtccaccatttgcttcaaggacaacgctccgcctgagaaggaagtgattgagagcctgctctctctcctcttcgtccaaaaggggcgcttaagagatgctgcccagagtaggttgctttcttcctgtaaacctagcccctcatttcttcatctcgcttctgcatgtctcatgcagtgagctgcctttttctttctggtttaaggacactgtgaacacacaaaatctctctctccattcaatgatgttgtggataagactcctgtcatccgctcagtgatactgaaactgcttttgaagtacaggtaagaacaacatggagacttgcttctggaaagccctggctttttctcttcatcgcagcgttttgttaccaagtcttcttgtcgtgactagtagctagtacatgatcttggggagctttttcggtgagacacagcctggttacttgtactggttgtgtattctgacattttcacatataggcacatgagtttagtattcccacaagcacacgcatctagcaagaagccaacagtgccgtgaagggaccacagtggcgtgagggacatggaactcaagaggccagaatctgtggtgctgagcctggttccacagcagcgcaactttctgatttttcagatggtagcttagaatcctgctcaccctgaatgtcctagatgtctcctaagtttctattcccctgaacatgggctctatttccttggaaaggatgttgacatccaagaatagtatcacctgtggtacttgtatggatctaatattgcagttctcaaagtgttggtatggacccttgggtgtgaggtaggtctctgaggttaaaactattttaaaaattagattactaagataaatttgcccttttttaaaaaacatgttgatacttatgatgatgttacaaaaagcggtgatgagttaaactgctggcccctcacgtgaagacacagtagctggaggtattgttttcttcaccgccatgcacacgtggttttcttcatgccagtttcattttagttttactaaatcttgactcttgaggatttgacttttcaacgttttgtggaaatgggaagcacacacaaaacactcccactacacaccggagtagacagttgcctcacagaaaatcactcatgacaagccctgggttatcagccggctgctgtgttcatggaccgccacccgtgctgggaggaaggatgcacatgatacaggtgtccagggctgggcaggcctctcctggaaatcagcaaagtgagccagcctcagccaaacaactgacaatgttggttggtgatgataacattcaagcttttaagctgaaattaaaattttgaaaagcttatattctccactatgagcttgtgagcttttgaatacttaaagacattttggggcaatttgtggtgatattaatgaatatggatttttttttttaaaacgtagaatacaaatgtgtcaacctttacaagacctgcacagcccagtgaaccaatattttccaaatgaccaatgcctgatgtcatgaaatcatgtgggtcaaaaaagaaaaaaatctatttaaagtatgggcagacctttttgattttaacataattgactgaaaaatgcactgatacagtttcaggctccacattgcaactaacctctagacatgaccatttatcactgtgggcacagcattaaggaataatagccacaatcagctgcaaaaactattaaaatgttcctcgctattccgagtatatgaggacagattttcttcatgttctcccatatgctgcagcgatggggagcagggcaggcaggccgctgacttccaggagccaggccccagggccagcacaggaatggaagaccaaaccactcttctcacggattcatgttttggaaaatattttaaatgttatttaacatgtaatagctttattgttattttaaatgaatgtatatttttgaaaccttttgtttttaatgtctcataattcctaatatcataaatattgataatataacccacataaaagctcttcggggttctcaatttttaagactataaaggggtcctgaaaccaaagtttgaggacagctggtctaaaatgtgagttttatattcctccagtattatgctaaaaggttttccataaaatcttagaaaccacgtatatgtatgtatatgtttatacacacacacacacaggacagacgaccgatagatagatgctcttttttttagtaaggtatgtctccagatctgagagaaccaggaataatatttctctttctgcagctttcatgatgtaaaagattatattcaggaatatttgaccctgttaaaaaagaaagcattcataactgaagataaaactgaactgtacatgctcttcatcaactgcctggaggtaagtgaactctctcttccctgaatttcttttggaaactatctgaaccacatggtttaaaatttacagaatataattttagtcagtataattaacgaatgctctgttccgtgcagaaaagaagaaaggtttcaaagacgcggcttctgccttcagcaacgtatattttggcatttacttgcatatacatacaaaacagaacagcctaggagaatatactgccaaagttaacagtggttatcattgagtggggacattatggatactttttatcttcatatttttatatccaaaatttttataatgtaaataaattagataattttttttcctcataggttcacttttcccctccttcttgtccttaaaataaaaaggaatgttaggtttccataagtcaagaaatttacactgaaacctacagtaacattcttctatccttccttctccacagtcacattggcgactgtagaagcttggggcatccatgtttaaaaaaataatatccttttctttcttgttccttgttcctcaggattcaatacttgagaagaccagtgcttactccagaaatgatgaactgaaccacctagaagaggaaggtcgtttccttaaggcatattctccagcaagccggggccgagagcctgccaacgaggcctcggttgaatacctgcaagaggtggcccggatccgcctctgcctcgacagagctgcagatttcctctcggagcctgagggaggcccaggcaagtcttctctgccttgctttcctttgggtttaaagactccgttatttagaaattcaggaagtatgggaaactagttcttcgaatagactactactgggcttttctacatcccctctcccctggatgtgtttctgtgaatgcctgtgggtaggtccgatgccctctggttggccttgtgtcctacaataaatgccctaagtcaccagccactcacccgctttctcgttggcctctcagagatggccaaggagaagcagtgctacctgcagcaagtcaagcagttctgtatccgggtggagaacgactggcaccgggtgtacctggtgcggaagctcagcagccagcgggggatggagttcgtgcagggcctctccaagcccggccgcccgcaccagtgggtgtttcccaaggacgttgtcaagcagcaggtgagaagcggggccgggcagcacacaaacatgcacccccacagccccatacaccccaaacccacacacccccctaccctcacaccctaccccccccacaccccaccccctcacaccttccccaccacataccctcatacccccacacctcaccctcacacccccacacctcaccctcacacccagggatggtgccactgcttccgcgttccgcctgcccttagcatccccagagccaggaaggaaacctgccgcttgtctgtctggtcctttgtctctgtgcttcagctgatttgccccagcttgtgatcatgtttacactgcctgctgtagggccaaggtgagggcactcacctcagagcttctttaattaggcatcacttctaattgaatttcactcaaggaaagtagaacattcttgtggcctttgctttcagcgaattaaacgtagttcagcttgcaaggtgcgacctttttacctctggcaggcagagacaggcaagagcaagaactaggaatagaagaattgcagaagaggcttcaaggccaggctgggcacagtggctctcacctgtaattccagcactttgggaggccgaggcaggcggatcacttgtggtcaggagtttgtcaagaccagcctggccaacatggtgaaaccttgtctctacttcaaagaaaaaaaaaattagctggacatgatggtgggtgcttgtaatcccagctagtcgggaggctgaggcaggagaatcacttgaacccgggaggcagaggttgcagtgagccgagattgcaccactgcactccagcgcctgggcgatagagcgagactccgtctcaaaaaaaaaaaaaaaaaaaagaggcttcaaggcctctcagtggtcctttccagatacccagaaattaacaaattcttattgtccaggggatacaaaaatggtactaagaaccccggcactgtttgactaccacctggggtttagagttgacatgacttgagccacccggcctcaggtgtggtgcggtgcgccgcaaacggaggaagcaagcacctccccaggtagcgctgccgtcggcaggcattccctgcacttgcacctcttcgtctactgaggaggaagctccctgcgaagagggcaccagactgtcctgcctcaggccaggtcagggaatcccagcttggctgcctttaaacctcgaatgatcaaccacctggttcctgtacccgttcagacggttctttgcaagacattcctcccattgttcacccccaactaacctctgtattccaggggctgcggcaggaccacccaggccagatggataggtacctggtgtacggcgatgaatacaaggctctccgtgatgctgtggccaaagctgtcctcgagtgcaagccactgggcattaagactgctctgaaggtaggatgggcccgtggcttctctctgataccaggtggcatcccttggagcctgcatgttccctggtttatgtcaaatgatgcagggtgatggaccactgatgcagcccatcacgtgacactgtattggaagtcacgtgcccacagcctccagggcgcacctggctagtgtgcgtgaaccagtggctggaacaggacagctatgacagttgagctgggttgacagatttgctgtgtcttgctgatctgccaagtccatcagcagcgccttttgatttatgcccattacttcctttgagaccctgctggaaaacagtctaagaaagatgctgacacaactattaatagcaaaattcatacctagatgtattcataattcagatatgcatgtgtgtttaataaaaatacatatgttggtgtagtgtgggaagttaaaaaatataaagatgtttttagaatctaacctttaaattggtctggtcttgcttcctttttgagtccctgtgccaggaaaagaggaaatggaaaatcctctttctgctcagaagtttctaagaccagtgaaggagtcagaagaacagatggtgattccgttgcttctgtcattaagctggctgctaaatatgcgttgagtttaatctgagagtatttcaggaactttgtagcccaaaagttgctcgccagaagactgcccatgtggggcatgaccccaggtgtccaggcctggaaaaggctccttcccttttggtgggttgagggctgaggcatgtgaaaagtttcttttcacatgcaaacttcgtgggcctctggcccttaggtagatctggcaggcagcggtgcgggggcgtctatcctataatcctagcactttgggaggccgaggcatgcagatcacaaggtcaggagtttgagaccagcctggcaaacatggtgaaaccccgtgtctactaaaagaaaaaaaaaaagaattagccggacatggttgcgtgtgcctgtagtcccagctactcgggaggctgagttagaatcgcttgaacccgagaggcagaggttgcagtgagccgagatcatgccactgcactccagcctgggtgacagagcaagactccatctcaaaaaaaaaagatgtgttgagcttttaaattcttacttgatacccttgattttgcaggcctgcaagaccccccaaagccagcagtcagcctacttcctgttaacactgtttagagaggtggctattttgtacagatcccacaatgcaagcctccaccccacgccagaggtgagtaaccgcctgcagggctgtgttcaaagtctcagtatttggagggattttattgaatagaatgaaagttatcaacacaaatcataccataatttttttatctaggatagaggttctcaaccttgttatgtggaggaacacataaccaagctgtttaacccaaagcttgtagaattataatgaaaactaaagccaagaacataagataatgtttaacagaatagaatatcaaaattaatgcttacgtatgtggatgctgtgtttgtatatgcacaattctcttctctgaaaaatttccccctcaaatggtggtgatttctccatatttaccttgatatttgatgtgtatttggtgtcagtgtatgtctaagagcaattcacacaatattctttgatacatcttaatgttaagtttttttcctgtcagcaatgtgaagctgtgagcaaattcattggcgaatgcaagatcctttcacctcctgatatcagccgttttgcaacatcgctcgtggacaattctgtgccattgttgagggcggggcctagtgacagcaaccttgatggaacggtgacagaaatggccattcatgctgcagccgtccttctgtgtggacagaatgaactcttggagcccctaaagaatctggccttctccccagccaccatggcggtaagagtaggccacaattccatcggccttcactggaacaccccccagagcttgtcactgtagagaccgagctgcagctgtgggaactcttgagcatctttatctcctcagttctctgcctttgtgtcacctgattcttgagcacacaagatagtgacagacttgccttgccctttgttatttcacaggaagctgttctgttttcttcacagacagcttgagaagtccagcagaaggaaagcagagttccctttcttcctctaggcctcctgctgagcagcagcacccaggtgacaagctcacttatctagagctgtctctgtcttcttgtttttcagcatgcttttcttccaaccatgcctgaagacttgctggctcaagctcggaggtggaagggtctggagcgagtccactggtacagtaagtgttggggtctagatgaccccacactcctttgagcttcaaagggtgtccagatgctatgaagcattgggttcgacttggggtccacgtggtttgtgcctcagggtccaaaaccacctgcattctaccggtggcgtctgcagaagacgaatggcttgaaggagctggcactccgccggctagatgatccaaaccatttcatttctttgtcgtgtggaaaaggccctctgtgatgcacttctgttctctggaatatgccattttgggagaagggagggactgggaaccacatcagagacgcattcaaaggcccaccacaaaacaaagtttttgacacaaagctcttctgaaatatatgaaatatagaaccgggagactgactcatataacccatgacatgtaaattttgctgttgcctgagtaaatattttaaaactagtttttaaagttgttataaaatatgctcatgacaaaaaaaaaaaaatcaaggaaaatagaaaggtctagaatcctgtccaccttgcctccaaaagtacccctggtatgggcctatattctaattgctctttacttgataaaattaataaaattagactcagacatttttcactgacaacatacatttattaagcttcaggcaggtgtcatgtaacttaacaaattagcgtgggatgctctggacagtcattctcatattgtggtcagggccagagagtagagagttagctttcccttttcaatgtgggtcattgggtgaaacctcattagccaatgtgtgtcctgttctcttcacagcttgtcccaacggccatccttgctccgtgggagaggtgagtcttggtatttaagatagggtttgaggggtggcgtgcactcctgggttggaggagggggatcgtgggtcaggagagtgaggctctcggccttccaggagagcacaggctcaccgaggactgcccagggtgctctgagcagggcaatgccaatggcgctaagggtttctagcccagggcttctcagactcagcactgtggacgtggctctgcggcgtgggctgtcctgtgcactgcaggctgtctggcagtatgcctgacctcgagtccctggatgccaggagcacccactcctcccagtgtgacagctaaaaccagacattgacaaaggtcccctaggaaagaaaattgctactggttgggaactgctgctagccattctttctagccactgcagcatggggtcagtgagccttgtcttgatagaatggcaaggtgttgcctggaccacaggctgcattattagccctcagaggaggtgtggtccagatgccaaaggaaaaagccacgtgtaggctgtgcgccatgggggaagaactgttgattattcctctctggattcccaagcatctagcctagagccctccatacacagtatctgtacttgctgagcaagaggctggtgggttgagctgacacgtggtagttagttattagtattacttacttggttgagatatgtctggctctcttacccaggctggagtgcagagtgacatgatcatagctcactataaacattgaactcctgggctcaagcgatcctcccgcctcggcctcccaaagtgttgggattatgagccactgtgcccagcctgatacacgtcatttaataatgtatataagagatacggagggagaaaaactgttacatacacttcatttttctgagcttcaatcacttccttgtccatgaaatgaggacgctgaaatagagtctatccaagaatgctcccagctctgaaattctgtaactggtttggtgtgttatcagccgtgactctcagtatattgtggcacaatatctgattttgaaaaataagcctttggaagtagattatgtgattagatttttttaaataaaaaagtccaagccaggtgtggtaggtcacacctgtaatcccagcacttcaggaggctgaggcaggtggattgctagatcccaggagtttgagactggcccgggcaacatgttgaaaccccgtctctacaaaaaaacacaaagcatcagcagggcatggtggtgcatgcgtgcatgcgtgcatgcgtgtggtcccagctacttgggaggctaaggtaggaggattgcttgagcctggggaggtcaaggctgtagtgagccgtgatggtgccactgcactccagcctggaggacagagcgaggctctgtctcataaaaattgatatatgaaaaagtccaaatgaatataaggaagtcagtttggaagctcttctagtattcttggtattagatcatgaagtgccacaggctagtgtgatagatggagggatggaaaaagtgctgaatacaagaaaggaaggttgaattttatatatttgtctataaagtgtcactctgggaataaagcttaaattgtctcacttatttaaaaaacagttccagtttgcccacgtgcaacattagtgagtacctaccctgttcccatgggttctccacccacccgaaacaagcacacactgggacaatctgagggtgctcacgtctgccggtgataaggaggtgttcatttgcatgatggcatttgtgcataaaatggtactgctccagaagtggttctagtgccctgtcttcaccctagtgtggcaggccgatggaacagagcatctgcattgactgccatgcgccgattggaggcattgaccacaaacctcgggacggctttcatctggtcaagtatgtgggtcaggattctatttcctaagtactcaaactttggggtgttgggctgtttttattccagctgataaagtgatactcaagatagtactaattactccagtacatgtgggcctgtgtcatattgaatagcaatgccaaagtcccagcagtcacacagcagggaggcatctgatctgttgttggatccctgggccctgaaatgcaaagcaggctaccctttaacagctgttaatatgaatacaggtgtcttccttttgggccttgggtgcaccttctgtagaaatatgcatgacataaacagatgatctaattcacgaggacatctatgtctgcaggaccaaaacctgggcatccgtctgtctcagcagatgccatctcacttgccagcaatcttagctttctccattttttattttttgagaaaaatgaaggagacagacatagtcttatgaaataccagacttcagaatccaggtacaaatccgatcccacaatcccatgctgagatgaatgtggttctaaatgctcctttcagagagtgagtgggacctgcgtgggggcctcacattctgactgttccctgcagtcacagcttaaaatactttcatgttatctccagaaactgtcacagtgtcctccatcctctaatagttttgccactgagagcatcggccacactgcatctcctctctgccggactttagatcccggtttttcctttggggagatgagaacaatatggacacccatgggatgccgactgtcctcccaaactctagctgttcttagcccaaccgctcctctcctgacaaagacttcagtggaaaagacgggtccaggcctgcgtcttaacaccctgcccggggatcagcatcaataccacacagcgcagccacctgacgctgagaatgcggtcgggtctggtccaccggaaaggcgagtctatcatgagagagactcttaggaacatggtccaggctttgtggaacagcaagtactcttcacataactctcttctcagccgtaagcctcactccaagtgctgagaaagtgcagcgtgccaaagcggccagcctcagcctctgtcttgtgttctctcgttctttccagagacaaggcagacagaacgcagaccggccacgtgctgggcaacccgcagcggagagacgtggtgacatgtgaccgagggctgcccccagtggtcttcctccttatccggctactcactcacttggctctgcttctgggagcgtcccagagttcccaggtataacccagtgctgccaaacaatgggctcagttaagaacctgctttcgcttcttcccagggagtccttttgtcttgagtcctagctgccatctatgcgttttggagataattagtctacaaagtaatatacaagttatacatcttcatgtttccccctgtggcgtatgatggtatggggggaactactccccagattatacagaatccacttcaaattaacactctgtgtctctggtccacatctgggagtagagaggctgacatcttcattattttacctgtgtcttcattgtagctagggaagaaagagcacactgcataaccaagatggccaacagtacaatctggatattctttatctcactgtaacaacagaaaagccagcagccgttccgcttgctagccttcctttcacctggatcactccgccgttttcatcttagaaaccgccttccgactctatgctggtgctccactcccaatggcctctaccaggctcaccatcttctctacaaaccagatccccgctgaacactctgttccgttgcccccacaggctctgataaacatcattaagcctccagtgagggatccaaaaggctttctgcagcagcacatcctgaaggacctggagcagttggccaagatgctgggacacagtgccgacgagaccatcggcgtggtccacctcgtcctgcgcaggcttctccaagagcagcaccagctctctagcagaagtgaggaaaggggcaagggctgggcggggatcacacagcacaacggcagcgcaagcaggctcgctgtcttgtgggccaccccacacacagccagtctgagctctgtctgtgctgttgctggaaagaatgagagaacacacagagagaaaaccgtgtctagggaaggcgatgcctggggctggaaaaaggaagcactctgcttgcccagaggctggaaggagctgctctgttccctccattcacccctgcctggctaagacctgcggtattcgggagcgtctgcacgcaagtgttcagtgtgcatatatggggagtcttcagttccgaagtcagccccgtaggtcattcccctaccatgctgggagcacgtgtcgtccacacagagcgtgcgtgtcaaaggatcaatcaccatcacagttgtgtgctgatttattaaatgtttatatgtccacagttatgttaaaaaaaaaaagctataaaatattgtattcactgagctaactttctattttaaaaatttaaatccatacagaaagaaaaggtctgtaagacaacttagtaaaatggttatatggttatctgtgagtggtggaattaagagtgattttcttttgctaatctgcaaaaatcacaatgaccattgtgaggacaatgttaatttaaaataataacaataatagcaagaagaagtcctgccccatgacaagaaaatctgctcccacctcaggtacttctttgcctgaaactggcattcctatttattttccattttgaacaatctgattttattttaagcctcttattctggtgggatttcagcaaagtgagcacacccagagtcacactgatgaaatgacagaatcctggaagcaggtggacagttcccgcagcactccacatctgtgtggtctgcctcagggtttgggtggcagcagctgagacggctggcggtagcctgggccactcttactattgagctcaagttctgttctttcagtaatttttttcaaaatgggtctaagattacaattatgtaggatagaggaatttttagagattgatgttatcttcaaaaggtcattaagttggtggtaacaacaggaactacttcaaaatacttagattaatttagaaagctattacctcaaaacgagtgttatttctattaaacacttatttagggtttattatacgcagactgctgtgttctttgtgccttgggtaacctacacatttggagtttttttgtagggcttttaaattttgacacagaattgtcaactaaagaaatgaggaacaactgggaaaaggaaatcgcagctgtgatttctcctgaactggaggtaagcagtaagtgctgacagctgggttgctcctcggtccagaaaggaagggtcccggcgtctgctgaatgctccttgcctgttgcccctcgtagcggtgccagcaagagcctttgactgagccccagattccaatgctccccacctcgagtcactccatcctcctcctgtccccaagtgctcttccctcctacagctggtcatgaagtcagtccgaggaattcctgggaatccagcaagtgcaggcagtgtttttctctccattactttttacagcagaatgtaatgtacgaggtagagaaataaactatcacatatatacccattaaaaatgaactgacaatcatagattaattattcatctagcagccagaatgttagtaagagaaatataggtttctgaatctcattctgtttggggagacatacatctataaacaaacaacactgaaattagaagatcaaagggaatacctgattacatgctcagagcaggggacaaacgccctaatatgcagacacccactggtggagttactgggtgttacaatctgtttgtagcaatacctcacttccagaattttttttttcattttctccatccagcatctagataaaacccttcccaccatgaataatctcatcagccaagataagcgtatcagctctaaccctgtggccaaaataatatatggtgacccagtgaccttcctgccccacctgccccggaaaagtgtggtccattgctctaagatttggagctgcaggaaaagaattacagttgagtacctccagcacattgtggaacagaaaaatggcaaagaaagagtgcccatcctctggcatttcctgcagaaggtatgtctggcttactgtggctccctccctctttcggtgcagagttccccagcaggcctgaaggccctgggcttttacgtagtataatcattcttaacagactattccagtgctttggttttgaataggatgtagcagaagactcagggctagagatcttcatacatatcaaactgtatgattgccagaagcgtaaagtcacagacgaaatacacacccacgttgggattagcagtgacctgtggggaagctggaggccaggagaggacctcccctcatcactcagccagacagaaaaggatgcagctctttcccagccgctctgttcctctctgtccacaatgctggagcatgggcagatcaaacaaaactcctccctgtgcctaagcatcgaggcgtacgtggaagacgggagtgagtgggtgtgtgccggcggtgctggggtactggggagcagtcaagtgtactggccacatctgttggaattggaaatatactttcctaactttcacccatttgcactttcattttctacaacacattgtctaaacatttctctccatggactattatttgctgtctagcaaggatgaagacgagttggaaacttctgttggtcagttgaggagtatgagttcacaatgacaggaaggacttcctgtcaatactgtggcctctctctcagatgcagtttcactacgtcgaagatgcttagatcctaggtcttcggaaggacacccaggaataaggccagccctcgctgcctaagctctgggtctcttctttcagcagcttctctccgtacccagccagttacatgggcccaagggacagatttccttcatcagcctttgatggacgcggctgatgcgtcagctccatagaggctgggctccctcttcgccgccctccatttctagcacactgcactgtctgtagacttgtgggaagaacttttcccgttttcaagctccacgctgcatcacaggaaatgacactgaccagattaagctacaaatacaagtctcgcagccagtctcaaagtctgtaaccccaataacattttttaggtaaataaaaattgttactgggtggtcttcccttctccaggaagcagagctgaggctggtaaagttcctgcctgagattttggccttgcaaagggatctagtgaagcagttccagaacgtccagcaagttgaatacagctccatcagaggcttcctcagcaagcacagctcaggtgtggctctgctctgacaggaccaggactgtcccgcatttggcggttcgaaaggatcactgcataggggaacagggtggggcggaggggaggaggcgctgatgggtgctctatagcctaagcccttaccatgcggtgaagggtgcttgaaccccaaaaacatattagaagctttcgccacagctgaaaagcacctccctctctagctcctcaaactcggctcactccttcaaacagcacctcagacatgcttgtgactgcacaaagcaggaaagatgggctctcggcagagcatgtaactagggtggtttggccctttcagggggttgctatcatacggttcttaccaagtattctgttcaacagatgggttgaggcagctgcttcacaacaggatcacagtctttctgtccacatggaacaaactgaggagatcgcttgagacgaacggttagtatcctgtcccctgtaccactaagcgttccaggagagcctcgtctgaaagctcttctcgtcagcctgactcggcccatccctgtcaacacccagcactgtgtttgtttgtttttgagatggagtcttgctctgtcgccaggctggagtgcagtggcaccatctcggctcactgcaacctctgcctcccggattcaagcaattctcctgcctcagcccctagtagagacagggtttcaccatgttgcccaggctggtctcaaactcccaagctcaggcaatccacccgcctcggcctcccaaagtgctaggattacaagcgggagccactgcgcccagccagcactgttaacgcttaacttgtgtctcttttgatggtggtgtctggataagtaaaataatgtgtcaggaaaataaaccctcagtactcttcagtccctaaatatggcatcaaaagggagctgaaagcatttgaaactctatcagcatatgagatggggcagaaccgagacccggctcccggctgtgtgtggagctgatggcttctgcatccctcctccccacgcctagattctgtgaggagttggaactcctctctgcttaagcataaccctgtcgtttaaaggtgagatcaacctacccaaagactactgcagcactgacttggatctggacactgagtttgagatcctcttgccacgccgacggggcctgggcctctgtgctaccgctctcgtcagctacttgattcgcctacacaatgaaattgtctacgccgtggaaaaactctccaaggaaaacaacaggtttgtgcacgagccaccaggaagtggtgcctgctcagcccagagtccctaagcccagtggggcagacacaagcaagcttcagccccttccctaacagacactcactccttcagccgcccccaccagtgacccgccccatacttgggtagggttttccactgctccaactgtgagaaatgggagcctgctccctgcaacatagagccctaggcccgcatgcctggcctggacgctgagcgctgtctttctgcccctcagctattccgtggatgccgccgaggtcactgaactgcatgtcatcagttatgaagtggagcgggacctgactccactgattctctccaactgccagtaccaggtggaggagggcagagagaccgtgcaggagttcgatctggagaagattcagcggcagatcgtcagccgcttcctccagggcaagccccggctgagcctcaaggtagggctgactcctgccactgctgctcatttggtgtgtctgttgtgaacaagcagcccttggtgtgtttctcgagagagggaagcagcacctcaccctgcagtctggtctgtatctcctccctcacacctgcagctcccgaggccaccacgccacctgtatctccgggccgcagggctctcctgagccctctcctgcagggccatctgcacctcagtcccccaaggaactgttgaggtctttttttgaaacagggtctcactctgtcaccgaggctgcagggcagtggtgccaagcctccacctctgggctcaagcgatcctctcacatcagcttcccaaatagctgagatcacaagtgtgcaccaccatgcccagctaatttgtgtattttttggtagagatggggcttcaccacgttgcccggctggtctcgaactcttgggatcaagggatccacccgcctaggcctcccaaagtgctgggattataggcgtgagccactgcacccagctgattgttgaggtcttgattctaccagttaatggcaccaccacccccacagcccctcttccttcagcctccatgggtaacctgccagcagatgccattagctgtgccttctgtgtgtcctcacctgactgccaaagcccaccctgtagttaaaagcatcctgtacgttggactgctagccactcctaactggtgcccacctccaggttcttcagtccacggcctaaaacccacatctggctctcttcatcctgtgccggatggacctgcctggcctctcatggcatatgggataaagccgacactctgttgtctggtatgggaggccctgtagctcggcccagcccaaccttccagccctgcctccagccacttagcccatttccctgaactgcatcccgtgacctcatgcactgaagccacacagcaggcactttcccatctctgttctttgactggacgcacttgttccttccagctgcagtcatatctactgtacttatgtacggtaccacccgcaactgggccaggaactgtgagagcccatggattttttttttttttttttttttttgagacggagtctcgctctgtcacccaggctggattgcagtggcgcaatctcagcttgctgcaagctccacctcccgggttcactcatgccattctcctgccgcagcctcccgagtagctgggactacaggcgcccgccaccatgcccggctaatttttttgtatttttagtagagacggggtttcaccatgttagccaggatggtctcgatctcttgacttcgtgatctgcccgtctctgcctcccaaaggctgtttttaattcattctcacagccatttcctctggcagagtgactgcctgtgcatggtctgtgcctttagtggctgaatgaataaatgaatgggatatgcacaaatacctgttgccctagcgcctcctgtggcgaagcaggccacgatgatgtgacaatatcttgtcatgtaattggctgtgaggactccgctggattcccggttgtgttactatttccatagatggtgggttaatgacggagaggggcgctcttagccaagggatacacagggcagcgcggcactacgctgcagttttccggctgcagattctgtttgtcatctgctggaaatgtccacgatggatttaattttaaaaaacttttttctttcccaatttagggaatacccactctggtgtacagacacgactggaactatgaacatctctttatggacatcaagaacaaaatggcacaggtgatcccgataaacctgatcctgtgcacggggctttctgccttctcagtgtgtttccctccgtgttaggcctactccagccttgccccgggtgtttgctgtgagcccacagtttctgcggcctcccttacagagagcaagcaagacagcaaatcagcaagttttcttgtagagtaaaagcagattgacatcttgtgggtttgattcttaggaatgatgttgatgcatggccatgcctgctgaagcgggaagtccatggaaccgatttgttcctgctctccgcatgcgggtactgataggtagacctgtgtgtctccatggcctccaggaactgcctgcacaccgtgcgcccaagtgtcagctgttagagagttggccccccgcatgtggcttgggcagtgaaggggctcggctctcttaccaggtggtgagatgccagaaacccagcccacagacatccctctcctgcttttcatttcccaggactccctccccagctcggtcattagtgccatcagtggacagctgcagtcctacagcgatgcctgtgaagtgctgtctgtcgtagaagtcactctggggtttctgagcacagctggtggggatccaaacatgcagctgaatgtgtatactcaagacatcctgcaaatgggtgatcagacgattcacgtgttaaaggtgggtctcacaccgaaaaggaaatcagcacagcccctcaccctggtctcctgcttcccgcgagggataggagcattcagggagtgccactctaggcgctcctgaaaaggatggggagacaagaacaactgctcacccagtcagtccagcataaacaggacacaccagggacagtagagacagacacgcgctagaaatgccagcagtctagatagagcccaaatgtgactgagtacatgaggcccctgcaaacagcgtgatgtgagcgggctgtgaggtgccgcaggagggaactggtagataggacagagatggccttcacaaggagggagatcacattagtacagggcagaacgaagagaagaatgcctgtgtggagagcactcaggctccctggtgcacgacatgagtgggggtgtgagacctcagcccccactcaggaattctattccttctgcaggccttaaacagatgccagttaaaacacaccattgccctctggcagttcctgtctgctcataagtctgaacagctgctgcggctgcacaaagtaagtctggtctcttcctctctgctggacagagggactgcgctcccttctccctgcaggctttaatgcttcatttgctcttccgtcgttttaggagccatttggggaaatcagttcaaggtacaaagcggatctgagcccggaaaatgctaagctcctcagcacattcctaaatcagactggcctagacgccttcctgctagagctgcacgaaatgataatcttgaaactaaagaacccccaaacccaaaccgaggagcgcttccgccctcagtggaggtatggatttgcacacctatggggcggggcagacacaatgttgtgctgtctctcctgtgatcttctatagacacaaaaatagttcttttcttaccacagaatcccatttcctgctttttgtcattaccagggcacctgaggactggctttttggttttaatctctactgggttttctttaagcaattacacaagtgtttttcagacaagagtcttgccctgttacccaggctggagtgcagtggagtaatctcaactcactgcaaccttggctcactgcaacctctgcctcccaggttcaagcgagtctcatgcctcagcttcccaaatagctgggactacaggcgtgtaccaccatgcctggctaatttttgtatttttagtagagacagagtttcactgtgttggccaggctggtctcgaactcctggcctgaaatgatctgcccgctttggcctctcaaagtgctagaatgaaaaggcgtgagccactacacccagcctaaaagtcatatattctaattttataacaagtagactatgtcaaagagaggtacattttaaatttgatagaaaaagctatcctaggccgggtgtggaggcttaccctgtaatcccagcactttgggaggccgaggtgggtggatcacctgaggtcaggagttcaagaccagcctggccaactggtgaaactctgtttctactaaaaatacaaaaattagccaggcatggtggtacacacctgcagtcccacctactcaggaggctgaggcaggagaattgctttaacctgggaggtggagattgcagtgagctgagatcgcaccactgcactccagcctgggcaacagagggagacttcatctcaaaaacaaacaaaaaaaagaatagaaaaagctataccaatgtataaagagtgtatgagaatactcaacattggatattatccatcttttacatagttgccaatctaaaggccaaaatggtatctcattttcagttgtatttccccatttaccgtgaggctgaacatgttttttatatttatcacccatttgtatatcatcctctgaattgcctttatgttttattttttgagaccgtgtctcactcccacccaagctggagtgcagtggcgcaatcttggcttagtgcaaccgctgccttctgggttcaatcgattctcctgccttagcctccctagtagctgggattacaggtgccaaccatcacgcccagctaattttttctattttagtacagagacggggtttctccacgtggccaggctggtctcgagctcctgacctcaagtgattcacaagctttggccaccacacccagcctaaattacctcttcgtatctttttcttttgcgctttgtctctgtaatggttgtgagagctctttgcatagaacaggggttcatcttctctgccgtgtgccacagtgctctatttcagcctttaattttatgaagtcaaatctgacagaattttcctataaagggtctctatacaaaaacacttactaggatcttccttatcccaggattataaactagccttttttttttttttttttttttttttttgagatggagtcttgctgtgtcatccaggctagagtgcaatggtgtcatcttagctcactgcaacctctgcctcctgggttcaagcgattctcctgcctcagcctcccgagtagctgggactacaggcatgcacctgcccggctaatttttttgtacttttagtagagacgggtttcaccatgttgaccaggctggtctcgatctcctgacctcaagtgatctgcccgtctcggcctcccaaagtgctaggattacaggcgtgagccactgcgcccggcctgtcctctctcttcttgtgctttcacatacttgttttattcaccagtttatgtttaggtgtaaagtaaggatttaacttgatgttttcctgactagatcatcaaactccagtcttcctcaccaatatgtttcctatttgctatcttcctccattatgctatgtggcatataccatatacatttatgttctttcaactttttcaacaagtctttactagcctgtgcttttcatgtagataaaaaagatccctttcctagagaatttccagtctttgttaatgtgaaacatgtaatagaatacaaggttttttgaatggtgaggccttgtttatgcaaccctgtaaataaacatcaccttgctagagggcctaaagtcatgtgaaggggccagcacagggcttgctccgtgggcttctgtcgtgtttgtgtactgcatgtgggaagcagcagtcaggcaccagagccttgaacccaggatgctagtcccagttcaggagctcaggtcattgaccttaaactgctcctcaggatttctgggttttttttttttctcgctctgtcgcccaggctggagtgcagtggtgcaatctcggctcactgcaagctccacctcctgggttcaagtgattttcctgcctcagcctcccgagtagctgggattacaggcacccaccgccatgcctggctaatttttgtatttttactagagacagggtttctccatgttggctaggctggtctcgaactcctgacttcaagtgatccacctgcctcagcctcccaaagtgctaggattataggcgtgagccactgcgcctggcctaggattttaagtcttaacgagcattttggttctgctgatgacaacgggaaaaagtaacatgaggggactgattggtccccttatgttatatgggagcctttttttttgagacaggatctcactgtggcccaggctggagtgcagttgtgcaatctcagctcgctgtagcctccacctcctggactcaagtggtcctcccacctcagcctcctgagtagcttcggactataggcatacaccaccacgtgcccagctaatttttgtatttttgctagagacagggtttcgccatgttgcccaggctggtcttgaactcctgacctccactgacccacccacctcagcctcccacagtgctgggcttacacacgtgagccacacagtgctgggcttacacacgtgagccaccatgctgaggagactgttttaaatgctctcttctttggtttttcagcctgagagacactctcgtaagttacatgcaaactaaagaaagtgaaattcttcctgaaatggcatctcagttcccagaagagatactgctcgccagctgtgtctcagtgtggaaaacagctgctgtgctgaaatggaatcgagaaatgagatagaattatttcctcagctatctttggatgactttggagagaagactcctctctcctcgtctgcggcgtggacttgatcatggactggtgcctttgcattcagaaggagagctgtcagcgtagcaccgaattcaagaccaaggcgtgctacctgagctgacagctttttgaaagccgagctgtttctgaaccatgtacatacatgttctgaaactttctcatcattttatgagtactgttcattgagagatgacaatgaagattagatgaaattggaaataaaccaacattgtttacattccaggagacttgtagctcagccacacacgcagtaatgacctgtgcccgttcgcctctggcactgcccacccctctttttttttttcttctaattctgtactcacaaaagagaatctcattttcttctttcttccattcccttaaattctgagtactgtacatatatttctgggttcccacgatgatgtgaaaaactaccagactgttttttgtcttctcacaaagacaagaaaaatcagggcattttgtgagtgccttaagatcaaactaacaagatctgaccctctcccctcacagtgagccactgccccacttcagagggtaagagccaaaagcctcattgtgaaaggcactggacttggaccagggacaccatcagggccttggttttctcacgcataaaatggagagtggattaatcgccaaagattcttctgatctgacattttgaaattgtgagagaaactagatgactgtaaacttggtcacaggcctggttctggcagttctttgcggacttttttctagcattatgccaaataaacatgcagtctcagtgtgctctcgcatgtatgaatatctagtcctttctgtggttctcagccaagacataaaaactaggactcagagcacatacaaaaccagttatgtttcggaaagagggaaaagagtccccgagcccggatcttgtgctgcttttctcactgacgtgttgccttttttctttacaaaatctgctttgatacttaggacctctctggactaatttctcttcctagacagctcagcacagctattgatatgttagaggcagtatccttaatattcattctaaatgagttaacgacttaacttgaaattgggcctaaggagtgagaactacaaaaatacaaaatgcttgtccaggactcagccatgcacaccttgagcagcgccggcaggaggcacggaaggaactgtgctccgttctcctcactgtcatggtgccaccagtgtctgatgaagggcagagtgacccagactgcaggcagtaactgacttcacacagtccctggcatttagtcatctgtgattgttttatcactctggactgtgcagagccacctgccaccgagatctgcattccgactgcctatgaacgggtgtgggggccgggggctggcttgctgaagtcttcaacttgcactcggagctcctttgatacctcagagctggctgtcaggtggcagctcacacccagactcactggccacacctcagcagggggggagtcgagtgtcagtctctttctgtgaaggctttttttttcctttggcctgggaatttttcccatttttatgaaggggttttaaattgtttcattttgtgtgctgtgcttcaaagccttaactgtcaaatcttgcattatcttgtttgtacagaaatatactggcctagcagaggcaaaaaaaaaaaaaatgaattttattttacttgtcacacctgtcttaataaactggagttttgctgctaaagaactcttctctctgggggcagagcttctatttatggcacatagacatcagctaggcttttgggaatcgtttgtgttctttgtggaaatgtcctttagaagcacccatgaagtagtgtgttcagactgtgcacacagaaaacaggctctgccttcacatgtgagacggtggacttttcctctggacaaaatgacagcatcctggcgactccacagtggagctgagcgccactccctgtagccgatctgggactgaaacgcttacacctctgcctcagaaggagtcccccatgccctgcctgaaatgacttcactggacacagcggggctgcagctaacggggtacaggtaggagctaactaacttcacccctgagtccacttgcggggtaagagataaacagtaacccttccaggagcccactgacgttggagtgctaaaaatgccccttcagggggaaaactgcattttctcttccaaaaaggaaaggttcttccaggcgagaaacctgtggtctagaaccacagcaagaagaggaggcatgctggcctgcaccggaagactcactttgtctgccctgcgccagcctcacctcaccctgcagttcccgtttccgccatggatgcctcatcaccaaccctgaccttccccctcccaaccctttattcatcctcactcccactcatacccgcctccctggacagttccctgctgcagagttctttctgctttcagccctaccttggtggtgatttacctgaaaatcttcacaactgatcattatctccttctctttgagacctgactgaaaaaattaggtgtgcacacctgtaatcccagctacctgggaggctgaggtatgaggattgcttgagcctgggagtttgaggctgcagtgagctatgattgcaccactgcactccaacctgggtgacagagtgagaccctgtctcaaaaaaaaataaaataaggaccttattgtgtgtgcaaattatttgcctttcatgaatagttatgagactttgtgcatgtgttaaccgagacggccctgagctatttcagttactcctgtatgttcaggcaattccaatttagaaacaaacttccagtgataaatattgggaagaaaatgtcagctcagggccaagtaggtaaagccacccaagtctagccatgcacacaggcactagtgtgctgaaggaaaacacctctgatttgatacataaagtgtgaaggttgcataactggggaggtggctggagaaaacctgagcctcgagctgagtaacaatccaagccatgattagcatttatattgcattctgcattattctcatcctatcacgttcattaagttcaaccattaccattacgaatcccgtttccagctggaaaaacaagcgccaggaaagtgcatttcccccccaccccccccccccaaccagagcaactttggtcagaagtcacacctaatcaccctctctgcaggatatgctggggatagcccttttgaggaggtgggggtgtatgcgaaagcaacctggggccaaagcagggggaagcaggagagactggaggggccctgggtccagcaagtgctccaccaggctgcccctgctcaggtgctccacagcccataaaaaacgccttcagccctgctgtgcttcccctcacacctaaacttactataagggtcctaccttccccagtattccttcatgatcactgctacctgtgccctgaagcgcaacagaacctcaacccagaggacagccacttcctcagaacccacgatctttgccccatcgccacaggtccatgagtgactcctaattaccaaatccaagggctccttcaccctgaccactctggaacccaacaaagctgacacacagcccagcccagacaggcctgaatgtgggtcctggctctcccatttgccagttctacagccatgggcaagtggctcgacctctctaagcttcagtttcctcgtctgtgaaatatctgtcagtgctcttaagggaggagaccaccccacatattgtcttacgcccaatttctgcctccaaagagagaagtaaaaactaaaaggcagaaatgaaatccacaagcagacagcctgcaccacaccctgggcctggtagttaaagatcgacgcctgacctaatcagtgatgctatctatagattacagacattatatagaaaagcaccgtgaaaatccctgtcctgttctgttccgttctaattacgggtgcatgcagcccccagtcacgtaccccctgcttgctcaatcaatcacgaccctctcacgcagaccccttaagagttgtgagcccttaaaagggacaggaattgctcactcggggagctcagttgttggagacatgagtcttgccgaagcgcccggctgaataaagcccttctttaactcgtgtctgaggggttttctctgcagcttgtcctgctacatttcttggttccctgaccaggaatctaggtgattaatggatggttgaggcagcccctcagacggcttaggcctgccctgtggagcatccctgtggaggactccagccagcttgagcgacatggatcctgagagcgctctcaggcaggcaattgccccagtggaatgcctggccagagcagtgtgtagcaggcccccgaggaggatcaacgcagtggctgaacaccgggaaggaactgccacttggagtccagacatctgaaacttggtaagactggtctttggaacttgcccactccatttgaggggaagcgtggcctgatcacccacggcgtgcctgtactggcactctggtttttgtttttgacttgacttggattgcttgatactttggttttggttttgacctgacttggatatcctgatactctgattttggttttgattttggtttggtgtaaactgtaaaagtgtgtgtgtgccctttttacctgttctttgttttgtggtatgcgtgtagggtgagcgtaatgttttgtcttgaagaagcatgggtcaagcacaaagtaagaccaccccactaggaactatgctgaaaaatttcaggaaaggatttaagggagactatggagtactatgacaccaggaaaacttaaaactttgtgtaagatagactggccagcattagaggtaggttggccatcagagtgaagcctggacaggtcccttgtttcaaaggtatggcacaaggtaacctgtaagccagggtacccacaccagttcccgtacacagacacttggttacagctggttttagactccccacccgcccgccccaacagtggttgagagaacagcagcataagtggctggcagaggcaaggaaagaccagcagagagagaaagaggaagagacagacaaagagggagtcagagagagagagagaaagagacagaggcaaaaggaaagtcaaagagaaagagacagaaaatcaagaggaaaaaaa

SEQ ID NO: 3 - DNA, 137919 bp, homo sapien
cagcgcgcggcaggcggcgagctcgggggccgcaggtgcgagcgggcctggagagtctcccggggcggggagcgggctaggatacagtgggccccgcgggccggcgggccgggtcccggggagcggcgcctgcgtccggatgcccctcccggccgcctcttcctgccggctccaagtttcggtttcgccgccggggtgcccggtccagccccgcccgcggcgcccactgaccctgttccccggctgcgggaggggtcggggtgggggcagcgggcacgcctgggaccccggcgacatccccggagcgcagagcgcggaggaggctttgcgccccggcagtgctgcccccgggaagtggccggggcacggggggtgtagtggaaggggacagccggacccgggcctgcaggtccgcccgggaatcctgcgcctgtacgaatggcaacaacggaaaagtgaagttgcaaaaacagactcctaacttttacgagggaggcatcgccccgtctgaaccgcaccgcgcagcgtccttccgacttggcgaagtcgcccgagcgcggggctcaaggccagggtgggcacccctcccggatggctgcctgcaagccggcgggccgggccctgggggagtccagggcgggaggggaaggagctgtgcaaacatggtggtggcccttccctgcccccaccttgttgactttggttgtggttgggggatgggctttgatttgggtggcagtgtctgtgcttgggaaaaaatgtcagagaaaagacaggaagcggattgaatgcaacagtgttgggtgcctggggctctctcttgtgtcttccggcccctagagcagatggaacaataagatgctttagggggccgggcgcagtggctaatgcctgtaatcccaaaactttgggaggccaaggcgggtgggtcacctgaggtcgggagttcgagaccagcctggccaacatgaaaccccgtttctactaaaaacacaaaaaattagccgggtgtggtggcgcatgcctgtaactccacctacttgggagactgaggcgggagaatcgctagagcccgggaggcggaggttgcagtgagctgagattgcccactgtactccagcctgggtgaaactgtcaaacaaacaaaaaatgctttttggaggatttttcgagttttctggtctgtggttccccagtgtagcattggagaaggaaacacttcgggtggaaagaaagaggcctgggcggtggggagtcattgaaggtgtttgagggagggagtgtccactggtggttgtttcaggtagagtgtggaggggaggaggtacggtgggagccagggcttggctgtggcaggggtaggggagttttaaactctccttctactctgaaggagagataattttagtctctggaataaaagggcagcagacctggagaaaagggatgcaaattgtcccatacacctattgggaacctcatcaaagagaagactgcagaagacagatgattgatgtttttatggcattgggacaggggcttggggctggagaggggaggtgtgcagggttgtcttgttgtgcagataatcactcaggtgatctcagagctgctctcagaggaactggcgaggccgcaggcactcctcttgtgtgtccctgggaccgttcctagatccctctaggcagataatggggcctcagagagagcttctgctccattctgctgtttcatggtgtggatttcctttatagccttttacaaaaggatagcttcccagaactcctgagtatgtggttgctctgaatagccatctcaaaattgaccacagaatctgttttggggtggcatagattagtctcccacacaggtcaagccagggaaccccacccagtgcctccgtccctcgttcaggcccagcctgagtgagcccaccccagtgggaggagagggcagggccagggcagggagggggcctgagtgtcctcctggctgctgaaggcaccagtcagctgccgctccagccactgccccagtggagttctttggttccaagccagcagaagaaggtggtgggtgggccagtgtgccctgaggcttcttactggggagggagagagtcaggtcctccactgttaggtggccaagcgcccaaacgccatctccactctcaccctggatgcaagaagtgaccccggaggcctgagtcctggccttggtctggtttgatgccatccaccgcagaggctgttctgagggcaggtggtcagtgcagagtggcgcgctttgtggatggcagcctccccccattactaggaatctgactgccagcccagtagccctgggctgcctgctcaggccccatcacctgtggggcaggtgctttagtccccttaagaggatgaggagggtgaggcatcagcaggctgagcgccttgctcagggcaggccgtgggaccctgccgaacagcacgtggctgccccacgcctgcctggagcatcccctatccccacccagcccaacccatgttctcagcagcagggatggttctaggctggctgaatgagggaccagggcagagactgcaaaagcttgagagccaagggggcagcacagagcggggaggggctgggcttgggctgtgctcctgttgggtttccattaaccaggggaccagctgggctgctgtgatttcactttcgcagaaaatgaaactgaagccgtggtcacgtgacaggacatgtagtatatagcaggctgccagcgactcctgctcttgcttctggatctgcagggcagtcccagcaggacccatggagtgtccttcgtgccagcatgtctccaaggaggaaacccccaagttctgcagccagtgcggagagaggctgcctcctgcagcccccatagcaggtgaggcccaggggtgctggtggaggctggggcagtggggacccctggagatgtctcacctcccttccaggaaatggaaaccctgggcagcaggcagctcaggtggggccgaggtcctctgtggctactgaggctctgtggctctgaatagccatctcaaaagtgaccacagagtctgttttggggtggcatagattagtctcccacacaggtcaagccaggggaccaccacccagtgcttccgtccctcgttcaggcccggcctgagtgagcccacccgagtgggaggagagggcagggccagggcagggagaggacaaaacaagaagttttgtcggggtctttgctggaggttcctgcttttgaaaattttcagtttcatttcctagagagagctcacggtttttcttccccttgggaatgagaagtgtcgggctgagctgagggcttcatagagagtttcagagaatgctgcagggaagcagagtttgaggctctgcaggggttgagagctctgcctgggttagtttttgaggggccgtgagggggccccaggacctgtccaggcacctccctggctcgggaggccagtggagagacaggagcggggcagtgtcaggcgggccttgcctgctgagcatcttgagtccattctcaattttgttggcttctggggcctcagactggttcccctcctcccgggttttaaacaccaaccctaaaactagcagcccccagaccttcagcctttctgtgtccaaagcccagccccacctccactggtgagggcacctcattcttccagctgcttctatcggacccatcaccccggggccctctccttcctccatgacccacatgcagagggccctgctggtctccccgcctccacgctgcatgctgccttcctgcttcctgctcagcacagcagacagtcaaaccacagacccccttacaagatccgcccctgcccccgctgtaactcaggacaagcaggagcccttacggtggccacgaggtcctacatagacggctgcccaccccattcctcttggctccctctcctgtccccagagcccaccaccttctggcccttcctggatacaccaggtgtgcttccaccgcagggcctttgcaccacccttccccagagggcggcctggctccctccttcccctctttcagtctttgcccagctgctcgccatggggtctctccgatgttgtccttcaagggtgtgagccccagtccttccatgtttgtttgtttttttttttttttttagagggagtttttttgttcttgttgctctggctagagagcagtggcgaaatctcagctcactgcaacctctgcctcccgggttcaagtgattcttctgcctcagcctcccaagtagctgggactactggtacccaccaccactcccggctaatttctgtatttttagtagagatggggtttcaccatgttggccaggctggttttgaactcctgacctcaggtgatccacccgcctcggcctcacaaagtgctgggattataggcgtgagccaccgcgcccagcctaagggctccacttctattaataatagtgcggagagcactggtagtgcgcagcatgaactgtttctagaggcatgcaaagcaaatgcacttgagactcctaattcaccacttgtaagaggccaggaatttggtgactctgtacatgatgcttttgaacatttatcgaaaaccaagaaatacagtgatgctggctggttgcccccagcgtcactgagaaagtggtgaaaaggatgaactcagggattcgatgtctgggctgcagctctgcataaatgatctgagagtttcttagtgtgccctggatcagaatcttctctcctgtagccacagggttgaaattgtagaaaatcgagcaccagctctcacgcgattagctgagttaaaatgaaagctgagcttccaggcatgcagggcgtctgctgttaaagtgggggcacttaagccggatgccgtggttcacacctacaaccccagcatgtttgcaggccaaggtgggaggatcacttgagcctaggagtttgagaccagcctgggcaatgtagaaagactccatctctgtattacaagaaaaaaaaagtgaggacattgggtggcaaaggaagggatccttcaagttgggatggggacatgggaagcccatggccaggctggagacattgagttccaaatgatataaagttgagtcaggttgagtttagtagtgtgggcccactagcagagattatgcatttcatgttgcagctggtagagttaggaaggcctctgagtctttgtttggttggctgaaacatggatcaaaaggtggcccaccttactaggcgtggtggttcacgcctgtaatcccagcactttgggaggccgaggtgagtagatcgcttgagcccaggagttcgagagcagcctaagcaacatggtggagccccatctctacaaaaaaaaaaaagaaaaaaaaatacaagaattagctggagcaggaggatcacttgagcctgggaagtcgaggctgcagtaagccatgattgtcccactgcactccagcctgggtgacagagtgagaccctgtcttagaagaaaagaaaaggaaaaaaaaagccttacagtggtctctcagtgctcaaatgaaaagtctcttgcctctcactttattttttaaaattttatttcattgttttgagacagagtcttgctctgtcacccaggctggagtgcagtggtgccatttcagctcactgcaacctttacctcccaggttcaagtgatgttcctgcctcagcctcccaagtagcggggattacaggcgtgaggcaccaccctcagctattttttatatttttagtagagacggcgtttcaccatgttggccaggttggtatcaaactcctgacctcaagtgatgcgcccaccttggcctctcaaagtgctgggattacaggtgtgagccacccaccgcacctggcctcatgtctctcactttaaatcaagagttagacatgattaagcttcttgaggaaggcatgttgaaagctgagataggctgatagctaggcctcttgcaccaaatggttagccaagttgtaaatgcaaaggaaaagtttttgaaagaaattaaaagtgcccccagcactttgggaggctgaggtaggtggatcacctgaggtcaggagtttgagaccagcctggccaacgtggtgaaaccccgtctctactaaaaatgcaaaaattagctgggtgtggtggctcatgcctgtaatcccagcttcttgggaggctgaggcacaagaattgcttgaacccaggagacggaggttgcagtgagctgagattgtgccactgcactccagcctgggtgacaacagcgagactctgtctcaaaaaaaaaaaagaaaaaaaagagaccatcctggccaatatggtgaaaacccatgtctactaaaaatacaaaaattagctaggcatggtggcgtgtacctgtagtcccagctactcgggaggctgaggcaggagagaatcacttgaacccaggaggtggaggttgcagtgagccgagatcacgccactgcactccagcctggcgacagagcgagactccatcccaaaaaagaaaaaaagtgctactccaatgaacacacaaatgattagagagtgaaacagccttattgtgatatggagagagtttgcaatgtctggagaggtcaaaccagtcacaacattcccttaaaccacagccgaatccacagtaaagccctaactctcctgtagccacaattccacacaggctgacagagttgaggaggctgcagagaagatcttgaagctagcagagactggtttatgaggttttaggaaagcagtcatctccataacataaaagtgcaaggtgaagcagcgagtgctgctggagaagctgcagtaagttctccagatctggctaaggttattgatggaggtggctctactcaacagcagattttcttttctttttttttttttgagacagggtcttggtctgtctcccaggctggagtgcagtggctggtcctcagctcactgcaacctccgcctcccaggttcaagcaattctcctgcctcagcctcccaagtagctgggattacaggtgtgtgccaccacttccggctaatattgtattttttattagagatagggtttctccatattagcattgctggtctccaactccttgacctcaagtgatccccctgcctctgcctcccaaagtaccggggctataggcatgaaccattgcacctggccaattttattcttttttaaggccgagtagtgttccattatgtatatgtaccacattttcttcaacgtccattgttggatagttggtggattccatatcttggctattgtgaatcgtgctacagtgagcatgggtgtgcatggcaggattgctggagcccaggaggtcaacgctgcagtgagccgtgatcataccactgcactccagcctgggtcgacagtgagaccctgtctcagaaaaaaaaaaaaaaaaaaaaaaaaaggcagtactgcatccccggagggactgcagggattagtgccaccaccaagcactccaaagatgcaggggtggggattcccattcacctcccctatttggcctttgtggaagacgggtggatcttgggaatgaaaatgaatgatcgtaagcttaatcaaatggtgatttctcagcctccatagtcgtgtgagccaattctcctaatacatcctctctcatccatctgtttgtccatccatccatccatccatccatccgtttatctgtctatctatctgtcatctgtcttctatcaattatccatccatccattcatccatgtacctatccatccatcttatctatctatcctatctatccatctatctataagtctgtattagggttctctaaagggacagaactaataggatctatgtctgtaagaaagggagtgtattatggagaattggctcacacaatcacaaggtgaagtcccatggtaggccgtctgcaagctgggaaagaaagaagccagtagttgctcagtctgagtccaaaagcctcaaaagcagggaagccgacagtgtagccttcagtctgtggctgaagacccgagatccccctggcaaaccactggcgtaagtccaagtttccaaaggccaaagaacctgaagtgtgatgtccaagggcaagaggaacgtgaggaagcatccagcataggaggaagatgaaagccagaagactcagcgagccagcttaccccaccttctgcctgctttgttctagccacgctggcagctgactggatgctgcccacccacatagagggtgggtcttcctctcccaggccattgactcaaatgtcagtctcctctgacaacaccctcacagacacaaccagaacaatactttaccaactacctaggcatccttcaacccaatcaaattgacacctgatattaaccatcacaccgtctatccatccctctaccctatctgtccacctaccctatctatctatccacctatccatctgtcctatcatctatccatccatccatccattcatctattctatctatccatccatctattcatccatccattcatctattctatctatccatccatccattcatctattctatctatccatccatcctctttctattcatccattcatctatccatctattctatctgtccatccatctatactatctatccgtccatcctatctgtttatctatcatctgtctatccattcatctagcttatctatctattcatccatcaatctatccatccatccattcatctgttctatctatgtatctatcttatgtatctatccattcatctatcccatcttatctatccatcccatcttatctatccatccgtccatccatccatgtatctacctatctacctgtctacctacctacctacatattctatagttctgctctctggataaccctgttctatactgtgagtatttaatgagttaacatgtacattgtttaggaagtgctagttaagtatgtctcttatttctgaatccagctacttacttttatgacaataaaaatgtaaatgctggttggcaaatgacccacatgttacaggaggacataaaatagcacgaagtttcctcaccctgggccaggactgtcacattccccagagcaacactgtaaactggtgtgtcctcttctagacatctcctctgcgtgaatgtgtgcgcacacacacacacgttaatgtgagtggcagctcgtgccctgcgcatgccttgctactttcatgtacagtggctgaggcctctagtggaggacggacctcagcagcctccctggctctgccacccagcagggcctgactcagcaacaggcctatcctgggcacttcccttgtcctgctgttttgccgtgacataggctgctaggctgcatgcttgcacggagaccttgccctctgagccaggctggccgtctggaggacagattcccagccactagcctgctggcttcaggctggcacatttacaatgcaaatctcttcaaatcccctgcacaaagcttctctggccactcactggccgcgtctctgtgctccctgccttctagatttctattcagattctctccagcgttcagaatgatggatcttgtcaatctgtgccggtcgttgggtggaaatggcactgcagggcctccgttctgatttccttcatcagtaggcatggcaggcatctctttggaagttaagagaccacatgtatgtgtatttccttgagcggcctgtctgtctttagggaagctcgttttgctttggttggtccttatgattgttgggactgtttatactgggaacagcctgaaacccagctctcctaggcttgctcagcaagagaaacgtgctgggtcaccgttgcccaagtccaggcttgaggggttcaagtgtactagggctttgctccatttctctgatcctgacagctctgcccttctccactgccagctttgtctgcaggtggaggagaacagacagtggtttcccagcaccacctcatggtctttccaggatgcactgagtggcagaaaccccagtaagggtccagaagtatggatgcttccatacttcttgctggttggcccttcccttagtcaatcactagtgccagggtaaatatcggccctgattggattaggctagtcagggcccgcccctggtgggagggtaggttggtgggagggtaggttggtgggaggggcaggctcagaatccctggttgtaggtgaaacagcagctctcgaaggatggggccttgggtcgcctgttgcagatctttctccagctcttactttctggctgtgatgtttcatgtgtgtcttatgtatgtagacgtttagaggatttgttatcaattttgagtcctgctaaggaacttcacgaattcttgagctcttggctacgccaacactgagtactcaaagggaaaaaggtctgcgtggtccctgccctccagatctcagaggaggagagggcagtgacgaaaccaggtgctggaaacgggcgtggggatgaagtgtccagacaggggcgcagctgggactggcttggggccttggagaagggtctgtggggatcaggcagagggaaggttctgtacagaaaagcaggcttggcctggcaccatctggagtgtgtgtcagggagaggtggggtcgtccagacccaggattgaaaacagggactccttgaagggtgttttcgtccattttctgttgccataagagtacccgagcctgggtaattgaaaaagaaaaggccgggtgtggtggctcaagcctgtaatcccagcactttgggaggccgaggtgggcggatcacgaggtcaggagttcaagaccagcctgaccaacatggtgaaaccccgtctctactaaaaatacaaaaaaaattagctgggtgtggtggcgcatgcctgtaatcccagctactccagaggctgaggcaggagaatcacttgaacccaggaggtggaggttgcagtgagccgagattgcaccactgcactccagcctgggtgacagagcgagactccgtctcaaaaaagaagaaaaaagaaaagaggccgggtggggtggctcacacctgtaatcccagcactttgagagggcaagacgggtggatcatgaggtcaggagttcaagaccatcctggccaagatgctgaaacccctgtctctactaaaaacacaaaaattagccgggtgtggtggcatgcacctgtaatcccagctacttgggaggccgaggcaggagaattgcttgaacctgggaggcagaggttgcagtgagccaagattgtgcctctgcactccagcctgggcgacagagcaagactctgtctcaaaaaaaataataaaataaaataaaaaaagaaaaagaaaaaagaggtttatttagctcacagttctgcagactgagaagttcagggcctggccctgatgtctggtgagggcttttgtgccacatggcagagtaggccgacggggatgctgacagctgtgaaagactaagcctgatgggacatcttgacttcataacaacccacctggcgggtgctaatccattcccgaggggagtaaacaagcctctcaagagtaaacccatgaccgcaaacggcaccaagccattcgtgagggatttgccctcacgacccacagacctccccgcagccctgcctcccagcactggcatactggggatcaacatgagttttggtggggatggacaaagtgcgtccacaccacaatgaaggctagagtgagtgtggggctggcagagtgggtgctccatgctgtctgcatggcagctctgcatgggtgagaatctggaggcagagcagctgggcgggcagatgccttagtgccaggacaagggaagcagtttgagacccctgggccgccactgggagaatgcccaccctggggaagacaggaggaatgtctacagtaggggaggaaagcgtaacaggctctgttttagaggtgcccgaggtgcgctgacatcctagtacagagtcaggtgaatccactcgtggacattgggaggaagaggctggatgctaggacggcacagtctttctgtctgattcaccccttgttgtgctgaaactggggtccctggttccctcctacccacctggagcagaacccctaccctgctcatgttagcaggcccaatgcaggacctcggagggagaacagggtgaatctctccatgcactcgtggggaggatttctgtttttccttcctaacactcgcttctctctgagatctgacccttccttcatctgccgttacagattctgagaacaataactccacaatggcgtcggcctcggagggtgaaatggagtgtgggcaggagctgaaggaggaagggggcccgtgcttgttcccgggctcagacagttggcaagaaaaccccgaggagccctgttccaaagcctcctggaccgtccaagaagtgagtgcactgcctcggctcccctccgcccccgctcactctgcccaggaaaatctcactgcacagctgcccagctagcccccgaaaatgccaccatggcccagcccattgaacctgcccacagggcagcagcagagctgccccttctgcacctgattcatctctggctggagtctgtgggttccagaccccctggggcctccaccgtctttttttttttttttttttttttgagacagagtttcgctcttgttgcccaggctggagtgcagtggtgcgatctcggctcgctgcagcctccacctcctggtttcaagcaattctcctgcctcagcctcccaagtagctgggactacaggcatgcaccaccacgaccagctaatttttttgtatttagtagagacggggtttcaccatgttggtcaggttggtctcaaactcctgacctcaggagatccacccacctcggcctcccaaagtgctgggattacaggtgtgagccaccgcgcccggcctccaccttccttttctttctaccagacccaatactcgtgtgtctcccagaagctgtggctggggtggggcctgagcttctgccgtgtgtatctgtgtcccaagcttctgtgggtctctttgcattgagggtgcaagctcagaggtgccttgctgcttcggggcagggacctgagcgtccgctgggtgcgtgtcttgcgcttctgtaggcctctgcattgagggtgcgtgcccagaggggctttgaagctttgggtgtggggtgggtgctctggaaatgtgctggctggcaggttacccttcttggaagggtatggctgagccaccttttggctccctctggccttgaacagcctcttaggcgttagacaccaagagaatgcgtccttgttaagattcccagttggagcactaggcgaggctttcgaggggagcgtcctggacatgttcaaggagaatggttggaagagaagggctcctgggctctagcgcggcctgggaagacccagagggcagtgtcagctcccgggtttcttgctgggcacggagaaggggaagctgtctttctgtgtctgcactggggctggctttctgtctgtcgttccttgtaggtggcactccatggttgggctatggtgggaagtgatgcagccgcagtgctgtggtctgtggggggtgagtggggtgagtgtggggggtgagtggggtgtctgtggggggtgtggggtgagtgtgtggggtgagtggggtgagtgtggggggtgagtggggtgtctggggggggtgagtggggtgagtgtggggggtgagtggggtgtctgtggggggtgagtggggtgagtgtggggtgtgagtggggtgtctgtgggggatgagtggggtgagtggggggtgaggggggtgtctgtggggggtgagtggggggtgagtggggtgtgtgttggggggtgtgtgagtggtgtgaatgggatgtgtgtgtgttgggggtgtgtgagtggggtgtgagtggggtgtgtgtgttgggtgtgtgagtggggggtgtgtgtgttggggtgtgtgtgttggatgtgtgtgtatgtgttggggtatgtgagttggtgtgtgagtggggtgtgtgtgtgttgggggtgtgtgttggtgtgtgagttgggggtgtgtgagtggggtgtgttgggtgtgtgtgtgttgggtgtgtgcgtgttgggtgtgtgtgagtggtgtgtgtgtgttgggagtgtgtgtggggtgagtgggatgtgtgtgtatgttggggtgtgtgggagtggggtgtgtgtgtgcttgtgtcattcccttggagaataatcccttccagagcagccaaggccacccccaagcctggagcacatgggatgcggaaggtttgggtaactccctttttatgcctaatttggaactctgtcagagtgggaaagtggcagtacggatggtgttccttgaaaacattgaaggcaaatgaataaaccctttgccatctggggcaaacaataaacccgcccaaagacagaggaaaagctaagaattgagttacttgggggaataaaattttgaaaagtttccatgaataatgaggaatctagaaagccacacaaatgctcgagcaggacgcactcgaaaaagacctgagaagacctcagtgcaggctggaaggaaggctgagtgtgggaggagtgtcccaactcagggccagtctacagagactgagagagtattattttttctttattttattttatttttttttgagatggagtctcactcctttgcccaggctggagtgcagtggcgccatctcagctcaactgcaacctttgcctcccaggttcaagtgattgtcctacttcagcctccggagtagctgggactacaggcacccgccaccacgcctggctaattttttgtatttttggtagagacggggtttcaccatgttggccaggatggtctcgatctcctgaccttgtgatccacccgcctcggcctcccagaatgttgggattacaggcgtgagccaccatgcctggccagtttttttttttcttttttcttttccatgttttggctgtaggtgtttaaggaaatctctatcaaactactaattggcaacaagccaaaggaacatagactttatttatttatttatttatttattttttgttttatttatttatttatttatttttgagatggagtttcgctcctgttgccaagctagggtgcaatggcgtgaccttggctcacagcaacctccacctcccgggttcaagcgattctcctgcctcagcctcccagctagctgggattacaggcatgcaccaccatgtctggctaattttgtatttttagtagagacggggtttctccatgttggtcaggctggtcttgaactcctgacttcaggtgctctgcccacctcagcctcccaaagtgctgggattacgggcgtgagccaccacgcctgccctattttttatttattttttaatgttttaaatttttttactagtggaaatctgcttgaatttgtaaaatgtagagttgacacagaagatgtgaaaagaatgaagacattttctagggaatcttgaacaagagaaaaccgacatgaacaagagaacaataaaagaggccaggcgcggtggctcactgggtgactgtgagatccttcctcaaagagagagagagagaaggaaggaaggaaagacaataggaaatgttgatgaggatgtggagaaattggaagtgttgtacagtgttggtggaaatgttaaacgctgcagccgttaaggaagcagcaaggcagttgatccaaaagttacgcataaaattatcctaggccgggcgcggtggctcacacctgtcatcccagcactttgggaggctgaggtgggtggatcacgaggtcaggagattgtgaacatcctggccaacatggtgaaaccccgtctctactaaaaatacaaaaaaaaaaattagctgggcgtggtggcgtatgcctgtaatcccagctacttgggcggctgaggcaggagaatcacttgaacccgggagggggaggtttcagtgagccgagatcgcaccactgcactccagcctggcaacagagcgagactcactctcaaaacaaagcaaacaaaccaaaaaaaaaacaaaaaaagaatacgatatggatctgtgctgtagcctggatggaccccaaaaacatgctaaatgaaagaagccagatacaagaggccatgtatgattcctttgatatgaaatatccacgatagactcacccatggagacagaacacagattagtggttggctgggaggagtggggaggagggagtcattgctgtgggatttctttctgggatgaagaaaatgggaactagggccaggcccggtggcttctcacctgtaatcccagcacattgggaggctgaggcgggtggatcacttgaggtcaggagttcaagaccaacctgaccaacatggggaaaccccgtctctactaaaaatacaaaaagtagccgggtgtggtggtgcttgcctgtaatcccagctactcaggaggttgaggcaggagaattgcttgaacctaggaggcagaggttgcagtgagccgagattgagacaccgcactccagcctgggcgacagtgagactctgtctcaaaaaaaaaaaaaaaaaaaaaagcctaaatatccacatatccacacatgagagaagttcagagtgaatacacaggtgaatgccgatgggttgtctctggtgatgagtttacaggggcttttgcgcattttcccaatcccacagggagcctattgaattctgaagctgagagcagtgtatgcgtgaacggtgctctaagcgcagacgccgcattctaaccatggtgaggagggtgctaggagccaagggaggcggccccagaagctgagacagcgagctgcgtggccagcctcaccctgcagcagagtcaggtggtcagtcctcacctgcagtcatggggtgggtggagagggaaagggcgcacagagaggggcccgcgcctgtcccttggcacagccatcctccacttggcctctcctttggtggccgctggttgctgactaacagggtgtcctttgtgcattcttcctctggagaggctactgggcttggctgctgggttgtacttcctgtggtgagggaagaggagactgccggagccaggggtcatttgggttggaggcatcggcaggccaggaggctgctggtggagcttcctttcctcagcttcctgctgggcgtcttgctgtgaggtctcccggcgatgcccggtgtggtgtggaagggaggtgtcggatgagcatgcccgctacagggccagactgcccgcctccgcctctaggggcttgggaggcctggcctggctggccctggggtgcccgggcctgcctataccttctgggtcggtctctgcagtgcatctgtgctctgagcacaagccaaggcattcgtgtggaggcccggggcgccgggagcctggtagggtgctgggagcttggcagggtgccgtgagcctggcagggtgccgcctctggtgtgggcagttctcctcttacgtggacttgtcctgcacgtctgcaggagctgcttcttcgtcttcccacaccctcctgcccatgggccctggaggcagacggtgctgggaagctggtcagtgcccacatgtgggtgtccctgcctgggccttcccaagaggaggtggcccctgaggtggggtctttgcgagtctactggagctgtgcgtggggtgcacagccctgccctgtctgaagggggtcgtgtttcaacagggagctacatcagaggttttggtagatgctgctgtagacctcatatccgatgaatgggaagctgctaatgccatacccagcaagagaaggaagcaggatgcagccccgcttgaggccgccagcgtgccttctgcagactgtgagcaggtagtccgagtcaatagtttgggcagaatgctccctgccctggtgcatgctggcacagcctggcacggccacctcgcacttccggcccttgagtccctgccagtcgaggaaggctgcccaggatgggcgttttcgggtcacccttgggctgtgaaagagcaacgctgattcaggcttggctcttgtgactctgaggatgttttgctagtggtgaatttcagctttattgtgcttgcccttctggcccacatccttccacttgcctttttactccgtgcagctgtccccttggacacctggagaaacttaacctggctgcactcacctggctaaagctccaccagcaacacaggcttcaccacagagagcagcaggggagcccaagggggcttagagggccaggcccaggcaggtgggggcccgacccagcctctgcctgaacacaaggtcttggatggcgctcgccacgtgggggtgtagtggaagccctgctcagtttagtctctggtttttggaagttgaaatcctgactttttctctttttcttttctttctttctttcttttttttttgagacagagtctcgctctgtcgcccaagctggagtgcagtggcacgatctcagttcactgcaacctccgcgtgcagggttcaagcgattctcctgcctcaccctcctgagtagctgggattacaggcacctgccaccacgcccggctactttttttgtgtatttttagtagagacggggtttcaccatgttggccaggctggtctcgaactcctggcctcaaatgatccacccatcttggccttccaaaatgctgggattacagacgtgagccactgtgcctgccccaaatcctgactttttctatagcatttaggagtattacaggactcactaataatatcaaaaatgaaattaggtaacacatgtaatgaaaggacttttgcttttggggaaaagcaagggagcttcataccttgaagagtgatgcttgtgaagtttattacttttttgcagagggcgacggcctccctgccttccccgcaccgcgctccccccagcccctgcccatcgagatggtcatgtgttcattgaacggagacttaccgagcatccaccacgcctaggtcttaagtgtaggcagaagccttcaaggcaggcatgctctttcctctgtgggctggggcttggccgtgagcccactcctgcagctcctgggaaatgcaggcagcgtccacacggggctggacttagccagacctaaggcacagtgtgggtggagagctcattcacaatagcaacaaaaatgtgagaaggaacttgtaaaataaaggatggattcataggccatgcgaggagaagaaggctcgggctcagcagacagtgaagtccgtggagaggtgggcccttccccagagagaacatggaaggtttagcactgcagagatgtctgctgtcacccagaatgacacgggaacttaaccaactaattaatgtataacagtagtatagctctgaatgggtttggtgggttttgtttttgtttgttttgaggcagggtctcgccctgggtcccaggctggagcgcagtggcaaaatcatagctcactgcagccttgacttcctgggctcaagcaatcctcgtgcctcagcctcccgagtagctgggactacaggcgtgcaccaccacacccaattaatttttaaaatttttggtagagatggggtcttgctgtgttacccacgctggtctcaaactcctgggctcaagcaattctcccgccccagcctcccaaagtgcagggattacaggcataaaccaccaccctagcctcgttttgtatttttggaagttgacagattttaaactataaattggtgaggatacttaacagatgtgaggaggagaaatggatgggagatttatagtaaagctgtcaacgtacacgggtggaaacattcccacggagtaacagaggcgcgacctggggatgcgcacggagcatgagatgtgagctggagttagggcactgcatatgcggaccggagcgtgttggtcagggtgtatacacgggtgtggaaagtggggtgtctagaccatgggctcagcatttgggtaaaacacacacactccactcaccccagtcacacacaccccccgccacacataccccactcacacataccccactcacaccactcacacacacccccacaccccactcacaccactcacacacacccccacacataccctccacacacacataccccactcacaccactcacacacacccccacacacaccccactcacacacacctcaacacacataccccactcacaccactcacactcccccccacacacataccctccacacacacataccccactcacaccactcacacacgcccccacacacacaccccactcacacacacctcaacacacacacacaccccactcacaccacttacacacccccaagacaaacaccccattcacaccactcacacaccctgcaacatacaccccactcacaacactcacacaccccccaacatacatacaccccactcacacacacaccccaacacacacatgccccactcataccactcacacaccccccaagacaaacgccccactcacaccactcacacactgccaacacacacagccaactcacaccactcacacacacccccaacacacactccccactcaccccactcacacacaccccaacatacgcaagtcccactcacacccatctcatactcacactgaaacacacagtggtcccttgttgcccacagggggtcggttccaggaccgcggaggacgccaaaatccaaggatgcccagtcccagatatgaaacggcgtggcattggtacataacccacagcatccgcctgtacacttaattttttattttttttattttttgagacggattctctctcttttgcccaggctggagtgcaatggcgtgatctcggctccctgcaacctccgcctcctgggttcaagcgagtcccctgcctcagcctcccgagcagctgggactataggcgcctgccaccacacctggctaatttttgtatttttagtagagatggggttttgccatgttggctaggctggtttcaagctcctgacctcaaggaatccgcctgccttgacctcccaaagtattgggataacaggcctgagccactgaggccggcccccgacaccatgcactttaattcatctctagattccttaccacaggcatctgtatgacatagatgctgtatgaacagttgctacacggtgcggtgttgctctttgtgttctttgttattgttgtctcgttattttctgttttcttccccagtattttctgtctgtggttggctgaatctgtggctgcagagggccgactgtataccagcttgattcaatattttatttttattttttatttattattgttattattttttgagatggagtctcactctgtcgcccaggccggagtgcagtggcacaatctcggctcactgcaagctccgcctcccaggttcacgccattctcctgcctcagcctcccgagtagctgggactacaggcgcccaccaccacgcccagccaatttttttgtatttttgtagagatggggtttcaccgtgttagccaggatggtctggatctcctgaccttgtgatccacccgcctcggtctcccaaagtgctgggattacaggcgtgagccactgcacccggcctattattactatttttcaaggcagagtgttgctctgtctcccaggctggagtgcagtggtgcaatcttggctcactgcaacctctgcctcctaggttcaagtgatttctcctgcctcagcctctagagtagctgggattacaggtgtgtgccaccacgcctggctaatttttgtatttttagtagagatggggtttccccatgttggccaggctggtctcgaactcctgacctcaggtgatccgcccgcctcgttctctcaaagtgctgggattacaggtgtgagccaccacgcctggcctgattcaatattttaatgtaaaacagcatcctaaaagctctagaaaatgtagggggatatttataaaattatgtaaatacttctaagcctcaccccccgtaaaattataaataccgctatggttatgtagttcgagattctgggtcaaagaagactatgaaactgttcaatggaaaagcagacagcaggaggcactggcagcacagggcgcctaccagggcactcggccagtcctcaccgagaagtaagtggtccctaactcagggccaggtggcagttcacacgggaagagctgagggggtgagcctggggctgctgctccgaggtgtcagccctgcaggtgtgatgatgtcagatggttggttttgtttctattgaaaagaggttctgggatggcggcttgagggcagtggtcttccaggaactggatcacggtccctccaagggtctctcctgcagttgcgtctgcgcttactgcagtctttccacagccccgtgttgtgggcagagggagtgaggccaggcctggctcctgcctccagcctccccgggctctgcccaacctccgtgtgctgctgctgctgtttcttcctggctggccactcccctcctgcaaggcaggccctggggaggggtgctggcagctgttcctaaggtctgagccctttgctacatcaaggaaagaagcggtagggggcctgcatcttccatgctggtgggaggtggggggtggtcaggggcctgcctcagtgggctcctcctgttccgggctgtgactcggcggtccagagcctcaggattctccgtctatttctgccagagcctgattatgtcatcgaagctgctagagcatccatgaccttggcttattttcaactttcataattagggaaaaacttaatttgaggtttgattattttaaccattagaaatctttgggtaatggccaggcacagtggctcacacctgtaatcacagcactttgggaggccgaggtgggtggatcacctgaggtcaggagttcaagactagctggccaacatggtgaaaccccatctgtactaaaaatatgaaaattacggccgggcacagtagctcacgcctggaatcccagcactttgggaggccgaggcgggtggatcacctgaggtcagttcaagaccagcctggccaacatggtgaaaccccatctgtacaaaaatacaaaaaaaaaaaaattagccgggcatgatggcaggtgcctgtaatcccagctacttgggaggctgaggcaggataatcacctgagctggggaggcggaggttgcaatgggctcagatcatgccattgcactccagcctgggcaacaagagtgaaacttcgtctcaaaaaaaacaaaaacaaaaacaaaacaaaaatagctgggcgtggtggcatgtgcctgtaatcccagctactcaggaggctgaggcaggagaatggcatgaacccgggaaacagaggttgcagtgagctgagattgtgccactgcactccagcctgggtgacagagtgagactccatctcaaaaaaagaaaaaaaaaaaagcctttgaattgcaaataatggaaagcccagctccacctttctaatcccattgaggaagtttattatggacacacctgatgagccccgagcctgtaggtgaggcttggtgcaggcgtctccggccctgtctactctgccttccggacggctcccccactgagcctctcatcagctgtttcccgttactccctcgtgccacacagtggcttcccctgtgatccacctgctactctgtccttcaggggacaagacagcgcctcctctggtgattgattcctctggagagaggaagcgcttcctcaaatctcattggctctgattggctcacaggccaatcccccagtgggtccctatggccaggatgatagacatcagtggttgacaccagcccacgcacaagagctgcccttggggctagagtaaggctgatgttactcaaaccatgcagccgataacagggagagccaagggaccattccccaggatgggccatccagcgctgtcaccaggtggccacaaacacctgctgtgtgtggacagtgaccatgaccacagcatcactgatgggggccttgcgtgtaccaggcagtgtcctacaactctccgtgtgctttgtcccatttggtcaccctcagtgatgctctgatgtggacacatctgctgtctccactttaaagatggggaaactgaggcccacggtggctcagtgacccacctggggttgcccagccattgtagcatggggtgagctggatgggaactcaggcaggccctctaaacccagcccagacgccactgcatggcagccccggaggtaccaggcagctggccgggcagggacggcgtcatcgcctctccgaggggaggctgtcttcagggctgggaccccacctgccaggtctcctcagcacactgaggacgatgggtgcctgcagtgaagggttgtgcagcacctgcctgtttcttgacggcctcttgcttccccctctcagcaggtcccccggcagctgaccagcctgtcattcagaggctgatacctgctgatgacgccactctacagtgctgggccccagccccagactcttcttctgcagctgcttctgcagttgcttttttttttttgtgagatggagtcttgctctattgctcaggctggagtgcagttgcgtaatatcggctgaccgcagcctctgcctcccgggttcaagcaattctcctgcttcagcctcccaagtagctgggattgcaggtgcctgccaccacgcccagctaattttttgtgtttttagtagagatggggaggatctcaccatgttggccaggctggtggcgaactcctgacctccagtgatccgcctgcctcggcctcccaaagtgctaggattacaggcctgagccaccgcacctgacctattgttttatttttgagatggagtctcactctgtcgcccaggctggagtgcagtggccagatctcagtgaggccctgttttagagtcagcctgcgctgggagtgagtctcctctgtccacacccaaacgcaccaagtgtgccatttcagcagtggtgcttgctccctggaatgggaccaggtgctctcagcggtgtggtgggttggtggcctggggttggtgtcggacgcaggccggtgttggacgcaggccgagcgggaggctggagccaagctgtggcctggggagatgttatgggtcggagggtcggggggtgggggcgcctcctgtgctttgtgtacactgagcatgggtttcctctgaatttaaaaaggaggagaaaatcggaatttctggccctggttctggcaggaagtgtggccatgtgtgatagagaaggggttgcagtgtcggcctggcctcctggaagccctgggatgcagccctgtccagctgcggcctcgtcatgccctgggtgggtgggaacgcagcctcctccttgggccacacaggggccgaccgtcagccgaggggctcctgaagtggcagtgatgggatcctgtggcgcttcctcatccccttgttaccagttgctgaggagagggtggattagcccctgggctgcacctcagtgtgtgcaggtcttcccaggtatgtgggtgcaggaggtggggggcgtggagtgggcacaggttcacacctgctgcctggcagtttggggccctcatcacacaccaccaggtttcaggggatctacaagtcactttcctgtactgacctgatccacacgcacccctgagtactgccccctgggagatgcctgtggggtcccagggtcctggcagcctcctcccaccagccgcagtcctggttccaaaatggggaccgtacacctgaacctggatgtgcctttgagcctggctgtgcctgctgagggtgcggtgggagctgctactcattttttagtctcatccttctcatttcaaattttatgtacgaaatatttttatagaggtgcataaaacgtggaaagcctgtgtgtgctttctaatgttcaaaaccaggccaggcacggtggctcacgcgtgtaatcccacactttgggaggccaagatgggaggattgcctgagcctaggtgttggagaccagcctgagcaacatgggagactctgcctctacagagcattttttaaaaccagctgggaatggtggttcgcgcctgtaatcccaggaccttgggaggccgagatgggcagattgcctgagcctgagatttcaaaaccagcttgggcaacatggtgaaaccccgtttctacaaaaaacaaaccaacaaaaaattagctgggcgtagtgatgctcacctatagtctcagctactcaagaggttgatgggggaggatcacttgagcccaggaggtcaaggctacagtgagctgggtttgcaccctgcactccatcctgggcgacagagggagaccttgtctcaaataaataaataaatacaaatccatctcagtggatgtccaataagcagtgagcccgtgtgagggtctcagcccggccgtgaccgtgccgagtgtggcgagcgcttcaaggccacttgccccgaccctgcccaccccccacttttgtttcttaatttcattctttccaggaaattgcagatttaacagatgttaggtactttggtcgagccaagcttgatgtagttgaggaacggaagagaaagttggagggaaacacgggctagagtagagtaaatctaagaaataaagtgagtgtctctctttctgtttagagcaaaaagaagaaaaggaagaagaaaaagaaggggaacaagtccgcttcctcagagctggcttccttgcccctttctcctgccagcccctgtcacctgactttgctttcaaacccgtggcctcaggacacagccctgccccacagccaagcccagcagagtggccccactggccagccgagccagcccccaggcacagccaccacgccactggagggtgacggcctctccgcgcccaccgaggttggcgacagccccctgcaggcccaggctttgggagaggcaggagtggccacaggaagtgaggctcagagcagcccgcaattccaggaccacacggaaggggaggaccaggacgcttccatcccctctgggggcagaggcctgtcccaggaggggaccggtccccccacctctgctggtgaaggccattctaggactgaagatgctgcccaggagctcctgttgcctgagtcaaaaggaggcagctctgagcccgggacagaactgcagaccaccgagcaacaggcaggggcctcagcctctatggtgagtcatccgggagagatggcctgggagtggcactgagccctcggcacctgggctctgctgcaaggtgctggcgttgcttccctgccggggggaggggcgtcctctgggccctgctccctgggtgggagtcggagggctgcccctccactggggatgccagcccaccctgtccctcggcttgtggcagatgctgccccttaaaccattgagtcggagtcaccctggcccattttgtcaccttggctctggtgtttggggtctttcaggcagttgatgctgtagctgagccagccaatgcagttaaaggggccgggaaggaaatgaaagagaagacccagagaatgaaacagccaccagcaaccactcctcctttcaaaacacactgccaggtgcgtctccttcctgcctgccggctccaggaggccctctcctgcccacggctgcgcctctttcatttaattattcagcaaatatttaagtgctggggatatagccatgattcagacaaagctctggccttcggggtgctcacattccagcggagagagagtcaggaaaccgacttcagcggtgagaagagcgtggagggagggagagagggcacccaggtgggccccgaggtaccatggcacccacagcccgagtggccgggcgaggcctctcttaggaggtggtgagggatggtccccggaggtgtctgggaaggtcatgtgcagaggccctggggcagtgtggggtgggcctgttcccagagcggcagggacgccagtgcccccaggaggagttgggggaggagaggccaccaatgaggctggagagaggcgcctctggaggctgtgattagtggccccagcggcactggaaggtcccgagcggggaagggtcgtgaacattctggccgctgtaagaagcatcccctgtaggggtcaatgtggaggctgggccaggcgcggtagctcacacctataatcccagcactttgggaagcccaggcgggtgcatcacctgagttcaggagttcaagaccagcctggccaacatggtgaaaccccgtctctactaaaaatacaaaaattagccagccgtggtggcatgtgcctgtaatcccagctactcgggaggctgtcgcaggagaattgcttgagcctgggaggcggaggttgcagtgagctgagatcgcagtactgcactccagccttggtaataagagcgagactctgtctcagaaaaaaaaaaaaaaaagaaaatgtggaggccggccttcaaggtcagggtttggttccttgttccaggaagctgagaccaagaccaaggacgagatggctgctgctgaagaaaaagtcggtaagaatgaacaaggggagcctgaagacctcaagaagccagaggggaagaacagaagtgcagctgctgtgaaaaacgagaaggagcaaaaaaaccaggaagcagatgtccaggaagtgaaggcaaggtagggatgcccccgcaggggagcaaaggagaccctgcctgagagcccggcacaccctctccctgcacaactctcaggggatatccaggctgcccttctagtcagctgttttggcaagtttaactttgggggaaaaggggaccacttaggaggtggaggggggtgggcacctgtgccagtttcttgtttcctaatagcccctggggtcctggagccagcgtgggcctttgggaactcaggagaggggctgttctggcccagacacctgctggtgcctcccgccactgtccccagcacttcagaggtgggcagggagtggccacctcttcttcctccattttggaggcagtgaagagagacctccatggggggtggtgtgtcacacgtggacgtgcttgcatgtttgctagggtgtgataatgtgcattacgaacacaaggaccatgtgcctgtgtgtgtgcatgtgggtgtgtgcgtgtgcgttcacgtgtgtgtgcgcacgtgtgtgcgtgtgcatgtatgtgtgcgtgtgtgagtgcgtgcacgtgtgtgcgtgtacgtgtgcttgtgtgtgtgcgtgtgtgcgagtgtgcgcgtgtgtgcatgtgtgtgtgcgagtgcatgtgtgtgtgcacgtgtgtgtgcgcacgtgtgtgtgtgcgcgtgtgtgcatgcacatggcaggtggacagatctcacgggaatcagatttctgttttggttttccaccagcacgctgagcccgggtggaggagtcaccgtgttcttccacgccatcatctctcttcatttcccattcaatcctgacctccataaagtcttcatcagaggaggagaagaatttggggagtcaaaatgggacagcaatatctgtgagctgcactacaccaggtgagcgtgtctgtaggcttgggaggaatccctcagggaaggcataggatgcccagcctgtgacacgtagtttaaaaaaattttgttttttttttttctgagacggagtcttgctgtgtcacccaggctggagtgtggtggcaccatctcagctcactgcagcctccgcctcctgggttcaagcgattctcatgcctcagctcccaagtagctgggactacaggtgtgtaccaccacgcctggctaatttttgtatttttagtagagacggagtttctactaaatgctggctaggctagtctcaaactcctgacctcaggtgatccgcccgcctaggcctcccaaagtgctgggattacaggcatgagccactgcgcccagcctttaaataatttttatccagtgagttgatgacattcttcgggttctggaagatgaatatttcagacagctcttcctggccatgcattttggtgtcatattccatcatggacctttttctttttaaaagtattctttctttctttcttataatttttttttttttttttagagaggggatcttgctctgttgcctaggctggagtgcaatcatgactcactgcagcctcaatctcctgggccatcatgcccagctttgtttatctgagacagagtcttgctctgtcacccaggctggagtgcagtggtgggatcacaggtcaatgcagccttgacctcctggactcaagaagtcctcccgcctcagcctcccatggtgttgggatttcaggcatgggccactgaacccagccttgccacatcaacttatagctttgcactccatgctacgtttgagaataactaaaatttccggggtaggaattttggatagccaaccgtatcctgttcattcacagagacttgggtcatgaccgcgttcttgttgaaggcattgtctgcatttccaagaagcacctagataaatacattccttacaagtacgtcatttataatggggaatcttttgagtatgagttcatttacaagcaccagcagaagaagggcgagtacgtcaaccgctgtctgttcataaaatcttcacttctgggctcaggaggtaagtcgtggcagcaggctgtctgctcacccctccggagtgcaggtgccaatcccgcggtactggacgcgtctctctggagagcacagactttgcctgggcagtgaggtcctctttgctctgcattgaccccgccccagcctccaggttcagtgacactgactctgggttgtgtctctggttggttaaagatgtgttggcttctcctttgagctcagtgtgacttacctactcacttgcaggaggaaacatgcaaaggactttttgtttgtttgttttctgagacagagtctgtcgctcaggctggagtacagtggtgcgatctcggctcactgcaacctccgcctcccagggtcaagcagttctcctgtctcagcctcccgagtagctgggattacaggagcctgtcaccacccccagctaacttttgtatttttagagagacagggtttcaccatgttggaccttgacctcaggtgatctgccctcctcgacctcccgaagtgttgggattacaggtgtaagccactatgcccagccagaaaggatttttaattaagggaaaggagagaaaacgaagccagaagaagggctgcggctgggaacagaggggcagcaaaggcctgggagctgggtcagggacaagtgcagtgaccaggaggccactgggacttgtcccttctctagagattttcagatggttgactggagatgacatccagagccccgtctgcaggctcctgctggctgtcatcctcagcacatcagcccctctgcccatctgtcaatagacgcgggcgcttcccttctcgcagagccctctgcgccccttcatgcctctctcgggggtcccccacctgggttctctgtctgcaaacttgacagacagagatcaagacttgactgtgttgatcacctggactcccagtgccgcctcctcacctggggggtcctgggcttcccctcgctccccctccctgcacagtgaccctgaaactcaaggaagtgagctggggtcaactggttgttgctttcccttggcaaccagggcctccctgccccctggtgtccggtgtcttggaaacagttgttttactgtttatgttgttcatgtgttgttttaggcagatacagaagaatgtaaatttagtccctgtcactccaccttggacaaagacagaagtcctaagaactttatagagtatatattttttcgtttttgtaaacatatatatatattttttttctgagacaggatctcgctctgtcacccaagctggagtgcagtggcacgatctcggctcactacagcctcaaccaccagggctcagctgatcctccccctcagcccccccaagtagctgggcctacaggcgtgtgtcaccatgtctggcaaatttttcatatattttttttggagagactggtcttgctgtgttgcccagtctggtctcgaactcctgggctcaagcaatccgcccatcttggcctcccaaagtgctgggattaagacgtgagccactgtgcccagccaaacatgatttttactagctagagagtgtactctgagaacataagctttgaaagaataggcattagtccggtaattccatatataaatacatttaaatatggaattctatatatataaatatggaattcctgctctgataaatgccatggcattgatggctcggttaaaagggcacgtggtggctgggcgtggtggctcacgcctgtaatcccagcattttgggaggccgaggcgggcggatcacgaggtcaggagatcaagaccatcctggctaacacggtgaaaccccgtctctactaaaaatacaaaaaaattggccgggcgtcttggcagcgggcgcctgtagtcccagctactcgggaggctgaggcaggagaatggcgtgaacccgggaggcggagcttgcagtgagccaagatcgtgccactgcactccagcctgggcgacagagggagactcagtctaaaaaaaaaaaaacatgtgataggggatttgacctggaggtcggcagaagcttccacaaggaggtgatgaccgagttgagaactaaacagttgcaggccctgctgggcccagggtgcagagctggggtgggcgggcctgccagtctagacaactgtgggtcgaaagcatggcagggggctgaggaggcctgtccgggcgcttcccatttctgcctgatttttacttctgtttgtaggtcttcacgtggcctctgaccctgtcattgacatcttgggttttctaattattttacagtcaacctcactgggttttctgcaatgaggtctgcactcatatcgtttgcaatggagcctaagaacagtcacgaattcagcccttgccctgtgtcagccaccatgccaagggccatctgtgccagctgggcagcctgcaccttcctccaggggctgtgtcccgttcctagtacagaggaaaccaactcagtgattgaccaggacagtgctcacttgctagtggggggatgcggtttctgtatgacacattccacctccttgtgatgatgtttaaggaagttgttgatcaagtttgctgagctacatagttagagatccgttgcaagtctcaggcccgctgcatcccatgaccctgggctttccactcattactgtgggacgtctaggatgtctgtttgcacggggctggcctcagatgagaagtcagttggaggagtctggctgtcgtcagtgtgtgggtttttgcttttcccttcctcccttcctctgccccatttactccatatctgtaccagtcgtgatcagccttctaggctagtgtctaggtctccagggttttgatggtcttaggtaggctcttgttccttctgtccctcttagactggcatcagtactatgacatagtttatatgaagcctcatgggagactccagaaagtcatgaaccacatcacagacgggccgaggaaggacctggtgaaggggaagcagattgccgctgcgctcatgctggacagcaccttcagcatcctgcagacctgggacaccatcaacctgaacagcttcttcacccagttcgagcagttttgctttgtcctgcaacagcctatgatttatgaaggacaggcacagctgtggaccgatttgcagtacagggagaaagaggtatcaggcttgccaccagctgctctacctgctgggcaggagccacacctgacctgctagtggccggatgaccccttgactctgtgggccaggttgcaaatgggaatgtgtagaactttccagccttttctcctaccactgtctcttgggatttctctgccctcccccattttcctccttttactggttgtaatctcagccccaccccagcaccagtcctgagtcctcccctggccttggagggagagtggaaggaacggggcaccctctgtcactgcacctttacccacactgcggtgcagcctgggtgggtttcaggccggcctggagctgtttctgagctgaagctgagccctgatgagcctcaggggccctgcctgagccctcatgccagggtcttggctgcactgcagctcctcctgtggctctcacaggtgtggtggtggggcacggatggggtctgctgccctagctgtggtgctggggcagctctggacactgccggtgaattcaagtccatggttcatgcatcttcctcttctcccaccatcaggtgaagagatacctgtggcaacatctgaaaaaacacgtggtaccattgccggacggaaaaagcacggactttttgcctgtggactgcccagtgaggagtaaactgaaaacaggcctgattgtcctttttgtagtggaaaaaattgagcttttattagaaggcagcctggactggttgtgtcacctcctaacctcagatgccagctcaccagatgagtttcaccgtgacctaagccacatccttgggatacctcagaggtattattattttttgtcaaaatgttttttatagctattataatgattttctctgattgcaaaaataagtgcttgactagagtgactgaaagcacacaggcaagaaataaaaccacccgtgattttaccactcactgtggtcatgtcagtagtttttcctagcatctgtcttatttttattatattctgtcctctgttgaattccctgccttttgttttccccccagacggcgtctcactctgtggcccaggctggagtacagtggcgcaatcttggctcactgcagcctccacctcccaggtttaggcaattctcctgcttcagcctccttagtagcagggactacaggtgcacactaccacacatggctaatttttgtatttttagtagagaagggttttcaccattttggccaggctggtttcgaactcctgacctcaagtgatccacccacctcggcctcccaaagtgctaggattgtaggcgtgagccaccgtgctgggtctgaataccctgctttttgaagcttcgtgtggtatcatgagcagcctctgtgtgcgcgtgtttaggaggttgtggcgtgacgccagcctgaactcatcccctcaaggacatctgcagaagcagcgtgaatgttctccccatgcccctgcctgtgccgtgtctagttcaggaaacacagtgtgactgtcctgggcctgaaatgttcagtggtgagaaggcgatggcctttgacttggtacctgctcagaccccactgagctctgcactctctctgcgtgtgttgatttgaacgtgagaatgacattaggtagcctttcctgaccagcatgtcttatcacgacatctgcctctcagttttacacatttatttatttgttgttttgagacagtgtcttactctgttcccccagtctggagtgcagtggagcaatcagctcactgcagcttcagcctcacagactcaggtggttctcccacctcagcctcctgagtagctgggactgcagatacacaccaccacttccagctaatttttgtatttattgtagagacggggtttcaccatgttgccacggtggtcttgagctcctgaccttgtgatccgcctgcctcgacctcccaaagtgctgggattatagacatgagccactgtgcctggcctggttttacaaataaaaaacaaccaaataaacgccgcacattttgacaaagaggaggagtggaggcaaaggcaatgtacagagttagtgccggggcttaaagtatgaggaatcattaatatcttttgactgtaggagattcaccatgtattgtttataggctcaacccttacgtttaaaaagttgttttggggccgggcacggtggctcacgcctgtaatcccagcactttgggaggtcgaggcaggcggatcacaaggtcaggagttcgagaccagcctgaccaacatggtgaaacactgtctctactaaaaatacaaaatttagccgggcgtggtggtgcatgcctgtaatcccagctactcaggaggctgaggcaggagaatcacgtgaacccaggaggcggaggttgcagtgagccgagattgtgccactgcactccagcctgggcgacacagtgagacttcatctcaaaaaaaaaaaaaagttgttttggccgggcattatggctcacacctgtaatcccagtgctttgggaggctgaggcaggagggattgcttgagccaggagttcaggatcagtctgggaaacaaaaattaaaataaaaaatagagccggccaacacagtgaaaccctgtctctacaaaaaatacaaaaaactagccaggcatggtggcgggcacctgtagtcccagctactcgggaggctgaggcaggagaatggcgtgaacccgagaggcagagcttgcagtgagccaagatcgtgccactgcgctccagcctgggcaacagagtgagactccgtctcaaaaaaaaaaaaaaaaaaatgtagctagctgggtgtggtggtgcacctgtaattccagcactggagaggctgaggcaggaggatcccttgagcccaagagttcgaggttataatgatcgcaccaccgcgctgccttgatgacagagtgagactctgtctctaaacaatgaaaataaattttacaagttgctttatatttagatttactgttgccagatggcctgggttcaaaccccagctctgtcagtcaggaccctgcgttgactacttagccaggacccctgcttctgagatccctcccctgtcctgggagtttgttgtggggattcggtgagggcctgcaaaggagctgacgccctaggctgggggctgagggaagccctgtctcctgcgtgagttaaactctgctcagccacgcgcggtgctcctcttgctctgtgtgcacggtgcttgcttcctgttgggactccagactcccagggagatgactccctggccagctcagctcactgcgggatctttattcccttccagctggcggctgtacctggtgaacctgtgccaaagatgcatggacacaaggacgtacacctggctgggcgccctgcctgtcctgcactgctgtatggagctggccccgcggcacaaggatgcctggagacagcctgaggacacctgggccgctctggagggactctccttctcaccgttccgggaacaaatgctagatacgtaagtcgtagagttgtgcttatctacatgaatctgggaagactgactcctacattgtgcacccggagtcccggtgggctctgcagtgactccattcctgattctaatgacagaactaacacacgctcttttaacattttaagacatcaaaactgtcaagaataggctgtgcacagtggctcacgcctgtaatcccagcactttgggaggctgagacgggtggatcacctgaggtcaggagttcgagaccagcctggccaacatggtgaaaacccgtctgtacgaaaaataccaaaaaaaaaaaaaaaaaattagccaggtgtggtggcatgtgcttgtaatcccagctactctggaggctgaggtaggagaatcactagaacccgggaggtggaggttgcagtgagctgggatcatgctactgcactgtagcttgggcgacagagcgagactctgtctaaaacaaacaaacaaaaaactatcaagaatacagaaacaacttgtaacctcagaggcagccgttgttagcacggtggcatacctatttgtggttttgtccaaatatggattcgtgggtgttttatgtacttaaaagaacaacaacaaatgatgtgttatttattctggtttacaacctgatttttcctcttaacagtattttgtgaaccattttttccatcagcaaattcttgtctatgtcttagcgttccagccagagagagtgccagccttgtattgagccagttctctgttacaggacatttggttggttgtgcagtttcgttttttcagcgtgctttcataagcatccttagctttctctgtcccataacttcattgagatagattcctacaagtggaactgctaggtcaaaggcattgtgaactctaaaccatttatacctttgcataatgctggcttaaaggagaggaatattggcaatatatataatcctgatctctgattcaaatataatgacctctcctttatcacaagaaaatattaccagagaaagtttatttatttatttatttatttatttatttatttttaacttctaagttcaggagtacatgtgcaggtttgttatatagataaacttgtgttatggagtttttttgtacagattatttcatcatccaaatattaagcctagtacccattagctatttttcctgatcctctccctcttcccatcctccaccctctgataagccccagtgtgtgttgttcccctctatgtgtccctgtgttctcatcatttagctcccacttacaagtgagaacctgcggtatttggttctcgttcctgagttaatttgctaaggataatggcctccagctccatctatgttcctgcaaaggacatgatttcattcttttttatggctgcatagtattccatggtgtgtatgtaccacattttctttatccagtctactgttgatgggcattgagtttgattccatgtctttgctattgtgaattgtgcttcaatgaacatacatgggcatgtttctttataatagaacgatttatattgtttttggtatatacccagtaatgggattgctgcggtgaatggtatttgtggaattgccacactgtcttccgtaatggttgaactaatttacactcccaccaacagtgcataagcattcctttttctccgcaacctcaccagcatctgttatttttttaccttttaatagcagccattctgactggtgttaagatggtatctcactgttttttttttttaagagacagagtctggctctgtcacccaggctggagtgcagtggtgtgatctcagctcactgcagcctctgcctcctcggcacaagcgattctgctgggattggtagtgtgcgccaccacatgtggctaatttttgtctttttagtagagacagggttgcaccatgttggccaggctgttcttcaactcctgacctcaagtgatccacctgcctcggcctcccaaagttctaggattgcaggcatgagccaccacgcctggcctcattgtggtttttgttttgttttgtttgagatggagtttcgctttatcacccaggctggattgcagtggcacaatctcagctcactgtaacctctgcctcccaggttcaagtgattgtcctgcctcagtcttctgggtagctgggaccacaggcaccccaccatgcctggctaatttttgtatttttagtagagatggggtttcaccatgttggccaggctggtctcaaaccccagacctcaagtgatccgcccaccttggcctcccaaagtgctgggattgcatgtgtgagccaccatgcccggcctcattgtgattttgatttgcatttctctaatgatgagtgatgttgagctttttttcatatgcctgttagccacatgtatgtcttcttgtgaaaagtgtctgttcatgtcctttgcccactttttaatgaggttgcttgtttttttttcttgtaaatttgtgtatgttccttatagatgctggatattacacctttgtcagatgcatattttgcaaaaattttctcccattctgtgggtcatctgtttactctgttgatagtttcttttgctgtgcaaaagctcctcagtttaattagttcttatttgtcaatttttgcttttcttgtgattgcttttggtatttttgtcgtgaaatctttgcccattcctatgtctagaatggtattgcctaggtctgggcaaagattggagaaaaattatggagaagtccttaaaagcacaggcgacaaaagtaaagtgagataaatgggattacatcaaatcaaaaagcttctgtgcagcaaaggaaactatcaacagagtgaagagacagtccacggaatgggagaaaatatttgtcatctacacgttggatagggggatttaaggaactcaaacaagtgaacagaaaaactcagatctaaaaatggacaaatgagttgagtagtcatctaaaaagaagacacacaaataaccaacaggcatatgaaaaaatgatcagcatcattaattagggaaatgcaaatcaaaaccacaatgagatatggtcttacccaagttagaatagctgtgatcaaaaagacaaaaaataaatgccagtgaggatgtgggaaagagaaactctcatacagtgtaggaatgtaaattagtactgccactatggaggacagtataaaggttcctgaagaaactaaaaatagaactactgtatgatccagcaatcgtactgctggggatatatccaaagtaaaggaaatcagtatgttgaagagatagctgcactcctatatttatcgtaacactcaatagccataatatggaatcatcctgagtgtccacccgcagatgagtggatgaagaaagtgttgtctatatacacagtagaatactatttggccaccaaaaagaatgaaattctgtctttcgcagcaacatggacaagcttggaggagattacgttaagtgaaataagccaggcgcagaaagagaaatactgcatattcccactcatacgtggatgtgaaaagagttgatcttctagaaggagagagtagaatagtagttacgagaggcgaggaaggatggggagagggctagccaaaggttggctagtggatacaaaagtatggctagataggacgagtaagttctagggtcctagagcagtatggaacgactgtaatttacaatttattacgtttttcaaatagctggaagagtggagtttgaatgtttccaacacaaagaaataaatgtttgagatagatatgctaattaccctgatttgtacacattatacactgtatgcatatatattgtatccatatatttgtacagattacagactgtatactttgtacatagtatacattgtagacatatttatatgtatatacagtgcataaaatgtattctctgtatgcatttgtatacattatgtattgtatacatatatagaaatataacactgttccccataaatatgtacaattattatgtgtcagtttaaaaataataaaagcagctgggcttggtggctcatgcctataatcccagtactttgggaggcccaggcaggaggattgtttgaggccaggagttcaagaccagtctgggcacatagtaaaacccagtttctacaaaaaaacaaacaaaaaaaatagttaggcatggtggggtgtacctgcagtcccagctacttgggaggcttacatgagaggatcgcttgagccagggaggtcaaggctgcagtggtagaagtccagattccctagaagttgaaataaaagcatctttattttcagattcttgacaggtaaccacaaactttctctttaagtataatctctctgaaatactgaatactgggttatttaatagaacagtcataatgaccacagattaacccttctaagcaaaatagattaatttattttggccttgaaatggtctttctcttattaatgtgctagaatgtattcattcattcactggatgaatacttgaagagcaccttccttgtgccaggaagtactactcaaggcacagcgtgtacagcactgctcaaaacagacagctgctcctggccttgtggagcttgcattctagctggagaggcaggcagttaatacatcagtaagtcctattgatgagagagctctggaaattcctccttcccctagcctggaggctcaggccacagaatctgctaaggtctgaaggtagggtaggagaacagaggtaatgactgcagcactctgggccttgcagtgagaacaagacagtgaccatccaattgggaaaggggctggagaactgaaagagacgccccctcataaagcatgatgctcagagcctgccaaatgccaaagactggggacagcagaaaaaatgaggcagttgctctgtgcccctggatcccaacttctgctaaaggcagtgttacggtcttgcctttagaaggcgtaaaagcctttggaaaccaattctattccttttcttttttcttttcttttcttttttttttttttttgagacagtcctgctctgtcgcccaggctggagtacagtggcgcgatctctggtcactgcaaccttcgcctcccaggttcaagtgattcttgtgcctcagcctcccaagtagctgggactacaggtgcatgtcatcacacatcacatgtggctaatttttgtatttttagtggagatgggttttgccatgttggccaggctggtcttgaactcctggcctcaagtgatctgcccgcctcagccttccaaagtgctgggattacaggcgtgagccacccactgtgcctggccagccgttgggaaccaattctaattaaagctacaacaaagctgtagttcatctaaactattaactcagcccctgataacagaagaggccactagatgatcaagagagaaaacagtcaatatagtcagacccatggatggtccatatttacctagaaaggctagatatagtagaaatatagagtaccttttattattattgctatttttatgtacttatctttaaatatcttgaaaagtctgcagtagcattgttcctaaagatccaatcgttcaggtaaaagtggcctttagtatgcagtgaacctttattgatatgtttttcataacttctgttacttctagggagccttgctttatttcttttccattgtcaacattttgggtctccagtactgtgttccagaatcagcattatttaagggccttcgctgagcccacttgggctgtttgatcctggacactcgttaataataattaagaggcttggctgggtgcagtggctcacacctgtaatcccagcactttgggaggccaaggcaggtggatcacaaggtcaggagatcgagacaagcctggctaacacagtgaaaccccatctctactaaaaatacaaaaaatgagccgggcgtggtggcaggcgcctgtagtcacagctactggggaggctgaggcaggagaatggcgtgagcctggtaggcagagcttgcagtgagccgagatcacaccactgcactccagccaaggcaacagagtgagactccaacacaaataaataaataaataaataataataataataattaagaggcttaattattggggtatatcccttttattgtaaaatatacataatctccagtttaccatgttaactccttttcaaggcacagttccctggcaccaagcacattcacactgctgtgtagccgtcagcaccatccacctcccgaactcagcttccccagctgaaactccatccccatgaaacacgacctccacactccccctcctcctggtaaccactgttctcctctctgtctctaggattttgacttctctggggacctcacgtgagtggaatcacacaggatttgtccttttgtgtctgatttatttcactgagcataatgtcaagattcatccatctcaatgaattctttttgtgtatttatttatttatttgtagagatggaatcttgctatgttgcccaggttggtctcaaactgctggcctcaagctatccatcctcctgctttggcctcccaagttgtggggattacagacatgagccactgcacccagcagtgaactttttttttttttgagacagttttggtctcattgcctatgctggagtacaatggcacgatcttggctcaccgcaacctctgcctcctgggttcaagtgattctcctgcctcagcctcccaagtagctgggattacaggtgtgcgccaccacgcctggctaatttaggatttttagtagagacgggatttctccatgttggtcaggctggtcttgaactcccaacctcaggtgatctgcctgcctcggcctcccaaagtgctgggattacagacgtgagccactgcgcccggcctgattttattactattttttaatattactgctccttgtagaacagggctaccccataggagcatgcccagaatggccagcagtgaattcttattccgtattctgaattctatattaagttaattctccttttttctttccttttttttttttgagacagagtctcactctgttgcccaggctggagtgcagtggcgtgatctcggctcactgcaatctctgccgccggggctcaagtgattcttctgcctcagcctcctgagtagctgggattacaggattacaggcatgtgccaccatgcctggctgatttttgtatttttagtagagacgcagtttcaccgtgttggccaggctggttgcaaacttctaacctcaactgatccacctgcctcagcctcccaaagtgctgggattcaggcgtgagccaccacgcccggccattaagttaattctcagtaggttgttctgtacttttcatttgattcactgcatatttttgttttccacatagcctttattttattttttaaagtagagacagggcctcactaggttccccaggctggtttcaagctcctgggctcaagtgatcctcccgagtcagcctcccaagtattgggattcaggtgtgagccaccacgcctgccctcaagtagtatttaaatcatttttgaattcgggactgtttctgtccctccagcattggtttcctccattttccctcactgatctcactgcgtctcttttctccgtccctatttctcttatgcaggagttccctacttcagtttatgagagagaagcagcatttgctgagcatagacgagcctctcttccggtcctggtttagtctgctacctctgagtcacctggttatgtatatggaaaacttcattgagcacctgggtcgttttcctgctcatatcctggactgtctttcagggatttactaccggcttccgggacttgagcaagtcttgaatacgcaggtttgtgtctgaagtcggctctggagtcctggcttagcaaaagcagactagataactaaacatggaaagctcaggattcttattcctaaaaaacagacagtgggctgggtgcggtggctcacgcctgaatcccagcactttgggaggccgaggcgggcagatcacgaggtcaggagatcgagaccatcctggctaacacagtgaaaccccgtctctactaaaaatacaaaaaaattagctgggcgtggtggtgggtacctgtagtcccagctactcaggaggctgaggcaggagaatggtgtgaacccgggaggcggagcttgcagtgagccgagatcacgccgctgcactccagcctgggtgacagagcgagactccatctcaaaaaaaaaaaaaaaaagaaggcgtctcatgtgatgcacttcgtagctgccattcttcctttcacattttttggtggagaaaatggtataagtttaaatcctgagttttatctgtaaaagaggtaagattagtatgtgagcaccttaaaatttgtttgtaggaagaaaacaatgtataccatattgatgttggatttttttcagctctgttttagcaatgacagtggcattgtgattcaatcttttgtcctgtttttctttttttctctgccttaggatgttcaggatgttcagaacgttcagaacattttagaaatgctgttgcgactcctggacacttaccgggacaagtaagtggaaagcacgatgcagtctctccctcacatgcggcccccgggggcttcctctgacccctataattggccgtgacccacatgtgctgttgtaacagcaaggtcataaattaatatgtggcccacttctcttctcaggttattaatattgtcgtctgtttttttttttttttttttgagtcagagtcttactctgttgcccaggctggagtgcagtgacgcaatcttagctcactacaacttctatctcctggttcaagtgattctcctgtctcagcctcccgagtagctgggattacaggcgcaccccaccacgcccagctaatttttgtgtgttggtttgtttgtttgtttgtttttttgagatggagtctcactcttgttgcccaagctggagtgcaatggcaccatcttggctcactgcaacctctgcttcccaggttcaagtgattctccttcctcagcctcctgagtagctgggattacaggcgcatgccaccacgcctggctaatttttgtatttttagtagagatggggtttcaccatgttggccaggctggtcttgaacttctgacctcaggtgatccgcctgtctgggcctcccaaagtgctgggattacaggcgtgagccaccatgcctggccgtctgttttttttttttttttttttttaaagggaaataatagatatcagctgctaagatttgggtttatctccccctgatcttttttcctatacatttttcccttacttgtaaatagtcatgatactgcatatgcctggtgggcgttctgcatttttttaatacttagtcagtttaagataaaaatcaaaggtagctttatataattatccaaaatcatttgctcctgcaaatttgtgacctctgataccctgaggggtcagcagacagaatgcagaaccactgaaatgtgccagtgagcgatgggatgggtgttgtctgagctgttctctgagcggctcgggcacttccagtcttcgttcacctcctttgttcacgtctctgccgatgttgatccagcacctgtgacttgaggatcccccccacaagctccctatctccccaccactgtgtgtcacattctcagcccagggagtcctttcttacaccgccttcccagtcccctccatcaactctcctcttaagctcctcctaagtgtcctcttaagtctctcctgagtcccctcctgagtccctcccaaggctcctcctgagtccctcctaagcctccttctgagtccctcctaagcctcctcctaagtcccctcctgagtccctcctaaggctcctcccgagtccctaccgagtccctcctaaggctcctcctaagtccctgctctgtccatgtgtccctcagaaaacacaaaacccaggcccggcagagctggagccaattccacacgggctgcacgctcttctactatttctttctcttcctccctcctttctgtttctttctgaatattttttcaaatttatgtcatattttaatgtctagtaataaacatcccttgccttttttcacatcttggaacgcactgaggagtgtttggacttgctttggttagaacagttgagactacagagacaaaacaagaggactttgcttcctttttatcttagtcacaagttcaggactgactgagattttccagacgttaacctagataaggtcaaacaaatgccctgttggtagttattttgaaggaaggagctagtcatcaatggtaaccattttctggcttctcctaaatccttgccgggatttctcttaactctttgcggggcaggattcccgaggaggccttgtcaccatcctacctgactgtgtgtctgaaactgcatgaagccatctgcagcagcacaaagctacttaagttttacgagctgccagccttatctgccgagattgtctgcagaatgattagacttctatctctggtggtaagtggagtcaacacacaaggtatcacacccgggataggtgcggaatttcaagcagcctcaatttggaaaggaaacagactgattcccgggtgctgggatgagatggagcggtggtttcagcagtggacatttcttgtgcacctgcttgatgctgggttctgttctgggtgtggggggtgtcagtgggccagggtctgcccttctgccaccttgggctttcctgggagggaggcagggagttaatgtgtggccatcagctggtcatggggaaaccagagagctggcgcaggggctgggggtcaggcaacgccacgcggagaagacgacttttcttttttcttgattctgttgtttgcagagaactacggggaccattttcctcccaaaaaatacatgtccaaacatggtctttcccaccttcttgacattgtagcttgaatacagtaacaaaggccatagcgccacacatctgccccccgctgcatgtcgtgtcccaggtctgatggcaggatgacccggctcctccgtcccaaagaaagccactgttgtgacttctcccatggatcagttttttttttgttttttgttttttgttttttaagacggggtctcactctgtcacccaggctggagtgcagtggcgtgatctcggcttactgcaagctccgcctcctgggttcacgccattctcctgtctcaacctcccaagtagctgggactacagacgcctgccaccacgcctggctaatttttgtatttttagtagagatggggtttcaccgtgttagccaggatggtctcgatctcatgacctcatgatccgcctgccttggcctccaaagtgctgggattacaggcttaaaccaccacgcccagcctcccatggatcagttttacctgtcttccagctttgacctttctgcctccgactttccccactcacccccatgtctctgagctctgtctgtgtggtgcagagatcggcaattccttctttcccgtctctgtgcagttttcacccacttgagttcatgagtttcagtttgaaagtgatgtaaggtttaatgtttagactgatcatttgtttgtttttttgagatggagttttgctcttgttgcccaggctggagtgtagtggcgccatctcagctcactgcaatctccgcctcctaggttcaagtgattctcctgcctcagcctcccaagtggctgggactacaggtgtgcaccaccacacccagctaatttttgtatttttagtagagacagggtttcaccatgttggccaagctggtctcaaacgcctgacctcacgtgatccacctgccttggcctcccagagtgctgggattgccgatgtgagccactgcacccagcacaattttttttttttttgagacagagtttcactcttgttgcccaggctgtagtgcaatggcgtgatctcggctcaccacaacctccgcctcctgggttcaagtgattctcctgcctcagcctcccgagtagctgggattacaggcatgtgccactaaacccagctaattctgtatttttagtcgagacaggatttctacatgttggtcaggctggccttgaactcctgacctcaggtgattcgcctgcctcagcctcccaaagtgctaggattacaggcatgagctactgcacccggctgatcattttttttaatcttacttcaagttagaactgtgacgttagtgatagaaaacaattaagtgtatgttttaactttcttcctttcagttttcttgtgttaaagtaccacagacacagtttaagaataaatgtcattggtgagatgatcacgttctctggagtggctgctatttaaaccgccacaggcagctgccaacttccacataaactgtgtttaaggaatttgtcagttacttaggatttattttctacagaaataactatcttaaatgttggctgggatctcagataagtttaatccatattatggacaaaatactctctacctgtgccataaaagcaaacaaacaaacaaaaaacctttgcaatactaaaattaaacaaagcaaaaatacgtgacgcatgttgaagaaacttttaggtgtctgctgctgtgaaggctccagggttgacggacacttggagaacaaggtgcccgtgtcaggctccggaggtctgtgcagcctctgagcggtcattcagtttgttgttattggccatcgctgtccagccctgtgctgctggattgttctagaaggagctgtgccattggggggaccttcagcagtgcctgtttcgttttctgtcggcccccgccccctgcgtgctgtgctctagtcactcctgtgcccagccccctctgcgggctctctttcacagcagcacctgcatcctggtccctcttacatgctttgaaagctcctgcctgtatcttcccgccctggcccttcccaggtatagtgacgctgtgttcccctgcctgctgtgggcttttcctctctcccactctcgggcagccccgcccagcagcagccttgtcctcttgcccagctgcctcgaggcgtgggcctctcggtgcttccagtgagcacctgagcgtatccaggttctgtggctcctgacacttgcacgatgtgcggggctgtgcttaaaaaaaaagatcacacacttggctgggtgtagtagctcacacctgtaatcccagcactttggaaggccaaagcaggcagataaccagaggttaggagttcgagaccagcctggccaacatggtgaaaccctgtctctactaaaaaatacaaaaattagccaggtatggtggcatgcacttgtaatcccagctacttgggaggctgaagcaggaggatcacttgaacccaggaggtggaggttgcagtgagccaagatcgcgccactgtactccagcctgggttacagagtgagactctgtctcaaaaaaaagaaaaaaaagaaaaagaaaagaaaaagaccacacattaatccaggactgtggggctcctcccaggaggaggtggccctgacccctgacctgtatgcttcctgggaaatgtgcttctggggaggacagagggaggaggaaggagagggaggaagaggaaggcaggggagagaagggaggcattacaggaggctttgagcccaggggaagaggggttttccctctggtctggtgggtccggcacggaggcggggggagagcatgatgggagcacagtgggaaggggacccaggtttacctccgggtcaggagcctggctgtggtctggcatggaggcagggggagggcatgatgggagcacagtgggaaggggacccaggtttacctccgggtcaggagcctggctgtggtctggcatggaggcagggggagggcatgatgggagcacagtgggaaggggacccaggtttacctccgggtcaggagcctggctgtctcctgtgtctaaggaacaggcccgggagtctgcagggcccctctctggggcgtgcttttccccctcagtctcctgggcacagcctggggacctgctcattggcaggacagaggctgcctgggctttcgggggagcacacagatgccgttccctccctccctcttttctcccgtatctcccacgttcagggtgaacccagaaaaccctggggaatggaagtgctttgggaatgtgggcttctgccaaggcctgtggtccctccatcgtagccactccttgagcagcctgtgccagcagggaggagaggagggggtgcagcatctcgccgggaacctgagtccacagccgaggatgactgaccctccctcttgtgtgacaacaggattctgcaggacagagagatgaaactggaaataattcagtccaaacagtcttccaagggacccttgctgctacgaaaaggtggctccgagaagtttttacaaagaacatgctcacatcttcaggtgcctcattcacatacgtcaaggaaattgaggtaggcatttggccgaaggcttctgggtagggatgtgactgatcgtgattcctcatggcctcaaatcatggggtacaggctgctggccaggggcagttgttggccttcacctgagcctcagttcttcatctacaaaatggagttgctcctgtctacctggcagggtggctctgaggcagacagatgccgggtgcaaagtgctgctgcactgcctcgtgtcccctggccgggcacagtccctgtggtgatggaggtgtggaggtgatggtgatggttggtggtggtggtggtagaggtgatggtggtggaggtgatggtgatggttggtggtggtggtggtagaggtgatggtggtgaaggtgatggtgatggtggacgtaatggaggtgatggtggtgatggtggtcatggaggtggtggaggtgatggtggtggtggaggtgatggtgattgtggtggaggtgatggtggtgatggtgatggttgtggaggtgatggtggaggtaatggaggtgatggtggtggtgaaggggatggtggtgatggaggtggtggtggtggaggtgacaatggtgatgctggtggtggaggtggtggaggtactggaggtgatggtggtggtgaaggtgatggtggaggtaatggaggtgatggtggtggtggaggtgatggtggaggtactggaggtgatggtggtggtgaaggtgatggtggaggtactggaggtgatggtggtggtggtggtgatggtggaggtggtggaggtaatggaggtgatggtggtggtggaggtgatggtggaggtactggaggtgatggtggtggtgaaggtgatggtggaggtaatggaggtgatggtggtggtggtggtgatggtggaggtggtggaggtaatggaggtgatggtggtggtggaggtgatggtggaggtactggaggtgatggtggtggtgaaggtgatggtggaggtactggaggtgatggtggtggtgtaggtgatggtggaggtgatggtggtggtgaaggtgatggtggaggtaatggaggtgatggtggtggtgaaggtgatggtggaggtactggaggtgatggtggtaaaggtgatggtggaggtactggaggtgatggtggtggacgtgatggtggaggtaatggaggtgatggtggtggtggtggtggtggaggtactggaggtgatggcggtcgtggaggtgatggtggaggtaatggaggtggtggtggtggtggtggtggaggtactggaggtgatggtggaggtaatggaggtgatggtggtgatggtgatggtggaggtactggaggtgatggtggtggtggtggaggtaatggaggtgatggtggtggtgaaggtgatggtggaggtaatggaggtgatggtggtggtggtggtggtggtggaggtaatggaggtgatggtggtggtggtggtggtggtggaggtactggaggtgatggcggtcgtggaggtgatggtggaggtaatggaggtggtggtggtggtggtggtggaggtactggaggtgatggtggaggtaatggaggtgatggtggtgatggtgatggtggaggtactggaggtgatggtggtggtggtggaggtaatggaggtgatggtggtggtgaaggtgatggtggaggtaatggaggtgatggtggtggtggtggtggtggtggaggtaatggaggtgatggtggtggtggaggtgatggtggaggtactggaggtgatggtggtggtgaaggtgttggtggaggtactggaggtgatggtggtcgtgtaggtgatggtggaggtgatggtggtggtgaaggtgatggtggaggtactggaggtgatggtggtggtgaaggtgatggtggaggtaatggaggtgatggtggtggtgaaggtgatggtggaggtaatggaggtgatggtggtaaaggtgatggtggaggtactggaggtgatggtggtaaaggtgatggtggaggtaatggaggtgatggtggtggacgtgatggtggaggtaatggaggtgatggtggtggtggtggtggaggtactggaggtgatggtggtggacgtgatggtggaggtaatggaggtgatggtggtggtggtggtggaggtaatggaggtgatggtggtggtggtgatggtggaggtactagaggtgatggcggtcgtggaggtgatggtggaggtaatggaggtgatggtggtggtggtggtggtactggaggtgatggtggaggtaatggaggtgatggtggtggtggtggtggtactggaggtgatggtggaggtaatggaggtggtggtggtggtggtggtggaggtactggaggtgatggtggaggtactggaggtgatggtggtcgtggaggtgatggtggaggtaatggaggtgatggtggtggtggtggtggtactggaggtgatggtggtccgtggaggtgatggtggtggtggtaatggaggtgatggtggtggtactggaggtgatggtggtggtgaaggtgatggtagaggtaatggaagtgatggtggaggtactggaggtgatggtggtggtggtggaggtgacagtggtgatgctggtggtggtggtggtggtggtggtggtggtggaggtggtggtggtggtggtggtggtgatggtgatggtggtggtggtggtggtggaggtgatggtggaggtaatggaggtgatggtggtggtgaaggtgatggtggtgatggaggtggtggtggtggaggtgacagtggtgatgctggtggtggaggtggtggaggtactggaggtcatggtggtggtggaggtgatagtggtgaaggtgatggaggtggtggaggttatggagataatggtggtggtggaggtgatagatatttgaacatgcctgacctaagaaaagttcattttcatttttggctgggcactatggctgatgcctgtaaccccaactctttaggaagcctaggtggaagggtggcttgaacccaggaggtcagggctgcagtgagctatgactgtgccactgcactccaacccaggtgacggagcgagaccctgtctcttaaaatattttttttacagtgcattttcatgtgtttcaacctcctagtgtccctgccaaaaatattttaatctgaatcaaatcatggggaaattatgagacaaatcaggtcaaaagacagtttacaaaacagttggcctgaacttttcaaaactgtcaacatgttaaaagaaaaaagaaaaaaatgaccagggaactcttctagaaaagagatgtgataagtaaatgcagaaaagagacgtgataagtaagtacagcgtgtgtcccaggaggatctaggatccagtcaggacaggagctggagcacgagaggaacgggggtggagaccacttcctgggggcagagtgtcctcctctccacgttgcacgtcctgagtgggaaacctgcactggagttgcacagggaagggctagggtcttaggagaccctgcccaggtatgtagtggcaaggtgccatgatgcctgcaacttactttccaacggtttgggagagaaaatgctcatttgtgcagagtccgaagagggagcacagaggagagaggaagagtgaaagcagctgtgtgaagcgtgaatcgcacaggactggagttgaatgaatgtgggtggtggtgtgctattcttgcgacctttttgaaagttcaaaaattttcaaagtataacatgagagataagtcctttcagaataaaaagccggttgtgcagtaggaggaccagtagtggcccctggttgggtctctgattctagaaagccaacctgggctgctgtgaccggccactagcatggctgactgttgatgaaggttggggagagccctggtgttcgcggagtcccgcgctctctgtattgccgtaatgctctgtctttctcctttcatgggagtgtgccgtggcatttagtcgtgagagtgggtgtgacctgtgtgcgggttttgcaggtctggaggcggctggtggaaatccaattccccgcggagcatggctggaaggagtcgttgctgggagacatggaatggaggctcacaaaggtaccaaaagtttgggggcagtcttttcagggcgtgaaggcaagctggagaaccccagaccattagcgacagccaagagatctcagcagtgcctctctgtgggcagggatggggtgaatcacagctccgtgtttctgtttctgatccagcccttatagtctgtccctagaagagcgcttcggagtcttactgagaggacagagaagaacaagggcccaggatctcaccatcatgggggtgcgggatttttcctgaccccttcgttggacttgcgacagggatgctgtgtttacttggcccgccgtgctcaaccccttgtgggagggagcacgtgagtgagtgtggcatctggccagctgctttgggagctggcaggagcaagctccgtgcaggccctgcagcagtgcccagattgaggtgcctgcaacccccgaagctccagagggcatgttacagtgctctcttagctccgccgtctatggacagtagtgtgttatcagctcagtgggtcccttgccttgttgcctagggtggctgccctctgccagggccaatgtgacagcctcttttaggtacccacactcggtgggtcccaagctcttgtccagcatccaagaagaatggggtcacccggacacttgaaggatggtgaaggtggagaattttattaagcaatggaaatggctctccatggagaggggagctggagaggggatgggtcaggtggggaatcttcctctggtccaggtgtctggctggctcttccctgaagtcaggacgtctttccgaagttaaaccgtctctccttggaagtccagccatccctctgaagtcaagtcacctgtttccagtgaagctacttctctctcactaccaagtctggggtctttataggcacaagatagggggcagggtgggccctaggtagttttggaaaaagcaacattctattggtaaaaagacattactccgaaagaaccagtggggagagagtaggcacacggggatagaggttctcactttgggccatgggtttcaggcttttcggctcgaaggtggggttttgccagggacccgcccctgtctgcgtaggatttctctgcctcctgcctccatcaatggggccccaggcacaggaggggccaggcctgcccataggcaggaagtctaagtggcctgttggtgacaggaacctcatgacacacaagtggagaacacacagacatgcccctcatgctgaattaaggcctgaggctcaaggaaaattagtttttatgtgatatgagagttttatatgtaactttttttttttttgagacggggtctcgctctatcgcccaggctggagtgcagtggcgggatctcggctcactgcaaactccgcctcccgggttcacgccattctcctgcctcagcctcccgagtagctgggactacaggcgcccgccaccgcgcccagctatatttttgtattttttgtagagacggggtttcaccgtgttagccaggatggtctcgatctcctgacctcgtgatccacccgcctcagcctcccaaagtgctgggatgacaggcgtgagccaccgcgcccggcctatatgtaactgttaaatggatctttaaagggaaaagtcagaaacaaggaaaaatgacctatgtctcataacttacctgtttttgcaagccaggtgctttttctgcagagtgggaaaagagactcttttaaattttagcctttggtctactggtggggggcagggaggacatgctttgcgtgggccaggagaagcttaaaattgggggaaacagtaaaacagcaggaaagtaaaaatgatgaaagaattttcatcccatagagcactggagcgctgcatccgaaagctctgaaaccacccccctttgatttttgcaggaggaacccctctcccagatcactgcctactgcaatagttgctgggacaccaaaggcttagaggacagtgtggccaagaccttcgagaaatgcatcattgaagccgtgagctcagcctgccaggtgaacaatctctcctcctgggaaacggattcgggctcacagctgtgttctgccatgacccagctaagggctatgaagcacccgctgggtctcagctcctccgctaactcagagattgggaagtgggcaccctcctccctcgccaagggcaatggcgctgaaatctagttctctccggattcctcagtgtgctgcacagtccctgctgctcgcaccatcctgcatgtgttccatatggaatcacggccgtgcgcgtgtggcacaagtcacacgggcttgcaggccgttcctcagatggccctgtcatcactgtggctgctggtttgattgattgttaacacttgctcagtaggtgtgcgggaagagactccaaaggttgacagaacatttatggaagcaaaatatgtgaaatggaaaattgtatcaatttatttagctcttttcggcaaaggggaagagattgtgcccccctgtctcccaggaacagtctcgcaggcaatgccacatgaggaagctccctgctggccacggctgccctgctcacatttcctaattggacacttaacccctgtacaagcacagccttgcggccacaggggaagtccagaaacattgaggtcattgaattccggggaccaaggggttctaattttttaagtgactgatacctttgataaggttttcctttccctttttcgttaactctttgttgagatattgttcgtatgccatacggtacatctgtcaaaagttccagttcagcaggttttggggtagtcacagatatgtacagtcatcaccacagttaatgacagagcattttcatcacttcaaagagaaacccggcccctttagccatcatcctcctcccctctagtcacccactcccctctgcaggcataaacaattgctgaacataaacaactgcttctgtggctttctctgttctgactgtcatatgaatggaatcatatcatatgtggccttttgggtatggcttatttcactgagcataatgtttttttgttgttggtggtggtggttgtttgttgtttttgagacagagtttcactctttttgcccaggctggagtgcaatggtgcgatcctggctcaccgcaaccgctgcctcccgggttcaagtgattctcctgcctcagcctcccaagtgctggaattacagctactttttgtttaaagagtcttttaattgtttaaagaacaatgtgccgccacactcggttccttttgtatttttagaagagacagggtttctccatgttggtcaggctggtctcgaactcccgacctcaggtgatccacccaccttggcctcccgaagtgccgagattacaggtgtgagccaccgcgcccggccgagcataatgttttgaaagaccgctcaggctggacacggttgctcacgcctgtaatcacggcactttgggagcccaggagttcaagacaagcctgggtaacagagtaagaccctgtctctataaaaactaaaaaataaacaaaaaaaattagccaggcatggccgggcacacctgtggtcccagctacttgggaggctgaggtgggaggctcccttgggcccagaaggtcaaggcagcagtgagccatgatcacaccactgcacttcaacctgggggacagagcaagaccctgtctcaaaaagcaataacaacaaaagtccatccatattgtagcttgtgtccgtttacgttaagtattccttacccaaaatgcttgagaccagaagtgttttggatttcagatgttttcaaattttggaatatttgcatttacataatgagatgtcttccagatgggacccagagtctaaccacaaaattcacttgtttcatatacatcttatacacatagcctgaaggtaattttatacaatatttttaacaattttgtgcatgagacaaagtttgtattaagtatttgtatgttgaatttttcacttgtggcatcattatactcaaaaagtttggattttgtagtattttggatttggggattaggaatgctcaacctatatttcatttttttccatggccaaatattccccgtttatccatgtgtccattgacggccatctatgttgcttcttcggctattataaatctgctgatacaaacattagtgtacatatttatgtgtgggtgtatgtcttcatttctcctgggtgtatacctcgatgtagaattgctgaatcatatggtaactccatgtttaattgtttaaagaactgtccggccgagtcccacagcagctgaaccattttcaatccctccagcagcataggaggcttccaggttctccacatcctcactaacatgtgttgtctaactttttgattctagccatcctggtgggtatgaagtggtatctccttgtggtttttgtttgttttttgagatggagtcttgccctgtcacccaggctggagtgcagtggcgtgatcttggctcactgcgacacctccacctcctgggttcaagcaattctcctgcctcagtctctcgagtagctgggactacaggcatgtgccaccatgcccagctaatttttgtatttttggtagagacggggttttgccgtgtgggtcatgatggtctcgatctcttgacctcatgatccacatgccttggcctcccaaagtgctgggattacaggcgtgagccactgtgcccggcctcattgtggtttttaactgcatttctctgataactaatgatatcaagcatcttttcatatgcttattggatttgtctgtatcttctttggagaaatgtttattgagatattttgcccctcatcccccccacccccccttttttttttttttttttgagaaaaggtctcgctttgtcacccaggctggaatacaatggcacgatcacagctcactacagcctcaacctcctgggctgaagtggtcctcccactttagcctcccgagtagcagggactacaggcatgtgccaccatgttcagctaattaaaaaaaaaatttctgtgggccgggcatggtggctcatgcctgtagaccatcctggctaacacggtgacaccctgtctctactaaaaatacaaacaattagctgggcatggtggcatgtgcctgtagtcccagctgcttgggaggctgaggccagagaatcacttgaagccatgaggtggaggttgcagtgagctgagattgtgccactgcactccggcctgggcgacagagcgagactctgtctcaaaaaaaaaaattttttttcgtagagacagggtcttgagatgttgcccaggctggtcttgaactcctggactcacatgaacctccctccttggccttccaaagtgttgggattgaaggcatgagccaccgcacctggcctcttttgctcatttttaaattgggttgtctttttattatagagttgggagtctttattctatatacaagtcacttgtcagatatatgattgcaagtattttctcccattctatgtgttgttttttcacattcttattggtttcttttgaagcacagaagtctttaattttgaagaagttagcatatctgttttttcttttgttgcttgtacttttggtgtcaaagaatcctttgccaaatcctaggtgatgaagatttactcctatgtttatttatctctaaatgttttatagttttagctcttacatgtaggcctttgatccattttgagttcctttttatatatggtgtatatggtgtgaggtaagggttctgtttcattctcttgcatgtggacatccagttgtcccagcatttgttgaaaggactctacattccctgttgagtgatgttggcactcttgtcaaaaatctgttgacgatacatgtatggatttatttctagattttcaattctatgtggtgatctacttgcctatccttgtgtcagtaccacactgtttggactaccattgctttctagtaagttttgaaattgggatgtgtgagtcctcctactttgttcttatttttcaagattgttttggctattttgggtcccttgcaatttcataagaattttagaatcagtatgtcagtttccactgacaaggaagtcagctgggattctggtagggctggtattcaatgtatagatcagtttggagagcattgccatcttaacaaggttaagttggatttctttcattcaattagatttttttttttcccctgttagacagagtctcgccctgttgcccaagctggagtgcccaagtagctgggactacaggtgtccaccaccatgcctggctaatttttgtatttttagtagtttcaccatattggtcagggtggtctcgaactcctgacctcagatgatcaacccgccttgacctcccagagtcctgggattacaggcatgagccaccattcctggccaatttcttttaacaatgttttgtatttttcatagtttaaattttgcacttcttttgttaaatttctaagtacttttttttgggggggggtgctattgtaattggaattgttttctgaattctgtttccagattgttccttgctggtgtctagacacacagtgctccatgcgtcttgtatcctgcaacattgctgagctcatttggtagctcaaattgtgtgtgcgtgtgtgtgtgtgtgtgcatgagagagagaattaaattttctatacataagatcatatcatctgtgaatagagtttcacttcttccaatctggatgccttttatttctttctcttgcataactgccctggctagaacctccagtacaatgttgaatgaaagtattgaaagtggacatctttgtcttgttctgatcttaagagaaggtttcagtcttttgccaccaggtgtgatgtcaacgtgagcttttcatagatgccctttatcagtttgtggaagttcctttttgttcctcatttgttgaatgcttttttttctttaatcatagaagagagttggattttgtcaaatgcttttcccgtatctactgaaatgatcatgcgatattttcctaatgttattaactgatatttgatgttaaatcaacctttcatccctgagataaattacacttgatcgtggtgtatagttcctttaacatggggctggataaggttttcttttatccttttaaatgtcagaaagtatctattataaattaaccttgtggtttttactaattactgaaatgttttacagaaactttgaacctaaaggaagaaaaatattgtttctcggaggagaattaaaaagagaattaaaatgtatatgttgtttgtaggcagctttttaaaagaattatggtttaggaacataaaatatatgctatattaagggtttattcatttttggtatttttcatgatatgaaagtccaaaaaaaaatgtagaaactggcagccagaaggaaggagggtgactggttatgttggtgtgtgtttgtgtgtgtgtcttcacatctctggtgctggacacttaaggaggcagtatacaaggaaatgaaaattttcgaagaaatgtaaagtgttttactattttgctctttttgtggccttataaaacaagttacagtagatttcagaaatgctatcgagtaggtaatttgcttttgttatttcaaaacaaactaatgaaaaacttctaaatgtccctcttttattaattttcttgtagtctcagaccagtatccttcaggggttctcttactctgatttgcggaaatttggcatcgtcttgtctgctgtgatcactaagtcctggcctaggaccgcggacaacttcgatgacattttaaagcatctgctcacgttggcagatgtcaagcacgtcttcagattgtgtggtatgtttgcgggagtgctgggaacatcagctcaggcaaggtggtgtcttcctgattgggaaaggtgggaggcagaagatttgacatgatgatactgaattgggatgggctgatgtttgacaaaggctgcagtttggacagagagaccctggaaggctcagagtgtcttgcgttgtaaataataactaatgctaacagccactattcattgaatgcttgctgtaccctagcgactgtgctgggtcgcaagggaagtgcccttgaaacaacccttctgaaagtcccctttaaggcccccagttttcagatcaggaaacaaatggagaaggcaatgcgacttacctaaggtctcaaagattataagtagtaaaaactaaaatccagacccaggtatgtcttatttggagatcaatatagaatgtccaagccaacattgatgacctcaacagaaagtgaagtactgtgctgtctgatttccccccagccccccgcgccccaggtgttttgtggtcaaggagggagagagagagacattccatcctaaaaacgttagagtccagttggcgtgtgagaccttagattcatatctttcagtgagaaggcgctggatgtggaacagccaaaatcaatgctgagcttcctacacatcagggaagctgtggggatcaaataactgaattaatatgggagtgcacaagtaaaagctactctcttgaaaagatcatttttgtgttatttgtatttatttatttatttatttatttatttatttattttggagatggagtctcgctctctcacccaggctggagtgcagtgctgtgatctcagctcactgcaacctctgcctcccgggttcaagcgattctcctgcctcagcctcccaagtagctgggattacagatgtgagccactgtgcccagcagtttatttaattttaaaacaaggtcttctctgttgcgcaagttagcatgtagtagagtgatgccatcatcgctcaccgtaagcgctgacctcccgggctcacgtgatcctcctgcctcagcctcccaagtggctggcactccaggcgtgcaccaccatacccagcctgtttataagttggatagaattttttagagcactttgatgtgtacagaaaaattgagcagaaagtacagagagttgtcatctatctctgccaccatcacacgggcagtaccctgttagtaacatgcagcattagtgtggtgcttttgttacagctgagaagccaatattgataacactgttattaactaaagtccatagttcgttcctggtgttgtccattctctgaggtttggataaaccatggcctgtgtccaccattccagtatcgtgcagaatagttgcgctgcccctacaaaatcccatgctccacccctcccatttcctttagtcttttccagaatgtcctatggttggaatcttataggatgtcgcctttagactggcttccttcacttagtaatacgtatttatgtttcctccatgtcttttcatggcttgagagctaacttcgttttaccactgaataatattctattgtatggatgtgctaccattcgcttacccgttcacctcatgaaagacatcttggttgcttccaagtttttgcaatgattagtaaagctactatgtttgtttcttatggtgcagataagcttcatcttctcctaatattgtatggctctaatattactgggagagaaatcctaagtggttaaacaaaacatgtataaaaattctgccctctaaatttatcataaaatcagttccaagattttgcaagataatgaagttgtacagagtataaagttatcacatggctgtttctctctttgcatatgctatgaaagtgtctccctaagaccatcctgatagacattgctaggtatgtctgcatcctctggtgcagtttcttctgttgtaggtattcctagggcaggggctttttaaagaagattctgtgtattctatttaaaaaatatactcaggccatgtgaggtggttcatgcgtataatcctaatgttttgggaggccaaggcgggaggatctcttgagcccaggagtttgagaccagcctgggcaacaaagtgagaccctgttctctacaaaaaattttgaaagtttgccaggcatggtgctgtgcacctgtgttcctagctactcgggaggctgaggcaggaaaatgaggttacagtgggctatggttgtgccactgcactccagcctgggtgacagagagagaccctgtcaaaaaaaaaaaaaaaaggaagtcagtccatccgtatactgaaggggacgtgggttttaacctgagaaatgtgtctcccagctgattttggccattgcgggaagtcatcttcttggacaaggaagttgttcaggggatgaatctgggcaagacctaaccctcgtgggggaaagcagaagggagtggaatgattggcgcatctggagacactggccagccattgcctgtgtttgaggaagtgggggcagaacaagaggttatctggaattcccacggtaacggcaaagaggcaggaggtggggagcccactgtgttaactgtgttcttcatctattcaggaaccgacgagaaaatactagcaaatgtcacagaggatgccaagaggctgatagctgttgccgactctgtgttgacgaaagttgttggtgacctcctaagtggcacgattttagttggacaactggagctgattataaagcacaagaatcagtttcttgacatctggcaactgagtaagcatcgagtcgatacgcacttcaggctcctgaggcattaagtagctggaagacacgtttgtgtttgcgtgtgcatttttgtaaaggagataatcatcttagccttgataatgagtatctcttcttgctcataagttgataggggtggtttataattctcaagaacatcacgggaaagtgataaaataatggccatctcgaaaaagtgggtatgcgcaaaaccatcctagtccttctcctggtggcggggaaggtgcggcgctttcaaagcattgccatggaaaatggcatttgttgctgtattgggttactttattggtgttcttattttccaggggaaaaaagtctttcaccccaggatgaacaatgtgctgtggaggaagcactggattggagaagggaggaactgttacttctaaagaaagagaaaagatgtgttgatagtctcctgaagatgtgtgggaacgtgaaacatctgatacaaggtggtattcctgagaagtgaacaaagttgagggctctcaaagggttagaggagaacacagtaagaatggatcacagtagcagatctttattttggagagaaggctttaaaattttttttttaatttgcatttgctggggggatcgctttcacctcttttagattcttctttttggtatttatgtccacatttccaaataacatgcttaagtgtctcctggatttttccggagtcagcatgagctgctgacgcccgctgcagaagatgagggcttagagccacacatttctggtctgtgccctgcacacatcacctttccacctcctgttgcttcctgttttctcataacggagttgcatcattgtttagggttaaatcatcaggacccacacggatcacaagtgaaccacgaaagaaaccgtcatcattttacaatttttgcacaaactctctgttttccacagaattacatttcctgtcagatgctgttttcactgcgttaatgatacgctgttttcattgtattaatttctaattccatcgcaatctctgccgagtgtctgaatttccttgaagatcattggtttgacctttgaaaaggaacctgccaaccctgggctgcagacgtagggtggagtctccctccacctcctaggagcctttgcctggcacctgggttagacgtggttcccacgcccccctcccccgctactcactcctgcttcctctgttggcagagcacaccctcactggcttcctgagaaaagggcgtgtaagaggttaaaccctcgaatccttgtgtgtctaaagatgtctgtcctcttactaggtcagtcgctcggctaggtctagaattacagaccggaagtcattttccttctgaagtttcaatgtgctgcgccatcattgcctccacagtgtggctatgtatggagaagtccgatgcagtgccagttacacatccttcatgtgtgtgacctgttttctctttcttgaagctcttgagctctttctgttactcatattctgaaataataacgtgtcttggcctggatctatgttccatcgaggctgggcatgttggctcccacctgtaatcccagcacttcaggaggccaaggcaggaggactgcttgagtctaggagtttgagaccagcctgggcaacatagcaagaccccatctctaaaaaaaatacaaaaaaattagcaagacacggtggtgcatgcctgtattcccaactacttgggaggctgaggcaggaggatcacttgagcctgggaagtcgaggctgcagtgagccgaaatcacgccacaacactccagcttgggtgacagagtgggaccctgtctcaaaaaataaaatattttcagtcccctctattgggtattaataggtaggtctttcaactctagacatcaaaatccttgagttctgggaaattctcttgaatgatttaattttttcttctcttgctggaattcctgttaattggatatgggacctcctggatgatcatctaactgtcatcatttttctctcggattttctatctctgttttttgctctgctcttgagagatttattcagaaccaaactttctgcttaggttttcatgtcagctttcgtatatatatttaatgtagaggaattctttttctcggaatgttcctttttaaattctgtcctgttcttgttcacgttgcagcatcttcccttctgggttattcaccgttttgttttggaggttttgcttttcctggcatcatgtgctgcttcctccaggttcctttcacttgttgatttgttttgattttcctcctatgtctggacattcttgtttgtctgtgtttattaagagaaagccctcacaagtgggttggccctctgcggggtgctgccgtggggtgctgtggctcgacctggaagttggcctgtctcctgaagtcttctgtctcctgcctggagggtgtgggcctggctgccaggtttctgggagccaagagggagaagcgggctggcgggccttggcatcccgtgcgtggtcctcccatggcccgtgttctcagtgtggttctccgccacctccctctgtctcctgtgtttcacaccccatcctccttccccctgagattggataattcatgtcttctgttagcttcctgagaaaggggatgtgtctagaaaggccctttgttctgccatgtatctgtggcctccaatccacacgcccccctgcgttatcctttctagaaaatgaaccatctcttggctgctggggtgaagaagggggtccacctgctgtgtcagggcattggggtgacagttggtgtgctggatggaccatgtcttttttttgggacagagtcttgccctgttgtccaggctggagtgcagtggctcagtctcggctcactgcaacctctgcttcctgggttcaagtgaatcttgtgtctcagcctccctagtagctgagattacaggtgtccaccaccacgtccagctagttttttgtatttttagtggagatgggatttcatcatgttggccaggctggtcttgaactcctgacctcaagtgatccatccgcctcagcctcccaaagtgctgggattacgggcgtgagccactgtgcccagcctggaccgtgtcttaaacagactttgaacccagtcttccttatttcatcaccacctcccagtctgcagtgacctgcacaatgtgtgtctgctttttgggaatcctgtgacataaaactactcagctctcagtgttgcccactgggaccctaggactccatgttaccaggcctcatgtgtcatttaccactggttcagctcgttttcaacttctaaaattttgttcctgttatcctgttcgccattcctcctcctgtccttgtcagtttatgacttttttttttttttttgatatggagtctcactctgtcacccaggctggagtgcagtgacacagtctcagctcactgcaacctccacctcccaggttcaagtgattctcctgcctcagcctcctgagtagctgggattacaggtgcgctccaccacgcctggctaatttttgtatttttagtagagacagggttttgtcatgttggccaggctgctcatgaactcctgacctcaggtgatccgcccatctcagcgtcccaacgtgctgggtgggattacaggcatgagccactgcgcccaactagtttatgactttttaaatgcaatttatgttctgtcattggagtggggtttggcaaagagagtaaataggtgcgtgttttcccactgccatctttacccagaagtttatgatgctttctttatcatgaatattggttaacaaggccaagcggggagggaaagacctgtgaactcttcctgagaaagaaatcctagcagctgtgtgctcttgagttcgctcagagaagtgaggagagaaagtcttaggaaagtgaaataaaatggaatcatgattagagctttgacttctgacactttcttttcgcttctaaagtggactttggagtgcttgcagtaagacactcacaagacctcagcagtaaaagattaaatgacaccgtgacagtgagactgtccacctcctcgaactcgcagagggcaacgcattaccacctgagctcccaggtccaagaaatggctgggaagatagacttgctcagagacagccacatcttccagctcttctggcgggaagccgcagagccgctgagtgagcctaaggaggaccaggaagccgcagagttgctgagtgagcccgaagaagaatcagaaaggcacatccttgagcttgaagaggtgtatgactatttgtatcagccttcttacagaaagttcattaagttgcaccaggatctaaagtcaggagaggtcacccttgcagagattgatgtcatcttcaaggactttgtgaataaatacacggacctggattcagaacttaagatcatgtgcaccgtggaccaccaggaccaaagagattggatcaaggaccgagtcgaacagatcaaggaataccatcacctgcaccaggctgtccacgcagccaaggtcatcttgcaggtcaaagagagcctgggactgaacggtgacttcagtgttctcaacactttactaaattttgtaagttatttgctggggactgtgggggtttggaggggcgtcctgcctcagcctcttcaggagccatgggctttgtggctttgaaaaggggggcggatgacttagagcttccgtcaggggctcctgtgtgtgtggtacttgaggcctgaatatcccaagggctttgtttttacctttgttataaatagtaccactgctccttagccagagggagtttccttgggtctgcgtgaagatcaagaactcaggaaagggcaacaatcctcttttcataacgggcatttgtaaagggtcataggctctctctaggttacagaagccaaaaagcaaaacactttgtcggctgcccaactgcatctcccagttccacccaaaagcggtaaatcagttgtttctgttagagttaagaggtgactcttttgcttttttttttttgagatggagtctcgctctgtcgtccaggctggagtgcagtggcgcgatcttggctcactgcaagcttcgcctcccaggttcacgccattctcctgtctcagcctcccaagtagctgggaccacaggtgcccgcaaccacgcccggctaatttttttggtatttttttttttttttagcagagacagggtttcaccgtgttagccaggatggtctcgatctcctgacctcgtgatccacccaccgtggcctcccaaagtgctgggattacaggcgtgagccaccgtgcccggctgagtcttctgcttcttatgtttttaggtagaccgagataatgattagaatttagctgggcacagtggctcatgcctgtaatcccagcactttgggaggctgaggtgggcagatcacctgaggtgaggagttcgagaccagcctgaccaacatggagaaaccccatctctactaaaaatacaaaaattagccgggtgtggtgtcaggtgcctgtaatctcagctactagagaggctgaggcaggaggatcgcttgaaccacggaggcggaggttgcagtgaaccgagatcgtgccactgcactccagcctgggcgacagagtgagactcttatctcaaaaaaaaaaaccaaaaaaaaaacctggaatcccatccatttacacttgaaccctagtgcacgtcctcgaggaagcaactgctctgggcctttattgacaaagcagaaaaagcaacagtagttacttggcagggttatgtgaggaattgattttaaaatccactttattaaaatgcttagcagaatatcaggttcccaggaatcacagttcatcttgatcagggagaaacagccatgggggtttgatcatccaattcaggggtaagagcttggtgtgcctgttgtcacagcagtggcaaatctaggcattgagggagggtggggctgctgggacggtcagtgcttgcagctcacagattctggggttctggttaatgagttccagtccacagtagagctttttcttgcagactgataacttcgacgactttcgccgtgaaacactggaccagatcaaccaggagctcatccaggccaaaaagctgctccaggacatcagcgaggcccggtgcaaggggctgcaggctctgtccctgagaaaggagttcatctgctgggtccgggaggctcttggaggtaaaatcagcctttggggttgcgtggaagtgtggagaaagttttcagatggcgcactgtgtggcgttcctaaactctttggcaatacctccccttggccaaggactacgtaaagggcagaaagacgttgcctgcatgctttagggagatgggcactgatcatagagttcacaccggtacagtatttcccatgtgctgctgtaaaagccactcaccttgccacaccccgccacttcggaagctgtaaatggctcaggttccttttccttaaaatcttgcccccttcagctttttcttccagtagatttttactggaggacaaggagagttcctgcccacagagaggttttttttttttgtttgtttgtttttttgagacagagtctcgctctgtcgcccaggctggagtgcagtggcgtgatcttggctcactgcaagctctgcctcccgggttcacgccattctcttgcctcagcctcccgagtagctgggactacaggcgaccgccaccacgcccggctaattttttgtgtttttagtagagacggggtttcactgtgttagccaggatggtctcgatctcctgacctcgtgatcagcccgtcttggcctcccaaagtgctgggattacaggcatgagccactgcacctggcctttttttttttttgagacggagtttcgctcttgttgcccaggctggagtgcagtggtgcaatctcggctcactgcaacctccacctcctggattcaagcgattttcctgtctcagtctcctgagtagctgggattacaggcgcccgccaccacacccagctacttttttgtatttttagtagagatggggtttcaccgtgttggccaggctggtcttgaactcctgacctcaggtgatccacccatctcagcctcccaaagtgcaggcgtgagcaagtacaggcgtgagccaccgcgcctggccccacagagagatttttctcacttctccattgatgctgtgcgtttcttggcagcctcttcagttctgtggcttagatgtcgttggcagaggagagaggaagaggcagaggaggcaggaggggcacaggtggcagtgcaggtgtgctcgggggtctgggggccaccacctgctggatctcaggctctggctctcttgggagagccgctgctttcagtggtggactctctggtccacactgatgcacatccttcagtgagtaatttatctgaggggaatgatctgagtgtttcatagttaattgtgaacatgttatttacagctgagccttggtttctttttgtttaaatggtaatgttgtgtggattgaaggaaagagcatacacagaagtgcagtacagtgcctgggacattgaaattgctcaggaacggcaagatatcgtttagtgctattaacagacagtacaggctgggcgtggtggctcacacctgtaatctcagcactttgggaggccaagtcgtgtggatcacctgaggtcaggagttggagaccagcctgaccaacatggtgaaacctggtctctactaaaaatacaaaaaattagccaggcgtggtggtgggcgccagtaatcccagctacacgggaggctgaggcaagagaatcacttaaacctggaaggtggaggttgcagtgagccgagatcatgtcacttcactccagcttgggtgacagagtgagactctgtctcaaaaaaaaaaaaaaaaactacaaaagattaggtgttccggactcttactgaaagcagaaagtggacagaaccttaaaaattcatgaaatatccatttcagcttcagtaaggattactgcccaagaccgagtcttgtgctatcgtggaatagtcccacgctgaactcccctcttctcttccccaggcatcaatgagctgaaggtgtttgtggacctggcctccatctcagcgggggagaatgacattgatgtggaccgggtggcctgcttccatgacgctgtgcagggctacgcatccctgctatttaagctggaccccagcgtggacttcagtgcattcatgaagcatctgaaaaagctgtggaaggctctggataaggaccagtacctgcccaggaaactggtgagtcttattctgtctctaatgcagattttgttgaatagagcattgcttagcaacgttagggcagtgactgtggaaatggtggcacacctgtgtggtaggtttgtacacagccgttttcaatgatatttaaaaagcttttcttcataaatggaaattcaccatcttgttacctagaaagcaggatacaaaattacatgacacatagtaatctctaaggtgcaaaacacacgtggaaaaaagacagaagggaaatatgctgaaacgttgccaggagttttctctgaatggttgtaattgtcattttattctgttactttttgttattttctataattgatagaattttttatcagaaaaaagtaaacatttaaaattagccaggcatggtggtgtgcgcctgtaatcccagctactctggaggctgagacagaattgcttgaacccgggaggcagagatagcagtgaactgagatcacaccactgtactccagcctgagtgacaaagtgagactctgtctcaaaaaaaagaaaagaaaagaaaaaagtaaacatttaagtttaagtaaactacctgtagcagggtctgaattgacgtacgcagcttaactagatacctgggccagcctccggacggctgctctgcatgtgggtggaggaagaagtgacatatggaagggcaggtaaagctatcttcatttttctgctagaaagtcagcagagtttccaaacaaaaccctctgttgtgatttttcctaaacttctcttattgtacttggggaccacagaaggacactgaggacttgggactccacagccattgcttccagcgtcacccccagagggttctctgcattggggacctggcagaatgatggcgtctggtagagaggcaggcgggcggctgctcattcccctccactcctccacagatgtaagtcaagtgcccccatgtgccagccggggcaccaggcactggaggaaacgtggaacagcgagtacaaagcagcactgagtgacagatcatgttgtcagggtggcacctggtccagctggggcgctgggtgggcgactgcgtcctgagccctggggaagcgtggggagaaggctctgcagcgaggcagaggcgggaggccgaccacaggagggagaagggcaagatcctcgctccaaccgtggcccgtgttctctccttttgtccccatagtgtgactccgccaggaacttggaatggctgaagactgtgaatgagagtcatgggtctgtggaacgctcatccctgaccctggccacggccatcaaccaaagaggcatctatgtgatccaggcgcccaaaggtggccaaaaggtgagcggtccccagccctcggcgcagctgcggcccttctgcaggctgctgccagtccaggtcttctggccccaagaaagtgacttctaacctatgctcttcacagatttccccagacacggttctgcacttgatccttcctgagagccctggcagccacgaggagtcacgagagtactctttagaggaggtgaaggagcttttgaacaagttgatgctgatgtctggcaagaaggatcgtaacaacacggaagtggagaggttttcagaggtgagggcgcatctttgcagtggcgctaagctggtggtgtcatctcgtccgtgagggctgtgtactcccaagaaaacggaaaggatttgacttgggatttgactgataagaagggctctgctcttaggcccatggagagtagagttggcacatttgtagggtgcatggaactctagtccgcggccccagagaggtcttaaggcaggcaggcccctgggttagcagtccctccttacgatccgtaggatgaacgctgaagctggcagcctgtccaccgcactgagaaggaggttggtcacccagcaaatagcccttagaaagacacttgaattgcctctctcactctgtaaatcagcaagaatccaaataactaagatttagatggacaaaacagaagtaatcatattgagaatggtgtaccggtctaagtaatagtctctcaattttattataggttctttctctaaagttgatttgtactttacaaatggtatcctttatctctgctgggtgcagtggctcacacctgtaaagccagcactttgggagcccaaggtggaaggctcattttagcccaggagttcatgaccagcctgggcaacatagcgagaccctgtctcaaaaagtataaggtttttttttttcccaattaaaaaaaaaagataatttaaaaaaattaaaacagtccaggcatcatggttcacactttgggaggccgaggcgggcctatcacttgaggtcaggtgtttgagaccagcctggcgatatggtgaaaccccatctctactaaaattacaaaaattagccgggcatggtggcacgtgcctgtaatcccagctgctccggagactgaggcaggagaattgcttgaacccaggaggcagaggttgcagtgagccgagatcacaccactgcactccagcctgggcaacaatgcaagactccatctcaaaaaaaaattaaaaaaaaaaaaaaattaaaacaaatgataccatttatctctacaatgactctttccctgatgagagtgccatcttctcaggtgggttgtgtagatgaggagggaggccttgtgagcgcagatcatgcagtgggcctgtggacagggccgtcttttggcggtaggcctgtgtgctgttgcagagtagcgtgttaccctctcgcatggctctgtgagccaacctcatggttctgcctctccaggtcttctgcagtgtgcagaggctcagccaggccttcatcgacctgcactctgctgggaatatgctgttcaggacgtggatcgccatggcctactgctcccccaagcagggtgtgtccctccaaatggactttggcttggacctggtgacggagcttaaagaaggtggagatgtcactgagctgctggcagccctctgcaggcagatggagcacttccttgacagctggaagagatttgtgacccagaagcgaatggagcacttttacctgaacttctacacggcagagcagctggtttacctgagcactgagctcaggaagcagcccccgagtgatgccgccctaacgatgctatccttcatcaaaagcaactgcaccctgagggatgtcttaagggcctctgtggggtgtgggagtgaggccgccaggtaccgcatgaggagagtcatggaagagctcccgctgatgctcttatcagagttcagcctggtggacaagctgaggatcatcatggagcagtccatgaggtgccttcctgccttcctgcccgactgcctcgacctagagacccttggccactgtctggctcacctggcagggatgggtgggtctcccgtggagcgttgtctcccgagaggtctgcaggtcggccagcccaacctcgtcgtctgtggccactccgaggtgttgccagccgccctggctgtctacatgcaaaccccaagccagcccctgcccacttacgatgaggtgctgctctgcaccccggcaaccacctttgaggaggtggcactgttgctgcgccgctgcctgaccctgggctccctggggcacaaggtctacagcctgctgttcgcagatcagctgagctacgaggtggcacgccaagcggaggagcttttccacaatctgtgcacgcagcagcaccgagaagactaccagctcgtcatggtctgtgatggggactgggagcactgctacctcccctctgccttcagccagcacaaggtcttcgtcaccccccaggcacccctcgaggccatccaagcctacctggcaggtcactaccgggtcccgaagcagaccctgtcggcggcagccgtgttcaatgaccggctgtgtgttgggatcgtggcctcggagcgagcaggtgttggtaaggagagcggcagggtgggcaggccccgtctcccagggactgcccggggcccttcccccctccagcagatgaagcctgtctgcaggtggagaaaccgaggctcagggagggtgtgattcatctgtgggtgtcaatcagggtctgtgccagaaccaggcaccctggtcacctggtctcccacaatgggtattccctgggagccccattcccttcctcctctcagcaaacatctctgcagtgtactttgtggtttttttttttttttttttttttttttttgagacagagtcttgctctgtcacccaggctggagtacagtggcgtgatcttagctcactgcaacctccgttttctgggttcaagcaattatcctgcctcagcctcctgagtagctgggattacaggtacccaccgccatccctggctaatttatttttttttgttttttgttttttgtttttttgagacagagtctcactctgttgcccagattggagtacagtggcgtgatctcggctcactgcaaccttcgcctcccggattcaagcgattttcctgcctcagcctcccaagtagctaggactacaggcatgcaccagtacacccagctaatttttttatttttagtagagatgtggcttcaccgtgttagccaggatggtctcgatctcctgacctcatgatctgccctcctcggcctcccaaagtactgggatcacaggcatgagccaccgtgcccggcctaatttttgtatttttagcagagacagggtttcaccatgttggccagtctggtctcaaactcctgacctcaggtgatccgcccacctcagcctcccaaagtgctgggattacaggtgtgagccaccacgcccggcctgaagtttacttcttctgcccttaaatgccactggcctctttggggttgatgttggtcgtgtgagcaaggggaggtagaattgaagagaaagccatgcctcttgacccacccttcgtttgccatcttgtttcccttaaaaagaaatagtagcttctgttctgttgactttatcctatcaacagtacctcgtcctgttgggataaacattactcttcccctccctgctgaagcctctccttttgctgtgacttttattagctagtcactcaacacataatgacatttcagtcaacagcagaccacgtatatgaccacggtcccataagattagaaaactgtactttaaaaattagccaggcatggtggtgcatgcctgtgatcccagctactaggaaggctgacttgggaggatcgctccagcccaagaggtcgaggctgtggtgagctgcaaatacgacactgcactccagcctaggcaacggggcaaggccttggtcttttaaaaaaagagaaagaaagaaagaacaaaagattataataccatattttttactgtaccttttctacatttttatttttatttttgagatggagtctcactctgttgcccaggctggagtgcaatggcacgatctcggctcactgcagcctctgcctcctgggttcaagcgattctcctgcctcagcctcctgagtagctgggactacaggcacacgccaccacacctgactagtttttagtagagatggggtttcaccatgttggccaggctggtctcaaactcctgaccttgagtgatcacccgcctcagcctcccaaagtgctgggattacaggcctgagccaccgtgcctggcctgaatatgtttagatattcagatatttgccccgtgtcacagctccccactgtatgtaggatgcccccatgctgtcacggcttgcagcccaggggcaatgggctattccacctagctcgggtgtgtggtcggctctaccatctgggtttctgcaggcacactctgatgttcacagtgacagaatcatttcacaatgcatttttcagaacgtgtccctagtgctaagtggcgcgggactctgctttgcctgctgtcctgcggaggcaggaggtgaccaggagagtgagtaggtaacggctgggaaatgtgaaggttcaagagcgtattcttgaatctgatgttatgttgcatcagttttgaattttatacaaagagaagtaacttctagtggatctttatagattctcttactctttgtcctagccctgggacttaatttttctctctctctctctctctatttttatatatatacacacacatgctgtatatacatacactatatatattcgatacatattctatatagatttctatatatattctatatatttttacatatataatatatattctatatacttccatatatactatatatattctatatatacatatatagtatgtatatatatattatatatatattgtatgtatatatatattatatatatatattttttgagacagagtttcgctctgtcaccctaacgatgacaactgcaccctaagggatgtcttaagggatgcccaggctggagtgtagtggtgcaatctcagctcactacaacctccgcctcccgggttcaagcgattctcctgcctcagcctcctgagtagctgggattacaggtgcctgccaccacgcctggctaatttttttgtatttttagtagggacgggatttcaccacgttgaccaggctggctttgaactcctgacctcaagtgatccccccgcctcggcctcccaaagtgctaggattacaggtgtgagccaccactcccagccctaatttctgtattaatgttataggaaagtctctgtacgtgaagaggttgcacgacaaaatgaagatgcagttaaacgtgaaaaatgtgcctctgaaaacaattcgactgatcgaccctcaggtggatgagagccgagtcctgggcgccctgctgcccttcctggatgcgcagtatcagaaggtccccgtgctctttcacctggacgtgacctcctcagtaagtgccctccagcgtcagccgatggccacatcagtaaagacgtggtccccatgtctctgcgtgactcctccccgtgtatagaattccttgtttccacacgcacagtcctgtgaagcttaacagtgggaatgtgctctgagaagtgtgttgtcaggcagtttcctccttgtgtgaacgtcatggtgtgcgcttacactaacctagacgtagagcccactgcacacacaggctttatggtacacactgtcgctcctaggccgcaaacctgtgctgcatatggctgttctgaatcctggagccaattgtaaaacggtgtatttatgtgtctaaacataaaaatggtacagggaaatatagtattaggattttatggggctgcccttggagacatgggccgttgttggctgaaatgttgatgttgatcatcaggatcatcgtgacaaagagcaaaataaggaggggttacttagagttgggagaactcgccatcgtgtcgtgtgtttacacctcgtgcgattctgttcttaggtgcagactggaatttgggtgtttcttttcaagctcctcattttacaatacttaatggatataaatgggaaaatgtggcttcggaacccctgccatttgtatatcgttgaaatcctggaaaggaggacgtcagtgccgtcgaggagctcttcagcgctggtctgtactgtggggcgttttcgcctggcgtggggggctcttgggttctttctggtcttactgaagtggaatggcgcgtttaggagactccacatctttgccttacttagtgcagcagctgaatgcagtgttagtaaagaaaagcccatctttaaactcactttttaatcatgtctgggataaaagtactcttctgttaattagcagtgtcttcaatatttctgttcaattcaggcttcatgctgtatgcccagtctgaatcccagctgtgctctgaatctaggaaattcatctgttgaaagacctcacctttcctaatgccagctaagatgagaaggagatgtttgtcaaaaatttcttagcaaaagagagttttatgttcactcacatacataatacatgtatagcttagtggagaaacttagtttcaggaagttgggttagaaagtgatttcctggctcagaacgcagctcccacagcaatgccttacttaatgtgcaaaagatatgctgtggaaaaaaagactatacagaaagctacatattttcagtgcgtttttcataaaggtccatccaatatagataacgtggagggttaagacacaaaagcatttcttagaaagtcttcttgtaaccatttcattaatgtctctcctttccagcgtacacgtgtaccccagttcagttttcttgacatcttcccaaaagtcacctgcaggcctcccaaagaggtgatagacatggagctgagtgccctgaggagtgacacagagcctgggatggatctgtgggagttctgcagcgaaactttccaaagaccttaccagtatttaagacgattcaatcaaaaccaagacctagacacgtttcagtatcaagaaggctctgtcgaaggcaccccggaggaatgcctccagcatttcctgtttcactgcggggtaataaacccatcctggtcagagcttcggaactttgctcggttcctgaattatcagctcagagattgtgaggcctctctcttctgcaatccgagttttattggcgacacactgaggggcttcaagaagttcgtggtgaccttcatgatctttatggcaagagattttgccacaccatcactccacacctctgaccaaagcccggggaagcacatggtcaccatggatggggttagggaagaagatctagcgcccttctccctccggaagaggtgggagtcggagcctcacccatacgttttcttcaatgacgaccacacaaccatgacattcatcggcttccatctgcagcccaacatcaacggcagtgtcgatgccatcagtcacttgactgggaaggtcatcaagagagacgtcatgaccagggacctgtaccagggcctgctgctccagagggtgcccttcaatgtcgactttgataaactgcccagacacaagaaacttgagaggctctgcctgaccttagggatcccccaggccaccgaccccgacaaaacgtatgagctcacaaccgacaatatgcttaaaatccttgccatcgagatgcggttccggtgtgggatcccggttatcatcatgggagaaactggctgtgggaaaaccaggcttattaaattccttagcgacctgcggcgtggtggtaccaatgctgacaccataaagctggtcaaggtgcacggaggaacaactgcagacatgatctactccagagtcagggaggctgaaaatgtggccttcgccaataaggaccaacatcagttggacaccatcttgttttttgatgaagccaacacaacggaagctataagctgtatcaaagaagtcctgtgtgatcatatggtggatggccagcctctggctgaggactctggcctgcatattatagctgcctgcaatccataccggaagcactctgaggagatgatctgccgtttggagtcagctggtttgggctacagggttagtatggaggagacggccgacaggctgggctccattcctctgaggcagctggtataccgggtccatgctctgcccccgagcctgattcctctggtgtgggactttggacaactgagtgacgttgctgaaaagctctacatccagcagattgtccagagactggttgagtccatcagcctagatgaaaacgggactcgcgtgatcacagaagtcctctgcgcctctcagggtttcatgaggaaaacagaagatgagtgcagctttgtcagcctcagggacgtggagcgctgtgtgaaagttttcaggtggttccacgagcacagcgcgatgctcttagcgcagctgaatgcctttctctccaagtccagcgtcagcaaaaatcacaccgagagagatcccgtcctctggtcgttgatgctggccatcggggtgtgttaccatgcctctttagaaaagaaagactcatatcggaaagccatcgccaggttctttccgaaaccgtatgacgacagcaggctgcttctggatgaaataacacgggcacaggatctttttctggacggcgtacctctgaggaaaaccatcgccaagaacttggccttgaaggagaacgtcttcatgatggtcgtctgcatcgagctgaagattcccctcttcctggtggggaagcccggcagctccaagtctctcgccaagaccatcgtggcagacgccatgcagggcccggctgcctactcagatctcttccgcagcctgaagcaggtccacctggtgtccttccagtgcagcccgcactccaccccacagggcatcatcagcaccttccggcagtgcgcccgctttcagcaggggaaggacctgcagcagtacgtctctgtggtggtgttagatgaggtggggctggcggaagactcacccaaaatgcccctgaagactctgcacccgctgctggaagacggatgcattgaagacgatcccgccccccacaaaaaggtcggcttcgtgggcatctccaactgggcccttgaccctgccaagatgaaccggggcatttttgtgtcacgtggcagccccaacgagacagagctcatagagagcgccaagggcatctgctcctcagacatcctcgtccaggaccgagtccaagggtactttgcgtcctttgccaaagcctacgaaacggtgtgtaagcgccaggacaaggaattcttcgggcttcgtgactactacagcctcatcaaaatggtctttgctgcagcaaaggcttcaaatagaaagccttccccgcaagacattgcacaggctgtccttaggaacttcagtggcaaggatgacatccaagctttggacatctttctggccaatttgcccgaggccaagtgctcagaggaagtcagccccatgcagctgatcaaacagaacatctttgggccttctcagaaggtgccgggtggagagcaggaagatgctgagtcccgctacttactcgtgctgaccaaaaactacgtggcactgcagatcctgcagcagacattcttcgagggggaccagcagccggagattatttttggttctggtttccccaaggaccaagagtacacccagctctgcagaaacatcaatcgtgtgaagatctgcatggaaacaggcaagatggtgttgcttctcaacctgcagaacctctacgagagcctctacgacgcactcaaccagtactacgtccacctcggcggccagaagtacgtggacctcggtctggggacccaccgcgtcaaatgtcgggttcaccccaacttccgcctgattgtcattgaagagaaagacgtcgtgtacaaacactttcccatccccctcattaaccggctggagaagcactatctggatatcaacacggtgctggagaaatggcagaagagcatcgtggaggagctctgtgcgtgggtggagaagttcatcaatgtcaaagcacatcatttccagaagaggcacaaatacagcccctctgacgtcttcatcggctaccactcggacgcctgcgcgtctgtggtgctgcaggtcatagagaggcagggtccccgggccttgacggaggaacttcaccagaaggtgtctgaggaggccaaatcgatcctgctgaactgcgctacgcccgatgccgtggtccggctgagcgcctactcgctgggcgggttcgcagcggagtggctgtcgcaggagtactttcacagacagaggcacaactcctttgcagatttccttcaggcacacctgcacacggcagacctggagcgccacgccatcttcacagaggtgattgtctttctgcacttgtaccctatcccctgtcacccaagagtcctaaatccctcgtgtcaggattcaagattcttccccaggcagcggttagggatcctgcagggagatgctgagacgctgagctctcctccgcggtaagtgtggggagtaggtccagttaaccaggtgctgagtgcctggctctgtgcagtgcaccatgctggtaacagcaccatacacagtgttcacaccaacaaataaagtaccacgtcccaggactgggccaagggcactagggacgcacagatgaatctgtagcccttgtcctttgttagcattagggagcatggagagaccagcacatgaacagatgccatcaatatcatatgataaatgctgtgcttagaggcagcggggagcggtgcagaccaggatgcgagctcagatgagatgttccctaggagaagcccctcgccgatggggaagaatggccgggaagggattgtaggctgagggccttctgtgggcagagccgctgacagctcttagggttcaaggctgtagtgctgagatggggcgatgaggtgcagtcagagagaactactggaggccctcagtgactctgcagagccacatctcagccctatggagcgggcactggaggcacgcttgtctccctggctgggtgaagggagtctgatgaaaggctgttgtggaaaagacgggccggtagggaggccgctggaaccgtacaaaggagaggagcagatggaaccgagagatactcaggaggcaatttggcagggccaataccaccacccagtggggggatggggggtggaggggtccggggcgaccccctggattcctccttagatgagtggacattgcttcatcatgacagataccgcaggaacggacagcaggttgtgggaggctagtgatgatgtccgccggggacaggtttctatgcatcgtgcagctggacgtaggaatctgagctcagtggtgaggcagggattcctgggctagagcagcaggcctcgaggaacgtttcgacttgcactgtgatgggggagtgacctttgggacaggagaattgctgacatctgggggaaggggacagcaccaaccacgaactccatctgaaagcatgagtcgtactataacaggaaatggcatttgtgctgagccctaagggatcatgagaatctcaagtacggaccaagcaggcagagacacgggcctctggggaggagaggaaggcaccctcggggcagggtggggtcgtctctccaatgcctttggccctgtagggcctctcggccccagcgctgccgtgttttgggaaactcctttgggtttggattctgtgccgttgtgtggcaactgcaccgcgctgaacatcgcaggtttctaggatctgtctaaacctggcagcagacttgcaacctttccttgaagtctggcaagtaatttgcatttcttaactctgtagatcaccactttctccaggctgctaacaagtcacgactgtgaaattttagaatcagaggtcacaggcagggctccgaaacccacactcctgtggctgcagcagtttgacaccgagtactcattcctcaaagaagtccggtgaggttccctgccttccctgctgccctctccctccccagccgcagccgtgtggcttctgcgtggcgatggtacccgcgccggttaatgagcgccacagtcacgtgactgtgaaatagatccttgttaaatctctcccagcatccctctcatctccatcatcttctgcaacgcggtgtctggcctaacatcctcctccgagagcaccatcctcggacctcgttaggaggcattccttgggtttcctcccctggactatctgttcttactgaagaaaatcctacctgagtagctgtttctttgtagcctttatgtttcccatcactttggggaattttcttttccatttttttaagacagagaactcacttgaataacttcccttttctttcagaaactgtttaacgaatacagccaaatgtaaaatcctcatttttcagacagattttgaagatggaatccgtagcgcccagctcattgcctcagctaagtatgtttttagtatttttctcagaaactatgtaaaaaacccaaaacgtaggaagtcctagagaattttttccttgaagacagtatagtatcataatcagtatagaaataaaaataacaattcttcccccgcctcattcccccaagtgggattagggaaactgaagagagacaaaaagaaaaggccaataacattacaaaaatagtggaatgggcctgggcaacagagcaagacctcatttctaaaaaaataaaataattagccttccacagtgcacctctagtcccagctgctcagaaggctgaggtgggaggatcgcttgagcctgggaggtcaaggctgcagtgaactgcgatcccaccactgcagtccagcctaggggccagagcaagagcctgtcctccccacaaaaaaggtgaaatgcgagaggtgtaaataatggaacattaacaagctataaaaggatgcctttgaagcctgtgtttgtagacatgttttggtcattattaattttgaattatacaatttgaatttatttcaagttcgagggaaacaacagtaggtaaatgctttttttcctatttattggatatttttatagtgtttgtaggggaagtctgatgctcttagaattaactttgtgcctttattacttaaagtaaaagtgatttctggacctttttgaagcattggatgccatatttcagttcgtggcttaaatctcaacaagaaactggctttggccattggtcatctgaagggaatggcattgcgcacagaactctttgttgaaatggaaaggtccactgggtacaggggctgtttcctgtaatcctagctacttgggaagcagaggcaggaggatcgtttgaggccaggagtttgagaccaggctgggcaacacagcaagacccccatcgcttaagagaaaagaaggaatggaaagttcagctgtcctcacccttagctgcaccggggcaggcccattgaggagcacaagatagggtttctggtcaacgaaggaatgccacttcaaagcagaggacacaggaatggggaagaaaacgagccgctaagagaagatttctcatccccttgtgagagaagaaatcacgatcgcagggctctgaagtttatgtaaaactcatcggaacgggtggccgtgagaccgaaccaacagctcggagaacacccttctgcagctgcacagctttgctttgtttatttgcttgtttttgtgtgtgtgtttgtttttaaaataggtattcttttttttttctttaaataggtattctgttataaatgaaatcaacaaaatacgagaaaatgaggaccgtatcttcgtctatttcatcacaaaactgtcccgggtgggaagaggaacagcctatgtgggcttccacggaggtgagatcagaacatcagtcagggtatttatttatgtatttatttatttatttgtatctatttattttttgagatggagtcttgctctgtcaccaggctggagtgcagtggcgcgatctcagctcactacaacctcaatctcctgggttcaagcgattctcctgcctcagcctcccaagtagctggcattacaggcgtgcgccaccatgcccagctaatttttgtatgtttagtagtgacggggtttcaccacgttggcctagatggtctcaatccgttgacctcatgatccgctcgccccagcctcccaaagtgctgggattacaggtgtgagccaccgcacccagcccagtcagtgtatttatttaagtcatgttggaactgtttctcatttggttctgtgttgtacagtctgaaattagaatattattgttaacctcaagaggattctttccagatgcaattagatttcttaccactgattaccatgaaaacatgaatcctgggatgggaggctgcgtgcacctctcctggactgactctaggcaagctcctcacctcttagcatgtaggtcacacggcgtggagactcccgactcccgacagacactgtcaggaacgcaccgatacgcctgtttggcggggagggagagtggcgggggtcggactatcttcagatctctttttttccaaggaatggtcaccagctatttatgacatagaaaagttggtattccagaaacaggaaagtaagtttacttgaataatttcgtggagaatggaaggcagaccttgccagtgtcccccacccctcactaactgtgatacagcaaatacaacaatgcatgggtgaaagaaccacaggccttatccatgcgtccttcccacgctggccattgcaggtcttaccgttgctgcttatggtgaagctgtcgatgggcatagaatcgggtcgtgtatagtatcgggttgggtggtttctgcgcaggcccattccagggtttcggcttcagggtgccagtcattcattgcgcagcaagataatgacaagccagggtgtgcaatgtccctgcttagggctgagcagcagccgggaaagacacaaagacagttgtgggtggcttcactcttcacagggctgtggcagtctgtccacatcgatgacctccggagatccaccctcatggtttctgatgtgaccaggctgcagcatgtcaccatcagccagctgttcgcgcccggagacttgcctgagcgtgagtcacgaggcggagcccctgggggagcaggtggtggaagggcagatggcaggtgtggagcgtggcgtgcacatggcactaggagcagggccaccgtgtttcgtccctcggcaggagctcggggacacatctgcagaactgactggtggctcatcatagagcaccagggccgagcaggtgcgcttaccacaggctgaggtagagctctgtgagcaggccagccatggaagtgagcacctagaacacgccagagcccaggctggaaggaaggggctgccttgggggctgatcttcatgaccgtgatctctcatctggggacctagcaccacagcaggggccggggaagcctgcactcggaggctgagcacacagactcccagatggcaccgctgccagtccctgtgccaccttctgagtggtaacgcaatcacgtttgcttcgactgcagtgggcttggaacaccgggcggaagacggccatgaggaggcgatggagacggaggccagcacatcaggggaggtggcagaggtggcagaggaggccatggaaacagaaagttctgagaaggtgggaaaggaaacctctgaactcggaggcagtgatgtaagttctggttcttgggacctccccttgtgctgctggtgatgcttctgagctgcatctttaaacgcttttgcattgggagctagaggagtcgccgccgctgtgcaggggtgaggatggcgccccactttcctcacacagtgacggtcttgttgctggttactgggggtcaagggcatctgcaccggcagtttggggggtgcagggcggaggtcggcgtctcttctttgtccgtgaggaccgccgccctgtgctgtttgctgcattgagaccctcatcgcatacgggcggtttggcttttgcccactgtgtcagtggcagaaacggatgacccaaccgtctccaccaacaggtgtcgatcctggacaccaccaggctgctgagaagctgtgtgcagagcgccgtgggcatgctcagagaccagaacgagagctgcacgcgcaatatgcggagggtggtgctcctcctgggcctcttgaatgaggatgacgcgtgccacggtatgagcctccccacccctcttgcccctgcccccacgtgggctcttcctgaggagtgggcatcatttcactgtgtgttgggggacaccctctcaggtttccatggctcagcagaagcagtgacacagtgggaatctaagagcatctctcagattttgctctagaattggcctggccaacggacttcccttcctgggggaggtgggacagaagcactccggagccaacagctcagccacggccatgctgaacgtctgtttctgcctttgtacagcctctttcttgcgggtatccaagatgcgcctcagtgtctttttaaagaagcaagaagagagccagtttcaccctctggagtggttggcaagggaagcctgcaaccaggacgctctccaggaggcgggcacattcaggtactgtgactaaaggaagcaaggagtggctccaatctggtggcagcatggggacctgcctgcagggatcctctctccatccgggccatggggactgagctgtttctttccaaacctctcagccattcaaagctgtaaagtttttccccaagaagcacacagtaggtctggacagtggccaaatggcaggtgctggactcttcctctaatttcgtgtttacagtttttcatactaaaaacttaaaaaaagtaaaacatctgttcttagagtagaacatttaccgacattcatgttgataaccctagaaagggctgctgttttcagtcatgaagttaaaatgacgtgcagagcaggcaggggacaggcgggattttcccagtcctgctgtttgaagaatggtaacagcaaaaccaggacccagcagtatattcactgccatggttatttttctgtcacccatgagactaaccttgattatcttggatgtggccgtgtattgaggaaggaggggtgctctgggccccagacagagggtctctttaagacagactctcagacctcctgcctgaaagcctaagaaaccagtgacttggttatttgggcccagttttcccatctctaaaagacagcggactcctccatgagtccccttccaggtccaagcttctgtgccagtgataggttcgctttgggcctacagccaggtgtgatctgcaggagggaacgtgaggaagaagcggggtgaacggtaatgggggcttacaggggaagaagcggggtgaacgggaatgggagcttacaggggaagaagcggggtgaatgggaatgggggctcacggaggaagaagcggggtggatgggaatcggggctcacggaggaagaggggtgaccgggaatgggggctcacagaggaagaagcggggtgaccgggaatgggggcttacagggggaagaagcggggtggacgggaatgggggcttatggaggaagaagcggggtgagtgggaatgggggcttacaggggaagaagcggggtgagtgggaatgggggcttacaggggaagaagcggggtggacgggaatgggggcttacagggggaagaagcggggtgaccgggaatgggggcttacagaggaagaagcggggtggacgggaatgggggctcacggaggaagaagcggggtgaatgggaatgggggctcatggaggaaaaagcggggtgaccgggaatgggggcttacaggagaagaagcggggtgaacgggaatggggacttacagacaccttcctcgtgaccagagattttctgattctactttttctctagttatccttcgtttctctccttgtcacgccttctgaagggattttaggagatcagaaatattttcatttccctccgttcctccttgtggactctcttgatgcttttttttttttgagacggagtctcactctgtcgcccaggctggagtgcagtgatgcgatctcagctcactgaaacttccacctcctgggttcaagcgattctcctgcctcagactcctgagtagctgagactataggcacccaccaccacacccagctacttttggtatttttagtagaggcgagatttcaccatgttggccaggctggtctcaaactcctgacctcaggtgatccactcgcctcagcctcccgaagtgctgggattccaggcgtgagccagtgtgcccggcctgttgatgcttttgaatccctgactccactccccgggaccagccctgagtcactgaacctcctcagtctgctcttccccactctgctgttcacgcagcactaggcctggctccgtcgtgttctgtggtcaccgtgaggcctgcgcagccgctgagtggtggccagacccgcaccctcagctcacctgccccagggccagcagcaccctgactacctcgattcaccaccactgtgttctggggactggagtcctttgccctctcgggattaaacagcccaaatcctgagagtcctttgtgtcccgaactctgcctgcctgtccagatacagcagaaccaggctcagcggctccagatagggcggaaccaggctcggcggctcccgcctctcccagcgcttgtcccagcgcctgggttttccttctgccttttgtgttcgcgacacttttcctagtttgctgttttctccctctgtgcactgggatgctttattttcccaatagacattttaaaattcttgccaggttcctctgtactatatatttaaaaaatgtaggtatttctttttattctcttcaaaagagaggcttcgcttttcccccaacattaattaccttgtggggttttttttttttcgagacagagtctcactctcgtcccccatgctggagtgcaatggcgcgattttggctcactgcaacttctgcctcccgggttcaagcgattctcctgctcagcctcctgagtagctgggattacaggtgcctgccaccacgactgtaatttttgtatttttagtagagacgggatttcaccatgttggccaggctggtctcgaactcctgacctcaggtgatccgcccgcctcagcctcccaacgtgctgggattagacgtgagccaccgtgcccagccaccttttaattcttatcctttacacaagaattttgaaatagagctattattgttacatgtaaatatatacaacaaaatatatataacaacaaaatgtcttgtagttaaccaattatctttctgtctgcctatctgtgcattcatccatccctccgcctgcctgtccatccacccatctgtccgtccgcccatctatccatccacctgtctatcagacactcagatctagtgtacaaaaacatcaacaggaacaaatacttagttccagataaacatgtgccttcttgtttagtttgatctgggacaaattcattttggtctcttcatctgtattatagtctatctacaacagatttttaaaatatttattttttccaaatgaatcgtcataattttatttatttagagaacctcgatgacttgttctgaaaaatagttacatacaaaaattatgcagccttgcaaaaaataaagcagataagtgcggtggctcacacctgtaatcccaatactttgggaggccaaggcgggaggattacttgtgcccaggagtttgagaccagccagctagggcaacatagtgagaccccatctcaacaaaaaataaaataaaatttaaaaattagctgggcatggtggcactgggtgtgttgttcctgtctacttgcacggctgaggtgggaggatcgtttgagcccaggtattccaggttatgacgatctatgattgtgtcactacaccgcagttggcgtgacagagtgagaccctcacatacatgttttaaaaataaaaaagcaaacactacttcacccttccagtaacctaatgacagtttattagatgtagaattaagttccattccagttccgtctctaatcttagacatctttgtgagtctgttttctaggacttaaaaatgatggaaatgtcaagttattgctgtcgctgtagtgtggtaaatagtagactagttgttttgttaatgctcaagaaggaacaaaatgtcaaaaggtggcagaccgccactctggttcctctgacccgtggtggcccatctctcttctgtgctgcaggcacaccctctggaagcgggtccaaggtgctgtcacccctctgctggcgagcatgatatcattcatcgacagagacggcaacctagagttactgaccaggccagatactccgccctgggcaagagatctttggatgtttattttcagtgacacgatgcttctgaacattcctcttgtgatgaataatgaaaggtgagtggaaggctttctttccctggggagagaaactatcagaacacagcaggaccctaatatgctctcccaagtgctgggtgaaacgcagccctcaacttcagagcaacgttgacatgggtgctttctgcagtaacaataggaagtttggccgggcatggtggctcacgcctgtaatcccagcactttgggaggccgaggcaggtggatcatgaggtcaagagatcaagaccgtcctggccaacgtggtgaaaccccgtctctactaaaaatacaaaaattagctgggcgtggtggcgcgtgcctgtattcccagctatttgggaggctgaggcaggagaattgcttgaacctgggaggcggaggttgcagtgagccgagatggcgccactgcactccagcctggtgacagagcaagactctgtctcaaaaaaaaagaataggaagtttacgaagctctgagaaatttctgttttatctccaccctcctcatttccctgctttcagagcactggttctagccagacccagcatggcgtgacacggagacagtgcgctgcgaacagccccacaatctgtgctccttacccctgggatctgtgctccctccccgtccctcattccctggtggagcggcacagcccccacccccttccgcaggcctgatgatgtgcggctcaggctcagctcccaatagcttccacttcagctttcaggggcttcaattctggatgtagatttataaagaatatagaaataaatgtgcccaggctcggtggctcatgcctataaccccagcaatttagtaggctgaggcaggaaagtttcttgaacccaggggttgaagaccagcttgggcaacatagtgagaccccatcactacaaaaaatttaaaaattaggcataacgtggtgcgcacctgtagtcccagctactctagaagctgaggcgggaggattgcttgagcccaggagtttgaggtgagataggatcacaccactcactgcactctagcctgggtggtgacagagtgagactctatctcaaaaaaaaaaaaaaaaaaaaaaaaaaaagagtgagagagggagggagacagaaggaagaaagagaaagaaagagcgagagaaagagagaaagaaagtaaagaaagaaagagtgagagaaagaaagaaatggaatttgaattgccagtggaaacacttatttaaaagacaaggcgctgctgatgttcatgaagcaaagactctaacaagttgtgctctgtgttacaagttatcaaagccagacaggttcaggaaccagaagacttggttctgcccgagattttgggcaacacacttgacccctgtcagccttggtttgtttttgttttgcctgtgaaacaaagattgcataagacagttccctagttctgtcataacagaaaccctgtactgtgaaacagatcagcgccgtctgcctggcctgttggcccctttgtttttgaggtctgagaagagctggcatcagtggcagatcttatcttgtgttttgagtgacgtctcacaaaccctcttcttatcatccctcaccttattgcagacataaaggtgagatggcctacatcgtggtgcagaaccacatgaacctttccgagaacgcttccaacaacgtccctttcagctggaaaatcaaggactatctggaggagctgtgggtccaggctcagtacatcacagacgcagaaggtgaggctacctcaagacaggtcagattcagcacaggtgaatcacaaagggattgcctgacagtgaaaagcagatgggtggctagaattgcaaggtgaattttggagtttttagttttcacactttgtttgtgcagtaagcgtccaatttacgtcaccgcgtcattttaaagtttctgctgaaggagtgagaggccccggcgggaccagaaacctttcgatcctatggcagcaggagcctgtgagatggtttttagtgccgtgatggccagggatatggcgaaatggggtgtgttctggcaagaggaggactgtcgcctctatcagctggtcattcccattctgggccttctcagactggggcactggactcggaagatgcccccaggagaggcgttctcagaaggcacgagcgcctggagcatcccctactcccaggtgccccatcaggaggcacctcccagctgtgtctcccgagtcacagcccagacacagtgctgagctctgctgccagatgccagaagatttgccctagtccagaaaaaccaacgacaacgcaacacttttacaaaagccatctttcatacatgcaatagtcttttccacgtttacttatcgtaccatttggaagactcagggtggccttcttttctaggttaccattctgccactttttctcaaagcagtctctctcctcatgagcatattcctttctcaggacaataccccaactgaccctgcttttctatgacagcatgcgaattaggggctgcaccccgcccactagaagccagatctttctggcttgcatgctctgtgacccccagcccctgaagagcagcccacttgttcctaatttacttggacccgggggttcctgaagcatgctgtgacctgtagccatgcaacatacaatgtagccatgcaacatacaactcagtcttatctagatgtttctctttggggctagcttggctgtttctgacctaaatttgacactgtttccgccttcctttattttattccactggaaaaatatcctaggccaggcgcagtggttcacaacaccttgggaggccaaggccggcagatcacctgaggtcaggagttcgagaccagcctgaccaacatggtgaaaccccgtctctactaaaaatacaaaaaattagctgggtgtggtggtgcatgcctgtagtcccagctacttggtaggctgaggcaggagaatcacttgaacctgggaggcggaggttgcagtgagcagagatcacgctacccaccgcactccagcctgggcaacagagtaagactccatctccaaaaaaaaggaaaaagaaaaatatcctaaatgtctagacagtgactattccttcaattccctacaaaatcaggcagttggtacccctttgtctacgagctcccattcaacaaggcgtccccattccccttcactccggagccccctggaggcaggggagcgccatgacttagacgcactccaggccgctccttggtttcctctctgcaggactgcccaagaagttcgtggacatctttcagcagactcctctgggcaggtttcttgcccagctccatggagagccgcagcaggaacttcttcagtgttacttgaaggatttcattctcttgaccatgcgtgtgtcaacggaggaggaattaaaggtagatgtttagatactggctaagggtcaggtgtagagcttgcatgatggggactggatgcagacacggagacgtttcctcagctgcctggagctggtgctgtgaagtctgggaacagaacatggtcagcgaagggtgccggtgggtgaaggggtcgcccagtctcctctcaatattcagtgctacaccctcagtccaccgcccaggggctcctaaaacacggagctttctgtgaacatgagaagacctccaatttccttgacatagcttctttttaaatgttgagtttctcttgaaaaaaattaaatacgtaactaaccctacagggtaagaataaacaagtgaaattcaatagaaagtcatacttttgactacctaaaaattttaaacttcagtacataaaaaaggagagtgacaaatttaagaacatccttacagctaatatgactagaggttaatattcttaggaatcaataagaaaataccctaagttttaaaaaatgggtaaacgttataaaacaacaattttataatctcattaagcatatcaacatccaggaaacatttgaaaaattgcttagccttactattaatagcaaatcaacacaacagtttttagatatcatgtttacgtattcattttgcaaagctgatttttaaaaacaacagccgccggccagtgctgcaaagaaatagccaggccacgcggctgacagtgtagcgtgcacagtgggcgccctgcagggctgcgtggcagaacagttgagcaccttatccgatctgaactgctgactctgtcctgaggaaactactggagatgtggacaaatatttggttcacagggatgtccttttcagctttgcttcgaaaaataagaaatagtttaattgtccggaaatacaggatgggcaaattaaagtatggccgtatgatgggttattgagcagccattaaaaccatgtttttcaagtatactcagtcatagggaaagttcatgatgtcatgttcagtggcaaaaagcccagacgacacggtgaccttaacgtgggaggagaggcagatagaaaactggacagaagcaaacgggacagaatagcacacatggtttctaatttcctcttttatggttttccaatagttcggatttcccacggggaaaacataccatttttgtaatttaaaaatatattctaaaagcttttttgaatcccagtttctgcagatggctctgtggtcctgcactaggaaactgaaagcggcgtcagaagcgcccgaggaagaggtttccttaccgtgggtgcaccttgcctaccagcgtttcagaagccgtctgcagaacttttccagaatcctgaccatctaccctcagcttctccacagcctgatggaagcccgttggaaccatgagctggctggatgtgagatggtatggccctcctccgcctgccctgagcaagccttgtggtgcttccaactccactctgggaatggagagcttctggggctgtgttccaagtgggagatttcttcacaaggcacataccttagctgaattcagagatgttaaggacacatctcgctgacgcttctcacatcctagacaatgaaagtttaggtcgcaagcctgggacacaagtatacatgcagctaacagccggggcctctggtgggccggtgggaggggcaccgctcagccacgccctgctgtccgtctccccagaccctggacgcatttgccgcaatggcctgcacggagatgctgacaagaaacaccctgaagcccagtccccaggcgtggctacagttggtgaagaatctttccatgccgctggagctcatctgctccgatgagcacatgcaaggcagcgggagcctggcccaggctgtcatcagggaagtcaggtgagacccaggagccctcacccactgcttcatctggcgcgcgctcaccaggagcctgccaagtgccaggcatgtccatgagaagacgggcaggtgctcctgccatgggaggggctccgtcctcacccgttcactccgcatttgccgaacccttagtgagtgccaggcgtctcattagggtgctggagacacgagaggcggctgtgcattcagggagcgcactgtgtactggggccgtagaaaggcagacgggctattgtgatgccgtgtgagaaatgctgtggtagaaaggacaccccgggcgggcaggtgcacagagcaggacaggccctcagggccagagtccacttccctaaaggtgaggtgggacttgacaggcgcaggatcatgcagtgagcgggttgtggtggtaccccatgcagaggcatcacagtgggacaccgagtcccagctaagctgagcgtctgagagcgagagctgggggcgggccaggaagtatgtcacatagggcttgcttgtaatcccagccgctgggcctggaccccgggtcccgcatctcttctcccgtctccctcctcgtttcacccttgggttccttggtgggagccgagtgagtgagtgagtggcgccctcttttgacagagcccagtggagtcggattttctccaccgcactcttcgtggagcacgtgctcctaggaaccgagagccgcgtccccgagttacaggggctggtgaccgagcacgtcttcttactagacaaggtgagtacttgggctggcctcagcacatgcacggatccacccttttccgaaaggaagaacagcactgacagtgatctgcggctgggagacgctcttttggctctgaccgttttgtctagacatgcaaaggaaggtgatttcatcactaggccattacattttccatgtttaattgtttaattatttaccctctgctgattgctaagtcagagcatatcatttagaagtgattccaggaactgtgtgcagaaaggggctgacgcagggaacatgcttgtgaaaccttcggcagggattacctggcctttggagtgaccccagaacagaccactagcctggccatctgtggaagctgttaccattttcatagtcatggagacaaggatgtcagagaatgccaccggggtttggggtcttcaaaacagtgctgtcaacagaaccaaggaacaggaagccaccatgcctgtcactcaacacccttcataaagctactaatgtggggtggtctgcagaaagaaacctgtgaccctacagtgatgcccctctgtggccacgcagtggtgtccagcaacagtggccactcagccaaacacagcctcagcctctgcctcacccgcacccgtgaccttcacgtgagcacatccagagccctcaccgccagggggtctggaagaggcagcgctggctgtccgacctttggagcacaggaaggtttactaaaaggaggccagcatggatgctggatgtgttgactctgacctatcaaaacatcagcggcttagacacagtatcagctgatttcccacccaggatgggtatgagcagcccaaggctaaggtaccagctccccggaggctggcacggagtcaggtgcccacgctccgtcttgtcccttcattgtccctaatgttcagcttccaccccgtggcctggcgtcacagcctgtgggacagaaagcaggggaggtagaggacaggccgttttccttaagagcccaatcccggacacgcacacgccacaccagctcgtgtctcgtggtcctaaacttaggcactcggccttatctggttgcaagaaactgaggagtttttcgtggcatggtcatgttccaggtggaacttgagttcttctgctgaaggaaaaggcggagagaggatagtaggacacagccggtgccccccttccacccttttccccacacccacacagcatgcagcctctccaagtctcatcatgtctcggcgctctgggagatgcacagggctttcagccaggtccagcgtgggtcataagggccaggtgcccataaacccaaaggtaaaggagctggcccctgcctgctcacatgcccacaggatttgggaggttaggaacgtggggagggttttttttggcgataaaatggcctcagaaacttactgggtttctggtttatttccttccagtcagatctctgtgcaggtaaccacagccaaagaccttacctcgttagttttcctgctggaagcctgacttgtacccctacccagcccccgctgaagagcagcccttgggaccatttgaaacaagaggcttgggggaaagccctgccttccgccgtgaggctggctccctcggccgggcaggaagttgtcgacggaactgctgcaggatggcacgggtgggactgcgggcatggctggcttttagttgttttggatatgtaccttgaaggggaattcctggatcatttgataactctgtttaactttatgcagaggcactgtattgttttccacgggggctgcagcatctttcttacatccccaccagccaggcaccagggtctgaatttctccacatcatgggcaacacctgttactatctgatttttttcataatggccaccgtgataattcattgtggtttttatttgcatttctctaatgactagttatgatgagcatccttcatgtgcttgttgggcatttgctgtcttctctggagaaatgtccattcaagtcctttgcccatttttgaattgggttgttgattaacaaagttattaggatattaaaaatacacacatcacttccaagtaagattaatcccagcaattcaaggatggctcaaaataaaaaaaaaaaaatctgtaaatgtcatcagttatataaattaaaagataaactctatatgatcatttcaaaatgtagagagaaagcatttgataaaattatttggaaagaaatacccttgtcaaacttggaacaggaaggaactctccttgagctcacaatgcccaaggtagacataatattaagatgtctataccaacatcatgcctgcccatcaaattccattagtacagccattaaactatcttgtacagtgatgatgtgtattgcctaaaaaccagtgtttccacttctaactatatcctagagaaacttctcatttgctctcagacatatgcaagaatgttgaatacaggactgtcaggaattgcaaaaaacctaaatgcccattaaccagcagacaggtaactggtgtctttatcagtgggtacaggagtgatctggacctaaggtatcatgaagagaatgagttgcagaagcctttatacaacgtggtatcattgatatcaagttttaaaacattcaaaataataactccatgttcagatatgcttacagctatcctaaaagcagacatttagaaatatagttatctctggggagggacggagggatgtgaagttgtaactatatgcataatgttttgtttctctaaaaaatgatctatcgcagcagcttgggaggctgaaagaaaattttaaaaaatttaaaaattttaaaaaatgatctaaagcaaatattccataaatgctgagatttcttaaagcttggtggggggtatacagatggtcattattattacttaaagtttgaaatatcttagtgagagcggaggagaccttaaaagaaaaagaagagggaaaatcgtaacttgagaatgtagtcccctgacaagcagcataatcacaaaacgagcattcagagttcaagcgttaaacacaggatcacaaaggcctcgcaccccacaccccacacacacggcgcagccttggccctgaatgtggtgctccctctgtcgcccggcctggccgccctcagccctcccccctgctaatgactcctgtccctgcctttcttcagtgtcttcgagagaactctgacgtgaagacgcacgggccttttgaggccgtgatgcgcactctctgtgaatgcaaggagacagccagcaagaccctcagcaggtgagaccttaggtttggatctgtgaaggcgagaattctgaacctctcgtggttttcacttcttctggccagtttctctgcttcagaactgattgcccttcttggattctaggtttgggattcagccgtgctccatctgcctgggagatgcaaaggaccccgtctgtctgccctgcgaccacgtgcactgcctgcgctgcctcagggcctggtttgcctcagagcagatgatatgcccctactgtttaactgccttgccagacgaattctctccagctgtttcccaagcgcacaggtacaacaccctttctctcaagaaagcatcctttttttcattttccttttttggcaaacacaatattcagaaatataaactctattaaccttcatttggtagaaaacctgacctcagagaactatcataagagacgccacttacgtactttcataaatatctggtatctcaagattattctctccccaagacatacacatacagatttcagacaacaaattcagaggaactaagccagaaagtcttaacaaaggtcctcaccagaggcccaaggaatgtagacgccagtgtttttttttttttttttgagacagtgtttcactctgttgcccaggctggagtacagtggcacgatctcagctcactgcaaccttcacctcctgggttcaggcaattctcctgcctcagcctcccaagtagctgggattacaggcatgcaccaccatgcccggctaatttttgtatttttagtagagacagggtttcaccatgttggccaggctggtctcgaactcctgacctcaggtgatccacccgccttggcctcccaaagtgcagggattacaggcatgagtgaccacacctggccgacgccactggttttaatgcatcagtatcattcacagtcactgacctgaggatcaacccacttcttgtctagctttttggagctggttaaaagcagctctggctctctggactcagcaggcctcagcccggctctgtgagtggttggttttctttccttccccttccccccttctcaggcctcctaaaagtggggcaccaggcaagcccagtggatgggttctttgacatactttgggatattgaagggtattgttgccgggtccaaatgatcaaagtgtttccagaaagggatgcatgtaaatatcatctgctgaggttttgaagactagctctaacgggtgagaggagtgacttgaatctttcaatttaaaagtaaaatgccagccaggcatggtggctcacgcctgtaatcccagcactctgggaggccgaggtgtgtggatcacctgaggtcagcagttcgaaaccagcctggccaacacggtgaaaccccatctctactaaaaatacaaaattagccaggcgtgatggtgcgtgcctgtaatcccagctacttgggaggctgaggcaggaggatcacttgaacctgggaggtggaggttgcagtgagcggagatcgcgccactgtactccagcctgggcaacaagagtgaaactccgtctcaaaaaaaaaaaaaaaagtgaaatgctgtgcaaatctcaagtcattctgtaaggaggcatttgggaaacaccatccacctgtcttctgtttctcgtgttctaagggaagccattgaaaagcatgcccgcttccggcagatgtgcaacagtttcttcgtagacctggtgtccaccatttgcttcaaggacaacgctccgcctgagaaggaagtgattgagagcctgctctctctcctcttcgtccaaaaggggcgcttaagagatgctgcccagagtaggttgctttcttcctgtaaacctagcccctcatttcttcatctcgcttctgcatgtctcatgcagtgagctgcctttttctttctggtttaaggacactgtgaacacacaaaatctctctctccattcaatgatgttgtggataagactcctgtcatccgctcagtgatactgaaactgcttttgaagtacaggtaagaacaacatggagacttgcttctggaaagccctggctttttctcttcatcgcagcgttttgttaccaagtcttcttgtcgtgactagtagctagtacatgatcttggggagctttttcggtgagacacagcctggttacttgtactggttgtgtattctgacattttcacatataggcacatgagtttagtattcccacaagcacacgcatctagcaagaagccaacagtgccgtgaagggaccacagtggcgtgagggacatggaactcaagaggccagaatctgtggtgctgagcctggttccacagcagcgcaactttctgatttttcagatggtagcttagaatcctgctcaccctgaatgtcctagatgtctcctaagtttctattcccctgaacatgggctctatttccttggaaaggatgttgacatccaagaatagtatcacctgtggtacttgtatggatctaatattgcagttctcaaagtgttggtatggacccttgggtgtgaggtaggtctctgaggttaaaactattttaaaaattagattactaagataaatttgcccttttttaaaaaacatgttgatacttatgatgatgttacaaaaagcggtgatgagttaaactgctggcccctcacgtgaagacacagtagctggaggtattgttttcttcaccgccatgcacacgtggttttcttcatgccagtttcattttagttttactaaatcttgactcttgaggatttgacttttcaacgttttgtggaaatgggaagcacacacaaaacactcccactacacaccggagtagacagttgcctcacagaaaatcactcatgacaagccctgggttatcagccggctgctgtgttcatggaccgccacccgtgctgggaggaaggatgcacatgatacaggtgtccagggctgggcaggcctctcctggaaatcagcaaagtgagccagcctcagccaaacaactgacaatgttggttggtgatgataacattcaagcttttaagctgaaattaaaattttgaaaagcttatattctccactatgagcttgtgagcttttgaatacttaaagacattttggggcaatttgtggtgatattaatgaatatggatttttttttttaaaacgtagaatacaaatgtgtcaacctttacaagacctgcacagcccagtgaaccaatattttccaaatgaccaatgcctgatgtcatgaaatcatgtgggtcaaaaaagaaaaaaatctatttaaagtatgggcagacctttttgattttaacataattgactgaaaaatgcactgatacagtttcaggctccacattgcaactaacctctagacatgaccatttatcactgtgggcacagcattaaggaataatagccacaatcagctgcaaaaactattaaaatgttcctcgctattccgagtatatgaggacagattttcttcatgttctcccatatgctgcagcgatggggagcagggcaggcaggccgctgacttccaggagccaggccccagggccagcacaggaatggaagaccaaaccactcttctcacggattcatgttttggaaaatattttaaatgttatttaacatgtaatagctttattgttattttaaatgaatgtatatttttgaaaccttttgtttttaatgtctcataattcctaatatcataaatattgataatataacccacataaaagctcttcggggttctcaatttttaagactataaaggggtcctgaaaccaaagtttgaggacagctggtctaaaatgtgagttttatattcctccagtattatgctaaaaggttttccataaaatcttagaaaccacgtatatgtatgtatatgtttatacacacacacacacaggacagacgaccgatagatagatgctcttttttttagtaaggtatgtctccagatctgagagaaccaggaataatatttctctttctgcagctttcatgatgtaaaagattatattcaggaatatttgaccctgttaaaaaagaaagcattcataactgaagataaaactgaactgtacatgctcttcatcaactgcctggaggtaagtgaactctctcttccctgaatttcttttggaaactatctgaaccacatggtttaaaatttacagaatataattttagtcagtataattaacgaatgctctgttccgtgcagaaaagaagaaaggtttcaaagacgcggcttctgccttcagcaacgtatattttggcatttacttgcatatacatacaaaacagaacagcctaggagaatatactgccaaagttaacagtggttatcattgagtggggacattatggatactttttatcttcatatttttatatccaaaatttttataatgtaaataaattagataattttttttcctcataggttcacttttcccctccttcttgtccttaaaataaaaaggaatgttaggtttccataagtcaagaaatttacactgaaacctacagtaacattcttctatccttccttctccacagtcacattggcgactgtagaagcttggggcatccatgtttaaaaaaataatatccttttctttcttgttccttgttcctcaggattcaatacttgagaagaccagtgcttactccagaaatgatgaactgaaccacctagaagaggaaggtcgtttccttaaggcatattctccagcaagccggggccgagagcctgccaacgaggcctcggttgaatacctgcaagaggtggcccggatccgcctctgcctcgacagagctgcagatttcctctcggagcctgagggaggcccaggcaagtcttctctgccttgctttcctttgggtttaaagactccgttatttagaaattcaggaagtatgggaaactagttcttcgaatagactactactgggcttttctacatcccctctcccctggatgtgtttctgtgaatgcctgtgggtaggtccgatgccctctggttggccttgtgtcctacaataaatgccctaagtcaccagccactcacccgctttctcgttggcctctcagagatggccaaggagaagcagtgctacctgcagcaagtcaagcagttctgtatccgggtggagaacgactggcaccgggtgtacctggtgcggaagctcagcagccagcgggggatggagttcgtgcagggcctctccaagcccggccgcccgcaccagtgggtgtttcccaaggacgttgtcaagcagcaggtgagaagcggggccgggcagcacacaaacatgcacccccacagccccatacaccccaaacccacacacccccctaccctcacaccctaccccccccacaccccaccccctcacaccttccccaccacataccctcatacccccacacctcaccctcacacccccacacctcaccctcacacccagggatggtgccactgcttccgcgttccgcctgcccttagcatccccagagccaggaaggaaacctgccgcttgtctgtctggtcctttgtctctgtgcttcagctgatttgccccagcttgtgatcatgtttacactgcctgctgtagggccaaggtgagggcactcacctcagagcttctttaattaggcatcacttctaattgaatttcactcaaggaaagtagaacattcttgtggcctttgctttcagcgaattaaacgtagttcagcttgcaaggtgcgacctttttacctctggcaggcagagacaggcaagagcaagaactaggaatagaagaattgcagaagaggcttcaaggccaggctgggcacagtggctctcacctgtaattccagcactttgggaggccgaggcaggcggatcacttgtggtcaggagtttgtcaagaccagcctggccaacatggtgaaaccttgtctctacttcaaagaaaaaaaaaattagctggacatgatggtgggtgcttgtaatcccagctagtcgggaggctgaggcaggagaatcacttgaacccgggaggcagaggttgcagtgagccgagattgcaccactgcactccagcgcctgggcgatagagcgagactccgtctcaaaaaaaaaaaaaaaaaaaagaggcttcaaggcctctcagtggtcctttccagatacccagaaattaacaaattcttattgtccaggggatacaaaaatggtactaagaaccccggcactgtttgactaccacctggggtttagagttgacatgacttgagccacccggcctcaggtgtggtgcggtgcgccgcaaacggaggaagcaagcacctccccaggtagcgctgccgtcggcaggcattccctgcacttgcacctcttcgtctactgaggaggaagctccctgcgaagagggcaccagactgtcctgcctcaggccaggtcagggaatcccagcttggctgcctttaaacctcgaatgatcaaccacctggttcctgtacccgttcagacggttctttgcaagacattcctcccattgttcacccccaactaacctctgtattccaggggctgcggcaggaccacccaggccagatggataggtacctggtgtacggcgatgaatacaaggctctccgtgatgctgtggccaaagctgtcctcgagtgcaagccactgggcattaagactgctctgaaggtaggatgggcccgtggcttctctctgataccaggtggcatcccttggagcctgcatgttccctggtttatgtcaaatgatgcagggtgatggaccactgatgcagcccatcacgtgacactgtattggaagtcacgtgcccacagcctccagggcgcacctggctagtgtgcgtgaaccagtggctggaacaggacagctatgacagttgagctgggttgacagatttgctgtgtcttgctgatctgccaagtccatcagcagcgccttttgatttatgcccattacttcctttgagaccctgctggaaaacagtctaagaaagatgctgacacaactattaatagcaaaattcatacctagatgtattcataattcagatatgcatgtgtgtttaataaaaatacatatgttggtgtagtgtgggaagttaaaaaatataaagatgtttttagaatctaacctttaaattggtctggtcttgcttcctttttgagtccctgtgccaggaaaagaggaaatggaaaatcctctttctgctcagaagtttctaagaccagtgaaggagtcagaagaacagatggtgattccgttgcttctgtcattaagctggctgctaaatatgcgttgagtttaatctgagagtatttcaggaactttgtagcccaaaagttgctcgccagaagactgcccatgtggggcatgaccccaggtgtccaggcctggaaaaggctccttcccttttggtgggttgagggctgaggcatgtgaaaagtttcttttcacatgcaaacttcgtgggcctctggcccttaggtagatctggcaggcagcggtgcgggggcgtctatcctataatcctagcactttgggaggccgaggcatgcagatcacaaggtcaggagtttgagaccagcctggcaaacatggtgaaaccccgtgtctactaaaagaaaaaaaaaaagaattagccggacatggttgcgtgtgcctgtagtcccagctactcgggaggctgagttagaatcgcttgaacccgagaggcagaggttgcagtgagccgagatcatgccactgcactccagcctgggtgacagagcaagactccatctcaaaaaaaaaagatgtgttgagcttttaaattcttacttgatacccttgattttgcaggcctgcaagaccccccaaagccagcagtcagcctacttcctgttaacactgtttagagaggtggctattttgtacagatcccacaatgcaagcctccaccccacgccagaggtgagtaaccgcctgcagggctgtgttcaaagtctcagtatttggagggattttattgaatagaatgaaagttatcaacacaaatcataccataatttttttatctaggatagaggttctcaaccttgttatgtggaggaacacataaccaagctgtttaacccaaagcttgtagaattataatgaaaactaaagccaagaacataagataatgtttaacagaatagaatatcaaaattaatgcttacgtatgtggatgctgtgtttgtatatgcacaattctcttctctgaaaaatttccccctcaaatggtggtgatttctccatatttaccttgatatttgatgtgtatttggtgtcagtgtatgtctaagagcaattcacacaatattctttgatacatcttaatgttaagtttttttcctgtcagcaatgtgaagctgtgagcaaattcattggcgaatgcaagatcctttcacctcctgatatcagccgttttgcaacatcgctcgtggacaattctgtgccattgttgagggcggggcctagtgacagcaaccttgatggaacggtgacagaaatggccattcatgctgcagccgtccttctgtgtggacagaatgaactcttggagcccctaaagaatctggccttctccccagccaccatggcggtaagagtaggccacaattccatcggccttcactggaacaccccccagagcttgtcactgtagagaccgagctgcagctgtgggaactcttgagcatctttatctcctcagttctctgcctttgtgtcacctgattcttgagcacacaagatagtgacagacttgccttgccctttgttatttcacaggaagctgttctgttttcttcacagacagcttgagaagtccagcagaaggaaagcagagttccctttcttcctctaggcctcctgctgagcagcagcacccaggtgacaagctcacttatctagagctgtctctgtcttcttgtttttcagcatgcttttcttccaaccatgcctgaagacttgctggctcaagctcggaggtggaagggtctggagcgagtccactggtacagtaagtgttggggtctagatgaccccacactcctttgagcttcaaagggtgtccagatgctatgaagcattgggttcgacttggggtccacgtggtttgtgcctcagggtccaaaaccacctgcattctaccggtggcgtctgcagaagacgaatggcttgaaggagctggcactccgccggctagatgatccaaaccatttcatttctttgtcgtgtggaaaaggccctctgtgatgcacttctgttctctggaatatgccattttgggagaagggagggactgggaaccacatcagagacgcattcaaaggcccaccacaaaacaaagtttttgacacaaagctcttctgaaatatatgaaatatagaaccgggagactgactcatataacccatgacatgtaaattttgctgttgcctgagtaaatattttaaaactagtttttaaagttgttataaaatatgctcatgacaaaaaaaaaaaaatcaaggaaaatagaaaggtctagaatcctgtccaccttgcctccaaaagtacccctggtatgggcctatattctaattgctctttacttgataaaattaataaaattagactcagacatttttcactgacaacatacatttattaagcttcaggcaggtgtcatgtaacttaacaaattagcgtgggatgctctggacagtcattctcatattgtggtcagggccagagagtagagagttagctttcccttttcaatgtgggtcattgggtgaaacctcattagccaatgtgtgtcctgttctcttcacagcttgtcccaacggccatccttgctccgtgggagaggtgagtcttggtatttaagatagggtttgaggggtggcgtgcactcctgggttggaggagggggatcgtgggtcaggagagtgaggctctcggccttccaggagagcacaggctcaccgaggactgcccagggtgctctgagcagggcaatgccaatggcgctaagggtttctagcccagggcttctcagactcagcactgtggacgtggctctgcggcgtgggctgtcctgtgcactgcaggctgtctggcagtatgcctgacctcgagtccctggatgccaggagcacccactcctcccagtgtgacagctaaaaccagacattgacaaaggtcccctaggaaagaaaattgctactggttgggaactgctgctagccattctttctagccactgcagcatggggtcagtgagccttgtcttgatagaatggcaaggtgttgcctggaccacaggctgcattattagccctcagaggaggtgtggtccagatgccaaaggaaaaagccacgtgtaggctgtgcgccatgggggaagaactgttgattattcctctctggattcccaagcatctagcctagagccctccatacacagtatctgtacttgctgagcaagaggctggtgggttgagctgacacgtggtagttagttattagtattacttacttggttgagatatgtctggctctcttacccaggctggagtgcagagtgacatgatcatagctcactataaacattgaactcctgggctcaagcgatcctcccgcctcggcctcccaaagtgttgggattatgagccactgtgcccagcctgatacacgtcatttaataatgtatataagagatacggagggagaaaaactgttacatacacttcatttttctgagcttcaatcacttccttgtccatgaaatgaggacgctgaaatagagtctatccaagaatgctcccagctctgaaattctgtaactggtttggtgtgttatcagccgtgactctcagtatattgtggcacaatatctgattttgaaaaataagcctttggaagtagattatgtgattagatttttttaaataaaaaagtccaagccaggtgtggtaggtcacacctgtaatcccagcacttcaggaggctgaggcaggtggattgctagatcccaggagtttgagactggcccgggcaacatgttgaaaccccgtctctacaaaaaaacacaaagcatcagcagggcatggtggtgcatgcgtgcatgcgtgcatgcgtgtggtcccagctacttgggaggctaaggtaggaggattgcttgagcctggggaggtcaaggctgtagtgagccgtgatggtgccactgcactccagcctggaggacagagcgaggctctgtctcataaaaattgatatatgaaaaagtccaaatgaatataaggaagtcagtttggaagctcttctagtattcttggtattagatcatgaagtgccacaggctagtgtgatagatggagggatggaaaaagtgctgaatacaagaaaggaaggttgaattttatatatttgtctataaagtgtcactctgggaataaagcttaaattgtctcacttatttaaaaaacagttccagtttgcccacgtgcaacattagtgagtacctaccctgttcccatgggttctccacccacccgaaacaagcacacactgggacaatctgagggtgctcacgtctgccggtgataaggaggtgttcatttgcatgatggcatttgtgcataaaatggtactgctccagaagtggttctagtgccctgtcttcaccctagtgtggcaggccgatggaacagagcatctgcattgactgccatgcgccgattggaggcattgaccacaaacctcgggacggctttcatctggtcaagtatgtgggtcaggattctatttcctaagtactcaaactttggggtgttgggctgtttttattccagctgataaagtgatactcaagatagtactaattactccagtacatgtgggcctgtgtcatattgaatagcaatgccaaagtcccagcagtcacacagcagggaggcatctgatctgttgttggatccctgggccctgaaatgcaaagcaggctaccctttaacagctgttaatatgaatacaggtgtcttccttttgggccttgggtgcaccttctgtagaaatatgcatgacataaacagatgatctaattcacgaggacatctatgtctgcaggaccaaaacctgggcatccgtctgtctcagcagatgccatctcacttgccagcaatcttagctttctccattttttattttttgagaaaaatgaaggagacagacatagtcttatgaaataccagacttcagaatccaggtacaaatccgatcccacaatcccatgctgagatgaatgtggttctaaatgctcctttcagagagtgagtgggacctgcgtgggggcctcacattctgactgttccctgcagtcacagcttaaaatactttcatgttatctccagaaactgtcacagtgtcctccatcctctaatagttttgccactgagagcatcggccacactgcatctcctctctgccggactttagatcccggtttttcctttggggagatgagaacaatatggacacccatgggatgccgactgtcctcccaaactctagctgttcttagcccaaccgctcctctcctgacaaagacttcagtggaaaagacgggtccaggcctgcgtcttaacaccctgcccggggatcagcatcaataccacacagcgcagccacctgacgctgagaatgcggtcgggtctggtccaccggaaaggcgagtctatcatgagagagactcttaggaacatggtccaggctttgtggaacagcaagtactcttcacataactctcttctcagccgtaagcctcactccaagtgctgagaaagtgcagcgtgccaaagcggccagcctcagcctctgtcttgtgttctctcgttctttccagagacaaggcagacagaacgcagaccggccacgtgctgggcaacccgcagcggagagacgtggtgacatgtgaccgagggctgcccccagtggtcttcctccttatccggctactcactcacttggctctgcttctgggagcgtcccagagttcccaggtataacccagtgctgccaaacaatgggctcagttaagaacctgctttcgcttcttcccagggagtccttttgtcttgagtcctagctgccatctatgcgttttggagataattagtctacaaagtaatatacaagttatacatcttcatgtttccccctgtggcgtatgatggtatggggggaactactccccagattatacagaatccacttcaaattaacactctgtgtctctggtccacatctgggagtagagaggctgacatcttcattattttacctgtgtcttcattgtagctagggaagaaagagcacactgcataaccaagatggccaacagtacaatctggatattctttatctcactgtaacaacagaaaagccagcagccgttccgcttgctagccttcctttcacctggatcactccgccgttttcatcttagaaaccgccttccgactctatgctggtgctccactcccaatggcctctaccaggctcaccatcttctctacaaaccagatccccgctgaacactctgttccgttgcccccacaggctctgataaacatcattaagcctccagtgagggatccaaaaggctttctgcagcagcacatcctgaaggacctggagcagttggccaagatgctgggacacagtgccgacgagaccatcggcgtggtccacctcgtcctgcgcaggcttctccaagagcagcaccagctctctagcagaagtgaggaaaggggcaagggctgggcggggatcacacagcacaacggcagcgcaagcaggctcgctgtcttgtgggccaccccacacacagccagtctgagctctgtctgtgctgttgctggaaagaatgagagaacacacagagagaaaaccgtgtctagggaaggcgatgcctggggctggaaaaaggaagcactctgcttgcccagaggctggaaggagctgctctgttccctccattcacccctgcctggctaagacctgcggtattcgggagcgtctgcacgcaagtgttcagtgtgcatatatggggagtcttcagttccgaagtcagccccgtaggtcattcccctaccatgctgggagcacgtgtcgtccacacagagcgtgcgtgtcaaaggatcaatcaccatcacagttgtgtgctgatttattaaatgtttatatgtccacagttatgttaaaaaaaaaaagctataaaatattgtattcactgagctaactttctattttaaaaatttaaatccatacagaaagaaaaggtctgtaagacaacttagtaaaatggttatatggttatctgtgagtggtggaattaagagtgattttcttttgctaatctgcaaaaatcacaatgaccattgtgaggacaatgttaatttaaaataataacaataatagcaagaagaagtcctgccccatgacaagaaaatctgctcccacctcaggtacttctttgcctgaaactggcattcctatttattttccattttgaacaatctgattttattttaagcctcttattctggtgggatttcagcaaagtgagcacacccagagtcacactgatgaaatgacagaatcctggaagcaggtggacagttcccgcagcactccacatctgtgtggtctgcctcagggtttgggtggcagcagctgagacggctggcggtagcctgggccactcttactattgagctcaagttctgttctttcagtaatttttttcaaaatgggtctaagattacaattatgtaggatagaggaatttttagagattgatgttatcttcaaaaggtcattaagttggtggtaacaacaggaactacttcaaaatacttagattaatttagaaagctattacctcaaaacgagtgttatttctattaaacacttatttagggtttattatacgcagactgctgtgttctttgtgccttgggtaacctacacatttggagtttttttgtagggcttttaaattttgacacagaattgtcaactaaagaaatgaggaacaactgggaaaaggaaatcgcagctgtgatttctcctgaactggaggtaagcagtaagtgctgacagctgggttgctcctcggtccagaaaggaagggtcccggcgtctgctgaatgctccttgcctgttgcccctcgtagcggtgccagcaagagcctttgactgagccccagattccaatgctccccacctcgagtcactccatcctcctcctgtccccaagtgctcttccctcctacagctggtcatgaagtcagtccgaggaattcctgggaatccagcaagtgcaggcagtgtttttctctccattactttttacagcagaatgtaatgtacgaggtagagaaataaactatcacatatatacccattaaaaatgaactgacaatcatagattaattattcatctagcagccagaatgttagtaagagaaatataggtttctgaatctcattctgtttggggagacatacatctataaacaaacaacactgaaattagaagatcaaagggaatacctgattacatgctcagagcaggggacaaacgccctaatatgcagacacccactggtggagttactgggtgttacaatctgtttgtagcaatacctcacttccagaattttttttttcattttctccatccagcatctagataaaacccttcccaccatgaataatctcatcagccaagataagcgtatcagctctaaccctgtggccaaaataatatatggtgacccagtgaccttcctgccccacctgccccggaaaagtgtggtccattgctctaagatttggagctgcaggaaaagaattacagttgagtacctccagcacattgtggaacagaaaaatggcaaagaaagagtgcccatcctctggcatttcctgcagaaggtatgtctggcttactgtggctccctccctctttcggtgcagagttccccagcaggcctgaaggccctgggcttttacgtagtataatcattcttaacagactattccagtgctttggttttgaataggatgtagcagaagactcagggctagagatcttcatacatatcaaactgtatgattgccagaagcgtaaagtcacagacgaaatacacacccacgttgggattagcagtgacctgtggggaagctggaggccaggagaggacctcccctcatcactcagccagacagaaaaggatgcagctctttcccagccgctctgttcctctctgtccacaatgctggagcatgggcagatcaaacaaaactcctccctgtgcctaagcatcgaggcgtacgtggaagacgggagtgagtgggtgtgtgccggcggtgctggggtactggggagcagtcaagtgtactggccacatctgttggaattggaaatatactttcctaactttcacccatttgcactttcattttctacaacacattgtctaaacatttctctccatggactattatttgctgtctagcaaggatgaagacgagttggaaacttctgttggtcagttgaggagtatgagttcacaatgacaggaaggacttcctgtcaatactgtggcctctctctcagatgcagtttcactacgtcgaagatgcttagatcctaggtcttcggaaggacacccaggaataaggccagccctcgctgcctaagctctgggtctcttctttcagcagcttctctccgtacccagccagttacatgggcccaagggacagatttccttcatcagcctttgatggacgcggctgatgcgtcagctccatagaggctgggctccctcttcgccgccctccatttctagcacactgcactgtctgtagacttgtgggaagaacttttcccgttttcaagctccacgctgcatcacaggaaatgacactgaccagattaagctacaaatacaagtctcgcagccagtctcaaagtctgtaaccccaataacattttttaggtaaataaaaattgttactgggtggtcttcccttctccaggaagcagagctgaggctggtaaagttcctgcctgagattttggccttgcaaagggatctagtgaagcagttccagaacgtccagcaagttgaatacagctccatcagaggcttcctcagcaagcacagctcaggtgtggctctgctctgacaggaccaggactgtcccgcatttggcggttcgaaaggatcactgcataggggaacagggtggggcggaggggaggaggcgctgatgggtgctctatagcctaagcccttaccatgcggtgaagggtgcttgaaccccaaaaacatattagaagctttcgccacagctgaaaagcacctccctctctagctcctcaaactcggctcactccttcaaacagcacctcagacatgcttgtgactgcacaaagcaggaaagatgggctctcggcagagcatgtaactagggtggtttggccctttcagggggttgctatcatacggttcttaccaagtattctgttcaacagatgggttgaggcagctgcttcacaacaggatcacagtctttctgtccacatggaacaaactgaggagatcgcttgagacgaacggttagtatcctgtcccctgtaccactaagcgttccaggagagcctcgtctgaaagctcttctcgtcagcctgactcggcccatccctgtcaacacccagcactgtgtttgtttgtttttgagatggagtcttgctctgtcgccaggctggagtgcagtggcaccatctcggctcactgcaacctctgcctcccggattcaagcaattctcctgcctcagcccctagtagagacagggtttcaccatgttgcccaggctggtctcaaactcccaagctcaggcaatccacccgcctcggcctcccaaagtgctaggattacaagcgggagccactgcgcccagccagcactgttaacgcttaacttgtgtctcttttgatggtggtgtctggataagtaaaataatgtgtcaggaaaataaaccctcagtactcttcagtccctaaatatggcatcaaaagggagctgaaagcatttgaaactctatcagcatatgagatggggcagaaccgagacccggctcccggctgtgtgtggagctgatggcttctgcatccctcctccccacgcctagattctgtgaggagttggaactcctctctgcttaagcataaccctgtcgtttaaaggtgagatcaacctacccaaagactactgcagcactgacttggatctggacactgagtttgagatcctcttgccacgccgacggggcctgggcctctgtgctaccgctctcgtcagctacttgattcgcctacacaatgaaattgtctacgccgtggaaaaactctccaaggaaaacaacaggtttgtgcacgagccaccaggaagtggtgcctgctcagcccagagtccctaagcccagtggggcagacacaagcaagcttcagccccttccctaacagacactcactccttcagccgcccccaccagtgacccgccccatacttgggtagggttttccactgctccaactgtgagaaatgggagcctgctccctgcaacatagagccctaggcccgcatgcctggcctggacgctgagcgctgtctttctgcccctcagctattccgtggatgccgccgaggtcactgaactgcatgtcatcagttatgaagtggagcgggacctgactccactgattctctccaactgccagtaccaggtggaggagggcagagagaccgtgcaggagttcgatctggagaagattcagcggcagatcgtcagccgcttcctccagggcaagccccggctgagcctcaaggtagggctgactcctgccactgctgctcatttggtgtgtctgttgtgaacaagcagcccttggtgtgtttctcgagagagggaagcagcacctcaccctgcagtctggtctgtatctcctccctcacacctgcagctcccgaggccaccacgccacctgtatctccgggccgcagggctctcctgagccctctcctgcagggccatctgcacctcagtcccccaaggaactgttgaggtctttttttgaaacagggtctcactctgtcaccgaggctgcagggcagtggtgccaagcctccacctctgggctcaagcgatcctctcacatcagcttcccaaatagctgagatcacaagtgtgcaccaccatgcccagctaatttgtgtattttttggtagagatggggcttcaccacgttgcccggctggtctcgaactcttgggatcaagggatccacccgcctaggcctcccaaagtgctgggattataggcgtgagccactgcacccagctgattgttgaggtcttgattctaccagttaatggcaccaccacccccacagcccctcttccttcagcctccatgggtaacctgccagcagatgccattagctgtgccttctgtgtgtcctcacctgactgccaaagcccaccctgtagttaaaagcatcctgtacgttggactgctagccactcctaactggtgcccacctccaggttcttcagtccacggcctaaaacccacatctggctctcttcatcctgtgccggatggacctgcctggcctctcatggcatatgggataaagccgacactctgttgtctggtatgggaggccctgtagctcggcccagcccaaccttccagccctgcctccagccacttagcccatttccctgaactgcatcccgtgacctcatgcactgaagccacacagcaggcactttcccatctctgttctttgactggacgcacttgttccttccagctgcagtcatatctactgtacttatgtacggtaccacccgcaactgggccaggaactgtgagagcccatggattttttttttttttttttttttttgagacggagtctcgctctgtcacccaggctggattgcagtggcgcaatctcagcttgctgcaagctccacctcccgggttcactcatgccattctcctgccgcagcctcccgagtagctgggactacaggcgcccgccaccatgcccggctaatttttttgtatttttagtagagacggggtttcaccatgttagccaggatggtctcgatctcttgacttcgtgatctgcccgtctctgcctcccaaaggctgtttttaattcattctcacagccatttcctctggcagagtgactgcctgtgcatggtctgtgcctttagtggctgaatgaataaatgaatgggatatgcacaaatacctgttgccctagcgcctcctgtggcgaagcaggccacgatgatgtgacaatatcttgtcatgtaattggctgtgaggactccgctggattcccggttgtgttactatttccatagatggtgggttaatgacggagaggggcgctcttagccaagggatacacagggcagcgcggcactacgctgcagttttccggctgcagattctgtttgtcatctgctggaaatgtccacgatggatttaattttaaaaaacttttttctttcccaatttagggaatacccactctggtgtacagacacgactggaactatgaacatctctttatggacatcaagaacaaaatggcacaggtgatcccgataaacctgatcctgtgcacggggctttctgccttctcagtgtgtttccctccgtgttaggcctactccagccttgccccgggtgtttgctgtgagcccacagtttctgcggcctcccttacagagagcaagcaagacagcaaatcagcaagttttcttgtagagtaaaagcagattgacatcttgtgggtttgattcttaggaatgatgttgatgcatggccatgcctgctgaagcgggaagtccatggaaccgatttgttcctgctctccgcatgcgggtactgataggtagacctgtgtgtctccatggcctccaggaactgcctgcacaccgtgcgcccaagtgtcagctgttagagagttggccccccgcatgtggcttgggcagtgaaggggctcggctctcttaccaggtggtgagatgccagaaacccagcccacagacatccctctcctgcttttcatttcccaggactccctccccagctcggtcattagtgccatcagtggacagctgcagtcctacagcgatgcctgtgaagtgctgtctgtcgtagaagtcactctggggtttctgagcacagctggtggggatccaaacatgcagctgaatgtgtatactcaagacatcctgcaaatgggtgatcagacgattcacgtgttaaaggtgggtctcacaccgaaaaggaaatcagcacagcccctcaccctggtctcctgcttcccgcgagggataggagcattcagggagtgccactctaggcgctcctgaaaaggatggggagacaagaacaactgctcacccagtcagtccagcataaacaggacacaccagggacagtagagacagacacgcgctagaaatgccagcagtctagatagagcccaaatgtgactgagtacatgaggcccctgcaaacagcgtgatgtgagcgggctgtgaggtgccgcaggagggaactggtagataggacagagatggccttcacaaggagggagatcacattagtacagggcagaacgaagagaagaatgcctgtgtggagagcactcaggctccctggtgcacgacatgagtgggggtgtgagacctcagcccccactcaggaattctattccttctgcaggccttaaacagatgccagttaaaacacaccattgccctctggcagttcctgtctgctcataagtctgaacagctgctgcggctgcacaaagtaagtctggtctcttcctctctgctggacagagggactgcgctcccttctccctgcaggctttaatgcttcatttgctcttccgtcgttttaggagccatttggggaaatcagttcaaggtacaaagcggatctgagcccggaaaatgctaagctcctcagcacattcctaaatcagactggcctagacgccttcctgctagagctgcacgaaatgataatcttgaaactaaagaacccccaaacccaaaccgaggagcgcttccgccctcagtggaggtatggatttgcacacctatggggcggggcagacacaatgttgtgctgtctctcctgtgatcttctatagacacaaaaatagttcttttcttaccacagaatcccatttcctgctttttgtcattaccagggcacctgaggactggctttttggttttaatctctactgggttttctttaagcaattacacaagtgtttttcagacaagagtcttgccctgttacccaggctggagtgcagtggagtaatctcaactcactgcaaccttggctcactgcaacctctgcctcccaggttcaagcgagtctcatgcctcagcttcccaaatagctgggactacaggcgtgtaccaccatgcctggctaatttttgtatttttagtagagacagagtttcactgtgttggccaggctggtctcgaactcctggcctgaaatgatctgcccgctttggcctctcaaagtgctagaatgaaaaggcgtgagccactacacccagcctaaaagtcatatattctaattttataacaagtagactatgtcaaagagaggtacattttaaatttgatagaaaaagctatcctaggccgggtgtggaggcttaccctgtaatcccagcactttgggaggccgaggtgggtggatcacctgaggtcaggagttcaagaccagcctggccaactggtgaaactctgtttctactaaaaatacaaaaattagccaggcatggtggtacacacctgcagtcccacctactcaggaggctgaggcaggagaattgctttaacctgggaggtggagattgcagtgagctgagatcgcaccactgcactccagcctgggcaacagagggagacttcatctcaaaaacaaacaaaaaaaagaatagaaaaagctataccaatgtataaagagtgtatgagaatactcaacattggatattatccatcttttacatagttgccaatctaaaggccaaaatggtatctcattttcagttgtatttccccatttaccgtgaggctgaacatgttttttatatttatcacccatttgtatatcatcctctgaattgcctttatgttttattttttgagaccgtgtctcactcccacccaagctggagtgcagtggcgcaatcttggcttagtgcaaccgctgccttctgggttcaatcgattctcctgccttagcctccctagtagctgggattacaggtgccaaccatcacgcccagctaattttttctattttagtacagagacggggtttctccacgtggccaggctggtctcgagctcctgacctcaagtgattcacaagctttggccaccacacccagcctaaattacctcttcgtatctttttcttttgcgctttgtctctgtaatggttgtgagagctctttgcatagaacaggggttcatcttctctgccgtgtgccacagtgctctatttcagcctttaattttatgaagtcaaatctgacagaattttcctataaagggtctctatacaaaaacacttactaggatcttccttatcccaggattataaactagccttttttttttttttttttttttttttttgagatggagtcttgctgtgtcatccaggctagagtgcaatggtgtcatcttagctcactgcaacctctgcctcctgggttcaagcgattctcctgcctcagcctcccgagtagctgggactacaggcatgcacctgcccggctaatttttttgtacttttagtagagacgggtttcaccatgttgaccaggctggtctcgatctcctgacctcaagtgatctgcccgtctcggcctcccaaagtgctaggattacaggcgtgagccactgcgcccggcctgtcctctctcttcttgtgctttcacatacttgttttattcaccagtttatgtttaggtgtaaagtaaggatttaacttgatgttttcctgactagatcatcaaactccagtcttcctcaccaatatgtttcctatttgctatcttcctccattatgctatgtggcatataccatatacatttatgttctttcaactttttcaacaagtctttactagcctgtgcttttcatgtagataaaaaagatccctttcctagagaatttccagtctttgttaatgtgaaacatgtaatagaatacaaggttttttgaatggtgaggccttgtttatgcaaccctgtaaataaacatcaccttgctagagggcctaaagtcatgtgaaggggccagcacagggcttgctccgtgggcttctgtcgtgtttgtgtactgcatgtgggaagcagcagtcaggcaccagagccttgaacccaggatgctagtcccagttcaggagctcaggtcattgaccttaaactgctcctcaggatttctgggttttttttttttctcgctctgtcgcccaggctggagtgcagtggtgcaatctcggctcactgcaagctccacctcctgggttcaagtgattttcctgcctcagcctcccgagtagctgggattacaggcacccaccgccatgcctggctaatttttgtatttttactagagacagggtttctccatgttggctaggctggtctcgaactcctgacttcaagtgatccacctgcctcagcctcccaaagtgctaggattataggcgtgagccactgcgcctggcctaggattttaagtcttaacgagcattttggttctgctgatgacaacgggaaaaagtaacatgaggggactgattggtccccttatgttatatgggagcctttttttttgagacaggatctcactgtggcccaggctggagtgcagttgtgcaatctcagctcgctgtagcctccacctcctggactcaagtggtcctcccacctcagcctcctgagtagcttcggactataggcatacaccaccacgtgcccagctaatttttgtatttttgctagagacagggtttcgccatgttgcccaggctggtcttgaactcctgacctccactgacccacccacctcagcctcccacagtgctgggcttacacacgtgagccacacagtgctgggcttacacacgtgagccaccatgctgaggagactgttttaaatgctctcttctttggtttttcagcctgagagacactctcgtaagttacatgcaaactaaagaaagtgaaattcttcctgaaatggcatctcagttcccagaagagatactgctcgccagctgtgtctcagtgtggaaaacagctgctgtgctgaaatggaatcgagaaatgagatagaattatttcctcagctatctttggatgactttggagagaagactcctctctcctcgtctgcggcgtggacttgatcatggactggtgcctttgcattcagaaggagagctgtcagcgtagcaccgaattcaagaccaaggcgtgctacctgagctgacagctttttgaaagccgagctgtttctgaaccatgtacatacatgttctgaaactttctcatcattttatgagtactgttcattgagagatgacaatgaagattagatgaaattggaaataaaccaacattgtttacattccaggagacttgtagctcagccacacacgcagtaatgacctgtgcccgttcgcctctggcactgcccacccctctttttttttttcttctaattctgtactcacaaaagagaatctcattttcttctttcttccattcccttaaattctgagtactgtacatatatttctgggttcccacgatgatgtgaaaaactaccagactgttttttgtcttctcacaaagacaagaaaaatcagggcattttgtgagtgccttaagatcaaactaacaagatctgaccctctcccctcacagtgagccactgccccacttcagagggtaagagccaaaagcctcattgtgaaaggcactggacttggaccagggacaccatcagggccttggttttctcacgcataaaatggagagtggattaatcgccaaagattcttctgatctgacattttgaaattgtgagagaaactagatgactgtaaacttggtcacaggcctggttctggcagttctttgcggacttttttctagcattatgccaaataaacatgcagtctcagtgtgctctcgcatgtatgaatatctagtcctttctgtggttctcagccaagacataaaaactaggactcagagcacatacaaaaccagttatgtttcggaaagagggaaaagagtccccgagcccggatcttgtgctgcttttctcactgacgtgttgccttttttctttacaaaatctgctttgatacttaggacctctctggactaatttctcttcctagacagctcagcacagctattgatatgttagaggcagtatccttaatattcattctaaatgagttaacgacttaacttgaaattgggcctaaggagtgagaactacaaaaatacaaaatgcttgtccaggactcagccatgcacaccttgagcagcgccggcaggaggcacggaaggaactgtgctccgttctcctcactgtcatggtgccaccagtgtctgatgaagggcagagtgacccagactgcaggcagtaactgacttcacacagtccctggcatttagtcatctgtgattgttttatcactctggactgtgcagagccacctgccaccgagatctgcattccgactgcctatgaacgggtgtgggggccgggggctggcttgctgaagtcttcaacttgcactcggagctcctttgatacctcagagctggctgtcaggtggcagctcacacccagactcactggccacacctcagcagggggggagtcgagtgtcagtctctttctgtgaaggctttttttttcctttggcctgggaatttttcccatttttatgaaggggttttaaattgtttcattttgtgtgctgtgcttcaaagccttaactgtcaaatcttgcattatcttgtttgtacagaaatatactggcctagcagaggcaaaaaaaaaaaaaatgaattttattttacttgtcacacctgtcttaataaactggagttttgctgctaaagaactcttctctctgggggcagagcttctatttatggcacatagacatcagctaggcttttgggaatcgtttgtgttctttgtggaaatgtcctttagaagcacccatgaagtagtgtgttcagactgtgcacacagaaaacaggctctgccttcacatgtgagacggtggacttttcctctggacaaaatgacagcatcctggcgactccacagtggagctgagcgccactccctgtagccgatctgggactgaaacgcttacacctctgcctcagaaggagtcccccatgccctgcctgaaatgacttcactggacacagcggggctgcagctaacggggtacaggtaggagctaactaacttcacccctgagtccacttgcggggtaagagataaacagtaacccttccaggagcccactgacgttggagtgctaaaaatgccccttcagggggaaaactgcattttctcttccaaaaaggaaaggttcttccaggcgagaaacctgtggtctagaaccacagcaagaagaggaggcatgctggcctgcaccggaagactcactttgtctgccctgcgccagcctcacctcaccctgcagttcccgtttccgccatggatgcctcatcaccaaccctgaccttccccctcccaaccctttattcatcctcactcccactcatacccgcctccctggacagttccctgctgcagagttctttctgctttcagccctaccttggtggtgatttacctgaaaatcttcacaactgatcattatctccttctctttgagacctgactgaaaaaattaggtgtgcacacctgtaatcccagctacctgggaggctgaggtatgaggattgcttgagcctgggagtttgaggctgcagtgagctatgattgcaccactgcactccaacctgggtgacagagtgagaccctgtctcaaaaaaaaataaaataaggaccttattgtgtgtgcaaattatttgcctttcatgaatagttatgagactttgtgcatgtgttaaccgagacggccctgagctatttcagttactcctgtatgttcaggcaattccaatttagaaacaaacttccagtgataaatattgggaagaaaatgtcagctcagggccaagtaggtaaagccacccaagtctagccatgcacacaggcactagtgtgctgaaggaaaacacctctgatttgatacataaagtgtgaaggttgcataactggggaggtggctggagaaaacctgagcctcgagctgagtaacaatccaagccatgattagcatttatattgcattctgcattattctcatcctatcacgttcattaagttcaaccattaccattacgaatcccgtttccagctggaaaaacaagcgccaggaaagtgcatttcccccccaccccccccccccaaccagagcaactttggtcagaagtcacacctaatcaccctctctgcaggatatgctggggatagcccttttgaggaggtgggggtgtatgcgaaagcaacctggggccaaagcagggggaagcaggagagactggaggggccctgggtccagcaagtgctccaccaggctgcccctgctcaggtgctccacagcccataaaaaacgccttcagccctgctgtgcttcccctcacacctaaacttactataagggtcctaccttccccagtattccttcatgatcactgctacctgtgccctgaagcgcaacagaacctcaacccagaggacagccacttcctcagaacccacgatctttgccccatcgccacaggtccatgagtgactcctaattaccaaatccaagggctccttcaccctgaccactctggaacccaacaaagctgacacacagcccagcccagacaggcctgaatgtgggtcctggctctcccatttgccagttctacagccatgggcaagtggctcgacctctctaagcttcagtttcctcgtctgtgaaatatctgtcagtgctcttaagggaggagaccaccccacatattgtcttacgcccaatttctgcctccaaagagagaagtaaaaactaaaaggcagaaatgaaatccacaagcagacagcctgcaccacaccctgggcctggtagttaaagatcgacgcctgacctaatcagtgatgctatctatagattacagacattatatagaaaagcaccgtgaaaatccctgtcctgttctgttccgttctaattacgggtgcatgcagcccccagtcacgtaccccctgcttgctcaatcaatcacgaccctctcacgcagaccccttaagagttgtgagcccttaaaagggacaggaattgctcactcggggagctcagttgttggagacatgagtcttgccgaagcgcccggctgaataaagcccttctttaactcgtgtctgaggggttttctctgcagcttgtcctgctacatttcttggttccctgaccaggaatctaggtgattaatggatggttgaggcagcccctcagacggcttaggcctgccctgtggagcatccctgtggaggactccagccagcttgagcgacatggatcctgagagcgctctcaggcaggcaattgccccagtggaatgcctggccagagcagtgtgtagcaggcccccgaggaggatcaacgcagtggctgaacaccgggaaggaactgccacttggagtccagacatctgaaacttggtaagactggtctttggaacttgcccactccatttgaggggaagcgtggcctgatcacccacggcgtgcctgtactggcactctggtttttgtttttgacttgacttggattgcttgatactttggttttggttttgacctgacttggatatcctgatactctgattttggttttgattttggtttggtgtaaactgtaaaagtgtgtgtgtgccctttttacctgttctttgttttgtggtatgcgtgtagggtgagcgtaatgttttgtcttgaagaagcatgggtcaagcacaaagtaagaccaccccactaggaactatgctgaaaaatttcaggaaaggatttaagggagactatggagtactatgacaccaggaaaacttaaaactttgtgtaagatagactggccagcattagaggtaggttggccatcagagtgaagcctggacaggtcccttgtttcaaaggtatggcacaaggtaacctgtaagccagggtacccacaccagttcccgtacacagacacttggttacagctggttttagactccccacccgcccgccccaacagtggttgagagaacagcagcataagtggctggcagaggcaaggaaagaccagcagagagagaaagaggaagagacagacaaagagggagtcagagagagagagagaaagagacagaggcaaaaggaaagtcaaagagaaagagacagaaaatcaagaggaaaaaaa

SEQ ID NO: 4 - DNA, 137919 bp, homo sapien
cagcgcgcggcaggcggcgagctcgggggccgcaggtgcgagcgggcctggagagtctcccggggcggggagcgggctaggatacagtgggccccgcgggccggcgggccgggtcccggggagcggcgcctgcgtccggatgcccctcccggccgcctcttcctgccggctccaagtttcggtttcgccgccggggtgcccggtccagccccgcccgcggcgcccactgaccctgttccccggctgcgggaggggtcggggtgggggcagcgggcacgcctgggaccccggcgacatccccggagcgcagagcgcggaggaggctttgcgccccggcagtgctgcccccgggaagtggccggggcacggggggtgtagtggaaggggacagccggacccgggcctgcaggtccgcccgggaatcctgcgcctgtacgaatggcaacaacggaaaagtgaagttgcaaaaacagactcctaacttttacgagggaggcatcgccccgtctgaaccgcaccgcgcagcgtccttccgacttggcgaagtcgcccgagcgcggggctcaaggccagggtgggcacccctcccggatggctgcctgcaagccggcgggccgggccctgggggagtccagggcgggaggggaaggagctgtgcaaacatggtggtggcccttccctgcccccaccttgttgactttggttgtggttgggggatgggctttgatttgggtggcagtgtctgtgcttgggaaaaaatgtcagagaaaagacaggaagcggattgaatgcaacagtgttgggtgcctggggctctctcttgtgtcttccggcccctagagcagatggaacaataagatgctttagggggccgggcgcagtggctaatgcctgtaatcccaaaactttgggaggccaaggcgggtgggtcacctgaggtcgggagttcgagaccagcctggccaacatgaaaccccgtttctactaaaaacacaaaaaattagccgggtgtggtggcgcatgcctgtaactccacctacttgggagactgaggcgggagaatcgctagagcccgggaggcggaggttgcagtgagctgagattgcccactgtactccagcctgggtgaaactgtcaaacaaacaaaaaatgctttttggaggatttttcgagttttctggtctgtggttccccagtgtagcattggagaaggaaacacttcgggtggaaagaaagaggcctgggcggtggggagtcattgaaggtgtttgagggagggagtgtccactggtggttgtttcaggtagagtgtggaggggaggaggtacggtgggagccagggcttggctgtggcaggggtaggggagttttaaactctccttctactctgaaggagagataattttagtctctggaataaaagggcagcagacctggagaaaagggatgcaaattgtcccatacacctattgggaacctcatcaaagagaagactgcagaagacagatgattgatgtttttatggcattgggacaggggcttggggctggagaggggaggtgtgcagggttgtcttgttgtgcagataatcactcaggtgatctcagagctgctctcagaggaactggcgaggccgcaggcactcctcttgtgtgtccctgggaccgttcctagatccctctaggcagataatggggcctcagagagagcttctgctccattctgctgtttcatggtgtggatttcctttatagccttttacaaaaggatagcttcccagaactcctgagtatgtggttgctctgaatagccatctcaaaattgaccacagaatctgttttggggtggcatagattagtctcccacacaggtcaagccagggaaccccacccagtgcctccgtccctcgttcaggcccagcctgagtgagcccaccccagtgggaggagagggcagggccagggcagggagggggcctgagtgtcctcctggctgctgaaggcaccagtcagctgccgctccagccactgccccagtggagttctttggttccaagccagcagaagaaggtggtgggtgggccagtgtgccctgaggcttcttactggggagggagagagtcaggtcctccactgttaggtggccaagcgcccaaacgccatctccactctcaccctggatgcaagaagtgaccccggaggcctgagtcctggccttggtctggtttgatgccatccaccgcagaggctgttctgagggcaggtggtcagtgcagagtggcgcgctttgtggatggcagcctccccccattactaggaatctgactgccagcccagtagccctgggctgcctgctcaggccccatcacctgtggggcaggtgctttagtccccttaagaggatgaggagggtgaggcatcagcaggctgagcgccttgctcagggcaggccgtgggaccctgccgaacagcacgtggctgccccacgcctgcctggagcatcccctatccccacccagcccaacccatgttctcagcagcagggatggttctaggctggctgaatgagggaccagggcagagactgcaaaagcttgagagccaagggggcagcacagagcggggaggggctgggcttgggctgtgctcctgttgggtttccattaaccaggggaccagctgggctgctgtgatttcactttcgcagaaaatgaaactgaagccgtggtcacgtgacaggacatgtagtatatagcaggctgccagcgactcctgctcttgcttctggatctgcagggcagtcccagcaggacccatggagtgtccttcgtgccagcatgtctccaaggaggaaacccccaagttctgcagccagtgcggagagaggctgcctcctgcagcccccatagcaggtgaggcccaggggtgctggtggaggctggggcagtggggacccctggagatgtctcacctcccttccaggaaatggaaaccctgggcagcaggcagctcaggtggggccgaggtcctctgtggctactgaggctctgtggctctgaatagccatctcaaaagtgaccacagagtctgttttggggtggcatagattagtctcccacacaggtcaagccaggggaccaccacccagtgcttccgtccctcgttcaggcccggcctgagtgagcccacccgagtgggaggagagggcagggccagggcagggagaggacaaaacaagaagttttgtcggggtctttgctggaggttcctgcttttgaaaattttcagtttcatttcctagagagagctcacggtttttcttccccttgggaatgagaagtgtcgggctgagctgagggcttcatagagagtttcagagaatgctgcagggaagcagagtttgaggctctgcaggggttgagagctctgcctgggttagtttttgaggggccgtgagggggccccaggacctgtccaggcacctccctggctcgggaggccagtggagagacaggagcggggcagtgtcaggcgggccttgcctgctgagcatcttgagtccattctcaattttgttggcttctggggcctcagactggttcccctcctcccgggttttaaacaccaaccctaaaactagcagcccccagaccttcagcctttctgtgtccaaagcccagccccacctccactggtgagggcacctcattcttccagctgcttctatcggacccatcaccccggggccctctccttcctccatgacccacatgcagagggccctgctggtctccccgcctccacgctgcatgctgccttcctgcttcctgctcagcacagcagacagtcaaaccacagacccccttacaagatccgcccctgcccccgctgtaactcaggacaagcaggagcccttacggtggccacgaggtcctacatagacggctgcccaccccattcctcttggctccctctcctgtccccagagcccaccaccttctggcccttcctggatacaccaggtgtgcttccaccgcagggcctttgcaccacccttccccagagggcggcctggctccctccttcccctctttcagtctttgcccagctgctcgccatggggtctctccgatgttgtccttcaagggtgtgagccccagtccttccatgtttgtttgtttttttttttttttttagagggagtttttttgttcttgttgctctggctagagagcagtggcgaaatctcagctcactgcaacctctgcctcccgggttcaagtgattcttctgcctcagcctcccaagtagctgggactactggtacccaccaccactcccggctaatttctgtatttttagtagagatggggtttcaccatgttggccaggctggttttgaactcctgacctcaggtgatccacccgcctcggcctcacaaagtgctgggattataggcgtgagccaccgcgcccagcctaagggctccacttctattaataatagtgcggagagcactggtagtgcgcagcatgaactgtttctagaggcatgcaaagcaaatgcacttgagactcctaattcaccacttgtaagaggccaggaatttggtgactctgtacatgatgcttttgaacatttatcgaaaaccaagaaatacagtgatgctggctggttgcccccagcgtcactgagaaagtggtgaaaaggatgaactcagggattcgatgtctgggctgcagctctgcataaatgatctgagagtttcttagtgtgccctggatcagaatcttctctcctgtagccacagggttgaaattgtagaaaatcgagcaccagctctcacgcgattagctgagttaaaatgaaagctgagcttccaggcatgcagggcgtctgctgttaaagtgggggcacttaagccggatgccgtggttcacacctacaaccccagcatgtttgcaggccaaggtgggaggatcacttgagcctaggagtttgagaccagcctgggcaatgtagaaagactccatctctgtattacaagaaaaaaaaagtgaggacattgggtggcaaaggaagggatccttcaagttgggatggggacatgggaagcccatggccaggctggagacattgagttccaaatgatataaagttgagtcaggttgagtttagtagtgtgggcccactagcagagattatgcatttcatgttgcagctggtagagttaggaaggcctctgagtctttgtttggttggctgaaacatggatcaaaaggtggcccaccttactaggcgtggtggttcacgcctgtaatcccagcactttgggaggccgaggtgagtagatcgcttgagcccaggagttcgagagcagcctaagcaacatggtggagccccatctctacaaaaaaaaaaaagaaaaaaaaatacaagaattagctggagcaggaggatcacttgagcctgggaagtcgaggctgcagtaagccatgattgtcccactgcactccagcctgggtgacagagtgagaccctgtcttagaagaaaagaaaaggaaaaaaaaagccttacagtggtctctcagtgctcaaatgaaaagtctcttgcctctcactttattttttaaaattttatttcattgttttgagacagagtcttgctctgtcacccaggctggagtgcagtggtgccatttcagctcactgcaacctttacctcccaggttcaagtgatgttcctgcctcagcctcccaagtagcggggattacaggcgtgaggcaccaccctcagctattttttatatttttagtagagacggcgtttcaccatgttggccaggttggtatcaaactcctgacctcaagtgatgcgcccaccttggcctctcaaagtgctgggattacaggtgtgagccacccaccgcacctggcctcatgtctctcactttaaatcaagagttagacatgattaagcttcttgaggaaggcatgttgaaagctgagataggctgatagctaggcctcttgcaccaaatggttagccaagttgtaaatgcaaaggaaaagtttttgaaagaaattaaaagtgcccccagcactttgggaggctgaggtaggtggatcacctgaggtcaggagtttgagaccagcctggccaacgtggtgaaaccccgtctctactaaaaatgcaaaaattagctgggtgtggtggctcatgcctgtaatcccagcttcttgggaggctgaggcacaagaattgcttgaacccaggagacggaggttgcagtgagctgagattgtgccactgcactccagcctgggtgacaacagcgagactctgtctcaaaaaaaaaaaagaaaaaaaagagaccatcctggccaatatggtgaaaacccatgtctactaaaaatacaaaaattagctaggcatggtggcgtgtacctgtagtcccagctactcgggaggctgaggcaggagagaatcacttgaacccaggaggtggaggttgcagtgagccgagatcacgccactgcactccagcctggcgacagagcgagactccatcccaaaaaagaaaaaaagtgctactccaatgaacacacaaatgattagagagtgaaacagccttattgtgatatggagagagtttgcaatgtctggagaggtcaaaccagtcacaacattcccttaaaccacagccgaatccacagtaaagccctaactctcctgtagccacaattccacacaggctgacagagttgaggaggctgcagagaagatcttgaagctagcagagactggtttatgaggttttaggaaagcagtcatctccataacataaaagtgcaaggtgaagcagcgagtgctgctggagaagctgcagtaagttctccagatctggctaaggttattgatggaggtggctctactcaacagcagattttcttttctttttttttttttgagacagggtcttggtctgtctcccaggctggagtgcagtggctggtcctcagctcactgcaacctccgcctcccaggttcaagcaattctcctgcctcagcctcccaagtagctgggattacaggtgtgtgccaccacttccggctaatattgtattttttattagagatagggtttctccatattagcattgctggtctccaactccttgacctcaagtgatccccctgcctctgcctcccaaagtaccggggctataggcatgaaccattgcacctggccaattttattcttttttaaggccgagtagtgttccattatgtatatgtaccacattttcttcaacgtccattgttggatagttggtggattccatatcttggctattgtgaatcgtgctacagtgagcatgggtgtgcatggcaggattgctggagcccaggaggtcaacgctgcagtgagccgtgatcataccactgcactccagcctgggtcgacagtgagaccctgtctcagaaaaaaaaaaaaaaaaaaaaaaaaaggcagtactgcatccccggagggactgcagggattagtgccaccaccaagcactccaaagatgcaggggtggggattcccattcacctcccctatttggcctttgtggaagacgggtggatcttgggaatgaaaatgaatgatcgtaagcttaatcaaatggtgatttctcagcctccatagtcgtgtgagccaattctcctaatacatcctctctcatccatctgtttgtccatccatccatccatccatccatccgtttatctgtctatctatctgtcatctgtcttctatcaattatccatccatccattcatccatgtacctatccatccatcttatctatctatcctatctatccatctatctataagtctgtattagggttctctaaagggacagaactaataggatctatgtctgtaagaaagggagtgtattatggagaattggctcacacaatcacaaggtgaagtcccatggtaggccgtctgcaagctgggaaagaaagaagccagtagttgctcagtctgagtccaaaagcctcaaaagcagggaagccgacagtgtagccttcagtctgtggctgaagacccgagatccccctggcaaaccactggcgtaagtccaagtttccaaaggccaaagaacctgaagtgtgatgtccaagggcaagaggaacgtgaggaagcatccagcataggaggaagatgaaagccagaagactcagcgagccagcttaccccaccttctgcctgctttgttctagccacgctggcagctgactggatgctgcccacccacatagagggtgggtcttcctctcccaggccattgactcaaatgtcagtctcctctgacaacaccctcacagacacaaccagaacaatactttaccaactacctaggcatccttcaacccaatcaaattgacacctgatattaaccatcacaccgtctatccatccctctaccctatctgtccacctaccctatctatctatccacctatccatctgtcctatcatctatccatccatccatccattcatctattctatctatccatccatctattcatccatccattcatctattctatctatccatccatccattcatctattctatctatccatccatcctctttctattcatccattcatctatccatctattctatctgtccatccatctatactatctatccgtccatcctatctgtttatctatcatctgtctatccattcatctagcttatctatctattcatccatcaatctatccatccatccattcatctgttctatctatgtatctatcttatgtatctatccattcatctatcccatcttatctatccatcccatcttatctatccatccgtccatccatccatgtatctacctatctacctgtctacctacctacctacatattctatagttctgctctctggataaccctgttctatactgtgagtatttaatgagttaacatgtacattgtttaggaagtgctagttaagtatgtctcttatttctgaatccagctacttacttttatgacaataaaaatgtaaatgctggttggcaaatgacccacatgttacaggaggacataaaatagcacgaagtttcctcaccctgggccaggactgtcacattccccagagcaacactgtaaactggtgtgtcctcttctagacatctcctctgcgtgaatgtgtgcgcacacacacacacgttaatgtgagtggcagctcgtgccctgcgcatgccttgctactttcatgtacagtggctgaggcctctagtggaggacggacctcagcagcctccctggctctgccacccagcagggcctgactcagcaacaggcctatcctgggcacttcccttgtcctgctgttttgccgtgacataggctgctaggctgcatgcttgcacggagaccttgccctctgagccaggctggccgtctggaggacagattcccagccactagcctgctggcttcaggctggcacatttacaatgcaaatctcttcaaatcccctgcacaaagcttctctggccactcactggccgcgtctctgtgctccctgccttctagatttctattcagattctctccagcgttcagaatgatggatcttgtcaatctgtgccggtcgttgggtggaaatggcactgcagggcctccgttctgatttccttcatcagtaggcatggcaggcatctctttggaagttaagagaccacatgtatgtgtatttccttgagcggcctgtctgtctttagggaagctcgttttgctttggttggtccttatgattgttgggactgtttatactgggaacagcctgaaacccagctctcctaggcttgctcagcaagagaaacgtgctgggtcaccgttgcccaagtccaggcttgaggggttcaagtgtactagggctttgctccatttctctgatcctgacagctctgcccttctccactgccagctttgtctgcaggtggaggagaacagacagtggtttcccagcaccacctcatggtctttccaggatgcactgagtggcagaaaccccagtaagggtccagaagtatggatgcttccatacttcttgctggttggcccttcccttagtcaatcactagtgccagggtaaatatcggccctgattggattaggctagtcagggcccgcccctggtgggagggtaggttggtgggagggtaggttggtgggaggggcaggctcagaatccctggttgtaggtgaaacagcagctctcgaaggatggggccttgggtcgcctgttgcagatctttctccagctcttactttctggctgtgatgtttcatgtgtgtcttatgtatgtagacgtttagaggatttgttatcaattttgagtcctgctaaggaacttcacgaattcttgagctcttggctacgccaacactgagtactcaaagggaaaaaggtctgcgtggtccctgccctccagatctcagaggaggagagggcagtgacgaaaccaggtgctggaaacgggcgtggggatgaagtgtccagacaggggcgcagctgggactggcttggggccttggagaagggtctgtggggatcaggcagagggaaggttctgtacagaaaagcaggcttggcctggcaccatctggagtgtgtgtcagggagaggtggggtcgtccagacccaggattgaaaacagggactccttgaagggtgttttcgtccattttctgttgccataagagtacccgagcctgggtaattgaaaaagaaaaggccgggtgtggtggctcaagcctgtaatcccagcactttgggaggccgaggtgggcggatcacgaggtcaggagttcaagaccagcctgaccaacatggtgaaaccccgtctctactaaaaatacaaaaaaaattagctgggtgtggtggcgcatgcctgtaatcccagctactccagaggctgaggcaggagaatcacttgaacccaggaggtggaggttgcagtgagccgagattgcaccactgcactccagcctgggtgacagagcgagactccgtctcaaaaaagaagaaaaaagaaaagaggccgggtggggtggctcacacctgtaatcccagcactttgagagggcaagacgggtggatcatgaggtcaggagttcaagaccatcctggccaagatgctgaaacccctgtctctactaaaaacacaaaaattagccgggtgtggtggcatgcacctgtaatcccagctacttgggaggccgaggcaggagaattgcttgaacctgggaggcagaggttgcagtgagccaagattgtgcctctgcactccagcctgggcgacagagcaagactctgtctcaaaaaaaataataaaataaaataaaaaaagaaaaagaaaaaagaggtttatttagctcacagttctgcagactgagaagttcagggcctggccctgatgtctggtgagggcttttgtgccacatggcagagtaggccgacggggatgctgacagctgtgaaagactaagcctgatgggacatcttgacttcataacaacccacctggcgggtgctaatccattcccgaggggagtaaacaagcctctcaagagtaaacccatgaccgcaaacggcaccaagccattcgtgagggatttgccctcacgacccacagacctccccgcagccctgcctcccagcactggcatactggggatcaacatgagttttggtggggatggacaaagtgcgtccacaccacaatgaaggctagagtgagtgtggggctggcagagtgggtgctccatgctgtctgcatggcagctctgcatgggtgagaatctggaggcagagcagctgggcgggcagatgccttagtgccaggacaagggaagcagtttgagacccctgggccgccactgggagaatgcccaccctggggaagacaggaggaatgtctacagtaggggaggaaagcgtaacaggctctgttttagaggtgcccgaggtgcgctgacatcctagtacagagtcaggtgaatccactcgtggacattgggaggaagaggctggatgctaggacggcacagtctttctgtctgattcaccccttgttgtgctgaaactggggtccctggttccctcctacccacctggagcagaacccctaccctgctcatgttagcaggcccaatgcaggacctcggagggagaacagggtgaatctctccatgcactcgtggggaggatttctgtttttccttcctaacactcgcttctctctgagatctgacccttccttcatctgccgttacagattctgagaacaataactccacaatggcgtcggcctcggagggtgaaatggagtgtgggcaggagctgaaggaggaagggggcccgtgcttgttcccgggctcagacagttggcaagaaaaccccgaggagccctgttccaaagcctcctggaccgtccaagaagtgagtgcactgcctcggctcccctccgcccccgctcactctgcccaggaaaatctcactgcacagctgcccagctagcccccgaaaatgccaccatggcccagcccattgaacctgcccacagggcagcagcagagctgccccttctgcacctgattcatctctggctggagtctgtgggttccagaccccctggggcctccaccgtctttttttttttttttttttttttgagacagagtttcgctcttgttgcccaggctggagtgcagtggtgcgatctcggctcgctgcagcctccacctcctggtttcaagcaattctcctgcctcagcctcccaagtagctgggactacaggcatgcaccaccacgaccagctaatttttttgtatttagtagagacggggtttcaccatgttggtcaggttggtctcaaactcctgacctcaggagatccacccacctcggcctcccaaagtgctgggattacaggtgtgagccaccgcgcccggcctccaccttccttttctttctaccagacccaatactcgtgtgtctcccagaagctgtggctggggtggggcctgagcttctgccgtgtgtatctgtgtcccaagcttctgtgggtctctttgcattgagggtgcaagctcagaggtgccttgctgcttcggggcagggacctgagcgtccgctgggtgcgtgtcttgcgcttctgtaggcctctgcattgagggtgcgtgcccagaggggctttgaagctttgggtgtggggtgggtgctctggaaatgtgctggctggcaggttacccttcttggaagggtatggctgagccaccttttggctccctctggccttgaacagcctcttaggcgttagacaccaagagaatgcgtccttgttaagattcccagttggagcactaggcgaggctttcgaggggagcgtcctggacatgttcaaggagaatggttggaagagaagggctcctgggctctagcgcggcctgggaagacccagagggcagtgtcagctcccgggtttcttgctgggcacggagaaggggaagctgtctttctgtgtctgcactggggctggctttctgtctgtcgttccttgtaggtggcactccatggttgggctatggtgggaagtgatgcagccgcagtgctgtggtctgtggggggtgagtggggtgagtgtggggggtgagtggggtgtctgtggggggtgtggggtgagtgtgtggggtgagtggggtgagtgtggggggtgagtggggtgtctggggggggtgagtggggtgagtgtggggggtgagtggggtgtctgtggggggtgagtggggtgagtgtggggtgtgagtggggtgtctgtgggggatgagtggggtgagtggggggtgaggggggtgtctgtggggggtgagtggggggtgagtggggtgtgtgttggggggtgtgtgagtggtgtgaatgggatgtgtgtgtgttgggggtgtgtgagtggggtgtgagtggggtgtgtgtgttgggtgtgtgagtggggggtgtgtgtgttggggtgtgtgtgttggatgtgtgtgtatgtgttggggtatgtgagttggtgtgtgagtggggtgtgtgtgtgttgggggtgtgtgttggtgtgtgagttgggggtgtgtgagtggggtgtgttgggtgtgtgtgtgttgggtgtgtgcgtgttgggtgtgtgtgagtggtgtgtgtgtgttgggagtgtgtgtggggtgagtgggatgtgtgtgtatgttggggtgtgtgggagtggggtgtgtgtgtgcttgtgtcattcccttggagaataatcccttccagagcagccaaggccacccccaagcctggagcacatgggatgcggaaggtttgggtaactccctttttatgcctaatttggaactctgtcagagtgggaaagtggcagtacggatggtgttccttgaaaacattgaaggcaaatgaataaaccctttgccatctggggcaaacaataaacccgcccaaagacagaggaaaagctaagaattgagttacttgggggaataaaattttgaaaagtttccatgaataatgaggaatctagaaagccacacaaatgctcgagcaggacgcactcgaaaaagacctgagaagacctcagtgcaggctggaaggaaggctgagtgtgggaggagtgtcccaactcagggccagtctacagagactgagagagtattattttttctttattttattttatttttttttgagatggagtctcactcctttgcccaggctggagtgcagtggcgccatctcagctcaactgcaacctttgcctcccaggttcaagtgattgtcctacttcagcctccggagtagctgggactacaggcacccgccaccacgcctggctaattttttgtatttttggtagagacggggtttcaccatgttggccaggatggtctcgatctcctgaccttgtgatccacccgcctcggcctcccagaatgttgggattacaggcgtgagccaccatgcctggccagtttttttttttcttttttcttttccatgttttggctgtaggtgtttaaggaaatctctatcaaactactaattggcaacaagccaaaggaacatagactttatttatttatttatttatttattttttgttttatttatttatttatttatttttgagatggagtttcgctcctgttgccaagctagggtgcaatggcgtgaccttggctcacagcaacctccacctcccgggttcaagcgattctcctgcctcagcctcccagctagctgggattacaggcatgcaccaccatgtctggctaattttgtatttttagtagagacggggtttctccatgttggtcaggctggtcttgaactcctgacttcaggtgctctgcccacctcagcctcccaaagtgctgggattacgggcgtgagccaccacgcctgccctattttttatttattttttaatgttttaaatttttttactagtggaaatctgcttgaatttgtaaaatgtagagttgacacagaagatgtgaaaagaatgaagacattttctagggaatcttgaacaagagaaaaccgacatgaacaagagaacaataaaagaggccaggcgcggtggctcactgggtgactgtgagatccttcctcaaagagagagagagagaaggaaggaaggaaagacaataggaaatgttgatgaggatgtggagaaattggaagtgttgtacagtgttggtggaaatgttaaacgctgcagccgttaaggaagcagcaaggcagttgatccaaaagttacgcataaaattatcctaggccgggcgcggtggctcacacctgtcatcccagcactttgggaggctgaggtgggtggatcacgaggtcaggagattgtgaacatcctggccaacatggtgaaaccccgtctctactaaaaatacaaaaaaaaaaattagctgggcgtggtggcgtatgcctgtaatcccagctacttgggcggctgaggcaggagaatcacttgaacccgggagggggaggtttcagtgagccgagatcgcaccactgcactccagcctggcaacagagcgagactcactctcaaaacaaagcaaacaaaccaaaaaaaaaacaaaaaaagaatacgatatggatctgtgctgtagcctggatggaccccaaaaacatgctaaatgaaagaagccagatacaagaggccatgtatgattcctttgatatgaaatatccacgatagactcacccatggagacagaacacagattagtggttggctgggaggagtggggaggagggagtcattgctgtgggatttctttctgggatgaagaaaatgggaactagggccaggcccggtggcttctcacctgtaatcccagcacattgggaggctgaggcgggtggatcacttgaggtcaggagttcaagaccaacctgaccaacatggggaaaccccgtctctactaaaaatacaaaaagtagccgggtgtggtggtgcttgcctgtaatcccagctactcaggaggttgaggcaggagaattgcttgaacctaggaggcagaggttgcagtgagccgagattgagacaccgcactccagcctgggcgacagtgagactctgtctcaaaaaaaaaaaaaaaaaaaaaagcctaaatatccacatatccacacatgagagaagttcagagtgaatacacaggtgaatgccgatgggttgtctctggtgatgagtttacaggggcttttgcgcattttcccaatcccacagggagcctattgaattctgaagctgagagcagtgtatgcgtgaacggtgctctaagcgcagacgccgcattctaaccatggtgaggagggtgctaggagccaagggaggcggccccagaagctgagacagcgagctgcgtggccagcctcaccctgcagcagagtcaggtggtcagtcctcacctgcagtcatggggtgggtggagagggaaagggcgcacagagaggggcccgcgcctgtcccttggcacagccatcctccacttggcctctcctttggtggccgctggttgctgactaacagggtgtcctttgtgcattcttcctctggagaggctactgggcttggctgctgggttgtacttcctgtggtgagggaagaggagactgccggagccaggggtcatttgggttggaggcatcggcaggccaggaggctgctggtggagcttcctttcctcagcttcctgctgggcgtcttgctgtgaggtctcccggcgatgcccggtgtggtgtggaagggaggtgtcggatgagcatgcccgctacagggccagactgcccgcctccgcctctaggggcttgggaggcctggcctggctggccctggggtgcccgggcctgcctataccttctgggtcggtctctgcagtgcatctgtgctctgagcacaagccaaggcattcgtgtggaggcccggggcgccgggagcctggtagggtgctgggagcttggcagggtgccgtgagcctggcagggtgccgcctctggtgtgggcagttctcctcttacgtggacttgtcctgcacgtctgcaggagctgcttcttcgtcttcccacaccctcctgcccatgggccctggaggcagacggtgctgggaagctggtcagtgcccacatgtgggtgtccctgcctgggccttcccaagaggaggtggcccctgaggtggggtctttgcgagtctactggagctgtgcgtggggtgcacagccctgccctgtctgaagggggtcgtgtttcaacagggagctacatcagaggttttggtagatgctgctgtagacctcatatccgatgaatgggaagctgctaatgccatacccagcaagagaaggaagcaggatgcagccccgcttgaggccgccagcgtgccttctgcagactgtgagcaggtagtccgagtcaatagtttgggcagaatgctccctgccctggtgcatgctggcacagcctggcacggccacctcgcacttccggcccttgagtccctgccagtcgaggaaggctgcccaggatgggcgttttcgggtcacccttgggctgtgaaagagcaacgctgattcaggcttggctcttgtgactctgaggatgttttgctagtggtgaatttcagctttattgtgcttgcccttctggcccacatccttccacttgcctttttactccgtgcagctgtccccttggacacctggagaaacttaacctggctgcactcacctggctaaagctccaccagcaacacaggcttcaccacagagagcagcaggggagcccaagggggcttagagggccaggcccaggcaggtgggggcccgacccagcctctgcctgaacacaaggtcttggatggcgctcgccacgtgggggtgtagtggaagccctgctcagtttagtctctggtttttggaagttgaaatcctgactttttctctttttcttttctttctttctttcttttttttttgagacagagtctcgctctgtcgcccaagctggagtgcagtggcacgatctcagttcactgcaacctccgcgtgcagggttcaagcgattctcctgcctcaccctcctgagtagctgggattacaggcacctgccaccacgcccggctactttttttgtgtatttttagtagagacggggtttcaccatgttggccaggctggtctcgaactcctggcctcaaatgatccacccatcttggccttccaaaatgctgggattacagacgtgagccactgtgcctgccccaaatcctgactttttctatagcatttaggagtattacaggactcactaataatatcaaaaatgaaattaggtaacacatgtaatgaaaggacttttgcttttggggaaaagcaagggagcttcataccttgaagagtgatgcttgtgaagtttattacttttttgcagagggcgacggcctccctgccttccccgcaccgcgctccccccagcccctgcccatcgagatggtcatgtgttcattgaacggagacttaccgagcatccaccacgcctaggtcttaagtgtaggcagaagccttcaaggcaggcatgctctttcctctgtgggctggggcttggccgtgagcccactcctgcagctcctgggaaatgcaggcagcgtccacacggggctggacttagccagacctaaggcacagtgtgggtggagagctcattcacaatagcaacaaaaatgtgagaaggaacttgtaaaataaaggatggattcataggccatgcgaggagaagaaggctcgggctcagcagacagtgaagtccgtggagaggtgggcccttccccagagagaacatggaaggtttagcactgcagagatgtctgctgtcacccagaatgacacgggaacttaaccaactaattaatgtataacagtagtatagctctgaatgggtttggtgggttttgtttttgtttgttttgaggcagggtctcgccctgggtcccaggctggagcgcagtggcaaaatcatagctcactgcagccttgacttcctgggctcaagcaatcctcgtgcctcagcctcccgagtagctgggactacaggcgtgcaccaccacacccaattaatttttaaaatttttggtagagatggggtcttgctgtgttacccacgctggtctcaaactcctgggctcaagcaattctcccgccccagcctcccaaagtgcagggattacaggcataaaccaccaccctagcctcgttttgtatttttggaagttgacagattttaaactataaattggtgaggatacttaacagatgtgaggaggagaaatggatgggagatttatagtaaagctgtcaacgtacacgggtggaaacattcccacggagtaacagaggcgcgacctggggatgcgcacggagcatgagatgtgagctggagttagggcactgcatatgcggaccggagcgtgttggtcagggtgtatacacgggtgtggaaagtggggtgtctagaccatgggctcagcatttgggtaaaacacacacactccactcaccccagtcacacacaccccccgccacacataccccactcacacataccccactcacaccactcacacacacccccacaccccactcacaccactcacacacacccccacacataccctccacacacacataccccactcacaccactcacacacacccccacacacaccccactcacacacacctcaacacacataccccactcacaccactcacactcccccccacacacataccctccacacacacataccccactcacaccactcacacacgcccccacacacacaccccactcacacacacctcaacacacacacacaccccactcacaccacttacacacccccaagacaaacaccccattcacaccactcacacaccctgcaacatacaccccactcacaacactcacacaccccccaacatacatacaccccactcacacacacaccccaacacacacatgccccactcataccactcacacaccccccaagacaaacgccccactcacaccactcacacactgccaacacacacagccaactcacaccactcacacacacccccaacacacactccccactcaccccactcacacacaccccaacatacgcaagtcccactcacacccatctcatactcacactgaaacacacagtggtcccttgttgcccacagggggtcggttccaggaccgcggaggacgccaaaatccaaggatgcccagtcccagatatgaaacggcgtggcattggtacataacccacagcatccgcctgtacacttaattttttattttttttattttttgagacggattctctctcttttgcccaggctggagtgcaatggcgtgatctcggctccctgcaacctccgcctcctgggttcaagcgagtcccctgcctcagcctcccgagcagctgggactataggcgcctgccaccacacctggctaatttttgtatttttagtagagatggggttttgccatgttggctaggctggtttcaagctcctgacctcaaggaatccgcctgccttgacctcccaaagtattgggataacaggcctgagccactgaggccggcccccgacaccatgcactttaattcatctctagattccttaccacaggcatctgtatgacatagatgctgtatgaacagttgctacacggtgcggtgttgctctttgtgttctttgttattgttgtctcgttattttctgttttcttccccagtattttctgtctgtggttggctgaatctgtggctgcagagggccgactgtataccagcttgattcaatattttatttttattttttatttattattgttattattttttgagatggagtctcactctgtcgcccaggccggagtgcagtggcacaatctcggctcactgcaagctccgcctcccaggttcacgccattctcctgcctcagcctcccgagtagctgggactacaggcgcccaccaccacgcccagccaatttttttgtatttttgtagagatggggtttcaccgtgttagccaggatggtctggatctcctgaccttgtgatccacccgcctcggtctcccaaagtgctgggattacaggcgtgagccactgcacccggcctattattactatttttcaaggcagagtgttgctctgtctcccaggctggagtgcagtggtgcaatcttggctcactgcaacctctgcctcctaggttcaagtgatttctcctgcctcagcctctagagtagctgggattacaggtgtgtgccaccacgcctggctaatttttgtatttttagtagagatggggtttccccatgttggccaggctggtctcgaactcctgacctcaggtgatccgcccgcctcgttctctcaaagtgctgggattacaggtgtgagccaccacgcctggcctgattcaatattttaatgtaaaacagcatcctaaaagctctagaaaatgtagggggatatttataaaattatgtaaatacttctaagcctcaccccccgtaaaattataaataccgctatggttatgtagttcgagattctgggtcaaagaagactatgaaactgttcaatggaaaagcagacagcaggaggcactggcagcacagggcgcctaccagggcactcggccagtcctcaccgagaagtaagtggtccctaactcagggccaggtggcagttcacacgggaagagctgagggggtgagcctggggctgctgctccgaggtgtcagccctgcaggtgtgatgatgtcagatggttggttttgtttctattgaaaagaggttctgggatggcggcttgagggcagtggtcttccaggaactggatcacggtccctccaagggtctctcctgcagttgcgtctgcgcttactgcagtctttccacagccccgtgttgtgggcagagggagtgaggccaggcctggctcctgcctccagcctccccgggctctgcccaacctccgtgtgctgctgctgctgtttcttcctggctggccactcccctcctgcaaggcaggccctggggaggggtgctggcagctgttcctaaggtctgagccctttgctacatcaaggaaagaagcggtagggggcctgcatcttccatgctggtgggaggtggggggtggtcaggggcctgcctcagtgggctcctcctgttccgggctgtgactcggcggtccagagcctcaggattctccgtctatttctgccagagcctgattatgtcatcgaagctgctagagcatccatgaccttggcttattttcaactttcataattagggaaaaacttaatttgaggtttgattattttaaccattagaaatctttgggtaatggccaggcacagtggctcacacctgtaatcacagcactttgggaggccgaggtgggtggatcacctgaggtcaggagttcaagactagctggccaacatggtgaaaccccatctgtactaaaaatatgaaaattacggccgggcacagtagctcacgcctggaatcccagcactttgggaggccgaggcgggtggatcacctgaggtcagttcaagaccagcctggccaacatggtgaaaccccatctgtacaaaaatacaaaaaaaaaaaaattagccgggcatgatggcaggtgcctgtaatcccagctacttgggaggctgaggcaggataatcacctgagctggggaggcggaggttgcaatgggctcagatcatgccattgcactccagcctgggcaacaagagtgaaacttcgtctcaaaaaaaacaaaaacaaaaacaaaacaaaaatagctgggcgtggtggcatgtgcctgtaatcccagctactcaggaggctgaggcaggagaatggcatgaacccgggaaacagaggttgcagtgagctgagattgtgccactgcactccagcctgggtgacagagtgagactccatctcaaaaaaagaaaaaaaaaaaagcctttgaattgcaaataatggaaagcccagctccacctttctaatcccattgaggaagtttattatggacacacctgatgagccccgagcctgtaggtgaggcttggtgcaggcgtctccggccctgtctactctgccttccggacggctcccccactgagcctctcatcagctgtttcccgttactccctcgtgccacacagtggcttcccctgtgatccacctgctactctgtccttcaggggacaagacagcgcctcctctggtgattgattcctctggagagaggaagcgcttcctcaaatctcattggctctgattggctcacaggccaatcccccagtgggtccctatggccaggatgatagacatcagtggttgacaccagcccacgcacaagagctgcccttggggctagagtaaggctgatgttactcaaaccatgcagccgataacagggagagccaagggaccattccccaggatgggccatccagcgctgtcaccaggtggccacaaacacctgctgtgtgtggacagtgaccatgaccacagcatcactgatgggggccttgcgtgtaccaggcagtgtcctacaactctccgtgtgctttgtcccatttggtcaccctcagtgatgctctgatgtggacacatctgctgtctccactttaaagatggggaaactgaggcccacggtggctcagtgacccacctggggttgcccagccattgtagcatggggtgagctggatgggaactcaggcaggccctctaaacccagcccagacgccactgcatggcagccccggaggtaccaggcagctggccgggcagggacggcgtcatcgcctctccgaggggaggctgtcttcagggctgggaccccacctgccaggtctcctcagcacactgaggacgatgggtgcctgcagtgaagggttgtgcagcacctgcctgtttcttgacggcctcttgcttccccctctcagcaggtcccccggcagctgaccagcctgtcattcagaggctgatacctgctgatgacgccactctacagtgctgggccccagccccagactcttcttctgcagctgcttctgcagttgcttttttttttttgtgagatggagtcttgctctattgctcaggctggagtgcagttgcgtaatatcggctgaccgcagcctctgcctcccgggttcaagcaattctcctgcttcagcctcccaagtagctgggattgcaggtgcctgccaccacgcccagctaattttttgtgtttttagtagagatggggaggatctcaccatgttggccaggctggtggcgaactcctgacctccagtgatccgcctgcctcggcctcccaaagtgctaggattacaggcctgagccaccgcacctgacctattgttttatttttgagatggagtctcactctgtcgcccaggctggagtgcagtggccagatctcagtgaggccctgttttagagtcagcctgcgctgggagtgagtctcctctgtccacacccaaacgcaccaagtgtgccatttcagcagtggtgcttgctccctggaatgggaccaggtgctctcagcggtgtggtgggttggtggcctggggttggtgtcggacgcaggccggtgttggacgcaggccgagcgggaggctggagccaagctgtggcctggggagatgttatgggtcggagggtcggggggtgggggcgcctcctgtgctttgtgtacactgagcatgggtttcctctgaatttaaaaaggaggagaaaatcggaatttctggccctggttctggcaggaagtgtggccatgtgtgatagagaaggggttgcagtgtcggcctggcctcctggaagccctgggatgcagccctgtccagctgcggcctcgtcatgccctgggtgggtgggaacgcagcctcctccttgggccacacaggggccgaccgtcagccgaggggctcctgaagtggcagtgatgggatcctgtggcgcttcctcatccccttgttaccagttgctgaggagagggtggattagcccctgggctgcacctcagtgtgtgcaggtcttcccaggtatgtgggtgcaggaggtggggggcgtggagtgggcacaggttcacacctgctgcctggcagtttggggccctcatcacacaccaccaggtttcaggggatctacaagtcactttcctgtactgacctgatccacacgcacccctgagtactgccccctgggagatgcctgtggggtcccagggtcctggcagcctcctcccaccagccgcagtcctggttccaaaatggggaccgtacacctgaacctggatgtgcctttgagcctggctgtgcctgctgagggtgcggtgggagctgctactcattttttagtctcatccttctcatttcaaattttatgtacgaaatatttttatagaggtgcataaaacgtggaaagcctgtgtgtgctttctaatgttcaaaaccaggccaggcacggtggctcacgcgtgtaatcccacactttgggaggccaagatgggaggattgcctgagcctaggtgttggagaccagcctgagcaacatgggagactctgcctctacagagcattttttaaaaccagctgggaatggtggttcgcgcctgtaatcccaggaccttgggaggccgagatgggcagattgcctgagcctgagatttcaaaaccagcttgggcaacatggtgaaaccccgtttctacaaaaaacaaaccaacaaaaaattagctgggcgtagtgatgctcacctatagtctcagctactcaagaggttgatgggggaggatcacttgagcccaggaggtcaaggctacagtgagctgggtttgcaccctgcactccatcctgggcgacagagggagaccttgtctcaaataaataaataaatacaaatccatctcagtggatgtccaataagcagtgagcccgtgtgagggtctcagcccggccgtgaccgtgccgagtgtggcgagcgcttcaaggccacttgccccgaccctgcccaccccccacttttgtttcttaatttcattctttccaggaaattgcagatttaacagatgttaggtactttggtcgagccaagcttgatgtagttgaggaacggaagagaaagttggagggaaacacgggctagagtagagtaaatctaagaaataaagtgagtgtctctctttctgtttagagcaaaaagaagaaaaggaagaagaaaaagaaggggaacaagtccgcttcctcagagctggcttccttgcccctttctcctgccagcccctgtcacctgactttgctttcaaacccgtggcctcaggacacagccctgccccacagccaagcccagcagagtggccccactggccagccgagccagcccccaggcacagccaccacgccactggagggtgacggcctctccgcgcccaccgaggttggcgacagccccctgcaggcccaggctttgggagaggcaggagtggccacaggaagtgaggctcagagcagcccgcaattccaggaccacacggaaggggaggaccaggacgcttccatcccctctgggggcagaggcctgtcccaggaggggaccggtccccccacctctgctggtgaaggccattctaggactgaagatgctgcccaggagctcctgttgcctgagtcaaaaggaggcagctctgagcccgggacagaactgcagaccaccgagcaacaggcaggggcctcagcctctatggtgagtcatccgggagagatggcctgggagtggcactgagccctcggcacctgggctctgctgcaaggtgctggcgttgcttccctgccggggggaggggcgtcctctgggccctgctccctgggtgggagtcggagggctgcccctccactggggatgccagcccaccctgtccctcggcttgtggcagatgctgccccttaaaccattgagtcggagtcaccctggcccattttgtcaccttggctctggtgtttggggtctttcaggcagttgatgctgtagctgagccagccaatgcagttaaaggggccgggaaggaaatgaaagagaagacccagagaatgaaacagccaccagcaaccactcctcctttcaaaacacactgccaggtgcgtctccttcctgcctgccggctccaggaggccctctcctgcccacggctgcgcctctttcatttaattattcagcaaatatttaagtgctggggatatagccatgattcagacaaagctctggccttcggggtgctcacattccagcggagagagagtcaggaaaccgacttcagcggtgagaagagcgtggagggagggagagagggcacccaggtgggccccgaggtaccatggcacccacagcccgagtggccgggcgaggcctctcttaggaggtggtgagggatggtccccggaggtgtctgggaaggtcatgtgcagaggccctggggcagtgtggggtgggcctgttcccagagcggcagggacgccagtgcccccaggaggagttgggggaggagaggccaccaatgaggctggagagaggcgcctctggaggctgtgattagtggccccagcggcactggaaggtcccgagcggggaagggtcgtgaacattctggccgctgtaagaagcatcccctgtaggggtcaatgtggaggctgggccaggcgcggtagctcacacctataatcccagcactttgggaagcccaggcgggtgcatcacctgagttcaggagttcaagaccagcctggccaacatggtgaaaccccgtctctactaaaaatacaaaaattagccagccgtggtggcatgtgcctgtaatcccagctactcgggaggctgtcgcaggagaattgcttgagcctgggaggcggaggttgcagtgagctgagatcgcagtactgcactccagccttggtaataagagcgagactctgtctcagaaaaaaaaaaaaaaaagaaaatgtggaggccggccttcaaggtcagggtttggttccttgttccaggaagctgagaccaagaccaaggacgagatggctgctgctgaagaaaaagtcggtaagaatgaacaaggggagcctgaagacctcaagaagccagaggggaagaacagaagtgcagctgctgtgaaaaacgagaaggagcaaaaaaaccaggaagcagatgtccaggaagtgaaggcaaggtagggatgcccccgcaggggagcaaaggagaccctgcctgagagcccggcacaccctctccctgcacaactctcaggggatatccaggctgcccttctagtcagctgttttggcaagtttaactttgggggaaaaggggaccacttaggaggtggaggggggtgggcacctgtgccagtttcttgtttcctaatagcccctggggtcctggagccagcgtgggcctttgggaactcaggagaggggctgttctggcccagacacctgctggtgcctcccgccactgtccccagcacttcagaggtgggcagggagtggccacctcttcttcctccattttggaggcagtgaagagagacctccatggggggtggtgtgtcacacgtggacgtgcttgcatgtttgctagggtgtgataatgtgcattacgaacacaaggaccatgtgcctgtgtgtgtgcatgtgggtgtgtgcgtgtgcgttcacgtgtgtgtgcgcacgtgtgtgcgtgtgcatgtatgtgtgcgtgtgtgagtgcgtgcacgtgtgtgcgtgtacgtgtgcttgtgtgtgtgcgtgtgtgcgagtgtgcgcgtgtgtgcatgtgtgtgtgcgagtgcatgtgtgtgtgcacgtgtgtgtgcgcacgtgtgtgtgtgcgcgtgtgtgcatgcacatggcaggtggacagatctcacgggaatcagatttctgttttggttttccaccagcacgctgagcccgggtggaggagtcaccgtgttcttccacgccatcatctctcttcatttcccattcaatcctgacctccataaagtcttcatcagaggaggagaagaatttggggagtcaaaatgggacagcaatatctgtgagctgcactacaccaggtgagcgtgtctgtaggcttgggaggaatccctcagggaaggcataggatgcccagcctgtgacacgtagtttaaaaaaattttgttttttttttttctgagacggagtcttgctgtgtcacccaggctggagtgtggtggcaccatctcagctcactgcagcctccgcctcctgggttcaagcgattctcatgcctcagctcccaagtagctgggactacaggtgtgtaccaccacgcctggctaatttttgtatttttagtagagacggagtttctactaaatgctggctaggctagtctcaaactcctgacctcaggtgatccgcccgcctaggcctcccaaagtgctgggattacaggcatgagccactgcgcccagcctttaaataatttttatccagtgagttgatgacattcttcgggttctggaagatgaatatttcagacagctcttcctggccatgcattttggtgtcatattccatcatggacctttttctttttaaaagtattctttctttctttcttataatttttttttttttttttagagaggggatcttgctctgttgcctaggctggagtgcaatcatgactcactgcagcctcaatctcctgggccatcatgcccagctttgtttatctgagacagagtcttgctctgtcacccaggctggagtgcagtggtgggatcacaggtcaatgcagccttgacctcctggactcaagaagtcctcccgcctcagcctcccatggtgttgggatttcaggcatgggccactgaacccagccttgccacatcaacttatagctttgcactccatgctacgtttgagaataactaaaatttccggggtaggaattttggatagccaaccgtatcctgttcattcacagagacttgggtcatgaccgcgttcttgttgaaggcattgtctgcatttccaagaagcacctagataaatacattccttacaagtacgtcatttataatggggaatcttttgagtatgagttcatttacaagcaccagcagaagaagggcgagtacgtcaaccgctgtctgttcataaaatcttcacttctgggctcaggaggtaagtcgtggcagcaggctgtctgctcacccctccggagtgcaggtgccaatcccgcggtactggacgcgtctctctggagagcacagactttgcctgggcagtgaggtcctctttgctctgcattgaccccgccccagcctccaggttcagtgacactgactctgggttgtgtctctggttggttaaagatgtgttggcttctcctttgagctcagtgtgacttacctactcacttgcaggaggaaacatgcaaaggactttttgtttgtttgttttctgagacagagtctgtcgctcaggctggagtacagtggtgcgatctcggctcactgcaacctccgcctcccagggtcaagcagttctcctgtctcagcctcccgagtagctgggattacaggagcctgtcaccacccccagctaacttttgtatttttagagagacagggtttcaccatgttggaccttgacctcaggtgatctgccctcctcgacctcccgaagtgttgggattacaggtgtaagccactatgcccagccagaaaggatttttaattaagggaaaggagagaaaacgaagccagaagaagggctgcggctgggaacagaggggcagcaaaggcctgggagctgggtcagggacaagtgcagtgaccaggaggccactgggacttgtcccttctctagagattttcagatggttgactggagatgacatccagagccccgtctgcaggctcctgctggctgtcatcctcagcacatcagcccctctgcccatctgtcaatagacgcgggcgcttcccttctcgcagagccctctgcgccccttcatgcctctctcgggggtcccccacctgggttctctgtctgcaaacttgacagacagagatcaagacttgactgtgttgatcacctggactcccagtgccgcctcctcacctggggggtcctgggcttcccctcgctccccctccctgcacagtgaccctgaaactcaaggaagtgagctggggtcaactggttgttgctttcccttggcaaccagggcctccctgccccctggtgtccggtgtcttggaaacagttgttttactgtttatgttgttcatgtgttgttttaggcagatacagaagaatgtaaatttagtccctgtcactccaccttggacaaagacagaagtcctaagaactttatagagtatatattttttcgtttttgtaaacatatatatatattttttttctgagacaggatctcgctctgtcacccaagctggagtgcagtggcacgatctcggctcactacagcctcaaccaccagggctcagctgatcctccccctcagcccccccaagtagctgggcctacaggcgtgtgtcaccatgtctggcaaatttttcatatattttttttggagagactggtcttgctgtgttgcccagtctggtctcgaactcctgggctcaagcaatccgcccatcttggcctcccaaagtgctgggattaagacgtgagccactgtgcccagccaaacatgatttttactagctagagagtgtactctgagaacataagctttgaaagaataggcattagtccggtaattccatatataaatacatttaaatatggaattctatatatataaatatggaattcctgctctgataaatgccatggcattgatggctcggttaaaagggcacgtggtggctgggcgtggtggctcacgcctgtaatcccagcattttgggaggccgaggcgggcggatcacgaggtcaggagatcaagaccatcctggctaacacggtgaaaccccgtctctactaaaaatacaaaaaaattggccgggcgtcttggcagcgggcgcctgtagtcccagctactcgggaggctgaggcaggagaatggcgtgaacccgggaggcggagcttgcagtgagccaagatcgtgccactgcactccagcctgggcgacagagggagactcagtctaaaaaaaaaaaaacatgtgataggggatttgacctggaggtcggcagaagcttccacaaggaggtgatgaccgagttgagaactaaacagttgcaggccctgctgggcccagggtgcagagctggggtgggcgggcctgccagtctagacaactgtgggtcgaaagcatggcagggggctgaggaggcctgtccgggcgcttcccatttctgcctgatttttacttctgtttgtaggtcttcacgtggcctctgaccctgtcattgacatcttgggttttctaattattttacagtcaacctcactgggttttctgcaatgaggtctgcactcatatcgtttgcaatggagcctaagaacagtcacgaattcagcccttgccctgtgtcagccaccatgccaagggccatctgtgccagctgggcagcctgcaccttcctccaggggctgtgtcccgttcctagtacagaggaaaccaactcagtgattgaccaggacagtgctcacttgctagtggggggatgcggtttctgtatgacacattccacctccttgtgatgatgtttaaggaagttgttgatcaagtttgctgagctacatagttagagatccgttgcaagtctcaggcccgctgcatcccatgaccctgggctttccactcattactgtgggacgtctaggatgtctgtttgcacggggctggcctcagatgagaagtcagttggaggagtctggctgtcgtcagtgtgtgggtttttgcttttcccttcctcccttcctctgccccatttactccatatctgtaccagtcgtgatcagccttctaggctagtgtctaggtctccagggttttgatggtcttaggtaggctcttgttccttctgtccctcttagactggcatcagtactatgacatagtttatatgaagcctcatgggagactccagaaagtcatgaaccacatcacagacgggccgaggaaggacctggtgaaggggaagcagattgccgctgcgctcatgctggacagcaccttcagcatcctgcagacctgggacaccatcaacctgaacagcttcttcacccagttcgagcagttttgctttgtcctgcaacagcctatgatttatgaaggacaggcacagctgtggaccgatttgcagtacagggagaaagaggtatcaggcttgccaccagctgctctacctgctgggcaggagccacacctgacctgctagtggccggatgaccccttgactctgtgggccaggttgcaaatgggaatgtgtagaactttccagccttttctcctaccactgtctcttgggatttctctgccctcccccattttcctccttttactggttgtaatctcagccccaccccagcaccagtcctgagtcctcccctggccttggagggagagtggaaggaacggggcaccctctgtcactgcacctttacccacactgcggtgcagcctgggtgggtttcaggccggcctggagctgtttctgagctgaagctgagccctgatgagcctcaggggccctgcctgagccctcatgccagggtcttggctgcactgcagctcctcctgtggctctcacaggtgtggtggtggggcacggatggggtctgctgccctagctgtggtgctggggcagctctggacactgccggtgaattcaagtccatggttcatgcatcttcctcttctcccaccatcaggtgaagagatacctgtggcaacatctgaaaaaacacgtggtaccattgccggacggaaaaagcacggactttttgcctgtggactgcccagtgaggagtaaactgaaaacaggcctgattgtcctttttgtagtggaaaaaattgagcttttattagaaggcagcctggactggttgtgtcacctcctaacctcagatgccagctcaccagatgagtttcaccgtgacctaagccacatccttgggatacctcagaggtattattattttttgtcaaaatgttttttatagctattataatgattttctctgattgcaaaaataagtgcttgactagagtgactgaaagcacacaggcaagaaataaaaccacccgtgattttaccactcactgtggtcatgtcagtagtttttcctagcatctgtcttatttttattatattctgtcctctgttgaattccctgccttttgttttccccccagacggcgtctcactctgtggcccaggctggagtacagtggcgcaatcttggctcactgcagcctccacctcccaggtttaggcaattctcctgcttcagcctccttagtagcagggactacaggtgcacactaccacacatggctaatttttgtatttttagtagagaagggttttcaccattttggccaggctggtttcgaactcctgacctcaagtgatccacccacctcggcctcccaaagtgctaggattgtaggcgtgagccaccgtgctgggtctgaataccctgctttttgaagcttcgtgtggtatcatgagcagcctctgtgtgcgcgtgtttaggaggttgtggcgtgacgccagcctgaactcatcccctcaaggacatctgcagaagcagcgtgaatgttctccccatgcccctgcctgtgccgtgtctagttcaggaaacacagtgtgactgtcctgggcctgaaatgttcagtggtgagaaggcgatggcctttgacttggtacctgctcagaccccactgagctctgcactctctctgcgtgtgttgatttgaacgtgagaatgacattaggtagcctttcctgaccagcatgtcttatcacgacatctgcctctcagttttacacatttatttatttgttgttttgagacagtgtcttactctgttcccccagtctggagtgcagtggagcaatcagctcactgcagcttcagcctcacagactcaggtggttctcccacctcagcctcctgagtagctgggactgcagatacacaccaccacttccagctaatttttgtatttattgtagagacggggtttcaccatgttgccacggtggtcttgagctcctgaccttgtgatccgcctgcctcgacctcccaaagtgctgggattatagacatgagccactgtgcctggcctggttttacaaataaaaaacaaccaaataaacgccgcacattttgacaaagaggaggagtggaggcaaaggcaatgtacagagttagtgccggggcttaaagtatgaggaatcattaatatcttttgactgtaggagattcaccatgtattgtttataggctcaacccttacgtttaaaaagttgttttggggccgggcacggtggctcacgcctgtaatcccagcactttgggaggtcgaggcaggcggatcacaaggtcaggagttcgagaccagcctgaccaacatggtgaaacactgtctctactaaaaatacaaaatttagccgggcgtggtggtgcatgcctgtaatcccagctactcaggaggctgaggcaggagaatcacgtgaacccaggaggcggaggttgcagtgagccgagattgtgccactgcactccagcctgggcgacacagtgagacttcatctcaaaaaaaaaaaaaagttgttttggccgggcattatggctcacacctgtaatcccagtgctttgggaggctgaggcaggagggattgcttgagccaggagttcaggatcagtctgggaaacaaaaattaaaataaaaaatagagccggccaacacagtgaaaccctgtctctacaaaaaatacaaaaaactagccaggcatggtggcgggcacctgtagtcccagctactcgggaggctgaggcaggagaatggcgtgaacccgagaggcagagcttgcagtgagccaagatcgtgccactgcgctccagcctgggcaacagagtgagactccgtctcaaaaaaaaaaaaaaaaaaatgtagctagctgggtgtggtggtgcacctgtaattccagcactggagaggctgaggcaggaggatcccttgagcccaagagttcgaggttataatgatcgcaccaccgcgctgccttgatgacagagtgagactctgtctctaaacaatgaaaataaattttacaagttgctttatatttagatttactgttgccagatggcctgggttcaaaccccagctctgtcagtcaggaccctgcgttgactacttagccaggacccctgcttctgagatccctcccctgtcctgggagtttgttgtggggattcggtgagggcctgcaaaggagctgacgccctaggctgggggctgagggaagccctgtctcctgcgtgagttaaactctgctcagccacgcgcggtgctcctcttgctctgtgtgcacggtgcttgcttcctgttgggactccagactcccagggagatgactccctggccagctcagctcactgcgggatctttattcccttccagctggcggctgtacctggtgaacctgtgccaaagatgcatggacacaaggacgtacacctggctgggcgccctgcctgtcctgcactgctgtatggagctggccccgcggcacaaggatgcctggagacagcctgaggacacctgggccgctctggagggactctccttctcaccgttccgggaacaaatgctagatacgtaagtcgtagagttgtgcttatctacatgaatctgggaagactgactcctacattgtgcacccggagtcccggtgggctctgcagtgactccattcctgattctaatgacagaactaacacacgctcttttaacattttaagacatcaaaactgtcaagaataggctgtgcacagtggctcacgcctgtaatcccagcactttgggaggctgagacgggtggatcacctgaggtcaggagttcgagaccagcctggccaacatggtgaaaacccgtctgtacgaaaaataccaaaaaaaaaaaaaaaaaattagccaggtgtggtggcatgtgcttgtaatcccagctactctggaggctgaggtaggagaatcactagaacccgggaggtggaggttgcagtgagctgggatcatgctactgcactgtagcttgggcgacagagcgagactctgtctaaaacaaacaaacaaaaaactatcaagaatacagaaacaacttgtaacctcagaggcagccgttgttagcacggtggcatacctatttgtggttttgtccaaatatggattcgtgggtgttttatgtacttaaaagaacaacaacaaatgatgtgttatttattctggtttacaacctgatttttcctcttaacagtattttgtgaaccattttttccatcagcaaattcttgtctatgtcttagcgttccagccagagagagtgccagccttgtattgagccagttctctgttacaggacatttggttggttgtgcagtttcgttttttcagcgtgctttcataagcatccttagctttctctgtcccataacttcattgagatagattcctacaagtggaactgctaggtcaaaggcattgtgaactctaaaccatttatacctttgcataatgctggcttaaaggagaggaatattggcaatatatataatcctgatctctgattcaaatataatgacctctcctttatcacaagaaaatattaccagagaaagtttatttatttatttatttatttatttatttatttttaacttctaagttcaggagtacatgtgcaggtttgttatatagataaacttgtgttatggagtttttttgtacagattatttcatcatccaaatattaagcctagtacccattagctatttttcctgatcctctccctcttcccatcctccaccctctgataagccccagtgtgtgttgttcccctctatgtgtccctgtgttctcatcatttagctcccacttacaagtgagaacctgcggtatttggttctcgttcctgagttaatttgctaaggataatggcctccagctccatctatgttcctgcaaaggacatgatttcattcttttttatggctgcatagtattccatggtgtgtatgtaccacattttctttatccagtctactgttgatgggcattgagtttgattccatgtctttgctattgtgaattgtgcttcaatgaacatacatgggcatgtttctttataatagaacgatttatattgtttttggtatatacccagtaatgggattgctgcggtgaatggtatttgtggaattgccacactgtcttccgtaatggttgaactaatttacactcccaccaacagtgcataagcattcctttttctccgcaacctcaccagcatctgttatttttttaccttttaatagcagccattctgactggtgttaagatggtatctcactgttttttttttttaagagacagagtctggctctgtcacccaggctggagtgcagtggtgtgatctcagctcactgcagcctctgcctcctcggcacaagcgattctgctgggattggtagtgtgcgccaccacatgtggctaatttttgtctttttagtagagacagggttgcaccatgttggccaggctgttcttcaactcctgacctcaagtgatccacctgcctcggcctcccaaagttctaggattgcaggcatgagccaccacgcctggcctcattgtggtttttgttttgttttgtttgagatggagtttcgctttatcacccaggctggattgcagtggcacaatctcagctcactgtaacctctgcctcccaggttcaagtgattgtcctgcctcagtcttctgggtagctgggaccacaggcaccccaccatgcctggctaatttttgtatttttagtagagatggggtttcaccatgttggccaggctggtctcaaaccccagacctcaagtgatccgcccaccttggcctcccaaagtgctgggattgcatgtgtgagccaccatgcccggcctcattgtgattttgatttgcatttctctaatgatgagtgatgttgagctttttttcatatgcctgttagccacatgtatgtcttcttgtgaaaagtgtctgttcatgtcctttgcccactttttaatgaggttgcttgtttttttttcttgtaaatttgtgtatgttccttatagatgctggatattacacctttgtcagatgcatattttgcaaaaattttctcccattctgtgggtcatctgtttactctgttgatagtttcttttgctgtgcaaaagctcctcagtttaattagttcttatttgtcaatttttgcttttcttgtgattgcttttggtatttttgtcgtgaaatctttgcccattcctatgtctagaatggtattgcctaggtctgggcaaagattggagaaaaattatggagaagtccttaaaagcacaggcgacaaaagtaaagtgagataaatgggattacatcaaatcaaaaagcttctgtgcagcaaaggaaactatcaacagagtgaagagacagtccacggaatgggagaaaatatttgtcatctacacgttggatagggggatttaaggaactcaaacaagtgaacagaaaaactcagatctaaaaatggacaaatgagttgagtagtcatctaaaaagaagacacacaaataaccaacaggcatatgaaaaaatgatcagcatcattaattagggaaatgcaaatcaaaaccacaatgagatatggtcttacccaagttagaatagctgtgatcaaaaagacaaaaaataaatgccagtgaggatgtgggaaagagaaactctcatacagtgtaggaatgtaaattagtactgccactatggaggacagtataaaggttcctgaagaaactaaaaatagaactactgtatgatccagcaatcgtactgctggggatatatccaaagtaaaggaaatcagtatgttgaagagatagctgcactcctatatttatcgtaacactcaatagccataatatggaatcatcctgagtgtccacccgcagatgagtggatgaagaaagtgttgtctatatacacagtagaatactatttggccaccaaaaagaatgaaattctgtctttcgcagcaacatggacaagcttggaggagattacgttaagtgaaataagccaggcgcagaaagagaaatactgcatattcccactcatacgtggatgtgaaaagagttgatcttctagaaggagagagtagaatagtagttacgagaggcgaggaaggatggggagagggctagccaaaggttggctagtggatacaaaagtatggctagataggacgagtaagttctagggtcctagagcagtatggaacgactgtaatttacaatttattacgtttttcaaatagctggaagagtggagtttgaatgtttccaacacaaagaaataaatgtttgagatagatatgctaattaccctgatttgtacacattatacactgtatgcatatatattgtatccatatatttgtacagattacagactgtatactttgtacatagtatacattgtagacatatttatatgtatatacagtgcataaaatgtattctctgtatgcatttgtatacattatgtattgtatacatatatagaaatataacactgttccccataaatatgtacaattattatgtgtcagtttaaaaataataaaagcagctgggcttggtggctcatgcctataatcccagtactttgggaggcccaggcaggaggattgtttgaggccaggagttcaagaccagtctgggcacatagtaaaacccagtttctacaaaaaaacaaacaaaaaaaatagttaggcatggtggggtgtacctgcagtcccagctacttgggaggcttacatgagaggatcgcttgagccagggaggtcaaggctgcagtggtagaagtccagattccctagaagttgaaataaaagcatctttattttcagattcttgacaggtaaccacaaactttctctttaagtataatctctctgaaatactgaatactgggttatttaatagaacagtcataatgaccacagattaacccttctaagcaaaatagattaatttattttggccttgaaatggtctttctcttattaatgtgctagaatgtattcattcattcactggatgaatacttgaagagcaccttccttgtgccaggaagtactactcaaggcacagcgtgtacagcactgctcaaaacagacagctgctcctggccttgtggagcttgcattctagctggagaggcaggcagttaatacatcagtaagtcctattgatgagagagctctggaaattcctccttcccctagcctggaggctcaggccacagaatctgctaaggtctgaaggtagggtaggagaacagaggtaatgactgcagcactctgggccttgcagtgagaacaagacagtgaccatccaattgggaaaggggctggagaactgaaagagacgccccctcataaagcatgatgctcagagcctgccaaatgccaaagactggggacagcagaaaaaatgaggcagttgctctgtgcccctggatcccaacttctgctaaaggcagtgttacggtcttgcctttagaaggcgtaaaagcctttggaaaccaattctattccttttcttttttcttttcttttcttttttttttttttttgagacagtcctgctctgtcgcccaggctggagtacagtggcgcgatctctggtcactgcaaccttcgcctcccaggttcaagtgattcttgtgcctcagcctcccaagtagctgggactacaggtgcatgtcatcacacatcacatgtggctaatttttgtatttttagtggagatgggttttgccatgttggccaggctggtcttgaactcctggcctcaagtgatctgcccgcctcagccttccaaagtgctgggattacaggcgtgagccacccactgtgcctggccagccgttgggaaccaattctaattaaagctacaacaaagctgtagttcatctaaactattaactcagcccctgataacagaagaggccactagatgatcaagagagaaaacagtcaatatagtcagacccatggatggtccatatttacctagaaaggctagatatagtagaaatatagagtaccttttattattattgctatttttatgtacttatctttaaatatcttgaaaagtctgcagtagcattgttcctaaagatccaatcgttcaggtaaaagtggcctttagtatgcagtgaacctttattgatatgtttttcataacttctgttacttctagggagccttgctttatttcttttccattgtcaacattttgggtctccagtactgtgttccagaatcagcattatttaagggccttcgctgagcccacttgggctgtttgatcctggacactcgttaataataattaagaggcttggctgggtgcagtggctcacacctgtaatcccagcactttgggaggccaaggcaggtggatcacaaggtcaggagatcgagacaagcctggctaacacagtgaaaccccatctctactaaaaatacaaaaaatgagccgggcgtggtggcaggcgcctgtagtcacagctactggggaggctgaggcaggagaatggcgtgagcctggtaggcagagcttgcagtgagccgagatcacaccactgcactccagccaaggcaacagagtgagactccaacacaaataaataaataaataaataataataataataattaagaggcttaattattggggtatatcccttttattgtaaaatatacataatctccagtttaccatgttaactccttttcaaggcacagttccctggcaccaagcacattcacactgctgtgtagccgtcagcaccatccacctcccgaactcagcttccccagctgaaactccatccccatgaaacacgacctccacactccccctcctcctggtaaccactgttctcctctctgtctctaggattttgacttctctggggacctcacgtgagtggaatcacacaggatttgtccttttgtgtctgatttatttcactgagcataatgtcaagattcatccatctcaatgaattctttttgtgtatttatttatttatttgtagagatggaatcttgctatgttgcccaggttggtctcaaactgctggcctcaagctatccatcctcctgctttggcctcccaagttgtggggattacagacatgagccactgcacccagcagtgaactttttttttttttgagacagttttggtctcattgcctatgctggagtacaatggcacgatcttggctcaccgcaacctctgcctcctgggttcaagtgattctcctgcctcagcctcccaagtagctgggattacaggtgtgcgccaccacgcctggctaatttaggatttttagtagagacgggatttctccatgttggtcaggctggtcttgaactcccaacctcaggtgatctgcctgcctcggcctcccaaagtgctgggattacagacgtgagccactgcgcccggcctgattttattactattttttaatattactgctccttgtagaacagggctaccccataggagcatgcccagaatggccagcagtgaattcttattccgtattctgaattctatattaagttaattctccttttttctttccttttttttttttgagacagagtctcactctgttgcccaggctggagtgcagtggcgtgatctcggctcactgcaatctctgccgccggggctcaagtgattcttctgcctcagcctcctgagtagctgggattacaggattacaggcatgtgccaccatgcctggctgatttttgtatttttagtagagacgcagtttcaccgtgttggccaggctggttgcaaacttctaacctcaactgatccacctgcctcagcctcccaaagtgctgggattcaggcgtgagccaccacgcccggccattaagttaattctcagtaggttgttctgtacttttcatttgattcactgcatatttttgttttccacatagcctttattttattttttaaagtagagacagggcctcactaggttccccaggctggtttcaagctcctgggctcaagtgatcctcccgagtcagcctcccaagtattgggattcaggtgtgagccaccacgcctgccctcaagtagtatttaaatcatttttgaattcgggactgtttctgtccctccagcattggtttcctccattttccctcactgatctcactgcgtctcttttctccgtccctatttctcttatgcaggagttccctacttcagtttatgagagagaagcagcatttgctgagcatagacgagcctctcttccggtcctggtttagtctgctacctctgagtcacctggttatgtatatggaaaacttcattgagcacctgggtcgttttcctgctcatatcctggactgtctttcagggatttactaccggcttccgggacttgagcaagtcttgaatacgcaggtttgtgtctgaagtcggctctggagtcctggcttagcaaaagcagactagataactaaacatggaaagctcaggattcttattcctaaaaaacagacagtgggctgggtgcggtggctcacgcctgaatcccagcactttgggaggccgaggcgggcagatcacgaggtcaggagatcgagaccatcctggctaacacagtgaaaccccgtctctactaaaaatacaaaaaaattagctgggcgtggtggtgggtacctgtagtcccagctactcaggaggctgaggcaggagaatggtgtgaacccgggaggcggagcttgcagtgagccgagatcacgccgctgcactccagcctgggtgacagagcgagactccatctcaaaaaaaaaaaaaaaaagaaggcgtctcatgtgatgcacttcgtagctgccattcttcctttcacattttttggtggagaaaatggtataagtttaaatcctgagttttatctgtaaaagaggtaagattagtatgtgagcaccttaaaatttgtttgtaggaagaaaacaatgtataccatattgatgttggatttttttcagctctgttttagcaatgacagtggcattgtgattcaatcttttgtcctgtttttctttttttctctgccttaggatgttcaggatgttcagaacgttcagaacattttagaaatgctgttgcgactcctggacacttaccgggacaagtaagtggaaagcacgatgcagtctctccctcacatgcggcccccgggggcttcctctgacccctataattggccgtgacccacatgtgctgttgtaacagcaaggtcataaattaatatgtggcccacttctcttctcaggttattaatattgtcgtctgtttttttttttttttttttgagtcagagtcttactctgttgcccaggctggagtgcagtgacgcaatcttagctcactacaacttctatctcctggttcaagtgattctcctgtctcagcctcccgagtagctgggattacaggcgcaccccaccacgcccagctaatttttgtgtgttggtttgtttgtttgtttgtttttttgagatggagtctcactcttgttgcccaagctggagtgcaatggcaccatcttggctcactgcaacctctgcttcccaggttcaagtgattctccttcctcagcctcctgagtagctgggattacaggcgcatgccaccacgcctggctaatttttgtatttttagtagagatggggtttcaccatgttggccaggctggtcttgaacttctgacctcaggtgatccgcctgtctgggcctcccaaagtgctgggattacaggcgtgagccaccatgcctggccgtctgttttttttttttttttttttttaaagggaaataatagatatcagctgctaagatttgggtttatctccccctgatcttttttcctatacatttttcccttacttgtaaatagtcatgatactgcatatgcctggtgggcgttctgcatttttttaatacttagtcagtttaagataaaaatcaaaggtagctttatataattatccaaaatcatttgctcctgcaaatttgtgacctctgataccctgaggggtcagcagacagaatgcagaaccactgaaatgtgccagtgagcgatgggatgggtgttgtctgagctgttctctgagcggctcgggcacttccagtcttcgttcacctcctttgttcacgtctctgccgatgttgatccagcacctgtgacttgaggatcccccccacaagctccctatctccccaccactgtgtgtcacattctcagcccagggagtcctttcttacaccgccttcccagtcccctccatcaactctcctcttaagctcctcctaagtgtcctcttaagtctctcctgagtcccctcctgagtccctcccaaggctcctcctgagtccctcctaagcctccttctgagtccctcctaagcctcctcctaagtcccctcctgagtccctcctaaggctcctcccgagtccctaccgagtccctcctaaggctcctcctaagtccctgctctgtccatgtgtccctcagaaaacacaaaacccaggcccggcagagctggagccaattccacacgggctgcacgctcttctactatttctttctcttcctccctcctttctgtttctttctgaatattttttcaaatttatgtcatattttaatgtctagtaataaacatcccttgccttttttcacatcttggaacgcactgaggagtgtttggacttgctttggttagaacagttgagactacagagacaaaacaagaggactttgcttcctttttatcttagtcacaagttcaggactgactgagattttccagacgttaacctagataaggtcaaacaaatgccctgttggtagttattttgaaggaaggagctagtcatcaatggtaaccattttctggcttctcctaaatccttgccgggatttctcttaactctttgcggggcaggattcccgaggaggccttgtcaccatcctacctgactgtgtgtctgaaactgcatgaagccatctgcagcagcacaaagctacttaagttttacgagctgccagccttatctgccgagattgtctgcagaatgattagacttctatctctggtggtaagtggagtcaacacacaaggtatcacacccgggataggtgcggaatttcaagcagcctcaatttggaaaggaaacagactgattcccgggtgctgggatgagatggagcggtggtttcagcagtggacatttcttgtgcacctgcttgatgctgggttctgttctgggtgtggggggtgtcagtgggccagggtctgcccttctgccaccttgggctttcctgggagggaggcagggagttaatgtgtggccatcagctggtcatggggaaaccagagagctggcgcaggggctgggggtcaggcaacgccacgcggagaagacgacttttcttttttcttgattctgttgtttgcagagaactacggggaccattttcctcccaaaaaatacatgtccaaacatggtctttcccaccttcttgacattgtagcttgaatacagtaacaaaggccatagcgccacacatctgccccccgctgcatgtcgtgtcccaggtctgatggcaggatgacccggctcctccgtcccaaagaaagccactgttgtgacttctcccatggatcagttttttttttgttttttgttttttgttttttaagacggggtctcactctgtcacccaggctggagtgcagtggcgtgatctcggcttactgcaagctccgcctcctgggttcacgccattctcctgtctcaacctcccaagtagctgggactacagacgcctgccaccacgcctggctaatttttgtatttttagtagagatggggtttcaccgtgttagccaggatggtctcgatctcatgacctcatgatccgcctgccttggcctccaaagtgctgggattacaggcttaaaccaccacgcccagcctcccatggatcagttttacctgtcttccagctttgacctttctgcctccgactttccccactcacccccatgtctctgagctctgtctgtgtggtgcagagatcggcaattccttctttcccgtctctgtgcagttttcacccacttgagttcatgagtttcagtttgaaagtgatgtaaggtttaatgtttagactgatcatttgtttgtttttttgagatggagttttgctcttgttgcccaggctggagtgtagtggcgccatctcagctcactgcaatctccgcctcctaggttcaagtgattctcctgcctcagcctcccaagtggctgggactacaggtgtgcaccaccacacccagctaatttttgtatttttagtagagacagggtttcaccatgttggccaagctggtctcaaacgcctgacctcacgtgatccacctgccttggcctcccagagtgctgggattgccgatgtgagccactgcacccagcacaattttttttttttttgagacagagtttcactcttgttgcccaggctgtagtgcaatggcgtgatctcggctcaccacaacctccgcctcctgggttcaagtgattctcctgcctcagcctcccgagtagctgggattacaggcatgtgccactaaacccagctaattctgtatttttagtcgagacaggatttctacatgttggtcaggctggccttgaactcctgacctcaggtgattcgcctgcctcagcctcccaaagtgctaggattacaggcatgagctactgcacccggctgatcattttttttaatcttacttcaagttagaactgtgacgttagtgatagaaaacaattaagtgtatgttttaactttcttcctttcagttttcttgtgttaaagtaccacagacacagtttaagaataaatgtcattggtgagatgatcacgttctctggagtggctgctatttaaaccgccacaggcagctgccaacttccacataaactgtgtttaaggaatttgtcagttacttaggatttattttctacagaaataactatcttaaatgttggctgggatctcagataagtttaatccatattatggacaaaatactctctacctgtgccataaaagcaaacaaacaaacaaaaaacctttgcaatactaaaattaaacaaagcaaaaatacgtgacgcatgttgaagaaacttttaggtgtctgctgctgtgaaggctccagggttgacggacacttggagaacaaggtgcccgtgtcaggctccggaggtctgtgcagcctctgagcggtcattcagtttgttgttattggccatcgctgtccagccctgtgctgctggattgttctagaaggagctgtgccattggggggaccttcagcagtgcctgtttcgttttctgtcggcccccgccccctgcgtgctgtgctctagtcactcctgtgcccagccccctctgcgggctctctttcacagcagcacctgcatcctggtccctcttacatgctttgaaagctcctgcctgtatcttcccgccctggcccttcccaggtatagtgacgctgtgttcccctgcctgctgtgggcttttcctctctcccactctcgggcagccccgcccagcagcagccttgtcctcttgcccagctgcctcgaggcgtgggcctctcggtgcttccagtgagcacctgagcgtatccaggttctgtggctcctgacacttgcacgatgtgcggggctgtgcttaaaaaaaaagatcacacacttggctgggtgtagtagctcacacctgtaatcccagcactttggaaggccaaagcaggcagataaccagaggttaggagttcgagaccagcctggccaacatggtgaaaccctgtctctactaaaaaatacaaaaattagccaggtatggtggcatgcacttgtaatcccagctacttgggaggctgaagcaggaggatcacttgaacccaggaggtggaggttgcagtgagccaagatcgcgccactgtactccagcctgggttacagagtgagactctgtctcaaaaaaaagaaaaaaaagaaaaagaaaagaaaaagaccacacattaatccaggactgtggggctcctcccaggaggaggtggccctgacccctgacctgtatgcttcctgggaaatgtgcttctggggaggacagagggaggaggaaggagagggaggaagaggaaggcaggggagagaagggaggcattacaggaggctttgagcccaggggaagaggggttttccctctggtctggtgggtccggcacggaggcggggggagagcatgatgggagcacagtgggaaggggacccaggtttacctccgggtcaggagcctggctgtggtctggcatggaggcagggggagggcatgatgggagcacagtgggaaggggacccaggtttacctccgggtcaggagcctggctgtggtctggcatggaggcagggggagggcatgatgggagcacagtgggaaggggacccaggtttacctccgggtcaggagcctggctgtctcctgtgtctaaggaacaggcccgggagtctgcagggcccctctctggggcgtgcttttccccctcagtctcctgggcacagcctggggacctgctcattggcaggacagaggctgcctgggctttcgggggagcacacagatgccgttccctccctccctcttttctcccgtatctcccacgttcagggtgaacccagaaaaccctggggaatggaagtgctttgggaatgtgggcttctgccaaggcctgtggtccctccatcgtagccactccttgagcagcctgtgccagcagggaggagaggagggggtgcagcatctcgccgggaacctgagtccacagccgaggatgactgaccctccctcttgtgtgacaacaggattctgcaggacagagagatgaaactggaaataattcagtccaaacagtcttccaagggacccttgctgctacgaaaaggtggctccgagaagtttttacaaagaacatgctcacatcttcaggtgcctcattcacatacgtcaaggaaattgaggtaggcatttggccgaaggcttctgggtagggatgtgactgatcgtgattcctcatggcctcaaatcatggggtacaggctgctggccaggggcagttgttggccttcacctgagcctcagttcttcatctacaaaatggagttgctcctgtctacctggcagggtggctctgaggcagacagatgccgggtgcaaagtgctgctgcactgcctcgtgtcccctggccgggcacagtccctgtggtgatggaggtgtggaggtgatggtgatggttggtggtggtggtggtagaggtgatggtggtggaggtgatggtgatggttggtggtggtggtggtagaggtgatggtggtgaaggtgatggtgatggtggacgtaatggaggtgatggtggtgatggtggtcatggaggtggtggaggtgatggtggtggtggaggtgatggtgattgtggtggaggtgatggtggtgatggtgatggttgtggaggtgatggtggaggtaatggaggtgatggtggtggtgaaggggatggtggtgatggaggtggtggtggtggaggtgacaatggtgatgctggtggtggaggtggtggaggtactggaggtgatggtggtggtgaaggtgatggtggaggtaatggaggtgatggtggtggtggaggtgatggtggaggtactggaggtgatggtggtggtgaaggtgatggtggaggtactggaggtgatggtggtggtggtggtgatggtggaggtggtggaggtaatggaggtgatggtggtggtggaggtgatggtggaggtactggaggtgatggtggtggtgaaggtgatggtggaggtaatggaggtgatggtggtggtggtggtgatggtggaggtggtggaggtaatggaggtgatggtggtggtggaggtgatggtggaggtactggaggtgatggtggtggtgaaggtgatggtggaggtactggaggtgatggtggtggtgtaggtgatggtggaggtgatggtggtggtgaaggtgatggtggaggtaatggaggtgatggtggtggtgaaggtgatggtggaggtactggaggtgatggtggtaaaggtgatggtggaggtactggaggtgatggtggtggacgtgatggtggaggtaatggaggtgatggtggtggtggtggtggtggaggtactggaggtgatggcggtcgtggaggtgatggtggaggtaatggaggtggtggtggtggtggtggtggaggtactggaggtgatggtggaggtaatggaggtgatggtggtgatggtgatggtggaggtactggaggtgatggtggtggtggtggaggtaatggaggtgatggtggtggtgaaggtgatggtggaggtaatggaggtgatggtggtggtggtggtggtggtggaggtaatggaggtgatggtggtggtggtggtggtggtggaggtactggaggtgatggcggtcgtggaggtgatggtggaggtaatggaggtggtggtggtggtggtggtggaggtactggaggtgatggtggaggtaatggaggtgatggtggtgatggtgatggtggaggtactggaggtgatggtggtggtggtggaggtaatggaggtgatggtggtggtgaaggtgatggtggaggtaatggaggtgatggtggtggtggtggtggtggtggaggtaatggaggtgatggtggtggtggaggtgatggtggaggtactggaggtgatggtggtggtgaaggtgttggtggaggtactggaggtgatggtggtcgtgtaggtgatggtggaggtgatggtggtggtgaaggtgatggtggaggtactggaggtgatggtggtggtgaaggtgatggtggaggtaatggaggtgatggtggtggtgaaggtgatggtggaggtaatggaggtgatggtggtaaaggtgatggtggaggtactggaggtgatggtggtaaaggtgatggtggaggtaatggaggtgatggtggtggacgtgatggtggaggtaatggaggtgatggtggtggtggtggtggaggtactggaggtgatggtggtggacgtgatggtggaggtaatggaggtgatggtggtggtggtggtggaggtaatggaggtgatggtggtggtggtgatggtggaggtactagaggtgatggcggtcgtggaggtgatggtggaggtaatggaggtgatggtggtggtggtggtggtactggaggtgatggtggaggtaatggaggtgatggtggtggtggtggtggtactggaggtgatggtggaggtaatggaggtggtggtggtggtggtggtggaggtactggaggtgatggtggaggtactggaggtgatggtggtcgtggaggtgatggtggaggtaatggaggtgatggtggtggtggtggtggtactggaggtgatggtggtccgtggaggtgatggtggtggtggtaatggaggtgatggtggtggtactggaggtgatggtggtggtgaaggtgatggtagaggtaatggaagtgatggtggaggtactggaggtgatggtggtggtggtggaggtgacagtggtgatgctggtggtggtggtggtggtggtggtggtggtggaggtggtggtggtggtggtggtggtgatggtgatggtggtggtggtggtggtggaggtgatggtggaggtaatggaggtgatggtggtggtgaaggtgatggtggtgatggaggtggtggtggtggaggtgacagtggtgatgctggtggtggaggtggtggaggtactggaggtcatggtggtggtggaggtgatagtggtgaaggtgatggaggtggtggaggttatggagataatggtggtggtggaggtgatagatatttgaacatgcctgacctaagaaaagttcattttcatttttggctgggcactatggctgatgcctgtaaccccaactctttaggaagcctaggtggaagggtggcttgaacccaggaggtcagggctgcagtgagctatgactgtgccactgcactccaacccaggtgacggagcgagaccctgtctcttaaaatattttttttacagtgcattttcatgtgtttcaacctcctagtgtccctgccaaaaatattttaatctgaatcaaatcatggggaaattatgagacaaatcaggtcaaaagacagtttacaaaacagttggcctgaacttttcaaaactgtcaacatgttaaaagaaaaaagaaaaaaatgaccagggaactcttctagaaaagagatgtgataagtaaatgcagaaaagagacgtgataagtaagtacagcgtgtgtcccaggaggatctaggatccagtcaggacaggagctggagcacgagaggaacgggggtggagaccacttcctgggggcagagtgtcctcctctccacgttgcacgtcctgagtgggaaacctgcactggagttgcacagggaagggctagggtcttaggagaccctgcccaggtatgtagtggcaaggtgccatgatgcctgcaacttactttccaacggtttgggagagaaaatgctcatttgtgcagagtccgaagagggagcacagaggagagaggaagagtgaaagcagctgtgtgaagcgtgaatcgcacaggactggagttgaatgaatgtgggtggtggtgtgctattcttgcgacctttttgaaagttcaaaaattttcaaagtataacatgagagataagtcctttcagaataaaaagccggttgtgcagtaggaggaccagtagtggcccctggttgggtctctgattctagaaagccaacctgggctgctgtgaccggccactagcatggctgactgttgatgaaggttggggagagccctggtgttcgcggagtcccgcgctctctgtattgccgtaatgctctgtctttctcctttcatgggagtgtgccgtggcatttagtcgtgagagtgggtgtgacctgtgtgcgggttttgcaggtctggaggcggctggtggaaatccaattccccgcggagcatggctggaaggagtcgttgctgggagacatggaatggaggctcacaaaggtaccaaaagtttgggggcagtcttttcagggcgtgaaggcaagctggagaaccccagaccattagcgacagccaagagatctcagcagtgcctctctgtgggcagggatggggtgaatcacagctccgtgtttctgtttctgatccagcccttatagtctgtccctagaagagcgcttcggagtcttactgagaggacagagaagaacaagggcccaggatctcaccatcatgggggtgcgggatttttcctgaccccttcgttggacttgcgacagggatgctgtgtttacttggcccgccgtgctcaaccccttgtgggagggagcacgtgagtgagtgtggcatctggccagctgctttgggagctggcaggagcaagctccgtgcaggccctgcagcagtgcccagattgaggtgcctgcaacccccgaagctccagagggcatgttacagtgctctcttagctccgccgtctatggacagtagtgtgttatcagctcagtgggtcccttgccttgttgcctagggtggctgccctctgccagggccaatgtgacagcctcttttaggtacccacactcggtgggtcccaagctcttgtccagcatccaagaagaatggggtcacccggacacttgaaggatggtgaaggtggagaattttattaagcaatggaaatggctctccatggagaggggagctggagaggggatgggtcaggtggggaatcttcctctggtccaggtgtctggctggctcttccctgaagtcaggacgtctttccgaagttaaaccgtctctccttggaagtccagccatccctctgaagtcaagtcacctgtttccagtgaagctacttctctctcactaccaagtctggggtctttataggcacaagatagggggcagggtgggccctaggtagttttggaaaaagcaacattctattggtaaaaagacattactccgaaagaaccagtggggagagagtaggcacacggggatagaggttctcactttgggccatgggtttcaggcttttcggctcgaaggtggggttttgccagggacccgcccctgtctgcgtaggatttctctgcctcctgcctccatcaatggggccccaggcacaggaggggccaggcctgcccataggcaggaagtctaagtggcctgttggtgacaggaacctcatgacacacaagtggagaacacacagacatgcccctcatgctgaattaaggcctgaggctcaaggaaaattagtttttatgtgatatgagagttttatatgtaactttttttttttttgagacggggtctcgctctatcgcccaggctggagtgcagtggcgggatctcggctcactgcaaactccgcctcccgggttcacgccattctcctgcctcagcctcccgagtagctgggactacaggcgcccgccaccgcgcccagctatatttttgtattttttgtagagacggggtttcaccgtgttagccaggatggtctcgatctcctgacctcgtgatccacccgcctcagcctcccaaagtgctgggatgacaggcgtgagccaccgcgcccggcctatatgtaactgttaaatggatctttaaagggaaaagtcagaaacaaggaaaaatgacctatgtctcataacttacctgtttttgcaagccaggtgctttttctgcagagtgggaaaagagactcttttaaattttagcctttggtctactggtggggggcagggaggacatgctttgcgtgggccaggagaagcttaaaattgggggaaacagtaaaacagcaggaaagtaaaaatgatgaaagaattttcatcccatagagcactggagcgctgcatccgaaagctctgaaaccacccccctttgatttttgcaggaggaacccctctcccagatcactgcctactgcaatagttgctgggacaccaaaggcttagaggacagtgtggccaagaccttcgagaaatgcatcattgaagccgtgagctcagcctgccaggtgaacaatctctcctcctgggaaacggattcgggctcacagctgtgttctgccatgacccagctaagggctatgaagcacccgctgggtctcagctcctccgctaactcagagattgggaagtgggcaccctcctccctcgccaagggcaatggcgctgaaatctagttctctccggattcctcagtgtgctgcacagtccctgctgctcgcaccatcctgcatgtgttccatatggaatcacggccgtgcgcgtgtggcacaagtcacacgggcttgcaggccgttcctcagatggccctgtcatcactgtggctgctggtttgattgattgttaacacttgctcagtaggtgtgcgggaagagactccaaaggttgacagaacatttatggaagcaaaatatgtgaaatggaaaattgtatcaatttatttagctcttttcggcaaaggggaagagattgtgcccccctgtctcccaggaacagtctcgcaggcaatgccacatgaggaagctccctgctggccacggctgccctgctcacatttcctaattggacacttaacccctgtacaagcacagccttgcggccacaggggaagtccagaaacattgaggtcattgaattccggggaccaaggggttctaattttttaagtgactgatacctttgataaggttttcctttccctttttcgttaactctttgttgagatattgttcgtatgccatacggtacatctgtcaaaagttccagttcagcaggttttggggtagtcacagatatgtacagtcatcaccacagttaatgacagagcattttcatcacttcaaagagaaacccggcccctttagccatcatcctcctcccctctagtcacccactcccctctgcaggcataaacaattgctgaacataaacaactgcttctgtggctttctctgttctgactgtcatatgaatggaatcatatcatatgtggccttttgggtatggcttatttcactgagcataatgtttttttgttgttggtggtggtggttgtttgttgtttttgagacagagtttcactctttttgcccaggctggagtgcaatggtgcgatcctggctcaccgcaaccgctgcctcccgggttcaagtgattctcctgcctcagcctcccaagtgctggaattacagctactttttgtttaaagagtcttttaattgtttaaagaacaatgtgccgccacactcggttccttttgtatttttagaagagacagggtttctccatgttggtcaggctggtctcgaactcccgacctcaggtgatccacccaccttggcctcccgaagtgccgagattacaggtgtgagccaccgcgcccggccgagcataatgttttgaaagaccgctcaggctggacacggttgctcacgcctgtaatcacggcactttgggagcccaggagttcaagacaagcctgggtaacagagtaagaccctgtctctataaaaactaaaaaataaacaaaaaaaattagccaggcatggccgggcacacctgtggtcccagctacttgggaggctgaggtgggaggctcccttgggcccagaaggtcaaggcagcagtgagccatgatcacaccactgcacttcaacctgggggacagagcaagaccctgtctcaaaaagcaataacaacaaaagtccatccatattgtagcttgtgtccgtttacgttaagtattccttacccaaaatgcttgagaccagaagtgttttggatttcagatgttttcaaattttggaatatttgcatttacataatgagatgtcttccagatgggacccagagtctaaccacaaaattcacttgtttcatatacatcttatacacatagcctgaaggtaattttatacaatatttttaacaattttgtgcatgagacaaagtttgtattaagtatttgtatgttgaatttttcacttgtggcatcattatactcaaaaagtttggattttgtagtattttggatttggggattaggaatgctcaacctatatttcatttttttccatggccaaatattccccgtttatccatgtgtccattgacggccatctatgttgcttcttcggctattataaatctgctgatacaaacattagtgtacatatttatgtgtgggtgtatgtcttcatttctcctgggtgtatacctcgatgtagaattgctgaatcatatggtaactccatgtttaattgtttaaagaactgtccggccgagtcccacagcagctgaaccattttcaatccctccagcagcataggaggcttccaggttctccacatcctcactaacatgtgttgtctaactttttgattctagccatcctggtgggtatgaagtggtatctccttgtggtttttgtttgttttttgagatggagtcttgccctgtcacccaggctggagtgcagtggcgtgatcttggctcactgcgacacctccacctcctgggttcaagcaattctcctgcctcagtctctcgagtagctgggactacaggcatgtgccaccatgcccagctaatttttgtatttttggtagagacggggttttgccgtgtgggtcatgatggtctcgatctcttgacctcatgatccacatgccttggcctcccaaagtgctgggattacaggcgtgagccactgtgcccggcctcattgtggtttttaactgcatttctctgataactaatgatatcaagcatcttttcatatgcttattggatttgtctgtatcttctttggagaaatgtttattgagatattttgcccctcatcccccccacccccccttttttttttttttttttgagaaaaggtctcgctttgtcacccaggctggaatacaatggcacgatcacagctcactacagcctcaacctcctgggctgaagtggtcctcccactttagcctcccgagtagcagggactacaggcatgtgccaccatgttcagctaattaaaaaaaaaatttctgtgggccgggcatggtggctcatgcctgtagaccatcctggctaacacggtgacaccctgtctctactaaaaatacaaacaattagctgggcatggtggcatgtgcctgtagtcccagctgcttgggaggctgaggccagagaatcacttgaagccatgaggtggaggttgcagtgagctgagattgtgccactgcactccggcctgggcgacagagcgagactctgtctcaaaaaaaaaaattttttttcgtagagacagggtcttgagatgttgcccaggctggtcttgaactcctggactcacatgaacctccctccttggccttccaaagtgttgggattgaaggcatgagccaccgcacctggcctcttttgctcatttttaaattgggttgtctttttattatagagttgggagtctttattctatatacaagtcacttgtcagatatatgattgcaagtattttctcccattctatgtgttgttttttcacattcttattggtttcttttgaagcacagaagtctttaattttgaagaagttagcatatctgttttttcttttgttgcttgtacttttggtgtcaaagaatcctttgccaaatcctaggtgatgaagatttactcctatgtttatttatctctaaatgttttatagttttagctcttacatgtaggcctttgatccattttgagttcctttttatatatggtgtatatggtgtgaggtaagggttctgtttcattctcttgcatgtggacatccagttgtcccagcatttgttgaaaggactctacattccctgttgagtgatgttggcactcttgtcaaaaatctgttgacgatacatgtatggatttatttctagattttcaattctatgtggtgatctacttgcctatccttgtgtcagtaccacactgtttggactaccattgctttctagtaagttttgaaattgggatgtgtgagtcctcctactttgttcttatttttcaagattgttttggctattttgggtcccttgcaatttcataagaattttagaatcagtatgtcagtttccactgacaaggaagtcagctgggattctggtagggctggtattcaatgtatagatcagtttggagagcattgccatcttaacaaggttaagttggatttctttcattcaattagatttttttttttcccctgttagacagagtctcgccctgttgcccaagctggagtgcccaagtagctgggactacaggtgtccaccaccatgcctggctaatttttgtatttttagtagtttcaccatattggtcagggtggtctcgaactcctgacctcagatgatcaacccgccttgacctcccagagtcctgggattacaggcatgagccaccattcctggccaatttcttttaacaatgttttgtatttttcatagtttaaattttgcacttcttttgttaaatttctaagtacttttttttgggggggggtgctattgtaattggaattgttttctgaattctgtttccagattgttccttgctggtgtctagacacacagtgctccatgcgtcttgtatcctgcaacattgctgagctcatttggtagctcaaattgtgtgtgcgtgtgtgtgtgtgtgtgcatgagagagagaattaaattttctatacataagatcatatcatctgtgaatagagtttcacttcttccaatctggatgccttttatttctttctcttgcataactgccctggctagaacctccagtacaatgttgaatgaaagtattgaaagtggacatctttgtcttgttctgatcttaagagaaggtttcagtcttttgccaccaggtgtgatgtcaacgtgagcttttcatagatgccctttatcagtttgtggaagttcctttttgttcctcatttgttgaatgcttttttttctttaatcatagaagagagttggattttgtcaaatgcttttcccgtatctactgaaatgatcatgcgatattttcctaatgttattaactgatatttgatgttaaatcaacctttcatccctgagataaattacacttgatcgtggtgtatagttcctttaacatggggctggataaggttttcttttatccttttaaatgtcagaaagtatctattataaattaaccttgtggtttttactaattactgaaatgttttacagaaactttgaacctaaaggaagaaaaatattgtttctcggaggagaattaaaaagagaattaaaatgtatatgttgtttgtaggcagctttttaaaagaattatggtttaggaacataaaatatatgctatattaagggtttattcatttttggtatttttcatgatatgaaagtccaaaaaaaaatgtagaaactggcagccagaaggaaggagggtgactggttatgttggtgtgtgtttgtgtgtgtgtcttcacatctctggtgctggacacttaaggaggcagtatacaaggaaatgaaaattttcgaagaaatgtaaagtgttttactattttgctctttttgtggccttataaaacaagttacagtagatttcagaaatgctatcgagtaggtaatttgcttttgttatttcaaaacaaactaatgaaaaacttctaaatgtccctcttttattaattttcttgtagtctcagaccagtatccttcaggggttctcttactctgatttgcggaaatttggcatcgtcttgtctgctgtgatcactaagtcctggcctaggaccgcggacaacttcgatgacattttaaagcatctgctcacgttggcagatgtcaagcacgtcttcagattgtgtggtatgtttgcgggagtgctgggaacatcagctcaggcaaggtggtgtcttcctgattgggaaaggtgggaggcagaagatttgacatgatgatactgaattgggatgggctgatgtttgacaaaggctgcagtttggacagagagaccctggaaggctcagagtgtcttgcgttgtaaataataactaatgctaacagccactattcattgaatgcttgctgtaccctagcgactgtgctgggtcgcaagggaagtgcccttgaaacaacccttctgaaagtcccctttaaggcccccagttttcagatcaggaaacaaatggagaaggcaatgcgacttacctaaggtctcaaagattataagtagtaaaaactaaaatccagacccaggtatgtcttatttggagatcaatatagaatgtccaagccaacattgatgacctcaacagaaagtgaagtactgtgctgtctgatttccccccagccccccgcgccccaggtgttttgtggtcaaggagggagagagagagacattccatcctaaaaacgttagagtccagttggcgtgtgagaccttagattcatatctttcagtgagaaggcgctggatgtggaacagccaaaatcaatgctgagcttcctacacatcagggaagctgtggggatcaaataactgaattaatatgggagtgcacaagtaaaagctactctcttgaaaagatcatttttgtgttatttgtatttatttatttatttatttatttatttatttattttggagatggagtctcgctctctcacccaggctggagtgcagtgctgtgatctcagctcactgcaacctctgcctcccgggttcaagcgattctcctgcctcagcctcccaagtagctgggattacagatgtgagccactgtgcccagcagtttatttaattttaaaacaaggtcttctctgttgcgcaagttagcatgtagtagagtgatgccatcatcgctcaccgtaagcgctgacctcccgggctcacgtgatcctcctgcctcagcctcccaagtggctggcactccaggcgtgcaccaccatacccagcctgtttataagttggatagaattttttagagcactttgatgtgtacagaaaaattgagcagaaagtacagagagttgtcatctatctctgccaccatcacacgggcagtaccctgttagtaacatgcagcattagtgtggtgcttttgttacagctgagaagccaatattgataacactgttattaactaaagtccatagttcgttcctggtgttgtccattctctgaggtttggataaaccatggcctgtgtccaccattccagtatcgtgcagaatagttgcgctgcccctacaaaatcccatgctccacccctcccatttcctttagtcttttccagaatgtcctatggttggaatcttataggatgtcgcctttagactggcttccttcacttagtaatacgtatttatgtttcctccatgtcttttcatggcttgagagctaacttcgttttaccactgaataatattctattgtatggatgtgctaccattcgcttacccgttcacctcatgaaagacatcttggttgcttccaagtttttgcaatgattagtaaagctactatgtttgtttcttatggtgcagataagcttcatcttctcctaatattgtatggctctaatattactgggagagaaatcctaagtggttaaacaaaacatgtataaaaattctgccctctaaatttatcataaaatcagttccaagattttgcaagataatgaagttgtacagagtataaagttatcacatggctgtttctctctttgcatatgctatgaaagtgtctccctaagaccatcctgatagacattgctaggtatgtctgcatcctctggtgcagtttcttctgttgtaggtattcctagggcaggggctttttaaagaagattctgtgtattctatttaaaaaatatactcaggccatgtgaggtggttcatgcgtataatcctaatgttttgggaggccaaggcgggaggatctcttgagcccaggagtttgagaccagcctgggcaacaaagtgagaccctgttctctacaaaaaattttgaaagtttgccaggcatggtgctgtgcacctgtgttcctagctactcgggaggctgaggcaggaaaatgaggttacagtgggctatggttgtgccactgcactccagcctgggtgacagagagagaccctgtcaaaaaaaaaaaaaaaaggaagtcagtccatccgtatactgaaggggacgtgggttttaacctgagaaatgtgtctcccagctgattttggccattgcgggaagtcatcttcttggacaaggaagttgttcaggggatgaatctgggcaagacctaaccctcgtgggggaaagcagaagggagtggaatgattggcgcatctggagacactggccagccattgcctgtgtttgaggaagtgggggcagaacaagaggttatctggaattcccacggtaacggcaaagaggcaggaggtggggagcccactgtgttaactgtgttcttcatctattcaggaaccgacgagaaaatactagcaaatgtcacagaggatgccaagaggctgatagctgttgccgactctgtgttgacgaaagttgttggtgacctcctaagtggcacgattttagttggacaactggagctgattataaagcacaagaatcagtttcttgacatctggcaactgagtaagcatcgagtcgatacgcacttcaggctcctgaggcattaagtagctggaagacacgtttgtgtttgcgtgtgcatttttgtaaaggagataatcatcttagccttgataatgagtatctcttcttgctcataagttgataggggtggtttataattctcaagaacatcacgggaaagtgataaaataatggccatctcgaaaaagtgggtatgcgcaaaaccatcctagtccttctcctggtggcggggaaggtgcggcgctttcaaagcattgccatggaaaatggcatttgttgctgtattgggttactttattggtgttcttattttccaggggaaaaaagtctttcaccccaggatgaacaatgtgctgtggaggaagcactggattggagaagggaggaactgttacttctaaagaaagagaaaagatgtgttgatagtctcctgaagatgtgtgggaacgtgaaacatctgatacaaggtggtattcctgagaagtgaacaaagttgagggctctcaaagggttagaggagaacacagtaagaatggatcacagtagcagatctttattttggagagaaggctttaaaattttttttttaatttgcatttgctggggggatcgctttcacctcttttagattcttctttttggtatttatgtccacatttccaaataacatgcttaagtgtctcctggatttttccggagtcagcatgagctgctgacgcccgctgcagaagatgagggcttagagccacacatttctggtctgtgccctgcacacatcacctttccacctcctgttgcttcctgttttctcataacggagttgcatcattgtttagggttaaatcatcaggacccacacggatcacaagtgaaccacgaaagaaaccgtcatcattttacaatttttgcacaaactctctgttttccacagaattacatttcctgtcagatgctgttttcactgcgttaatgatacgctgttttcattgtattaatttctaattccatcgcaatctctgccgagtgtctgaatttccttgaagatcattggtttgacctttgaaaaggaacctgccaaccctgggctgcagacgtagggtggagtctccctccacctcctaggagcctttgcctggcacctgggttagacgtggttcccacgcccccctcccccgctactcactcctgcttcctctgttggcagagcacaccctcactggcttcctgagaaaagggcgtgtaagaggttaaaccctcgaatccttgtgtgtctaaagatgtctgtcctcttactaggtcagtcgctcggctaggtctagaattacagaccggaagtcattttccttctgaagtttcaatgtgctgcgccatcattgcctccacagtgtggctatgtatggagaagtccgatgcagtgccagttacacatccttcatgtgtgtgacctgttttctctttcttgaagctcttgagctctttctgttactcatattctgaaataataacgtgtcttggcctggatctatgttccatcgaggctgggcatgttggctcccacctgtaatcccagcacttcaggaggccaaggcaggaggactgcttgagtctaggagtttgagaccagcctgggcaacatagcaagaccccatctctaaaaaaaatacaaaaaaattagcaagacacggtggtgcatgcctgtattcccaactacttgggaggctgaggcaggaggatcacttgagcctgggaagtcgaggctgcagtgagccgaaatcacgccacaacactccagcttgggtgacagagtgggaccctgtctcaaaaaataaaatattttcagtcccctctattgggtattaataggtaggtctttcaactctagacatcaaaatccttgagttctgggaaattctcttgaatgatttaattttttcttctcttgctggaattcctgttaattggatatgggacctcctggatgatcatctaactgtcatcatttttctctcggattttctatctctgttttttgctctgctcttgagagatttattcagaaccaaactttctgcttaggttttcatgtcagctttcgtatatatatttaatgtagaggaattctttttctcggaatgttcctttttaaattctgtcctgttcttgttcacgttgcagcatcttcccttctgggttattcaccgttttgttttggaggttttgcttttcctggcatcatgtgctgcttcctccaggttcctttcacttgttgatttgttttgattttcctcctatgtctggacattcttgtttgtctgtgtttattaagagaaagccctcacaagtgggttggccctctgcggggtgctgccgtggggtgctgtggctcgacctggaagttggcctgtctcctgaagtcttctgtctcctgcctggagggtgtgggcctggctgccaggtttctgggagccaagagggagaagcgggctggcgggccttggcatcccgtgcgtggtcctcccatggcccgtgttctcagtgtggttctccgccacctccctctgtctcctgtgtttcacaccccatcctccttccccctgagattggataattcatgtcttctgttagcttcctgagaaaggggatgtgtctagaaaggccctttgttctgccatgtatctgtggcctccaatccacacgcccccctgcgttatcctttctagaaaatgaaccatctcttggctgctggggtgaagaagggggtccacctgctgtgtcagggcattggggtgacagttggtgtgctggatggaccatgtcttttttttgggacagagtcttgccctgttgtccaggctggagtgcagtggctcagtctcggctcactgcaacctctgcttcctgggttcaagtgaatcttgtgtctcagcctccctagtagctgagattacaggtgtccaccaccacgtccagctagttttttgtatttttagtggagatgggatttcatcatgttggccaggctggtcttgaactcctgacctcaagtgatccatccgcctcagcctcccaaagtgctgggattacgggcgtgagccactgtgcccagcctggaccgtgtcttaaacagactttgaacccagtcttccttatttcatcaccacctcccagtctgcagtgacctgcacaatgtgtgtctgctttttgggaatcctgtgacataaaactactcagctctcagtgttgcccactgggaccctaggactccatgttaccaggcctcatgtgtcatttaccactggttcagctcgttttcaacttctaaaattttgttcctgttatcctgttcgccattcctcctcctgtccttgtcagtttatgacttttttttttttttttgatatggagtctcactctgtcacccaggctggagtgcagtgacacagtctcagctcactgcaacctccacctcccaggttcaagtgattctcctgcctcagcctcctgagtagctgggattacaggtgcgctccaccacgcctggctaatttttgtatttttagtagagacagggttttgtcatgttggccaggctgctcatgaactcctgacctcaggtgatccgcccatctcagcgtcccaacgtgctgggtgggattacaggcatgagccactgcgcccaactagtttatgactttttaaatgcaatttatgttctgtcattggagtggggtttggcaaagagagtaaataggtgcgtgttttcccactgccatctttacccagaagtttatgatgctttctttatcatgaatattggttaacaaggccaagcggggagggaaagacctgtgaactcttcctgagaaagaaatcctagcagctgtgtgctcttgagttcgctcagagaagtgaggagagaaagtcttaggaaagtgaaataaaatggaatcatgattagagctttgacttctgacactttcttttcgcttctaaagtggactttggagtgcttgcagtaagacactcacaagacctcagcagtaaaagattaaatgacaccgtgacagtgagactgtccacctcctcgaactcgcagagggcaacgcattaccacctgagctcccaggtccaagaaatggctgggaagatagacttgctcagagacagccacatcttccagctcttctggcgggaagccgcagagccgctgagtgagcctaaggaggaccaggaagccgcagagttgctgagtgagcccgaagaagaatcagaaaggcacatccttgagcttgaagaggtgtatgactatttgtatcagccttcttacagaaagttcattaagttgcaccaggatctaaagtcaggagaggtcacccttgcagagattgatgtcatcttcaaggactttgtgaataaatacacggacctggattcagaacttaagatcatgtgcaccgtggaccaccaggaccaaagagattggatcaaggaccgagtcgaacagatcaaggaataccatcacctgcaccaggctgtccacgcagccaaggtcatcttgcaggtcaaagagagcctgggactgaacggtgacttcagtgttctcaacactttactaaattttgtaagttatttgctggggactgtgggggtttggaggggcgtcctgcctcagcctcttcaggagccatgggctttgtggctttgaaaaggggggcggatgacttagagcttccgtcaggggctcctgtgtgtgtggtacttgaggcctgaatatcccaagggctttgtttttacctttgttataaatagtaccactgctccttagccagagggagtttccttgggtctgcgtgaagatcaagaactcaggaaagggcaacaatcctcttttcataacgggcatttgtaaagggtcataggctctctctaggttacagaagccaaaaagcaaaacactttgtcggctgcccaactgcatctcccagttccacccaaaagcggtaaatcagttgtttctgttagagttaagaggtgactcttttgcttttttttttttgagatggagtctcgctctgtcgtccaggctggagtgcagtggcgcgatcttggctcactgcaagcttcgcctcccaggttcacgccattctcctgtctcagcctcccaagtagctgggaccacaggtgcccgcaaccacgcccggctaatttttttggtatttttttttttttttagcagagacagggtttcaccgtgttagccaggatggtctcgatctcctgacctcgtgatccacccaccgtggcctcccaaagtgctgggattacaggcgtgagccaccgtgcccggctgagtcttctgcttcttatgtttttaggtagaccgagataatgattagaatttagctgggcacagtggctcatgcctgtaatcccagcactttgggaggctgaggtgggcagatcacctgaggtgaggagttcgagaccagcctgaccaacatggagaaaccccatctctactaaaaatacaaaaattagccgggtgtggtgtcaggtgcctgtaatctcagctactagagaggctgaggcaggaggatcgcttgaaccacggaggcggaggttgcagtgaaccgagatcgtgccactgcactccagcctgggcgacagagtgagactcttatctcaaaaaaaaaaaccaaaaaaaaaacctggaatcccatccatttacacttgaaccctagtgcacgtcctcgaggaagcaactgctctgggcctttattgacaaagcagaaaaagcaacagtagttacttggcagggttatgtgaggaattgattttaaaatccactttattaaaatgcttagcagaatatcaggttcccaggaatcacagttcatcttgatcagggagaaacagccatgggggtttgatcatccaattcaggggtaagagcttggtgtgcctgttgtcacagcagtggcaaatctaggcattgagggagggtggggctgctgggacggtcagtgcttgcagctcacagattctggggttctggttaatgagttccagtccacagtagagctttttcttgcagactgataacttcgacgactttcgccgtgaaacactggaccagatcaaccaggagctcatccaggccaaaaagctgctccaggacatcagcgaggcccggtgcaaggggctgcaggctctgtccctgagaaaggagttcatctgctgggtccgggaggctcttggaggtaaaatcagcctttggggttgcgtggaagtgtggagaaagttttcagatggcgcactgtgtggcgttcctaaactctttggcaatacctccccttggccaaggactacgtaaagggcagaaagacgttgcctgcatgctttagggagatgggcactgatcatagagttcacaccggtacagtatttcccatgtgctgctgtaaaagccactcaccttgccacaccccgccacttcggaagctgtaaatggctcaggttccttttccttaaaatcttgcccccttcagctttttcttccagtagatttttactggaggacaaggagagttcctgcccacagagaggttttttttttttgtttgtttgtttttttgagacagagtctcgctctgtcgcccaggctggagtgcagtggcgtgatcttggctcactgcaagctctgcctcccgggttcacgccattctcttgcctcagcctcccgagtagctgggactacaggcgaccgccaccacgcccggctaattttttgtgtttttagtagagacggggtttcactgtgttagccaggatggtctcgatctcctgacctcgtgatcagcccgtcttggcctcccaaagtgctgggattacaggcatgagccactgcacctggcctttttttttttttgagacggagtttcgctcttgttgcccaggctggagtgcagtggtgcaatctcggctcactgcaacctccacctcctggattcaagcgattttcctgtctcagtctcctgagtagctgggattacaggcgcccgccaccacacccagctacttttttgtatttttagtagagatggggtttcaccgtgttggccaggctggtcttgaactcctgacctcaggtgatccacccatctcagcctcccaaagtgcaggcgtgagcaagtacaggcgtgagccaccgcgcctggccccacagagagatttttctcacttctccattgatgctgtgcgtttcttggcagcctcttcagttctgtggcttagatgtcgttggcagaggagagaggaagaggcagaggaggcaggaggggcacaggtggcagtgcaggtgtgctcgggggtctgggggccaccacctgctggatctcaggctctggctctcttgggagagccgctgctttcagtggtggactctctggtccacactgatgcacatccttcagtgagtaatttatctgaggggaatgatctgagtgtttcatagttaattgtgaacatgttatttacagctgagccttggtttctttttgtttaaatggtaatgttgtgtggattgaaggaaagagcatacacagaagtgcagtacagtgcctgggacattgaaattgctcaggaacggcaagatatcgtttagtgctattaacagacagtacaggctgggcgtggtggctcacacctgtaatctcagcactttgggaggccaagtcgtgtggatcacctgaggtcaggagttggagaccagcctgaccaacatggtgaaacctggtctctactaaaaatacaaaaaattagccaggcgtggtggtgggcgccagtaatcccagctacacgggaggctgaggcaagagaatcacttaaacctggaaggtggaggttgcagtgagccgagatcatgtcacttcactccagcttgggtgacagagtgagactctgtctcaaaaaaaaaaaaaaaaactacaaaagattaggtgttccggactcttactgaaagcagaaagtggacagaaccttaaaaattcatgaaatatccatttcagcttcagtaaggattactgcccaagaccgagtcttgtgctatcgtggaatagtcccacgctgaactcccctcttctcttccccaggcatcaatgagctgaaggtgtttgtggacctggcctccatctcagcgggggagaatgacattgatgtggaccgggtggcctgcttccatgacgctgtgcagggctacgcatccctgctatttaagctggaccccagcgtggacttcagtgcattcatgaagcatctgaaaaagctgtggaaggctctggataaggaccagtacctgcccaggaaactggtgagtcttattctgtctctaatgcagattttgttgaatagagcattgcttagcaacgttagggcagtgactgtggaaatggtggcacacctgtgtggtaggtttgtacacagccgttttcaatgatatttaaaaagcttttcttcataaatggaaattcaccatcttgttacctagaaagcaggatacaaaattacatgacacatagtaatctctaaggtgcaaaacacacgtggaaaaaagacagaagggaaatatgctgaaacgttgccaggagttttctctgaatggttgtaattgtcattttattctgttactttttgttattttctataattgatagaattttttatcagaaaaaagtaaacatttaaaattagccaggcatggtggtgtgcgcctgtaatcccagctactctggaggctgagacagaattgcttgaacccgggaggcagagatagcagtgaactgagatcacaccactgtactccagcctgagtgacaaagtgagactctgtctcaaaaaaaagaaaagaaaagaaaaaagtaaacatttaagtttaagtaaactacctgtagcagggtctgaattgacgtacgcagcttaactagatacctgggccagcctccggacggctgctctgcatgtgggtggaggaagaagtgacatatggaagggcaggtaaagctatcttcatttttctgctagaaagtcagcagagtttccaaacaaaaccctctgttgtgatttttcctaaacttctcttattgtacttggggaccacagaaggacactgaggacttgggactccacagccattgcttccagcgtcacccccagagggttctctgcattggggacctggcagaatgatggcgtctggtagagaggcaggcgggcggctgctcattcccctccactcctccacagatgtaagtcaagtgcccccatgtgccagccggggcaccaggcactggaggaaacgtggaacagcgagtacaaagcagcactgagtgacagatcatgttgtcagggtggcacctggtccagctggggcgctgggtgggcgactgcgtcctgagccctggggaagcgtggggagaaggctctgcagcgaggcagaggcgggaggccgaccacaggagggagaagggcaagatcctcgctccaaccgtggcccgtgttctctccttttgtccccatagtgtgactccgccaggaacttggaatggctgaagactgtgaatgagagtcatgggtctgtggaacgctcatccctgaccctggccacggccatcaaccaaagaggcatctatgtgatccaggcgcccaaaggtggccaaaaggtgagcggtccccagccctcggcgcagctgcggcccttctgcaggctgctgccagtccaggtcttctggccccaagaaagtgacttctaacctatgctcttcacagatttccccagacacggttctgcacttgatccttcctgagagccctggcagccacgaggagtcacgagagtactctttagaggaggtgaaggagcttttgaacaagttgatgctgatgtctggcaagaaggatcgtaacaacacggaagtggagaggttttcagaggtgagggcgcatctttgcagtggcgctaagctggtggtgtcatctcgtccgtgagggctgtgtactcccaagaaaacggaaaggatttgacttgggatttgactgataagaagggctctgctcttaggcccatggagagtagagttggcacatttgtagggtgcatggaactctagtccgcggccccagagaggtcttaaggcaggcaggcccctgggttagcagtccctccttacgatccgtaggatgaacgctgaagctggcagcctgtccaccgcactgagaaggaggttggtcacccagcaaatagcccttagaaagacacttgaattgcctctctcactctgtaaatcagcaagaatccaaataactaagatttagatggacaaaacagaagtaatcatattgagaatggtgtaccggtctaagtaatagtctctcaattttattataggttctttctctaaagttgatttgtactttacaaatggtatcctttatctctgctgggtgcagtggctcacacctgtaaagccagcactttgggagcccaaggtggaaggctcattttagcccaggagttcatgaccagcctgggcaacatagcgagaccctgtctcaaaaagtataaggtttttttttttcccaattaaaaaaaaaagataatttaaaaaaattaaaacagtccaggcatcatggttcacactttgggaggccgaggcgggcctatcacttgaggtcaggtgtttgagaccagcctggcgatatggtgaaaccccatctctactaaaattacaaaaattagccgggcatggtggcacgtgcctgtaatcccagctgctccggagactgaggcaggagaattgcttgaacccaggaggcagaggttgcagtgagccgagatcacaccactgcactccagcctgggcaacaatgcaagactccatctcaaaaaaaaattaaaaaaaaaaaaaaattaaaacaaatgataccatttatctctacaatgactctttccctgatgagagtgccatcttctcaggtgggttgtgtagatgaggagggaggccttgtgagcgcagatcatgcagtgggcctgtggacagggccgtcttttggcggtaggcctgtgtgctgttgcagagtagcgtgttaccctctcgcatggctctgtgagccaacctcatggttctgcctctccaggtcttctgcagtgtgcagaggctcagccaggccttcatcgacctgcactctgctgggaatatgctgttcaggacgtggatcgccatggcctactgctcccccaagcagggtgtgtccctccaaatggactttggcttggacctggtgacggagcttaaagaaggtggagatgtcactgagctgctggcagccctctgcaggcagatggagcacttccttgacagctggaagagatttgtgacccagaagcgaatggagcacttttacctgaacttctacacggcagagcagctggtttacctgagcactgagctcaggaagcagcccccgagtgatgccgccctaacgatgctatccttcatcaaaagcaactgcaccctgagggatgtcttaagggcctctgtggggtgtgggagtgaggccgccaggtaccgcatgaggagagtcatggaagagctcccgctgatgctcttatcagagttcagcctggtggacaagctgaggatcatcatggagcagtccatgaggtgccttcctgccttcctgcccgactgcctcgacctagagacccttggccactgtctggctcacctggcagggatgggtgggtctcccgtggagcgttgtctcccgagaggtctgcaggtcggccagcccaacctcgtcgtctgtggccactccgaggtgttgccagccgccctggctgtctacatgcaaaccccaagccagcccctgcccacttacgatgaggtgctgctctgcaccccggcaaccacctttgaggaggtggcactgttgctgcgccgctgcctgaccctgggctccctggggcacaaggtctacagcctgctgttcgcagatcagctgagctacgaggtggcacgccaagcggaggagcttttccacaatctgtgcacgcagcagcaccgagaagactaccagctcgtcatggtctgtgatggggactgggagcactgctacctcccctctgccttcagccagcacaaggtcttcgtcaccccccaggcacccctcgaggccatccaagcctacctggcaggtcactaccgggtcccgaagcagaccctgtcggcggcagccgtgttcaatgaccggctgtgtgttgggatcgtggcctcggagcgagcaggtgttggtaaggagagcggcagggtgggcaggccccgtctcccagggactgcccggggcccttcccccctccagcagatgaagcctgtctgcaggtggagaaaccgaggctcagggagggtgtgattcatctgtgggtgtcaatcagggtctgtgccagaaccaggcaccctggtcacctggtctcccacaatgggtattccctgggagccccattcccttcctcctctcagcaaacatctctgcagtgtactttgtggtttttttttttttttttttttttttttttgagacagagtcttgctctgtcacccaggctggagtacagtggcgtgatcttagctcactgcaacctccgttttctgggttcaagcaattatcctgcctcagcctcctgagtagctgggattacaggtacccaccgccatccctggctaatttatttttttttgttttttgttttttgtttttttgagacagagtctcactctgttgcccagattggagtacagtggcgtgatctcggctcactgcaaccttcgcctcccggattcaagcgattttcctgcctcagcctcccaagtagctaggactacaggcatgcaccagtacacccagctaatttttttatttttagtagagatgtggcttcaccgtgttagccaggatggtctcgatctcctgacctcatgatctgccctcctcggcctcccaaagtactgggatcacaggcatgagccaccgtgcccggcctaatttttgtatttttagcagagacagggtttcaccatgttggccagtctggtctcaaactcctgacctcaggtgatccgcccacctcagcctcccaaagtgctgggattacaggtgtgagccaccacgcccggcctgaagtttacttcttctgcccttaaatgccactggcctctttggggttgatgttggtcgtgtgagcaaggggaggtagaattgaagagaaagccatgcctcttgacccacccttcgtttgccatcttgtttcccttaaaaagaaatagtagcttctgttctgttgactttatcctatcaacagtacctcgtcctgttgggataaacattactcttcccctccctgctgaagcctctccttttgctgtgacttttattagctagtcactcaacacataatgacatttcagtcaacagcagaccacgtatatgaccacggtcccataagattagaaaactgtactttaaaaattagccaggcatggtggtgcatgcctgtgatcccagctactaggaaggctgacttgggaggatcgctccagcccaagaggtcgaggctgtggtgagctgcaaatacgacactgcactccagcctaggcaacggggcaaggccttggtcttttaaaaaaagagaaagaaagaaagaacaaaagattataataccatattttttactgtaccttttctacatttttatttttatttttgagatggagtctcactctgttgcccaggctggagtgcaatggcacgatctcggctcactgcagcctctgcctcctgggttcaagcgattctcctgcctcagcctcctgagtagctgggactacaggcacacgccaccacacctgactagtttttagtagagatggggtttcaccatgttggccaggctggtctcaaactcctgaccttgagtgatcacccgcctcagcctcccaaagtgctgggattacaggcctgagccaccgtgcctggcctgaatatgtttagatattcagatatttgccccgtgtcacagctccccactgtatgtaggatgcccccatgctgtcacggcttgcagcccaggggcaatgggctattccacctagctcgggtgtgtggtcggctctaccatctgggtttctgcaggcacactctgatgttcacagtgacagaatcatttcacaatgcatttttcagaacgtgtccctagtgctaagtggcgcgggactctgctttgcctgctgtcctgcggaggcaggaggtgaccaggagagtgagtaggtaacggctgggaaatgtgaaggttcaagagcgtattcttgaatctgatgttatgttgcatcagttttgaattttatacaaagagaagtaacttctagtggatctttatagattctcttactctttgtcctagccctgggacttaatttttctctctctctctctctctatttttatatatatacacacacatgctgtatatacatacactatatatattcgatacatattctatatagatttctatatatattctatatatttttacatatataatatatattctatatacttccatatatactatatatattctatatatacatatatagtatgtatatatatattatatatatattgtatgtatatatatattatatatatatattttttgagacagagtttcgctctgtcaccctaacgatgacaactgcaccctaagggatgtcttaagggatgcccaggctggagtgtagtggtgcaatctcagctcactacaacctccgcctcccgggttcaagcgattctcctgcctcagcctcctgagtagctgggattacaggtgcctgccaccacgcctggctaatttttttgtatttttagtagggacgggatttcaccacgttgaccaggctggctttgaactcctgacctcaagtgatccccccgcctcggcctcccaaagtgctaggattacaggtgtgagccaccactcccagccctaatttctgtattaatgttataggaaagtctctgtacgtgaagaggttgcacgacaaaatgaagatgcagttaaacgtgaaaaatgtgcctctgaaaacaattcgactgatcgaccctcaggtggatgagagccgagtcctgggcgccctgctgcccttcctggatgcgcagtatcagaaggtccccgtgctctttcacctggacgtgacctcctcagtaagtgccctccagcgtcagccgatggccacatcagtaaagacgtggtccccatgtctctgcgtgactcctccccgtgtatagaattccttgtttccacacgcacagtcctgtgaagcttaacagtgggaatgtgctctgagaagtgtgttgtcaggcagtttcctccttgtgtgaacgtcatggtgtgcgcttacactaacctagacgtagagcccactgcacacacaggctttatggtacacactgtcgctcctaggccgcaaacctgtgctgcatatggctgttctgaatcctggagccaattgtaaaacggtgtatttatgtgtctaaacataaaaatggtacagggaaatatagtattaggattttatggggctgcccttggagacatgggccgttgttggctgaaatgttgatgttgatcatcaggatcatcgtgacaaagagcaaaataaggaggggttacttagagttgggagaactcgccatcgtgtcgtgtgtttacacctcgtgcgattctgttcttaggtgcagactggaatttgggtgtttcttttcaagctcctcattttacaatacttaatggatataaatgggaaaatgtggcttcggaacccctgccatttgtatatcgttgaaatcctggaaaggaggacgtcagtgccgtcgaggagctcttcagcgctggtctgtactgtggggcgttttcgcctggcgtggggggctcttgggttctttctggtcttactgaagtggaatggcgcgtttaggagactccacatctttgccttacttagtgcagcagctgaatgcagtgttagtaaagaaaagcccatctttaaactcactttttaatcatgtctgggataaaagtactcttctgttaattagcagtgtcttcaatatttctgttcaattcaggcttcatgctgtatgcccagtctgaatcccagctgtgctctgaatctaggaaattcatctgttgaaagacctcacctttcctaatgccagctaagatgagaaggagatgtttgtcaaaaatttcttagcaaaagagagttttatgttcactcacatacataatacatgtatagcttagtggagaaacttagtttcaggaagttgggttagaaagtgatttcctggctcagaacgcagctcccacagcaatgccttacttaatgtgcaaaagatatgctgtggaaaaaaagactatacagaaagctacatattttcagtgcgtttttcataaaggtccatccaatatagataacgtggagggttaagacacaaaagcatttcttagaaagtcttcttgtaaccatttcattaatgtctctcctttccagcgtacacgtgtaccccagttcagttttcttgacatcttcccaaaagtcacctgcaggcctcccaaagaggtgatagacatggagctgagtgccctgaggagtgacacagagcctgggatggatctgtgggagttctgcagcgaaactttccaaagaccttaccagtatttaagacgattcaatcaaaaccaagacctagacacgtttcagtatcaagaaggctctgtcgaaggcaccccggaggaatgcctccagcatttcctgtttcactgcggggtaataaacccatcctggtcagagcttcggaactttgctcggttcctgaattatcagctcagagattgtgaggcctctctcttctgcaatccgagttttattggcgacacactgaggggcttcaagaagttcgtggtgaccttcatgatctttatggcaagagattttgccacaccatcactccacacctctgaccaaagcccggggaagcacatggtcaccatggatggggttagggaagaagatctagcgcccttctccctccggaagaggtgggagtcggagcctcacccatacgttttcttcaatgacgaccacacaaccatgacattcatcggcttccatctgcagcccaacatcaacggcagtgtcgatgccatcagtcacttgactgggaaggtcatcaagagagacgtcatgaccagggacctgtaccagggcctgctgctccagagggtgcccttcaatgtcgactttgataaactgcccagacacaagaaacttgagaggctctgcctgaccttagggatcccccaggccaccgaccccgacaaaacgtatgagctcacaaccgacaatatgcttaaaatccttgccatcgagatgcggttccggtgtgggatcccggttatcatcatgggagaaactggctgtgggaaaaccaggcttattaaattccttagcgacctgcggcgtggtggtaccaatgctgacaccataaagctggtcaaggtgcacggaggaacaactgcagacatgatctactccagagtcagggaggctgaaaatgtggccttcgccaataaggaccaacatcagttggacaccatcttgttttttgatgaagccaacacaacggaagctataagctgtatcaaagaagtcctgtgtgatcatatggtggatggccagcctctggctgaggactctggcctgcatattatagctgcctgcaatccataccggaagcactctgaggagatgatctgccgtttggagtcagctggtttgggctacagggttagtatggaggagacggccgacaggctgggctccattcctctgaggcagctggtataccgggtccatgctctgcccccgagcctgattcctctggtgtgggactttggacaactgagtgacgttgctgaaaagctctacatccagcagattgtccagagactggttgagtccatcagcctagatgaaaacgggactcgcgtgatcacagaagtcctctgcgcctctcagggtttcatgaggaaaacagaagatgagtgcagctttgtcagcctcagggacgtggagcgctgtgtgaaagttttcaggtggttccacgagcacagcgcgatgctcttagcgcagctgaatgcctttctctccaagtccagcgtcagcaaaaatcacaccgagagagatcccgtcctctggtcgttgatgctggccatcggggtgtgttaccatgcctctttagaaaagaaagactcatatcggaaagccatcgccaggttctttccgaaaccgtatgacgacagcaggctgcttctggatgaaataacacgggcacaggatctttttctggacggcgtacctctgaggaaaaccatcgccaagaacttggccttgaaggagaacgtcttcatgatggtcgtctgcatcgagctgaagattcccctcttcctggtggggaagcccggcagctccaagtctctcgccaagaccatcgtggcagacgccatgcagggcccggctgcctactcagatctcttccgcagcctgaagcaggtccacctggtgtccttccagtgcagcccgcactccaccccacagggcatcatcagcaccttccggcagtgcgcccgctttcagcaggggaaggacctgcagcagtacgtctctgtggtggtgttagatgaggtggggctggcggaagactcacccaaaatgcccctgaagactctgcacccgctgctggaagacggatgcattgaagacgatcccgccccccacaaaaaggtcggcttcgtgggcatctccaactgggcccttgaccctgccaagatgaaccggggcatttttgtgtcacgtggcagccccaacgagacagagctcatagagagcgccaagggcatctgctcctcagacatcctcgtccaggaccgagtccaagggtactttgcgtcctttgccaaagcctacgaaacggtgtgtaagcgccaggacaaggaattcttcgggcttcgtgactactacagcctcatcaaaatggtctttgctgcagcaaaggcttcaaatagaaagccttccccgcaagacattgcacaggctgtccttaggaacttcagtggcaaggatgacatccaagctttggacatctttctggccaatttgcccgaggccaagtgctcagaggaagtcagccccatgcagctgatcaaacagaacatctttgggccttctcagaaggtgccgggtggagagcaggaagatgctgagtcccgctacttactcgtgctgaccaaaaactacgtggcactgcagatcctgcagcagacattcttcgagggggaccagcagccggagattatttttggttctggtttccccaaggaccaagagtacacccagctctgcagaaacatcaatcgtgtgaagatctgcatggaaacaggcaagatggtgttgcttctcaacctgcagaacctctacgagagcctctacgacgcactcaaccagtactacgtccacctcggcggccagaagtacgtggacctcggtctggggacccaccgcgtcaaatgtcgggttcaccccaacttccgcctgattgtcattgaagagaaagacgtcgtgtacaaacactttcccatccccctcattaaccggctggagaagcactatctggatatcaacacggtgctggagaaatggcagaagagcatcgtggaggagctctgtgcgtgggtggagaagttcatcaatgtcaaagcacatcatttccagaagaggcacaaatacagcccctctgacgtcttcatcggctaccactcggacgcctgcgcgtctgtggtgctgcaggtcatagagaggcagggtccccgggccttgacggaggaacttcaccagaaggtgtctgaggaggccaaatcgatcctgctgaactgcgctacgcccgatgccgtggtccggctgagcgcctactcgctgggcgggttcgcagcggagtggctgtcgcaggagtactttcacagacagaggcacaactcctttgcagatttccttcaggcacacctgcacacggcagacctggagcgccacgccatcttcacagaggtgattgtctttctgcacttgtaccctatcccctgtcacccaagagtcctaaatccctcgtgtcaggattcaagattcttccccaggcagcggttagggatcctgcagggagatgctgagacgctgagctctcctccgcggtaagtgtggggagtaggtccagttaaccaggtgctgagtgcctggctctgtgcagtgcaccatgctggtaacagcaccatacacagtgttcacaccaacaaataaagtaccacgtcccaggactgggccaagggcactagggacgcacagatgaatctgtagcccttgtcctttgttagcattagggagcatggagagaccagcacatgaacagatgccatcaatatcatatgataaatgctgtgcttagaggcagcggggagcggtgcagaccaggatgcgagctcagatgagatgttccctaggagaagcccctcgccgatggggaagaatggccgggaagggattgtaggctgagggccttctgtgggcagagccgctgacagctcttagggttcaaggctgtagtgctgagatggggcgatgaggtgcagtcagagagaactactggaggccctcagtgactctgcagagccacatctcagccctatggagcgggcactggaggcacgcttgtctccctggctgggtgaagggagtctgatgaaaggctgttgtggaaaagacgggccggtagggaggccgctggaaccgtacaaaggagaggagcagatggaaccgagagatactcaggaggcaatttggcagggccaataccaccacccagtggggggatggggggtggaggggtccggggcgaccccctggattcctccttagatgagtggacattgcttcatcatgacagataccgcaggaacggacagcaggttgtgggaggctagtgatgatgtccgccggggacaggtttctatgcatcgtgcagctggacgtaggaatctgagctcagtggtgaggcagggattcctgggctagagcagcaggcctcgaggaacgtttcgacttgcactgtgatgggggagtgacctttgggacaggagaattgctgacatctgggggaaggggacagcaccaaccacgaactccatctgaaagcatgagtcgtactataacaggaaatggcatttgtgctgagccctaagggatcatgagaatctcaagtacggaccaagcaggcagagacacgggcctctggggaggagaggaaggcaccctcggggcagggtggggtcgtctctccaatgcctttggccctgtagggcctctcggccccagcgctgccgtgttttgggaaactcctttgggtttggattctgtgccgttgtgtggcaactgcaccgcgctgaacatcgcaggtttctaggatctgtctaaacctggcagcagacttgcaacctttccttgaagtctggcaagtaatttgcatttcttaactctgtagatcaccactttctccaggctgctaacaagtcacgactgtgaaattttagaatcagaggtcacaggcagggctccgaaacccacactcctgtggctgcagcagtttgacaccgagtactcattcctcaaagaagtccggtgaggttccctgccttccctgctgccctctccctccccagccgcagccgtgtggcttctgcgtggcgatggtacccgcgccggttaatgagcgccacagtcacgtgactgtgaaatagatccttgttaaatctctcccagcatccctctcatctccatcatcttctgcaacgcggtgtctggcctaacatcctcctccgagagcaccatcctcggacctcgttaggaggcattccttgggtttcctcccctggactatctgttcttactgaagaaaatcctacctgagtagctgtttctttgtagcctttatgtttcccatcactttggggaattttcttttccatttttttaagacagagaactcacttgaataacttcccttttctttcagaaactgtttaacgaatacagccaaatgtaaaatcctcatttttcagacagattttgaagatggaatccgtagcgcccagctcattgcctcagctaagtatgtttttagtatttttctcagaaactatgtaaaaaacccaaaacgtaggaagtcctagagaattttttccttgaagacagtatagtatcataatcagtatagaaataaaaataacaattcttcccccgcctcattcccccaagtgggattagggaaactgaagagagacaaaaagaaaaggccaataacattacaaaaatagtggaatgggcctgggcaacagagcaagacctcatttctaaaaaaataaaataattagccttccacagtgcacctctagtcccagctgctcagaaggctgaggtgggaggatcgcttgagcctgggaggtcaaggctgcagtgaactgcgatcccaccactgcagtccagcctaggggccagagcaagagcctgtcctccccacaaaaaaggtgaaatgcgagaggtgtaaataatggaacattaacaagctataaaaggatgcctttgaagcctgtgtttgtagacatgttttggtcattattaattttgaattatacaatttgaatttatttcaagttcgagggaaacaacagtaggtaaatgctttttttcctatttattggatatttttatagtgtttgtaggggaagtctgatgctcttagaattaactttgtgcctttattacttaaagtaaaagtgatttctggacctttttgaagcattggatgccatatttcagttcgtggcttaaatctcaacaagaaactggctttggccattggtcatctgaagggaatggcattgcgcacagaactctttgttgaaatggaaaggtccactgggtacaggggctgtttcctgtaatcctagctacttgggaagcagaggcaggaggatcgtttgaggccaggagtttgagaccaggctgggcaacacagcaagacccccatcgcttaagagaaaagaaggaatggaaagttcagctgtcctcacccttagctgcaccggggcaggcccattgaggagcacaagatagggtttctggtcaacgaaggaatgccacttcaaagcagaggacacaggaatggggaagaaaacgagccgctaagagaagatttctcatccccttgtgagagaagaaatcacgatcgcagggctctgaagtttatgtaaaactcatcggaacgggtggccgtgagaccgaaccaacagctcggagaacacccttctgcagctgcacagctttgctttgtttatttgcttgtttttgtgtgtgtgtttgtttttaaaataggtattcttttttttttctttaaataggtattctgttataaatgaaatcaacaaaatacgagaaaatgaggaccgtatcttcgtctatttcatcacaaaactgtcccgggtgggaagaggaacagcctatgtgggcttccacggaggtgagatcagaacatcagtcagggtatttatttatgtatttatttatttatttgtatctatttattttttgagatggagtcttgctctgtcaccaggctggagtgcagtggcgcgatctcagctcactacaacctcaatctcctgggttcaagcgattctcctgcctcagcctcccaagtagctggcattacaggcgtgcgccaccatgcccagctaatttttgtatgtttagtagtgacggggtttcaccacgttggcctagatggtctcaatccgttgacctcatgatccgctcgccccagcctcccaaagtgctgggattacaggtgtgagccaccgcacccagcccagtcagtgtatttatttaagtcatgttggaactgtttctcatttggttctgtgttgtacagtctgaaattagaatattattgttaacctcaagaggattctttccagatgcaattagatttcttaccactgattaccatgaaaacatgaatcctgggatgggaggctgcgtgcacctctcctggactgactctaggcaagctcctcacctcttagcatgtaggtcacacggcgtggagactcccgactcccgacagacactgtcaggaacgcaccgatacgcctgtttggcggggagggagagtggcgggggtcggactatcttcagatctctttttttccaaggaatggtcaccagctatttatgacatagaaaagttggtattccagaaacaggaaagtaagtttacttgaataatttcgtggagaatggaaggcagaccttgccagtgtcccccacccctcactaactgtgatacagcaaatacaacaatgcatgggtgaaagaaccacaggccttatccatgcgtccttcccacgctggccattgcaggtcttaccgttgctgcttatggtgaagctgtcgatgggcatagaatcgggtcgtgtatagtatcgggttgggtggtttctgcgcaggcccattccagggtttcggcttcagggtgccagtcattcattgcgcagcaagataatgacaagccagggtgtgcaatgtccctgcttagggctgagcagcagccgggaaagacacaaagacagttgtgggtggcttcactcttcacagggctgtggcagtctgtccacatcgatgacctccggagatccaccctcatggtttctgatgtgaccaggctgcagcatgtcaccatcagccagctgttcgcgcccggagacttgcctgagcgtgagtcacgaggcggagcccctgggggagcaggtggtggaagggcagatggcaggtgtggagcgtggcgtgcacatggcactaggagcagggccaccgtgtttcgtccctcggcaggagctcggggacacatctgcagaactgactggtggctcatcatagagcaccagggccgagcaggtgcgcttaccacaggctgaggtagagctctgtgagcaggccagccatggaagtgagcacctagaacacgccagagcccaggctggaaggaaggggctgccttgggggctgatcttcatgaccgtgatctctcatctggggacctagcaccacagcaggggccggggaagcctgcactcggaggctgagcacacagactcccagatggcaccgctgccagtccctgtgccaccttctgagtggtaacgcaatcacgtttgcttcgactgcagtgggcttggaacaccgggcggaagacggccatgaggaggcgatggagacggaggccagcacatcaggggaggtggcagaggtggcagaggaggccatggaaacagaaagttctgagaaggtgggaaaggaaacctctgaactcggaggcagtgatgtaagttctggttcttgggacctccccttgtgctgctggtgatgcttctgagctgcatctttaaacgcttttgcattgggagctagaggagtcgccgccgctgtgcaggggtgaggatggcgccccactttcctcacacagtgacggtcttgttgctggttactgggggtcaagggcatctgcaccggcagtttggggggtgcagggcggaggtcggcgtctcttctttgtccgtgaggaccgccgccctgtgctgtttgctgcattgagaccctcatcgcatacgggcggtttggcttttgcccactgtgtcagtggcagaaacggatgacccaaccgtctccaccaacaggtgtcgatcctggacaccaccaggctgctgagaagctgtgtgcagagcgccgtgggcatgctcagagaccagaacgagagctgcacgcgcaatatgcggagggtggtgctcctcctgggcctcttgaatgaggatgacgcgtgccacggtatgagcctccccacccctcttgcccctgcccccacgtgggctcttcctgaggagtgggcatcatttcactgtgtgttgggggacaccctctcaggtttccatggctcagcagaagcagtgacacagtgggaatctaagagcatctctcagattttgctctagaattggcctggccaacggacttcccttcctgggggaggtgggacagaagcactccggagccaacagctcagccacggccatgctgaacgtctgtttctgcctttgtacagcctctttcttgcgggtatccaagatgcgcctcagtgtctttttaaagaagcaagaagagagccagtttcaccctctggagtggttggcaagggaagcctgcaaccaggacgctctccaggaggcgggcacattcaggtactgtgactaaaggaagcaaggagtggctccaatctggtggcagcatggggacctgcctgcagggatcctctctccatccgggccatggggactgagctgtttctttccaaacctctcagccattcaaagctgtaaagtttttccccaagaagcacacagtaggtctggacagtggccaaatggcaggtgctggactcttcctctaatttcgtgtttacagtttttcatactaaaaacttaaaaaaagtaaaacatctgttcttagagtagaacatttaccgacattcatgttgataaccctagaaagggctgctgttttcagtcatgaagttaaaatgacgtgcagagcaggcaggggacaggcgggattttcccagtcctgctgtttgaagaatggtaacagcaaaaccaggacccagcagtatattcactgccatggttatttttctgtcacccatgagactaaccttgattatcttggatgtggccgtgtattgaggaaggaggggtgctctgggccccagacagagggtctctttaagacagactctcagacctcctgcctgaaagcctaagaaaccagtgacttggttatttgggcccagttttcccatctctaaaagacagcggactcctccatgagtccccttccaggtccaagcttctgtgccagtgataggttcgctttgggcctacagccaggtgtgatctgcaggagggaacgtgaggaagaagcggggtgaacggtaatgggggcttacaggggaagaagcggggtgaacgggaatgggagcttacaggggaagaagcggggtgaatgggaatgggggctcacggaggaagaagcggggtggatgggaatcggggctcacggaggaagaggggtgaccgggaatgggggctcacagaggaagaagcggggtgaccgggaatgggggcttacagggggaagaagcggggtggacgggaatgggggcttatggaggaagaagcggggtgagtgggaatgggggcttacaggggaagaagcggggtgagtgggaatgggggcttacaggggaagaagcggggtggacgggaatgggggcttacagggggaagaagcggggtgaccgggaatgggggcttacagaggaagaagcggggtggacgggaatgggggctcacggaggaagaagcggggtgaatgggaatgggggctcatggaggaaaaagcggggtgaccgggaatgggggcttacaggagaagaagcggggtgaacgggaatggggacttacagacaccttcctcgtgaccagagattttctgattctactttttctctagttatccttcgtttctctccttgtcacgccttctgaagggattttaggagatcagaaatattttcatttccctccgttcctccttgtggactctcttgatgcttttttttttttgagacggagtctcactctgtcgcccaggctggagtgcagtgatgcgatctcagctcactgaaacttccacctcctgggttcaagcgattctcctgcctcagactcctgagtagctgagactataggcacccaccaccacacccagctacttttggtatttttagtagaggcgagatttcaccatgttggccaggctggtctcaaactcctgacctcaggtgatccactcgcctcagcctcccgaagtgctgggattccaggcgtgagccagtgtgcccggcctgttgatgcttttgaatccctgactccactccccgggaccagccctgagtcactgaacctcctcagtctgctcttccccactctgctgttcacgcagcactaggcctggctccgtcgtgttctgtggtcaccgtgaggcctgcgcagccgctgagtggtggccagacccgcaccctcagctcacctgccccagggccagcagcaccctgactacctcgattcaccaccactgtgttctggggactggagtcctttgccctctcgggattaaacagcccaaatcctgagagtcctttgtgtcccgaactctgcctgcctgtccagatacagcagaaccaggctcagcggctccagatagggcggaaccaggctcggcggctcccgcctctcccagcgcttgtcccagcgcctgggttttccttctgccttttgtgttcgcgacacttttcctagtttgctgttttctccctctgtgcactgggatgctttattttcccaatagacattttaaaattcttgccaggttcctctgtactatatatttaaaaaatgtaggtatttctttttattctcttcaaaagagaggcttcgcttttcccccaacattaattaccttgtggggttttttttttttcgagacagagtctcactctcgtcccccatgctggagtgcaatggcgcgattttggctcactgcaacttctgcctcccgggttcaagcgattctcctgctcagcctcctgagtagctgggattacaggtgcctgccaccacgactgtaatttttgtatttttagtagagacgggatttcaccatgttggccaggctggtctcgaactcctgacctcaggtgatccgcccgcctcagcctcccaacgtgctgggattagacgtgagccaccgtgcccagccaccttttaattcttatcctttacacaagaattttgaaatagagctattattgttacatgtaaatatatacaacaaaatatatataacaacaaaatgtcttgtagttaaccaattatctttctgtctgcctatctgtgcattcatccatccctccgcctgcctgtccatccacccatctgtccgtccgcccatctatccatccacctgtctatcagacactcagatctagtgtacaaaaacatcaacaggaacaaatacttagttccagataaacatgtgccttcttgtttagtttgatctgggacaaattcattttggtctcttcatctgtattatagtctatctacaacagatttttaaaatatttattttttccaaatgaatcgtcataattttatttatttagagaacctcgatgacttgttctgaaaaatagttacatacaaaaattatgcagccttgcaaaaaataaagcagataagtgcggtggctcacacctgtaatcccaatactttgggaggccaaggcgggaggattacttgtgcccaggagtttgagaccagccagctagggcaacatagtgagaccccatctcaacaaaaaataaaataaaatttaaaaattagctgggcatggtggcactgggtgtgttgttcctgtctacttgcacggctgaggtgggaggatcgtttgagcccaggtattccaggttatgacgatctatgattgtgtcactacaccgcagttggcgtgacagagtgagaccctcacatacatgttttaaaaataaaaaagcaaacactacttcacccttccagtaacctaatgacagtttattagatgtagaattaagttccattccagttccgtctctaatcttagacatctttgtgagtctgttttctaggacttaaaaatgatggaaatgtcaagttattgctgtcgctgtagtgtggtaaatagtagactagttgttttgttaatgctcaagaaggaacaaaatgtcaaaaggtggcagaccgccactctggttcctctgacccgtggtggcccatctctcttctgtgctgcaggcacaccctctggaagcgggtccaaggtgctgtcacccctctgctggcgagcatgatatcattcatcgacagagacggcaacctagagttactgaccaggccagatactccgccctgggcaagagatctttggatgtttattttcagtgacacgatgcttctgaacattcctcttgtgatgaataatgaaaggtgagtggaaggctttctttccctggggagagaaactatcagaacacagcaggaccctaatatgctctcccaagtgctgggtgaaacgcagccctcaacttcagagcaacgttgacatgggtgctttctgcagtaacaataggaagtttggccgggcatggtggctcacgcctgtaatcccagcactttgggaggccgaggcaggtggatcatgaggtcaagagatcaagaccgtcctggccaacgtggtgaaaccccgtctctactaaaaatacaaaaattagctgggcgtggtggcgcgtgcctgtattcccagctatttgggaggctgaggcaggagaattgcttgaacctgggaggcggaggttgcagtgagccgagatggcgccactgcactccagcctggtgacagagcaagactctgtctcaaaaaaaaagaataggaagtttacgaagctctgagaaatttctgttttatctccaccctcctcatttccctgctttcagagcactggttctagccagacccagcatggcgtgacacggagacagtgcgctgcgaacagccccacaatctgtgctccttacccctgggatctgtgctccctccccgtccctcattccctggtggagcggcacagcccccacccccttccgcaggcctgatgatgtgcggctcaggctcagctcccaatagcttccacttcagctttcaggggcttcaattctggatgtagatttataaagaatatagaaataaatgtgcccaggctcggtggctcatgcctataaccccagcaatttagtaggctgaggcaggaaagtttcttgaacccaggggttgaagaccagcttgggcaacatagtgagaccccatcactacaaaaaatttaaaaattaggcataacgtggtgcgcacctgtagtcccagctactctagaagctgaggcgggaggattgcttgagcccaggagtttgaggtgagataggatcacaccactcactgcactctagcctgggtggtgacagagtgagactctatctcaaaaaaaaaaaaaaaaaaaaaaaaaaaagagtgagagagggagggagacagaaggaagaaagagaaagaaagagcgagagaaagagagaaagaaagtaaagaaagaaagagtgagagaaagaaagaaatggaatttgaattgccagtggaaacacttatttaaaagacaaggcgctgctgatgttcatgaagcaaagactctaacaagttgtgctctgtgttacaagttatcaaagccagacaggttcaggaaccagaagacttggttctgcccgagattttgggcaacacacttgacccctgtcagccttggtttgtttttgttttgcctgtgaaacaaagattgcataagacagttccctagttctgtcataacagaaaccctgtactgtgaaacagatcagcgccgtctgcctggcctgttggcccctttgtttttgaggtctgagaagagctggcatcagtggcagatcttatcttgtgttttgagtgacgtctcacaaaccctcttcttatcatccctcaccttattgcagacataaaggtgagatggcctacatcgtggtgcagaaccacatgaacctttccgagaacgcttccaacaacgtccctttcagctggaaaatcaaggactatctggaggagctgtgggtccaggctcagtacatcacagacgcagaaggtgaggctacctcaagacaggtcagattcagcacaggtgaatcacaaagggattgcctgacagtgaaaagcagatgggtggctagaattgcaaggtgaattttggagtttttagttttcacactttgtttgtgcagtaagcgtccaatttacgtcaccgcgtcattttaaagtttctgctgaaggagtgagaggccccggcgggaccagaaacctttcgatcctatggcagcaggagcctgtgagatggtttttagtgccgtgatggccagggatatggcgaaatggggtgtgttctggcaagaggaggactgtcgcctctatcagctggtcattcccattctgggccttctcagactggggcactggactcggaagatgcccccaggagaggcgttctcagaaggcacgagcgcctggagcatcccctactcccaggtgccccatcaggaggcacctcccagctgtgtctcccgagtcacagcccagacacagtgctgagctctgctgccagatgccagaagatttgccctagtccagaaaaaccaacgacaacgcaacacttttacaaaagccatctttcatacatgcaatagtcttttccacgtttacttatcgtaccatttggaagactcagggtggccttcttttctaggttaccattctgccactttttctcaaagcagtctctctcctcatgagcatattcctttctcaggacaataccccaactgaccctgcttttctatgacagcatgcgaattaggggctgcaccccgcccactagaagccagatctttctggcttgcatgctctgtgacccccagcccctgaagagcagcccacttgttcctaatttacttggacccgggggttcctgaagcatgctgtgacctgtagccatgcaacatacaatgtagccatgcaacatacaactcagtcttatctagatgtttctctttggggctagcttggctgtttctgacctaaatttgacactgtttccgccttcctttattttattccactggaaaaatatcctaggccaggcgcagtggttcacaacaccttgggaggccaaggccggcagatcacctgaggtcaggagttcgagaccagcctgaccaacatggtgaaaccccgtctctactaaaaatacaaaaaattagctgggtgtggtggtgcatgcctgtagtcccagctacttggtaggctgaggcaggagaatcacttgaacctgggaggcggaggttgcagtgagcagagatcacgctacccaccgcactccagcctgggcaacagagtaagactccatctccaaaaaaaaggaaaaagaaaaatatcctaaatgtctagacagtgactattccttcaattccctacaaaatcaggcagttggtacccctttgtctacgagctcccattcaacaaggcgtccccattccccttcactccggagccccctggaggcaggggagcgccatgacttagacgcactccaggccgctccttggtttcctctctgcaggactgcccaagaagttcgtggacatctttcagcagactcctctgggcaggtttcttgcccagctccatggagagccgcagcaggaacttcttcagtgttacttgaaggatttcattctcttgaccatgcgtgtgtcaacggaggaggaattaaaggtagatgtttagatactggctaagggtcaggtgtagagcttgcatgatggggactggatgcagacacggagacgtttcctcagctgcctggagctggtgctgtgaagtctgggaacagaacatggtcagcgaagggtgccggtgggtgaaggggtcgcccagtctcctctcaatattcagtgctacaccctcagtccaccgcccaggggctcctaaaacacggagctttctgtgaacatgagaagacctccaatttccttgacatagcttctttttaaatgttgagtttctcttgaaaaaaattaaatacgtaactaaccctacagggtaagaataaacaagtgaaattcaatagaaagtcatacttttgactacctaaaaattttaaacttcagtacataaaaaaggagagtgacaaatttaagaacatccttacagctaatatgactagaggttaatattcttaggaatcaataagaaaataccctaagttttaaaaaatgggtaaacgttataaaacaacaattttataatctcattaagcatatcaacatccaggaaacatttgaaaaattgcttagccttactattaatagcaaatcaacacaacagtttttagatatcatgtttacgtattcattttgcaaagctgatttttaaaaacaacagccgccggccagtgctgcaaagaaatagccaggccacgcggctgacagtgtagcgtgcacagtgggcgccctgcagggctgcgtggcagaacagttgagcaccttatccgatctgaactgctgactctgtcctgaggaaactactggagatgtggacaaatatttggttcacagggatgtccttttcagctttgcttcgaaaaataagaaatagtttaattgtccggaaatacaggatgggcaaattaaagtatggccgtatgatgggttattgagcagccattaaaaccatgtttttcaagtatactcagtcatagggaaagttcatgatgtcatgttcagtggcaaaaagcccagacgacacggtgaccttaacgtgggaggagaggcagatagaaaactggacagaagcaaacgggacagaatagcacacatggtttctaatttcctcttttatggttttccaatagttcggatttcccacggggaaaacataccatttttgtaatttaaaaatatattctaaaagcttttttgaatcccagtttctgcagatggctctgtggtcctgcactaggaaactgaaagcggcgtcagaagcgcccgaggaagaggtttccttaccgtgggtgcaccttgcctaccagcgtttcagaagccgtctgcagaacttttccagaatcctgaccatctaccctcaggttctccacagcctgatggaagcccgttggaaccatgagctggctggatgtgagatggtatggccctcctccgcctgccctgagcaagccttgtggtgcttccaactccactctgggaatggagagcttctggggctgtgttccaagtgggagatttcttcacaaggcacataccttagctgaattcagagatgttaaggacacatctcgctgacgcttctcacatcctagacaatgaaagtttaggtcgcaagcctgggacacaagtatacatgcagctaacagccggggcctctggtgggccggtgggaggggcaccgctcagccacgccctgctgtccgtctccccagaccctggacgcatttgccgcaatggcctgcacggagatgctgacaagaaacaccctgaagcccagtccccaggcgtggctacagttggtgaagaatctttccatgccgctggagctcatctgctccgatgagcacatgcaaggcagcgggagcctggcccaggctgtcatcagggaagtcaggtgagacccaggagccctcacccactgcttcatctggcgcgcgctcaccaggagcctgccaagtgccaggcatgtccatgagaagacgggcaggtgctcctgccatgggaggggctccgtcctcacccgttcactccgcatttgccgaacccttagtgagtgccaggcgtctcattagggtgctggagacacgagaggcggctgtgcattcagggagcgcactgtgtactggggccgtagaaaggcagacgggctattgtgatgccgtgtgagaaatgctgtggtagaaaggacaccccgggtgggcaggtgcacagagcaggacaggccctcagggccagagtccacttccctaaaggtgaggtgggacttgacaggcgcaggatcatgcagtgagcgggttgtggtggtaccccatgcagaggcatcacagtgggacaccgagtcccagctaagctgagcgtctgagagcgagagctgggggcgggccaggaagtatgtcacatagggcttgcttgtaatcccagccgctgggcctggaccccgggtcccgcatctcttctcccgtctccctcctcgtttcacccttgggttccttggtgggagccgagtgagtgagtgagtggcgccctcttttgacagagcccagtggagtcggattttctccaccgcactcttcgtggagcacgtgctcctaggaaccgagagccgcgtccccgagttacaggggctggtgaccgagcacgtcttcttactagacaaggtgagtacttgggctggcctcagcacatgcacggatccacccttttccgaaaggaagaacagcactgacagtgatctgcggctgggagacgctcttttggctctgaccgttttgtctagacatgcaaaggaaggtgatttcatcactaggccattacattttccatgtttaattgtttaattatttaccctctgctgattgctaagtcagagcatatcatttagaagtgattccaggaactgtgtgcagaaaggggctgacgcagggaacatgcttgtgaaaccttcggcagggattacctggcctttggagtgaccccagaacagaccactagcctggccatctgtggaagctgttaccattttcatagtcatggagacaaggatgtcagagaatgccaccggggtttggggtcttcaaaacagtgctgtcaacagaaccaaggaacaggaagccaccatgcctgtcactcaacacccttcataaagctactaatgtggggtggtctgcagaaagaaacctgtgaccctacagtgatgcccctctgtggccacgcagtggtgtccagcaacagtggccactcagccaaacacagcctcagcctctgcctcacccgcacccgtgaccttcacgtgagcacatccagagccctcaccgccagggggtctggaagaggcagcgctggctgtccgacctttggagcacaggaaggtttactaaaaggaggccagcatggatgctggatgtgttgactctgacctatcaaaacatcagcggcttagacacagtatcagctgatttcccacccaggatgggtatgagcagcccaaggctaaggtaccagctccccggaggctggcacggagtcaggtgcccacgctccgtcttgtcccttcattgtccctaatgttcagcttccaccccgtggcctggcgtcacagcctgtgggacagaaagcaggggaggtagaggacaggccgttttccttaagagcccaatcccggacacgcacacgccacaccagctcgtgtctcgtggtcctaaacttaggcactcggccttatctggttgcaagaaactgaggagtttttcgtggcatggtcatgttccaggtggaacttgagttcttctgctgaaggaaaaggcggagagaggatagtaggacacagccggtgccccccttccacccttttccccacacccacacagcatgcagcctctccaagtctcatcatgtctcggcgctctgggagatgcacagggctttcagccaggtccagcgtgggtcataagggccaggtgcccataaacccaaaggtaaaggagctggcccctgcctgctcacatgcccacaggatttgggaggttaggaacgtggggagggttttttttggcgataaaatggcctcagaaacttactgggtttctggtttatttccttccagtcagatctctgtgcaggtaaccacagccaaagaccttacctcgttagttttcctgctggaagcctgacttgtacccctacccagcccccgctgaagagcagcccttgggaccatttgaaacaagaggcttgggggaaagccctgccttccgccgtgaggctggctccctcggccgggcaggaagttgtcgacggaactgctgcaggatggcacgggtgggactgcgggcatggctggcttttagttgttttggatatgtaccttgaaggggaattcctggatcatttgataactctgtttaactttatgcagaggcactgtattgttttccacgggggctgcagcatctttcttacatccccaccagccaggcaccagggtctgaatttctccacatcatgggcaacacctgttactatctgatttttttcataatggccaccgtgataattcattgtggtttttatttgcatttctctaatgactagttatgatgagcatccttcatgtgcttgttgggcatttgctgtcttctctggagaaatgtccattcaagtcctttgcccatttttgaattgggttgttgattaacaaagttattaggatattaaaaatacacacatcacttccaagtaagattaatcccagcaattcaaggatggctcaaaataaaaaaaaaaaaatctgtaaatgtcatcagttatataaattaaaagataaactctatatgatcatttcaaaatgtagagagaaagcatttgataaaattatttggaaagaaatacccttgtcaaacttggaacaggaaggaactctccttgagctcacaatgcccaaggtagacataatattaagatgtctataccaacatcatgcctgcccatcaaattccattagtacagccattaaactatcttgtacagtgatgatgtgtattgcctaaaaaccagtgtttccacttctaactatatcctagagaaacttctcatttgctctcagacatatgcaagaatgttgaatacaggactgtcaggaattgcaaaaaacctaaatgcccattaaccagcagacaggtaactggtgtctttatcagtgggtacaggagtgatctggacctaaggtatcatgaagagaatgagttgcagaagcctttatacaacgtggtatcattgatatcaagttttaaaacattcaaaataataactccatgttcagatatgcttacagctatcctaaaagcagacatttagaaatatagttatctctggggagggacggagggatgtgaagttgtaactatatgcataatgttttgtttctctaaaaaatgatctatcgcagcagcttgggaggctgaaagaaaattttaaaaaatttaaaaattttaaaaaatgatctaaagcaaatattccataaatgctgagatttcttaaagcttggtggggggtatacagatggtcattattattacttaaagtttgaaatatcttagtgagagcggaggagaccttaaaagaaaaagaagagggaaaatcgtaacttgagaatgtagtcccctgacaagcagcataatcacaaaacgagcattcagagttcaagcgttaaacacaggatcacaaaggcctcgcaccccacaccccacacacacggcgcagccttggccctgaatgtggtgctccctctgtcgcccggcctggccgccctcagccctcccccctgctaatgactcctgtccctgcctttcttcagtgtcttcgagagaactctgacgtgaagacgcacgggccttttgaggccgtgatgcgcactctctgtgaatgcaaggagacagccagcaagaccctcagcaggtgagaccttaggtttggatctgtgaaggcgagaattctgaacctctcgtggttttcacttcttctggccagtttctctgcttcagaactgattgcccttcttggattctaggtttgggattcagccgtgctccatctgcctgggagatgcaaaggaccccgtctgtctgccctgcgaccacgtgcactgcctgcgctgcctcagggcctggtttgcctcagagcagatgatatgcccctactgtttaactgccttgccagacgaattctctccagctgtttcccaagcgcacaggtacaacaccctttctctcaagaaagcatcctttttttcattttccttttttggcaaacacaatattcagaaatataaactctattaaccttcatttggtagaaaacctgacctcagagaactatcataagagacgccacttacgtactttcataaatatctggtatctcaagattattctctccccaagacatacacatacagatttcagacaacaaattcagaggaactaagccagaaagtcttaacaaaggtcctcaccagaggcccaaggaatgtagacgccagtgtttttttttttttttttgagacagtgtttcactctgttgcccaggctggagtacagtggcacgatctcagctcactgcaaccttcacctcctgggttcaggcaattctcctgcctcagcctcccaagtagctgggattacaggcatgcaccaccatgcccggctaatttttgtatttttagtagagacagggtttcaccatgttggccaggctggtctcgaactcctgacctcaggtgatccacccgccttggcctcccaaagtgcagggattacaggcatgagtgaccacacctggccgacgccactggttttaatgcatcagtatcattcacagtcactgacctgaggatcaacccacttcttgtctagctttttggagctggttaaaagcagctctggctctctggactcagcaggcctcagcccggctctgtgagtggttggttttctttccttccccttccccccttctcaggcctcctaaaagtggggcaccaggcaagcccagtggatgggttctttgacatactttgggatattgaagggtattgttgccgggtccaaatgatcaaagtgtttccagaaagggatgcatgtaaatatcatctgctgaggttttgaagactagctctaacgggtgagaggagtgacttgaatctttcaatttaaaagtaaaatgccagccaggcatggtggctcacgcctgtaatcccagcactctgggaggccgaggtgtgtggatcacctgaggtcagcagttcgaaaccagcctggccaacacggtgaaaccccatctctactaaaaatacaaaattagccaggcgtgatggtgcgtgcctgtaatcccagctacttgggaggctgaggcaggaggatcacttgaacctgggaggtggaggttgcagtgagcggagatcgcgccactgtactccagcctgggcaacaagagtgaaactccgtctcaaaaaaaaaaaaaaaagtgaaatgctgtgcaaatctcaagtcattctgtaaggaggcatttgggaaacaccatccacctgtcttctgtttctcgtgttctaagggaagccattgaaaagcatgcccgcttccggcagatgtgcaacagtttcttcgtagacctggtgtccaccatttgcttcaaggacaacgctccgcctgagaaggaagtgattgagagcctgctctctctcctcttcgtccaaaaggggcgcttaagagatgctgcccagagtaggttgctttcttcctgtaaacctagcccctcatttcttcatctcgcttctgcatgtctcatgcagtgagctgcctttttctttctggtttaaggacactgtgaacacacaaaatctctctctccattcaatgatgttgtggataagactcctgtcatccgctcagtgatactgaaactgcttttgaagtacaggtaagaacaacatggagacttgcttctggaaagccctggctttttctcttcatcgcagcgttttgttaccaagtcttcttgtcgtgactagtagctagtacatgatcttggggagctttttcggtgagacacagcctggttacttgtactggttgtgtattctgacattttcacatataggcacatgagtttagtattcccacaagcacacgcatctagcaagaagccaacagtgccgtgaagggaccacagtggcgtgagggacatggaactcaagaggccagaatctgtggtgctgagcctggttccacagcagcgcaactttctgatttttcagatggtagcttagaatcctgctcaccctgaatgtcctagatgtctcctaagtttctattcccctgaacatgggctctatttccttggaaaggatgttgacatccaagaatagtatcacctgtggtacttgtatggatctaatattgcagttctcaaagtgttggtatggacccttgggtgtgaggtaggtctctgaggttaaaactattttaaaaattagattactaagataaatttgcccttttttaaaaaacatgttgatacttatgatgatgttacaaaaagcggtgatgagttaaactgctggcccctcacgtgaagacacagtagctggaggtattgttttcttcaccgccatgcacacgtggttttcttcatgccagtttcattttagttttactaaatcttgactcttgaggatttgacttttcaacgttttgtggaaatgggaagcacacacaaaacactcccactacacaccggagtagacagttgcctcacagaaaatcactcatgacaagccctgggttatcagccggctgctgtgttcatggaccgccacccgtgctgggaggaaggatgcacatgatacaggtgtccagggctgggcaggcctctcctggaaatcagcaaagtgagccagcctcagccaaacaactgacaatgttggttggtgatgataacattcaagcttttaagctgaaattaaaattttgaaaagcttatattctccactatgagcttgtgagcttttgaatacttaaagacattttggggcaatttgtggtgatattaatgaatatggatttttttttttaaaacgtagaatacaaatgtgtcaacctttacaagacctgcacagcccagtgaaccaatattttccaaatgaccaatgcctgatgtcatgaaatcatgtgggtcaaaaaagaaaaaaatctatttaaagtatgggcagacctttttgattttaacataattgactgaaaaatgcactgatacagtttcaggctccacattgcaactaacctctagacatgaccatttatcactgtgggcacagcattaaggaataatagccacaatcagctgcaaaaactattaaaatgttcctcgctattccgagtatatgaggacagattttcttcatgttctcccatatgctgcagcgatggggagcagggcaggcaggccgctgacttccaggagccaggccccagggccagcacaggaatggaagaccaaaccactcttctcacggattcatgttttggaaaatattttaaatgttatttaacatgtaatagctttattgttattttaaatgaatgtatatttttgaaaccttttgtttttaatgtctcataattcctaatatcataaatattgataatataacccacataaaagctcttcggggttctcaatttttaagactataaaggggtcctgaaaccaaagtttgaggacagctggtctaaaatgtgagttttatattcctccagtattatgctaaaaggttttccataaaatcttagaaaccacgtatatgtatgtatatgtttatacacacacacacacaggacagacgaccgatagatagatgctcttttttttagtaaggtatgtctccagatctgagagaaccaggaataatatttctctttctgcagctttcatgatgtaaaagattatattcaggaatatttgaccctgttaaaaaagaaagcattcataactgaagataaaactgaactgtacatgctcttcatcaactgcctggaggtaagtgaactctctcttccctgaatttcttttggaaactatctgaaccacatggtttaaaatttacagaatataattttagtcagtataattaacgaatgctctgttccgtgcagaaaagaagaaaggtttcaaagacgcggcttctgccttcagcaacgtatattttggcatttacttgcatatacatacaaaacagaacagcctaggagaatatactgccaaagttaacagtggttatcattgagtggggacattatggatactttttatcttcatatttttatatccaaaatttttataatgtaaataaattagataattttttttcctcataggttcacttttcccctccttcttgtccttaaaataaaaaggaatgttaggtttccataagtcaagaaatttacactgaaacctacagtaacattcttctatccttccttctccacagtcacattggcgactgtagaagcttggggcatccatgtttaaaaaaataatatccttttctttcttgttccttgttcctcaggattcaatacttgagaagaccagtgcttactccagaaatgatgaactgaaccacctagaagaggaaggtcgtttccttaaggcatattctccagcaagccggggccgagagcctgccaacgaggcctcggttgaatacctgcaagaggtggcccggatccgcctctgcctcgacagagctgcagatttcctctcggagcctgagggaggcccaggcaagtcttctctgccttgctttcctttgggtttaaagactccgttatttagaaattcaggaagtatgggaaactagttcttcgaatagactactactgggcttttctacatcccctctcccctggatgtgtttctgtgaatgcctgtgggtaggtccgatgccctctggttggccttgtgtcctacaataaatgccctaagtcaccagccactcacccgctttctcgttggcctctcagagatggccaaggagaagcagtgctacctgcagcaagtcaagcagttctgtatccgggtggagaacgactggcaccgggtgtacctggtgcggaagctcagcagccagcgggggatggagttcgtgcagggcctctccaagcccggccgcccgcaccagtgggtgtttcccaaggacgttgtcaagcagcaggtgagaagcggggccgggcagcacacaaacatgcacccccacagccccatacaccccaaacccacacacccccctaccctcacaccctaccccccccacaccccaccccctcacaccttccccaccacataccctcatacccccacacctcaccctcacacccccacacctcaccctcacacccagggatggtgccactgcttccgcgttccgcctgcccttagcatccccagagccaggaaggaaacctgccgcttgtctgtctggtcctttgtctctgtgcttcagctgatttgccccagcttgtgatcatgtttacactgcctgctgtagggccaaggtgagggcactcacctcagagcttctttaattaggcatcacttctaattgaatttcactcaaggaaagtagaacattcttgtggcctttgctttcagcgaattaaacgtagttcagcttgcaaggtgcgacctttttacctctggcaggcagagacaggcaagagcaagaactaggaatagaagaattgcagaagaggcttcaaggccaggctgggcacagtggctctcacctgtaattccagcactttgggaggccgaggcaggcggatcacttgtggtcaggagtttgtcaagaccagcctggccaacatggtgaaaccttgtctctacttcaaagaaaaaaaaaattagctggacatgatggtgggtgcttgtaatcccagctagtcgggaggctgaggcaggagaatcacttgaacccgggaggcagaggttgcagtgagccgagattgcaccactgcactccagcgcctgggcgatagagcgagactccgtctcaaaaaaaaaaaaaaaaaaaagaggcttcaaggcctctcagtggtcctttccagatacccagaaattaacaaattcttattgtccaggggatacaaaaatggtactaagaaccccggcactgtttgactaccacctggggtttagagttgacatgacttgagccacccggcctcaggtgtggtgcggtgcgccgcaaacggaggaagcaagcacctccccaggtagcgctgccgtcggcaggcattccctgcacttgcacctcttcgtctactgaggaggaagctccctgcgaagagggcaccagactgtcctgcctcaggccaggtcagggaatcccagcttggctgcctttaaacctcgaatgatcaaccacctggttcctgtacccgttcagacggttctttgcaagacattcctcccattgttcacccccaactaacctctgtattccaggggctgcggcaggaccacccaggccagatggataggtacctggtgtacggcgatgaatacaaggctctccgtgatgctgtggccaaagctgtcctcgagtgcaagccactgggcattaagactgctctgaaggtaggatgggcccgtggcttctctctgataccaggtggcatcccttggagcctgcatgttccctggtttatgtcaaatgatgcagggtgatggaccactgatgcagcccatcacgtgacactgtattggaagtcacgtgcccacagcctccagggcgcacctggctagtgtgcgtgaaccagtggctggaacaggacagctatgacagttgagctgggttgacagatttgctgtgtcttgctgatctgccaagtccatcagcagcgccttttgatttatgcccattacttcctttgagaccctgctggaaaacagtctaagaaagatgctgacacaactattaatagcaaaattcatacctagatgtattcataattcagatatgcatgtgtgtttaataaaaatacatatgttggtgtagtgtgggaagttaaaaaatataaagatgtttttagaatctaacctttaaattggtctggtcttgcttcctttttgagtccctgtgccaggaaaagaggaaatggaaaatcctctttctgctcagaagtttctaagaccagtgaaggagtcagaagaacagatggtgattccgttgcttctgtcattaagctggctgctaaatatgcgttgagtttaatctgagagtatttcaggaactttgtagcccaaaagttgctcgccagaagactgcccatgtggggcatgaccccaggtgtccaggcctggaaaaggctccttcccttttggtgggttgagggctgaggcatgtgaaaagtttcttttcacatgcaaacttcgtgggcctctggcccttaggtagatctggcaggcagcggtgcgggggcgtctatcctataatcctagcactttgggaggccgaggcatgcagatcacaaggtcaggagtttgagaccagcctggcaaacatggtgaaaccccgtgtctactaaaagaaaaaaaaaaagaattagccggacatggttgcgtgtgcctgtagtcccagctactcgggaggctgagttagaatcgcttgaacccgagaggcagaggttgcagtgagccgagatcatgccactgcactccagcctgggtgacagagcaagactccatctcaaaaaaaaaagatgtgttgagcttttaaattcttacttgatacccttgattttgcaggcctgcaagaccccccaaagccagcagtcagcctacttcctgttaacactgtttagagaggtggctattttgtacagatcccacaatgcaagcctccaccccacgccagaggtgagtaaccgcctgcagggctgtgttcaaagtctcagtatttggagggattttattgaatagaatgaaagttatcaacacaaatcataccataatttttttatctaggatagaggttctcaaccttgttatgtggaggaacacataaccaagctgtttaacccaaagcttgtagaattataatgaaaactaaagccaagaacataagataatgtttaacagaatagaatatcaaaattaatgcttacgtatgtggatgctgtgtttgtatatgcacaattctcttctctgaaaaatttccccctcaaatggtggtgatttctccatatttaccttgatatttgatgtgtatttggtgtcagtgtatgtctaagagcaattcacacaatattctttgatacatcttaatgttaagtttttttcctgtcagcaatgtgaagctgtgagcaaattcattggcgaatgcaagatcctttcacctcctgatatcagccgttttgcaacatcgctcgtggacaattctgtgccattgttgagggcggggcctagtgacagcaaccttgatggaacggtgacagaaatggccattcatgctgcagccgtccttctgtgtggacagaatgaactcttggagcccctaaagaatctggccttctccccagccaccatggcggtaagagtaggccacaattccatcggccttcactggaacaccccccagagcttgtcactgtagagaccgagctgcagctgtgggaactcttgagcatctttatctcctcagttctctgcctttgtgtcacctgattcttgagcacacaagatagtgacagacttgccttgccctttgttatttcacaggaagctgttctgttttcttcacagacagcttgagaagtccagcagaaggaaagcagagttccctttcttcctctaggcctcctgctgagcagcagcacccaggtgacaagctcacttatctagagctgtctctgtcttcttgtttttcagcatgcttttcttccaaccatgcctgaagacttgctggctcaagctcggaggtggaagggtctggagcgagtccactggtacagtaagtgttggggtctagatgaccccacactcctttgagcttcaaagggtgtccagatgctatgaagcattgggttcgacttggggtccacgtggtttgtgcctcagggtccaaaaccacctgcattctaccggtggcgtctgcagaagacgaatggcttgaaggagctggcactccgccggctagatgatccaaaccatttcatttctttgtcgtgtggaaaaggccctctgtgatgcacttctgttctctggaatatgccattttgggagaagggagggactgggaaccacatcagagacgcattcaaaggcccaccacaaaacaaagtttttgacacaaagctcttctgaaatatatgaaatatagaaccgggagactgactcatataacccatgacatgtaaattttgctgttgcctgagtaaatattttaaaactagtttttaaagttgttataaaatatgctcatgacaaaaaaaaaaaaatcaaggaaaatagaaaggtctagaatcctgtccaccttgcctccaaaagtacccctggtatgggcctatattctaattgctctttacttgataaaattaataaaattagactcagacatttttcactgacaacatacatttattaagcttcaggcaggtgtcatgtaacttaacaaattagcgtgggatgctctggacagtcattctcatattgtggtcagggccagagagtagagagttagctttcccttttcaatgtgggtcattgggtgaaacctcattagccaatgtgtgtcctgttctcttcacagcttgtcccaacggccatccttgctccgtgggagaggtgagtcttggtatttaagatagggtttgaggggtggcgtgcactcctgggttggaggagggggatcgtgggtcaggagagtgaggctctcggccttccaggagagcacaggctcaccgaggactgcccagggtgctctgagcagggcaatgccaatggcgctaagggtttctagcccagggcttctcagactcagcactgtggacgtggctctgcggcgtgggctgtcctgtgcactgcaggctgtctggcagtatgcctgacctcgagtccctggatgccaggagcacccactcctcccagtgtgacagctaaaaccagacattgacaaaggtcccctaggaaagaaaattgctactggttgggaactgctgctagccattctttctagccactgcagcatggggtcagtgagccttgtcttgatagaatggcaaggtgttgcctggaccacaggctgcattattagccctcagaggaggtgtggtccagatgccaaaggaaaaagccacgtgtaggctgtgcgccatgggggaagaactgttgattattcctctctggattcccaagcatctagcctagagccctccatacacagtatctgtacttgctgagcaagaggctggtgggttgagctgacacgtggtagttagttattagtattacttacttggttgagatatgtctggctctcttacccaggctggagtgcagagtgacatgatcatagctcactataaacattgaactcctgggctcaagcgatcctcccgcctcggcctcccaaagtgttgggattatgagccactgtgcccagcctgatacacgtcatttaataatgtatataagagatacggagggagaaaaactgttacatacacttcatttttctgagcttcaatcacttccttgtccatgaaatgaggacgctgaaatagagtctatccaagaatgctcccagctctgaaattctgtaactggtttggtgtgttatcagccgtgactctcagtatattgtggcacaatatctgattttgaaaaataagcctttggaagtagattatgtgattagatttttttaaataaaaaagtccaagccaggtgtggtaggtcacacctgtaatcccagcacttcaggaggctgaggcaggtggattgctagatcccaggagtttgagactggcccgggcaacatgttgaaaccccgtctctacaaaaaaacacaaagcatcagcagggcatggtggtgcatgcgtgcatgcgtgcatgcgtgtggtcccagctacttgggaggctaaggtaggaggattgcttgagcctggggaggtcaaggctgtagtgagccgtgatggtgccactgcactccagcctggaggacagagcgaggctctgtctcataaaaattgatatatgaaaaagtccaaatgaatataaggaagtcagtttggaagctcttctagtattcttggtattagatcatgaagtgccacaggctagtgtgatagatggagggatggaaaaagtgctgaatacaagaaaggaaggttgaattttatatatttgtctataaagtgtcactctgggaataaagcttaaattgtctcacttatttaaaaaacagttccagtttgcccacgtgcaacattagtgagtacctaccctgttcccatgggttctccacccacccgaaacaagcacacactgggacaatctgagggtgctcacgtctgccggtgataaggaggtgttcatttgcatgatggcatttgtgcataaaatggtactgctccagaagtggttctagtgccctgtcttcaccctagtgtggcaggccgatggaacagagcatctgcattgactgccatgcgccgattggaggcattgaccacaaacctcgggacggctttcatctggtcaagtatgtgggtcaggattctatttcctaagtactcaaactttggggtgttgggctgtttttattccagctgataaagtgatactcaagatagtactaattactccagtacatgtgggcctgtgtcatattgaatagcaatgccaaagtcccagcagtcacacagcagggaggcatctgatctgttgttggatccctgggccctgaaatgcaaagcaggctaccctttaacagctgttaatatgaatacaggtgtcttccttttgggccttgggtgcaccttctgtagaaatatgcatgacataaacagatgatctaattcacgaggacatctatgtctgcaggaccaaaacctgggcatccgtctgtctcagcagatgccatctcacttgccagcaatcttagctttctccattttttattttttgagaaaaatgaaggagacagacatagtcttatgaaataccagacttcagaatccaggtacaaatccgatcccacaatcccatgctgagatgaatgtggttctaaatgctcctttcagagagtgagtgggacctgcgtgggggcctcacattctgactgttccctgcagtcacagcttaaaatactttcatgttatctccagaaactgtcacagtgtcctccatcctctaatagttttgccactgagagcatcggccacactgcatctcctctctgccggactttagatcccggtttttcctttggggagatgagaacaatatggacacccatgggatgccgactgtcctcccaaactctagctgttcttagcccaaccgctcctctcctgacaaagacttcagtggaaaagacgggtccaggcctgcgtcttaacaccctgcccggggatcagcatcaataccacacagcgcagccacctgacgctgagaatgcggtcgggtctggtccaccggaaaggcgagtctatcatgagagagactcttaggaacatggtccaggctttgtggaacagcaagtactcttcacataactctcttctcagccgtaagcctcactccaagtgctgagaaagtgcagcgtgccaaagcggccagcctcagcctctgtcttgtgttctctcgttctttccagagacaaggcagacagaacgcagaccggccacgtgctgggcaacccgcagcggagagacgtggtgacatgtgaccgagggctgcccccagtggtcttcctccttatccggctactcactcacttggctctgcttctgggagcgtcccagagttcccaggtataacccagtgctgccaaacaatgggctcagttaagaacctgctttcgcttcttcccagggagtccttttgtcttgagtcctagctgccatctatgcgttttggagataattagtctacaaagtaatatacaagttatacatcttcatgtttccccctgtggcgtatgatggtatggggggaactactccccagattatacagaatccacttcaaattaacactctgtgtctctggtccacatctgggagtagagaggctgacatcttcattattttacctgtgtcttcattgtagctagggaagaaagagcacactgcataaccaagatggccaacagtacaatctggatattctttatctcactgtaacaacagaaaagccagcagccgttccgcttgctagccttcctttcacctggatcactccgccgttttcatcttagaaaccgccttccgactctatgctggtgctccactcccaatggcctctaccaggctcaccatcttctctacaaaccagatccccgctgaacactctgttccgttgcccccacaggctctgataaacatcattaagcctccagtgagggatccaaaaggctttctgcagcagcacatcctgaaggacctggagcagttggccaagatgctgggacacagtgccgacgagaccatcggcgtggtccacctcgtcctgcgcaggcttctccaagagcagcaccagctctctagcagaagtgaggaaaggggcaagggctgggcggggatcacacagcacaacggcagcgcaagcaggctcgctgtcttgtgggccaccccacacacagccagtctgagctctgtctgtgctgttgctggaaagaatgagagaacacacagagagaaaaccgtgtctagggaaggcgatgcctggggctggaaaaaggaagcactctgcttgcccagaggctggaaggagctgctctgttccctccattcacccctgcctggctaagacctgcggtattcgggagcgtctgcacgcaagtgttcagtgtgcatatatggggagtcttcagttccgaagtcagccccgtaggtcattcccctaccatgctgggagcacgtgtcgtccacacagagcgtgcgtgtcaaaggatcaatcaccatcacagttgtgtgctgatttattaaatgtttatatgtccacagttatgttaaaaaaaaaaagctataaaatattgtattcactgagctaactttctattttaaaaatttaaatccatacagaaagaaaaggtctgtaagacaacttagtaaaatggttatatggttatctgtgagtggtggaattaagagtgattttcttttgctaatctgcaaaaatcacaatgaccattgtgaggacaatgttaatttaaaataataacaataatagcaagaagaagtcctgccccatgacaagaaaatctgctcccacctcaggtacttctttgcctgaaactggcattcctatttattttccattttgaacaatctgattttattttaagcctcttattctggtgggatttcagcaaagtgagcacacccagagtcacactgatgaaatgacagaatcctggaagcaggtggacagttcccgcagcactccacatctgtgtggtctgcctcagggtttgggtggcagcagctgagacggctggcggtagcctgggccactcttactattgagctcaagttctgttctttcagtaatttttttcaaaatgggtctaagattacaattatgtaggatagaggaatttttagagattgatgttatcttcaaaaggtcattaagttggtggtaacaacaggaactacttcaaaatacttagattaatttagaaagctattacctcaaaacgagtgttatttctattaaacacttatttagggtttattatacgcagactgctgtgttctttgtgccttgggtaacctacacatttggagtttttttgtagggcttttaaattttgacacagaattgtcaactaaagaaatgaggaacaactgggaaaaggaaatcgcagctgtgatttctcctgaactggaggtaagcagtaagtgctgacagctgggttgctcctcggtccagaaaggaagggtcccggcgtctgctgaatgctccttgcctgttgcccctcgtagcggtgccagcaagagcctttgactgagccccagattccaatgctccccacctcgagtcactccatcctcctcctgtccccaagtgctcttccctcctacagctggtcatgaagtcagtccgaggaattcctgggaatccagcaagtgcaggcagtgtttttctctccattactttttacagcagaatgtaatgtacgaggtagagaaataaactatcacatatatacccattaaaaatgaactgacaatcatagattaattattcatctagcagccagaatgttagtaagagaaatataggtttctgaatctcattctgtttggggagacatacatctataaacaaacaacactgaaattagaagatcaaagggaatacctgattacatgctcagagcaggggacaaacgccctaatatgcagacacccactggtggagttactgggtgttacaatctgtttgtagcaatacctcacttccagaattttttttttcattttctccatccagcatctagataaaacccttcccaccatgaataatctcatcagccaagataagcgtatcagctctaaccctgtggccaaaataatatatggtgacccagtgaccttcctgccccacctgccccggaaaagtgtggtccattgctctaagatttggagctgcaggaaaagaattacagttgagtacctccagcacattgtggaacagaaaaatggcaaagaaagagtgcccatcctctggcatttcctgcagaaggtatgtctggcttactgtggctccctccctctttcggtgcagagttccccagcaggcctgaaggccctgggcttttacgtagtataatcattcttaacagactattccagtgctttggttttgaataggatgtagcagaagactcagggctagagatcttcatacatatcaaactgtatgattgccagaagcgtaaagtcacagacgaaatacacacccacgttgggattagcagtgacctgtggggaagctggaggccaggagaggacctcccctcatcactcagccagacagaaaaggatgcagctctttcccagccgctctgttcctctctgtccacaatgctggagcatgggcagatcaaacaaaactcctccctgtgcctaagcatcgaggcgtacgtggaagacgggagtgagtgggtgtgtgccggcggtgctggggtactggggagcagtcaagtgtactggccacatctgttggaattggaaatatactttcctaactttcacccatttgcactttcattttctacaacacattgtctaaacatttctctccatggactattatttgctgtctagcaaggatgaagacgagttggaaacttctgttggtcagttgaggagtatgagttcacaatgacaggaaggacttcctgtcaatactgtggcctctctctcagatgcagtttcactacgtcgaagatgcttagatcctaggtcttcggaaggacacccaggaataaggccagccctcgctgcctaagctctgggtctcttctttcagcagcttctctccgtacccagccagttacatgggcccaagggacagatttccttcatcagcctttgatggacgcggctgatgcgtcagctccatagaggctgggctccctcttcgccgccctccatttctagcacactgcactgtctgtagacttgtgggaagaacttttcccgttttcaagctccacgctgcatcacaggaaatgacactgaccagattaagctacaaatacaagtctcgcagccagtctcaaagtctgtaaccccaataacattttttaggtaaataaaaattgttactgggtggtcttcccttctccaggaagcagagctgaggctggtaaagttcctgcctgagattttggccttgcaaagggatctagtgaagcagttccagaacgtccagcaagttgaatacagctccatcagaggcttcctcagcaagcacagctcaggtgtggctctgctctgacaggaccaggactgtcccgcatttggcggttcgaaaggatcactgcataggggaacagggtggggcggaggggaggaggcgctgatgggtgctctatagcctaagcccttaccatgcggtgaagggtgcttgaaccccaaaaacatattagaagctttcgccacagctgaaaagcacctccctctctagctcctcaaactcggctcactccttcaaacagcacctcagacatgcttgtgactgcacaaagcaggaaagatgggctctcggcagagcatgtaactagggtggtttggccctttcagggggttgctatcatacggttcttaccaagtattctgttcaacagatgggttgaggcagctgcttcacaacaggatcacagtctttctgtccacatggaacaaactgaggagatcgcttgagacgaacggttagtatcctgtcccctgtaccactaagcgttccaggagagcctcgtctgaaagctcttctcgtcagcctgactcggcccatccctgtcaacacccagcactgtgtttgtttgtttttgagatggagtcttgctctgtcgccaggctggagtgcagtggcaccatctcggctcactgcaacctctgcctcccggattcaagcaattctcctgcctcagcccctagtagagacagggtttcaccatgttgcccaggctggtctcaaactcccaagctcaggcaatccacccgcctcggcctcccaaagtgctaggattacaagcgggagccactgcgcccagccagcactgttaacgcttaacttgtgtctcttttgatggtggtgtctggataagtaaaataatgtgtcaggaaaataaaccctcagtactcttcagtccctaaatatggcatcaaaagggagctgaaagcatttgaaactctatcagcatatgagatggggcagaaccgagacccggctcccggctgtgtgtggagctgatggcttctgcatccctcctccccacgcctagattctgtgaggagttggaactcctctctgcttaagcataaccctgtcgtttaaaggtgagatcaacctacccaaagactactgcagcactgacttggatctggacactgagtttgagatcctcttgccacgccgacggggcctgggcctctgtgctaccgctctcgtcagctacttgattcgcctacacaatgaaattgtctacgccgtggaaaaactctccaaggaaaacaacaggtttgtgcacgagccaccaggaagtggtgcctgctcagcccagagtccctaagcccagtggggcagacacaagcaagcttcagccccttccctaacagacactcactccttcagccgcccccaccagtgacccgccccatacttgggtagggttttccactgctccaactgtgagaaatgggagcctgctccctgcaacatagagccctaggcccgcatgcctggcctggacgctgagcgctgtctttctgcccctcagctattccgtggatgccgccgaggtcactgaactgcatgtcatcagttatgaagtggagcgggacctgactccactgattctctccaactgccagtaccaggtggaggagggcagagagaccgtgcaggagttcgatctggagaagattcagcggcagatcgtcagccgcttcctccagggcaagccccggctgagcctcaaggtagggctgactcctgccactgctgctcatttggtgtgtctgttgtgaacaagcagcccttggtgtgtttctcgagagagggaagcagcacctcaccctgcagtctggtctgtatctcctccctcacacctgcagctcccgaggccaccacgccacctgtatctccgggccgcagggctctcctgagccctctcctgcagggccatctgcacctcagtcccccaaggaactgttgaggtctttttttgaaacagggtctcactctgtcaccgaggctgcagggcagtggtgccaagcctccacctctgggctcaagcgatcctctcacatcagcttcccaaatagctgagatcacaagtgtgcaccaccatgcccagctaatttgtgtattttttggtagagatggggcttcaccacgttgcccggctggtctcgaactcttgggatcaagggatccacccgcctaggcctcccaaagtgctgggattataggcgtgagccactgcacccagctgattgttgaggtcttgattctaccagttaatggcaccaccacccccacagcccctcttccttcagcctccatgggtaacctgccagcagatgccattagctgtgccttctgtgtgtcctcacctgactgccaaagcccaccctgtagttaaaagcatcctgtacgttggactgctagccactcctaactggtgcccacctccaggttcttcagtccacggcctaaaacccacatctggctctcttcatcctgtgccggatggacctgcctggcctctcatggcatatgggataaagccgacactctgttgtctggtatgggaggccctgtagctcggcccagcccaaccttccagccctgcctccagccacttagcccatttccctgaactgcatcccgtgacctcatgcactgaagccacacagcaggcactttcccatctctgttctttgactggacgcacttgttccttccagctgcagtcatatctactgtacttatgtacggtaccacccgcaactgggccaggaactgtgagagcccatggattttttttttttttttttttttttgagacggagtctcgctctgtcacccaggctggattgcagtggcgcaatctcagcttgctgcaagctccacctcccgggttcactcatgccattctcctgccgcagcctcccgagtagctgggactacaggcgcccgccaccatgcccggctaatttttttgtatttttagtagagacggggtttcaccatgttagccaggatggtctcgatctcttgacttcgtgatctgcccgtctctgcctcccaaaggctgtttttaattcattctcacagccatttcctctggcagagtgactgcctgtgcatggtctgtgcctttagtggctgaatgaataaatgaatgggatatgcacaaatacctgttgccctagcgcctcctgtggcgaagcaggccacgatgatgtgacaatatcttgtcatgtaattggctgtgaggactccgctggattcccggttgtgttactatttccatagatggtgggttaatgacggagaggggcgctcttagccaagggatacacagggcagcgcggcactacgctgcagttttccggctgcagattctgtttgtcatctgctggaaatgtccacgatggatttaattttaaaaaacttttttctttcccaatttagggaatacccactctggtgtacagacacgactggaactatgaacatctctttatggacatcaagaacaaaatggcacaggtgatcccgataaacctgatcctgtgcacggggctttctgccttctcagtgtgtttccctccgtgttaggcctactccagccttgccccgggtgtttgctgtgagcccacagtttctgcggcctcccttacagagagcaagcaagacagcaaatcagcaagttttcttgtagagtaaaagcagattgacatcttgtgggtttgattcttaggaatgatgttgatgcatggccatgcctgctgaagcgggaagtccatggaaccgatttgttcctgctctccgcatgcgggtactgataggtagacctgtgtgtctccatggcctccaggaactgcctgcacaccgtgcgcccaagtgtcagctgttagagagttggccccccgcatgtggcttgggcagtgaaggggctcggctctcttaccaggtggtgagatgccagaaacccagcccacagacatccctctcctgcttttcatttcccaggactccctccccagctcggtcattagtgccatcagtggacagctgcagtcctacagcgatgcctgtgaagtgctgtctgtcgtagaagtcactctggggtttctgagcacagctggtggggatccaaacatgcagctgaatgtgtatactcaagacatcctgcaaatgggtgatcagacgattcacgtgttaaaggtgggtctcacaccgaaaaggaaatcagcacagcccctcaccctggtctcctgcttcccgcgagggataggagcattcagggagtgccactctaggcgctcctgaaaaggatggggagacaagaacaactgctcacccagtcagtccagcataaacaggacacaccagggacagtagagacagacacgcgctagaaatgccagcagtctagatagagcccaaatgtgactgagtacatgaggcccctgcaaacagcgtgatgtgagcgggctgtgaggtgccgcaggagggaactggtagataggacagagatggccttcacaaggagggagatcacattagtacagggcagaacgaagagaagaatgcctgtgtggagagcactcaggctccctggtgcacgacatgagtgggggtgtgagacctcagcccccactcaggaattctattccttctgcaggccttaaacagatgccagttaaaacacaccattgccctctggcagttcctgtctgctcataagtctgaacagctgctgcggctgcacaaagtaagtctggtctcttcctctctgctggacagagggactgcgctcccttctccctgcaggctttaatgcttcatttgctcttccgtcgttttaggagccatttggggaaatcagttcaaggtacaaagcggatctgagcccggaaaatgctaagctcctcagcacattcctaaatcagactggcctagacgccttcctgctagagctgcacgaaatgataatcttgaaactaaagaacccccaaacccaaaccgaggagcgcttccgccctcagtggaggtatggatttgcacacctatggggcggggcagacacaatgttgtgctgtctctcctgtgatcttctatagacacaaaaatagttcttttcttaccacagaatcccatttcctgctttttgtcattaccagggcacctgaggactggctttttggttttaatctctactgggttttctttaagcaattacacaagtgtttttcagacaagagtcttgccctgttacccaggctggagtgcagtggagtaatctcaactcactgcaaccttggctcactgcaacctctgcctcccaggttcaagcgagtctcatgcctcagcttcccaaatagctgggactacaggcgtgtaccaccatgcctggctaatttttgtatttttagtagagacagagtttcactgtgttggccaggctggtctcgaactcctggcctgaaatgatctgcccgctttggcctctcaaagtgctagaatgaaaaggcgtgagccactacacccagcctaaaagtcatatattctaattttataacaagtagactatgtcaaagagaggtacattttaaatttgatagaaaaagctatcctaggccgggtgtggaggcttaccctgtaatcccagcactttgggaggccgaggtgggtggatcacctgaggtcaggagttcaagaccagcctggccaactggtgaaactctgtttctactaaaaatacaaaaattagccaggcatggtggtacacacctgcagtcccacctactcaggaggctgaggcaggagaattgctttaacctgggaggtggagattgcagtgagctgagatcgcaccactgcactccagcctgggcaacagagggagacttcatctcaaaaacaaacaaaaaaaagaatagaaaaagctataccaatgtataaagagtgtatgagaatactcaacattggatattatccatcttttacatagttgccaatctaaaggccaaaatggtatctcattttcagttgtatttccccatttaccgtgaggctgaacatgttttttatatttatcacccatttgtatatcatcctctgaattgcctttatgttttattttttgagaccgtgtctcactcccacccaagctggagtgcagtggcgcaatcttggcttagtgcaaccgctgccttctgggttcaatcgattctcctgccttagcctccctagtagctgggattacaggtgccaaccatcacgcccagctaattttttctattttagtacagagacggggtttctccacgtggccaggctggtctcgagctcctgacctcaagtgattcacaagctttggccaccacacccagcctaaattacctcttcgtatctttttcttttgcgctttgtctctgtaatggttgtgagagctctttgcatagaacaggggttcatcttctctgccgtgtgccacagtgctctatttcagcctttaattttatgaagtcaaatctgacagaattttcctataaagggtctctatacaaaaacacttactaggatcttccttatcccaggattataaactagccttttttttttttttttttttttttttttgagatggagtcttgctgtgtcatccaggctagagtgcaatggtgtcatcttagctcactgcaacctctgcctcctgggttcaagcgattctcctgcctcagcctcccgagtagctgggactacaggcatgcacctgcccggctaatttttttgtacttttagtagagacgggtttcaccatgttgaccaggctggtctcgatctcctgacctcaagtgatctgcccgtctcggcctcccaaagtgctaggattacaggcgtgagccactgcgcccggcctgtcctctctcttcttgtgctttcacatacttgttttattcaccagtttatgtttaggtgtaaagtaaggatttaacttgatgttttcctgactagatcatcaaactccagtcttcctcaccaatatgtttcctatttgctatcttcctccattatgctatgtggcatataccatatacatttatgttctttcaactttttcaacaagtctttactagcctgtgcttttcatgtagataaaaaagatccctttcctagagaatttccagtctttgttaatgtgaaacatgtaatagaatacaaggttttttgaatggtgaggccttgtttatgcaaccctgtaaataaacatcaccttgctagagggcctaaagtcatgtgaaggggccagcacagggcttgctccgtgggcttctgtcgtgtttgtgtactgcatgtgggaagcagcagtcaggcaccagagccttgaacccaggatgctagtcccagttcaggagctcaggtcattgaccttaaactgctcctcaggatttctgggttttttttttttctcgctctgtcgcccaggctggagtgcagtggtgcaatctcggctcactgcaagctccacctcctgggttcaagtgattttcctgcctcagcctcccgagtagctgggattacaggcacccaccgccatgcctggctaatttttgtatttttactagagacagggtttctccatgttggctaggctggtctcgaactcctgacttcaagtgatccacctgcctcagcctcccaaagtgctaggattataggcgtgagccactgcgcctggcctaggattttaagtcttaacgagcattttggttctgctgatgacaacgggaaaaagtaacatgaggggactgattggtccccttatgttatatgggagcctttttttttgagacaggatctcactgtggcccaggctggagtgcagttgtgcaatctcagctcgctgtagcctccacctcctggactcaagtggtcctcccacctcagcctcctgagtagcttcggactataggcatacaccaccacgtgcccagctaatttttgtatttttgctagagacagggtttcgccatgttgcccaggctggtcttgaactcctgacctccactgacccacccacctcagcctcccacagtgctgggcttacacacgtgagccacacagtgctgggcttacacacgtgagccaccatgctgaggagactgttttaaatgctctcttctttggtttttcagcctgagagacactctcgtaagttacatgcaaactaaagaaagtgaaattcttcctgaaatggcatctcagttcccagaagagatactgctcgccagctgtgtctcagtgtggaaaacagctgctgtgctgaaatggaatcgagaaatgagatagaattatttcctcagctatctttggatgactttggagagaagactcctctctcctcgtctgcggcgtggacttgatcatggactggtgcctttgcattcagaaggagagctgtcagcgtagcaccgaattcaagaccaaggcgtgctacctgagctgacagctttttgaaagccgagctgtttctgaaccatgtacatacatgttctgaaactttctcatcattttatgagtactgttcattgagagatgacaatgaagattagatgaaattggaaataaaccaacattgtttacattccaggagacttgtagctcagccacacacgcagtaatgacctgtgcccgttcgcctctggcactgcccacccctctttttttttttcttctaattctgtactcacaaaagagaatctcattttcttctttcttccattcccttaaattctgagtactgtacatatatttctgggttcccacgatgatgtgaaaaactaccagactgttttttgtcttctcacaaagacaagaaaaatcagggcattttgtgagtgccttaagatcaaactaacaagatctgaccctctcccctcacagtgagccactgccccacttcagagggtaagagccaaaagcctcattgtgaaaggcactggacttggaccagggacaccatcagggccttggttttctcacgcataaaatggagagtggattaatcgccaaagattcttctgatctgacattttgaaattgtgagagaaactagatgactgtaaacttggtcacaggcctggttctggcagttctttgcggacttttttctagcattatgccaaataaacatgcagtctcagtgtgctctcgcatgtatgaatatctagtcctttctgtggttctcagccaagacataaaaactaggactcagagcacatacaaaaccagttatgtttcggaaagagggaaaagagtccccgagcccggatcttgtgctgcttttctcactgacgtgttgccttttttctttacaaaatctgctttgatacttaggacctctctggactaatttctcttcctagacagctcagcacagctattgatatgttagaggcagtatccttaatattcattctaaatgagttaacgacttaacttgaaattgggcctaaggagtgagaactacaaaaatacaaaatgcttgtccaggactcagccatgcacaccttgagcagcgccggcaggaggcacggaaggaactgtgctccgttctcctcactgtcatggtgccaccagtgtctgatgaagggcagagtgacccagactgcaggcagtaactgacttcacacagtccctggcatttagtcatctgtgattgttttatcactctggactgtgcagagccacctgccaccgagatctgcattccgactgcctatgaacgggtgtgggggccgggggctggcttgctgaagtcttcaacttgcactcggagctcctttgatacctcagagctggctgtcaggtggcagctcacacccagactcactggccacacctcagcagggggggagtcgagtgtcagtctctttctgtgaaggctttttttttcctttggcctgggaatttttcccatttttatgaaggggttttaaattgtttcattttgtgtgctgtgcttcaaagccttaactgtcaaatcttgcattatcttgtttgtacagaaatatactggcctagcagaggcaaaaaaaaaaaaaatgaattttattttacttgtcacacctgtcttaataaactggagttttgctgctaaagaactcttctctctgggggcagagcttctatttatggcacatagacatcagctaggcttttgggaatcgtttgtgttctttgtggaaatgtcctttagaagcacccatgaagtagtgtgttcagactgtgcacacagaaaacaggctctgccttcacatgtgagacggtggacttttcctctggacaaaatgacagcatcctggcgactccacagtggagctgagcgccactccctgtagccgatctgggactgaaacgcttacacctctgcctcagaaggagtcccccatgccctgcctgaaatgacttcactggacacagcggggctgcagctaacggggtacaggtaggagctaactaacttcacccctgagtccacttgcggggtaagagataaacagtaacccttccaggagcccactgacgttggagtgctaaaaatgccccttcagggggaaaactgcattttctcttccaaaaaggaaaggttcttccaggcgagaaacctgtggtctagaaccacagcaagaagaggaggcatgctggcctgcaccggaagactcactttgtctgccctgcgccagcctcacctcaccctgcagttcccgtttccgccatggatgcctcatcaccaaccctgaccttccccctcccaaccctttattcatcctcactcccactcatacccgcctccctggacagttccctgctgcagagttctttctgctttcagccctaccttggtggtgatttacctgaaaatcttcacaactgatcattatctccttctctttgagacctgactgaaaaaattaggtgtgcacacctgtaatcccagctacctgggaggctgaggtatgaggattgcttgagcctgggagtttgaggctgcagtgagctatgattgcaccactgcactccaacctgggtgacagagtgagaccctgtctcaaaaaaaaataaaataaggaccttattgtgtgtgcaaattatttgcctttcatgaatagttatgagactttgtgcatgtgttaaccgagacggccctgagctatttcagttactcctgtatgttcaggcaattccaatttagaaacaaacttccagtgataaatattgggaagaaaatgtcagctcagggccaagtaggtaaagccacccaagtctagccatgcacacaggcactagtgtgctgaaggaaaacacctctgatttgatacataaagtgtgaaggttgcataactggggaggtggctggagaaaacctgagcctcgagctgagtaacaatccaagccatgattagcatttatattgcattctgcattattctcatcctatcacgttcattaagttcaaccattaccattacgaatcccgtttccagctggaaaaacaagcgccaggaaagtgcatttcccccccaccccccccccccaaccagagcaactttggtcagaagtcacacctaatcaccctctctgcaggatatgctggggatagcccttttgaggaggtgggggtgtatgcgaaagcaacctggggccaaagcagggggaagcaggagagactggaggggccctgggtccagcaagtgctccaccaggctgcccctgctcaggtgctccacagcccataaaaaacgccttcagccctgctgtgcttcccctcacacctaaacttactataagggtcctaccttccccagtattccttcatgatcactgctacctgtgccctgaagcgcaacagaacctcaacccagaggacagccacttcctcagaacccacgatctttgccccatcgccacaggtccatgagtgactcctaattaccaaatccaagggctccttcaccctgaccactctggaacccaacaaagctgacacacagcccagcccagacaggcctgaatgtgggtcctggctctcccatttgccagttctacagccatgggcaagtggctcgacctctctaagcttcagtttcctcgtctgtgaaatatctgtcagtgctcttaagggaggagaccaccccacatattgtcttacgcccaatttctgcctccaaagagagaagtaaaaactaaaaggcagaaatgaaatccacaagcagacagcctgcaccacaccctgggcctggtagttaaagatcgacgcctgacctaatcagtgatgctatctatagattacagacattatatagaaaagcaccgtgaaaatccctgtcctgttctgttccgttctaattacgggtgcatgcagcccccagtcacgtaccccctgcttgctcaatcaatcacgaccctctcacgcagaccccttaagagttgtgagcccttaaaagggacaggaattgctcactcggggagctcagttgttggagacatgagtcttgccgaagcgcccggctgaataaagcccttctttaactcgtgtctgaggggttttctctgcagcttgtcctgctacatttcttggttccctgaccaggaatctaggtgattaatggatggttgaggcagcccctcagacggcttaggcctgccctgtggagcatccctgtggaggactccagccagcttgagcgacatggatcctgagagcgctctcaggcaggcaattgccccagtggaatgcctggccagagcagtgtgtagcaggcccccgaggaggatcaacgcagtggctgaacaccgggaaggaactgccacttggagtccagacatctgaaacttggtaagactggtctttggaacttgcccactccatttgaggggaagcgtggcctgatcacccacggcgtgcctgtactggcactctggtttttgtttttgacttgacttggattgcttgatactttggttttggttttgacctgacttggatatcctgatactctgattttggttttgattttggtttggtgtaaactgtaaaagtgtgtgtgtgccctttttacctgttctttgttttgtggtatgcgtgtagggtgagcgtaatgttttgtcttgaagaagcatgggtcaagcacaaagtaagaccaccccactaggaactatgctgaaaaatttcaggaaaggatttaagggagactatggagtactatgacaccaggaaaacttaaaactttgtgtaagatagactggccagcattagaggtaggttggccatcagagtgaagcctggacaggtcccttgtttcaaaggtatggcacaaggtaacctgtaagccagggtacccacaccagttcccgtacacagacacttggttacagctggttttagactccccacccgcccgccccaacagtggttgagagaacagcagcataagtggctggcagaggcaaggaaagaccagcagagagagaaagaggaagagacagacaaagagggagtcagagagagagagagaaagagacagaggcaaaaggaaagtcaaagagaaagagacagaaaatcaagaggaaaaaaa

SEQ ID NO: 5 - RNA, 21056 nt, homo sapien
cagcgcgcggcaggcggcgagcucgggggccgcagaaaaugaaacugaagccguggucacgugacaggacauguaguauauagcaggcugccagcgacuccugcucuugcuucuggaucugcagggcagucccagcaggacccauggaguguccuucgugccagcaugucuccaaggaggaaacccccaaguucugcagccagugcggagagaggcugccuccugcagcccccauagcagauucugagaacaauaacuccacaauggcgucggccucggagggugaaauggagugugggcaggagcugaaggaggaagggggcccgugcuuguucccgggcucagacaguuggcaagaaaaccccgaggagcccuguuccaaagccuccuggaccguccaagaaagcaaaaagaagaaaaggaagaagaaaaagaaggggaacaaguccgcuuccucagagcuggcuuccuugccccuuucuccugccagccccugucaccugacuuugcuuucaaacccguggccucaggacacagcccugccccacagccaagcccagcagaguggccccacuggccagccgagccagcccccaggcacagccaccacgccacuggagggugacggccucuccgcgcccaccgagguuggcgacagcccccugcaggcccaggcuuugggagaggcaggaguggccacaggaagugaggcucagagcagcccgcaauuccaggaccacacggaaggggaggaccaggacgcuuccauccccucugggggcagaggccugucccaggaggggaccgguccccccaccucugcuggugaaggccauucuaggacugaagaugcugcccaggagcuccuguugccugagucaaaaggaggcagcucugagcccgggacagaacugcagaccaccgagcaacaggcaggggccucagccucuauggcaguugaugcuguagcugagccagccaaugcaguuaaaggggccgggaaggaaaugaaagagaagacccagagaaugaaacagccaccagcaaccacuccuccuuucaaaacacacugccaggaagcugagaccaagaccaaggacgagauggcugcugcugaagaaaaagucgguaagaaugaacaaggggagccugaagaccucaagaagccagaggggaagaacagaagugcagcugcugugaaaaacgagaaggagcaaaaaaaccaggaagcagauguccaggaagugaaggcaagcacgcugagcccggguggaggagucaccguguucuuccacgccaucaucucucuucauuucccauucaauccugaccuccauaaagucuucaucagaggaggagaagaauuuggggagucaaaaugggacagcaauaucugugagcugcacuacaccagagacuugggucaugaccgcguucuuguugaaggcauugucugcauuuccaagaagcaccuagauaaauacauuccuuacaaguacgucauuuauaauggggaaucuuuugaguaugaguucauuuacaagcaccagcagaagaagggcgaguacgucaaccgcugucuguucauaaaaucuucacuucugggcucaggagacuggcaucaguacuaugacauaguuuauaugaagccucaugggagacuccagaaagucaugaaccacaucacagacgggccgaggaaggaccuggugaaggggaagcagauugccgcugcgcucaugcuggacagcaccuucagcauccugcagaccugggacaccaucaaccugaacagcuucuucacccaguucgagcaguuuugcuuuguccugcaacagccuaugauuuaugaaggacaggcacagcuguggaccgauuugcaguacagggagaaagaggugaagagauaccuguggcaacaucugaaaaaacacgugguaccauugccggacggaaaaagcacggacuuuuugccuguggacugcccagugaggaguaaacugaaaacaggccugauuguccuuuuuguaguggaaaaaauugagcuuuuauuagaaggcagccuggacugguugugucaccuccuaaccucagaugccagcucaccagaugaguuucaccgugaccuaagccacauccuugggauaccucagagcuggcggcuguaccuggugaaccugugccaaagaugcauggacacaaggacguacaccuggcugggcgcccugccuguccugcacugcuguauggagcuggccccgcggcacaaggaugccuggagacagccugaggacaccugggccgcucuggagggacucuccuucucaccguuccgggaacaaaugcuagauacgaguucccuacuucaguuuaugagagagaagcagcauuugcugagcauagacgagccucucuuccgguccugguuuagucugcuaccucugagucaccugguuauguauauggaaaacuucauugagcaccugggucguuuuccugcucauauccuggacugucuuucagggauuuacuaccggcuuccgggacuugagcaagucuugaauacgcaggauguucaggauguucagaacguucagaacauuuuagaaaugcuguugcgacuccuggacacuuaccgggacaagauucccgaggaggccuugucaccauccuaccugacugugugucugaaacugcaugaagccaucugcagcagcacaaagcuacuuaaguuuuacgagcugccagccuuaucugccgagauugucugcagaaugauuagacuucuaucucugguggauucugcaggacagagagaugaaacuggaaauaauucaguccaaacagucuuccaagggacccuugcugcuacgaaaagguggcuccgagaaguuuuuacaaagaacaugcucacaucuucaggugccucauucacauacgucaaggaaauugaggucuggaggcggcugguggaaauccaauuccccgcggagcauggcuggaaggagucguugcugggagacauggaauggaggcucacaaaggaggaaccccucucccagaucacugccuacugcaauaguugcugggacaccaaaggcuuagaggacaguguggccaagaccuucgagaaaugcaucauugaagccgugagcucagccugccagucucagaccaguauccuucagggguucucuuacucugauuugcggaaauuuggcaucgucuugucugcugugaucacuaaguccuggccuaggaccgcggacaacuucgaugacauuuuaaagcaucugcucacguuggcagaugucaagcacgucuucagauuguguggaaccgacgagaaaauacuagcaaaugucacagaggaugccaagaggcugauagcuguugccgacucuguguugacgaaaguuguuggugaccuccuaaguggcacgauuuuaguuggacaacuggagcugauuauaaagcacaagaaucaguuucuugacaucuggcaacugagggaaaaaagucuuucaccccaggaugaacaaugugcuguggaggaagcacuggauuggagaagggaggaacuguuacuucuaaagaaagagaaaagauguguugauagucuccugaagaugugugggaacgugaaacaucugauacaaguggacuuuggagugcuugcaguaagacacucacaagaccucagcaguaaaagauuaaaugacaccgugacagugagacuguccaccuccucgaacucgcagagggcaacgcauuaccaccugagcucccagguccaagaaauggcugggaagauagacuugcucagagacagccacaucuuccagcucuucuggcgggaagccgcagagccgcugagugagccuaaggaggaccaggaagccgcagaguugcugagugagcccgaagaagaaucagaaaggcacauccuugagcuugaagagguguaugacuauuuguaucagccuucuuacagaaaguucauuaaguugcaccaggaucuaaagucaggagaggucacccuugcagagauugaugucaucuucaaggacuuugugaauaaauacacggaccuggauucagaacuuaagaucaugugcaccguggaccaccaggaccaaagagauuggaucaaggaccgagucgaacagaucaaggaauaccaucaccugcaccaggcuguccacgcagccaaggucaucuugcaggucaaagagagccugggacugaacggugacuucaguguucucaacacuuuacuaaauuuuacugauaacuucgacgacuuucgccgugaaacacuggaccagaucaaccaggagcucauccaggccaaaaagcugcuccaggacaucagcgaggcccggugcaaggggcugcaggcucugucccugagaaaggaguucaucugcuggguccgggaggcucuuggaggcaucaaugagcugaagguguuuguggaccuggccuccaucucagcgggggagaaugacauugauguggaccggguggccugcuuccaugacgcugugcagggcuacgcaucccugcuauuuaagcuggaccccagcguggacuucagugcauucaugaagcaucugaaaaagcuguggaaggcucuggauaaggaccaguaccugcccaggaaacugugugacuccgccaggaacuuggaauggcugaagacugugaaugagagucaugggucuguggaacgcucaucccugacccuggccacggccaucaaccaaagaggcaucuaugugauccaggcgcccaaagguggccaaaagauuuccccagacacgguucugcacuugauccuuccugagagcccuggcagccacgaggagucacgagaguacucuuuagaggaggugaaggagcuuuugaacaaguugaugcugaugucuggcaagaaggaucguaacaacacggaaguggagagguuuucagaggucuucugcagugugcagaggcucagccaggccuucaucgaccugcacucugcugggaauaugcuguucaggacguggaucgccauggccuacugcucccccaagcagggugugucccuccaaauggacuuuggcuuggaccuggugacggagcuuaaagaagguggagaugucacugagcugcuggcagcccucugcaggcagauggagcacuuccuugacagcuggaagagauuugugacccagaagcgaauggagcacuuuuaccugaacuucuacacggcagagcagcugguuuaccugagcacugagcucaggaagcagcccccgagugaugccgcccuaacgaugcuauccuucaucaaaagcaacugcacccugagggaugucuuaagggccucuguggggugugggagugaggccgccagguaccgcaugaggagagucauggaagagcucccgcugaugcucuuaucagaguucagccugguggacaagcugaggaucaucauggagcaguccaugaggugccuuccugccuuccugcccgacugccucgaccuagagacccuuggccacugucuggcucaccuggcagggaugggugggucucccguggagcguugucucccgagaggucugcaggucggccagcccaaccucgucgucuguggccacuccgagguguugccagccgcccuggcugucuacaugcaaaccccaagccagccccugcccacuuacgaugaggugcugcucugcaccccggcaaccaccuuugaggagguggcacuguugcugcgccgcugccugacccugggcucccuggggcacaaggucuacagccugcuguucgcagaucagcugagcuacgagguggcacgccaagcggaggagcuuuuccacaaucugugcacgcagcagcaccgagaagacuaccagcucgucauggucugugauggggacugggagcacugcuaccuccccucugccuucagccagcacaaggucuucgucaccccccaggcaccccucgaggccauccaagccuaccuggcaggucacuaccgggucccgaagcagacccugucggcggcagccguguucaaugaccggcuguguguugggaucguggccucggagcgagcagguguuggaaagucucuguacgugaagagguugcacgacaaaaugaagaugcaguuaaacgugaaaaaugugccucugaaaacaauucgacugaucgacccucagguggaugagagccgaguccugggcgcccugcugcccuuccuggaugcgcaguaucagaagguccccgugcucuuucaccuggacgugaccuccucagugcagacuggaauuuggguguuucuuuucaagcuccucauuuuacaauacuuaauggauauaaaugggaaaauguggcuucggaaccccugccauuuguauaucguugaaauccuggaaaggaggacgucagugccgucgaggagcucuucagcgcugcguacacguguaccccaguucaguuuucuugacaucuucccaaaagucaccugcaggccucccaaagaggugauagacauggagcugagugcccugaggagugacacagagccugggauggaucugugggaguucugcagcgaaacuuuccaaagaccuuaccaguauuuaagacgauucaaucaaaaccaagaccuagacacguuucaguaucaagaaggcucugucgaaggcaccccggaggaaugccuccagcauuuccuguuucacugcgggguaauaaacccauccuggucagagcuucggaacuuugcucgguuccugaauuaucagcucagagauugugaggccucucucuucugcaauccgaguuuuauuggcgacacacugaggggcuucaagaaguucguggugaccuucaugaucuuuauggcaagagauuuugccacaccaucacuccacaccucugaccaaagcccggggaagcacauggucaccauggaugggguuagggaagaagaucuagcgcccuucucccuccggaagaggugggagucggagccucacccauacguuuucuucaaugacgaccacacaaccaugacauucaucggcuuccaucugcagcccaacaucaacggcagugucgaugccaucagucacuugacugggaaggucaucaagagagacgucaugaccagggaccuguaccagggccugcugcuccagagggugcccuucaaugucgacuuugauaaacugcccagacacaagaaacuugagaggcucugccugaccuuagggaucccccaggccaccgaccccgacaaaacguaugagcucacaaccgacaauaugcuuaaaauccuugccaucgagaugcgguuccggugugggaucccgguuaucaucaugggagaaacuggcugugggaaaaccaggcuuauuaaauuccuuagcgaccugcggcguggugguaccaaugcugacaccauaaagcuggucaaggugcacggaggaacaacugcagacaugaucuacuccagagucagggaggcugaaaauguggccuucgccaauaaggaccaacaucaguuggacaccaucuuguuuuuugaugaagccaacacaacggaagcuauaagcuguaucaaagaaguccugugugaucauaugguggauggccagccucuggcugaggacucuggccugcauauuauagcugccugcaauccauaccggaagcacucugaggagaugaucugccguuuggagucagcugguuugggcuacaggguuaguauggaggagacggccgacaggcugggcuccauuccucugaggcagcugguauaccggguccaugcucugcccccgagccugauuccucuggugugggacuuuggacaacugagugacguugcugaaaagcucuacauccagcagauuguccagagacugguugaguccaucagccuagaugaaaacgggacucgcgugaucacagaaguccucugcgccucucaggguuucaugaggaaaacagaagaugagugcagcuuugucagccucagggacguggagcgcugugugaaaguuuucaggugguuccacgagcacagcgcgaugcucuuagcgcagcugaaugccuuucucuccaaguccagcgucagcaaaaaucacaccgagagagaucccguccucuggucguugaugcuggccaucgggguguguuaccaugccucuuuagaaaagaaagacucauaucggaaagccaucgccagguucuuuccgaaaccguaugacgacagcaggcugcuucuggaugaaauaacacgggcacaggaucuuuuucuggacggcguaccucugaggaaaaccaucgccaagaacuuggccuugaaggagaacgucuucaugauggucgucugcaucgagcugaagauuccccucuuccugguggggaagcccggcagcuccaagucucucgccaagaccaucguggcagacgccaugcagggcccggcugccuacucagaucucuuccgcagccugaagcagguccaccugguguccuuccagugcagcccgcacuccaccccacagggcaucaucagcaccuuccggcagugcgcccgcuuucagcaggggaaggaccugcagcaguacgucucuguggugguguuagaugagguggggcuggcggaagacucacccaaaaugccccugaagacucugcacccgcugcuggaagacggaugcauugaagacgaucccgccccccacaaaaaggucggcuucgugggcaucuccaacugggcccuugacccugccaagaugaaccggggcauuuuugugucacguggcagccccaacgagacagagcucauagagagcgccaagggcaucugcuccucagacauccucguccaggaccgaguccaaggguacuuugcguccuuugccaaagccuacgaaacgguguguaagcgccaggacaaggaauucuucgggcuucgugacuacuacagccucaucaaaauggucuuugcugcagcaaaggcuucaaauagaaagccuuccccgcaagacauugcacaggcuguccuuaggaacuucaguggcaaggaugacauccaagcuuuggacaucuuucuggccaauuugcccgaggccaagugcucagaggaagucagccccaugcagcugaucaaacagaacaucuuugggccuucucagaaggugccggguggagagcaggaagaugcugagucccgcuacuuacucgugcugaccaaaaacuacguggcacugcagauccugcagcagacauucuucgagggggaccagcagccggagauuauuuuugguucugguuuccccaaggaccaagaguacacccagcucugcagaaacaucaaucgugugaagaucugcauggaaacaggcaagaugguguugcuucucaaccugcagaaccucuacgagagccucuacgacgcacucaaccaguacuacguccaccucggcggccagaaguacguggaccucggucuggggacccaccgcgucaaaugucggguucaccccaacuuccgccugauugucauugaagagaaagacgucguguacaaacacuuucccaucccccucauuaaccggcuggagaagcacuaucuggauaucaacacggugcuggagaaauggcagaagagcaucguggaggagcucugugcguggguggagaaguucaucaaugucaaagcacaucauuuccagaagaggcacaaauacagccccucugacgucuucaucggcuaccacucggacgccugcgcgucuguggugcugcaggucauagagaggcaggguccccgggccuugacggaggaacuucaccagaaggugucugaggaggccaaaucgauccugcugaacugcgcuacgcccgaugccgugguccggcugagcgccuacucgcugggcggguucgcagcggaguggcugucgcaggaguacuuucacagacagaggcacaacuccuuugcagauuuccuucaggcacaccugcacacggcagaccuggagcgccacgccaucuucacagagaucaccacuuucuccaggcugcuaacaagucacgacugugaaauuuuagaaucagaggucacaggcagggcuccgaaacccacacuccuguggcugcagcaguuugacaccgaguacucauuccucaaagaaguccgaaacuguuuaacgaauacagccaaauguaaaauccucauuuuucagacagauuuugaagauggaauccguagcgcccagcucauugccucagcuaaguauucuguuauaaaugaaaucaacaaaauacgagaaaaugaggaccguaucuucgucuauuucaucacaaaacugucccgggugggaagaggaacagccuaugugggcuuccacggagggcuguggcagucuguccacaucgaugaccuccggagauccacccucaugguuucugaugugaccaggcugcagcaugucaccaucagccagcuguucgcgcccggagacuugccugagcugggcuuggaacaccgggcggaagacggccaugaggaggcgauggagacggaggccagcacaucaggggagguggcagagguggcagaggaggccauggaaacagaaaguucugagaaggugggaaaggaaaccucugaacucggaggcagugaugugucgauccuggacaccaccaggcugcugagaagcugugugcagagcgccgugggcaugcucagagaccagaacgagagcugcacgcgcaauaugcggaggguggugcuccuccugggccucuugaaugaggaugacgcgugccacgccucuuucuugcggguauccaagaugcgccucagugucuuuuuaaagaagcaagaagagagccaguuucacccucuggagugguuggcaagggaagccugcaaccaggacgcucuccaggaggcgggcacauucaggcacacccucuggaagcggguccaaggugcugucaccccucugcuggcgagcaugauaucauucaucgacagagacggcaaccuagaguuacugaccaggccagauacuccgcccugggcaagagaucuuuggauguuuauuuucagugacacgaugcuucugaacauuccucuugugaugaauaaugaaagacauaaaggugagauggccuacaucguggugcagaaccacaugaaccuuuccgagaacgcuuccaacaacgucccuuucagcuggaaaaucaaggacuaucuggaggagcuguggguccaggcucaguacaucacagacgcagaaggacugcccaagaaguucguggacaucuuucagcagacuccucugggcagguuucuugcccagcuccauggagagccgcagcaggaacuucuucaguguuacuugaaggauuucauucucuugaccaugcgugugucaacggaggaggaauuaaaguuucugcagauggcucugugguccugcacuaggaaacugaaagcggcgucagaagcgcccgaggaagagguuuccuuaccgugggugcaccuugccuaccagcguuucagaagccgucugcagaacuuuuccagaauccugaccaucuacccucagguucuccacagccugauggaagcccguuggaaccaugagcuggcuggaugugagaugacccuggacgcauuugccgcaauggccugcacggagaugcugacaagaaacacccugaagcccaguccccaggcguggcuacaguuggugaagaaucuuuccaugccgcuggagcucaucugcuccgaugagcacaugcaaggcagcgggagccuggcccaggcugucaucagggaagucagagcccaguggagucggauuuucuccaccgcacucuucguggagcacgugcuccuaggaaccgagagccgcguccccgaguuacaggggcuggugaccgagcacgucuucuuacuagacaagugucuucgagagaacucugacgugaagacgcacgggccuuuugaggccgugaugcgcacucucugugaaugcaaggagacagccagcaagacccucagcagguuugggauucagccgugcuccaucugccugggagaugcaaaggaccccgucugucugcccugcgaccacgugcacugccugcgcugccucagggccugguuugccucagagcagaugauaugccccuacuguuuaacugccuugccagacgaauucucuccagcuguuucccaagcgcacagggaagccauugaaaagcaugcccgcuuccggcagaugugcaacaguuucuucguagaccugguguccaccauuugcuucaaggacaacgcuccgccugagaaggaagugauugagagccugcucucucuccucuucguccaaaaggggcgcuuaagagaugcugcccagagacacugugaacacacaaaaucucucucuccauucaaugauguuguggauaagacuccugucauccgcucagugauacugaaacugcuuuugaaguacagcuuucaugauguaaaagauuauauucaggaauauuugacccuguuaaaaaagaaagcauucauaacugaagauaaaacugaacuguacaugcucuucaucaacugccuggaggauucaauacuugagaagaccagugcuuacuccagaaaugaugaacugaaccaccuagaagaggaaggucguuuccuuaaggcauauucuccagcaagccggggccgagagccugccaacgaggccucgguugaauaccugcaagagguggcccggauccgccucugccucgacagagcugcagauuuccucucggagccugagggaggcccagagauggccaaggagaagcagugcuaccugcagcaagucaagcaguucuguauccggguggagaacgacuggcaccggguguaccuggugcggaagcucagcagccagcgggggauggaguucgugcagggccucuccaagcccggccgcccgcaccaguggguguuucccaaggacguugucaagcagcaggggcugcggcaggaccacccaggccagauggauagguaccugguguacggcgaugaauacaaggcucuccgugaugcuguggccaaagcuguccucgagugcaagccacugggcauuaagacugcucugaaggccugcaagaccccccaaagccagcagucagccuacuuccuguuaacacuguuuagagagguggcuauuuuguacagaucccacaaugcaagccuccaccccacgccagagcaaugugaagcugugagcaaauucauuggcgaaugcaagauccuuucaccuccugauaucagccguuuugcaacaucgcucguggacaauucugugccauuguugagggcggggccuagugacagcaaccuugauggaacggugacagaaauggccauucaugcugcagccguccuucuguguggacagaaugaacucuuggagccccuaaagaaucuggccuucuccccagccaccauggcgcaugcuuuucuuccaaccaugccugaagacuugcuggcucaagcucggagguggaagggucuggagcgaguccacugguacacuugucccaacggccauccuugcuccgugggagaguguggcaggccgauggaacagagcaucugcauugacugccaugcgccgauuggaggcauugaccacaaaccucgggacggcuuucaucuggucaaagacaaggcagacagaacgcagaccggccacgugcugggcaacccgcagcggagagacguggugacaugugaccgagggcugcccccaguggucuuccuccuuauccggcuacucacucacuuggcucugcuucugggagcgucccagaguucccaggcucugauaaacaucauuaagccuccagugagggauccaaaaggcuuucugcagcagcacauccugaaggaccuggagcaguuggccaagaugcugggacacagugccgacgagaccaucggcgugguccaccucguccugcgcaggcuucuccaagagcagcaccagcucucuagcagaaggcuuuuaaauuuugacacagaauugucaacuaaagaaaugaggaacaacugggaaaaggaaaucgcagcugugauuucuccugaacuggagcaucuagauaaaacccuucccaccaugaauaaucucaucagccaagauaagcguaucagcucuaacccuguggccaaaauaauauauggugacccagugaccuuccugccccaccugccccggaaaagugugguccauugcucuaagauuuggagcugcaggaaaagaauuacaguugaguaccuccagcacauuguggaacagaaaaauggcaaagaaagagugcccauccucuggcauuuccugcagaaggaagcagagcugaggcugguaaaguuccugccugagauuuuggccuugcaaagggaucuagugaagcaguuccagaacguccagcaaguugaauacagcuccaucagaggcuuccucagcaagcacagcucagauggguugaggcagcugcuucacaacaggaucacagucuuucuguccacauggaacaaacugaggagaucgcuugagacgaacggugagaucaaccuacccaaagacuacugcagcacugacuuggaucuggacacugaguuugagauccucuugccacgccgacggggccugggccucugugcuaccgcucucgucagcuacuugauucgccuacacaaugaaauugucuacgccguggaaaaacucuccaaggaaaacaacagcuauuccguggaugccgccgaggucacugaacugcaugucaucaguuaugaaguggagcgggaccugacuccacugauucucuccaacugccaguaccagguggaggagggcagagagaccgugcaggaguucgaucuggagaagauucagcggcagaucgucagccgcuuccuccagggcaagccccggcugagccucaagggaauacccacucugguguacagacacgacuggaacuaugaacaucucuuuauggacaucaagaacaaaauggcacaggacucccuccccagcucggucauuagugccaucaguggacagcugcaguccuacagcgaugccugugaagugcugucugucguagaagucacucugggguuucugagcacagcugguggggauccaaacaugcagcugaauguguauacucaagacauccugcaaaugggugaucagacgauucacguguuaaaggccuuaaacagaugccaguuaaaacacaccauugcccucuggcaguuccugucugcucauaagucugaacagcugcugcggcugcacaaagagccauuuggggaaaucaguucaagguacaaagcggaucugagcccggaaaaugcuaagcuccucagcacauuccuaaaucagacuggccuagacgccuuccugcuagagcugcacgaaaugauaaucuugaaacuaaagaacccccaaacccaaaccgaggagcgcuuccgcccucaguggagccugagagacacucucguaaguuacaugcaaacuaaagaaagugaaauucuuccugaaauggcaucucaguucccagaagagauacugcucgccagcugugucucaguguggaaaacagcugcugugcugaaauggaaucgagaaaugagauagaauuauuuccucagcuaucuuuggaugacuuuggagagaagacuccucucuccucgucugcggcguggacuugaucauggacuggugccuuugcauucagaaggagagcugucagcguagcaccgaauucaagaccaaggcgugcuaccugagcugacagcuuuuugaaagccgagcuguuucugaaccauguacauacauguucugaaacuuucucaucauuuuaugaguacuguucauugagagaugacaaugaagauuagaugaaauuggaaauaaaccaacauuguuuacauuccaggagacuuguagcucagccacacacgcaguaaugaccugugcccguucgccucuggcacugcccaccccucuuuuuuuuuuucuucuaauucuguacucacaaaagagaaucucauuuucuucuuucuuccauucccuuaaauucugaguacuguacauauauuucuggguucccacgaugaugugaaaaacuaccagacuguuuuuugucuucucacaaagacaagaaaaaucagggcauuuugugagugccuuaagaucaaacuaacaagaucugacccucuccccucacagugagccacugccccacuucagaggguaagagccaaaagccucauugugaaaggcacuggacuuggaccagggacaccaucagggccuugguuuucucacgcauaaaauggagaguggauuaaucgccaaagauucuucugaucugacauuuugaaauugugagagaaacuagaugacuguaaacuuggucacaggccugguucuggcaguucuuugcggacuuuuuucuagcauuaugccaaauaaacaugcagucucagugugcucucgcauguaugaauaucuaguccuuucugugguucucagccaagacauaaaaacuaggacucagagcacauacaaaaccaguuauguuucggaaagagggaaaagaguccccgagcccggaucuugugcugcuuuucucacugacguguugccuuuuuucuuuacaaaaucugcuuugauacuuaggaccucucuggacuaauuucucuuccuagacagcucagcacagcuauugauauguuagaggcaguauccuuaauauucauucuaaaugaguuaacgacuuaacuugaaauugggccuaaggagugagaacuacaaaaauacaaaaugcuuguccaggacucagccaugcacaccuugagcagcgccggcaggaggcacggaaggaacugugcuccguucuccucacugucauggugccaccagugucugaugaagggcagagugacccagacugcaggcaguaacugacuucacacagucccuggcauuuagucaucugugauuguuuuaucacucuggacugugcagagccaccugccaccgagaucugcauuccgacugccuaugaacgggugugggggccgggggcuggcuugcugaagucuucaacuugcacucggagcuccuuugauaccucagagcuggcugucagguggcagcucacacccagacucacuggccacaccucagcagggggggagucgagugucagucucuuucugugaaggcuuuuuuuuuccuuuggccugggaauuuuucccauuuuuaugaagggguuuuaaauuguuucauuuugugugcugugcuucaaagccuuaacugucaaaucuugcauuaucuuguuuguacagaaauauacuggccuagcagaggcaaaaaaaaaaaaaaugaauuuuauuuuacuugucacaccugucuuaauaaacuggaguuuugcugcuaaagaacucuucucucugggggcagagcuucuauuuauggcacauagacaucagcuaggcuuuugggaaucguuuguguucuuuguggaaauguccuuuagaagcacccaugaaguaguguguucagacugugcacacagaaaacaggcucugccuucacaugugagacgguggacuuuuccucuggacaaaaugacagcauccuggcgacuccacaguggagcugagcgccacucccuguagccgaucugggacugaaacgcuuacaccucugccucagaaggagucccccaugcccugccugaaaugacuucacuggacacagcggggcugcagcuaacgggguacagguaggagcuaacuaacuucaccccugaguccacuugcgggguaagagauaaacaguaacccuuccaggagcccacugacguuggagugcuaaaaaugccccuucagggggaaaacugcauuuucucuuccaaaaaggaaagguucuuccaggcgagaaaccuguggucuagaaccacagcaagaagaggaggcaugcuggccugcaccggaagacucacuuugucugcccugcgccagccucaccucacccugcaguucccguuuccgccauggaugccucaucaccaacccugaccuucccccucccaacccuuuauucauccucacucccacucauacccgccucccuggacaguucccugcugcagaguucuuucugcuuucagcccuaccuugguggugauuuaccugaaaaucuucacaacugaucauuaucuccuucucuuugagaccugacugaaaaaauuaggugugcacaccuguaaucccagcuaccugggaggcugagguaugaggauugcuugagccugggaguuugaggcugcagugagcuaugauugcaccacugcacuccaaccugggugacagagugagacccugucucaaaaaaaaauaaaauaaggaccuuauugugugugcaaauuauuugccuuucaugaauaguuaugagacuuugugcauguguuaaccgagacggcccugagcuauuucaguuacuccuguauguucaggcaauuccaauuuagaaacaaacuuccagugauaaauauugggaagaaaaugucagcucagggccaaguagguaaagccacccaagucuagccaugcacacaggcacuagugugcugaaggaaaacaccucugauuugauacauaaagugugaagguugcauaacuggggagguggcuggagaaaaccugagccucgagcugaguaacaauccaagccaugauuagcauuuauauugcauucugcauuauucucauccuaucacguucauuaaguucaaccauuaccauuacgaaucccguuuccagcuggaaaaacaagcgccaggaaagugcauuucccccccaccccccccccccaaccagagcaacuuuggucagaagucacaccuaaucacccucucugcaggauaugcuggggauagcccuuuugaggagguggggguguaugcgaaagcaaccuggggccaaagcagggggaagcaggagagacuggaggggcccuggguccagcaagugcuccaccaggcugccccugcucaggugcuccacagcccauaaaaaacgccuucagcccugcugugcuuccccucacaccuaaacuuacuauaaggguccuaccuuccccaguauuccuucaugaucacugcuaccugugcccugaagcgcaacagaaccucaacccagaggacagccacuuccucagaacccacgaucuuugccccaucgccacagguccaugagugacuccuaauuaccaaauccaagggcuccuucacccugaccacucuggaacccaacaaagcugacacacagcccagcccagacaggccugaauguggguccuggcucucccauuugccaguucuacagccaugggcaaguggcucgaccucucuaagcuucaguuuccucgucugugaaauaucugucagugcucuuaagggaggagaccaccccacauauugucuuacgcccaauuucugccuccaaagagagaaguaaaaacuaaaaggcagaaaugaaauccacaagcagacagccugcaccacacccugggccugguaguuaaagaucgacgccugaccuaaucagugaugcuaucuauagauuacagacauuauauagaaaagcaccgugaaaaucccuguccuguucuguuccguucuaauuacgggugcaugcagcccccagucacguacccccugcuugcucaaucaaucacgacccucucacgcagaccccuuaagaguugugagcccuuaaaagggacaggaauugcucacucggggagcucaguuguuggagacaugagucuugccgaagcgcccggcugaauaaagcccuucuuuaacucgugucugagggguuuucucugcagcuuguccugcuacauuucuugguucccugaccaggaaucuaggugauuaauggaugguugaggcagccccucagacggcuuaggccugcccuguggagcaucccuguggaggacuccagccagcuugagcgacauggauccugagagcgcucucaggcaggcaauugccccaguggaaugccuggccagagcaguguguagcaggcccccgaggaggaucaacgcaguggcugaacaccgggaaggaacugccacuuggaguccagacaucugaaacuugguaagacuggucuuuggaacuugcccacuccauuugaggggaagcguggccugaucacccacggcgugccuguacuggcacucugguuuuuguuuuugacuugacuuggauugcuugauacuuugguuuugguuuugaccugacuuggauauccugauacucugauuuugguuuugauuuugguuugguguaaacuguaaaagugugugugugcccuuuuuaccuguucuuuguuuugugguaugcguguagggugagcguaauguuuugucuugaagaagcaugggucaagcacaaaguaagaccaccccacuaggaacuaugcugaaaaauuucaggaaaggauuuaagggagacuauggaguacuaugacaccaggaaaacuuaaaacuuuguguaagauagacuggccagcauuagagguagguuggccaucagagugaagccuggacaggucccuuguuucaaagguauggcacaagguaaccuguaagccaggguacccacaccaguucccguacacagacacuugguuacagcugguuuuagacuccccacccgcccgccccaacagugguugagagaacagcagcauaaguggcuggcagaggcaaggaaagaccagcagagagagaaagaggaagagacagacaaagagggagucagagagagagagagaaagagacagaggcaaaaggaaagucaaagagaaagagacagaaaaucaagaggaaaaaaaa

SEQ ID NO: 6 - RNA, 17730 nt, homo sapien
gacagcgcgcggcaggcggcgagcucgggggccgcagaaaaugaaacugaagccguggucacgugacaggacauguaguauauagcaggcugccagcgacuccugcucuugcuucuggaucugcagggcagucccagcaggacccauggaguguccuucgugccagcaugucuccaaggaggaaacccccaaguucugcagccagugcggagagaggcugccuccugcagcccccauagcagauucugagaacaauaacuccacaauggcgucggccucggagggugaaauggagugugggcaggagcugaaggaggaagggggcccgugcuuguucccgggcucagacaguuggcaagaaaaccccgaggagcccuguuccaaagccuccuggaccguccaagaaggagcuacaucagagguuuugguagaugcugcuguagaccucauauccgaugaaugggaagcugcuaaugccauacccagcaagagaaggaagcaggaugcagccccgcuugaggccgccagcgugccuucugcagacugugagcagagcaaaaagaagaaaaggaagaagaaaaagaaggggaacaaguccgcuuccucagagcuggcuuccuugccccuuucuccugccagccccugucaccugacuuugcuuucaaacccguggccucaggacacagcccugccccacagccaagcccagcagaguggccccacuggccagccgagccagcccccaggcacagccaccacgccacuggagggugacggccucuccgcgcccaccgagguuggcgacagcccccugcaggcccaggcuuugggagaggcaggaguggccacaggaagugaggcucagagcagcccgcaauuccaggaccacacggaaggggaggaccaggacgcuuccauccccucugggggcagaggccugucccaggaggggaccgguccccccaccucugcuggugaaggccauucuaggacugaagaugcugcccaggagcuccuguugccugagucaaaaggaggcagcucugagcccgggacagaacugcagaccaccgagcaacaggcaggggccucagccucuauggcaguugaugcuguagcugagccagccaaugcaguuaaaggggccgggaaggaaaugaaagagaagacccagagaaugaaacagccaccagcaaccacuccuccuuucaaaacacacugccaggaagcugagaccaagaccaaggacgagauggcugcugcugaagaaaaagucgguaagaaugaacaaggggagccugaagaccucaagaagccagaggggaagaacagaagugcagcugcugugaaaaacgagaaggagcaaaaaaaccaggaagcagauguccaggaagugaaggcaagcacgcugagcccggguggaggagucaccguguucuuccacgccaucaucucucuucauuucccauucaauccugaccuccauaaagucuucaucagaggaggagaagaauuuggggagucaaaaugggacagcaauaucugugagcugcacuacaccagagacuugggucaugaccgcguucuuguugaaggcauugucugcauuuccaagaagcaccuagauaaauacauuccuuacaaguacgucauuuauaauggggaaucuuuugaguaugaguucauuuacaagcaccagcagaagaagggcgaguacgucaaccgcugucuguucauaaaaucuucacuucugggcucaggagacuggcaucaguacuaugacauaguuuauaugaagccucaugggagacuccagaaagucaugaaccacaucacagacgggccgaggaaggaccuggugaaggggaagcagauugccgcugcgcucaugcuggacagcaccuucagcauccugcagaccugggacaccaucaaccugaacagcuucuucacccaguucgagcaguuuugcuuuguccugcaacagccuaugauuuaugaaggacaggcacagcuguggaccgauuugcaguacagggagaaagaggugaagagauaccuguggcaacaucugaaaaaacacgugguaccauugccggacggaaaaagcacggacuuuuugccuguggacugcccagugaggaguaaacugaaaacaggccugauuguccuuuuuguaguggaaaaaauugagcuuuuauuagaaggcagccuggacugguugugucaccuccuaaccucagaugccagcucaccagaugaguuucaccgugaccuaagccacauccuugggauaccucagagcuggcggcuguaccuggugaaccugugccaaagaugcauggacacaaggacguacaccuggcugggcgcccugccuguccugcacugcuguauggagcuggccccgcggcacaaggaugccuggagacagccugaggacaccugggccgcucuggagggacucuccuucucaccguuccgggaacaaaugcuagauacgaguucccuacuucaguuuaugagagagaagcagcauuugcugagcauagacgagccucucuuccgguccugguuuagucugcuaccucugagucaccugguuauguauauggaaaacuucauugagcaccugggucguuuuccugcucauauccuggacugucuuucagggauuuacuaccggcuuccgggacuugagcaagucuugaauacgcaggauguucaggauguucagaacguucagaacauuuuagaaaugcuguugcgacuccuggacacuuaccgggacaagauucccgaggaggccuugucaccauccuaccugacugugugucugaaacugcaugaagccaucugcagcagcacaaagcuacuuaaguuuuacgagcugccagccuuaucugccgagauugucugcagaaugauuagacuucuaucucugguggauucugcaggacagagagaugaaacuggaaauaauucaguccaaacagucuuccaagggacccuugcugcuacgaaaagguggcuccgagaaguuuuuacaaagaacaugcucacaucuucaggugccucauucacauacgucaaggaaauugaggucuggaggcggcugguggaaauccaauuccccgcggagcauggcuggaaggagucguugcugggagacauggaauggaggcucacaaaggaggaaccccucucccagaucacugccuacugcaauaguugcugggacaccaaaggcuuagaggacaguguggccaagaccuucgagaaaugcaucauugaagccgugagcucagccugccagucucagaccaguauccuucagggguucucuuacucugauuugcggaaauuuggcaucgucuugucugcugugaucacuaaguccuggccuaggaccgcggacaacuucgaugacauuuuaaagcaucugcucacguuggcagaugucaagcacgucuucagauuguguggaaccgacgagaaaauacuagcaaaugucacagaggaugccaagaggcugauagcuguugccgacucuguguugacgaaaguuguuggugaccuccuaaguggcacgauuuuaguuggacaacuggagcugauuauaaagcacaagaaucaguuucuugacaucuggcaacugagggaaaaaagucuuucaccccaggaugaacaaugugcuguggaggaagcacuggauuggagaagggaggaacuguuacuucuaaagaaagagaaaagauguguugauagucuccugaagaugugugggaacgugaaacaucugauacaaguggacuuuggagugcuugcaguaagacacucacaagaccucagcaguaaaagauuaaaugacaccgugacagugagacuguccaccuccucgaacucgcagagggcaacgcauuaccaccugagcucccagguccaagaaauggcugggaagauagacuugcucagagacagccacaucuuccagcucuucuggcgggaagccgcagagccgcugagugagccuaaggaggaccaggaagccgcagaguugcugagugagcccgaagaagaaucagaaaggcacauccuugagcuugaagagguguaugacuauuuguaucagccuucuuacagaaaguucauuaaguugcaccaggaucuaaagucaggagaggucacccuugcagagauugaugucaucuucaaggacuuugugaauaaauacacggaccuggauucagaacuuaagaucaugugcaccguggaccaccaggaccaaagagauuggaucaaggaccgagucgaacagaucaaggaauaccaucaccugcaccaggcuguccacgcagccaaggucaucuugcaggucaaagagagccugggacugaacggugacuucaguguucucaacacuuuacuaaauuuuacugauaacuucgacgacuuucgccgugaaacacuggaccagaucaaccaggagcucauccaggccaaaaagcugcuccaggacaucagcgaggcccggugcaaggggcugcaggcucugucccugagaaaggaguucaucugcuggguccgggaggcucuuggaggcaucaaugagcugaagguguuuguggaccuggccuccaucucagcgggggagaaugacauugauguggaccggguggccugcuuccaugacgcugugcagggcuacgcaucccugcuauuuaagcuggaccccagcguggacuucagugcauucaugaagcaucugaaaaagcuguggaaggcucuggauaaggaccaguaccugcccaggaaacugugugacuccgccaggaacuuggaauggcugaagacugugaaugagagucaugggucuguggaacgcucaucccugacccuggccacggccaucaaccaaagaggcaucuaugugauccaggcgcccaaagguggccaaaagauuuccccagacacgguucugcacuugauccuuccugagagcccuggcagccacgaggagucacgagaguacucuuuagaggaggugaaggagcuuuugaacaaguugaugcugaugucuggcaagaaggaucguaacaacacggaaguggagagguuuucagaggucuucugcagugugcagaggcucagccaggccuucaucgaccugcacucugcugggaauaugcuguucaggacguggaucgccauggccuacugcucccccaagcagggugugucccuccaaauggacuuuggcuuggaccuggugacggagcuuaaagaagguggagaugucacugagcugcuggcagcccucugcaggcagauggagcacuuccuugacagcuggaagagauuugugacccagaagcgaauggagcacuuuuaccugaacuucuacacggcagagcagcugguuuaccugagcacugagcucaggaagcagcccccgagugaugccgcccuaacgaugcuauccuucaucaaaagcaacugcacccugagggaugucuuaagggccucuguggggugugggagugaggccgccagguaccgcaugaggagagucauggaagagcucccgcugaugcucuuaucagaguucagccugguggacaagcugaggaucaucauggagcaguccaugaggugccuuccugccuuccugcccgacugccucgaccuagagacccuuggccacugucuggcucaccuggcagggaugggugggucucccguggagcguugucucccgagaggucugcaggucggccagcccaaccucgucgucuguggccacuccgagguguugccagccgcccuggcugucuacaugcaaaccccaagccagccccugcccacuuacgaugaggugcugcucugcaccccggcaaccaccuuugaggagguggcacuguugcugcgccgcugccugacccugggcucccuggggcacaaggucuacagccugcuguucgcagaucagcugagcuacgagguggcacgccaagcggaggagcuuuuccacaaucugugcacgcagcagcaccgagaagacuaccagcucgucauggucugugauggggacugggagcacugcuaccuccccucugccuucagccagcacaaggucuucgucaccccccaggcaccccucgaggccauccaagccuaccuggcaggucacuaccgggucccgaagcagacccugucggcggcagccguguucaaugaccggcuguguguugggaucguggccucggagcgagcagguguuggaaagucucuguacgugaagagguugcacgacaaaaugaagaugcaguuaaacgugaaaaaugugccucugaaaacaauucgacugaucgacccucagguggaugagagccgaguccugggcgcccugcugcccuuccuggaugcgcaguaucagaagguccccgugcucuuucaccuggacgugaccuccucagugcagacuggaauuuggguguuucuuuucaagcuccucauuuuacaauacuuaauggauauaaaugggaaaauguggcuucggaaccccugccauuuguauaucguugaaauccuggaaaggaggacgucagugccgucgaggagcucuucagcgcugcguacacguguaccccaguucaguuuucuugacaucuucccaaaagucaccugcaggccucccaaagaggugauagacauggagcugagugcccugaggagugacacagagccugggauggaucugugggaguucugcagcgaaacuuuccaaagaccuuaccaguauuuaagacgauucaaucaaaaccaagaccuagacacguuucaguaucaagaaggcucugucgaaggcaccccggaggaaugccuccagcauuuccuguuucacugcgggguaauaaacccauccuggucagagcuucggaacuuugcucgguuccugaauuaucagcucagagauugugaggccucucucuucugcaauccgaguuuuauuggcgacacacugaggggcuucaagaaguucguggugaccuucaugaucuuuauggcaagagauuuugccacaccaucacuccacaccucugaccaaagcccggggaagcacauggucaccauggaugggguuagggaagaagaucuagcgcccuucucccuccggaagaggugggagucggagccucacccauacguuuucuucaaugacgaccacacaaccaugacauucaucggcuuccaucugcagcccaacaucaacggcagugucgaugccaucagucacuugacugggaaggucaucaagagagacgucaugaccagggaccuguaccagggccugcugcuccagagggugcccuucaaugucgacuuugauaaacugcccagacacaagaaacuugagaggcucugccugaccuuagggaucccccaggccaccgaccccgacaaaacguaugagcucacaaccgacaauaugcuuaaaauccuugccaucgagaugcgguuccggugugggaucccgguuaucaucaugggagaaacuggcugugggaaaaccaggcuuauuaaauuccuuagcgaccugcggcguggugguaccaaugcugacaccauaaagcuggucaaggugcacggaggaacaacugcagacaugaucuacuccagagucagggaggcugaaaauguggccuucgccaauaaggaccaacaucaguuggacaccaucuuguuuuuugaugaagccaacacaacggaagcuauaagcuguaucaaagaaguccugugugaucauaugguggauggccagccucuggcugaggacucuggccugcauauuauagcugccugcaauccauaccggaagcacucugaggagaugaucugccguuuggagucagcugguuugggcuacaggguuaguauggaggagacggccgacaggcugggcuccauuccucugaggcagcugguauaccggguccaugcucugcccccgagccugauuccucuggugugggacuuuggacaacugagugacguugcugaaaagcucuacauccagcagauuguccagagacugguugaguccaucagccuagaugaaaacgggacucgcgugaucacagaaguccucugcgccucucaggguuucaugaggaaaacagaagaugagugcagcuuugucagccucagggacguggagcgcugugugaaaguuuucaggugguuccacgagcacagcgcgaugcucuuagcgcagcugaaugccuuucucuccaaguccagcgucagcaaaaaucacaccgagagagaucccguccucuggucguugaugcuggccaucgggguguguuaccaugccucuuuagaaaagaaagacucauaucggaaagccaucgccagguucuuuccgaaaccguaugacgacagcaggcugcuucuggaugaaauaacacgggcacaggaucuuuuucuggacggcguaccucugaggaaaaccaucgccaagaacuuggccuugaaggagaacgucuucaugauggucgucugcaucgagcugaagauuccccucuuccugguggggaagcccggcagcuccaagucucucgccaagaccaucguggcagacgccaugcagggcccggcugccuacucagaucucuuccgcagccugaagcagguccaccugguguccuuccagugcagcccgcacuccaccccacagggcaucaucagcaccuuccggcagugcgcccgcuuucagcaggggaaggaccugcagcaguacgucucuguggugguguuagaugagguggggcuggcggaagacucacccaaaaugccccugaagacucugcacccgcugcuggaagacggaugcauugaagacgaucccgccccccacaaaaaggucggcuucgugggcaucuccaacugggcccuugacccugccaagaugaaccggggcauuuuugugucacguggcagccccaacgagacagagcucauagagagcgccaagggcaucugcuccucagacauccucguccaggaccgaguccaaggguacuuugcguccuuugccaaagccuacgaaacgguguguaagcgccaggacaaggaauucuucgggcuucgugacuacuacagccucaucaaaauggucuuugcugcagcaaaggcuucaaauagaaagccuuccccgcaagacauugcacaggcuguccuuaggaacuucaguggcaaggaugacauccaagcuuuggacaucuuucuggccaauuugcccgaggccaagugcucagaggaagucagccccaugcagcugaucaaacagaacaucuuugggccuucucagaaggugccggguggagagcaggaagaugcugagucccgcuacuuacucgugcugaccaaaaacuacguggcacugcagauccugcagcagacauucuucgagggggaccagcagccggagauuauuuuugguucugguuuccccaaggaccaagaguacacccagcucugcagaaacaucaaucgugugaagaucugcauggaaacaggcaagaugguguugcuucucaaccugcagaaccucuacgagagccucuacgacgcacucaaccaguacuacguccaccucggcggccagaaguacguggaccucggucuggggacccaccgcgucaaaugucggguucaccccaacuuccgccugauugucauugaagagaaagacgucguguacaaacacuuucccaucccccucauuaaccggcuggagaagcacuaucuggauaucaacacggugcuggagaaauggcagaagagcaucguggaggagcucugugcguggguggagaaguucaucaaugucaaagcacaucauuuccagaagaggcacaaauacagccccucugacgucuucaucggcuaccacucggacgccugcgcgucuguggugcugcaggucauagagaggcaggguccccgggccuugacggaggaacuucaccagaaggugucugaggaggccaaaucgauccugcugaacugcgcuacgcccgaugccgugguccggcugagcgccuacucgcugggcggguucgcagcggaguggcugucgcaggaguacuuucacagacagaggcacaacuccuuugcagauuuccuucaggcacaccugcacacggcagaccuggagcgccacgccaucuucacagagaucaccacuuucuccaggcugcuaacaagucacgacugugaaauuuuagaaucagaggucacaggcagggcuccgaaacccacacuccuguggcugcagcaguuugacaccgaguacucauuccucaaagaaguccgaaacuguuuaacgaauacagccaaauguaaaauccucauuuuucagacagauuuugaagauggaauccguagcgcccagcucauugccucagcuaaguauucuguuauaaaugaaaucaacaaaauacgagaaaaugaggaccguaucuucgucuauuucaucacaaaacugucccgggugggaagaggaacagccuaugugggcuuccacggagggcuguggcagucuguccacaucgaugaccuccggagauccacccucaugguuucugaugugaccaggcugcagcaugucaccaucagccagcuguucgcgcccggagacuugccugagcugggcuuggaacaccgggcggaagacggccaugaggaggcgauggagacggaggccagcacaucaggggagguggcagagguggcagaggaggccauggaaacagaaaguucugagaaggugggaaaggaaaccucugaacucggaggcagugaugugucgauccuggacaccaccaggcugcugagaagcugugugcagagcgccgugggcaugcucagagaccagaacgagagcugcacgcgcaauaugcggaggguggugcuccuccugggccucuugaaugaggaugacgcgugccacgccucuuucuugcggguauccaagaugcgccucagugucuuuuuaaagaagcaagaagagagccaguuucacccucuggagugguuggcaagggaagccugcaaccaggacgcucuccaggaggcgggcacauucaggcacacccucuggaagcggguccaaggugcugucaccccucugcuggcgagcaugauaucauucaucgacagagacggcaaccuagaguuacugaccaggccagauacuccgcccugggcaagagaucuuuggauguuuauuuucagugacacgaugcuucugaacauuccucuugugaugaauaaugaaagacauaaaggugagauggccuacaucguggugcagaaccacaugaaccuuuccgagaacgcuuccaacaacgucccuuucagcuggaaaaucaaggacuaucuggaggagcuguggguccaggcucaguacaucacagacgcagaaggacugcccaagaaguucguggacaucuuucagcagacuccucugggcagguuucuugcccagcuccauggagagccgcagcaggaacuucuucaguguuacuugaaggauuucauucucuugaccaugcgugugucaacggaggaggaauuaaaguuucugcagauggcucugugguccugcacuaggaaacugaaagcggcgucagaagcgcccgaggaagagguuuccuuaccgugggugcaccuugccuaccagcguuucagaagccgucugcagaacuuuuccagaauccugaccaucuacccucagguucuccacagccugauggaagcccguuggaaccaugagcuggcuggaugugagaugacccuggacgcauuugccgcaauggccugcacggagaugcugacaagaaacacccugaagcccaguccccaggcguggcuacaguuggugaagaaucuuuccaugccgcuggagcucaucugcuccgaugagcacaugcaaggcagcgggagccuggcccaggcugucaucagggaagucagagcccaguggagucggauuuucuccaccgcacucuucguggagcacgugcuccuaggaaccgagagccgcguccccgaguuacaggggcuggugaccgagcacgucuucuuacuagacaagugucuucgagagaacucugacgugaagacgcacgggccuuuugaggccgugaugcgcacucucugugaaugcaaggagacagccagcaagacccucagcagguuugggauucagccgugcuccaucugccugggagaugcaaaggaccccgucugucugcccugcgaccacgugcacugccugcgcugccucagggccugguuugccucagagcagaugauaugccccuacuguuuaacugccuugccagacgaauucucuccagcuguuucccaagcgcacagggaagccauugaaaagcaugcccgcuuccggcagaugugcaacaguuucuucguagaccugguguccaccauuugcuucaaggacaacgcuccgccugagaaggaagugauugagagccugcucucucuccucuucguccaaaaggggcgcuuaagagaugcugcccagagacacugugaacacacaaaaucucucucuccauucaaugauguuguggauaagacuccugucauccgcucagugauacugaaacugcuuuugaaguacagcuuucaugauguaaaagauuauauucaggaauauuugacccuguuaaaaaagaaagcauucauaacugaagauaaaacugaacuguacaugcucuucaucaacugccuggaggauucaauacuugagaagaccagugcuuacuccagaaaugaugaacugaaccaccuagaagaggaaggucguuuccuuaaggcauauucuccagcaagccggggccgagagccugccaacgaggccucgguugaauaccugcaagagguggcccggauccgccucugccucgacagagcugcagauuuccucucggagccugagggaggcccagagauggccaaggagaagcagugcuaccugcagcaagucaagcaguucuguauccggguggagaacgacuggcaccggguguaccuggugcggaagcucagcagccagcgggggauggaguucgugcagggccucuccaagcccggccgcccgcaccaguggguguuucccaaggacguugucaagcagcaggggcugcggcaggaccacccaggccagauggauagguaccugguguacggcgaugaauacaaggcucuccgugaugcuguggccaaagcuguccucgagugcaagccacugggcauuaagacugcucugaaggccugcaagaccccccaaagccagcagucagccuacuuccuguuaacacuguuuagagagguggcuauuuuguacagaucccacaaugcaagccuccaccccacgccagagcaaugugaagcugugagcaaauucauuggcgaaugcaagauccuuucaccuccugauaucagccguuuugcaacaucgcucguggacaauucugugccauuguugagggcggggccuagugacagcaaccuugauggaacggugacagaaauggccauucaugcugcagccguccuucuguguggacagaaugaacucuuggagccccuaaagaaucuggccuucuccccagccaccauggcgcaugcuuuucuuccaaccaugccugaagacuugcuggcucaagcucggagguggaagggucuggagcgaguccacugguacacuugucccaacggccauccuugcuccgugggagaguguggcaggccgauggaacagagcaucugcauugacugccaugcgccgauuggaggcauugaccacaaaccucgggacggcuuucaucuggucaaagacaaggcagacagaacgcagaccggccacgugcugggcaacccgcagcggagagacguggugacaugugaccgagggcugcccccaguggucuuccuccuuauccggcuacucacucacuuggcucugcuucugggagcgucccagaguucccaggcucugauaaacaucauuaagccuccagugagggauccaaaaggcuuucugcagcagcacauccugaaggaccuggagcaguuggccaagaugcugggacacagugccgacgagaccaucggcgugguccaccucguccugcgcaggcuucuccaagagcagcaccagcucucuagcagaaggcuuuuaaauuuugacacagaauugucaacuaaagaaaugaggaacaacugggaaaaggaaaucgcagcugugauuucuccugaacuggagcaucuagauaaaacccuucccaccaugaauaaucucaucagccaagauaagcguaucagcucuaacccuguggccaaaauaauauauggugacccagugaccuuccugccccaccugccccggaaaagugugguccauugcucuaagauuuggagcugcaggaaaagaauuacaguugaguaccuccagcacauuguggaacagaaaaauggcaaagaaagagugcccauccucuggcauuuccugcagaaggaagcagagcugaggcugguaaaguuccugccugagauuuuggccuugcaaagggaucuagugaagcaguuccagaacguccagcaaguugaauacagcuccaucagaggcuuccucagcaagcacagcucagauggguugaggcagcugcuucacaacaggaucacagucuuucuguccacauggaacaaacugaggagaucgcuugagacgaacggugagaucaaccuacccaaagacuacugcagcacugacuuggaucuggacacugaguuugagauccucuugccacgccgacggggccugggccucugugcuaccgcucucgucagcuacuugauucgccuacacaaugaaauugucuacgccguggaaaaacucuccaaggaaaacaacagcuauuccguggaugccgccgaggucacugaacugcaugucaucaguuaugaaguggagcgggaccugacuccacugauucucuccaacugccaguaccagguggaggagggcagagagaccgugcaggaguucgaucuggagaagauucagcggcagaucgucagccgcuuccuccagggcaagccccggcugagccucaagggaauacccacucugguguacagacacgacuggaacuaugaacaucucuuuauggacaucaagaacaaaauggcacaggacucccuccccagcucggucauuagugccaucaguggacagcugcaguccuacagcgaugccugugaagugcugucugucguagaagucacucugggguuucugagcacagcugguggggauccaaacaugcagcugaauguguauacucaagacauccugcaaaugggugaucagacgauucacguguuaaaggccuuaaacagaugccaguuaaaacacaccauugcccucuggcaguuccugucugcucauaagucugaacagcugcugcggcugcacaaagagccauuuggggaaaucaguucaagguacaaagcggaucugagcccggaaaaugcuaagcuccucagcacauuccuaaaucagacuggccuagacgccuuccugcuagagcugcacgaaaugauaaucuugaaacuaaagaacccccaaacccaaaccgaggagcgcuuccgcccucaguggagccugagagacacucucguaaguuacaugcaaacuaaagaaagugaaauucuuccugaaauggcaucucaguucccagaagagauacugcucgccagcugugucucaguguggaaaacagcugcugugcugaaauggaaucgagaaaugagauagaauuauuuccucagcuaucuuuggaugacuuuggagagaagacuccucucuccucgucugcggcguggacuugaucauggacuggugccuuugcauucagaaggagagcugucagcguagcaccgaauucaagaccaaggcgugcuaccugagcugacagcuuuuugaaagccgagcuguuucugaaccauguacauacauguucugaaacuuucucaucauuuuaugaguacuguucauugagagaugacaaugaagauuagaugaaauuggaaauaaaccaacauuguuuacauuccaggagacuuguagcucagccacacacgcaguaaugaccugugcccguucgccucuggcacugcccaccccucuuuuuuuuuuucuucuaauucuguacucacaaaagagaaucucauuuucuucuuucuuccauucccuuaaauucugaguacuguacauauauuucuggguucccacgaugaugugaaaaacuaccagacuguuuuuugucuucucacaaagacaagaaaaaucagggcauuuugugagugccuuaagaucaaacuaacaagaucugacccucuccccucacagugagccacugccccacuucagaggguaagagccaaaagccucauugugaaaggcacuggacuuggaccagggacaccaucagggccuugguuuucucacgcauaaaauggagaguggauuaaucgccaaagauucuucugaucugacauuuugaaauugugagagaaacuagaugacuguaaacuuggucacaggccugguucuggcaguucuuugcggacuuuuuucuagcauuaugccaaauaaacaugcagucucagugugcucucgcauguaugaauaucuaguccuuucugugguucucagccaagacauaaaaacuaggacucagagcacauacaaaaccaguuauguuucggaaagagggaaaagaguccccgagcccggaucuugugcugcuuuucucacugacguguugccuuuuuucuuuacaaaaucugcuuugauacuuaggaccucucuggacuaauuucucuuccuagacagcucagcacagcuauugauauguuagaggcaguauccuuaauauucauucuaaaugaguuaacgacuuaacuugaaauugggccuaaggagugagaacuacaaaaauacaaaaugcuuguccaggacucagccaugcacaccuugagcagcgccggcaggaggcacggaaggaacugugcuccguucuccucacugucauggugccaccagugucugaugaagggcagagugacccagacugcaggcaguaacugacuucacacagucccuggcauuuagucaucugugauuguuuuaucacucuggacugugcagagccaccugccaccgagaucugcauuccgacugccuaugaacgggugugggggccgggggcuggcuugcugaagucuucaacuugcacucggagcuccuuugauaccucagagcuggcugucagguggcagcucacacccagacucacuggccacaccucagcagggggggagucgagugucagucucuuucugugaaggcuuuuuuuuuccuuuggccugggaauuuuucccauuuuuaugaagggguuuuaaauuguuucauuuugugugcugugcuucaaagccuuaacugucaaaucuugcauuaucuuguuuguacagaaauauacuggccuagcagaggcaaaaaaaaaaaaaaugaauuuuauuuuacuugucacaccugucuuaauaaacuggaguuuugcugcuaaagaa

SEQ ID NO: 7 - RNA, 8391 nt, homo sapien
gaacaucuuugggccuucucagaaggugccggguggagagcaggaagaugcugagucccgcuacuuacucgugcugaccaaaaacuacguggcacugcagauccugcagcagacauucuucgagggggaccagcagccggagauuauuuuugguucugguuuccccaaggaccaagaguacacccagcucugcagaaacaucaaucgugugaagaucugcauggaaacaggcaagaugguguugcuucucaaccugcagaaccucuacgagagccucuacgacgcacucaaccaguacuacguccaccucggcggccagaaguacguggaccucggucuggggacccaccgcgucaaaugucggguucaccccaacuuccgccugauugucauugaagagaaagacgucguguacaaacacuuucccaucccccucauuaaccggcuggagaagcacuaucuggauaucaacacggugcuggagaaauggcagaagagcaucguggaggagcucugugcguggguggagaaguucaucaaugucaaagcacaucauuuccagaagaggcacaaauacagccccucugacgucuucaucggcuaccacucggacgccugcgcgucuguggugcugcaggucauagagaggcaggguccccgggccuugacggaggaacuucaccagaaggugucugaggaggccaaaucgauccugcugaacugcgcuacgcccgaugccgugguccggcugagcgccuacucgcugggcggguucgcagcggaguggcugucgcaggaguacuuucacagacagaggcacaacuccuuugcagauuuccuucaggcacaccugcacacggcagaccuggagcgccacgccaucuucacagagaucaccacuuucuccgggcugcuaacaagucacgacugugaaauuuuagaaucagaggucacaggcagggcuccgaaacccacacuccuguggcugcagcaguuugacaccgaguacucauuccucaaagaaguccgaaacuguuuaacgaauacagccaaauguaaaauccucauuuuucagacagauuuugaagauggaauccguagcgcccagcucauugccucagcuaaguauucuguuauaaaugaaaucaacaaaauacgagaaaaugaggaccguaucuucgucuauuucaucacaaaacugucccgggugggaagaggaacagccuaugugggcuuccacggagggcuguggcagucuguccacaucgaugaccuccggagauccacccucaugguuucugaugugaccaggcugcagcaugucaccaucagccagcuguucgcgcccggagacuugccugagcugggcuuggaacaccgggcggaagacggccaugaggaggcgauggaaacggaggccagcacaucaggggagguggcagagguggcagaggaggccauggaaacagaaaguucugagaaggugggaaaggaaaccucugaacucggaggcagugaugugucgauccuggacaccaccaggcugcugagaagcugugugcagagcgccgugggcaugcucagagaccagaacgagagcugcacgcgcaauaugcggaggguggugcuccuccugggccucuugaaugaggaugacgcgugccacgccucuuucuugcggguauccaagaugcgccucagugucuuuuuaaagaagcaagaagagagccaguuucacccucuggagugguuggcaagggaagccugcaaccaggacgcucuccaggaggcgggcacauucaggcacacccucuggaagcggguccaaggugcugucaccccucugcuggcgagcaugauaucauucaucgacagagacggcaaccuagaguuacugaccaggccagauacuccgcccugggcaagagaucuuuggauguuuauuuucagugacacgaugcuucugaacauuccucuugugaugaauaaugaaagacauaaaggugagauggccuacaucguggugcagaaccacaugaaccuuuccgagaacgcuuccaacaacgucccuuucagcuggaaaaucaaggacuaucuggaggagcuguggguccaggcucaguacaucacagacgcagaaggacugcccaagaaguucguggacaucuuucagcagacuccucugggcagguuucuugcccagcuccauggagagccgcagcaggaacuucuucaguguuacuugaaggauuucauucucuugaccaugcgugugucaacggaggaggaauuaaaguuucugcagauggcucugugguccugcacuaggaaacugaaagcggcgucagaagcgcccgaggaagagguuuccuuaccgugggugcaccuugccuaccagcguuucagaagccgucugcagaacuuuuccagaauccugaccaucuacccucagguucuccacagccugauggaagcccguuggaaccaugagcuggcuggaugugagaugacccuggacgcauuugccgcaauggccugcacggagaugcugacaagaaacacccugaagcccaguccccaggcguggcuacaguuggugaagaaucuuuccaugccgcuggagcucaucugcuccgaugagcacaugcaaggcagcgggagccuggcccaggcugucaucagggaagucagagcccaguggagucggauuuucuccaccgcacucuucguggagcacgugcuccuaggaaccgagagccgcguccccgaguuacaggggcuggugaccgagcacgucuucuuacuagacaagugucuucgagagaacucugacgugaagacgcacgggccuuuugaggccgugaugcgcacucucugugaaugcaaggagacagccagcaagacccucagcagguuugggauucagccgugcuccaucugccugggagaugcaaaggaccccgucugucugcccugcgaccacgugcacugccugcgcugccucagggccugguuugccucagagcagaugauaugccccuacuguuuaacugccuugccagacgaauucucuccagcuguuucccaagcgcacagggaagccauugaaaagcaugcccgcuuccggcagaugugcaacaguuucuucguagaccugguguccaccauuugcuucaaggacaacgcuccgccugagaaggaagugauugagagccugcucucucuccucuucguccaaaaggggcgcuuaagagaugcugcccagagacacugugaacacacaaaaucucucucuccauucaaugauguuguggauaagacuccugucauccgcucagugauacugaaacugcuuuugaaguacagcuuucaugauguaaaagauuauauucaggaauauuugacccuguuaaaaaagaaagcauucauaacugaagauaaaacugaacuguacaugcucuucaucaacugccuggaggauucaauacuugagaagaccagugcuuacuccagaaaugaugaacugaaccaccuagaagaggaaggucguuuccuuaaggcauauucuccagcaagccggggccgagagccugccaacgaggccucgguugaauaccugcaagagguggcccggauccgccucugccucgacagagcugcagauuuccucucggagccugagggaggcccagagauggccaaggagaagcagugcuaccugcagcaagucaagcaguucuguauccggguggagaacgacuggcaccggguguaccuggugcggaagcucagcagccagcgggggauggaguucgugcagggccucuccaagcccggccgcccgcaccaguggguguuucccaaggacguugucaagcagcaggggcugcggcaggaccacccaggccagauggauagguaccugguguacggcgaugaauacaaggcucuccgugaugcuguggccaaagcuguccucgagugcaagccacugggcauuaagacugcucugaaggccugcaagaccccccaaagccagcagucagccuacuuccuguuaacacuguuuagagagguggcuauuuuguacagaucccacaaugcaagccuccaccccacgccagagcaaugugaagcugugagcaaauucauuggcgaaugcaagauccuuucaccuccugauaucagccguuuugcaacaucgcucguggacaauucugugccauuguugagggcggggccuagugacagcaaccuugauggaacggugacagaaauggccauucaugcugcagccguccuucuguguggacagaaugaacucuuggagccccuaaagaaucuggccuucuccccagccaccauggcgcaugcuuuucuuccaaccaugccugaagacuugcuggcucaagcucggagguggaagggucuggagcgaguccacugguacacuugucccaacggccauccuugcuccgugggagaguguggcaggccgauggaacagagcaucugcauugacugccaugcgccgauuggaggcauugaccacaaaccucgggacggcuuucaucuggucaaagacaaggcagacagaacgcagaccggccaugugcugggcaacccgcagcggagagacguggugacaugugaccgagggcugcccccaguggucuuccuccuuauccggcuacucacucacuuggcucugcuucugggagcgucccagaguucccaggcucugauaaacaucauuaagccuccagugagggauccaaaaggcuuucugcagcagcacauccugaaggaccuggagcaguuggccaagaugcugggacacagugccgacgagaccaucggcgugguccaccucguccugcgcaggcuucuccaagagcagcaccagcucucuagcagaaggcuuuuaaauuuugacacagaauugucaacuaaagaaaugaggaacaacugggaaaaggaaaucgcagcugugauuucuccugaacuggagcaucuagauaaaacccuucccaccaugaauaaucucaucagccaagauaagcguaucagcucuaacccuguggccaaaauaauauauggugacccagugaccuuccugccccaccugccccggaaaagugugguccauugcucuaagauuuggagcugcaggaaaagaauuacaguugaguaccuccagcacauuguggaacagaaaaauggcaaagaaagagugcccauccucuggcauuuccugcagaaggaagcagagcugaggcugguaaaguuccugccugagauuuuggccuugcaaagggaucuagugaagcaguuccagaacguccagcaaguugaauacagcuccaucagaggcuuccucagcaagcacagcucagauggguugaggcagcugcuucacaacaggaucacagucuuucuguccacauggaacaaacugaggagaucgcuugagacgaacggugagaucaaccuacccaaagacuacugcagcacugacuuggaucuggacacugaguuugagauccucuugccacgccgacggggccugggccucugugcuaccgcucucgucagcuacuugauucgccuacacaaugaaauugucuacgccguggaaaaacucuccaaggaaaacaacagcuauuccguggaugccgccgaggucacugaacugcaugucaucaguuaugaaguggagcgggaccugacuccacugauucucuccaacugccaguaccagguggaggagggcagagagaccgugcaggaguucgaucuggagaagauucagcggcagaucgucagccgcuuccuccagggcaagccccggcugagccucaagggaauacccacucugguguacagacacgacuggaacuaugaacaucucuuuauggacaucaagaacaaaauggcacaggacucccuccccagcucggucauuagugccaucaguggacagcugcaguccuacagcgaugccugugaagugcugucugucguagaagucacucugggguuucugagcacagcugguggggauccaaacaugcagcugaauguguauacucaagacauccugcaaaugggugaucagacgauucacguguuaaaggccuuaaacagaugccaguuaaaacacaccauugcccucuggcaguuccugucugcucauaagucugaacagcugcugcggcugcacaaagagccauuuggggaaaucaguucaagguacaaagcggaucugagcccggaaaaugcuaagcuccucagcacauuccuaaaucagacuggccuagacgccuuccugcuagagcugcacgaaaugauaaucuugaaacuaaagaacccccaaacccaaaccgaggagcgcuuccgcccucaguggagccugagagacacucucguaaguuacaugcaaacuaaagaaagugaaauucuuccugaaauggcaucucaguucccagaagagauacugcucgccagcugugucucaguguggaaaacagcugcugugcugaaauggaaucgagaaaugagauagaauuauuuccucagcuaucuuuggaugacuuuggagagaagacuccucucuccucgucugcggcguggacuugaucauggacuggugccuuugcauucagaaggagagcugucagcguagcaccgaauucaagaccaaggcgugcuaccugagcugacagcuuuuugaaagccgagcuguuucugaaccauguacauacauguucugaaacuuucucaucauuuuaugaguacuguucauugagagaugacaaugaagauuagaugaaauuggaaauaaaccaacauuguuuacauuccaggagacuuguagcucagccacacacgcaguaaugaccugugcccguucgccucuggcacugcccaccccucuuuuuuuuuuucuucuaauucuguacucacaaaagagaaucucauuuucuucuuucuuccauucccuuaaauucugaguacuguacauauauuucuggguucccacgaugaugugaaaaacuaccagacuguuuuuugucuucucacaaagacaagaaaaaucagggcauuuugugagugccuuaagaucaaacuaacaagaucugacccucuccccucacagugagccacugccccacuucagaggguaagagccaaaagccucauugugaaaggcacuggacuuggaccagggacaccaucagggccuugguuuucucacgcauaaaauggagaguggauuaaucgccaaagauucuucugaucugacauuuugaaauugugagagaaacuagaugacuguaaacuuggucacaggccugguucuggcaguucuuugcggacuuuuuucuagcauuaugccaaauaaacaugcagucucagugugcucucgcauguaugaauaucuaguccuuucugugguucucagccaagacauaaaaacuaggacucagagcacauacaaaaccaguuauguuucggaaagagggaaaagaguccccgagcccggaucuugugcugcuuuucucacugacguguugccuuuuuucuuuacaaaaucugcuuugauacuuaggaccucucuggacuaauuucucuuccuagacagcucagcacagcuauugauauguuagaggcaguauccuuaauauucauucuaaaugaguuaacgacuuaacuugaaauugggccuaaggagugagaacuacaaaaauacaaaaugcuuguccaggacucagccaugcacaccuugagcagcgccggcaggaggcacggaaggaacugugcuccguucuccucacugucauggugccaccagugucugaugaagggcagagugacccagacugcaggcaguaacugacuucacacagucccuggcauuuagucaucugugauuguuuuaucacucuggacugugcagagccaccugccaccgagaucugcauuccgacugccuaugaacgggugugggggccgggggcuggcuugcugaagucuucaacuugcacucggagcuccuuugauaccucagagcuggcugucagguggcagcucacacccagacucacuggccacaccucagcagggggggagucgagugucagucucuuucugugaaggcuuuuuuuuuccuuuggccugggaauuuuucccauuuuuaugaagggguuuuaaauuguuucauuuugugugcugugcuucaaagccuuaacugucaaaucuugcauuaucuuguuuguacagaaauauacuggccuagcagaggcaaaaaaaaaaaaaugaauuuuauuuuacuugucacaccugucuuaauaaacuggaguuuugcugcuaaaaaaaaaaaaaaaaaaa

SEQ ID NO: 8 - RNA, 6693 nt, homo sapien
gggccucuugaaugaggaugacgcgugccacgccucuuucuugcggguauccaagaugcgccucagugucuuuuuaaagaagcaagaagagagccaguuucacccucuggagugguuggcaagggaagccugcaaccaggacgcucuccaggaggcgggcacauucaggcacacccucuggaagcggguccaaggugcugucaccccucugcuggcgagcaugauaucauucaucgacagagacggcaaccuagaguuacugaccaggccagauacuccgcccugggcaagagaucuuuggauguuuauuuucagugacacgaugcuucugaacauuccucuugugaugaauaaugaaagacauaaaggugagauggccuacaucguggugcagaaccacaugaaccuuuccgagaacgcuuccaacaacgucccuuucagcuggaaaaucaaggacuaucuggaggagcuguggguccaggcucaguacaucacagacgcagaaggacugcccaagaaguucguggacaucuuucagcagacuccucugggcagguuucuugcccagcuccauggagagccgcagcaggaacuucuucaguguuacuugaaggauuucauucucuugaccaugcgugugucaacggaggaggaauuaaaguuucugcagauggcucugugguccugcacuaggaaacugaaagcggcgucagaagcgcccgaggaagagguuuccuuaccgugggugcaccuugccuaccagcguuucagaagccgucugcagaacuuuuccagaauccugaccaucuacccucagguucuccacagccugauggaagcccguuggaaccaugagcuggcuggaugugagaugacccuggacgcauuugccgcaauggccugcacggagaugcugacaagaaacacccugaagcccaguccccaggcguggcuacaguuggugaagaaucuuuccaugccgcuggagcucaucugcuccgaugagcacaugcaaggcagcgggagccuggcccaggcugucaucagggaagucagagcccaguggagucggauuuucuccaccgcacucuucguggagcacgugcuccuaggaaccgagagccgcguccccgaguuacaggggcuggugaccgagcacgucuucuuacuagacaagugucuucgagagaacucugacgugaagacgcacgggccuuuugaggccgugaugcgcacucucugugaaugcaaggagacagccagcaagacccucagcagguuugggauucagccgugcuccaucugccugggagaugcaaaggaccccgucugucugcccugcgaccacgugcacugccugcgcugccucagggccugguuugccucagagcagaugauaugccccuacuguuuaacugccuugccagacgaauucucuccagcuguuucccaagcgcacagggaagccauugaaaagcaugcccgcuuccggcagaugugcaacaguuucuucguagaccugguguccaccauuugcuucaaggacaacgcuccgccugagaaggaagugauugagagccugcucucucuccucuucguccaaaaggggcgcuuaagagaugcugcccagagacacugugaacacacaaaaucucucucuccauucaaugauguuguggauaagacuccugucauccgcucagugauacugaaacugcuuuugaaguacagcuuucaugauguaaaagauuauauucaggaauauuugacccuguuaaaaaagaaagcauucauaacugaagauaaaacugaacuguacaugcucuucaucaacugccuggaggauucaauacuugagaagaccagugcuuacuccagaaaugaugaacugaaccaccuagaagaggaaggucguuuccuuaaggcauauucuccagcaagccggggccgagagccugccaacgaggccucgguugaauaccugcaagagguggcccggauccgccucugccucgacagagcugcagauuuccucucggagccugagggaggcccagagauggccaaggagaagcagugcuaccugcagcaagucaagcaguucuguauccggguggagaacgacuggcaccggguguaccuggugcggaagcucagcagccagcgggggauggaguucgugcagggccucuccaagcccggccgcccgcaccaguggguguuucccaaggacguugucaagcagcaggggcugcggcaggaccacccaggccagauggauagguaccugguguacggcgaugaauacaaggcucuccgugaugcuguggccaaagcuguccucgagugcaagccacugggcauuaagacugcucugaaggccugcaagaccccccaaagccagcagucagccuacuuccuguuaacacuguuuagagagguggcuauuuuguacagaucccacaaugcaagccuccaccccacgccagagcaaugugaagcugugagcaaauucauuggcgaaugcaagauccuuucaccuccugauaucagccguuuugcaacaucgcucguggacaauucugugccauuguugagggcggggccuagugacagcaaccuugauggaacggugacagaaauggccauucaugcugcagccguccuucuguguggacagaaugaacucuuggagccccuaaagaaucuggccuucuccccagccaccauggcgcaugcuuuucuuccaaccaugccugaagacuugcuggcucaagcucggagguggaagggucuggagcgaguccacugguacacuugucccaacggccauccuugcuccgugggagaguguggcaggccgauggaacagagcaucugcauugacugccaugcgccgauuggaggcauugaccacaaaccucgggacggcuuucaucuggucaaagacaaggcagacagaacgcagaccggccacgugcugggcaacccgcagcggagagacguggugacaugugaccgagggcugcccccaguggucuuccuccuuauccggcuacucacucacuuggcucugcuucugggagcgucccagaguucccaggcucugauaaacaucauuaagccuccagugagggauccaaaaggcuuucugcagcagcacauccugaaggaccuggagcaguuggccaagaugcugggacacagugccgacgagaccaucggcgugguccaccucguccugcgcaggcuucuccaagagcagcaccagcucucuagcagaaggcuuuuaaauuuugacacagaauugucaacuaaagaaaugaggaacaacugggaaaaggaaaucgcagcugugauuucuccugaacuggagcaucuagauaaaacccuucccaccaugaauaaucucaucagccaagauaagcguaucagcucuaacccuguggccaaaauaauauauggugacccagugaccuuccugccccaccugccccggaaaagugugguccauugcucuaagauuuggagcugcaggaaaagaauuacaguugaguaccuccagcacauuguggaacagaaaaauggcaaagaaagagugcccauccucuggcauuuccugcagaaggaagcagagcugaggcugguaaaguuccugccugagauuuuggccuugcaaagggaucuagugaagcaguuccagaacguccagcaaguugaauacagcuccaucagaggcuuccucagcaagcacagcucagauggguugaggcagcugcuucacaacaggaucacagucuuucuguccacauggaacaaacugaggagaucgcuugagacgaacggugagaucaaccuacccaaagacuacugcagcacugacuuggaucuggacacugaguuugagauccucuugccacgccgacggggccugggccucugugcuaccgcucucgucagcuacuugauucgccuacacaaugaaauugucuacgccguggaaaaacucuccaaggaaaacaacagcuauuccguggaugccgccgaggucacugaacugcaugucaucaguuaugaaguggagcgggaccugacuccacugauucucuccaacugccaguaccagguggaggagggcagagagaccgugcaggaguucgaucuggagaagauucagcggcagaucgucagccgcuuccuccagggcaagccccggcugagccucaagggaauacccacucugguguacagacacgacuggaacuaugaacaucucuuuauggacaucaagaacaaaauggcacaggacucccuccccagcucggucauuagugccaucaguggacagcugcaguccuacagcgaugccugugaagugcugucugucguagaagucacucugggguuucugagcacagcugguggggauccaaacaugcagcugaauguguauacucaagacauccugcaaaugggugaucagacgauucacguguuaaaggccuuaaacagaugccaguuaaaacacaccauugcccucuggcaguuccugucugcucauaagucugaacagcugcugcggcugcacaaagagccauuuggggaaaucaguucaagguacaaagcggaucugagcccggaaaaugcuaagcuccucagcacauuccuaaaucagacuggccuagacgccuuccugcuagagcugcacgaaaugauaaucuugaaacuaaagaacccccaaacccaaaccgaggagcgcuuccgcccucaguggagccugagagacacucucguaaguuacaugcaaacuaaagaaagugaaauucuuccugaaauggcaucucaguucccagaagagauacugcucgccagcugugucucaguguggaaaacagcugcugugcugaaauggaaucgagaaaugagauagaauuauuuccucagcuaucuuuggaugacuuuggagagaagacuccucucuccucgucugcggcguggacuugaucauggacuggugccuuugcauucagaaggagagcugucagcguagcaccgaauucaagaccaaggcgugcuaccugagcugacagcuuuuugaaagccgagcuguuucugaaccauguacauacauguucugaaacuuucucaucauuuuaugaguacuguucauugagagaugacaaugaagauuagaugaaauuggaaauaaaccaacauuguuuacauuccaggagacuuguagcucagccacacacgcaguaaugaccugugcccguucgccucuggcacugcccaccccucuuuuuuuuuuucuucuaauucuguacucacaaaagagaaucucauuuucuucuuucuuccauucccuuaaauucugaguacuguacauauauuucuggguucccacgaugaugugaaaaacuaccagacuguuuuuugucuucucacaaagacaagaaaaaucagggcauuuugugagugccuuaagaucaaacuaacaagaucugacccucuccccucacagugagccacugccccacuucagaggguaagagccaaaagccucauugugaaaggcacuggacuuggaccagggacaccaucagggccuugguuuucucacgcauaaaauggagaguggauuaaucgccaaagauucuucugaucugacauuuugaaauugugagagaaacuagaugacuguaaacuuggucacaggccugguucuggcaguucuuugcggacuuuuuucuagcauuaugccaaauaaacaugcagucucagugugcucucgcauguaugaauaucuaguccuuucugugguucucagccaagacauaaaaacuaggacucagagcacauacaaaaccaguuauguuucggaaagagggaaaagaguccccgagcccggaucuugugcugcuuuucucacugacguguugccuuuuuucuuuacaaaaucugcuuugauacuuaggaccucucuggacuaauuucucuuccuagacagcucagcacagcuauugauauguuagaggcaguauccuuaauauucauucuaaaugaguuaacgacuuaacuugaaauugggccuaaggagugagaacuacaaaaauacaaaaugcuuguccaggacucagccaugcacaccuugagcagcgccggcaggaggcacggaaggaacugugcuccguucuccucacugucauggugccaccagugucugaugaagggcagagugacccagacugcaggcaguaacugacuucacacagucccuggcauuuagucaucugugauuguuuuaucacucuggacugugcagagccaccugccaccgagaucugcauuccgacugccuaugaacgggugugggggccgggggcuggcuugcugaagucuucaacuugcacucggagcuccuuugauaccucagagcuggcugucagguggcagcucacacccagacucacuggccacaccucagcagggggggagucgagugucagucucuuucugugaaggcuuuuuuuuuccuuuggccugggaauuuuucccauuuuuaugaagggguuuuaaauuguuucauuuugugugcugugcuucaaagccuuaacugucaaaucuugcauuaucuuguuuguacagaaauauacuggccuagcagaggcagaaaaaaaaaaaaaaaaaaaa

SEQ ID NO: 9 - RNA, 4616 nt, homo sapien
ggauuucauucucuugaccaugcgugugucaacggaggaggaauuaaaguuucugcagauggcucugugguccugcacuaggaaacugaaagcggcgucagaagcgcccgaggaagagguuuccuuaccgugggugcaccuugccuaccagcguuucagaagccgucugcagaacuuuuccagaauccugaccaucuacccucagguucuccacagccugauggaagcccguuggaaccaugagcuggcuggaugugagaugacccuggacgcauuugccgcaauggccugcacggagaugcugacaagaaacacccugaagcccaguccccaggcguggcuacaguuggugaagaaucuuuccaugccgcuggagcucaucugcuccgaugagcacaugcaaggcagcgggagccuggcccaggcugucaucagggaagucagagcccaguggagucggauuuucuccaccgcacucuucguggagcacgugcuccuaggaaccgagagccgcguccccgaguuacaggggcuggugaccgagcacgucuucuuacuagacaagugucuucgagagaacucugacgugaagacgcacgggccuuuugaggccgugaugcgcacucucugugaaugcaaggagacagccagcaagacccucagcagguuugggauucagccgugcuccaucugccugggagaugcaaaggaccccgucugucugcccugcgaccacgugcacugccugcgcugccucagggccugguuugccucagagcagaugauaugccccuacuguuuaacugccuugccagacgaauucucuccagcuguuucccaagcgcacagggaagccauugaaaagcaugcccgcuuccggcagaugugcaacaguuucuucguagaccugguguccaccauuugcuucaaggacaacgcuccgccugagaaggaagugauugagagccugcucucucuccucuucguccaaaaggggcgcuuaagagaugcugcccagagacacugugaacacacaaaaucucucucuccauucaaugauguuguggauaagacuccugucauccgcucagugauacugaaacugcuuuugaaguacagcuuucaugauguaaaagauuauauucaggaauauuugacccuguuaaaaaagaaagcauucauaacugaagauaaaacugaacuguacaugcucuucaucaacugccuggaggauucaauacuugagaagaccagugcuuacuccagaaaugaugaacugaaccaccuagaagaggaaggucguuuccuuaaggcauauucuccagcaagccggggccgagagccugccaacgaggccucgguugaauaccugcaagagguggcccggauccgccucugccucgacagagcugcagauuuccucucggagccugagggaggcccagagauggccaaggagaagcagugcuaccugcagcaagucaagcaguucuguauccggguggagaacgacuggcaccggguguaccuggugcggaagcucagcagccagcgggggauggaguucgugcagggccucuccaagcccggccgcccgcaccaguggguguuucccaaggacguugucaagcagcaggggcugcggcaggaccacccaggccagauggauagguaccugguguacggcgaugaauacaaggcucuccgugaugcuguggccaaagcuguccucgagugcaagccacugggcauuaagacugcucugaaggccugcaagaccccccaaagccagcagucagccuacuuccuguuaacacuguuuagagagguggcuauuuuguacagaucccacaaugcaagccuccaccccacgccagagcaaugugaagcugugagcaaauucauuggcgaaugcaagauccuuucaccuccugauaucagccguuuugcaacaucgcucguggacaauucugugccauuguugagggcggggccuagugacagcaaccuugauggaacggugacagaaauggccauucaugcugcagccguccuucuguguggacagaaugaacucuuggagccccuaaagaaucuggccuucuccccagccaccauggcgcaugcuuuucuuccaaccaugccugaagacuugcuggcucaagcucggagguggaagggucuggagcgaguccacugguacacuugucccaacggccauccuugcuccgugggagaguguggcaggccgauggaacagagcaucugcauugacugccaugcgccgauuggaggcauugaccacaaaccucgggacggcuuucaucuggucaaagacaaggcagacagaacgcagaccggccacgugcugggcaacccgcagcggagagacguggugacaugugaccgagggcugcccccaguggucuuccuccuuauccggcuacucacucacuuggcucugcuucugggagcgucccagaguucccaggcucugauaaacaucauuaagccuccagugagggauccaaaaggcuuucugcagcagcacauccugaaggaccuggagcaguuggccaagaugcugggacacagugccgacgagaccaucggcgugguccaccucguccugcgcaggcuucuccaagagcagcaccagcucucuagcagaaggcuuuuaaauuuugacacagaauugucaacuaaagaaaugaggaacaacugggaaaaggaaaucgcagcugugauuucuccugaacuggagcaucuagauaaaacccuucccaccaugaauaaucucaucagccaagauaagcguaucagcucuaacccuguggccaaaauaauauauggugacccagugaccuuccugccccaccugccccggaaaagugugguccauugcucuaagauuuggagcugcaggaaaagaauuacaguugaguaccuccagcacauuguggaacagaaaaauggcaaagaaagagugcccauccucuggcauuuccugcagaaggaagcagagcugaggcugguaaaguuccugccugagauuuuggccuugcaaagggaucuagugaagcaguuccagaacguccagcaaguugaauacagcuccaucagaggcuuccucagcaagcacagcucagauggguugaggcagcugcuucacaacaggaucacagucuuucuguccacauggaacaaacugaggagaucgcuugagacgaacggugagaucaaccuacccaaagacuacugcagcacugacuuggaucuggacacugaguuugagauccucuugccacgccgacggggccugggccucugugcuaccgcucucgucagcuacuugauucgccuacacaaugaaauugucuacgccguggaaaaacucuccaaggaaaacaacagcuauuccguggaugccgccgaggucacugaacugcaugucaucaguuaugaaguggagcgggaccugacuccacugauucucuccaacugccaguaccagguggaggagggcagagagaccgugcaggaguucgaucuggagaagauucagcggcagaucgucagccgcuuccuccagggcaagccccggcugagccucaagggaauacccacucugguguacagacacgacuggaacuaugaacaucucuuuauggacaucaagaacaaaauggcacaggacucccuccccagcucggucauuagugccaucaguggacagcugcaguccuacagcgaugccugugaagugcugucugucguagaagucacucugggguuucugagcacagcugguggggauccaaacaugcagcugaauguguauacucaagacauccugcaaaugggugaucagacgauucacguguuaaaggccuuaaacagaugccaguuaaaacacaccauugcccucuggcaguuccugucugcucauaagucugaacagcugcugcggcugcacaaagagccauuuggggaaaucaguucaagguacaaagcggaucugagcccggaaaaugcuaagcuccucagcacauuccuaaaucagacuggccuagacgccuuccugcuagagcugcacgaaaugauaaucuugaaacuaaagaacccccaaacccaaaccgaggagcgcuuccgcccucaguggagccugagagacacucucguaaguuacaugcaaacuaaagaaagugaaauucuuccugaaauggcaucucaguucccagaagagauacugcucgccagcugugucucaguguggaaaacagcugcugugcugaaauggaaucgagaaaugagauagaauuauuuccucagcuaucuuuggaugacuuuggagagaagacuccucucuccucgucugcggcguggacuugaucauggacuggugccuuugcauucagaaggagagcugucagcguagcaccgaauucaagaccaaggcgugcuaccugagcugacagcuuuuugaaagccgagcuguuucugaaccauguacauacauguucugaaacuuucucaucauuuuaugaguacuguucauugagagaugacaaugaagauuagaugaaauuggaaauaaaccaacauuguuuacauuc

SEQ ID NO: 10 - RNA, 5949 nt, homo sapien
guccccaggcguggcuacaguuggugaagaaucuuuccaugccgcuggagcucaucugcuccgaugagcacaugcaaggcagcgggagccuggcccaggcugucaucagggaagucagagcccaguggagucggauuuucuccaccgcacucuucguggagcacgugcuccuaggaaccgagagccgcguccccgaguuacaggggcuggugaccgagcacgucuucuuacuagacaagugucuucgagagaacucugacgugaagacgcacgggccuuuugaggccgugaugcgcacucucugugaaugcaaggagacagccagcaagacccucagcagguuugggauucagccgugcuccaucugccugggagaugcaaaggaccccgucugucugcccugcgaccacgugcacugccugcgcugccucagggccugguuugccucagagcagaugauaugccccuacuguuuaacugccuugccagacgaauucucuccagcuguuucccaagcgcacagggaagccauugaaaagcaugcccgcuuccggcagaugugcaacaguuucuucguagaccugguguccaccauuugcuucaaggacaacgcuccgccugagaaggaagugauugagagccugcucucucuccucuucguccaaaaggggcgcuuaagagaugcugcccagagacacugugaacacacaaaaucucucucuccauucaaugauguuguggauaagacuccugucauccgcucagugauacugaaacugcuuuugaaguacagcuuucaugauguaaaagauuauauucaggaauauuugacccuguuaaaaaagaaagcauucauaacugaagauaaaacugaacuguacaugcucuucaucaacugccuggaggauucaauacuugagaagaccagugcuuacuccagaaaugaugaacugaaccaccuagaagaggaaggucguuuccuuaaggcauauucuccagcaagccggggccgagagccugccaacgaggccucgguugaauaccugcaagagguggcccggauccgccucugccucgacagagcugcagauuuccucucggagccugagggaggcccagagauggccaaggagaagcagugcuaccugcagcaagucaagcaguucuguauccggguggagaacgacuggcaccggguguaccuggugcggaagcucagcagccagcgggggauggaguucgugcagggccucuccaagcccggccgcccgcaccaguggguguuucccaaggacguugucaagcagcaggggcugcggcaggaccacccaggccagauggauagguaccugguguacggcgaugaauacaaggcucuccgugaugcuguggccaaagcuguccucgagugcaagccacugggcauuaagacugcucugaaggccugcaagaccccccaaagccagcagucagccuacuuccuguuaacacuguuuagagagguggcuauuuuguacagaucccacaaugcaagccuccaccccacgccagagcaaugugaagcugugagcaaauucauuggcgaaugcaagauccuuucaccuccugauaucagccguuuugcaacaucgcucguggacaauucugugccauuguugagggcggggccuagugacagcaaccuugauggaacggugacagaaauggccauucaugcugcagccguccuucuguguggacagaaugaacucuuggagccccuaaagaaucuggccuucuccccagccaccauggcgcaugcuuuucuuccaaccaugccugaagacuugcuggcucaagcucggagguggaagggucuggagcgaguccacugguacacuugucccaacggccauccuugcuccgugggagaguguggcaggccgauggaacagagcaucugcauugacugccaugcgccgauuggaggcauugaccacaaaccucgggacggcuuucaucuggucaaagacaaggcagacagaacgcagaccggccaugugcugggcaacccgcagcggagagacguggugacaugugaccgagggcugcccccaguggucuuccuccuuauccggcuacucacucacuuggcucugcuucugggagcgucccagaguucccaggcucugauaaacaucauuaagccuccagugagggauccaaaaggcuuucugcagcagcacauccugaaggaccuggagcaguuggccaagaugcugggacacagugccgacgagaccaucggcgugguccaccucguccugcgcaggcuucuccaagagcagcaccagcucucuagcagaaggcuuuuaaauuuugacacagaauugucaacuaaagaaaugaggaacaacugggaaaaggaaaucgcagcugugauuucuccugaacuggagcaucuagauaaaacccuucccaccaugaauaaucucaucagccaagauaagcguaucagcucuaacccuguggccaaaauaauauauggugacccagugaccuuccugccccaccugccccggaaaagugugguccauugcucuaagauuuggagcugcaggaaaagaauuacaguugaguaccuccagcacauuguggaacagaaaaauggcaaagaaagagugcccauccucuggcauuuccugcagaaggaagcagagcugaggcugguaaaguuccugccugagauuuuggccuugcaaagggaucuagugaagcaguuccagaacguccagcaaguugaauacagcuccaucagaggcuuccucagcaagcacagcucagauggguugaggcagcugcuucacaacaggaucacagucuuucuguccacauggaacaaacugaggagaucgcuugagacgaacggugagaucaaccuacccaaagacuacugcagcacugacuuggaucuggacacugaguuugagauccucuugccacgccgacggggccugggccucugugcuaccgcucucgucagcuacuugauucgccuacacaaugaaauugucuacgccguggaaaaacucuccaaggaaaacaacagcuauuccguggaugccgccgaggucacugaacugcaugucaucaguuaugaaguggagcgggaccugacuccacugauucucuccaacugccaguaccagguggaggagggcagagagaccgugcaggaguucgaucuggagaagauucagcggcagaucgucagccgcuuccuccagggcaagccccggcugagccucaagggaauacccacucugguguacagacacgacuggaacuaugaacaucucuuuauggacaucaagaacaaaauggcacaggacucccuccccagcucggucauuagugccaucaguggacagcugcaguccuacagcgaugccugugaagugcugucugucguagaagucacucugggguuucugagcacagcugguggggauccaaacaugcagcugaauguguauacucaagacauccugcaaaugggugaucagacgauucacguguuaaaggccuuaaacagaugccaguuaaaacacaccauugcccucuggcaguuccugucugcucauaagucugaacagcugcugcggcugcacaaagagccauuuggggaaaucaguucaagguacaaagcggaucugagcccggaaaaugcuaagcuccucagcacauuccuaaaucagacuggccuagacgccuuccugcuagagcugcacgaaaugauaaucuugaaacuaaagaacccccaaacccaaaccgaggagcgcuuccgcccucaguggagccugagagacacucucguaaguuacaugcaaacuaaagaaagugaaauucuuccugaaauggcaucucaguucccagaagagauacugcucgccagcugugucucaguguggaaaacagcugcugugcugaaauggaaucgagaaaugagauagaauuauuuccucagcuaucuuuggaugacuuuggagagaagacuccucucuccucgucugcggcguggacuugaucauggacuggugccuuugcauucagaaggagagcugucagcguagcaccgaauucaagaccaaggcgugcuaccugagcugacagcuuuuugaaagccgagcuguuucugaaccauguacauacauguucugaaacuuucucaucauuuuaugaguacuguucauugagagaugacaaugaagauuagaugaaauuggaaauaaaccaacauuguuuacauuccaggagacuuguagcucagccacacacgcaguaaugaccugugcccguucgccucuggcacugcccaccccucuuuuuuuuuucuucuaauucuguacucacaaaagagaaucucauuuucuucuuucuuccauucccuuaaauucugaguacuguacauauauuucuggguucccacgaugaugugaaaaacuaccagacuguuuuuugucuucucacaaagacaagaaaaaucagggcauuuugugagugccuuaagaucaaacuaacaagaucugacccucuccccucacagugagccacugccccacuucagaggguaagagccaaaagccucauugugaaaggcacuggacuuggaccagggacaccaucagggccuugguuuucucacgcauaaaauggagaguggauuaaucgccaaagauucuucugaucugacauuuugaaauugugagagaaacuagaugacuguaaacuuggucacaggccugguucuggcaguucuuugcggacuuuuuucuagcauuaugccaaauaaacaugcagucucagugugcucucgcauguaugaauaucuaguccuuucugugguucucagccaagacauaaaaacuaggacucagagcacauacaaaaccaguuauguuucggaaagagggaaaagaguccccgagcccggaucuugugcugcuuuucucacugacguguugccuuuuuucuuuacaaaaucugcuuugauacuuaggaccucucuggacuaauuucucuuccuagacagcucagcacagcuauugauauguuagaggcaguauccuuaauauucauucuaaaugaguuaacgacuuaacuugaaauugggccuaaggagugagaacuacaaaaauacaaaaugcuuguccaggacucagccaugcacaccuugagcagcgccggcaggaggcacggaaggaacugugcuccguucuccucacugucauggugccaccagugucugaugaagggcagagugacccagacugcaggcaguaacugacuucacacagucccuggcauuuagucaucugugauuguuuuaucacucuggacugugcagagccaccugccaccgagaucugcauuccgacugccuaugaacgggugugggggccgggggcuggcuugcugaagucuucaacuugcacucggagcuccuuugauaccucagagcuggcugucagguggcagcucacacccagacucacuggccacaccucagcagggggggagucgagugucagucucuuucugugaaggcuuuuuuuuuccuuuggccugggaauuuuucccauuuuuaugaagggguuuuaaauuguuucauuuugugugcugugcuucaaagccuuaacugucaaaucuugcauuaucuuguuuguacagaaauauacuggccuagcagaggcaaaaaaaaaaaaaaugaauuuuauuuuacuugucacaccugucuuaauaaacuggaguuuugcugcuaaaaaaaaaaaaaaaaaaaaaaaaaaaaaaaaaaaaaaaaaaaaaaaaaaaaaaaaaaaaaaaaaaaaaaaaaaaaaaaaaaaaaaaaaaaaaaaaaaaaaaaaaaaaaaaaaaaaaaaaaaaaaaaaaaaaaaaaaaaaaaaaaaaaaa

SEQ ID NO: 11 - RNA, 5705 nt, homo sapien
gaaucuuuccaugccgcuggagcucaucugcuccgaugagcacaugcaaggcagcgggagccuggcccaggcugucaucagggaagucagagcccaguggagucggauuuucuccaccgcacucuucguggagcacgugcuccuaggaaccgagagccgcguccccgaguuacaggggcuggugaccgagcacgucuucuuacuagacaagugucuucgagagaacucugacgugaagacgcacgggccuuuugaggccgugaugcgcacucucugugaaugcaaggagacagccagcaagacccucagcagguuugggauucagccgugcuccaucugccugggagaugcaaaggaccccgucugucugcccugcgaccacgugcacugccugcgcugccucagggccugguuugccucagagcagaugauaugccccuacuguuuaacugccuugccagacgaauucucuccagcuguuucccaagcgcacagggaagccauugaaaagcaugcccgcuuccggcagaugugcaacaguuucuucguagaccugguguccaccauuugcuucaaggacaacgcuccgccugagaaggaagugauugagagccugcucucucuccucuucguccaaaaggggcgcuuaagagaugcugcccagagacacugugaacacacaaaaucucucucuccauucaaugauguuguggauaagacuccugucauccgcucagugauacugaaacugcuuuugaaguacagcuuucaugauguaaaagauuauauucaggaauauuugacccuguuaaaaaagaaagcauucauaacugaagauaaaacugaacuguacaugcucuucaucaacugccuggaggauucaauacuugagaagaccagugcuuacuccagaaaugaugaacugaaccaccuagaagaggaaggucguuuccuuaaggcauauucuccagcaagccggggccgagagccugccaacgaggccucgguugaauaccugcaagagguggcccggauccgccucugccucgacagagcugcagauuuccucucggagccugagggaggcccagagauggccaaggagaagcagugcuaccugcagcaagucaagcaguucuguauccggguggagaacgacuggcaccggguguaccuggugcggaagcucagcagccagcgggggauggaguucgugcagggccucuccaagcccggccgcccgcaccaguggguguuucccaaggacguugucaagcagcaggggcugcggcaggaccacccaggccagauggauagguaccugguguacggcgaugaauacaaggcucuccgugaugcuguggccaaagcuguccucgagugcaagccacugggcauuaagacugcucugaaggccugcaagaccccccaaagccagcagucagccuacuuccuguuaacacuguuuagagagguggcuauuuuguacagaucccacaaugcaagccuccaccccacgccagagcaaugugaagcugugagcaaauucauuggcgaaugcaagauccuuucaccuccugauaucagccguuuugcaacaucgcucguggacaauucugugccauuguugagggcggggccuagugacagcaaccuugauggaacggugacagaaauggccauucaugcugcagccguccuucuguguggacagaaugaacucuuggagccccuaaagaaucuggccuucuccccagccaccauggcgcaugcuuuucuuccaaccaugccugaagacuugcuggcucaagcucggagguggaagggucuggagcgaguccacugguacacuugucccaacggccauccuugcuccgugggagaguguggcaggccgauggaacagagcaucugcauugacugccaugcgccgauuggaggcauugaccacaaaccucgggacggcuuucaucuggucaaagacaaggcagacagaacgcagaccggccaugugcugggcaacccgcagcggagagacguggugacaugugaccgagggcugcccccaguggucuuccuccuuauccggcuacucacucacuuggcucugcuucugggagcgucccagaguucccaggcucugauaaacaucauuaagccuccagugagggauccaaaaggcuuucugcagcagcacauccugaaggaccuggagcaguuggccaagaugcugggacacagugccgacgagaccaucggcgugguccaccucguccugcgcaggcuucuccaagagcagcaccagcucucuagcagaaggcuuuuaaauuuugacacagaauugucaacuaaagaaaugaggaacaacugggaaaaggaaaucgcagcugugauuucuccugaacuggagcaucuagauaaaacccuucccaccaugaauaaucucaucagccaagauaagcguaucagcucuaacccuguggccaaaauaauauauggugacccagugaccuuccugccccaccugccccggaaaagugugguccauugcucuaagauuuggagcugcaggaaaagaauuacaguugaguaccuccagcacauuguggaacagaaaaauggcaaagaaagagugcccauccucuggcauuuccugcagaaggaagcagagcugaggcugguaaaguuccugccugagauuuuggccuugcaaagggaucuagugaagcaguuccagaacguccagcaaguugaauacagcuccaucagaggcuuccucagcaagcacagcucagauggguugaggcagcugcuucacaacaggaucacagucuuucuguccacauggaacaaacugaggagaucgcuugagacgaacggugagaucaaccuacccaaagacuacugcagcacugacuuggaucuggacacugaguuugagauccucuugccacgccgacggggccugggccucugugcuaccgcucucgucagcuacuugauucgccuacacaaugaaauugucuacgccguggaaaaacucuccaaggaaaacaacagcuauuccguggaugccgccgaggucacugaacugcaugucaucaguuaugaaguggagcgggaccugacuccacugauucucuccaacugccaguaccagguggaggagggcagagagaccgugcaggaguucgaucuggagaagauucagcggcagaucgucagccgcuuccuccagggcaagccccggcugagccucaagggaauacccacucugguguacagacacgacuggaacuaugaacaucucuuuauggacaucaagaacaaaauggcacaggacucccuccccagcucggucauuagugccaucaguggacagcugcaguccuacagcgaugccugugaagugcugucugucguagaagucacucugggguuucugagcacagcugguggggauccaaacaugcagcugaauguguauacucaagacauccugcaaaugggugaucagacgauucacguguuaaaggccuuaaacagaugccaguuaaaacacaccauugcccucuggcaguuccugucugcucauaagucugaacagcugcugcggcugcacaaagagccauuuggggaaaucaguucaagguacaaagcggaucugagcccggaaaaugcuaagcuccucagcacauuccuaaaucagacuggccuagacgccuuccugcuagagcugcacgaaaugauaaucuugaaacuaaagaacccccaaacccaaaccgaggagcgcuuccgcccucaguggagccugagagacacucucguaaguuacaugcaaacuaaagaaagugaaauucuuccugaaauggcaucucaguucccagaagagauacugcucgccagcugugucucaguguggaaaacagcugcugugcugaaauggaaucgagaaaugagauagaauuauuuccucagcuaucuuuggaugacuuuggagagaagacuccucucuccucgucugcggcguggacuugaucauggacuggugccuuugcauucagaaggagagcugucagcguagcaccgaauucaagaccaaggcgugcuaccugagcugacagcuuuuugaaagccgagcuguuucugaaccauguacauacauguucugaaacuuucucaucauuuuaugaguacuguucauugagagaugacaaugaagauuagaugaaauuggaaauaaaccaacauuguuuacauuccaggagacuuguagcucagccacacacgcaguaaugaccugugcccguucgccucuggcacugcccaccccucuuuuuuuuuuucuucuaauucuguacucacaaaagagaaucucauuuucuucuuucuuccauucccuuaaauucugaguacuguacauauauuucuggguucccacgaugaugugaaaaacuaccagacuguuuuuugucuucucacaaagacaagaaaaaucagggcauuuugugagugccuuaagaucaaacuaacaagaucugacccucuccccucacagugagccacugccccacuucagaggguaagagccaaaagccucauugugaaaggcacuggacuuggaccagggacaccaucagggccuugguuuucucacgcauaaaauggagaguggauuaaucgccaaagauucuucugaucugacauuuugaaauugugagagaaacuagaugacuguaaacuuggucacaggccugguucuggcaguucuuugcggacuuuuuucuagcauuaugccaaauaaacaugcagucucagugugcucucgcauguaugaauaucuaguccuuucugugguucucagccaagacauaaaaacuaggacucagagcacauacaaaaccaguuauguuucggaaagagggaaaagaguccccgagcccggaucuugugcugcuuuucucacugacguguugccuuuuuucuuuacaaaaucugcuuugauacuuaggaccucucuggacuaauuucucuuccuagacagcucagcacagcuauugauauguuagaggcaguauccuuaauauucauucuaaaugaguuaacgacuuaacuugaaauugggccuaaggagugagaacuacaaaaauacaaaaugcuuguccaggacucagccaugcacaccuugagcagcgccggcaggaggcacggaaggaacugugcuccguucuccucacugucauggugccaccagugucugaugaagggcagagugacccagacugcaggcaguaacugacuucacacagucccuggcauuuagucaucugugauuguuuuaucacucuggacugugcagagccaccugccaccgagaucugcauuccgacugccuaugaacgggugugggggccgggggcuggcuugcugaagucuucaacuugcacucggagcuccuuugauaccucagagcuggcugucagguggcagcucacacccagacucacuggccacaccucagcagggggggagucgagugucagucucuuucugugaaggcuuuuuuuuuccuuuggccugggaauuuuucccauuuuuaugaagggguuuuaaauuguuucauuuugugugcugugcuucaaagccuuaacugucaaaucuugcauuaucuuguuuguacagaaauauacuggccuagcagaggc

SEQ ID NO: 12 - RNA, 21056 nt, homo sapien
cagcgcgcggcaggcggcgagcucgggggccgcagaaaaugaaacugaagccguggucacgugacaggacauguaguauauagcaggcugccagcgacuccugcucuugcuucuggaucugcagggcagucccagcaggacccauggaguguccuucgugccagcaugucuccaaggaggaaacccccaaguucugcagccagugcggagagaggcugccuccugcagcccccauagcagauucugagaacaauaacuccacaauggcgucggccucggagggugaaauggagugugggcaggagcugaaggaggaagggggcccgugcuuguucccgggcucagacaguuggcaagaaaaccccgaggagcccuguuccaaagccuccuggaccguccaagaaagcaaaaagaagaaaaggaagaagaaaaagaaggggaacaaguccgcuuccucagagcuggcuuccuugccccuuucuccugccagccccugucaccugacuuugcuuucaaacccguggccucaggacacagcccugccccacagccaagcccagcagaguggccccacuggccagccgagccagcccccaggcacagccaccacgccacuggagggugacggccucuccgcgcccaccgagguuggcgacagcccccugcaggcccaggcuuugggagaggcaggaguggccacaggaagugaggcucagagcagcccgcaauuccaggaccacacggaaggggaggaccaggacgcuuccauccccucugggggcagaggccugucccaggaggggaccgguccccccaccucugcuggugaaggccauucuaggacugaagaugcugcccaggagcuccuguugccugagucaaaaggaggcagcucugagcccgggacagaacugcagaccaccgagcaacaggcaggggccucagccucuauggcaguugaugcuguagcugagccagccaaugcaguuaaaggggccgggaaggaaaugaaagagaagacccagagaaugaaacagccaccagcaaccacuccuccuuucaaaacacacugccaggaagcugagaccaagaccaaggacgagauggcugcugcugaagaaaaagucgguaagaaugaacaaggggagccugaagaccucaagaagccagaggggaagaacagaagugcagcugcugugaaaaacgagaaggagcaaaaaaaccaggaagcagauguccaggaagugaaggcaagcacgcugagcccggguggaggagucaccguguucuuccacgccaucaucucucuucauuucccauucaauccugaccuccauaaagucuucaucagaggaggagaagaauuuggggagucaaaaugggacagcaauaucugugagcugcacuacaccagagacuugggucaugaccgcguucuuguugaaggcauugucugcauuuccaagaagcaccuagauaaauacauuccuuacaaguacgucauuuauaauggggaaucuuuugaguaugaguucauuuacaagcaccagcagaagaagggcgaguacgucaaccgcugucuguucauaaaaucuucacuucugggcucaggagacuggcaucaguacuaugacauaguuuauaugaagccucaugggagacuccagaaagucaugaaccacaucacagacgggccgaggaaggaccuggugaaggggaagcagauugccgcugcgcucaugcuggacagcaccuucagcauccugcagaccugggacaccaucaaccugaacagcuucuucacccaguucgagcaguuuugcuuuguccugcaacagccuaugauuuaugaaggacaggcacagcuguggaccgauuugcaguacagggagaaagaggugaagagauaccuguggcaacaucugaaaaaacacgugguaccauugccggacggaaaaagcacggacuuuuugccuguggacugcccagugaggaguaaacugaaaacaggccugauuguccuuuuuguaguggaaaaaauugagcuuuuauuagaaggcagccuggacugguugugucaccuccuaaccucagaugccagcucaccagaugaguuucaccgugaccuaagccacauccuugggauaccucagagcuggcggcuguaccuggugaaccugugccaaagaugcauggacacaaggacguacaccuggcugggcgcccugccuguccugcacugcuguauggagcuggccccgcggcacaaggaugccuggagacagccugaggacaccugggccgcucuggagggacucuccuucucaccguuccgggaacaaaugcuagauacgaguucccuacuucaguuuaugagagagaagcagcauuugcugagcauagacgagccucucuuccgguccugguuuagucugcuaccucugagucaccugguuauguauauggaaaacuucauugagcaccugggucguuuuccugcucauauccuggacugucuuucagggauuuacuaccggcuuccgggacuugagcaagucuugaauacgcaggauguucaggauguucagaacguucagaacauuuuagaaaugcuguugcgacuccuggacacuuaccgggacaagauucccgaggaggccuugucaccauccuaccugacugugugucugaaacugcaugaagccaucugcagcagcacaaagcuacuuaaguuuuacgagcugccagccuuaucugccgagauugucugcagaaugauuagacuucuaucucugguggauucugcaggacagagagaugaaacuggaaauaauucaguccaaacagucuuccaagggacccuugcugcuacgaaaagguggcuccgagaaguuuuuacaaagaacaugcucacaucuucaggugccucauucacauacgucaaggaaauugaggucuggaggcggcugguggaaauccaauuccccgcggagcauggcuggaaggagucguugcugggagacauggaauggaggcucacaaaggaggaaccccucucccagaucacugccuacugcaauaguugcugggacaccaaaggcuuagaggacaguguggccaagaccuucgagaaaugcaucauugaagccgugagcucagccugccagucucagaccaguauccuucagggguucucuuacucugauuugcggaaauuuggcaucgucuugucugcugugaucacuaaguccuggccuaggaccgcggacaacuucgaugacauuuuaaagcaucugcucacguuggcagaugucaagcacgucuucagauuguguggaaccgacgagaaaauacuagcaaaugucacagaggaugccaagaggcugauagcuguugccgacucuguguugacgaaaguuguuggugaccuccuaaguggcacgauuuuaguuggacaacuggagcugauuauaaagcacaagaaucaguuucuugacaucuggcaacugagggaaaaaagucuuucaccccaggaugaacaaugugcuguggaggaagcacuggauuggagaagggaggaacuguuacuucuaaagaaagagaaaagauguguugauagucuccugaagaugugugggaacgugaaacaucugauacaaguggacuuuggagugcuugcaguaagacacucacaagaccucagcaguaaaagauuaaaugacaccgugacagugagacuguccaccuccucgaacucgcagagggcaacgcauuaccaccugagcucccagguccaagaaauggcugggaagauagacuugcucagagacagccacaucuuccagcucuucuggcgggaagccgcagagccgcugagugagccuaaggaggaccaggaagccgcagaguugcugagugagcccgaagaagaaucagaaaggcacauccuugagcuugaagagguguaugacuauuuguaucagccuucuuacagaaaguucauuaaguugcaccaggaucuaaagucaggagaggucacccuugcagagauugaugucaucuucaaggacuuugugaauaaauacacggaccuggauucagaacuuaagaucaugugcaccguggaccaccaggaccaaagagauuggaucaaggaccgagucgaacagaucaaggaauaccaucaccugcaccaggcuguccacgcagccaaggucaucuugcaggucaaagagagccugggacugaacggugacuucaguguucucaacacuuuacuaaauuuuacugauaacuucgacgacuuucgccgugaaacacuggaccagaucaaccaggagcucauccaggccaaaaagcugcuccaggacaucagcgaggcccggugcaaggggcugcaggcucugucccugagaaaggaguucaucugcuggguccgggaggcucuuggaggcaucaaugagcugaagguguuuguggaccuggccuccaucucagcgggggagaaugacauugauguggaccggguggccugcuuccaugacgcugugcagggcuacgcaucccugcuauuuaagcuggaccccagcguggacuucagugcauucaugaagcaucugaaaaagcuguggaaggcucuggauaaggaccaguaccugcccaggaaacugugugacuccgccaggaacuuggaauggcugaagacugugaaugagagucaugggucuguggaacgcucaucccugacccuggccacggccaucaaccaaagaggcaucuaugugauccaggcgcccaaagguggccaaaagauuuccccagacacgguucugcacuugauccuuccugagagcccuggcagccacgaggagucacgagaguacucuuuagaggaggugaaggagcuuuugaacaaguugaugcugaugucuggcaagaaggaucguaacaacacggaaguggagagguuuucagaggucuucugcagugugcagaggcucagccaggccuucaucgaccugcacucugcugggaauaugcuguucaggacguggaucgccauggccuacugcucccccaagcagggugugucccuccaaauggacuuuggcuuggaccuggugacggagcuuaaagaagguggagaugucacugagcugcuggcagcccucugcaggcagauggagcacuuccuugacagcuggaagagauuugugacccagaagcgaauggagcacuuuuaccugaacuucuacacggcagagcagcugguuuaccugagcacugagcucaggaagcagcccccgagugaugccgcccuaacgaugcuauccuucaucaaaagcaacugcacccugagggaugucuuaagggccucuguggggugugggagugaggccgccagguaccgcaugaggagagucauggaagagcucccgcugaugcucuuaucagaguucagccugguggacaagcugaggaucaucauggagcaguccaugaggugccuuccugccuuccugcccgacugccucgaccuagagacccuuggccacugucuggcucaccuggcagggaugggugggucucccguggagcguugucucccgagaggucugcaggucggccagcccaaccucgucgucuguggccacuccgagguguugccagccgcccuggcugucuacaugcaaaccccaagccagccccugcccacuuacgaugaggugcugcucugcaccccggcaaccaccuuugaggagguggcacuguugcugcgccgcugccugacccugggcucccuggggcacaaggucuacagccugcuguucgcagaucagcugagcuacgagguggcacgccaagcggaggagcuuuuccacaaucugugcacgcagcagcaccgagaagacuaccagcucgucauggucugugauggggacugggagcacugcuaccuccccucugccuucagccagcacaaggucuucgucaccccccaggcaccccucgaggccauccaagccuaccuggcaggucacuaccgggucccgaagcagacccugucggcggcagccguguucaaugaccggcuguguguugggaucguggccucggagcgagcagguguuggaaagucucuguacgugaagagguugcacgacaaaaugaagaugcaguuaaacgugaaaaaugugccucugaaaacaauucgacugaucgacccucagguggaugagagccgaguccugggcgcccugcugcccuuccuggaugcgcaguaucagaagguccccgugcucuuucaccuggacgugaccuccucagugcagacuggaauuuggguguuucuuuucaagcuccucauuuuacaauacuuaauggauauaaaugggaaaauguggcuucggaaccccugccauuuguauaucguugaaauccuggaaaggaggacgucagugccgucgaggagcucuucagcgcugcguacacguguaccccaguucaguuuucuugacaucuucccaaaagucaccugcaggccucccaaagaggugauagacauggagcugagugcccugaggagugacacagagccugggauggaucugugggaguucugcagcgaaacuuuccaaagaccuuaccaguauuuaagacgauucaaucaaaaccaagaccuagacacguuucaguaucaagaaggcucugucgaaggcaccccggaggaaugccuccagcauuuccuguuucacugcgggguaauaaacccauccuggucagagcuucggaacuuugcucgguuccugaauuaucagcucagagauugugaggccucucucuucugcaauccgaguuuuauuggcgacacacugaggggcuucaagaaguucguggugaccuucaugaucuuuauggcaagagauuuugccacaccaucacuccacaccucugaccaaagcccggggaagcacauggucaccauggaugggguuagggaagaagaucuagcgcccuucucccuccggaagaggugggagucggagccucacccauacguuuucuucaaugacgaccacacaaccaugacauucaucggcuuccaucugcagcccaacaucaacggcagugucgaugccaucagucacuugacugggaaggucaucaagagagacgucaugaccagggaccuguaccagggccugcugcuccagagggugcccuucaaugucgacuuugauaaacugcccagacacaagaaacuugagaggcucugccugaccuuagggaucccccaggccaccgaccccgacaaaacguaugagcucacaaccgacaauaugcuuaaaauccuugccaucgagaugcgguuccggugugggaucccgguuaucaucaugggagaaacuggcugugggaaaaccaggcuuauuaaauuccuuagcgaccugcggcguggugguaccaaugcugacaccauaaagcuggucaaggugcacggaggaacaacugcagacaugaucuacuccagagucagggaggcugaaaauguggccuucgccaauaaggaccaacaucaguuggacaccaucuuguuuuuugaugaagccaacacaacggaagcuauaagcuguaucaaagaaguccugugugaucauaugguggauggccagccucuggcugaggacucuggccugcauauuauagcugccugcaauccauaccggaagcacucugaggagaugaucugccguuuggagucagcugguuugggcuacaggguuaguauggaggagacggccgacaggcugggcuccauuccucugaggcagcugguauaccggguccaugcucugcccccgagccugauuccucuggugugggacuuuggacaacugagugacguugcugaaaagcucuacauccagcagauuguccagagacugguugaguccaucagccuagaugaaaacgggacucgcgugaucacagaaguccucugcgccucucaggguuucaugaggaaaacagaagaugagugcagcuuugucagccucagggacguggagcgcugugugaaaguuuucaggugguuccacgagcacagcgcgaugcucuuagcgcagcugaaugccuuucucuccaaguccagcgucagcaaaaaucacaccgagagagaucccguccucuggucguugaugcuggccaucgggguguguuaccaugccucuuuagaaaagaaagacucauaucggaaagccaucgccagguucuuuccgaaaccguaugacgacagcaggcugcuucuggaugaaauaacacgggcacaggaucuuuuucuggacggcguaccucugaggaaaaccaucgccaagaacuuggccuugaaggagaacgucuucaugauggucgucugcaucgagcugaagauuccccucuuccugguggggaagcccggcagcuccaagucucucgccaagaccaucguggcagacgccaugcagggcccggcugccuacucagaucucuuccgcagccugaagcagguccaccugguguccuuccagugcagcccgcacuccaccccacagggcaucaucagcaccuuccggcagugcgcccgcuuucagcaggggaaggaccugcagcaguacgucucuguggugguguuagaugagguggggcuggcggaagacucacccaaaaugccccugaagacucugcacccgcugcuggaagacggaugcauugaagacgaucccgccccccacaaaaaggucggcuucgugggcaucuccaacugggcccuugacccugccaagaugaaccggggcauuuuugugucacguggcagccccaacgagacagagcucauagagagcgccaagggcaucugcuccucagacauccucguccaggaccgaguccaaggguacuuugcguccuuugccaaagccuacgaaacgguguguaagcgccaggacaaggaauucuucgggcuucgugacuacuacagccucaucaaaauggucuuugcugcagcaaaggcuucaaauagaaagccuuccccgcaagacauugcacaggcuguccuuaggaacuucaguggcaaggaugacauccaagcuuuggacaucuuucuggccaauuugcccgaggccaagugcucagaggaagucagccccaugcagcugaucaaacagaacaucuuugggccuucucagaaggugccggguggagagcaggaagaugcugagucccgcuacuuacucgugcugaccaaaaacuacguggcacugcagauccugcagcagacauucuucgagggggaccagcagccggagauuauuuuugguucugguuuccccaaggaccaagaguacacccagcucugcagaaacaucaaucgugugaagaucugcauggaaacaggcaagaugguguugcuucucaaccugcagaaccucuacgagagccucuacgacgcacucaaccaguacuacguccaccucggcggccagaaguacguggaccucggucuggggacccaccgcgucaaaugucggguucaccccaacuuccgccugauugucauugaagagaaagacgucguguacaaacacuuucccaucccccucauuaaccggcuggagaagcacuaucuggauaucaacacggugcuggagaaauggcagaagagcaucguggaggagcucugugcguggguggagaaguucaucaaugucaaagcacaucauuuccagaagaggcacaaauacagccccucugacgucuucaucggcuaccacucggacgccugcgcgucuguggugcugcaggucauagagaggcaggguccccgggccuugacggaggaacuucaccagaaggugucugaggaggccaaaucgauccugcugaacugcgcuacgcccgaugccgugguccggcugagcgccuacucgcugggcggguucgcagcggaguggcugucgcaggaguacuuucacagacagaggcacaacuccuuugcagauuuccuucaggcacaccugcacacggcagaccuggagcgccacgccaucuucacagagaucaccacuuucuccaggcugcuaacaagucacgacugugaaauuuuagaaucagaggucacaggcagggcuccgaaacccacacuccuguggcugcagcaguuugacaccgaguacucauuccucaaagaaguccgaaacuguuuaacgaauacagccaaauguaaaauccucauuuuucagacagauuuugaagauggaauccguagcgcccagcucauugccucagcuaaguauucuguuauaaaugaaaucaacaaaauacgagaaaaugaggaccguaucuucgucuauuucaucacaaaacugucccgggugggaagaggaacagccuaugugggcuuccacggagggcuguggcagucuguccacaucgaugaccuccggagauccacccucaugguuucugaugugaccaggcugcagcaugucaccaucagccagcuguucgcgcccggagacuugccugagcugggcuuggaacaccgggcggaagacggccaugaggaggcgauggagacggaggccagcacaucaggggagguggcagagguggcagaggaggccauggaaacagaaaguucugagaaggugggaaaggaaaccucugaacucggaggcagugaugugucgauccuggacaccaccaggcugcugagaagcugugugcagagcgccgugggcaugcucagagaccagaacgagagcugcacgcgcaauaugcggaggguggugcuccuccugggccucuugaaugaggaugacgcgugccacgccucuuucuugcggguauccaagaugcgccucagugucuuuuuaaagaagcaagaagagagccaguuucacccucuggagugguuggcaagggaagccugcaaccaggacgcucuccaggaggcgggcacauucaggcacacccucuggaagcggguccaaggugcugucaccccucugcuggcgagcaugauaucauucaucgacagagacggcaaccuagaguuacugaccaggccagauacuccgcccugggcaagagaucuuuggauguuuauuuucagugacacgaugcuucugaacauuccucuugugaugaauaaugaaagacauaaaggugagauggccuacaucguggugcagaaccacaugaaccuuuccgagaacgcuuccaacaacgucccuuucagcuggaaaaucaaggacuaucuggaggagcuguggguccaggcucaguacaucacagacgcagaaggacugcccaagaaguucguggacaucuuucagcagacuccucugggcagguuucuugcccagcuccauggagagccgcagcaggaacuucuucaguguuacuugaaggauuucauucucuugaccaugcgugugucaacggaggaggaauuaaaguuucugcagauggcucugugguccugcacuaggaaacugaaagcggcgucagaagcgcccgaggaagagguuuccuuaccgugggugcaccuugccuaccagcguuucagaagccgucugcagaacuuuuccagaauccugaccaucuacccucagguucuccacagccugauggaagcccguuggaaccaugagcuggcuggaugugagaugacccuggacgcauuugccgcaauggccugcacggagaugcugacaagaaacacccugaagcccaguccccaggcguggcuacaguuggugaagaaucuuuccaugccgcuggagcucaucugcuccgaugagcacaugcaaggcagcgggagccuggcccaggcugucaucaggggagucagagcccaguggagucggauuuucuccaccgcacucuucguggagcacgugcuccuaggaaccgagagccgcguccccgaguuacaggggcuggugaccgagcacgucuucuuacuagacaagugucuucgagagaacucugacgugaagacgcacgggccuuuugaggccgugaugcgcacucucugugaaugcaaggagacagccagcaagacccucagcagguuugggauucagccgugcuccaucugccugggagaugcaaaggaccccgucugucugcccugcgaccacgugcacugccugcgcugccucagggccugguuugccucagagcagaugauaugccccuacuguuuaacugccuugccagacgaauucucuccagcuguuucccaagcgcacagggaagccauugaaaagcaugcccgcuuccggcagaugugcaacaguuucuucguagaccugguguccaccauuugcuucaaggacaacgcuccgccugagaaggaagugauugagagccugcucucucuccucuucguccaaaaggggcgcuuaagagaugcugcccagagacacugugaacacacaaaaucucucucuccauucaaugauguuguggauaagacuccugucauccgcucagugauacugaaacugcuuuugaaguacagcuuucaugauguaaaagauuauauucaggaauauuugacccuguuaaaaaagaaagcauucauaacugaagauaaaacugaacuguacaugcucuucaucaacugccuggaggauucaauacuugagaagaccagugcuuacuccagaaaugaugaacugaaccaccuagaagaggaaggucguuuccuuaaggcauauucuccagcaagccggggccgagagccugccaacgaggccucgguugaauaccugcaagagguggcccggauccgccucugccucgacagagcugcagauuuccucucggagccugagggaggcccagagauggccaaggagaagcagugcuaccugcagcaagucaagcaguucuguauccggguggagaacgacuggcaccggguguaccuggugcggaagcucagcagccagcgggggauggaguucgugcagggccucuccaagcccggccgcccgcaccaguggguguuucccaaggacguugucaagcagcaggggcugcggcaggaccacccaggccagauggauagguaccugguguacggcgaugaauacaaggcucuccgugaugcuguggccaaagcuguccucgagugcaagccacugggcauuaagacugcucugaaggccugcaagaccccccaaagccagcagucagccuacuuccuguuaacacuguuuagagagguggcuauuuuguacagaucccacaaugcaagccuccaccccacgccagagcaaugugaagcugugagcaaauucauuggcgaaugcaagauccuuucaccuccugauaucagccguuuugcaacaucgcucguggacaauucugugccauuguugagggcggggccuagugacagcaaccuugauggaacggugacagaaauggccauucaugcugcagccguccuucuguguggacagaaugaacucuuggagccccuaaagaaucuggccuucuccccagccaccauggcgcaugcuuuucuuccaaccaugccugaagacuugcuggcucaagcucggagguggaagggucuggagcgaguccacugguacacuugucccaacggccauccuugcuccgugggagaguguggcaggccgauggaacagagcaucugcauugacugccaugcgccgauuggaggcauugaccacaaaccucgggacggcuuucaucuggucaaagacaaggcagacagaacgcagaccggccacgugcugggcaacccgcagcggagagacguggugacaugugaccgagggcugcccccaguggucuuccuccuuauccggcuacucacucacuuggcucugcuucugggagcgucccagaguucccaggcucugauaaacaucauuaagccuccagugagggauccaaaaggcuuucugcagcagcacauccugaaggaccuggagcaguuggccaagaugcugggacacagugccgacgagaccaucggcgugguccaccucguccugcgcaggcuucuccaagagcagcaccagcucucuagcagaaggcuuuuaaauuuugacacagaauugucaacuaaagaaaugaggaacaacugggaaaaggaaaucgcagcugugauuucuccugaacuggagcaucuagauaaaacccuucccaccaugaauaaucucaucagccaagauaagcguaucagcucuaacccuguggccaaaauaauauauggugacccagugaccuuccugccccaccugccccggaaaagugugguccauugcucuaagauuuggagcugcaggaaaagaauuacaguugaguaccuccagcacauuguggaacagaaaaauggcaaagaaagagugcccauccucuggcauuuccugcagaaggaagcagagcugaggcugguaaaguuccugccugagauuuuggccuugcaaagggaucuagugaagcaguuccagaacguccagcaaguugaauacagcuccaucagaggcuuccucagcaagcacagcucagauggguugaggcagcugcuucacaacaggaucacagucuuucuguccacauggaacaaacugaggagaucgcuugagacgaacggugagaucaaccuacccaaagacuacugcagcacugacuuggaucuggacacugaguuugagauccucuugccacgccgacggggccugggccucugugcuaccgcucucgucagcuacuugauucgccuacacaaugaaauugucuacgccguggaaaaacucuccaaggaaaacaacagcuauuccguggaugccgccgaggucacugaacugcaugucaucaguuaugaaguggagcgggaccugacuccacugauucucuccaacugccaguaccagguggaggagggcagagagaccgugcaggaguucgaucuggagaagauucagcggcagaucgucagccgcuuccuccagggcaagccccggcugagccucaagggaauacccacucugguguacagacacgacuggaacuaugaacaucucuuuauggacaucaagaacaaaauggcacaggacucccuccccagcucggucauuagugccaucaguggacagcugcaguccuacagcgaugccugugaagugcugucugucguagaagucacucugggguuucugagcacagcugguggggauccaaacaugcagcugaauguguauacucaagacauccugcaaaugggugaucagacgauucacguguuaaaggccuuaaacagaugccaguuaaaacacaccauugcccucuggcaguuccugucugcucauaagucugaacagcugcugcggcugcacaaagagccauuuggggaaaucaguucaagguacaaagcggaucugagcccggaaaaugcuaagcuccucagcacauuccuaaaucagacuggccuagacgccuuccugcuagagcugcacgaaaugauaaucuugaaacuaaagaacccccaaacccaaaccgaggagcgcuuccgcccucaguggagccugagagacacucucguaaguuacaugcaaacuaaagaaagugaaauucuuccugaaauggcaucucaguucccagaagagauacugcucgccagcugugucucaguguggaaaacagcugcugugcugaaauggaaucgagaaaugagauagaauuauuuccucagcuaucuuuggaugacuuuggagagaagacuccucucuccucgucugcggcguggacuugaucauggacuggugccuuugcauucagaaggagagcugucagcguagcaccgaauucaagaccaaggcgugcuaccugagcugacagcuuuuugaaagccgagcuguuucugaaccauguacauacauguucugaaacuuucucaucauuuuaugaguacuguucauugagagaugacaaugaagauuagaugaaauuggaaauaaaccaacauuguuuacauuccaggagacuuguagcucagccacacacgcaguaaugaccugugcccguucgccucuggcacugcccaccccucuuuuuuuuuuucuucuaauucuguacucacaaaagagaaucucauuuucuucuuucuuccauucccuuaaauucugaguacuguacauauauuucuggguucccacgaugaugugaaaaacuaccagacuguuuuuugucuucucacaaagacaagaaaaaucagggcauuuugugagugccuuaagaucaaacuaacaagaucugacccucuccccucacagugagccacugccccacuucagaggguaagagccaaaagccucauugugaaaggcacuggacuuggaccagggacaccaucagggccuugguuuucucacgcauaaaauggagaguggauuaaucgccaaagauucuucugaucugacauuuugaaauugugagagaaacuagaugacuguaaacuuggucacaggccugguucuggcaguucuuugcggacuuuuuucuagcauuaugccaaauaaacaugcagucucagugugcucucgcauguaugaauaucuaguccuuucugugguucucagccaagacauaaaaacuaggacucagagcacauacaaaaccaguuauguuucggaaagagggaaaagaguccccgagcccggaucuugugcugcuuuucucacugacguguugccuuuuuucuuuacaaaaucugcuuugauacuuaggaccucucuggacuaauuucucuuccuagacagcucagcacagcuauugauauguuagaggcaguauccuuaauauucauucuaaaugaguuaacgacuuaacuugaaauugggccuaaggagugagaacuacaaaaauacaaaaugcuuguccaggacucagccaugcacaccuugagcagcgccggcaggaggcacggaaggaacugugcuccguucuccucacugucauggugccaccagugucugaugaagggcagagugacccagacugcaggcaguaacugacuucacacagucccuggcauuuagucaucugugauuguuuuaucacucuggacugugcagagccaccugccaccgagaucugcauuccgacugccuaugaacgggugugggggccgggggcuggcuugcugaagucuucaacuugcacucggagcuccuuugauaccucagagcuggcugucagguggcagcucacacccagacucacuggccacaccucagcagggggggagucgagugucagucucuuucugugaaggcuuuuuuuuuccuuuggccugggaauuuuucccauuuuuaugaagggguuuuaaauuguuucauuuugugugcugugcuucaaagccuuaacugucaaaucuugcauuaucuuguuuguacagaaauauacuggccuagcagaggcaaaaaaaaaaaaaaugaauuuuauuuuacuugucacaccugucuuaauaaacuggaguuuugcugcuaaagaacucuucucucugggggcagagcuucuauuuauggcacauagacaucagcuaggcuuuugggaaucguuuguguucuuuguggaaauguccuuuagaagcacccaugaaguaguguguucagacugugcacacagaaaacaggcucugccuucacaugugagacgguggacuuuuccucuggacaaaaugacagcauccuggcgacuccacaguggagcugagcgccacucccuguagccgaucugggacugaaacgcuuacaccucugccucagaaggagucccccaugcccugccugaaaugacuucacuggacacagcggggcugcagcuaacgggguacagguaggagcuaacuaacuucaccccugaguccacuugcgggguaagagauaaacaguaacccuuccaggagcccacugacguuggagugcuaaaaaugccccuucagggggaaaacugcauuuucucuuccaaaaaggaaagguucuuccaggcgagaaaccuguggucuagaaccacagcaagaagaggaggcaugcuggccugcaccggaagacucacuuugucugcccugcgccagccucaccucacccugcaguucccguuuccgccauggaugccucaucaccaacccugaccuucccccucccaacccuuuauucauccucacucccacucauacccgccucccuggacaguucccugcugcagaguucuuucugcuuucagcccuaccuugguggugauuuaccugaaaaucuucacaacugaucauuaucuccuucucuuugagaccugacugaaaaaauuaggugugcacaccuguaaucccagcuaccugggaggcugagguaugaggauugcuugagccugggaguuugaggcugcagugagcuaugauugcaccacugcacuccaaccugggugacagagugagacccugucucaaaaaaaaauaaaauaaggaccuuauugugugugcaaauuauuugccuuucaugaauaguuaugagacuuugugcauguguuaaccgagacggcccugagcuauuucaguuacuccuguauguucaggcaauuccaauuuagaaacaaacuuccagugauaaauauugggaagaaaaugucagcucagggccaaguagguaaagccacccaagucuagccaugcacacaggcacuagugugcugaaggaaaacaccucugauuugauacauaaagugugaagguugcauaacuggggagguggcuggagaaaaccugagccucgagcugaguaacaauccaagccaugauuagcauuuauauugcauucugcauuauucucauccuaucacguucauuaaguucaaccauuaccauuacgaaucccguuuccagcuggaaaaacaagcgccaggaaagugcauuucccccccaccccccccccccaaccagagcaacuuuggucagaagucacaccuaaucacccucucugcaggauaugcuggggauagcccuuuugaggagguggggguguaugcgaaagcaaccuggggccaaagcagggggaagcaggagagacuggaggggcccuggguccagcaagugcuccaccaggcugccccugcucaggugcuccacagcccauaaaaaacgccuucagcccugcugugcuuccccucacaccuaaacuuacuauaaggguccuaccuuccccaguauuccuucaugaucacugcuaccugugcccugaagcgcaacagaaccucaacccagaggacagccacuuccucagaacccacgaucuuugccccaucgccacagguccaugagugacuccuaauuaccaaauccaagggcuccuucacccugaccacucuggaacccaacaaagcugacacacagcccagcccagacaggccugaauguggguccuggcucucccauuugccaguucuacagccaugggcaaguggcucgaccucucuaagcuucaguuuccucgucugugaaauaucugucagugcucuuaagggaggagaccaccccacauauugucuuacgcccaauuucugccuccaaagagagaaguaaaaacuaaaaggcagaaaugaaauccacaagcagacagccugcaccacacccugggccugguaguuaaagaucgacgccugaccuaaucagugaugcuaucuauagauuacagacauuauauagaaaagcaccgugaaaaucccuguccuguucuguuccguucuaauuacgggugcaugcagcccccagucacguacccccugcuugcucaaucaaucacgacccucucacgcagaccccuuaagaguugugagcccuuaaaagggacaggaauugcucacucggggagcucaguuguuggagacaugagucuugccgaagcgcccggcugaauaaagcccuucuuuaacucgugucugagggguuuucucugcagcuuguccugcuacauuucuugguucccugaccaggaaucuaggugauuaauggaugguugaggcagccccucagacggcuuaggccugcccuguggagcaucccuguggaggacuccagccagcuugagcgacauggauccugagagcgcucucaggcaggcaauugccccaguggaaugccuggccagagcaguguguagcaggcccccgaggaggaucaacgcaguggcugaacaccgggaaggaacugccacuuggaguccagacaucugaaacuugguaagacuggucuuuggaacuugcccacuccauuugaggggaagcguggccugaucacccacggcgugccuguacuggcacucugguuuuuguuuuugacuugacuuggauugcuugauacuuugguuuugguuuugaccugacuuggauauccugauacucugauuuugguuuugauuuugguuugguguaaacuguaaaagugugugugugcccuuuuuaccuguucuuuguuuugugguaugcguguagggugagcguaauguuuugucuugaagaagcaugggucaagcacaaaguaagaccaccccacuaggaacuaugcugaaaaauuucaggaaaggauuuaagggagacuauggaguacuaugacaccaggaaaacuuaaaacuuuguguaagauagacuggccagcauuagagguagguuggccaucagagugaagccuggacaggucccuuguuucaaagguauggcacaagguaaccuguaagccaggguacccacaccaguucccguacacagacacuugguuacagcugguuuuagacuccccacccgcccgccccaacagugguugagagaacagcagcauaaguggcuggcagaggcaaggaaagaccagcagagagagaaagaggaagagacagacaaagagggagucagagagagagagagaaagagacagaggcaaaaggaaagucaaagagaaagagacagaaaaucaagaggaaaaaaaa

SEQ ID NO: 13 - RNA, 17730 nt, homo sapien
gacagcgcgcggcaggcggcgagcucgggggccgcagaaaaugaaacugaagccguggucacgugacaggacauguaguauauagcaggcugccagcgacuccugcucuugcuucuggaucugcagggcagucccagcaggacccauggaguguccuucgugccagcaugucuccaaggaggaaacccccaaguucugcagccagugcggagagaggcugccuccugcagcccccauagcagauucugagaacaauaacuccacaauggcgucggccucggagggugaaauggagugugggcaggagcugaaggaggaagggggcccgugcuuguucccgggcucagacaguuggcaagaaaaccccgaggagcccuguuccaaagccuccuggaccguccaagaaggagcuacaucagagguuuugguagaugcugcuguagaccucauauccgaugaaugggaagcugcuaaugccauacccagcaagagaaggaagcaggaugcagccccgcuugaggccgccagcgugccuucugcagacugugagcagagcaaaaagaagaaaaggaagaagaaaaagaaggggaacaaguccgcuuccucagagcuggcuuccuugccccuuucuccugccagccccugucaccugacuuugcuuucaaacccguggccucaggacacagcccugccccacagccaagcccagcagaguggccccacuggccagccgagccagcccccaggcacagccaccacgccacuggagggugacggccucuccgcgcccaccgagguuggcgacagcccccugcaggcccaggcuuugggagaggcaggaguggccacaggaagugaggcucagagcagcccgcaauuccaggaccacacggaaggggaggaccaggacgcuuccauccccucugggggcagaggccugucccaggaggggaccgguccccccaccucugcuggugaaggccauucuaggacugaagaugcugcccaggagcuccuguugccugagucaaaaggaggcagcucugagcccgggacagaacugcagaccaccgagcaacaggcaggggccucagccucuauggcaguugaugcuguagcugagccagccaaugcaguuaaaggggccgggaaggaaaugaaagagaagacccagagaaugaaacagccaccagcaaccacuccuccuuucaaaacacacugccaggaagcugagaccaagaccaaggacgagauggcugcugcugaagaaaaagucgguaagaaugaacaaggggagccugaagaccucaagaagccagaggggaagaacagaagugcagcugcugugaaaaacgagaaggagcaaaaaaaccaggaagcagauguccaggaagugaaggcaagcacgcugagcccggguggaggagucaccguguucuuccacgccaucaucucucuucauuucccauucaauccugaccuccauaaagucuucaucagaggaggagaagaauuuggggagucaaaaugggacagcaauaucugugagcugcacuacaccagagacuugggucaugaccgcguucuuguugaaggcauugucugcauuuccaagaagcaccuagauaaauacauuccuuacaaguacgucauuuauaauggggaaucuuuugaguaugaguucauuuacaagcaccagcagaagaagggcgaguacgucaaccgcugucuguucauaaaaucuucacuucugggcucaggagacuggcaucaguacuaugacauaguuuauaugaagccucaugggagacuccagaaagucaugaaccacaucacagacgggccgaggaaggaccuggugaaggggaagcagauugccgcugcgcucaugcuggacagcaccuucagcauccugcagaccugggacaccaucaaccugaacagcuucuucacccaguucgagcaguuuugcuuuguccugcaacagccuaugauuuaugaaggacaggcacagcuguggaccgauuugcaguacagggagaaagaggugaagagauaccuguggcaacaucugaaaaaacacgugguaccauugccggacggaaaaagcacggacuuuuugccuguggacugcccagugaggaguaaacugaaaacaggccugauuguccuuuuuguaguggaaaaaauugagcuuuuauuagaaggcagccuggacugguugugucaccuccuaaccucagaugccagcucaccagaugaguuucaccgugaccuaagccacauccuugggauaccucagagcuggcggcuguaccuggugaaccugugccaaagaugcauggacacaaggacguacaccuggcugggcgcccugccuguccugcacugcuguauggagcuggccccgcggcacaaggaugccuggagacagccugaggacaccugggccgcucuggagggacucuccuucucaccguuccgggaacaaaugcuagauacgaguucccuacuucaguuuaugagagagaagcagcauuugcugagcauagacgagccucucuuccgguccugguuuagucugcuaccucugagucaccugguuauguauauggaaaacuucauugagcaccugggucguuuuccugcucauauccuggacugucuuucagggauuuacuaccggcuuccgggacuugagcaagucuugaauacgcaggauguucaggauguucagaacguucagaacauuuuagaaaugcuguugcgacuccuggacacuuaccgggacaagauucccgaggaggccuugucaccauccuaccugacugugugucugaaacugcaugaagccaucugcagcagcacaaagcuacuuaaguuuuacgagcugccagccuuaucugccgagauugucugcagaaugauuagacuucuaucucugguggauucugcaggacagagagaugaaacuggaaauaauucaguccaaacagucuuccaagggacccuugcugcuacgaaaagguggcuccgagaaguuuuuacaaagaacaugcucacaucuucaggugccucauucacauacgucaaggaaauugaggucuggaggcggcugguggaaauccaauuccccgcggagcauggcuggaaggagucguugcugggagacauggaauggaggcucacaaaggaggaaccccucucccagaucacugccuacugcaauaguugcugggacaccaaaggcuuagaggacaguguggccaagaccuucgagaaaugcaucauugaagccgugagcucagccugccagucucagaccaguauccuucagggguucucuuacucugauuugcggaaauuuggcaucgucuugucugcugugaucacuaaguccuggccuaggaccgcggacaacuucgaugacauuuuaaagcaucugcucacguuggcagaugucaagcacgucuucagauuguguggaaccgacgagaaaauacuagcaaaugucacagaggaugccaagaggcugauagcuguugccgacucuguguugacgaaaguuguuggugaccuccuaaguggcacgauuuuaguuggacaacuggagcugauuauaaagcacaagaaucaguuucuugacaucuggcaacugagggaaaaaagucuuucaccccaggaugaacaaugugcuguggaggaagcacuggauuggagaagggaggaacuguuacuucuaaagaaagagaaaagauguguugauagucuccugaagaugugugggaacgugaaacaucugauacaaguggacuuuggagugcuugcaguaagacacucacaagaccucagcaguaaaagauuaaaugacaccgugacagugagacuguccaccuccucgaacucgcagagggcaacgcauuaccaccugagcucccagguccaagaaauggcugggaagauagacuugcucagagacagccacaucuuccagcucuucuggcgggaagccgcagagccgcugagugagccuaaggaggaccaggaagccgcagaguugcugagugagcccgaagaagaaucagaaaggcacauccuugagcuugaagagguguaugacuauuuguaucagccuucuuacagaaaguucauuaaguugcaccaggaucuaaagucaggagaggucacccuugcagagauugaugucaucuucaaggacuuugugaauaaauacacggaccuggauucagaacuuaagaucaugugcaccguggaccaccaggaccaaagagauuggaucaaggaccgagucgaacagaucaaggaauaccaucaccugcaccaggcuguccacgcagccaaggucaucuugcaggucaaagagagccugggacugaacggugacuucaguguucucaacacuuuacuaaauuuuacugauaacuucgacgacuuucgccgugaaacacuggaccagaucaaccaggagcucauccaggccaaaaagcugcuccaggacaucagcgaggcccggugcaaggggcugcaggcucugucccugagaaaggaguucaucugcuggguccgggaggcucuuggaggcaucaaugagcugaagguguuuguggaccuggccuccaucucagcgggggagaaugacauugauguggaccggguggccugcuuccaugacgcugugcagggcuacgcaucccugcuauuuaagcuggaccccagcguggacuucagugcauucaugaagcaucugaaaaagcuguggaaggcucuggauaaggaccaguaccugcccaggaaacugugugacuccgccaggaacuuggaauggcugaagacugugaaugagagucaugggucuguggaacgcucaucccugacccuggccacggccaucaaccaaagaggcaucuaugugauccaggcgcccaaagguggccaaaagauuuccccagacacgguucugcacuugauccuuccugagagcccuggcagccacgaggagucacgagaguacucuuuagaggaggugaaggagcuuuugaacaaguugaugcugaugucuggcaagaaggaucguaacaacacggaaguggagagguuuucagaggucuucugcagugugcagaggcucagccaggccuucaucgaccugcacucugcugggaauaugcuguucaggacguggaucgccauggccuacugcucccccaagcagggugugucccuccaaauggacuuuggcuuggaccuggugacggagcuuaaagaagguggagaugucacugagcugcuggcagcccucugcaggcagauggagcacuuccuugacagcuggaagagauuugugacccagaagcgaauggagcacuuuuaccugaacuucuacacggcagagcagcugguuuaccugagcacugagcucaggaagcagcccccgagugaugccgcccuaacgaugcuauccuucaucaaaagcaacugcacccugagggaugucuuaagggccucuguggggugugggagugaggccgccagguaccgcaugaggagagucauggaagagcucccgcugaugcucuuaucagaguucagccugguggacaagcugaggaucaucauggagcaguccaugaggugccuuccugccuuccugcccgacugccucgaccuagagacccuuggccacugucuggcucaccuggcagggaugggugggucucccguggagcguugucucccgagaggucugcaggucggccagcccaaccucgucgucuguggccacuccgagguguugccagccgcccuggcugucuacaugcaaaccccaagccagccccugcccacuuacgaugaggugcugcucugcaccccggcaaccaccuuugaggagguggcacuguugcugcgccgcugccugacccugggcucccuggggcacaaggucuacagccugcuguucgcagaucagcugagcuacgagguggcacgccaagcggaggagcuuuuccacaaucugugcacgcagcagcaccgagaagacuaccagcucgucauggucugugauggggacugggagcacugcuaccuccccucugccuucagccagcacaaggucuucgucaccccccaggcaccccucgaggccauccaagccuaccuggcaggucacuaccgggucccgaagcagacccugucggcggcagccguguucaaugaccggcuguguguugggaucguggccucggagcgagcagguguuggaaagucucuguacgugaagagguugcacgacaaaaugaagaugcaguuaaacgugaaaaaugugccucugaaaacaauucgacugaucgacccucagguggaugagagccgaguccugggcgcccugcugcccuuccuggaugcgcaguaucagaagguccccgugcucuuucaccuggacgugaccuccucagugcagacuggaauuuggguguuucuuuucaagcuccucauuuuacaauacuuaauggauauaaaugggaaaauguggcuucggaaccccugccauuuguauaucguugaaauccuggaaaggaggacgucagugccgucgaggagcucuucagcgcugcguacacguguaccccaguucaguuuucuugacaucuucccaaaagucaccugcaggccucccaaagaggugauagacauggagcugagugcccugaggagugacacagagccugggauggaucugugggaguucugcagcgaaacuuuccaaagaccuuaccaguauuuaagacgauucaaucaaaaccaagaccuagacacguuucaguaucaagaaggcucugucgaaggcaccccggaggaaugccuccagcauuuccuguuucacugcgggguaauaaacccauccuggucagagcuucggaacuuugcucgguuccugaauuaucagcucagagauugugaggccucucucuucugcaauccgaguuuuauuggcgacacacugaggggcuucaagaaguucguggugaccuucaugaucuuuauggcaagagauuuugccacaccaucacuccacaccucugaccaaagcccggggaagcacauggucaccauggaugggguuagggaagaagaucuagcgcccuucucccuccggaagaggugggagucggagccucacccauacguuuucuucaaugacgaccacacaaccaugacauucaucggcuuccaucugcagcccaacaucaacggcagugucgaugccaucagucacuugacugggaaggucaucaagagagacgucaugaccagggaccuguaccagggccugcugcuccagagggugcccuucaaugucgacuuugauaaacugcccagacacaagaaacuugagaggcucugccugaccuuagggaucccccaggccaccgaccccgacaaaacguaugagcucacaaccgacaauaugcuuaaaauccuugccaucgagaugcgguuccggugugggaucccgguuaucaucaugggagaaacuggcugugggaaaaccaggcuuauuaaauuccuuagcgaccugcggcguggugguaccaaugcugacaccauaaagcuggucaaggugcacggaggaacaacugcagacaugaucuacuccagagucagggaggcugaaaauguggccuucgccaauaaggaccaacaucaguuggacaccaucuuguuuuuugaugaagccaacacaacggaagcuauaagcuguaucaaagaaguccugugugaucauaugguggauggccagccucuggcugaggacucuggccugcauauuauagcugccugcaauccauaccggaagcacucugaggagaugaucugccguuuggagucagcugguuugggcuacaggguuaguauggaggagacggccgacaggcugggcuccauuccucugaggcagcugguauaccggguccaugcucugcccccgagccugauuccucuggugugggacuuuggacaacugagugacguugcugaaaagcucuacauccagcagauuguccagagacugguugaguccaucagccuagaugaaaacgggacucgcgugaucacagaaguccucugcgccucucaggguuucaugaggaaaacagaagaugagugcagcuuugucagccucagggacguggagcgcugugugaaaguuuucaggugguuccacgagcacagcgcgaugcucuuagcgcagcugaaugccuuucucuccaaguccagcgucagcaaaaaucacaccgagagagaucccguccucuggucguugaugcuggccaucgggguguguuaccaugccucuuuagaaaagaaagacucauaucggaaagccaucgccagguucuuuccgaaaccguaugacgacagcaggcugcuucuggaugaaauaacacgggcacaggaucuuuuucuggacggcguaccucugaggaaaaccaucgccaagaacuuggccuugaaggagaacgucuucaugauggucgucugcaucgagcugaagauuccccucuuccugguggggaagcccggcagcuccaagucucucgccaagaccaucguggcagacgccaugcagggcccggcugccuacucagaucucuuccgcagccugaagcagguccaccugguguccuuccagugcagcccgcacuccaccccacagggcaucaucagcaccuuccggcagugcgcccgcuuucagcaggggaaggaccugcagcaguacgucucuguggugguguuagaugagguggggcuggcggaagacucacccaaaaugccccugaagacucugcacccgcugcuggaagacggaugcauugaagacgaucccgccccccacaaaaaggucggcuucgugggcaucuccaacugggcccuugacccugccaagaugaaccggggcauuuuugugucacguggcagccccaacgagacagagcucauagagagcgccaagggcaucugcuccucagacauccucguccaggaccgaguccaaggguacuuugcguccuuugccaaagccuacgaaacgguguguaagcgccaggacaaggaauucuucgggcuucgugacuacuacagccucaucaaaauggucuuugcugcagcaaaggcuucaaauagaaagccuuccccgcaagacauugcacaggcuguccuuaggaacuucaguggcaaggaugacauccaagcuuuggacaucuuucuggccaauuugcccgaggccaagugcucagaggaagucagccccaugcagcugaucaaacagaacaucuuugggccuucucagaaggugccggguggagagcaggaagaugcugagucccgcuacuuacucgugcugaccaaaaacuacguggcacugcagauccugcagcagacauucuucgagggggaccagcagccggagauuauuuuugguucugguuuccccaaggaccaagaguacacccagcucugcagaaacaucaaucgugugaagaucugcauggaaacaggcaagaugguguugcuucucaaccugcagaaccucuacgagagccucuacgacgcacucaaccaguacuacguccaccucggcggccagaaguacguggaccucggucuggggacccaccgcgucaaaugucggguucaccccaacuuccgccugauugucauugaagagaaagacgucguguacaaacacuuucccaucccccucauuaaccggcuggagaagcacuaucuggauaucaacacggugcuggagaaauggcagaagagcaucguggaggagcucugugcguggguggagaaguucaucaaugucaaagcacaucauuuccagaagaggcacaaauacagccccucugacgucuucaucggcuaccacucggacgccugcgcgucuguggugcugcaggucauagagaggcaggguccccgggccuugacggaggaacuucaccagaaggugucugaggaggccaaaucgauccugcugaacugcgcuacgcccgaugccgugguccggcugagcgccuacucgcugggcggguucgcagcggaguggcugucgcaggaguacuuucacagacagaggcacaacuccuuugcagauuuccuucaggcacaccugcacacggcagaccuggagcgccacgccaucuucacagagaucaccacuuucuccaggcugcuaacaagucacgacugugaaauuuuagaaucagaggucacaggcagggcuccgaaacccacacuccuguggcugcagcaguuugacaccgaguacucauuccucaaagaaguccgaaacuguuuaacgaauacagccaaauguaaaauccucauuuuucagacagauuuugaagauggaauccguagcgcccagcucauugccucagcuaaguauucuguuauaaaugaaaucaacaaaauacgagaaaaugaggaccguaucuucgucuauuucaucacaaaacugucccgggugggaagaggaacagccuaugugggcuuccacggagggcuguggcagucuguccacaucgaugaccuccggagauccacccucaugguuucugaugugaccaggcugcagcaugucaccaucagccagcuguucgcgcccggagacuugccugagcugggcuuggaacaccgggcggaagacggccaugaggaggcgauggagacggaggccagcacaucaggggagguggcagagguggcagaggaggccauggaaacagaaaguucugagaaggugggaaaggaaaccucugaacucggaggcagugaugugucgauccuggacaccaccaggcugcugagaagcugugugcagagcgccgugggcaugcucagagaccagaacgagagcugcacgcgcaauaugcggaggguggugcuccuccugggccucuugaaugaggaugacgcgugccacgccucuuucuugcggguauccaagaugcgccucagugucuuuuuaaagaagcaagaagagagccaguuucacccucuggagugguuggcaagggaagccugcaaccaggacgcucuccaggaggcgggcacauucaggcacacccucuggaagcggguccaaggugcugucaccccucugcuggcgagcaugauaucauucaucgacagagacggcaaccuagaguuacugaccaggccagauacuccgcccugggcaagagaucuuuggauguuuauuuucagugacacgaugcuucugaacauuccucuugugaugaauaaugaaagacauaaaggugagauggccuacaucguggugcagaaccacaugaaccuuuccgagaacgcuuccaacaacgucccuuucagcuggaaaaucaaggacuaucuggaggagcuguggguccaggcucaguacaucacagacgcagaaggacugcccaagaaguucguggacaucuuucagcagacuccucugggcagguuucuugcccagcuccauggagagccgcagcaggaacuucuucaguguuacuugaaggauuucauucucuugaccaugcgugugucaacggaggaggaauuaaaguuucugcagauggcucugugguccugcacuaggaaacugaaagcggcgucagaagcgcccgaggaagagguuuccuuaccgugggugcaccuugccuaccagcguuucagaagccgucugcagaacuuuuccagaauccugaccaucuacccucagguucuccacagccugauggaagcccguuggaaccaugagcuggcuggaugugagaugacccuggacgcauuugccgcaauggccugcacggagaugcugacaagaaacacccugaagcccaguccccaggcguggcuacaguuggugaagaaucuuuccaugccgcuggagcucaucugcuccgaugagcacaugcaaggcagcgggagccuggcccaggcugucaucaggggagucagagcccaguggagucggauuuucuccaccgcacucuucguggagcacgugcuccuaggaaccgagagccgcguccccgaguuacaggggcuggugaccgagcacgucuucuuacuagacaagugucuucgagagaacucugacgugaagacgcacgggccuuuugaggccgugaugcgcacucucugugaaugcaaggagacagccagcaagacccucagcagguuugggauucagccgugcuccaucugccugggagaugcaaaggaccccgucugucugcccugcgaccacgugcacugccugcgcugccucagggccugguuugccucagagcagaugauaugccccuacuguuuaacugccuugccagacgaauucucuccagcuguuucccaagcgcacagggaagccauugaaaagcaugcccgcuuccggcagaugugcaacaguuucuucguagaccugguguccaccauuugcuucaaggacaacgcuccgccugagaaggaagugauugagagccugcucucucuccucuucguccaaaaggggcgcuuaagagaugcugcccagagacacugugaacacacaaaaucucucucuccauucaaugauguuguggauaagacuccugucauccgcucagugauacugaaacugcuuuugaaguacagcuuucaugauguaaaagauuauauucaggaauauuugacccuguuaaaaaagaaagcauucauaacugaagauaaaacugaacuguacaugcucuucaucaacugccuggaggauucaauacuugagaagaccagugcuuacuccagaaaugaugaacugaaccaccuagaagaggaaggucguuuccuuaaggcauauucuccagcaagccggggccgagagccugccaacgaggccucgguugaauaccugcaagagguggcccggauccgccucugccucgacagagcugcagauuuccucucggagccugagggaggcccagagauggccaaggagaagcagugcuaccugcagcaagucaagcaguucuguauccggguggagaacgacuggcaccggguguaccuggugcggaagcucagcagccagcgggggauggaguucgugcagggccucuccaagcccggccgcccgcaccaguggguguuucccaaggacguugucaagcagcaggggcugcggcaggaccacccaggccagauggauagguaccugguguacggcgaugaauacaaggcucuccgugaugcuguggccaaagcuguccucgagugcaagccacugggcauuaagacugcucugaaggccugcaagaccccccaaagccagcagucagccuacuuccuguuaacacuguuuagagagguggcuauuuuguacagaucccacaaugcaagccuccaccccacgccagagcaaugugaagcugugagcaaauucauuggcgaaugcaagauccuuucaccuccugauaucagccguuuugcaacaucgcucguggacaauucugugccauuguugagggcggggccuagugacagcaaccuugauggaacggugacagaaauggccauucaugcugcagccguccuucuguguggacagaaugaacucuuggagccccuaaagaaucuggccuucuccccagccaccauggcgcaugcuuuucuuccaaccaugccugaagacuugcuggcucaagcucggagguggaagggucuggagcgaguccacugguacacuugucccaacggccauccuugcuccgugggagaguguggcaggccgauggaacagagcaucugcauugacugccaugcgccgauuggaggcauugaccacaaaccucgggacggcuuucaucuggucaaagacaaggcagacagaacgcagaccggccacgugcugggcaacccgcagcggagagacguggugacaugugaccgagggcugcccccaguggucuuccuccuuauccggcuacucacucacuuggcucugcuucugggagcgucccagaguucccaggcucugauaaacaucauuaagccuccagugagggauccaaaaggcuuucugcagcagcacauccugaaggaccuggagcaguuggccaagaugcugggacacagugccgacgagaccaucggcgugguccaccucguccugcgcaggcuucuccaagagcagcaccagcucucuagcagaaggcuuuuaaauuuugacacagaauugucaacuaaagaaaugaggaacaacugggaaaaggaaaucgcagcugugauuucuccugaacuggagcaucuagauaaaacccuucccaccaugaauaaucucaucagccaagauaagcguaucagcucuaacccuguggccaaaauaauauauggugacccagugaccuuccugccccaccugccccggaaaagugugguccauugcucuaagauuuggagcugcaggaaaagaauuacaguugaguaccuccagcacauuguggaacagaaaaauggcaaagaaagagugcccauccucuggcauuuccugcagaaggaagcagagcugaggcugguaaaguuccugccugagauuuuggccuugcaaagggaucuagugaagcaguuccagaacguccagcaaguugaauacagcuccaucagaggcuuccucagcaagcacagcucagauggguugaggcagcugcuucacaacaggaucacagucuuucuguccacauggaacaaacugaggagaucgcuugagacgaacggugagaucaaccuacccaaagacuacugcagcacugacuuggaucuggacacugaguuugagauccucuugccacgccgacggggccugggccucugugcuaccgcucucgucagcuacuugauucgccuacacaaugaaauugucuacgccguggaaaaacucuccaaggaaaacaacagcuauuccguggaugccgccgaggucacugaacugcaugucaucaguuaugaaguggagcgggaccugacuccacugauucucuccaacugccaguaccagguggaggagggcagagagaccgugcaggaguucgaucuggagaagauucagcggcagaucgucagccgcuuccuccagggcaagccccggcugagccucaagggaauacccacucugguguacagacacgacuggaacuaugaacaucucuuuauggacaucaagaacaaaauggcacaggacucccuccccagcucggucauuagugccaucaguggacagcugcaguccuacagcgaugccugugaagugcugucugucguagaagucacucugggguuucugagcacagcugguggggauccaaacaugcagcugaauguguauacucaagacauccugcaaaugggugaucagacgauucacguguuaaaggccuuaaacagaugccaguuaaaacacaccauugcccucuggcaguuccugucugcucauaagucugaacagcugcugcggcugcacaaagagccauuuggggaaaucaguucaagguacaaagcggaucugagcccggaaaaugcuaagcuccucagcacauuccuaaaucagacuggccuagacgccuuccugcuagagcugcacgaaaugauaaucuugaaacuaaagaacccccaaacccaaaccgaggagcgcuuccgcccucaguggagccugagagacacucucguaaguuacaugcaaacuaaagaaagugaaauucuuccugaaauggcaucucaguucccagaagagauacugcucgccagcugugucucaguguggaaaacagcugcugugcugaaauggaaucgagaaaugagauagaauuauuuccucagcuaucuuuggaugacuuuggagagaagacuccucucuccucgucugcggcguggacuugaucauggacuggugccuuugcauucagaaggagagcugucagcguagcaccgaauucaagaccaaggcgugcuaccugagcugacagcuuuuugaaagccgagcuguuucugaaccauguacauacauguucugaaacuuucucaucauuuuaugaguacuguucauugagagaugacaaugaagauuagaugaaauuggaaauaaaccaacauuguuuacauuccaggagacuuguagcucagccacacacgcaguaaugaccugugcccguucgccucuggcacugcccaccccucuuuuuuuuuuucuucuaauucuguacucacaaaagagaaucucauuuucuucuuucuuccauucccuuaaauucugaguacuguacauauauuucuggguucccacgaugaugugaaaaacuaccagacuguuuuuugucuucucacaaagacaagaaaaaucagggcauuuugugagugccuuaagaucaaacuaacaagaucugacccucuccccucacagugagccacugccccacuucagaggguaagagccaaaagccucauugugaaaggcacuggacuuggaccagggacaccaucagggccuugguuuucucacgcauaaaauggagaguggauuaaucgccaaagauucuucugaucugacauuuugaaauugugagagaaacuagaugacuguaaacuuggucacaggccugguucuggcaguucuuugcggacuuuuuucuagcauuaugccaaauaaacaugcagucucagugugcucucgcauguaugaauaucuaguccuuucugugguucucagccaagacauaaaaacuaggacucagagcacauacaaaaccaguuauguuucggaaagagggaaaagaguccccgagcccggaucuugugcugcuuuucucacugacguguugccuuuuuucuuuacaaaaucugcuuugauacuuaggaccucucuggacuaauuucucuuccuagacagcucagcacagcuauugauauguuagaggcaguauccuuaauauucauucuaaaugaguuaacgacuuaacuugaaauugggccuaaggagugagaacuacaaaaauacaaaaugcuuguccaggacucagccaugcacaccuugagcagcgccggcaggaggcacggaaggaacugugcuccguucuccucacugucauggugccaccagugucugaugaagggcagagugacccagacugcaggcaguaacugacuucacacagucccuggcauuuagucaucugugauuguuuuaucacucuggacugugcagagccaccugccaccgagaucugcauuccgacugccuaugaacgggugugggggccgggggcuggcuugcugaagucuucaacuugcacucggagcuccuuugauaccucagagcuggcugucagguggcagcucacacccagacucacuggccacaccucagcagggggggagucgagugucagucucuuucugugaaggcuuuuuuuuuccuuuggccugggaauuuuucccauuuuuaugaagggguuuuaaauuguuucauuuugugugcugugcuucaaagccuuaacugucaaaucuugcauuaucuuguuuguacagaaauauacuggccuagcagaggcaaaaaaaaaaaaaaugaauuuuauuuuacuugucacaccugucuuaauaaacuggaguuuugcugcuaaagaa

SEQ ID NO: 14 - RNA, 8391 nt, homo sapien
gaacaucuuugggccuucucagaaggugccggguggagagcaggaagaugcugagucccgcuacuuacucgugcugaccaaaaacuacguggcacugcagauccugcagcagacauucuucgagggggaccagcagccggagauuauuuuugguucugguuuccccaaggaccaagaguacacccagcucugcagaaacaucaaucgugugaagaucugcauggaaacaggcaagaugguguugcuucucaaccugcagaaccucuacgagagccucuacgacgcacucaaccaguacuacguccaccucggcggccagaaguacguggaccucggucuggggacccaccgcgucaaaugucggguucaccccaacuuccgccugauugucauugaagagaaagacgucguguacaaacacuuucccaucccccucauuaaccggcuggagaagcacuaucuggauaucaacacggugcuggagaaauggcagaagagcaucguggaggagcucugugcguggguggagaaguucaucaaugucaaagcacaucauuuccagaagaggcacaaauacagccccucugacgucuucaucggcuaccacucggacgccugcgcgucuguggugcugcaggucauagagaggcaggguccccgggccuugacggaggaacuucaccagaaggugucugaggaggccaaaucgauccugcugaacugcgcuacgcccgaugccgugguccggcugagcgccuacucgcugggcggguucgcagcggaguggcugucgcaggaguacuuucacagacagaggcacaacuccuuugcagauuuccuucaggcacaccugcacacggcagaccuggagcgccacgccaucuucacagagaucaccacuuucuccgggcugcuaacaagucacgacugugaaauuuuagaaucagaggucacaggcagggcuccgaaacccacacuccuguggcugcagcaguuugacaccgaguacucauuccucaaagaaguccgaaacuguuuaacgaauacagccaaauguaaaauccucauuuuucagacagauuuugaagauggaauccguagcgcccagcucauugccucagcuaaguauucuguuauaaaugaaaucaacaaaauacgagaaaaugaggaccguaucuucgucuauuucaucacaaaacugucccgggugggaagaggaacagccuaugugggcuuccacggagggcuguggcagucuguccacaucgaugaccuccggagauccacccucaugguuucugaugugaccaggcugcagcaugucaccaucagccagcuguucgcgcccggagacuugccugagcugggcuuggaacaccgggcggaagacggccaugaggaggcgauggaaacggaggccagcacaucaggggagguggcagagguggcagaggaggccauggaaacagaaaguucugagaaggugggaaaggaaaccucugaacucggaggcagugaugugucgauccuggacaccaccaggcugcugagaagcugugugcagagcgccgugggcaugcucagagaccagaacgagagcugcacgcgcaauaugcggaggguggugcuccuccugggccucuugaaugaggaugacgcgugccacgccucuuucuugcggguauccaagaugcgccucagugucuuuuuaaagaagcaagaagagagccaguuucacccucuggagugguuggcaagggaagccugcaaccaggacgcucuccaggaggcgggcacauucaggcacacccucuggaagcggguccaaggugcugucaccccucugcuggcgagcaugauaucauucaucgacagagacggcaaccuagaguuacugaccaggccagauacuccgcccugggcaagagaucuuuggauguuuauuuucagugacacgaugcuucugaacauuccucuugugaugaauaaugaaagacauaaaggugagauggccuacaucguggugcagaaccacaugaaccuuuccgagaacgcuuccaacaacgucccuuucagcuggaaaaucaaggacuaucuggaggagcuguggguccaggcucaguacaucacagacgcagaaggacugcccaagaaguucguggacaucuuucagcagacuccucugggcagguuucuugcccagcuccauggagagccgcagcaggaacuucuucaguguuacuugaaggauuucauucucuugaccaugcgugugucaacggaggaggaauuaaaguuucugcagauggcucugugguccugcacuaggaaacugaaagcggcgucagaagcgcccgaggaagagguuuccuuaccgugggugcaccuugccuaccagcguuucagaagccgucugcagaacuuuuccagaauccugaccaucuacccucagguucuccacagccugauggaagcccguuggaaccaugagcuggcuggaugugagaugacccuggacgcauuugccgcaauggccugcacggagaugcugacaagaaacacccugaagcccaguccccaggcguggcuacaguuggugaagaaucuuuccaugccgcuggagcucaucugcuccgaugagcacaugcaaggcagcgggagccuggcccaggcugucaucaggggagucagagcccaguggagucggauuuucuccaccgcacucuucguggagcacgugcuccuaggaaccgagagccgcguccccgaguuacaggggcuggugaccgagcacgucuucuuacuagacaagugucuucgagagaacucugacgugaagacgcacgggccuuuugaggccgugaugcgcacucucugugaaugcaaggagacagccagcaagacccucagcagguuugggauucagccgugcuccaucugccugggagaugcaaaggaccccgucugucugcccugcgaccacgugcacugccugcgcugccucagggccugguuugccucagagcagaugauaugccccuacuguuuaacugccuugccagacgaauucucuccagcuguuucccaagcgcacagggaagccauugaaaagcaugcccgcuuccggcagaugugcaacaguuucuucguagaccugguguccaccauuugcuucaaggacaacgcuccgccugagaaggaagugauugagagccugcucucucuccucuucguccaaaaggggcgcuuaagagaugcugcccagagacacugugaacacacaaaaucucucucuccauucaaugauguuguggauaagacuccugucauccgcucagugauacugaaacugcuuuugaaguacagcuuucaugauguaaaagauuauauucaggaauauuugacccuguuaaaaaagaaagcauucauaacugaagauaaaacugaacuguacaugcucuucaucaacugccuggaggauucaauacuugagaagaccagugcuuacuccagaaaugaugaacugaaccaccuagaagaggaaggucguuuccuuaaggcauauucuccagcaagccggggccgagagccugccaacgaggccucgguugaauaccugcaagagguggcccggauccgccucugccucgacagagcugcagauuuccucucggagccugagggaggcccagagauggccaaggagaagcagugcuaccugcagcaagucaagcaguucuguauccggguggagaacgacuggcaccggguguaccuggugcggaagcucagcagccagcgggggauggaguucgugcagggccucuccaagcccggccgcccgcaccaguggguguuucccaaggacguugucaagcagcaggggcugcggcaggaccacccaggccagauggauagguaccugguguacggcgaugaauacaaggcucuccgugaugcuguggccaaagcuguccucgagugcaagccacugggcauuaagacugcucugaaggccugcaagaccccccaaagccagcagucagccuacuuccuguuaacacuguuuagagagguggcuauuuuguacagaucccacaaugcaagccuccaccccacgccagagcaaugugaagcugugagcaaauucauuggcgaaugcaagauccuuucaccuccugauaucagccguuuugcaacaucgcucguggacaauucugugccauuguugagggcggggccuagugacagcaaccuugauggaacggugacagaaauggccauucaugcugcagccguccuucuguguggacagaaugaacucuuggagccccuaaagaaucuggccuucuccccagccaccauggcgcaugcuuuucuuccaaccaugccugaagacuugcuggcucaagcucggagguggaagggucuggagcgaguccacugguacacuugucccaacggccauccuugcuccgugggagaguguggcaggccgauggaacagagcaucugcauugacugccaugcgccgauuggaggcauugaccacaaaccucgggacggcuuucaucuggucaaagacaaggcagacagaacgcagaccggccaugugcugggcaacccgcagcggagagacguggugacaugugaccgagggcugcccccaguggucuuccuccuuauccggcuacucacucacuuggcucugcuucugggagcgucccagaguucccaggcucugauaaacaucauuaagccuccagugagggauccaaaaggcuuucugcagcagcacauccugaaggaccuggagcaguuggccaagaugcugggacacagugccgacgagaccaucggcgugguccaccucguccugcgcaggcuucuccaagagcagcaccagcucucuagcagaaggcuuuuaaauuuugacacagaauugucaacuaaagaaaugaggaacaacugggaaaaggaaaucgcagcugugauuucuccugaacuggagcaucuagauaaaacccuucccaccaugaauaaucucaucagccaagauaagcguaucagcucuaacccuguggccaaaauaauauauggugacccagugaccuuccugccccaccugccccggaaaagugugguccauugcucuaagauuuggagcugcaggaaaagaauuacaguugaguaccuccagcacauuguggaacagaaaaauggcaaagaaagagugcccauccucuggcauuuccugcagaaggaagcagagcugaggcugguaaaguuccugccugagauuuuggccuugcaaagggaucuagugaagcaguuccagaacguccagcaaguugaauacagcuccaucagaggcuuccucagcaagcacagcucagauggguugaggcagcugcuucacaacaggaucacagucuuucuguccacauggaacaaacugaggagaucgcuugagacgaacggugagaucaaccuacccaaagacuacugcagcacugacuuggaucuggacacugaguuugagauccucuugccacgccgacggggccugggccucugugcuaccgcucucgucagcuacuugauucgccuacacaaugaaauugucuacgccguggaaaaacucuccaaggaaaacaacagcuauuccguggaugccgccgaggucacugaacugcaugucaucaguuaugaaguggagcgggaccugacuccacugauucucuccaacugccaguaccagguggaggagggcagagagaccgugcaggaguucgaucuggagaagauucagcggcagaucgucagccgcuuccuccagggcaagccccggcugagccucaagggaauacccacucugguguacagacacgacuggaacuaugaacaucucuuuauggacaucaagaacaaaauggcacaggacucccuccccagcucggucauuagugccaucaguggacagcugcaguccuacagcgaugccugugaagugcugucugucguagaagucacucugggguuucugagcacagcugguggggauccaaacaugcagcugaauguguauacucaagacauccugcaaaugggugaucagacgauucacguguuaaaggccuuaaacagaugccaguuaaaacacaccauugcccucuggcaguuccugucugcucauaagucugaacagcugcugcggcugcacaaagagccauuuggggaaaucaguucaagguacaaagcggaucugagcccggaaaaugcuaagcuccucagcacauuccuaaaucagacuggccuagacgccuuccugcuagagcugcacgaaaugauaaucuugaaacuaaagaacccccaaacccaaaccgaggagcgcuuccgcccucaguggagccugagagacacucucguaaguuacaugcaaacuaaagaaagugaaauucuuccugaaauggcaucucaguucccagaagagauacugcucgccagcugugucucaguguggaaaacagcugcugugcugaaauggaaucgagaaaugagauagaauuauuuccucagcuaucuuuggaugacuuuggagagaagacuccucucuccucgucugcggcguggacuugaucauggacuggugccuuugcauucagaaggagagcugucagcguagcaccgaauucaagaccaaggcgugcuaccugagcugacagcuuuuugaaagccgagcuguuucugaaccauguacauacauguucugaaacuuucucaucauuuuaugaguacuguucauugagagaugacaaugaagauuagaugaaauuggaaauaaaccaacauuguuuacauuccaggagacuuguagcucagccacacacgcaguaaugaccugugcccguucgccucuggcacugcccaccccucuuuuuuuuuuucuucuaauucuguacucacaaaagagaaucucauuuucuucuuucuuccauucccuuaaauucugaguacuguacauauauuucuggguucccacgaugaugugaaaaacuaccagacuguuuuuugucuucucacaaagacaagaaaaaucagggcauuuugugagugccuuaagaucaaacuaacaagaucugacccucuccccucacagugagccacugccccacuucagaggguaagagccaaaagccucauugugaaaggcacuggacuuggaccagggacaccaucagggccuugguuuucucacgcauaaaauggagaguggauuaaucgccaaagauucuucugaucugacauuuugaaauugugagagaaacuagaugacuguaaacuuggucacaggccugguucuggcaguucuuugcggacuuuuuucuagcauuaugccaaauaaacaugcagucucagugugcucucgcauguaugaauaucuaguccuuucugugguucucagccaagacauaaaaacuaggacucagagcacauacaaaaccaguuauguuucggaaagagggaaaagaguccccgagcccggaucuugugcugcuuuucucacugacguguugccuuuuuucuuuacaaaaucugcuuugauacuuaggaccucucuggacuaauuucucuuccuagacagcucagcacagcuauugauauguuagaggcaguauccuuaauauucauucuaaaugaguuaacgacuuaacuugaaauugggccuaaggagugagaacuacaaaaauacaaaaugcuuguccaggacucagccaugcacaccuugagcagcgccggcaggaggcacggaaggaacugugcuccguucuccucacugucauggugccaccagugucugaugaagggcagagugacccagacugcaggcaguaacugacuucacacagucccuggcauuuagucaucugugauuguuuuaucacucuggacugugcagagccaccugccaccgagaucugcauuccgacugccuaugaacgggugugggggccgggggcuggcuugcugaagucuucaacuugcacucggagcuccuuugauaccucagagcuggcugucagguggcagcucacacccagacucacuggccacaccucagcagggggggagucgagugucagucucuuucugugaaggcuuuuuuuuuccuuuggccugggaauuuuucccauuuuuaugaagggguuuuaaauuguuucauuuugugugcugugcuucaaagccuuaacugucaaaucuugcauuaucuuguuuguacagaaauauacuggccuagcagaggcaaaaaaaaaaaaaugaauuuuauuuuacuugucacaccugucuuaauaaacuggaguuuugcugcuaaaaaaaaaaaaaaaaaaa

SEQ ID NO: 15 - RNA, 6693 nt, homo sapien
gggccucuugaaugaggaugacgcgugccacgccucuuucuugcggguauccaagaugcgccucagugucuuuuuaaagaagcaagaagagagccaguuucacccucuggagugguuggcaagggaagccugcaaccaggacgcucuccaggaggcgggcacauucaggcacacccucuggaagcggguccaaggugcugucaccccucugcuggcgagcaugauaucauucaucgacagagacggcaaccuagaguuacugaccaggccagauacuccgcccugggcaagagaucuuuggauguuuauuuucagugacacgaugcuucugaacauuccucuugugaugaauaaugaaagacauaaaggugagauggccuacaucguggugcagaaccacaugaaccuuuccgagaacgcuuccaacaacgucccuuucagcuggaaaaucaaggacuaucuggaggagcuguggguccaggcucaguacaucacagacgcagaaggacugcccaagaaguucguggacaucuuucagcagacuccucugggcagguuucuugcccagcuccauggagagccgcagcaggaacuucuucaguguuacuugaaggauuucauucucuugaccaugcgugugucaacggaggaggaauuaaaguuucugcagauggcucugugguccugcacuaggaaacugaaagcggcgucagaagcgcccgaggaagagguuuccuuaccgugggugcaccuugccuaccagcguuucagaagccgucugcagaacuuuuccagaauccugaccaucuacccucagguucuccacagccugauggaagcccguuggaaccaugagcuggcuggaugugagaugacccuggacgcauuugccgcaauggccugcacggagaugcugacaagaaacacccugaagcccaguccccaggcguggcuacaguuggugaagaaucuuuccaugccgcuggagcucaucugcuccgaugagcacaugcaaggcagcgggagccuggcccaggcugucaucaggggagucagagcccaguggagucggauuuucuccaccgcacucuucguggagcacgugcuccuaggaaccgagagccgcguccccgaguuacaggggcuggugaccgagcacgucuucuuacuagacaagugucuucgagagaacucugacgugaagacgcacgggccuuuugaggccgugaugcgcacucucugugaaugcaaggagacagccagcaagacccucagcagguuugggauucagccgugcuccaucugccugggagaugcaaaggaccccgucugucugcccugcgaccacgugcacugccugcgcugccucagggccugguuugccucagagcagaugauaugccccuacuguuuaacugccuugccagacgaauucucuccagcuguuucccaagcgcacagggaagccauugaaaagcaugcccgcuuccggcagaugugcaacaguuucuucguagaccugguguccaccauuugcuucaaggacaacgcuccgccugagaaggaagugauugagagccugcucucucuccucuucguccaaaaggggcgcuuaagagaugcugcccagagacacugugaacacacaaaaucucucucuccauucaaugauguuguggauaagacuccugucauccgcucagugauacugaaacugcuuuugaaguacagcuuucaugauguaaaagauuauauucaggaauauuugacccuguuaaaaaagaaagcauucauaacugaagauaaaacugaacuguacaugcucuucaucaacugccuggaggauucaauacuugagaagaccagugcuuacuccagaaaugaugaacugaaccaccuagaagaggaaggucguuuccuuaaggcauauucuccagcaagccggggccgagagccugccaacgaggccucgguugaauaccugcaagagguggcccggauccgccucugccucgacagagcugcagauuuccucucggagccugagggaggcccagagauggccaaggagaagcagugcuaccugcagcaagucaagcaguucuguauccggguggagaacgacuggcaccggguguaccuggugcggaagcucagcagccagcgggggauggaguucgugcagggccucuccaagcccggccgcccgcaccaguggguguuucccaaggacguugucaagcagcaggggcugcggcaggaccacccaggccagauggauagguaccugguguacggcgaugaauacaaggcucuccgugaugcuguggccaaagcuguccucgagugcaagccacugggcauuaagacugcucugaaggccugcaagaccccccaaagccagcagucagccuacuuccuguuaacacuguuuagagagguggcuauuuuguacagaucccacaaugcaagccuccaccccacgccagagcaaugugaagcugugagcaaauucauuggcgaaugcaagauccuuucaccuccugauaucagccguuuugcaacaucgcucguggacaauucugugccauuguugagggcggggccuagugacagcaaccuugauggaacggugacagaaauggccauucaugcugcagccguccuucuguguggacagaaugaacucuuggagccccuaaagaaucuggccuucuccccagccaccauggcgcaugcuuuucuuccaaccaugccugaagacuugcuggcucaagcucggagguggaagggucuggagcgaguccacugguacacuugucccaacggccauccuugcuccgugggagaguguggcaggccgauggaacagagcaucugcauugacugccaugcgccgauuggaggcauugaccacaaaccucgggacggcuuucaucuggucaaagacaaggcagacagaacgcagaccggccacgugcugggcaacccgcagcggagagacguggugacaugugaccgagggcugcccccaguggucuuccuccuuauccggcuacucacucacuuggcucugcuucugggagcgucccagaguucccaggcucugauaaacaucauuaagccuccagugagggauccaaaaggcuuucugcagcagcacauccugaaggaccuggagcaguuggccaagaugcugggacacagugccgacgagaccaucggcgugguccaccucguccugcgcaggcuucuccaagagcagcaccagcucucuagcagaaggcuuuuaaauuuugacacagaauugucaacuaaagaaaugaggaacaacugggaaaaggaaaucgcagcugugauuucuccugaacuggagcaucuagauaaaacccuucccaccaugaauaaucucaucagccaagauaagcguaucagcucuaacccuguggccaaaauaauauauggugacccagugaccuuccugccccaccugccccggaaaagugugguccauugcucuaagauuuggagcugcaggaaaagaauuacaguugaguaccuccagcacauuguggaacagaaaaauggcaaagaaagagugcccauccucuggcauuuccugcagaaggaagcagagcugaggcugguaaaguuccugccugagauuuuggccuugcaaagggaucuagugaagcaguuccagaacguccagcaaguugaauacagcuccaucagaggcuuccucagcaagcacagcucagauggguugaggcagcugcuucacaacaggaucacagucuuucuguccacauggaacaaacugaggagaucgcuugagacgaacggugagaucaaccuacccaaagacuacugcagcacugacuuggaucuggacacugaguuugagauccucuugccacgccgacggggccugggccucugugcuaccgcucucgucagcuacuugauucgccuacacaaugaaauugucuacgccguggaaaaacucuccaaggaaaacaacagcuauuccguggaugccgccgaggucacugaacugcaugucaucaguuaugaaguggagcgggaccugacuccacugauucucuccaacugccaguaccagguggaggagggcagagagaccgugcaggaguucgaucuggagaagauucagcggcagaucgucagccgcuuccuccagggcaagccccggcugagccucaagggaauacccacucugguguacagacacgacuggaacuaugaacaucucuuuauggacaucaagaacaaaauggcacaggacucccuccccagcucggucauuagugccaucaguggacagcugcaguccuacagcgaugccugugaagugcugucugucguagaagucacucugggguuucugagcacagcugguggggauccaaacaugcagcugaauguguauacucaagacauccugcaaaugggugaucagacgauucacguguuaaaggccuuaaacagaugccaguuaaaacacaccauugcccucuggcaguuccugucugcucauaagucugaacagcugcugcggcugcacaaagagccauuuggggaaaucaguucaagguacaaagcggaucugagcccggaaaaugcuaagcuccucagcacauuccuaaaucagacuggccuagacgccuuccugcuagagcugcacgaaaugauaaucuugaaacuaaagaacccccaaacccaaaccgaggagcgcuuccgcccucaguggagccugagagacacucucguaaguuacaugcaaacuaaagaaagugaaauucuuccugaaauggcaucucaguucccagaagagauacugcucgccagcugugucucaguguggaaaacagcugcugugcugaaauggaaucgagaaaugagauagaauuauuuccucagcuaucuuuggaugacuuuggagagaagacuccucucuccucgucugcggcguggacuugaucauggacuggugccuuugcauucagaaggagagcugucagcguagcaccgaauucaagaccaaggcgugcuaccugagcugacagcuuuuugaaagccgagcuguuucugaaccauguacauacauguucugaaacuuucucaucauuuuaugaguacuguucauugagagaugacaaugaagauuagaugaaauuggaaauaaaccaacauuguuuacauuccaggagacuuguagcucagccacacacgcaguaaugaccugugcccguucgccucuggcacugcccaccccucuuuuuuuuuuucuucuaauucuguacucacaaaagagaaucucauuuucuucuuucuuccauucccuuaaauucugaguacuguacauauauuucuggguucccacgaugaugugaaaaacuaccagacuguuuuuugucuucucacaaagacaagaaaaaucagggcauuuugugagugccuuaagaucaaacuaacaagaucugacccucuccccucacagugagccacugccccacuucagaggguaagagccaaaagccucauugugaaaggcacuggacuuggaccagggacaccaucagggccuugguuuucucacgcauaaaauggagaguggauuaaucgccaaagauucuucugaucugacauuuugaaauugugagagaaacuagaugacuguaaacuuggucacaggccugguucuggcaguucuuugcggacuuuuuucuagcauuaugccaaauaaacaugcagucucagugugcucucgcauguaugaauaucuaguccuuucugugguucucagccaagacauaaaaacuaggacucagagcacauacaaaaccaguuauguuucggaaagagggaaaagaguccccgagcccggaucuugugcugcuuuucucacugacguguugccuuuuuucuuuacaaaaucugcuuugauacuuaggaccucucuggacuaauuucucuuccuagacagcucagcacagcuauugauauguuagaggcaguauccuuaauauucauucuaaaugaguuaacgacuuaacuugaaauugggccuaaggagugagaacuacaaaaauacaaaaugcuuguccaggacucagccaugcacaccuugagcagcgccggcaggaggcacggaaggaacugugcuccguucuccucacugucauggugccaccagugucugaugaagggcagagugacccagacugcaggcaguaacugacuucacacagucccuggcauuuagucaucugugauuguuuuaucacucuggacugugcagagccaccugccaccgagaucugcauuccgacugccuaugaacgggugugggggccgggggcuggcuugcugaagucuucaacuugcacucggagcuccuuugauaccucagagcuggcugucagguggcagcucacacccagacucacuggccacaccucagcagggggggagucgagugucagucucuuucugugaaggcuuuuuuuuuccuuuggccugggaauuuuucccauuuuuaugaagggguuuuaaauuguuucauuuugugugcugugcuucaaagccuuaacugucaaaucuugcauuaucuuguuuguacagaaauauacuggccuagcagaggcagaaaaaaaaaaaaaaaaaaaa

SEQ ID NO: 16 - RNA, 4616 nt, homo sapien
ggauuucauucucuugaccaugcgugugucaacggaggaggaauuaaaguuucugcagauggcucugugguccugcacuaggaaacugaaagcggcgucagaagcgcccgaggaagagguuuccuuaccgugggugcaccuugccuaccagcguuucagaagccgucugcagaacuuuuccagaauccugaccaucuacccucagguucuccacagccugauggaagcccguuggaaccaugagcuggcuggaugugagaugacccuggacgcauuugccgcaauggccugcacggagaugcugacaagaaacacccugaagcccaguccccaggcguggcuacaguuggugaagaaucuuuccaugccgcuggagcucaucugcuccgaugagcacaugcaaggcagcgggagccuggcccaggcugucaucaggggagucagagcccaguggagucggauuuucuccaccgcacucuucguggagcacgugcuccuaggaaccgagagccgcguccccgaguuacaggggcuggugaccgagcacgucuucuuacuagacaagugucuucgagagaacucugacgugaagacgcacgggccuuuugaggccgugaugcgcacucucugugaaugcaaggagacagccagcaagacccucagcagguuugggauucagccgugcuccaucugccugggagaugcaaaggaccccgucugucugcccugcgaccacgugcacugccugcgcugccucagggccugguuugccucagagcagaugauaugccccuacuguuuaacugccuugccagacgaauucucuccagcuguuucccaagcgcacagggaagccauugaaaagcaugcccgcuuccggcagaugugcaacaguuucuucguagaccugguguccaccauuugcuucaaggacaacgcuccgccugagaaggaagugauugagagccugcucucucuccucuucguccaaaaggggcgcuuaagagaugcugcccagagacacugugaacacacaaaaucucucucuccauucaaugauguuguggauaagacuccugucauccgcucagugauacugaaacugcuuuugaaguacagcuuucaugauguaaaagauuauauucaggaauauuugacccuguuaaaaaagaaagcauucauaacugaagauaaaacugaacuguacaugcucuucaucaacugccuggaggauucaauacuugagaagaccagugcuuacuccagaaaugaugaacugaaccaccuagaagaggaaggucguuuccuuaaggcauauucuccagcaagccggggccgagagccugccaacgaggccucgguugaauaccugcaagagguggcccggauccgccucugccucgacagagcugcagauuuccucucggagccugagggaggcccagagauggccaaggagaagcagugcuaccugcagcaagucaagcaguucuguauccggguggagaacgacuggcaccggguguaccuggugcggaagcucagcagccagcgggggauggaguucgugcagggccucuccaagcccggccgcccgcaccaguggguguuucccaaggacguugucaagcagcaggggcugcggcaggaccacccaggccagauggauagguaccugguguacggcgaugaauacaaggcucuccgugaugcuguggccaaagcuguccucgagugcaagccacugggcauuaagacugcucugaaggccugcaagaccccccaaagccagcagucagccuacuuccuguuaacacuguuuagagagguggcuauuuuguacagaucccacaaugcaagccuccaccccacgccagagcaaugugaagcugugagcaaauucauuggcgaaugcaagauccuuucaccuccugauaucagccguuuugcaacaucgcucguggacaauucugugccauuguugagggcggggccuagugacagcaaccuugauggaacggugacagaaauggccauucaugcugcagccguccuucuguguggacagaaugaacucuuggagccccuaaagaaucuggccuucuccccagccaccauggcgcaugcuuuucuuccaaccaugccugaagacuugcuggcucaagcucggagguggaagggucuggagcgaguccacugguacacuugucccaacggccauccuugcuccgugggagaguguggcaggccgauggaacagagcaucugcauugacugccaugcgccgauuggaggcauugaccacaaaccucgggacggcuuucaucuggucaaagacaaggcagacagaacgcagaccggccacgugcugggcaacccgcagcggagagacguggugacaugugaccgagggcugcccccaguggucuuccuccuuauccggcuacucacucacuuggcucugcuucugggagcgucccagaguucccaggcucugauaaacaucauuaagccuccagugagggauccaaaaggcuuucugcagcagcacauccugaaggaccuggagcaguuggccaagaugcugggacacagugccgacgagaccaucggcgugguccaccucguccugcgcaggcuucuccaagagcagcaccagcucucuagcagaaggcuuuuaaauuuugacacagaauugucaacuaaagaaaugaggaacaacugggaaaaggaaaucgcagcugugauuucuccugaacuggagcaucuagauaaaacccuucccaccaugaauaaucucaucagccaagauaagcguaucagcucuaacccuguggccaaaauaauauauggugacccagugaccuuccugccccaccugccccggaaaagugugguccauugcucuaagauuuggagcugcaggaaaagaauuacaguugaguaccuccagcacauuguggaacagaaaaauggcaaagaaagagugcccauccucuggcauuuccugcagaaggaagcagagcugaggcugguaaaguuccugccugagauuuuggccuugcaaagggaucuagugaagcaguuccagaacguccagcaaguugaauacagcuccaucagaggcuuccucagcaagcacagcucagauggguugaggcagcugcuucacaacaggaucacagucuuucuguccacauggaacaaacugaggagaucgcuugagacgaacggugagaucaaccuacccaaagacuacugcagcacugacuuggaucuggacacugaguuugagauccucuugccacgccgacggggccugggccucugugcuaccgcucucgucagcuacuugauucgccuacacaaugaaauugucuacgccguggaaaaacucuccaaggaaaacaacagcuauuccguggaugccgccgaggucacugaacugcaugucaucaguuaugaaguggagcgggaccugacuccacugauucucuccaacugccaguaccagguggaggagggcagagagaccgugcaggaguucgaucuggagaagauucagcggcagaucgucagccgcuuccuccagggcaagccccggcugagccucaagggaauacccacucugguguacagacacgacuggaacuaugaacaucucuuuauggacaucaagaacaaaauggcacaggacucccuccccagcucggucauuagugccaucaguggacagcugcaguccuacagcgaugccugugaagugcugucugucguagaagucacucugggguuucugagcacagcugguggggauccaaacaugcagcugaauguguauacucaagacauccugcaaaugggugaucagacgauucacguguuaaaggccuuaaacagaugccaguuaaaacacaccauugcccucuggcaguuccugucugcucauaagucugaacagcugcugcggcugcacaaagagccauuuggggaaaucaguucaagguacaaagcggaucugagcccggaaaaugcuaagcuccucagcacauuccuaaaucagacuggccuagacgccuuccugcuagagcugcacgaaaugauaaucuugaaacuaaagaacccccaaacccaaaccgaggagcgcuuccgcccucaguggagccugagagacacucucguaaguuacaugcaaacuaaagaaagugaaauucuuccugaaauggcaucucaguucccagaagagauacugcucgccagcugugucucaguguggaaaacagcugcugugcugaaauggaaucgagaaaugagauagaauuauuuccucagcuaucuuuggaugacuuuggagagaagacuccucucuccucgucugcggcguggacuugaucauggacuggugccuuugcauucagaaggagagcugucagcguagcaccgaauucaagaccaaggcgugcuaccugagcugacagcuuuuugaaagccgagcuguuucugaaccauguacauacauguucugaaacuuucucaucauuuuaugaguacuguucauugagagaugacaaugaagauuagaugaaauuggaaauaaaccaacauuguuuacauuc

SEQ ID NO: 17 - RNA, 5949 nt, homo sapien
guccccaggcguggcuacaguuggugaagaaucuuuccaugccgcuggagcucaucugcuccgaugagcacaugcaaggcagcgggagccuggcccaggcugucaucaggggagucagagcccaguggagucggauuuucuccaccgcacucuucguggagcacgugcuccuaggaaccgagagccgcguccccgaguuacaggggcuggugaccgagcacgucuucuuacuagacaagugucuucgagagaacucugacgugaagacgcacgggccuuuugaggccgugaugcgcacucucugugaaugcaaggagacagccagcaagacccucagcagguuugggauucagccgugcuccaucugccugggagaugcaaaggaccccgucugucugcccugcgaccacgugcacugccugcgcugccucagggccugguuugccucagagcagaugauaugccccuacuguuuaacugccuugccagacgaauucucuccagcuguuucccaagcgcacagggaagccauugaaaagcaugcccgcuuccggcagaugugcaacaguuucuucguagaccugguguccaccauuugcuucaaggacaacgcuccgccugagaaggaagugauugagagccugcucucucuccucuucguccaaaaggggcgcuuaagagaugcugcccagagacacugugaacacacaaaaucucucucuccauucaaugauguuguggauaagacuccugucauccgcucagugauacugaaacugcuuuugaaguacagcuuucaugauguaaaagauuauauucaggaauauuugacccuguuaaaaaagaaagcauucauaacugaagauaaaacugaacuguacaugcucuucaucaacugccuggaggauucaauacuugagaagaccagugcuuacuccagaaaugaugaacugaaccaccuagaagaggaaggucguuuccuuaaggcauauucuccagcaagccggggccgagagccugccaacgaggccucgguugaauaccugcaagagguggcccggauccgccucugccucgacagagcugcagauuuccucucggagccugagggaggcccagagauggccaaggagaagcagugcuaccugcagcaagucaagcaguucuguauccggguggagaacgacuggcaccggguguaccuggugcggaagcucagcagccagcgggggauggaguucgugcagggccucuccaagcccggccgcccgcaccaguggguguuucccaaggacguugucaagcagcaggggcugcggcaggaccacccaggccagauggauagguaccugguguacggcgaugaauacaaggcucuccgugaugcuguggccaaagcuguccucgagugcaagccacugggcauuaagacugcucugaaggccugcaagaccccccaaagccagcagucagccuacuuccuguuaacacuguuuagagagguggcuauuuuguacagaucccacaaugcaagccuccaccccacgccagagcaaugugaagcugugagcaaauucauuggcgaaugcaagauccuuucaccuccugauaucagccguuuugcaacaucgcucguggacaauucugugccauuguugagggcggggccuagugacagcaaccuugauggaacggugacagaaauggccauucaugcugcagccguccuucuguguggacagaaugaacucuuggagccccuaaagaaucuggccuucuccccagccaccauggcgcaugcuuuucuuccaaccaugccugaagacuugcuggcucaagcucggagguggaagggucuggagcgaguccacugguacacuugucccaacggccauccuugcuccgugggagaguguggcaggccgauggaacagagcaucugcauugacugccaugcgccgauuggaggcauugaccacaaaccucgggacggcuuucaucuggucaaagacaaggcagacagaacgcagaccggccaugugcugggcaacccgcagcggagagacguggugacaugugaccgagggcugcccccaguggucuuccuccuuauccggcuacucacucacuuggcucugcuucugggagcgucccagaguucccaggcucugauaaacaucauuaagccuccagugagggauccaaaaggcuuucugcagcagcacauccugaaggaccuggagcaguuggccaagaugcugggacacagugccgacgagaccaucggcgugguccaccucguccugcgcaggcuucuccaagagcagcaccagcucucuagcagaaggcuuuuaaauuuugacacagaauugucaacuaaagaaaugaggaacaacugggaaaaggaaaucgcagcugugauuucuccugaacuggagcaucuagauaaaacccuucccaccaugaauaaucucaucagccaagauaagcguaucagcucuaacccuguggccaaaauaauauauggugacccagugaccuuccugccccaccugccccggaaaagugugguccauugcucuaagauuuggagcugcaggaaaagaauuacaguugaguaccuccagcacauuguggaacagaaaaauggcaaagaaagagugcccauccucuggcauuuccugcagaaggaagcagagcugaggcugguaaaguuccugccugagauuuuggccuugcaaagggaucuagugaagcaguuccagaacguccagcaaguugaauacagcuccaucagaggcuuccucagcaagcacagcucagauggguugaggcagcugcuucacaacaggaucacagucuuucuguccacauggaacaaacugaggagaucgcuugagacgaacggugagaucaaccuacccaaagacuacugcagcacugacuuggaucuggacacugaguuugagauccucuugccacgccgacggggccugggccucugugcuaccgcucucgucagcuacuugauucgccuacacaaugaaauugucuacgccguggaaaaacucuccaaggaaaacaacagcuauuccguggaugccgccgaggucacugaacugcaugucaucaguuaugaaguggagcgggaccugacuccacugauucucuccaacugccaguaccagguggaggagggcagagagaccgugcaggaguucgaucuggagaagauucagcggcagaucgucagccgcuuccuccagggcaagccccggcugagccucaagggaauacccacucugguguacagacacgacuggaacuaugaacaucucuuuauggacaucaagaacaaaauggcacaggacucccuccccagcucggucauuagugccaucaguggacagcugcaguccuacagcgaugccugugaagugcugucugucguagaagucacucugggguuucugagcacagcugguggggauccaaacaugcagcugaauguguauacucaagacauccugcaaaugggugaucagacgauucacguguuaaaggccuuaaacagaugccaguuaaaacacaccauugcccucuggcaguuccugucugcucauaagucugaacagcugcugcggcugcacaaagagccauuuggggaaaucaguucaagguacaaagcggaucugagcccggaaaaugcuaagcuccucagcacauuccuaaaucagacuggccuagacgccuuccugcuagagcugcacgaaaugauaaucuugaaacuaaagaacccccaaacccaaaccgaggagcgcuuccgcccucaguggagccugagagacacucucguaaguuacaugcaaacuaaagaaagugaaauucuuccugaaauggcaucucaguucccagaagagauacugcucgccagcugugucucaguguggaaaacagcugcugugcugaaauggaaucgagaaaugagauagaauuauuuccucagcuaucuuuggaugacuuuggagagaagacuccucucuccucgucugcggcguggacuugaucauggacuggugccuuugcauucagaaggagagcugucagcguagcaccgaauucaagaccaaggcgugcuaccugagcugacagcuuuuugaaagccgagcuguuucugaaccauguacauacauguucugaaacuuucucaucauuuuaugaguacuguucauugagagaugacaaugaagauuagaugaaauuggaaauaaaccaacauuguuuacauuccaggagacuuguagcucagccacacacgcaguaaugaccugugcccguucgccucuggcacugcccaccccucuuuuuuuuuucuucuaauucuguacucacaaaagagaaucucauuuucuucuuucuuccauucccuuaaauucugaguacuguacauauauuucuggguucccacgaugaugugaaaaacuaccagacuguuuuuugucuucucacaaagacaagaaaaaucagggcauuuugugagugccuuaagaucaaacuaacaagaucugacccucuccccucacagugagccacugccccacuucagaggguaagagccaaaagccucauugugaaaggcacuggacuuggaccagggacaccaucagggccuugguuuucucacgcauaaaauggagaguggauuaaucgccaaagauucuucugaucugacauuuugaaauugugagagaaacuagaugacuguaaacuuggucacaggccugguucuggcaguucuuugcggacuuuuuucuagcauuaugccaaauaaacaugcagucucagugugcucucgcauguaugaauaucuaguccuuucugugguucucagccaagacauaaaaacuaggacucagagcacauacaaaaccaguuauguuucggaaagagggaaaagaguccccgagcccggaucuugugcugcuuuucucacugacguguugccuuuuuucuuuacaaaaucugcuuugauacuuaggaccucucuggacuaauuucucuuccuagacagcucagcacagcuauugauauguuagaggcaguauccuuaauauucauucuaaaugaguuaacgacuuaacuugaaauugggccuaaggagugagaacuacaaaaauacaaaaugcuuguccaggacucagccaugcacaccuugagcagcgccggcaggaggcacggaaggaacugugcuccguucuccucacugucauggugccaccagugucugaugaagggcagagugacccagacugcaggcaguaacugacuucacacagucccuggcauuuagucaucugugauuguuuuaucacucuggacugugcagagccaccugccaccgagaucugcauuccgacugccuaugaacgggugugggggccgggggcuggcuugcugaagucuucaacuugcacucggagcuccuuugauaccucagagcuggcugucagguggcagcucacacccagacucacuggccacaccucagcagggggggagucgagugucagucucuuucugugaaggcuuuuuuuuuccuuuggccugggaauuuuucccauuuuuaugaagggguuuuaaauuguuucauuuugugugcugugcuucaaagccuuaacugucaaaucuugcauuaucuuguuuguacagaaauauacuggccuagcagaggcaaaaaaaaaaaaaaugaauuuuauuuuacuugucacaccugucuuaauaaacuggaguuuugcugcuaaaaaaaaaaaaaaaaaaaaaaaaaaaaaaaaaaaaaaaaaaaaaaaaaaaaaaaaaaaaaaaaaaaaaaaaaaaaaaaaaaaaaaaaaaaaaaaaaaaaaaaaaaaaaaaaaaaaaaaaaaaaaaaaaaaaaaaaaaaaaaaaaaaaaa

SEQ ID NO: 18 - RNA, 5705 nt, homo sapien
gaaucuuuccaugccgcuggagcucaucugcuccgaugagcacaugcaaggcagcgggagccuggcccaggcugucaucaggggagucagagcccaguggagucggauuuucuccaccgcacucuucguggagcacgugcuccuaggaaccgagagccgcguccccgaguuacaggggcuggugaccgagcacgucuucuuacuagacaagugucuucgagagaacucugacgugaagacgcacgggccuuuugaggccgugaugcgcacucucugugaaugcaaggagacagccagcaagacccucagcagguuugggauucagccgugcuccaucugccugggagaugcaaaggaccccgucugucugcccugcgaccacgugcacugccugcgcugccucagggccugguuugccucagagcagaugauaugccccuacuguuuaacugccuugccagacgaauucucuccagcuguuucccaagcgcacagggaagccauugaaaagcaugcccgcuuccggcagaugugcaacaguuucuucguagaccugguguccaccauuugcuucaaggacaacgcuccgccugagaaggaagugauugagagccugcucucucuccucuucguccaaaaggggcgcuuaagagaugcugcccagagacacugugaacacacaaaaucucucucuccauucaaugauguuguggauaagacuccugucauccgcucagugauacugaaacugcuuuugaaguacagcuuucaugauguaaaagauuauauucaggaauauuugacccuguuaaaaaagaaagcauucauaacugaagauaaaacugaacuguacaugcucuucaucaacugccuggaggauucaauacuugagaagaccagugcuuacuccagaaaugaugaacugaaccaccuagaagaggaaggucguuuccuuaaggcauauucuccagcaagccggggccgagagccugccaacgaggccucgguugaauaccugcaagagguggcccggauccgccucugccucgacagagcugcagauuuccucucggagccugagggaggcccagagauggccaaggagaagcagugcuaccugcagcaagucaagcaguucuguauccggguggagaacgacuggcaccggguguaccuggugcggaagcucagcagccagcgggggauggaguucgugcagggccucuccaagcccggccgcccgcaccaguggguguuucccaaggacguugucaagcagcaggggcugcggcaggaccacccaggccagauggauagguaccugguguacggcgaugaauacaaggcucuccgugaugcuguggccaaagcuguccucgagugcaagccacugggcauuaagacugcucugaaggccugcaagaccccccaaagccagcagucagccuacuuccuguuaacacuguuuagagagguggcuauuuuguacagaucccacaaugcaagccuccaccccacgccagagcaaugugaagcugugagcaaauucauuggcgaaugcaagauccuuucaccuccugauaucagccguuuugcaacaucgcucguggacaauucugugccauuguugagggcggggccuagugacagcaaccuugauggaacggugacagaaauggccauucaugcugcagccguccuucuguguggacagaaugaacucuuggagccccuaaagaaucuggccuucuccccagccaccauggcgcaugcuuuucuuccaaccaugccugaagacuugcuggcucaagcucggagguggaagggucuggagcgaguccacugguacacuugucccaacggccauccuugcuccgugggagaguguggcaggccgauggaacagagcaucugcauugacugccaugcgccgauuggaggcauugaccacaaaccucgggacggcuuucaucuggucaaagacaaggcagacagaacgcagaccggccaugugcugggcaacccgcagcggagagacguggugacaugugaccgagggcugcccccaguggucuuccuccuuauccggcuacucacucacuuggcucugcuucugggagcgucccagaguucccaggcucugauaaacaucauuaagccuccagugagggauccaaaaggcuuucugcagcagcacauccugaaggaccuggagcaguuggccaagaugcugggacacagugccgacgagaccaucggcgugguccaccucguccugcgcaggcuucuccaagagcagcaccagcucucuagcagaaggcuuuuaaauuuugacacagaauugucaacuaaagaaaugaggaacaacugggaaaaggaaaucgcagcugugauuucuccugaacuggagcaucuagauaaaacccuucccaccaugaauaaucucaucagccaagauaagcguaucagcucuaacccuguggccaaaauaauauauggugacccagugaccuuccugccccaccugccccggaaaagugugguccauugcucuaagauuuggagcugcaggaaaagaauuacaguugaguaccuccagcacauuguggaacagaaaaauggcaaagaaagagugcccauccucuggcauuuccugcagaaggaagcagagcugaggcugguaaaguuccugccugagauuuuggccuugcaaagggaucuagugaagcaguuccagaacguccagcaaguugaauacagcuccaucagaggcuuccucagcaagcacagcucagauggguugaggcagcugcuucacaacaggaucacagucuuucuguccacauggaacaaacugaggagaucgcuugagacgaacggugagaucaaccuacccaaagacuacugcagcacugacuuggaucuggacacugaguuugagauccucuugccacgccgacggggccugggccucugugcuaccgcucucgucagcuacuugauucgccuacacaaugaaauugucuacgccguggaaaaacucuccaaggaaaacaacagcuauuccguggaugccgccgaggucacugaacugcaugucaucaguuaugaaguggagcgggaccugacuccacugauucucuccaacugccaguaccagguggaggagggcagagagaccgugcaggaguucgaucuggagaagauucagcggcagaucgucagccgcuuccuccagggcaagccccggcugagccucaagggaauacccacucugguguacagacacgacuggaacuaugaacaucucuuuauggacaucaagaacaaaauggcacaggacucccuccccagcucggucauuagugccaucaguggacagcugcaguccuacagcgaugccugugaagugcugucugucguagaagucacucugggguuucugagcacagcugguggggauccaaacaugcagcugaauguguauacucaagacauccugcaaaugggugaucagacgauucacguguuaaaggccuuaaacagaugccaguuaaaacacaccauugcccucuggcaguuccugucugcucauaagucugaacagcugcugcggcugcacaaagagccauuuggggaaaucaguucaagguacaaagcggaucugagcccggaaaaugcuaagcuccucagcacauuccuaaaucagacuggccuagacgccuuccugcuagagcugcacgaaaugauaaucuugaaacuaaagaacccccaaacccaaaccgaggagcgcuuccgcccucaguggagccugagagacacucucguaaguuacaugcaaacuaaagaaagugaaauucuuccugaaauggcaucucaguucccagaagagauacugcucgccagcugugucucaguguggaaaacagcugcugugcugaaauggaaucgagaaaugagauagaauuauuuccucagcuaucuuuggaugacuuuggagagaagacuccucucuccucgucugcggcguggacuugaucauggacuggugccuuugcauucagaaggagagcugucagcguagcaccgaauucaagaccaaggcgugcuaccugagcugacagcuuuuugaaagccgagcuguuucugaaccauguacauacauguucugaaacuuucucaucauuuuaugaguacuguucauugagagaugacaaugaagauuagaugaaauuggaaauaaaccaacauuguuuacauuccaggagacuuguagcucagccacacacgcaguaaugaccugugcccguucgccucuggcacugcccaccccucuuuuuuuuuuucuucuaauucuguacucacaaaagagaaucucauuuucuucuuucuuccauucccuuaaauucugaguacuguacauauauuucuggguucccacgaugaugugaaaaacuaccagacuguuuuuugucuucucacaaagacaagaaaaaucagggcauuuugugagugccuuaagaucaaacuaacaagaucugacccucuccccucacagugagccacugccccacuucagaggguaagagccaaaagccucauugugaaaggcacuggacuuggaccagggacaccaucagggccuugguuuucucacgcauaaaauggagaguggauuaaucgccaaagauucuucugaucugacauuuugaaauugugagagaaacuagaugacuguaaacuuggucacaggccugguucuggcaguucuuugcggacuuuuuucuagcauuaugccaaauaaacaugcagucucagugugcucucgcauguaugaauaucuaguccuuucugugguucucagccaagacauaaaaacuaggacucagagcacauacaaaaccaguuauguuucggaaagagggaaaagaguccccgagcccggaucuugugcugcuuuucucacugacguguugccuuuuuucuuuacaaaaucugcuuugauacuuaggaccucucuggacuaauuucucuuccuagacagcucagcacagcuauugauauguuagaggcaguauccuuaauauucauucuaaaugaguuaacgacuuaacuugaaauugggccuaaggagugagaacuacaaaaauacaaaaugcuuguccaggacucagccaugcacaccuugagcagcgccggcaggaggcacggaaggaacugugcuccguucuccucacugucauggugccaccagugucugaugaagggcagagugacccagacugcaggcaguaacugacuucacacagucccuggcauuuagucaucugugauuguuuuaucacucuggacugugcagagccaccugccaccgagaucugcauuccgacugccuaugaacgggugugggggccgggggcuggcuugcugaagucuucaacuugcacucggagcuccuuugauaccucagagcuggcugucagguggcagcucacacccagacucacuggccacaccucagcagggggggagucgagugucagucucuuucugugaaggcuuuuuuuuuccuuuggccugggaauuuuucccauuuuuaugaagggguuuuaaauuguuucauuuugugugcugugcuucaaagccuuaacugucaaaucuugcauuaucuuguuuguacagaaauauacuggccuagcagaggc

SEQ ID NO: 19 - RNA, 21056 nt, homo sapien
cagcgcgcggcaggcggcgagcucgggggccgcagaaaaugaaacugaagccguggucacgugacaggacauguaguauauagcaggcugccagcgacuccugcucuugcuucuggaucugcagggcagucccagcaggacccauggaguguccuucgugccagcaugucuccaaggaggaaacccccaaguucugcagccagugcggagagaggcugccuccugcagcccccauagcagauucugagaacaauaacuccacaauggcgucggccucggagggugaaauggagugugggcaggagcugaaggaggaagggggcccgugcuuguucccgggcucagacaguuggcaagaaaaccccgaggagcccuguuccaaagccuccuggaccguccaagaaagcaaaaagaagaaaaggaagaagaaaaagaaggggaacaaguccgcuuccucagagcuggcuuccuugccccuuucuccugccagccccugucaccugacuuugcuuucaaacccguggccucaggacacagcccugccccacagccaagcccagcagaguggccccacuggccagccgagccagcccccaggcacagccaccacgccacuggagggugacggccucuccgcgcccaccgagguuggcgacagcccccugcaggcccaggcuuugggagaggcaggaguggccacaggaagugaggcucagagcagcccgcaauuccaggaccacacggaaggggaggaccaggacgcuuccauccccucugggggcagaggccugucccaggaggggaccgguccccccaccucugcuggugaaggccauucuaggacugaagaugcugcccaggagcuccuguugccugagucaaaaggaggcagcucugagcccgggacagaacugcagaccaccgagcaacaggcaggggccucagccucuauggcaguugaugcuguagcugagccagccaaugcaguuaaaggggccgggaaggaaaugaaagagaagacccagagaaugaaacagccaccagcaaccacuccuccuuucaaaacacacugccaggaagcugagaccaagaccaaggacgagauggcugcugcugaagaaaaagucgguaagaaugaacaaggggagccugaagaccucaagaagccagaggggaagaacagaagugcagcugcugugaaaaacgagaaggagcaaaaaaaccaggaagcagauguccaggaagugaaggcaagcacgcugagcccggguggaggagucaccguguucuuccacgccaucaucucucuucauuucccauucaauccugaccuccauaaagucuucaucagaggaggagaagaauuuggggagucaaaaugggacagcaauaucugugagcugcacuacaccagagacuugggucaugaccgcguucuuguugaaggcauugucugcauuuccaagaagcaccuagauaaauacauuccuuacaaguacgucauuuauaauggggaaucuuuugaguaugaguucauuuacaagcaccagcagaagaagggcgaguacgucaaccgcugucuguucauaaaaucuucacuucugggcucaggagacuggcaucaguacuaugacauaguuuauaugaagccucaugggagacuccagaaagucaugaaccacaucacagacgggccgaggaaggaccuggugaaggggaagcagauugccgcugcgcucaugcuggacagcaccuucagcauccugcagaccugggacaccaucaaccugaacagcuucuucacccaguucgagcaguuuugcuuuguccugcaacagccuaugauuuaugaaggacaggcacagcuguggaccgauuugcaguacagggagaaagaggugaagagauaccuguggcaacaucugaaaaaacacgugguaccauugccggacggaaaaagcacggacuuuuugccuguggacugcccagugaggaguaaacugaaaacaggccugauuguccuuuuuguaguggaaaaaauugagcuuuuauuagaaggcagccuggacugguugugucaccuccuaaccucagaugccagcucaccagaugaguuucaccgugaccuaagccacauccuugggauaccucagagcuggcggcuguaccuggugaaccugugccaaagaugcauggacacaaggacguacaccuggcugggcgcccugccuguccugcacugcuguauggagcuggccccgcggcacaaggaugccuggagacagccugaggacaccugggccgcucuggagggacucuccuucucaccguuccgggaacaaaugcuagauacgaguucccuacuucaguuuaugagagagaagcagcauuugcugagcauagacgagccucucuuccgguccugguuuagucugcuaccucugagucaccugguuauguauauggaaaacuucauugagcaccugggucguuuuccugcucauauccuggacugucuuucagggauuuacuaccggcuuccgggacuugagcaagucuugaauacgcaggauguucaggauguucagaacguucagaacauuuuagaaaugcuguugcgacuccuggacacuuaccgggacaagauucccgaggaggccuugucaccauccuaccugacugugugucugaaacugcaugaagccaucugcagcagcacaaagcuacuuaaguuuuacgagcugccagccuuaucugccgagauugucugcagaaugauuagacuucuaucucugguggauucugcaggacagagagaugaaacuggaaauaauucaguccaaacagucuuccaagggacccuugcugcuacgaaaagguggcuccgagaaguuuuuacaaagaacaugcucacaucuucaggugccucauucacauacgucaaggaaauugaggucuggaggcggcugguggaaauccaauuccccgcggagcauggcuggaaggagucguugcugggagacauggaauggaggcucacaaaggaggaaccccucucccagaucacugccuacugcaauaguugcugggacaccaaaggcuuagaggacaguguggccaagaccuucgagaaaugcaucauugaagccgugagcucagccugccagucucagaccaguauccuucagggguucucuuacucugauuugcggaaauuuggcaucgucuugucugcugugaucacuaaguccuggccuaggaccgcggacaacuucgaugacauuuuaaagcaucugcucacguuggcagaugucaagcacgucuucagauuguguggaaccgacgagaaaauacuagcaaaugucacagaggaugccaagaggcugauagcuguugccgacucuguguugacgaaaguuguuggugaccuccuaaguggcacgauuuuaguuggacaacuggagcugauuauaaagcacaagaaucaguuucuugacaucuggcaacugagggaaaaaagucuuucaccccaggaugaacaaugugcuguggaggaagcacuggauuggagaagggaggaacuguuacuucuaaagaaagagaaaagauguguugauagucuccugaagaugugugggaacgugaaacaucugauacaaguggacuuuggagugcuugcaguaagacacucacaagaccucagcaguaaaagauuaaaugacaccgugacagugagacuguccaccuccucgaacucgcagagggcaacgcauuaccaccugagcucccagguccaagaaauggcugggaagauagacuugcucagagacagccacaucuuccagcucuucuggcgggaagccgcagagccgcugagugagccuaaggaggaccaggaagccgcagaguugcugagugagcccgaagaagaaucagaaaggcacauccuugagcuugaagagguguaugacuauuuguaucagccuucuuacagaaaguucauuaaguugcaccaggaucuaaagucaggagaggucacccuugcagagauugaugucaucuucaaggacuuugugaauaaauacacggaccuggauucagaacuuaagaucaugugcaccguggaccaccaggaccaaagagauuggaucaaggaccgagucgaacagaucaaggaauaccaucaccugcaccaggcuguccacgcagccaaggucaucuugcaggucaaagagagccugggacugaacggugacuucaguguucucaacacuuuacuaaauuuuacugauaacuucgacgacuuucgccgugaaacacuggaccagaucaaccaggagcucauccaggccaaaaagcugcuccaggacaucagcgaggcccggugcaaggggcugcaggcucugucccugagaaaggaguucaucugcuggguccgggaggcucuuggaggcaucaaugagcugaagguguuuguggaccuggccuccaucucagcgggggagaaugacauugauguggaccggguggccugcuuccaugacgcugugcagggcuacgcaucccugcuauuuaagcuggaccccagcguggacuucagugcauucaugaagcaucugaaaaagcuguggaaggcucuggauaaggaccaguaccugcccaggaaacugugugacuccgccaggaacuuggaauggcugaagacugugaaugagagucaugggucuguggaacgcucaucccugacccuggccacggccaucaaccaaagaggcaucuaugugauccaggcgcccaaagguggccaaaagauuuccccagacacgguucugcacuugauccuuccugagagcccuggcagccacgaggagucacgagaguacucuuuagaggaggugaaggagcuuuugaacaaguugaugcugaugucuggcaagaaggaucguaacaacacggaaguggagagguuuucagaggucuucugcagugugcagaggcucagccaggccuucaucgaccugcacucugcugggaauaugcuguucaggacguggaucgccauggccuacugcucccccaagcagggugugucccuccaaauggacuuuggcuuggaccuggugacggagcuuaaagaagguggagaugucacugagcugcuggcagcccucugcaggcagauggagcacuuccuugacagcuggaagagauuugugacccagaagcgaauggagcacuuuuaccugaacuucuacacggcagagcagcugguuuaccugagcacugagcucaggaagcagcccccgagugaugccgcccuaacgaugcuauccuucaucaaaagcaacugcacccugagggaugucuuaagggccucuguggggugugggagugaggccgccagguaccgcaugaggagagucauggaagagcucccgcugaugcucuuaucagaguucagccugguggacaagcugaggaucaucauggagcaguccaugaggugccuuccugccuuccugcccgacugccucgaccuagagacccuuggccacugucuggcucaccuggcagggaugggugggucucccguggagcguugucucccgagaggucugcaggucggccagcccaaccucgucgucuguggccacuccgagguguugccagccgcccuggcugucuacaugcaaaccccaagccagccccugcccacuuacgaugaggugcugcucugcaccccggcaaccaccuuugaggagguggcacuguugcugcgccgcugccugacccugggcucccuggggcacaaggucuacagccugcuguucgcagaucagcugagcuacgagguggcacgccaagcggaggagcuuuuccacaaucugugcacgcagcagcaccgagaagacuaccagcucgucauggucugugauggggacugggagcacugcuaccuccccucugccuucagccagcacaaggucuucgucaccccccaggcaccccucgaggccauccaagccuaccuggcaggucacuaccgggucccgaagcagacccugucggcggcagccguguucaaugaccggcuguguguugggaucguggccucggagcgagcagguguuggaaagucucuguacgugaagagguugcacgacaaaaugaagaugcaguuaaacgugaaaaaugugccucugaaaacaauucgacugaucgacccucagguggaugagagccgaguccugggcgcccugcugcccuuccuggaugcgcaguaucagaagguccccgugcucuuucaccuggacgugaccuccucagugcagacuggaauuuggguguuucuuuucaagcuccucauuuuacaauacuuaauggauauaaaugggaaaauguggcuucggaaccccugccauuuguauaucguugaaauccuggaaaggaggacgucagugccgucgaggagcucuucagcgcugcguacacguguaccccaguucaguuuucuugacaucuucccaaaagucaccugcaggccucccaaagaggugauagacauggagcugagugcccugaggagugacacagagccugggauggaucugugggaguucugcagcgaaacuuuccaaagaccuuaccaguauuuaagacgauucaaucaaaaccaagaccuagacacguuucaguaucaagaaggcucugucgaaggcaccccggaggaaugccuccagcauuuccuguuucacugcgggguaauaaacccauccuggucagagcuucggaacuuugcucgguuccugaauuaucagcucagagauugugaggccucucucuucugcaauccgaguuuuauuggcgacacacugaggggcuucaagaaguucguggugaccuucaugaucuuuauggcaagagauuuugccacaccaucacuccacaccucugaccaaagcccggggaagcacauggucaccauggaugggguuagggaagaagaucuagcgcccuucucccuccggaagaggugggagucggagccucacccauacguuuucuucaaugacgaccacacaaccaugacauucaucggcuuccaucugcagcccaacaucaacggcagugucgaugccaucagucacuugacugggaaggucaucaagagagacgucaugaccagggaccuguaccagggccugcugcuccagagggugcccuucaaugucgacuuugauaaacugcccagacacaagaaacuugagaggcucugccugaccuuagggaucccccaggccaccgaccccgacaaaacguaugagcucacaaccgacaauaugcuuaaaauccuugccaucgagaugcgguuccggugugggaucccgguuaucaucaugggagaaacuggcugugggaaaaccaggcuuauuaaauuccuuagcgaccugcggcguggugguaccaaugcugacaccauaaagcuggucaaggugcacggaggaacaacugcagacaugaucuacuccagagucagggaggcugaaaauguggccuucgccaauaaggaccaacaucaguuggacaccaucuuguuuuuugaugaagccaacacaacggaagcuauaagcuguaucaaagaaguccugugugaucauaugguggauggccagccucuggcugaggacucuggccugcauauuauagcugccugcaauccauaccggaagcacucugaggagaugaucugccguuuggagucagcugguuugggcuacaggguuaguauggaggagacggccgacaggcugggcuccauuccucugaggcagcugguauaccggguccaugcucugcccccgagccugauuccucuggugugggacuuuggacaacugagugacguugcugaaaagcucuacauccagcagauuguccagagacugguugaguccaucagccuagaugaaaacgggacucgcgugaucacagaaguccucugcgccucucaggguuucaugaggaaaacagaagaugagugcagcuuugucagccucagggacguggagcgcugugugaaaguuuucaggugguuccacgagcacagcgcgaugcucuuagcgcagcugaaugccuuucucuccaaguccagcgucagcaaaaaucacaccgagagagaucccguccucuggucguugaugcuggccaucgggguguguuaccaugccucuuuagaaaagaaagacucauaucggaaagccaucgccagguucuuuccgaaaccguaugacgacagcaggcugcuucuggaugaaauaacacgggcacaggaucuuuuucuggacggcguaccucugaggaaaaccaucgccaagaacuuggccuugaaggagaacgucuucaugauggucgucugcaucgagcugaagauuccccucuuccugguggggaagcccggcagcuccaagucucucgccaagaccaucguggcagacgccaugcagggcccggcugccuacucagaucucuuccgcagccugaagcagguccaccugguguccuuccagugcagcccgcacuccaccccacagggcaucaucagcaccuuccggcagugcgcccgcuuucagcaggggaaggaccugcagcaguacgucucuguggugguguuagaugagguggggcuggcggaagacucacccaaaaugccccugaagacucugcacccgcugcuggaagacggaugcauugaagacgaucccgccccccacaaaaaggucggcuucgugggcaucuccaacugggcccuugacccugccaagaugaaccggggcauuuuugugucacguggcagccccaacgagacagagcucauagagagcgccaagggcaucugcuccucagacauccucguccaggaccgaguccaaggguacuuugcguccuuugccaaagccuacgaaacgguguguaagcgccaggacaaggaauucuucgggcuucgugacuacuacagccucaucaaaauggucuuugcugcagcaaaggcuucaaauagaaagccuuccccgcaagacauugcacaggcuguccuuaggaacuucaguggcaaggaugacauccaagcuuuggacaucuuucuggccaauuugcccgaggccaagugcucagaggaagucagccccaugcagcugaucaaacagaacaucuuugggccuucucagaaggugccggguggagagcaggaagaugcugagucccgcuacuuacucgugcugaccaaaaacuacguggcacugcagauccugcagcagacauucuucgagggggaccagcagccggagauuauuuuugguucugguuuccccaaggaccaagaguacacccagcucugcagaaacaucaaucgugugaagaucugcauggaaacaggcaagaugguguugcuucucaaccugcagaaccucuacgagagccucuacgacgcacucaaccaguacuacguccaccucggcggccagaaguacguggaccucggucuggggacccaccgcgucaaaugucggguucaccccaacuuccgccugauugucauugaagagaaagacgucguguacaaacacuuucccaucccccucauuaaccggcuggagaagcacuaucuggauaucaacacggugcuggagaaauggcagaagagcaucguggaggagcucugugcguggguggagaaguucaucaaugucaaagcacaucauuuccagaagaggcacaaauacagccccucugacgucuucaucggcuaccacucggacgccugcgcgucuguggugcugcaggucauagagaggcaggguccccgggccuugacggaggaacuucaccagaaggugucugaggaggccaaaucgauccugcugaacugcgcuacgcccgaugccgugguccggcugagcgccuacucgcugggcggguucgcagcggaguggcugucgcaggaguacuuucacagacagaggcacaacuccuuugcagauuuccuucaggcacaccugcacacggcagaccuggagcgccacgccaucuucacagagaucaccacuuucuccaggcugcuaacaagucacgacugugaaauuuuagaaucagaggucacaggcagggcuccgaaacccacacuccuguggcugcagcaguuugacaccgaguacucauuccucaaagaaguccgaaacuguuuaacgaauacagccaaauguaaaauccucauuuuucagacagauuuugaagauggaauccguagcgcccagcucauugccucagcuaaguauucuguuauaaaugaaaucaacaaaauacgagaaaaugaggaccguaucuucgucuauuucaucacaaaacugucccgggugggaagaggaacagccuaugugggcuuccacggagggcuguggcagucuguccacaucgaugaccuccggagauccacccucaugguuucugaugugaccaggcugcagcaugucaccaucagccagcuguucgcgcccggagacuugccugagcugggcuuggaacaccgggcggaagacggccaugaggaggcgauggagacggaggccagcacaucaggggagguggcagagguggcagaggaggccauggaaacagaaaguucugagaaggugggaaaggaaaccucugaacucggaggcagugaugugucgauccuggacaccaccaggcugcugagaagcugugugcagagcgccgugggcaugcucagagaccagaacgagagcugcacgcgcaauaugcggaggguggugcuccuccugggccucuugaaugaggaugacgcgugccacgccucuuucuugcggguauccaagaugcgccucagugucuuuuuaaagaagcaagaagagagccaguuucacccucuggagugguuggcaagggaagccugcaaccaggacgcucuccaggaggcgggcacauucaggcacacccucuggaagcggguccaaggugcugucaccccucugcuggcgagcaugauaucauucaucgacagagacggcaaccuagaguuacugaccaggccagauacuccgcccugggcaagagaucuuuggauguuuauuuucagugacacgaugcuucugaacauuccucuugugaugaauaaugaaagacauaaaggugagauggccuacaucguggugcagaaccacaugaaccuuuccgagaacgcuuccaacaacgucccuuucagcuggaaaaucaaggacuaucuggaggagcuguggguccaggcucaguacaucacagacgcagaaggacugcccaagaaguucguggacaucuuucagcagacuccucugggcagguuucuugcccagcuccauggagagccgcagcaggaacuucuucaguguuacuugaaggauuucauucucuugaccaugcgugugucaacggaggaggaauuaaaguuucugcagauggcucugugguccugcacuaggaaacugaaagcggcgucagaagcgcccgaggaagagguuuccuuaccgugggugcaccuugccuaccagcguuucagaagccgucugcagaacuuuuccagaauccugaccaucuacccucagcuucuccacagccugauggaagcccguuggaaccaugagcuggcuggaugugagaugacccuggacgcauuugccgcaauggccugcacggagaugcugacaagaaacacccugaagcccaguccccaggcguggcuacaguuggugaagaaucuuuccaugccgcuggagcucaucugcuccgaugagcacaugcaaggcagcgggagccuggcccaggcugucaucagggaagucagagcccaguggagucggauuuucuccaccgcacucuucguggagcacgugcuccuaggaaccgagagccgcguccccgaguuacaggggcuggugaccgagcacgucuucuuacuagacaagugucuucgagagaacucugacgugaagacgcacgggccuuuugaggccgugaugcgcacucucugugaaugcaaggagacagccagcaagacccucagcagguuugggauucagccgugcuccaucugccugggagaugcaaaggaccccgucugucugcccugcgaccacgugcacugccugcgcugccucagggccugguuugccucagagcagaugauaugccccuacuguuuaacugccuugccagacgaauucucuccagcuguuucccaagcgcacagggaagccauugaaaagcaugcccgcuuccggcagaugugcaacaguuucuucguagaccugguguccaccauuugcuucaaggacaacgcuccgccugagaaggaagugauugagagccugcucucucuccucuucguccaaaaggggcgcuuaagagaugcugcccagagacacugugaacacacaaaaucucucucuccauucaaugauguuguggauaagacuccugucauccgcucagugauacugaaacugcuuuugaaguacagcuuucaugauguaaaagauuauauucaggaauauuugacccuguuaaaaaagaaagcauucauaacugaagauaaaacugaacuguacaugcucuucaucaacugccuggaggauucaauacuugagaagaccagugcuuacuccagaaaugaugaacugaaccaccuagaagaggaaggucguuuccuuaaggcauauucuccagcaagccggggccgagagccugccaacgaggccucgguugaauaccugcaagagguggcccggauccgccucugccucgacagagcugcagauuuccucucggagccugagggaggcccagagauggccaaggagaagcagugcuaccugcagcaagucaagcaguucuguauccggguggagaacgacuggcaccggguguaccuggugcggaagcucagcagccagcgggggauggaguucgugcagggccucuccaagcccggccgcccgcaccaguggguguuucccaaggacguugucaagcagcaggggcugcggcaggaccacccaggccagauggauagguaccugguguacggcgaugaauacaaggcucuccgugaugcuguggccaaagcuguccucgagugcaagccacugggcauuaagacugcucugaaggccugcaagaccccccaaagccagcagucagccuacuuccuguuaacacuguuuagagagguggcuauuuuguacagaucccacaaugcaagccuccaccccacgccagagcaaugugaagcugugagcaaauucauuggcgaaugcaagauccuuucaccuccugauaucagccguuuugcaacaucgcucguggacaauucugugccauuguugagggcggggccuagugacagcaaccuugauggaacggugacagaaauggccauucaugcugcagccguccuucuguguggacagaaugaacucuuggagccccuaaagaaucuggccuucuccccagccaccauggcgcaugcuuuucuuccaaccaugccugaagacuugcuggcucaagcucggagguggaagggucuggagcgaguccacugguacacuugucccaacggccauccuugcuccgugggagaguguggcaggccgauggaacagagcaucugcauugacugccaugcgccgauuggaggcauugaccacaaaccucgggacggcuuucaucuggucaaagacaaggcagacagaacgcagaccggccacgugcugggcaacccgcagcggagagacguggugacaugugaccgagggcugcccccaguggucuuccuccuuauccggcuacucacucacuuggcucugcuucugggagcgucccagaguucccaggcucugauaaacaucauuaagccuccagugagggauccaaaaggcuuucugcagcagcacauccugaaggaccuggagcaguuggccaagaugcugggacacagugccgacgagaccaucggcgugguccaccucguccugcgcaggcuucuccaagagcagcaccagcucucuagcagaaggcuuuuaaauuuugacacagaauugucaacuaaagaaaugaggaacaacugggaaaaggaaaucgcagcugugauuucuccugaacuggagcaucuagauaaaacccuucccaccaugaauaaucucaucagccaagauaagcguaucagcucuaacccuguggccaaaauaauauauggugacccagugaccuuccugccccaccugccccggaaaagugugguccauugcucuaagauuuggagcugcaggaaaagaauuacaguugaguaccuccagcacauuguggaacagaaaaauggcaaagaaagagugcccauccucuggcauuuccugcagaaggaagcagagcugaggcugguaaaguuccugccugagauuuuggccuugcaaagggaucuagugaagcaguuccagaacguccagcaaguugaauacagcuccaucagaggcuuccucagcaagcacagcucagauggguugaggcagcugcuucacaacaggaucacagucuuucuguccacauggaacaaacugaggagaucgcuugagacgaacggugagaucaaccuacccaaagacuacugcagcacugacuuggaucuggacacugaguuugagauccucuugccacgccgacggggccugggccucugugcuaccgcucucgucagcuacuugauucgccuacacaaugaaauugucuacgccguggaaaaacucuccaaggaaaacaacagcuauuccguggaugccgccgaggucacugaacugcaugucaucaguuaugaaguggagcgggaccugacuccacugauucucuccaacugccaguaccagguggaggagggcagagagaccgugcaggaguucgaucuggagaagauucagcggcagaucgucagccgcuuccuccagggcaagccccggcugagccucaagggaauacccacucugguguacagacacgacuggaacuaugaacaucucuuuauggacaucaagaacaaaauggcacaggacucccuccccagcucggucauuagugccaucaguggacagcugcaguccuacagcgaugccugugaagugcugucugucguagaagucacucugggguuucugagcacagcugguggggauccaaacaugcagcugaauguguauacucaagacauccugcaaaugggugaucagacgauucacguguuaaaggccuuaaacagaugccaguuaaaacacaccauugcccucuggcaguuccugucugcucauaagucugaacagcugcugcggcugcacaaagagccauuuggggaaaucaguucaagguacaaagcggaucugagcccggaaaaugcuaagcuccucagcacauuccuaaaucagacuggccuagacgccuuccugcuagagcugcacgaaaugauaaucuugaaacuaaagaacccccaaacccaaaccgaggagcgcuuccgcccucaguggagccugagagacacucucguaaguuacaugcaaacuaaagaaagugaaauucuuccugaaauggcaucucaguucccagaagagauacugcucgccagcugugucucaguguggaaaacagcugcugugcugaaauggaaucgagaaaugagauagaauuauuuccucagcuaucuuuggaugacuuuggagagaagacuccucucuccucgucugcggcguggacuugaucauggacuggugccuuugcauucagaaggagagcugucagcguagcaccgaauucaagaccaaggcgugcuaccugagcugacagcuuuuugaaagccgagcuguuucugaaccauguacauacauguucugaaacuuucucaucauuuuaugaguacuguucauugagagaugacaaugaagauuagaugaaauuggaaauaaaccaacauuguuuacauuccaggagacuuguagcucagccacacacgcaguaaugaccugugcccguucgccucuggcacugcccaccccucuuuuuuuuuuucuucuaauucuguacucacaaaagagaaucucauuuucuucuuucuuccauucccuuaaauucugaguacuguacauauauuucuggguucccacgaugaugugaaaaacuaccagacuguuuuuugucuucucacaaagacaagaaaaaucagggcauuuugugagugccuuaagaucaaacuaacaagaucugacccucuccccucacagugagccacugccccacuucagaggguaagagccaaaagccucauugugaaaggcacuggacuuggaccagggacaccaucagggccuugguuuucucacgcauaaaauggagaguggauuaaucgccaaagauucuucugaucugacauuuugaaauugugagagaaacuagaugacuguaaacuuggucacaggccugguucuggcaguucuuugcggacuuuuuucuagcauuaugccaaauaaacaugcagucucagugugcucucgcauguaugaauaucuaguccuuucugugguucucagccaagacauaaaaacuaggacucagagcacauacaaaaccaguuauguuucggaaagagggaaaagaguccccgagcccggaucuugugcugcuuuucucacugacguguugccuuuuuucuuuacaaaaucugcuuugauacuuaggaccucucuggacuaauuucucuuccuagacagcucagcacagcuauugauauguuagaggcaguauccuuaauauucauucuaaaugaguuaacgacuuaacuugaaauugggccuaaggagugagaacuacaaaaauacaaaaugcuuguccaggacucagccaugcacaccuugagcagcgccggcaggaggcacggaaggaacugugcuccguucuccucacugucauggugccaccagugucugaugaagggcagagugacccagacugcaggcaguaacugacuucacacagucccuggcauuuagucaucugugauuguuuuaucacucuggacugugcagagccaccugccaccgagaucugcauuccgacugccuaugaacgggugugggggccgggggcuggcuugcugaagucuucaacuugcacucggagcuccuuugauaccucagagcuggcugucagguggcagcucacacccagacucacuggccacaccucagcagggggggagucgagugucagucucuuucugugaaggcuuuuuuuuuccuuuggccugggaauuuuucccauuuuuaugaagggguuuuaaauuguuucauuuugugugcugugcuucaaagccuuaacugucaaaucuugcauuaucuuguuuguacagaaauauacuggccuagcagaggcaaaaaaaaaaaaaaugaauuuuauuuuacuugucacaccugucuuaauaaacuggaguuuugcugcuaaagaacucuucucucugggggcagagcuucuauuuauggcacauagacaucagcuaggcuuuugggaaucguuuguguucuuuguggaaauguccuuuagaagcacccaugaaguaguguguucagacugugcacacagaaaacaggcucugccuucacaugugagacgguggacuuuuccucuggacaaaaugacagcauccuggcgacuccacaguggagcugagcgccacucccuguagccgaucugggacugaaacgcuuacaccucugccucagaaggagucccccaugcccugccugaaaugacuucacuggacacagcggggcugcagcuaacgggguacagguaggagcuaacuaacuucaccccugaguccacuugcgggguaagagauaaacaguaacccuuccaggagcccacugacguuggagugcuaaaaaugccccuucagggggaaaacugcauuuucucuuccaaaaaggaaagguucuuccaggcgagaaaccuguggucuagaaccacagcaagaagaggaggcaugcuggccugcaccggaagacucacuuugucugcccugcgccagccucaccucacccugcaguucccguuuccgccauggaugccucaucaccaacccugaccuucccccucccaacccuuuauucauccucacucccacucauacccgccucccuggacaguucccugcugcagaguucuuucugcuuucagcccuaccuugguggugauuuaccugaaaaucuucacaacugaucauuaucuccuucucuuugagaccugacugaaaaaauuaggugugcacaccuguaaucccagcuaccugggaggcugagguaugaggauugcuugagccugggaguuugaggcugcagugagcuaugauugcaccacugcacuccaaccugggugacagagugagacccugucucaaaaaaaaauaaaauaaggaccuuauugugugugcaaauuauuugccuuucaugaauaguuaugagacuuugugcauguguuaaccgagacggcccugagcuauuucaguuacuccuguauguucaggcaauuccaauuuagaaacaaacuuccagugauaaauauugggaagaaaaugucagcucagggccaaguagguaaagccacccaagucuagccaugcacacaggcacuagugugcugaaggaaaacaccucugauuugauacauaaagugugaagguugcauaacuggggagguggcuggagaaaaccugagccucgagcugaguaacaauccaagccaugauuagcauuuauauugcauucugcauuauucucauccuaucacguucauuaaguucaaccauuaccauuacgaaucccguuuccagcuggaaaaacaagcgccaggaaagugcauuucccccccaccccccccccccaaccagagcaacuuuggucagaagucacaccuaaucacccucucugcaggauaugcuggggauagcccuuuugaggagguggggguguaugcgaaagcaaccuggggccaaagcagggggaagcaggagagacuggaggggcccuggguccagcaagugcuccaccaggcugccccugcucaggugcuccacagcccauaaaaaacgccuucagcccugcugugcuuccccucacaccuaaacuuacuauaaggguccuaccuuccccaguauuccuucaugaucacugcuaccugugcccugaagcgcaacagaaccucaacccagaggacagccacuuccucagaacccacgaucuuugccccaucgccacagguccaugagugacuccuaauuaccaaauccaagggcuccuucacccugaccacucuggaacccaacaaagcugacacacagcccagcccagacaggccugaauguggguccuggcucucccauuugccaguucuacagccaugggcaaguggcucgaccucucuaagcuucaguuuccucgucugugaaauaucugucagugcucuuaagggaggagaccaccccacauauugucuuacgcccaauuucugccuccaaagagagaaguaaaaacuaaaaggcagaaaugaaauccacaagcagacagccugcaccacacccugggccugguaguuaaagaucgacgccugaccuaaucagugaugcuaucuauagauuacagacauuauauagaaaagcaccgugaaaaucccuguccuguucuguuccguucuaauuacgggugcaugcagcccccagucacguacccccugcuugcucaaucaaucacgacccucucacgcagaccccuuaagaguugugagcccuuaaaagggacaggaauugcucacucggggagcucaguuguuggagacaugagucuugccgaagcgcccggcugaauaaagcccuucuuuaacucgugucugagggguuuucucugcagcuuguccugcuacauuucuugguucccugaccaggaaucuaggugauuaauggaugguugaggcagccccucagacggcuuaggccugcccuguggagcaucccuguggaggacuccagccagcuugagcgacauggauccugagagcgcucucaggcaggcaauugccccaguggaaugccuggccagagcaguguguagcaggcccccgaggaggaucaacgcaguggcugaacaccgggaaggaacugccacuuggaguccagacaucugaaacuugguaagacuggucuuuggaacuugcccacuccauuugaggggaagcguggccugaucacccacggcgugccuguacuggcacucugguuuuuguuuuugacuugacuuggauugcuugauacuuugguuuugguuuugaccugacuuggauauccugauacucugauuuugguuuugauuuugguuugguguaaacuguaaaagugugugugugcccuuuuuaccuguucuuuguuuugugguaugcguguagggugagcguaauguuuugucuugaagaagcaugggucaagcacaaaguaagaccaccccacuaggaacuaugcugaaaaauuucaggaaaggauuuaagggagacuauggaguacuaugacaccaggaaaacuuaaaacuuuguguaagauagacuggccagcauuagagguagguuggccaucagagugaagccuggacaggucccuuguuucaaagguauggcacaagguaaccuguaagccaggguacccacaccaguucccguacacagacacuugguuacagcugguuuuagacuccccacccgcccgccccaacagugguugagagaacagcagcauaaguggcuggcagaggcaaggaaagaccagcagagagagaaagaggaagagacagacaaagagggagucagagagagagagagaaagagacagaggcaaaaggaaagucaaagagaaagagacagaaaaucaagaggaaaaaaaa

SEQ ID NO: 20 - RNA, 17730 nt, homo sapien
gacagcgcgcggcaggcggcgagcucgggggccgcagaaaaugaaacugaagccguggucacgugacaggacauguaguauauagcaggcugccagcgacuccugcucuugcuucuggaucugcagggcagucccagcaggacccauggaguguccuucgugccagcaugucuccaaggaggaaacccccaaguucugcagccagugcggagagaggcugccuccugcagcccccauagcagauucugagaacaauaacuccacaauggcgucggccucggagggugaaauggagugugggcaggagcugaaggaggaagggggcccgugcuuguucccgggcucagacaguuggcaagaaaaccccgaggagcccuguuccaaagccuccuggaccguccaagaaggagcuacaucagagguuuugguagaugcugcuguagaccucauauccgaugaaugggaagcugcuaaugccauacccagcaagagaaggaagcaggaugcagccccgcuugaggccgccagcgugccuucugcagacugugagcagagcaaaaagaagaaaaggaagaagaaaaagaaggggaacaaguccgcuuccucagagcuggcuuccuugccccuuucuccugccagccccugucaccugacuuugcuuucaaacccguggccucaggacacagcccugccccacagccaagcccagcagaguggccccacuggccagccgagccagcccccaggcacagccaccacgccacuggagggugacggccucuccgcgcccaccgagguuggcgacagcccccugcaggcccaggcuuugggagaggcaggaguggccacaggaagugaggcucagagcagcccgcaauuccaggaccacacggaaggggaggaccaggacgcuuccauccccucugggggcagaggccugucccaggaggggaccgguccccccaccucugcuggugaaggccauucuaggacugaagaugcugcccaggagcuccuguugccugagucaaaaggaggcagcucugagcccgggacagaacugcagaccaccgagcaacaggcaggggccucagccucuauggcaguugaugcuguagcugagccagccaaugcaguuaaaggggccgggaaggaaaugaaagagaagacccagagaaugaaacagccaccagcaaccacuccuccuuucaaaacacacugccaggaagcugagaccaagaccaaggacgagauggcugcugcugaagaaaaagucgguaagaaugaacaaggggagccugaagaccucaagaagccagaggggaagaacagaagugcagcugcugugaaaaacgagaaggagcaaaaaaaccaggaagcagauguccaggaagugaaggcaagcacgcugagcccggguggaggagucaccguguucuuccacgccaucaucucucuucauuucccauucaauccugaccuccauaaagucuucaucagaggaggagaagaauuuggggagucaaaaugggacagcaauaucugugagcugcacuacaccagagacuugggucaugaccgcguucuuguugaaggcauugucugcauuuccaagaagcaccuagauaaauacauuccuuacaaguacgucauuuauaauggggaaucuuuugaguaugaguucauuuacaagcaccagcagaagaagggcgaguacgucaaccgcugucuguucauaaaaucuucacuucugggcucaggagacuggcaucaguacuaugacauaguuuauaugaagccucaugggagacuccagaaagucaugaaccacaucacagacgggccgaggaaggaccuggugaaggggaagcagauugccgcugcgcucaugcuggacagcaccuucagcauccugcagaccugggacaccaucaaccugaacagcuucuucacccaguucgagcaguuuugcuuuguccugcaacagccuaugauuuaugaaggacaggcacagcuguggaccgauuugcaguacagggagaaagaggugaagagauaccuguggcaacaucugaaaaaacacgugguaccauugccggacggaaaaagcacggacuuuuugccuguggacugcccagugaggaguaaacugaaaacaggccugauuguccuuuuuguaguggaaaaaauugagcuuuuauuagaaggcagccuggacugguugugucaccuccuaaccucagaugccagcucaccagaugaguuucaccgugaccuaagccacauccuugggauaccucagagcuggcggcuguaccuggugaaccugugccaaagaugcauggacacaaggacguacaccuggcugggcgcccugccuguccugcacugcuguauggagcuggccccgcggcacaaggaugccuggagacagccugaggacaccugggccgcucuggagggacucuccuucucaccguuccgggaacaaaugcuagauacgaguucccuacuucaguuuaugagagagaagcagcauuugcugagcauagacgagccucucuuccgguccugguuuagucugcuaccucugagucaccugguuauguauauggaaaacuucauugagcaccugggucguuuuccugcucauauccuggacugucuuucagggauuuacuaccggcuuccgggacuugagcaagucuugaauacgcaggauguucaggauguucagaacguucagaacauuuuagaaaugcuguugcgacuccuggacacuuaccgggacaagauucccgaggaggccuugucaccauccuaccugacugugugucugaaacugcaugaagccaucugcagcagcacaaagcuacuuaaguuuuacgagcugccagccuuaucugccgagauugucugcagaaugauuagacuucuaucucugguggauucugcaggacagagagaugaaacuggaaauaauucaguccaaacagucuuccaagggacccuugcugcuacgaaaagguggcuccgagaaguuuuuacaaagaacaugcucacaucuucaggugccucauucacauacgucaaggaaauugaggucuggaggcggcugguggaaauccaauuccccgcggagcauggcuggaaggagucguugcugggagacauggaauggaggcucacaaaggaggaaccccucucccagaucacugccuacugcaauaguugcugggacaccaaaggcuuagaggacaguguggccaagaccuucgagaaaugcaucauugaagccgugagcucagccugccagucucagaccaguauccuucagggguucucuuacucugauuugcggaaauuuggcaucgucuugucugcugugaucacuaaguccuggccuaggaccgcggacaacuucgaugacauuuuaaagcaucugcucacguuggcagaugucaagcacgucuucagauuguguggaaccgacgagaaaauacuagcaaaugucacagaggaugccaagaggcugauagcuguugccgacucuguguugacgaaaguuguuggugaccuccuaaguggcacgauuuuaguuggacaacuggagcugauuauaaagcacaagaaucaguuucuugacaucuggcaacugagggaaaaaagucuuucaccccaggaugaacaaugugcuguggaggaagcacuggauuggagaagggaggaacuguuacuucuaaagaaagagaaaagauguguugauagucuccugaagaugugugggaacgugaaacaucugauacaaguggacuuuggagugcuugcaguaagacacucacaagaccucagcaguaaaagauuaaaugacaccgugacagugagacuguccaccuccucgaacucgcagagggcaacgcauuaccaccugagcucccagguccaagaaauggcugggaagauagacuugcucagagacagccacaucuuccagcucuucuggcgggaagccgcagagccgcugagugagccuaaggaggaccaggaagccgcagaguugcugagugagcccgaagaagaaucagaaaggcacauccuugagcuugaagagguguaugacuauuuguaucagccuucuuacagaaaguucauuaaguugcaccaggaucuaaagucaggagaggucacccuugcagagauugaugucaucuucaaggacuuugugaauaaauacacggaccuggauucagaacuuaagaucaugugcaccguggaccaccaggaccaaagagauuggaucaaggaccgagucgaacagaucaaggaauaccaucaccugcaccaggcuguccacgcagccaaggucaucuugcaggucaaagagagccugggacugaacggugacuucaguguucucaacacuuuacuaaauuuuacugauaacuucgacgacuuucgccgugaaacacuggaccagaucaaccaggagcucauccaggccaaaaagcugcuccaggacaucagcgaggcccggugcaaggggcugcaggcucugucccugagaaaggaguucaucugcuggguccgggaggcucuuggaggcaucaaugagcugaagguguuuguggaccuggccuccaucucagcgggggagaaugacauugauguggaccggguggccugcuuccaugacgcugugcagggcuacgcaucccugcuauuuaagcuggaccccagcguggacuucagugcauucaugaagcaucugaaaaagcuguggaaggcucuggauaaggaccaguaccugcccaggaaacugugugacuccgccaggaacuuggaauggcugaagacugugaaugagagucaugggucuguggaacgcucaucccugacccuggccacggccaucaaccaaagaggcaucuaugugauccaggcgcccaaagguggccaaaagauuuccccagacacgguucugcacuugauccuuccugagagcccuggcagccacgaggagucacgagaguacucuuuagaggaggugaaggagcuuuugaacaaguugaugcugaugucuggcaagaaggaucguaacaacacggaaguggagagguuuucagaggucuucugcagugugcagaggcucagccaggccuucaucgaccugcacucugcugggaauaugcuguucaggacguggaucgccauggccuacugcucccccaagcagggugugucccuccaaauggacuuuggcuuggaccuggugacggagcuuaaagaagguggagaugucacugagcugcuggcagcccucugcaggcagauggagcacuuccuugacagcuggaagagauuugugacccagaagcgaauggagcacuuuuaccugaacuucuacacggcagagcagcugguuuaccugagcacugagcucaggaagcagcccccgagugaugccgcccuaacgaugcuauccuucaucaaaagcaacugcacccugagggaugucuuaagggccucuguggggugugggagugaggccgccagguaccgcaugaggagagucauggaagagcucccgcugaugcucuuaucagaguucagccugguggacaagcugaggaucaucauggagcaguccaugaggugccuuccugccuuccugcccgacugccucgaccuagagacccuuggccacugucuggcucaccuggcagggaugggugggucucccguggagcguugucucccgagaggucugcaggucggccagcccaaccucgucgucuguggccacuccgagguguugccagccgcccuggcugucuacaugcaaaccccaagccagccccugcccacuuacgaugaggugcugcucugcaccccggcaaccaccuuugaggagguggcacuguugcugcgccgcugccugacccugggcucccuggggcacaaggucuacagccugcuguucgcagaucagcugagcuacgagguggcacgccaagcggaggagcuuuuccacaaucugugcacgcagcagcaccgagaagacuaccagcucgucauggucugugauggggacugggagcacugcuaccuccccucugccuucagccagcacaaggucuucgucaccccccaggcaccccucgaggccauccaagccuaccuggcaggucacuaccgggucccgaagcagacccugucggcggcagccguguucaaugaccggcuguguguugggaucguggccucggagcgagcagguguuggaaagucucuguacgugaagagguugcacgacaaaaugaagaugcaguuaaacgugaaaaaugugccucugaaaacaauucgacugaucgacccucagguggaugagagccgaguccugggcgcccugcugcccuuccuggaugcgcaguaucagaagguccccgugcucuuucaccuggacgugaccuccucagugcagacuggaauuuggguguuucuuuucaagcuccucauuuuacaauacuuaauggauauaaaugggaaaauguggcuucggaaccccugccauuuguauaucguugaaauccuggaaaggaggacgucagugccgucgaggagcucuucagcgcugcguacacguguaccccaguucaguuuucuugacaucuucccaaaagucaccugcaggccucccaaagaggugauagacauggagcugagugcccugaggagugacacagagccugggauggaucugugggaguucugcagcgaaacuuuccaaagaccuuaccaguauuuaagacgauucaaucaaaaccaagaccuagacacguuucaguaucaagaaggcucugucgaaggcaccccggaggaaugccuccagcauuuccuguuucacugcgggguaauaaacccauccuggucagagcuucggaacuuugcucgguuccugaauuaucagcucagagauugugaggccucucucuucugcaauccgaguuuuauuggcgacacacugaggggcuucaagaaguucguggugaccuucaugaucuuuauggcaagagauuuugccacaccaucacuccacaccucugaccaaagcccggggaagcacauggucaccauggaugggguuagggaagaagaucuagcgcccuucucccuccggaagaggugggagucggagccucacccauacguuuucuucaaugacgaccacacaaccaugacauucaucggcuuccaucugcagcccaacaucaacggcagugucgaugccaucagucacuugacugggaaggucaucaagagagacgucaugaccagggaccuguaccagggccugcugcuccagagggugcccuucaaugucgacuuugauaaacugcccagacacaagaaacuugagaggcucugccugaccuuagggaucccccaggccaccgaccccgacaaaacguaugagcucacaaccgacaauaugcuuaaaauccuugccaucgagaugcgguuccggugugggaucccgguuaucaucaugggagaaacuggcugugggaaaaccaggcuuauuaaauuccuuagcgaccugcggcguggugguaccaaugcugacaccauaaagcuggucaaggugcacggaggaacaacugcagacaugaucuacuccagagucagggaggcugaaaauguggccuucgccaauaaggaccaacaucaguuggacaccaucuuguuuuuugaugaagccaacacaacggaagcuauaagcuguaucaaagaaguccugugugaucauaugguggauggccagccucuggcugaggacucuggccugcauauuauagcugccugcaauccauaccggaagcacucugaggagaugaucugccguuuggagucagcugguuugggcuacaggguuaguauggaggagacggccgacaggcugggcuccauuccucugaggcagcugguauaccggguccaugcucugcccccgagccugauuccucuggugugggacuuuggacaacugagugacguugcugaaaagcucuacauccagcagauuguccagagacugguugaguccaucagccuagaugaaaacgggacucgcgugaucacagaaguccucugcgccucucaggguuucaugaggaaaacagaagaugagugcagcuuugucagccucagggacguggagcgcugugugaaaguuuucaggugguuccacgagcacagcgcgaugcucuuagcgcagcugaaugccuuucucuccaaguccagcgucagcaaaaaucacaccgagagagaucccguccucuggucguugaugcuggccaucgggguguguuaccaugccucuuuagaaaagaaagacucauaucggaaagccaucgccagguucuuuccgaaaccguaugacgacagcaggcugcuucuggaugaaauaacacgggcacaggaucuuuuucuggacggcguaccucugaggaaaaccaucgccaagaacuuggccuugaaggagaacgucuucaugauggucgucugcaucgagcugaagauuccccucuuccugguggggaagcccggcagcuccaagucucucgccaagaccaucguggcagacgccaugcagggcccggcugccuacucagaucucuuccgcagccugaagcagguccaccugguguccuuccagugcagcccgcacuccaccccacagggcaucaucagcaccuuccggcagugcgcccgcuuucagcaggggaaggaccugcagcaguacgucucuguggugguguuagaugagguggggcuggcggaagacucacccaaaaugccccugaagacucugcacccgcugcuggaagacggaugcauugaagacgaucccgccccccacaaaaaggucggcuucgugggcaucuccaacugggcccuugacccugccaagaugaaccggggcauuuuugugucacguggcagccccaacgagacagagcucauagagagcgccaagggcaucugcuccucagacauccucguccaggaccgaguccaaggguacuuugcguccuuugccaaagccuacgaaacgguguguaagcgccaggacaaggaauucuucgggcuucgugacuacuacagccucaucaaaauggucuuugcugcagcaaaggcuucaaauagaaagccuuccccgcaagacauugcacaggcuguccuuaggaacuucaguggcaaggaugacauccaagcuuuggacaucuuucuggccaauuugcccgaggccaagugcucagaggaagucagccccaugcagcugaucaaacagaacaucuuugggccuucucagaaggugccggguggagagcaggaagaugcugagucccgcuacuuacucgugcugaccaaaaacuacguggcacugcagauccugcagcagacauucuucgagggggaccagcagccggagauuauuuuugguucugguuuccccaaggaccaagaguacacccagcucugcagaaacaucaaucgugugaagaucugcauggaaacaggcaagaugguguugcuucucaaccugcagaaccucuacgagagccucuacgacgcacucaaccaguacuacguccaccucggcggccagaaguacguggaccucggucuggggacccaccgcgucaaaugucggguucaccccaacuuccgccugauugucauugaagagaaagacgucguguacaaacacuuucccaucccccucauuaaccggcuggagaagcacuaucuggauaucaacacggugcuggagaaauggcagaagagcaucguggaggagcucugugcguggguggagaaguucaucaaugucaaagcacaucauuuccagaagaggcacaaauacagccccucugacgucuucaucggcuaccacucggacgccugcgcgucuguggugcugcaggucauagagaggcaggguccccgggccuugacggaggaacuucaccagaaggugucugaggaggccaaaucgauccugcugaacugcgcuacgcccgaugccgugguccggcugagcgccuacucgcugggcggguucgcagcggaguggcugucgcaggaguacuuucacagacagaggcacaacuccuuugcagauuuccuucaggcacaccugcacacggcagaccuggagcgccacgccaucuucacagagaucaccacuuucuccaggcugcuaacaagucacgacugugaaauuuuagaaucagaggucacaggcagggcuccgaaacccacacuccuguggcugcagcaguuugacaccgaguacucauuccucaaagaaguccgaaacuguuuaacgaauacagccaaauguaaaauccucauuuuucagacagauuuugaagauggaauccguagcgcccagcucauugccucagcuaaguauucuguuauaaaugaaaucaacaaaauacgagaaaaugaggaccguaucuucgucuauuucaucacaaaacugucccgggugggaagaggaacagccuaugugggcuuccacggagggcuguggcagucuguccacaucgaugaccuccggagauccacccucaugguuucugaugugaccaggcugcagcaugucaccaucagccagcuguucgcgcccggagacuugccugagcugggcuuggaacaccgggcggaagacggccaugaggaggcgauggagacggaggccagcacaucaggggagguggcagagguggcagaggaggccauggaaacagaaaguucugagaaggugggaaaggaaaccucugaacucggaggcagugaugugucgauccuggacaccaccaggcugcugagaagcugugugcagagcgccgugggcaugcucagagaccagaacgagagcugcacgcgcaauaugcggaggguggugcuccuccugggccucuugaaugaggaugacgcgugccacgccucuuucuugcggguauccaagaugcgccucagugucuuuuuaaagaagcaagaagagagccaguuucacccucuggagugguuggcaagggaagccugcaaccaggacgcucuccaggaggcgggcacauucaggcacacccucuggaagcggguccaaggugcugucaccccucugcuggcgagcaugauaucauucaucgacagagacggcaaccuagaguuacugaccaggccagauacuccgcccugggcaagagaucuuuggauguuuauuuucagugacacgaugcuucugaacauuccucuugugaugaauaaugaaagacauaaaggugagauggccuacaucguggugcagaaccacaugaaccuuuccgagaacgcuuccaacaacgucccuuucagcuggaaaaucaaggacuaucuggaggagcuguggguccaggcucaguacaucacagacgcagaaggacugcccaagaaguucguggacaucuuucagcagacuccucugggcagguuucuugcccagcuccauggagagccgcagcaggaacuucuucaguguuacuugaaggauuucauucucuugaccaugcgugugucaacggaggaggaauuaaaguuucugcagauggcucugugguccugcacuaggaaacugaaagcggcgucagaagcgcccgaggaagagguuuccuuaccgugggugcaccuugccuaccagcguuucagaagccgucugcagaacuuuuccagaauccugaccaucuacccucagcuucuccacagccugauggaagcccguuggaaccaugagcuggcuggaugugagaugacccuggacgcauuugccgcaauggccugcacggagaugcugacaagaaacacccugaagcccaguccccaggcguggcuacaguuggugaagaaucuuuccaugccgcuggagcucaucugcuccgaugagcacaugcaaggcagcgggagccuggcccaggcugucaucagggaagucagagcccaguggagucggauuuucuccaccgcacucuucguggagcacgugcuccuaggaaccgagagccgcguccccgaguuacaggggcuggugaccgagcacgucuucuuacuagacaagugucuucgagagaacucugacgugaagacgcacgggccuuuugaggccgugaugcgcacucucugugaaugcaaggagacagccagcaagacccucagcagguuugggauucagccgugcuccaucugccugggagaugcaaaggaccccgucugucugcccugcgaccacgugcacugccugcgcugccucagggccugguuugccucagagcagaugauaugccccuacuguuuaacugccuugccagacgaauucucuccagcuguuucccaagcgcacagggaagccauugaaaagcaugcccgcuuccggcagaugugcaacaguuucuucguagaccugguguccaccauuugcuucaaggacaacgcuccgccugagaaggaagugauugagagccugcucucucuccucuucguccaaaaggggcgcuuaagagaugcugcccagagacacugugaacacacaaaaucucucucuccauucaaugauguuguggauaagacuccugucauccgcucagugauacugaaacugcuuuugaaguacagcuuucaugauguaaaagauuauauucaggaauauuugacccuguuaaaaaagaaagcauucauaacugaagauaaaacugaacuguacaugcucuucaucaacugccuggaggauucaauacuugagaagaccagugcuuacuccagaaaugaugaacugaaccaccuagaagaggaaggucguuuccuuaaggcauauucuccagcaagccggggccgagagccugccaacgaggccucgguugaauaccugcaagagguggcccggauccgccucugccucgacagagcugcagauuuccucucggagccugagggaggcccagagauggccaaggagaagcagugcuaccugcagcaagucaagcaguucuguauccggguggagaacgacuggcaccggguguaccuggugcggaagcucagcagccagcgggggauggaguucgugcagggccucuccaagcccggccgcccgcaccaguggguguuucccaaggacguugucaagcagcaggggcugcggcaggaccacccaggccagauggauagguaccugguguacggcgaugaauacaaggcucuccgugaugcuguggccaaagcuguccucgagugcaagccacugggcauuaagacugcucugaaggccugcaagaccccccaaagccagcagucagccuacuuccuguuaacacuguuuagagagguggcuauuuuguacagaucccacaaugcaagccuccaccccacgccagagcaaugugaagcugugagcaaauucauuggcgaaugcaagauccuuucaccuccugauaucagccguuuugcaacaucgcucguggacaauucugugccauuguugagggcggggccuagugacagcaaccuugauggaacggugacagaaauggccauucaugcugcagccguccuucuguguggacagaaugaacucuuggagccccuaaagaaucuggccuucuccccagccaccauggcgcaugcuuuucuuccaaccaugccugaagacuugcuggcucaagcucggagguggaagggucuggagcgaguccacugguacacuugucccaacggccauccuugcuccgugggagaguguggcaggccgauggaacagagcaucugcauugacugccaugcgccgauuggaggcauugaccacaaaccucgggacggcuuucaucuggucaaagacaaggcagacagaacgcagaccggccacgugcugggcaacccgcagcggagagacguggugacaugugaccgagggcugcccccaguggucuuccuccuuauccggcuacucacucacuuggcucugcuucugggagcgucccagaguucccaggcucugauaaacaucauuaagccuccagugagggauccaaaaggcuuucugcagcagcacauccugaaggaccuggagcaguuggccaagaugcugggacacagugccgacgagaccaucggcgugguccaccucguccugcgcaggcuucuccaagagcagcaccagcucucuagcagaaggcuuuuaaauuuugacacagaauugucaacuaaagaaaugaggaacaacugggaaaaggaaaucgcagcugugauuucuccugaacuggagcaucuagauaaaacccuucccaccaugaauaaucucaucagccaagauaagcguaucagcucuaacccuguggccaaaauaauauauggugacccagugaccuuccugccccaccugccccggaaaagugugguccauugcucuaagauuuggagcugcaggaaaagaauuacaguugaguaccuccagcacauuguggaacagaaaaauggcaaagaaagagugcccauccucuggcauuuccugcagaaggaagcagagcugaggcugguaaaguuccugccugagauuuuggccuugcaaagggaucuagugaagcaguuccagaacguccagcaaguugaauacagcuccaucagaggcuuccucagcaagcacagcucagauggguugaggcagcugcuucacaacaggaucacagucuuucuguccacauggaacaaacugaggagaucgcuugagacgaacggugagaucaaccuacccaaagacuacugcagcacugacuuggaucuggacacugaguuugagauccucuugccacgccgacggggccugggccucugugcuaccgcucucgucagcuacuugauucgccuacacaaugaaauugucuacgccguggaaaaacucuccaaggaaaacaacagcuauuccguggaugccgccgaggucacugaacugcaugucaucaguuaugaaguggagcgggaccugacuccacugauucucuccaacugccaguaccagguggaggagggcagagagaccgugcaggaguucgaucuggagaagauucagcggcagaucgucagccgcuuccuccagggcaagccccggcugagccucaagggaauacccacucugguguacagacacgacuggaacuaugaacaucucuuuauggacaucaagaacaaaauggcacaggacucccuccccagcucggucauuagugccaucaguggacagcugcaguccuacagcgaugccugugaagugcugucugucguagaagucacucugggguuucugagcacagcugguggggauccaaacaugcagcugaauguguauacucaagacauccugcaaaugggugaucagacgauucacguguuaaaggccuuaaacagaugccaguuaaaacacaccauugcccucuggcaguuccugucugcucauaagucugaacagcugcugcggcugcacaaagagccauuuggggaaaucaguucaagguacaaagcggaucugagcccggaaaaugcuaagcuccucagcacauuccuaaaucagacuggccuagacgccuuccugcuagagcugcacgaaaugauaaucuugaaacuaaagaacccccaaacccaaaccgaggagcgcuuccgcccucaguggagccugagagacacucucguaaguuacaugcaaacuaaagaaagugaaauucuuccugaaauggcaucucaguucccagaagagauacugcucgccagcugugucucaguguggaaaacagcugcugugcugaaauggaaucgagaaaugagauagaauuauuuccucagcuaucuuuggaugacuuuggagagaagacuccucucuccucgucugcggcguggacuugaucauggacuggugccuuugcauucagaaggagagcugucagcguagcaccgaauucaagaccaaggcgugcuaccugagcugacagcuuuuugaaagccgagcuguuucugaaccauguacauacauguucugaaacuuucucaucauuuuaugaguacuguucauugagagaugacaaugaagauuagaugaaauuggaaauaaaccaacauuguuuacauuccaggagacuuguagcucagccacacacgcaguaaugaccugugcccguucgccucuggcacugcccaccccucuuuuuuuuuuucuucuaauucuguacucacaaaagagaaucucauuuucuucuuucuuccauucccuuaaauucugaguacuguacauauauuucuggguucccacgaugaugugaaaaacuaccagacuguuuuuugucuucucacaaagacaagaaaaaucagggcauuuugugagugccuuaagaucaaacuaacaagaucugacccucuccccucacagugagccacugccccacuucagaggguaagagccaaaagccucauugugaaaggcacuggacuuggaccagggacaccaucagggccuugguuuucucacgcauaaaauggagaguggauuaaucgccaaagauucuucugaucugacauuuugaaauugugagagaaacuagaugacuguaaacuuggucacaggccugguucuggcaguucuuugcggacuuuuuucuagcauuaugccaaauaaacaugcagucucagugugcucucgcauguaugaauaucuaguccuuucugugguucucagccaagacauaaaaacuaggacucagagcacauacaaaaccaguuauguuucggaaagagggaaaagaguccccgagcccggaucuugugcugcuuuucucacugacguguugccuuuuuucuuuacaaaaucugcuuugauacuuaggaccucucuggacuaauuucucuuccuagacagcucagcacagcuauugauauguuagaggcaguauccuuaauauucauucuaaaugaguuaacgacuuaacuugaaauugggccuaaggagugagaacuacaaaaauacaaaaugcuuguccaggacucagccaugcacaccuugagcagcgccggcaggaggcacggaaggaacugugcuccguucuccucacugucauggugccaccagugucugaugaagggcagagugacccagacugcaggcaguaacugacuucacacagucccuggcauuuagucaucugugauuguuuuaucacucuggacugugcagagccaccugccaccgagaucugcauuccgacugccuaugaacgggugugggggccgggggcuggcuugcugaagucuucaacuugcacucggagcuccuuugauaccucagagcuggcugucagguggcagcucacacccagacucacuggccacaccucagcagggggggagucgagugucagucucuuucugugaaggcuuuuuuuuuccuuuggccugggaauuuuucccauuuuuaugaagggguuuuaaauuguuucauuuugugugcugugcuucaaagccuuaacugucaaaucuugcauuaucuuguuuguacagaaauauacuggccuagcagaggcaaaaaaaaaaaaaaugaauuuuauuuuacuugucacaccugucuuaauaaacuggaguuuugcugcuaaagaa

SEQ ID NO: 21 - RNA, 8391 nt, homo sapien
gaacaucuuugggccuucucagaaggugccggguggagagcaggaagaugcugagucccgcuacuuacucgugcugaccaaaaacuacguggcacugcagauccugcagcagacauucuucgagggggaccagcagccggagauuauuuuugguucugguuuccccaaggaccaagaguacacccagcucugcagaaacaucaaucgugugaagaucugcauggaaacaggcaagaugguguugcuucucaaccugcagaaccucuacgagagccucuacgacgcacucaaccaguacuacguccaccucggcggccagaaguacguggaccucggucuggggacccaccgcgucaaaugucggguucaccccaacuuccgccugauugucauugaagagaaagacgucguguacaaacacuuucccaucccccucauuaaccggcuggagaagcacuaucuggauaucaacacggugcuggagaaauggcagaagagcaucguggaggagcucugugcguggguggagaaguucaucaaugucaaagcacaucauuuccagaagaggcacaaauacagccccucugacgucuucaucggcuaccacucggacgccugcgcgucuguggugcugcaggucauagagaggcaggguccccgggccuugacggaggaacuucaccagaaggugucugaggaggccaaaucgauccugcugaacugcgcuacgcccgaugccgugguccggcugagcgccuacucgcugggcggguucgcagcggaguggcugucgcaggaguacuuucacagacagaggcacaacuccuuugcagauuuccuucaggcacaccugcacacggcagaccuggagcgccacgccaucuucacagagaucaccacuuucuccgggcugcuaacaagucacgacugugaaauuuuagaaucagaggucacaggcagggcuccgaaacccacacuccuguggcugcagcaguuugacaccgaguacucauuccucaaagaaguccgaaacuguuuaacgaauacagccaaauguaaaauccucauuuuucagacagauuuugaagauggaauccguagcgcccagcucauugccucagcuaaguauucuguuauaaaugaaaucaacaaaauacgagaaaaugaggaccguaucuucgucuauuucaucacaaaacugucccgggugggaagaggaacagccuaugugggcuuccacggagggcuguggcagucuguccacaucgaugaccuccggagauccacccucaugguuucugaugugaccaggcugcagcaugucaccaucagccagcuguucgcgcccggagacuugccugagcugggcuuggaacaccgggcggaagacggccaugaggaggcgauggaaacggaggccagcacaucaggggagguggcagagguggcagaggaggccauggaaacagaaaguucugagaaggugggaaaggaaaccucugaacucggaggcagugaugugucgauccuggacaccaccaggcugcugagaagcugugugcagagcgccgugggcaugcucagagaccagaacgagagcugcacgcgcaauaugcggaggguggugcuccuccugggccucuugaaugaggaugacgcgugccacgccucuuucuugcggguauccaagaugcgccucagugucuuuuuaaagaagcaagaagagagccaguuucacccucuggagugguuggcaagggaagccugcaaccaggacgcucuccaggaggcgggcacauucaggcacacccucuggaagcggguccaaggugcugucaccccucugcuggcgagcaugauaucauucaucgacagagacggcaaccuagaguuacugaccaggccagauacuccgcccugggcaagagaucuuuggauguuuauuuucagugacacgaugcuucugaacauuccucuugugaugaauaaugaaagacauaaaggugagauggccuacaucguggugcagaaccacaugaaccuuuccgagaacgcuuccaacaacgucccuuucagcuggaaaaucaaggacuaucuggaggagcuguggguccaggcucaguacaucacagacgcagaaggacugcccaagaaguucguggacaucuuucagcagacuccucugggcagguuucuugcccagcuccauggagagccgcagcaggaacuucuucaguguuacuugaaggauuucauucucuugaccaugcgugugucaacggaggaggaauuaaaguuucugcagauggcucugugguccugcacuaggaaacugaaagcggcgucagaagcgcccgaggaagagguuuccuuaccgugggugcaccuugccuaccagcguuucagaagccgucugcagaacuuuuccagaauccugaccaucuacccucagcuucuccacagccugauggaagcccguuggaaccaugagcuggcuggaugugagaugacccuggacgcauuugccgcaauggccugcacggagaugcugacaagaaacacccugaagcccaguccccaggcguggcuacaguuggugaagaaucuuuccaugccgcuggagcucaucugcuccgaugagcacaugcaaggcagcgggagccuggcccaggcugucaucagggaagucagagcccaguggagucggauuuucuccaccgcacucuucguggagcacgugcuccuaggaaccgagagccgcguccccgaguuacaggggcuggugaccgagcacgucuucuuacuagacaagugucuucgagagaacucugacgugaagacgcacgggccuuuugaggccgugaugcgcacucucugugaaugcaaggagacagccagcaagacccucagcagguuugggauucagccgugcuccaucugccugggagaugcaaaggaccccgucugucugcccugcgaccacgugcacugccugcgcugccucagggccugguuugccucagagcagaugauaugccccuacuguuuaacugccuugccagacgaauucucuccagcuguuucccaagcgcacagggaagccauugaaaagcaugcccgcuuccggcagaugugcaacaguuucuucguagaccugguguccaccauuugcuucaaggacaacgcuccgccugagaaggaagugauugagagccugcucucucuccucuucguccaaaaggggcgcuuaagagaugcugcccagagacacugugaacacacaaaaucucucucuccauucaaugauguuguggauaagacuccugucauccgcucagugauacugaaacugcuuuugaaguacagcuuucaugauguaaaagauuauauucaggaauauuugacccuguuaaaaaagaaagcauucauaacugaagauaaaacugaacuguacaugcucuucaucaacugccuggaggauucaauacuugagaagaccagugcuuacuccagaaaugaugaacugaaccaccuagaagaggaaggucguuuccuuaaggcauauucuccagcaagccggggccgagagccugccaacgaggccucgguugaauaccugcaagagguggcccggauccgccucugccucgacagagcugcagauuuccucucggagccugagggaggcccagagauggccaaggagaagcagugcuaccugcagcaagucaagcaguucuguauccggguggagaacgacuggcaccggguguaccuggugcggaagcucagcagccagcgggggauggaguucgugcagggccucuccaagcccggccgcccgcaccaguggguguuucccaaggacguugucaagcagcaggggcugcggcaggaccacccaggccagauggauagguaccugguguacggcgaugaauacaaggcucuccgugaugcuguggccaaagcuguccucgagugcaagccacugggcauuaagacugcucugaaggccugcaagaccccccaaagccagcagucagccuacuuccuguuaacacuguuuagagagguggcuauuuuguacagaucccacaaugcaagccuccaccccacgccagagcaaugugaagcugugagcaaauucauuggcgaaugcaagauccuuucaccuccugauaucagccguuuugcaacaucgcucguggacaauucugugccauuguugagggcggggccuagugacagcaaccuugauggaacggugacagaaauggccauucaugcugcagccguccuucuguguggacagaaugaacucuuggagccccuaaagaaucuggccuucuccccagccaccauggcgcaugcuuuucuuccaaccaugccugaagacuugcuggcucaagcucggagguggaagggucuggagcgaguccacugguacacuugucccaacggccauccuugcuccgugggagaguguggcaggccgauggaacagagcaucugcauugacugccaugcgccgauuggaggcauugaccacaaaccucgggacggcuuucaucuggucaaagacaaggcagacagaacgcagaccggccaugugcugggcaacccgcagcggagagacguggugacaugugaccgagggcugcccccaguggucuuccuccuuauccggcuacucacucacuuggcucugcuucugggagcgucccagaguucccaggcucugauaaacaucauuaagccuccagugagggauccaaaaggcuuucugcagcagcacauccugaaggaccuggagcaguuggccaagaugcugggacacagugccgacgagaccaucggcgugguccaccucguccugcgcaggcuucuccaagagcagcaccagcucucuagcagaaggcuuuuaaauuuugacacagaauugucaacuaaagaaaugaggaacaacugggaaaaggaaaucgcagcugugauuucuccugaacuggagcaucuagauaaaacccuucccaccaugaauaaucucaucagccaagauaagcguaucagcucuaacccuguggccaaaauaauauauggugacccagugaccuuccugccccaccugccccggaaaagugugguccauugcucuaagauuuggagcugcaggaaaagaauuacaguugaguaccuccagcacauuguggaacagaaaaauggcaaagaaagagugcccauccucuggcauuuccugcagaaggaagcagagcugaggcugguaaaguuccugccugagauuuuggccuugcaaagggaucuagugaagcaguuccagaacguccagcaaguugaauacagcuccaucagaggcuuccucagcaagcacagcucagauggguugaggcagcugcuucacaacaggaucacagucuuucuguccacauggaacaaacugaggagaucgcuugagacgaacggugagaucaaccuacccaaagacuacugcagcacugacuuggaucuggacacugaguuugagauccucuugccacgccgacggggccugggccucugugcuaccgcucucgucagcuacuugauucgccuacacaaugaaauugucuacgccguggaaaaacucuccaaggaaaacaacagcuauuccguggaugccgccgaggucacugaacugcaugucaucaguuaugaaguggagcgggaccugacuccacugauucucuccaacugccaguaccagguggaggagggcagagagaccgugcaggaguucgaucuggagaagauucagcggcagaucgucagccgcuuccuccagggcaagccccggcugagccucaagggaauacccacucugguguacagacacgacuggaacuaugaacaucucuuuauggacaucaagaacaaaauggcacaggacucccuccccagcucggucauuagugccaucaguggacagcugcaguccuacagcgaugccugugaagugcugucugucguagaagucacucugggguuucugagcacagcugguggggauccaaacaugcagcugaauguguauacucaagacauccugcaaaugggugaucagacgauucacguguuaaaggccuuaaacagaugccaguuaaaacacaccauugcccucuggcaguuccugucugcucauaagucugaacagcugcugcggcugcacaaagagccauuuggggaaaucaguucaagguacaaagcggaucugagcccggaaaaugcuaagcuccucagcacauuccuaaaucagacuggccuagacgccuuccugcuagagcugcacgaaaugauaaucuugaaacuaaagaacccccaaacccaaaccgaggagcgcuuccgcccucaguggagccugagagacacucucguaaguuacaugcaaacuaaagaaagugaaauucuuccugaaauggcaucucaguucccagaagagauacugcucgccagcugugucucaguguggaaaacagcugcugugcugaaauggaaucgagaaaugagauagaauuauuuccucagcuaucuuuggaugacuuuggagagaagacuccucucuccucgucugcggcguggacuugaucauggacuggugccuuugcauucagaaggagagcugucagcguagcaccgaauucaagaccaaggcgugcuaccugagcugacagcuuuuugaaagccgagcuguuucugaaccauguacauacauguucugaaacuuucucaucauuuuaugaguacuguucauugagagaugacaaugaagauuagaugaaauuggaaauaaaccaacauuguuuacauuccaggagacuuguagcucagccacacacgcaguaaugaccugugcccguucgccucuggcacugcccaccccucuuuuuuuuuuucuucuaauucuguacucacaaaagagaaucucauuuucuucuuucuuccauucccuuaaauucugaguacuguacauauauuucuggguucccacgaugaugugaaaaacuaccagacuguuuuuugucuucucacaaagacaagaaaaaucagggcauuuugugagugccuuaagaucaaacuaacaagaucugacccucuccccucacagugagccacugccccacuucagaggguaagagccaaaagccucauugugaaaggcacuggacuuggaccagggacaccaucagggccuugguuuucucacgcauaaaauggagaguggauuaaucgccaaagauucuucugaucugacauuuugaaauugugagagaaacuagaugacuguaaacuuggucacaggccugguucuggcaguucuuugcggacuuuuuucuagcauuaugccaaauaaacaugcagucucagugugcucucgcauguaugaauaucuaguccuuucugugguucucagccaagacauaaaaacuaggacucagagcacauacaaaaccaguuauguuucggaaagagggaaaagaguccccgagcccggaucuugugcugcuuuucucacugacguguugccuuuuuucuuuacaaaaucugcuuugauacuuaggaccucucuggacuaauuucucuuccuagacagcucagcacagcuauugauauguuagaggcaguauccuuaauauucauucuaaaugaguuaacgacuuaacuugaaauugggccuaaggagugagaacuacaaaaauacaaaaugcuuguccaggacucagccaugcacaccuugagcagcgccggcaggaggcacggaaggaacugugcuccguucuccucacugucauggugccaccagugucugaugaagggcagagugacccagacugcaggcaguaacugacuucacacagucccuggcauuuagucaucugugauuguuuuaucacucuggacugugcagagccaccugccaccgagaucugcauuccgacugccuaugaacgggugugggggccgggggcuggcuugcugaagucuucaacuugcacucggagcuccuuugauaccucagagcuggcugucagguggcagcucacacccagacucacuggccacaccucagcagggggggagucgagugucagucucuuucugugaaggcuuuuuuuuuccuuuggccugggaauuuuucccauuuuuaugaagggguuuuaaauuguuucauuuugugugcugugcuucaaagccuuaacugucaaaucuugcauuaucuuguuuguacagaaauauacuggccuagcagaggcaaaaaaaaaaaaaugaauuuuauuuuacuugucacaccugucuuaauaaacuggaguuuugcugcuaaaaaaaaaaaaaaaaaaa

SEQ ID NO: 22 - RNA, 6693 nt, homo sapien
gggccucuugaaugaggaugacgcgugccacgccucuuucuugcggguauccaagaugcgccucagugucuuuuuaaagaagcaagaagagagccaguuucacccucuggagugguuggcaagggaagccugcaaccaggacgcucuccaggaggcgggcacauucaggcacacccucuggaagcggguccaaggugcugucaccccucugcuggcgagcaugauaucauucaucgacagagacggcaaccuagaguuacugaccaggccagauacuccgcccugggcaagagaucuuuggauguuuauuuucagugacacgaugcuucugaacauuccucuugugaugaauaaugaaagacauaaaggugagauggccuacaucguggugcagaaccacaugaaccuuuccgagaacgcuuccaacaacgucccuuucagcuggaaaaucaaggacuaucuggaggagcuguggguccaggcucaguacaucacagacgcagaaggacugcccaagaaguucguggacaucuuucagcagacuccucugggcagguuucuugcccagcuccauggagagccgcagcaggaacuucuucaguguuacuugaaggauuucauucucuugaccaugcgugugucaacggaggaggaauuaaaguuucugcagauggcucugugguccugcacuaggaaacugaaagcggcgucagaagcgcccgaggaagagguuuccuuaccgugggugcaccuugccuaccagcguuucagaagccgucugcagaacuuuuccagaauccugaccaucuacccucagcuucuccacagccugauggaagcccguuggaaccaugagcuggcuggaugugagaugacccuggacgcauuugccgcaauggccugcacggagaugcugacaagaaacacccugaagcccaguccccaggcguggcuacaguuggugaagaaucuuuccaugccgcuggagcucaucugcuccgaugagcacaugcaaggcagcgggagccuggcccaggcugucaucagggaagucagagcccaguggagucggauuuucuccaccgcacucuucguggagcacgugcuccuaggaaccgagagccgcguccccgaguuacaggggcuggugaccgagcacgucuucuuacuagacaagugucuucgagagaacucugacgugaagacgcacgggccuuuugaggccgugaugcgcacucucugugaaugcaaggagacagccagcaagacccucagcagguuugggauucagccgugcuccaucugccugggagaugcaaaggaccccgucugucugcccugcgaccacgugcacugccugcgcugccucagggccugguuugccucagagcagaugauaugccccuacuguuuaacugccuugccagacgaauucucuccagcuguuucccaagcgcacagggaagccauugaaaagcaugcccgcuuccggcagaugugcaacaguuucuucguagaccugguguccaccauuugcuucaaggacaacgcuccgccugagaaggaagugauugagagccugcucucucuccucuucguccaaaaggggcgcuuaagagaugcugcccagagacacugugaacacacaaaaucucucucuccauucaaugauguuguggauaagacuccugucauccgcucagugauacugaaacugcuuuugaaguacagcuuucaugauguaaaagauuauauucaggaauauuugacccuguuaaaaaagaaagcauucauaacugaagauaaaacugaacuguacaugcucuucaucaacugccuggaggauucaauacuugagaagaccagugcuuacuccagaaaugaugaacugaaccaccuagaagaggaaggucguuuccuuaaggcauauucuccagcaagccggggccgagagccugccaacgaggccucgguugaauaccugcaagagguggcccggauccgccucugccucgacagagcugcagauuuccucucggagccugagggaggcccagagauggccaaggagaagcagugcuaccugcagcaagucaagcaguucuguauccggguggagaacgacuggcaccggguguaccuggugcggaagcucagcagccagcgggggauggaguucgugcagggccucuccaagcccggccgcccgcaccaguggguguuucccaaggacguugucaagcagcaggggcugcggcaggaccacccaggccagauggauagguaccugguguacggcgaugaauacaaggcucuccgugaugcuguggccaaagcuguccucgagugcaagccacugggcauuaagacugcucugaaggccugcaagaccccccaaagccagcagucagccuacuuccuguuaacacuguuuagagagguggcuauuuuguacagaucccacaaugcaagccuccaccccacgccagagcaaugugaagcugugagcaaauucauuggcgaaugcaagauccuuucaccuccugauaucagccguuuugcaacaucgcucguggacaauucugugccauuguugagggcggggccuagugacagcaaccuugauggaacggugacagaaauggccauucaugcugcagccguccuucuguguggacagaaugaacucuuggagccccuaaagaaucuggccuucuccccagccaccauggcgcaugcuuuucuuccaaccaugccugaagacuugcuggcucaagcucggagguggaagggucuggagcgaguccacugguacacuugucccaacggccauccuugcuccgugggagaguguggcaggccgauggaacagagcaucugcauugacugccaugcgccgauuggaggcauugaccacaaaccucgggacggcuuucaucuggucaaagacaaggcagacagaacgcagaccggccacgugcugggcaacccgcagcggagagacguggugacaugugaccgagggcugcccccaguggucuuccuccuuauccggcuacucacucacuuggcucugcuucugggagcgucccagaguucccaggcucugauaaacaucauuaagccuccagugagggauccaaaaggcuuucugcagcagcacauccugaaggaccuggagcaguuggccaagaugcugggacacagugccgacgagaccaucggcgugguccaccucguccugcgcaggcuucuccaagagcagcaccagcucucuagcagaaggcuuuuaaauuuugacacagaauugucaacuaaagaaaugaggaacaacugggaaaaggaaaucgcagcugugauuucuccugaacuggagcaucuagauaaaacccuucccaccaugaauaaucucaucagccaagauaagcguaucagcucuaacccuguggccaaaauaauauauggugacccagugaccuuccugccccaccugccccggaaaagugugguccauugcucuaagauuuggagcugcaggaaaagaauuacaguugaguaccuccagcacauuguggaacagaaaaauggcaaagaaagagugcccauccucuggcauuuccugcagaaggaagcagagcugaggcugguaaaguuccugccugagauuuuggccuugcaaagggaucuagugaagcaguuccagaacguccagcaaguugaauacagcuccaucagaggcuuccucagcaagcacagcucagauggguugaggcagcugcuucacaacaggaucacagucuuucuguccacauggaacaaacugaggagaucgcuugagacgaacggugagaucaaccuacccaaagacuacugcagcacugacuuggaucuggacacugaguuugagauccucuugccacgccgacggggccugggccucugugcuaccgcucucgucagcuacuugauucgccuacacaaugaaauugucuacgccguggaaaaacucuccaaggaaaacaacagcuauuccguggaugccgccgaggucacugaacugcaugucaucaguuaugaaguggagcgggaccugacuccacugauucucuccaacugccaguaccagguggaggagggcagagagaccgugcaggaguucgaucuggagaagauucagcggcagaucgucagccgcuuccuccagggcaagccccggcugagccucaagggaauacccacucugguguacagacacgacuggaacuaugaacaucucuuuauggacaucaagaacaaaauggcacaggacucccuccccagcucggucauuagugccaucaguggacagcugcaguccuacagcgaugccugugaagugcugucugucguagaagucacucugggguuucugagcacagcugguggggauccaaacaugcagcugaauguguauacucaagacauccugcaaaugggugaucagacgauucacguguuaaaggccuuaaacagaugccaguuaaaacacaccauugcccucuggcaguuccugucugcucauaagucugaacagcugcugcggcugcacaaagagccauuuggggaaaucaguucaagguacaaagcggaucugagcccggaaaaugcuaagcuccucagcacauuccuaaaucagacuggccuagacgccuuccugcuagagcugcacgaaaugauaaucuugaaacuaaagaacccccaaacccaaaccgaggagcgcuuccgcccucaguggagccugagagacacucucguaaguuacaugcaaacuaaagaaagugaaauucuuccugaaauggcaucucaguucccagaagagauacugcucgccagcugugucucaguguggaaaacagcugcugugcugaaauggaaucgagaaaugagauagaauuauuuccucagcuaucuuuggaugacuuuggagagaagacuccucucuccucgucugcggcguggacuugaucauggacuggugccuuugcauucagaaggagagcugucagcguagcaccgaauucaagaccaaggcgugcuaccugagcugacagcuuuuugaaagccgagcuguuucugaaccauguacauacauguucugaaacuuucucaucauuuuaugaguacuguucauugagagaugacaaugaagauuagaugaaauuggaaauaaaccaacauuguuuacauuccaggagacuuguagcucagccacacacgcaguaaugaccugugcccguucgccucuggcacugcccaccccucuuuuuuuuuuucuucuaauucuguacucacaaaagagaaucucauuuucuucuuucuuccauucccuuaaauucugaguacuguacauauauuucuggguucccacgaugaugugaaaaacuaccagacuguuuuuugucuucucacaaagacaagaaaaaucagggcauuuugugagugccuuaagaucaaacuaacaagaucugacccucuccccucacagugagccacugccccacuucagaggguaagagccaaaagccucauugugaaaggcacuggacuuggaccagggacaccaucagggccuugguuuucucacgcauaaaauggagaguggauuaaucgccaaagauucuucugaucugacauuuugaaauugugagagaaacuagaugacuguaaacuuggucacaggccugguucuggcaguucuuugcggacuuuuuucuagcauuaugccaaauaaacaugcagucucagugugcucucgcauguaugaauaucuaguccuuucugugguucucagccaagacauaaaaacuaggacucagagcacauacaaaaccaguuauguuucggaaagagggaaaagaguccccgagcccggaucuugugcugcuuuucucacugacguguugccuuuuuucuuuacaaaaucugcuuugauacuuaggaccucucuggacuaauuucucuuccuagacagcucagcacagcuauugauauguuagaggcaguauccuuaauauucauucuaaaugaguuaacgacuuaacuugaaauugggccuaaggagugagaacuacaaaaauacaaaaugcuuguccaggacucagccaugcacaccuugagcagcgccggcaggaggcacggaaggaacugugcuccguucuccucacugucauggugccaccagugucugaugaagggcagagugacccagacugcaggcaguaacugacuucacacagucccuggcauuuagucaucugugauuguuuuaucacucuggacugugcagagccaccugccaccgagaucugcauuccgacugccuaugaacgggugugggggccgggggcuggcuugcugaagucuucaacuugcacucggagcuccuuugauaccucagagcuggcugucagguggcagcucacacccagacucacuggccacaccucagcagggggggagucgagugucagucucuuucugugaaggcuuuuuuuuuccuuuggccugggaauuuuucccauuuuuaugaagggguuuuaaauuguuucauuuugugugcugugcuucaaagccuuaacugucaaaucuugcauuaucuuguuuguacagaaauauacuggccuagcagaggcagaaaaaaaaaaaaaaaaaaaa

SEQ ID NO: 23 - RNA, 4616 nt, homo sapien
ggauuucauucucuugaccaugcgugugucaacggaggaggaauuaaaguuucugcagauggcucugugguccugcacuaggaaacugaaagcggcgucagaagcgcccgaggaagagguuuccuuaccgugggugcaccuugccuaccagcguuucagaagccgucugcagaacuuuuccagaauccugaccaucuacccucagcuucuccacagccugauggaagcccguuggaaccaugagcuggcuggaugugagaugacccuggacgcauuugccgcaauggccugcacggagaugcugacaagaaacacccugaagcccaguccccaggcguggcuacaguuggugaagaaucuuuccaugccgcuggagcucaucugcuccgaugagcacaugcaaggcagcgggagccuggcccaggcugucaucagggaagucagagcccaguggagucggauuuucuccaccgcacucuucguggagcacgugcuccuaggaaccgagagccgcguccccgaguuacaggggcuggugaccgagcacgucuucuuacuagacaagugucuucgagagaacucugacgugaagacgcacgggccuuuugaggccgugaugcgcacucucugugaaugcaaggagacagccagcaagacccucagcagguuugggauucagccgugcuccaucugccugggagaugcaaaggaccccgucugucugcccugcgaccacgugcacugccugcgcugccucagggccugguuugccucagagcagaugauaugccccuacuguuuaacugccuugccagacgaauucucuccagcuguuucccaagcgcacagggaagccauugaaaagcaugcccgcuuccggcagaugugcaacaguuucuucguagaccugguguccaccauuugcuucaaggacaacgcuccgccugagaaggaagugauugagagccugcucucucuccucuucguccaaaaggggcgcuuaagagaugcugcccagagacacugugaacacacaaaaucucucucuccauucaaugauguuguggauaagacuccugucauccgcucagugauacugaaacugcuuuugaaguacagcuuucaugauguaaaagauuauauucaggaauauuugacccuguuaaaaaagaaagcauucauaacugaagauaaaacugaacuguacaugcucuucaucaacugccuggaggauucaauacuugagaagaccagugcuuacuccagaaaugaugaacugaaccaccuagaagaggaaggucguuuccuuaaggcauauucuccagcaagccggggccgagagccugccaacgaggccucgguugaauaccugcaagagguggcccggauccgccucugccucgacagagcugcagauuuccucucggagccugagggaggcccagagauggccaaggagaagcagugcuaccugcagcaagucaagcaguucuguauccggguggagaacgacuggcaccggguguaccuggugcggaagcucagcagccagcgggggauggaguucgugcagggccucuccaagcccggccgcccgcaccaguggguguuucccaaggacguugucaagcagcaggggcugcggcaggaccacccaggccagauggauagguaccugguguacggcgaugaauacaaggcucuccgugaugcuguggccaaagcuguccucgagugcaagccacugggcauuaagacugcucugaaggccugcaagaccccccaaagccagcagucagccuacuuccuguuaacacuguuuagagagguggcuauuuuguacagaucccacaaugcaagccuccaccccacgccagagcaaugugaagcugugagcaaauucauuggcgaaugcaagauccuuucaccuccugauaucagccguuuugcaacaucgcucguggacaauucugugccauuguugagggcggggccuagugacagcaaccuugauggaacggugacagaaauggccauucaugcugcagccguccuucuguguggacagaaugaacucuuggagccccuaaagaaucuggccuucuccccagccaccauggcgcaugcuuuucuuccaaccaugccugaagacuugcuggcucaagcucggagguggaagggucuggagcgaguccacugguacacuugucccaacggccauccuugcuccgugggagaguguggcaggccgauggaacagagcaucugcauugacugccaugcgccgauuggaggcauugaccacaaaccucgggacggcuuucaucuggucaaagacaaggcagacagaacgcagaccggccacgugcugggcaacccgcagcggagagacguggugacaugugaccgagggcugcccccaguggucuuccuccuuauccggcuacucacucacuuggcucugcuucugggagcgucccagaguucccaggcucugauaaacaucauuaagccuccagugagggauccaaaaggcuuucugcagcagcacauccugaaggaccuggagcaguuggccaagaugcugggacacagugccgacgagaccaucggcgugguccaccucguccugcgcaggcuucuccaagagcagcaccagcucucuagcagaaggcuuuuaaauuuugacacagaauugucaacuaaagaaaugaggaacaacugggaaaaggaaaucgcagcugugauuucuccugaacuggagcaucuagauaaaacccuucccaccaugaauaaucucaucagccaagauaagcguaucagcucuaacccuguggccaaaauaauauauggugacccagugaccuuccugccccaccugccccggaaaagugugguccauugcucuaagauuuggagcugcaggaaaagaauuacaguugaguaccuccagcacauuguggaacagaaaaauggcaaagaaagagugcccauccucuggcauuuccugcagaaggaagcagagcugaggcugguaaaguuccugccugagauuuuggccuugcaaagggaucuagugaagcaguuccagaacguccagcaaguugaauacagcuccaucagaggcuuccucagcaagcacagcucagauggguugaggcagcugcuucacaacaggaucacagucuuucuguccacauggaacaaacugaggagaucgcuugagacgaacggugagaucaaccuacccaaagacuacugcagcacugacuuggaucuggacacugaguuugagauccucuugccacgccgacggggccugggccucugugcuaccgcucucgucagcuacuugauucgccuacacaaugaaauugucuacgccguggaaaaacucuccaaggaaaacaacagcuauuccguggaugccgccgaggucacugaacugcaugucaucaguuaugaaguggagcgggaccugacuccacugauucucuccaacugccaguaccagguggaggagggcagagagaccgugcaggaguucgaucuggagaagauucagcggcagaucgucagccgcuuccuccagggcaagccccggcugagccucaagggaauacccacucugguguacagacacgacuggaacuaugaacaucucuuuauggacaucaagaacaaaauggcacaggacucccuccccagcucggucauuagugccaucaguggacagcugcaguccuacagcgaugccugugaagugcugucugucguagaagucacucugggguuucugagcacagcugguggggauccaaacaugcagcugaauguguauacucaagacauccugcaaaugggugaucagacgauucacguguuaaaggccuuaaacagaugccaguuaaaacacaccauugcccucuggcaguuccugucugcucauaagucugaacagcugcugcggcugcacaaagagccauuuggggaaaucaguucaagguacaaagcggaucugagcccggaaaaugcuaagcuccucagcacauuccuaaaucagacuggccuagacgccuuccugcuagagcugcacgaaaugauaaucuugaaacuaaagaacccccaaacccaaaccgaggagcgcuuccgcccucaguggagccugagagacacucucguaaguuacaugcaaacuaaagaaagugaaauucuuccugaaauggcaucucaguucccagaagagauacugcucgccagcugugucucaguguggaaaacagcugcugugcugaaauggaaucgagaaaugagauagaauuauuuccucagcuaucuuuggaugacuuuggagagaagacuccucucuccucgucugcggcguggacuugaucauggacuggugccuuugcauucagaaggagagcugucagcguagcaccgaauucaagaccaaggcgugcuaccugagcugacagcuuuuugaaagccgagcuguuucugaaccauguacauacauguucugaaacuuucucaucauuuuaugaguacuguucauugagagaugacaaugaagauuagaugaaauuggaaauaaaccaacauuguuuacauuc

SEQ ID NO: 24 - DNA, 21056 bp, homo sapien
cagcgcgcggcaggcggcgagctcgggggccgcagaaaatgaaactgaagccgtggtcacgtgacaggacatgtagtatatagcaggctgccagcgactcctgctcttgcttctggatctgcagggcagtcccagcaggacccatggagtgtccttcgtgccagcatgtctccaaggaggaaacccccaagttctgcagccagtgcggagagaggctgcctcctgcagcccccatagcagattctgagaacaataactccacaatggcgtcggcctcggagggtgaaatggagtgtgggcaggagctgaaggaggaagggggcccgtgcttgttcccgggctcagacagttggcaagaaaaccccgaggagccctgttccaaagcctcctggaccgtccaagaaagcaaaaagaagaaaaggaagaagaaaaagaaggggaacaagtccgcttcctcagagctggcttccttgcccctttctcctgccagcccctgtcacctgactttgctttcaaacccgtggcctcaggacacagccctgccccacagccaagcccagcagagtggccccactggccagccgagccagcccccaggcacagccaccacgccactggagggtgacggcctctccgcgcccaccgaggttggcgacagccccctgcaggcccaggctttgggagaggcaggagtggccacaggaagtgaggctcagagcagcccgcaattccaggaccacacggaaggggaggaccaggacgcttccatcccctctgggggcagaggcctgtcccaggaggggaccggtccccccacctctgctggtgaaggccattctaggactgaagatgctgcccaggagctcctgttgcctgagtcaaaaggaggcagctctgagcccgggacagaactgcagaccaccgagcaacaggcaggggcctcagcctctatggcagttgatgctgtagctgagccagccaatgcagttaaaggggccgggaaggaaatgaaagagaagacccagagaatgaaacagccaccagcaaccactcctcctttcaaaacacactgccaggaagctgagaccaagaccaaggacgagatggctgctgctgaagaaaaagtcggtaagaatgaacaaggggagcctgaagacctcaagaagccagaggggaagaacagaagtgcagctgctgtgaaaaacgagaaggagcaaaaaaaccaggaagcagatgtccaggaagtgaaggcaagcacgctgagcccgggtggaggagtcaccgtgttcttccacgccatcatctctcttcatttcccattcaatcctgacctccataaagtcttcatcagaggaggagaagaatttggggagtcaaaatgggacagcaatatctgtgagctgcactacaccagagacttgggtcatgaccgcgttcttgttgaaggcattgtctgcatttccaagaagcacctagataaatacattccttacaagtacgtcatttataatggggaatcttttgagtatgagttcatttacaagcaccagcagaagaagggcgagtacgtcaaccgctgtctgttcataaaatcttcacttctgggctcaggagactggcatcagtactatgacatagtttatatgaagcctcatgggagactccagaaagtcatgaaccacatcacagacgggccgaggaaggacctggtgaaggggaagcagattgccgctgcgctcatgctggacagcaccttcagcatcctgcagacctgggacaccatcaacctgaacagcttcttcacccagttcgagcagttttgctttgtcctgcaacagcctatgatttatgaaggacaggcacagctgtggaccgatttgcagtacagggagaaagaggtgaagagatacctgtggcaacatctgaaaaaacacgtggtaccattgccggacggaaaaagcacggactttttgcctgtggactgcccagtgaggagtaaactgaaaacaggcctgattgtcctttttgtagtggaaaaaattgagcttttattagaaggcagcctggactggttgtgtcacctcctaacctcagatgccagctcaccagatgagtttcaccgtgacctaagccacatccttgggatacctcagagctggcggctgtacctggtgaacctgtgccaaagatgcatggacacaaggacgtacacctggctgggcgccctgcctgtcctgcactgctgtatggagctggccccgcggcacaaggatgcctggagacagcctgaggacacctgggccgctctggagggactctccttctcaccgttccgggaacaaatgctagatacgagttccctacttcagtttatgagagagaagcagcatttgctgagcatagacgagcctctcttccggtcctggtttagtctgctacctctgagtcacctggttatgtatatggaaaacttcattgagcacctgggtcgttttcctgctcatatcctggactgtctttcagggatttactaccggcttccgggacttgagcaagtcttgaatacgcaggatgttcaggatgttcagaacgttcagaacattttagaaatgctgttgcgactcctggacacttaccgggacaagattcccgaggaggccttgtcaccatcctacctgactgtgtgtctgaaactgcatgaagccatctgcagcagcacaaagctacttaagttttacgagctgccagccttatctgccgagattgtctgcagaatgattagacttctatctctggtggattctgcaggacagagagatgaaactggaaataattcagtccaaacagtcttccaagggacccttgctgctacgaaaaggtggctccgagaagtttttacaaagaacatgctcacatcttcaggtgcctcattcacatacgtcaaggaaattgaggtctggaggcggctggtggaaatccaattccccgcggagcatggctggaaggagtcgttgctgggagacatggaatggaggctcacaaaggaggaacccctctcccagatcactgcctactgcaatagttgctgggacaccaaaggcttagaggacagtgtggccaagaccttcgagaaatgcatcattgaagccgtgagctcagcctgccagtctcagaccagtatccttcaggggttctcttactctgatttgcggaaatttggcatcgtcttgtctgctgtgatcactaagtcctggcctaggaccgcggacaacttcgatgacattttaaagcatctgctcacgttggcagatgtcaagcacgtcttcagattgtgtggaaccgacgagaaaatactagcaaatgtcacagaggatgccaagaggctgatagctgttgccgactctgtgttgacgaaagttgttggtgacctcctaagtggcacgattttagttggacaactggagctgattataaagcacaagaatcagtttcttgacatctggcaactgagggaaaaaagtctttcaccccaggatgaacaatgtgctgtggaggaagcactggattggagaagggaggaactgttacttctaaagaaagagaaaagatgtgttgatagtctcctgaagatgtgtgggaacgtgaaacatctgatacaagtggactttggagtgcttgcagtaagacactcacaagacctcagcagtaaaagattaaatgacaccgtgacagtgagactgtccacctcctcgaactcgcagagggcaacgcattaccacctgagctcccaggtccaagaaatggctgggaagatagacttgctcagagacagccacatcttccagctcttctggcgggaagccgcagagccgctgagtgagcctaaggaggaccaggaagccgcagagttgctgagtgagcccgaagaagaatcagaaaggcacatccttgagcttgaagaggtgtatgactatttgtatcagccttcttacagaaagttcattaagttgcaccaggatctaaagtcaggagaggtcacccttgcagagattgatgtcatcttcaaggactttgtgaataaatacacggacctggattcagaacttaagatcatgtgcaccgtggaccaccaggaccaaagagattggatcaaggaccgagtcgaacagatcaaggaataccatcacctgcaccaggctgtccacgcagccaaggtcatcttgcaggtcaaagagagcctgggactgaacggtgacttcagtgttctcaacactttactaaattttactgataacttcgacgactttcgccgtgaaacactggaccagatcaaccaggagctcatccaggccaaaaagctgctccaggacatcagcgaggcccggtgcaaggggctgcaggctctgtccctgagaaaggagttcatctgctgggtccgggaggctcttggaggcatcaatgagctgaaggtgtttgtggacctggcctccatctcagcgggggagaatgacattgatgtggaccgggtggcctgcttccatgacgctgtgcagggctacgcatccctgctatttaagctggaccccagcgtggacttcagtgcattcatgaagcatctgaaaaagctgtggaaggctctggataaggaccagtacctgcccaggaaactgtgtgactccgccaggaacttggaatggctgaagactgtgaatgagagtcatgggtctgtggaacgctcatccctgaccctggccacggccatcaaccaaagaggcatctatgtgatccaggcgcccaaaggtggccaaaagatttccccagacacggttctgcacttgatccttcctgagagccctggcagccacgaggagtcacgagagtactctttagaggaggtgaaggagcttttgaacaagttgatgctgatgtctggcaagaaggatcgtaacaacacggaagtggagaggttttcagaggtcttctgcagtgtgcagaggctcagccaggccttcatcgacctgcactctgctgggaatatgctgttcaggacgtggatcgccatggcctactgctcccccaagcagggtgtgtccctccaaatggactttggcttggacctggtgacggagcttaaagaaggtggagatgtcactgagctgctggcagccctctgcaggcagatggagcacttccttgacagctggaagagatttgtgacccagaagcgaatggagcacttttacctgaacttctacacggcagagcagctggtttacctgagcactgagctcaggaagcagcccccgagtgatgccgccctaacgatgctatccttcatcaaaagcaactgcaccctgagggatgtcttaagggcctctgtggggtgtgggagtgaggccgccaggtaccgcatgaggagagtcatggaagagctcccgctgatgctcttatcagagttcagcctggtggacaagctgaggatcatcatggagcagtccatgaggtgccttcctgccttcctgcccgactgcctcgacctagagacccttggccactgtctggctcacctggcagggatgggtgggtctcccgtggagcgttgtctcccgagaggtctgcaggtcggccagcccaacctcgtcgtctgtggccactccgaggtgttgccagccgccctggctgtctacatgcaaaccccaagccagcccctgcccacttacgatgaggtgctgctctgcaccccggcaaccacctttgaggaggtggcactgttgctgcgccgctgcctgaccctgggctccctggggcacaaggtctacagcctgctgttcgcagatcagctgagctacgaggtggcacgccaagcggaggagcttttccacaatctgtgcacgcagcagcaccgagaagactaccagctcgtcatggtctgtgatggggactgggagcactgctacctcccctctgccttcagccagcacaaggtcttcgtcaccccccaggcacccctcgaggccatccaagcctacctggcaggtcactaccgggtcccgaagcagaccctgtcggcggcagccgtgttcaatgaccggctgtgtgttgggatcgtggcctcggagcgagcaggtgttggaaagtctctgtacgtgaagaggttgcacgacaaaatgaagatgcagttaaacgtgaaaaatgtgcctctgaaaacaattcgactgatcgaccctcaggtggatgagagccgagtcctgggcgccctgctgcccttcctggatgcgcagtatcagaaggtccccgtgctctttcacctggacgtgacctcctcagtgcagactggaatttgggtgtttcttttcaagctcctcattttacaatacttaatggatataaatgggaaaatgtggcttcggaacccctgccatttgtatatcgttgaaatcctggaaaggaggacgtcagtgccgtcgaggagctcttcagcgctgcgtacacgtgtaccccagttcagttttcttgacatcttcccaaaagtcacctgcaggcctcccaaagaggtgatagacatggagctgagtgccctgaggagtgacacagagcctgggatggatctgtgggagttctgcagcgaaactttccaaagaccttaccagtatttaagacgattcaatcaaaaccaagacctagacacgtttcagtatcaagaaggctctgtcgaaggcaccccggaggaatgcctccagcatttcctgtttcactgcggggtaataaacccatcctggtcagagcttcggaactttgctcggttcctgaattatcagctcagagattgtgaggcctctctcttctgcaatccgagttttattggcgacacactgaggggcttcaagaagttcgtggtgaccttcatgatctttatggcaagagattttgccacaccatcactccacacctctgaccaaagcccggggaagcacatggtcaccatggatggggttagggaagaagatctagcgcccttctccctccggaagaggtgggagtcggagcctcacccatacgttttcttcaatgacgaccacacaaccatgacattcatcggcttccatctgcagcccaacatcaacggcagtgtcgatgccatcagtcacttgactgggaaggtcatcaagagagacgtcatgaccagggacctgtaccagggcctgctgctccagagggtgcccttcaatgtcgactttgataaactgcccagacacaagaaacttgagaggctctgcctgaccttagggatcccccaggccaccgaccccgacaaaacgtatgagctcacaaccgacaatatgcttaaaatccttgccatcgagatgcggttccggtgtgggatcccggttatcatcatgggagaaactggctgtgggaaaaccaggcttattaaattccttagcgacctgcggcgtggtggtaccaatgctgacaccataaagctggtcaaggtgcacggaggaacaactgcagacatgatctactccagagtcagggaggctgaaaatgtggccttcgccaataaggaccaacatcagttggacaccatcttgttttttgatgaagccaacacaacggaagctataagctgtatcaaagaagtcctgtgtgatcatatggtggatggccagcctctggctgaggactctggcctgcatattatagctgcctgcaatccataccggaagcactctgaggagatgatctgccgtttggagtcagctggtttgggctacagggttagtatggaggagacggccgacaggctgggctccattcctctgaggcagctggtataccgggtccatgctctgcccccgagcctgattcctctggtgtgggactttggacaactgagtgacgttgctgaaaagctctacatccagcagattgtccagagactggttgagtccatcagcctagatgaaaacgggactcgcgtgatcacagaagtcctctgcgcctctcagggtttcatgaggaaaacagaagatgagtgcagctttgtcagcctcagggacgtggagcgctgtgtgaaagttttcaggtggttccacgagcacagcgcgatgctcttagcgcagctgaatgcctttctctccaagtccagcgtcagcaaaaatcacaccgagagagatcccgtcctctggtcgttgatgctggccatcggggtgtgttaccatgcctctttagaaaagaaagactcatatcggaaagccatcgccaggttctttccgaaaccgtatgacgacagcaggctgcttctggatgaaataacacgggcacaggatctttttctggacggcgtacctctgaggaaaaccatcgccaagaacttggccttgaaggagaacgtcttcatgatggtcgtctgcatcgagctgaagattcccctcttcctggtggggaagcccggcagctccaagtctctcgccaagaccatcgtggcagacgccatgcagggcccggctgcctactcagatctcttccgcagcctgaagcaggtccacctggtgtccttccagtgcagcccgcactccaccccacagggcatcatcagcaccttccggcagtgcgcccgctttcagcaggggaaggacctgcagcagtacgtctctgtggtggtgttagatgaggtggggctggcggaagactcacccaaaatgcccctgaagactctgcacccgctgctggaagacggatgcattgaagacgatcccgccccccacaaaaaggtcggcttcgtgggcatctccaactgggcccttgaccctgccaagatgaaccggggcatttttgtgtcacgtggcagccccaacgagacagagctcatagagagcgccaagggcatctgctcctcagacatcctcgtccaggaccgagtccaagggtactttgcgtcctttgccaaagcctacgaaacggtgtgtaagcgccaggacaaggaattcttcgggcttcgtgactactacagcctcatcaaaatggtctttgctgcagcaaaggcttcaaatagaaagccttccccgcaagacattgcacaggctgtccttaggaacttcagtggcaaggatgacatccaagctttggacatctttctggccaatttgcccgaggccaagtgctcagaggaagtcagccccatgcagctgatcaaacagaacatctttgggccttctcagaaggtgccgggtggagagcaggaagatgctgagtcccgctacttactcgtgctgaccaaaaactacgtggcactgcagatcctgcagcagacattcttcgagggggaccagcagccggagattatttttggttctggtttccccaaggaccaagagtacacccagctctgcagaaacatcaatcgtgtgaagatctgcatggaaacaggcaagatggtgttgcttctcaacctgcagaacctctacgagagcctctacgacgcactcaaccagtactacgtccacctcggcggccagaagtacgtggacctcggtctggggacccaccgcgtcaaatgtcgggttcaccccaacttccgcctgattgtcattgaagagaaagacgtcgtgtacaaacactttcccatccccctcattaaccggctggagaagcactatctggatatcaacacggtgctggagaaatggcagaagagcatcgtggaggagctctgtgcgtgggtggagaagttcatcaatgtcaaagcacatcatttccagaagaggcacaaatacagcccctctgacgtcttcatcggctaccactcggacgcctgcgcgtctgtggtgctgcaggtcatagagaggcagggtccccgggccttgacggaggaacttcaccagaaggtgtctgaggaggccaaatcgatcctgctgaactgcgctacgcccgatgccgtggtccggctgagcgcctactcgctgggcgggttcgcagcggagtggctgtcgcaggagtactttcacagacagaggcacaactcctttgcagatttccttcaggcacacctgcacacggcagacctggagcgccacgccatcttcacagagatcaccactttctccaggctgctaacaagtcacgactgtgaaattttagaatcagaggtcacaggcagggctccgaaacccacactcctgtggctgcagcagtttgacaccgagtactcattcctcaaagaagtccgaaactgtttaacgaatacagccaaatgtaaaatcctcatttttcagacagattttgaagatggaatccgtagcgcccagctcattgcctcagctaagtattctgttataaatgaaatcaacaaaatacgagaaaatgaggaccgtatcttcgtctatttcatcacaaaactgtcccgggtgggaagaggaacagcctatgtgggcttccacggagggctgtggcagtctgtccacatcgatgacctccggagatccaccctcatggtttctgatgtgaccaggctgcagcatgtcaccatcagccagctgttcgcgcccggagacttgcctgagctgggcttggaacaccgggcggaagacggccatgaggaggcgatggagacggaggccagcacatcaggggaggtggcagaggtggcagaggaggccatggaaacagaaagttctgagaaggtgggaaaggaaacctctgaactcggaggcagtgatgtgtcgatcctggacaccaccaggctgctgagaagctgtgtgcagagcgccgtgggcatgctcagagaccagaacgagagctgcacgcgcaatatgcggagggtggtgctcctcctgggcctcttgaatgaggatgacgcgtgccacgcctctttcttgcgggtatccaagatgcgcctcagtgtctttttaaagaagcaagaagagagccagtttcaccctctggagtggttggcaagggaagcctgcaaccaggacgctctccaggaggcgggcacattcaggcacaccctctggaagcgggtccaaggtgctgtcacccctctgctggcgagcatgatatcattcatcgacagagacggcaacctagagttactgaccaggccagatactccgccctgggcaagagatctttggatgtttattttcagtgacacgatgcttctgaacattcctcttgtgatgaataatgaaagacataaaggtgagatggcctacatcgtggtgcagaaccacatgaacctttccgagaacgcttccaacaacgtccctttcagctggaaaatcaaggactatctggaggagctgtgggtccaggctcagtacatcacagacgcagaaggactgcccaagaagttcgtggacatctttcagcagactcctctgggcaggtttcttgcccagctccatggagagccgcagcaggaacttcttcagtgttacttgaaggatttcattctcttgaccatgcgtgtgtcaacggaggaggaattaaagtttctgcagatggctctgtggtcctgcactaggaaactgaaagcggcgtcagaagcgcccgaggaagaggtttccttaccgtgggtgcaccttgcctaccagcgtttcagaagccgtctgcagaacttttccagaatcctgaccatctaccctcaggttctccacagcctgatggaagcccgttggaaccatgagctggctggatgtgagatgaccctggacgcatttgccgcaatggcctgcacggagatgctgacaagaaacaccctgaagcccagtccccaggcgtggctacagttggtgaagaatctttccatgccgctggagctcatctgctccgatgagcacatgcaaggcagcgggagcctggcccaggctgtcatcagggaagtcagagcccagtggagtcggattttctccaccgcactcttcgtggagcacgtgctcctaggaaccgagagccgcgtccccgagttacaggggctggtgaccgagcacgtcttcttactagacaagtgtcttcgagagaactctgacgtgaagacgcacgggccttttgaggccgtgatgcgcactctctgtgaatgcaaggagacagccagcaagaccctcagcaggtttgggattcagccgtgctccatctgcctgggagatgcaaaggaccccgtctgtctgccctgcgaccacgtgcactgcctgcgctgcctcagggcctggtttgcctcagagcagatgatatgcccctactgtttaactgccttgccagacgaattctctccagctgtttcccaagcgcacagggaagccattgaaaagcatgcccgcttccggcagatgtgcaacagtttcttcgtagacctggtgtccaccatttgcttcaaggacaacgctccgcctgagaaggaagtgattgagagcctgctctctctcctcttcgtccaaaaggggcgcttaagagatgctgcccagagacactgtgaacacacaaaatctctctctccattcaatgatgttgtggataagactcctgtcatccgctcagtgatactgaaactgcttttgaagtacagctttcatgatgtaaaagattatattcaggaatatttgaccctgttaaaaaagaaagcattcataactgaagataaaactgaactgtacatgctcttcatcaactgcctggaggattcaatacttgagaagaccagtgcttactccagaaatgatgaactgaaccacctagaagaggaaggtcgtttccttaaggcatattctccagcaagccggggccgagagcctgccaacgaggcctcggttgaatacctgcaagaggtggcccggatccgcctctgcctcgacagagctgcagatttcctctcggagcctgagggaggcccagagatggccaaggagaagcagtgctacctgcagcaagtcaagcagttctgtatccgggtggagaacgactggcaccgggtgtacctggtgcggaagctcagcagccagcgggggatggagttcgtgcagggcctctccaagcccggccgcccgcaccagtgggtgtttcccaaggacgttgtcaagcagcaggggctgcggcaggaccacccaggccagatggataggtacctggtgtacggcgatgaatacaaggctctccgtgatgctgtggccaaagctgtcctcgagtgcaagccactgggcattaagactgctctgaaggcctgcaagaccccccaaagccagcagtcagcctacttcctgttaacactgtttagagaggtggctattttgtacagatcccacaatgcaagcctccaccccacgccagagcaatgtgaagctgtgagcaaattcattggcgaatgcaagatcctttcacctcctgatatcagccgttttgcaacatcgctcgtggacaattctgtgccattgttgagggcggggcctagtgacagcaaccttgatggaacggtgacagaaatggccattcatgctgcagccgtccttctgtgtggacagaatgaactcttggagcccctaaagaatctggccttctccccagccaccatggcgcatgcttttcttccaaccatgcctgaagacttgctggctcaagctcggaggtggaagggtctggagcgagtccactggtacacttgtcccaacggccatccttgctccgtgggagagtgtggcaggccgatggaacagagcatctgcattgactgccatgcgccgattggaggcattgaccacaaacctcgggacggctttcatctggtcaaagacaaggcagacagaacgcagaccggccacgtgctgggcaacccgcagcggagagacgtggtgacatgtgaccgagggctgcccccagtggtcttcctccttatccggctactcactcacttggctctgcttctgggagcgtcccagagttcccaggctctgataaacatcattaagcctccagtgagggatccaaaaggctttctgcagcagcacatcctgaaggacctggagcagttggccaagatgctgggacacagtgccgacgagaccatcggcgtggtccacctcgtcctgcgcaggcttctccaagagcagcaccagctctctagcagaaggcttttaaattttgacacagaattgtcaactaaagaaatgaggaacaactgggaaaaggaaatcgcagctgtgatttctcctgaactggagcatctagataaaacccttcccaccatgaataatctcatcagccaagataagcgtatcagctctaaccctgtggccaaaataatatatggtgacccagtgaccttcctgccccacctgccccggaaaagtgtggtccattgctctaagatttggagctgcaggaaaagaattacagttgagtacctccagcacattgtggaacagaaaaatggcaaagaaagagtgcccatcctctggcatttcctgcagaaggaagcagagctgaggctggtaaagttcctgcctgagattttggccttgcaaagggatctagtgaagcagttccagaacgtccagcaagttgaatacagctccatcagaggcttcctcagcaagcacagctcagatgggttgaggcagctgcttcacaacaggatcacagtctttctgtccacatggaacaaactgaggagatcgcttgagacgaacggtgagatcaacctacccaaagactactgcagcactgacttggatctggacactgagtttgagatcctcttgccacgccgacggggcctgggcctctgtgctaccgctctcgtcagctacttgattcgcctacacaatgaaattgtctacgccgtggaaaaactctccaaggaaaacaacagctattccgtggatgccgccgaggtcactgaactgcatgtcatcagttatgaagtggagcgggacctgactccactgattctctccaactgccagtaccaggtggaggagggcagagagaccgtgcaggagttcgatctggagaagattcagcggcagatcgtcagccgcttcctccagggcaagccccggctgagcctcaagggaatacccactctggtgtacagacacgactggaactatgaacatctctttatggacatcaagaacaaaatggcacaggactccctccccagctcggtcattagtgccatcagtggacagctgcagtcctacagcgatgcctgtgaagtgctgtctgtcgtagaagtcactctggggtttctgagcacagctggtggggatccaaacatgcagctgaatgtgtatactcaagacatcctgcaaatgggtgatcagacgattcacgtgttaaaggccttaaacagatgccagttaaaacacaccattgccctctggcagttcctgtctgctcataagtctgaacagctgctgcggctgcacaaagagccatttggggaaatcagttcaaggtacaaagcggatctgagcccggaaaatgctaagctcctcagcacattcctaaatcagactggcctagacgccttcctgctagagctgcacgaaatgataatcttgaaactaaagaacccccaaacccaaaccgaggagcgcttccgccctcagtggagcctgagagacactctcgtaagttacatgcaaactaaagaaagtgaaattcttcctgaaatggcatctcagttcccagaagagatactgctcgccagctgtgtctcagtgtggaaaacagctgctgtgctgaaatggaatcgagaaatgagatagaattatttcctcagctatctttggatgactttggagagaagactcctctctcctcgtctgcggcgtggacttgatcatggactggtgcctttgcattcagaaggagagctgtcagcgtagcaccgaattcaagaccaaggcgtgctacctgagctgacagctttttgaaagccgagctgtttctgaaccatgtacatacatgttctgaaactttctcatcattttatgagtactgttcattgagagatgacaatgaagattagatgaaattggaaataaaccaacattgtttacattccaggagacttgtagctcagccacacacgcagtaatgacctgtgcccgttcgcctctggcactgcccacccctctttttttttttcttctaattctgtactcacaaaagagaatctcattttcttctttcttccattcccttaaattctgagtactgtacatatatttctgggttcccacgatgatgtgaaaaactaccagactgttttttgtcttctcacaaagacaagaaaaatcagggcattttgtgagtgccttaagatcaaactaacaagatctgaccctctcccctcacagtgagccactgccccacttcagagggtaagagccaaaagcctcattgtgaaaggcactggacttggaccagggacaccatcagggccttggttttctcacgcataaaatggagagtggattaatcgccaaagattcttctgatctgacattttgaaattgtgagagaaactagatgactgtaaacttggtcacaggcctggttctggcagttctttgcggacttttttctagcattatgccaaataaacatgcagtctcagtgtgctctcgcatgtatgaatatctagtcctttctgtggttctcagccaagacataaaaactaggactcagagcacatacaaaaccagttatgtttcggaaagagggaaaagagtccccgagcccggatcttgtgctgcttttctcactgacgtgttgccttttttctttacaaaatctgctttgatacttaggacctctctggactaatttctcttcctagacagctcagcacagctattgatatgttagaggcagtatccttaatattcattctaaatgagttaacgacttaacttgaaattgggcctaaggagtgagaactacaaaaatacaaaatgcttgtccaggactcagccatgcacaccttgagcagcgccggcaggaggcacggaaggaactgtgctccgttctcctcactgtcatggtgccaccagtgtctgatgaagggcagagtgacccagactgcaggcagtaactgacttcacacagtccctggcatttagtcatctgtgattgttttatcactctggactgtgcagagccacctgccaccgagatctgcattccgactgcctatgaacgggtgtgggggccgggggctggcttgctgaagtcttcaacttgcactcggagctcctttgatacctcagagctggctgtcaggtggcagctcacacccagactcactggccacacctcagcagggggggagtcgagtgtcagtctctttctgtgaaggctttttttttcctttggcctgggaatttttcccatttttatgaaggggttttaaattgtttcattttgtgtgctgtgcttcaaagccttaactgtcaaatcttgcattatcttgtttgtacagaaatatactggcctagcagaggcaaaaaaaaaaaaaatgaattttattttacttgtcacacctgtcttaataaactggagttttgctgctaaagaactcttctctctgggggcagagcttctatttatggcacatagacatcagctaggcttttgggaatcgtttgtgttctttgtggaaatgtcctttagaagcacccatgaagtagtgtgttcagactgtgcacacagaaaacaggctctgccttcacatgtgagacggtggacttttcctctggacaaaatgacagcatcctggcgactccacagtggagctgagcgccactccctgtagccgatctgggactgaaacgcttacacctctgcctcagaaggagtcccccatgccctgcctgaaatgacttcactggacacagcggggctgcagctaacggggtacaggtaggagctaactaacttcacccctgagtccacttgcggggtaagagataaacagtaacccttccaggagcccactgacgttggagtgctaaaaatgccccttcagggggaaaactgcattttctcttccaaaaaggaaaggttcttccaggcgagaaacctgtggtctagaaccacagcaagaagaggaggcatgctggcctgcaccggaagactcactttgtctgccctgcgccagcctcacctcaccctgcagttcccgtttccgccatggatgcctcatcaccaaccctgaccttccccctcccaaccctttattcatcctcactcccactcatacccgcctccctggacagttccctgctgcagagttctttctgctttcagccctaccttggtggtgatttacctgaaaatcttcacaactgatcattatctccttctctttgagacctgactgaaaaaattaggtgtgcacacctgtaatcccagctacctgggaggctgaggtatgaggattgcttgagcctgggagtttgaggctgcagtgagctatgattgcaccactgcactccaacctgggtgacagagtgagaccctgtctcaaaaaaaaataaaataaggaccttattgtgtgtgcaaattatttgcctttcatgaatagttatgagactttgtgcatgtgttaaccgagacggccctgagctatttcagttactcctgtatgttcaggcaattccaatttagaaacaaacttccagtgataaatattgggaagaaaatgtcagctcagggccaagtaggtaaagccacccaagtctagccatgcacacaggcactagtgtgctgaaggaaaacacctctgatttgatacataaagtgtgaaggttgcataactggggaggtggctggagaaaacctgagcctcgagctgagtaacaatccaagccatgattagcatttatattgcattctgcattattctcatcctatcacgttcattaagttcaaccattaccattacgaatcccgtttccagctggaaaaacaagcgccaggaaagtgcatttcccccccaccccccccccccaaccagagcaactttggtcagaagtcacacctaatcaccctctctgcaggatatgctggggatagcccttttgaggaggtgggggtgtatgcgaaagcaacctggggccaaagcagggggaagcaggagagactggaggggccctgggtccagcaagtgctccaccaggctgcccctgctcaggtgctccacagcccataaaaaacgccttcagccctgctgtgcttcccctcacacctaaacttactataagggtcctaccttccccagtattccttcatgatcactgctacctgtgccctgaagcgcaacagaacctcaacccagaggacagccacttcctcagaacccacgatctttgccccatcgccacaggtccatgagtgactcctaattaccaaatccaagggctccttcaccctgaccactctggaacccaacaaagctgacacacagcccagcccagacaggcctgaatgtgggtcctggctctcccatttgccagttctacagccatgggcaagtggctcgacctctctaagcttcagtttcctcgtctgtgaaatatctgtcagtgctcttaagggaggagaccaccccacatattgtcttacgcccaatttctgcctccaaagagagaagtaaaaactaaaaggcagaaatgaaatccacaagcagacagcctgcaccacaccctgggcctggtagttaaagatcgacgcctgacctaatcagtgatgctatctatagattacagacattatatagaaaagcaccgtgaaaatccctgtcctgttctgttccgttctaattacgggtgcatgcagcccccagtcacgtaccccctgcttgctcaatcaatcacgaccctctcacgcagaccccttaagagttgtgagcccttaaaagggacaggaattgctcactcggggagctcagttgttggagacatgagtcttgccgaagcgcccggctgaataaagcccttctttaactcgtgtctgaggggttttctctgcagcttgtcctgctacatttcttggttccctgaccaggaatctaggtgattaatggatggttgaggcagcccctcagacggcttaggcctgccctgtggagcatccctgtggaggactccagccagcttgagcgacatggatcctgagagcgctctcaggcaggcaattgccccagtggaatgcctggccagagcagtgtgtagcaggcccccgaggaggatcaacgcagtggctgaacaccgggaaggaactgccacttggagtccagacatctgaaacttggtaagactggtctttggaacttgcccactccatttgaggggaagcgtggcctgatcacccacggcgtgcctgtactggcactctggtttttgtttttgacttgacttggattgcttgatactttggttttggttttgacctgacttggatatcctgatactctgattttggttttgattttggtttggtgtaaactgtaaaagtgtgtgtgtgccctttttacctgttctttgttttgtggtatgcgtgtagggtgagcgtaatgttttgtcttgaagaagcatgggtcaagcacaaagtaagaccaccccactaggaactatgctgaaaaatttcaggaaaggatttaagggagactatggagtactatgacaccaggaaaacttaaaactttgtgtaagatagactggccagcattagaggtaggttggccatcagagtgaagcctggacaggtcccttgtttcaaaggtatggcacaaggtaacctgtaagccagggtacccacaccagttcccgtacacagacacttggttacagctggttttagactccccacccgcccgccccaacagtggttgagagaacagcagcataagtggctggcagaggcaaggaaagaccagcagagagagaaagaggaagagacagacaaagagggagtcagagagagagagagaaagagacagaggcaaaaggaaagtcaaagagaaagagacagaaaatcaagaggaaaaaaaa

SEQ ID NO: 25 - DNA, 17730 bp, homo sapien
gacagcgcgcggcaggcggcgagctcgggggccgcagaaaatgaaactgaagccgtggtcacgtgacaggacatgtagtatatagcaggctgccagcgactcctgctcttgcttctggatctgcagggcagtcccagcaggacccatggagtgtccttcgtgccagcatgtctccaaggaggaaacccccaagttctgcagccagtgcggagagaggctgcctcctgcagcccccatagcagattctgagaacaataactccacaatggcgtcggcctcggagggtgaaatggagtgtgggcaggagctgaaggaggaagggggcccgtgcttgttcccgggctcagacagttggcaagaaaaccccgaggagccctgttccaaagcctcctggaccgtccaagaaggagctacatcagaggttttggtagatgctgctgtagacctcatatccgatgaatgggaagctgctaatgccatacccagcaagagaaggaagcaggatgcagccccgcttgaggccgccagcgtgccttctgcagactgtgagcagagcaaaaagaagaaaaggaagaagaaaaagaaggggaacaagtccgcttcctcagagctggcttccttgcccctttctcctgccagcccctgtcacctgactttgctttcaaacccgtggcctcaggacacagccctgccccacagccaagcccagcagagtggccccactggccagccgagccagcccccaggcacagccaccacgccactggagggtgacggcctctccgcgcccaccgaggttggcgacagccccctgcaggcccaggctttgggagaggcaggagtggccacaggaagtgaggctcagagcagcccgcaattccaggaccacacggaaggggaggaccaggacgcttccatcccctctgggggcagaggcctgtcccaggaggggaccggtccccccacctctgctggtgaaggccattctaggactgaagatgctgcccaggagctcctgttgcctgagtcaaaaggaggcagctctgagcccgggacagaactgcagaccaccgagcaacaggcaggggcctcagcctctatggcagttgatgctgtagctgagccagccaatgcagttaaaggggccgggaaggaaatgaaagagaagacccagagaatgaaacagccaccagcaaccactcctcctttcaaaacacactgccaggaagctgagaccaagaccaaggacgagatggctgctgctgaagaaaaagtcggtaagaatgaacaaggggagcctgaagacctcaagaagccagaggggaagaacagaagtgcagctgctgtgaaaaacgagaaggagcaaaaaaaccaggaagcagatgtccaggaagtgaaggcaagcacgctgagcccgggtggaggagtcaccgtgttcttccacgccatcatctctcttcatttcccattcaatcctgacctccataaagtcttcatcagaggaggagaagaatttggggagtcaaaatgggacagcaatatctgtgagctgcactacaccagagacttgggtcatgaccgcgttcttgttgaaggcattgtctgcatttccaagaagcacctagataaatacattccttacaagtacgtcatttataatggggaatcttttgagtatgagttcatttacaagcaccagcagaagaagggcgagtacgtcaaccgctgtctgttcataaaatcttcacttctgggctcaggagactggcatcagtactatgacatagtttatatgaagcctcatgggagactccagaaagtcatgaaccacatcacagacgggccgaggaaggacctggtgaaggggaagcagattgccgctgcgctcatgctggacagcaccttcagcatcctgcagacctgggacaccatcaacctgaacagcttcttcacccagttcgagcagttttgctttgtcctgcaacagcctatgatttatgaaggacaggcacagctgtggaccgatttgcagtacagggagaaagaggtgaagagatacctgtggcaacatctgaaaaaacacgtggtaccattgccggacggaaaaagcacggactttttgcctgtggactgcccagtgaggagtaaactgaaaacaggcctgattgtcctttttgtagtggaaaaaattgagcttttattagaaggcagcctggactggttgtgtcacctcctaacctcagatgccagctcaccagatgagtttcaccgtgacctaagccacatccttgggatacctcagagctggcggctgtacctggtgaacctgtgccaaagatgcatggacacaaggacgtacacctggctgggcgccctgcctgtcctgcactgctgtatggagctggccccgcggcacaaggatgcctggagacagcctgaggacacctgggccgctctggagggactctccttctcaccgttccgggaacaaatgctagatacgagttccctacttcagtttatgagagagaagcagcatttgctgagcatagacgagcctctcttccggtcctggtttagtctgctacctctgagtcacctggttatgtatatggaaaacttcattgagcacctgggtcgttttcctgctcatatcctggactgtctttcagggatttactaccggcttccgggacttgagcaagtcttgaatacgcaggatgttcaggatgttcagaacgttcagaacattttagaaatgctgttgcgactcctggacacttaccgggacaagattcccgaggaggccttgtcaccatcctacctgactgtgtgtctgaaactgcatgaagccatctgcagcagcacaaagctacttaagttttacgagctgccagccttatctgccgagattgtctgcagaatgattagacttctatctctggtggattctgcaggacagagagatgaaactggaaataattcagtccaaacagtcttccaagggacccttgctgctacgaaaaggtggctccgagaagtttttacaaagaacatgctcacatcttcaggtgcctcattcacatacgtcaaggaaattgaggtctggaggcggctggtggaaatccaattccccgcggagcatggctggaaggagtcgttgctgggagacatggaatggaggctcacaaaggaggaacccctctcccagatcactgcctactgcaatagttgctgggacaccaaaggcttagaggacagtgtggccaagaccttcgagaaatgcatcattgaagccgtgagctcagcctgccagtctcagaccagtatccttcaggggttctcttactctgatttgcggaaatttggcatcgtcttgtctgctgtgatcactaagtcctggcctaggaccgcggacaacttcgatgacattttaaagcatctgctcacgttggcagatgtcaagcacgtcttcagattgtgtggaaccgacgagaaaatactagcaaatgtcacagaggatgccaagaggctgatagctgttgccgactctgtgttgacgaaagttgttggtgacctcctaagtggcacgattttagttggacaactggagctgattataaagcacaagaatcagtttcttgacatctggcaactgagggaaaaaagtctttcaccccaggatgaacaatgtgctgtggaggaagcactggattggagaagggaggaactgttacttctaaagaaagagaaaagatgtgttgatagtctcctgaagatgtgtgggaacgtgaaacatctgatacaagtggactttggagtgcttgcagtaagacactcacaagacctcagcagtaaaagattaaatgacaccgtgacagtgagactgtccacctcctcgaactcgcagagggcaacgcattaccacctgagctcccaggtccaagaaatggctgggaagatagacttgctcagagacagccacatcttccagctcttctggcgggaagccgcagagccgctgagtgagcctaaggaggaccaggaagccgcagagttgctgagtgagcccgaagaagaatcagaaaggcacatccttgagcttgaagaggtgtatgactatttgtatcagccttcttacagaaagttcattaagttgcaccaggatctaaagtcaggagaggtcacccttgcagagattgatgtcatcttcaaggactttgtgaataaatacacggacctggattcagaacttaagatcatgtgcaccgtggaccaccaggaccaaagagattggatcaaggaccgagtcgaacagatcaaggaataccatcacctgcaccaggctgtccacgcagccaaggtcatcttgcaggtcaaagagagcctgggactgaacggtgacttcagtgttctcaacactttactaaattttactgataacttcgacgactttcgccgtgaaacactggaccagatcaaccaggagctcatccaggccaaaaagctgctccaggacatcagcgaggcccggtgcaaggggctgcaggctctgtccctgagaaaggagttcatctgctgggtccgggaggctcttggaggcatcaatgagctgaaggtgtttgtggacctggcctccatctcagcgggggagaatgacattgatgtggaccgggtggcctgcttccatgacgctgtgcagggctacgcatccctgctatttaagctggaccccagcgtggacttcagtgcattcatgaagcatctgaaaaagctgtggaaggctctggataaggaccagtacctgcccaggaaactgtgtgactccgccaggaacttggaatggctgaagactgtgaatgagagtcatgggtctgtggaacgctcatccctgaccctggccacggccatcaaccaaagaggcatctatgtgatccaggcgcccaaaggtggccaaaagatttccccagacacggttctgcacttgatccttcctgagagccctggcagccacgaggagtcacgagagtactctttagaggaggtgaaggagcttttgaacaagttgatgctgatgtctggcaagaaggatcgtaacaacacggaagtggagaggttttcagaggtcttctgcagtgtgcagaggctcagccaggccttcatcgacctgcactctgctgggaatatgctgttcaggacgtggatcgccatggcctactgctcccccaagcagggtgtgtccctccaaatggactttggcttggacctggtgacggagcttaaagaaggtggagatgtcactgagctgctggcagccctctgcaggcagatggagcacttccttgacagctggaagagatttgtgacccagaagcgaatggagcacttttacctgaacttctacacggcagagcagctggtttacctgagcactgagctcaggaagcagcccccgagtgatgccgccctaacgatgctatccttcatcaaaagcaactgcaccctgagggatgtcttaagggcctctgtggggtgtgggagtgaggccgccaggtaccgcatgaggagagtcatggaagagctcccgctgatgctcttatcagagttcagcctggtggacaagctgaggatcatcatggagcagtccatgaggtgccttcctgccttcctgcccgactgcctcgacctagagacccttggccactgtctggctcacctggcagggatgggtgggtctcccgtggagcgttgtctcccgagaggtctgcaggtcggccagcccaacctcgtcgtctgtggccactccgaggtgttgccagccgccctggctgtctacatgcaaaccccaagccagcccctgcccacttacgatgaggtgctgctctgcaccccggcaaccacctttgaggaggtggcactgttgctgcgccgctgcctgaccctgggctccctggggcacaaggtctacagcctgctgttcgcagatcagctgagctacgaggtggcacgccaagcggaggagcttttccacaatctgtgcacgcagcagcaccgagaagactaccagctcgtcatggtctgtgatggggactgggagcactgctacctcccctctgccttcagccagcacaaggtcttcgtcaccccccaggcacccctcgaggccatccaagcctacctggcaggtcactaccgggtcccgaagcagaccctgtcggcggcagccgtgttcaatgaccggctgtgtgttgggatcgtggcctcggagcgagcaggtgttggaaagtctctgtacgtgaagaggttgcacgacaaaatgaagatgcagttaaacgtgaaaaatgtgcctctgaaaacaattcgactgatcgaccctcaggtggatgagagccgagtcctgggcgccctgctgcccttcctggatgcgcagtatcagaaggtccccgtgctctttcacctggacgtgacctcctcagtgcagactggaatttgggtgtttcttttcaagctcctcattttacaatacttaatggatataaatgggaaaatgtggcttcggaacccctgccatttgtatatcgttgaaatcctggaaaggaggacgtcagtgccgtcgaggagctcttcagcgctgcgtacacgtgtaccccagttcagttttcttgacatcttcccaaaagtcacctgcaggcctcccaaagaggtgatagacatggagctgagtgccctgaggagtgacacagagcctgggatggatctgtgggagttctgcagcgaaactttccaaagaccttaccagtatttaagacgattcaatcaaaaccaagacctagacacgtttcagtatcaagaaggctctgtcgaaggcaccccggaggaatgcctccagcatttcctgtttcactgcggggtaataaacccatcctggtcagagcttcggaactttgctcggttcctgaattatcagctcagagattgtgaggcctctctcttctgcaatccgagttttattggcgacacactgaggggcttcaagaagttcgtggtgaccttcatgatctttatggcaagagattttgccacaccatcactccacacctctgaccaaagcccggggaagcacatggtcaccatggatggggttagggaagaagatctagcgcccttctccctccggaagaggtgggagtcggagcctcacccatacgttttcttcaatgacgaccacacaaccatgacattcatcggcttccatctgcagcccaacatcaacggcagtgtcgatgccatcagtcacttgactgggaaggtcatcaagagagacgtcatgaccagggacctgtaccagggcctgctgctccagagggtgcccttcaatgtcgactttgataaactgcccagacacaagaaacttgagaggctctgcctgaccttagggatcccccaggccaccgaccccgacaaaacgtatgagctcacaaccgacaatatgcttaaaatccttgccatcgagatgcggttccggtgtgggatcccggttatcatcatgggagaaactggctgtgggaaaaccaggcttattaaattccttagcgacctgcggcgtggtggtaccaatgctgacaccataaagctggtcaaggtgcacggaggaacaactgcagacatgatctactccagagtcagggaggctgaaaatgtggccttcgccaataaggaccaacatcagttggacaccatcttgttttttgatgaagccaacacaacggaagctataagctgtatcaaagaagtcctgtgtgatcatatggtggatggccagcctctggctgaggactctggcctgcatattatagctgcctgcaatccataccggaagcactctgaggagatgatctgccgtttggagtcagctggtttgggctacagggttagtatggaggagacggccgacaggctgggctccattcctctgaggcagctggtataccgggtccatgctctgcccccgagcctgattcctctggtgtgggactttggacaactgagtgacgttgctgaaaagctctacatccagcagattgtccagagactggttgagtccatcagcctagatgaaaacgggactcgcgtgatcacagaagtcctctgcgcctctcagggtttcatgaggaaaacagaagatgagtgcagctttgtcagcctcagggacgtggagcgctgtgtgaaagttttcaggtggttccacgagcacagcgcgatgctcttagcgcagctgaatgcctttctctccaagtccagcgtcagcaaaaatcacaccgagagagatcccgtcctctggtcgttgatgctggccatcggggtgtgttaccatgcctctttagaaaagaaagactcatatcggaaagccatcgccaggttctttccgaaaccgtatgacgacagcaggctgcttctggatgaaataacacgggcacaggatctttttctggacggcgtacctctgaggaaaaccatcgccaagaacttggccttgaaggagaacgtcttcatgatggtcgtctgcatcgagctgaagattcccctcttcctggtggggaagcccggcagctccaagtctctcgccaagaccatcgtggcagacgccatgcagggcccggctgcctactcagatctcttccgcagcctgaagcaggtccacctggtgtccttccagtgcagcccgcactccaccccacagggcatcatcagcaccttccggcagtgcgcccgctttcagcaggggaaggacctgcagcagtacgtctctgtggtggtgttagatgaggtggggctggcggaagactcacccaaaatgcccctgaagactctgcacccgctgctggaagacggatgcattgaagacgatcccgccccccacaaaaaggtcggcttcgtgggcatctccaactgggcccttgaccctgccaagatgaaccggggcatttttgtgtcacgtggcagccccaacgagacagagctcatagagagcgccaagggcatctgctcctcagacatcctcgtccaggaccgagtccaagggtactttgcgtcctttgccaaagcctacgaaacggtgtgtaagcgccaggacaaggaattcttcgggcttcgtgactactacagcctcatcaaaatggtctttgctgcagcaaaggcttcaaatagaaagccttccccgcaagacattgcacaggctgtccttaggaacttcagtggcaaggatgacatccaagctttggacatctttctggccaatttgcccgaggccaagtgctcagaggaagtcagccccatgcagctgatcaaacagaacatctttgggccttctcagaaggtgccgggtggagagcaggaagatgctgagtcccgctacttactcgtgctgaccaaaaactacgtggcactgcagatcctgcagcagacattcttcgagggggaccagcagccggagattatttttggttctggtttccccaaggaccaagagtacacccagctctgcagaaacatcaatcgtgtgaagatctgcatggaaacaggcaagatggtgttgcttctcaacctgcagaacctctacgagagcctctacgacgcactcaaccagtactacgtccacctcggcggccagaagtacgtggacctcggtctggggacccaccgcgtcaaatgtcgggttcaccccaacttccgcctgattgtcattgaagagaaagacgtcgtgtacaaacactttcccatccccctcattaaccggctggagaagcactatctggatatcaacacggtgctggagaaatggcagaagagcatcgtggaggagctctgtgcgtgggtggagaagttcatcaatgtcaaagcacatcatttccagaagaggcacaaatacagcccctctgacgtcttcatcggctaccactcggacgcctgcgcgtctgtggtgctgcaggtcatagagaggcagggtccccgggccttgacggaggaacttcaccagaaggtgtctgaggaggccaaatcgatcctgctgaactgcgctacgcccgatgccgtggtccggctgagcgcctactcgctgggcgggttcgcagcggagtggctgtcgcaggagtactttcacagacagaggcacaactcctttgcagatttccttcaggcacacctgcacacggcagacctggagcgccacgccatcttcacagagatcaccactttctccaggctgctaacaagtcacgactgtgaaattttagaatcagaggtcacaggcagggctccgaaacccacactcctgtggctgcagcagtttgacaccgagtactcattcctcaaagaagtccgaaactgtttaacgaatacagccaaatgtaaaatcctcatttttcagacagattttgaagatggaatccgtagcgcccagctcattgcctcagctaagtattctgttataaatgaaatcaacaaaatacgagaaaatgaggaccgtatcttcgtctatttcatcacaaaactgtcccgggtgggaagaggaacagcctatgtgggcttccacggagggctgtggcagtctgtccacatcgatgacctccggagatccaccctcatggtttctgatgtgaccaggctgcagcatgtcaccatcagccagctgttcgcgcccggagacttgcctgagctgggcttggaacaccgggcggaagacggccatgaggaggcgatggagacggaggccagcacatcaggggaggtggcagaggtggcagaggaggccatggaaacagaaagttctgagaaggtgggaaaggaaacctctgaactcggaggcagtgatgtgtcgatcctggacaccaccaggctgctgagaagctgtgtgcagagcgccgtgggcatgctcagagaccagaacgagagctgcacgcgcaatatgcggagggtggtgctcctcctgggcctcttgaatgaggatgacgcgtgccacgcctctttcttgcgggtatccaagatgcgcctcagtgtctttttaaagaagcaagaagagagccagtttcaccctctggagtggttggcaagggaagcctgcaaccaggacgctctccaggaggcgggcacattcaggcacaccctctggaagcgggtccaaggtgctgtcacccctctgctggcgagcatgatatcattcatcgacagagacggcaacctagagttactgaccaggccagatactccgccctgggcaagagatctttggatgtttattttcagtgacacgatgcttctgaacattcctcttgtgatgaataatgaaagacataaaggtgagatggcctacatcgtggtgcagaaccacatgaacctttccgagaacgcttccaacaacgtccctttcagctggaaaatcaaggactatctggaggagctgtgggtccaggctcagtacatcacagacgcagaaggactgcccaagaagttcgtggacatctttcagcagactcctctgggcaggtttcttgcccagctccatggagagccgcagcaggaacttcttcagtgttacttgaaggatttcattctcttgaccatgcgtgtgtcaacggaggaggaattaaagtttctgcagatggctctgtggtcctgcactaggaaactgaaagcggcgtcagaagcgcccgaggaagaggtttccttaccgtgggtgcaccttgcctaccagcgtttcagaagccgtctgcagaacttttccagaatcctgaccatctaccctcaggttctccacagcctgatggaagcccgttggaaccatgagctggctggatgtgagatgaccctggacgcatttgccgcaatggcctgcacggagatgctgacaagaaacaccctgaagcccagtccccaggcgtggctacagttggtgaagaatctttccatgccgctggagctcatctgctccgatgagcacatgcaaggcagcgggagcctggcccaggctgtcatcagggaagtcagagcccagtggagtcggattttctccaccgcactcttcgtggagcacgtgctcctaggaaccgagagccgcgtccccgagttacaggggctggtgaccgagcacgtcttcttactagacaagtgtcttcgagagaactctgacgtgaagacgcacgggccttttgaggccgtgatgcgcactctctgtgaatgcaaggagacagccagcaagaccctcagcaggtttgggattcagccgtgctccatctgcctgggagatgcaaaggaccccgtctgtctgccctgcgaccacgtgcactgcctgcgctgcctcagggcctggtttgcctcagagcagatgatatgcccctactgtttaactgccttgccagacgaattctctccagctgtttcccaagcgcacagggaagccattgaaaagcatgcccgcttccggcagatgtgcaacagtttcttcgtagacctggtgtccaccatttgcttcaaggacaacgctccgcctgagaaggaagtgattgagagcctgctctctctcctcttcgtccaaaaggggcgcttaagagatgctgcccagagacactgtgaacacacaaaatctctctctccattcaatgatgttgtggataagactcctgtcatccgctcagtgatactgaaactgcttttgaagtacagctttcatgatgtaaaagattatattcaggaatatttgaccctgttaaaaaagaaagcattcataactgaagataaaactgaactgtacatgctcttcatcaactgcctggaggattcaatacttgagaagaccagtgcttactccagaaatgatgaactgaaccacctagaagaggaaggtcgtttccttaaggcatattctccagcaagccggggccgagagcctgccaacgaggcctcggttgaatacctgcaagaggtggcccggatccgcctctgcctcgacagagctgcagatttcctctcggagcctgagggaggcccagagatggccaaggagaagcagtgctacctgcagcaagtcaagcagttctgtatccgggtggagaacgactggcaccgggtgtacctggtgcggaagctcagcagccagcgggggatggagttcgtgcagggcctctccaagcccggccgcccgcaccagtgggtgtttcccaaggacgttgtcaagcagcaggggctgcggcaggaccacccaggccagatggataggtacctggtgtacggcgatgaatacaaggctctccgtgatgctgtggccaaagctgtcctcgagtgcaagccactgggcattaagactgctctgaaggcctgcaagaccccccaaagccagcagtcagcctacttcctgttaacactgtttagagaggtggctattttgtacagatcccacaatgcaagcctccaccccacgccagagcaatgtgaagctgtgagcaaattcattggcgaatgcaagatcctttcacctcctgatatcagccgttttgcaacatcgctcgtggacaattctgtgccattgttgagggcggggcctagtgacagcaaccttgatggaacggtgacagaaatggccattcatgctgcagccgtccttctgtgtggacagaatgaactcttggagcccctaaagaatctggccttctccccagccaccatggcgcatgcttttcttccaaccatgcctgaagacttgctggctcaagctcggaggtggaagggtctggagcgagtccactggtacacttgtcccaacggccatccttgctccgtgggagagtgtggcaggccgatggaacagagcatctgcattgactgccatgcgccgattggaggcattgaccacaaacctcgggacggctttcatctggtcaaagacaaggcagacagaacgcagaccggccacgtgctgggcaacccgcagcggagagacgtggtgacatgtgaccgagggctgcccccagtggtcttcctccttatccggctactcactcacttggctctgcttctgggagcgtcccagagttcccaggctctgataaacatcattaagcctccagtgagggatccaaaaggctttctgcagcagcacatcctgaaggacctggagcagttggccaagatgctgggacacagtgccgacgagaccatcggcgtggtccacctcgtcctgcgcaggcttctccaagagcagcaccagctctctagcagaaggcttttaaattttgacacagaattgtcaactaaagaaatgaggaacaactgggaaaaggaaatcgcagctgtgatttctcctgaactggagcatctagataaaacccttcccaccatgaataatctcatcagccaagataagcgtatcagctctaaccctgtggccaaaataatatatggtgacccagtgaccttcctgccccacctgccccggaaaagtgtggtccattgctctaagatttggagctgcaggaaaagaattacagttgagtacctccagcacattgtggaacagaaaaatggcaaagaaagagtgcccatcctctggcatttcctgcagaaggaagcagagctgaggctggtaaagttcctgcctgagattttggccttgcaaagggatctagtgaagcagttccagaacgtccagcaagttgaatacagctccatcagaggcttcctcagcaagcacagctcagatgggttgaggcagctgcttcacaacaggatcacagtctttctgtccacatggaacaaactgaggagatcgcttgagacgaacggtgagatcaacctacccaaagactactgcagcactgacttggatctggacactgagtttgagatcctcttgccacgccgacggggcctgggcctctgtgctaccgctctcgtcagctacttgattcgcctacacaatgaaattgtctacgccgtggaaaaactctccaaggaaaacaacagctattccgtggatgccgccgaggtcactgaactgcatgtcatcagttatgaagtggagcgggacctgactccactgattctctccaactgccagtaccaggtggaggagggcagagagaccgtgcaggagttcgatctggagaagattcagcggcagatcgtcagccgcttcctccagggcaagccccggctgagcctcaagggaatacccactctggtgtacagacacgactggaactatgaacatctctttatggacatcaagaacaaaatggcacaggactccctccccagctcggtcattagtgccatcagtggacagctgcagtcctacagcgatgcctgtgaagtgctgtctgtcgtagaagtcactctggggtttctgagcacagctggtggggatccaaacatgcagctgaatgtgtatactcaagacatcctgcaaatgggtgatcagacgattcacgtgttaaaggccttaaacagatgccagttaaaacacaccattgccctctggcagttcctgtctgctcataagtctgaacagctgctgcggctgcacaaagagccatttggggaaatcagttcaaggtacaaagcggatctgagcccggaaaatgctaagctcctcagcacattcctaaatcagactggcctagacgccttcctgctagagctgcacgaaatgataatcttgaaactaaagaacccccaaacccaaaccgaggagcgcttccgccctcagtggagcctgagagacactctcgtaagttacatgcaaactaaagaaagtgaaattcttcctgaaatggcatctcagttcccagaagagatactgctcgccagctgtgtctcagtgtggaaaacagctgctgtgctgaaatggaatcgagaaatgagatagaattatttcctcagctatctttggatgactttggagagaagactcctctctcctcgtctgcggcgtggacttgatcatggactggtgcctttgcattcagaaggagagctgtcagcgtagcaccgaattcaagaccaaggcgtgctacctgagctgacagctttttgaaagccgagctgtttctgaaccatgtacatacatgttctgaaactttctcatcattttatgagtactgttcattgagagatgacaatgaagattagatgaaattggaaataaaccaacattgtttacattccaggagacttgtagctcagccacacacgcagtaatgacctgtgcccgttcgcctctggcactgcccacccctctttttttttttcttctaattctgtactcacaaaagagaatctcattttcttctttcttccattcccttaaattctgagtactgtacatatatttctgggttcccacgatgatgtgaaaaactaccagactgttttttgtcttctcacaaagacaagaaaaatcagggcattttgtgagtgccttaagatcaaactaacaagatctgaccctctcccctcacagtgagccactgccccacttcagagggtaagagccaaaagcctcattgtgaaaggcactggacttggaccagggacaccatcagggccttggttttctcacgcataaaatggagagtggattaatcgccaaagattcttctgatctgacattttgaaattgtgagagaaactagatgactgtaaacttggtcacaggcctggttctggcagttctttgcggacttttttctagcattatgccaaataaacatgcagtctcagtgtgctctcgcatgtatgaatatctagtcctttctgtggttctcagccaagacataaaaactaggactcagagcacatacaaaaccagttatgtttcggaaagagggaaaagagtccccgagcccggatcttgtgctgcttttctcactgacgtgttgccttttttctttacaaaatctgctttgatacttaggacctctctggactaatttctcttcctagacagctcagcacagctattgatatgttagaggcagtatccttaatattcattctaaatgagttaacgacttaacttgaaattgggcctaaggagtgagaactacaaaaatacaaaatgcttgtccaggactcagccatgcacaccttgagcagcgccggcaggaggcacggaaggaactgtgctccgttctcctcactgtcatggtgccaccagtgtctgatgaagggcagagtgacccagactgcaggcagtaactgacttcacacagtccctggcatttagtcatctgtgattgttttatcactctggactgtgcagagccacctgccaccgagatctgcattccgactgcctatgaacgggtgtgggggccgggggctggcttgctgaagtcttcaacttgcactcggagctcctttgatacctcagagctggctgtcaggtggcagctcacacccagactcactggccacacctcagcagggggggagtcgagtgtcagtctctttctgtgaaggctttttttttcctttggcctgggaatttttcccatttttatgaaggggttttaaattgtttcattttgtgtgctgtgcttcaaagccttaactgtcaaatcttgcattatcttgtttgtacagaaatatactggcctagcagaggcaaaaaaaaaaaaaatgaattttattttacttgtcacacctgtcttaataaactggagttttgctgctaaagaa

SEQ ID NO: 26 - DNA, 8391 bp, homo sapien
gaacatctttgggccttctcagaaggtgccgggtggagagcaggaagatgctgagtcccgctacttactcgtgctgaccaaaaactacgtggcactgcagatcctgcagcagacattcttcgagggggaccagcagccggagattatttttggttctggtttccccaaggaccaagagtacacccagctctgcagaaacatcaatcgtgtgaagatctgcatggaaacaggcaagatggtgttgcttctcaacctgcagaacctctacgagagcctctacgacgcactcaaccagtactacgtccacctcggcggccagaagtacgtggacctcggtctggggacccaccgcgtcaaatgtcgggttcaccccaacttccgcctgattgtcattgaagagaaagacgtcgtgtacaaacactttcccatccccctcattaaccggctggagaagcactatctggatatcaacacggtgctggagaaatggcagaagagcatcgtggaggagctctgtgcgtgggtggagaagttcatcaatgtcaaagcacatcatttccagaagaggcacaaatacagcccctctgacgtcttcatcggctaccactcggacgcctgcgcgtctgtggtgctgcaggtcatagagaggcagggtccccgggccttgacggaggaacttcaccagaaggtgtctgaggaggccaaatcgatcctgctgaactgcgctacgcccgatgccgtggtccggctgagcgcctactcgctgggcgggttcgcagcggagtggctgtcgcaggagtactttcacagacagaggcacaactcctttgcagatttccttcaggcacacctgcacacggcagacctggagcgccacgccatcttcacagagatcaccactttctccgggctgctaacaagtcacgactgtgaaattttagaatcagaggtcacaggcagggctccgaaacccacactcctgtggctgcagcagtttgacaccgagtactcattcctcaaagaagtccgaaactgtttaacgaatacagccaaatgtaaaatcctcatttttcagacagattttgaagatggaatccgtagcgcccagctcattgcctcagctaagtattctgttataaatgaaatcaacaaaatacgagaaaatgaggaccgtatcttcgtctatttcatcacaaaactgtcccgggtgggaagaggaacagcctatgtgggcttccacggagggctgtggcagtctgtccacatcgatgacctccggagatccaccctcatggtttctgatgtgaccaggctgcagcatgtcaccatcagccagctgttcgcgcccggagacttgcctgagctgggcttggaacaccgggcggaagacggccatgaggaggcgatggaaacggaggccagcacatcaggggaggtggcagaggtggcagaggaggccatggaaacagaaagttctgagaaggtgggaaaggaaacctctgaactcggaggcagtgatgtgtcgatcctggacaccaccaggctgctgagaagctgtgtgcagagcgccgtgggcatgctcagagaccagaacgagagctgcacgcgcaatatgcggagggtggtgctcctcctgggcctcttgaatgaggatgacgcgtgccacgcctctttcttgcgggtatccaagatgcgcctcagtgtctttttaaagaagcaagaagagagccagtttcaccctctggagtggttggcaagggaagcctgcaaccaggacgctctccaggaggcgggcacattcaggcacaccctctggaagcgggtccaaggtgctgtcacccctctgctggcgagcatgatatcattcatcgacagagacggcaacctagagttactgaccaggccagatactccgccctgggcaagagatctttggatgtttattttcagtgacacgatgcttctgaacattcctcttgtgatgaataatgaaagacataaaggtgagatggcctacatcgtggtgcagaaccacatgaacctttccgagaacgcttccaacaacgtccctttcagctggaaaatcaaggactatctggaggagctgtgggtccaggctcagtacatcacagacgcagaaggactgcccaagaagttcgtggacatctttcagcagactcctctgggcaggtttcttgcccagctccatggagagccgcagcaggaacttcttcagtgttacttgaaggatttcattctcttgaccatgcgtgtgtcaacggaggaggaattaaagtttctgcagatggctctgtggtcctgcactaggaaactgaaagcggcgtcagaagcgcccgaggaagaggtttccttaccgtgggtgcaccttgcctaccagcgtttcagaagccgtctgcagaacttttccagaatcctgaccatctaccctcaggttctccacagcctgatggaagcccgttggaaccatgagctggctggatgtgagatgaccctggacgcatttgccgcaatggcctgcacggagatgctgacaagaaacaccctgaagcccagtccccaggcgtggctacagttggtgaagaatctttccatgccgctggagctcatctgctccgatgagcacatgcaaggcagcgggagcctggcccaggctgtcatcagggaagtcagagcccagtggagtcggattttctccaccgcactcttcgtggagcacgtgctcctaggaaccgagagccgcgtccccgagttacaggggctggtgaccgagcacgtcttcttactagacaagtgtcttcgagagaactctgacgtgaagacgcacgggccttttgaggccgtgatgcgcactctctgtgaatgcaaggagacagccagcaagaccctcagcaggtttgggattcagccgtgctccatctgcctgggagatgcaaaggaccccgtctgtctgccctgcgaccacgtgcactgcctgcgctgcctcagggcctggtttgcctcagagcagatgatatgcccctactgtttaactgccttgccagacgaattctctccagctgtttcccaagcgcacagggaagccattgaaaagcatgcccgcttccggcagatgtgcaacagtttcttcgtagacctggtgtccaccatttgcttcaaggacaacgctccgcctgagaaggaagtgattgagagcctgctctctctcctcttcgtccaaaaggggcgcttaagagatgctgcccagagacactgtgaacacacaaaatctctctctccattcaatgatgttgtggataagactcctgtcatccgctcagtgatactgaaactgcttttgaagtacagctttcatgatgtaaaagattatattcaggaatatttgaccctgttaaaaaagaaagcattcataactgaagataaaactgaactgtacatgctcttcatcaactgcctggaggattcaatacttgagaagaccagtgcttactccagaaatgatgaactgaaccacctagaagaggaaggtcgtttccttaaggcatattctccagcaagccggggccgagagcctgccaacgaggcctcggttgaatacctgcaagaggtggcccggatccgcctctgcctcgacagagctgcagatttcctctcggagcctgagggaggcccagagatggccaaggagaagcagtgctacctgcagcaagtcaagcagttctgtatccgggtggagaacgactggcaccgggtgtacctggtgcggaagctcagcagccagcgggggatggagttcgtgcagggcctctccaagcccggccgcccgcaccagtgggtgtttcccaaggacgttgtcaagcagcaggggctgcggcaggaccacccaggccagatggataggtacctggtgtacggcgatgaatacaaggctctccgtgatgctgtggccaaagctgtcctcgagtgcaagccactgggcattaagactgctctgaaggcctgcaagaccccccaaagccagcagtcagcctacttcctgttaacactgtttagagaggtggctattttgtacagatcccacaatgcaagcctccaccccacgccagagcaatgtgaagctgtgagcaaattcattggcgaatgcaagatcctttcacctcctgatatcagccgttttgcaacatcgctcgtggacaattctgtgccattgttgagggcggggcctagtgacagcaaccttgatggaacggtgacagaaatggccattcatgctgcagccgtccttctgtgtggacagaatgaactcttggagcccctaaagaatctggccttctccccagccaccatggcgcatgcttttcttccaaccatgcctgaagacttgctggctcaagctcggaggtggaagggtctggagcgagtccactggtacacttgtcccaacggccatccttgctccgtgggagagtgtggcaggccgatggaacagagcatctgcattgactgccatgcgccgattggaggcattgaccacaaacctcgggacggctttcatctggtcaaagacaaggcagacagaacgcagaccggccatgtgctgggcaacccgcagcggagagacgtggtgacatgtgaccgagggctgcccccagtggtcttcctccttatccggctactcactcacttggctctgcttctgggagcgtcccagagttcccaggctctgataaacatcattaagcctccagtgagggatccaaaaggctttctgcagcagcacatcctgaaggacctggagcagttggccaagatgctgggacacagtgccgacgagaccatcggcgtggtccacctcgtcctgcgcaggcttctccaagagcagcaccagctctctagcagaaggcttttaaattttgacacagaattgtcaactaaagaaatgaggaacaactgggaaaaggaaatcgcagctgtgatttctcctgaactggagcatctagataaaacccttcccaccatgaataatctcatcagccaagataagcgtatcagctctaaccctgtggccaaaataatatatggtgacccagtgaccttcctgccccacctgccccggaaaagtgtggtccattgctctaagatttggagctgcaggaaaagaattacagttgagtacctccagcacattgtggaacagaaaaatggcaaagaaagagtgcccatcctctggcatttcctgcagaaggaagcagagctgaggctggtaaagttcctgcctgagattttggccttgcaaagggatctagtgaagcagttccagaacgtccagcaagttgaatacagctccatcagaggcttcctcagcaagcacagctcagatgggttgaggcagctgcttcacaacaggatcacagtctttctgtccacatggaacaaactgaggagatcgcttgagacgaacggtgagatcaacctacccaaagactactgcagcactgacttggatctggacactgagtttgagatcctcttgccacgccgacggggcctgggcctctgtgctaccgctctcgtcagctacttgattcgcctacacaatgaaattgtctacgccgtggaaaaactctccaaggaaaacaacagctattccgtggatgccgccgaggtcactgaactgcatgtcatcagttatgaagtggagcgggacctgactccactgattctctccaactgccagtaccaggtggaggagggcagagagaccgtgcaggagttcgatctggagaagattcagcggcagatcgtcagccgcttcctccagggcaagccccggctgagcctcaagggaatacccactctggtgtacagacacgactggaactatgaacatctctttatggacatcaagaacaaaatggcacaggactccctccccagctcggtcattagtgccatcagtggacagctgcagtcctacagcgatgcctgtgaagtgctgtctgtcgtagaagtcactctggggtttctgagcacagctggtggggatccaaacatgcagctgaatgtgtatactcaagacatcctgcaaatgggtgatcagacgattcacgtgttaaaggccttaaacagatgccagttaaaacacaccattgccctctggcagttcctgtctgctcataagtctgaacagctgctgcggctgcacaaagagccatttggggaaatcagttcaaggtacaaagcggatctgagcccggaaaatgctaagctcctcagcacattcctaaatcagactggcctagacgccttcctgctagagctgcacgaaatgataatcttgaaactaaagaacccccaaacccaaaccgaggagcgcttccgccctcagtggagcctgagagacactctcgtaagttacatgcaaactaaagaaagtgaaattcttcctgaaatggcatctcagttcccagaagagatactgctcgccagctgtgtctcagtgtggaaaacagctgctgtgctgaaatggaatcgagaaatgagatagaattatttcctcagctatctttggatgactttggagagaagactcctctctcctcgtctgcggcgtggacttgatcatggactggtgcctttgcattcagaaggagagctgtcagcgtagcaccgaattcaagaccaaggcgtgctacctgagctgacagctttttgaaagccgagctgtttctgaaccatgtacatacatgttctgaaactttctcatcattttatgagtactgttcattgagagatgacaatgaagattagatgaaattggaaataaaccaacattgtttacattccaggagacttgtagctcagccacacacgcagtaatgacctgtgcccgttcgcctctggcactgcccacccctctttttttttttcttctaattctgtactcacaaaagagaatctcattttcttctttcttccattcccttaaattctgagtactgtacatatatttctgggttcccacgatgatgtgaaaaactaccagactgttttttgtcttctcacaaagacaagaaaaatcagggcattttgtgagtgccttaagatcaaactaacaagatctgaccctctcccctcacagtgagccactgccccacttcagagggtaagagccaaaagcctcattgtgaaaggcactggacttggaccagggacaccatcagggccttggttttctcacgcataaaatggagagtggattaatcgccaaagattcttctgatctgacattttgaaattgtgagagaaactagatgactgtaaacttggtcacaggcctggttctggcagttctttgcggacttttttctagcattatgccaaataaacatgcagtctcagtgtgctctcgcatgtatgaatatctagtcctttctgtggttctcagccaagacataaaaactaggactcagagcacatacaaaaccagttatgtttcggaaagagggaaaagagtccccgagcccggatcttgtgctgcttttctcactgacgtgttgccttttttctttacaaaatctgctttgatacttaggacctctctggactaatttctcttcctagacagctcagcacagctattgatatgttagaggcagtatccttaatattcattctaaatgagttaacgacttaacttgaaattgggcctaaggagtgagaactacaaaaatacaaaatgcttgtccaggactcagccatgcacaccttgagcagcgccggcaggaggcacggaaggaactgtgctccgttctcctcactgtcatggtgccaccagtgtctgatgaagggcagagtgacccagactgcaggcagtaactgacttcacacagtccctggcatttagtcatctgtgattgttttatcactctggactgtgcagagccacctgccaccgagatctgcattccgactgcctatgaacgggtgtgggggccgggggctggcttgctgaagtcttcaacttgcactcggagctcctttgatacctcagagctggctgtcaggtggcagctcacacccagactcactggccacacctcagcagggggggagtcgagtgtcagtctctttctgtgaaggctttttttttcctttggcctgggaatttttcccatttttatgaaggggttttaaattgtttcattttgtgtgctgtgcttcaaagccttaactgtcaaatcttgcattatcttgtttgtacagaaatatactggcctagcagaggcaaaaaaaaaaaaatgaattttattttacttgtcacacctgtcttaataaactggagttttgctgctaaaaaaaaaaaaaaaaaaa

SEQ ID NO: 27 - DNA, 6693 bp, homo sapien
gggcctcttgaatgaggatgacgcgtgccacgcctctttcttgcgggtatccaagatgcgcctcagtgtctttttaaagaagcaagaagagagccagtttcaccctctggagtggttggcaagggaagcctgcaaccaggacgctctccaggaggcgggcacattcaggcacaccctctggaagcgggtccaaggtgctgtcacccctctgctggcgagcatgatatcattcatcgacagagacggcaacctagagttactgaccaggccagatactccgccctgggcaagagatctttggatgtttattttcagtgacacgatgcttctgaacattcctcttgtgatgaataatgaaagacataaaggtgagatggcctacatcgtggtgcagaaccacatgaacctttccgagaacgcttccaacaacgtccctttcagctggaaaatcaaggactatctggaggagctgtgggtccaggctcagtacatcacagacgcagaaggactgcccaagaagttcgtggacatctttcagcagactcctctgggcaggtttcttgcccagctccatggagagccgcagcaggaacttcttcagtgttacttgaaggatttcattctcttgaccatgcgtgtgtcaacggaggaggaattaaagtttctgcagatggctctgtggtcctgcactaggaaactgaaagcggcgtcagaagcgcccgaggaagaggtttccttaccgtgggtgcaccttgcctaccagcgtttcagaagccgtctgcagaacttttccagaatcctgaccatctaccctcaggttctccacagcctgatggaagcccgttggaaccatgagctggctggatgtgagatgaccctggacgcatttgccgcaatggcctgcacggagatgctgacaagaaacaccctgaagcccagtccccaggcgtggctacagttggtgaagaatctttccatgccgctggagctcatctgctccgatgagcacatgcaaggcagcgggagcctggcccaggctgtcatcagggaagtcagagcccagtggagtcggattttctccaccgcactcttcgtggagcacgtgctcctaggaaccgagagccgcgtccccgagttacaggggctggtgaccgagcacgtcttcttactagacaagtgtcttcgagagaactctgacgtgaagacgcacgggccttttgaggccgtgatgcgcactctctgtgaatgcaaggagacagccagcaagaccctcagcaggtttgggattcagccgtgctccatctgcctgggagatgcaaaggaccccgtctgtctgccctgcgaccacgtgcactgcctgcgctgcctcagggcctggtttgcctcagagcagatgatatgcccctactgtttaactgccttgccagacgaattctctccagctgtttcccaagcgcacagggaagccattgaaaagcatgcccgcttccggcagatgtgcaacagtttcttcgtagacctggtgtccaccatttgcttcaaggacaacgctccgcctgagaaggaagtgattgagagcctgctctctctcctcttcgtccaaaaggggcgcttaagagatgctgcccagagacactgtgaacacacaaaatctctctctccattcaatgatgttgtggataagactcctgtcatccgctcagtgatactgaaactgcttttgaagtacagctttcatgatgtaaaagattatattcaggaatatttgaccctgttaaaaaagaaagcattcataactgaagataaaactgaactgtacatgctcttcatcaactgcctggaggattcaatacttgagaagaccagtgcttactccagaaatgatgaactgaaccacctagaagaggaaggtcgtttccttaaggcatattctccagcaagccggggccgagagcctgccaacgaggcctcggttgaatacctgcaagaggtggcccggatccgcctctgcctcgacagagctgcagatttcctctcggagcctgagggaggcccagagatggccaaggagaagcagtgctacctgcagcaagtcaagcagttctgtatccgggtggagaacgactggcaccgggtgtacctggtgcggaagctcagcagccagcgggggatggagttcgtgcagggcctctccaagcccggccgcccgcaccagtgggtgtttcccaaggacgttgtcaagcagcaggggctgcggcaggaccacccaggccagatggataggtacctggtgtacggcgatgaatacaaggctctccgtgatgctgtggccaaagctgtcctcgagtgcaagccactgggcattaagactgctctgaaggcctgcaagaccccccaaagccagcagtcagcctacttcctgttaacactgtttagagaggtggctattttgtacagatcccacaatgcaagcctccaccccacgccagagcaatgtgaagctgtgagcaaattcattggcgaatgcaagatcctttcacctcctgatatcagccgttttgcaacatcgctcgtggacaattctgtgccattgttgagggcggggcctagtgacagcaaccttgatggaacggtgacagaaatggccattcatgctgcagccgtccttctgtgtggacagaatgaactcttggagcccctaaagaatctggccttctccccagccaccatggcgcatgcttttcttccaaccatgcctgaagacttgctggctcaagctcggaggtggaagggtctggagcgagtccactggtacacttgtcccaacggccatccttgctccgtgggagagtgtggcaggccgatggaacagagcatctgcattgactgccatgcgccgattggaggcattgaccacaaacctcgggacggctttcatctggtcaaagacaaggcagacagaacgcagaccggccacgtgctgggcaacccgcagcggagagacgtggtgacatgtgaccgagggctgcccccagtggtcttcctccttatccggctactcactcacttggctctgcttctgggagcgtcccagagttcccaggctctgataaacatcattaagcctccagtgagggatccaaaaggctttctgcagcagcacatcctgaaggacctggagcagttggccaagatgctgggacacagtgccgacgagaccatcggcgtggtccacctcgtcctgcgcaggcttctccaagagcagcaccagctctctagcagaaggcttttaaattttgacacagaattgtcaactaaagaaatgaggaacaactgggaaaaggaaatcgcagctgtgatttctcctgaactggagcatctagataaaacccttcccaccatgaataatctcatcagccaagataagcgtatcagctctaaccctgtggccaaaataatatatggtgacccagtgaccttcctgccccacctgccccggaaaagtgtggtccattgctctaagatttggagctgcaggaaaagaattacagttgagtacctccagcacattgtggaacagaaaaatggcaaagaaagagtgcccatcctctggcatttcctgcagaaggaagcagagctgaggctggtaaagttcctgcctgagattttggccttgcaaagggatctagtgaagcagttccagaacgtccagcaagttgaatacagctccatcagaggcttcctcagcaagcacagctcagatgggttgaggcagctgcttcacaacaggatcacagtctttctgtccacatggaacaaactgaggagatcgcttgagacgaacggtgagatcaacctacccaaagactactgcagcactgacttggatctggacactgagtttgagatcctcttgccacgccgacggggcctgggcctctgtgctaccgctctcgtcagctacttgattcgcctacacaatgaaattgtctacgccgtggaaaaactctccaaggaaaacaacagctattccgtggatgccgccgaggtcactgaactgcatgtcatcagttatgaagtggagcgggacctgactccactgattctctccaactgccagtaccaggtggaggagggcagagagaccgtgcaggagttcgatctggagaagattcagcggcagatcgtcagccgcttcctccagggcaagccccggctgagcctcaagggaatacccactctggtgtacagacacgactggaactatgaacatctctttatggacatcaagaacaaaatggcacaggactccctccccagctcggtcattagtgccatcagtggacagctgcagtcctacagcgatgcctgtgaagtgctgtctgtcgtagaagtcactctggggtttctgagcacagctggtggggatccaaacatgcagctgaatgtgtatactcaagacatcctgcaaatgggtgatcagacgattcacgtgttaaaggccttaaacagatgccagttaaaacacaccattgccctctggcagttcctgtctgctcataagtctgaacagctgctgcggctgcacaaagagccatttggggaaatcagttcaaggtacaaagcggatctgagcccggaaaatgctaagctcctcagcacattcctaaatcagactggcctagacgccttcctgctagagctgcacgaaatgataatcttgaaactaaagaacccccaaacccaaaccgaggagcgcttccgccctcagtggagcctgagagacactctcgtaagttacatgcaaactaaagaaagtgaaattcttcctgaaatggcatctcagttcccagaagagatactgctcgccagctgtgtctcagtgtggaaaacagctgctgtgctgaaatggaatcgagaaatgagatagaattatttcctcagctatctttggatgactttggagagaagactcctctctcctcgtctgcggcgtggacttgatcatggactggtgcctttgcattcagaaggagagctgtcagcgtagcaccgaattcaagaccaaggcgtgctacctgagctgacagctttttgaaagccgagctgtttctgaaccatgtacatacatgttctgaaactttctcatcattttatgagtactgttcattgagagatgacaatgaagattagatgaaattggaaataaaccaacattgtttacattccaggagacttgtagctcagccacacacgcagtaatgacctgtgcccgttcgcctctggcactgcccacccctctttttttttttcttctaattctgtactcacaaaagagaatctcattttcttctttcttccattcccttaaattctgagtactgtacatatatttctgggttcccacgatgatgtgaaaaactaccagactgttttttgtcttctcacaaagacaagaaaaatcagggcattttgtgagtgccttaagatcaaactaacaagatctgaccctctcccctcacagtgagccactgccccacttcagagggtaagagccaaaagcctcattgtgaaaggcactggacttggaccagggacaccatcagggccttggttttctcacgcataaaatggagagtggattaatcgccaaagattcttctgatctgacattttgaaattgtgagagaaactagatgactgtaaacttggtcacaggcctggttctggcagttctttgcggacttttttctagcattatgccaaataaacatgcagtctcagtgtgctctcgcatgtatgaatatctagtcctttctgtggttctcagccaagacataaaaactaggactcagagcacatacaaaaccagttatgtttcggaaagagggaaaagagtccccgagcccggatcttgtgctgcttttctcactgacgtgttgccttttttctttacaaaatctgctttgatacttaggacctctctggactaatttctcttcctagacagctcagcacagctattgatatgttagaggcagtatccttaatattcattctaaatgagttaacgacttaacttgaaattgggcctaaggagtgagaactacaaaaatacaaaatgcttgtccaggactcagccatgcacaccttgagcagcgccggcaggaggcacggaaggaactgtgctccgttctcctcactgtcatggtgccaccagtgtctgatgaagggcagagtgacccagactgcaggcagtaactgacttcacacagtccctggcatttagtcatctgtgattgttttatcactctggactgtgcagagccacctgccaccgagatctgcattccgactgcctatgaacgggtgtgggggccgggggctggcttgctgaagtcttcaacttgcactcggagctcctttgatacctcagagctggctgtcaggtggcagctcacacccagactcactggccacacctcagcagggggggagtcgagtgtcagtctctttctgtgaaggctttttttttcctttggcctgggaatttttcccatttttatgaaggggttttaaattgtttcattttgtgtgctgtgcttcaaagccttaactgtcaaatcttgcattatcttgtttgtacagaaatatactggcctagcagaggcagaaaaaaaaaaaaaaaaaaaa

SEQ ID NO: 28 - DNA, 4616 bp, homo sapien
ggatttcattctcttgaccatgcgtgtgtcaacggaggaggaattaaagtttctgcagatggctctgtggtcctgcactaggaaactgaaagcggcgtcagaagcgcccgaggaagaggtttccttaccgtgggtgcaccttgcctaccagcgtttcagaagccgtctgcagaacttttccagaatcctgaccatctaccctcaggttctccacagcctgatggaagcccgttggaaccatgagctggctggatgtgagatgaccctggacgcatttgccgcaatggcctgcacggagatgctgacaagaaacaccctgaagcccagtccccaggcgtggctacagttggtgaagaatctttccatgccgctggagctcatctgctccgatgagcacatgcaaggcagcgggagcctggcccaggctgtcatcagggaagtcagagcccagtggagtcggattttctccaccgcactcttcgtggagcacgtgctcctaggaaccgagagccgcgtccccgagttacaggggctggtgaccgagcacgtcttcttactagacaagtgtcttcgagagaactctgacgtgaagacgcacgggccttttgaggccgtgatgcgcactctctgtgaatgcaaggagacagccagcaagaccctcagcaggtttgggattcagccgtgctccatctgcctgggagatgcaaaggaccccgtctgtctgccctgcgaccacgtgcactgcctgcgctgcctcagggcctggtttgcctcagagcagatgatatgcccctactgtttaactgccttgccagacgaattctctccagctgtttcccaagcgcacagggaagccattgaaaagcatgcccgcttccggcagatgtgcaacagtttcttcgtagacctggtgtccaccatttgcttcaaggacaacgctccgcctgagaaggaagtgattgagagcctgctctctctcctcttcgtccaaaaggggcgcttaagagatgctgcccagagacactgtgaacacacaaaatctctctctccattcaatgatgttgtggataagactcctgtcatccgctcagtgatactgaaactgcttttgaagtacagctttcatgatgtaaaagattatattcaggaatatttgaccctgttaaaaaagaaagcattcataactgaagataaaactgaactgtacatgctcttcatcaactgcctggaggattcaatacttgagaagaccagtgcttactccagaaatgatgaactgaaccacctagaagaggaaggtcgtttccttaaggcatattctccagcaagccggggccgagagcctgccaacgaggcctcggttgaatacctgcaagaggtggcccggatccgcctctgcctcgacagagctgcagatttcctctcggagcctgagggaggcccagagatggccaaggagaagcagtgctacctgcagcaagtcaagcagttctgtatccgggtggagaacgactggcaccgggtgtacctggtgcggaagctcagcagccagcgggggatggagttcgtgcagggcctctccaagcccggccgcccgcaccagtgggtgtttcccaaggacgttgtcaagcagcaggggctgcggcaggaccacccaggccagatggataggtacctggtgtacggcgatgaatacaaggctctccgtgatgctgtggccaaagctgtcctcgagtgcaagccactgggcattaagactgctctgaaggcctgcaagaccccccaaagccagcagtcagcctacttcctgttaacactgtttagagaggtggctattttgtacagatcccacaatgcaagcctccaccccacgccagagcaatgtgaagctgtgagcaaattcattggcgaatgcaagatcctttcacctcctgatatcagccgttttgcaacatcgctcgtggacaattctgtgccattgttgagggcggggcctagtgacagcaaccttgatggaacggtgacagaaatggccattcatgctgcagccgtccttctgtgtggacagaatgaactcttggagcccctaaagaatctggccttctccccagccaccatggcgcatgcttttcttccaaccatgcctgaagacttgctggctcaagctcggaggtggaagggtctggagcgagtccactggtacacttgtcccaacggccatccttgctccgtgggagagtgtggcaggccgatggaacagagcatctgcattgactgccatgcgccgattggaggcattgaccacaaacctcgggacggctttcatctggtcaaagacaaggcagacagaacgcagaccggccacgtgctgggcaacccgcagcggagagacgtggtgacatgtgaccgagggctgcccccagtggtcttcctccttatccggctactcactcacttggctctgcttctgggagcgtcccagagttcccaggctctgataaacatcattaagcctccagtgagggatccaaaaggctttctgcagcagcacatcctgaaggacctggagcagttggccaagatgctgggacacagtgccgacgagaccatcggcgtggtccacctcgtcctgcgcaggcttctccaagagcagcaccagctctctagcagaaggcttttaaattttgacacagaattgtcaactaaagaaatgaggaacaactgggaaaaggaaatcgcagctgtgatttctcctgaactggagcatctagataaaacccttcccaccatgaataatctcatcagccaagataagcgtatcagctctaaccctgtggccaaaataatatatggtgacccagtgaccttcctgccccacctgccccggaaaagtgtggtccattgctctaagatttggagctgcaggaaaagaattacagttgagtacctccagcacattgtggaacagaaaaatggcaaagaaagagtgcccatcctctggcatttcctgcagaaggaagcagagctgaggctggtaaagttcctgcctgagattttggccttgcaaagggatctagtgaagcagttccagaacgtccagcaagttgaatacagctccatcagaggcttcctcagcaagcacagctcagatgggttgaggcagctgcttcacaacaggatcacagtctttctgtccacatggaacaaactgaggagatcgcttgagacgaacggtgagatcaacctacccaaagactactgcagcactgacttggatctggacactgagtttgagatcctcttgccacgccgacggggcctgggcctctgtgctaccgctctcgtcagctacttgattcgcctacacaatgaaattgtctacgccgtggaaaaactctccaaggaaaacaacagctattccgtggatgccgccgaggtcactgaactgcatgtcatcagttatgaagtggagcgggacctgactccactgattctctccaactgccagtaccaggtggaggagggcagagagaccgtgcaggagttcgatctggagaagattcagcggcagatcgtcagccgcttcctccagggcaagccccggctgagcctcaagggaatacccactctggtgtacagacacgactggaactatgaacatctctttatggacatcaagaacaaaatggcacaggactccctccccagctcggtcattagtgccatcagtggacagctgcagtcctacagcgatgcctgtgaagtgctgtctgtcgtagaagtcactctggggtttctgagcacagctggtggggatccaaacatgcagctgaatgtgtatactcaagacatcctgcaaatgggtgatcagacgattcacgtgttaaaggccttaaacagatgccagttaaaacacaccattgccctctggcagttcctgtctgctcataagtctgaacagctgctgcggctgcacaaagagccatttggggaaatcagttcaaggtacaaagcggatctgagcccggaaaatgctaagctcctcagcacattcctaaatcagactggcctagacgccttcctgctagagctgcacgaaatgataatcttgaaactaaagaacccccaaacccaaaccgaggagcgcttccgccctcagtggagcctgagagacactctcgtaagttacatgcaaactaaagaaagtgaaattcttcctgaaatggcatctcagttcccagaagagatactgctcgccagctgtgtctcagtgtggaaaacagctgctgtgctgaaatggaatcgagaaatgagatagaattatttcctcagctatctttggatgactttggagagaagactcctctctcctcgtctgcggcgtggacttgatcatggactggtgcctttgcattcagaaggagagctgtcagcgtagcaccgaattcaagaccaaggcgtgctacctgagctgacagctttttgaaagccgagctgtttctgaaccatgtacatacatgttctgaaactttctcatcattttatgagtactgttcattgagagatgacaatgaagattagatgaaattggaaataaaccaacattgtttacattc

SEQ ID NO: 29 - DNA, 5949 bp, homo sapien
gtccccaggcgtggctacagttggtgaagaatctttccatgccgctggagctcatctgctccgatgagcacatgcaaggcagcgggagcctggcccaggctgtcatcagggaagtcagagcccagtggagtcggattttctccaccgcactcttcgtggagcacgtgctcctaggaaccgagagccgcgtccccgagttacaggggctggtgaccgagcacgtcttcttactagacaagtgtcttcgagagaactctgacgtgaagacgcacgggccttttgaggccgtgatgcgcactctctgtgaatgcaaggagacagccagcaagaccctcagcaggtttgggattcagccgtgctccatctgcctgggagatgcaaaggaccccgtctgtctgccctgcgaccacgtgcactgcctgcgctgcctcagggcctggtttgcctcagagcagatgatatgcccctactgtttaactgccttgccagacgaattctctccagctgtttcccaagcgcacagggaagccattgaaaagcatgcccgcttccggcagatgtgcaacagtttcttcgtagacctggtgtccaccatttgcttcaaggacaacgctccgcctgagaaggaagtgattgagagcctgctctctctcctcttcgtccaaaaggggcgcttaagagatgctgcccagagacactgtgaacacacaaaatctctctctccattcaatgatgttgtggataagactcctgtcatccgctcagtgatactgaaactgcttttgaagtacagctttcatgatgtaaaagattatattcaggaatatttgaccctgttaaaaaagaaagcattcataactgaagataaaactgaactgtacatgctcttcatcaactgcctggaggattcaatacttgagaagaccagtgcttactccagaaatgatgaactgaaccacctagaagaggaaggtcgtttccttaaggcatattctccagcaagccggggccgagagcctgccaacgaggcctcggttgaatacctgcaagaggtggcccggatccgcctctgcctcgacagagctgcagatttcctctcggagcctgagggaggcccagagatggccaaggagaagcagtgctacctgcagcaagtcaagcagttctgtatccgggtggagaacgactggcaccgggtgtacctggtgcggaagctcagcagccagcgggggatggagttcgtgcagggcctctccaagcccggccgcccgcaccagtgggtgtttcccaaggacgttgtcaagcagcaggggctgcggcaggaccacccaggccagatggataggtacctggtgtacggcgatgaatacaaggctctccgtgatgctgtggccaaagctgtcctcgagtgcaagccactgggcattaagactgctctgaaggcctgcaagaccccccaaagccagcagtcagcctacttcctgttaacactgtttagagaggtggctattttgtacagatcccacaatgcaagcctccaccccacgccagagcaatgtgaagctgtgagcaaattcattggcgaatgcaagatcctttcacctcctgatatcagccgttttgcaacatcgctcgtggacaattctgtgccattgttgagggcggggcctagtgacagcaaccttgatggaacggtgacagaaatggccattcatgctgcagccgtccttctgtgtggacagaatgaactcttggagcccctaaagaatctggccttctccccagccaccatggcgcatgcttttcttccaaccatgcctgaagacttgctggctcaagctcggaggtggaagggtctggagcgagtccactggtacacttgtcccaacggccatccttgctccgtgggagagtgtggcaggccgatggaacagagcatctgcattgactgccatgcgccgattggaggcattgaccacaaacctcgggacggctttcatctggtcaaagacaaggcagacagaacgcagaccggccatgtgctgggcaacccgcagcggagagacgtggtgacatgtgaccgagggctgcccccagtggtcttcctccttatccggctactcactcacttggctctgcttctgggagcgtcccagagttcccaggctctgataaacatcattaagcctccagtgagggatccaaaaggctttctgcagcagcacatcctgaaggacctggagcagttggccaagatgctgggacacagtgccgacgagaccatcggcgtggtccacctcgtcctgcgcaggcttctccaagagcagcaccagctctctagcagaaggcttttaaattttgacacagaattgtcaactaaagaaatgaggaacaactgggaaaaggaaatcgcagctgtgatttctcctgaactggagcatctagataaaacccttcccaccatgaataatctcatcagccaagataagcgtatcagctctaaccctgtggccaaaataatatatggtgacccagtgaccttcctgccccacctgccccggaaaagtgtggtccattgctctaagatttggagctgcaggaaaagaattacagttgagtacctccagcacattgtggaacagaaaaatggcaaagaaagagtgcccatcctctggcatttcctgcagaaggaagcagagctgaggctggtaaagttcctgcctgagattttggccttgcaaagggatctagtgaagcagttccagaacgtccagcaagttgaatacagctccatcagaggcttcctcagcaagcacagctcagatgggttgaggcagctgcttcacaacaggatcacagtctttctgtccacatggaacaaactgaggagatcgcttgagacgaacggtgagatcaacctacccaaagactactgcagcactgacttggatctggacactgagtttgagatcctcttgccacgccgacggggcctgggcctctgtgctaccgctctcgtcagctacttgattcgcctacacaatgaaattgtctacgccgtggaaaaactctccaaggaaaacaacagctattccgtggatgccgccgaggtcactgaactgcatgtcatcagttatgaagtggagcgggacctgactccactgattctctccaactgccagtaccaggtggaggagggcagagagaccgtgcaggagttcgatctggagaagattcagcggcagatcgtcagccgcttcctccagggcaagccccggctgagcctcaagggaatacccactctggtgtacagacacgactggaactatgaacatctctttatggacatcaagaacaaaatggcacaggactccctccccagctcggtcattagtgccatcagtggacagctgcagtcctacagcgatgcctgtgaagtgctgtctgtcgtagaagtcactctggggtttctgagcacagctggtggggatccaaacatgcagctgaatgtgtatactcaagacatcctgcaaatgggtgatcagacgattcacgtgttaaaggccttaaacagatgccagttaaaacacaccattgccctctggcagttcctgtctgctcataagtctgaacagctgctgcggctgcacaaagagccatttggggaaatcagttcaaggtacaaagcggatctgagcccggaaaatgctaagctcctcagcacattcctaaatcagactggcctagacgccttcctgctagagctgcacgaaatgataatcttgaaactaaagaacccccaaacccaaaccgaggagcgcttccgccctcagtggagcctgagagacactctcgtaagttacatgcaaactaaagaaagtgaaattcttcctgaaatggcatctcagttcccagaagagatactgctcgccagctgtgtctcagtgtggaaaacagctgctgtgctgaaatggaatcgagaaatgagatagaattatttcctcagctatctttggatgactttggagagaagactcctctctcctcgtctgcggcgtggacttgatcatggactggtgcctttgcattcagaaggagagctgtcagcgtagcaccgaattcaagaccaaggcgtgctacctgagctgacagctttttgaaagccgagctgtttctgaaccatgtacatacatgttctgaaactttctcatcattttatgagtactgttcattgagagatgacaatgaagattagatgaaattggaaataaaccaacattgtttacattccaggagacttgtagctcagccacacacgcagtaatgacctgtgcccgttcgcctctggcactgcccacccctcttttttttttcttctaattctgtactcacaaaagagaatctcattttcttctttcttccattcccttaaattctgagtactgtacatatatttctgggttcccacgatgatgtgaaaaactaccagactgttttttgtcttctcacaaagacaagaaaaatcagggcattttgtgagtgccttaagatcaaactaacaagatctgaccctctcccctcacagtgagccactgccccacttcagagggtaagagccaaaagcctcattgtgaaaggcactggacttggaccagggacaccatcagggccttggttttctcacgcataaaatggagagtggattaatcgccaaagattcttctgatctgacattttgaaattgtgagagaaactagatgactgtaaacttggtcacaggcctggttctggcagttctttgcggacttttttctagcattatgccaaataaacatgcagtctcagtgtgctctcgcatgtatgaatatctagtcctttctgtggttctcagccaagacataaaaactaggactcagagcacatacaaaaccagttatgtttcggaaagagggaaaagagtccccgagcccggatcttgtgctgcttttctcactgacgtgttgccttttttctttacaaaatctgctttgatacttaggacctctctggactaatttctcttcctagacagctcagcacagctattgatatgttagaggcagtatccttaatattcattctaaatgagttaacgacttaacttgaaattgggcctaaggagtgagaactacaaaaatacaaaatgcttgtccaggactcagccatgcacaccttgagcagcgccggcaggaggcacggaaggaactgtgctccgttctcctcactgtcatggtgccaccagtgtctgatgaagggcagagtgacccagactgcaggcagtaactgacttcacacagtccctggcatttagtcatctgtgattgttttatcactctggactgtgcagagccacctgccaccgagatctgcattccgactgcctatgaacgggtgtgggggccgggggctggcttgctgaagtcttcaacttgcactcggagctcctttgatacctcagagctggctgtcaggtggcagctcacacccagactcactggccacacctcagcagggggggagtcgagtgtcagtctctttctgtgaaggctttttttttcctttggcctgggaatttttcccatttttatgaaggggttttaaattgtttcattttgtgtgctgtgcttcaaagccttaactgtcaaatcttgcattatcttgtttgtacagaaatatactggcctagcagaggcaaaaaaaaaaaaaatgaattttattttacttgtcacacctgtcttaataaactggagttttgctgctaaaaaaaaaaaaaaaaaaaaaaaaaaaaaaaaaaaaaaaaaaaaaaaaaaaaaaaaaaaaaaaaaaaaaaaaaaaaaaaaaaaaaaaaaaaaaaaaaaaaaaaaaaaaaaaaaaaaaaaaaaaaaaaaaaaaaaaaaaaaaaaaaaaaaa

SEQ ID NO: 30 - DNA, 5705 bp, homo sapien
gaatctttccatgccgctggagctcatctgctccgatgagcacatgcaaggcagcgggagcctggcccaggctgtcatcagggaagtcagagcccagtggagtcggattttctccaccgcactcttcgtggagcacgtgctcctaggaaccgagagccgcgtccccgagttacaggggctggtgaccgagcacgtcttcttactagacaagtgtcttcgagagaactctgacgtgaagacgcacgggccttttgaggccgtgatgcgcactctctgtgaatgcaaggagacagccagcaagaccctcagcaggtttgggattcagccgtgctccatctgcctgggagatgcaaaggaccccgtctgtctgccctgcgaccacgtgcactgcctgcgctgcctcagggcctggtttgcctcagagcagatgatatgcccctactgtttaactgccttgccagacgaattctctccagctgtttcccaagcgcacagggaagccattgaaaagcatgcccgcttccggcagatgtgcaacagtttcttcgtagacctggtgtccaccatttgcttcaaggacaacgctccgcctgagaaggaagtgattgagagcctgctctctctcctcttcgtccaaaaggggcgcttaagagatgctgcccagagacactgtgaacacacaaaatctctctctccattcaatgatgttgtggataagactcctgtcatccgctcagtgatactgaaactgcttttgaagtacagctttcatgatgtaaaagattatattcaggaatatttgaccctgttaaaaaagaaagcattcataactgaagataaaactgaactgtacatgctcttcatcaactgcctggaggattcaatacttgagaagaccagtgcttactccagaaatgatgaactgaaccacctagaagaggaaggtcgtttccttaaggcatattctccagcaagccggggccgagagcctgccaacgaggcctcggttgaatacctgcaagaggtggcccggatccgcctctgcctcgacagagctgcagatttcctctcggagcctgagggaggcccagagatggccaaggagaagcagtgctacctgcagcaagtcaagcagttctgtatccgggtggagaacgactggcaccgggtgtacctggtgcggaagctcagcagccagcgggggatggagttcgtgcagggcctctccaagcccggccgcccgcaccagtgggtgtttcccaaggacgttgtcaagcagcaggggctgcggcaggaccacccaggccagatggataggtacctggtgtacggcgatgaatacaaggctctccgtgatgctgtggccaaagctgtcctcgagtgcaagccactgggcattaagactgctctgaaggcctgcaagaccccccaaagccagcagtcagcctacttcctgttaacactgtttagagaggtggctattttgtacagatcccacaatgcaagcctccaccccacgccagagcaatgtgaagctgtgagcaaattcattggcgaatgcaagatcctttcacctcctgatatcagccgttttgcaacatcgctcgtggacaattctgtgccattgttgagggcggggcctagtgacagcaaccttgatggaacggtgacagaaatggccattcatgctgcagccgtccttctgtgtggacagaatgaactcttggagcccctaaagaatctggccttctccccagccaccatggcgcatgcttttcttccaaccatgcctgaagacttgctggctcaagctcggaggtggaagggtctggagcgagtccactggtacacttgtcccaacggccatccttgctccgtgggagagtgtggcaggccgatggaacagagcatctgcattgactgccatgcgccgattggaggcattgaccacaaacctcgggacggctttcatctggtcaaagacaaggcagacagaacgcagaccggccatgtgctgggcaacccgcagcggagagacgtggtgacatgtgaccgagggctgcccccagtggtcttcctccttatccggctactcactcacttggctctgcttctgggagcgtcccagagttcccaggctctgataaacatcattaagcctccagtgagggatccaaaaggctttctgcagcagcacatcctgaaggacctggagcagttggccaagatgctgggacacagtgccgacgagaccatcggcgtggtccacctcgtcctgcgcaggcttctccaagagcagcaccagctctctagcagaaggcttttaaattttgacacagaattgtcaactaaagaaatgaggaacaactgggaaaaggaaatcgcagctgtgatttctcctgaactggagcatctagataaaacccttcccaccatgaataatctcatcagccaagataagcgtatcagctctaaccctgtggccaaaataatatatggtgacccagtgaccttcctgccccacctgccccggaaaagtgtggtccattgctctaagatttggagctgcaggaaaagaattacagttgagtacctccagcacattgtggaacagaaaaatggcaaagaaagagtgcccatcctctggcatttcctgcagaaggaagcagagctgaggctggtaaagttcctgcctgagattttggccttgcaaagggatctagtgaagcagttccagaacgtccagcaagttgaatacagctccatcagaggcttcctcagcaagcacagctcagatgggttgaggcagctgcttcacaacaggatcacagtctttctgtccacatggaacaaactgaggagatcgcttgagacgaacggtgagatcaacctacccaaagactactgcagcactgacttggatctggacactgagtttgagatcctcttgccacgccgacggggcctgggcctctgtgctaccgctctcgtcagctacttgattcgcctacacaatgaaattgtctacgccgtggaaaaactctccaaggaaaacaacagctattccgtggatgccgccgaggtcactgaactgcatgtcatcagttatgaagtggagcgggacctgactccactgattctctccaactgccagtaccaggtggaggagggcagagagaccgtgcaggagttcgatctggagaagattcagcggcagatcgtcagccgcttcctccagggcaagccccggctgagcctcaagggaatacccactctggtgtacagacacgactggaactatgaacatctctttatggacatcaagaacaaaatggcacaggactccctccccagctcggtcattagtgccatcagtggacagctgcagtcctacagcgatgcctgtgaagtgctgtctgtcgtagaagtcactctggggtttctgagcacagctggtggggatccaaacatgcagctgaatgtgtatactcaagacatcctgcaaatgggtgatcagacgattcacgtgttaaaggccttaaacagatgccagttaaaacacaccattgccctctggcagttcctgtctgctcataagtctgaacagctgctgcggctgcacaaagagccatttggggaaatcagttcaaggtacaaagcggatctgagcccggaaaatgctaagctcctcagcacattcctaaatcagactggcctagacgccttcctgctagagctgcacgaaatgataatcttgaaactaaagaacccccaaacccaaaccgaggagcgcttccgccctcagtggagcctgagagacactctcgtaagttacatgcaaactaaagaaagtgaaattcttcctgaaatggcatctcagttcccagaagagatactgctcgccagctgtgtctcagtgtggaaaacagctgctgtgctgaaatggaatcgagaaatgagatagaattatttcctcagctatctttggatgactttggagagaagactcctctctcctcgtctgcggcgtggacttgatcatggactggtgcctttgcattcagaaggagagctgtcagcgtagcaccgaattcaagaccaaggcgtgctacctgagctgacagctttttgaaagccgagctgtttctgaaccatgtacatacatgttctgaaactttctcatcattttatgagtactgttcattgagagatgacaatgaagattagatgaaattggaaataaaccaacattgtttacattccaggagacttgtagctcagccacacacgcagtaatgacctgtgcccgttcgcctctggcactgcccacccctctttttttttttcttctaattctgtactcacaaaagagaatctcattttcttctttcttccattcccttaaattctgagtactgtacatatatttctgggttcccacgatgatgtgaaaaactaccagactgttttttgtcttctcacaaagacaagaaaaatcagggcattttgtgagtgccttaagatcaaactaacaagatctgaccctctcccctcacagtgagccactgccccacttcagagggtaagagccaaaagcctcattgtgaaaggcactggacttggaccagggacaccatcagggccttggttttctcacgcataaaatggagagtggattaatcgccaaagattcttctgatctgacattttgaaattgtgagagaaactagatgactgtaaacttggtcacaggcctggttctggcagttctttgcggacttttttctagcattatgccaaataaacatgcagtctcagtgtgctctcgcatgtatgaatatctagtcctttctgtggttctcagccaagacataaaaactaggactcagagcacatacaaaaccagttatgtttcggaaagagggaaaagagtccccgagcccggatcttgtgctgcttttctcactgacgtgttgccttttttctttacaaaatctgctttgatacttaggacctctctggactaatttctcttcctagacagctcagcacagctattgatatgttagaggcagtatccttaatattcattctaaatgagttaacgacttaacttgaaattgggcctaaggagtgagaactacaaaaatacaaaatgcttgtccaggactcagccatgcacaccttgagcagcgccggcaggaggcacggaaggaactgtgctccgttctcctcactgtcatggtgccaccagtgtctgatgaagggcagagtgacccagactgcaggcagtaactgacttcacacagtccctggcatttagtcatctgtgattgttttatcactctggactgtgcagagccacctgccaccgagatctgcattccgactgcctatgaacgggtgtgggggccgggggctggcttgctgaagtcttcaacttgcactcggagctcctttgatacctcagagctggctgtcaggtggcagctcacacccagactcactggccacacctcagcagggggggagtcgagtgtcagtctctttctgtgaaggctttttttttcctttggcctgggaatttttcccatttttatgaaggggttttaaattgtttcattttgtgtgctgtgcttcaaagccttaactgtcaaatcttgcattatcttgtttgtacagaaatatactggcctagcagaggc

SEQ ID NO: 31 - DNA, 21056 bp, homo sapien
cagcgcgcggcaggcggcgagctcgggggccgcagaaaatgaaactgaagccgtggtcacgtgacaggacatgtagtatatagcaggctgccagcgactcctgctcttgcttctggatctgcagggcagtcccagcaggacccatggagtgtccttcgtgccagcatgtctccaaggaggaaacccccaagttctgcagccagtgcggagagaggctgcctcctgcagcccccatagcagattctgagaacaataactccacaatggcgtcggcctcggagggtgaaatggagtgtgggcaggagctgaaggaggaagggggcccgtgcttgttcccgggctcagacagttggcaagaaaaccccgaggagccctgttccaaagcctcctggaccgtccaagaaagcaaaaagaagaaaaggaagaagaaaaagaaggggaacaagtccgcttcctcagagctggcttccttgcccctttctcctgccagcccctgtcacctgactttgctttcaaacccgtggcctcaggacacagccctgccccacagccaagcccagcagagtggccccactggccagccgagccagcccccaggcacagccaccacgccactggagggtgacggcctctccgcgcccaccgaggttggcgacagccccctgcaggcccaggctttgggagaggcaggagtggccacaggaagtgaggctcagagcagcccgcaattccaggaccacacggaaggggaggaccaggacgcttccatcccctctgggggcagaggcctgtcccaggaggggaccggtccccccacctctgctggtgaaggccattctaggactgaagatgctgcccaggagctcctgttgcctgagtcaaaaggaggcagctctgagcccgggacagaactgcagaccaccgagcaacaggcaggggcctcagcctctatggcagttgatgctgtagctgagccagccaatgcagttaaaggggccgggaaggaaatgaaagagaagacccagagaatgaaacagccaccagcaaccactcctcctttcaaaacacactgccaggaagctgagaccaagaccaaggacgagatggctgctgctgaagaaaaagtcggtaagaatgaacaaggggagcctgaagacctcaagaagccagaggggaagaacagaagtgcagctgctgtgaaaaacgagaaggagcaaaaaaaccaggaagcagatgtccaggaagtgaaggcaagcacgctgagcccgggtggaggagtcaccgtgttcttccacgccatcatctctcttcatttcccattcaatcctgacctccataaagtcttcatcagaggaggagaagaatttggggagtcaaaatgggacagcaatatctgtgagctgcactacaccagagacttgggtcatgaccgcgttcttgttgaaggcattgtctgcatttccaagaagcacctagataaatacattccttacaagtacgtcatttataatggggaatcttttgagtatgagttcatttacaagcaccagcagaagaagggcgagtacgtcaaccgctgtctgttcataaaatcttcacttctgggctcaggagactggcatcagtactatgacatagtttatatgaagcctcatgggagactccagaaagtcatgaaccacatcacagacgggccgaggaaggacctggtgaaggggaagcagattgccgctgcgctcatgctggacagcaccttcagcatcctgcagacctgggacaccatcaacctgaacagcttcttcacccagttcgagcagttttgctttgtcctgcaacagcctatgatttatgaaggacaggcacagctgtggaccgatttgcagtacagggagaaagaggtgaagagatacctgtggcaacatctgaaaaaacacgtggtaccattgccggacggaaaaagcacggactttttgcctgtggactgcccagtgaggagtaaactgaaaacaggcctgattgtcctttttgtagtggaaaaaattgagcttttattagaaggcagcctggactggttgtgtcacctcctaacctcagatgccagctcaccagatgagtttcaccgtgacctaagccacatccttgggatacctcagagctggcggctgtacctggtgaacctgtgccaaagatgcatggacacaaggacgtacacctggctgggcgccctgcctgtcctgcactgctgtatggagctggccccgcggcacaaggatgcctggagacagcctgaggacacctgggccgctctggagggactctccttctcaccgttccgggaacaaatgctagatacgagttccctacttcagtttatgagagagaagcagcatttgctgagcatagacgagcctctcttccggtcctggtttagtctgctacctctgagtcacctggttatgtatatggaaaacttcattgagcacctgggtcgttttcctgctcatatcctggactgtctttcagggatttactaccggcttccgggacttgagcaagtcttgaatacgcaggatgttcaggatgttcagaacgttcagaacattttagaaatgctgttgcgactcctggacacttaccgggacaagattcccgaggaggccttgtcaccatcctacctgactgtgtgtctgaaactgcatgaagccatctgcagcagcacaaagctacttaagttttacgagctgccagccttatctgccgagattgtctgcagaatgattagacttctatctctggtggattctgcaggacagagagatgaaactggaaataattcagtccaaacagtcttccaagggacccttgctgctacgaaaaggtggctccgagaagtttttacaaagaacatgctcacatcttcaggtgcctcattcacatacgtcaaggaaattgaggtctggaggcggctggtggaaatccaattccccgcggagcatggctggaaggagtcgttgctgggagacatggaatggaggctcacaaaggaggaacccctctcccagatcactgcctactgcaatagttgctgggacaccaaaggcttagaggacagtgtggccaagaccttcgagaaatgcatcattgaagccgtgagctcagcctgccagtctcagaccagtatccttcaggggttctcttactctgatttgcggaaatttggcatcgtcttgtctgctgtgatcactaagtcctggcctaggaccgcggacaacttcgatgacattttaaagcatctgctcacgttggcagatgtcaagcacgtcttcagattgtgtggaaccgacgagaaaatactagcaaatgtcacagaggatgccaagaggctgatagctgttgccgactctgtgttgacgaaagttgttggtgacctcctaagtggcacgattttagttggacaactggagctgattataaagcacaagaatcagtttcttgacatctggcaactgagggaaaaaagtctttcaccccaggatgaacaatgtgctgtggaggaagcactggattggagaagggaggaactgttacttctaaagaaagagaaaagatgtgttgatagtctcctgaagatgtgtgggaacgtgaaacatctgatacaagtggactttggagtgcttgcagtaagacactcacaagacctcagcagtaaaagattaaatgacaccgtgacagtgagactgtccacctcctcgaactcgcagagggcaacgcattaccacctgagctcccaggtccaagaaatggctgggaagatagacttgctcagagacagccacatcttccagctcttctggcgggaagccgcagagccgctgagtgagcctaaggaggaccaggaagccgcagagttgctgagtgagcccgaagaagaatcagaaaggcacatccttgagcttgaagaggtgtatgactatttgtatcagccttcttacagaaagttcattaagttgcaccaggatctaaagtcaggagaggtcacccttgcagagattgatgtcatcttcaaggactttgtgaataaatacacggacctggattcagaacttaagatcatgtgcaccgtggaccaccaggaccaaagagattggatcaaggaccgagtcgaacagatcaaggaataccatcacctgcaccaggctgtccacgcagccaaggtcatcttgcaggtcaaagagagcctgggactgaacggtgacttcagtgttctcaacactttactaaattttactgataacttcgacgactttcgccgtgaaacactggaccagatcaaccaggagctcatccaggccaaaaagctgctccaggacatcagcgaggcccggtgcaaggggctgcaggctctgtccctgagaaaggagttcatctgctgggtccgggaggctcttggaggcatcaatgagctgaaggtgtttgtggacctggcctccatctcagcgggggagaatgacattgatgtggaccgggtggcctgcttccatgacgctgtgcagggctacgcatccctgctatttaagctggaccccagcgtggacttcagtgcattcatgaagcatctgaaaaagctgtggaaggctctggataaggaccagtacctgcccaggaaactgtgtgactccgccaggaacttggaatggctgaagactgtgaatgagagtcatgggtctgtggaacgctcatccctgaccctggccacggccatcaaccaaagaggcatctatgtgatccaggcgcccaaaggtggccaaaagatttccccagacacggttctgcacttgatccttcctgagagccctggcagccacgaggagtcacgagagtactctttagaggaggtgaaggagcttttgaacaagttgatgctgatgtctggcaagaaggatcgtaacaacacggaagtggagaggttttcagaggtcttctgcagtgtgcagaggctcagccaggccttcatcgacctgcactctgctgggaatatgctgttcaggacgtggatcgccatggcctactgctcccccaagcagggtgtgtccctccaaatggactttggcttggacctggtgacggagcttaaagaaggtggagatgtcactgagctgctggcagccctctgcaggcagatggagcacttccttgacagctggaagagatttgtgacccagaagcgaatggagcacttttacctgaacttctacacggcagagcagctggtttacctgagcactgagctcaggaagcagcccccgagtgatgccgccctaacgatgctatccttcatcaaaagcaactgcaccctgagggatgtcttaagggcctctgtggggtgtgggagtgaggccgccaggtaccgcatgaggagagtcatggaagagctcccgctgatgctcttatcagagttcagcctggtggacaagctgaggatcatcatggagcagtccatgaggtgccttcctgccttcctgcccgactgcctcgacctagagacccttggccactgtctggctcacctggcagggatgggtgggtctcccgtggagcgttgtctcccgagaggtctgcaggtcggccagcccaacctcgtcgtctgtggccactccgaggtgttgccagccgccctggctgtctacatgcaaaccccaagccagcccctgcccacttacgatgaggtgctgctctgcaccccggcaaccacctttgaggaggtggcactgttgctgcgccgctgcctgaccctgggctccctggggcacaaggtctacagcctgctgttcgcagatcagctgagctacgaggtggcacgccaagcggaggagcttttccacaatctgtgcacgcagcagcaccgagaagactaccagctcgtcatggtctgtgatggggactgggagcactgctacctcccctctgccttcagccagcacaaggtcttcgtcaccccccaggcacccctcgaggccatccaagcctacctggcaggtcactaccgggtcccgaagcagaccctgtcggcggcagccgtgttcaatgaccggctgtgtgttgggatcgtggcctcggagcgagcaggtgttggaaagtctctgtacgtgaagaggttgcacgacaaaatgaagatgcagttaaacgtgaaaaatgtgcctctgaaaacaattcgactgatcgaccctcaggtggatgagagccgagtcctgggcgccctgctgcccttcctggatgcgcagtatcagaaggtccccgtgctctttcacctggacgtgacctcctcagtgcagactggaatttgggtgtttcttttcaagctcctcattttacaatacttaatggatataaatgggaaaatgtggcttcggaacccctgccatttgtatatcgttgaaatcctggaaaggaggacgtcagtgccgtcgaggagctcttcagcgctgcgtacacgtgtaccccagttcagttttcttgacatcttcccaaaagtcacctgcaggcctcccaaagaggtgatagacatggagctgagtgccctgaggagtgacacagagcctgggatggatctgtgggagttctgcagcgaaactttccaaagaccttaccagtatttaagacgattcaatcaaaaccaagacctagacacgtttcagtatcaagaaggctctgtcgaaggcaccccggaggaatgcctccagcatttcctgtttcactgcggggtaataaacccatcctggtcagagcttcggaactttgctcggttcctgaattatcagctcagagattgtgaggcctctctcttctgcaatccgagttttattggcgacacactgaggggcttcaagaagttcgtggtgaccttcatgatctttatggcaagagattttgccacaccatcactccacacctctgaccaaagcccggggaagcacatggtcaccatggatggggttagggaagaagatctagcgcccttctccctccggaagaggtgggagtcggagcctcacccatacgttttcttcaatgacgaccacacaaccatgacattcatcggcttccatctgcagcccaacatcaacggcagtgtcgatgccatcagtcacttgactgggaaggtcatcaagagagacgtcatgaccagggacctgtaccagggcctgctgctccagagggtgcccttcaatgtcgactttgataaactgcccagacacaagaaacttgagaggctctgcctgaccttagggatcccccaggccaccgaccccgacaaaacgtatgagctcacaaccgacaatatgcttaaaatccttgccatcgagatgcggttccggtgtgggatcccggttatcatcatgggagaaactggctgtgggaaaaccaggcttattaaattccttagcgacctgcggcgtggtggtaccaatgctgacaccataaagctggtcaaggtgcacggaggaacaactgcagacatgatctactccagagtcagggaggctgaaaatgtggccttcgccaataaggaccaacatcagttggacaccatcttgttttttgatgaagccaacacaacggaagctataagctgtatcaaagaagtcctgtgtgatcatatggtggatggccagcctctggctgaggactctggcctgcatattatagctgcctgcaatccataccggaagcactctgaggagatgatctgccgtttggagtcagctggtttgggctacagggttagtatggaggagacggccgacaggctgggctccattcctctgaggcagctggtataccgggtccatgctctgcccccgagcctgattcctctggtgtgggactttggacaactgagtgacgttgctgaaaagctctacatccagcagattgtccagagactggttgagtccatcagcctagatgaaaacgggactcgcgtgatcacagaagtcctctgcgcctctcagggtttcatgaggaaaacagaagatgagtgcagctttgtcagcctcagggacgtggagcgctgtgtgaaagttttcaggtggttccacgagcacagcgcgatgctcttagcgcagctgaatgcctttctctccaagtccagcgtcagcaaaaatcacaccgagagagatcccgtcctctggtcgttgatgctggccatcggggtgtgttaccatgcctctttagaaaagaaagactcatatcggaaagccatcgccaggttctttccgaaaccgtatgacgacagcaggctgcttctggatgaaataacacgggcacaggatctttttctggacggcgtacctctgaggaaaaccatcgccaagaacttggccttgaaggagaacgtcttcatgatggtcgtctgcatcgagctgaagattcccctcttcctggtggggaagcccggcagctccaagtctctcgccaagaccatcgtggcagacgccatgcagggcccggctgcctactcagatctcttccgcagcctgaagcaggtccacctggtgtccttccagtgcagcccgcactccaccccacagggcatcatcagcaccttccggcagtgcgcccgctttcagcaggggaaggacctgcagcagtacgtctctgtggtggtgttagatgaggtggggctggcggaagactcacccaaaatgcccctgaagactctgcacccgctgctggaagacggatgcattgaagacgatcccgccccccacaaaaaggtcggcttcgtgggcatctccaactgggcccttgaccctgccaagatgaaccggggcatttttgtgtcacgtggcagccccaacgagacagagctcatagagagcgccaagggcatctgctcctcagacatcctcgtccaggaccgagtccaagggtactttgcgtcctttgccaaagcctacgaaacggtgtgtaagcgccaggacaaggaattcttcgggcttcgtgactactacagcctcatcaaaatggtctttgctgcagcaaaggcttcaaatagaaagccttccccgcaagacattgcacaggctgtccttaggaacttcagtggcaaggatgacatccaagctttggacatctttctggccaatttgcccgaggccaagtgctcagaggaagtcagccccatgcagctgatcaaacagaacatctttgggccttctcagaaggtgccgggtggagagcaggaagatgctgagtcccgctacttactcgtgctgaccaaaaactacgtggcactgcagatcctgcagcagacattcttcgagggggaccagcagccggagattatttttggttctggtttccccaaggaccaagagtacacccagctctgcagaaacatcaatcgtgtgaagatctgcatggaaacaggcaagatggtgttgcttctcaacctgcagaacctctacgagagcctctacgacgcactcaaccagtactacgtccacctcggcggccagaagtacgtggacctcggtctggggacccaccgcgtcaaatgtcgggttcaccccaacttccgcctgattgtcattgaagagaaagacgtcgtgtacaaacactttcccatccccctcattaaccggctggagaagcactatctggatatcaacacggtgctggagaaatggcagaagagcatcgtggaggagctctgtgcgtgggtggagaagttcatcaatgtcaaagcacatcatttccagaagaggcacaaatacagcccctctgacgtcttcatcggctaccactcggacgcctgcgcgtctgtggtgctgcaggtcatagagaggcagggtccccgggccttgacggaggaacttcaccagaaggtgtctgaggaggccaaatcgatcctgctgaactgcgctacgcccgatgccgtggtccggctgagcgcctactcgctgggcgggttcgcagcggagtggctgtcgcaggagtactttcacagacagaggcacaactcctttgcagatttccttcaggcacacctgcacacggcagacctggagcgccacgccatcttcacagagatcaccactttctccaggctgctaacaagtcacgactgtgaaattttagaatcagaggtcacaggcagggctccgaaacccacactcctgtggctgcagcagtttgacaccgagtactcattcctcaaagaagtccgaaactgtttaacgaatacagccaaatgtaaaatcctcatttttcagacagattttgaagatggaatccgtagcgcccagctcattgcctcagctaagtattctgttataaatgaaatcaacaaaatacgagaaaatgaggaccgtatcttcgtctatttcatcacaaaactgtcccgggtgggaagaggaacagcctatgtgggcttccacggagggctgtggcagtctgtccacatcgatgacctccggagatccaccctcatggtttctgatgtgaccaggctgcagcatgtcaccatcagccagctgttcgcgcccggagacttgcctgagctgggcttggaacaccgggcggaagacggccatgaggaggcgatggagacggaggccagcacatcaggggaggtggcagaggtggcagaggaggccatggaaacagaaagttctgagaaggtgggaaaggaaacctctgaactcggaggcagtgatgtgtcgatcctggacaccaccaggctgctgagaagctgtgtgcagagcgccgtgggcatgctcagagaccagaacgagagctgcacgcgcaatatgcggagggtggtgctcctcctgggcctcttgaatgaggatgacgcgtgccacgcctctttcttgcgggtatccaagatgcgcctcagtgtctttttaaagaagcaagaagagagccagtttcaccctctggagtggttggcaagggaagcctgcaaccaggacgctctccaggaggcgggcacattcaggcacaccctctggaagcgggtccaaggtgctgtcacccctctgctggcgagcatgatatcattcatcgacagagacggcaacctagagttactgaccaggccagatactccgccctgggcaagagatctttggatgtttattttcagtgacacgatgcttctgaacattcctcttgtgatgaataatgaaagacataaaggtgagatggcctacatcgtggtgcagaaccacatgaacctttccgagaacgcttccaacaacgtccctttcagctggaaaatcaaggactatctggaggagctgtgggtccaggctcagtacatcacagacgcagaaggactgcccaagaagttcgtggacatctttcagcagactcctctgggcaggtttcttgcccagctccatggagagccgcagcaggaacttcttcagtgttacttgaaggatttcattctcttgaccatgcgtgtgtcaacggaggaggaattaaagtttctgcagatggctctgtggtcctgcactaggaaactgaaagcggcgtcagaagcgcccgaggaagaggtttccttaccgtgggtgcaccttgcctaccagcgtttcagaagccgtctgcagaacttttccagaatcctgaccatctaccctcaggttctccacagcctgatggaagcccgttggaaccatgagctggctggatgtgagatgaccctggacgcatttgccgcaatggcctgcacggagatgctgacaagaaacaccctgaagcccagtccccaggcgtggctacagttggtgaagaatctttccatgccgctggagctcatctgctccgatgagcacatgcaaggcagcgggagcctggcccaggctgtcatcaggggagtcagagcccagtggagtcggattttctccaccgcactcttcgtggagcacgtgctcctaggaaccgagagccgcgtccccgagttacaggggctggtgaccgagcacgtcttcttactagacaagtgtcttcgagagaactctgacgtgaagacgcacgggccttttgaggccgtgatgcgcactctctgtgaatgcaaggagacagccagcaagaccctcagcaggtttgggattcagccgtgctccatctgcctgggagatgcaaaggaccccgtctgtctgccctgcgaccacgtgcactgcctgcgctgcctcagggcctggtttgcctcagagcagatgatatgcccctactgtttaactgccttgccagacgaattctctccagctgtttcccaagcgcacagggaagccattgaaaagcatgcccgcttccggcagatgtgcaacagtttcttcgtagacctggtgtccaccatttgcttcaaggacaacgctccgcctgagaaggaagtgattgagagcctgctctctctcctcttcgtccaaaaggggcgcttaagagatgctgcccagagacactgtgaacacacaaaatctctctctccattcaatgatgttgtggataagactcctgtcatccgctcagtgatactgaaactgcttttgaagtacagctttcatgatgtaaaagattatattcaggaatatttgaccctgttaaaaaagaaagcattcataactgaagataaaactgaactgtacatgctcttcatcaactgcctggaggattcaatacttgagaagaccagtgcttactccagaaatgatgaactgaaccacctagaagaggaaggtcgtttccttaaggcatattctccagcaagccggggccgagagcctgccaacgaggcctcggttgaatacctgcaagaggtggcccggatccgcctctgcctcgacagagctgcagatttcctctcggagcctgagggaggcccagagatggccaaggagaagcagtgctacctgcagcaagtcaagcagttctgtatccgggtggagaacgactggcaccgggtgtacctggtgcggaagctcagcagccagcgggggatggagttcgtgcagggcctctccaagcccggccgcccgcaccagtgggtgtttcccaaggacgttgtcaagcagcaggggctgcggcaggaccacccaggccagatggataggtacctggtgtacggcgatgaatacaaggctctccgtgatgctgtggccaaagctgtcctcgagtgcaagccactgggcattaagactgctctgaaggcctgcaagaccccccaaagccagcagtcagcctacttcctgttaacactgtttagagaggtggctattttgtacagatcccacaatgcaagcctccaccccacgccagagcaatgtgaagctgtgagcaaattcattggcgaatgcaagatcctttcacctcctgatatcagccgttttgcaacatcgctcgtggacaattctgtgccattgttgagggcggggcctagtgacagcaaccttgatggaacggtgacagaaatggccattcatgctgcagccgtccttctgtgtggacagaatgaactcttggagcccctaaagaatctggccttctccccagccaccatggcgcatgcttttcttccaaccatgcctgaagacttgctggctcaagctcggaggtggaagggtctggagcgagtccactggtacacttgtcccaacggccatccttgctccgtgggagagtgtggcaggccgatggaacagagcatctgcattgactgccatgcgccgattggaggcattgaccacaaacctcgggacggctttcatctggtcaaagacaaggcagacagaacgcagaccggccacgtgctgggcaacccgcagcggagagacgtggtgacatgtgaccgagggctgcccccagtggtcttcctccttatccggctactcactcacttggctctgcttctgggagcgtcccagagttcccaggctctgataaacatcattaagcctccagtgagggatccaaaaggctttctgcagcagcacatcctgaaggacctggagcagttggccaagatgctgggacacagtgccgacgagaccatcggcgtggtccacctcgtcctgcgcaggcttctccaagagcagcaccagctctctagcagaaggcttttaaattttgacacagaattgtcaactaaagaaatgaggaacaactgggaaaaggaaatcgcagctgtgatttctcctgaactggagcatctagataaaacccttcccaccatgaataatctcatcagccaagataagcgtatcagctctaaccctgtggccaaaataatatatggtgacccagtgaccttcctgccccacctgccccggaaaagtgtggtccattgctctaagatttggagctgcaggaaaagaattacagttgagtacctccagcacattgtggaacagaaaaatggcaaagaaagagtgcccatcctctggcatttcctgcagaaggaagcagagctgaggctggtaaagttcctgcctgagattttggccttgcaaagggatctagtgaagcagttccagaacgtccagcaagttgaatacagctccatcagaggcttcctcagcaagcacagctcagatgggttgaggcagctgcttcacaacaggatcacagtctttctgtccacatggaacaaactgaggagatcgcttgagacgaacggtgagatcaacctacccaaagactactgcagcactgacttggatctggacactgagtttgagatcctcttgccacgccgacggggcctgggcctctgtgctaccgctctcgtcagctacttgattcgcctacacaatgaaattgtctacgccgtggaaaaactctccaaggaaaacaacagctattccgtggatgccgccgaggtcactgaactgcatgtcatcagttatgaagtggagcgggacctgactccactgattctctccaactgccagtaccaggtggaggagggcagagagaccgtgcaggagttcgatctggagaagattcagcggcagatcgtcagccgcttcctccagggcaagccccggctgagcctcaagggaatacccactctggtgtacagacacgactggaactatgaacatctctttatggacatcaagaacaaaatggcacaggactccctccccagctcggtcattagtgccatcagtggacagctgcagtcctacagcgatgcctgtgaagtgctgtctgtcgtagaagtcactctggggtttctgagcacagctggtggggatccaaacatgcagctgaatgtgtatactcaagacatcctgcaaatgggtgatcagacgattcacgtgttaaaggccttaaacagatgccagttaaaacacaccattgccctctggcagttcctgtctgctcataagtctgaacagctgctgcggctgcacaaagagccatttggggaaatcagttcaaggtacaaagcggatctgagcccggaaaatgctaagctcctcagcacattcctaaatcagactggcctagacgccttcctgctagagctgcacgaaatgataatcttgaaactaaagaacccccaaacccaaaccgaggagcgcttccgccctcagtggagcctgagagacactctcgtaagttacatgcaaactaaagaaagtgaaattcttcctgaaatggcatctcagttcccagaagagatactgctcgccagctgtgtctcagtgtggaaaacagctgctgtgctgaaatggaatcgagaaatgagatagaattatttcctcagctatctttggatgactttggagagaagactcctctctcctcgtctgcggcgtggacttgatcatggactggtgcctttgcattcagaaggagagctgtcagcgtagcaccgaattcaagaccaaggcgtgctacctgagctgacagctttttgaaagccgagctgtttctgaaccatgtacatacatgttctgaaactttctcatcattttatgagtactgttcattgagagatgacaatgaagattagatgaaattggaaataaaccaacattgtttacattccaggagacttgtagctcagccacacacgcagtaatgacctgtgcccgttcgcctctggcactgcccacccctctttttttttttcttctaattctgtactcacaaaagagaatctcattttcttctttcttccattcccttaaattctgagtactgtacatatatttctgggttcccacgatgatgtgaaaaactaccagactgttttttgtcttctcacaaagacaagaaaaatcagggcattttgtgagtgccttaagatcaaactaacaagatctgaccctctcccctcacagtgagccactgccccacttcagagggtaagagccaaaagcctcattgtgaaaggcactggacttggaccagggacaccatcagggccttggttttctcacgcataaaatggagagtggattaatcgccaaagattcttctgatctgacattttgaaattgtgagagaaactagatgactgtaaacttggtcacaggcctggttctggcagttctttgcggacttttttctagcattatgccaaataaacatgcagtctcagtgtgctctcgcatgtatgaatatctagtcctttctgtggttctcagccaagacataaaaactaggactcagagcacatacaaaaccagttatgtttcggaaagagggaaaagagtccccgagcccggatcttgtgctgcttttctcactgacgtgttgccttttttctttacaaaatctgctttgatacttaggacctctctggactaatttctcttcctagacagctcagcacagctattgatatgttagaggcagtatccttaatattcattctaaatgagttaacgacttaacttgaaattgggcctaaggagtgagaactacaaaaatacaaaatgcttgtccaggactcagccatgcacaccttgagcagcgccggcaggaggcacggaaggaactgtgctccgttctcctcactgtcatggtgccaccagtgtctgatgaagggcagagtgacccagactgcaggcagtaactgacttcacacagtccctggcatttagtcatctgtgattgttttatcactctggactgtgcagagccacctgccaccgagatctgcattccgactgcctatgaacgggtgtgggggccgggggctggcttgctgaagtcttcaacttgcactcggagctcctttgatacctcagagctggctgtcaggtggcagctcacacccagactcactggccacacctcagcagggggggagtcgagtgtcagtctctttctgtgaaggctttttttttcctttggcctgggaatttttcccatttttatgaaggggttttaaattgtttcattttgtgtgctgtgcttcaaagccttaactgtcaaatcttgcattatcttgtttgtacagaaatatactggcctagcagaggcaaaaaaaaaaaaaatgaattttattttacttgtcacacctgtcttaataaactggagttttgctgctaaagaactcttctctctgggggcagagcttctatttatggcacatagacatcagctaggcttttgggaatcgtttgtgttctttgtggaaatgtcctttagaagcacccatgaagtagtgtgttcagactgtgcacacagaaaacaggctctgccttcacatgtgagacggtggacttttcctctggacaaaatgacagcatcctggcgactccacagtggagctgagcgccactccctgtagccgatctgggactgaaacgcttacacctctgcctcagaaggagtcccccatgccctgcctgaaatgacttcactggacacagcggggctgcagctaacggggtacaggtaggagctaactaacttcacccctgagtccacttgcggggtaagagataaacagtaacccttccaggagcccactgacgttggagtgctaaaaatgccccttcagggggaaaactgcattttctcttccaaaaaggaaaggttcttccaggcgagaaacctgtggtctagaaccacagcaagaagaggaggcatgctggcctgcaccggaagactcactttgtctgccctgcgccagcctcacctcaccctgcagttcccgtttccgccatggatgcctcatcaccaaccctgaccttccccctcccaaccctttattcatcctcactcccactcatacccgcctccctggacagttccctgctgcagagttctttctgctttcagccctaccttggtggtgatttacctgaaaatcttcacaactgatcattatctccttctctttgagacctgactgaaaaaattaggtgtgcacacctgtaatcccagctacctgggaggctgaggtatgaggattgcttgagcctgggagtttgaggctgcagtgagctatgattgcaccactgcactccaacctgggtgacagagtgagaccctgtctcaaaaaaaaataaaataaggaccttattgtgtgtgcaaattatttgcctttcatgaatagttatgagactttgtgcatgtgttaaccgagacggccctgagctatttcagttactcctgtatgttcaggcaattccaatttagaaacaaacttccagtgataaatattgggaagaaaatgtcagctcagggccaagtaggtaaagccacccaagtctagccatgcacacaggcactagtgtgctgaaggaaaacacctctgatttgatacataaagtgtgaaggttgcataactggggaggtggctggagaaaacctgagcctcgagctgagtaacaatccaagccatgattagcatttatattgcattctgcattattctcatcctatcacgttcattaagttcaaccattaccattacgaatcccgtttccagctggaaaaacaagcgccaggaaagtgcatttcccccccaccccccccccccaaccagagcaactttggtcagaagtcacacctaatcaccctctctgcaggatatgctggggatagcccttttgaggaggtgggggtgtatgcgaaagcaacctggggccaaagcagggggaagcaggagagactggaggggccctgggtccagcaagtgctccaccaggctgcccctgctcaggtgctccacagcccataaaaaacgccttcagccctgctgtgcttcccctcacacctaaacttactataagggtcctaccttccccagtattccttcatgatcactgctacctgtgccctgaagcgcaacagaacctcaacccagaggacagccacttcctcagaacccacgatctttgccccatcgccacaggtccatgagtgactcctaattaccaaatccaagggctccttcaccctgaccactctggaacccaacaaagctgacacacagcccagcccagacaggcctgaatgtgggtcctggctctcccatttgccagttctacagccatgggcaagtggctcgacctctctaagcttcagtttcctcgtctgtgaaatatctgtcagtgctcttaagggaggagaccaccccacatattgtcttacgcccaatttctgcctccaaagagagaagtaaaaactaaaaggcagaaatgaaatccacaagcagacagcctgcaccacaccctgggcctggtagttaaagatcgacgcctgacctaatcagtgatgctatctatagattacagacattatatagaaaagcaccgtgaaaatccctgtcctgttctgttccgttctaattacgggtgcatgcagcccccagtcacgtaccccctgcttgctcaatcaatcacgaccctctcacgcagaccccttaagagttgtgagcccttaaaagggacaggaattgctcactcggggagctcagttgttggagacatgagtcttgccgaagcgcccggctgaataaagcccttctttaactcgtgtctgaggggttttctctgcagcttgtcctgctacatttcttggttccctgaccaggaatctaggtgattaatggatggttgaggcagcccctcagacggcttaggcctgccctgtggagcatccctgtggaggactccagccagcttgagcgacatggatcctgagagcgctctcaggcaggcaattgccccagtggaatgcctggccagagcagtgtgtagcaggcccccgaggaggatcaacgcagtggctgaacaccgggaaggaactgccacttggagtccagacatctgaaacttggtaagactggtctttggaacttgcccactccatttgaggggaagcgtggcctgatcacccacggcgtgcctgtactggcactctggtttttgtttttgacttgacttggattgcttgatactttggttttggttttgacctgacttggatatcctgatactctgattttggttttgattttggtttggtgtaaactgtaaaagtgtgtgtgtgccctttttacctgttctttgttttgtggtatgcgtgtagggtgagcgtaatgttttgtcttgaagaagcatgggtcaagcacaaagtaagaccaccccactaggaactatgctgaaaaatttcaggaaaggatttaagggagactatggagtactatgacaccaggaaaacttaaaactttgtgtaagatagactggccagcattagaggtaggttggccatcagagtgaagcctggacaggtcccttgtttcaaaggtatggcacaaggtaacctgtaagccagggtacccacaccagttcccgtacacagacacttggttacagctggttttagactccccacccgcccgccccaacagtggttgagagaacagcagcataagtggctggcagaggcaaggaaagaccagcagagagagaaagaggaagagacagacaaagagggagtcagagagagagagagaaagagacagaggcaaaaggaaagtcaaagagaaagagacagaaaatcaagaggaaaaaaaa

SEQ ID NO: 32 - DNA, 17730 bp, homo sapien
gacagcgcgcggcaggcggcgagctcgggggccgcagaaaatgaaactgaagccgtggtcacgtgacaggacatgtagtatatagcaggctgccagcgactcctgctcttgcttctggatctgcagggcagtcccagcaggacccatggagtgtccttcgtgccagcatgtctccaaggaggaaacccccaagttctgcagccagtgcggagagaggctgcctcctgcagcccccatagcagattctgagaacaataactccacaatggcgtcggcctcggagggtgaaatggagtgtgggcaggagctgaaggaggaagggggcccgtgcttgttcccgggctcagacagttggcaagaaaaccccgaggagccctgttccaaagcctcctggaccgtccaagaaggagctacatcagaggttttggtagatgctgctgtagacctcatatccgatgaatgggaagctgctaatgccatacccagcaagagaaggaagcaggatgcagccccgcttgaggccgccagcgtgccttctgcagactgtgagcagagcaaaaagaagaaaaggaagaagaaaaagaaggggaacaagtccgcttcctcagagctggcttccttgcccctttctcctgccagcccctgtcacctgactttgctttcaaacccgtggcctcaggacacagccctgccccacagccaagcccagcagagtggccccactggccagccgagccagcccccaggcacagccaccacgccactggagggtgacggcctctccgcgcccaccgaggttggcgacagccccctgcaggcccaggctttgggagaggcaggagtggccacaggaagtgaggctcagagcagcccgcaattccaggaccacacggaaggggaggaccaggacgcttccatcccctctgggggcagaggcctgtcccaggaggggaccggtccccccacctctgctggtgaaggccattctaggactgaagatgctgcccaggagctcctgttgcctgagtcaaaaggaggcagctctgagcccgggacagaactgcagaccaccgagcaacaggcaggggcctcagcctctatggcagttgatgctgtagctgagccagccaatgcagttaaaggggccgggaaggaaatgaaagagaagacccagagaatgaaacagccaccagcaaccactcctcctttcaaaacacactgccaggaagctgagaccaagaccaaggacgagatggctgctgctgaagaaaaagtcggtaagaatgaacaaggggagcctgaagacctcaagaagccagaggggaagaacagaagtgcagctgctgtgaaaaacgagaaggagcaaaaaaaccaggaagcagatgtccaggaagtgaaggcaagcacgctgagcccgggtggaggagtcaccgtgttcttccacgccatcatctctcttcatttcccattcaatcctgacctccataaagtcttcatcagaggaggagaagaatttggggagtcaaaatgggacagcaatatctgtgagctgcactacaccagagacttgggtcatgaccgcgttcttgttgaaggcattgtctgcatttccaagaagcacctagataaatacattccttacaagtacgtcatttataatggggaatcttttgagtatgagttcatttacaagcaccagcagaagaagggcgagtacgtcaaccgctgtctgttcataaaatcttcacttctgggctcaggagactggcatcagtactatgacatagtttatatgaagcctcatgggagactccagaaagtcatgaaccacatcacagacgggccgaggaaggacctggtgaaggggaagcagattgccgctgcgctcatgctggacagcaccttcagcatcctgcagacctgggacaccatcaacctgaacagcttcttcacccagttcgagcagttttgctttgtcctgcaacagcctatgatttatgaaggacaggcacagctgtggaccgatttgcagtacagggagaaagaggtgaagagatacctgtggcaacatctgaaaaaacacgtggtaccattgccggacggaaaaagcacggactttttgcctgtggactgcccagtgaggagtaaactgaaaacaggcctgattgtcctttttgtagtggaaaaaattgagcttttattagaaggcagcctggactggttgtgtcacctcctaacctcagatgccagctcaccagatgagtttcaccgtgacctaagccacatccttgggatacctcagagctggcggctgtacctggtgaacctgtgccaaagatgcatggacacaaggacgtacacctggctgggcgccctgcctgtcctgcactgctgtatggagctggccccgcggcacaaggatgcctggagacagcctgaggacacctgggccgctctggagggactctccttctcaccgttccgggaacaaatgctagatacgagttccctacttcagtttatgagagagaagcagcatttgctgagcatagacgagcctctcttccggtcctggtttagtctgctacctctgagtcacctggttatgtatatggaaaacttcattgagcacctgggtcgttttcctgctcatatcctggactgtctttcagggatttactaccggcttccgggacttgagcaagtcttgaatacgcaggatgttcaggatgttcagaacgttcagaacattttagaaatgctgttgcgactcctggacacttaccgggacaagattcccgaggaggccttgtcaccatcctacctgactgtgtgtctgaaactgcatgaagccatctgcagcagcacaaagctacttaagttttacgagctgccagccttatctgccgagattgtctgcagaatgattagacttctatctctggtggattctgcaggacagagagatgaaactggaaataattcagtccaaacagtcttccaagggacccttgctgctacgaaaaggtggctccgagaagtttttacaaagaacatgctcacatcttcaggtgcctcattcacatacgtcaaggaaattgaggtctggaggcggctggtggaaatccaattccccgcggagcatggctggaaggagtcgttgctgggagacatggaatggaggctcacaaaggaggaacccctctcccagatcactgcctactgcaatagttgctgggacaccaaaggcttagaggacagtgtggccaagaccttcgagaaatgcatcattgaagccgtgagctcagcctgccagtctcagaccagtatccttcaggggttctcttactctgatttgcggaaatttggcatcgtcttgtctgctgtgatcactaagtcctggcctaggaccgcggacaacttcgatgacattttaaagcatctgctcacgttggcagatgtcaagcacgtcttcagattgtgtggaaccgacgagaaaatactagcaaatgtcacagaggatgccaagaggctgatagctgttgccgactctgtgttgacgaaagttgttggtgacctcctaagtggcacgattttagttggacaactggagctgattataaagcacaagaatcagtttcttgacatctggcaactgagggaaaaaagtctttcaccccaggatgaacaatgtgctgtggaggaagcactggattggagaagggaggaactgttacttctaaagaaagagaaaagatgtgttgatagtctcctgaagatgtgtgggaacgtgaaacatctgatacaagtggactttggagtgcttgcagtaagacactcacaagacctcagcagtaaaagattaaatgacaccgtgacagtgagactgtccacctcctcgaactcgcagagggcaacgcattaccacctgagctcccaggtccaagaaatggctgggaagatagacttgctcagagacagccacatcttccagctcttctggcgggaagccgcagagccgctgagtgagcctaaggaggaccaggaagccgcagagttgctgagtgagcccgaagaagaatcagaaaggcacatccttgagcttgaagaggtgtatgactatttgtatcagccttcttacagaaagttcattaagttgcaccaggatctaaagtcaggagaggtcacccttgcagagattgatgtcatcttcaaggactttgtgaataaatacacggacctggattcagaacttaagatcatgtgcaccgtggaccaccaggaccaaagagattggatcaaggaccgagtcgaacagatcaaggaataccatcacctgcaccaggctgtccacgcagccaaggtcatcttgcaggtcaaagagagcctgggactgaacggtgacttcagtgttctcaacactttactaaattttactgataacttcgacgactttcgccgtgaaacactggaccagatcaaccaggagctcatccaggccaaaaagctgctccaggacatcagcgaggcccggtgcaaggggctgcaggctctgtccctgagaaaggagttcatctgctgggtccgggaggctcttggaggcatcaatgagctgaaggtgtttgtggacctggcctccatctcagcgggggagaatgacattgatgtggaccgggtggcctgcttccatgacgctgtgcagggctacgcatccctgctatttaagctggaccccagcgtggacttcagtgcattcatgaagcatctgaaaaagctgtggaaggctctggataaggaccagtacctgcccaggaaactgtgtgactccgccaggaacttggaatggctgaagactgtgaatgagagtcatgggtctgtggaacgctcatccctgaccctggccacggccatcaaccaaagaggcatctatgtgatccaggcgcccaaaggtggccaaaagatttccccagacacggttctgcacttgatccttcctgagagccctggcagccacgaggagtcacgagagtactctttagaggaggtgaaggagcttttgaacaagttgatgctgatgtctggcaagaaggatcgtaacaacacggaagtggagaggttttcagaggtcttctgcagtgtgcagaggctcagccaggccttcatcgacctgcactctgctgggaatatgctgttcaggacgtggatcgccatggcctactgctcccccaagcagggtgtgtccctccaaatggactttggcttggacctggtgacggagcttaaagaaggtggagatgtcactgagctgctggcagccctctgcaggcagatggagcacttccttgacagctggaagagatttgtgacccagaagcgaatggagcacttttacctgaacttctacacggcagagcagctggtttacctgagcactgagctcaggaagcagcccccgagtgatgccgccctaacgatgctatccttcatcaaaagcaactgcaccctgagggatgtcttaagggcctctgtggggtgtgggagtgaggccgccaggtaccgcatgaggagagtcatggaagagctcccgctgatgctcttatcagagttcagcctggtggacaagctgaggatcatcatggagcagtccatgaggtgccttcctgccttcctgcccgactgcctcgacctagagacccttggccactgtctggctcacctggcagggatgggtgggtctcccgtggagcgttgtctcccgagaggtctgcaggtcggccagcccaacctcgtcgtctgtggccactccgaggtgttgccagccgccctggctgtctacatgcaaaccccaagccagcccctgcccacttacgatgaggtgctgctctgcaccccggcaaccacctttgaggaggtggcactgttgctgcgccgctgcctgaccctgggctccctggggcacaaggtctacagcctgctgttcgcagatcagctgagctacgaggtggcacgccaagcggaggagcttttccacaatctgtgcacgcagcagcaccgagaagactaccagctcgtcatggtctgtgatggggactgggagcactgctacctcccctctgccttcagccagcacaaggtcttcgtcaccccccaggcacccctcgaggccatccaagcctacctggcaggtcactaccgggtcccgaagcagaccctgtcggcggcagccgtgttcaatgaccggctgtgtgttgggatcgtggcctcggagcgagcaggtgttggaaagtctctgtacgtgaagaggttgcacgacaaaatgaagatgcagttaaacgtgaaaaatgtgcctctgaaaacaattcgactgatcgaccctcaggtggatgagagccgagtcctgggcgccctgctgcccttcctggatgcgcagtatcagaaggtccccgtgctctttcacctggacgtgacctcctcagtgcagactggaatttgggtgtttcttttcaagctcctcattttacaatacttaatggatataaatgggaaaatgtggcttcggaacccctgccatttgtatatcgttgaaatcctggaaaggaggacgtcagtgccgtcgaggagctcttcagcgctgcgtacacgtgtaccccagttcagttttcttgacatcttcccaaaagtcacctgcaggcctcccaaagaggtgatagacatggagctgagtgccctgaggagtgacacagagcctgggatggatctgtgggagttctgcagcgaaactttccaaagaccttaccagtatttaagacgattcaatcaaaaccaagacctagacacgtttcagtatcaagaaggctctgtcgaaggcaccccggaggaatgcctccagcatttcctgtttcactgcggggtaataaacccatcctggtcagagcttcggaactttgctcggttcctgaattatcagctcagagattgtgaggcctctctcttctgcaatccgagttttattggcgacacactgaggggcttcaagaagttcgtggtgaccttcatgatctttatggcaagagattttgccacaccatcactccacacctctgaccaaagcccggggaagcacatggtcaccatggatggggttagggaagaagatctagcgcccttctccctccggaagaggtgggagtcggagcctcacccatacgttttcttcaatgacgaccacacaaccatgacattcatcggcttccatctgcagcccaacatcaacggcagtgtcgatgccatcagtcacttgactgggaaggtcatcaagagagacgtcatgaccagggacctgtaccagggcctgctgctccagagggtgcccttcaatgtcgactttgataaactgcccagacacaagaaacttgagaggctctgcctgaccttagggatcccccaggccaccgaccccgacaaaacgtatgagctcacaaccgacaatatgcttaaaatccttgccatcgagatgcggttccggtgtgggatcccggttatcatcatgggagaaactggctgtgggaaaaccaggcttattaaattccttagcgacctgcggcgtggtggtaccaatgctgacaccataaagctggtcaaggtgcacggaggaacaactgcagacatgatctactccagagtcagggaggctgaaaatgtggccttcgccaataaggaccaacatcagttggacaccatcttgttttttgatgaagccaacacaacggaagctataagctgtatcaaagaagtcctgtgtgatcatatggtggatggccagcctctggctgaggactctggcctgcatattatagctgcctgcaatccataccggaagcactctgaggagatgatctgccgtttggagtcagctggtttgggctacagggttagtatggaggagacggccgacaggctgggctccattcctctgaggcagctggtataccgggtccatgctctgcccccgagcctgattcctctggtgtgggactttggacaactgagtgacgttgctgaaaagctctacatccagcagattgtccagagactggttgagtccatcagcctagatgaaaacgggactcgcgtgatcacagaagtcctctgcgcctctcagggtttcatgaggaaaacagaagatgagtgcagctttgtcagcctcagggacgtggagcgctgtgtgaaagttttcaggtggttccacgagcacagcgcgatgctcttagcgcagctgaatgcctttctctccaagtccagcgtcagcaaaaatcacaccgagagagatcccgtcctctggtcgttgatgctggccatcggggtgtgttaccatgcctctttagaaaagaaagactcatatcggaaagccatcgccaggttctttccgaaaccgtatgacgacagcaggctgcttctggatgaaataacacgggcacaggatctttttctggacggcgtacctctgaggaaaaccatcgccaagaacttggccttgaaggagaacgtcttcatgatggtcgtctgcatcgagctgaagattcccctcttcctggtggggaagcccggcagctccaagtctctcgccaagaccatcgtggcagacgccatgcagggcccggctgcctactcagatctcttccgcagcctgaagcaggtccacctggtgtccttccagtgcagcccgcactccaccccacagggcatcatcagcaccttccggcagtgcgcccgctttcagcaggggaaggacctgcagcagtacgtctctgtggtggtgttagatgaggtggggctggcggaagactcacccaaaatgcccctgaagactctgcacccgctgctggaagacggatgcattgaagacgatcccgccccccacaaaaaggtcggcttcgtgggcatctccaactgggcccttgaccctgccaagatgaaccggggcatttttgtgtcacgtggcagccccaacgagacagagctcatagagagcgccaagggcatctgctcctcagacatcctcgtccaggaccgagtccaagggtactttgcgtcctttgccaaagcctacgaaacggtgtgtaagcgccaggacaaggaattcttcgggcttcgtgactactacagcctcatcaaaatggtctttgctgcagcaaaggcttcaaatagaaagccttccccgcaagacattgcacaggctgtccttaggaacttcagtggcaaggatgacatccaagctttggacatctttctggccaatttgcccgaggccaagtgctcagaggaagtcagccccatgcagctgatcaaacagaacatctttgggccttctcagaaggtgccgggtggagagcaggaagatgctgagtcccgctacttactcgtgctgaccaaaaactacgtggcactgcagatcctgcagcagacattcttcgagggggaccagcagccggagattatttttggttctggtttccccaaggaccaagagtacacccagctctgcagaaacatcaatcgtgtgaagatctgcatggaaacaggcaagatggtgttgcttctcaacctgcagaacctctacgagagcctctacgacgcactcaaccagtactacgtccacctcggcggccagaagtacgtggacctcggtctggggacccaccgcgtcaaatgtcgggttcaccccaacttccgcctgattgtcattgaagagaaagacgtcgtgtacaaacactttcccatccccctcattaaccggctggagaagcactatctggatatcaacacggtgctggagaaatggcagaagagcatcgtggaggagctctgtgcgtgggtggagaagttcatcaatgtcaaagcacatcatttccagaagaggcacaaatacagcccctctgacgtcttcatcggctaccactcggacgcctgcgcgtctgtggtgctgcaggtcatagagaggcagggtccccgggccttgacggaggaacttcaccagaaggtgtctgaggaggccaaatcgatcctgctgaactgcgctacgcccgatgccgtggtccggctgagcgcctactcgctgggcgggttcgcagcggagtggctgtcgcaggagtactttcacagacagaggcacaactcctttgcagatttccttcaggcacacctgcacacggcagacctggagcgccacgccatcttcacagagatcaccactttctccaggctgctaacaagtcacgactgtgaaattttagaatcagaggtcacaggcagggctccgaaacccacactcctgtggctgcagcagtttgacaccgagtactcattcctcaaagaagtccgaaactgtttaacgaatacagccaaatgtaaaatcctcatttttcagacagattttgaagatggaatccgtagcgcccagctcattgcctcagctaagtattctgttataaatgaaatcaacaaaatacgagaaaatgaggaccgtatcttcgtctatttcatcacaaaactgtcccgggtgggaagaggaacagcctatgtgggcttccacggagggctgtggcagtctgtccacatcgatgacctccggagatccaccctcatggtttctgatgtgaccaggctgcagcatgtcaccatcagccagctgttcgcgcccggagacttgcctgagctgggcttggaacaccgggcggaagacggccatgaggaggcgatggagacggaggccagcacatcaggggaggtggcagaggtggcagaggaggccatggaaacagaaagttctgagaaggtgggaaaggaaacctctgaactcggaggcagtgatgtgtcgatcctggacaccaccaggctgctgagaagctgtgtgcagagcgccgtgggcatgctcagagaccagaacgagagctgcacgcgcaatatgcggagggtggtgctcctcctgggcctcttgaatgaggatgacgcgtgccacgcctctttcttgcgggtatccaagatgcgcctcagtgtctttttaaagaagcaagaagagagccagtttcaccctctggagtggttggcaagggaagcctgcaaccaggacgctctccaggaggcgggcacattcaggcacaccctctggaagcgggtccaaggtgctgtcacccctctgctggcgagcatgatatcattcatcgacagagacggcaacctagagttactgaccaggccagatactccgccctgggcaagagatctttggatgtttattttcagtgacacgatgcttctgaacattcctcttgtgatgaataatgaaagacataaaggtgagatggcctacatcgtggtgcagaaccacatgaacctttccgagaacgcttccaacaacgtccctttcagctggaaaatcaaggactatctggaggagctgtgggtccaggctcagtacatcacagacgcagaaggactgcccaagaagttcgtggacatctttcagcagactcctctgggcaggtttcttgcccagctccatggagagccgcagcaggaacttcttcagtgttacttgaaggatttcattctcttgaccatgcgtgtgtcaacggaggaggaattaaagtttctgcagatggctctgtggtcctgcactaggaaactgaaagcggcgtcagaagcgcccgaggaagaggtttccttaccgtgggtgcaccttgcctaccagcgtttcagaagccgtctgcagaacttttccagaatcctgaccatctaccctcaggttctccacagcctgatggaagcccgttggaaccatgagctggctggatgtgagatgaccctggacgcatttgccgcaatggcctgcacggagatgctgacaagaaacaccctgaagcccagtccccaggcgtggctacagttggtgaagaatctttccatgccgctggagctcatctgctccgatgagcacatgcaaggcagcgggagcctggcccaggctgtcatcaggggagtcagagcccagtggagtcggattttctccaccgcactcttcgtggagcacgtgctcctaggaaccgagagccgcgtccccgagttacaggggctggtgaccgagcacgtcttcttactagacaagtgtcttcgagagaactctgacgtgaagacgcacgggccttttgaggccgtgatgcgcactctctgtgaatgcaaggagacagccagcaagaccctcagcaggtttgggattcagccgtgctccatctgcctgggagatgcaaaggaccccgtctgtctgccctgcgaccacgtgcactgcctgcgctgcctcagggcctggtttgcctcagagcagatgatatgcccctactgtttaactgccttgccagacgaattctctccagctgtttcccaagcgcacagggaagccattgaaaagcatgcccgcttccggcagatgtgcaacagtttcttcgtagacctggtgtccaccatttgcttcaaggacaacgctccgcctgagaaggaagtgattgagagcctgctctctctcctcttcgtccaaaaggggcgcttaagagatgctgcccagagacactgtgaacacacaaaatctctctctccattcaatgatgttgtggataagactcctgtcatccgctcagtgatactgaaactgcttttgaagtacagctttcatgatgtaaaagattatattcaggaatatttgaccctgttaaaaaagaaagcattcataactgaagataaaactgaactgtacatgctcttcatcaactgcctggaggattcaatacttgagaagaccagtgcttactccagaaatgatgaactgaaccacctagaagaggaaggtcgtttccttaaggcatattctccagcaagccggggccgagagcctgccaacgaggcctcggttgaatacctgcaagaggtggcccggatccgcctctgcctcgacagagctgcagatttcctctcggagcctgagggaggcccagagatggccaaggagaagcagtgctacctgcagcaagtcaagcagttctgtatccgggtggagaacgactggcaccgggtgtacctggtgcggaagctcagcagccagcgggggatggagttcgtgcagggcctctccaagcccggccgcccgcaccagtgggtgtttcccaaggacgttgtcaagcagcaggggctgcggcaggaccacccaggccagatggataggtacctggtgtacggcgatgaatacaaggctctccgtgatgctgtggccaaagctgtcctcgagtgcaagccactgggcattaagactgctctgaaggcctgcaagaccccccaaagccagcagtcagcctacttcctgttaacactgtttagagaggtggctattttgtacagatcccacaatgcaagcctccaccccacgccagagcaatgtgaagctgtgagcaaattcattggcgaatgcaagatcctttcacctcctgatatcagccgttttgcaacatcgctcgtggacaattctgtgccattgttgagggcggggcctagtgacagcaaccttgatggaacggtgacagaaatggccattcatgctgcagccgtccttctgtgtggacagaatgaactcttggagcccctaaagaatctggccttctccccagccaccatggcgcatgcttttcttccaaccatgcctgaagacttgctggctcaagctcggaggtggaagggtctggagcgagtccactggtacacttgtcccaacggccatccttgctccgtgggagagtgtggcaggccgatggaacagagcatctgcattgactgccatgcgccgattggaggcattgaccacaaacctcgggacggctttcatctggtcaaagacaaggcagacagaacgcagaccggccacgtgctgggcaacccgcagcggagagacgtggtgacatgtgaccgagggctgcccccagtggtcttcctccttatccggctactcactcacttggctctgcttctgggagcgtcccagagttcccaggctctgataaacatcattaagcctccagtgagggatccaaaaggctttctgcagcagcacatcctgaaggacctggagcagttggccaagatgctgggacacagtgccgacgagaccatcggcgtggtccacctcgtcctgcgcaggcttctccaagagcagcaccagctctctagcagaaggcttttaaattttgacacagaattgtcaactaaagaaatgaggaacaactgggaaaaggaaatcgcagctgtgatttctcctgaactggagcatctagataaaacccttcccaccatgaataatctcatcagccaagataagcgtatcagctctaaccctgtggccaaaataatatatggtgacccagtgaccttcctgccccacctgccccggaaaagtgtggtccattgctctaagatttggagctgcaggaaaagaattacagttgagtacctccagcacattgtggaacagaaaaatggcaaagaaagagtgcccatcctctggcatttcctgcagaaggaagcagagctgaggctggtaaagttcctgcctgagattttggccttgcaaagggatctagtgaagcagttccagaacgtccagcaagttgaatacagctccatcagaggcttcctcagcaagcacagctcagatgggttgaggcagctgcttcacaacaggatcacagtctttctgtccacatggaacaaactgaggagatcgcttgagacgaacggtgagatcaacctacccaaagactactgcagcactgacttggatctggacactgagtttgagatcctcttgccacgccgacggggcctgggcctctgtgctaccgctctcgtcagctacttgattcgcctacacaatgaaattgtctacgccgtggaaaaactctccaaggaaaacaacagctattccgtggatgccgccgaggtcactgaactgcatgtcatcagttatgaagtggagcgggacctgactccactgattctctccaactgccagtaccaggtggaggagggcagagagaccgtgcaggagttcgatctggagaagattcagcggcagatcgtcagccgcttcctccagggcaagccccggctgagcctcaagggaatacccactctggtgtacagacacgactggaactatgaacatctctttatggacatcaagaacaaaatggcacaggactccctccccagctcggtcattagtgccatcagtggacagctgcagtcctacagcgatgcctgtgaagtgctgtctgtcgtagaagtcactctggggtttctgagcacagctggtggggatccaaacatgcagctgaatgtgtatactcaagacatcctgcaaatgggtgatcagacgattcacgtgttaaaggccttaaacagatgccagttaaaacacaccattgccctctggcagttcctgtctgctcataagtctgaacagctgctgcggctgcacaaagagccatttggggaaatcagttcaaggtacaaagcggatctgagcccggaaaatgctaagctcctcagcacattcctaaatcagactggcctagacgccttcctgctagagctgcacgaaatgataatcttgaaactaaagaacccccaaacccaaaccgaggagcgcttccgccctcagtggagcctgagagacactctcgtaagttacatgcaaactaaagaaagtgaaattcttcctgaaatggcatctcagttcccagaagagatactgctcgccagctgtgtctcagtgtggaaaacagctgctgtgctgaaatggaatcgagaaatgagatagaattatttcctcagctatctttggatgactttggagagaagactcctctctcctcgtctgcggcgtggacttgatcatggactggtgcctttgcattcagaaggagagctgtcagcgtagcaccgaattcaagaccaaggcgtgctacctgagctgacagctttttgaaagccgagctgtttctgaaccatgtacatacatgttctgaaactttctcatcattttatgagtactgttcattgagagatgacaatgaagattagatgaaattggaaataaaccaacattgtttacattccaggagacttgtagctcagccacacacgcagtaatgacctgtgcccgttcgcctctggcactgcccacccctctttttttttttcttctaattctgtactcacaaaagagaatctcattttcttctttcttccattcccttaaattctgagtactgtacatatatttctgggttcccacgatgatgtgaaaaactaccagactgttttttgtcttctcacaaagacaagaaaaatcagggcattttgtgagtgccttaagatcaaactaacaagatctgaccctctcccctcacagtgagccactgccccacttcagagggtaagagccaaaagcctcattgtgaaaggcactggacttggaccagggacaccatcagggccttggttttctcacgcataaaatggagagtggattaatcgccaaagattcttctgatctgacattttgaaattgtgagagaaactagatgactgtaaacttggtcacaggcctggttctggcagttctttgcggacttttttctagcattatgccaaataaacatgcagtctcagtgtgctctcgcatgtatgaatatctagtcctttctgtggttctcagccaagacataaaaactaggactcagagcacatacaaaaccagttatgtttcggaaagagggaaaagagtccccgagcccggatcttgtgctgcttttctcactgacgtgttgccttttttctttacaaaatctgctttgatacttaggacctctctggactaatttctcttcctagacagctcagcacagctattgatatgttagaggcagtatccttaatattcattctaaatgagttaacgacttaacttgaaattgggcctaaggagtgagaactacaaaaatacaaaatgcttgtccaggactcagccatgcacaccttgagcagcgccggcaggaggcacggaaggaactgtgctccgttctcctcactgtcatggtgccaccagtgtctgatgaagggcagagtgacccagactgcaggcagtaactgacttcacacagtccctggcatttagtcatctgtgattgttttatcactctggactgtgcagagccacctgccaccgagatctgcattccgactgcctatgaacgggtgtgggggccgggggctggcttgctgaagtcttcaacttgcactcggagctcctttgatacctcagagctggctgtcaggtggcagctcacacccagactcactggccacacctcagcagggggggagtcgagtgtcagtctctttctgtgaaggctttttttttcctttggcctgggaatttttcccatttttatgaaggggttttaaattgtttcattttgtgtgctgtgcttcaaagccttaactgtcaaatcttgcattatcttgtttgtacagaaatatactggcctagcagaggcaaaaaaaaaaaaaatgaattttattttacttgtcacacctgtcttaataaactggagttttgctgctaaagaa

SEQ ID NO: 33 - DNA, 8391 bp, homo sapien
gaacatctttgggccttctcagaaggtgccgggtggagagcaggaagatgctgagtcccgctacttactcgtgctgaccaaaaactacgtggcactgcagatcctgcagcagacattcttcgagggggaccagcagccggagattatttttggttctggtttccccaaggaccaagagtacacccagctctgcagaaacatcaatcgtgtgaagatctgcatggaaacaggcaagatggtgttgcttctcaacctgcagaacctctacgagagcctctacgacgcactcaaccagtactacgtccacctcggcggccagaagtacgtggacctcggtctggggacccaccgcgtcaaatgtcgggttcaccccaacttccgcctgattgtcattgaagagaaagacgtcgtgtacaaacactttcccatccccctcattaaccggctggagaagcactatctggatatcaacacggtgctggagaaatggcagaagagcatcgtggaggagctctgtgcgtgggtggagaagttcatcaatgtcaaagcacatcatttccagaagaggcacaaatacagcccctctgacgtcttcatcggctaccactcggacgcctgcgcgtctgtggtgctgcaggtcatagagaggcagggtccccgggccttgacggaggaacttcaccagaaggtgtctgaggaggccaaatcgatcctgctgaactgcgctacgcccgatgccgtggtccggctgagcgcctactcgctgggcgggttcgcagcggagtggctgtcgcaggagtactttcacagacagaggcacaactcctttgcagatttccttcaggcacacctgcacacggcagacctggagcgccacgccatcttcacagagatcaccactttctccgggctgctaacaagtcacgactgtgaaattttagaatcagaggtcacaggcagggctccgaaacccacactcctgtggctgcagcagtttgacaccgagtactcattcctcaaagaagtccgaaactgtttaacgaatacagccaaatgtaaaatcctcatttttcagacagattttgaagatggaatccgtagcgcccagctcattgcctcagctaagtattctgttataaatgaaatcaacaaaatacgagaaaatgaggaccgtatcttcgtctatttcatcacaaaactgtcccgggtgggaagaggaacagcctatgtgggcttccacggagggctgtggcagtctgtccacatcgatgacctccggagatccaccctcatggtttctgatgtgaccaggctgcagcatgtcaccatcagccagctgttcgcgcccggagacttgcctgagctgggcttggaacaccgggcggaagacggccatgaggaggcgatggaaacggaggccagcacatcaggggaggtggcagaggtggcagaggaggccatggaaacagaaagttctgagaaggtgggaaaggaaacctctgaactcggaggcagtgatgtgtcgatcctggacaccaccaggctgctgagaagctgtgtgcagagcgccgtgggcatgctcagagaccagaacgagagctgcacgcgcaatatgcggagggtggtgctcctcctgggcctcttgaatgaggatgacgcgtgccacgcctctttcttgcgggtatccaagatgcgcctcagtgtctttttaaagaagcaagaagagagccagtttcaccctctggagtggttggcaagggaagcctgcaaccaggacgctctccaggaggcgggcacattcaggcacaccctctggaagcgggtccaaggtgctgtcacccctctgctggcgagcatgatatcattcatcgacagagacggcaacctagagttactgaccaggccagatactccgccctgggcaagagatctttggatgtttattttcagtgacacgatgcttctgaacattcctcttgtgatgaataatgaaagacataaaggtgagatggcctacatcgtggtgcagaaccacatgaacctttccgagaacgcttccaacaacgtccctttcagctggaaaatcaaggactatctggaggagctgtgggtccaggctcagtacatcacagacgcagaaggactgcccaagaagttcgtggacatctttcagcagactcctctgggcaggtttcttgcccagctccatggagagccgcagcaggaacttcttcagtgttacttgaaggatttcattctcttgaccatgcgtgtgtcaacggaggaggaattaaagtttctgcagatggctctgtggtcctgcactaggaaactgaaagcggcgtcagaagcgcccgaggaagaggtttccttaccgtgggtgcaccttgcctaccagcgtttcagaagccgtctgcagaacttttccagaatcctgaccatctaccctcaggttctccacagcctgatggaagcccgttggaaccatgagctggctggatgtgagatgaccctggacgcatttgccgcaatggcctgcacggagatgctgacaagaaacaccctgaagcccagtccccaggcgtggctacagttggtgaagaatctttccatgccgctggagctcatctgctccgatgagcacatgcaaggcagcgggagcctggcccaggctgtcatcaggggagtcagagcccagtggagtcggattttctccaccgcactcttcgtggagcacgtgctcctaggaaccgagagccgcgtccccgagttacaggggctggtgaccgagcacgtcttcttactagacaagtgtcttcgagagaactctgacgtgaagacgcacgggccttttgaggccgtgatgcgcactctctgtgaatgcaaggagacagccagcaagaccctcagcaggtttgggattcagccgtgctccatctgcctgggagatgcaaaggaccccgtctgtctgccctgcgaccacgtgcactgcctgcgctgcctcagggcctggtttgcctcagagcagatgatatgcccctactgtttaactgccttgccagacgaattctctccagctgtttcccaagcgcacagggaagccattgaaaagcatgcccgcttccggcagatgtgcaacagtttcttcgtagacctggtgtccaccatttgcttcaaggacaacgctccgcctgagaaggaagtgattgagagcctgctctctctcctcttcgtccaaaaggggcgcttaagagatgctgcccagagacactgtgaacacacaaaatctctctctccattcaatgatgttgtggataagactcctgtcatccgctcagtgatactgaaactgcttttgaagtacagctttcatgatgtaaaagattatattcaggaatatttgaccctgttaaaaaagaaagcattcataactgaagataaaactgaactgtacatgctcttcatcaactgcctggaggattcaatacttgagaagaccagtgcttactccagaaatgatgaactgaaccacctagaagaggaaggtcgtttccttaaggcatattctccagcaagccggggccgagagcctgccaacgaggcctcggttgaatacctgcaagaggtggcccggatccgcctctgcctcgacagagctgcagatttcctctcggagcctgagggaggcccagagatggccaaggagaagcagtgctacctgcagcaagtcaagcagttctgtatccgggtggagaacgactggcaccgggtgtacctggtgcggaagctcagcagccagcgggggatggagttcgtgcagggcctctccaagcccggccgcccgcaccagtgggtgtttcccaaggacgttgtcaagcagcaggggctgcggcaggaccacccaggccagatggataggtacctggtgtacggcgatgaatacaaggctctccgtgatgctgtggccaaagctgtcctcgagtgcaagccactgggcattaagactgctctgaaggcctgcaagaccccccaaagccagcagtcagcctacttcctgttaacactgtttagagaggtggctattttgtacagatcccacaatgcaagcctccaccccacgccagagcaatgtgaagctgtgagcaaattcattggcgaatgcaagatcctttcacctcctgatatcagccgttttgcaacatcgctcgtggacaattctgtgccattgttgagggcggggcctagtgacagcaaccttgatggaacggtgacagaaatggccattcatgctgcagccgtccttctgtgtggacagaatgaactcttggagcccctaaagaatctggccttctccccagccaccatggcgcatgcttttcttccaaccatgcctgaagacttgctggctcaagctcggaggtggaagggtctggagcgagtccactggtacacttgtcccaacggccatccttgctccgtgggagagtgtggcaggccgatggaacagagcatctgcattgactgccatgcgccgattggaggcattgaccacaaacctcgggacggctttcatctggtcaaagacaaggcagacagaacgcagaccggccatgtgctgggcaacccgcagcggagagacgtggtgacatgtgaccgagggctgcccccagtggtcttcctccttatccggctactcactcacttggctctgcttctgggagcgtcccagagttcccaggctctgataaacatcattaagcctccagtgagggatccaaaaggctttctgcagcagcacatcctgaaggacctggagcagttggccaagatgctgggacacagtgccgacgagaccatcggcgtggtccacctcgtcctgcgcaggcttctccaagagcagcaccagctctctagcagaaggcttttaaattttgacacagaattgtcaactaaagaaatgaggaacaactgggaaaaggaaatcgcagctgtgatttctcctgaactggagcatctagataaaacccttcccaccatgaataatctcatcagccaagataagcgtatcagctctaaccctgtggccaaaataatatatggtgacccagtgaccttcctgccccacctgccccggaaaagtgtggtccattgctctaagatttggagctgcaggaaaagaattacagttgagtacctccagcacattgtggaacagaaaaatggcaaagaaagagtgcccatcctctggcatttcctgcagaaggaagcagagctgaggctggtaaagttcctgcctgagattttggccttgcaaagggatctagtgaagcagttccagaacgtccagcaagttgaatacagctccatcagaggcttcctcagcaagcacagctcagatgggttgaggcagctgcttcacaacaggatcacagtctttctgtccacatggaacaaactgaggagatcgcttgagacgaacggtgagatcaacctacccaaagactactgcagcactgacttggatctggacactgagtttgagatcctcttgccacgccgacggggcctgggcctctgtgctaccgctctcgtcagctacttgattcgcctacacaatgaaattgtctacgccgtggaaaaactctccaaggaaaacaacagctattccgtggatgccgccgaggtcactgaactgcatgtcatcagttatgaagtggagcgggacctgactccactgattctctccaactgccagtaccaggtggaggagggcagagagaccgtgcaggagttcgatctggagaagattcagcggcagatcgtcagccgcttcctccagggcaagccccggctgagcctcaagggaatacccactctggtgtacagacacgactggaactatgaacatctctttatggacatcaagaacaaaatggcacaggactccctccccagctcggtcattagtgccatcagtggacagctgcagtcctacagcgatgcctgtgaagtgctgtctgtcgtagaagtcactctggggtttctgagcacagctggtggggatccaaacatgcagctgaatgtgtatactcaagacatcctgcaaatgggtgatcagacgattcacgtgttaaaggccttaaacagatgccagttaaaacacaccattgccctctggcagttcctgtctgctcataagtctgaacagctgctgcggctgcacaaagagccatttggggaaatcagttcaaggtacaaagcggatctgagcccggaaaatgctaagctcctcagcacattcctaaatcagactggcctagacgccttcctgctagagctgcacgaaatgataatcttgaaactaaagaacccccaaacccaaaccgaggagcgcttccgccctcagtggagcctgagagacactctcgtaagttacatgcaaactaaagaaagtgaaattcttcctgaaatggcatctcagttcccagaagagatactgctcgccagctgtgtctcagtgtggaaaacagctgctgtgctgaaatggaatcgagaaatgagatagaattatttcctcagctatctttggatgactttggagagaagactcctctctcctcgtctgcggcgtggacttgatcatggactggtgcctttgcattcagaaggagagctgtcagcgtagcaccgaattcaagaccaaggcgtgctacctgagctgacagctttttgaaagccgagctgtttctgaaccatgtacatacatgttctgaaactttctcatcattttatgagtactgttcattgagagatgacaatgaagattagatgaaattggaaataaaccaacattgtttacattccaggagacttgtagctcagccacacacgcagtaatgacctgtgcccgttcgcctctggcactgcccacccctctttttttttttcttctaattctgtactcacaaaagagaatctcattttcttctttcttccattcccttaaattctgagtactgtacatatatttctgggttcccacgatgatgtgaaaaactaccagactgttttttgtcttctcacaaagacaagaaaaatcagggcattttgtgagtgccttaagatcaaactaacaagatctgaccctctcccctcacagtgagccactgccccacttcagagggtaagagccaaaagcctcattgtgaaaggcactggacttggaccagggacaccatcagggccttggttttctcacgcataaaatggagagtggattaatcgccaaagattcttctgatctgacattttgaaattgtgagagaaactagatgactgtaaacttggtcacaggcctggttctggcagttctttgcggacttttttctagcattatgccaaataaacatgcagtctcagtgtgctctcgcatgtatgaatatctagtcctttctgtggttctcagccaagacataaaaactaggactcagagcacatacaaaaccagttatgtttcggaaagagggaaaagagtccccgagcccggatcttgtgctgcttttctcactgacgtgttgccttttttctttacaaaatctgctttgatacttaggacctctctggactaatttctcttcctagacagctcagcacagctattgatatgttagaggcagtatccttaatattcattctaaatgagttaacgacttaacttgaaattgggcctaaggagtgagaactacaaaaatacaaaatgcttgtccaggactcagccatgcacaccttgagcagcgccggcaggaggcacggaaggaactgtgctccgttctcctcactgtcatggtgccaccagtgtctgatgaagggcagagtgacccagactgcaggcagtaactgacttcacacagtccctggcatttagtcatctgtgattgttttatcactctggactgtgcagagccacctgccaccgagatctgcattccgactgcctatgaacgggtgtgggggccgggggctggcttgctgaagtcttcaacttgcactcggagctcctttgatacctcagagctggctgtcaggtggcagctcacacccagactcactggccacacctcagcagggggggagtcgagtgtcagtctctttctgtgaaggctttttttttcctttggcctgggaatttttcccatttttatgaaggggttttaaattgtttcattttgtgtgctgtgcttcaaagccttaactgtcaaatcttgcattatcttgtttgtacagaaatatactggcctagcagaggcaaaaaaaaaaaaatgaattttattttacttgtcacacctgtcttaataaactggagttttgctgctaaaaaaaaaaaaaaaaaaa

SEQ ID NO: 34 - DNA, 6693 bp, homo sapien
gggcctcttgaatgaggatgacgcgtgccacgcctctttcttgcgggtatccaagatgcgcctcagtgtctttttaaagaagcaagaagagagccagtttcaccctctggagtggttggcaagggaagcctgcaaccaggacgctctccaggaggcgggcacattcaggcacaccctctggaagcgggtccaaggtgctgtcacccctctgctggcgagcatgatatcattcatcgacagagacggcaacctagagttactgaccaggccagatactccgccctgggcaagagatctttggatgtttattttcagtgacacgatgcttctgaacattcctcttgtgatgaataatgaaagacataaaggtgagatggcctacatcgtggtgcagaaccacatgaacctttccgagaacgcttccaacaacgtccctttcagctggaaaatcaaggactatctggaggagctgtgggtccaggctcagtacatcacagacgcagaaggactgcccaagaagttcgtggacatctttcagcagactcctctgggcaggtttcttgcccagctccatggagagccgcagcaggaacttcttcagtgttacttgaaggatttcattctcttgaccatgcgtgtgtcaacggaggaggaattaaagtttctgcagatggctctgtggtcctgcactaggaaactgaaagcggcgtcagaagcgcccgaggaagaggtttccttaccgtgggtgcaccttgcctaccagcgtttcagaagccgtctgcagaacttttccagaatcctgaccatctaccctcaggttctccacagcctgatggaagcccgttggaaccatgagctggctggatgtgagatgaccctggacgcatttgccgcaatggcctgcacggagatgctgacaagaaacaccctgaagcccagtccccaggcgtggctacagttggtgaagaatctttccatgccgctggagctcatctgctccgatgagcacatgcaaggcagcgggagcctggcccaggctgtcatcaggggagtcagagcccagtggagtcggattttctccaccgcactcttcgtggagcacgtgctcctaggaaccgagagccgcgtccccgagttacaggggctggtgaccgagcacgtcttcttactagacaagtgtcttcgagagaactctgacgtgaagacgcacgggccttttgaggccgtgatgcgcactctctgtgaatgcaaggagacagccagcaagaccctcagcaggtttgggattcagccgtgctccatctgcctgggagatgcaaaggaccccgtctgtctgccctgcgaccacgtgcactgcctgcgctgcctcagggcctggtttgcctcagagcagatgatatgcccctactgtttaactgccttgccagacgaattctctccagctgtttcccaagcgcacagggaagccattgaaaagcatgcccgcttccggcagatgtgcaacagtttcttcgtagacctggtgtccaccatttgcttcaaggacaacgctccgcctgagaaggaagtgattgagagcctgctctctctcctcttcgtccaaaaggggcgcttaagagatgctgcccagagacactgtgaacacacaaaatctctctctccattcaatgatgttgtggataagactcctgtcatccgctcagtgatactgaaactgcttttgaagtacagctttcatgatgtaaaagattatattcaggaatatttgaccctgttaaaaaagaaagcattcataactgaagataaaactgaactgtacatgctcttcatcaactgcctggaggattcaatacttgagaagaccagtgcttactccagaaatgatgaactgaaccacctagaagaggaaggtcgtttccttaaggcatattctccagcaagccggggccgagagcctgccaacgaggcctcggttgaatacctgcaagaggtggcccggatccgcctctgcctcgacagagctgcagatttcctctcggagcctgagggaggcccagagatggccaaggagaagcagtgctacctgcagcaagtcaagcagttctgtatccgggtggagaacgactggcaccgggtgtacctggtgcggaagctcagcagccagcgggggatggagttcgtgcagggcctctccaagcccggccgcccgcaccagtgggtgtttcccaaggacgttgtcaagcagcaggggctgcggcaggaccacccaggccagatggataggtacctggtgtacggcgatgaatacaaggctctccgtgatgctgtggccaaagctgtcctcgagtgcaagccactgggcattaagactgctctgaaggcctgcaagaccccccaaagccagcagtcagcctacttcctgttaacactgtttagagaggtggctattttgtacagatcccacaatgcaagcctccaccccacgccagagcaatgtgaagctgtgagcaaattcattggcgaatgcaagatcctttcacctcctgatatcagccgttttgcaacatcgctcgtggacaattctgtgccattgttgagggcggggcctagtgacagcaaccttgatggaacggtgacagaaatggccattcatgctgcagccgtccttctgtgtggacagaatgaactcttggagcccctaaagaatctggccttctccccagccaccatggcgcatgcttttcttccaaccatgcctgaagacttgctggctcaagctcggaggtggaagggtctggagcgagtccactggtacacttgtcccaacggccatccttgctccgtgggagagtgtggcaggccgatggaacagagcatctgcattgactgccatgcgccgattggaggcattgaccacaaacctcgggacggctttcatctggtcaaagacaaggcagacagaacgcagaccggccacgtgctgggcaacccgcagcggagagacgtggtgacatgtgaccgagggctgcccccagtggtcttcctccttatccggctactcactcacttggctctgcttctgggagcgtcccagagttcccaggctctgataaacatcattaagcctccagtgagggatccaaaaggctttctgcagcagcacatcctgaaggacctggagcagttggccaagatgctgggacacagtgccgacgagaccatcggcgtggtccacctcgtcctgcgcaggcttctccaagagcagcaccagctctctagcagaaggcttttaaattttgacacagaattgtcaactaaagaaatgaggaacaactgggaaaaggaaatcgcagctgtgatttctcctgaactggagcatctagataaaacccttcccaccatgaataatctcatcagccaagataagcgtatcagctctaaccctgtggccaaaataatatatggtgacccagtgaccttcctgccccacctgccccggaaaagtgtggtccattgctctaagatttggagctgcaggaaaagaattacagttgagtacctccagcacattgtggaacagaaaaatggcaaagaaagagtgcccatcctctggcatttcctgcagaaggaagcagagctgaggctggtaaagttcctgcctgagattttggccttgcaaagggatctagtgaagcagttccagaacgtccagcaagttgaatacagctccatcagaggcttcctcagcaagcacagctcagatgggttgaggcagctgcttcacaacaggatcacagtctttctgtccacatggaacaaactgaggagatcgcttgagacgaacggtgagatcaacctacccaaagactactgcagcactgacttggatctggacactgagtttgagatcctcttgccacgccgacggggcctgggcctctgtgctaccgctctcgtcagctacttgattcgcctacacaatgaaattgtctacgccgtggaaaaactctccaaggaaaacaacagctattccgtggatgccgccgaggtcactgaactgcatgtcatcagttatgaagtggagcgggacctgactccactgattctctccaactgccagtaccaggtggaggagggcagagagaccgtgcaggagttcgatctggagaagattcagcggcagatcgtcagccgcttcctccagggcaagccccggctgagcctcaagggaatacccactctggtgtacagacacgactggaactatgaacatctctttatggacatcaagaacaaaatggcacaggactccctccccagctcggtcattagtgccatcagtggacagctgcagtcctacagcgatgcctgtgaagtgctgtctgtcgtagaagtcactctggggtttctgagcacagctggtggggatccaaacatgcagctgaatgtgtatactcaagacatcctgcaaatgggtgatcagacgattcacgtgttaaaggccttaaacagatgccagttaaaacacaccattgccctctggcagttcctgtctgctcataagtctgaacagctgctgcggctgcacaaagagccatttggggaaatcagttcaaggtacaaagcggatctgagcccggaaaatgctaagctcctcagcacattcctaaatcagactggcctagacgccttcctgctagagctgcacgaaatgataatcttgaaactaaagaacccccaaacccaaaccgaggagcgcttccgccctcagtggagcctgagagacactctcgtaagttacatgcaaactaaagaaagtgaaattcttcctgaaatggcatctcagttcccagaagagatactgctcgccagctgtgtctcagtgtggaaaacagctgctgtgctgaaatggaatcgagaaatgagatagaattatttcctcagctatctttggatgactttggagagaagactcctctctcctcgtctgcggcgtggacttgatcatggactggtgcctttgcattcagaaggagagctgtcagcgtagcaccgaattcaagaccaaggcgtgctacctgagctgacagctttttgaaagccgagctgtttctgaaccatgtacatacatgttctgaaactttctcatcattttatgagtactgttcattgagagatgacaatgaagattagatgaaattggaaataaaccaacattgtttacattccaggagacttgtagctcagccacacacgcagtaatgacctgtgcccgttcgcctctggcactgcccacccctctttttttttttcttctaattctgtactcacaaaagagaatctcattttcttctttcttccattcccttaaattctgagtactgtacatatatttctgggttcccacgatgatgtgaaaaactaccagactgttttttgtcttctcacaaagacaagaaaaatcagggcattttgtgagtgccttaagatcaaactaacaagatctgaccctctcccctcacagtgagccactgccccacttcagagggtaagagccaaaagcctcattgtgaaaggcactggacttggaccagggacaccatcagggccttggttttctcacgcataaaatggagagtggattaatcgccaaagattcttctgatctgacattttgaaattgtgagagaaactagatgactgtaaacttggtcacaggcctggttctggcagttctttgcggacttttttctagcattatgccaaataaacatgcagtctcagtgtgctctcgcatgtatgaatatctagtcctttctgtggttctcagccaagacataaaaactaggactcagagcacatacaaaaccagttatgtttcggaaagagggaaaagagtccccgagcccggatcttgtgctgcttttctcactgacgtgttgccttttttctttacaaaatctgctttgatacttaggacctctctggactaatttctcttcctagacagctcagcacagctattgatatgttagaggcagtatccttaatattcattctaaatgagttaacgacttaacttgaaattgggcctaaggagtgagaactacaaaaatacaaaatgcttgtccaggactcagccatgcacaccttgagcagcgccggcaggaggcacggaaggaactgtgctccgttctcctcactgtcatggtgccaccagtgtctgatgaagggcagagtgacccagactgcaggcagtaactgacttcacacagtccctggcatttagtcatctgtgattgttttatcactctggactgtgcagagccacctgccaccgagatctgcattccgactgcctatgaacgggtgtgggggccgggggctggcttgctgaagtcttcaacttgcactcggagctcctttgatacctcagagctggctgtcaggtggcagctcacacccagactcactggccacacctcagcagggggggagtcgagtgtcagtctctttctgtgaaggctttttttttcctttggcctgggaatttttcccatttttatgaaggggttttaaattgtttcattttgtgtgctgtgcttcaaagccttaactgtcaaatcttgcattatcttgtttgtacagaaatatactggcctagcagaggcagaaaaaaaaaaaaaaaaaaaa

SEQ ID NO: 35 - DNA, 4616 bp, homo sapien
ggatttcattctcttgaccatgcgtgtgtcaacggaggaggaattaaagtttctgcagatggctctgtggtcctgcactaggaaactgaaagcggcgtcagaagcgcccgaggaagaggtttccttaccgtgggtgcaccttgcctaccagcgtttcagaagccgtctgcagaacttttccagaatcctgaccatctaccctcaggttctccacagcctgatggaagcccgttggaaccatgagctggctggatgtgagatgaccctggacgcatttgccgcaatggcctgcacggagatgctgacaagaaacaccctgaagcccagtccccaggcgtggctacagttggtgaagaatctttccatgccgctggagctcatctgctccgatgagcacatgcaaggcagcgggagcctggcccaggctgtcatcaggggagtcagagcccagtggagtcggattttctccaccgcactcttcgtggagcacgtgctcctaggaaccgagagccgcgtccccgagttacaggggctggtgaccgagcacgtcttcttactagacaagtgtcttcgagagaactctgacgtgaagacgcacgggccttttgaggccgtgatgcgcactctctgtgaatgcaaggagacagccagcaagaccctcagcaggtttgggattcagccgtgctccatctgcctgggagatgcaaaggaccccgtctgtctgccctgcgaccacgtgcactgcctgcgctgcctcagggcctggtttgcctcagagcagatgatatgcccctactgtttaactgccttgccagacgaattctctccagctgtttcccaagcgcacagggaagccattgaaaagcatgcccgcttccggcagatgtgcaacagtttcttcgtagacctggtgtccaccatttgcttcaaggacaacgctccgcctgagaaggaagtgattgagagcctgctctctctcctcttcgtccaaaaggggcgcttaagagatgctgcccagagacactgtgaacacacaaaatctctctctccattcaatgatgttgtggataagactcctgtcatccgctcagtgatactgaaactgcttttgaagtacagctttcatgatgtaaaagattatattcaggaatatttgaccctgttaaaaaagaaagcattcataactgaagataaaactgaactgtacatgctcttcatcaactgcctggaggattcaatacttgagaagaccagtgcttactccagaaatgatgaactgaaccacctagaagaggaaggtcgtttccttaaggcatattctccagcaagccggggccgagagcctgccaacgaggcctcggttgaatacctgcaagaggtggcccggatccgcctctgcctcgacagagctgcagatttcctctcggagcctgagggaggcccagagatggccaaggagaagcagtgctacctgcagcaagtcaagcagttctgtatccgggtggagaacgactggcaccgggtgtacctggtgcggaagctcagcagccagcgggggatggagttcgtgcagggcctctccaagcccggccgcccgcaccagtgggtgtttcccaaggacgttgtcaagcagcaggggctgcggcaggaccacccaggccagatggataggtacctggtgtacggcgatgaatacaaggctctccgtgatgctgtggccaaagctgtcctcgagtgcaagccactgggcattaagactgctctgaaggcctgcaagaccccccaaagccagcagtcagcctacttcctgttaacactgtttagagaggtggctattttgtacagatcccacaatgcaagcctccaccccacgccagagcaatgtgaagctgtgagcaaattcattggcgaatgcaagatcctttcacctcctgatatcagccgttttgcaacatcgctcgtggacaattctgtgccattgttgagggcggggcctagtgacagcaaccttgatggaacggtgacagaaatggccattcatgctgcagccgtccttctgtgtggacagaatgaactcttggagcccctaaagaatctggccttctccccagccaccatggcgcatgcttttcttccaaccatgcctgaagacttgctggctcaagctcggaggtggaagggtctggagcgagtccactggtacacttgtcccaacggccatccttgctccgtgggagagtgtggcaggccgatggaacagagcatctgcattgactgccatgcgccgattggaggcattgaccacaaacctcgggacggctttcatctggtcaaagacaaggcagacagaacgcagaccggccacgtgctgggcaacccgcagcggagagacgtggtgacatgtgaccgagggctgcccccagtggtcttcctccttatccggctactcactcacttggctctgcttctgggagcgtcccagagttcccaggctctgataaacatcattaagcctccagtgagggatccaaaaggctttctgcagcagcacatcctgaaggacctggagcagttggccaagatgctgggacacagtgccgacgagaccatcggcgtggtccacctcgtcctgcgcaggcttctccaagagcagcaccagctctctagcagaaggcttttaaattttgacacagaattgtcaactaaagaaatgaggaacaactgggaaaaggaaatcgcagctgtgatttctcctgaactggagcatctagataaaacccttcccaccatgaataatctcatcagccaagataagcgtatcagctctaaccctgtggccaaaataatatatggtgacccagtgaccttcctgccccacctgccccggaaaagtgtggtccattgctctaagatttggagctgcaggaaaagaattacagttgagtacctccagcacattgtggaacagaaaaatggcaaagaaagagtgcccatcctctggcatttcctgcagaaggaagcagagctgaggctggtaaagttcctgcctgagattttggccttgcaaagggatctagtgaagcagttccagaacgtccagcaagttgaatacagctccatcagaggcttcctcagcaagcacagctcagatgggttgaggcagctgcttcacaacaggatcacagtctttctgtccacatggaacaaactgaggagatcgcttgagacgaacggtgagatcaacctacccaaagactactgcagcactgacttggatctggacactgagtttgagatcctcttgccacgccgacggggcctgggcctctgtgctaccgctctcgtcagctacttgattcgcctacacaatgaaattgtctacgccgtggaaaaactctccaaggaaaacaacagctattccgtggatgccgccgaggtcactgaactgcatgtcatcagttatgaagtggagcgggacctgactccactgattctctccaactgccagtaccaggtggaggagggcagagagaccgtgcaggagttcgatctggagaagattcagcggcagatcgtcagccgcttcctccagggcaagccccggctgagcctcaagggaatacccactctggtgtacagacacgactggaactatgaacatctctttatggacatcaagaacaaaatggcacaggactccctccccagctcggtcattagtgccatcagtggacagctgcagtcctacagcgatgcctgtgaagtgctgtctgtcgtagaagtcactctggggtttctgagcacagctggtggggatccaaacatgcagctgaatgtgtatactcaagacatcctgcaaatgggtgatcagacgattcacgtgttaaaggccttaaacagatgccagttaaaacacaccattgccctctggcagttcctgtctgctcataagtctgaacagctgctgcggctgcacaaagagccatttggggaaatcagttcaaggtacaaagcggatctgagcccggaaaatgctaagctcctcagcacattcctaaatcagactggcctagacgccttcctgctagagctgcacgaaatgataatcttgaaactaaagaacccccaaacccaaaccgaggagcgcttccgccctcagtggagcctgagagacactctcgtaagttacatgcaaactaaagaaagtgaaattcttcctgaaatggcatctcagttcccagaagagatactgctcgccagctgtgtctcagtgtggaaaacagctgctgtgctgaaatggaatcgagaaatgagatagaattatttcctcagctatctttggatgactttggagagaagactcctctctcctcgtctgcggcgtggacttgatcatggactggtgcctttgcattcagaaggagagctgtcagcgtagcaccgaattcaagaccaaggcgtgctacctgagctgacagctttttgaaagccgagctgtttctgaaccatgtacatacatgttctgaaactttctcatcattttatgagtactgttcattgagagatgacaatgaagattagatgaaattggaaataaaccaacattgtttacattc

SEQ ID NO: 36 - DNA, 5949 bp, homo sapien
gtccccaggcgtggctacagttggtgaagaatctttccatgccgctggagctcatctgctccgatgagcacatgcaaggcagcgggagcctggcccaggctgtcatcaggggagtcagagcccagtggagtcggattttctccaccgcactcttcgtggagcacgtgctcctaggaaccgagagccgcgtccccgagttacaggggctggtgaccgagcacgtcttcttactagacaagtgtcttcgagagaactctgacgtgaagacgcacgggccttttgaggccgtgatgcgcactctctgtgaatgcaaggagacagccagcaagaccctcagcaggtttgggattcagccgtgctccatctgcctgggagatgcaaaggaccccgtctgtctgccctgcgaccacgtgcactgcctgcgctgcctcagggcctggtttgcctcagagcagatgatatgcccctactgtttaactgccttgccagacgaattctctccagctgtttcccaagcgcacagggaagccattgaaaagcatgcccgcttccggcagatgtgcaacagtttcttcgtagacctggtgtccaccatttgcttcaaggacaacgctccgcctgagaaggaagtgattgagagcctgctctctctcctcttcgtccaaaaggggcgcttaagagatgctgcccagagacactgtgaacacacaaaatctctctctccattcaatgatgttgtggataagactcctgtcatccgctcagtgatactgaaactgcttttgaagtacagctttcatgatgtaaaagattatattcaggaatatttgaccctgttaaaaaagaaagcattcataactgaagataaaactgaactgtacatgctcttcatcaactgcctggaggattcaatacttgagaagaccagtgcttactccagaaatgatgaactgaaccacctagaagaggaaggtcgtttccttaaggcatattctccagcaagccggggccgagagcctgccaacgaggcctcggttgaatacctgcaagaggtggcccggatccgcctctgcctcgacagagctgcagatttcctctcggagcctgagggaggcccagagatggccaaggagaagcagtgctacctgcagcaagtcaagcagttctgtatccgggtggagaacgactggcaccgggtgtacctggtgcggaagctcagcagccagcgggggatggagttcgtgcagggcctctccaagcccggccgcccgcaccagtgggtgtttcccaaggacgttgtcaagcagcaggggctgcggcaggaccacccaggccagatggataggtacctggtgtacggcgatgaatacaaggctctccgtgatgctgtggccaaagctgtcctcgagtgcaagccactgggcattaagactgctctgaaggcctgcaagaccccccaaagccagcagtcagcctacttcctgttaacactgtttagagaggtggctattttgtacagatcccacaatgcaagcctccaccccacgccagagcaatgtgaagctgtgagcaaattcattggcgaatgcaagatcctttcacctcctgatatcagccgttttgcaacatcgctcgtggacaattctgtgccattgttgagggcggggcctagtgacagcaaccttgatggaacggtgacagaaatggccattcatgctgcagccgtccttctgtgtggacagaatgaactcttggagcccctaaagaatctggccttctccccagccaccatggcgcatgcttttcttccaaccatgcctgaagacttgctggctcaagctcggaggtggaagggtctggagcgagtccactggtacacttgtcccaacggccatccttgctccgtgggagagtgtggcaggccgatggaacagagcatctgcattgactgccatgcgccgattggaggcattgaccacaaacctcgggacggctttcatctggtcaaagacaaggcagacagaacgcagaccggccatgtgctgggcaacccgcagcggagagacgtggtgacatgtgaccgagggctgcccccagtggtcttcctccttatccggctactcactcacttggctctgcttctgggagcgtcccagagttcccaggctctgataaacatcattaagcctccagtgagggatccaaaaggctttctgcagcagcacatcctgaaggacctggagcagttggccaagatgctgggacacagtgccgacgagaccatcggcgtggtccacctcgtcctgcgcaggcttctccaagagcagcaccagctctctagcagaaggcttttaaattttgacacagaattgtcaactaaagaaatgaggaacaactgggaaaaggaaatcgcagctgtgatttctcctgaactggagcatctagataaaacccttcccaccatgaataatctcatcagccaagataagcgtatcagctctaaccctgtggccaaaataatatatggtgacccagtgaccttcctgccccacctgccccggaaaagtgtggtccattgctctaagatttggagctgcaggaaaagaattacagttgagtacctccagcacattgtggaacagaaaaatggcaaagaaagagtgcccatcctctggcatttcctgcagaaggaagcagagctgaggctggtaaagttcctgcctgagattttggccttgcaaagggatctagtgaagcagttccagaacgtccagcaagttgaatacagctccatcagaggcttcctcagcaagcacagctcagatgggttgaggcagctgcttcacaacaggatcacagtctttctgtccacatggaacaaactgaggagatcgcttgagacgaacggtgagatcaacctacccaaagactactgcagcactgacttggatctggacactgagtttgagatcctcttgccacgccgacggggcctgggcctctgtgctaccgctctcgtcagctacttgattcgcctacacaatgaaattgtctacgccgtggaaaaactctccaaggaaaacaacagctattccgtggatgccgccgaggtcactgaactgcatgtcatcagttatgaagtggagcgggacctgactccactgattctctccaactgccagtaccaggtggaggagggcagagagaccgtgcaggagttcgatctggagaagattcagcggcagatcgtcagccgcttcctccagggcaagccccggctgagcctcaagggaatacccactctggtgtacagacacgactggaactatgaacatctctttatggacatcaagaacaaaatggcacaggactccctccccagctcggtcattagtgccatcagtggacagctgcagtcctacagcgatgcctgtgaagtgctgtctgtcgtagaagtcactctggggtttctgagcacagctggtggggatccaaacatgcagctgaatgtgtatactcaagacatcctgcaaatgggtgatcagacgattcacgtgttaaaggccttaaacagatgccagttaaaacacaccattgccctctggcagttcctgtctgctcataagtctgaacagctgctgcggctgcacaaagagccatttggggaaatcagttcaaggtacaaagcggatctgagcccggaaaatgctaagctcctcagcacattcctaaatcagactggcctagacgccttcctgctagagctgcacgaaatgataatcttgaaactaaagaacccccaaacccaaaccgaggagcgcttccgccctcagtggagcctgagagacactctcgtaagttacatgcaaactaaagaaagtgaaattcttcctgaaatggcatctcagttcccagaagagatactgctcgccagctgtgtctcagtgtggaaaacagctgctgtgctgaaatggaatcgagaaatgagatagaattatttcctcagctatctttggatgactttggagagaagactcctctctcctcgtctgcggcgtggacttgatcatggactggtgcctttgcattcagaaggagagctgtcagcgtagcaccgaattcaagaccaaggcgtgctacctgagctgacagctttttgaaagccgagctgtttctgaaccatgtacatacatgttctgaaactttctcatcattttatgagtactgttcattgagagatgacaatgaagattagatgaaattggaaataaaccaacattgtttacattccaggagacttgtagctcagccacacacgcagtaatgacctgtgcccgttcgcctctggcactgcccacccctcttttttttttcttctaattctgtactcacaaaagagaatctcattttcttctttcttccattcccttaaattctgagtactgtacatatatttctgggttcccacgatgatgtgaaaaactaccagactgttttttgtcttctcacaaagacaagaaaaatcagggcattttgtgagtgccttaagatcaaactaacaagatctgaccctctcccctcacagtgagccactgccccacttcagagggtaagagccaaaagcctcattgtgaaaggcactggacttggaccagggacaccatcagggccttggttttctcacgcataaaatggagagtggattaatcgccaaagattcttctgatctgacattttgaaattgtgagagaaactagatgactgtaaacttggtcacaggcctggttctggcagttctttgcggacttttttctagcattatgccaaataaacatgcagtctcagtgtgctctcgcatgtatgaatatctagtcctttctgtggttctcagccaagacataaaaactaggactcagagcacatacaaaaccagttatgtttcggaaagagggaaaagagtccccgagcccggatcttgtgctgcttttctcactgacgtgttgccttttttctttacaaaatctgctttgatacttaggacctctctggactaatttctcttcctagacagctcagcacagctattgatatgttagaggcagtatccttaatattcattctaaatgagttaacgacttaacttgaaattgggcctaaggagtgagaactacaaaaatacaaaatgcttgtccaggactcagccatgcacaccttgagcagcgccggcaggaggcacggaaggaactgtgctccgttctcctcactgtcatggtgccaccagtgtctgatgaagggcagagtgacccagactgcaggcagtaactgacttcacacagtccctggcatttagtcatctgtgattgttttatcactctggactgtgcagagccacctgccaccgagatctgcattccgactgcctatgaacgggtgtgggggccgggggctggcttgctgaagtcttcaacttgcactcggagctcctttgatacctcagagctggctgtcaggtggcagctcacacccagactcactggccacacctcagcagggggggagtcgagtgtcagtctctttctgtgaaggctttttttttcctttggcctgggaatttttcccatttttatgaaggggttttaaattgtttcattttgtgtgctgtgcttcaaagccttaactgtcaaatcttgcattatcttgtttgtacagaaatatactggcctagcagaggcaaaaaaaaaaaaaatgaattttattttacttgtcacacctgtcttaataaactggagttttgctgctaaaaaaaaaaaaaaaaaaaaaaaaaaaaaaaaaaaaaaaaaaaaaaaaaaaaaaaaaaaaaaaaaaaaaaaaaaaaaaaaaaaaaaaaaaaaaaaaaaaaaaaaaaaaaaaaaaaaaaaaaaaaaaaaaaaaaaaaaaaaaaaaaaaaaa

SEQ ID NO: 37 - DNA, 5705 bp, homo sapien
gaatctttccatgccgctggagctcatctgctccgatgagcacatgcaaggcagcgggagcctggcccaggctgtcatcaggggagtcagagcccagtggagtcggattttctccaccgcactcttcgtggagcacgtgctcctaggaaccgagagccgcgtccccgagttacaggggctggtgaccgagcacgtcttcttactagacaagtgtcttcgagagaactctgacgtgaagacgcacgggccttttgaggccgtgatgcgcactctctgtgaatgcaaggagacagccagcaagaccctcagcaggtttgggattcagccgtgctccatctgcctgggagatgcaaaggaccccgtctgtctgccctgcgaccacgtgcactgcctgcgctgcctcagggcctggtttgcctcagagcagatgatatgcccctactgtttaactgccttgccagacgaattctctccagctgtttcccaagcgcacagggaagccattgaaaagcatgcccgcttccggcagatgtgcaacagtttcttcgtagacctggtgtccaccatttgcttcaaggacaacgctccgcctgagaaggaagtgattgagagcctgctctctctcctcttcgtccaaaaggggcgcttaagagatgctgcccagagacactgtgaacacacaaaatctctctctccattcaatgatgttgtggataagactcctgtcatccgctcagtgatactgaaactgcttttgaagtacagctttcatgatgtaaaagattatattcaggaatatttgaccctgttaaaaaagaaagcattcataactgaagataaaactgaactgtacatgctcttcatcaactgcctggaggattcaatacttgagaagaccagtgcttactccagaaatgatgaactgaaccacctagaagaggaaggtcgtttccttaaggcatattctccagcaagccggggccgagagcctgccaacgaggcctcggttgaatacctgcaagaggtggcccggatccgcctctgcctcgacagagctgcagatttcctctcggagcctgagggaggcccagagatggccaaggagaagcagtgctacctgcagcaagtcaagcagttctgtatccgggtggagaacgactggcaccgggtgtacctggtgcggaagctcagcagccagcgggggatggagttcgtgcagggcctctccaagcccggccgcccgcaccagtgggtgtttcccaaggacgttgtcaagcagcaggggctgcggcaggaccacccaggccagatggataggtacctggtgtacggcgatgaatacaaggctctccgtgatgctgtggccaaagctgtcctcgagtgcaagccactgggcattaagactgctctgaaggcctgcaagaccccccaaagccagcagtcagcctacttcctgttaacactgtttagagaggtggctattttgtacagatcccacaatgcaagcctccaccccacgccagagcaatgtgaagctgtgagcaaattcattggcgaatgcaagatcctttcacctcctgatatcagccgttttgcaacatcgctcgtggacaattctgtgccattgttgagggcggggcctagtgacagcaaccttgatggaacggtgacagaaatggccattcatgctgcagccgtccttctgtgtggacagaatgaactcttggagcccctaaagaatctggccttctccccagccaccatggcgcatgcttttcttccaaccatgcctgaagacttgctggctcaagctcggaggtggaagggtctggagcgagtccactggtacacttgtcccaacggccatccttgctccgtgggagagtgtggcaggccgatggaacagagcatctgcattgactgccatgcgccgattggaggcattgaccacaaacctcgggacggctttcatctggtcaaagacaaggcagacagaacgcagaccggccatgtgctgggcaacccgcagcggagagacgtggtgacatgtgaccgagggctgcccccagtggtcttcctccttatccggctactcactcacttggctctgcttctgggagcgtcccagagttcccaggctctgataaacatcattaagcctccagtgagggatccaaaaggctttctgcagcagcacatcctgaaggacctggagcagttggccaagatgctgggacacagtgccgacgagaccatcggcgtggtccacctcgtcctgcgcaggcttctccaagagcagcaccagctctctagcagaaggcttttaaattttgacacagaattgtcaactaaagaaatgaggaacaactgggaaaaggaaatcgcagctgtgatttctcctgaactggagcatctagataaaacccttcccaccatgaataatctcatcagccaagataagcgtatcagctctaaccctgtggccaaaataatatatggtgacccagtgaccttcctgccccacctgccccggaaaagtgtggtccattgctctaagatttggagctgcaggaaaagaattacagttgagtacctccagcacattgtggaacagaaaaatggcaaagaaagagtgcccatcctctggcatttcctgcagaaggaagcagagctgaggctggtaaagttcctgcctgagattttggccttgcaaagggatctagtgaagcagttccagaacgtccagcaagttgaatacagctccatcagaggcttcctcagcaagcacagctcagatgggttgaggcagctgcttcacaacaggatcacagtctttctgtccacatggaacaaactgaggagatcgcttgagacgaacggtgagatcaacctacccaaagactactgcagcactgacttggatctggacactgagtttgagatcctcttgccacgccgacggggcctgggcctctgtgctaccgctctcgtcagctacttgattcgcctacacaatgaaattgtctacgccgtggaaaaactctccaaggaaaacaacagctattccgtggatgccgccgaggtcactgaactgcatgtcatcagttatgaagtggagcgggacctgactccactgattctctccaactgccagtaccaggtggaggagggcagagagaccgtgcaggagttcgatctggagaagattcagcggcagatcgtcagccgcttcctccagggcaagccccggctgagcctcaagggaatacccactctggtgtacagacacgactggaactatgaacatctctttatggacatcaagaacaaaatggcacaggactccctccccagctcggtcattagtgccatcagtggacagctgcagtcctacagcgatgcctgtgaagtgctgtctgtcgtagaagtcactctggggtttctgagcacagctggtggggatccaaacatgcagctgaatgtgtatactcaagacatcctgcaaatgggtgatcagacgattcacgtgttaaaggccttaaacagatgccagttaaaacacaccattgccctctggcagttcctgtctgctcataagtctgaacagctgctgcggctgcacaaagagccatttggggaaatcagttcaaggtacaaagcggatctgagcccggaaaatgctaagctcctcagcacattcctaaatcagactggcctagacgccttcctgctagagctgcacgaaatgataatcttgaaactaaagaacccccaaacccaaaccgaggagcgcttccgccctcagtggagcctgagagacactctcgtaagttacatgcaaactaaagaaagtgaaattcttcctgaaatggcatctcagttcccagaagagatactgctcgccagctgtgtctcagtgtggaaaacagctgctgtgctgaaatggaatcgagaaatgagatagaattatttcctcagctatctttggatgactttggagagaagactcctctctcctcgtctgcggcgtggacttgatcatggactggtgcctttgcattcagaaggagagctgtcagcgtagcaccgaattcaagaccaaggcgtgctacctgagctgacagctttttgaaagccgagctgtttctgaaccatgtacatacatgttctgaaactttctcatcattttatgagtactgttcattgagagatgacaatgaagattagatgaaattggaaataaaccaacattgtttacattccaggagacttgtagctcagccacacacgcagtaatgacctgtgcccgttcgcctctggcactgcccacccctctttttttttttcttctaattctgtactcacaaaagagaatctcattttcttctttcttccattcccttaaattctgagtactgtacatatatttctgggttcccacgatgatgtgaaaaactaccagactgttttttgtcttctcacaaagacaagaaaaatcagggcattttgtgagtgccttaagatcaaactaacaagatctgaccctctcccctcacagtgagccactgccccacttcagagggtaagagccaaaagcctcattgtgaaaggcactggacttggaccagggacaccatcagggccttggttttctcacgcataaaatggagagtggattaatcgccaaagattcttctgatctgacattttgaaattgtgagagaaactagatgactgtaaacttggtcacaggcctggttctggcagttctttgcggacttttttctagcattatgccaaataaacatgcagtctcagtgtgctctcgcatgtatgaatatctagtcctttctgtggttctcagccaagacataaaaactaggactcagagcacatacaaaaccagttatgtttcggaaagagggaaaagagtccccgagcccggatcttgtgctgcttttctcactgacgtgttgccttttttctttacaaaatctgctttgatacttaggacctctctggactaatttctcttcctagacagctcagcacagctattgatatgttagaggcagtatccttaatattcattctaaatgagttaacgacttaacttgaaattgggcctaaggagtgagaactacaaaaatacaaaatgcttgtccaggactcagccatgcacaccttgagcagcgccggcaggaggcacggaaggaactgtgctccgttctcctcactgtcatggtgccaccagtgtctgatgaagggcagagtgacccagactgcaggcagtaactgacttcacacagtccctggcatttagtcatctgtgattgttttatcactctggactgtgcagagccacctgccaccgagatctgcattccgactgcctatgaacgggtgtgggggccgggggctggcttgctgaagtcttcaacttgcactcggagctcctttgatacctcagagctggctgtcaggtggcagctcacacccagactcactggccacacctcagcagggggggagtcgagtgtcagtctctttctgtgaaggctttttttttcctttggcctgggaatttttcccatttttatgaaggggttttaaattgtttcattttgtgtgctgtgcttcaaagccttaactgtcaaatcttgcattatcttgtttgtacagaaatatactggcctagcagaggc

SEQ ID NO: 38 - DNA, 21056 bp, homo sapien
cagcgcgcggcaggcggcgagctcgggggccgcagaaaatgaaactgaagccgtggtcacgtgacaggacatgtagtatatagcaggctgccagcgactcctgctcttgcttctggatctgcagggcagtcccagcaggacccatggagtgtccttcgtgccagcatgtctccaaggaggaaacccccaagttctgcagccagtgcggagagaggctgcctcctgcagcccccatagcagattctgagaacaataactccacaatggcgtcggcctcggagggtgaaatggagtgtgggcaggagctgaaggaggaagggggcccgtgcttgttcccgggctcagacagttggcaagaaaaccccgaggagccctgttccaaagcctcctggaccgtccaagaaagcaaaaagaagaaaaggaagaagaaaaagaaggggaacaagtccgcttcctcagagctggcttccttgcccctttctcctgccagcccctgtcacctgactttgctttcaaacccgtggcctcaggacacagccctgccccacagccaagcccagcagagtggccccactggccagccgagccagcccccaggcacagccaccacgccactggagggtgacggcctctccgcgcccaccgaggttggcgacagccccctgcaggcccaggctttgggagaggcaggagtggccacaggaagtgaggctcagagcagcccgcaattccaggaccacacggaaggggaggaccaggacgcttccatcccctctgggggcagaggcctgtcccaggaggggaccggtccccccacctctgctggtgaaggccattctaggactgaagatgctgcccaggagctcctgttgcctgagtcaaaaggaggcagctctgagcccgggacagaactgcagaccaccgagcaacaggcaggggcctcagcctctatggcagttgatgctgtagctgagccagccaatgcagttaaaggggccgggaaggaaatgaaagagaagacccagagaatgaaacagccaccagcaaccactcctcctttcaaaacacactgccaggaagctgagaccaagaccaaggacgagatggctgctgctgaagaaaaagtcggtaagaatgaacaaggggagcctgaagacctcaagaagccagaggggaagaacagaagtgcagctgctgtgaaaaacgagaaggagcaaaaaaaccaggaagcagatgtccaggaagtgaaggcaagcacgctgagcccgggtggaggagtcaccgtgttcttccacgccatcatctctcttcatttcccattcaatcctgacctccataaagtcttcatcagaggaggagaagaatttggggagtcaaaatgggacagcaatatctgtgagctgcactacaccagagacttgggtcatgaccgcgttcttgttgaaggcattgtctgcatttccaagaagcacctagataaatacattccttacaagtacgtcatttataatggggaatcttttgagtatgagttcatttacaagcaccagcagaagaagggcgagtacgtcaaccgctgtctgttcataaaatcttcacttctgggctcaggagactggcatcagtactatgacatagtttatatgaagcctcatgggagactccagaaagtcatgaaccacatcacagacgggccgaggaaggacctggtgaaggggaagcagattgccgctgcgctcatgctggacagcaccttcagcatcctgcagacctgggacaccatcaacctgaacagcttcttcacccagttcgagcagttttgctttgtcctgcaacagcctatgatttatgaaggacaggcacagctgtggaccgatttgcagtacagggagaaagaggtgaagagatacctgtggcaacatctgaaaaaacacgtggtaccattgccggacggaaaaagcacggactttttgcctgtggactgcccagtgaggagtaaactgaaaacaggcctgattgtcctttttgtagtggaaaaaattgagcttttattagaaggcagcctggactggttgtgtcacctcctaacctcagatgccagctcaccagatgagtttcaccgtgacctaagccacatccttgggatacctcagagctggcggctgtacctggtgaacctgtgccaaagatgcatggacacaaggacgtacacctggctgggcgccctgcctgtcctgcactgctgtatggagctggccccgcggcacaaggatgcctggagacagcctgaggacacctgggccgctctggagggactctccttctcaccgttccgggaacaaatgctagatacgagttccctacttcagtttatgagagagaagcagcatttgctgagcatagacgagcctctcttccggtcctggtttagtctgctacctctgagtcacctggttatgtatatggaaaacttcattgagcacctgggtcgttttcctgctcatatcctggactgtctttcagggatttactaccggcttccgggacttgagcaagtcttgaatacgcaggatgttcaggatgttcagaacgttcagaacattttagaaatgctgttgcgactcctggacacttaccgggacaagattcccgaggaggccttgtcaccatcctacctgactgtgtgtctgaaactgcatgaagccatctgcagcagcacaaagctacttaagttttacgagctgccagccttatctgccgagattgtctgcagaatgattagacttctatctctggtggattctgcaggacagagagatgaaactggaaataattcagtccaaacagtcttccaagggacccttgctgctacgaaaaggtggctccgagaagtttttacaaagaacatgctcacatcttcaggtgcctcattcacatacgtcaaggaaattgaggtctggaggcggctggtggaaatccaattccccgcggagcatggctggaaggagtcgttgctgggagacatggaatggaggctcacaaaggaggaacccctctcccagatcactgcctactgcaatagttgctgggacaccaaaggcttagaggacagtgtggccaagaccttcgagaaatgcatcattgaagccgtgagctcagcctgccagtctcagaccagtatccttcaggggttctcttactctgatttgcggaaatttggcatcgtcttgtctgctgtgatcactaagtcctggcctaggaccgcggacaacttcgatgacattttaaagcatctgctcacgttggcagatgtcaagcacgtcttcagattgtgtggaaccgacgagaaaatactagcaaatgtcacagaggatgccaagaggctgatagctgttgccgactctgtgttgacgaaagttgttggtgacctcctaagtggcacgattttagttggacaactggagctgattataaagcacaagaatcagtttcttgacatctggcaactgagggaaaaaagtctttcaccccaggatgaacaatgtgctgtggaggaagcactggattggagaagggaggaactgttacttctaaagaaagagaaaagatgtgttgatagtctcctgaagatgtgtgggaacgtgaaacatctgatacaagtggactttggagtgcttgcagtaagacactcacaagacctcagcagtaaaagattaaatgacaccgtgacagtgagactgtccacctcctcgaactcgcagagggcaacgcattaccacctgagctcccaggtccaagaaatggctgggaagatagacttgctcagagacagccacatcttccagctcttctggcgggaagccgcagagccgctgagtgagcctaaggaggaccaggaagccgcagagttgctgagtgagcccgaagaagaatcagaaaggcacatccttgagcttgaagaggtgtatgactatttgtatcagccttcttacagaaagttcattaagttgcaccaggatctaaagtcaggagaggtcacccttgcagagattgatgtcatcttcaaggactttgtgaataaatacacggacctggattcagaacttaagatcatgtgcaccgtggaccaccaggaccaaagagattggatcaaggaccgagtcgaacagatcaaggaataccatcacctgcaccaggctgtccacgcagccaaggtcatcttgcaggtcaaagagagcctgggactgaacggtgacttcagtgttctcaacactttactaaattttactgataacttcgacgactttcgccgtgaaacactggaccagatcaaccaggagctcatccaggccaaaaagctgctccaggacatcagcgaggcccggtgcaaggggctgcaggctctgtccctgagaaaggagttcatctgctgggtccgggaggctcttggaggcatcaatgagctgaaggtgtttgtggacctggcctccatctcagcgggggagaatgacattgatgtggaccgggtggcctgcttccatgacgctgtgcagggctacgcatccctgctatttaagctggaccccagcgtggacttcagtgcattcatgaagcatctgaaaaagctgtggaaggctctggataaggaccagtacctgcccaggaaactgtgtgactccgccaggaacttggaatggctgaagactgtgaatgagagtcatgggtctgtggaacgctcatccctgaccctggccacggccatcaaccaaagaggcatctatgtgatccaggcgcccaaaggtggccaaaagatttccccagacacggttctgcacttgatccttcctgagagccctggcagccacgaggagtcacgagagtactctttagaggaggtgaaggagcttttgaacaagttgatgctgatgtctggcaagaaggatcgtaacaacacggaagtggagaggttttcagaggtcttctgcagtgtgcagaggctcagccaggccttcatcgacctgcactctgctgggaatatgctgttcaggacgtggatcgccatggcctactgctcccccaagcagggtgtgtccctccaaatggactttggcttggacctggtgacggagcttaaagaaggtggagatgtcactgagctgctggcagccctctgcaggcagatggagcacttccttgacagctggaagagatttgtgacccagaagcgaatggagcacttttacctgaacttctacacggcagagcagctggtttacctgagcactgagctcaggaagcagcccccgagtgatgccgccctaacgatgctatccttcatcaaaagcaactgcaccctgagggatgtcttaagggcctctgtggggtgtgggagtgaggccgccaggtaccgcatgaggagagtcatggaagagctcccgctgatgctcttatcagagttcagcctggtggacaagctgaggatcatcatggagcagtccatgaggtgccttcctgccttcctgcccgactgcctcgacctagagacccttggccactgtctggctcacctggcagggatgggtgggtctcccgtggagcgttgtctcccgagaggtctgcaggtcggccagcccaacctcgtcgtctgtggccactccgaggtgttgccagccgccctggctgtctacatgcaaaccccaagccagcccctgcccacttacgatgaggtgctgctctgcaccccggcaaccacctttgaggaggtggcactgttgctgcgccgctgcctgaccctgggctccctggggcacaaggtctacagcctgctgttcgcagatcagctgagctacgaggtggcacgccaagcggaggagcttttccacaatctgtgcacgcagcagcaccgagaagactaccagctcgtcatggtctgtgatggggactgggagcactgctacctcccctctgccttcagccagcacaaggtcttcgtcaccccccaggcacccctcgaggccatccaagcctacctggcaggtcactaccgggtcccgaagcagaccctgtcggcggcagccgtgttcaatgaccggctgtgtgttgggatcgtggcctcggagcgagcaggtgttggaaagtctctgtacgtgaagaggttgcacgacaaaatgaagatgcagttaaacgtgaaaaatgtgcctctgaaaacaattcgactgatcgaccctcaggtggatgagagccgagtcctgggcgccctgctgcccttcctggatgcgcagtatcagaaggtccccgtgctctttcacctggacgtgacctcctcagtgcagactggaatttgggtgtttcttttcaagctcctcattttacaatacttaatggatataaatgggaaaatgtggcttcggaacccctgccatttgtatatcgttgaaatcctggaaaggaggacgtcagtgccgtcgaggagctcttcagcgctgcgtacacgtgtaccccagttcagttttcttgacatcttcccaaaagtcacctgcaggcctcccaaagaggtgatagacatggagctgagtgccctgaggagtgacacagagcctgggatggatctgtgggagttctgcagcgaaactttccaaagaccttaccagtatttaagacgattcaatcaaaaccaagacctagacacgtttcagtatcaagaaggctctgtcgaaggcaccccggaggaatgcctccagcatttcctgtttcactgcggggtaataaacccatcctggtcagagcttcggaactttgctcggttcctgaattatcagctcagagattgtgaggcctctctcttctgcaatccgagttttattggcgacacactgaggggcttcaagaagttcgtggtgaccttcatgatctttatggcaagagattttgccacaccatcactccacacctctgaccaaagcccggggaagcacatggtcaccatggatggggttagggaagaagatctagcgcccttctccctccggaagaggtgggagtcggagcctcacccatacgttttcttcaatgacgaccacacaaccatgacattcatcggcttccatctgcagcccaacatcaacggcagtgtcgatgccatcagtcacttgactgggaaggtcatcaagagagacgtcatgaccagggacctgtaccagggcctgctgctccagagggtgcccttcaatgtcgactttgataaactgcccagacacaagaaacttgagaggctctgcctgaccttagggatcccccaggccaccgaccccgacaaaacgtatgagctcacaaccgacaatatgcttaaaatccttgccatcgagatgcggttccggtgtgggatcccggttatcatcatgggagaaactggctgtgggaaaaccaggcttattaaattccttagcgacctgcggcgtggtggtaccaatgctgacaccataaagctggtcaaggtgcacggaggaacaactgcagacatgatctactccagagtcagggaggctgaaaatgtggccttcgccaataaggaccaacatcagttggacaccatcttgttttttgatgaagccaacacaacggaagctataagctgtatcaaagaagtcctgtgtgatcatatggtggatggccagcctctggctgaggactctggcctgcatattatagctgcctgcaatccataccggaagcactctgaggagatgatctgccgtttggagtcagctggtttgggctacagggttagtatggaggagacggccgacaggctgggctccattcctctgaggcagctggtataccgggtccatgctctgcccccgagcctgattcctctggtgtgggactttggacaactgagtgacgttgctgaaaagctctacatccagcagattgtccagagactggttgagtccatcagcctagatgaaaacgggactcgcgtgatcacagaagtcctctgcgcctctcagggtttcatgaggaaaacagaagatgagtgcagctttgtcagcctcagggacgtggagcgctgtgtgaaagttttcaggtggttccacgagcacagcgcgatgctcttagcgcagctgaatgcctttctctccaagtccagcgtcagcaaaaatcacaccgagagagatcccgtcctctggtcgttgatgctggccatcggggtgtgttaccatgcctctttagaaaagaaagactcatatcggaaagccatcgccaggttctttccgaaaccgtatgacgacagcaggctgcttctggatgaaataacacgggcacaggatctttttctggacggcgtacctctgaggaaaaccatcgccaagaacttggccttgaaggagaacgtcttcatgatggtcgtctgcatcgagctgaagattcccctcttcctggtggggaagcccggcagctccaagtctctcgccaagaccatcgtggcagacgccatgcagggcccggctgcctactcagatctcttccgcagcctgaagcaggtccacctggtgtccttccagtgcagcccgcactccaccccacagggcatcatcagcaccttccggcagtgcgcccgctttcagcaggggaaggacctgcagcagtacgtctctgtggtggtgttagatgaggtggggctggcggaagactcacccaaaatgcccctgaagactctgcacccgctgctggaagacggatgcattgaagacgatcccgccccccacaaaaaggtcggcttcgtgggcatctccaactgggcccttgaccctgccaagatgaaccggggcatttttgtgtcacgtggcagccccaacgagacagagctcatagagagcgccaagggcatctgctcctcagacatcctcgtccaggaccgagtccaagggtactttgcgtcctttgccaaagcctacgaaacggtgtgtaagcgccaggacaaggaattcttcgggcttcgtgactactacagcctcatcaaaatggtctttgctgcagcaaaggcttcaaatagaaagccttccccgcaagacattgcacaggctgtccttaggaacttcagtggcaaggatgacatccaagctttggacatctttctggccaatttgcccgaggccaagtgctcagaggaagtcagccccatgcagctgatcaaacagaacatctttgggccttctcagaaggtgccgggtggagagcaggaagatgctgagtcccgctacttactcgtgctgaccaaaaactacgtggcactgcagatcctgcagcagacattcttcgagggggaccagcagccggagattatttttggttctggtttccccaaggaccaagagtacacccagctctgcagaaacatcaatcgtgtgaagatctgcatggaaacaggcaagatggtgttgcttctcaacctgcagaacctctacgagagcctctacgacgcactcaaccagtactacgtccacctcggcggccagaagtacgtggacctcggtctggggacccaccgcgtcaaatgtcgggttcaccccaacttccgcctgattgtcattgaagagaaagacgtcgtgtacaaacactttcccatccccctcattaaccggctggagaagcactatctggatatcaacacggtgctggagaaatggcagaagagcatcgtggaggagctctgtgcgtgggtggagaagttcatcaatgtcaaagcacatcatttccagaagaggcacaaatacagcccctctgacgtcttcatcggctaccactcggacgcctgcgcgtctgtggtgctgcaggtcatagagaggcagggtccccgggccttgacggaggaacttcaccagaaggtgtctgaggaggccaaatcgatcctgctgaactgcgctacgcccgatgccgtggtccggctgagcgcctactcgctgggcgggttcgcagcggagtggctgtcgcaggagtactttcacagacagaggcacaactcctttgcagatttccttcaggcacacctgcacacggcagacctggagcgccacgccatcttcacagagatcaccactttctccaggctgctaacaagtcacgactgtgaaattttagaatcagaggtcacaggcagggctccgaaacccacactcctgtggctgcagcagtttgacaccgagtactcattcctcaaagaagtccgaaactgtttaacgaatacagccaaatgtaaaatcctcatttttcagacagattttgaagatggaatccgtagcgcccagctcattgcctcagctaagtattctgttataaatgaaatcaacaaaatacgagaaaatgaggaccgtatcttcgtctatttcatcacaaaactgtcccgggtgggaagaggaacagcctatgtgggcttccacggagggctgtggcagtctgtccacatcgatgacctccggagatccaccctcatggtttctgatgtgaccaggctgcagcatgtcaccatcagccagctgttcgcgcccggagacttgcctgagctgggcttggaacaccgggcggaagacggccatgaggaggcgatggagacggaggccagcacatcaggggaggtggcagaggtggcagaggaggccatggaaacagaaagttctgagaaggtgggaaaggaaacctctgaactcggaggcagtgatgtgtcgatcctggacaccaccaggctgctgagaagctgtgtgcagagcgccgtgggcatgctcagagaccagaacgagagctgcacgcgcaatatgcggagggtggtgctcctcctgggcctcttgaatgaggatgacgcgtgccacgcctctttcttgcgggtatccaagatgcgcctcagtgtctttttaaagaagcaagaagagagccagtttcaccctctggagtggttggcaagggaagcctgcaaccaggacgctctccaggaggcgggcacattcaggcacaccctctggaagcgggtccaaggtgctgtcacccctctgctggcgagcatgatatcattcatcgacagagacggcaacctagagttactgaccaggccagatactccgccctgggcaagagatctttggatgtttattttcagtgacacgatgcttctgaacattcctcttgtgatgaataatgaaagacataaaggtgagatggcctacatcgtggtgcagaaccacatgaacctttccgagaacgcttccaacaacgtccctttcagctggaaaatcaaggactatctggaggagctgtgggtccaggctcagtacatcacagacgcagaaggactgcccaagaagttcgtggacatctttcagcagactcctctgggcaggtttcttgcccagctccatggagagccgcagcaggaacttcttcagtgttacttgaaggatttcattctcttgaccatgcgtgtgtcaacggaggaggaattaaagtttctgcagatggctctgtggtcctgcactaggaaactgaaagcggcgtcagaagcgcccgaggaagaggtttccttaccgtgggtgcaccttgcctaccagcgtttcagaagccgtctgcagaacttttccagaatcctgaccatctaccctcagcttctccacagcctgatggaagcccgttggaaccatgagctggctggatgtgagatgaccctggacgcatttgccgcaatggcctgcacggagatgctgacaagaaacaccctgaagcccagtccccaggcgtggctacagttggtgaagaatctttccatgccgctggagctcatctgctccgatgagcacatgcaaggcagcgggagcctggcccaggctgtcatcagggaagtcagagcccagtggagtcggattttctccaccgcactcttcgtggagcacgtgctcctaggaaccgagagccgcgtccccgagttacaggggctggtgaccgagcacgtcttcttactagacaagtgtcttcgagagaactctgacgtgaagacgcacgggccttttgaggccgtgatgcgcactctctgtgaatgcaaggagacagccagcaagaccctcagcaggtttgggattcagccgtgctccatctgcctgggagatgcaaaggaccccgtctgtctgccctgcgaccacgtgcactgcctgcgctgcctcagggcctggtttgcctcagagcagatgatatgcccctactgtttaactgccttgccagacgaattctctccagctgtttcccaagcgcacagggaagccattgaaaagcatgcccgcttccggcagatgtgcaacagtttcttcgtagacctggtgtccaccatttgcttcaaggacaacgctccgcctgagaaggaagtgattgagagcctgctctctctcctcttcgtccaaaaggggcgcttaagagatgctgcccagagacactgtgaacacacaaaatctctctctccattcaatgatgttgtggataagactcctgtcatccgctcagtgatactgaaactgcttttgaagtacagctttcatgatgtaaaagattatattcaggaatatttgaccctgttaaaaaagaaagcattcataactgaagataaaactgaactgtacatgctcttcatcaactgcctggaggattcaatacttgagaagaccagtgcttactccagaaatgatgaactgaaccacctagaagaggaaggtcgtttccttaaggcatattctccagcaagccggggccgagagcctgccaacgaggcctcggttgaatacctgcaagaggtggcccggatccgcctctgcctcgacagagctgcagatttcctctcggagcctgagggaggcccagagatggccaaggagaagcagtgctacctgcagcaagtcaagcagttctgtatccgggtggagaacgactggcaccgggtgtacctggtgcggaagctcagcagccagcgggggatggagttcgtgcagggcctctccaagcccggccgcccgcaccagtgggtgtttcccaaggacgttgtcaagcagcaggggctgcggcaggaccacccaggccagatggataggtacctggtgtacggcgatgaatacaaggctctccgtgatgctgtggccaaagctgtcctcgagtgcaagccactgggcattaagactgctctgaaggcctgcaagaccccccaaagccagcagtcagcctacttcctgttaacactgtttagagaggtggctattttgtacagatcccacaatgcaagcctccaccccacgccagagcaatgtgaagctgtgagcaaattcattggcgaatgcaagatcctttcacctcctgatatcagccgttttgcaacatcgctcgtggacaattctgtgccattgttgagggcggggcctagtgacagcaaccttgatggaacggtgacagaaatggccattcatgctgcagccgtccttctgtgtggacagaatgaactcttggagcccctaaagaatctggccttctccccagccaccatggcgcatgcttttcttccaaccatgcctgaagacttgctggctcaagctcggaggtggaagggtctggagcgagtccactggtacacttgtcccaacggccatccttgctccgtgggagagtgtggcaggccgatggaacagagcatctgcattgactgccatgcgccgattggaggcattgaccacaaacctcgggacggctttcatctggtcaaagacaaggcagacagaacgcagaccggccacgtgctgggcaacccgcagcggagagacgtggtgacatgtgaccgagggctgcccccagtggtcttcctccttatccggctactcactcacttggctctgcttctgggagcgtcccagagttcccaggctctgataaacatcattaagcctccagtgagggatccaaaaggctttctgcagcagcacatcctgaaggacctggagcagttggccaagatgctgggacacagtgccgacgagaccatcggcgtggtccacctcgtcctgcgcaggcttctccaagagcagcaccagctctctagcagaaggcttttaaattttgacacagaattgtcaactaaagaaatgaggaacaactgggaaaaggaaatcgcagctgtgatttctcctgaactggagcatctagataaaacccttcccaccatgaataatctcatcagccaagataagcgtatcagctctaaccctgtggccaaaataatatatggtgacccagtgaccttcctgccccacctgccccggaaaagtgtggtccattgctctaagatttggagctgcaggaaaagaattacagttgagtacctccagcacattgtggaacagaaaaatggcaaagaaagagtgcccatcctctggcatttcctgcagaaggaagcagagctgaggctggtaaagttcctgcctgagattttggccttgcaaagggatctagtgaagcagttccagaacgtccagcaagttgaatacagctccatcagaggcttcctcagcaagcacagctcagatgggttgaggcagctgcttcacaacaggatcacagtctttctgtccacatggaacaaactgaggagatcgcttgagacgaacggtgagatcaacctacccaaagactactgcagcactgacttggatctggacactgagtttgagatcctcttgccacgccgacggggcctgggcctctgtgctaccgctctcgtcagctacttgattcgcctacacaatgaaattgtctacgccgtggaaaaactctccaaggaaaacaacagctattccgtggatgccgccgaggtcactgaactgcatgtcatcagttatgaagtggagcgggacctgactccactgattctctccaactgccagtaccaggtggaggagggcagagagaccgtgcaggagttcgatctggagaagattcagcggcagatcgtcagccgcttcctccagggcaagccccggctgagcctcaagggaatacccactctggtgtacagacacgactggaactatgaacatctctttatggacatcaagaacaaaatggcacaggactccctccccagctcggtcattagtgccatcagtggacagctgcagtcctacagcgatgcctgtgaagtgctgtctgtcgtagaagtcactctggggtttctgagcacagctggtggggatccaaacatgcagctgaatgtgtatactcaagacatcctgcaaatgggtgatcagacgattcacgtgttaaaggccttaaacagatgccagttaaaacacaccattgccctctggcagttcctgtctgctcataagtctgaacagctgctgcggctgcacaaagagccatttggggaaatcagttcaaggtacaaagcggatctgagcccggaaaatgctaagctcctcagcacattcctaaatcagactggcctagacgccttcctgctagagctgcacgaaatgataatcttgaaactaaagaacccccaaacccaaaccgaggagcgcttccgccctcagtggagcctgagagacactctcgtaagttacatgcaaactaaagaaagtgaaattcttcctgaaatggcatctcagttcccagaagagatactgctcgccagctgtgtctcagtgtggaaaacagctgctgtgctgaaatggaatcgagaaatgagatagaattatttcctcagctatctttggatgactttggagagaagactcctctctcctcgtctgcggcgtggacttgatcatggactggtgcctttgcattcagaaggagagctgtcagcgtagcaccgaattcaagaccaaggcgtgctacctgagctgacagctttttgaaagccgagctgtttctgaaccatgtacatacatgttctgaaactttctcatcattttatgagtactgttcattgagagatgacaatgaagattagatgaaattggaaataaaccaacattgtttacattccaggagacttgtagctcagccacacacgcagtaatgacctgtgcccgttcgcctctggcactgcccacccctctttttttttttcttctaattctgtactcacaaaagagaatctcattttcttctttcttccattcccttaaattctgagtactgtacatatatttctgggttcccacgatgatgtgaaaaactaccagactgttttttgtcttctcacaaagacaagaaaaatcagggcattttgtgagtgccttaagatcaaactaacaagatctgaccctctcccctcacagtgagccactgccccacttcagagggtaagagccaaaagcctcattgtgaaaggcactggacttggaccagggacaccatcagggccttggttttctcacgcataaaatggagagtggattaatcgccaaagattcttctgatctgacattttgaaattgtgagagaaactagatgactgtaaacttggtcacaggcctggttctggcagttctttgcggacttttttctagcattatgccaaataaacatgcagtctcagtgtgctctcgcatgtatgaatatctagtcctttctgtggttctcagccaagacataaaaactaggactcagagcacatacaaaaccagttatgtttcggaaagagggaaaagagtccccgagcccggatcttgtgctgcttttctcactgacgtgttgccttttttctttacaaaatctgctttgatacttaggacctctctggactaatttctcttcctagacagctcagcacagctattgatatgttagaggcagtatccttaatattcattctaaatgagttaacgacttaacttgaaattgggcctaaggagtgagaactacaaaaatacaaaatgcttgtccaggactcagccatgcacaccttgagcagcgccggcaggaggcacggaaggaactgtgctccgttctcctcactgtcatggtgccaccagtgtctgatgaagggcagagtgacccagactgcaggcagtaactgacttcacacagtccctggcatttagtcatctgtgattgttttatcactctggactgtgcagagccacctgccaccgagatctgcattccgactgcctatgaacgggtgtgggggccgggggctggcttgctgaagtcttcaacttgcactcggagctcctttgatacctcagagctggctgtcaggtggcagctcacacccagactcactggccacacctcagcagggggggagtcgagtgtcagtctctttctgtgaaggctttttttttcctttggcctgggaatttttcccatttttatgaaggggttttaaattgtttcattttgtgtgctgtgcttcaaagccttaactgtcaaatcttgcattatcttgtttgtacagaaatatactggcctagcagaggcaaaaaaaaaaaaaatgaattttattttacttgtcacacctgtcttaataaactggagttttgctgctaaagaactcttctctctgggggcagagcttctatttatggcacatagacatcagctaggcttttgggaatcgtttgtgttctttgtggaaatgtcctttagaagcacccatgaagtagtgtgttcagactgtgcacacagaaaacaggctctgccttcacatgtgagacggtggacttttcctctggacaaaatgacagcatcctggcgactccacagtggagctgagcgccactccctgtagccgatctgggactgaaacgcttacacctctgcctcagaaggagtcccccatgccctgcctgaaatgacttcactggacacagcggggctgcagctaacggggtacaggtaggagctaactaacttcacccctgagtccacttgcggggtaagagataaacagtaacccttccaggagcccactgacgttggagtgctaaaaatgccccttcagggggaaaactgcattttctcttccaaaaaggaaaggttcttccaggcgagaaacctgtggtctagaaccacagcaagaagaggaggcatgctggcctgcaccggaagactcactttgtctgccctgcgccagcctcacctcaccctgcagttcccgtttccgccatggatgcctcatcaccaaccctgaccttccccctcccaaccctttattcatcctcactcccactcatacccgcctccctggacagttccctgctgcagagttctttctgctttcagccctaccttggtggtgatttacctgaaaatcttcacaactgatcattatctccttctctttgagacctgactgaaaaaattaggtgtgcacacctgtaatcccagctacctgggaggctgaggtatgaggattgcttgagcctgggagtttgaggctgcagtgagctatgattgcaccactgcactccaacctgggtgacagagtgagaccctgtctcaaaaaaaaataaaataaggaccttattgtgtgtgcaaattatttgcctttcatgaatagttatgagactttgtgcatgtgttaaccgagacggccctgagctatttcagttactcctgtatgttcaggcaattccaatttagaaacaaacttccagtgataaatattgggaagaaaatgtcagctcagggccaagtaggtaaagccacccaagtctagccatgcacacaggcactagtgtgctgaaggaaaacacctctgatttgatacataaagtgtgaaggttgcataactggggaggtggctggagaaaacctgagcctcgagctgagtaacaatccaagccatgattagcatttatattgcattctgcattattctcatcctatcacgttcattaagttcaaccattaccattacgaatcccgtttccagctggaaaaacaagcgccaggaaagtgcatttcccccccaccccccccccccaaccagagcaactttggtcagaagtcacacctaatcaccctctctgcaggatatgctggggatagcccttttgaggaggtgggggtgtatgcgaaagcaacctggggccaaagcagggggaagcaggagagactggaggggccctgggtccagcaagtgctccaccaggctgcccctgctcaggtgctccacagcccataaaaaacgccttcagccctgctgtgcttcccctcacacctaaacttactataagggtcctaccttccccagtattccttcatgatcactgctacctgtgccctgaagcgcaacagaacctcaacccagaggacagccacttcctcagaacccacgatctttgccccatcgccacaggtccatgagtgactcctaattaccaaatccaagggctccttcaccctgaccactctggaacccaacaaagctgacacacagcccagcccagacaggcctgaatgtgggtcctggctctcccatttgccagttctacagccatgggcaagtggctcgacctctctaagcttcagtttcctcgtctgtgaaatatctgtcagtgctcttaagggaggagaccaccccacatattgtcttacgcccaatttctgcctccaaagagagaagtaaaaactaaaaggcagaaatgaaatccacaagcagacagcctgcaccacaccctgggcctggtagttaaagatcgacgcctgacctaatcagtgatgctatctatagattacagacattatatagaaaagcaccgtgaaaatccctgtcctgttctgttccgttctaattacgggtgcatgcagcccccagtcacgtaccccctgcttgctcaatcaatcacgaccctctcacgcagaccccttaagagttgtgagcccttaaaagggacaggaattgctcactcggggagctcagttgttggagacatgagtcttgccgaagcgcccggctgaataaagcccttctttaactcgtgtctgaggggttttctctgcagcttgtcctgctacatttcttggttccctgaccaggaatctaggtgattaatggatggttgaggcagcccctcagacggcttaggcctgccctgtggagcatccctgtggaggactccagccagcttgagcgacatggatcctgagagcgctctcaggcaggcaattgccccagtggaatgcctggccagagcagtgtgtagcaggcccccgaggaggatcaacgcagtggctgaacaccgggaaggaactgccacttggagtccagacatctgaaacttggtaagactggtctttggaacttgcccactccatttgaggggaagcgtggcctgatcacccacggcgtgcctgtactggcactctggtttttgtttttgacttgacttggattgcttgatactttggttttggttttgacctgacttggatatcctgatactctgattttggttttgattttggtttggtgtaaactgtaaaagtgtgtgtgtgccctttttacctgttctttgttttgtggtatgcgtgtagggtgagcgtaatgttttgtcttgaagaagcatgggtcaagcacaaagtaagaccaccccactaggaactatgctgaaaaatttcaggaaaggatttaagggagactatggagtactatgacaccaggaaaacttaaaactttgtgtaagatagactggccagcattagaggtaggttggccatcagagtgaagcctggacaggtcccttgtttcaaaggtatggcacaaggtaacctgtaagccagggtacccacaccagttcccgtacacagacacttggttacagctggttttagactccccacccgcccgccccaacagtggttgagagaacagcagcataagtggctggcagaggcaaggaaagaccagcagagagagaaagaggaagagacagacaaagagggagtcagagagagagagagaaagagacagaggcaaaaggaaagtcaaagagaaagagacagaaaatcaagaggaaaaaaaa

SEQ ID NO: 39 - DNA, 17730 bp, homo sapien
gacagcgcgcggcaggcggcgagctcgggggccgcagaaaatgaaactgaagccgtggtcacgtgacaggacatgtagtatatagcaggctgccagcgactcctgctcttgcttctggatctgcagggcagtcccagcaggacccatggagtgtccttcgtgccagcatgtctccaaggaggaaacccccaagttctgcagccagtgcggagagaggctgcctcctgcagcccccatagcagattctgagaacaataactccacaatggcgtcggcctcggagggtgaaatggagtgtgggcaggagctgaaggaggaagggggcccgtgcttgttcccgggctcagacagttggcaagaaaaccccgaggagccctgttccaaagcctcctggaccgtccaagaaggagctacatcagaggttttggtagatgctgctgtagacctcatatccgatgaatgggaagctgctaatgccatacccagcaagagaaggaagcaggatgcagccccgcttgaggccgccagcgtgccttctgcagactgtgagcagagcaaaaagaagaaaaggaagaagaaaaagaaggggaacaagtccgcttcctcagagctggcttccttgcccctttctcctgccagcccctgtcacctgactttgctttcaaacccgtggcctcaggacacagccctgccccacagccaagcccagcagagtggccccactggccagccgagccagcccccaggcacagccaccacgccactggagggtgacggcctctccgcgcccaccgaggttggcgacagccccctgcaggcccaggctttgggagaggcaggagtggccacaggaagtgaggctcagagcagcccgcaattccaggaccacacggaaggggaggaccaggacgcttccatcccctctgggggcagaggcctgtcccaggaggggaccggtccccccacctctgctggtgaaggccattctaggactgaagatgctgcccaggagctcctgttgcctgagtcaaaaggaggcagctctgagcccgggacagaactgcagaccaccgagcaacaggcaggggcctcagcctctatggcagttgatgctgtagctgagccagccaatgcagttaaaggggccgggaaggaaatgaaagagaagacccagagaatgaaacagccaccagcaaccactcctcctttcaaaacacactgccaggaagctgagaccaagaccaaggacgagatggctgctgctgaagaaaaagtcggtaagaatgaacaaggggagcctgaagacctcaagaagccagaggggaagaacagaagtgcagctgctgtgaaaaacgagaaggagcaaaaaaaccaggaagcagatgtccaggaagtgaaggcaagcacgctgagcccgggtggaggagtcaccgtgttcttccacgccatcatctctcttcatttcccattcaatcctgacctccataaagtcttcatcagaggaggagaagaatttggggagtcaaaatgggacagcaatatctgtgagctgcactacaccagagacttgggtcatgaccgcgttcttgttgaaggcattgtctgcatttccaagaagcacctagataaatacattccttacaagtacgtcatttataatggggaatcttttgagtatgagttcatttacaagcaccagcagaagaagggcgagtacgtcaaccgctgtctgttcataaaatcttcacttctgggctcaggagactggcatcagtactatgacatagtttatatgaagcctcatgggagactccagaaagtcatgaaccacatcacagacgggccgaggaaggacctggtgaaggggaagcagattgccgctgcgctcatgctggacagcaccttcagcatcctgcagacctgggacaccatcaacctgaacagcttcttcacccagttcgagcagttttgctttgtcctgcaacagcctatgatttatgaaggacaggcacagctgtggaccgatttgcagtacagggagaaagaggtgaagagatacctgtggcaacatctgaaaaaacacgtggtaccattgccggacggaaaaagcacggactttttgcctgtggactgcccagtgaggagtaaactgaaaacaggcctgattgtcctttttgtagtggaaaaaattgagcttttattagaaggcagcctggactggttgtgtcacctcctaacctcagatgccagctcaccagatgagtttcaccgtgacctaagccacatccttgggatacctcagagctggcggctgtacctggtgaacctgtgccaaagatgcatggacacaaggacgtacacctggctgggcgccctgcctgtcctgcactgctgtatggagctggccccgcggcacaaggatgcctggagacagcctgaggacacctgggccgctctggagggactctccttctcaccgttccgggaacaaatgctagatacgagttccctacttcagtttatgagagagaagcagcatttgctgagcatagacgagcctctcttccggtcctggtttagtctgctacctctgagtcacctggttatgtatatggaaaacttcattgagcacctgggtcgttttcctgctcatatcctggactgtctttcagggatttactaccggcttccgggacttgagcaagtcttgaatacgcaggatgttcaggatgttcagaacgttcagaacattttagaaatgctgttgcgactcctggacacttaccgggacaagattcccgaggaggccttgtcaccatcctacctgactgtgtgtctgaaactgcatgaagccatctgcagcagcacaaagctacttaagttttacgagctgccagccttatctgccgagattgtctgcagaatgattagacttctatctctggtggattctgcaggacagagagatgaaactggaaataattcagtccaaacagtcttccaagggacccttgctgctacgaaaaggtggctccgagaagtttttacaaagaacatgctcacatcttcaggtgcctcattcacatacgtcaaggaaattgaggtctggaggcggctggtggaaatccaattccccgcggagcatggctggaaggagtcgttgctgggagacatggaatggaggctcacaaaggaggaacccctctcccagatcactgcctactgcaatagttgctgggacaccaaaggcttagaggacagtgtggccaagaccttcgagaaatgcatcattgaagccgtgagctcagcctgccagtctcagaccagtatccttcaggggttctcttactctgatttgcggaaatttggcatcgtcttgtctgctgtgatcactaagtcctggcctaggaccgcggacaacttcgatgacattttaaagcatctgctcacgttggcagatgtcaagcacgtcttcagattgtgtggaaccgacgagaaaatactagcaaatgtcacagaggatgccaagaggctgatagctgttgccgactctgtgttgacgaaagttgttggtgacctcctaagtggcacgattttagttggacaactggagctgattataaagcacaagaatcagtttcttgacatctggcaactgagggaaaaaagtctttcaccccaggatgaacaatgtgctgtggaggaagcactggattggagaagggaggaactgttacttctaaagaaagagaaaagatgtgttgatagtctcctgaagatgtgtgggaacgtgaaacatctgatacaagtggactttggagtgcttgcagtaagacactcacaagacctcagcagtaaaagattaaatgacaccgtgacagtgagactgtccacctcctcgaactcgcagagggcaacgcattaccacctgagctcccaggtccaagaaatggctgggaagatagacttgctcagagacagccacatcttccagctcttctggcgggaagccgcagagccgctgagtgagcctaaggaggaccaggaagccgcagagttgctgagtgagcccgaagaagaatcagaaaggcacatccttgagcttgaagaggtgtatgactatttgtatcagccttcttacagaaagttcattaagttgcaccaggatctaaagtcaggagaggtcacccttgcagagattgatgtcatcttcaaggactttgtgaataaatacacggacctggattcagaacttaagatcatgtgcaccgtggaccaccaggaccaaagagattggatcaaggaccgagtcgaacagatcaaggaataccatcacctgcaccaggctgtccacgcagccaaggtcatcttgcaggtcaaagagagcctgggactgaacggtgacttcagtgttctcaacactttactaaattttactgataacttcgacgactttcgccgtgaaacactggaccagatcaaccaggagctcatccaggccaaaaagctgctccaggacatcagcgaggcccggtgcaaggggctgcaggctctgtccctgagaaaggagttcatctgctgggtccgggaggctcttggaggcatcaatgagctgaaggtgtttgtggacctggcctccatctcagcgggggagaatgacattgatgtggaccgggtggcctgcttccatgacgctgtgcagggctacgcatccctgctatttaagctggaccccagcgtggacttcagtgcattcatgaagcatctgaaaaagctgtggaaggctctggataaggaccagtacctgcccaggaaactgtgtgactccgccaggaacttggaatggctgaagactgtgaatgagagtcatgggtctgtggaacgctcatccctgaccctggccacggccatcaaccaaagaggcatctatgtgatccaggcgcccaaaggtggccaaaagatttccccagacacggttctgcacttgatccttcctgagagccctggcagccacgaggagtcacgagagtactctttagaggaggtgaaggagcttttgaacaagttgatgctgatgtctggcaagaaggatcgtaacaacacggaagtggagaggttttcagaggtcttctgcagtgtgcagaggctcagccaggccttcatcgacctgcactctgctgggaatatgctgttcaggacgtggatcgccatggcctactgctcccccaagcagggtgtgtccctccaaatggactttggcttggacctggtgacggagcttaaagaaggtggagatgtcactgagctgctggcagccctctgcaggcagatggagcacttccttgacagctggaagagatttgtgacccagaagcgaatggagcacttttacctgaacttctacacggcagagcagctggtttacctgagcactgagctcaggaagcagcccccgagtgatgccgccctaacgatgctatccttcatcaaaagcaactgcaccctgagggatgtcttaagggcctctgtggggtgtgggagtgaggccgccaggtaccgcatgaggagagtcatggaagagctcccgctgatgctcttatcagagttcagcctggtggacaagctgaggatcatcatggagcagtccatgaggtgccttcctgccttcctgcccgactgcctcgacctagagacccttggccactgtctggctcacctggcagggatgggtgggtctcccgtggagcgttgtctcccgagaggtctgcaggtcggccagcccaacctcgtcgtctgtggccactccgaggtgttgccagccgccctggctgtctacatgcaaaccccaagccagcccctgcccacttacgatgaggtgctgctctgcaccccggcaaccacctttgaggaggtggcactgttgctgcgccgctgcctgaccctgggctccctggggcacaaggtctacagcctgctgttcgcagatcagctgagctacgaggtggcacgccaagcggaggagcttttccacaatctgtgcacgcagcagcaccgagaagactaccagctcgtcatggtctgtgatggggactgggagcactgctacctcccctctgccttcagccagcacaaggtcttcgtcaccccccaggcacccctcgaggccatccaagcctacctggcaggtcactaccgggtcccgaagcagaccctgtcggcggcagccgtgttcaatgaccggctgtgtgttgggatcgtggcctcggagcgagcaggtgttggaaagtctctgtacgtgaagaggttgcacgacaaaatgaagatgcagttaaacgtgaaaaatgtgcctctgaaaacaattcgactgatcgaccctcaggtggatgagagccgagtcctgggcgccctgctgcccttcctggatgcgcagtatcagaaggtccccgtgctctttcacctggacgtgacctcctcagtgcagactggaatttgggtgtttcttttcaagctcctcattttacaatacttaatggatataaatgggaaaatgtggcttcggaacccctgccatttgtatatcgttgaaatcctggaaaggaggacgtcagtgccgtcgaggagctcttcagcgctgcgtacacgtgtaccccagttcagttttcttgacatcttcccaaaagtcacctgcaggcctcccaaagaggtgatagacatggagctgagtgccctgaggagtgacacagagcctgggatggatctgtgggagttctgcagcgaaactttccaaagaccttaccagtatttaagacgattcaatcaaaaccaagacctagacacgtttcagtatcaagaaggctctgtcgaaggcaccccggaggaatgcctccagcatttcctgtttcactgcggggtaataaacccatcctggtcagagcttcggaactttgctcggttcctgaattatcagctcagagattgtgaggcctctctcttctgcaatccgagttttattggcgacacactgaggggcttcaagaagttcgtggtgaccttcatgatctttatggcaagagattttgccacaccatcactccacacctctgaccaaagcccggggaagcacatggtcaccatggatggggttagggaagaagatctagcgcccttctccctccggaagaggtgggagtcggagcctcacccatacgttttcttcaatgacgaccacacaaccatgacattcatcggcttccatctgcagcccaacatcaacggcagtgtcgatgccatcagtcacttgactgggaaggtcatcaagagagacgtcatgaccagggacctgtaccagggcctgctgctccagagggtgcccttcaatgtcgactttgataaactgcccagacacaagaaacttgagaggctctgcctgaccttagggatcccccaggccaccgaccccgacaaaacgtatgagctcacaaccgacaatatgcttaaaatccttgccatcgagatgcggttccggtgtgggatcccggttatcatcatgggagaaactggctgtgggaaaaccaggcttattaaattccttagcgacctgcggcgtggtggtaccaatgctgacaccataaagctggtcaaggtgcacggaggaacaactgcagacatgatctactccagagtcagggaggctgaaaatgtggccttcgccaataaggaccaacatcagttggacaccatcttgttttttgatgaagccaacacaacggaagctataagctgtatcaaagaagtcctgtgtgatcatatggtggatggccagcctctggctgaggactctggcctgcatattatagctgcctgcaatccataccggaagcactctgaggagatgatctgccgtttggagtcagctggtttgggctacagggttagtatggaggagacggccgacaggctgggctccattcctctgaggcagctggtataccgggtccatgctctgcccccgagcctgattcctctggtgtgggactttggacaactgagtgacgttgctgaaaagctctacatccagcagattgtccagagactggttgagtccatcagcctagatgaaaacgggactcgcgtgatcacagaagtcctctgcgcctctcagggtttcatgaggaaaacagaagatgagtgcagctttgtcagcctcagggacgtggagcgctgtgtgaaagttttcaggtggttccacgagcacagcgcgatgctcttagcgcagctgaatgcctttctctccaagtccagcgtcagcaaaaatcacaccgagagagatcccgtcctctggtcgttgatgctggccatcggggtgtgttaccatgcctctttagaaaagaaagactcatatcggaaagccatcgccaggttctttccgaaaccgtatgacgacagcaggctgcttctggatgaaataacacgggcacaggatctttttctggacggcgtacctctgaggaaaaccatcgccaagaacttggccttgaaggagaacgtcttcatgatggtcgtctgcatcgagctgaagattcccctcttcctggtggggaagcccggcagctccaagtctctcgccaagaccatcgtggcagacgccatgcagggcccggctgcctactcagatctcttccgcagcctgaagcaggtccacctggtgtccttccagtgcagcccgcactccaccccacagggcatcatcagcaccttccggcagtgcgcccgctttcagcaggggaaggacctgcagcagtacgtctctgtggtggtgttagatgaggtggggctggcggaagactcacccaaaatgcccctgaagactctgcacccgctgctggaagacggatgcattgaagacgatcccgccccccacaaaaaggtcggcttcgtgggcatctccaactgggcccttgaccctgccaagatgaaccggggcatttttgtgtcacgtggcagccccaacgagacagagctcatagagagcgccaagggcatctgctcctcagacatcctcgtccaggaccgagtccaagggtactttgcgtcctttgccaaagcctacgaaacggtgtgtaagcgccaggacaaggaattcttcgggcttcgtgactactacagcctcatcaaaatggtctttgctgcagcaaaggcttcaaatagaaagccttccccgcaagacattgcacaggctgtccttaggaacttcagtggcaaggatgacatccaagctttggacatctttctggccaatttgcccgaggccaagtgctcagaggaagtcagccccatgcagctgatcaaacagaacatctttgggccttctcagaaggtgccgggtggagagcaggaagatgctgagtcccgctacttactcgtgctgaccaaaaactacgtggcactgcagatcctgcagcagacattcttcgagggggaccagcagccggagattatttttggttctggtttccccaaggaccaagagtacacccagctctgcagaaacatcaatcgtgtgaagatctgcatggaaacaggcaagatggtgttgcttctcaacctgcagaacctctacgagagcctctacgacgcactcaaccagtactacgtccacctcggcggccagaagtacgtggacctcggtctggggacccaccgcgtcaaatgtcgggttcaccccaacttccgcctgattgtcattgaagagaaagacgtcgtgtacaaacactttcccatccccctcattaaccggctggagaagcactatctggatatcaacacggtgctggagaaatggcagaagagcatcgtggaggagctctgtgcgtgggtggagaagttcatcaatgtcaaagcacatcatttccagaagaggcacaaatacagcccctctgacgtcttcatcggctaccactcggacgcctgcgcgtctgtggtgctgcaggtcatagagaggcagggtccccgggccttgacggaggaacttcaccagaaggtgtctgaggaggccaaatcgatcctgctgaactgcgctacgcccgatgccgtggtccggctgagcgcctactcgctgggcgggttcgcagcggagtggctgtcgcaggagtactttcacagacagaggcacaactcctttgcagatttccttcaggcacacctgcacacggcagacctggagcgccacgccatcttcacagagatcaccactttctccaggctgctaacaagtcacgactgtgaaattttagaatcagaggtcacaggcagggctccgaaacccacactcctgtggctgcagcagtttgacaccgagtactcattcctcaaagaagtccgaaactgtttaacgaatacagccaaatgtaaaatcctcatttttcagacagattttgaagatggaatccgtagcgcccagctcattgcctcagctaagtattctgttataaatgaaatcaacaaaatacgagaaaatgaggaccgtatcttcgtctatttcatcacaaaactgtcccgggtgggaagaggaacagcctatgtgggcttccacggagggctgtggcagtctgtccacatcgatgacctccggagatccaccctcatggtttctgatgtgaccaggctgcagcatgtcaccatcagccagctgttcgcgcccggagacttgcctgagctgggcttggaacaccgggcggaagacggccatgaggaggcgatggagacggaggccagcacatcaggggaggtggcagaggtggcagaggaggccatggaaacagaaagttctgagaaggtgggaaaggaaacctctgaactcggaggcagtgatgtgtcgatcctggacaccaccaggctgctgagaagctgtgtgcagagcgccgtgggcatgctcagagaccagaacgagagctgcacgcgcaatatgcggagggtggtgctcctcctgggcctcttgaatgaggatgacgcgtgccacgcctctttcttgcgggtatccaagatgcgcctcagtgtctttttaaagaagcaagaagagagccagtttcaccctctggagtggttggcaagggaagcctgcaaccaggacgctctccaggaggcgggcacattcaggcacaccctctggaagcgggtccaaggtgctgtcacccctctgctggcgagcatgatatcattcatcgacagagacggcaacctagagttactgaccaggccagatactccgccctgggcaagagatctttggatgtttattttcagtgacacgatgcttctgaacattcctcttgtgatgaataatgaaagacataaaggtgagatggcctacatcgtggtgcagaaccacatgaacctttccgagaacgcttccaacaacgtccctttcagctggaaaatcaaggactatctggaggagctgtgggtccaggctcagtacatcacagacgcagaaggactgcccaagaagttcgtggacatctttcagcagactcctctgggcaggtttcttgcccagctccatggagagccgcagcaggaacttcttcagtgttacttgaaggatttcattctcttgaccatgcgtgtgtcaacggaggaggaattaaagtttctgcagatggctctgtggtcctgcactaggaaactgaaagcggcgtcagaagcgcccgaggaagaggtttccttaccgtgggtgcaccttgcctaccagcgtttcagaagccgtctgcagaacttttccagaatcctgaccatctaccctcagcttctccacagcctgatggaagcccgttggaaccatgagctggctggatgtgagatgaccctggacgcatttgccgcaatggcctgcacggagatgctgacaagaaacaccctgaagcccagtccccaggcgtggctacagttggtgaagaatctttccatgccgctggagctcatctgctccgatgagcacatgcaaggcagcgggagcctggcccaggctgtcatcagggaagtcagagcccagtggagtcggattttctccaccgcactcttcgtggagcacgtgctcctaggaaccgagagccgcgtccccgagttacaggggctggtgaccgagcacgtcttcttactagacaagtgtcttcgagagaactctgacgtgaagacgcacgggccttttgaggccgtgatgcgcactctctgtgaatgcaaggagacagccagcaagaccctcagcaggtttgggattcagccgtgctccatctgcctgggagatgcaaaggaccccgtctgtctgccctgcgaccacgtgcactgcctgcgctgcctcagggcctggtttgcctcagagcagatgatatgcccctactgtttaactgccttgccagacgaattctctccagctgtttcccaagcgcacagggaagccattgaaaagcatgcccgcttccggcagatgtgcaacagtttcttcgtagacctggtgtccaccatttgcttcaaggacaacgctccgcctgagaaggaagtgattgagagcctgctctctctcctcttcgtccaaaaggggcgcttaagagatgctgcccagagacactgtgaacacacaaaatctctctctccattcaatgatgttgtggataagactcctgtcatccgctcagtgatactgaaactgcttttgaagtacagctttcatgatgtaaaagattatattcaggaatatttgaccctgttaaaaaagaaagcattcataactgaagataaaactgaactgtacatgctcttcatcaactgcctggaggattcaatacttgagaagaccagtgcttactccagaaatgatgaactgaaccacctagaagaggaaggtcgtttccttaaggcatattctccagcaagccggggccgagagcctgccaacgaggcctcggttgaatacctgcaagaggtggcccggatccgcctctgcctcgacagagctgcagatttcctctcggagcctgagggaggcccagagatggccaaggagaagcagtgctacctgcagcaagtcaagcagttctgtatccgggtggagaacgactggcaccgggtgtacctggtgcggaagctcagcagccagcgggggatggagttcgtgcagggcctctccaagcccggccgcccgcaccagtgggtgtttcccaaggacgttgtcaagcagcaggggctgcggcaggaccacccaggccagatggataggtacctggtgtacggcgatgaatacaaggctctccgtgatgctgtggccaaagctgtcctcgagtgcaagccactgggcattaagactgctctgaaggcctgcaagaccccccaaagccagcagtcagcctacttcctgttaacactgtttagagaggtggctattttgtacagatcccacaatgcaagcctccaccccacgccagagcaatgtgaagctgtgagcaaattcattggcgaatgcaagatcctttcacctcctgatatcagccgttttgcaacatcgctcgtggacaattctgtgccattgttgagggcggggcctagtgacagcaaccttgatggaacggtgacagaaatggccattcatgctgcagccgtccttctgtgtggacagaatgaactcttggagcccctaaagaatctggccttctccccagccaccatggcgcatgcttttcttccaaccatgcctgaagacttgctggctcaagctcggaggtggaagggtctggagcgagtccactggtacacttgtcccaacggccatccttgctccgtgggagagtgtggcaggccgatggaacagagcatctgcattgactgccatgcgccgattggaggcattgaccacaaacctcgggacggctttcatctggtcaaagacaaggcagacagaacgcagaccggccacgtgctgggcaacccgcagcggagagacgtggtgacatgtgaccgagggctgcccccagtggtcttcctccttatccggctactcactcacttggctctgcttctgggagcgtcccagagttcccaggctctgataaacatcattaagcctccagtgagggatccaaaaggctttctgcagcagcacatcctgaaggacctggagcagttggccaagatgctgggacacagtgccgacgagaccatcggcgtggtccacctcgtcctgcgcaggcttctccaagagcagcaccagctctctagcagaaggcttttaaattttgacacagaattgtcaactaaagaaatgaggaacaactgggaaaaggaaatcgcagctgtgatttctcctgaactggagcatctagataaaacccttcccaccatgaataatctcatcagccaagataagcgtatcagctctaaccctgtggccaaaataatatatggtgacccagtgaccttcctgccccacctgccccggaaaagtgtggtccattgctctaagatttggagctgcaggaaaagaattacagttgagtacctccagcacattgtggaacagaaaaatggcaaagaaagagtgcccatcctctggcatttcctgcagaaggaagcagagctgaggctggtaaagttcctgcctgagattttggccttgcaaagggatctagtgaagcagttccagaacgtccagcaagttgaatacagctccatcagaggcttcctcagcaagcacagctcagatgggttgaggcagctgcttcacaacaggatcacagtctttctgtccacatggaacaaactgaggagatcgcttgagacgaacggtgagatcaacctacccaaagactactgcagcactgacttggatctggacactgagtttgagatcctcttgccacgccgacggggcctgggcctctgtgctaccgctctcgtcagctacttgattcgcctacacaatgaaattgtctacgccgtggaaaaactctccaaggaaaacaacagctattccgtggatgccgccgaggtcactgaactgcatgtcatcagttatgaagtggagcgggacctgactccactgattctctccaactgccagtaccaggtggaggagggcagagagaccgtgcaggagttcgatctggagaagattcagcggcagatcgtcagccgcttcctccagggcaagccccggctgagcctcaagggaatacccactctggtgtacagacacgactggaactatgaacatctctttatggacatcaagaacaaaatggcacaggactccctccccagctcggtcattagtgccatcagtggacagctgcagtcctacagcgatgcctgtgaagtgctgtctgtcgtagaagtcactctggggtttctgagcacagctggtggggatccaaacatgcagctgaatgtgtatactcaagacatcctgcaaatgggtgatcagacgattcacgtgttaaaggccttaaacagatgccagttaaaacacaccattgccctctggcagttcctgtctgctcataagtctgaacagctgctgcggctgcacaaagagccatttggggaaatcagttcaaggtacaaagcggatctgagcccggaaaatgctaagctcctcagcacattcctaaatcagactggcctagacgccttcctgctagagctgcacgaaatgataatcttgaaactaaagaacccccaaacccaaaccgaggagcgcttccgccctcagtggagcctgagagacactctcgtaagttacatgcaaactaaagaaagtgaaattcttcctgaaatggcatctcagttcccagaagagatactgctcgccagctgtgtctcagtgtggaaaacagctgctgtgctgaaatggaatcgagaaatgagatagaattatttcctcagctatctttggatgactttggagagaagactcctctctcctcgtctgcggcgtggacttgatcatggactggtgcctttgcattcagaaggagagctgtcagcgtagcaccgaattcaagaccaaggcgtgctacctgagctgacagctttttgaaagccgagctgtttctgaaccatgtacatacatgttctgaaactttctcatcattttatgagtactgttcattgagagatgacaatgaagattagatgaaattggaaataaaccaacattgtttacattccaggagacttgtagctcagccacacacgcagtaatgacctgtgcccgttcgcctctggcactgcccacccctctttttttttttcttctaattctgtactcacaaaagagaatctcattttcttctttcttccattcccttaaattctgagtactgtacatatatttctgggttcccacgatgatgtgaaaaactaccagactgttttttgtcttctcacaaagacaagaaaaatcagggcattttgtgagtgccttaagatcaaactaacaagatctgaccctctcccctcacagtgagccactgccccacttcagagggtaagagccaaaagcctcattgtgaaaggcactggacttggaccagggacaccatcagggccttggttttctcacgcataaaatggagagtggattaatcgccaaagattcttctgatctgacattttgaaattgtgagagaaactagatgactgtaaacttggtcacaggcctggttctggcagttctttgcggacttttttctagcattatgccaaataaacatgcagtctcagtgtgctctcgcatgtatgaatatctagtcctttctgtggttctcagccaagacataaaaactaggactcagagcacatacaaaaccagttatgtttcggaaagagggaaaagagtccccgagcccggatcttgtgctgcttttctcactgacgtgttgccttttttctttacaaaatctgctttgatacttaggacctctctggactaatttctcttcctagacagctcagcacagctattgatatgttagaggcagtatccttaatattcattctaaatgagttaacgacttaacttgaaattgggcctaaggagtgagaactacaaaaatacaaaatgcttgtccaggactcagccatgcacaccttgagcagcgccggcaggaggcacggaaggaactgtgctccgttctcctcactgtcatggtgccaccagtgtctgatgaagggcagagtgacccagactgcaggcagtaactgacttcacacagtccctggcatttagtcatctgtgattgttttatcactctggactgtgcagagccacctgccaccgagatctgcattccgactgcctatgaacgggtgtgggggccgggggctggcttgctgaagtcttcaacttgcactcggagctcctttgatacctcagagctggctgtcaggtggcagctcacacccagactcactggccacacctcagcagggggggagtcgagtgtcagtctctttctgtgaaggctttttttttcctttggcctgggaatttttcccatttttatgaaggggttttaaattgtttcattttgtgtgctgtgcttcaaagccttaactgtcaaatcttgcattatcttgtttgtacagaaatatactggcctagcagaggcaaaaaaaaaaaaaatgaattttattttacttgtcacacctgtcttaataaactggagttttgctgctaaagaa

SEQ ID NO: 40 - DNA, 8391 bp, homo sapien
gaacatctttgggccttctcagaaggtgccgggtggagagcaggaagatgctgagtcccgctacttactcgtgctgaccaaaaactacgtggcactgcagatcctgcagcagacattcttcgagggggaccagcagccggagattatttttggttctggtttccccaaggaccaagagtacacccagctctgcagaaacatcaatcgtgtgaagatctgcatggaaacaggcaagatggtgttgcttctcaacctgcagaacctctacgagagcctctacgacgcactcaaccagtactacgtccacctcggcggccagaagtacgtggacctcggtctggggacccaccgcgtcaaatgtcgggttcaccccaacttccgcctgattgtcattgaagagaaagacgtcgtgtacaaacactttcccatccccctcattaaccggctggagaagcactatctggatatcaacacggtgctggagaaatggcagaagagcatcgtggaggagctctgtgcgtgggtggagaagttcatcaatgtcaaagcacatcatttccagaagaggcacaaatacagcccctctgacgtcttcatcggctaccactcggacgcctgcgcgtctgtggtgctgcaggtcatagagaggcagggtccccgggccttgacggaggaacttcaccagaaggtgtctgaggaggccaaatcgatcctgctgaactgcgctacgcccgatgccgtggtccggctgagcgcctactcgctgggcgggttcgcagcggagtggctgtcgcaggagtactttcacagacagaggcacaactcctttgcagatttccttcaggcacacctgcacacggcagacctggagcgccacgccatcttcacagagatcaccactttctccgggctgctaacaagtcacgactgtgaaattttagaatcagaggtcacaggcagggctccgaaacccacactcctgtggctgcagcagtttgacaccgagtactcattcctcaaagaagtccgaaactgtttaacgaatacagccaaatgtaaaatcctcatttttcagacagattttgaagatggaatccgtagcgcccagctcattgcctcagctaagtattctgttataaatgaaatcaacaaaatacgagaaaatgaggaccgtatcttcgtctatttcatcacaaaactgtcccgggtgggaagaggaacagcctatgtgggcttccacggagggctgtggcagtctgtccacatcgatgacctccggagatccaccctcatggtttctgatgtgaccaggctgcagcatgtcaccatcagccagctgttcgcgcccggagacttgcctgagctgggcttggaacaccgggcggaagacggccatgaggaggcgatggaaacggaggccagcacatcaggggaggtggcagaggtggcagaggaggccatggaaacagaaagttctgagaaggtgggaaaggaaacctctgaactcggaggcagtgatgtgtcgatcctggacaccaccaggctgctgagaagctgtgtgcagagcgccgtgggcatgctcagagaccagaacgagagctgcacgcgcaatatgcggagggtggtgctcctcctgggcctcttgaatgaggatgacgcgtgccacgcctctttcttgcgggtatccaagatgcgcctcagtgtctttttaaagaagcaagaagagagccagtttcaccctctggagtggttggcaagggaagcctgcaaccaggacgctctccaggaggcgggcacattcaggcacaccctctggaagcgggtccaaggtgctgtcacccctctgctggcgagcatgatatcattcatcgacagagacggcaacctagagttactgaccaggccagatactccgccctgggcaagagatctttggatgtttattttcagtgacacgatgcttctgaacattcctcttgtgatgaataatgaaagacataaaggtgagatggcctacatcgtggtgcagaaccacatgaacctttccgagaacgcttccaacaacgtccctttcagctggaaaatcaaggactatctggaggagctgtgggtccaggctcagtacatcacagacgcagaaggactgcccaagaagttcgtggacatctttcagcagactcctctgggcaggtttcttgcccagctccatggagagccgcagcaggaacttcttcagtgttacttgaaggatttcattctcttgaccatgcgtgtgtcaacggaggaggaattaaagtttctgcagatggctctgtggtcctgcactaggaaactgaaagcggcgtcagaagcgcccgaggaagaggtttccttaccgtgggtgcaccttgcctaccagcgtttcagaagccgtctgcagaacttttccagaatcctgaccatctaccctcagcttctccacagcctgatggaagcccgttggaaccatgagctggctggatgtgagatgaccctggacgcatttgccgcaatggcctgcacggagatgctgacaagaaacaccctgaagcccagtccccaggcgtggctacagttggtgaagaatctttccatgccgctggagctcatctgctccgatgagcacatgcaaggcagcgggagcctggcccaggctgtcatcagggaagtcagagcccagtggagtcggattttctccaccgcactcttcgtggagcacgtgctcctaggaaccgagagccgcgtccccgagttacaggggctggtgaccgagcacgtcttcttactagacaagtgtcttcgagagaactctgacgtgaagacgcacgggccttttgaggccgtgatgcgcactctctgtgaatgcaaggagacagccagcaagaccctcagcaggtttgggattcagccgtgctccatctgcctgggagatgcaaaggaccccgtctgtctgccctgcgaccacgtgcactgcctgcgctgcctcagggcctggtttgcctcagagcagatgatatgcccctactgtttaactgccttgccagacgaattctctccagctgtttcccaagcgcacagggaagccattgaaaagcatgcccgcttccggcagatgtgcaacagtttcttcgtagacctggtgtccaccatttgcttcaaggacaacgctccgcctgagaaggaagtgattgagagcctgctctctctcctcttcgtccaaaaggggcgcttaagagatgctgcccagagacactgtgaacacacaaaatctctctctccattcaatgatgttgtggataagactcctgtcatccgctcagtgatactgaaactgcttttgaagtacagctttcatgatgtaaaagattatattcaggaatatttgaccctgttaaaaaagaaagcattcataactgaagataaaactgaactgtacatgctcttcatcaactgcctggaggattcaatacttgagaagaccagtgcttactccagaaatgatgaactgaaccacctagaagaggaaggtcgtttccttaaggcatattctccagcaagccggggccgagagcctgccaacgaggcctcggttgaatacctgcaagaggtggcccggatccgcctctgcctcgacagagctgcagatttcctctcggagcctgagggaggcccagagatggccaaggagaagcagtgctacctgcagcaagtcaagcagttctgtatccgggtggagaacgactggcaccgggtgtacctggtgcggaagctcagcagccagcgggggatggagttcgtgcagggcctctccaagcccggccgcccgcaccagtgggtgtttcccaaggacgttgtcaagcagcaggggctgcggcaggaccacccaggccagatggataggtacctggtgtacggcgatgaatacaaggctctccgtgatgctgtggccaaagctgtcctcgagtgcaagccactgggcattaagactgctctgaaggcctgcaagaccccccaaagccagcagtcagcctacttcctgttaacactgtttagagaggtggctattttgtacagatcccacaatgcaagcctccaccccacgccagagcaatgtgaagctgtgagcaaattcattggcgaatgcaagatcctttcacctcctgatatcagccgttttgcaacatcgctcgtggacaattctgtgccattgttgagggcggggcctagtgacagcaaccttgatggaacggtgacagaaatggccattcatgctgcagccgtccttctgtgtggacagaatgaactcttggagcccctaaagaatctggccttctccccagccaccatggcgcatgcttttcttccaaccatgcctgaagacttgctggctcaagctcggaggtggaagggtctggagcgagtccactggtacacttgtcccaacggccatccttgctccgtgggagagtgtggcaggccgatggaacagagcatctgcattgactgccatgcgccgattggaggcattgaccacaaacctcgggacggctttcatctggtcaaagacaaggcagacagaacgcagaccggccatgtgctgggcaacccgcagcggagagacgtggtgacatgtgaccgagggctgcccccagtggtcttcctccttatccggctactcactcacttggctctgcttctgggagcgtcccagagttcccaggctctgataaacatcattaagcctccagtgagggatccaaaaggctttctgcagcagcacatcctgaaggacctggagcagttggccaagatgctgggacacagtgccgacgagaccatcggcgtggtccacctcgtcctgcgcaggcttctccaagagcagcaccagctctctagcagaaggcttttaaattttgacacagaattgtcaactaaagaaatgaggaacaactgggaaaaggaaatcgcagctgtgatttctcctgaactggagcatctagataaaacccttcccaccatgaataatctcatcagccaagataagcgtatcagctctaaccctgtggccaaaataatatatggtgacccagtgaccttcctgccccacctgccccggaaaagtgtggtccattgctctaagatttggagctgcaggaaaagaattacagttgagtacctccagcacattgtggaacagaaaaatggcaaagaaagagtgcccatcctctggcatttcctgcagaaggaagcagagctgaggctggtaaagttcctgcctgagattttggccttgcaaagggatctagtgaagcagttccagaacgtccagcaagttgaatacagctccatcagaggcttcctcagcaagcacagctcagatgggttgaggcagctgcttcacaacaggatcacagtctttctgtccacatggaacaaactgaggagatcgcttgagacgaacggtgagatcaacctacccaaagactactgcagcactgacttggatctggacactgagtttgagatcctcttgccacgccgacggggcctgggcctctgtgctaccgctctcgtcagctacttgattcgcctacacaatgaaattgtctacgccgtggaaaaactctccaaggaaaacaacagctattccgtggatgccgccgaggtcactgaactgcatgtcatcagttatgaagtggagcgggacctgactccactgattctctccaactgccagtaccaggtggaggagggcagagagaccgtgcaggagttcgatctggagaagattcagcggcagatcgtcagccgcttcctccagggcaagccccggctgagcctcaagggaatacccactctggtgtacagacacgactggaactatgaacatctctttatggacatcaagaacaaaatggcacaggactccctccccagctcggtcattagtgccatcagtggacagctgcagtcctacagcgatgcctgtgaagtgctgtctgtcgtagaagtcactctggggtttctgagcacagctggtggggatccaaacatgcagctgaatgtgtatactcaagacatcctgcaaatgggtgatcagacgattcacgtgttaaaggccttaaacagatgccagttaaaacacaccattgccctctggcagttcctgtctgctcataagtctgaacagctgctgcggctgcacaaagagccatttggggaaatcagttcaaggtacaaagcggatctgagcccggaaaatgctaagctcctcagcacattcctaaatcagactggcctagacgccttcctgctagagctgcacgaaatgataatcttgaaactaaagaacccccaaacccaaaccgaggagcgcttccgccctcagtggagcctgagagacactctcgtaagttacatgcaaactaaagaaagtgaaattcttcctgaaatggcatctcagttcccagaagagatactgctcgccagctgtgtctcagtgtggaaaacagctgctgtgctgaaatggaatcgagaaatgagatagaattatttcctcagctatctttggatgactttggagagaagactcctctctcctcgtctgcggcgtggacttgatcatggactggtgcctttgcattcagaaggagagctgtcagcgtagcaccgaattcaagaccaaggcgtgctacctgagctgacagctttttgaaagccgagctgtttctgaaccatgtacatacatgttctgaaactttctcatcattttatgagtactgttcattgagagatgacaatgaagattagatgaaattggaaataaaccaacattgtttacattccaggagacttgtagctcagccacacacgcagtaatgacctgtgcccgttcgcctctggcactgcccacccctctttttttttttcttctaattctgtactcacaaaagagaatctcattttcttctttcttccattcccttaaattctgagtactgtacatatatttctgggttcccacgatgatgtgaaaaactaccagactgttttttgtcttctcacaaagacaagaaaaatcagggcattttgtgagtgccttaagatcaaactaacaagatctgaccctctcccctcacagtgagccactgccccacttcagagggtaagagccaaaagcctcattgtgaaaggcactggacttggaccagggacaccatcagggccttggttttctcacgcataaaatggagagtggattaatcgccaaagattcttctgatctgacattttgaaattgtgagagaaactagatgactgtaaacttggtcacaggcctggttctggcagttctttgcggacttttttctagcattatgccaaataaacatgcagtctcagtgtgctctcgcatgtatgaatatctagtcctttctgtggttctcagccaagacataaaaactaggactcagagcacatacaaaaccagttatgtttcggaaagagggaaaagagtccccgagcccggatcttgtgctgcttttctcactgacgtgttgccttttttctttacaaaatctgctttgatacttaggacctctctggactaatttctcttcctagacagctcagcacagctattgatatgttagaggcagtatccttaatattcattctaaatgagttaacgacttaacttgaaattgggcctaaggagtgagaactacaaaaatacaaaatgcttgtccaggactcagccatgcacaccttgagcagcgccggcaggaggcacggaaggaactgtgctccgttctcctcactgtcatggtgccaccagtgtctgatgaagggcagagtgacccagactgcaggcagtaactgacttcacacagtccctggcatttagtcatctgtgattgttttatcactctggactgtgcagagccacctgccaccgagatctgcattccgactgcctatgaacgggtgtgggggccgggggctggcttgctgaagtcttcaacttgcactcggagctcctttgatacctcagagctggctgtcaggtggcagctcacacccagactcactggccacacctcagcagggggggagtcgagtgtcagtctctttctgtgaaggctttttttttcctttggcctgggaatttttcccatttttatgaaggggttttaaattgtttcattttgtgtgctgtgcttcaaagccttaactgtcaaatcttgcattatcttgtttgtacagaaatatactggcctagcagaggcaaaaaaaaaaaaatgaattttattttacttgtcacacctgtcttaataaactggagttttgctgctaaaaaaaaaaaaaaaaaaa

SEQ ID NO: 41 - DNA, 6693 bp, homo sapien
gggcctcttgaatgaggatgacgcgtgccacgcctctttcttgcgggtatccaagatgcgcctcagtgtctttttaaagaagcaagaagagagccagtttcaccctctggagtggttggcaagggaagcctgcaaccaggacgctctccaggaggcgggcacattcaggcacaccctctggaagcgggtccaaggtgctgtcacccctctgctggcgagcatgatatcattcatcgacagagacggcaacctagagttactgaccaggccagatactccgccctgggcaagagatctttggatgtttattttcagtgacacgatgcttctgaacattcctcttgtgatgaataatgaaagacataaaggtgagatggcctacatcgtggtgcagaaccacatgaacctttccgagaacgcttccaacaacgtccctttcagctggaaaatcaaggactatctggaggagctgtgggtccaggctcagtacatcacagacgcagaaggactgcccaagaagttcgtggacatctttcagcagactcctctgggcaggtttcttgcccagctccatggagagccgcagcaggaacttcttcagtgttacttgaaggatttcattctcttgaccatgcgtgtgtcaacggaggaggaattaaagtttctgcagatggctctgtggtcctgcactaggaaactgaaagcggcgtcagaagcgcccgaggaagaggtttccttaccgtgggtgcaccttgcctaccagcgtttcagaagccgtctgcagaacttttccagaatcctgaccatctaccctcagcttctccacagcctgatggaagcccgttggaaccatgagctggctggatgtgagatgaccctggacgcatttgccgcaatggcctgcacggagatgctgacaagaaacaccctgaagcccagtccccaggcgtggctacagttggtgaagaatctttccatgccgctggagctcatctgctccgatgagcacatgcaaggcagcgggagcctggcccaggctgtcatcagggaagtcagagcccagtggagtcggattttctccaccgcactcttcgtggagcacgtgctcctaggaaccgagagccgcgtccccgagttacaggggctggtgaccgagcacgtcttcttactagacaagtgtcttcgagagaactctgacgtgaagacgcacgggccttttgaggccgtgatgcgcactctctgtgaatgcaaggagacagccagcaagaccctcagcaggtttgggattcagccgtgctccatctgcctgggagatgcaaaggaccccgtctgtctgccctgcgaccacgtgcactgcctgcgctgcctcagggcctggtttgcctcagagcagatgatatgcccctactgtttaactgccttgccagacgaattctctccagctgtttcccaagcgcacagggaagccattgaaaagcatgcccgcttccggcagatgtgcaacagtttcttcgtagacctggtgtccaccatttgcttcaaggacaacgctccgcctgagaaggaagtgattgagagcctgctctctctcctcttcgtccaaaaggggcgcttaagagatgctgcccagagacactgtgaacacacaaaatctctctctccattcaatgatgttgtggataagactcctgtcatccgctcagtgatactgaaactgcttttgaagtacagctttcatgatgtaaaagattatattcaggaatatttgaccctgttaaaaaagaaagcattcataactgaagataaaactgaactgtacatgctcttcatcaactgcctggaggattcaatacttgagaagaccagtgcttactccagaaatgatgaactgaaccacctagaagaggaaggtcgtttccttaaggcatattctccagcaagccggggccgagagcctgccaacgaggcctcggttgaatacctgcaagaggtggcccggatccgcctctgcctcgacagagctgcagatttcctctcggagcctgagggaggcccagagatggccaaggagaagcagtgctacctgcagcaagtcaagcagttctgtatccgggtggagaacgactggcaccgggtgtacctggtgcggaagctcagcagccagcgggggatggagttcgtgcagggcctctccaagcccggccgcccgcaccagtgggtgtttcccaaggacgttgtcaagcagcaggggctgcggcaggaccacccaggccagatggataggtacctggtgtacggcgatgaatacaaggctctccgtgatgctgtggccaaagctgtcctcgagtgcaagccactgggcattaagactgctctgaaggcctgcaagaccccccaaagccagcagtcagcctacttcctgttaacactgtttagagaggtggctattttgtacagatcccacaatgcaagcctccaccccacgccagagcaatgtgaagctgtgagcaaattcattggcgaatgcaagatcctttcacctcctgatatcagccgttttgcaacatcgctcgtggacaattctgtgccattgttgagggcggggcctagtgacagcaaccttgatggaacggtgacagaaatggccattcatgctgcagccgtccttctgtgtggacagaatgaactcttggagcccctaaagaatctggccttctccccagccaccatggcgcatgcttttcttccaaccatgcctgaagacttgctggctcaagctcggaggtggaagggtctggagcgagtccactggtacacttgtcccaacggccatccttgctccgtgggagagtgtggcaggccgatggaacagagcatctgcattgactgccatgcgccgattggaggcattgaccacaaacctcgggacggctttcatctggtcaaagacaaggcagacagaacgcagaccggccacgtgctgggcaacccgcagcggagagacgtggtgacatgtgaccgagggctgcccccagtggtcttcctccttatccggctactcactcacttggctctgcttctgggagcgtcccagagttcccaggctctgataaacatcattaagcctccagtgagggatccaaaaggctttctgcagcagcacatcctgaaggacctggagcagttggccaagatgctgggacacagtgccgacgagaccatcggcgtggtccacctcgtcctgcgcaggcttctccaagagcagcaccagctctctagcagaaggcttttaaattttgacacagaattgtcaactaaagaaatgaggaacaactgggaaaaggaaatcgcagctgtgatttctcctgaactggagcatctagataaaacccttcccaccatgaataatctcatcagccaagataagcgtatcagctctaaccctgtggccaaaataatatatggtgacccagtgaccttcctgccccacctgccccggaaaagtgtggtccattgctctaagatttggagctgcaggaaaagaattacagttgagtacctccagcacattgtggaacagaaaaatggcaaagaaagagtgcccatcctctggcatttcctgcagaaggaagcagagctgaggctggtaaagttcctgcctgagattttggccttgcaaagggatctagtgaagcagttccagaacgtccagcaagttgaatacagctccatcagaggcttcctcagcaagcacagctcagatgggttgaggcagctgcttcacaacaggatcacagtctttctgtccacatggaacaaactgaggagatcgcttgagacgaacggtgagatcaacctacccaaagactactgcagcactgacttggatctggacactgagtttgagatcctcttgccacgccgacggggcctgggcctctgtgctaccgctctcgtcagctacttgattcgcctacacaatgaaattgtctacgccgtggaaaaactctccaaggaaaacaacagctattccgtggatgccgccgaggtcactgaactgcatgtcatcagttatgaagtggagcgggacctgactccactgattctctccaactgccagtaccaggtggaggagggcagagagaccgtgcaggagttcgatctggagaagattcagcggcagatcgtcagccgcttcctccagggcaagccccggctgagcctcaagggaatacccactctggtgtacagacacgactggaactatgaacatctctttatggacatcaagaacaaaatggcacaggactccctccccagctcggtcattagtgccatcagtggacagctgcagtcctacagcgatgcctgtgaagtgctgtctgtcgtagaagtcactctggggtttctgagcacagctggtggggatccaaacatgcagctgaatgtgtatactcaagacatcctgcaaatgggtgatcagacgattcacgtgttaaaggccttaaacagatgccagttaaaacacaccattgccctctggcagttcctgtctgctcataagtctgaacagctgctgcggctgcacaaagagccatttggggaaatcagttcaaggtacaaagcggatctgagcccggaaaatgctaagctcctcagcacattcctaaatcagactggcctagacgccttcctgctagagctgcacgaaatgataatcttgaaactaaagaacccccaaacccaaaccgaggagcgcttccgccctcagtggagcctgagagacactctcgtaagttacatgcaaactaaagaaagtgaaattcttcctgaaatggcatctcagttcccagaagagatactgctcgccagctgtgtctcagtgtggaaaacagctgctgtgctgaaatggaatcgagaaatgagatagaattatttcctcagctatctttggatgactttggagagaagactcctctctcctcgtctgcggcgtggacttgatcatggactggtgcctttgcattcagaaggagagctgtcagcgtagcaccgaattcaagaccaaggcgtgctacctgagctgacagctttttgaaagccgagctgtttctgaaccatgtacatacatgttctgaaactttctcatcattttatgagtactgttcattgagagatgacaatgaagattagatgaaattggaaataaaccaacattgtttacattccaggagacttgtagctcagccacacacgcagtaatgacctgtgcccgttcgcctctggcactgcccacccctctttttttttttcttctaattctgtactcacaaaagagaatctcattttcttctttcttccattcccttaaattctgagtactgtacatatatttctgggttcccacgatgatgtgaaaaactaccagactgttttttgtcttctcacaaagacaagaaaaatcagggcattttgtgagtgccttaagatcaaactaacaagatctgaccctctcccctcacagtgagccactgccccacttcagagggtaagagccaaaagcctcattgtgaaaggcactggacttggaccagggacaccatcagggccttggttttctcacgcataaaatggagagtggattaatcgccaaagattcttctgatctgacattttgaaattgtgagagaaactagatgactgtaaacttggtcacaggcctggttctggcagttctttgcggacttttttctagcattatgccaaataaacatgcagtctcagtgtgctctcgcatgtatgaatatctagtcctttctgtggttctcagccaagacataaaaactaggactcagagcacatacaaaaccagttatgtttcggaaagagggaaaagagtccccgagcccggatcttgtgctgcttttctcactgacgtgttgccttttttctttacaaaatctgctttgatacttaggacctctctggactaatttctcttcctagacagctcagcacagctattgatatgttagaggcagtatccttaatattcattctaaatgagttaacgacttaacttgaaattgggcctaaggagtgagaactacaaaaatacaaaatgcttgtccaggactcagccatgcacaccttgagcagcgccggcaggaggcacggaaggaactgtgctccgttctcctcactgtcatggtgccaccagtgtctgatgaagggcagagtgacccagactgcaggcagtaactgacttcacacagtccctggcatttagtcatctgtgattgttttatcactctggactgtgcagagccacctgccaccgagatctgcattccgactgcctatgaacgggtgtgggggccgggggctggcttgctgaagtcttcaacttgcactcggagctcctttgatacctcagagctggctgtcaggtggcagctcacacccagactcactggccacacctcagcagggggggagtcgagtgtcagtctctttctgtgaaggctttttttttcctttggcctgggaatttttcccatttttatgaaggggttttaaattgtttcattttgtgtgctgtgcttcaaagccttaactgtcaaatcttgcattatcttgtttgtacagaaatatactggcctagcagaggcagaaaaaaaaaaaaaaaaaaaa

SEQ ID NO: 42 - DNA, 4616 bp, homo sapien
ggatttcattctcttgaccatgcgtgtgtcaacggaggaggaattaaagtttctgcagatggctctgtggtcctgcactaggaaactgaaagcggcgtcagaagcgcccgaggaagaggtttccttaccgtgggtgcaccttgcctaccagcgtttcagaagccgtctgcagaacttttccagaatcctgaccatctaccctcagcttctccacagcctgatggaagcccgttggaaccatgagctggctggatgtgagatgaccctggacgcatttgccgcaatggcctgcacggagatgctgacaagaaacaccctgaagcccagtccccaggcgtggctacagttggtgaagaatctttccatgccgctggagctcatctgctccgatgagcacatgcaaggcagcgggagcctggcccaggctgtcatcagggaagtcagagcccagtggagtcggattttctccaccgcactcttcgtggagcacgtgctcctaggaaccgagagccgcgtccccgagttacaggggctggtgaccgagcacgtcttcttactagacaagtgtcttcgagagaactctgacgtgaagacgcacgggccttttgaggccgtgatgcgcactctctgtgaatgcaaggagacagccagcaagaccctcagcaggtttgggattcagccgtgctccatctgcctgggagatgcaaaggaccccgtctgtctgccctgcgaccacgtgcactgcctgcgctgcctcagggcctggtttgcctcagagcagatgatatgcccctactgtttaactgccttgccagacgaattctctccagctgtttcccaagcgcacagggaagccattgaaaagcatgcccgcttccggcagatgtgcaacagtttcttcgtagacctggtgtccaccatttgcttcaaggacaacgctccgcctgagaaggaagtgattgagagcctgctctctctcctcttcgtccaaaaggggcgcttaagagatgctgcccagagacactgtgaacacacaaaatctctctctccattcaatgatgttgtggataagactcctgtcatccgctcagtgatactgaaactgcttttgaagtacagctttcatgatgtaaaagattatattcaggaatatttgaccctgttaaaaaagaaagcattcataactgaagataaaactgaactgtacatgctcttcatcaactgcctggaggattcaatacttgagaagaccagtgcttactccagaaatgatgaactgaaccacctagaagaggaaggtcgtttccttaaggcatattctccagcaagccggggccgagagcctgccaacgaggcctcggttgaatacctgcaagaggtggcccggatccgcctctgcctcgacagagctgcagatttcctctcggagcctgagggaggcccagagatggccaaggagaagcagtgctacctgcagcaagtcaagcagttctgtatccgggtggagaacgactggcaccgggtgtacctggtgcggaagctcagcagccagcgggggatggagttcgtgcagggcctctccaagcccggccgcccgcaccagtgggtgtttcccaaggacgttgtcaagcagcaggggctgcggcaggaccacccaggccagatggataggtacctggtgtacggcgatgaatacaaggctctccgtgatgctgtggccaaagctgtcctcgagtgcaagccactgggcattaagactgctctgaaggcctgcaagaccccccaaagccagcagtcagcctacttcctgttaacactgtttagagaggtggctattttgtacagatcccacaatgcaagcctccaccccacgccagagcaatgtgaagctgtgagcaaattcattggcgaatgcaagatcctttcacctcctgatatcagccgttttgcaacatcgctcgtggacaattctgtgccattgttgagggcggggcctagtgacagcaaccttgatggaacggtgacagaaatggccattcatgctgcagccgtccttctgtgtggacagaatgaactcttggagcccctaaagaatctggccttctccccagccaccatggcgcatgcttttcttccaaccatgcctgaagacttgctggctcaagctcggaggtggaagggtctggagcgagtccactggtacacttgtcccaacggccatccttgctccgtgggagagtgtggcaggccgatggaacagagcatctgcattgactgccatgcgccgattggaggcattgaccacaaacctcgggacggctttcatctggtcaaagacaaggcagacagaacgcagaccggccacgtgctgggcaacccgcagcggagagacgtggtgacatgtgaccgagggctgcccccagtggtcttcctccttatccggctactcactcacttggctctgcttctgggagcgtcccagagttcccaggctctgataaacatcattaagcctccagtgagggatccaaaaggctttctgcagcagcacatcctgaaggacctggagcagttggccaagatgctgggacacagtgccgacgagaccatcggcgtggtccacctcgtcctgcgcaggcttctccaagagcagcaccagctctctagcagaaggcttttaaattttgacacagaattgtcaactaaagaaatgaggaacaactgggaaaaggaaatcgcagctgtgatttctcctgaactggagcatctagataaaacccttcccaccatgaataatctcatcagccaagataagcgtatcagctctaaccctgtggccaaaataatatatggtgacccagtgaccttcctgccccacctgccccggaaaagtgtggtccattgctctaagatttggagctgcaggaaaagaattacagttgagtacctccagcacattgtggaacagaaaaatggcaaagaaagagtgcccatcctctggcatttcctgcagaaggaagcagagctgaggctggtaaagttcctgcctgagattttggccttgcaaagggatctagtgaagcagttccagaacgtccagcaagttgaatacagctccatcagaggcttcctcagcaagcacagctcagatgggttgaggcagctgcttcacaacaggatcacagtctttctgtccacatggaacaaactgaggagatcgcttgagacgaacggtgagatcaacctacccaaagactactgcagcactgacttggatctggacactgagtttgagatcctcttgccacgccgacggggcctgggcctctgtgctaccgctctcgtcagctacttgattcgcctacacaatgaaattgtctacgccgtggaaaaactctccaaggaaaacaacagctattccgtggatgccgccgaggtcactgaactgcatgtcatcagttatgaagtggagcgggacctgactccactgattctctccaactgccagtaccaggtggaggagggcagagagaccgtgcaggagttcgatctggagaagattcagcggcagatcgtcagccgcttcctccagggcaagccccggctgagcctcaagggaatacccactctggtgtacagacacgactggaactatgaacatctctttatggacatcaagaacaaaatggcacaggactccctccccagctcggtcattagtgccatcagtggacagctgcagtcctacagcgatgcctgtgaagtgctgtctgtcgtagaagtcactctggggtttctgagcacagctggtggggatccaaacatgcagctgaatgtgtatactcaagacatcctgcaaatgggtgatcagacgattcacgtgttaaaggccttaaacagatgccagttaaaacacaccattgccctctggcagttcctgtctgctcataagtctgaacagctgctgcggctgcacaaagagccatttggggaaatcagttcaaggtacaaagcggatctgagcccggaaaatgctaagctcctcagcacattcctaaatcagactggcctagacgccttcctgctagagctgcacgaaatgataatcttgaaactaaagaacccccaaacccaaaccgaggagcgcttccgccctcagtggagcctgagagacactctcgtaagttacatgcaaactaaagaaagtgaaattcttcctgaaatggcatctcagttcccagaagagatactgctcgccagctgtgtctcagtgtggaaaacagctgctgtgctgaaatggaatcgagaaatgagatagaattatttcctcagctatctttggatgactttggagagaagactcctctctcctcgtctgcggcgtggacttgatcatggactggtgcctttgcattcagaaggagagctgtcagcgtagcaccgaattcaagaccaaggcgtgctacctgagctgacagctttttgaaagccgagctgtttctgaaccatgtacatacatgttctgaaactttctcatcattttatgagtactgttcattgagagatgacaatgaagattagatgaaattggaaataaaccaacattgtttacattc

SEQ ID NO: 43 - protein, 5207 aa, homo sapien
MECPSCQHVSKEETPKFCSQCGERLPPAAPIADSENNNSTMASASEGEMECGQELKEEGGPCLFPGSDSWQENPEEPCSKASWTVQESKKKKRKKKKKGNKSASSELASLPLSPASPCHLTLLSNPWPQDTALPHSQAQQSGPTGQPSQPPGTATTPLEGDGLSAPTEVGDSPLQAQALGEAGVATGSEAQSSPQFQDHTEGEDQDASIPSGGRGLSQEGTGPPTSAGEGHSRTEDAAQELLLPESKGGSSEPGTELQTTEQQAGASASMAVDAVAEPANAVKGAGKEMKEKTQRMKQPPATTPPFKTHCQEAETKTKDEMAAAEEKVGKNEQGEPEDLKKPEGKNRSAAAVKNEKEQKNQEADVQEVKASTLSPGGGVTVFFHAIISLHFPFNPDLHKVFIRGGEEFGESKWDSNICELHYTRDLGHDRVLVEGIVCISKKHLDKYIPYKYVIYNGESFEYEFIYKHQQKKGEYVNRCLFIKSSLLGSGDWHQYYDIVYMKPHGRLQKVMNHITDGPRKDLVKGKQIAAALMLDSTFSILQTWDTINLNSFFTQFEQFCFVLQQPMIYEGQAQLWTDLQYREKEVKRYLWQHLKKHVVPLPDGKSTDFLPVDCPVRSKLKTGLIVLFVVEKIELLLEGSLDWLCHLLTSDASSPDEFHRDLSHILGIPQSWRLYLVNLCQRCMDTRTYTWLGALPVLHCCMELAPRHKDAWRQPEDTWAALEGLSFSPFREQMLDTSSLLQFMREKQHLLSIDEPLFRSWFSLLPLSHLVMYMENFIEHLGRFPAHILDCLSGIYYRLPGLEQVLNTQDVQDVQNVQNILEMLLRLLDTYRDKIPEEALSPSYLTVCLKLHEAICSSTKLLKFYELPALSAEIVCRMIRLLSLVDSAGQRDETGNNSVQTVFQGTLAATKRWLREVFTKNMLTSSGASFTYVKEIEVWRRLVEIQFPAEHGWKESLLGDMEWRLTKEEPLSQITAYCNSCWDTKGLEDSVAKTFEKCIIEAVSSACQSQTSILQGFSYSDLRKFGIVLSAVITKSWPRTADNFDDILKHLLTLADVKHVFRLCGTDEKILANVTEDAKRLIAVADSVLTKVVGDLLSGTILVGQLELIIKHKNQFLDIWQLREKSLSPQDEQCAVEEALDWRREELLLLKKEKRCVDSLLKMCGNVKHLIQVDFGVLAVRHSQDLSSKRLNDTVTVRLSTSSNSQRATHYHLSSQVQEMAGKIDLLRDSHIFQLFWREAAEPLSEPKEDQEAAELLSEPEEESERHILELEEVYDYLYQPSYRKFIKLHQDLKSGEVTLAEIDVIFKDFVNKYTDLDSELKIMCTVDHQDQRDWIKDRVEQIKEYHHLHQAVHAAKVILQVKESLGLNGDFSVLNTLLNFTDNFDDFRRETLDQINQELIQAKKLLQDISEARCKGLQALSLRKEFICWVREALGGINELKVFVDLASISAGENDIDVDRVACFHDAVQGYASLLFKLDPSVDFSAFMKHLKKLWKALDKDQYLPRKLCDSARNLEWLKTVNESHGSVERSSLTLATAINQRGIYVIQAPKGGQKISPDTVLHLILPESPGSHEESREYSLEEVKELLNKLMLMSGKKDRNNTEVERFSEVFCSVQRLSQAFIDLHSAGNMLFRTWIAMAYCSPKQGVSLQMDFGLDLVTELKEGGDVTELLAALCRQMEHFLDSWKRFVTQKRMEHFYLNFYTAEQLVYLSTELRKQPPSDAALTMLSFIKSNCTLRDVLRASVGCGSEAARYRMRRVMEELPLMLLSEFSLVDKLRIIMEQSMRCLPAFLPDCLDLETLGHCLAHLAGMGGSPVERCLPRGLQVGQPNLVVCGHSEVLPAALAVYMQTPSQPLPTYDEVLLCTPATTFEEVALLLRRCLTLGSLGHKVYSLLFADQLSYEVARQAEELFHNLCTQQHREDYQLVMVCDGDWEHCYLPSAFSQHKVFVTPQAPLEAIQAYLAGHYRVPKQTLSAAAVFNDRLCVGIVASERAGVGKSLYVKRLHDKMKMQLNVKNVPLKTIRLIDPQVDESRVLGALLPFLDAQYQKVPVLFHLDVTSSVQTGIWVFLFKLLILQYLMDINGKMWLRNPCHLYIVEILERRTSVPSRSSSALRTRVPQFSFLDIFPKVTCRPPKEVIDMELSALRSDTEPGMDLWEFCSETFQRPYQYLRRFNQNQDLDTFQYQEGSVEGTPEECLQHFLFHCGVINPSWSELRNFARFLNYQLRDCEASLFCNPSFIGDTLRGFKKFVVTFMIFMARDFATPSLHTSDQSPGKHMVTMDGVREEDLAPFSLRKRWESEPHPYVFFNDDHTTMTFIGFHLQPNINGSVDAISHLTGKVIKRDVMTRDLYQGLLLQRVPFNVDFDKLPRHKKLERLCLTLGIPQATDPDKTYELTTDNMLKILAIEMRFRCGIPVIIMGETGCGKTRLIKFLSDLRRGGTNADTIKLVKVHGGTTADMIYSRVREAENVAFANKDQHQLDTILFFDEANTTEAISCIKEVLCDHMVDGQPLAEDSGLHIIAACNPYRKHSEEMICRLESAGLGYRVSMEETADRLGSIPLRQLVYRVHALPPSLIPLVWDFGQLSDVAEKLYIQQIVQRLVESISLDENGTRVITEVLCASQGFMRKTEDECSFVSLRDVERCVKVFRWFHEHSAMLLAQLNAFLSKSSVSKNHTERDPVLWSLMLAIGVCYHASLEKKDSYRKAIARFFPKPYDDSRLLLDEITRAQDLFLDGVPLRKTIAKNLALKENVFMMVVCIELKIPLFLVGKPGSSKSLAKTIVADAMQGPAAYSDLFRSLKQVHLVSFQCSPHSTPQGIISTFRQCARFQQGKDLQQYVSVVVLDEVGLAEDSPKMPLKTLHPLLEDGCIEDDPAPHKKVGFVGISNWALDPAKMNRGIFVSRGSPNETELIESAKGICSSDILVQDRVQGYFASFAKAYETVCKRQDKEFFGLRDYYSLIKMVFAAAKASNRKPSPQDIAQAVLRNFSGKDDIQALDIFLANLPEAKCSEEVSPMQLIKQNIFGPSQKVPGGEQEDAESRYLLVLTKNYVALQILQQTFFEGDQQPEIIFGSGFPKDQEYTQLCRNINRVKICMETGKMVLLLNLQNLYESLYDALNQYYVHLGGQKYVDLGLGTHRVKCRVHPNFRLIVIEEKDVVYKHFPIPLINRLEKHYLDINTVLEKWQKSIVEELCAWVEKFINVKAHHFQKRHKYSPSDVFIGYHSDACASVVLQVIERQGPRALTEELHQKVSEEAKSILLNCATPDAVVRLSAYSLGGFAAEWLSQEYFHRQRHNSFADFLQAHLHTADLERHAIFTEITTFSRLLTSHDCEILESEVTGRAPKPTLLWLQQFDTEYSFLKEVRNCLTNTAKCKILIFQTDFEDGIRSAQLIASAKYSVINEINKIRENEDRIFVYFITKLSRVGRGTAYVGFHGGLWQSVHIDDLRRSTLMVSDVTRLQHVTISQLFAPGDLPELGLEHRAEDGHEEAMETEASTSGEVAEVAEEAMETESSEKVGKETSELGGSDVSILDTTRLLRSCVQSAVGMLRDQNESCTRNMRRVVLLLGLLNEDDACHASFLRVSKMRLSVFLKKQEESQFHPLEWLAREACNQDALQEAGTFRHTLWKRVQGAVTPLLASMISFIDRDGNLELLTRPDTPPWARDLWMFIFSDTMLLNIPLVMNNERHKGEMAYIVVQNHMNLSENASNNVPFSWKIKDYLEELWVQAQYITDAEGLPKKFVDIFQQTPLGRFLAQLHGEPQQELLQCYLKDFILLTMRVSTEEELKFLQMALWSCTRKLKAASEAPEEEVSLPWVHLAYQRFRSRLQNFSRILTIYPQVLHSLMEARWNHELAGCEMTLDAFAAMACTEMLTRNTLKPSPQAWLQLVKNLSMPLELICSDEHMQGSGSLAQAVIREVRAQWSRIFSTALFVEHVLLGTESRVPELQGLVTEHVFLLDKCLRENSDVKTHGPFEAVMRTLCECKETASKTLSRFGIQPCSICLGDAKDPVCLPCDHVHCLRCLRAWFASEQMICPYCLTALPDEFSPAVSQAHREAIEKHARFRQMCNSFFVDLVSTICFKDNAPPEKEVIESLLSLLFVQKGRLRDAAQRHCEHTKSLSPFNDVVDKTPVIRSVILKLLLKYSFHDVKDYIQEYLTLLKKKAFITEDKTELYMLFINCLEDSILEKTSAYSRNDELNHLEEEGRFLKAYSPASRGREPANEASVEYLQEVARIRLCLDRAADFLSEPEGGPEMAKEKQCYLQQVKQFCIRVENDWHRVYLVRKLSSQRGMEFVQGLSKPGRPHQWVFPKDVVKQQGLRQDHPGQMDRYLVYGDEYKALRDAVAKAVLECKPLGIKTALKACKTPQSQQSAYFLLTLFREVAILYRSHNASLHPTPEQCEAVSKFIGECKILSPPDISRFATSLVDNSVPLLRAGPSDSNLDGTVTEMAIHAAAVLLCGQNELLEPLKNLAFSPATMAHAFLPTMPEDLLAQARRWKGLERVHWYTCPNGHPCSVGECGRPMEQSICIDCHAPIGGIDHKPRDGFHLVKDKADRTQTGHVLGNPQRRDVVTCDRGLPPVVFLLIRLLTHLALLLGASQSSQALINIIKPPVRDPKGFLQQHILKDLEQLAKMLGHSADETIGVVHLVLRRLLQEQHQLSSRRLLNFDTELSTKEMRNNWEKEIAAVISPELEHLDKTLPTMNNLISQDKRISSNPVAKIIYGDPVTFLPHLPRKSVVHCSKIWSCRKRITVEYLQHIVEQKNGKERVPILWHFLQKEAELRLVKFLPEILALQRDLVKQFQNVQQVEYSSIRGFLSKHSSDGLRQLLHNRITVFLSTWNKLRRSLETNGEINLPKDYCSTDLDLDTEFEILLPRRRGLGLCATALVSYLIRLHNEIVYAVEKLSKENNSYSVDAAEVTELHVISYEVERDLTPLILSNCQYQVEEGRETVQEFDLEKIQRQIVSRFLQGKPRLSLKGIPTLVYRHDWNYEHLFMDIKNKMAQDSLPSSVISAISGQLQSYSDACEVLSVVEVTLGFLSTAGGDPNMQLNVYTQDILQMGDQTIHVLKALNRCQLKHTIALWQFLSAHKSEQLLRLHKEPFGEISSRYKADLSPENAKLLSTFLNQTGLDAFLLELHEMIILKLKNPQTQTEERFRPQWSLRDTLVSYMQTKESEILPEMASQFPEEILLASCVSVWKTAAVLKWNREMR

SEQ ID NO: 44 - protein, 5256 aa, homo sapien
MECPSCQHVSKEETPKFCSQCGERLPPAAPIADSENNNSTMASASEGEMECGQELKEEGGPCLFPGSDSWQENPEEPCSKASWTVQEGATSEVLVDAAVDLISDEWEAANAIPSKRRKQDAAPLEAASVPSADCEQSKKKKRKKKKKGNKSASSELASLPLSPASPCHLTLLSNPWPQDTALPHSQAQQSGPTGQPSQPPGTATTPLEGDGLSAPTEVGDSPLQAQALGEAGVATGSEAQSSPQFQDHTEGEDQDASIPSGGRGLSQEGTGPPTSAGEGHSRTEDAAQELLLPESKGGSSEPGTELQTTEQQAGASASMAVDAVAEPANAVKGAGKEMKEKTQRMKQPPATTPPFKTHCQEAETKTKDEMAAAEEKVGKNEQGEPEDLKKPEGKNRSAAAVKNEKEQKNQEADVQEVKASTLSPGGGVTVFFHAIISLHFPFNPDLHKVFIRGGEEFGESKWDSNICELHYTRDLGHDRVLVEGIVCISKKHLDKYIPYKYVIYNGESFEYEFIYKHQQKKGEYVNRCLFIKSSLLGSGDWHQYYDIVYMKPHGRLQKVMNHITDGPRKDLVKGKQIAAALMLDSTFSILQTWDTINLNSFFTQFEQFCFVLQQPMIYEGQAQLWTDLQYREKEVKRYLWQHLKKHVVPLPDGKSTDFLPVDCPVRSKLKTGLIVLFVVEKIELLLEGSLDWLCHLLTSDASSPDEFHRDLSHILGIPQSWRLYLVNLCQRCMDTRTYTWLGALPVLHCCMELAPRHKDAWRQPEDTWAALEGLSFSPFREQMLDTSSLLQFMREKQHLLSIDEPLFRSWFSLLPLSHLVMYMENFIEHLGRFPAHILDCLSGIYYRLPGLEQVLNTQDVQDVQNVQNILEMLLRLLDTYRDKIPEEALSPSYLTVCLKLHEAICSSTKLLKFYELPALSAEIVCRMIRLLSLVDSAGQRDETGNNSVQTVFQGTLAATKRWLREVFTKNMLTSSGASFTYVKEIEVWRRLVEIQFPAEHGWKESLLGDMEWRLTKEEPLSQITAYCNSCWDTKGLEDSVAKTFEKCIIEAVSSACQSQTSILQGFSYSDLRKFGIVLSAVITKSWPRTADNFDDILKHLLTLADVKHVFRLCGTDEKILANVTEDAKRLIAVADSVLTKVVGDLLSGTILVGQLELIIKHKNQFLDIWQLREKSLSPQDEQCAVEEALDWRREELLLLKKEKRCVDSLLKMCGNVKHLIQVDFGVLAVRHSQDLSSKRLNDTVTVRLSTSSNSQRATHYHLSSQVQEMAGKIDLLRDSHIFQLFWREAAEPLSEPKEDQEAAELLSEPEEESERHILELEEVYDYLYQPSYRKFIKLHQDLKSGEVTLAEIDVIFKDFVNKYTDLDSELKIMCTVDHQDQRDWIKDRVEQIKEYHHLHQAVHAAKVILQVKESLGLNGDFSVLNTLLNFTDNFDDFRRETLDQINQELIQAKKLLQDISEARCKGLQALSLRKEFICWVREALGGINELKVFVDLASISAGENDIDVDRVACFHDAVQGYASLLFKLDPSVDFSAFMKHLKKLWKALDKDQYLPRKLCDSARNLEWLKTVNESHGSVERSSLTLATAINQRGIYVIQAPKGGQKISPDTVLHLILPESPGSHEESREYSLEEVKELLNKLMLMSGKKDRNNTEVERFSEVFCSVQRLSQAFIDLHSAGNMLFRTWIAMAYCSPKQGVSLQMDFGLDLVTELKEGGDVTELLAALCRQMEHFLDSWKRFVTQKRMEHFYLNFYTAEQLVYLSTELRKQPPSDAALTMLSFIKSNCTLRDVLRASVGCGSEAARYRMRRVMEELPLMLLSEFSLVDKLRIIMEQSMRCLPAFLPDCLDLETLGHCLAHLAGMGGSPVERCLPRGLQVGQPNLVVCGHSEVLPAALAVYMQTPSQPLPTYDEVLLCTPATTFEEVALLLRRCLTLGSLGHKVYSLLFADQLSYEVARQAEELFHNLCTQQHREDYQLVMVCDGDWEHCYLPSAFSQHKVFVTPQAPLEAIQAYLAGHYRVPKQTLSAAAVFNDRLCVGIVASERAGVGKSLYVKRLHDKMKMQLNVKNVPLKTIRLIDPQVDESRVLGALLPFLDAQYQKVPVLFHLDVTSSVQTGIWVFLFKLLILQYLMDINGKMWLRNPCHLYIVEILERRTSVPSRSSSALRTRVPQFSFLDIFPKVTCRPPKEVIDMELSALRSDTEPGMDLWEFCSETFQRPYQYLRRFNQNQDLDTFQYQEGSVEGTPEECLQHFLFHCGVINPSWSELRNFARFLNYQLRDCEASLFCNPSFIGDTLRGFKKFVVTFMIFMARDFATPSLHTSDQSPGKHMVTMDGVREEDLAPFSLRKRWESEPHPYVFFNDDHTTMTFIGFHLQPNINGSVDAISHLTGKVIKRDVMTRDLYQGLLLQRVPFNVDFDKLPRHKKLERLCLTLGIPQATDPDKTYELTTDNMLKILAIEMRFRCGIPVIIMGETGCGKTRLIKFLSDLRRGGTNADTIKLVKVHGGTTADMIYSRVREAENVAFANKDQHQLDTILFFDEANTTEAISCIKEVLCDHMVDGQPLAEDSGLHIIAACNPYRKHSEEMICRLESAGLGYRVSMEETADRLGSIPLRQLVYRVHALPPSLIPLVWDFGQLSDVAEKLYIQQIVQRLVESISLDENGTRVITEVLCASQGFMRKTEDECSFVSLRDVERCVKVFRWFHEHSAMLLAQLNAFLSKSSVSKNHTERDPVLWSLMLAIGVCYHASLEKKDSYRKAIARFFPKPYDDSRLLLDEITRAQDLFLDGVPLRKTIAKNLALKENVFMMVVCIELKIPLFLVGKPGSSKSLAKTIVADAMQGPAAYSDLFRSLKQVHLVSFQCSPHSTPQGIISTFRQCARFQQGKDLQQYVSVVVLDEVGLAEDSPKMPLKTLHPLLEDGCIEDDPAPHKKVGFVGISNWALDPAKMNRGIFVSRGSPNETELIESAKGICSSDILVQDRVQGYFASFAKAYETVCKRQDKEFFGLRDYYSLIKMVFAAAKASNRKPSPQDIAQAVLRNFSGKDDIQALDIFLANLPEAKCSEEVSPMQLIKQNIFGPSQKVPGGEQEDAESRYLLVLTKNYVALQILQQTFFEGDQQPEIIFGSGFPKDQEYTQLCRNINRVKICMETGKMVLLLNLQNLYESLYDALNQYYVHLGGQKYVDLGLGTHRVKCRVHPNFRLIVIEEKDVVYKHFPIPLINRLEKHYLDINTVLEKWQKSIVEELCAWVEKFINVKAHHFQKRHKYSPSDVFIGYHSDACASVVLQVIERQGPRALTEELHQKVSEEAKSILLNCATPDAVVRLSAYSLGGFAAEWLSQEYFHRQRHNSFADFLQAHLHTADLERHAIFTEITTFSRLLTSHDCEILESEVTGRAPKPTLLWLQQFDTEYSFLKEVRNCLTNTAKCKILIFQTDFEDGIRSAQLIASAKYSVINEINKIRENEDRIFVYFITKLSRVGRGTAYVGFHGGLWQSVHIDDLRRSTLMVSDVTRLQHVTISQLFAPGDLPELGLEHRAEDGHEEAMETEASTSGEVAEVAEEAMETESSEKVGKETSELGGSDVSILDTTRLLRSCVQSAVGMLRDQNESCTRNMRRVVLLLGLLNEDDACHASFLRVSKMRLSVFLKKQEESQFHPLEWLAREACNQDALQEAGTFRHTLWKRVQGAVTPLLASMISFIDRDGNLELLTRPDTPPWARDLWMFIFSDTMLLNIPLVMNNERHKGEMAYIVVQNHMNLSENASNNVPFSWKIKDYLEELWVQAQYITDAEGLPKKFVDIFQQTPLGRFLAQLHGEPQQELLQCYLKDFILLTMRVSTEEELKFLQMALWSCTRKLKAASEAPEEEVSLPWVHLAYQRFRSRLQNFSRILTIYPQVLHSLMEARWNHELAGCEMTLDAFAAMACTEMLTRNTLKPSPQAWLQLVKNLSMPLELICSDEHMQGSGSLAQAVIREVRAQWSRIFSTALFVEHVLLGTESRVPELQGLVTEHVFLLDKCLRENSDVKTHGPFEAVMRTLCECKETASKTLSRFGIQPCSICLGDAKDPVCLPCDHVHCLRCLRAWFASEQMICPYCLTALPDEFSPAVSQAHREAIEKHARFRQMCNSFFVDLVSTICFKDNAPPEKEVIESLLSLLFVQKGRLRDAAQRHCEHTKSLSPFNDVVDKTPVIRSVILKLLLKYSFHDVKDYIQEYLTLLKKKAFITEDKTELYMLFINCLEDSILEKTSAYSRNDELNHLEEEGRFLKAYSPASRGREPANEASVEYLQEVARIRLCLDRAADFLSEPEGGPEMAKEKQCYLQQVKQFCIRVENDWHRVYLVRKLSSQRGMEFVQGLSKPGRPHQWVFPKDVVKQQGLRQDHPGQMDRYLVYGDEYKALRDAVAKAVLECKPLGIKTALKACKTPQSQQSAYFLLTLFREVAILYRSHNASLHPTPEQCEAVSKFIGECKILSPPDISRFATSLVDNSVPLLRAGPSDSNLDGTVTEMAIHAAAVLLCGQNELLEPLKNLAFSPATMAHAFLPTMPEDLLAQARRWKGLERVHWYTCPNGHPCSVGECGRPMEQSICIDCHAPIGGIDHKPRDGFHLVKDKADRTQTGHVLGNPQRRDVVTCDRGLPPVVFLLIRLLTHLALLLGASQSSQALINIIKPPVRDPKGFLQQHILKDLEQLAKMLGHSADETIGVVHLVLRRLLQEQHQLSSRRLLNFDTELSTKEMRNNWEKEIAAVISPELEHLDKTLPTMNNLISQDKRISSNPVAKIIYGDPVTFLPHLPRKSVVHCSKIWSCRKRITVEYLQHIVEQKNGKERVPILWHFLQKEAELRLVKFLPEILALQRDLVKQFQNVQQVEYSSIRGFLSKHSSDGLRQLLHNRITVFLSTWNKLRRSLETNGEINLPKDYCSTDLDLDTEFEILLPRRRGLGLCATALVSYLIRLHNEIVYAVEKLSKENNSYSVDAAEVTELHVISYEVERDLTPLILSNCQYQVEEGRETVQEFDLEKIQRQIVSRFLQGKPRLSLKGIPTLVYRHDWNYEHLFMDIKNKMAQDSLPSSVISAISGQLQSYSDACEVLSVVEVTLGFLSTAGGDPNMQLNVYTQDILQMGDQTIHVLKALNRCQLKHTIALWQFLSAHKSEQLLRLHKEPFGEISSRYKADLSPENAKLLSTFLNQTGLDAFLLELHEMIILKLKNPQTQTEERFRPQWSLRDTLVSYMQTKESEILPEMASQFPEEILLASCVSVWKTAAVLKWNREMR

SEQ ID NO: 45 - protein, 2114 aa, homo sapien [sequence omitted]

SEQ ID NO: 46 - protein, 1642 aa, homo sapien
GLLNEDDACHASFLRVSKMRLSVFLKKQEESQFHPLEWLAREACNQDALQEAGTFRHTLWKRVQGAVTPLLASMISFIDRDGNLELLTRPDTPPWARDLWMFIFSDTMLLNIPLVMNNERHKGEMAYIVVQNHMNLSENASNNVPFSWKIKDYLEELWVQAQYITDAEGLPKKFVDIFQQTPLGRFLAQLHGEPQQELLQCYLKDFILLTMRVSTEEELKFLQMALWSCTRKLKAASEAPEEEVSLPWVHLAYQRFRSRLQNFSRILTIYPQVLHSLMEARWNHELAGCEMTLDAFAAMACTEMLTRNTLKPSPQAWLQLVKNLSMPLELICSDEHMQGSGSLAQAVIREVRAQWSRIFSTALFVEHVLLGTESRVPELQGLVTEHVFLLDKCLRENSDVKTHGPFEAVMRTLCECKETASKTLSRFGIQPCSICLGDAKDPVCLPCDHVHCLRCLRAWFASEQMICPYCLTALPDEFSPAVSQAHREAIEKHARFRQMCNSFFVDLVSTICFKDNAPPEKEVIESLLSLLFVQKGRLRDAAQRHCEHTKSLSPFNDVVDKTPVIRSVILKLLLKYSFHDVKDYIQEYLTLLKKKAFITEDKTELYMLFINCLEDSILEKTSAYSRNDELNHLEEEGRFLKAYSPASRGREPANEASVEYLQEVARIRLCLDRAADFLSEPEGGPEMAKEKQCYLQQVKQFCIRVENDWHRVYLVRKLSSQRGMEFVQGLSKPGRPHQWVFPKDVVKQQGLRQDHPGQMDRYLVYGDEYKALRDAVAKAVLECKPLGIKTALKACKTPQSQQSAYFLLTLFREVAILYRSHNASLHPTPEQCEAVSKFIGECKILSPPDISRFATSLVDNSVPLLRAGPSDSNLDGTVTEMAIHAAAVLLCGQNELLEPLKNLAFSPATMAHAFLPTMPEDLLAQARRWKGLERVHWYTCPNGHPCSVGECGRPMEQSICIDCHAPIGGIDHKPRDGFHLVKDKADRTQTGHVLGNPQRRDVVTCDRGLPPVVFLLIRLLTHLALLLGASQSSQALINIIKPPVRDPKGFLQQHILKDLEQLAKMLGHSADETIGVVHLVLRRLLQEQHQLSSRRLLNFDTELSTKEMRNNWEKEIAAVISPELEHLDKTLPTMNNLISQDKRISSNPVAKIIYGDPVTFLPHLPRKSVVHCSKIWSCRKRITVEYLQHIVEQKNGKERVPILWHFLQKEAELRLVKFLPEILALQRDLVKQFQNVQQVEYSSIRGFLSKHSSDGLRQLLHNRITVFLSTWNKLRRSLETNGEINLPKDYCSTDLDLDTEFEILLPRRRGLGLCATALVSYLIRLHNEIVYAVEKLSKENNSYSVDAAEVTELHVISYEVERDLTPLILSNCQYQVEEGRETVQEFDLEKIQRQIVSRFLQGKPRLSLKGIPTLVYRHDWNYEHLFMDIKNKMAQDSLPSSVISAISGQLQSYSDACEVLSVVEVTLGFLSTAGGDPNMQLNVYTQDILQMGDQTIHVLKALNRCQLKHTIALWQFLSAHKSEQLLRLHKEPFGEISSRYKADLSPENAKLLSTFLNQTGLDAFLLELHEMIILKLKNPQTQTEERFRPQWSLRDTLVSYMQTKESEILPEMASQFPEEILLASCVSVWKTAAVLKWNREMR

SEQ ID NO: 47 - protein, 1438 aa, homo sapien
DFILLTMRVSTEEELKFLQMALWSCTRKLKAASEAPEEEVSLPWVHLAYQRFRSRLQNFSRILTIYPQVLHSLMEARWNHELAGCEMTLDAFAAMACTEMLTRNTLKPSPQAWLQLVKNLSMPLELICSDEHMQGSGSLAQAVIREVRAQWSRIFSTALFVEHVLLGTESRVPELQGLVTEHVFLLDKCLRENSDVKTHGPFEAVMRTLCECKETASKTLSRFGIQPCSICLGDAKDPVCLPCDHVHCLRCLRAWFASEQMICPYCLTALPDEFSPAVSQAHREAIEKHARFRQMCNSFFVDLVSTICFKDNAPPEKEVIESLLSLLFVQKGRLRDAAQRHCEHTKSLSPFNDVVDKTPVIRSVILKLLLKYSFHDVKDYIQEYLTLLKKKAFITEDKTELYMLFINCLEDSILEKTSAYSRNDELNHLEEEGRFLKAYSPASRGREPANEASVEYLQEVARIRLCLDRAADFLSEPEGGPEMAKEKQCYLQQVKQFCIRVENDWHRVYLVRKLSSQRGMEFVQGLSKPGRPHQWVFPKDVVKQQGLRQDHPGQMDRYLVYGDEYKALRDAVAKAVLECKPLGIKTALKACKTPQSQQSAYFLLTLFREVAILYRSHNASLHPTPEQCEAVSKFIGECKILSPPDISRFATSLVDNSVPLLRAGPSDSNLDGTVTEMAIHAAAVLLCGQNELLEPLKNLAFSPATMAHAFLPTMPEDLLAQARRWKGLERVHWYTCPNGHPCSVGECGRPMEQSICIDCHAPIGGIDHKPRDGFHLVKDKADRTQTGHVLGNPQRRDVVTCDRGLPPVVFLLIRLLTHLALLLGASQSSQALINIIKPPVRDPKGFLQQHILKDLEQLAKMLGHSADETIGVVHLVLRRLLQEQHQLSSRRLLNFDTELSTKEMRNNWEKEIAAVISPELEHLDKTLPTMNNLISQDKRISSNPVAKIIYGDPVTFLPHLPRKSVVHCSKIWSCRKRITVEYLQHIVEQKNGKERVPILWHFLQKEAELRLVKFLPEILALQRDLVKQFQNVQQVEYSSIRGFLSKHSSDGLRQLLHNRITVFLSTWNKLRRSLETNGEINLPKDYCSTDLDLDTEFEILLPRRRGLGLCATALVSYLIRLHNEIVYAVEKLSKENNSYSVDAAEVTELHVISYEVERDLTPLILSNCQYQVEEGRETVQEFDLEKIQRQIVSRFLQGKPRLSLKGIPTLVYRHDWNYEHLFMDIKNKMAQDSLPSSVISAISGQLQSYSDACEVLSVVEVTLGFLSTAGGDPNMQLNVYTQDILQMGDQTIHVLKALNRCQLKHTIALWQFLSAHKSEQLLRLHKEPFGEISSRYKADLSPENAKLLSTFLNQTGLDAFLLELHEMIILKLKNPQTQTEERFRPQWSLRDTLVSYMQTKESEILPEMASQFPEEILLASCVSVWKTAAVLKWNREMR

SEQ ID NO: 48 - protein, 1329 aa, homo sapien
PQAWLQLVKNLSMPLELICSDEHMQGSGSLAQAVIREVRAQWSRIFSTALFVEHVLLGTESRVPELQGLVTEHVFLLDKCLRENSDVKTHGPFEAVMRTLCECKETASKTLSRFGIQPCSICLGDAKDPVCLPCDHVHCLRCLRAWFASEQMICPYCLTALPDEFSPAVSQAHREAIEKHARFRQMCNSFFVDLVSTICFKDNAPPEKEVIESLLSLLFVQKGRLRDAAQRHCEHTKSLSPFNDVVDKTPVIRSVILKLLLKYSFHDVKDYIQEYLTLLKKKAFITEDKTELYMLFINCLEDSILEKTSAYSRNDELNHLEEEGRFLKAYSPASRGREPANEASVEYLQEVARIRLCLDRAADFLSEPEGGPEMAKEKQCYLQQVKQFCIRVENDWHRVYLVRKLSSQRGMEFVQGLSKPGRPHQWVFPKDVVKQQGLRQDHPGQMDRYLVYGDEYKALRDAVAKAVLECKPLGIKTALKACKTPQSQQSAYFLLTLFREVAILYRSHNASLHPTPEQCEAVSKFIGECKILSPPDISRFATSLVDNSVPLLRAGPSDSNLDGTVTEMAIHAAAVLLCGQNELLEPLKNLAFSPATMAHAFLPTMPEDLLAQARRWKGLERVHWYTCPNGHPCSVGECGRPMEQSICIDCHAPIGGIDHKPRDGFHLVKDKADRTQTGHVLGNPQRRDVVTCDRGLPPVVFLLIRLLTHLALLLGASQSSQALINIIKPPVRDPKGFLQQHILKDLEQLAKMLGHSADETIGVVHLVLRRLLQEQHQLSSRRLLNFDTELSTKEMRNNWEKEIAAVISPELEHLDKTLPTMNNLISQDKRISSNPVAKIIYGDPVTFLPHLPRKSVVHCSKIWSCRKRITVEYLQHIVEQKNGKERVPILWHFLQKEAELRLVKFLPEILALQRDLVKQFQNVQQVEYSSIRGFLSKHSSDGLRQLLHNRITVFLSTWNKLRRSLETNGEINLPKDYCSTDLDLDTEFEILLPRRRGLGLCATALVSYLIRLHNEIVYAVEKLSKENNSYSVDAAEVTELHVISYEVERDLTPLILSNCQYQVEEGRETVQEFDLEKIQRQIVSRFLQGKPRLSLKGIPTLVYRHDWNYEHLFMDIKNKMAQDSLPSSVISAISGQLQSYSDACEVLSVVEVTLGFLSTAGGDPNMQLNVYTQDILQMGDQTIHVLKALNRCQLKHTIALWQFLSAHKSEQLLRLHKEPFGEISSRYKADLSPENAKLLSTFLNQTGLDAFLLELHEMIILKLKNPQTQTEERFRPQWSLRDTLVSYMQTKESEILPEMASQFPEEILLASCVSVWKTAAVLKWNREMR

SEQ ID NO: 49 - protein, 1320 aa, homo sapien
NLSMPLELICSDEHMQGSGSLAQAVIREVRAQWSRIFSTALFVEHVLLGTESRVPELQGLVTEHVFLLDKCLRENSDVKTHGPFEAVMRTLCECKETASKTLSRFGIQPCSICLGDAKDPVCLPCDHVHCLRCLRAWFASEQMICPYCLTALPDEFSPAVSQAHREAIEKHARFRQMCNSFFVDLVSTICFKDNAPPEKEVIESLLSLLFVQKGRLRDAAQRHCEHTKSLSPFNDVVDKTPVIRSVILKLLLKYSFHDVKDYIQEYLTLLKKKAFITEDKTELYMLFINCLEDSILEKTSAYSRNDELNHLEEEGRFLKAYSPASRGREPANEASVEYLQEVARIRLCLDRAADFLSEPEGGPEMAKEKQCYLQQVKQFCIRVENDWHRVYLVRKLSSQRGMEFVQGLSKPGRPHQWVFPKDVVKQQGLRQDHPGQMDRYLVYGDEYKALRDAVAKAVLECKPLGIKTALKACKTPQSQQSAYFLLTLFREVAILYRSHNASLHPTPEQCEAVSKFIGECKILSPPDISRFATSLVDNSVPLLRAGPSDSNLDGTVTEMAIHAAAVLLCGQNELLEPLKNLAFSPATMAHAFLPTMPEDLLAQARRWKGLERVHWYTCPNGHPCSVGECGRPMEQSICIDCHAPIGGIDHKPRDGFHLVKDKADRTQTGHVLGNPQRRDVVTCDRGLPPVVFLLIRLLTHLALLLGASQSSQALINIIKPPVRDPKGFLQQHILKDLEQLAKMLGHSADETIGVVHLVLRRLLQEQHQLSSRRLLNFDTELSTKEMRNNWEKEIAAVISPELEHLDKTLPTMNNLISQDKRISSNPVAKIIYGDPVTFLPHLPRKSVVHCSKIWSCRKRITVEYLQHIVEQKNGKERVPILWHFLQKEAELRLVKFLPEILALQRDLVKQFQNVQQVEYSSIRGFLSKHSSDGLRQLLHNRITVFLSTWNKLRRSLETNGEINLPKDYCSTDLDLDTEFEILLPRRRGLGLCATALVSYLIRLHNEIVYAVEKLSKENNSYSVDAAEVTELHVISYEVERDLTPLILSNCQYQVEEGRETVQEFDLEKIQRQIVSRFLQGKPRLSLKGIPTLVYRHDWNYEHLFMDIKNKMAQDSLPSSVISAISGQLQSYSDACEVLSVVEVTLGFLSTAGGDPNMQLNVYTQDILQMGDQTIHVLKALNRCQLKHTIALWQFLSAHKSEQLLRLHKEPFGEISSRYKADLSPENAKLLSTFLNQTGLDAFLLELHEMIILKLKNPQTQTEERFRPQWSLRDTLVSYMQTKESEILPEMASQFPEEILLASCVSVWKTAAVLKWNREMR

SEQ ID NO: 50 - protein, 5207 aa, homo sapien
MECPSCQHVSKEETPKFCSQCGERLPPAAPIADSENNNSTMASASEGEMECGQELKEEGGPCLFPGSDSWQENPEEPCSKASWTVQESKKKKRKKKKKGNKSASSELASLPLSPASPCHLTLLSNPWPQDTALPHSQAQQSGPTGQPSQPPGTATTPLEGDGLSAPTEVGDSPLQAQALGEAGVATGSEAQSSPQFQDHTEGEDQDASIPSGGRGLSQEGTGPPTSAGEGHSRTEDAAQELLLPESKGGSSEPGTELQTTEQQAGASASMAVDAVAEPANAVKGAGKEMKEKTQRMKQPPATTPPFKTHCQEAETKTKDEMAAAEEKVGKNEQGEPEDLKKPEGKNRSAAAVKNEKEQKNQEADVQEVKASTLSPGGGVTVFFHAIISLHFPFNPDLHKVFIRGGEEFGESKWDSNICELHYTRDLGHDRVLVEGIVCISKKHLDKYIPYKYVIYNGESFEYEFIYKHQQKKGEYVNRCLFIKSSLLGSGDWHQYYDIVYMKPHGRLQKVMNHITDGPRKDLVKGKQIAAALMLDSTFSILQTWDTINLNSFFTQFEQFCFVLQQPMIYEGQAQLWTDLQYREKEVKRYLWQHLKKHVVPLPDGKSTDFLPVDCPVRSKLKTGLIVLFVVEKIELLLEGSLDWLCHLLTSDASSPDEFHRDLSHILGIPQSWRLYLVNLCQRCMDTRTYTWLGALPVLHCCMELAPRHKDAWRQPEDTWAALEGLSFSPFREQMLDTSSLLQFMREKQHLLSIDEPLFRSWFSLLPLSHLVMYMENFIEHLGRFPAHILDCLSGIYYRLPGLEQVLNTQDVQDVQNVQNILEMLLRLLDTYRDKIPEEALSPSYLTVCLKLHEAICSSTKLLKFYELPALSAEIVCRMIRLLSLVDSAGQRDETGNNSVQTVFQGTLAATKRWLREVFTKNMLTSSGASFTYVKEIEVWRRLVEIQFPAEHGWKESLLGDMEWRLTKEEPLSQITAYCNSCWDTKGLEDSVAKTFEKCIIEAVSSACQSQTSILQGFSYSDLRKFGIVLSAVITKSWPRTADNFDDILKHLLTLADVKHVFRLCGTDEKILANVTEDAKRLIAVADSVLTKVVGDLLSGTILVGQLELIIKHKNQFLDIWQLREKSLSPQDEQCAVEEALDWRREELLLLKKEKRCVDSLLKMCGNVKHLIQVDFGVLAVRHSQDLSSKRLNDTVTVRLSTSSNSQRATHYHLSSQVQEMAGKIDLLRDSHIFQLFWREAAEPLSEPKEDQEAAELLSEPEEESERHILELEEVYDYLYQPSYRKFIKLHQDLKSGEVTLAEIDVIFKDFVNKYTDLDSELKIMCTVDHQDQRDWIKDRVEQIKEYHHLHQAVHAAKVILQVKESLGLNGDFSVLNTLLNFTDNFDDFRRETLDQINQELIQAKKLLQDISEARCKGLQALSLRKEFICWVREALGGINELKVFVDLASISAGENDIDVDRVACFHDAVQGYASLLFKLDPSVDFSAFMKHLKKLWKALDKDQYLPRKLCDSARNLEWLKTVNESHGSVERSSLTLATAINQRGIYVIQAPKGGQKISPDTVLHLILPESPGSHEESREYSLEEVKELLNKLMLMSGKKDRNNTEVERFSEVFCSVQRLSQAFIDLHSAGNMLFRTWIAMAYCSPKQGVSLQMDFGLDLVTELKEGGDVTELLAALCRQMEHFLDSWKRFVTQKRMEHFYLNFYTAEQLVYLSTELRKQPPSDAALTMLSFIKSNCTLRDVLRASVGCGSEAARYRMRRVMEELPLMLLSEFSLVDKLRIIMEQSMRCLPAFLPDCLDLETLGHCLAHLAGMGGSPVERCLPRGLQVGQPNLVVCGHSEVLPAALAVYMQTPSQPLPTYDEVLLCTPATTFEEVALLLRRCLTLGSLGHKVYSLLFADQLSYEVARQAEELFHNLCTQQHREDYQLVMVCDGDWEHCYLPSAFSQHKVFVTPQAPLEAIQAYLAGHYRVPKQTLSAAAVFNDRLCVGIVASERAGVGKSLYVKRLHDKMKMQLNVKNVPLKTIRLIDPQVDESRVLGALLPFLDAQYQKVPVLFHLDVTSSVQTGIWVFLFKLLILQYLMDINGKMWLRNPCHLYIVEILERRTSVPSRSSSALRTRVPQFSFLDIFPKVTCRPPKEVIDMELSALRSDTEPGMDLWEFCSETFQRPYQYLRRFNQNQDLDTFQYQEGSVEGTPEECLQHFLFHCGVINPSWSELRNFARFLNYQLRDCEASLFCNPSFIGDTLRGFKKFVVTFMIFMARDFATPSLHTSDQSPGKHMVTMDGVREEDLAPFSLRKRWESEPHPYVFFNDDHTTMTFIGFHLQPNINGSVDAISHLTGKVIKRDVMTRDLYQGLLLQRVPFNVDFDKLPRHKKLERLCLTLGIPQATDPDKTYELTTDNMLKILAIEMRFRCGIPVIIMGETGCGKTRLIKFLSDLRRGGTNADTIKLVKVHGGTTADMIYSRVREAENVAFANKDQHQLDTILFFDEANTTEAISCIKEVLCDHMVDGQPLAEDSGLHIIAACNPYRKHSEEMICRLESAGLGYRVSMEETADRLGSIPLRQLVYRVHALPPSLIPLVWDFGQLSDVAEKLYIQQIVQRLVESISLDENGTRVITEVLCASQGFMRKTEDECSFVSLRDVERCVKVFRWFHEHSAMLLAQLNAFLSKSSVSKNHTERDPVLWSLMLAIGVCYHASLEKKDSYRKAIARFFPKPYDDSRLLLDEITRAQDLFLDGVPLRKTIAKNLALKENVFMMVVCIELKIPLFLVGKPGSSKSLAKTIVADAMQGPAAYSDLFRSLKQVHLVSFQCSPHSTPQGIISTFRQCARFQQGKDLQQYVSVVVLDEVGLAEDSPKMPLKTLHPLLEDGCIEDDPAPHKKVGFVGISNWALDPAKMNRGIFVSRGSPNETELIESAKGICSSDILVQDRVQGYFASFAKAYETVCKRQDKEFFGLRDYYSLIKMVFAAAKASNRKPSPQDIAQAVLRNFSGKDDIQALDIFLANLPEAKCSEEVSPMQLIKQNIFGPSQKVPGGEQEDAESRYLLVLTKNYVALQILQQTFFEGDQQPEIIFGSGFPKDQEYTQLCRNINRVKICMETGKMVLLLNLQNLYESLYDALNQYYVHLGGQKYVDLGLGTHRVKCRVHPNFRLIVIEEKDVVYKHFPIPLINRLEKHYLDINTVLEKWQKSIVEELCAWVEKFINVKAHHFQKRHKYSPSDVFIGYHSDACASVVLQVIERQGPRALTEELHQKVSEEAKSILLNCATPDAVVRLSAYSLGGFAAEWLSQEYFHRQRHNSFADFLQAHLHTADLERHAIFTEITTFSRLLTSHDCEILESEVTGRAPKPTLLWLQQFDTEYSFLKEVRNCLTNTAKCKILIFQTDFEDGIRSAQLIASAKYSVINEINKIRENEDRIFVYFITKLSRVGRGTAYVGFHGGLWQSVHIDDLRRSTLMVSDVTRLQHVTISQLFAPGDLPELGLEHRAEDGHEEAMETEASTSGEVAEVAEEAMETESSEKVGKETSELGGSDVSILDTTRLLRSCVQSAVGMLRDQNESCTRNMRRVVLLLGLLNEDDACHASFLRVSKMRLSVFLKKQEESQFHPLEWLAREACNQDALQEAGTFRHTLWKRVQGAVTPLLASMISFIDRDGNLELLTRPDTPPWARDLWMFIFSDTMLLNIPLVMNNERHKGEMAYIVVQNHMNLSENASNNVPFSWKIKDYLEELWVQAQYITDAEGLPKKFVDIFQQTPLGRFLAQLHGEPQQELLQCYLKDFILLTMRVSTEEELKFLQMALWSCTRKLKAASEAPEEEVSLPWVHLAYQRFRSRLQNFSRILTIYPQVLHSLMEARWNHELAGCEMTLDAFAAMACTEMLTRNTLKPSPQAWLQLVKNLSMPLELICSDEHMQGSGSLAQAVIRGVRAQWSRIFSTALFVEHVLLGTESRVPELQGLVTEHVFLLDKCLRENSDVKTHGPFEAVMRTLCECKETASKTLSRFGIQPCSICLGDAKDPVCLPCDHVHCLRCLRAWFASEQMICPYCLTALPDEFSPAVSQAHREAIEKHARFRQMCNSFFVDLVSTICFKDNAPPEKEVIESLLSLLFVQKGRLRDAAQRHCEHTKSLSPFNDVVDKTPVIRSVILKLLLKYSFHDVKDYIQEYLTLLKKKAFITEDKTELYMLFINCLEDSILEKTSAYSRNDELNHLEEEGRFLKAYSPASRGREPANEASVEYLQEVARIRLCLDRAADFLSEPEGGPEMAKEKQCYLQQVKQFCIRVENDWHRVYLVRKLSSQRGMEFVQGLSKPGRPHQWVFPKDVVKQQGLRQDHPGQMDRYLVYGDEYKALRDAVAKAVLECKPLGIKTALKACKTPQSQQSAYFLLTLFREVAILYRSHNASLHPTPEQCEAVSKFIGECKILSPPDISRFATSLVDNSVPLLRAGPSDSNLDGTVTEMAIHAAAVLLCGQNELLEPLKNLAFSPATMAHAFLPTMPEDLLAQARRWKGLERVHWYTCPNGHPCSVGECGRPMEQSICIDCHAPIGGIDHKPRDGFHLVKDKADRTQTGHVLGNPQRRDVVTCDRGLPPVVFLLIRLLTHLALLLGASQSSQALINIIKPPVRDPKGFLQQHILKDLEQLAKMLGHSADETIGVVHLVLRRLLQEQHQLSSRRLLNFDTELSTKEMRNNWEKEIAAVISPELEHLDKTLPTMNNLISQDKRISSNPVAKIIYGDPVTFLPHLPRKSVVHCSKIWSCRKRITVEYLQHIVEQKNGKERVPILWHFLQKEAELRLVKFLPEILALQRDLVKQFQNVQQVEYSSIRGFLSKHSSDGLRQLLHNRITVFLSTWNKLRRSLETNGEINLPKDYCSTDLDLDTEFEILLPRRRGLGLCATALVSYLIRLHNEIVYAVEKLSKENNSYSVDAAEVTELHVISYEVERDLTPLILSNCQYQVEEGRETVQEFDLEKIQRQIVSRFLQGKPRLSLKGIPTLVYRHDWNYEHLFMDIKNKMAQDSLPSSVISAISGQLQSYSDACEVLSVVEVTLGFLSTAGGDPNMQLNVYTQDILQMGDQTIHVLKALNRCQLKHTIALWQFLSAHKSEQLLRLHKEPFGEISSRYKADLSPENAKLLSTFLNQTGLDAFLLELHEMIILKLKNPQTQTEERFRPQWSLRDTLVSYMQTKESEILPEMASQFPEEILLASCVSVWKTAAVLKWNREMR

SEQ ID NO: 51 - protein, 5256 aa, homo sapien
MECPSCQHVSKEETPKFCSQCGERLPPAAPIADSENNNSTMASASEGEMECGQELKEEGGPCLFPGSDSWQENPEEPCSKASWTVQEGATSEVLVDAAVDLISDEWEAANAIPSKRRKQDAAPLEAASVPSADCEQSKKKKRKKKKKGNKSASSELASLPLSPASPCHLTLLSNPWPQDTALPHSQAQQSGPTGQPSQPPGTATTPLEGDGLSAPTEVGDSPLQAQALGEAGVATGSEAQSSPQFQDHTEGEDQDASIPSGGRGLSQEGTGPPTSAGEGHSRTEDAAQELLLPESKGGSSEPGTELQTTEQQAGASASMAVDAVAEPANAVKGAGKEMKEKTQRMKQPPATTPPFKTHCQEAETKTKDEMAAAEEKVGKNEQGEPEDLKKPEGKNRSAAAVKNEKEQKNQEADVQEVKASTLSPGGGVTVFFHAIISLHFPFNPDLHKVFIRGGEEFGESKWDSNICELHYTRDLGHDRVLVEGIVCISKKHLDKYIPYKYVIYNGESFEYEFIYKHQQKKGEYVNRCLFIKSSLLGSGDWHQYYDIVYMKPHGRLQKVMNHITDGPRKDLVKGKQIAAALMLDSTFSILQTWDTINLNSFFTQFEQFCFVLQQPMIYEGQAQLWTDLQYREKEVKRYLWQHLKKHVVPLPDGKSTDFLPVDCPVRSKLKTGLIVLFVVEKIELLLEGSLDWLCHLLTSDASSPDEFHRDLSHILGIPQSWRLYLVNLCQRCMDTRTYTWLGALPVLHCCMELAPRHKDAWRQPEDTWAALEGLSFSPFREQMLDTSSLLQFMREKQHLLSIDEPLFRSWFSLLPLSHLVMYMENFIEHLGRFPAHILDCLSGIYYRLPGLEQVLNTQDVQDVQNVQNILEMLLRLLDTYRDKIPEEALSPSYLTVCLKLHEAICSSTKLLKFYELPALSAEIVCRMIRLLSLVDSAGQRDETGNNSVQTVFQGTLAATKRWLREVFTKNMLTSSGASFTYVKEIEVWRRLVEIQFPAEHGWKESLLGDMEWRLTKEEPLSQITAYCNSCWDTKGLEDSVAKTFEKCIIEAVSSACQSQTSILQGFSYSDLRKFGIVLSAVITKSWPRTADNFDDILKHLLTLADVKHVFRLCGTDEKILANVTEDAKRLIAVADSVLTKVVGDLLSGTILVGQLELIIKHKNQFLDIWQLREKSLSPQDEQCAVEEALDWRREELLLLKKEKRCVDSLLKMCGNVKHLIQVDFGVLAVRHSQDLSSKRLNDTVTVRLSTSSNSQRATHYHLSSQVQEMAGKIDLLRDSHIFQLFWREAAEPLSEPKEDQEAAELLSEPEEESERHILELEEVYDYLYQPSYRKFIKLHQDLKSGEVTLAEIDVIFKDFVNKYTDLDSELKIMCTVDHQDQRDWIKDRVEQIKEYHHLHQAVHAAKVILQVKESLGLNGDFSVLNTLLNFTDNFDDFRRETLDQINQELIQAKKLLQDISEARCKGLQALSLRKEFICWVREALGGINELKVFVDLASISAGENDIDVDRVACFHDAVQGYASLLFKLDPSVDFSAFMKHLKKLWKALDKDQYLPRKLCDSARNLEWLKTVNESHGSVERSSLTLATAINQRGIYVIQAPKGGQKISPDTVLHLILPESPGSHEESREYSLEEVKELLNKLMLMSGKKDRNNTEVERFSEVFCSVQRLSQAFIDLHSAGNMLFRTWIAMAYCSPKQGVSLQMDFGLDLVTELKEGGDVTELLAALCRQMEHFLDSWKRFVTQKRMEHFYLNFYTAEQLVYLSTELRKQPPSDAALTMLSFIKSNCTLRDVLRASVGCGSEAARYRMRRVMEELPLMLLSEFSLVDKLRIIMEQSMRCLPAFLPDCLDLETLGHCLAHLAGMGGSPVERCLPRGLQVGQPNLVVCGHSEVLPAALAVYMQTPSQPLPTYDEVLLCTPATTFEEVALLLRRCLTLGSLGHKVYSLLFADQLSYEVARQAEELFHNLCTQQHREDYQLVMVCDGDWEHCYLPSAFSQHKVFVTPQAPLEAIQAYLAGHYRVPKQTLSAAAVFNDRLCVGIVASERAGVGKSLYVKRLHDKMKMQLNVKNVPLKTIRLIDPQVDESRVLGALLPFLDAQYQKVPVLFHLDVTSSVQTGIWVFLFKLLILQYLMDINGKMWLRNPCHLYIVEILERRTSVPSRSSSALRTRVPQFSFLDIFPKVTCRPPKEVIDMELSALRSDTEPGMDLWEFCSETFQRPYQYLRRFNQNQDLDTFQYQEGSVEGTPEECLQHFLFHCGVINPSWSELRNFARFLNYQLRDCEASLFCNPSFIGDTLRGFKKFVVTFMIFMARDFATPSLHTSDQSPGKHMVTMDGVREEDLAPFSLRKRWESEPHPYVFFNDDHTTMTFIGFHLQPNINGSVDAISHLTGKVIKRDVMTRDLYQGLLLQRVPFNVDFDKLPRHKKLERLCLTLGIPQATDPDKTYELTTDNMLKILAIEMRFRCGIPVIIMGETGCGKTRLIKFLSDLRRGGTNADTIKLVKVHGGTTADMIYSRVREAENVAFANKDQHQLDTILFFDEANTTEAISCIKEVLCDHMVDGQPLAEDSGLHIIAACNPYRKHSEEMICRLESAGLGYRVSMEETADRLGSIPLRQLVYRVHALPPSLIPLVWDFGQLSDVAEKLYIQQIVQRLVESISLDENGTRVITEVLCASQGFMRKTEDECSFVSLRDVERCVKVFRWFHEHSAMLLAQLNAFLSKSSVSKNHTERDPVLWSLMLAIGVCYHASLEKKDSYRKAIARFFPKPYDDSRLLLDEITRAQDLFLDGVPLRKTIAKNLALKENVFMMVVCIELKIPLFLVGKPGSSKSLAKTIVADAMQGPAAYSDLFRSLKQVHLVSFQCSPHSTPQGIISTFRQCARFQQGKDLQQYVSVVVLDEVGLAEDSPKMPLKTLHPLLEDGCIEDDPAPHKKVGFVGISNWALDPAKMNRGIFVSRGSPNETELIESAKGICSSDILVQDRVQGYFASFAKAYETVCKRQDKEFFGLRDYYSLIKMVFAAAKASNRKPSPQDIAQAVLRNFSGKDDIQALDIFLANLPEAKCSEEVSPMQLIKQNIFGPSQKVPGGEQEDAESRYLLVLTKNYVALQILQQTFFEGDQQPEIIFGSGFPKDQEYTQLCRNINRVKICMETGKMVLLLNLQNLYESLYDALNQYYVHLGGQKYVDLGLGTHRVKCRVHPNFRLIVIEEKDVVYKHFPIPLINRLEKHYLDINTVLEKWQKSIVEELCAWVEKFINVKAHHFQKRHKYSPSDVFIGYHSDACASVVLQVIERQGPRALTEELHQKVSEEAKSILLNCATPDAVVRLSAYSLGGFAAEWLSQEYFHRQRHNSFADFLQAHLHTADLERHAIFTEITTFSRLLTSHDCEILESEVTGRAPKPTLLWLQQFDTEYSFLKEVRNCLTNTAKCKILIFQTDFEDGIRSAQLIASAKYSVINEINKIRENEDRIFVYFITKLSRVGRGTAYVGFHGGLWQSVHIDDLRRSTLMVSDVTRLQHVTISQLFAPGDLPELGLEHRAEDGHEEAMETEASTSGEVAEVAEEAMETESSEKVGKETSELGGSDVSILDTTRLLRSCVQSAVGMLRDQNESCTRNMRRVVLLLGLLNEDDACHASFLRVSKMRLSVFLKKQEESQFHPLEWLAREACNQDALQEAGTFRHTLWKRVQGAVTPLLASMISFIDRDGNLELLTRPDTPPWARDLWMFIFSDTMLLNIPLVMNNERHKGEMAYIVVQNHMNLSENASNNVPFSWKIKDYLEELWVQAQYITDAEGLPKKFVDIFQQTPLGRFLAQLHGEPQQELLQCYLKDFILLTMRVSTEEELKFLQMALWSCTRKLKAASEAPEEEVSLPWVHLAYQRFRSRLQNFSRILTIYPQVLHSLMEARWNHELAGCEMTLDAFAAMACTEMLTRNTLKPSPQAWLQLVKNLSMPLELICSDEHMQGSGSLAQAVIRGVRAQWSRIFSTALFVEHVLLGTESRVPELQGLVTEHVFLLDKCLRENSDVKTHGPFEAVMRTLCECKETASKTLSRFGIQPCSICLGDAKDPVCLPCDHVHCLRCLRAWFASEQMICPYCLTALPDEFSPAVSQAHREAIEKHARFRQMCNSFFVDLVSTICFKDNAPPEKEVIESLLSLLFVQKGRLRDAAQRHCEHTKSLSPFNDVVDKTPVIRSVILKLLLKYSFHDVKDYIQEYLTLLKKKAFITEDKTELYMLFINCLEDSILEKTSAYSRNDELNHLEEEGRFLKAYSPASRGREPANEASVEYLQEVARIRLCLDRAADFLSEPEGGPEMAKEKQCYLQQVKQFCIRVENDWHRVYLVRKLSSQRGMEFVQGLSKPGRPHQWVFPKDVVKQQGLRQDHPGQMDRYLVYGDEYKALRDAVAKAVLECKPLGIKTALKACKTPQSQQSAYFLLTLFREVAILYRSHNASLHPTPEQCEAVSKFIGECKILSPPDISRFATSLVDNSVPLLRAGPSDSNLDGTVTEMAIHAAAVLLCGQNELLEPLKNLAFSPATMAHAFLPTMPEDLLAQARRWKGLERVHWYTCPNGHPCSVGECGRPMEQSICIDCHAPIGGIDHKPRDGFHLVKDKADRTQTGHVLGNPQRRDVVTCDRGLPPVVFLLIRLLTHLALLLGASQSSQALINIIKPPVRDPKGFLQQHILKDLEQLAKMLGHSADETIGVVHLVLRRLLQEQHQLSSRRLLNFDTELSTKEMRNNWEKEIAAVISPELEHLDKTLPTMNNLISQDKRISSNPVAKIIYGDPVTFLPHLPRKSVVHCSKIWSCRKRITVEYLQHIVEQKNGKERVPILWHFLQKEAELRLVKFLPEILALQRDLVKQFQNVQQVEYSSIRGFLSKHSSDGLRQLLHNRITVFLSTWNKLRRSLETNGEINLPKDYCSTDLDLDTEFEILLPRRRGLGLCATALVSYLIRLHNEIVYAVEKLSKENNSYSVDAAEVTELHVISYEVERDLTPLILSNCQYQVEEGRETVQEFDLEKIQRQIVSRFLQGKPRLSLKGIPTLVYRHDWNYEHLFMDIKNKMAQDSLPSSVISAISGQLQSYSDACEVLSVVEVTLGFLSTAGGDPNMQLNVYTQDILQMGDQTIHVLKALNRCQLKHTIALWQFLSAHKSEQLLRLHKEPFGEISSRYKADLSPENAKLLSTFLNQTGLDAFLLELHEMIILKLKNPQTQTEERFRPQWSLRDTLVSYMQTKESEILPEMASQFPEEILLASCVSVWKTAAVLKWNREMR

SEQ ID NO: 52 - protein, 2114 aa, homo sapien
METGKMVLLLNLQNLYESLYDALNQYYVHLGGQKYVDLGLGTHRVKCRVHPNFRLIVIEEKDVVYKHFPIPLINRLEKHYLDINTVLEKWQKSIVEELCAWVEKFINVKAHHFQKRHKYSPSDVFIGYHSDACASVVLQVIERQGPRALTEELHQKVSEEAKSILLNCATPDAVVRLSAYSLGGFAAEWLSQEYFHRQRHNSFADFLQAHLHTADLERHAIFTEITTFSGLLTSHDCEILESEVTGRAPKPTLLWLQQFDTEYSFLKEVRNCLTNTAKCKILIFQTDFEDGIRSAQLIASAKYSVINEINKIRENEDRIFVYFITKLSRVGRGTAYVGFHGGLWQSVHIDDLRRSTLMVSDVTRLQHVTISQLFAPGDLPELGLEHRAEDGHEEAMETEASTSGEVAEVAEEAMETESSEKVGKETSELGGSDVSILDTTRLLRSCVQSAVGMLRDQNESCTRNMRRVVLLLGLLNEDDACHASFLRVSKMRLSVFLKKQEESQFHPLEWLAREACNQDALQEAGTFRHTLWKRVQGAVTPLLASMISFIDRDGNLELLTRPDTPPWARDLWMFIFSDTMLLNIPLVMNNERHKGEMAYIVVQNHMNLSENASNNVPFSWKIKDYLEELWVQAQYITDAEGLPKKFVDIFQQTPLGRFLAQLHGEPQQELLQCYLKDFILLTMRVSTEEELKFLQMALWSCTRKLKAASEAPEEEVSLPWVHLAYQRFRSRLQNFSRILTIYPQVLHSLMEARWNHELAGCEMTLDAFAAMACTEMLTRNTLKPSPQAWLQLVKNLSMPLELICSDEHMQGSGSLAQAVIRGVRAQWSRIFSTALFVEHVLLGTESRVPELQGLVTEHVFLLDKCLRENSDVKTHGPFEAVMRTLCECKETASKTLSRFGIQPCSICLGDAKDPVCLPCDHVHCLRCLRAWFASEQMICPYCLTALPDEFSPAVSQAHREAIEKHARFRQMCNSFFVDLVSTICFKDNAPPEKEVIESLLSLLFVQKGRLRDAAQRHCEHTKSLSPFNDVVDKTPVIRSVILKLLLKYSFHDVKDYIQEYLTLLKKKAFITEDKTELYMLFINCLEDSILEKTSAYSRNDELNHLEEEGRFLKAYSPASRGREPANEASVEYLQEVARIRLCLDRAADFLSEPEGGPEMAKEKQCYLQQVKQFCIRVENDWHRVYLVRKLSSQRGMEFVQGLSKPGRPHQWVFPKDVVKQQGLRQDHPGQMDRYLVYGDEYKALRDAVAKAVLECKPLGIKTALKACKTPQSQQSAYFLLTLFREVAILYRSHNASLHPTPEQCEAVSKFIGECKILSPPDISRFATSLVDNSVPLLRAGPSDSNLDGTVTEMAIHAAAVLLCGQNELLEPLKNLAFSPATMAHAFLPTMPEDLLAQARRWKGLERVHWYTCPNGHPCSVGECGRPMEQSICIDCHAPIGGIDHKPRDGFHLVKDKADRTQTGHVLGNPQRRDVVTCDRGLPPVVFLLIRLLTHLALLLGASQSSQALINIIKPPVRDPKGFLQQHILKDLEQLAKMLGHSADETIGVVHLVLRRLLQEQHQLSSRRLLNFDTELSTKEMRNNWEKEIAAVISPELEHLDKTLPTMNNLISQDKRISSNPVAKIIYGDPVTFLPHLPRKSVVHCSKIWSCRKRITVEYLQHIVEQKNGKERVPILWHFLQKEAELRLVKFLPEILALQRDLVKQFQNVQQVEYSSIRGFLSKHSSDGLRQLLHNRITVFLSTWNKLRRSLETNGEINLPKDYCSTDLDLDTEFEILLPRRRGLGLCATALVSYLIRLHNEIVYAVEKLSKENNSYSVDAAEVTELHVISYEVERDLTPLILSNCQYQVEEGRETVQEFDLEKIQRQIVSRFLQGKPRLSLKGIPTLVYRHDWNYEHLFMDIKNKMAQDSLPSSVISAISGQLQSYSDACEVLSVVEVTLGFLSTAGGDPNMQLNVYTQDILQMGDQTIHVLKALNRCQLKHTIALWQFLSAHKSEQLLRLHKEPFGEISSRYKADLSPENAKLLSTFLNQTGLDAFLLELHEMIILKLKNPQTQTEERFRPQWSLRDTLVSYMQTKESEILPEMASQFPEEILLASCVSVWKTAAVLKWNREMR

SEQ ID NO: 53 - protein, 1642 aa, homo sapien
GLLNEDDACHASFLRVSKMRLSVFLKKQEESQFHPLEWLAREACNQDALQEAGTFRHTLWKRVQGAVTPLLASMISFIDRDGNLELLTRPDTPPWARDLWMFIFSDTMLLNIPLVMNNERHKGEMAYIVVQNHMNLSENASNNVPFSWKIKDYLEELWVQAQYITDAEGLPKKFVDIFQQTPLGRFLAQLHGEPQQELLQCYLKDFILLTMRVSTEEELKFLQMALWSCTRKLKAASEAPEEEVSLPWVHLAYQRFRSRLQNFSRILTIYPQVLHSLMEARWNHELAGCEMTLDAFAAMACTEMLTRNTLKPSPQAWLQLVKNLSMPLELICSDEHMQGSGSLAQAVIRGVRAQWSRIFSTALFVEHVLLGTESRVPELQGLVTEHVFLLDKCLRENSDVKTHGPFEAVMRTLCECKETASKTLSRFGIQPCSICLGDAKDPVCLPCDHVHCLRCLRAWFASEQMICPYCLTALPDEFSPAVSQAHREAIEKHARFRQMCNSFFVDLVSTICFKDNAPPEKEVIESLLSLLFVQKGRLRDAAQRHCEHTKSLSPFNDVVDKTPVIRSVILKLLLKYSFHDVKDYIQEYLTLLKKKAFITEDKTELYMLFINCLEDSILEKTSAYSRNDELNHLEEEGRFLKAYSPASRGREPANEASVEYLQEVARIRLCLDRAADFLSEPEGGPEMAKEKQCYLQQVKQFCIRVENDWHRVYLVRKLSSQRGMEFVQGLSKPGRPHQWVFPKDVVKQQGLRQDHPGQMDRYLVYGDEYKALRDAVAKAVLECKPLGIKTALKACKTPQSQQSAYFLLTLFREVAILYRSHNASLHPTPEQCEAVSKFIGECKILSPPDISRFATSLVDNSVPLLRAGPSDSNLDGTVTEMAIHAAAVLLCGQNELLEPLKNLAFSPATMAHAFLPTMPEDLLAQARRWKGLERVHWYTCPNGHPCSVGECGRPMEQSICIDCHAPIGGIDHKPRDGFHLVKDKADRTQTGHVLGNPQRRDVVTCDRGLPPVVFLLIRLLTHLALLLGASQSSQALINIIKPPVRDPKGFLQQHILKDLEQLAKMLGHSADETIGVVHLVLRRLLQEQHQLSSRRLLNFDTELSTKEMRNNWEKEIAAVISPELEHLDKTLPTMNNLISQDKRISSNPVAKIIYGDPVTFLPHLPRKSVVHCSKIWSCRKRITVEYLQHIVEQKNGKERVPILWHFLQKEAELRLVKFLPEILALQRDLVKQFQNVQQVEYSSIRGFLSKHSSDGLRQLLHNRITVFLSTWNKLRRSLETNGEINLPKDYCSTDLDLDTEFEILLPRRRGLGLCATALVSYLIRLHNEIVYAVEKLSKENNSYSVDAAEVTELHVISYEVERDLTPLILSNCQYQVEEGRETVQEFDLEKIQRQIVSRFLQGKPRLSLKGIPTLVYRHDWNYEHLFMDIKNKMAQDSLPSSVISAISGQLQSYSDACEVLSVVEVTLGFLSTAGGDPNMQLNVYTQDILQMGDQTIHVLKALNRCQLKHTIALWQFLSAHKSEQLLRLHKEPFGEISSRYKADLSPENAKLLSTFLNQTGLDAFLLELHEMIILKLKNPQTQTEERFRPQWSLRDTLVSYMQTKESEILPEMASQFPEEILLASCVSVWKTAAVLKWNREMR

SEQ ID NO: 54 - protein, 1438 aa, homo sapien
DFILLTMRVSTEEELKFLQMALWSCTRKLKAASEAPEEEVSLPWVHLAYQRFRSRLQNFSRILTIYPQVLHSLMEARWNHELAGCEMTLDAFAAMACTEMLTRNTLKPSPQAWLQLVKNLSMPLELICSDEHMQGSGSLAQAVIRGVRAQWSRIFSTALFVEHVLLGTESRVPELQGLVTEHVFLLDKCLRENSDVKTHGPFEAVMRTLCECKETASKTLSRFGIQPCSICLGDAKDPVCLPCDHVHCLRCLRAWFASEQMICPYCLTALPDEFSPAVSQAHREAIEKHARFRQMCNSFFVDLVSTICFKDNAPPEKEVIESLLSLLFVQKGRLRDAAQRHCEHTKSLSPFNDVVDKTPVIRSVILKLLLKYSFHDVKDYIQEYLTLLKKKAFITEDKTELYMLFINCLEDSILEKTSAYSRNDELNHLEEEGRFLKAYSPASRGREPANEASVEYLQEVARIRLCLDRAADFLSEPEGGPEMAKEKQCYLQQVKQFCIRVENDWHRVYLVRKLSSQRGMEFVQGLSKPGRPHQWVFPKDVVKQQGLRQDHPGQMDRYLVYGDEYKALRDAVAKAVLECKPLGIKTALKACKTPQSQQSAYFLLTLFREVAILYRSHNASLHPTPEQCEAVSKFIGECKILSPPDISRFATSLVDNSVPLLRAGPSDSNLDGTVTEMAIHAAAVLLCGQNELLEPLKNLAFSPATMAHAFLPTMPEDLLAQARRWKGLERVHWYTCPNGHPCSVGECGRPMEQSICIDCHAPIGGIDHKPRDGFHLVKDKADRTQTGHVLGNPQRRDVVTCDRGLPPVVFLLIRLLTHLALLLGASQSSQALINIIKPPVRDPKGFLQQHILKDLEQLAKMLGHSADETIGVVHLVLRRLLQEQHQLSSRRLLNFDTELSTKEMRNNWEKEIAAVISPELEHLDKTLPTMNNLISQDKRISSNPVAKIIYGDPVTFLPHLPRKSVVHCSKIWSCRKRITVEYLQHIVEQKNGKERVPILWHFLQKEAELRLVKFLPEILALQRDLVKQFQNVQQVEYSSIRGFLSKHSSDGLRQLLHNRITVFLSTWNKLRRSLETNGEINLPKDYCSTDLDLDTEFEILLPRRRGLGLCATALVSYLIRLHNEIVYAVEKLSKENNSYSVDAAEVTELHVISYEVERDLTPLILSNCQYQVEEGRETVQEFDLEKIQRQIVSRFLQGKPRLSLKGIPTLVYRHDWNYEHLFMDIKNKMAQDSLPSSVISAISGQLQSYSDACEVLSVVEVTLGFLSTAGGDPNMQLNVYTQDILQMGDQTIHVLKALNRCQLKHTIALWQFLSAHKSEQLLRLHKEPFGEISSRYKADLSPENAKLLSTFLNQTGLDAFLLELHEMIILKLKNPQTQTEERFRPQWSLRDTLVSYMQTKESEILPEMASQFPEEILLASCVSVWKTAAVLKWNREMR

SEQ ID NO: 55 - protein, 1329 aa, homo sapien
PQAWLQLVKNLSMPLELICSDEHMQGSGSLAQAVIRGVRAQWSRIFSTALFVEHVLLGTESRVPELQGLVTEHVFLLDKCLRENSDVKTHGPFEAVMRTLCECKETASKTLSRFGIQPCSICLGDAKDPVCLPCDHVHCLRCLRAWFASEQMICPYCLTALPDEFSPAVSQAHREAIEKHARFRQMCNSFFVDLVSTICFKDNAPPEKEVIESLLSLLFVQKGRLRDAAQRHCEHTKSLSPFNDVVDKTPVIRSVILKLLLKYSFHDVKDYIQEYLTLLKKKAFITEDKTELYMLFINCLEDSILEKTSAYSRNDELNHLEEEGRFLKAYSPASRGREPANEASVEYLQEVARIRLCLDRAADFLSEPEGGPEMAKEKQCYLQQVKQFCIRVENDWHRVYLVRKLSSQRGMEFVQGLSKPGRPHQWVFPKDVVKQQGLRQDHPGQMDRYLVYGDEYKALRDAVAKAVLECKPLGIKTALKACKTPQSQQSAYFLLTLFREVAILYRSHNASLHPTPEQCEAVSKFIGECKILSPPDISRFATSLVDNSVPLLRAGPSDSNLDGTVTEMAIHAAAVLLCGQNELLEPLKNLAFSPATMAHAFLPTMPEDLLAQARRWKGLERVHWYTCPNGHPCSVGECGRPMEQSICIDCHAPIGGIDHKPRDGFHLVKDKADRTQTGHVLGNPQRRDVVTCDRGLPPVVFLLIRLLTHLALLLGASQSSQALINIIKPPVRDPKGFLQQHILKDLEQLAKMLGHSADETIGVVHLVLRRLLQEQHQLSSRRLLNFDTELSTKEMRNNWEKEIAAVISPELEHLDKTLPTMNNLISQDKRISSNPVAKIIYGDPVTFLPHLPRKSVVHCSKIWSCRKRITVEYLQHIVEQKNGKERVPILWHFLQKEAELRLVKFLPEILALQRDLVKQFQNVQQVEYSSIRGFLSKHSSDGLRQLLHNRITVFLSTWNKLRRSLETNGEINLPKDYCSTDLDLDTEFEILLPRRRGLGLCATALVSYLIRLHNEIVYAVEKLSKENNSYSVDAAEVTELHVISYEVERDLTPLILSNCQYQVEEGRETVQEFDLEKIQRQIVSRFLQGKPRLSLKGIPTLVYRHDWNYEHLFMDIKNKMAQDSLPSSVISAISGQLQSYSDACEVLSVVEVTLGFLSTAGGDPNMQLNVYTQDILQMGDQTIHVLKALNRCQLKHTIALWQFLSAHKSEQLLRLHKEPFGEISSRYKADLSPENAKLLSTFLNQTGLDAFLLELHEMIILKLKNPQTQTEERFRPQWSLRDTLVSYMQTKESEILPEMASQFPEEILLASCVSVWKTAAVLKWNREMR

SEQ ID NO: 56 - protein, 1320 aa, homo sapien
NLSMPLELICSDEHMQGSGSLAQAVIRGVRAQWSRIFSTALFVEHVLLGTESRVPELQGLVTEHVFLLDKCLRENSDVKTHGPFEAVMRTLCECKETASKTLSRFGIQPCSICLGDAKDPVCLPCDHVHCLRCLRAWFASEQMICPYCLTALPDEFSPAVSQAHREAIEKHARFRQMCNSFFVDLVSTICFKDNAPPEKEVIESLLSLLFVQKGRLRDAAQRHCEHTKSLSPFNDVVDKTPVIRSVILKLLLKYSFHDVKDYIQEYLTLLKKKAFITEDKTELYMLFINCLEDSILEKTSAYSRNDELNHLEEEGRFLKAYSPASRGREPANEASVEYLQEVARIRLCLDRAADFLSEPEGGPEMAKEKQCYLQQVKQFCIRVENDWHRVYLVRKLSSQRGMEFVQGLSKPGRPHQWVFPKDVVKQQGLRQDHPGQMDRYLVYGDEYKALRDAVAKAVLECKPLGIKTALKACKTPQSQQSAYFLLTLFREVAILYRSHNASLHPTPEQCEAVSKFIGECKILSPPDISRFATSLVDNSVPLLRAGPSDSNLDGTVTEMAIHAAAVLLCGQNELLEPLKNLAFSPATMAHAFLPTMPEDLLAQARRWKGLERVHWYTCPNGHPCSVGECGRPMEQSICIDCHAPIGGIDHKPRDGFHLVKDKADRTQTGHVLGNPQRRDVVTCDRGLPPVVFLLIRLLTHLALLLGASQSSQALINIIKPPVRDPKGFLQQHILKDLEQLAKMLGHSADETIGVVHLVLRRLLQEQHQLSSRRLLNFDTELSTKEMRNNWEKEIAAVISPELEHLDKTLPTMNNLISQDKRISSNPVAKIIYGDPVTFLPHLPRKSVVHCSKIWSCRKRITVEYLQHIVEQKNGKERVPILWHFLQKEAELRLVKFLPEILALQRDLVKQFQNVQQVEYSSIRGFLSKHSSDGLRQLLHNRITVFLSTWNKLRRSLETNGEINLPKDYCSTDLDLDTEFEILLPRRRGLGLCATALVSYLIRLHNEIVYAVEKLSKENNSYSVDAAEVTELHVISYEVERDLTPLILSNCQYQVEEGRETVQEFDLEKIQRQIVSRFLQGKPRLSLKGIPTLVYRHDWNYEHLFMDIKNKMAQDSLPSSVISAISGQLQSYSDACEVLSVVEVTLGFLSTAGGDPNMQLNVYTQDILQMGDQTIHVLKALNRCQLKHTIALWQFLSAHKSEQLLRLHKEPFGEISSRYKADLSPENAKLLSTFLNQTGLDAFLLELHEMIILKLKNPQTQTEERFRPQWSLRDTLVSYMQTKESEILPEMASQFPEEILLASCVSVWKTAAVLKWNREMR

SEQ ID NO: 57 - protein, 5207 aa, homo sapien
MECPSCQHVSKEETPKFCSQCGERLPPAAPIADSENNNSTMASASEGEMECGQELKEEGGPCLFPGSDSWQENPEEPCSKASWTVQESKKKKRKKKKKGNKSASSELASLPLSPASPCHLTLLSNPWPQDTALPHSQAQQSGPTGQPSQPPGTATTPLEGDGLSAPTEVGDSPLQAQALGEAGVATGSEAQSSPQFQDHTEGEDQDASIPSGGRGLSQEGTGPPTSAGEGHSRTEDAAQELLLPESKGGSSEPGTELQTTEQQAGASASMAVDAVAEPANAVKGAGKEMKEKTQRMKQPPATTPPFKTHCQEAETKTKDEMAAAEEKVGKNEQGEPEDLKKPEGKNRSAAAVKNEKEQKNQEADVQEVKASTLSPGGGVTVFFHAIISLHFPFNPDLHKVFIRGGEEFGESKWDSNICELHYTRDLGHDRVLVEGIVCISKKHLDKYIPYKYVIYNGESFEYEFIYKHQQKKGEYVNRCLFIKSSLLGSGDWHQYYDIVYMKPHGRLQKVMNHITDGPRKDLVKGKQIAAALMLDSTFSILQTWDTINLNSFFTQFEQFCFVLQQPMIYEGQAQLWTDLQYREKEVKRYLWQHLKKHVVPLPDGKSTDFLPVDCPVRSKLKTGLIVLFVVEKIELLLEGSLDWLCHLLTSDASSPDEFHRDLSHILGIPQSWRLYLVNLCQRCMDTRTYTWLGALPVLHCCMELAPRHKDAWRQPEDTWAALEGLSFSPFREQMLDTSSLLQFMREKQHLLSIDEPLFRSWFSLLPLSHLVMYMENFIEHLGRFPAHILDCLSGIYYRLPGLEQVLNTQDVQDVQNVQNILEMLLRLLDTYRDKIPEEALSPSYLTVCLKLHEAICSSTKLLKFYELPALSAEIVCRMIRLLSLVDSAGQRDETGNNSVQTVFQGTLAATKRWLREVFTKNMLTSSGASFTYVKEIEVWRRLVEIQFPAEHGWKESLLGDMEWRLTKEEPLSQITAYCNSCWDTKGLEDSVAKTFEKCIIEAVSSACQSQTSILQGFSYSDLRKFGIVLSAVITKSWPRTADNFDDILKHLLTLADVKHVFRLCGTDEKILANVTEDAKRLIAVADSVLTKVVGDLLSGTILVGQLELIIKHKNQFLDIWQLREKSLSPQDEQCAVEEALDWRREELLLLKKEKRCVDSLLKMCGNVKHLIQVDFGVLAVRHSQDLSSKRLNDTVTVRLSTSSNSQRATHYHLSSQVQEMAGKIDLLRDSHIFQLFWREAAEPLSEPKEDQEAAELLSEPEEESERHILELEEVYDYLYQPSYRKFIKLHQDLKSGEVTLAEIDVIFKDFVNKYTDLDSELKIMCTVDHQDQRDWIKDRVEQIKEYHHLHQAVHAAKVILQVKESLGLNGDFSVLNTLLNFTDNFDDFRRETLDQINQELIQAKKLLQDISEARCKGLQALSLRKEFICWVREALGGINELKVFVDLASISAGENDIDVDRVACFHDAVQGYASLLFKLDPSVDFSAFMKHLKKLWKALDKDQYLPRKLCDSARNLEWLKTVNESHGSVERSSLTLATAINQRGIYVIQAPKGGQKISPDTVLHLILPESPGSHEESREYSLEEVKELLNKLMLMSGKKDRNNTEVERFSEVFCSVQRLSQAFIDLHSAGNMLFRTWIAMAYCSPKQGVSLQMDFGLDLVTELKEGGDVTELLAALCRQMEHFLDSWKRFVTQKRMEHFYLNFYTAEQLVYLSTELRKQPPSDAALTMLSFIKSNCTLRDVLRASVGCGSEAARYRMRRVMEELPLMLLSEFSLVDKLRIIMEQSMRCLPAFLPDCLDLETLGHCLAHLAGMGGSPVERCLPRGLQVGQPNLVVCGHSEVLPAALAVYMQTPSQPLPTYDEVLLCTPATTFEEVALLLRRCLTLGSLGHKVYSLLFADQLSYEVARQAEELFHNLCTQQHREDYQLVMVCDGDWEHCYLPSAFSQHKVFVTPQAPLEAIQAYLAGHYRVPKQTLSAAAVFNDRLCVGIVASERAGVGKSLYVKRLHDKMKMQLNVKNVPLKTIRLIDPQVDESRVLGALLPFLDAQYQKVPVLFHLDVTSSVQTGIWVFLFKLLILQYLMDINGKMWLRNPCHLYIVEILERRTSVPSRSSSALRTRVPQFSFLDIFPKVTCRPPKEVIDMELSALRSDTEPGMDLWEFCSETFQRPYQYLRRFNQNQDLDTFQYQEGSVEGTPEECLQHFLFHCGVINPSWSELRNFARFLNYQLRDCEASLFCNPSFIGDTLRGFKKFVVTFMIFMARDFATPSLHTSDQSPGKHMVTMDGVREEDLAPFSLRKRWESEPHPYVFFNDDHTTMTFIGFHLQPNINGSVDAISHLTGKVIKRDVMTRDLYQGLLLQRVPFNVDFDKLPRHKKLERLCLTLGIPQATDPDKTYELTTDNMLKILAIEMRFRCGIPVIIMGETGCGKTRLIKFLSDLRRGGTNADTIKLVKVHGGTTADMIYSRVREAENVAFANKDQHQLDTILFFDEANTTEAISCIKEVLCDHMVDGQPLAEDSGLHIIAACNPYRKHSEEMICRLESAGLGYRVSMEETADRLGSIPLRQLVYRVHALPPSLIPLVWDFGQLSDVAEKLYIQQIVQRLVESISLDENGTRVITEVLCASQGFMRKTEDECSFVSLRDVERCVKVFRWFHEHSAMLLAQLNAFLSKSSVSKNHTERDPVLWSLMLAIGVCYHASLEKKDSYRKAIARFFPKPYDDSRLLLDEITRAQDLFLDGVPLRKTIAKNLALKENVFMMVVCIELKIPLFLVGKPGSSKSLAKTIVADAMQGPAAYSDLFRSLKQVHLVSFQCSPHSTPQGIISTFRQCARFQQGKDLQQYVSVVVLDEVGLAEDSPKMPLKTLHPLLEDGCIEDDPAPHKKVGFVGISNWALDPAKMNRGIFVSRGSPNETELIESAKGICSSDILVQDRVQGYFASFAKAYETVCKRQDKEFFGLRDYYSLIKMVFAAAKASNRKPSPQDIAQAVLRNFSGKDDIQALDIFLANLPEAKCSEEVSPMQLIKQNIFGPSQKVPGGEQEDAESRYLLVLTKNYVALQILQQTFFEGDQQPEIIFGSGFPKDQEYTQLCRNINRVKICMETGKMVLLLNLQNLYESLYDALNQYYVHLGGQKYVDLGLGTHRVKCRVHPNFRLIVIEEKDVVYKHFPIPLINRLEKHYLDINTVLEKWQKSIVEELCAWVEKFINVKAHHFQKRHKYSPSDVFIGYHSDACASVVLQVIERQGPRALTEELHQKVSEEAKSILLNCATPDAVVRLSAYSLGGFAAEWLSQEYFHRQRHNSFADFLQAHLHTADLERHAIFTEITTFSRLLTSHDCEILESEVTGRAPKPTLLWLQQFDTEYSFLKEVRNCLTNTAKCKILIFQTDFEDGIRSAQLIASAKYSVINEINKIRENEDRIFVYFITKLSRVGRGTAYVGFHGGLWQSVHIDDLRRSTLMVSDVTRLQHVTISQLFAPGDLPELGLEHRAEDGHEEAMETEASTSGEVAEVAEEAMETESSEKVGKETSELGGSDVSILDTTRLLRSCVQSAVGMLRDQNESCTRNMRRVVLLLGLLNEDDACHASFLRVSKMRLSVFLKKQEESQFHPLEWLAREACNQDALQEAGTFRHTLWKRVQGAVTPLLASMISFIDRDGNLELLTRPDTPPWARDLWMFIFSDTMLLNIPLVMNNERHKGEMAYIVVQNHMNLSENASNNVPFSWKIKDYLEELWVQAQYITDAEGLPKKFVDIFQQTPLGRFLAQLHGEPQQELLQCYLKDFILLTMRVSTEEELKFLQMALWSCTRKLKAASEAPEEEVSLPWVHLAYQRFRSRLQNFSRILTIYPQLLHSLMEARWNHELAGCEMTLDAFAAMACTEMLTRNTLKPSPQAWLQLVKNLSMPLELICSDEHMQGSGSLAQAVIREVRAQWSRIFSTALFVEHVLLGTESRVPELQGLVTEHVFLLDKCLRENSDVKTHGPFEAVMRTLCECKETASKTLSRFGIQPCSICLGDAKDPVCLPCDHVHCLRCLRAWFASEQMICPYCLTALPDEFSPAVSQAHREAIEKHARFRQMCNSFFVDLVSTICFKDNAPPEKEVIESLLSLLFVQKGRLRDAAQRHCEHTKSLSPFNDVVDKTPVIRSVILKLLLKYSFHDVKDYIQEYLTLLKKKAFITEDKTELYMLFINCLEDSILEKTSAYSRNDELNHLEEEGRFLKAYSPASRGREPANEASVEYLQEVARIRLCLDRAADFLSEPEGGPEMAKEKQCYLQQVKQFCIRVENDWHRVYLVRKLSSQRGMEFVQGLSKPGRPHQWVFPKDVVKQQGLRQDHPGQMDRYLVYGDEYKALRDAVAKAVLECKPLGIKTALKACKTPQSQQSAYFLLTLFREVAILYRSHNASLHPTPEQCEAVSKFIGECKILSPPDISRFATSLVDNSVPLLRAGPSDSNLDGTVTEMAIHAAAVLLCGQNELLEPLKNLAFSPATMAHAFLPTMPEDLLAQARRWKGLERVHWYTCPNGHPCSVGECGRPMEQSICIDCHAPIGGIDHKPRDGFHLVKDKADRTQTGHVLGNPQRRDVVTCDRGLPPVVFLLIRLLTHLALLLGASQSSQALINIIKPPVRDPKGFLQQHILKDLEQLAKMLGHSADETIGVVHLVLRRLLQEQHQLSSRRLLNFDTELSTKEMRNNWEKEIAAVISPELEHLDKTLPTMNNLISQDKRISSNPVAKIIYGDPVTFLPHLPRKSVVHCSKIWSCRKRITVEYLQHIVEQKNGKERVPILWHFLQKEAELRLVKFLPEILALQRDLVKQFQNVQQVEYSSIRGFLSKHSSDGLRQLLHNRITVFLSTWNKLRRSLETNGEINLPKDYCSTDLDLDTEFEILLPRRRGLGLCATALVSYLIRLHNEIVYAVEKLSKENNSYSVDAAEVTELHVISYEVERDLTPLILSNCQYQVEEGRETVQEFDLEKIQRQIVSRFLQGKPRLSLKGIPTLVYRHDWNYEHLFMDIKNKMAQDSLPSSVISAISGQLQSYSDACEVLSVVEVTLGFLSTAGGDPNMQLNVYTQDILQMGDQTIHVLKALNRCQLKHTIALWQFLSAHKSEQLLRLHKEPFGEISSRYKADLSPENAKLLSTFLNQTGLDAFLLELHEMIILKLKNPQTQTEERFRPQWSLRDTLVSYMQTKESEILPEMASQFPEEILLASCVSVWKTAAVLKWNREMR

SEQ ID NO: 58 - protein, 5256 aa, homo sapien
MECPSCQHVSKEETPKFCSQCGERLPPAAPIADSENNNSTMASASEGEMECGQELKEEGGPCLFPGSDSWQENPEEPCSKASWTVQEGATSEVLVDAAVDLISDEWEAANAIPSKRRKQDAAPLEAASVPSADCEQSKKKKRKKKKKGNKSASSELASLPLSPASPCHLTLLSNPWPQDTALPHSQAQQSGPTGQPSQPPGTATTPLEGDGLSAPTEVGDSPLQAQALGEAGVATGSEAQSSPQFQDHTEGEDQDASIPSGGRGLSQEGTGPPTSAGEGHSRTEDAAQELLLPESKGGSSEPGTELQTTEQQAGASASMAVDAVAEPANAVKGAGKEMKEKTQRMKQPPATTPPFKTHCQEAETKTKDEMAAAEEKVGKNEQGEPEDLKKPEGKNRSAAAVKNEKEQKNQEADVQEVKASTLSPGGGVTVFFHAIISLHFPFNPDLHKVFIRGGEEFGESKWDSNICELHYTRDLGHDRVLVEGIVCISKKHLDKYIPYKYVIYNGESFEYEFIYKHQQKKGEYVNRCLFIKSSLLGSGDWHQYYDIVYMKPHGRLQKVMNHITDGPRKDLVKGKQIAAALMLDSTFSILQTWDTINLNSFFTQFEQFCFVLQQPMIYEGQAQLWTDLQYREKEVKRYLWQHLKKHVVPLPDGKSTDFLPVDCPVRSKLKTGLIVLFVVEKIELLLEGSLDWLCHLLTSDASSPDEFHRDLSHILGIPQSWRLYLVNLCQRCMDTRTYTWLGALPVLHCCMELAPRHKDAWRQPEDTWAALEGLSFSPFREQMLDTSSLLQFMREKQHLLSIDEPLFRSWFSLLPLSHLVMYMENFIEHLGRFPAHILDCLSGIYYRLPGLEQVLNTQDVQDVQNVQNILEMLLRLLDTYRDKIPEEALSPSYLTVCLKLHEAICSSTKLLKFYELPALSAEIVCRMIRLLSLVDSAGQRDETGNNSVQTVFQGTLAATKRWLREVFTKNMLTSSGASFTYVKEIEVWRRLVEIQFPAEHGWKESLLGDMEWRLTKEEPLSQITAYCNSCWDTKGLEDSVAKTFEKCIIEAVSSACQSQTSILQGFSYSDLRKFGIVLSAVITKSWPRTADNFDDILKHLLTLADVKHVFRLCGTDEKILANVTEDAKRLIAVADSVLTKVVGDLLSGTILVGQLELIIKHKNQFLDIWQLREKSLSPQDEQCAVEEALDWRREELLLLKKEKRCVDSLLKMCGNVKHLIQVDFGVLAVRHSQDLSSKRLNDTVTVRLSTSSNSQRATHYHLSSQVQEMAGKIDLLRDSHIFQLFWREAAEPLSEPKEDQEAAELLSEPEEESERHILELEEVYDYLYQPSYRKFIKLHQDLKSGEVTLAEIDVIFKDFVNKYTDLDSELKIMCTVDHQDQRDWIKDRVEQIKEYHHLHQAVHAAKVILQVKESLGLNGDFSVLNTLLNFTDNFDDFRRETLDQINQELIQAKKLLQDISEARCKGLQALSLRKEFICWVREALGGINELKVFVDLASISAGENDIDVDRVACFHDAVQGYASLLFKLDPSVDFSAFMKHLKKLWKALDKDQYLPRKLCDSARNLEWLKTVNESHGSVERSSLTLATAINQRGIYVIQAPKGGQKISPDTVLHLILPESPGSHEESREYSLEEVKELLNKLMLMSGKKDRNNTEVERFSEVFCSVQRLSQAFIDLHSAGNMLFRTWIAMAYCSPKQGVSLQMDFGLDLVTELKEGGDVTELLAALCRQMEHFLDSWKRFVTQKRMEHFYLNFYTAEQLVYLSTELRKQPPSDAALTMLSFIKSNCTLRDVLRASVGCGSEAARYRMRRVMEELPLMLLSEFSLVDKLRIIMEQSMRCLPAFLPDCLDLETLGHCLAHLAGMGGSPVERCLPRGLQVGQPNLVVCGHSEVLPAALAVYMQTPSQPLPTYDEVLLCTPATTFEEVALLLRRCLTLGSLGHKVYSLLFADQLSYEVARQAEELFHNLCTQQHREDYQLVMVCDGDWEHCYLPSAFSQHKVFVTPQAPLEAIQAYLAGHYRVPKQTLSAAAVFNDRLCVGIVASERAGVGKSLYVKRLHDKMKMQLNVKNVPLKTIRLIDPQVDESRVLGALLPFLDAQYQKVPVLFHLDVTSSVQTGIWVFLFKLLILQYLMDINGKMWLRNPCHLYIVEILERRTSVPSRSSSALRTRVPQFSFLDIFPKVTCRPPKEVIDMELSALRSDTEPGMDLWEFCSETFQRPYQYLRRFNQNQDLDTFQYQEGSVEGTPEECLQHFLFHCGVINPSWSELRNFARFLNYQLRDCEASLFCNPSFIGDTLRGFKKFVVTFMIFMARDFATPSLHTSDQSPGKHMVTMDGVREEDLAPFSLRKRWESEPHPYVFFNDDHTTMTFIGFHLQPNINGSVDAISHLTGKVIKRDVMTRDLYQGLLLQRVPFNVDFDKLPRHKKLERLCLTLGIPQATDPDKTYELTTDNMLKILAIEMRFRCGIPVIIMGETGCGKTRLIKFLSDLRRGGTNADTIKLVKVHGGTTADMIYSRVREAENVAFANKDQHQLDTILFFDEANTTEAISCIKEVLCDHMVDGQPLAEDSGLHIIAACNPYRKHSEEMICRLESAGLGYRVSMEETADRLGSIPLRQLVYRVHALPPSLIPLVWDFGQLSDVAEKLYIQQIVQRLVESISLDENGTRVITEVLCASQGFMRKTEDECSFVSLRDVERCVKVFRWFHEHSAMLLAQLNAFLSKSSVSKNHTERDPVLWSLMLAIGVCYHASLEKKDSYRKAIARFFPKPYDDSRLLLDEITRAQDLFLDGVPLRKTIAKNLALKENVFMMVVCIELKIPLFLVGKPGSSKSLAKTIVADAMQGPAAYSDLFRSLKQVHLVSFQCSPHSTPQGIISTFRQCARFQQGKDLQQYVSVVVLDEVGLAEDSPKMPLKTLHPLLEDGCIEDDPAPHKKVGFVGISNWALDPAKMNRGIFVSRGSPNETELIESAKGICSSDILVQDRVQGYFASFAKAYETVCKRQDKEFFGLRDYYSLIKMVFAAAKASNRKPSPQDIAQAVLRNFSGKDDIQALDIFLANLPEAKCSEEVSPMQLIKQNIFGPSQKVPGGEQEDAESRYLLVLTKNYVALQILQQTFFEGDQQPEIIFGSGFPKDQEYTQLCRNINRVKICMETGKMVLLLNLQNLYESLYDALNQYYVHLGGQKYVDLGLGTHRVKCRVHPNFRLIVIEEKDVVYKHFPIPLINRLEKHYLDINTVLEKWQKSIVEELCAWVEKFINVKAHHFQKRHKYSPSDVFIGYHSDACASVVLQVIERQGPRALTEELHQKVSEEAKSILLNCATPDAVVRLSAYSLGGFAAEWLSQEYFHRQRHNSFADFLQAHLHTADLERHAIFTEITTFSRLLTSHDCEILESEVTGRAPKPTLLWLQQFDTEYSFLKEVRNCLTNTAKCKILIFQTDFEDGIRSAQLIASAKYSVINEINKIRENEDRIFVYFITKLSRVGRGTAYVGFHGGLWQSVHIDDLRRSTLMVSDVTRLQHVTISQLFAPGDLPELGLEHRAEDGHEEAMETEASTSGEVAEVAEEAMETESSEKVGKETSELGGSDVSILDTTRLLRSCVQSAVGMLRDQNESCTRNMRRVVLLLGLLNEDDACHASFLRVSKMRLSVFLKKQEESQFHPLEWLAREACNQDALQEAGTFRHTLWKRVQGAVTPLLASMISFIDRDGNLELLTRPDTPPWARDLWMFIFSDTMLLNIPLVMNNERHKGEMAYIVVQNHMNLSENASNNVPFSWKIKDYLEELWVQAQYITDAEGLPKKFVDIFQQTPLGRFLAQLHGEPQQELLQCYLKDFILLTMRVSTEEELKFLQMALWSCTRKLKAASEAPEEEVSLPWVHLAYQRFRSRLQNFSRILTIYPQLLHSLMEARWNHELAGCEMTLDAFAAMACTEMLTRNTLKPSPQAWLQLVKNLSMPLELICSDEHMQGSGSLAQAVIREVRAQWSRIFSTALFVEHVLLGTESRVPELQGLVTEHVFLLDKCLRENSDVKTHGPFEAVMRTLCECKETASKTLSRFGIQPCSICLGDAKDPVCLPCDHVHCLRCLRAWFASEQMICPYCLTALPDEFSPAVSQAHREAIEKHARFRQMCNSFFVDLVSTICFKDNAPPEKEVIESLLSLLFVQKGRLRDAAQRHCEHTKSLSPFNDVVDKTPVIRSVILKLLLKYSFHDVKDYIQEYLTLLKKKAFITEDKTELYMLFINCLEDSILEKTSAYSRNDELNHLEEEGRFLKAYSPASRGREPANEASVEYLQEVARIRLCLDRAADFLSEPEGGPEMAKEKQCYLQQVKQFCIRVENDWHRVYLVRKLSSQRGMEFVQGLSKPGRPHQWVFPKDVVKQQGLRQDHPGQMDRYLVYGDEYKALRDAVAKAVLECKPLGIKTALKACKTPQSQQSAYFLLTLFREVAILYRSHNASLHPTPEQCEAVSKFIGECKILSPPDISRFATSLVDNSVPLLRAGPSDSNLDGTVTEMAIHAAAVLLCGQNELLEPLKNLAFSPATMAHAFLPTMPEDLLAQARRWKGLERVHWYTCPNGHPCSVGECGRPMEQSICIDCHAPIGGIDHKPRDGFHLVKDKADRTQTGHVLGNPQRRDVVTCDRGLPPVVFLLIRLLTHLALLLGASQSSQALINIIKPPVRDPKGFLQQHILKDLEQLAKMLGHSADETIGVVHLVLRRLLQEQHQLSSRRLLNFDTELSTKEMRNNWEKEIAAVISPELEHLDKTLPTMNNLISQDKRISSNPVAKIIYGDPVTFLPHLPRKSVVHCSKIWSCRKRITVEYLQHIVEQKNGKERVPILWHFLQKEAELRLVKFLPEILALQRDLVKQFQNVQQVEYSSIRGFLSKHSSDGLRQLLHNRITVFLSTWNKLRRSLETNGEINLPKDYCSTDLDLDTEFEILLPRRRGLGLCATALVSYLIRLHNEIVYAVEKLSKENNSYSVDAAEVTELHVISYEVERDLTPLILSNCQYQVEEGRETVQEFDLEKIQRQIVSRFLQGKPRLSLKGIPTLVYRHDWNYEHLFMDIKNKMAQDSLPSSVISAISGQLQSYSDACEVLSVVEVTLGFLSTAGGDPNMQLNVYTQDILQMGDQTIHVLKALNRCQLKHTIALWQFLSAHKSEQLLRLHKEPFGEISSRYKADLSPENAKLLSTFLNQTGLDAFLLELHEMIILKLKNPQTQTEERFRPQWSLRDTLVSYMQTKESEILPEMASQFPEEILLASCVSVWKTAAVLKWNREMR

SEQ ID NO: 59 - protein, 2114 aa, homo sapien
METGKMVLLLNLQNLYESLYDALNQYYVHLGGQKYVDLGLGTHRVKCRVHPNFRLIVIEEKDVVYKHFPIPLINRLEKHYLDINTVLEKWQKSIVEELCAWVEKFINVKAHHFQKRHKYSPSDVFIGYHSDACASVVLQVIERQGPRALTEELHQKVSEEAKSILLNCATPDAVVRLSAYSLGGFAAEWLSQEYFHRQRHNSFADFLQAHLHTADLERHAIFTEITTFSGLLTSHDCEILESEVTGRAPKPTLLWLQQFDTEYSFLKEVRNCLTNTAKCKILIFQTDFEDGIRSAQLIASAKYSVINEINKIRENEDRIFVYFITKLSRVGRGTAYVGFHGGLWQSVHIDDLRRSTLMVSDVTRLQHVTISQLFAPGDLPELGLEHRAEDGHEEAMETEASTSGEVAEVAEEAMETESSEKVGKETSELGGSDVSILDTTRLLRSCVQSAVGMLRDQNESCTRNMRRVVLLLGLLNEDDACHASFLRVSKMRLSVFLKKQEESQFHPLEWLAREACNQDALQEAGTFRHTLWKRVQGAVTPLLASMISFIDRDGNLELLTRPDTPPWARDLWMFIFSDTMLLNIPLVMNNERHKGEMAYIVVQNHMNLSENASNNVPFSWKIKDYLEELWVQAQYITDAEGLPKKFVDIFQQTPLGRFLAQLHGEPQQELLQCYLKDFILLTMRVSTEEELKFLQMALWSCTRKLKAASEAPEEEVSLPWVHLAYQRFRSRLQNFSRILTIYPQLLHSLMEARWNHELAGCEMTLDAFAAMACTEMLTRNTLKPSPQAWLQLVKNLSMPLELICSDEHMQGSGSLAQAVIREVRAQWSRIFSTALFVEHVLLGTESRVPELQGLVTEHVFLLDKCLRENSDVKTHGPFEAVMRTLCECKETASKTLSRFGIQPCSICLGDAKDPVCLPCDHVHCLRCLRAWFASEQMICPYCLTALPDEFSPAVSQAHREAIEKHARFRQMCNSFFVDLVSTICFKDNAPPEKEVIESLLSLLFVQKGRLRDAAQRHCEHTKSLSPFNDVVDKTPVIRSVILKLLLKYSFHDVKDYIQEYLTLLKKKAFITEDKTELYMLFINCLEDSILEKTSAYSRNDELNHLEEEGRFLKAYSPASRGREPANEASVEYLQEVARIRLCLDRAADFLSEPEGGPEMAKEKQCYLQQVKQFCIRVENDWHRVYLVRKLSSQRGMEFVQGLSKPGRPHQWVFPKDVVKQQGLRQDHPGQMDRYLVYGDEYKALRDAVAKAVLECKPLGIKTALKACKTPQSQQSAYFLLTLFREVAILYRSHNASLHPTPEQCEAVSKFIGECKILSPPDISRFATSLVDNSVPLLRAGPSDSNLDGTVTEMAIHAAAVLLCGQNELLEPLKNLAFSPATMAHAFLPTMPEDLLAQARRWKGLERVHWYTCPNGHPCSVGECGRPMEQSICIDCHAPIGGIDHKPRDGFHLVKDKADRTQTGHVLGNPQRRDVVTCDRGLPPVVFLLIRLLTHLALLLGASQSSQALINIIKPPVRDPKGFLQQHILKDLEQLAKMLGHSADETIGVVHLVLRRLLQEQHQLSSRRLLNFDTELSTKEMRNNWEKEIAAVISPELEHLDKTLPTMNNLISQDKRISSNPVAKIIYGDPVTFLPHLPRKSVVHCSKIWSCRKRITVEYLQHIVEQKNGKERVPILWHFLQKEAELRLVKFLPEILALQRDLVKQFQNVQQVEYSSIRGFLSKHSSDGLRQLLHNRITVFLSTWNKLRRSLETNGEINLPKDYCSTDLDLDTEFEILLPRRRGLGLCATALVSYLIRLHNEIVYAVEKLSKENNSYSVDAAEVTELHVISYEVERDLTPLILSNCQYQVEEGRETVQEFDLEKIQRQIVSRFLQGKPRLSLKGIPTLVYRHDWNYEHLFMDIKNKMAQDSLPSSVISAISGQLQSYSDACEVLSVVEVTLGFLSTAGGDPNMQLNVYTQDILQMGDQTIHVLKALNRCQLKHTIALWQFLSAHKSEQLLRLHKEPFGEISSRYKADLSPENAKLLSTFLNQTGLDAFLLELHEMIILKLKNPQTQTEERFRPQWSLRDTLVSYMQTKESEILPEMASQFPEEILLASCVSVWKTAAVLKWNREMR

SEQ ID NO: 60 - protein, 1642 aa, homo sapien
GLLNEDDACHASFLRVSKMRLSVFLKKQEESQFHPLEWLAREACNQDALQEAGTFRHTLWKRVQGAVTPLLASMISFIDRDGNLELLTRPDTPPWARDLWMFIFSDTMLLNIPLVMNNERHKGEMAYIVVQNHMNLSENASNNVPFSWKIKDYLEELWVQAQYITDAEGLPKKFVDIFQQTPLGRFLAQLHGEPQQELLQCYLKDFILLTMRVSTEEELKFLQMALWSCTRKLKAASEAPEEEVSLPWVHLAYQRFRSRLQNFSRILTIYPQLLHSLMEARWNHELAGCEMTLDAFAAMACTEMLTRNTLKPSPQAWLQLVKNLSMPLELICSDEHMQGSGSLAQAVIREVRAQWSRIFSTALFVEHVLLGTESRVPELQGLVTEHVFLLDKCLRENSDVKTHGPFEAVMRTLCECKETASKTLSRFGIQPCSICLGDAKDPVCLPCDHVHCLRCLRAWFASEQMICPYCLTALPDEFSPAVSQAHREAIEKHARFRQMCNSFFVDLVSTICFKDNAPPEKEVIESLLSLLFVQKGRLRDAAQRHCEHTKSLSPFNDVVDKTPVIRSVILKLLLKYSFHDVKDYIQEYLTLLKKKAFITEDKTELYMLFINCLEDSILEKTSAYSRNDELNHLEEEGRFLKAYSPASRGREPANEASVEYLQEVARIRLCLDRAADFLSEPEGGPEMAKEKQCYLQQVKQFCIRVENDWHRVYLVRKLSSQRGMEFVQGLSKPGRPHQWVFPKDVVKQQGLRQDHPGQMDRYLVYGDEYKALRDAVAKAVLECKPLGIKTALKACKTPQSQQSAYFLLTLFREVAILYRSHNASLHPTPEQCEAVSKFIGECKILSPPDISRFATSLVDNSVPLLRAGPSDSNLDGTVTEMAIHAAAVLLCGQNELLEPLKNLAFSPATMAHAFLPTMPEDLLAQARRWKGLERVHWYTCPNGHPCSVGECGRPMEQSICIDCHAPIGGIDHKPRDGFHLVKDKADRTQTGHVLGNPQRRDVVTCDRGLPPVVFLLIRLLTHLALLLGASQSSQALINIIKPPVRDPKGFLQQHILKDLEQLAKMLGHSADETIGVVHLVLRRLLQEQHQLSSRRLLNFDTELSTKEMRNNWEKEIAAVISPELEHLDKTLPTMNNLISQDKRISSNPVAKIIYGDPVTFLPHLPRKSVVHCSKIWSCRKRITVEYLQHIVEQKNGKERVPILWHFLQKEAELRLVKFLPEILALQRDLVKQFQNVQQVEYSSIRGFLSKHSSDGLRQLLHNRITVFLSTWNKLRRSLETNGEINLPKDYCSTDLDLDTEFEILLPRRRGLGLCATALVSYLIRLHNEIVYAVEKLSKENNSYSVDAAEVTELHVISYEVERDLTPLILSNCQYQVEEGRETVQEFDLEKIQRQIVSRFLQGKPRLSLKGIPTLVYRHDWNYEHLFMDIKNKMAQDSLPSSVISAISGQLQSYSDACEVLSVVEVTLGFLSTAGGDPNMQLNVYTQDILQMGDQTIHVLKALNRCQLKHTIALWQFLSAHKSEQLLRLHKEPFGEISSRYKADLSPENAKLLSTFLNQTGLDAFLLELHEMIILKLKNPQTQTEERFRPQWSLRDTLVSYMQTKESEILPEMASQFPEEILLASCVSVWKTAAVLKWNREMR

SEQ ID NO: 61 - protein, 1438 aa, homo sapien
DFILLTMRVSTEEELKFLQMALWSCTRKLKAASEAPEEEVSLPWVHLAYQRFRSRLQNFSRILTIYPQLLHSLMEARWNHELAGCEMTLDAFAAMACTEMLTRNTLKPSPQAWLQLVKNLSMPLELICSDEHMQGSGSLAQAVIREVRAQWSRIFSTALFVEHVLLGTESRVPELQGLVTEHVFLLDKCLRENSDVKTHGPFEAVMRTLCECKETASKTLSRFGIQPCSICLGDAKDPVCLPCDHVHCLRCLRAWFASEQMICPYCLTALPDEFSPAVSQAHREAIEKHARFRQMCNSFFVDLVSTICFKDNAPPEKEVIESLLSLLFVQKGRLRDAAQRHCEHTKSLSPFNDVVDKTPVIRSVILKLLLKYSFHDVKDYIQEYLTLLKKKAFITEDKTELYMLFINCLEDSILEKTSAYSRNDELNHLEEEGRFLKAYSPASRGREPANEASVEYLQEVARIRLCLDRAADFLSEPEGGPEMAKEKQCYLQQVKQFCIRVENDWHRVYLVRKLSSQRGMEFVQGLSKPGRPHQWVFPKDVVKQQGLRQDHPGQMDRYLVYGDEYKALRDAVAKAVLECKPLGIKTALKACKTPQSQQSAYFLLTLFREVAILYRSHNASLHPTPEQCEAVSKFIGECKILSPPDISRFATSLVDNSVPLLRAGPSDSNLDGTVTEMAIHAAAVLLCGQNELLEPLKNLAFSPATMAHAFLPTMPEDLLAQARRWKGLERVHWYTCPNGHPCSVGECGRPMEQSICIDCHAPIGGIDHKPRDGFHLVKDKADRTQTGHVLGNPQRRDVVTCDRGLPPVVFLLIRLLTHLALLLGASQSSQALINIIKPPVRDPKGFLQQHILKDLEQLAKMLGHSADETIGVVHLVLRRLLQEQHQLSSRRLLNFDTELSTKEMRNNWEKEIAAVISPELEHLDKTLPTMNNLISQDKRISSNPVAKIIYGDPVTFLPHLPRKSVVHCSKIWSCRKRITVEYLQHIVEQKNGKERVPILWHFLQKEAELRLVKFLPEILALQRDLVKQFQNVQQVEYSSIRGFLSKHSSDGLRQLLHNRITVFLSTWNKLRRSLETNGEINLPKDYCSTDLDLDTEFEILLPRRRGLGLCATALVSYLIRLHNEIVYAVEKLSKENNSYSVDAAEVTELHVISYEVERDLTPLILSNCQYQVEEGRETVQEFDLEKIQRQIVSRFLQGKPRLSLKGIPTLVYRHDWNYEHLFMDIKNKMAQDSLPSSVISAISGQLQSYSDACEVLSVVEVTLGFLSTAGGDPNMQLNVYTQDILQMGDQTIHVLKALNRCQLKHTIALWQFLSAHKSEQLLRLHKEPFGEISSRYKADLSPENAKLLSTFLNQTGLDAFLLELHEMIILKLKNPQTQTEERFRPQWSLRDTLVSYMQTKESEILPEMASQFPEEILLASCVSVWKTAAVLKWNREMR

SEQ ID NO: 62 - DNA, 23 bp, artificial sequence
  gRNA Recognition Sequence
gtggaccgatttgcagtacaggg

SEQ ID NO: 63 - DNA, 23 bp, artificial sequence
  gRNA Recognition Sequence
gtgctttttccgtccggcaatgg

SEQ ID NO: 64 - DNA, 23 bp, artificial sequence
  gRNA Recognition Sequence
cacgtggtaccattgccggacgg

SEQ ID NO: 65 - DNA, 23 bp, artificial sequence
  gRNA Recognition Sequence
gaatctgtaacggcagatgaagg

SEQ ID NO: 66 - DNA, 23 bp, artificial sequence
  gRNA Recognition Sequence
ttgttcccggaacggtgagaagg

SEQ ID NO: 67 - DNA, 23 bp, artificial sequence
  gRNA Recognition Sequence
ggacccttgctgctacgaaaagg

SEQ ID NO: 68 - DNA, 23 bp, artificial sequence
  gRNA Recognition Sequence
atccaattccccgcggagcatgg

SEQ ID NO: 69 - DNA, 23 bp, artificial sequence
  gRNA Recognition Sequence
gtcgccaacctcggtgggcgcgg

SEQ ID NO: 70 - DNA, 23 bp, artificial sequence
  gRNA Recognition Sequence
ctccacaatggcgtcggcctcgg

SEQ ID NO: 71 - DNA, 23 bp, artificial sequence
  gRNA Recognition Sequence
aggtcacggtgaaactcatctgg

SEQ ID NO: 72 - DNA, 23 bp, artificial sequence
  gRNA Recognition Sequence
agggatttactaccggcttccgg

SEQ ID NO: 73 - DNA, 23 bp, artificial sequence
  gRNA Recognition Sequence
agtcggtaagaatgaacaagggg

SEQ ID NO: 74 - DNA, 23 bp, artificial sequence
  gRNA Recognition Sequence
tcccggatgactcaccatagagg

SEQ ID NO: 75 - DNA, 23 bp, artificial sequence
  gRNA Recognition Sequence
cccttgctgctacgaaaaggtgg

SEQ ID NO: 76 - DNA, 23 bp, artificial sequence
  gRNA Recognition Sequence
tttgcggggcaggattcccgagg

SEQ ID NO: 77 - DNA, 23 bp, artificial sequence
  gRNA Recognition Sequence
acaatggcgtcggcctcggaggg

SEQ ID NO: 78 - DNA, 23 bp, artificial sequence
  gRNA Recognition Sequence
actcacttcttggacggtccagg

SEQ ID NO: 79 - DNA, 23 bp, artificial sequence
  gRNA Recognition Sequence
ctccgaggccgacgccattgtgg

SEQ ID NO: 80 - DNA, 23 bp, artificial sequence
  gRNA Recognition Sequence
cacaatggcgtcggcctcggagg

SEQ ID NO: 81 - DNA, 23 bp, artificial sequence
  gRNA Recognition Sequence
aattccccgcggagcatggctgg

SEQ ID NO: 82 - RNA, 20 nt, Artificial Sequence
  Antisense oligo
aaaccgaaacuuggagccgg

SEQ ID NO: 83 - RNA, 20 nt, Artificial Sequence
  Antisense oligo
gaaaccgaaacuuggagccg

SEQ ID NO: 84 - RNA, 20 nt, Artificial Sequence
  Antisense oligo
cgaaaccgaaacuuggagcc

SEQ ID NO: 85 - RNA, 20 nt, Artificial Sequence
  Antisense oligo
gcgaaaccgaaacuuggagc

SEQ ID NO: 86 - RNA, 20 nt, Artificial Sequence
  Antisense oligo
ggcgaaaccgaaacuuggag

SEQ ID NO: 87 - RNA, 20 nt, Artificial Sequence
  Antisense oligo
cggcgaaaccgaaacuugga

SEQ ID NO: 88 - RNA, 20 nt, Artificial Sequence
  Antisense oligo
ucguacaggcgcaggauucc

SEQ ID NO: 89 - RNA, 20 nt, Artificial Sequence
  Antisense oligo
uucguacaggcgcaggauuc

SEQ ID NO: 90 - RNA, 20 nt, Artificial Sequence
  Antisense oligo
auucguacaggcgcaggauu

SEQ ID NO: 91 - RNA, 20 nt, Artificial Sequence
  Antisense oligo
cuucacuuuuccguuguugc

SEQ ID NO: 92 - RNA, 20 nt, Artificial Sequence
  Antisense oligo
acuucacuuuuccguuguug

SEQ ID NO: 93 - RNA, 20 nt, Artificial Sequence
  Antisense oligo
ugcaacuucacuuuuccguu

SEQ ID NO: 94 - RNA, 20 nt, Artificial Sequence
  Antisense oligo
cguaaaaguuaggagucugu

SEQ ID NO: 95 - RNA, 20 nt, Artificial Sequence
  Antisense oligo
ucguaaaaguuaggagucug

SEQ ID NO: 96 - RNA, 20 nt, Artificial Sequence
  Antisense oligo
ccucguaaaaguuaggaguc

SEQ ID NO: 97 - RNA, 20 nt, Artificial Sequence
  Antisense oligo
cccucguaaaaguuaggagu

SEQ ID NO: 98 - RNA, 20 nt, Artificial Sequence
  Antisense oligo
ucccucguaaaaguuaggag

SEQ ID NO: 99 - RNA, 20 nt, Artificial Sequence
  Antisense oligo
cucccucguaaaaguuagga

SEQ ID NO: 100 - RNA, 20 nt, Artificial Sequence
  Antisense oligo
ccucccucguaaaaguuagg

SEQ ID NO: 101 - RNA, 20 nt, Artificial Sequence
  Antisense oligo
gccucccucguaaaaguuag

SEQ ID NO: 102 - RNA, 20 nt, Artificial Sequence
  Antisense oligo
ugccucccucguaaaaguua

SEQ ID NO: 103 - RNA, 20 nt, Artificial Sequence
  Antisense oligo
augccucccucguaaaaguu

SEQ ID NO: 104 - RNA, 20 nt, Artificial Sequence
  Antisense oligo
gaugccucccucguaaaagu

SEQ ID NO: 105 - RNA, 20 nt, Artificial Sequence
  Antisense oligo
cgaugccucccucguaaaag

SEQ ID NO: 106 - RNA, 20 nt, Artificial Sequence
  Antisense oligo
gcgaugccucccucguaaaa

SEQ ID NO: 107 - RNA, 20 nt, Artificial Sequence
  Antisense oligo
ggcgaugccucccucguaaa

SEQ ID NO: 108 - RNA, 20 nt, Artificial Sequence
  Antisense oligo
uucgccaagucggaaggacg

SEQ ID NO: 109 - RNA, 20 nt, Artificial Sequence
  Antisense oligo
aaccaaagucaacaaggugg

SEQ ID NO: 110 - RNA, 20 nt, Artificial Sequence
  Antisense oligo
accacaaccaaagucaacaa

SEQ ID NO: 111 - RNA, 20 nt, Artificial Sequence
  Antisense oligo
aaccacaaccaaagucaaca

SEQ ID NO: 112 - RNA, 20 nt, Artificial Sequence
  Antisense oligo
caaccacaaccaaagucaac

SEQ ID NO: 113 - RNA, 20 nt, Artificial Sequence
  Antisense oligo
cccaaaucaaagcccauccc

SEQ ID NO: 114 - RNA, 20 nt, Artificial Sequence
  Antisense oligo
acccaaaucaaagcccaucc

SEQ ID NO: 115 - RNA, 20 nt, Artificial Sequence
  Antisense oligo
cacccaaaucaaagcccauc

SEQ ID NO: 116 - RNA, 20 nt, Artificial Sequence
  Antisense oligo
ccacccaaaucaaagcccau

SEQ ID NO: 117 - RNA, 20 nt, Artificial Sequence
  Antisense oligo
gccacccaaaucaaagccca

SEQ ID NO: 118 - RNA, 20 nt, Artificial Sequence
  Antisense oligo
acugccacccaaaucaaagc

SEQ ID NO: 119 - RNA, 20 nt, Artificial Sequence
  Antisense oligo
cacugccacccaaaucaaag

SEQ ID NO: 120 - RNA, 20 nt, Artificial Sequence
  Antisense oligo
gcacagacacugccacccaa

SEQ ID NO: 121 - RNA, 20 nt, Artificial Sequence
  Antisense oligo
agcacagacacugccaccca

SEQ ID NO: 122 - RNA, 20 nt, Artificial Sequence
  Antisense oligo
ccaagcacagacacugccac

SEQ ID NO: 123 - RNA, 20 nt, Artificial Sequence
  Antisense oligo
auccgcuuccugucuuuucu

SEQ ID NO: 124 - RNA, 20 nt, Artificial Sequence
  Antisense oligo
aauccgcuuccugucuuuuc

SEQ ID NO: 125 - RNA, 20 nt, Artificial Sequence
  Antisense oligo
caauccgcuuccugucuuuu

SEQ ID NO: 126 - RNA, 20 nt, Artificial Sequence
  Antisense oligo
uucaauccgcuuccugucuu

SEQ ID NO: 127 - RNA, 20 nt, Artificial Sequence
  Antisense oligo
auucaauccgcuuccugucu

SEQ ID NO: 128 - RNA, 20 nt, Artificial Sequence
  Antisense oligo
cauucaauccgcuuccuguc

SEQ ID NO: 129 - RNA, 20 nt, Artificial Sequence
  Antisense oligo
gcauucaauccgcuuccugu

SEQ ID NO: 130 - RNA, 20 nt, Artificial Sequence
  Antisense oligo
ugcauucaauccgcuuccug

SEQ ID NO: 131 - RNA, 20 nt, Artificial Sequence
  Antisense oligo
uuguuccaucugcucuaggg

SEQ ID NO: 132 - RNA, 20 nt, Artificial Sequence
  Antisense oligo
uauuguuccaucugcucuag

SEQ ID NO: 133 - RNA, 20 nt, Artificial Sequence
  Antisense oligo
ucuuauuguuccaucugcuc

SEQ ID NO: 134 - RNA, 20 nt, Artificial Sequence
  Antisense oligo
caucuuauuguuccaucugc

SEQ ID NO: 135 - RNA, 20 nt, Artificial Sequence
  Antisense oligo
ugggauuacaggcauuagcc

SEQ ID NO: 136 - RNA, 20 nt, Artificial Sequence
  Antisense oligo
uugggauuacaggcauuagc

SEQ ID NO: 137 - RNA, 20 nt, Artificial Sequence
  Antisense oligo
uuugggauuacaggcauuag

SEQ ID NO: 138 - RNA, 20 nt, Artificial Sequence
  Antisense oligo
guuuugggauuacaggcauu

SEQ ID NO: 139 - RNA, 20 nt, Artificial Sequence
  Antisense oligo
aguuuugggauuacaggcau

SEQ ID NO: 140 - RNA, 20 nt, Artificial Sequence
  Antisense oligo
aaguuuugggauuacaggca

SEQ ID NO: 141 - RNA, 20 nt, Artificial Sequence
  Antisense oligo
ucagcucacugcaaccuccg

SEQ ID NO: 142 - RNA, 20 nt, Artificial Sequence
  Antisense oligo
cucagcucacugcaaccucc

SEQ ID NO: 143 - RNA, 20 nt, Artificial Sequence
  Antisense oligo
ucucagcucacugcaaccuc

SEQ ID NO: 144 - RNA, 20 nt, Artificial Sequence
  Antisense oligo
aucucagcucacugcaaccu

SEQ ID NO: 145 - RNA, 20 nt, Artificial Sequence
  Antisense oligo
aaucucagcucacugcaacc

SEQ ID NO: 146 - RNA, 20 nt, Artificial Sequence
  Antisense oligo
caaucucagcucacugcaac

SEQ ID NO: 147 - RNA, 20 nt, Artificial Sequence
  Antisense oligo
gcaaucucagcucacugcaa

SEQ ID NO: 148 - RNA, 20 nt, Artificial Sequence
  Antisense oligo
ggcaaucucagcucacugca

SEQ ID NO: 149 - RNA, 20 nt, Artificial Sequence
  Antisense oligo
gggcaaucucagcucacugc

SEQ ID NO: 150 - RNA, 20 nt, Artificial Sequence
  Antisense oligo
ugggcaaucucagcucacug

SEQ ID NO: 151 - RNA, 20 nt, Artificial Sequence
  Antisense oligo
gugggcaaucucagcucacu

SEQ ID NO: 152 - RNA, 20 nt, Artificial Sequence
  Antisense oligo
agugggcaaucucagcucac

SEQ ID NO: 153 - RNA, 20 nt, Artificial Sequence
  Antisense oligo
cagugggcaaucucagcuca

SEQ ID NO: 154 - RNA, 20 nt, Artificial Sequence
  Antisense oligo
acagugggcaaucucagcuc

SEQ ID NO: 155 - RNA, 20 nt, Artificial Sequence
  Antisense oligo
gcuggaguacagugggcaau

SEQ ID NO: 156 - RNA, 20 nt, Artificial Sequence
  Antisense oligo
ggcuggaguacagugggcaa

SEQ ID NO: 157 - RNA, 20 nt, Artificial Sequence
  Antisense oligo
aggcuggaguacagugggca

SEQ ID NO: 158 - RNA, 20 nt, Artificial Sequence
  Antisense oligo
acccaggcuggaguacagug

SEQ ID NO: 159 - RNA, 20 nt, Artificial Sequence
  Antisense oligo
cacccaggcuggaguacagu

SEQ ID NO: 160 - RNA, 20 nt, Artificial Sequence
  Antisense oligo
ucacccaggcuggaguacag

SEQ ID NO: 161 - RNA, 20 nt, Artificial Sequence
  Antisense oligo
uucacccaggcuggaguaca

SEQ ID NO: 162 - RNA, 20 nt, Artificial Sequence
  Antisense oligo
uuucacccaggcuggaguac

SEQ ID NO: 163 - RNA, 20 nt, Artificial Sequence
  Antisense oligo
guuucacccaggcuggagua

SEQ ID NO: 164 - RNA, 20 nt, Artificial Sequence
  Antisense oligo
aguuucacccaggcuggagu

SEQ ID NO: 165 - RNA, 20 nt, Artificial Sequence
  Antisense oligo
caguuucacccaggcuggag

SEQ ID NO: 166 - RNA, 20 nt, Artificial Sequence
  Antisense oligo
acaguuucacccaggcugga

SEQ ID NO: 167 - RNA, 20 nt, Artificial Sequence
  Antisense oligo
gacaguuucacccaggcugg

SEQ ID NO: 168 - RNA, 20 nt, Artificial Sequence
  Antisense oligo
ugacaguuucacccaggcug

SEQ ID NO: 169 - RNA, 20 nt, Artificial Sequence
  Antisense oligo
uugacaguuucacccaggcu

SEQ ID NO: 170 - RNA, 20 nt, Artificial Sequence
  Antisense oligo
guuuguuugacaguuucacc

SEQ ID NO: 171 - RNA, 20 nt, Artificial Sequence
  Antisense oligo
uucuccaaugcuacacuggg

SEQ ID NO: 172 - RNA, 20 nt, Artificial Sequence
  Antisense oligo
guuuccuucuccaaugcuac

SEQ ID NO: 173 - RNA, 20 nt, Artificial Sequence
  Antisense oligo
uguuuccuucuccaaugcua

SEQ ID NO: 174 - RNA, 20 nt, Artificial Sequence
  Antisense oligo
guguuuccuucuccaaugcu

SEQ ID NO: 175 - RNA, 20 nt, Artificial Sequence
  Antisense oligo
cucccucccucaaacaccuu

SEQ ID NO: 176 - RNA, 20 nt, Artificial Sequence
  Antisense oligo
acucccucccucaaacaccu

SEQ ID NO: 177 - RNA, 20 nt, Artificial Sequence
  Antisense oligo
cacucccucccucaaacacc

SEQ ID NO: 178 - RNA, 20 nt, Artificial Sequence
  Antisense oligo
accaccaguggacacucccu

SEQ ID NO: 179 - RNA, 20 nt, Artificial Sequence
  Antisense oligo
aaccaccaguggacacuccc

SEQ ID NO: 180 - RNA, 20 nt, Artificial Sequence
  Antisense oligo
caaccaccaguggacacucc

SEQ ID NO: 181 - RNA, 20 nt, Artificial Sequence
  Antisense oligo
acaaccaccaguggacacuc

SEQ ID NO: 182 - RNA, 20 nt, Artificial Sequence
  Antisense oligo
aacaaccaccaguggacacu

SEQ ID NO: 183 - RNA, 20 nt, Artificial Sequence
  Antisense oligo
aaacaaccaccaguggacac

SEQ ID NO: 184 - RNA, 20 nt, Artificial Sequence
  Antisense oligo
gaaacaaccaccaguggaca

SEQ ID NO: 185 - RNA, 20 nt, Artificial Sequence
  Antisense oligo
ugaaacaaccaccaguggac

SEQ ID NO: 186 - RNA, 20 nt, Artificial Sequence
  Antisense oligo
acucuaccugaaacaaccac

SEQ ID NO: 187 - RNA, 20 nt, Artificial Sequence
  Antisense oligo
cacucuaccugaaacaacca

SEQ ID NO: 188 - RNA, 20 nt, Artificial Sequence
  Antisense oligo
acacucuaccugaaacaacc

SEQ ID NO: 189 - RNA, 20 nt, Artificial Sequence
  Antisense oligo
cacacucuaccugaaacaac

SEQ ID NO: 190 - RNA, 20 nt, Artificial Sequence
  Antisense oligo
ccacacucuaccugaaacaa

SEQ ID NO: 191 - RNA, 20 nt, Artificial Sequence
  Antisense oligo
uccacacucuaccugaaaca

SEQ ID NO: 192 - RNA, 20 nt, Artificial Sequence
  Antisense oligo
cuccacacucuaccugaaac

SEQ ID NO: 193 - RNA, 20 nt, Artificial Sequence
  Antisense oligo
cccuccacacucuaccugaa

SEQ ID NO: 194 - RNA, 20 nt, Artificial Sequence
  Antisense oligo
uucagaguagaaggagaguu

SEQ ID NO: 195 - RNA, 20 nt, Artificial Sequence
  Antisense oligo
gcccuuuuauuccagagacu

SEQ ID NO: 196 - RNA, 20 nt, Artificial Sequence
  Antisense oligo
gcugcccuuuuauuccagag

SEQ ID NO: 197 - RNA, 20 nt, Artificial Sequence
  Antisense oligo
ugcugcccuuuuauuccaga

SEQ ID NO: 198 - RNA, 20 nt, Artificial Sequence
  Antisense oligo
ucugcugcccuuuuauucca

SEQ ID NO: 199 - RNA, 20 nt, Artificial Sequence
  Antisense oligo
gucugcugcccuuuuauucc

SEQ ID NO: 200 - RNA, 20 nt, Artificial Sequence
  Antisense oligo
ggucugcugcccuuuuauuc

SEQ ID NO: 201 - RNA, 20 nt, Artificial Sequence
  Antisense oligo
ccaggucugcugcccuuuua

SEQ ID NO: 202 - RNA, 20 nt, Artificial Sequence
  Antisense oligo
ucuccaggucugcugcccuu

SEQ ID NO: 203 - RNA, 20 nt, Artificial Sequence
  Antisense oligo
uucuccaggucugcugcccu

SEQ ID NO: 204 - RNA, 20 nt, Artificial Sequence
  Antisense oligo
uuucuccaggucugcugccc

SEQ ID NO: 205 - RNA, 20 nt, Artificial Sequence
  Antisense oligo
gcaucccuuuucuccagguc

SEQ ID NO: 206 - RNA, 20 nt, Artificial Sequence
  Antisense oligo
ugcaucccuuuucuccaggu

SEQ ID NO: 207 - RNA, 20 nt, Artificial Sequence
  Antisense oligo
guaugggacaauuugcaucc

SEQ ID NO: 208 - RNA, 20 nt, Artificial Sequence
  Antisense oligo
uguaugggacaauuugcauc

SEQ ID NO: 209 - RNA, 20 nt, Artificial Sequence
  Antisense oligo
guguaugggacaauuugcau

SEQ ID NO: 210 - RNA, 20 nt, Artificial Sequence
  Antisense oligo
gguguaugggacaauuugca

SEQ ID NO: 211 - RNA, 20 nt, Artificial Sequence
  Antisense oligo
uagguguaugggacaauuug

SEQ ID NO: 212 - RNA, 20 nt, Artificial Sequence
  Antisense oligo
caauagguguaugggacaau

SEQ ID NO: 213 - RNA, 20 nt, Artificial Sequence
  Antisense oligo
ccaauagguguaugggacaa

SEQ ID NO: 214 - RNA, 20 nt, Artificial Sequence
  Antisense oligo
gguucccaauagguguaugg

SEQ ID NO: 215 - RNA, 20 nt, Artificial Sequence
  Antisense oligo
agguucccaauagguguaug

SEQ ID NO: 216 - RNA, 20 nt, Artificial Sequence
  Antisense oligo
gagguucccaauagguguau

SEQ ID NO: 217 - RNA, 20 nt, Artificial Sequence
  Antisense oligo
ugagguucccaauaggugua

SEQ ID NO: 218 - RNA, 20 nt, Artificial Sequence
  Antisense oligo
augagguucccaauaggugu

SEQ ID NO: 219 - RNA, 20 nt, Artificial Sequence
  Antisense oligo
gaugagguucccaauaggug

SEQ ID NO: 220 - RNA, 20 nt, Artificial Sequence
  Antisense oligo
ugaugagguucccaauaggu

SEQ ID NO: 221 - RNA, 20 nt, Artificial Sequence
  Antisense oligo
uuugaugagguucccaauag

SEQ ID NO: 222 - RNA, 20 nt, Artificial Sequence
  Antisense oligo
cuuugaugagguucccaaua

SEQ ID NO: 223 - RNA, 20 nt, Artificial Sequence
  Antisense oligo
ucuuugaugagguucccaau

SEQ ID NO: 224 - RNA, 20 nt, Artificial Sequence
  Antisense oligo
cucuuugaugagguucccaa

SEQ ID NO: 225 - RNA, 20 nt, Artificial Sequence
  Antisense oligo
ucucuuugaugagguuccca

SEQ ID NO: 226 - RNA, 20 nt, Artificial Sequence
  Antisense oligo
gcagucuucucuuugaugag

SEQ ID NO: 227 - RNA, 20 nt, Artificial Sequence
  Antisense oligo
agacaacccugcacaccucc

SEQ ID NO: 228 - RNA, 20 nt, Artificial Sequence
  Antisense oligo
aagacaacccugcacaccuc

SEQ ID NO: 229 - RNA, 20 nt, Artificial Sequence
  Antisense oligo
caagacaacccugcacaccu

SEQ ID NO: 230 - RNA, 20 nt, Artificial Sequence
  Antisense oligo
acaagacaacccugcacacc

SEQ ID NO: 231 - RNA, 20 nt, Artificial Sequence
  Antisense oligo
aacaagacaacccugcacac

SEQ ID NO: 232 - RNA, 20 nt, Artificial Sequence
  Antisense oligo
acaacaagacaacccugcac

SEQ ID NO: 233 - RNA, 20 nt, Artificial Sequence
  Antisense oligo
cacaacaagacaacccugca

SEQ ID NO: 234 - RNA, 20 nt, Artificial Sequence
  Antisense oligo
gcacaacaagacaacccugc

SEQ ID NO: 235 - RNA, 20 nt, Artificial Sequence
  Antisense oligo
ugcacaacaagacaacccug

SEQ ID NO: 236 - RNA, 20 nt, Artificial Sequence
  Antisense oligo
cugcacaacaagacaacccu

SEQ ID NO: 237 - RNA, 20 nt, Artificial Sequence
  Antisense oligo
ucugcacaacaagacaaccc

SEQ ID NO: 238 - RNA, 20 nt, Artificial Sequence
  Antisense oligo
gauuaucugcacaacaagac

SEQ ID NO: 239 - RNA, 20 nt, Artificial Sequence
  Antisense oligo
gagugauuaucugcacaaca

SEQ ID NO: 240 - RNA, 20 nt, Artificial Sequence
  Antisense oligo
ugagugauuaucugcacaac

SEQ ID NO: 241 - RNA, 20 nt, Artificial Sequence
  Antisense oligo
cugagugauuaucugcacaa

SEQ ID NO: 242 - RNA, 20 nt, Artificial Sequence
  Antisense oligo
gcucugagaucaccugagug

SEQ ID NO: 243 - RNA, 20 nt, Artificial Sequence
  Antisense oligo
agcucugagaucaccugagu

SEQ ID NO: 244 - RNA, 20 nt, Artificial Sequence
  Antisense oligo
cagcucugagaucaccugag

SEQ ID NO: 245 - RNA, 20 nt, Artificial Sequence
  Antisense oligo
gcagcucugagaucaccuga

SEQ ID NO: 246 - RNA, 20 nt, Artificial Sequence
  Antisense oligo
agcagcucugagaucaccug

SEQ ID NO: 247 - RNA, 20 nt, Artificial Sequence
  Antisense oligo
gagcagcucugagaucaccu

SEQ ID NO: 248 - RNA, 20 nt, Artificial Sequence
  Antisense oligo
acacaagaggagugccugcg

SEQ ID NO: 249 - RNA, 20 nt, Artificial Sequence
  Antisense oligo
cacacaagaggagugccugc

SEQ ID NO: 250 - RNA, 20 nt, Artificial Sequence
  Antisense oligo
cagggacacacaagaggagu

SEQ ID NO: 251 - RNA, 20 nt, Artificial Sequence
  Antisense oligo
cccagggacacacaagagga

SEQ ID NO: 252 - RNA, 20 nt, Artificial Sequence
  Antisense oligo
ucuaggaacggucccaggga

SEQ ID NO: 253 - RNA, 20 nt, Artificial Sequence
  Antisense oligo
aucuaggaacggucccaggg

SEQ ID NO: 254 - RNA, 20 nt, Artificial Sequence
  Antisense oligo
gaucuaggaacggucccagg

SEQ ID NO: 255 - RNA, 20 nt, Artificial Sequence
  Antisense oligo
ggaucuaggaacggucccag

SEQ ID NO: 256 - RNA, 20 nt, Artificial Sequence
  Antisense oligo
agagggaucuaggaacgguc

SEQ ID NO: 257 - RNA, 20 nt, Artificial Sequence
  Antisense oligo
uuaucugccuagagggaucu

SEQ ID NO: 258 - RNA, 20 nt, Artificial Sequence
  Antisense oligo
auuaucugccuagagggauc

SEQ ID NO: 259 - RNA, 20 nt, Artificial Sequence
  Antisense oligo
cauuaucugccuagagggau

SEQ ID NO: 260 - RNA, 20 nt, Artificial Sequence
  Antisense oligo
ccauuaucugccuagaggga

SEQ ID NO: 261 - RNA, 20 nt, Artificial Sequence
  Antisense oligo
cccauuaucugccuagaggg

SEQ ID NO: 262 - RNA, 20 nt, Artificial Sequence
  Antisense oligo
gcuauaaaggaaauccacac

SEQ ID NO: 263 - RNA, 20 nt, Artificial Sequence
  Antisense oligo
cucaggaguucugggaagcu

SEQ ID NO: 264 - RNA, 20 nt, Artificial Sequence
  Antisense oligo
cauacucaggaguucuggga

SEQ ID NO: 265 - RNA, 20 nt, Artificial Sequence
  Antisense oligo
acauacucaggaguucuggg

SEQ ID NO: 266 - RNA, 20 nt, Artificial Sequence
  Antisense oligo
cacauacucaggaguucugg

SEQ ID NO: 267 - RNA, 20 nt, Artificial Sequence
  Antisense oligo
ccacauacucaggaguucug

SEQ ID NO: 268 - RNA, 20 nt, Artificial Sequence
  Antisense oligo
accacauacucaggaguucu

SEQ ID NO: 269 - RNA, 20 nt, Artificial Sequence
  Antisense oligo
aaccacauacucaggaguuc

SEQ ID NO: 270 - RNA, 20 nt, Artificial Sequence
  Antisense oligo
caaccacauacucaggaguu

SEQ ID NO: 271 - RNA, 20 nt, Artificial Sequence
  Antisense oligo
gagcaaccacauacucagga

SEQ ID NO: 272 - RNA, 20 nt, Artificial Sequence
  Antisense oligo
cagagcaaccacauacucag

SEQ ID NO: 273 - RNA, 20 nt, Artificial Sequence
  Antisense oligo
ucagagcaaccacauacuca

SEQ ID NO: 274 - RNA, 20 nt, Artificial Sequence
  Antisense oligo
uucagagcaaccacauacuc

SEQ ID NO: 275 - RNA, 20 nt, Artificial Sequence
  Antisense oligo
auucagagcaaccacauacu

SEQ ID NO: 276 - RNA, 20 nt, Artificial Sequence
  Antisense oligo
cuauucagagcaaccacaua

SEQ ID NO: 277 - RNA, 20 nt, Artificial Sequence
  Antisense oligo
gcuauucagagcaaccacau

SEQ ID NO: 278 - RNA, 20 nt, Artificial Sequence
  Antisense oligo
ggcuauucagagcaaccaca

SEQ ID NO: 279 - RNA, 20 nt, Artificial Sequence
  Antisense oligo
uggcuauucagagcaaccac

SEQ ID NO: 280 - RNA, 20 nt, Artificial Sequence
  Antisense oligo
auggcuauucagagcaacca

SEQ ID NO: 281 - RNA, 20 nt, Artificial Sequence
  Antisense oligo
gauggcuauucagagcaacc

SEQ ID NO: 282 - RNA, 20 nt, Artificial Sequence
  Antisense oligo
ggucaauuuugagauggcua

SEQ ID NO: 283 - RNA, 20 nt, Artificial Sequence
  Antisense oligo
agcagccaggaggacacuca

SEQ ID NO: 284 - RNA, 20 nt, Artificial Sequence
  Antisense oligo
acuggugccuucagcagcca

SEQ ID NO: 285 - RNA, 20 nt, Artificial Sequence
  Antisense oligo
gaaccaaagaacuccacugg

SEQ ID NO: 286 - RNA, 20 nt, Artificial Sequence
  Antisense oligo
ggaaccaaagaacuccacug

SEQ ID NO: 287 - RNA, 20 nt, Artificial Sequence
  Antisense oligo
gcuuggaaccaaagaacucc

SEQ ID NO: 288 - RNA, 20 nt, Artificial Sequence
  Antisense oligo
ggcuuggaaccaaagaacuc

SEQ ID NO: 289 - RNA, 20 nt, Artificial Sequence
  Antisense oligo
ucugcuggcuuggaaccaaa

SEQ ID NO: 290 - RNA, 20 nt, Artificial Sequence
  Antisense oligo
cuucuucugcuggcuuggaa

SEQ ID NO: 291 - RNA, 20 nt, Artificial Sequence
  Antisense oligo
ccuucuucugcuggcuugga

SEQ ID NO: 292 - RNA, 20 nt, Artificial Sequence
  Antisense oligo
caccuucuucugcuggcuug

SEQ ID NO: 293 - RNA, 20 nt, Artificial Sequence
  Antisense oligo
ccaccuucuucugcuggcuu

SEQ ID NO: 294 - RNA, 20 nt, Artificial Sequence
  Antisense oligo
uaagaagccucagggcacac

SEQ ID NO: 295 - RNA, 20 nt, Artificial Sequence
  Antisense oligo
aguaagaagccucagggcac

SEQ ID NO: 296 - RNA, 20 nt, Artificial Sequence
  Antisense oligo
caguaagaagccucagggca

SEQ ID NO: 297 - RNA, 20 nt, Artificial Sequence
  Antisense oligo
aggaccugacucucucccuc

SEQ ID NO: 298 - RNA, 20 nt, Artificial Sequence
  Antisense oligo
gaggaccugacucucucccu

SEQ ID NO: 299 - RNA, 20 nt, Artificial Sequence
  Antisense oligo
guggaggaccugacucucuc

SEQ ID NO: 300 - RNA, 20 nt, Artificial Sequence
  Antisense oligo
aguggaggaccugacucucu

SEQ ID NO: 301 - RNA, 20 nt, Artificial Sequence
  Antisense oligo
caguggaggaccugacucuc

SEQ ID NO: 302 - RNA, 20 nt, Artificial Sequence
  Antisense oligo
acaguggaggaccugacucu

SEQ ID NO: 303 - RNA, 20 nt, Artificial Sequence
  Antisense oligo
aacaguggaggaccugacuc

SEQ ID NO: 304 - RNA, 20 nt, Artificial Sequence
  Antisense oligo
uugcauccagggugagagug

SEQ ID NO: 305 - RNA, 20 nt, Artificial Sequence
  Antisense oligo
cuugcauccagggugagagu

SEQ ID NO: 306 - RNA, 20 nt, Artificial Sequence
  Antisense oligo
ucuugcauccagggugagag

SEQ ID NO: 307 - RNA, 20 nt, Artificial Sequence
  Antisense oligo
uucuugcauccagggugaga

SEQ ID NO: 308 - RNA, 20 nt, Artificial Sequence
  Antisense oligo
cuucuugcauccagggugag

SEQ ID NO: 309 - RNA, 20 nt, Artificial Sequence
  Antisense oligo
acuucuugcauccaggguga

SEQ ID NO: 310 - RNA, 20 nt, Artificial Sequence
  Antisense oligo
cacuucuugcauccagggug

SEQ ID NO: 311 - RNA, 20 nt, Artificial Sequence
  Antisense oligo
ucacuucuugcauccagggu

SEQ ID NO: 312 - RNA, 20 nt, Artificial Sequence
  Antisense oligo
gucacuucuugcauccaggg

SEQ ID NO: 313 - RNA, 20 nt, Artificial Sequence
  Antisense oligo
ggucacuucuugcauccagg

SEQ ID NO: 314 - RNA, 20 nt, Artificial Sequence
  Antisense oligo
gggucacuucuugcauccag

SEQ ID NO: 315 - RNA, 20 nt, Artificial Sequence
  Antisense oligo
accagaccaaggccaggacu

SEQ ID NO: 316 - RNA, 20 nt, Artificial Sequence
  Antisense oligo
aaaccagaccaaggccagga

SEQ ID NO: 317 - RNA, 20 nt, Artificial Sequence
  Antisense oligo
caaaccagaccaaggccagg

SEQ ID NO: 318 - RNA, 20 nt, Artificial Sequence
  Antisense oligo
aucaaaccagaccaaggcca

SEQ ID NO: 319 - RNA, 20 nt, Artificial Sequence
  Antisense oligo
caucaaaccagaccaaggcc

SEQ ID NO: 320 - RNA, 20 nt, Artificial Sequence
  Antisense oligo
gcaucaaaccagaccaaggc

SEQ ID NO: 321 - RNA, 20 nt, Artificial Sequence
  Antisense oligo
ggcaucaaaccagaccaagg

SEQ ID NO: 322 - RNA, 20 nt, Artificial Sequence
  Antisense oligo
uggcaucaaaccagaccaag

SEQ ID NO: 323 - RNA, 20 nt, Artificial Sequence
  Antisense oligo
gauggcaucaaaccagacca

SEQ ID NO: 324 - RNA, 20 nt, Artificial Sequence
  Antisense oligo
ggauggcaucaaaccagacc

SEQ ID NO: 325 - RNA, 20 nt, Artificial Sequence
  Antisense oligo
uggauggcaucaaaccagac

SEQ ID NO: 326 - RNA, 20 nt, Artificial Sequence
  Antisense oligo
guggauggcaucaaaccaga

SEQ ID NO: 327 - RNA, 20 nt, Artificial Sequence
  Antisense oligo
gcgguggauggcaucaaacc

SEQ ID NO: 328 - RNA, 20 nt, Artificial Sequence
  Antisense oligo
ugcgguggauggcaucaaac

SEQ ID NO: 329 - RNA, 20 nt, Artificial Sequence
  Antisense oligo
cucugcgguggauggcauca

SEQ ID NO: 330 - RNA, 20 nt, Artificial Sequence
  Antisense oligo
aacagccucugcgguggaug

SEQ ID NO: 331 - RNA, 20 nt, Artificial Sequence
  Antisense oligo
gaacagccucugcgguggau

SEQ ID NO: 332 - RNA, 20 nt, Artificial Sequence
  Antisense oligo
agaacagccucugcggugga

SEQ ID NO: 333 - RNA, 20 nt, Artificial Sequence
  Antisense oligo
cugcccucagaacagccucu

SEQ ID NO: 334 - RNA, 20 nt, Artificial Sequence
  Antisense oligo
accaccugcccucagaacag

SEQ ID NO: 335 - RNA, 20 nt, Artificial Sequence
  Antisense oligo
acucugcacugaccaccugc

SEQ ID NO: 336 - RNA, 20 nt, Artificial Sequence
  Antisense oligo
cacucugcacugaccaccug

SEQ ID NO: 337 - RNA, 20 nt, Artificial Sequence
  Antisense oligo
aggcugccauccacaaagcg

SEQ ID NO: 338 - RNA, 20 nt, Artificial Sequence
  Antisense oligo
gggaggcugccauccacaaa

SEQ ID NO: 339 - RNA, 20 nt, Artificial Sequence
  Antisense oligo
augccucacccuccucaucc

SEQ ID NO: 340 - RNA, 20 nt, Artificial Sequence
  Antisense oligo
aacauggguugggcugggug

SEQ ID NO: 341 - RNA, 20 nt, Artificial Sequence
  Antisense oligo
gcugagaacauggguugggc

SEQ ID NO: 342 - RNA, 20 nt, Artificial Sequence
  Antisense oligo
ugcugagaacauggguuggg

SEQ ID NO: 343 - RNA, 20 nt, Artificial Sequence
  Antisense oligo
caucccugcugcugagaaca

SEQ ID NO: 344 - RNA, 20 nt, Artificial Sequence
  Antisense oligo
cuagaaccaucccugcugcu

SEQ ID NO: 345 - RNA, 20 nt, Artificial Sequence
  Antisense oligo
agccuagaaccaucccugcu

SEQ ID NO: 346 - RNA, 20 nt, Artificial Sequence
  Antisense oligo
cagccuagaaccaucccugc

SEQ ID NO: 347 - RNA, 20 nt, Artificial Sequence
  Antisense oligo
ccagccuagaaccaucccug

SEQ ID NO: 348 - RNA, 20 nt, Artificial Sequence
  Antisense oligo
gccagccuagaaccaucccu

SEQ ID NO: 349 - RNA, 20 nt, Artificial Sequence
  Antisense oligo
agccagccuagaaccauccc

SEQ ID NO: 350 - RNA, 20 nt, Artificial Sequence
  Antisense oligo
cagccagccuagaaccaucc

SEQ ID NO: 351 - RNA, 20 nt, Artificial Sequence
  Antisense oligo
ucagccagccuagaaccauc

SEQ ID NO: 352 - RNA, 20 nt, Artificial Sequence
  Antisense oligo
uucagccagccuagaaccau

SEQ ID NO: 353 - RNA, 20 nt, Artificial Sequence
  Antisense oligo
auucagccagccuagaacca

SEQ ID NO: 354 - RNA, 20 nt, Artificial Sequence
  Antisense oligo
cauucagccagccuagaacc

SEQ ID NO: 355 - RNA, 20 nt, Artificial Sequence
  Antisense oligo
ucauucagccagccuagaac

SEQ ID NO: 356 - RNA, 20 nt, Artificial Sequence
  Antisense oligo
cucauucagccagccuagaa

SEQ ID NO: 357 - RNA, 20 nt, Artificial Sequence
  Antisense oligo
ccucauucagccagccuaga

SEQ ID NO: 358 - RNA, 20 nt, Artificial Sequence
  Antisense oligo
cccucauucagccagccuag

SEQ ID NO: 359 - RNA, 20 nt, Artificial Sequence
  Antisense oligo
uggucccucauucagccagc

SEQ ID NO: 360 - RNA, 20 nt, Artificial Sequence
  Antisense oligo
ugcccuggucccucauucag

SEQ ID NO: 361 - RNA, 20 nt, Artificial Sequence
  Antisense oligo
cugcccuggucccucauuca

SEQ ID NO: 362 - RNA, 20 nt, Artificial Sequence
  Antisense oligo
aacaggagcacagcccaagc

SEQ ID NO: 363 - RNA, 20 nt, Artificial Sequence
  Antisense oligo
ccaacaggagcacagcccaa

SEQ ID NO: 364 - RNA, 20 nt, Artificial Sequence
  Antisense oligo
aaacccaacaggagcacagc

SEQ ID NO: 365 - RNA, 20 nt, Artificial Sequence
  Antisense oligo
gaaacccaacaggagcacag

SEQ ID NO: 366 - RNA, 20 nt, Artificial Sequence
  Antisense oligo
ggaaacccaacaggagcaca

SEQ ID NO: 367 - RNA, 20 nt, Artificial Sequence
  Antisense oligo
uggaaacccaacaggagcac

SEQ ID NO: 368 - RNA, 20 nt, Artificial Sequence
  Antisense oligo
guuaauggaaacccaacagg

SEQ ID NO: 369 - RNA, 20 nt, Artificial Sequence
  Antisense oligo
cgaaagugaaaucacagcag

SEQ ID NO: 370 - RNA, 20 nt, Artificial Sequence
  Antisense oligo
ugcgaaagugaaaucacagc

SEQ ID NO: 371 - RNA, 20 nt, Artificial Sequence
  Antisense oligo
ucugcgaaagugaaaucaca

SEQ ID NO: 372 - RNA, 20 nt, Artificial Sequence
  Antisense oligo
uucugcgaaagugaaaucac

SEQ ID NO: 373 - RNA, 20 nt, Artificial Sequence
  Antisense oligo
accacggcuucaguuucauu

SEQ ID NO: 374 - RNA, 20 nt, Artificial Sequence
  Antisense oligo
gaccacggcuucaguuucau

SEQ ID NO: 375 - RNA, 20 nt, Artificial Sequence
  Antisense oligo
ugaccacggcuucaguuuca

SEQ ID NO: 376 - RNA, 20 nt, Artificial Sequence
  Antisense oligo
gugaccacggcuucaguuuc

SEQ ID NO: 377 - RNA, 20 nt, Artificial Sequence
  Antisense oligo
cgugaccacggcuucaguuu

SEQ ID NO: 378 - RNA, 20 nt, Artificial Sequence
  Antisense oligo
ucgcuggcagccugcuauau

SEQ ID NO: 379 - RNA, 20 nt, Artificial Sequence
  Antisense oligo
agucgcuggcagccugcuau

SEQ ID NO: 380 - RNA, 20 nt, Artificial Sequence
  Antisense oligo
gaagcaagagcaggagucgc

SEQ ID NO: 381 - RNA, 20 nt, Artificial Sequence
  Antisense oligo
agaagcaagagcaggagucg

SEQ ID NO: 382 - RNA, 20 nt, Artificial Sequence
  Antisense oligo
cagaagcaagagcaggaguc

SEQ ID NO: 383 - RNA, 20 nt, Artificial Sequence
  Antisense oligo
ccagaagcaagagcaggagu

SEQ ID NO: 384 - RNA, 20 nt, Artificial Sequence
  Antisense oligo
ggcacgaaggacacuccaug

SEQ ID NO: 385 - RNA, 20 nt, Artificial Sequence
  Antisense oligo
uggcacgaaggacacuccau

SEQ ID NO: 386 - RNA, 20 nt, Artificial Sequence
  Antisense oligo
cuggcacgaaggacacucca

SEQ ID NO: 387 - RNA, 20 nt, Artificial Sequence
  Antisense oligo
ugcuggcacgaaggacacuc

SEQ ID NO: 388 - RNA, 20 nt, Artificial Sequence
  Antisense oligo
augcuggcacgaaggacacu

SEQ ID NO: 389 - RNA, 20 nt, Artificial Sequence
  Antisense oligo
caugcuggcacgaaggacac

SEQ ID NO: 390 - RNA, 20 nt, Artificial Sequence
  Antisense oligo
acaugcuggcacgaaggaca

SEQ ID NO: 391 - RNA, 20 nt, Artificial Sequence
  Antisense oligo
gacaugcuggcacgaaggac

SEQ ID NO: 392 - RNA, 20 nt, Artificial Sequence
  Antisense oligo
agacaugcuggcacgaagga

SEQ ID NO: 393 - RNA, 20 nt, Artificial Sequence
  Antisense oligo
gagacaugcuggcacgaagg

SEQ ID NO: 394 - RNA, 20 nt, Artificial Sequence
  Antisense oligo
ggagacaugcuggcacgaag

SEQ ID NO: 395 - RNA, 20 nt, Artificial Sequence
  Antisense oligo
uggagacaugcuggcacgaa

SEQ ID NO: 396 - RNA, 20 nt, Artificial Sequence
  Antisense oligo
uuggagacaugcuggcacga

SEQ ID NO: 397 - RNA, 20 nt, Artificial Sequence
  Antisense oligo
cuuggagacaugcuggcacg

SEQ ID NO: 398 - RNA, 20 nt, Artificial Sequence
  Antisense oligo
uuccuccuuggagacaugcu

SEQ ID NO: 399 - RNA, 20 nt, Artificial Sequence
  Antisense oligo
uuuccuccuuggagacaugc

SEQ ID NO: 400 - RNA, 20 nt, Artificial Sequence
  Antisense oligo
gguuuccuccuuggagacau

SEQ ID NO: 401 - RNA, 20 nt, Artificial Sequence
  Antisense oligo
gaggugagacaucuccaggg

SEQ ID NO: 402 - RNA, 20 nt, Artificial Sequence
  Antisense oligo
cugcugcccaggguuuccau

SEQ ID NO: 403 - RNA, 20 nt, Artificial Sequence
  Antisense oligo
gucacuuuugagauggcuau

SEQ ID NO: 404 - RNA, 20 nt, Artificial Sequence
  Antisense oligo
ggucacuuuugagauggcua

SEQ ID NO: 405 - RNA, 20 nt, Artificial Sequence
  Antisense oligo
uggucacuuuugagauggcu

SEQ ID NO: 406 - RNA, 20 nt, Artificial Sequence
  Antisense oligo
gacucuguggucacuuuuga

SEQ ID NO: 407 - RNA, 20 nt, Artificial Sequence
  Antisense oligo
cagacucuguggucacuuuu

SEQ ID NO: 408 - RNA, 20 nt, Artificial Sequence
  Antisense oligo
aacgagggacggaagcacug

SEQ ID NO: 409 - RNA, 20 nt, Artificial Sequence
  Antisense oligo
gaacgagggacggaagcacu

SEQ ID NO: 410 - RNA, 20 nt, Artificial Sequence
  Antisense oligo
ugaacgagggacggaagcac

SEQ ID NO: 411 - RNA, 20 nt, Artificial Sequence
  Antisense oligo
cugaacgagggacggaagca

SEQ ID NO: 412 - RNA, 20 nt, Artificial Sequence
  Antisense oligo
cuuguuuuguccucucccug

SEQ ID NO: 413 - RNA, 20 nt, Artificial Sequence
  Antisense oligo
uucuuguuuuguccucuccc

SEQ ID NO: 414 - RNA, 20 nt, Artificial Sequence
  Antisense oligo
acuucuuguuuuguccucuc

SEQ ID NO: 415 - RNA, 20 nt, Artificial Sequence
  Antisense oligo
gcaggaaccuccagcaaaga

SEQ ID NO: 416 - RNA, 20 nt, Artificial Sequence
  Antisense oligo
agcaggaaccuccagcaaag

SEQ ID NO: 417 - RNA, 20 nt, Artificial Sequence
  Antisense oligo
aaagcaggaaccuccagcaa

SEQ ID NO: 418 - RNA, 20 nt, Artificial Sequence
  Antisense oligo
aaaagcaggaaccuccagca

SEQ ID NO: 419 - RNA, 20 nt, Artificial Sequence
  Antisense oligo
ucaaaagcaggaaccuccag

SEQ ID NO: 420 - RNA, 20 nt, Artificial Sequence
  Antisense oligo
uucaaaagcaggaaccucca

SEQ ID NO: 421 - RNA, 20 nt, Artificial Sequence
  Antisense oligo
gcucucucuaggaaaugaaa

SEQ ID NO: 422 - RNA, 20 nt, Artificial Sequence
  Antisense oligo
gacacuucucauucccaagg

SEQ ID NO: 423 - RNA, 20 nt, Artificial Sequence
  Antisense oligo
cgacacuucucauucccaag

SEQ ID NO: 424 - RNA, 20 nt, Artificial Sequence
  Antisense oligo
gcccgacacuucucauuccc

SEQ ID NO: 425 - RNA, 20 nt, Artificial Sequence
  Antisense oligo
agcccgacacuucucauucc

SEQ ID NO: 426 - RNA, 20 nt, Artificial Sequence
  Antisense oligo
cagcccgacacuucucauuc

SEQ ID NO: 427 - RNA, 20 nt, Artificial Sequence
  Antisense oligo
cucagcccgacacuucucau

SEQ ID NO: 428 - RNA, 20 nt, Artificial Sequence
  Antisense oligo
gcucagcccgacacuucuca

SEQ ID NO: 429 - RNA, 20 nt, Artificial Sequence
  Antisense oligo
agcucagcccgacacuucuc

SEQ ID NO: 430 - RNA, 20 nt, Artificial Sequence
  Antisense oligo
cucagcucagcccgacacuu

SEQ ID NO: 431 - RNA, 20 nt, Artificial Sequence
  Antisense oligo
cucuaugaagcccucagcuc

SEQ ID NO: 432 - RNA, 20 nt, Artificial Sequence
  Antisense oligo
cucucuaugaagcccucagc

SEQ ID NO: 433 - RNA, 20 nt, Artificial Sequence
  Antisense oligo
aacucucuaugaagcccuca

SEQ ID NO: 434 - RNA, 20 nt, Artificial Sequence
  Antisense oligo
aaacucucuaugaagcccuc

SEQ ID NO: 435 - RNA, 20 nt, Artificial Sequence
  Antisense oligo
gaaacucucuaugaagcccu

SEQ ID NO: 436 - RNA, 20 nt, Artificial Sequence
  Antisense oligo
ugaaacucucuaugaagccc

SEQ ID NO: 437 - RNA, 20 nt, Artificial Sequence
  Antisense oligo
cugaaacucucuaugaagcc

SEQ ID NO: 438 - RNA, 20 nt, Artificial Sequence
  Antisense oligo
ucugaaacucucuaugaagc

SEQ ID NO: 439 - RNA, 20 nt, Artificial Sequence
  Antisense oligo
cucugaaacucucuaugaag

SEQ ID NO: 440 - RNA, 20 nt, Artificial Sequence
  Antisense oligo
aaaacuaacccaggcagagc

SEQ ID NO: 441 - RNA, 20 nt, Artificial Sequence
  Antisense oligo
acucaagaugcucagcaggc

SEQ ID NO: 442 - RNA, 20 nt, Artificial Sequence
  Antisense oligo
agaauggacucaagaugcuc

SEQ ID NO: 443 - RNA, 20 nt, Artificial Sequence
  Antisense oligo
gccaacaaaauugagaaugg

SEQ ID NO: 444 - RNA, 20 nt, Artificial Sequence
  Antisense oligo
ccagaagccaacaaaauuga

SEQ ID NO: 445 - RNA, 20 nt, Artificial Sequence
  Antisense oligo
agaaaggcugaaggucuggg

SEQ ID NO: 446 - RNA, 20 nt, Artificial Sequence
  Antisense oligo
cacagaaaggcugaaggucu

SEQ ID NO: 447 - RNA, 20 nt, Artificial Sequence
  Antisense oligo
uuggacacagaaaggcugaa

SEQ ID NO: 448 - RNA, 20 nt, Artificial Sequence
  Antisense oligo
ggcugggcuuuggacacaga

SEQ ID NO: 449 - RNA, 20 nt, Artificial Sequence
  Antisense oligo
uggguccgauagaagcagcu

SEQ ID NO: 450 - RNA, 20 nt, Artificial Sequence
  Antisense oligo
auggguccgauagaagcagc

SEQ ID NO: 451 - RNA, 20 nt, Artificial Sequence
  Antisense oligo
gauggguccgauagaagcag

SEQ ID NO: 452 - RNA, 20 nt, Artificial Sequence
  Antisense oligo
ugauggguccgauagaagca

SEQ ID NO: 453 - RNA, 20 nt, Artificial Sequence
  Antisense oligo
gugauggguccgauagaagc

SEQ ID NO: 454 - RNA, 20 nt, Artificial Sequence
  Antisense oligo
ggugauggguccgauagaag

SEQ ID NO: 455 - RNA, 20 nt, Artificial Sequence
  Antisense oligo
gggugauggguccgauagaa

SEQ ID NO: 456 - RNA, 20 nt, Artificial Sequence
  Antisense oligo
gugguuugacugucugcugu

SEQ ID NO: 457 - RNA, 20 nt, Artificial Sequence
  Antisense oligo
ugugguuugacugucugcug

SEQ ID NO: 458 - RNA, 20 nt, Artificial Sequence
  Antisense oligo
gucugugguuugacugucug

SEQ ID NO: 459 - RNA, 20 nt, Artificial Sequence
  Antisense oligo
ggucugugguuugacugucu

SEQ ID NO: 460 - RNA, 20 nt, Artificial Sequence
  Antisense oligo
gggucugugguuugacuguc

SEQ ID NO: 461 - RNA, 20 nt, Artificial Sequence
  Antisense oligo
uuguccugaguuacagcggg

SEQ ID NO: 462 - RNA, 20 nt, Artificial Sequence
  Antisense oligo
cuuguccugaguuacagcgg

SEQ ID NO: 463 - RNA, 20 nt, Artificial Sequence
  Antisense oligo
cugcuuguccugaguuacag

SEQ ID NO: 464 - RNA, 20 nt, Artificial Sequence
  Antisense oligo
ccugcuuguccugaguuaca

SEQ ID NO: 465 - RNA, 20 nt, Artificial Sequence
  Antisense oligo
uccugcuuguccugaguuac

SEQ ID NO: 466 - RNA, 20 nt, Artificial Sequence
  Antisense oligo
cuccugcuuguccugaguua

SEQ ID NO: 467 - RNA, 20 nt, Artificial Sequence
  Antisense oligo
gcuccugcuuguccugaguu

SEQ ID NO: 468 - RNA, 20 nt, Artificial Sequence
  Antisense oligo
ggcuccugcuuguccugagu

SEQ ID NO: 469 - RNA, 20 nt, Artificial Sequence
  Antisense oligo
ccguaagggcuccugcuugu

SEQ ID NO: 470 - RNA, 20 nt, Artificial Sequence
  Antisense oligo
accguaagggcuccugcuug

SEQ ID NO: 471 - RNA, 20 nt, Artificial Sequence
  Antisense oligo
caccguaagggcuccugcuu

SEQ ID NO: 472 - RNA, 20 nt, Artificial Sequence
  Antisense oligo
agccgucuauguaggaccuc

SEQ ID NO: 473 - RNA, 20 nt, Artificial Sequence
  Antisense oligo
cagccgucuauguaggaccu

SEQ ID NO: 474 - RNA, 20 nt, Artificial Sequence
  Antisense oligo
gcagccgucuauguaggacc

SEQ ID NO: 475 - RNA, 20 nt, Artificial Sequence
  Antisense oligo
ggcagccgucuauguaggac

SEQ ID NO: 476 - RNA, 20 nt, Artificial Sequence
  Antisense oligo
gggcagccgucuauguagga

SEQ ID NO: 477 - RNA, 20 nt, Artificial Sequence
  Antisense oligo
ugggcagccgucuauguagg

SEQ ID NO: 478 - RNA, 20 nt, Artificial Sequence
  Antisense oligo
gugggcagccgucuauguag

SEQ ID NO: 479 - RNA, 20 nt, Artificial Sequence
  Antisense oligo
ggugggcagccgucuaugua

SEQ ID NO: 480 - RNA, 20 nt, Artificial Sequence
  Antisense oligo
gagggagccaagaggaaugg

SEQ ID NO: 481 - RNA, 20 nt, Artificial Sequence
  Antisense oligo
agagggagccaagaggaaug

SEQ ID NO: 482 - RNA, 20 nt, Artificial Sequence
  Antisense oligo
uguauccaggaagggccaga

SEQ ID NO: 483 - RNA, 20 nt, Artificial Sequence
  Antisense oligo
guguauccaggaagggccag

SEQ ID NO: 484 - RNA, 20 nt, Artificial Sequence
  Antisense oligo
gguguauccaggaagggcca

SEQ ID NO: 485 - RNA, 20 nt, Artificial Sequence
  Antisense oligo
ugguguauccaggaagggcc

SEQ ID NO: 486 - RNA, 20 nt, Artificial Sequence
  Antisense oligo
gcugggcaaagacugaaaga

SEQ ID NO: 487 - RNA, 20 nt, Artificial Sequence
  Antisense oligo
ggacaacaucggagagaccc

SEQ ID NO: 488 - RNA, 20 nt, Artificial Sequence
  Antisense oligo
aggacaacaucggagagacc

SEQ ID NO: 489 - RNA, 20 nt, Artificial Sequence
  Antisense oligo
aaggacaacaucggagagac

SEQ ID NO: 490 - RNA, 20 nt, Artificial Sequence
  Antisense oligo
gaaggacaacaucggagaga

SEQ ID NO: 491 - RNA, 20 nt, Artificial Sequence
  Antisense oligo
ugaaggacaacaucggagag

SEQ ID NO: 492 - RNA, 20 nt, Artificial Sequence
  Antisense oligo
uugaaggacaacaucggaga

SEQ ID NO: 493 - RNA, 20 nt, Artificial Sequence
  Antisense oligo
cuugaaggacaacaucggag

SEQ ID NO: 494 - RNA, 20 nt, Artificial Sequence
  Antisense oligo
ccuugaaggacaacaucgga

SEQ ID NO: 495 - RNA, 20 nt, Artificial Sequence
  Antisense oligo
cccuugaaggacaacaucgg

SEQ ID NO: 496 - RNA, 20 nt, Artificial Sequence
  Antisense oligo
acccuugaaggacaacaucg

SEQ ID NO: 497 - RNA, 20 nt, Artificial Sequence
  Antisense oligo
acacccuugaaggacaacau

SEQ ID NO: 498 - RNA, 20 nt, Artificial Sequence
  Antisense oligo
gcucacacccuugaaggaca

SEQ ID NO: 499 - RNA, 20 nt, Artificial Sequence
  Antisense oligo
ggcucacacccuugaaggac

SEQ ID NO: 500 - RNA, 20 nt, Artificial Sequence
  Antisense oligo
acaaacauggaaggacuggg

SEQ ID NO: 501 - RNA, 20 nt, Artificial Sequence
  Antisense oligo
gauuucgccacugcucucua

SEQ ID NO: 502 - RNA, 20 nt, Artificial Sequence
  Antisense oligo
cagugagcugagauuucgcc

SEQ ID NO: 503 - RNA, 20 nt, Artificial Sequence
  Antisense oligo
gcagugagcugagauuucgc

SEQ ID NO: 504 - RNA, 20 nt, Artificial Sequence
  Antisense oligo
ugcagugagcugagauuucg

SEQ ID NO: 505 - RNA, 20 nt, Artificial Sequence
  Antisense oligo
uugcagugagcugagauuuc

SEQ ID NO: 506 - RNA, 20 nt, Artificial Sequence
  Antisense oligo
guugcagugagcugagauuu

SEQ ID NO: 507 - RNA, 20 nt, Artificial Sequence
  Antisense oligo
gguugcagugagcugagauu

SEQ ID NO: 508 - RNA, 20 nt, Artificial Sequence
  Antisense oligo
agguugcagugagcugagau

SEQ ID NO: 509 - RNA, 20 nt, Artificial Sequence
  Antisense oligo
gagguugcagugagcugaga

SEQ ID NO: 510 - RNA, 20 nt, Artificial Sequence
  Antisense oligo
agagguugcagugagcugag

SEQ ID NO: 511 - RNA, 20 nt, Artificial Sequence
  Antisense oligo
cagagguugcagugagcuga

SEQ ID NO: 512 - RNA, 20 nt, Artificial Sequence
  Antisense oligo
gcagagguugcagugagcug

SEQ ID NO: 513 - RNA, 20 nt, Artificial Sequence
  Antisense oligo
ggcagagguugcagugagcu

SEQ ID NO: 514 - RNA, 20 nt, Artificial Sequence
  Antisense oligo
aggcagagguugcagugagc

SEQ ID NO: 515 - RNA, 20 nt, Artificial Sequence
  Antisense oligo
gaggcagagguugcagugag

SEQ ID NO: 516 - RNA, 20 nt, Artificial Sequence
  Antisense oligo
ggaggcagagguugcaguga

SEQ ID NO: 517 - RNA, 20 nt, Artificial Sequence
  Antisense oligo
gaagaaucacuugaacccgg

SEQ ID NO: 518 - RNA, 20 nt, Artificial Sequence
  Antisense oligo
agaagaaucacuugaacccg

SEQ ID NO: 519 - RNA, 20 nt, Artificial Sequence
  Antisense oligo
cagaagaaucacuugaaccc

SEQ ID NO: 520 - RNA, 20 nt, Artificial Sequence
  Antisense oligo
gcagaagaaucacuugaacc

SEQ ID NO: 521 - RNA, 20 nt, Artificial Sequence
  Antisense oligo
aggucaggaguucaaaacca

SEQ ID NO: 522 - RNA, 20 nt, Artificial Sequence
  Antisense oligo
gaggucaggaguucaaaacc

SEQ ID NO: 523 - RNA, 20 nt, Artificial Sequence
  Antisense oligo
ugaggucaggaguucaaaac

SEQ ID NO: 524 - RNA, 20 nt, Artificial Sequence
  Antisense oligo
cugaggucaggaguucaaaa

SEQ ID NO: 525 - RNA, 20 nt, Artificial Sequence
  Antisense oligo
aaucccagcacuuugugagg

SEQ ID NO: 526 - RNA, 20 nt, Artificial Sequence
  Antisense oligo
uaaucccagcacuuugugag

SEQ ID NO: 527 - RNA, 20 nt, Artificial Sequence
  Antisense oligo
auaaucccagcacuuuguga

SEQ ID NO: 528 - RNA, 20 nt, Artificial Sequence
  Antisense oligo
uauaaucccagcacuuugug

SEQ ID NO: 529 - RNA, 20 nt, Artificial Sequence
  Antisense oligo
cuauaaucccagcacuuugu

SEQ ID NO: 530 - RNA, 20 nt, Artificial Sequence
  Antisense oligo
ccuauaaucccagcacuuug

SEQ ID NO: 531 - RNA, 20 nt, Artificial Sequence
  Antisense oligo
gccuauaaucccagcacuuu

SEQ ID NO: 532 - RNA, 20 nt, Artificial Sequence
  Antisense oligo
cgccuauaaucccagcacuu

SEQ ID NO: 533 - RNA, 20 nt, Artificial Sequence
  Antisense oligo
acgccuauaaucccagcacu

SEQ ID NO: 534 - RNA, 20 nt, Artificial Sequence
  Antisense oligo
cacgccuauaaucccagcac

SEQ ID NO: 535 - RNA, 20 nt, Artificial Sequence
  Antisense oligo
ucacgccuauaaucccagca

SEQ ID NO: 536 - RNA, 20 nt, Artificial Sequence
  Antisense oligo
cucacgccuauaaucccagc

SEQ ID NO: 537 - RNA, 20 nt, Artificial Sequence
  Antisense oligo
gcucacgccuauaaucccag

SEQ ID NO: 538 - RNA, 20 nt, Artificial Sequence
  Antisense oligo
ggcucacgccuauaauccca

SEQ ID NO: 539 - RNA, 20 nt, Artificial Sequence
  Antisense oligo
uggcucacgccuauaauccc

SEQ ID NO: 540 - RNA, 20 nt, Artificial Sequence
  Antisense oligo
guggcucacgccuauaaucc

SEQ ID NO: 541 - RNA, 20 nt, Artificial Sequence
  Antisense oligo
gguggcucacgccuauaauc

SEQ ID NO: 542 - RNA, 20 nt, Artificial Sequence
  Antisense oligo
cgguggcucacgccuauaau

SEQ ID NO: 543 - RNA, 20 nt, Artificial Sequence
  Antisense oligo
gcgguggcucacgccuauaa

SEQ ID NO: 544 - RNA, 20 nt, Artificial Sequence
  Antisense oligo
uagaaguggagcccuuaggc

SEQ ID NO: 545 - RNA, 20 nt, Artificial Sequence
  Antisense oligo
aauagaaguggagcccuuag

SEQ ID NO: 546 - RNA, 20 nt, Artificial Sequence
  Antisense oligo
uuaauagaaguggagcccuu

SEQ ID NO: 547 - RNA, 20 nt, Artificial Sequence
  Antisense oligo
gcucuccgcacuauuauuaa

SEQ ID NO: 548 - RNA, 20 nt, Artificial Sequence
  Antisense oligo
uagaaacaguucaugcugcg

SEQ ID NO: 549 - RNA, 20 nt, Artificial Sequence
  Antisense oligo
cuagaaacaguucaugcugc

SEQ ID NO: 550 - RNA, 20 nt, Artificial Sequence
  Antisense oligo
cucaagugcauuugcuuugc

SEQ ID NO: 551 - RNA, 20 nt, Artificial Sequence
  Antisense oligo
ucucaagugcauuugcuuug

SEQ ID NO: 552 - RNA, 20 nt, Artificial Sequence
  Antisense oligo
gucucaagugcauuugcuuu

SEQ ID NO: 553 - RNA, 20 nt, Artificial Sequence
  Antisense oligo
agucucaagugcauuugcuu

SEQ ID NO: 554 - RNA, 20 nt, Artificial Sequence
  Antisense oligo
gagucucaagugcauuugcu

SEQ ID NO: 555 - RNA, 20 nt, Artificial Sequence
  Antisense oligo
aggagucucaagugcauuug

SEQ ID NO: 556 - RNA, 20 nt, Artificial Sequence
  Antisense oligo
uaggagucucaagugcauuu

SEQ ID NO: 557 - RNA, 20 nt, Artificial Sequence
  Antisense oligo
uuaggagucucaagugcauu

SEQ ID NO: 558 - RNA, 20 nt, Artificial Sequence
  Antisense oligo
auuaggagucucaagugcau

SEQ ID NO: 559 - RNA, 20 nt, Artificial Sequence
  Antisense oligo
aauuaggagucucaagugca

SEQ ID NO: 560 - RNA, 20 nt, Artificial Sequence
  Antisense oligo
gaauuaggagucucaagugc

SEQ ID NO: 561 - RNA, 20 nt, Artificial Sequence
  Antisense oligo
ugaauuaggagucucaagug

SEQ ID NO: 562 - RNA, 20 nt, Artificial Sequence
  Antisense oligo
gugaauuaggagucucaagu

SEQ ID NO: 563 - RNA, 20 nt, Artificial Sequence
  Antisense oligo
ggugaauuaggagucucaag

SEQ ID NO: 564 - RNA, 20 nt, Artificial Sequence
  Antisense oligo
aaguggugaauuaggagucu

SEQ ID NO: 565 - RNA, 20 nt, Artificial Sequence
  Antisense oligo
caaguggugaauuaggaguc

SEQ ID NO: 566 - RNA, 20 nt, Artificial Sequence
  Antisense oligo
gccucuuacaaguggugaau

SEQ ID NO: 567 - RNA, 20 nt, Artificial Sequence
  Antisense oligo
uggccucuuacaagugguga

SEQ ID NO: 568 - RNA, 20 nt, Artificial Sequence
  Antisense oligo
cuggccucuuacaaguggug

SEQ ID NO: 569 - RNA, 20 nt, Artificial Sequence
  Antisense oligo
agucaccaaauuccuggccu

SEQ ID NO: 570 - RNA, 20 nt, Artificial Sequence
  Antisense oligo
agagucaccaaauuccuggc

SEQ ID NO: 571 - RNA, 20 nt, Artificial Sequence
  Antisense oligo
agcaucacuguauuucuugg

SEQ ID NO: 572 - RNA, 20 nt, Artificial Sequence
  Antisense oligo
cagcaucacuguauuucuug

SEQ ID NO: 573 - RNA, 20 nt, Artificial Sequence
  Antisense oligo
accagccagcaucacuguau

SEQ ID NO: 574 - RNA, 20 nt, Artificial Sequence
  Antisense oligo
cauccuuuucaccacuuucu

SEQ ID NO: 575 - RNA, 20 nt, Artificial Sequence
  Antisense oligo
ucauccuuuucaccacuuuc

SEQ ID NO: 576 - RNA, 20 nt, Artificial Sequence
  Antisense oligo
guucauccuuuucaccacuu

SEQ ID NO: 577 - RNA, 20 nt, Artificial Sequence
  Antisense oligo
gacaucgaaucccugaguuc

SEQ ID NO: 578 - RNA, 20 nt, Artificial Sequence
  Antisense oligo
agacaucgaaucccugaguu

SEQ ID NO: 579 - RNA, 20 nt, Artificial Sequence
  Antisense oligo
cagacaucgaaucccugagu

SEQ ID NO: 580 - RNA, 20 nt, Artificial Sequence
  Antisense oligo
ccagacaucgaaucccugag

SEQ ID NO: 581 - RNA, 20 nt, Artificial Sequence
  Antisense oligo
cccagacaucgaaucccuga

SEQ ID NO: 582 - RNA, 20 nt, Artificial Sequence
  Antisense oligo
gcccagacaucgaaucccug

SEQ ID NO: 583 - RNA, 20 nt, Artificial Sequence
  Antisense oligo
agcccagacaucgaaucccu

SEQ ID NO: 584 - RNA, 20 nt, Artificial Sequence
  Antisense oligo
cagcccagacaucgaauccc

SEQ ID NO: 585 - RNA, 20 nt, Artificial Sequence
  Antisense oligo
gcagcccagacaucgaaucc

SEQ ID NO: 586 - RNA, 20 nt, Artificial Sequence
  Antisense oligo
ugcagcccagacaucgaauc

SEQ ID NO: 587 - RNA, 20 nt, Artificial Sequence
  Antisense oligo
gaucauuuaugcagagcugc

SEQ ID NO: 588 - RNA, 20 nt, Artificial Sequence
  Antisense oligo
agaucauuuaugcagagcug

SEQ ID NO: 589 - RNA, 20 nt, Artificial Sequence
  Antisense oligo
cagaucauuuaugcagagcu

SEQ ID NO: 590 - RNA, 20 nt, Artificial Sequence
  Antisense oligo
ucagaucauuuaugcagagc

SEQ ID NO: 591 - RNA, 20 nt, Artificial Sequence
  Antisense oligo
cucagaucauuuaugcagag

SEQ ID NO: 592 - RNA, 20 nt, Artificial Sequence
  Antisense oligo
cacuaagaaacucucagauc

SEQ ID NO: 593 - RNA, 20 nt, Artificial Sequence
  Antisense oligo
gggcacacuaagaaacucuc

SEQ ID NO: 594 - RNA, 20 nt, Artificial Sequence
  Antisense oligo
agggcacacuaagaaacucu

SEQ ID NO: 595 - RNA, 20 nt, Artificial Sequence
  Antisense oligo
cagggcacacuaagaaacuc

SEQ ID NO: 596 - RNA, 20 nt, Artificial Sequence
  Antisense oligo
ccagggcacacuaagaaacu

SEQ ID NO: 597 - RNA, 20 nt, Artificial Sequence
  Antisense oligo
uccagggcacacuaagaaac

SEQ ID NO: 598 - RNA, 20 nt, Artificial Sequence
  Antisense oligo
gauccagggcacacuaagaa

SEQ ID NO: 599 - RNA, 20 nt, Artificial Sequence
  Antisense oligo
ugauccagggcacacuaaga

SEQ ID NO: 600 - RNA, 20 nt, Artificial Sequence
  Antisense oligo
cugauccagggcacacuaag

SEQ ID NO: 601 - RNA, 20 nt, Artificial Sequence
  Antisense oligo
ucugauccagggcacacuaa

SEQ ID NO: 602 - RNA, 20 nt, Artificial Sequence
  Antisense oligo
uucugauccagggcacacua

SEQ ID NO: 603 - RNA, 20 nt, Artificial Sequence
  Antisense oligo
auucugauccagggcacacu

SEQ ID NO: 604 - RNA, 20 nt, Artificial Sequence
  Antisense oligo
gauucugauccagggcacac

SEQ ID NO: 605 - RNA, 20 nt, Artificial Sequence
  Antisense oligo
agauucugauccagggcaca

SEQ ID NO: 606 - RNA, 20 nt, Artificial Sequence
  Antisense oligo
aagauucugauccagggcac

SEQ ID NO: 607 - RNA, 20 nt, Artificial Sequence
  Antisense oligo
agaagauucugauccagggc

SEQ ID NO: 608 - RNA, 20 nt, Artificial Sequence
  Antisense oligo
agagaagauucugauccagg

SEQ ID NO: 609 - RNA, 20 nt, Artificial Sequence
  Antisense oligo
gagagaagauucugauccag

SEQ ID NO: 610 - RNA, 20 nt, Artificial Sequence
  Antisense oligo
ggugcucgauuuucuacaau

SEQ ID NO: 611 - RNA, 20 nt, Artificial Sequence
  Antisense oligo
uggugcucgauuuucuacaa

SEQ ID NO: 612 - RNA, 20 nt, Artificial Sequence
  Antisense oligo
cuggugcucgauuuucuaca

SEQ ID NO: 613 - RNA, 20 nt, Artificial Sequence
  Antisense oligo
gcuggugcucgauuuucuac

SEQ ID NO: 614 - RNA, 20 nt, Artificial Sequence
  Antisense oligo
agcuggugcucgauuuucua

SEQ ID NO: 615 - RNA, 20 nt, Artificial Sequence
  Antisense oligo
aucgcgugagagcuggugcu

SEQ ID NO: 616 - RNA, 20 nt, Artificial Sequence
  Antisense oligo
aaucgcgugagagcuggugc

SEQ ID NO: 617 - RNA, 20 nt, Artificial Sequence
  Antisense oligo
uaaucgcgugagagcuggug

SEQ ID NO: 618 - RNA, 20 nt, Artificial Sequence
  Antisense oligo
cuaaucgcgugagagcuggu

SEQ ID NO: 619 - RNA, 20 nt, Artificial Sequence
  Antisense oligo
gcuaaucgcgugagagcugg

SEQ ID NO: 620 - RNA, 20 nt, Artificial Sequence
  Antisense oligo
ucagcuaaucgcgugagagc

SEQ ID NO: 621 - RNA, 20 nt, Artificial Sequence
  Antisense oligo
uaacucagcuaaucgcguga

SEQ ID NO: 622 - RNA, 20 nt, Artificial Sequence
  Antisense oligo
uuaacucagcuaaucgcgug

SEQ ID NO: 623 - RNA, 20 nt, Artificial Sequence
  Antisense oligo
cuuuaacagcagacgcccug

SEQ ID NO: 624 - RNA, 20 nt, Artificial Sequence
  Antisense oligo
acuuuaacagcagacgcccu

SEQ ID NO: 625 - RNA, 20 nt, Artificial Sequence
  Antisense oligo
aaccacggcauccggcuuaa

SEQ ID NO: 626 - RNA, 20 nt, Artificial Sequence
  Antisense oligo
gaaccacggcauccggcuua

SEQ ID NO: 627 - RNA, 20 nt, Artificial Sequence
  Antisense oligo
ugaaccacggcauccggcuu

SEQ ID NO: 628 - RNA, 20 nt, Artificial Sequence
  Antisense oligo
uaggugugaaccacggcauc

SEQ ID NO: 629 - RNA, 20 nt, Artificial Sequence
  Antisense oligo
guaggugugaaccacggcau

SEQ ID NO: 630 - RNA, 20 nt, Artificial Sequence
  Antisense oligo
uggccugcaaacaugcuggg

SEQ ID NO: 631 - RNA, 20 nt, Artificial Sequence
  Antisense oligo
ccuuggccugcaaacaugcu

SEQ ID NO: 632 - RNA, 20 nt, Artificial Sequence
  Antisense oligo
accuuggccugcaaacaugc

SEQ ID NO: 633 - RNA, 20 nt, Artificial Sequence
  Antisense oligo
caccuuggccugcaaacaug

SEQ ID NO: 634 - RNA, 20 nt, Artificial Sequence
  Antisense oligo
ccaccuuggccugcaaacau

SEQ ID NO: 635 - RNA, 20 nt, Artificial Sequence
  Antisense oligo
cccaccuuggccugcaaaca

SEQ ID NO: 636 - RNA, 20 nt, Artificial Sequence
  Antisense oligo
ugauccucccaccuuggccu

SEQ ID NO: 637 - RNA, 20 nt, Artificial Sequence
  Antisense oligo
agugauccucccaccuuggc

SEQ ID NO: 638 - RNA, 20 nt, Artificial Sequence
  Antisense oligo
aagugauccucccaccuugg

SEQ ID NO: 639 - RNA, 20 nt, Artificial Sequence
  Antisense oligo
ucaagugauccucccaccuu

SEQ ID NO: 640 - RNA, 20 nt, Artificial Sequence
  Antisense oligo
cucaagugauccucccaccu

SEQ ID NO: 641 - RNA, 20 nt, Artificial Sequence
  Antisense oligo
gcucaagugauccucccacc

SEQ ID NO: 642 - RNA, 20 nt, Artificial Sequence
  Antisense oligo
ggcucaagugauccucccac

SEQ ID NO: 643 - RNA, 20 nt, Artificial Sequence
  Antisense oligo
aggcucaagugauccuccca

SEQ ID NO: 644 - RNA, 20 nt, Artificial Sequence
  Antisense oligo
uaggcucaagugauccuccc

SEQ ID NO: 645 - RNA, 20 nt, Artificial Sequence
  Antisense oligo
cuaggcucaagugauccucc

SEQ ID NO: 646 - RNA, 20 nt, Artificial Sequence
  Antisense oligo
ggcuggucucaaacuccuag

SEQ ID NO: 647 - RNA, 20 nt, Artificial Sequence
  Antisense oligo
aggcuggucucaaacuccua

SEQ ID NO: 648 - RNA, 20 nt, Artificial Sequence
  Antisense oligo
caggcuggucucaaacuccu

SEQ ID NO: 649 - RNA, 20 nt, Artificial Sequence
  Antisense oligo
ccaggcuggucucaaacucc

SEQ ID NO: 650 - RNA, 20 nt, Artificial Sequence
  Antisense oligo
cccaggcuggucucaaacuc

SEQ ID NO: 651 - RNA, 20 nt, Artificial Sequence
  Antisense oligo
gcccaggcuggucucaaacu

SEQ ID NO: 652 - RNA, 20 nt, Artificial Sequence
  Antisense oligo
ugcccaggcuggucucaaac

SEQ ID NO: 653 - RNA, 20 nt, Artificial Sequence
  Antisense oligo
uugcccaggcuggucucaaa

SEQ ID NO: 654 - RNA, 20 nt, Artificial Sequence
  Antisense oligo
auugcccaggcuggucucaa

SEQ ID NO: 655 - RNA, 20 nt, Artificial Sequence
  Antisense oligo
cauugcccaggcuggucuca

SEQ ID NO: 656 - RNA, 20 nt, Artificial Sequence
  Antisense oligo
acauugcccaggcuggucuc

SEQ ID NO: 657 - RNA, 20 nt, Artificial Sequence
  Antisense oligo
uacauugcccaggcuggucu

SEQ ID NO: 658 - RNA, 20 nt, Artificial Sequence
  Antisense oligo
cuacauugcccaggcugguc

SEQ ID NO: 659 - RNA, 20 nt, Artificial Sequence
  Antisense oligo
ucuacauugcccaggcuggu

SEQ ID NO: 660 - RNA, 20 nt, Artificial Sequence
  Antisense oligo
auggagucuuucuacauugc

SEQ ID NO: 661 - RNA, 20 nt, Artificial Sequence
  Antisense oligo
gauggagucuuucuacauug

SEQ ID NO: 662 - RNA, 20 nt, Artificial Sequence
  Antisense oligo
gagauggagucuuucuacau

SEQ ID NO: 663 - RNA, 20 nt, Artificial Sequence
  Antisense oligo
cagagauggagucuuucuac

SEQ ID NO: 664 - RNA, 20 nt, Artificial Sequence
  Antisense oligo
guaauacagagauggagucu

SEQ ID NO: 665 - RNA, 20 nt, Artificial Sequence
  Antisense oligo
gccacccaauguccucacuu

SEQ ID NO: 666 - RNA, 20 nt, Artificial Sequence
  Antisense oligo
uuugccacccaauguccuca

SEQ ID NO: 667 - RNA, 20 nt, Artificial Sequence
  Antisense oligo
cuuugccacccaauguccuc

SEQ ID NO: 668 - RNA, 20 nt, Artificial Sequence
  Antisense oligo
uccuuugccacccaaugucc

SEQ ID NO: 669 - RNA, 20 nt, Artificial Sequence
  Antisense oligo
uuccuuugccacccaauguc

SEQ ID NO: 670 - RNA, 20 nt, Artificial Sequence
  Antisense oligo
cuuccuuugccacccaaugu

SEQ ID NO: 671 - RNA, 20 nt, Artificial Sequence
  Antisense oligo
ucaaugucuccagccuggcc

SEQ ID NO: 672 - RNA, 20 nt, Artificial Sequence
  Antisense oligo
auuuggaacucaaugucucc

SEQ ID NO: 673 - RNA, 20 nt, Artificial Sequence
  Antisense oligo
aacucaaccugacucaacuu

SEQ ID NO: 674 - RNA, 20 nt, Artificial Sequence
  Antisense oligo
aaacucaaccugacucaacu

SEQ ID NO: 675 - RNA, 20 nt, Artificial Sequence
  Antisense oligo
uaaacucaaccugacucaac

SEQ ID NO: 676 - RNA, 20 nt, Artificial Sequence
  Antisense oligo
cuaaacucaaccugacucaa

SEQ ID NO: 677 - RNA, 20 nt, Artificial Sequence
  Antisense oligo
acuaaacucaaccugacuca

SEQ ID NO: 678 - RNA, 20 nt, Artificial Sequence
  Antisense oligo
uacuaaacucaaccugacuc

SEQ ID NO: 679 - RNA, 20 nt, Artificial Sequence
  Antisense oligo
cuacuaaacucaaccugacu

SEQ ID NO: 680 - RNA, 20 nt, Artificial Sequence
  Antisense oligo
acuacuaaacucaaccugac

SEQ ID NO: 681 - RNA, 20 nt, Artificial Sequence
  Antisense oligo
cacuacuaaacucaaccuga

SEQ ID NO: 682 - RNA, 20 nt, Artificial Sequence
  Antisense oligo
cacacuacuaaacucaaccu

SEQ ID NO: 683 - RNA, 20 nt, Artificial Sequence
  Antisense oligo
gcccacacuacuaaacucaa

SEQ ID NO: 684 - RNA, 20 nt, Artificial Sequence
  Antisense oligo
ggcccacacuacuaaacuca

SEQ ID NO: 685 - RNA, 20 nt, Artificial Sequence
  Antisense oligo
ccuuccuaacucuaccagcu

SEQ ID NO: 686 - RNA, 20 nt, Artificial Sequence
  Antisense oligo
caaccaaacaaagacucaga

SEQ ID NO: 687 - RNA, 20 nt, Artificial Sequence
  Antisense oligo
agccaaccaaacaaagacuc

SEQ ID NO: 688 - RNA, 20 nt, Artificial Sequence
  Antisense oligo
acgccuaguaaggugggcca

SEQ ID NO: 689 - RNA, 20 nt, Artificial Sequence
  Antisense oligo
accaccacgccuaguaaggu

SEQ ID NO: 690 - RNA, 20 nt, Artificial Sequence
  Antisense oligo
aaccaccacgccuaguaagg

SEQ ID NO: 691 - RNA, 20 nt, Artificial Sequence
  Antisense oligo
ggauuacaggcgugaaccac

SEQ ID NO: 692 - RNA, 20 nt, Artificial Sequence
  Antisense oligo
gggauuacaggcgugaacca

SEQ ID NO: 693 - RNA, 20 nt, Artificial Sequence
  Antisense oligo
ugggauuacaggcgugaacc

SEQ ID NO: 694 - RNA, 20 nt, Artificial Sequence
  Antisense oligo
cugggauuacaggcgugaac

SEQ ID NO: 695 - RNA, 20 nt, Artificial Sequence
  Antisense oligo
gcugggauuacaggcgugaa

SEQ ID NO: 696 - RNA, 20 nt, Artificial Sequence
  Antisense oligo
ugcugggauuacaggcguga

SEQ ID NO: 697 - RNA, 20 nt, Artificial Sequence
  Antisense oligo
gugcugggauuacaggcgug

SEQ ID NO: 698 - RNA, 20 nt, Artificial Sequence
  Antisense oligo
agugcugggauuacaggcgu

SEQ ID NO: 699 - RNA, 20 nt, Artificial Sequence
  Antisense oligo
aagugcugggauuacaggcg

SEQ ID NO: 700 - RNA, 20 nt, Artificial Sequence
  Antisense oligo
aaagugcugggauuacaggc

SEQ ID NO: 701 - RNA, 20 nt, Artificial Sequence
  Antisense oligo
caaagugcugggauuacagg

SEQ ID NO: 702 - RNA, 20 nt, Artificial Sequence
  Antisense oligo
ccaaagugcugggauuacag

SEQ ID NO: 703 - RNA, 20 nt, Artificial Sequence
  Antisense oligo
ucaccucggccucccaaagu

SEQ ID NO: 704 - RNA, 20 nt, Artificial Sequence
  Antisense oligo
acucaccucggccucccaaa

SEQ ID NO: 705 - RNA, 20 nt, Artificial Sequence
  Antisense oligo
uacucaccucggccucccaa

SEQ ID NO: 706 - RNA, 20 nt, Artificial Sequence
  Antisense oligo
cuccugggcucaagcgaucu

SEQ ID NO: 707 - RNA, 20 nt, Artificial Sequence
  Antisense oligo
acuccugggcucaagcgauc

SEQ ID NO: 708 - RNA, 20 nt, Artificial Sequence
  Antisense oligo
aacuccugggcucaagcgau

SEQ ID NO: 709 - RNA, 20 nt, Artificial Sequence
  Antisense oligo
gaacuccugggcucaagcga

SEQ ID NO: 710 - RNA, 20 nt, Artificial Sequence
  Antisense oligo
ucgaacuccugggcucaagc

SEQ ID NO: 711 - RNA, 20 nt, Artificial Sequence
  Antisense oligo
cucgaacuccugggcucaag

SEQ ID NO: 712 - RNA, 20 nt, Artificial Sequence
  Antisense oligo
ucucgaacuccugggcucaa

SEQ ID NO: 713 - RNA, 20 nt, Artificial Sequence
  Antisense oligo
cucucgaacuccugggcuca

SEQ ID NO: 714 - RNA, 20 nt, Artificial Sequence
  Antisense oligo
ugcucucgaacuccugggcu

SEQ ID NO: 715 - RNA, 20 nt, Artificial Sequence
  Antisense oligo
gcuccaccauguugcuuagg

SEQ ID NO: 716 - RNA, 20 nt, Artificial Sequence
  Antisense oligo
ggcuccaccauguugcuuag

SEQ ID NO: 717 - RNA, 20 nt, Artificial Sequence
  Antisense oligo
uccugcuccagcuaauucuu

SEQ ID NO: 718 - RNA, 20 nt, Artificial Sequence
  Antisense oligo
cuccugcuccagcuaauucu

SEQ ID NO: 719 - RNA, 20 nt, Artificial Sequence
  Antisense oligo
ccuccugcuccagcuaauuc

SEQ ID NO: 720 - RNA, 20 nt, Artificial Sequence
  Antisense oligo
aagugauccuccugcuccag

SEQ ID NO: 721 - RNA, 20 nt, Artificial Sequence
  Antisense oligo
caagugauccuccugcucca

SEQ ID NO: 722 - RNA, 20 nt, Artificial Sequence
  Antisense oligo
ucaagugauccuccugcucc

SEQ ID NO: 723 - RNA, 20 nt, Artificial Sequence
  Antisense oligo
cucaagugauccuccugcuc

SEQ ID NO: 724 - RNA, 20 nt, Artificial Sequence
  Antisense oligo
gcucaagugauccuccugcu

SEQ ID NO: 725 - RNA, 20 nt, Artificial Sequence
  Antisense oligo
ggcucaagugauccuccugc

SEQ ID NO: 726 - RNA, 20 nt, Artificial Sequence
  Antisense oligo
aggcucaagugauccuccug

SEQ ID NO: 727 - RNA, 20 nt, Artificial Sequence
  Antisense oligo
caggcucaagugauccuccu

SEQ ID NO: 728 - RNA, 20 nt, Artificial Sequence
  Antisense oligo
ccaggcucaagugauccucc

SEQ ID NO: 729 - RNA, 20 nt, Artificial Sequence
  Antisense oligo
cccaggcucaagugauccuc

SEQ ID NO: 730 - RNA, 20 nt, Artificial Sequence
  Antisense oligo
ucccaggcucaagugauccu

SEQ ID NO: 731 - RNA, 20 nt, Artificial Sequence
  Antisense oligo
gcuggagugcagugggacaa

SEQ ID NO: 732 - RNA, 20 nt, Artificial Sequence
  Antisense oligo
ucugucacccaggcuggagu

SEQ ID NO: 733 - RNA, 20 nt, Artificial Sequence
  Antisense oligo
acucugucacccaggcugga

SEQ ID NO: 734 - RNA, 20 nt, Artificial Sequence
  Antisense oligo
ucacucugucacccaggcug

SEQ ID NO: 735 - RNA, 20 nt, Artificial Sequence
  Antisense oligo
cucacucugucacccaggcu

SEQ ID NO: 736 - RNA, 20 nt, Artificial Sequence
  Antisense oligo
ucucacucugucacccaggc

SEQ ID NO: 737 - RNA, 20 nt, Artificial Sequence
  Antisense oligo
gucucacucugucacccagg

SEQ ID NO: 738 - RNA, 20 nt, Artificial Sequence
  Antisense oligo
ggucucacucugucacccag

SEQ ID NO: 739 - RNA, 20 nt, Artificial Sequence
  Antisense oligo
cagggucucacucugucacc

SEQ ID NO: 740 - RNA, 20 nt, Artificial Sequence
  Antisense oligo
gagaccacuguaaggcuuuu

SEQ ID NO: 741 - RNA, 20 nt, Artificial Sequence
  Antisense oligo
agagaccacuguaaggcuuu

SEQ ID NO: 742 - RNA, 20 nt, Artificial Sequence
  Antisense oligo
gagagaccacuguaaggcuu

SEQ ID NO: 743 - RNA, 20 nt, Artificial Sequence
  Antisense oligo
ugagagaccacuguaaggcu

SEQ ID NO: 744 - RNA, 20 nt, Artificial Sequence
  Antisense oligo
cugagagaccacuguaaggc

SEQ ID NO: 745 - RNA, 20 nt, Artificial Sequence
  Antisense oligo
cacugagagaccacuguaag

SEQ ID NO: 746 - RNA, 20 nt, Artificial Sequence
  Antisense oligo
gcacugagagaccacuguaa

SEQ ID NO: 747 - RNA, 20 nt, Artificial Sequence
  Antisense oligo
agcacugagagaccacugua

SEQ ID NO: 748 - RNA, 20 nt, Artificial Sequence
  Antisense oligo
gagcacugagagaccacugu

SEQ ID NO: 749 - RNA, 20 nt, Artificial Sequence
  Antisense oligo
ugagcacugagagaccacug

SEQ ID NO: 750 - RNA, 20 nt, Artificial Sequence
  Antisense oligo
uugagcacugagagaccacu

SEQ ID NO: 751 - RNA, 20 nt, Artificial Sequence
  Antisense oligo
uuugagcacugagagaccac

SEQ ID NO: 752 - RNA, 20 nt, Artificial Sequence
  Antisense oligo
cauuugagcacugagagacc

SEQ ID NO: 753 - RNA, 20 nt, Artificial Sequence
  Antisense oligo
uucauuugagcacugagaga

SEQ ID NO: 754 - RNA, 20 nt, Artificial Sequence
  Antisense oligo
uuucauuugagcacugagag

SEQ ID NO: 755 - RNA, 20 nt, Artificial Sequence
  Antisense oligo
gacucugucucaaaacaaug

SEQ ID NO: 756 - RNA, 20 nt, Artificial Sequence
  Antisense oligo
ugggugacagagcaagacuc

SEQ ID NO: 757 - RNA, 20 nt, Artificial Sequence
  Antisense oligo
cugggugacagagcaagacu

SEQ ID NO: 758 - RNA, 20 nt, Artificial Sequence
  Antisense oligo
ccugggugacagagcaagac

SEQ ID NO: 759 - RNA, 20 nt, Artificial Sequence
  Antisense oligo
gccugggugacagagcaaga

SEQ ID NO: 760 - RNA, 20 nt, Artificial Sequence
  Antisense oligo
agccugggugacagagcaag

SEQ ID NO: 761 - RNA, 20 nt, Artificial Sequence
  Antisense oligo
cagccugggugacagagcaa

SEQ ID NO: 762 - RNA, 20 nt, Artificial Sequence
  Antisense oligo
acuccagccugggugacaga

SEQ ID NO: 763 - RNA, 20 nt, Artificial Sequence
  Antisense oligo
auggcaccacugcacuccag

SEQ ID NO: 764 - RNA, 20 nt, Artificial Sequence
  Antisense oligo
aauggcaccacugcacucca

SEQ ID NO: 765 - RNA, 20 nt, Artificial Sequence
  Antisense oligo
aaauggcaccacugcacucc

SEQ ID NO: 766 - RNA, 20 nt, Artificial Sequence
  Antisense oligo
guugcagugagcugaaaugg

SEQ ID NO: 767 - RNA, 20 nt, Artificial Sequence
  Antisense oligo
gguugcagugagcugaaaug

SEQ ID NO: 768 - RNA, 20 nt, Artificial Sequence
  Antisense oligo
agguugcagugagcugaaau

SEQ ID NO: 769 - RNA, 20 nt, Artificial Sequence
  Antisense oligo
aagguugcagugagcugaaa

SEQ ID NO: 770 - RNA, 20 nt, Artificial Sequence
  Antisense oligo
aaagguugcagugagcugaa

SEQ ID NO: 771 - RNA, 20 nt, Artificial Sequence
  Antisense oligo
uaaagguugcagugagcuga

SEQ ID NO: 772 - RNA, 20 nt, Artificial Sequence
  Antisense oligo
guaaagguugcagugagcug

SEQ ID NO: 773 - RNA, 20 nt, Artificial Sequence
  Antisense oligo
gguaaagguugcagugagcu

SEQ ID NO: 774 - RNA, 20 nt, Artificial Sequence
  Antisense oligo
caucacuugaaccugggagg

SEQ ID NO: 775 - RNA, 20 nt, Artificial Sequence
  Antisense oligo
acaucacuugaaccugggag

SEQ ID NO: 776 - RNA, 20 nt, Artificial Sequence
  Antisense oligo
aacaucacuugaaccuggga

SEQ ID NO: 777 - RNA, 20 nt, Artificial Sequence
  Antisense oligo
gaacaucacuugaaccuggg

SEQ ID NO: 778 - RNA, 20 nt, Artificial Sequence
  Antisense oligo
ggaacaucacuugaaccugg

SEQ ID NO: 779 - RNA, 20 nt, Artificial Sequence
  Antisense oligo
aggcugaggcaggaacauca

SEQ ID NO: 780 - RNA, 20 nt, Artificial Sequence
  Antisense oligo
gaggcugaggcaggaacauc

SEQ ID NO: 781 - RNA, 20 nt, Artificial Sequence
  Antisense oligo
ggaggcugaggcaggaacau

SEQ ID NO: 782 - RNA, 20 nt, Artificial Sequence
  Antisense oligo
uugggaggcugaggcaggaa

SEQ ID NO: 783 - RNA, 20 nt, Artificial Sequence
  Antisense oligo
uacuugggaggcugaggcag

SEQ ID NO: 784 - RNA, 20 nt, Artificial Sequence
  Antisense oligo
cuacuugggaggcugaggca

SEQ ID NO: 785 - RNA, 20 nt, Artificial Sequence
  Antisense oligo
ugccucacgccuguaauccc

SEQ ID NO: 786 - RNA, 20 nt, Artificial Sequence
  Antisense oligo
gugccucacgccuguaaucc

SEQ ID NO: 787 - RNA, 20 nt, Artificial Sequence
  Antisense oligo
ggugccucacgccuguaauc

SEQ ID NO: 788 - RNA, 20 nt, Artificial Sequence
  Antisense oligo
aaacgccgucucuacuaaaa

SEQ ID NO: 789 - RNA, 20 nt, Artificial Sequence
  Antisense oligo
ccaacauggugaaacgccgu

SEQ ID NO: 790 - RNA, 20 nt, Artificial Sequence
  Antisense oligo
gccaacauggugaaacgccg

SEQ ID NO: 791 - RNA, 20 nt, Artificial Sequence
  Antisense oligo
ggccaacauggugaaacgcc

SEQ ID NO: 792 - RNA, 20 nt, Artificial Sequence
  Antisense oligo
uugaggucaggaguuugaua

SEQ ID NO: 793 - RNA, 20 nt, Artificial Sequence
  Antisense oligo
cuugaggucaggaguuugau

SEQ ID NO: 794 - RNA, 20 nt, Artificial Sequence
  Antisense oligo
acuugaggucaggaguuuga

SEQ ID NO: 795 - RNA, 20 nt, Artificial Sequence
  Antisense oligo
cacuugaggucaggaguuug

SEQ ID NO: 796 - RNA, 20 nt, Artificial Sequence
  Antisense oligo
ucacuugaggucaggaguuu

SEQ ID NO: 797 - RNA, 20 nt, Artificial Sequence
  Antisense oligo
aucacuugaggucaggaguu

SEQ ID NO: 798 - RNA, 20 nt, Artificial Sequence
  Antisense oligo
caucacuugaggucaggagu

SEQ ID NO: 799 - RNA, 20 nt, Artificial Sequence
  Antisense oligo
gcaucacuugaggucaggag

SEQ ID NO: 800 - RNA, 20 nt, Artificial Sequence
  Antisense oligo
cgcaucacuugaggucagga

SEQ ID NO: 801 - RNA, 20 nt, Artificial Sequence
  Antisense oligo
gcgcaucacuugaggucagg

SEQ ID NO: 802 - RNA, 20 nt, Artificial Sequence
  Antisense oligo
ggcgcaucacuugaggucag

SEQ ID NO: 803 - RNA, 20 nt, Artificial Sequence
  Antisense oligo
uuugagaggccaaggugggc

SEQ ID NO: 804 - RNA, 20 nt, Artificial Sequence
  Antisense oligo
cuuugagaggccaagguggg

SEQ ID NO: 805 - RNA, 20 nt, Artificial Sequence
  Antisense oligo
acuuugagaggccaaggugg

SEQ ID NO: 806 - RNA, 20 nt, Artificial Sequence
  Antisense oligo
cacuuugagaggccaaggug

SEQ ID NO: 807 - RNA, 20 nt, Artificial Sequence
  Antisense oligo
gcacuuugagaggccaaggu

SEQ ID NO: 808 - RNA, 20 nt, Artificial Sequence
  Antisense oligo
agcacuuugagaggccaagg

SEQ ID NO: 809 - RNA, 20 nt, Artificial Sequence
  Antisense oligo
cagcacuuugagaggccaag

SEQ ID NO: 810 - RNA, 20 nt, Artificial Sequence
  Antisense oligo
ccagcacuuugagaggccaa

SEQ ID NO: 811 - RNA, 20 nt, Artificial Sequence
  Antisense oligo
cccagcacuuugagaggcca

SEQ ID NO: 812 - RNA, 20 nt, Artificial Sequence
  Antisense oligo
ucccagcacuuugagaggcc

SEQ ID NO: 813 - RNA, 20 nt, Artificial Sequence
  Antisense oligo
aucccagcacuuugagaggc

SEQ ID NO: 814 - RNA, 20 nt, Artificial Sequence
  Antisense oligo
aaucccagcacuuugagagg

SEQ ID NO: 815 - RNA, 20 nt, Artificial Sequence
  Antisense oligo
uaaucccagcacuuugagag

SEQ ID NO: 816 - RNA, 20 nt, Artificial Sequence
  Antisense oligo
guaaucccagcacuuugaga

SEQ ID NO: 817 - RNA, 20 nt, Artificial Sequence
  Antisense oligo
uguaaucccagcacuuugag

SEQ ID NO: 818 - RNA, 20 nt, Artificial Sequence
  Antisense oligo
cuguaaucccagcacuuuga

SEQ ID NO: 819 - RNA, 20 nt, Artificial Sequence
  Antisense oligo
ccuguaaucccagcacuuug

SEQ ID NO: 820 - RNA, 20 nt, Artificial Sequence
  Antisense oligo
accuguaaucccagcacuuu

SEQ ID NO: 821 - RNA, 20 nt, Artificial Sequence
  Antisense oligo
caccuguaaucccagcacuu

SEQ ID NO: 822 - RNA, 20 nt, Artificial Sequence
  Antisense oligo
acaccuguaaucccagcacu

SEQ ID NO: 823 - RNA, 20 nt, Artificial Sequence
  Antisense oligo
cacaccuguaaucccagcac

SEQ ID NO: 824 - RNA, 20 nt, Artificial Sequence
  Antisense oligo
ucacaccuguaaucccagca

SEQ ID NO: 825 - RNA, 20 nt, Artificial Sequence
  Antisense oligo
cucacaccuguaaucccagc

SEQ ID NO: 826 - RNA, 20 nt, Artificial Sequence
  Antisense oligo
gcucacaccuguaaucccag

SEQ ID NO: 827 - RNA, 20 nt, Artificial Sequence
  Antisense oligo
ggcucacaccuguaauccca

SEQ ID NO: 828 - RNA, 20 nt, Artificial Sequence
  Antisense oligo
uggcucacaccuguaauccc

SEQ ID NO: 829 - RNA, 20 nt, Artificial Sequence
  Antisense oligo
guggcucacaccuguaaucc

SEQ ID NO: 830 - RNA, 20 nt, Artificial Sequence
  Antisense oligo
ccucagccucccaaagugcu

SEQ ID NO: 831 - RNA, 20 nt, Artificial Sequence
  Antisense oligo
accucagccucccaaagugc

SEQ ID NO: 832 - RNA, 20 nt, Artificial Sequence
  Antisense oligo
uaccucagccucccaaagug

SEQ ID NO: 833 - RNA, 20 nt, Artificial Sequence
  Antisense oligo
cuaccucagccucccaaagu

SEQ ID NO: 834 - RNA, 20 nt, Artificial Sequence
  Antisense oligo
ccuaccucagccucccaaag

SEQ ID NO: 835 - RNA, 20 nt, Artificial Sequence
  Antisense oligo
accuaccucagccucccaaa

SEQ ID NO: 836 - RNA, 20 nt, Artificial Sequence
  Antisense oligo
caccuaccucagccucccaa

SEQ ID NO: 837 - RNA, 20 nt, Artificial Sequence
  Antisense oligo
auccaccuaccucagccucc

SEQ ID NO: 838 - RNA, 20 nt, Artificial Sequence
  Antisense oligo
ucucaaacuccugaccucag

SEQ ID NO: 839 - RNA, 20 nt, Artificial Sequence
  Antisense oligo
gucucaaacuccugaccuca

SEQ ID NO: 840 - RNA, 20 nt, Artificial Sequence
  Antisense oligo
gcuggucucaaacuccugac

SEQ ID NO: 841 - RNA, 20 nt, Artificial Sequence
  Antisense oligo
ggcuggucucaaacuccuga

SEQ ID NO: 842 - RNA, 20 nt, Artificial Sequence
  Antisense oligo
aggcuggucucaaacuccug

SEQ ID NO: 843 - RNA, 20 nt, Artificial Sequence
  Antisense oligo
caggcuggucucaaacuccu

SEQ ID NO: 844 - RNA, 20 nt, Artificial Sequence
  Antisense oligo
ccaggcuggucucaaacucc

SEQ ID NO: 845 - RNA, 20 nt, Artificial Sequence
  Antisense oligo
gccaggcuggucucaaacuc

SEQ ID NO: 846 - RNA, 20 nt, Artificial Sequence
  Antisense oligo
ggccaggcuggucucaaacu

SEQ ID NO: 847 - RNA, 20 nt, Artificial Sequence
  Antisense oligo
caccacacccagcuaauuuu

SEQ ID NO: 848 - RNA, 20 nt, Artificial Sequence
  Antisense oligo
ccaccacacccagcuaauuu

SEQ ID NO: 849 - RNA, 20 nt, Artificial Sequence
  Antisense oligo
gccaccacacccagcuaauu

SEQ ID NO: 850 - RNA, 20 nt, Artificial Sequence
  Antisense oligo
agccaccacacccagcuaau

SEQ ID NO: 851 - RNA, 20 nt, Artificial Sequence
  Antisense oligo
gagccaccacacccagcuaa

SEQ ID NO: 852 - RNA, 20 nt, Artificial Sequence
  Antisense oligo
ugagccaccacacccagcua

SEQ ID NO: 853 - RNA, 20 nt, Artificial Sequence
  Antisense oligo
augagccaccacacccagcu

SEQ ID NO: 854 - RNA, 20 nt, Artificial Sequence
  Antisense oligo
acaggcaugagccaccacac

SEQ ID NO: 855 - RNA, 20 nt, Artificial Sequence
  Antisense oligo
uacaggcaugagccaccaca

SEQ ID NO: 856 - RNA, 20 nt, Artificial Sequence
  Antisense oligo
uuacaggcaugagccaccac

SEQ ID NO: 857 - RNA, 20 nt, Artificial Sequence
  Antisense oligo
auuacaggcaugagccacca

SEQ ID NO: 858 - RNA, 20 nt, Artificial Sequence
  Antisense oligo
gauuacaggcaugagccacc

SEQ ID NO: 859 - RNA, 20 nt, Artificial Sequence
  Antisense oligo
ggauuacaggcaugagccac

SEQ ID NO: 860 - RNA, 20 nt, Artificial Sequence
  Antisense oligo
gggauuacaggcaugagcca

SEQ ID NO: 861 - RNA, 20 nt, Artificial Sequence
  Antisense oligo
ugggauuacaggcaugagcc

SEQ ID NO: 862 - RNA, 20 nt, Artificial Sequence
  Antisense oligo
cugggauuacaggcaugagc

SEQ ID NO: 863 - RNA, 20 nt, Artificial Sequence
  Antisense oligo
gcugggauuacaggcaugag

SEQ ID NO: 864 - RNA, 20 nt, Artificial Sequence
  Antisense oligo
agcugggauuacaggcauga

SEQ ID NO: 865 - RNA, 20 nt, Artificial Sequence
  Antisense oligo
aagcugggauuacaggcaug

SEQ ID NO: 866 - RNA, 20 nt, Artificial Sequence
  Antisense oligo
cuugugccucagccucccaa

SEQ ID NO: 867 - RNA, 20 nt, Artificial Sequence
  Antisense oligo
ucuugugccucagccuccca

SEQ ID NO: 868 - RNA, 20 nt, Artificial Sequence
  Antisense oligo
uucuugugccucagccuccc

SEQ ID NO: 869 - RNA, 20 nt, Artificial Sequence
  Antisense oligo
ucacugcaaccuccgucucc

SEQ ID NO: 870 - RNA, 20 nt, Artificial Sequence
  Antisense oligo
cucacugcaaccuccgucuc

SEQ ID NO: 871 - RNA, 20 nt, Artificial Sequence
  Antisense oligo
gcucacugcaaccuccgucu

SEQ ID NO: 872 - RNA, 20 nt, Artificial Sequence
  Antisense oligo
agcucacugcaaccuccguc

SEQ ID NO: 873 - RNA, 20 nt, Artificial Sequence
  Antisense oligo
cagcucacugcaaccuccgu

SEQ ID NO: 874 - RNA, 20 nt, Artificial Sequence
  Antisense oligo
ucagcucacugcaaccuccg

SEQ ID NO: 875 - RNA, 20 nt, Artificial Sequence
  Antisense oligo
cucagcucacugcaaccucc

SEQ ID NO: 876 - RNA, 20 nt, Artificial Sequence
  Antisense oligo
ucucagcucacugcaaccuc

SEQ ID NO: 877 - RNA, 20 nt, Artificial Sequence
  Antisense oligo
aucucagcucacugcaaccu

SEQ ID NO: 878 - RNA, 20 nt, Artificial Sequence
  Antisense oligo
aaucucagcucacugcaacc

SEQ ID NO: 879 - RNA, 20 nt, Artificial Sequence
  Antisense oligo
caaucucagcucacugcaac

SEQ ID NO: 880 - RNA, 20 nt, Artificial Sequence
  Antisense oligo
acaaucucagcucacugcaa

SEQ ID NO: 881 - RNA, 20 nt, Artificial Sequence
  Antisense oligo
cacaaucucagcucacugca

SEQ ID NO: 882 - RNA, 20 nt, Artificial Sequence
  Antisense oligo
gcacaaucucagcucacugc

SEQ ID NO: 883 - RNA, 20 nt, Artificial Sequence
  Antisense oligo
ggcacaaucucagcucacug

SEQ ID NO: 884 - RNA, 20 nt, Artificial Sequence
  Antisense oligo
uggcacaaucucagcucacu

SEQ ID NO: 885 - RNA, 20 nt, Artificial Sequence
  Antisense oligo
guggcacaaucucagcucac

SEQ ID NO: 886 - RNA, 20 nt, Artificial Sequence
  Antisense oligo
aguggcacaaucucagcuca

SEQ ID NO: 887 - RNA, 20 nt, Artificial Sequence
  Antisense oligo
caguggcacaaucucagcuc

SEQ ID NO: 888 - RNA, 20 nt, Artificial Sequence
  Antisense oligo
gcaguggcacaaucucagcu

SEQ ID NO: 889 - RNA, 20 nt, Artificial Sequence
  Antisense oligo
ugcaguggcacaaucucagc

SEQ ID NO: 890 - RNA, 20 nt, Artificial Sequence
  Antisense oligo
uugucacccaggcuggagug

SEQ ID NO: 891 - RNA, 20 nt, Artificial Sequence
  Antisense oligo
guugucacccaggcuggagu

SEQ ID NO: 892 - RNA, 20 nt, Artificial Sequence
  Antisense oligo
uguugucacccaggcuggag

SEQ ID NO: 893 - RNA, 20 nt, Artificial Sequence
  Antisense oligo
cuguugucacccaggcugga

SEQ ID NO: 894 - RNA, 20 nt, Artificial Sequence
  Antisense oligo
uggguuuucaccauauuggc

SEQ ID NO: 895 - RNA, 20 nt, Artificial Sequence
  Antisense oligo
gcugggacuacagguacacg

SEQ ID NO: 896 - RNA, 20 nt, Artificial Sequence
  Antisense oligo
agcugggacuacagguacac

SEQ ID NO: 897 - RNA, 20 nt, Artificial Sequence
  Antisense oligo
uagcugggacuacagguaca

SEQ ID NO: 898 - RNA, 20 nt, Artificial Sequence
  Antisense oligo
uucucuccugccucagccuc

SEQ ID NO: 899 - RNA, 20 nt, Artificial Sequence
  Antisense oligo
auucucuccugccucagccu

SEQ ID NO: 900 - RNA, 20 nt, Artificial Sequence
  Antisense oligo
gauucucuccugccucagcc

SEQ ID NO: 901 - RNA, 20 nt, Artificial Sequence
  Antisense oligo
guucaagugauucucuccug

SEQ ID NO: 902 - RNA, 20 nt, Artificial Sequence
  Antisense oligo
gguucaagugauucucuccu

SEQ ID NO: 903 - RNA, 20 nt, Artificial Sequence
  Antisense oligo
ggguucaagugauucucucc

SEQ ID NO: 904 - RNA, 20 nt, Artificial Sequence
  Antisense oligo
uggguucaagugauucucuc

SEQ ID NO: 905 - RNA, 20 nt, Artificial Sequence
  Antisense oligo
cuggguucaagugauucucu

SEQ ID NO: 906 - RNA, 20 nt, Artificial Sequence
  Antisense oligo
ccuggguucaagugauucuc

SEQ ID NO: 907 - RNA, 20 nt, Artificial Sequence
  Antisense oligo
uccuggguucaagugauucu

SEQ ID NO: 908 - RNA, 20 nt, Artificial Sequence
  Antisense oligo
cuccuggguucaagugauuc

SEQ ID NO: 909 - RNA, 20 nt, Artificial Sequence
  Antisense oligo
ccuccuggguucaagugauu

SEQ ID NO: 910 - RNA, 20 nt, Artificial Sequence
  Antisense oligo
accuccuggguucaagugau

SEQ ID NO: 911 - RNA, 20 nt, Artificial Sequence
  Antisense oligo
caccuccuggguucaaguga

SEQ ID NO: 912 - RNA, 20 nt, Artificial Sequence
  Antisense oligo
ccaccuccuggguucaagug

SEQ ID NO: 913 - RNA, 20 nt, Artificial Sequence
  Antisense oligo
uccaccuccuggguucaagu

SEQ ID NO: 914 - RNA, 20 nt, Artificial Sequence
  Antisense oligo
cuccaccuccuggguucaag

SEQ ID NO: 915 - RNA, 20 nt, Artificial Sequence
  Antisense oligo
ccuccaccuccuggguucaa

SEQ ID NO: 916 - RNA, 20 nt, Artificial Sequence
  Antisense oligo
accuccaccuccuggguuca

SEQ ID NO: 917 - RNA, 20 nt, Artificial Sequence
  Antisense oligo
acugcaaccuccaccuccug

SEQ ID NO: 918 - RNA, 20 nt, Artificial Sequence
  Antisense oligo
cacugcaaccuccaccuccu

SEQ ID NO: 919 - RNA, 20 nt, Artificial Sequence
  Antisense oligo
ucacugcaaccuccaccucc

SEQ ID NO: 920 - RNA, 20 nt, Artificial Sequence
  Antisense oligo
cucacugcaaccuccaccuc

SEQ ID NO: 921 - RNA, 20 nt, Artificial Sequence
  Antisense oligo
gcucacugcaaccuccaccu

SEQ ID NO: 922 - RNA, 20 nt, Artificial Sequence
  Antisense oligo
ucggcucacugcaaccucca

SEQ ID NO: 923 - RNA, 20 nt, Artificial Sequence
  Antisense oligo
ucucggcucacugcaaccuc

SEQ ID NO: 924 - RNA, 20 nt, Artificial Sequence
  Antisense oligo
aucucggcucacugcaaccu

SEQ ID NO: 925 - RNA, 20 nt, Artificial Sequence
  Antisense oligo
gaucucggcucacugcaacc

SEQ ID NO: 926 - RNA, 20 nt, Artificial Sequence
  Antisense oligo
ugaucucggcucacugcaac

SEQ ID NO: 927 - RNA, 20 nt, Artificial Sequence
  Antisense oligo
aguggcgugaucucggcuca

SEQ ID NO: 928 - RNA, 20 nt, Artificial Sequence
  Antisense oligo
agugcaguggcgugaucucg

SEQ ID NO: 929 - RNA, 20 nt, Artificial Sequence
  Antisense oligo
gagugcaguggcgugaucuc

SEQ ID NO: 930 - RNA, 20 nt, Artificial Sequence
  Antisense oligo
ggagugcaguggcgugaucu

SEQ ID NO: 931 - RNA, 20 nt, Artificial Sequence
  Antisense oligo
uggagugcaguggcgugauc

SEQ ID NO: 932 - RNA, 20 nt, Artificial Sequence
  Antisense oligo
cuggagugcaguggcgugau

SEQ ID NO: 933 - RNA, 20 nt, Artificial Sequence
  Antisense oligo
auggagucucgcucugucgc

SEQ ID NO: 934 - RNA, 20 nt, Artificial Sequence
  Antisense oligo
gauggagucucgcucugucg

SEQ ID NO: 935 - RNA, 20 nt, Artificial Sequence
  Antisense oligo
ggauggagucucgcucuguc

SEQ ID NO: 936 - RNA, 20 nt, Artificial Sequence
  Antisense oligo
gggauggagucucgcucugu

SEQ ID NO: 937 - RNA, 20 nt, Artificial Sequence
  Antisense oligo
ugggauggagucucgcucug

SEQ ID NO: 938 - RNA, 20 nt, Artificial Sequence
  Antisense oligo
uugggauggagucucgcucu

SEQ ID NO: 939 - RNA, 20 nt, Artificial Sequence
  Antisense oligo
uuugggauggagucucgcuc

SEQ ID NO: 940 - RNA, 20 nt, Artificial Sequence
  Antisense oligo
ucuccauaucacaauaaggc

SEQ ID NO: 941 - RNA, 20 nt, Artificial Sequence
  Antisense oligo
gcaaacucucuccauaucac

SEQ ID NO: 942 - RNA, 20 nt, Artificial Sequence
  Antisense oligo
uugaccucuccagacauugc

SEQ ID NO: 943 - RNA, 20 nt, Artificial Sequence
  Antisense oligo
gguuugaccucuccagacau

SEQ ID NO: 944 - RNA, 20 nt, Artificial Sequence
  Antisense oligo
ugguuugaccucuccagaca

SEQ ID NO: 945 - RNA, 20 nt, Artificial Sequence
  Antisense oligo
ugacugguuugaccucucca

SEQ ID NO: 946 - RNA, 20 nt, Artificial Sequence
  Antisense oligo
gugacugguuugaccucucc

SEQ ID NO: 947 - RNA, 20 nt, Artificial Sequence
  Antisense oligo
ugugacugguuugaccucuc

SEQ ID NO: 948 - RNA, 20 nt, Artificial Sequence
  Antisense oligo
uugugacugguuugaccucu

SEQ ID NO: 949 - RNA, 20 nt, Artificial Sequence
  Antisense oligo
ggcugugguuuaagggaaug

SEQ ID NO: 950 - RNA, 20 nt, Artificial Sequence
  Antisense oligo
cggcugugguuuaagggaau

SEQ ID NO: 951 - RNA, 20 nt, Artificial Sequence
  Antisense oligo
ucggcugugguuuaagggaa

SEQ ID NO: 952 - RNA, 20 nt, Artificial Sequence
  Antisense oligo
uucggcugugguuuaaggga

SEQ ID NO: 953 - RNA, 20 nt, Artificial Sequence
  Antisense oligo
auucggcugugguuuaaggg

SEQ ID NO: 954 - RNA, 20 nt, Artificial Sequence
  Antisense oligo
ggauucggcugugguuuaag

SEQ ID NO: 955 - RNA, 20 nt, Artificial Sequence
  Antisense oligo
uggauucggcugugguuuaa

SEQ ID NO: 956 - RNA, 20 nt, Artificial Sequence
  Antisense oligo
guggauucggcugugguuua

SEQ ID NO: 957 - RNA, 20 nt, Artificial Sequence
  Antisense oligo
uguggauucggcugugguuu

SEQ ID NO: 958 - RNA, 20 nt, Artificial Sequence
  Antisense oligo
cuguggauucggcugugguu

SEQ ID NO: 959 - RNA, 20 nt, Artificial Sequence
  Antisense oligo
acuguggauucggcuguggu

SEQ ID NO: 960 - RNA, 20 nt, Artificial Sequence
  Antisense oligo
uacuguggauucggcugugg

SEQ ID NO: 961 - RNA, 20 nt, Artificial Sequence
  Antisense oligo
uuacuguggauucggcugug

SEQ ID NO: 962 - RNA, 20 nt, Artificial Sequence
  Antisense oligo
uuuacuguggauucggcugu

SEQ ID NO: 963 - RNA, 20 nt, Artificial Sequence
  Antisense oligo
cuuuacuguggauucggcug

SEQ ID NO: 964 - RNA, 20 nt, Artificial Sequence
  Antisense oligo
gcuuuacuguggauucggcu

SEQ ID NO: 965 - RNA, 20 nt, Artificial Sequence
  Antisense oligo
ggcuuuacuguggauucggc

SEQ ID NO: 966 - RNA, 20 nt, Artificial Sequence
  Antisense oligo
gggcuuuacuguggauucgg

SEQ ID NO: 967 - RNA, 20 nt, Artificial Sequence
  Antisense oligo
agggcuuuacuguggauucg

SEQ ID NO: 968 - RNA, 20 nt, Artificial Sequence
  Antisense oligo
aauuguggcuacaggagagu

SEQ ID NO: 969 - RNA, 20 nt, Artificial Sequence
  Antisense oligo
uggaauuguggcuacaggag

SEQ ID NO: 970 - RNA, 20 nt, Artificial Sequence
  Antisense oligo
guguggaauuguggcuacag

SEQ ID NO: 971 - RNA, 20 nt, Artificial Sequence
  Antisense oligo
uguguggaauuguggcuaca

SEQ ID NO: 972 - RNA, 20 nt, Artificial Sequence
  Antisense oligo
ccuguguggaauuguggcua

SEQ ID NO: 973 - RNA, 20 nt, Artificial Sequence
  Antisense oligo
gccuguguggaauuguggcu

SEQ ID NO: 974 - RNA, 20 nt, Artificial Sequence
  Antisense oligo
cugucagccuguguggaauu

SEQ ID NO: 975 - RNA, 20 nt, Artificial Sequence
  Antisense oligo
ucugucagccuguguggaau

SEQ ID NO: 976 - RNA, 20 nt, Artificial Sequence
  Antisense oligo
aacucugucagccugugugg

SEQ ID NO: 977 - RNA, 20 nt, Artificial Sequence
  Antisense oligo
ucauaaaccagucucugcua

SEQ ID NO: 978 - RNA, 20 nt, Artificial Sequence
  Antisense oligo
cucauaaaccagucucugcu

SEQ ID NO: 979 - RNA, 20 nt, Artificial Sequence
  Antisense oligo
ccucauaaaccagucucugc

SEQ ID NO: 980 - RNA, 20 nt, Artificial Sequence
  Antisense oligo
accucauaaaccagucucug

SEQ ID NO: 981 - RNA, 20 nt, Artificial Sequence
  Antisense oligo
gacugcuuuccuaaaaccuc

SEQ ID NO: 982 - RNA, 20 nt, Artificial Sequence
  Antisense oligo
augacugcuuuccuaaaacc

SEQ ID NO: 983 - RNA, 20 nt, Artificial Sequence
  Antisense oligo
gaugacugcuuuccuaaaac

SEQ ID NO: 984 - RNA, 20 nt, Artificial Sequence
  Antisense oligo
gagaugacugcuuuccuaaa

SEQ ID NO: 985 - RNA, 20 nt, Artificial Sequence
  Antisense oligo
uggagaugacugcuuuccua

SEQ ID NO: 986 - RNA, 20 nt, Artificial Sequence
  Antisense oligo
cuucuccagcagcacucgcu

SEQ ID NO: 987 - RNA, 20 nt, Artificial Sequence
  Antisense oligo
gagccaccuccaucaauaac

SEQ ID NO: 988 - RNA, 20 nt, Artificial Sequence
  Antisense oligo
uagagccaccuccaucaaua

SEQ ID NO: 989 - RNA, 20 nt, Artificial Sequence
  Antisense oligo
uugaguagagccaccuccau

SEQ ID NO: 990 - RNA, 20 nt, Artificial Sequence
  Antisense oligo
uguugaguagagccaccucc

SEQ ID NO: 991 - RNA, 20 nt, Artificial Sequence
  Antisense oligo
cuguugaguagagccaccuc

SEQ ID NO: 992 - RNA, 20 nt, Artificial Sequence
  Antisense oligo
gcuguugaguagagccaccu

SEQ ID NO: 993 - RNA, 20 nt, Artificial Sequence
  Antisense oligo
ugcuguugaguagagccacc

SEQ ID NO: 994 - RNA, 20 nt, Artificial Sequence
  Antisense oligo
gaaaaucugcuguugaguag

SEQ ID NO: 995 - RNA, 20 nt, Artificial Sequence
  Antisense oligo
ugaggaccagccacugcacu

SEQ ID NO: 996 - RNA, 20 nt, Artificial Sequence
  Antisense oligo
auugcuugaaccugggaggc

SEQ ID NO: 997 - RNA, 20 nt, Artificial Sequence
  Antisense oligo
aauugcuugaaccugggagg

SEQ ID NO: 998 - RNA, 20 nt, Artificial Sequence
  Antisense oligo
gaauugcuugaaccugggag

SEQ ID NO: 999 - RNA, 20 nt, Artificial Sequence
  Antisense oligo
agaauugcuugaaccuggga

SEQ ID NO: 1000 - RNA, 20 nt, Artificial Sequence
  Antisense oligo
gagaauugcuugaaccuggg

SEQ ID NO: 1001 - RNA, 20 nt, Artificial Sequence
  Antisense oligo
ggagaauugcuugaaccugg

SEQ ID NO: 1002 - RNA, 20 nt, Artificial Sequence
  Antisense oligo
aggagaauugcuugaaccug

SEQ ID NO: 1003 - RNA, 20 nt, Artificial Sequence
  Antisense oligo
caggagaauugcuugaaccu

SEQ ID NO: 1004 - RNA, 20 nt, Artificial Sequence
  Antisense oligo
gcaggagaauugcuugaacc

SEQ ID NO: 1005 - RNA, 20 nt, Artificial Sequence
  Antisense oligo
ggcaggagaauugcuugaac

SEQ ID NO: 1006 - RNA, 20 nt, Artificial Sequence
  Antisense oligo
aggcaggagaauugcuugaa

SEQ ID NO: 1007 - RNA, 20 nt, Artificial Sequence
  Antisense oligo
gaggcaggagaauugcuuga

SEQ ID NO: 1008 - RNA, 20 nt, Artificial Sequence
  Antisense oligo
ugaggcaggagaauugcuug

SEQ ID NO: 1009 - RNA, 20 nt, Artificial Sequence
  Antisense oligo
cugaggcaggagaauugcuu

SEQ ID NO: 1010 - RNA, 20 nt, Artificial Sequence
  Antisense oligo
gcugaggcaggagaauugcu

SEQ ID NO: 1011 - RNA, 20 nt, Artificial Sequence
  Antisense oligo
ggcugaggcaggagaauugc

SEQ ID NO: 1012 - RNA, 20 nt, Artificial Sequence
  Antisense oligo
aggcugaggcaggagaauug

SEQ ID NO: 1013 - RNA, 20 nt, Artificial Sequence
  Antisense oligo
gaggcugaggcaggagaauu

SEQ ID NO: 1014 - RNA, 20 nt, Artificial Sequence
  Antisense oligo
ggaggcugaggcaggagaau

SEQ ID NO: 1015 - RNA, 20 nt, Artificial Sequence
  Antisense oligo
uacuugggaggcugaggcag

SEQ ID NO: 1016 - RNA, 20 nt, Artificial Sequence
  Antisense oligo
cuacuugggaggcugaggca

SEQ ID NO: 1017 - RNA, 20 nt, Artificial Sequence
  Antisense oligo
agcuacuugggaggcugagg

SEQ ID NO: 1018 - RNA, 20 nt, Artificial Sequence
  Antisense oligo
cuguaaucccagcuacuugg

SEQ ID NO: 1019 - RNA, 20 nt, Artificial Sequence
  Antisense oligo
ccuguaaucccagcuacuug

SEQ ID NO: 1020 - RNA, 20 nt, Artificial Sequence
  Antisense oligo
accuguaaucccagcuacuu

SEQ ID NO: 1021 - RNA, 20 nt, Artificial Sequence
  Antisense oligo
caccuguaaucccagcuacu

SEQ ID NO: 1022 - RNA, 20 nt, Artificial Sequence
  Antisense oligo
acaccuguaaucccagcuac

SEQ ID NO: 1023 - RNA, 20 nt, Artificial Sequence
  Antisense oligo
cacaccuguaaucccagcua

SEQ ID NO: 1024 - RNA, 20 nt, Artificial Sequence
  Antisense oligo
acacaccuguaaucccagcu

SEQ ID NO: 1025 - RNA, 20 nt, Artificial Sequence
  Antisense oligo
cacacaccuguaaucccagc

SEQ ID NO: 1026 - RNA, 20 nt, Artificial Sequence
  Antisense oligo
gcacacaccuguaaucccag

SEQ ID NO: 1027 - RNA, 20 nt, Artificial Sequence
  Antisense oligo
ggcacacaccuguaauccca

SEQ ID NO: 1028 - RNA, 20 nt, Artificial Sequence
  Antisense oligo
uggcacacaccuguaauccc

SEQ ID NO: 1029 - RNA, 20 nt, Artificial Sequence
  Antisense oligo
augcuaauauggagaaaccc

SEQ ID NO: 1030 - RNA, 20 nt, Artificial Sequence
  Antisense oligo
cagcaaugcuaauauggaga

SEQ ID NO: 1031 - RNA, 20 nt, Artificial Sequence
  Antisense oligo
ccagcaaugcuaauauggag

SEQ ID NO: 1032 - RNA, 20 nt, Artificial Sequence
  Antisense oligo
accagcaaugcuaauaugga

SEQ ID NO: 1033 - RNA, 20 nt, Artificial Sequence
  Antisense oligo
gaccagcaaugcuaauaugg

SEQ ID NO: 1034 - RNA, 20 nt, Artificial Sequence
  Antisense oligo
agaccagcaaugcuaauaug

SEQ ID NO: 1035 - RNA, 20 nt, Artificial Sequence
  Antisense oligo
gagaccagcaaugcuaauau

SEQ ID NO: 1036 - RNA, 20 nt, Artificial Sequence
  Antisense oligo
uuggagaccagcaaugcuaa

SEQ ID NO: 1037 - RNA, 20 nt, Artificial Sequence
  Antisense oligo
guuggagaccagcaaugcua

SEQ ID NO: 1038 - RNA, 20 nt, Artificial Sequence
  Antisense oligo
aacacuacucggccuuaaaa

SEQ ID NO: 1039 - RNA, 20 nt, Artificial Sequence
  Antisense oligo
gaacacuacucggccuuaaa

SEQ ID NO: 1040 - RNA, 20 nt, Artificial Sequence
  Antisense oligo
ggaacacuacucggccuuaa

SEQ ID NO: 1041 - RNA, 20 nt, Artificial Sequence
  Antisense oligo
uggaacacuacucggccuua

SEQ ID NO: 1042 - RNA, 20 nt, Artificial Sequence
  Antisense oligo
ggacguugaagaaaaugugg

SEQ ID NO: 1043 - RNA, 20 nt, Artificial Sequence
  Antisense oligo
uggacguugaagaaaaugug

SEQ ID NO: 1044 - RNA, 20 nt, Artificial Sequence
  Antisense oligo
aauccaccaacuauccaaca

SEQ ID NO: 1045 - RNA, 20 nt, Artificial Sequence
  Antisense oligo
gaauccaccaacuauccaac

SEQ ID NO: 1046 - RNA, 20 nt, Artificial Sequence
  Antisense oligo
auggaauccaccaacuaucc

SEQ ID NO: 1047 - RNA, 20 nt, Artificial Sequence
  Antisense oligo
uauggaauccaccaacuauc

SEQ ID NO: 1048 - RNA, 20 nt, Artificial Sequence
  Antisense oligo
uagcacgauucacaauagcc

SEQ ID NO: 1049 - RNA, 20 nt, Artificial Sequence
  Antisense oligo
auccugccaugcacacccau

SEQ ID NO: 1050 - RNA, 20 nt, Artificial Sequence
  Antisense oligo
caauccugccaugcacaccc

SEQ ID NO: 1051 - RNA, 20 nt, Artificial Sequence
  Antisense oligo
ccagcaauccugccaugcac

SEQ ID NO: 1052 - RNA, 20 nt, Artificial Sequence
  Antisense oligo
cuggagugcagugguaugau

SEQ ID NO: 1053 - RNA, 20 nt, Artificial Sequence
  Antisense oligo
gcuggagugcagugguauga

SEQ ID NO: 1054 - RNA, 20 nt, Artificial Sequence
  Antisense oligo
ggcuggagugcagugguaug

SEQ ID NO: 1055 - RNA, 20 nt, Artificial Sequence
  Antisense oligo
aggcuggagugcagugguau

SEQ ID NO: 1056 - RNA, 20 nt, Artificial Sequence
  Antisense oligo
caggcuggagugcaguggua

SEQ ID NO: 1057 - RNA, 20 nt, Artificial Sequence
  Antisense oligo
uggagugcuuggugguggca

SEQ ID NO: 1058 - RNA, 20 nt, Artificial Sequence
  Antisense oligo
uuggagugcuuggugguggc

SEQ ID NO: 1059 - RNA, 20 nt, Artificial Sequence
  Antisense oligo
uuuggagugcuugguggugg

SEQ ID NO: 1060 - RNA, 20 nt, Artificial Sequence
  Antisense oligo
cuuuggagugcuugguggug

SEQ ID NO: 1061 - RNA, 20 nt, Artificial Sequence
  Antisense oligo
ucuuuggagugcuugguggu

SEQ ID NO: 1062 - RNA, 20 nt, Artificial Sequence
  Antisense oligo
caucuuuggagugcuuggug

SEQ ID NO: 1063 - RNA, 20 nt, Artificial Sequence
  Antisense oligo
gcaucuuuggagugcuuggu

SEQ ID NO: 1064 - RNA, 20 nt, Artificial Sequence
  Antisense oligo
ugcaucuuuggagugcuugg

SEQ ID NO: 1065 - RNA, 20 nt, Artificial Sequence
  Antisense oligo
cugcaucuuuggagugcuug

SEQ ID NO: 1066 - RNA, 20 nt, Artificial Sequence
  Antisense oligo
uuccacaaaggccaaauagg

SEQ ID NO: 1067 - RNA, 20 nt, Artificial Sequence
  Antisense oligo
cauuuucauucccaagaucc

SEQ ID NO: 1068 - RNA, 20 nt, Artificial Sequence
  Antisense oligo
gagaggauguauuaggagaa

SEQ ID NO: 1069 - RNA, 20 nt, Artificial Sequence
  Antisense oligo
agagaggauguauuaggaga

SEQ ID NO: 1070 - RNA, 20 nt, Artificial Sequence
  Antisense oligo
augagagaggauguauuagg

SEQ ID NO: 1071 - RNA, 20 nt, Artificial Sequence
  Antisense oligo
gaugagagaggauguauuag

SEQ ID NO: 1072 - RNA, 20 nt, Artificial Sequence
  Antisense oligo
uggaugagagaggauguauu

SEQ ID NO: 1073 - RNA, 20 nt, Artificial Sequence
  Antisense oligo
aacagauggaugagagagga

SEQ ID NO: 1074 - RNA, 20 nt, Artificial Sequence
  Antisense oligo
caaacagauggaugagagag

SEQ ID NO: 1075 - RNA, 20 nt, Artificial Sequence
  Antisense oligo
acaaacagauggaugagaga

SEQ ID NO: 1076 - RNA, 20 nt, Artificial Sequence
  Antisense oligo
ggauggauggauggacaaac

SEQ ID NO: 1077 - RNA, 20 nt, Artificial Sequence
  Antisense oligo
uggauggauggauggacaaa

SEQ ID NO: 1078 - RNA, 20 nt, Artificial Sequence
  Antisense oligo
auggauggauggauggacaa

SEQ ID NO: 1079 - RNA, 20 nt, Artificial Sequence
  Antisense oligo
gauggauggauggauggaca

SEQ ID NO: 1080 - RNA, 20 nt, Artificial Sequence
  Antisense oligo
ggauggauggauggauggac

SEQ ID NO: 1081 - RNA, 20 nt, Artificial Sequence
  Antisense oligo
uggauggauggauggaugga

SEQ ID NO: 1082 - RNA, 20 nt, Artificial Sequence
  Antisense oligo
auggauggauggauggaugg

SEQ ID NO: 1083 - RNA, 20 nt, Artificial Sequence
  Antisense oligo
gauggauggauggauggaug

SEQ ID NO: 1084 - RNA, 20 nt, Artificial Sequence
  Antisense oligo
ggauggauggauggauggau

SEQ ID NO: 1085 - RNA, 20 nt, Artificial Sequence
  Antisense oligo
uggauggauggauggaugga

SEQ ID NO: 1086 - RNA, 20 nt, Artificial Sequence
  Antisense oligo
auggauggauggauggaugg

SEQ ID NO: 1087 - RNA, 20 nt, Artificial Sequence
  Antisense oligo
gauggauggauggauggaug

SEQ ID NO: 1088 - RNA, 20 nt, Artificial Sequence
  Antisense oligo
agguacauggaugaauggau

SEQ ID NO: 1089 - RNA, 20 nt, Artificial Sequence
  Antisense oligo
uagguacauggaugaaugga

SEQ ID NO: 1090 - RNA, 20 nt, Artificial Sequence
  Antisense oligo
auagguacauggaugaaugg

SEQ ID NO: 1091 - RNA, 20 nt, Artificial Sequence
  Antisense oligo
gauagguacauggaugaaug

SEQ ID NO: 1092 - RNA, 20 nt, Artificial Sequence
  Antisense oligo
ggauagguacauggaugaau

SEQ ID NO: 1093 - RNA, 20 nt, Artificial Sequence
  Antisense oligo
uggauagguacauggaugaa

SEQ ID NO: 1094 - RNA, 20 nt, Artificial Sequence
  Antisense oligo
auggauagguacauggauga

SEQ ID NO: 1095 - RNA, 20 nt, Artificial Sequence
  Antisense oligo
uggauggauagguacaugga

SEQ ID NO: 1096 - RNA, 20 nt, Artificial Sequence
  Antisense oligo
gauggauggauagguacaug

SEQ ID NO: 1097 - RNA, 20 nt, Artificial Sequence
  Antisense oligo
uaagauggauggauagguac

SEQ ID NO: 1098 - RNA, 20 nt, Artificial Sequence
  Antisense oligo
acucccuuucuuacagacau

SEQ ID NO: 1099 - RNA, 20 nt, Artificial Sequence
  Antisense oligo
cacucccuuucuuacagaca

SEQ ID NO: 1100 - RNA, 20 nt, Artificial Sequence
  Antisense oligo
acacucccuuucuuacagac

SEQ ID NO: 1101 - RNA, 20 nt, Artificial Sequence
  Antisense oligo
uacacucccuuucuuacaga

SEQ ID NO: 1102 - RNA, 20 nt, Artificial Sequence
  Antisense oligo
auacacucccuuucuuacag

SEQ ID NO: 1103 - RNA, 20 nt, Artificial Sequence
  Antisense oligo
ucagacugagcaacuacugg

SEQ ID NO: 1104 - RNA, 20 nt, Artificial Sequence
  Antisense oligo
aacuuggacuuacgccagug

SEQ ID NO: 1105 - RNA, 20 nt, Artificial Sequence
  Antisense oligo
aaacuuggacuuacgccagu

SEQ ID NO: 1106 - RNA, 20 nt, Artificial Sequence
  Antisense oligo
gaaacuuggacuuacgccag

SEQ ID NO: 1107 - RNA, 20 nt, Artificial Sequence
  Antisense oligo
uuggaaacuuggacuuacgc

SEQ ID NO: 1108 - RNA, 20 nt, Artificial Sequence
  Antisense oligo
uuuggaaacuuggacuuacg

SEQ ID NO: 1109 - RNA, 20 nt, Artificial Sequence
  Antisense oligo
cuuuggaaacuuggacuuac

SEQ ID NO: 1110 - RNA, 20 nt, Artificial Sequence
  Antisense oligo
ggccuuuggaaacuuggacu

SEQ ID NO: 1111 - RNA, 20 nt, Artificial Sequence
  Antisense oligo
uggccuuuggaaacuuggac

SEQ ID NO: 1112 - RNA, 20 nt, Artificial Sequence
  Antisense oligo
uuuggccuuuggaaacuugg

SEQ ID NO: 1113 - RNA, 20 nt, Artificial Sequence
  Antisense oligo
acguuccucuugcccuugga

SEQ ID NO: 1114 - RNA, 20 nt, Artificial Sequence
  Antisense oligo
cacguuccucuugcccuugg

SEQ ID NO: 1115 - RNA, 20 nt, Artificial Sequence
  Antisense oligo
uuccucacguuccucuugcc

SEQ ID NO: 1116 - RNA, 20 nt, Artificial Sequence
  Antisense oligo
cuuccucacguuccucuugc

SEQ ID NO: 1117 - RNA, 20 nt, Artificial Sequence
  Antisense oligo
gcuuccucacguuccucuug

SEQ ID NO: 1118 - RNA, 20 nt, Artificial Sequence
  Antisense oligo
ugcuuccucacguuccucuu

SEQ ID NO: 1119 - RNA, 20 nt, Artificial Sequence
  Antisense oligo
augcuuccucacguuccucu

SEQ ID NO: 1120 - RNA, 20 nt, Artificial Sequence
  Antisense oligo
uggaugcuuccucacguucc

SEQ ID NO: 1121 - RNA, 20 nt, Artificial Sequence
  Antisense oligo
cuggaugcuuccucacguuc

SEQ ID NO: 1122 - RNA, 20 nt, Artificial Sequence
  Antisense oligo
uuucaucuuccuccuaugcu

SEQ ID NO: 1123 - RNA, 20 nt, Artificial Sequence
  Antisense oligo
uggcucgcugagucuucugg

SEQ ID NO: 1124 - RNA, 20 nt, Artificial Sequence
  Antisense oligo
cuggcucgcugagucuucug

SEQ ID NO: 1125 - RNA, 20 nt, Artificial Sequence
  Antisense oligo
gcuggcucgcugagucuucu

SEQ ID NO: 1126 - RNA, 20 nt, Artificial Sequence
  Antisense oligo
agcuggcucgcugagucuuc

SEQ ID NO: 1127 - RNA, 20 nt, Artificial Sequence
  Antisense oligo
uaagcuggcucgcugagucu

SEQ ID NO: 1128 - RNA, 20 nt, Artificial Sequence
  Antisense oligo
gguaagcuggcucgcugagu

SEQ ID NO: 1129 - RNA, 20 nt, Artificial Sequence
  Antisense oligo
ucaauggccugggagaggaa

SEQ ID NO: 1130 - RNA, 20 nt, Artificial Sequence
  Antisense oligo
gucaauggccugggagagga

SEQ ID NO: 1131 - RNA, 20 nt, Artificial Sequence
  Antisense oligo
gagucaauggccugggagag

SEQ ID NO: 1132 - RNA, 20 nt, Artificial Sequence
  Antisense oligo
ugagucaauggccugggaga

SEQ ID NO: 1133 - RNA, 20 nt, Artificial Sequence
  Antisense oligo
uugagucaauggccugggag

SEQ ID NO: 1134 - RNA, 20 nt, Artificial Sequence
  Antisense oligo
uuugagucaauggccuggga

SEQ ID NO: 1135 - RNA, 20 nt, Artificial Sequence
  Antisense oligo
aguauuguucugguuguguc

SEQ ID NO: 1136 - RNA, 20 nt, Artificial Sequence
  Antisense oligo
ggauagacggugugaugguu

SEQ ID NO: 1137 - RNA, 20 nt, Artificial Sequence
  Antisense oligo
uggauagacggugugauggu

SEQ ID NO: 1138 - RNA, 20 nt, Artificial Sequence
  Antisense oligo
auggauagacggugugaugg

SEQ ID NO: 1139 - RNA, 20 nt, Artificial Sequence
  Antisense oligo
gauggauagacggugugaug

SEQ ID NO: 1140 - RNA, 20 nt, Artificial Sequence
  Antisense oligo
ggauggauagacggugugau

SEQ ID NO: 1141 - RNA, 20 nt, Artificial Sequence
  Antisense oligo
gggauggauagacgguguga

SEQ ID NO: 1142 - RNA, 20 nt, Artificial Sequence
  Antisense oligo
agggauggauagacggugug

SEQ ID NO: 1143 - RNA, 20 nt, Artificial Sequence
  Antisense oligo
guagagggauggauagacgg

SEQ ID NO: 1144 - RNA, 20 nt, Artificial Sequence
  Antisense oligo
gguagagggauggauagacg

SEQ ID NO: 1145 - RNA, 20 nt, Artificial Sequence
  Antisense oligo
ggguagagggauggauagac

SEQ ID NO: 1146 - RNA, 20 nt, Artificial Sequence
  Antisense oligo
acagauaggguagagggaug

SEQ ID NO: 1147 - RNA, 20 nt, Artificial Sequence
  Antisense oligo
gacagauaggguagagggau

SEQ ID NO: 1148 - RNA, 20 nt, Artificial Sequence
  Antisense oligo
ggacagauaggguagaggga

SEQ ID NO: 1149 - RNA, 20 nt, Artificial Sequence
  Antisense oligo
uggacagauaggguagaggg

SEQ ID NO: 1150 - RNA, 20 nt, Artificial Sequence
  Antisense oligo
gguggacagauaggguagag

SEQ ID NO: 1151 - RNA, 20 nt, Artificial Sequence
  Antisense oligo
agguggacagauaggguaga

SEQ ID NO: 1152 - RNA, 20 nt, Artificial Sequence
  Antisense oligo
uagguggacagauaggguag

SEQ ID NO: 1153 - RNA, 20 nt, Artificial Sequence
  Antisense oligo
ggguagguggacagauaggg

SEQ ID NO: 1154 - RNA, 20 nt, Artificial Sequence
  Antisense oligo
aggguagguggacagauagg

SEQ ID NO: 1155 - RNA, 20 nt, Artificial Sequence
  Antisense oligo
agauaggguagguggacaga

SEQ ID NO: 1156 - RNA, 20 nt, Artificial Sequence
  Antisense oligo
uagauaggguagguggacag

SEQ ID NO: 1157 - RNA, 20 nt, Artificial Sequence
  Antisense oligo
agauagauaggguaggugga

SEQ ID NO: 1158 - RNA, 20 nt, Artificial Sequence
  Antisense oligo
uagauagauaggguaggugg

SEQ ID NO: 1159 - RNA, 20 nt, Artificial Sequence
  Antisense oligo
auagauagauaggguaggug

SEQ ID NO: 1160 - RNA, 20 nt, Artificial Sequence
  Antisense oligo
gauagauagauaggguaggu

SEQ ID NO: 1161 - RNA, 20 nt, Artificial Sequence
  Antisense oligo
ggauagauagauaggguagg

SEQ ID NO: 1162 - RNA, 20 nt, Artificial Sequence
  Antisense oligo
gguggauagauagauagggu

SEQ ID NO: 1163 - RNA, 20 nt, Artificial Sequence
  Antisense oligo
ggauggacagauagaauaga

SEQ ID NO: 1164 - RNA, 20 nt, Artificial Sequence
  Antisense oligo
gauaguauagauggauggac

SEQ ID NO: 1165 - RNA, 20 nt, Artificial Sequence
  Antisense oligo
ggauagauaagaugggauag

SEQ ID NO: 1166 - RNA, 20 nt, Artificial Sequence
  Antisense oligo
gggauggauagauaagaugg

SEQ ID NO: 1167 - RNA, 20 nt, Artificial Sequence
  Antisense oligo
agaugggauggauagauaag

SEQ ID NO: 1168 - RNA, 20 nt, Artificial Sequence
  Antisense oligo
uacauggauggauggacgga

SEQ ID NO: 1169 - RNA, 20 nt, Artificial Sequence
  Antisense oligo
auacauggauggauggacgg

SEQ ID NO: 1170 - RNA, 20 nt, Artificial Sequence
  Antisense oligo
gauacauggauggauggacg

SEQ ID NO: 1171 - RNA, 20 nt, Artificial Sequence
  Antisense oligo
aggguuauccagagagcaga

SEQ ID NO: 1172 - RNA, 20 nt, Artificial Sequence
  Antisense oligo
gcacuuccuaaacaauguac

SEQ ID NO: 1173 - RNA, 20 nt, Artificial Sequence
  Antisense oligo
cuagcacuuccuaaacaaug

SEQ ID NO: 1174 - RNA, 20 nt, Artificial Sequence
  Antisense oligo
guaaguagcuggauucagaa

SEQ ID NO: 1175 - RNA, 20 nt, Artificial Sequence
  Antisense oligo
cauuugccaaccagcauuua

SEQ ID NO: 1176 - RNA, 20 nt, Artificial Sequence
  Antisense oligo
ucauuugccaaccagcauuu

SEQ ID NO: 1177 - RNA, 20 nt, Artificial Sequence
  Antisense oligo
gucauuugccaaccagcauu

SEQ ID NO: 1178 - RNA, 20 nt, Artificial Sequence
  Antisense oligo
augugggucauuugccaacc

SEQ ID NO: 1179 - RNA, 20 nt, Artificial Sequence
  Antisense oligo
ucgugcuauuuuauguccuc

SEQ ID NO: 1180 - RNA, 20 nt, Artificial Sequence
  Antisense oligo
gaggaaacuucgugcuauuu

SEQ ID NO: 1181 - RNA, 20 nt, Artificial Sequence
  Antisense oligo
ugaggaaacuucgugcuauu

SEQ ID NO: 1182 - RNA, 20 nt, Artificial Sequence
  Antisense oligo
gugaggaaacuucgugcuau

SEQ ID NO: 1183 - RNA, 20 nt, Artificial Sequence
  Antisense oligo
ggugaggaaacuucgugcua

SEQ ID NO: 1184 - RNA, 20 nt, Artificial Sequence
  Antisense oligo
gggugaggaaacuucgugcu

SEQ ID NO: 1185 - RNA, 20 nt, Artificial Sequence
  Antisense oligo
agggugaggaaacuucgugc

SEQ ID NO: 1186 - RNA, 20 nt, Artificial Sequence
  Antisense oligo
cagggugaggaaacuucgug

SEQ ID NO: 1187 - RNA, 20 nt, Artificial Sequence
  Antisense oligo
ccagggugaggaaacuucgu

SEQ ID NO: 1188 - RNA, 20 nt, Artificial Sequence
  Antisense oligo
cccagggugaggaaacuucg

SEQ ID NO: 1189 - RNA, 20 nt, Artificial Sequence
  Antisense oligo
uggcccagggugaggaaacu

SEQ ID NO: 1190 - RNA, 20 nt, Artificial Sequence
  Antisense oligo
agaggacacaccaguuuaca

SEQ ID NO: 1191 - RNA, 20 nt, Artificial Sequence
  Antisense oligo
aagaggacacaccaguuuac

SEQ ID NO: 1192 - RNA, 20 nt, Artificial Sequence
  Antisense oligo
uagaagaggacacaccaguu

SEQ ID NO: 1193 - RNA, 20 nt, Artificial Sequence
  Antisense oligo
cuagaagaggacacaccagu

SEQ ID NO: 1194 - RNA, 20 nt, Artificial Sequence
  Antisense oligo
cacgcagaggagaugucuag

SEQ ID NO: 1195 - RNA, 20 nt, Artificial Sequence
  Antisense oligo
ucacgcagaggagaugucua

SEQ ID NO: 1196 - RNA, 20 nt, Artificial Sequence
  Antisense oligo
uucacgcagaggagaugucu

SEQ ID NO: 1197 - RNA, 20 nt, Artificial Sequence
  Antisense oligo
auucacgcagaggagauguc

SEQ ID NO: 1198 - RNA, 20 nt, Artificial Sequence
  Antisense oligo
cauuaacgugugugugugug

SEQ ID NO: 1199 - RNA, 20 nt, Artificial Sequence
  Antisense oligo
ugccacucacauuaacgugu

SEQ ID NO: 1200 - RNA, 20 nt, Artificial Sequence
  Antisense oligo
cugccacucacauuaacgug

SEQ ID NO: 1201 - RNA, 20 nt, Artificial Sequence
  Antisense oligo
gcugccacucacauuaacgu

SEQ ID NO: 1202 - RNA, 20 nt, Artificial Sequence
  Antisense oligo
gagcugccacucacauuaac

SEQ ID NO: 1203 - RNA, 20 nt, Artificial Sequence
  Antisense oligo
acgagcugccacucacauua

SEQ ID NO: 1204 - RNA, 20 nt, Artificial Sequence
  Antisense oligo
cacgagcugccacucacauu

SEQ ID NO: 1205 - RNA, 20 nt, Artificial Sequence
  Antisense oligo
gcacgagcugccacucacau

SEQ ID NO: 1206 - RNA, 20 nt, Artificial Sequence
  Antisense oligo
acaugaaaguagcaaggcau

SEQ ID NO: 1207 - RNA, 20 nt, Artificial Sequence
  Antisense oligo
uacaugaaaguagcaaggca

SEQ ID NO: 1208 - RNA, 20 nt, Artificial Sequence
  Antisense oligo
guacaugaaaguagcaaggc

SEQ ID NO: 1209 - RNA, 20 nt, Artificial Sequence
  Antisense oligo
agguccguccuccacuagag

SEQ ID NO: 1210 - RNA, 20 nt, Artificial Sequence
  Antisense oligo
aagggaagugcccaggauag

SEQ ID NO: 1211 - RNA, 20 nt, Artificial Sequence
  Antisense oligo
caagggaagugcccaggaua

SEQ ID NO: 1212 - RNA, 20 nt, Artificial Sequence
  Antisense oligo
aggacaagggaagugcccag

SEQ ID NO: 1213 - RNA, 20 nt, Artificial Sequence
  Antisense oligo
agcaggacaagggaagugcc

SEQ ID NO: 1214 - RNA, 20 nt, Artificial Sequence
  Antisense oligo
cagcaggacaagggaagugc

SEQ ID NO: 1215 - RNA, 20 nt, Artificial Sequence
  Antisense oligo
aacagcaggacaagggaagu

SEQ ID NO: 1216 - RNA, 20 nt, Artificial Sequence
  Antisense oligo
gcaaaacagcaggacaaggg

SEQ ID NO: 1217 - RNA, 20 nt, Artificial Sequence
  Antisense oligo
cacggcaaaacagcaggaca

SEQ ID NO: 1218 - RNA, 20 nt, Artificial Sequence
  Antisense oligo
gucacggcaaaacagcagga

SEQ ID NO: 1219 - RNA, 20 nt, Artificial Sequence
  Antisense oligo
ugucacggcaaaacagcagg

SEQ ID NO: 1220 - RNA, 20 nt, Artificial Sequence
  Antisense oligo
augucacggcaaaacagcag

SEQ ID NO: 1221 - RNA, 20 nt, Artificial Sequence
  Antisense oligo
uaugucacggcaaaacagca

SEQ ID NO: 1222 - RNA, 20 nt, Artificial Sequence
  Antisense oligo
cuaugucacggcaaaacagc

SEQ ID NO: 1223 - RNA, 20 nt, Artificial Sequence
  Antisense oligo
ccuaugucacggcaaaacag

SEQ ID NO: 1224 - RNA, 20 nt, Artificial Sequence
  Antisense oligo
gccuaugucacggcaaaaca

SEQ ID NO: 1225 - RNA, 20 nt, Artificial Sequence
  Antisense oligo
agccuaugucacggcaaaac

SEQ ID NO: 1226 - RNA, 20 nt, Artificial Sequence
  Antisense oligo
cagccuaugucacggcaaaa

SEQ ID NO: 1227 - RNA, 20 nt, Artificial Sequence
  Antisense oligo
gcagccuaugucacggcaaa

SEQ ID NO: 1228 - RNA, 20 nt, Artificial Sequence
  Antisense oligo
agcagccuaugucacggcaa

SEQ ID NO: 1229 - RNA, 20 nt, Artificial Sequence
  Antisense oligo
uagcagccuaugucacggca

SEQ ID NO: 1230 - RNA, 20 nt, Artificial Sequence
  Antisense oligo
cuagcagccuaugucacggc

SEQ ID NO: 1231 - RNA, 20 nt, Artificial Sequence
  Antisense oligo
ccuagcagccuaugucacgg

SEQ ID NO: 1232 - RNA, 20 nt, Artificial Sequence
  Antisense oligo
gccuagcagccuaugucacg

SEQ ID NO: 1233 - RNA, 20 nt, Artificial Sequence
  Antisense oligo
agccuagcagccuaugucac

SEQ ID NO: 1234 - RNA, 20 nt, Artificial Sequence
  Antisense oligo
cagccuagcagccuauguca

SEQ ID NO: 1235 - RNA, 20 nt, Artificial Sequence
  Antisense oligo
gcagccuagcagccuauguc

SEQ ID NO: 1236 - RNA, 20 nt, Artificial Sequence
  Antisense oligo
ugcagccuagcagccuaugu

SEQ ID NO: 1237 - RNA, 20 nt, Artificial Sequence
  Antisense oligo
augcagccuagcagccuaug

SEQ ID NO: 1238 - RNA, 20 nt, Artificial Sequence
  Antisense oligo
caugcagccuagcagccuau

SEQ ID NO: 1239 - RNA, 20 nt, Artificial Sequence
  Antisense oligo
aaggucuccgugcaagcaug

SEQ ID NO: 1240 - RNA, 20 nt, Artificial Sequence
  Antisense oligo
caaggucuccgugcaagcau

SEQ ID NO: 1241 - RNA, 20 nt, Artificial Sequence
  Antisense oligo
gcaaggucuccgugcaagca

SEQ ID NO: 1242 - RNA, 20 nt, Artificial Sequence
  Antisense oligo
agggcaaggucuccgugcaa

SEQ ID NO: 1243 - RNA, 20 nt, Artificial Sequence
  Antisense oligo
ucagagggcaaggucuccgu

SEQ ID NO: 1244 - RNA, 20 nt, Artificial Sequence
  Antisense oligo
gcaggcuaguggcugggaau

SEQ ID NO: 1245 - RNA, 20 nt, Artificial Sequence
  Antisense oligo
augugccagccugaagccag

SEQ ID NO: 1246 - RNA, 20 nt, Artificial Sequence
  Antisense oligo
guaaaugugccagccugaag

SEQ ID NO: 1247 - RNA, 20 nt, Artificial Sequence
  Antisense oligo
uguaaaugugccagccugaa

SEQ ID NO: 1248 - RNA, 20 nt, Artificial Sequence
  Antisense oligo
uuguaaaugugccagccuga

SEQ ID NO: 1249 - RNA, 20 nt, Artificial Sequence
  Antisense oligo
auuguaaaugugccagccug

SEQ ID NO: 1250 - RNA, 20 nt, Artificial Sequence
  Antisense oligo
uagaaggcagggagcacaga

SEQ ID NO: 1251 - RNA, 20 nt, Artificial Sequence
  Antisense oligo
ugaacgcuggagagaaucug

SEQ ID NO: 1252 - RNA, 20 nt, Artificial Sequence
  Antisense oligo
cugaacgcuggagagaaucu

SEQ ID NO: 1253 - RNA, 20 nt, Artificial Sequence
  Antisense oligo
ucugaacgcuggagagaauc

SEQ ID NO: 1254 - RNA, 20 nt, Artificial Sequence
  Antisense oligo
cauucugaacgcuggagaga

SEQ ID NO: 1255 - RNA, 20 nt, Artificial Sequence
  Antisense oligo
ucauucugaacgcuggagag

SEQ ID NO: 1256 - RNA, 20 nt, Artificial Sequence
  Antisense oligo
aucauucugaacgcuggaga

SEQ ID NO: 1257 - RNA, 20 nt, Artificial Sequence
  Antisense oligo
caucauucugaacgcuggag

SEQ ID NO: 1258 - RNA, 20 nt, Artificial Sequence
  Antisense oligo
ccaucauucugaacgcugga

SEQ ID NO: 1259 - RNA, 20 nt, Artificial Sequence
  Antisense oligo
uccaucauucugaacgcugg

SEQ ID NO: 1260 - RNA, 20 nt, Artificial Sequence
  Antisense oligo
aagauccaucauucugaacg

SEQ ID NO: 1261 - RNA, 20 nt, Artificial Sequence
  Antisense oligo
caagauccaucauucugaac

SEQ ID NO: 1262 - RNA, 20 nt, Artificial Sequence
  Antisense oligo
gacaagauccaucauucuga

SEQ ID NO: 1263 - RNA, 20 nt, Artificial Sequence
  Antisense oligo
ugacaagauccaucauucug

SEQ ID NO: 1264 - RNA, 20 nt, Artificial Sequence
  Antisense oligo
acagauugacaagauccauc

SEQ ID NO: 1265 - RNA, 20 nt, Artificial Sequence
  Antisense oligo
cacagauugacaagauccau

SEQ ID NO: 1266 - RNA, 20 nt, Artificial Sequence
  Antisense oligo
gcacagauugacaagaucca

SEQ ID NO: 1267 - RNA, 20 nt, Artificial Sequence
  Antisense oligo
ggcacagauugacaagaucc

SEQ ID NO: 1268 - RNA, 20 nt, Artificial Sequence
  Antisense oligo
cggcacagauugacaagauc

SEQ ID NO: 1269 - RNA, 20 nt, Artificial Sequence
  Antisense oligo
ccggcacagauugacaagau

SEQ ID NO: 1270 - RNA, 20 nt, Artificial Sequence
  Antisense oligo
accggcacagauugacaaga

SEQ ID NO: 1271 - RNA, 20 nt, Artificial Sequence
  Antisense oligo
gaccggcacagauugacaag

SEQ ID NO: 1272 - RNA, 20 nt, Artificial Sequence
  Antisense oligo
cgaccggcacagauugacaa

SEQ ID NO: 1273 - RNA, 20 nt, Artificial Sequence
  Antisense oligo
acgaccggcacagauugaca

SEQ ID NO: 1274 - RNA, 20 nt, Artificial Sequence
  Antisense oligo
aacgaccggcacagauugac

SEQ ID NO: 1275 - RNA, 20 nt, Artificial Sequence
  Antisense oligo
caacgaccggcacagauuga

SEQ ID NO: 1276 - RNA, 20 nt, Artificial Sequence
  Antisense oligo
ccaacgaccggcacagauug

SEQ ID NO: 1277 - RNA, 20 nt, Artificial Sequence
  Antisense oligo
cccaacgaccggcacagauu

SEQ ID NO: 1278 - RNA, 20 nt, Artificial Sequence
  Antisense oligo
acccaacgaccggcacagau

SEQ ID NO: 1279 - RNA, 20 nt, Artificial Sequence
  Antisense oligo
uuuccacccaacgaccggca

SEQ ID NO: 1280 - RNA, 20 nt, Artificial Sequence
  Antisense oligo
auuuccacccaacgaccggc

SEQ ID NO: 1281 - RNA, 20 nt, Artificial Sequence
  Antisense oligo
cauuuccacccaacgaccgg

SEQ ID NO: 1282 - RNA, 20 nt, Artificial Sequence
  Antisense oligo
ccauuuccacccaacgaccg

SEQ ID NO: 1283 - RNA, 20 nt, Artificial Sequence
  Antisense oligo
gccauuuccacccaacgacc

SEQ ID NO: 1284 - RNA, 20 nt, Artificial Sequence
  Antisense oligo
gugccauuuccacccaacga

SEQ ID NO: 1285 - RNA, 20 nt, Artificial Sequence
  Antisense oligo
agugccauuuccacccaacg

SEQ ID NO: 1286 - RNA, 20 nt, Artificial Sequence
  Antisense oligo
gcagugccauuuccacccaa

SEQ ID NO: 1287 - RNA, 20 nt, Artificial Sequence
  Antisense oligo
ugcagugccauuuccaccca

SEQ ID NO: 1288 - RNA, 20 nt, Artificial Sequence
  Antisense oligo
aucagaacggaggcccugca

SEQ ID NO: 1289 - RNA, 20 nt, Artificial Sequence
  Antisense oligo
aaucagaacggaggcccugc

SEQ ID NO: 1290 - RNA, 20 nt, Artificial Sequence
  Antisense oligo
aaaucagaacggaggcccug

SEQ ID NO: 1291 - RNA, 20 nt, Artificial Sequence
  Antisense oligo
gaaaucagaacggaggcccu

SEQ ID NO: 1292 - RNA, 20 nt, Artificial Sequence
  Antisense oligo
ggaaaucagaacggaggccc

SEQ ID NO: 1293 - RNA, 20 nt, Artificial Sequence
  Antisense oligo
aggaaaucagaacggaggcc

SEQ ID NO: 1294 - RNA, 20 nt, Artificial Sequence
  Antisense oligo
aaggaaaucagaacggaggc

SEQ ID NO: 1295 - RNA, 20 nt, Artificial Sequence
  Antisense oligo
gaaggaaaucagaacggagg

SEQ ID NO: 1296 - RNA, 20 nt, Artificial Sequence
  Antisense oligo
ugccuacugaugaaggaaau

SEQ ID NO: 1297 - RNA, 20 nt, Artificial Sequence
  Antisense oligo
ccaugccuacugaugaagga

SEQ ID NO: 1298 - RNA, 20 nt, Artificial Sequence
  Antisense oligo
gccaugccuacugaugaagg

SEQ ID NO: 1299 - RNA, 20 nt, Artificial Sequence
  Antisense oligo
cugccaugccuacugaugaa

SEQ ID NO: 1300 - RNA, 20 nt, Artificial Sequence
  Antisense oligo
ccugccaugccuacugauga

SEQ ID NO: 1301 - RNA, 20 nt, Artificial Sequence
  Antisense oligo
gccugccaugccuacugaug

SEQ ID NO: 1302 - RNA, 20 nt, Artificial Sequence
  Antisense oligo
ugccugccaugccuacugau

SEQ ID NO: 1303 - RNA, 20 nt, Artificial Sequence
  Antisense oligo
augccugccaugccuacuga

SEQ ID NO: 1304 - RNA, 20 nt, Artificial Sequence
  Antisense oligo
gaugccugccaugccuacug

SEQ ID NO: 1305 - RNA, 20 nt, Artificial Sequence
  Antisense oligo
aaagagaugccugccaugcc

SEQ ID NO: 1306 - RNA, 20 nt, Artificial Sequence
  Antisense oligo
caaagagaugccugccaugc

SEQ ID NO: 1307 - RNA, 20 nt, Artificial Sequence
  Antisense oligo
aacuuccaaagagaugccug

SEQ ID NO: 1308 - RNA, 20 nt, Artificial Sequence
  Antisense oligo
auguggucucuuaacuucca

SEQ ID NO: 1309 - RNA, 20 nt, Artificial Sequence
  Antisense oligo
cauguggucucuuaacuucc

SEQ ID NO: 1310 - RNA, 20 nt, Artificial Sequence
  Antisense oligo
ccgcucaaggaaauacacau

SEQ ID NO: 1311 - RNA, 20 nt, Artificial Sequence
  Antisense oligo
gccgcucaaggaaauacaca

SEQ ID NO: 1312 - RNA, 20 nt, Artificial Sequence
  Antisense oligo
cccuaaagacagacaggccg

SEQ ID NO: 1313 - RNA, 20 nt, Artificial Sequence
  Antisense oligo
ucccuaaagacagacaggcc

SEQ ID NO: 1314 - RNA, 20 nt, Artificial Sequence
  Antisense oligo
cuucccuaaagacagacagg

SEQ ID NO: 1315 - RNA, 20 nt, Artificial Sequence
  Antisense oligo
agcuucccuaaagacagaca

SEQ ID NO: 1316 - RNA, 20 nt, Artificial Sequence
  Antisense oligo
cgagcuucccuaaagacaga

SEQ ID NO: 1317 - RNA, 20 nt, Artificial Sequence
  Antisense oligo
acgagcuucccuaaagacag

SEQ ID NO: 1318 - RNA, 20 nt, Artificial Sequence
  Antisense oligo
aacgagcuucccuaaagaca

SEQ ID NO: 1319 - RNA, 20 nt, Artificial Sequence
  Antisense oligo
aaaacgagcuucccuaaaga

SEQ ID NO: 1320 - RNA, 20 nt, Artificial Sequence
  Antisense oligo
caaaacgagcuucccuaaag

SEQ ID NO: 1321 - RNA, 20 nt, Artificial Sequence
  Antisense oligo
gcaaaacgagcuucccuaaa

SEQ ID NO: 1322 - RNA, 20 nt, Artificial Sequence
  Antisense oligo
agcaaaacgagcuucccuaa

SEQ ID NO: 1323 - RNA, 20 nt, Artificial Sequence
  Antisense oligo
caaccaaagcaaaacgagcu

SEQ ID NO: 1324 - RNA, 20 nt, Artificial Sequence
  Antisense oligo
caguauaaacagucccaaca

SEQ ID NO: 1325 - RNA, 20 nt, Artificial Sequence
  Antisense oligo
ccaguauaaacagucccaac

SEQ ID NO: 1326 - RNA, 20 nt, Artificial Sequence
  Antisense oligo
cccaguauaaacagucccaa

SEQ ID NO: 1327 - RNA, 20 nt, Artificial Sequence
  Antisense oligo
gcacguuucucuugcugagc

SEQ ID NO: 1328 - RNA, 20 nt, Artificial Sequence
  Antisense oligo
ggugacccagcacguuucuc

SEQ ID NO: 1329 - RNA, 20 nt, Artificial Sequence
  Antisense oligo
cggugacccagcacguuucu

SEQ ID NO: 1330 - RNA, 20 nt, Artificial Sequence
  Antisense oligo
acggugacccagcacguuuc

SEQ ID NO: 1331 - RNA, 20 nt, Artificial Sequence
  Antisense oligo
caguggagaagggcagagcu

SEQ ID NO: 1332 - RNA, 20 nt, Artificial Sequence
  Antisense oligo
gucuguucuccuccaccugc

SEQ ID NO: 1333 - RNA, 20 nt, Artificial Sequence
  Antisense oligo
acugucuguucuccuccacc

SEQ ID NO: 1334 - RNA, 20 nt, Artificial Sequence
  Antisense oligo
cacugucuguucuccuccac

SEQ ID NO: 1335 - RNA, 20 nt, Artificial Sequence
  Antisense oligo
accacugucuguucuccucc

SEQ ID NO: 1336 - RNA, 20 nt, Artificial Sequence
  Antisense oligo
cugggaaaccacugucuguu

SEQ ID NO: 1337 - RNA, 20 nt, Artificial Sequence
  Antisense oligo
ggugcugggaaaccacuguc

SEQ ID NO: 1338 - RNA, 20 nt, Artificial Sequence
  Antisense oligo
augagguggugcugggaaac

SEQ ID NO: 1339 - RNA, 20 nt, Artificial Sequence
  Antisense oligo
caugagguggugcugggaaa

SEQ ID NO: 1340 - RNA, 20 nt, Artificial Sequence
  Antisense oligo
ccuggaaagaccaugaggug

SEQ ID NO: 1341 - RNA, 20 nt, Artificial Sequence
  Antisense oligo
uccuggaaagaccaugaggu

SEQ ID NO: 1342 - RNA, 20 nt, Artificial Sequence
  Antisense oligo
auccuggaaagaccaugagg

SEQ ID NO: 1343 - RNA, 20 nt, Artificial Sequence
  Antisense oligo
cauccuggaaagaccaugag

SEQ ID NO: 1344 - RNA, 20 nt, Artificial Sequence
  Antisense oligo
gugcauccuggaaagaccau

SEQ ID NO: 1345 - RNA, 20 nt, Artificial Sequence
  Antisense oligo
cagugcauccuggaaagacc

SEQ ID NO: 1346 - RNA, 20 nt, Artificial Sequence
  Antisense oligo
acucagugcauccuggaaag

SEQ ID NO: 1347 - RNA, 20 nt, Artificial Sequence
  Antisense oligo
cacucagugcauccuggaaa

SEQ ID NO: 1348 - RNA, 20 nt, Artificial Sequence
  Antisense oligo
ccacucagugcauccuggaa

SEQ ID NO: 1349 - RNA, 20 nt, Artificial Sequence
  Antisense oligo
gccacucagugcauccugga

SEQ ID NO: 1350 - RNA, 20 nt, Artificial Sequence
  Antisense oligo
ugccacucagugcauccugg

SEQ ID NO: 1351 - RNA, 20 nt, Artificial Sequence
  Antisense oligo
uucugccacucagugcaucc

SEQ ID NO: 1352 - RNA, 20 nt, Artificial Sequence
  Antisense oligo
auacuucuggacccuuacug

SEQ ID NO: 1353 - RNA, 20 nt, Artificial Sequence
  Antisense oligo
cauacuucuggacccuuacu

SEQ ID NO: 1354 - RNA, 20 nt, Artificial Sequence
  Antisense oligo
ccauacuucuggacccuuac

SEQ ID NO: 1355 - RNA, 20 nt, Artificial Sequence
  Antisense oligo
caagaaguauggaagcaucc

SEQ ID NO: 1356 - RNA, 20 nt, Artificial Sequence
  Antisense oligo
cagcaagaaguauggaagca

SEQ ID NO: 1357 - RNA, 20 nt, Artificial Sequence
  Antisense oligo
ccagcaagaaguauggaagc

SEQ ID NO: 1358 - RNA, 20 nt, Artificial Sequence
  Antisense oligo
accagcaagaaguauggaag

SEQ ID NO: 1359 - RNA, 20 nt, Artificial Sequence
  Antisense oligo
aaccagcaagaaguauggaa

SEQ ID NO: 1360 - RNA, 20 nt, Artificial Sequence
  Antisense oligo
caaccagcaagaaguaugga

SEQ ID NO: 1361 - RNA, 20 nt, Artificial Sequence
  Antisense oligo
ggccaaccagcaagaaguau

SEQ ID NO: 1362 - RNA, 20 nt, Artificial Sequence
  Antisense oligo
gggccaaccagcaagaagua

SEQ ID NO: 1363 - RNA, 20 nt, Artificial Sequence
  Antisense oligo
agggccaaccagcaagaagu

SEQ ID NO: 1364 - RNA, 20 nt, Artificial Sequence
  Antisense oligo
aagggccaaccagcaagaag

SEQ ID NO: 1365 - RNA, 20 nt, Artificial Sequence
  Antisense oligo
gaagggccaaccagcaagaa

SEQ ID NO: 1366 - RNA, 20 nt, Artificial Sequence
  Antisense oligo
agggaagggccaaccagcaa

SEQ ID NO: 1367 - RNA, 20 nt, Artificial Sequence
  Antisense oligo
uaagggaagggccaaccagc

SEQ ID NO: 1368 - RNA, 20 nt, Artificial Sequence
  Antisense oligo
cuaagggaagggccaaccag

SEQ ID NO: 1369 - RNA, 20 nt, Artificial Sequence
  Antisense oligo
gacuaagggaagggccaacc

SEQ ID NO: 1370 - RNA, 20 nt, Artificial Sequence
  Antisense oligo
ugacuaagggaagggccaac

SEQ ID NO: 1371 - RNA, 20 nt, Artificial Sequence
  Antisense oligo
ugauugacuaagggaagggc

SEQ ID NO: 1372 - RNA, 20 nt, Artificial Sequence
  Antisense oligo
gugauugacuaagggaaggg

SEQ ID NO: 1373 - RNA, 20 nt, Artificial Sequence
  Antisense oligo
gauauuuacccuggcacuag

SEQ ID NO: 1374 - RNA, 20 nt, Artificial Sequence
  Antisense oligo
cgauauuuacccuggcacua

SEQ ID NO: 1375 - RNA, 20 nt, Artificial Sequence
  Antisense oligo
ccgauauuuacccuggcacu

SEQ ID NO: 1376 - RNA, 20 nt, Artificial Sequence
  Antisense oligo
gccgauauuuacccuggcac

SEQ ID NO: 1377 - RNA, 20 nt, Artificial Sequence
  Antisense oligo
ggccgauauuuacccuggca

SEQ ID NO: 1378 - RNA, 20 nt, Artificial Sequence
  Antisense oligo
uacccucccaccaaccuacc

SEQ ID NO: 1379 - RNA, 20 nt, Artificial Sequence
  Antisense oligo
cuacccucccaccaaccuac

SEQ ID NO: 1380 - RNA, 20 nt, Artificial Sequence
  Antisense oligo
ccuacccucccaccaaccua

SEQ ID NO: 1381 - RNA, 20 nt, Artificial Sequence
  Antisense oligo
accuacccucccaccaaccu

SEQ ID NO: 1382 - RNA, 20 nt, Artificial Sequence
  Antisense oligo
aaccuacccucccaccaacc

SEQ ID NO: 1383 - RNA, 20 nt, Artificial Sequence
  Antisense oligo
ccaaccuacccucccaccaa

SEQ ID NO: 1384 - RNA, 20 nt, Artificial Sequence
  Antisense oligo
gagcugcuguuucaccuaca

SEQ ID NO: 1385 - RNA, 20 nt, Artificial Sequence
  Antisense oligo
agagcugcuguuucaccuac

SEQ ID NO: 1386 - RNA, 20 nt, Artificial Sequence
  Antisense oligo
ccuucgagagcugcuguuuc

SEQ ID NO: 1387 - RNA, 20 nt, Artificial Sequence
  Antisense oligo
uccuucgagagcugcuguuu

SEQ ID NO: 1388 - RNA, 20 nt, Artificial Sequence
  Antisense oligo
auccuucgagagcugcuguu

SEQ ID NO: 1389 - RNA, 20 nt, Artificial Sequence
  Antisense oligo
cauccuucgagagcugcugu

SEQ ID NO: 1390 - RNA, 20 nt, Artificial Sequence
  Antisense oligo
ccauccuucgagagcugcug

SEQ ID NO: 1391 - RNA, 20 nt, Artificial Sequence
  Antisense oligo
cccauccuucgagagcugcu

SEQ ID NO: 1392 - RNA, 20 nt, Artificial Sequence
  Antisense oligo
cagaaaguaagagcuggaga

SEQ ID NO: 1393 - RNA, 20 nt, Artificial Sequence
  Antisense oligo
acagccagaaaguaagagcu

SEQ ID NO: 1394 - RNA, 20 nt, Artificial Sequence
  Antisense oligo
augaaacaucacagccagaa

SEQ ID NO: 1395 - RNA, 20 nt, Artificial Sequence
  Antisense oligo
caugaaacaucacagccaga

SEQ ID NO: 1396 - RNA, 20 nt, Artificial Sequence
  Antisense oligo
acaugaaacaucacagccag

SEQ ID NO: 1397 - RNA, 20 nt, Artificial Sequence
  Antisense oligo
cacacaugaaacaucacagc

SEQ ID NO: 1398 - RNA, 20 nt, Artificial Sequence
  Antisense oligo
acacacaugaaacaucacag

SEQ ID NO: 1399 - RNA, 20 nt, Artificial Sequence
  Antisense oligo
cuuagcaggacucaaaauug

SEQ ID NO: 1400 - RNA, 20 nt, Artificial Sequence
  Antisense oligo
ucgugaaguuccuuagcagg

SEQ ID NO: 1401 - RNA, 20 nt, Artificial Sequence
  Antisense oligo
uucgugaaguuccuuagcag

SEQ ID NO: 1402 - RNA, 20 nt, Artificial Sequence
  Antisense oligo
auucgugaaguuccuuagca

SEQ ID NO: 1403 - RNA, 20 nt, Artificial Sequence
  Antisense oligo
aauucgugaaguuccuuagc

SEQ ID NO: 1404 - RNA, 20 nt, Artificial Sequence
  Antisense oligo
guuucgucacugcccucucc

SEQ ID NO: 1405 - RNA, 20 nt, Artificial Sequence
  Antisense oligo
gguuucgucacugcccucuc

SEQ ID NO: 1406 - RNA, 20 nt, Artificial Sequence
  Antisense oligo
ugguuucgucacugcccucu

SEQ ID NO: 1407 - RNA, 20 nt, Artificial Sequence
  Antisense oligo
cugguuucgucacugcccuc

SEQ ID NO: 1408 - RNA, 20 nt, Artificial Sequence
  Antisense oligo
caccugguuucgucacugcc

SEQ ID NO: 1409 - RNA, 20 nt, Artificial Sequence
  Antisense oligo
gcaccugguuucgucacugc

SEQ ID NO: 1410 - RNA, 20 nt, Artificial Sequence
  Antisense oligo
agcaccugguuucgucacug

SEQ ID NO: 1411 - RNA, 20 nt, Artificial Sequence
  Antisense oligo
cagcaccugguuucgucacu

SEQ ID NO: 1412 - RNA, 20 nt, Artificial Sequence
  Antisense oligo
cugucuggacacuucauccc

SEQ ID NO: 1413 - RNA, 20 nt, Artificial Sequence
  Antisense oligo
ccugucuggacacuucaucc

SEQ ID NO: 1414 - RNA, 20 nt, Artificial Sequence
  Antisense oligo
cccugucuggacacuucauc

SEQ ID NO: 1415 - RNA, 20 nt, Artificial Sequence
  Antisense oligo
ccaagccugcuuuucuguac

SEQ ID NO: 1416 - RNA, 20 nt, Artificial Sequence
  Antisense oligo
uccagauggugccaggccaa

SEQ ID NO: 1417 - RNA, 20 nt, Artificial Sequence
  Antisense oligo
acacacuccagauggugcca

SEQ ID NO: 1418 - RNA, 20 nt, Artificial Sequence
  Antisense oligo
cacacacuccagauggugcc

SEQ ID NO: 1419 - RNA, 20 nt, Artificial Sequence
  Antisense oligo
acacacacuccagauggugc

SEQ ID NO: 1420 - RNA, 20 nt, Artificial Sequence
  Antisense oligo
ccugacacacacuccagaug

SEQ ID NO: 1421 - RNA, 20 nt, Artificial Sequence
  Antisense oligo
ucccugacacacacuccaga

SEQ ID NO: 1422 - RNA, 20 nt, Artificial Sequence
  Antisense oligo
ccucucccugacacacacuc

SEQ ID NO: 1423 - RNA, 20 nt, Artificial Sequence
  Antisense oligo
accucucccugacacacacu

SEQ ID NO: 1424 - RNA, 20 nt, Artificial Sequence
  Antisense oligo
caauccugggucuggacgac

SEQ ID NO: 1425 - RNA, 20 nt, Artificial Sequence
  Antisense oligo
ucaauccugggucuggacga

SEQ ID NO: 1426 - RNA, 20 nt, Artificial Sequence
  Antisense oligo
uucaauccugggucuggacg

SEQ ID NO: 1427 - RNA, 20 nt, Artificial Sequence
  Antisense oligo
guuuucaauccugggucugg

SEQ ID NO: 1428 - RNA, 20 nt, Artificial Sequence
  Antisense oligo
ggagucccuguuuucaaucc

SEQ ID NO: 1429 - RNA, 20 nt, Artificial Sequence
  Antisense oligo
ucaaggagucccuguuuuca

SEQ ID NO: 1430 - RNA, 20 nt, Artificial Sequence
  Antisense oligo
uucaaggagucccuguuuuc

SEQ ID NO: 1431 - RNA, 20 nt, Artificial Sequence
  Antisense oligo
ccuucaaggagucccuguuu

SEQ ID NO: 1432 - RNA, 20 nt, Artificial Sequence
  Antisense oligo
cccuucaaggagucccuguu

SEQ ID NO: 1433 - RNA, 20 nt, Artificial Sequence
  Antisense oligo
aacacccuucaaggaguccc

SEQ ID NO: 1434 - RNA, 20 nt, Artificial Sequence
  Antisense oligo
aaaacacccuucaaggaguc

SEQ ID NO: 1435 - RNA, 20 nt, Artificial Sequence
  Antisense oligo
gaaaacacccuucaaggagu

SEQ ID NO: 1436 - RNA, 20 nt, Artificial Sequence
  Antisense oligo
cgaaaacacccuucaaggag

SEQ ID NO: 1437 - RNA, 20 nt, Artificial Sequence
  Antisense oligo
acgaaaacacccuucaagga

SEQ ID NO: 1438 - RNA, 20 nt, Artificial Sequence
  Antisense oligo
gacgaaaacacccuucaagg

SEQ ID NO: 1439 - RNA, 20 nt, Artificial Sequence
  Antisense oligo
ggacgaaaacacccuucaag

SEQ ID NO: 1440 - RNA, 20 nt, Artificial Sequence
  Antisense oligo
uggacgaaaacacccuucaa

SEQ ID NO: 1441 - RNA, 20 nt, Artificial Sequence
  Antisense oligo
auggacgaaaacacccuuca

SEQ ID NO: 1442 - RNA, 20 nt, Artificial Sequence
  Antisense oligo
aauggacgaaaacacccuuc

SEQ ID NO: 1443 - RNA, 20 nt, Artificial Sequence
  Antisense oligo
aaauggacgaaaacacccuu

SEQ ID NO: 1444 - RNA, 20 nt, Artificial Sequence
  Antisense oligo
gaaaauggacgaaaacaccc

SEQ ID NO: 1445 - RNA, 20 nt, Artificial Sequence
  Antisense oligo
agaaaauggacgaaaacacc

SEQ ID NO: 1446 - RNA, 20 nt, Artificial Sequence
  Antisense oligo
cagaaaauggacgaaaacac

SEQ ID NO: 1447 - RNA, 20 nt, Artificial Sequence
  Antisense oligo
guacucuuauggcaacagaa

SEQ ID NO: 1448 - RNA, 20 nt, Artificial Sequence
  Antisense oligo
gguacucuuauggcaacaga

SEQ ID NO: 1449 - RNA, 20 nt, Artificial Sequence
  Antisense oligo
ggguacucuuauggcaacag

SEQ ID NO: 1450 - RNA, 20 nt, Artificial Sequence
  Antisense oligo
cggguacucuuauggcaaca

SEQ ID NO: 1451 - RNA, 20 nt, Artificial Sequence
  Antisense oligo
ucggguacucuuauggcaac

SEQ ID NO: 1452 - RNA, 20 nt, Artificial Sequence
  Antisense oligo
cucggguacucuuauggcaa

SEQ ID NO: 1453 - RNA, 20 nt, Artificial Sequence
  Antisense oligo
gcucggguacucuuauggca

SEQ ID NO: 1454 - RNA, 20 nt, Artificial Sequence
  Antisense oligo
ggcucggguacucuuauggc

SEQ ID NO: 1455 - RNA, 20 nt, Artificial Sequence
  Antisense oligo
aggcucggguacucuuaugg

SEQ ID NO: 1456 - RNA, 20 nt, Artificial Sequence
  Antisense oligo
caggcucggguacucuuaug

SEQ ID NO: 1457 - RNA, 20 nt, Artificial Sequence
  Antisense oligo
ccaggcucggguacucuuau

SEQ ID NO: 1458 - RNA, 20 nt, Artificial Sequence
  Antisense oligo
cccaggcucggguacucuua

SEQ ID NO: 1459 - RNA, 20 nt, Artificial Sequence
  Antisense oligo
uuuucaauuacccaggcucg

SEQ ID NO: 1460 - RNA, 20 nt, Artificial Sequence
  Antisense oligo
acuccugaccucgugauccg

SEQ ID NO: 1461 - RNA, 20 nt, Artificial Sequence
  Antisense oligo
aacuccugaccucgugaucc

SEQ ID NO: 1462 - RNA, 20 nt, Artificial Sequence
  Antisense oligo
gaacuccugaccucgugauc

SEQ ID NO: 1463 - RNA, 20 nt, Artificial Sequence
  Antisense oligo
ugaacuccugaccucgugau

SEQ ID NO: 1464 - RNA, 20 nt, Artificial Sequence
  Antisense oligo
uugaacuccugaccucguga

SEQ ID NO: 1465 - RNA, 20 nt, Artificial Sequence
  Antisense oligo
cuugaacuccugaccucgug

SEQ ID NO: 1466 - RNA, 20 nt, Artificial Sequence
  Antisense oligo
ucuugaacuccugaccucgu

SEQ ID NO: 1467 - RNA, 20 nt, Artificial Sequence
  Antisense oligo
gucuugaacuccugaccucg

SEQ ID NO: 1468 - RNA, 20 nt, Artificial Sequence
  Antisense oligo
gcuggucuugaacuccugac

SEQ ID NO: 1469 - RNA, 20 nt, Artificial Sequence
  Antisense oligo
ggcuggucuugaacuccuga

SEQ ID NO: 1470 - RNA, 20 nt, Artificial Sequence
  Antisense oligo
aggcuggucuugaacuccug

SEQ ID NO: 1471 - RNA, 20 nt, Artificial Sequence
  Antisense oligo
caggcuggucuugaacuccu

SEQ ID NO: 1472 - RNA, 20 nt, Artificial Sequence
  Antisense oligo
ucaggcuggucuugaacucc

SEQ ID NO: 1473 - RNA, 20 nt, Artificial Sequence
  Antisense oligo
gucaggcuggucuugaacuc

SEQ ID NO: 1474 - RNA, 20 nt, Artificial Sequence
  Antisense oligo
ggucaggcuggucuugaacu

SEQ ID NO: 1475 - RNA, 20 nt, Artificial Sequence
  Antisense oligo
uggucaggcuggucuugaac

SEQ ID NO: 1476 - RNA, 20 nt, Artificial Sequence
  Antisense oligo
uuggucaggcuggucuugaa

SEQ ID NO: 1477 - RNA, 20 nt, Artificial Sequence
  Antisense oligo
guuggucaggcuggucuuga

SEQ ID NO: 1478 - RNA, 20 nt, Artificial Sequence
  Antisense oligo
uguuggucaggcuggucuug

SEQ ID NO: 1479 - RNA, 20 nt, Artificial Sequence
  Antisense oligo
auguuggucaggcuggucuu

SEQ ID NO: 1480 - RNA, 20 nt, Artificial Sequence
  Antisense oligo
cauguuggucaggcuggucu

SEQ ID NO: 1481 - RNA, 20 nt, Artificial Sequence
  Antisense oligo
ccauguuggucaggcugguc

SEQ ID NO: 1482 - RNA, 20 nt, Artificial Sequence
  Antisense oligo
caccacacccagcuaauuuu

SEQ ID NO: 1483 - RNA, 20 nt, Artificial Sequence
  Antisense oligo
ccaccacacccagcuaauuu

SEQ ID NO: 1484 - RNA, 20 nt, Artificial Sequence
  Antisense oligo
uagcugggauuacaggcaug

SEQ ID NO: 1485 - RNA, 20 nt, Artificial Sequence
  Antisense oligo
guagcugggauuacaggcau

SEQ ID NO: 1486 - RNA, 20 nt, Artificial Sequence
  Antisense oligo
aguagcugggauuacaggca

SEQ ID NO: 1487 - RNA, 20 nt, Artificial Sequence
  Antisense oligo
gaguagcugggauuacaggc

SEQ ID NO: 1488 - RNA, 20 nt, Artificial Sequence
  Antisense oligo
ggaguagcugggauuacagg

SEQ ID NO: 1489 - RNA, 20 nt, Artificial Sequence
  Antisense oligo
uggaguagcugggauuacag

SEQ ID NO: 1490 - RNA, 20 nt, Artificial Sequence
  Antisense oligo
cuggaguagcugggauuaca

SEQ ID NO: 1491 - RNA, 20 nt, Artificial Sequence
  Antisense oligo
ucuggaguagcugggauuac

SEQ ID NO: 1492 - RNA, 20 nt, Artificial Sequence
  Antisense oligo
cucuggaguagcugggauua

SEQ ID NO: 1493 - RNA, 20 nt, Artificial Sequence
  Antisense oligo
uucuccugccucagccucug

SEQ ID NO: 1494 - RNA, 20 nt, Artificial Sequence
  Antisense oligo
auucuccugccucagccucu

SEQ ID NO: 1495 - RNA, 20 nt, Artificial Sequence
  Antisense oligo
gauucuccugccucagccuc

SEQ ID NO: 1496 - RNA, 20 nt, Artificial Sequence
  Antisense oligo
ugauucuccugccucagccu

SEQ ID NO: 1497 - RNA, 20 nt, Artificial Sequence
  Antisense oligo
gugauucuccugccucagcc

SEQ ID NO: 1498 - RNA, 20 nt, Artificial Sequence
  Antisense oligo
agugauucuccugccucagc

SEQ ID NO: 1499 - RNA, 20 nt, Artificial Sequence
  Antisense oligo
aagugauucuccugccucag

SEQ ID NO: 1500 - RNA, 20 nt, Artificial Sequence
  Antisense oligo
caagugauucuccugccuca

SEQ ID NO: 1501 - RNA, 20 nt, Artificial Sequence
  Antisense oligo
ucaagugauucuccugccuc

SEQ ID NO: 1502 - RNA, 20 nt, Artificial Sequence
  Antisense oligo
uucaagugauucuccugccu

SEQ ID NO: 1503 - RNA, 20 nt, Artificial Sequence
  Antisense oligo
guucaagugauucuccugcc

SEQ ID NO: 1504 - RNA, 20 nt, Artificial Sequence
  Antisense oligo
gguucaagugauucuccugc

SEQ ID NO: 1505 - RNA, 20 nt, Artificial Sequence
  Antisense oligo
ggguucaagugauucuccug

SEQ ID NO: 1506 - RNA, 20 nt, Artificial Sequence
  Antisense oligo
uggguucaagugauucuccu

SEQ ID NO: 1507 - RNA, 20 nt, Artificial Sequence
  Antisense oligo
cuggguucaagugauucucc

SEQ ID NO: 1508 - RNA, 20 nt, Artificial Sequence
  Antisense oligo
ccuggguucaagugauucuc

SEQ ID NO: 1509 - RNA, 20 nt, Artificial Sequence
  Antisense oligo
uccuggguucaagugauucu

SEQ ID NO: 1510 - RNA, 20 nt, Artificial Sequence
  Antisense oligo
cuccuggguucaagugauuc

SEQ ID NO: 1511 - RNA, 20 nt, Artificial Sequence
  Antisense oligo
ccuccuggguucaagugauu

SEQ ID NO: 1512 - RNA, 20 nt, Artificial Sequence
  Antisense oligo
accuccuggguucaagugau

SEQ ID NO: 1513 - RNA, 20 nt, Artificial Sequence
  Antisense oligo
caccuccuggguucaaguga

SEQ ID NO: 1514 - RNA, 20 nt, Artificial Sequence
  Antisense oligo
ccaccuccuggguucaagug

SEQ ID NO: 1515 - RNA, 20 nt, Artificial Sequence
  Antisense oligo
uccaccuccuggguucaagu

SEQ ID NO: 1516 - RNA, 20 nt, Artificial Sequence
  Antisense oligo
cuccaccuccuggguucaag

SEQ ID NO: 1517 - RNA, 20 nt, Artificial Sequence
  Antisense oligo
ccuccaccuccuggguucaa

SEQ ID NO: 1518 - RNA, 20 nt, Artificial Sequence
  Antisense oligo
accuccaccuccuggguuca

SEQ ID NO: 1519 - RNA, 20 nt, Artificial Sequence
  Antisense oligo
acugcaaccuccaccuccug

SEQ ID NO: 1520 - RNA, 20 nt, Artificial Sequence
  Antisense oligo
cacugcaaccuccaccuccu

SEQ ID NO: 1521 - RNA, 20 nt, Artificial Sequence
  Antisense oligo
ucacugcaaccuccaccucc

SEQ ID NO: 1522 - RNA, 20 nt, Artificial Sequence
  Antisense oligo
cucacugcaaccuccaccuc

SEQ ID NO: 1523 - RNA, 20 nt, Artificial Sequence
  Antisense oligo
gcucacugcaaccuccaccu

SEQ ID NO: 1524 - RNA, 20 nt, Artificial Sequence
  Antisense oligo
ucggcucacugcaaccucca

SEQ ID NO: 1525 - RNA, 20 nt, Artificial Sequence
  Antisense oligo
ucucggcucacugcaaccuc

SEQ ID NO: 1526 - RNA, 20 nt, Artificial Sequence
  Antisense oligo
aucucggcucacugcaaccu

SEQ ID NO: 1527 - RNA, 20 nt, Artificial Sequence
  Antisense oligo
aaucucggcucacugcaacc

SEQ ID NO: 1528 - RNA, 20 nt, Artificial Sequence
  Antisense oligo
caaucucggcucacugcaac

SEQ ID NO: 1529 - RNA, 20 nt, Artificial Sequence
  Antisense oligo
gcaaucucggcucacugcaa

SEQ ID NO: 1530 - RNA, 20 nt, Artificial Sequence
  Antisense oligo
gugcaaucucggcucacugc

SEQ ID NO: 1531 - RNA, 20 nt, Artificial Sequence
  Antisense oligo
ggugcaaucucggcucacug

SEQ ID NO: 1532 - RNA, 20 nt, Artificial Sequence
  Antisense oligo
uggugcaaucucggcucacu

SEQ ID NO: 1533 - RNA, 20 nt, Artificial Sequence
  Antisense oligo
guggugcaaucucggcucac

SEQ ID NO: 1534 - RNA, 20 nt, Artificial Sequence
  Antisense oligo
aguggugcaaucucggcuca

SEQ ID NO: 1535 - RNA, 20 nt, Artificial Sequence
  Antisense oligo
caguggugcaaucucggcuc

SEQ ID NO: 1536 - RNA, 20 nt, Artificial Sequence
  Antisense oligo
gcaguggugcaaucucggcu

SEQ ID NO: 1537 - RNA, 20 nt, Artificial Sequence
  Antisense oligo
ucugucacccaggcuggagu

SEQ ID NO: 1538 - RNA, 20 nt, Artificial Sequence
  Antisense oligo
agucucgcucugucacccag

SEQ ID NO: 1539 - RNA, 20 nt, Artificial Sequence
  Antisense oligo
gagucucgcucugucaccca

SEQ ID NO: 1540 - RNA, 20 nt, Artificial Sequence
  Antisense oligo
ggauuacaggugugagccac

SEQ ID NO: 1541 - RNA, 20 nt, Artificial Sequence
  Antisense oligo
gggauuacaggugugagcca

SEQ ID NO: 1542 - RNA, 20 nt, Artificial Sequence
  Antisense oligo
ugggauuacaggugugagcc

SEQ ID NO: 1543 - RNA, 20 nt, Artificial Sequence
  Antisense oligo
cugggauuacaggugugagc

SEQ ID NO: 1544 - RNA, 20 nt, Artificial Sequence
  Antisense oligo
gcugggauuacaggugugag

SEQ ID NO: 1545 - RNA, 20 nt, Artificial Sequence
  Antisense oligo
ugcugggauuacagguguga

SEQ ID NO: 1546 - RNA, 20 nt, Artificial Sequence
  Antisense oligo
gugcugggauuacaggugug

SEQ ID NO: 1547 - RNA, 20 nt, Artificial Sequence
  Antisense oligo
agugcugggauuacaggugu

SEQ ID NO: 1548 - RNA, 20 nt, Artificial Sequence
  Antisense oligo
aagugcugggauuacaggug

SEQ ID NO: 1549 - RNA, 20 nt, Artificial Sequence
  Antisense oligo
aaagugcugggauuacaggu

SEQ ID NO: 1550 - RNA, 20 nt, Artificial Sequence
  Antisense oligo
caaagugcugggauuacagg

SEQ ID NO: 1551 - RNA, 20 nt, Artificial Sequence
  Antisense oligo
ucaaagugcugggauuacag

SEQ ID NO: 1552 - RNA, 20 nt, Artificial Sequence
  Antisense oligo
cucaaagugcugggauuaca

SEQ ID NO: 1553 - RNA, 20 nt, Artificial Sequence
  Antisense oligo
ucucaaagugcugggauuac

SEQ ID NO: 1554 - RNA, 20 nt, Artificial Sequence
  Antisense oligo
cucucaaagugcugggauua

SEQ ID NO: 1555 - RNA, 20 nt, Artificial Sequence
  Antisense oligo
ccucucaaagugcugggauu

SEQ ID NO: 1556 - RNA, 20 nt, Artificial Sequence
  Antisense oligo
gucuugaacuccugaccuca

SEQ ID NO: 1557 - RNA, 20 nt, Artificial Sequence
  Antisense oligo
gauggucuugaacuccugac

SEQ ID NO: 1558 - RNA, 20 nt, Artificial Sequence
  Antisense oligo
ggauggucuugaacuccuga

SEQ ID NO: 1559 - RNA, 20 nt, Artificial Sequence
  Antisense oligo
ccaggauggucuugaacucc

SEQ ID NO: 1560 - RNA, 20 nt, Artificial Sequence
  Antisense oligo
gccaggauggucuugaacuc

SEQ ID NO: 1561 - RNA, 20 nt, Artificial Sequence
  Antisense oligo
ggccaggauggucuugaacu

SEQ ID NO: 1562 - RNA, 20 nt, Artificial Sequence
  Antisense oligo
gcugggauuacaggugcaug

SEQ ID NO: 1563 - RNA, 20 nt, Artificial Sequence
  Antisense oligo
agcugggauuacaggugcau

SEQ ID NO: 1564 - RNA, 20 nt, Artificial Sequence
  Antisense oligo
uagcugggauuacaggugca

SEQ ID NO: 1565 - RNA, 20 nt, Artificial Sequence
  Antisense oligo
guagcugggauuacaggugc

SEQ ID NO: 1566 - RNA, 20 nt, Artificial Sequence
  Antisense oligo
aguagcugggauuacaggug

SEQ ID NO: 1567 - RNA, 20 nt, Artificial Sequence
  Antisense oligo
aaguagcugggauuacaggu

SEQ ID NO: 1568 - RNA, 20 nt, Artificial Sequence
  Antisense oligo
caaguagcugggauuacagg

SEQ ID NO: 1569 - RNA, 20 nt, Artificial Sequence
  Antisense oligo
ccaaguagcugggauuacag

SEQ ID NO: 1570 - RNA, 20 nt, Artificial Sequence
  Antisense oligo
ucaagcaauucuccugccuc

SEQ ID NO: 1571 - RNA, 20 nt, Artificial Sequence
  Antisense oligo
uucaagcaauucuccugccu

SEQ ID NO: 1572 - RNA, 20 nt, Artificial Sequence
  Antisense oligo
guucaagcaauucuccugcc

SEQ ID NO: 1573 - RNA, 20 nt, Artificial Sequence
  Antisense oligo
gguucaagcaauucuccugc

SEQ ID NO: 1574 - RNA, 20 nt, Artificial Sequence
  Antisense oligo
agguucaagcaauucuccug

SEQ ID NO: 1575 - RNA, 20 nt, Artificial Sequence
  Antisense oligo
cagguucaagcaauucuccu

SEQ ID NO: 1576 - RNA, 20 nt, Artificial Sequence
  Antisense oligo
ccagguucaagcaauucucc

SEQ ID NO: 1577 - RNA, 20 nt, Artificial Sequence
  Antisense oligo
cccagguucaagcaauucuc

SEQ ID NO: 1578 - RNA, 20 nt, Artificial Sequence
  Antisense oligo
ucccagguucaagcaauucu

SEQ ID NO: 1579 - RNA, 20 nt, Artificial Sequence
  Antisense oligo
cucccagguucaagcaauuc

SEQ ID NO: 1580 - RNA, 20 nt, Artificial Sequence
  Antisense oligo
ccucccagguucaagcaauu

SEQ ID NO: 1581 - RNA, 20 nt, Artificial Sequence
  Antisense oligo
gccucccagguucaagcaau

SEQ ID NO: 1582 - RNA, 20 nt, Artificial Sequence
  Antisense oligo
ugccucccagguucaagcaa

SEQ ID NO: 1583 - RNA, 20 nt, Artificial Sequence
  Antisense oligo
cugccucccagguucaagca

SEQ ID NO: 1584 - RNA, 20 nt, Artificial Sequence
  Antisense oligo
ucugccucccagguucaagc

SEQ ID NO: 1585 - RNA, 20 nt, Artificial Sequence
  Antisense oligo
cucugccucccagguucaag

SEQ ID NO: 1586 - RNA, 20 nt, Artificial Sequence
  Antisense oligo
ccucugccucccagguucaa

SEQ ID NO: 1587 - RNA, 20 nt, Artificial Sequence
  Antisense oligo
acugcaaccucugccuccca

SEQ ID NO: 1588 - RNA, 20 nt, Artificial Sequence
  Antisense oligo
ucacugcaaccucugccucc

SEQ ID NO: 1589 - RNA, 20 nt, Artificial Sequence
  Antisense oligo
cucacugcaaccucugccuc

SEQ ID NO: 1590 - RNA, 20 nt, Artificial Sequence
  Antisense oligo
gcucacugcaaccucugccu

SEQ ID NO: 1591 - RNA, 20 nt, Artificial Sequence
  Antisense oligo
uggcucacugcaaccucugc

SEQ ID NO: 1592 - RNA, 20 nt, Artificial Sequence
  Antisense oligo
uuggcucacugcaaccucug

SEQ ID NO: 1593 - RNA, 20 nt, Artificial Sequence
  Antisense oligo
cuuggcucacugcaaccucu

SEQ ID NO: 1594 - RNA, 20 nt, Artificial Sequence
  Antisense oligo
ucuuggcucacugcaaccuc

SEQ ID NO: 1595 - RNA, 20 nt, Artificial Sequence
  Antisense oligo
aucuuggcucacugcaaccu

SEQ ID NO: 1596 - RNA, 20 nt, Artificial Sequence
  Antisense oligo
aaucuuggcucacugcaacc

SEQ ID NO: 1597 - RNA, 20 nt, Artificial Sequence
  Antisense oligo
caaucuuggcucacugcaac

SEQ ID NO: 1598 - RNA, 20 nt, Artificial Sequence
  Antisense oligo
acaaucuuggcucacugcaa

SEQ ID NO: 1599 - RNA, 20 nt, Artificial Sequence
  Antisense oligo
cacaaucuuggcucacugca

SEQ ID NO: 1600 - RNA, 20 nt, Artificial Sequence
  Antisense oligo
gcacaaucuuggcucacugc

SEQ ID NO: 1601 - RNA, 20 nt, Artificial Sequence
  Antisense oligo
ggcacaaucuuggcucacug

SEQ ID NO: 1602 - RNA, 20 nt, Artificial Sequence
  Antisense oligo
aggcacaaucuuggcucacu

SEQ ID NO: 1603 - RNA, 20 nt, Artificial Sequence
  Antisense oligo
aggcuuagucuuucacagcu

SEQ ID NO: 1604 - RNA, 20 nt, Artificial Sequence
  Antisense oligo
aucaggcuuagucuuucaca

SEQ ID NO: 1605 - RNA, 20 nt, Artificial Sequence
  Antisense oligo
caucaggcuuagucuuucac

SEQ ID NO: 1606 - RNA, 20 nt, Artificial Sequence
  Antisense oligo
ccaucaggcuuagucuuuca

SEQ ID NO: 1607 - RNA, 20 nt, Artificial Sequence
  Antisense oligo
cccaucaggcuuagucuuuc

SEQ ID NO: 1608 - RNA, 20 nt, Artificial Sequence
  Antisense oligo
ucccaucaggcuuagucuuu

SEQ ID NO: 1609 - RNA, 20 nt, Artificial Sequence
  Antisense oligo
gucccaucaggcuuagucuu

SEQ ID NO: 1610 - RNA, 20 nt, Artificial Sequence
  Antisense oligo
uuaugaagucaagauguccc

SEQ ID NO: 1611 - RNA, 20 nt, Artificial Sequence
  Antisense oligo
guuaugaagucaagaugucc

SEQ ID NO: 1612 - RNA, 20 nt, Artificial Sequence
  Antisense oligo
gggaauggauuagcacccgc

SEQ ID NO: 1613 - RNA, 20 nt, Artificial Sequence
  Antisense oligo
ucgggaauggauuagcaccc

SEQ ID NO: 1614 - RNA, 20 nt, Artificial Sequence
  Antisense oligo
cucgggaauggauuagcacc

SEQ ID NO: 1615 - RNA, 20 nt, Artificial Sequence
  Antisense oligo
ccucgggaauggauuagcac

SEQ ID NO: 1616 - RNA, 20 nt, Artificial Sequence
  Antisense oligo
ugagaggcuuguuuacuccc

SEQ ID NO: 1617 - RNA, 20 nt, Artificial Sequence
  Antisense oligo
uuuacucuugagaggcuugu

SEQ ID NO: 1618 - RNA, 20 nt, Artificial Sequence
  Antisense oligo
gguuuacucuugagaggcuu

SEQ ID NO: 1619 - RNA, 20 nt, Artificial Sequence
  Antisense oligo
uggguuuacucuugagaggc

SEQ ID NO: 1620 - RNA, 20 nt, Artificial Sequence
  Antisense oligo
cauggguuuacucuugagag

SEQ ID NO: 1621 - RNA, 20 nt, Artificial Sequence
  Antisense oligo
ucauggguuuacucuugaga

SEQ ID NO: 1622 - RNA, 20 nt, Artificial Sequence
  Antisense oligo
cggucauggguuuacucuug

SEQ ID NO: 1623 - RNA, 20 nt, Artificial Sequence
  Antisense oligo
gcggucauggguuuacucuu

SEQ ID NO: 1624 - RNA, 20 nt, Artificial Sequence
  Antisense oligo
ugcggucauggguuuacucu

SEQ ID NO: 1625 - RNA, 20 nt, Artificial Sequence
  Antisense oligo
uugcggucauggguuuacuc

SEQ ID NO: 1626 - RNA, 20 nt, Artificial Sequence
  Antisense oligo
uuugcggucauggguuuacu

SEQ ID NO: 1627 - RNA, 20 nt, Artificial Sequence
  Antisense oligo
guuugcggucauggguuuac

SEQ ID NO: 1628 - RNA, 20 nt, Artificial Sequence
  Antisense oligo
cguuugcggucauggguuua

SEQ ID NO: 1629 - RNA, 20 nt, Artificial Sequence
  Antisense oligo
ccguuugcggucauggguuu

SEQ ID NO: 1630 - RNA, 20 nt, Artificial Sequence
  Antisense oligo
gccguuugcggucauggguu

SEQ ID NO: 1631 - RNA, 20 nt, Artificial Sequence
  Antisense oligo
ugccguuugcggucaugggu

SEQ ID NO: 1632 - RNA, 20 nt, Artificial Sequence
  Antisense oligo
uggugccguuugcggucaug

SEQ ID NO: 1633 - RNA, 20 nt, Artificial Sequence
  Antisense oligo
uuggugccguuugcggucau

SEQ ID NO: 1634 - RNA, 20 nt, Artificial Sequence
  Antisense oligo
cuuggugccguuugcgguca

SEQ ID NO: 1635 - RNA, 20 nt, Artificial Sequence
  Antisense oligo
cugugggucgugagggcaaa

SEQ ID NO: 1636 - RNA, 20 nt, Artificial Sequence
  Antisense oligo
ucugugggucgugagggcaa

SEQ ID NO: 1637 - RNA, 20 nt, Artificial Sequence
  Antisense oligo
aguaugccagugcugggagg

SEQ ID NO: 1638 - RNA, 20 nt, Artificial Sequence
  Antisense oligo
uagccuucauuguggugugg

SEQ ID NO: 1639 - RNA, 20 nt, Artificial Sequence
  Antisense oligo
cuagccuucauuguggugug

SEQ ID NO: 1640 - RNA, 20 nt, Artificial Sequence
  Antisense oligo
ucuagccuucauuguggugu

SEQ ID NO: 1641 - RNA, 20 nt, Artificial Sequence
  Antisense oligo
acucuagccuucauuguggu

SEQ ID NO: 1642 - RNA, 20 nt, Artificial Sequence
  Antisense oligo
cacucuagccuucauugugg

SEQ ID NO: 1643 - RNA, 20 nt, Artificial Sequence
  Antisense oligo
ucacucuagccuucauugug

SEQ ID NO: 1644 - RNA, 20 nt, Artificial Sequence
  Antisense oligo
acucacucuagccuucauug

SEQ ID NO: 1645 - RNA, 20 nt, Artificial Sequence
  Antisense oligo
cacucacucuagccuucauu

SEQ ID NO: 1646 - RNA, 20 nt, Artificial Sequence
  Antisense oligo
acacucacucuagccuucau

SEQ ID NO: 1647 - RNA, 20 nt, Artificial Sequence
  Antisense oligo
cacacucacucuagccuuca

SEQ ID NO: 1648 - RNA, 20 nt, Artificial Sequence
  Antisense oligo
ccacacucacucuagccuuc

SEQ ID NO: 1649 - RNA, 20 nt, Artificial Sequence
  Antisense oligo
cccacacucacucuagccuu

SEQ ID NO: 1650 - RNA, 20 nt, Artificial Sequence
  Antisense oligo
auucucacccaugcagagcu

SEQ ID NO: 1651 - RNA, 20 nt, Artificial Sequence
  Antisense oligo
gauucucacccaugcagagc

SEQ ID NO: 1652 - RNA, 20 nt, Artificial Sequence
  Antisense oligo
agauucucacccaugcagag

SEQ ID NO: 1653 - RNA, 20 nt, Artificial Sequence
  Antisense oligo
cagauucucacccaugcaga

SEQ ID NO: 1654 - RNA, 20 nt, Artificial Sequence
  Antisense oligo
gccuccagauucucacccau

SEQ ID NO: 1655 - RNA, 20 nt, Artificial Sequence
  Antisense oligo
ugccuccagauucucaccca

SEQ ID NO: 1656 - RNA, 20 nt, Artificial Sequence
  Antisense oligo
cugccuccagauucucaccc

SEQ ID NO: 1657 - RNA, 20 nt, Artificial Sequence
  Antisense oligo
ccuggcacuaaggcaucugc

SEQ ID NO: 1658 - RNA, 20 nt, Artificial Sequence
  Antisense oligo
uuguccuggcacuaaggcau

SEQ ID NO: 1659 - RNA, 20 nt, Artificial Sequence
  Antisense oligo
cuuguccuggcacuaaggca

SEQ ID NO: 1660 - RNA, 20 nt, Artificial Sequence
  Antisense oligo
ucccuuguccuggcacuaag

SEQ ID NO: 1661 - RNA, 20 nt, Artificial Sequence
  Antisense oligo
uucccuuguccuggcacuaa

SEQ ID NO: 1662 - RNA, 20 nt, Artificial Sequence
  Antisense oligo
gcuucccuuguccuggcacu

SEQ ID NO: 1663 - RNA, 20 nt, Artificial Sequence
  Antisense oligo
ugcuucccuuguccuggcac

SEQ ID NO: 1664 - RNA, 20 nt, Artificial Sequence
  Antisense oligo
aacugcuucccuuguccugg

SEQ ID NO: 1665 - RNA, 20 nt, Artificial Sequence
  Antisense oligo
aaacugcuucccuuguccug

SEQ ID NO: 1666 - RNA, 20 nt, Artificial Sequence
  Antisense oligo
gggucucaaacugcuucccu

SEQ ID NO: 1667 - RNA, 20 nt, Artificial Sequence
  Antisense oligo
cccuacuguagacauuccuc

SEQ ID NO: 1668 - RNA, 20 nt, Artificial Sequence
  Antisense oligo
agccuguuacgcuuuccucc

SEQ ID NO: 1669 - RNA, 20 nt, Artificial Sequence
  Antisense oligo
gagccuguuacgcuuuccuc

SEQ ID NO: 1670 - RNA, 20 nt, Artificial Sequence
  Antisense oligo
agagccuguuacgcuuuccu

SEQ ID NO: 1671 - RNA, 20 nt, Artificial Sequence
  Antisense oligo
cucgggcaccucuaaaacag

SEQ ID NO: 1672 - RNA, 20 nt, Artificial Sequence
  Antisense oligo
gacucuguacuaggauguca

SEQ ID NO: 1673 - RNA, 20 nt, Artificial Sequence
  Antisense oligo
ugacucuguacuaggauguc

SEQ ID NO: 1674 - RNA, 20 nt, Artificial Sequence
  Antisense oligo
accugacucuguacuaggau

SEQ ID NO: 1675 - RNA, 20 nt, Artificial Sequence
  Antisense oligo
caccugacucuguacuagga

SEQ ID NO: 1676 - RNA, 20 nt, Artificial Sequence
  Antisense oligo
ucaccugacucuguacuagg

SEQ ID NO: 1677 - RNA, 20 nt, Artificial Sequence
  Antisense oligo
ggauucaccugacucuguac

SEQ ID NO: 1678 - RNA, 20 nt, Artificial Sequence
  Antisense oligo
uggauucaccugacucugua

SEQ ID NO: 1679 - RNA, 20 nt, Artificial Sequence
  Antisense oligo
guggauucaccugacucugu

SEQ ID NO: 1680 - RNA, 20 nt, Artificial Sequence
  Antisense oligo
cacgaguggauucaccugac

SEQ ID NO: 1681 - RNA, 20 nt, Artificial Sequence
  Antisense oligo
ccacgaguggauucaccuga

SEQ ID NO: 1682 - RNA, 20 nt, Artificial Sequence
  Antisense oligo
cuagcauccagccucuuccu

SEQ ID NO: 1683 - RNA, 20 nt, Artificial Sequence
  Antisense oligo
ccuagcauccagccucuucc

SEQ ID NO: 1684 - RNA, 20 nt, Artificial Sequence
  Antisense oligo
uccuagcauccagccucuuc

SEQ ID NO: 1685 - RNA, 20 nt, Artificial Sequence
  Antisense oligo
guccuagcauccagccucuu

SEQ ID NO: 1686 - RNA, 20 nt, Artificial Sequence
  Antisense oligo
cguccuagcauccagccucu

SEQ ID NO: 1687 - RNA, 20 nt, Artificial Sequence
  Antisense oligo
ugugccguccuagcauccag

SEQ ID NO: 1688 - RNA, 20 nt, Artificial Sequence
  Antisense oligo
cugugccguccuagcaucca

SEQ ID NO: 1689 - RNA, 20 nt, Artificial Sequence
  Antisense oligo
acugugccguccuagcaucc

SEQ ID NO: 1690 - RNA, 20 nt, Artificial Sequence
  Antisense oligo
gacugugccguccuagcauc

SEQ ID NO: 1691 - RNA, 20 nt, Artificial Sequence
  Antisense oligo
agacugugccguccuagcau

SEQ ID NO: 1692 - RNA, 20 nt, Artificial Sequence
  Antisense oligo
aagacugugccguccuagca

SEQ ID NO: 1693 - RNA, 20 nt, Artificial Sequence
  Antisense oligo
aaagacugugccguccuagc

SEQ ID NO: 1694 - RNA, 20 nt, Artificial Sequence
  Antisense oligo
gaaagacugugccguccuag

SEQ ID NO: 1695 - RNA, 20 nt, Artificial Sequence
  Antisense oligo
agaaagacugugccguccua

SEQ ID NO: 1696 - RNA, 20 nt, Artificial Sequence
  Antisense oligo
cagaaagacugugccguccu

SEQ ID NO: 1697 - RNA, 20 nt, Artificial Sequence
  Antisense oligo
gggugaaucagacagaaaga

SEQ ID NO: 1698 - RNA, 20 nt, Artificial Sequence
  Antisense oligo
caguuucagcacaacaaggg

SEQ ID NO: 1699 - RNA, 20 nt, Artificial Sequence
  Antisense oligo
ccaguuucagcacaacaagg

SEQ ID NO: 1700 - RNA, 20 nt, Artificial Sequence
  Antisense oligo
cccaguuucagcacaacaag

SEQ ID NO: 1701 - RNA, 20 nt, Artificial Sequence
  Antisense oligo
ucugcuccagguggguagga

SEQ ID NO: 1702 - RNA, 20 nt, Artificial Sequence
  Antisense oligo
uugggccugcuaacaugagc

SEQ ID NO: 1703 - RNA, 20 nt, Artificial Sequence
  Antisense oligo
auugggccugcuaacaugag

SEQ ID NO: 1704 - RNA, 20 nt, Artificial Sequence
  Antisense oligo
cauugggccugcuaacauga

SEQ ID NO: 1705 - RNA, 20 nt, Artificial Sequence
  Antisense oligo
gcauugggccugcuaacaug

SEQ ID NO: 1706 - RNA, 20 nt, Artificial Sequence
  Antisense oligo
ugcauugggccugcuaacau

SEQ ID NO: 1707 - RNA, 20 nt, Artificial Sequence
  Antisense oligo
cugcauugggccugcuaaca

SEQ ID NO: 1708 - RNA, 20 nt, Artificial Sequence
  Antisense oligo
ccugcauugggccugcuaac

SEQ ID NO: 1709 - RNA, 20 nt, Artificial Sequence
  Antisense oligo
uccugcauugggccugcuaa

SEQ ID NO: 1710 - RNA, 20 nt, Artificial Sequence
  Antisense oligo
ucccuccgagguccugcauu

SEQ ID NO: 1711 - RNA, 20 nt, Artificial Sequence
  Antisense oligo
ucacccuguucucccuccga

SEQ ID NO: 1712 - RNA, 20 nt, Artificial Sequence
  Antisense oligo
auucacccuguucucccucc

SEQ ID NO: 1713 - RNA, 20 nt, Artificial Sequence
  Antisense oligo
uggagagauucacccuguuc

SEQ ID NO: 1714 - RNA, 20 nt, Artificial Sequence
  Antisense oligo
gugcauggagagauucaccc

SEQ ID NO: 1715 - RNA, 20 nt, Artificial Sequence
  Antisense oligo
gagugcauggagagauucac

SEQ ID NO: 1716 - RNA, 20 nt, Artificial Sequence
  Antisense oligo
cgagugcauggagagauuca

SEQ ID NO: 1717 - RNA, 20 nt, Artificial Sequence
  Antisense oligo
acgagugcauggagagauuc

SEQ ID NO: 1718 - RNA, 20 nt, Artificial Sequence
  Antisense oligo
cacgagugcauggagagauu

SEQ ID NO: 1719 - RNA, 20 nt, Artificial Sequence
  Antisense oligo
ccacgagugcauggagagau

SEQ ID NO: 1720 - RNA, 20 nt, Artificial Sequence
  Antisense oligo
cccacgagugcauggagaga

SEQ ID NO: 1721 - RNA, 20 nt, Artificial Sequence
  Antisense oligo
gaagcgaguguuaggaagga

SEQ ID NO: 1722 - RNA, 20 nt, Artificial Sequence
  Antisense oligo
agaagcgaguguuaggaagg

SEQ ID NO: 1723 - RNA, 20 nt, Artificial Sequence
  Antisense oligo
gagaagcgaguguuaggaag

SEQ ID NO: 1724 - RNA, 20 nt, Artificial Sequence
  Antisense oligo
gagagaagcgaguguuagga

SEQ ID NO: 1725 - RNA, 20 nt, Artificial Sequence
  Antisense oligo
agagagaagcgaguguuagg

SEQ ID NO: 1726 - RNA, 20 nt, Artificial Sequence
  Antisense oligo
ucagagagaagcgaguguua

SEQ ID NO: 1727 - RNA, 20 nt, Artificial Sequence
  Antisense oligo
cucagagagaagcgaguguu

SEQ ID NO: 1728 - RNA, 20 nt, Artificial Sequence
  Antisense oligo
ggcagaugaaggaaggguca

SEQ ID NO: 1729 - RNA, 20 nt, Artificial Sequence
  Antisense oligo
cggcagaugaaggaaggguc

SEQ ID NO: 1730 - RNA, 20 nt, Artificial Sequence
  Antisense oligo
acggcagaugaaggaagggu

SEQ ID NO: 1731 - RNA, 20 nt, Artificial Sequence
  Antisense oligo
uaacggcagaugaaggaagg

SEQ ID NO: 1732 - RNA, 20 nt, Artificial Sequence
  Antisense oligo
guaacggcagaugaaggaag

SEQ ID NO: 1733 - RNA, 20 nt, Artificial Sequence
  Antisense oligo
uguaacggcagaugaaggaa

SEQ ID NO: 1734 - RNA, 20 nt, Artificial Sequence
  Antisense oligo
cuguaacggcagaugaagga

SEQ ID NO: 1735 - RNA, 20 nt, Artificial Sequence
  Antisense oligo
uuuucuugccaacugucuga

SEQ ID NO: 1736 - RNA, 20 nt, Artificial Sequence
  Antisense oligo
guuuucuugccaacugucug

SEQ ID NO: 1737 - RNA, 20 nt, Artificial Sequence
  Antisense oligo
ggcuuuggaacagggcuccu

SEQ ID NO: 1738 - RNA, 20 nt, Artificial Sequence
  Antisense oligo
ggaggcuuuggaacagggcu

SEQ ID NO: 1739 - RNA, 20 nt, Artificial Sequence
  Antisense oligo
ccaggaggcuuuggaacagg

SEQ ID NO: 1740 - RNA, 20 nt, Artificial Sequence
  Antisense oligo
acucacuucuuggacggucc

SEQ ID NO: 1741 - RNA, 20 nt, Artificial Sequence
  Antisense oligo
cacucacuucuuggacgguc

SEQ ID NO: 1742 - RNA, 20 nt, Artificial Sequence
  Antisense oligo
gcacucacuucuuggacggu

SEQ ID NO: 1743 - RNA, 20 nt, Artificial Sequence
  Antisense oligo
ugcacucacuucuuggacgg

SEQ ID NO: 1744 - RNA, 20 nt, Artificial Sequence
  Antisense oligo
ugugcagugagauuuuccug

SEQ ID NO: 1745 - RNA, 20 nt, Artificial Sequence
  Antisense oligo
cugugcagugagauuuuccu

SEQ ID NO: 1746 - RNA, 20 nt, Artificial Sequence
  Antisense oligo
gcugugcagugagauuuucc

SEQ ID NO: 1747 - RNA, 20 nt, Artificial Sequence
  Antisense oligo
agguucaaugggcugggcca

SEQ ID NO: 1748 - RNA, 20 nt, Artificial Sequence
  Antisense oligo
ugggcagguucaaugggcug

SEQ ID NO: 1749 - RNA, 20 nt, Artificial Sequence
  Antisense oligo
ugugggcagguucaaugggc

SEQ ID NO: 1750 - RNA, 20 nt, Artificial Sequence
  Antisense oligo
cugugggcagguucaauggg

SEQ ID NO: 1751 - RNA, 20 nt, Artificial Sequence
  Antisense oligo
augaaucaggugcagaaggg

SEQ ID NO: 1752 - RNA, 20 nt, Artificial Sequence
  Antisense oligo
gaugaaucaggugcagaagg

SEQ ID NO: 1753 - RNA, 20 nt, Artificial Sequence
  Antisense oligo
gagaugaaucaggugcagaa

SEQ ID NO: 1754 - RNA, 20 nt, Artificial Sequence
  Antisense oligo
agagaugaaucaggugcaga

SEQ ID NO: 1755 - RNA, 20 nt, Artificial Sequence
  Antisense oligo
ccagccagagaugaaucagg

SEQ ID NO: 1756 - RNA, 20 nt, Artificial Sequence
  Antisense oligo
uccagccagagaugaaucag

SEQ ID NO: 1757 - RNA, 20 nt, Artificial Sequence
  Antisense oligo
cuccagccagagaugaauca

SEQ ID NO: 1758 - RNA, 20 nt, Artificial Sequence
  Antisense oligo
gacuccagccagagaugaau

SEQ ID NO: 1759 - RNA, 20 nt, Artificial Sequence
  Antisense oligo
acagacuccagccagagaug

SEQ ID NO: 1760 - RNA, 20 nt, Artificial Sequence
  Antisense oligo
acccacagacuccagccaga

SEQ ID NO: 1761 - RNA, 20 nt, Artificial Sequence
  Antisense oligo
aacccacagacuccagccag

SEQ ID NO: 1762 - RNA, 20 nt, Artificial Sequence
  Antisense oligo
uccagccugggcaacaagag

SEQ ID NO: 1763 - RNA, 20 nt, Artificial Sequence
  Antisense oligo
cuccagccugggcaacaaga

SEQ ID NO: 1764 - RNA, 20 nt, Artificial Sequence
  Antisense oligo
acuccagccugggcaacaag

SEQ ID NO: 1765 - RNA, 20 nt, Artificial Sequence
  Antisense oligo
cacuccagccugggcaacaa

SEQ ID NO: 1766 - RNA, 20 nt, Artificial Sequence
  Antisense oligo
aucgcaccacugcacuccag

SEQ ID NO: 1767 - RNA, 20 nt, Artificial Sequence
  Antisense oligo
gaucgcaccacugcacucca

SEQ ID NO: 1768 - RNA, 20 nt, Artificial Sequence
  Antisense oligo
agaucgcaccacugcacucc

SEQ ID NO: 1769 - RNA, 20 nt, Artificial Sequence
  Antisense oligo
gagaucgcaccacugcacuc

SEQ ID NO: 1770 - RNA, 20 nt, Artificial Sequence
  Antisense oligo
cgagaucgcaccacugcacu

SEQ ID NO: 1771 - RNA, 20 nt, Artificial Sequence
  Antisense oligo
ggagaauugcuugaaaccag

SEQ ID NO: 1772 - RNA, 20 nt, Artificial Sequence
  Antisense oligo
aggagaauugcuugaaacca

SEQ ID NO: 1773 - RNA, 20 nt, Artificial Sequence
  Antisense oligo
caggagaauugcuugaaacc

SEQ ID NO: 1774 - RNA, 20 nt, Artificial Sequence
  Antisense oligo
gcaggagaauugcuugaaac

SEQ ID NO: 1775 - RNA, 20 nt, Artificial Sequence
  Antisense oligo
ggcaggagaauugcuugaaa

SEQ ID NO: 1776 - RNA, 20 nt, Artificial Sequence
  Antisense oligo
aggcaggagaauugcuugaa

SEQ ID NO: 1777 - RNA, 20 nt, Artificial Sequence
  Antisense oligo
gaggcaggagaauugcuuga

SEQ ID NO: 1778 - RNA, 20 nt, Artificial Sequence
  Antisense oligo
ugaggcaggagaauugcuug

SEQ ID NO: 1779 - RNA, 20 nt, Artificial Sequence
  Antisense oligo
cugaggcaggagaauugcuu

SEQ ID NO: 1780 - RNA, 20 nt, Artificial Sequence
  Antisense oligo
gcugaggcaggagaauugcu

SEQ ID NO: 1781 - RNA, 20 nt, Artificial Sequence
  Antisense oligo
ggcugaggcaggagaauugc

SEQ ID NO: 1782 - RNA, 20 nt, Artificial Sequence
  Antisense oligo
aggcugaggcaggagaauug

SEQ ID NO: 1783 - RNA, 20 nt, Artificial Sequence
  Antisense oligo
gaggcugaggcaggagaauu

SEQ ID NO: 1784 - RNA, 20 nt, Artificial Sequence
  Antisense oligo
ggaggcugaggcaggagaau

SEQ ID NO: 1785 - RNA, 20 nt, Artificial Sequence
  Antisense oligo
uacuugggaggcugaggcag

SEQ ID NO: 1786 - RNA, 20 nt, Artificial Sequence
  Antisense oligo
cuacuugggaggcugaggca

SEQ ID NO: 1787 - RNA, 20 nt, Artificial Sequence
  Antisense oligo
agcuacuugggaggcugagg

SEQ ID NO: 1788 - RNA, 20 nt, Artificial Sequence
  Antisense oligo
caugccuguagucccagcua

SEQ ID NO: 1789 - RNA, 20 nt, Artificial Sequence
  Antisense oligo
cccgucucuacuaaauacaa

SEQ ID NO: 1790 - RNA, 20 nt, Artificial Sequence
  Antisense oligo
aggaguuugagaccaaccug

SEQ ID NO: 1791 - RNA, 20 nt, Artificial Sequence
  Antisense oligo
caggaguuugagaccaaccu

SEQ ID NO: 1792 - RNA, 20 nt, Artificial Sequence
  Antisense oligo
ucaggaguuugagaccaacc

SEQ ID NO: 1793 - RNA, 20 nt, Artificial Sequence
  Antisense oligo
gucaggaguuugagaccaac

SEQ ID NO: 1794 - RNA, 20 nt, Artificial Sequence
  Antisense oligo
ugaggucaggaguuugagac

SEQ ID NO: 1795 - RNA, 20 nt, Artificial Sequence
  Antisense oligo
cugaggucaggaguuugaga

SEQ ID NO: 1796 - RNA, 20 nt, Artificial Sequence
  Antisense oligo
cuguaaucccagcacuuugg

SEQ ID NO: 1797 - RNA, 20 nt, Artificial Sequence
  Antisense oligo
ccuguaaucccagcacuuug

SEQ ID NO: 1798 - RNA, 20 nt, Artificial Sequence
  Antisense oligo
accuguaaucccagcacuuu

SEQ ID NO: 1799 - RNA, 20 nt, Artificial Sequence
  Antisense oligo
caccuguaaucccagcacuu

SEQ ID NO: 1800 - RNA, 20 nt, Artificial Sequence
  Antisense oligo
acaccuguaaucccagcacu

SEQ ID NO: 1801 - RNA, 20 nt, Artificial Sequence
  Antisense oligo
cacaccuguaaucccagcac

SEQ ID NO: 1802 - RNA, 20 nt, Artificial Sequence
  Antisense oligo
ucacaccuguaaucccagca

SEQ ID NO: 1803 - RNA, 20 nt, Artificial Sequence
  Antisense oligo
cucacaccuguaaucccagc

SEQ ID NO: 1804 - RNA, 20 nt, Artificial Sequence
  Antisense oligo
gcucacaccuguaaucccag

SEQ ID NO: 1805 - RNA, 20 nt, Artificial Sequence
  Antisense oligo
ggcucacaccuguaauccca

SEQ ID NO: 1806 - RNA, 20 nt, Artificial Sequence
  Antisense oligo
uggcucacaccuguaauccc

SEQ ID NO: 1807 - RNA, 20 nt, Artificial Sequence
  Antisense oligo
guggcucacaccuguaaucc

SEQ ID NO: 1808 - RNA, 20 nt, Artificial Sequence
  Antisense oligo
aagaaaaggaagguggaggc

SEQ ID NO: 1809 - RNA, 20 nt, Artificial Sequence
  Antisense oligo
aaagaaaaggaagguggagg

SEQ ID NO: 1810 - RNA, 20 nt, Artificial Sequence
  Antisense oligo
uagaaagaaaaggaaggugg

SEQ ID NO: 1811 - RNA, 20 nt, Artificial Sequence
  Antisense oligo
guagaaagaaaaggaaggug

SEQ ID NO: 1812 - RNA, 20 nt, Artificial Sequence
  Antisense oligo
auugggucugguagaaagaa

SEQ ID NO: 1813 - RNA, 20 nt, Artificial Sequence
  Antisense oligo
guauugggucugguagaaag

SEQ ID NO: 1814 - RNA, 20 nt, Artificial Sequence
  Antisense oligo
aguauugggucugguagaaa

SEQ ID NO: 1815 - RNA, 20 nt, Artificial Sequence
  Antisense oligo
gaguauugggucugguagaa

SEQ ID NO: 1816 - RNA, 20 nt, Artificial Sequence
  Antisense oligo
cgaguauugggucugguaga

SEQ ID NO: 1817 - RNA, 20 nt, Artificial Sequence
  Antisense oligo
acgaguauugggucugguag

SEQ ID NO: 1818 - RNA, 20 nt, Artificial Sequence
  Antisense oligo
cacgaguauugggucuggua

SEQ ID NO: 1819 - RNA, 20 nt, Artificial Sequence
  Antisense oligo
acacgaguauugggucuggu

SEQ ID NO: 1820 - RNA, 20 nt, Artificial Sequence
  Antisense oligo
cacacgaguauugggucugg

SEQ ID NO: 1821 - RNA, 20 nt, Artificial Sequence
  Antisense oligo
acacacgaguauugggucug

SEQ ID NO: 1822 - RNA, 20 nt, Artificial Sequence
  Antisense oligo
gacacacgaguauugggucu

SEQ ID NO: 1823 - RNA, 20 nt, Artificial Sequence
  Antisense oligo
agacacacgaguauuggguc

SEQ ID NO: 1824 - RNA, 20 nt, Artificial Sequence
  Antisense oligo
gagacacacgaguauugggu

SEQ ID NO: 1825 - RNA, 20 nt, Artificial Sequence
  Antisense oligo
ggagacacacgaguauuggg

SEQ ID NO: 1826 - RNA, 20 nt, Artificial Sequence
  Antisense oligo
gggagacacacgaguauugg

SEQ ID NO: 1827 - RNA, 20 nt, Artificial Sequence
  Antisense oligo
ugggagacacacgaguauug

SEQ ID NO: 1828 - RNA, 20 nt, Artificial Sequence
  Antisense oligo
cugggagacacacgaguauu

SEQ ID NO: 1829 - RNA, 20 nt, Artificial Sequence
  Antisense oligo
ucugggagacacacgaguau

SEQ ID NO: 1830 - RNA, 20 nt, Artificial Sequence
  Antisense oligo
uucugggagacacacgagua

SEQ ID NO: 1831 - RNA, 20 nt, Artificial Sequence
  Antisense oligo
cuucugggagacacacgagu

SEQ ID NO: 1832 - RNA, 20 nt, Artificial Sequence
  Antisense oligo
agcuucugggagacacacga

SEQ ID NO: 1833 - RNA, 20 nt, Artificial Sequence
  Antisense oligo
cagcuucugggagacacacg

SEQ ID NO: 1834 - RNA, 20 nt, Artificial Sequence
  Antisense oligo
acagcuucugggagacacac

SEQ ID NO: 1835 - RNA, 20 nt, Artificial Sequence
  Antisense oligo
cacagcuucugggagacaca

SEQ ID NO: 1836 - RNA, 20 nt, Artificial Sequence
  Antisense oligo
ccacagcuucugggagacac

SEQ ID NO: 1837 - RNA, 20 nt, Artificial Sequence
  Antisense oligo
gccacagcuucugggagaca

SEQ ID NO: 1838 - RNA, 20 nt, Artificial Sequence
  Antisense oligo
acacacggcagaagcucagg

SEQ ID NO: 1839 - RNA, 20 nt, Artificial Sequence
  Antisense oligo
auacacacggcagaagcuca

SEQ ID NO: 1840 - RNA, 20 nt, Artificial Sequence
  Antisense oligo
gauacacacggcagaagcuc

SEQ ID NO: 1841 - RNA, 20 nt, Artificial Sequence
  Antisense oligo
agauacacacggcagaagcu

SEQ ID NO: 1842 - RNA, 20 nt, Artificial Sequence
  Antisense oligo
cagauacacacggcagaagc

SEQ ID NO: 1843 - RNA, 20 nt, Artificial Sequence
  Antisense oligo
acagauacacacggcagaag

SEQ ID NO: 1844 - RNA, 20 nt, Artificial Sequence
  Antisense oligo
cacagauacacacggcagaa

SEQ ID NO: 1845 - RNA, 20 nt, Artificial Sequence
  Antisense oligo
uugggacacagauacacacg

SEQ ID NO: 1846 - RNA, 20 nt, Artificial Sequence
  Antisense oligo
caaugcaaagagacccacag

SEQ ID NO: 1847 - RNA, 20 nt, Artificial Sequence
  Antisense oligo
cucaaugcaaagagacccac

SEQ ID NO: 1848 - RNA, 20 nt, Artificial Sequence
  Antisense oligo
ccucaaugcaaagagaccca

SEQ ID NO: 1849 - RNA, 20 nt, Artificial Sequence
  Antisense oligo
cccucaaugcaaagagaccc

SEQ ID NO: 1850 - RNA, 20 nt, Artificial Sequence
  Antisense oligo
acccucaaugcaaagagacc

SEQ ID NO: 1851 - RNA, 20 nt, Artificial Sequence
  Antisense oligo
cacccucaaugcaaagagac

SEQ ID NO: 1852 - RNA, 20 nt, Artificial Sequence
  Antisense oligo
gcacccucaaugcaaagaga

SEQ ID NO: 1853 - RNA, 20 nt, Artificial Sequence
  Antisense oligo
caccucugagcuugcacccu

SEQ ID NO: 1854 - RNA, 20 nt, Artificial Sequence
  Antisense oligo
aaggcaccucugagcuugca

SEQ ID NO: 1855 - RNA, 20 nt, Artificial Sequence
  Antisense oligo
agcagcaaggcaccucugag

SEQ ID NO: 1856 - RNA, 20 nt, Artificial Sequence
  Antisense oligo
cgaagcagcaaggcaccucu

SEQ ID NO: 1857 - RNA, 20 nt, Artificial Sequence
  Antisense oligo
cacgcacccucaaugcagag

SEQ ID NO: 1858 - RNA, 20 nt, Artificial Sequence
  Antisense oligo
gcacgcacccucaaugcaga

SEQ ID NO: 1859 - RNA, 20 nt, Artificial Sequence
  Antisense oligo
ucugggcacgcacccucaau

SEQ ID NO: 1860 - RNA, 20 nt, Artificial Sequence
  Antisense oligo
accugccagccagcacauuu

SEQ ID NO: 1861 - RNA, 20 nt, Artificial Sequence
  Antisense oligo
aaggguaaccugccagccag

SEQ ID NO: 1862 - RNA, 20 nt, Artificial Sequence
  Antisense oligo
gaaggguaaccugccagcca

SEQ ID NO: 1863 - RNA, 20 nt, Artificial Sequence
  Antisense oligo
agaaggguaaccugccagcc

SEQ ID NO: 1864 - RNA, 20 nt, Artificial Sequence
  Antisense oligo
aagaaggguaaccugccagc

SEQ ID NO: 1865 - RNA, 20 nt, Artificial Sequence
  Antisense oligo
caagaaggguaaccugccag

SEQ ID NO: 1866 - RNA, 20 nt, Artificial Sequence
  Antisense oligo
uccaagaaggguaaccugcc

SEQ ID NO: 1867 - RNA, 20 nt, Artificial Sequence
  Antisense oligo
uuccaagaaggguaaccugc

SEQ ID NO: 1868 - RNA, 20 nt, Artificial Sequence
  Antisense oligo
cagagggagccaaaaggugg

SEQ ID NO: 1869 - RNA, 20 nt, Artificial Sequence
  Antisense oligo
ccagagggagccaaaaggug

SEQ ID NO: 1870 - RNA, 20 nt, Artificial Sequence
  Antisense oligo
gccagagggagccaaaaggu

SEQ ID NO: 1871 - RNA, 20 nt, Artificial Sequence
  Antisense oligo
aggccagagggagccaaaag

SEQ ID NO: 1872 - RNA, 20 nt, Artificial Sequence
  Antisense oligo
cuuggugucuaacgccuaag

SEQ ID NO: 1873 - RNA, 20 nt, Artificial Sequence
  Antisense oligo
ucuuggugucuaacgccuaa

SEQ ID NO: 1874 - RNA, 20 nt, Artificial Sequence
  Antisense oligo
cucuuggugucuaacgccua

SEQ ID NO: 1875 - RNA, 20 nt, Artificial Sequence
  Antisense oligo
ucucuuggugucuaacgccu

SEQ ID NO: 1876 - RNA, 20 nt, Artificial Sequence
  Antisense oligo
ggaaucuuaacaaggacgca

SEQ ID NO: 1877 - RNA, 20 nt, Artificial Sequence
  Antisense oligo
gggaaucuuaacaaggacgc

SEQ ID NO: 1878 - RNA, 20 nt, Artificial Sequence
  Antisense oligo
ugggaaucuuaacaaggacg

SEQ ID NO: 1879 - RNA, 20 nt, Artificial Sequence
  Antisense oligo
acugggaaucuuaacaagga

SEQ ID NO: 1880 - RNA, 20 nt, Artificial Sequence
  Antisense oligo
aacugggaaucuuaacaagg

SEQ ID NO: 1881 - RNA, 20 nt, Artificial Sequence
  Antisense oligo
uccaacugggaaucuuaaca

SEQ ID NO: 1882 - RNA, 20 nt, Artificial Sequence
  Antisense oligo
uagugcuccaacugggaauc

SEQ ID NO: 1883 - RNA, 20 nt, Artificial Sequence
  Antisense oligo
cuagugcuccaacugggaau

SEQ ID NO: 1884 - RNA, 20 nt, Artificial Sequence
  Antisense oligo
ccuagugcuccaacugggaa

SEQ ID NO: 1885 - RNA, 20 nt, Artificial Sequence
  Antisense oligo
gccuagugcuccaacuggga

SEQ ID NO: 1886 - RNA, 20 nt, Artificial Sequence
  Antisense oligo
ucgccuagugcuccaacugg

SEQ ID NO: 1887 - RNA, 20 nt, Artificial Sequence
  Antisense oligo
cucgccuagugcuccaacug

SEQ ID NO: 1888 - RNA, 20 nt, Artificial Sequence
  Antisense oligo
ccucgccuagugcuccaacu

SEQ ID NO: 1889 - RNA, 20 nt, Artificial Sequence
  Antisense oligo
agccucgccuagugcuccaa

SEQ ID NO: 1890 - RNA, 20 nt, Artificial Sequence
  Antisense oligo
aagccucgccuagugcucca

SEQ ID NO: 1891 - RNA, 20 nt, Artificial Sequence
  Antisense oligo
aaagccucgccuagugcucc

SEQ ID NO: 1892 - RNA, 20 nt, Artificial Sequence
  Antisense oligo
gaaagccucgccuagugcuc

SEQ ID NO: 1893 - RNA, 20 nt, Artificial Sequence
  Antisense oligo
ucgaaagccucgccuagugc

SEQ ID NO: 1894 - RNA, 20 nt, Artificial Sequence
  Antisense oligo
cucgaaagccucgccuagug

SEQ ID NO: 1895 - RNA, 20 nt, Artificial Sequence
  Antisense oligo
ccucgaaagccucgccuagu

SEQ ID NO: 1896 - RNA, 20 nt, Artificial Sequence
  Antisense oligo
uccaaccauucuccuugaac

SEQ ID NO: 1897 - RNA, 20 nt, Artificial Sequence
  Antisense oligo
uucucuuccaaccauucucc

SEQ ID NO: 1898 - RNA, 20 nt, Artificial Sequence
  Antisense oligo
ccuucucuuccaaccauucu

SEQ ID NO: 1899 - RNA, 20 nt, Artificial Sequence
  Antisense oligo
cccuucucuuccaaccauuc

SEQ ID NO: 1900 - RNA, 20 nt, Artificial Sequence
  Antisense oligo
gcccuucucuuccaaccauu

SEQ ID NO: 1901 - RNA, 20 nt, Artificial Sequence
  Antisense oligo
agcccuucucuuccaaccau

SEQ ID NO: 1902 - RNA, 20 nt, Artificial Sequence
  Antisense oligo
ggagcccuucucuuccaacc

SEQ ID NO: 1903 - RNA, 20 nt, Artificial Sequence
  Antisense oligo
aggagcccuucucuuccaac

SEQ ID NO: 1904 - RNA, 20 nt, Artificial Sequence
  Antisense oligo
ccaggagcccuucucuucca

SEQ ID NO: 1905 - RNA, 20 nt, Artificial Sequence
  Antisense oligo
uccgugcccagcaagaaacc

SEQ ID NO: 1906 - RNA, 20 nt, Artificial Sequence
  Antisense oligo
cuccgugcccagcaagaaac

SEQ ID NO: 1907 - RNA, 20 nt, Artificial Sequence
  Antisense oligo
ucuccgugcccagcaagaaa

SEQ ID NO: 1908 - RNA, 20 nt, Artificial Sequence
  Antisense oligo
cuucuccgugcccagcaaga

SEQ ID NO: 1909 - RNA, 20 nt, Artificial Sequence
  Antisense oligo
aucccauucacaccacucac

SEQ ID NO: 1910 - RNA, 20 nt, Artificial Sequence
  Antisense oligo
caucccauucacaccacuca

SEQ ID NO: 1911 - RNA, 20 nt, Artificial Sequence
  Antisense oligo
cacacaucccauucacacca

SEQ ID NO: 1912 - RNA, 20 nt, Artificial Sequence
  Antisense oligo
acacacacacaucccauuca

SEQ ID NO: 1913 - RNA, 20 nt, Artificial Sequence
  Antisense oligo
aacacacacacaucccauuc

SEQ ID NO: 1914 - RNA, 20 nt, Artificial Sequence
  Antisense oligo
acauacacacacauccaaca

SEQ ID NO: 1915 - RNA, 20 nt, Artificial Sequence
  Antisense oligo
cacauacacacacauccaac

SEQ ID NO: 1916 - RNA, 20 nt, Artificial Sequence
  Antisense oligo
acacauacacacacauccaa

SEQ ID NO: 1917 - RNA, 20 nt, Artificial Sequence
  Antisense oligo
aacacauacacacacaucca

SEQ ID NO: 1918 - RNA, 20 nt, Artificial Sequence
  Antisense oligo
acacaccaacucacauaccc

SEQ ID NO: 1919 - RNA, 20 nt, Artificial Sequence
  Antisense oligo
ccaacacgcacacacccaac

SEQ ID NO: 1920 - RNA, 20 nt, Artificial Sequence
  Antisense oligo
cccaacacgcacacacccaa

SEQ ID NO: 1921 - RNA, 20 nt, Artificial Sequence
  Antisense oligo
acacccaacacgcacacacc

SEQ ID NO: 1922 - RNA, 20 nt, Artificial Sequence
  Antisense oligo
acacacccaacacgcacaca

SEQ ID NO: 1923 - RNA, 20 nt, Artificial Sequence
  Antisense oligo
acacacacccaacacgcaca

SEQ ID NO: 1924 - RNA, 20 nt, Artificial Sequence
  Antisense oligo
acauacacacacaucccacu

SEQ ID NO: 1925 - RNA, 20 nt, Artificial Sequence
  Antisense oligo
caacauacacacacauccca

SEQ ID NO: 1926 - RNA, 20 nt, Artificial Sequence
  Antisense oligo
ccaacauacacacacauccc

SEQ ID NO: 1927 - RNA, 20 nt, Artificial Sequence
  Antisense oligo
cccaacauacacacacaucc

SEQ ID NO: 1928 - RNA, 20 nt, Artificial Sequence
  Antisense oligo
aagggaaugacacaagcaca

SEQ ID NO: 1929 - RNA, 20 nt, Artificial Sequence
  Antisense oligo
uucuccaagggaaugacaca

SEQ ID NO: 1930 - RNA, 20 nt, Artificial Sequence
  Antisense oligo
agggauuauucuccaaggga

SEQ ID NO: 1931 - RNA, 20 nt, Artificial Sequence
  Antisense oligo
aagggauuauucuccaaggg

SEQ ID NO: 1932 - RNA, 20 nt, Artificial Sequence
  Antisense oligo
ggaagggauuauucuccaag

SEQ ID NO: 1933 - RNA, 20 nt, Artificial Sequence
  Antisense oligo
ucuggaagggauuauucucc

SEQ ID NO: 1934 - RNA, 20 nt, Artificial Sequence
  Antisense oligo
cucuggaagggauuauucuc

SEQ ID NO: 1935 - RNA, 20 nt, Artificial Sequence
  Antisense oligo
ugcucuggaagggauuauuc

SEQ ID NO: 1936 - RNA, 20 nt, Artificial Sequence
  Antisense oligo
cugcucuggaagggauuauu

SEQ ID NO: 1937 - RNA, 20 nt, Artificial Sequence
  Antisense oligo
cuuccgcaucccaugugcuc

SEQ ID NO: 1938 - RNA, 20 nt, Artificial Sequence
  Antisense oligo
ccuuccgcaucccaugugcu

SEQ ID NO: 1939 - RNA, 20 nt, Artificial Sequence
  Antisense oligo
accuuccgcaucccaugugc

SEQ ID NO: 1940 - RNA, 20 nt, Artificial Sequence
  Antisense oligo
aaccuuccgcaucccaugug

SEQ ID NO: 1941 - RNA, 20 nt, Artificial Sequence
  Antisense oligo
caaaccuuccgcaucccaug

SEQ ID NO: 1942 - RNA, 20 nt, Artificial Sequence
  Antisense oligo
ccaaaccuuccgcaucccau

SEQ ID NO: 1943 - RNA, 20 nt, Artificial Sequence
  Antisense oligo
cccaaaccuuccgcauccca

SEQ ID NO: 1944 - RNA, 20 nt, Artificial Sequence
  Antisense oligo
acccaaaccuuccgcauccc

SEQ ID NO: 1945 - RNA, 20 nt, Artificial Sequence
  Antisense oligo
uacccaaaccuuccgcaucc

SEQ ID NO: 1946 - RNA, 20 nt, Artificial Sequence
  Antisense oligo
uuacccaaaccuuccgcauc

SEQ ID NO: 1947 - RNA, 20 nt, Artificial Sequence
  Antisense oligo
aguuacccaaaccuuccgca

SEQ ID NO: 1948 - RNA, 20 nt, Artificial Sequence
  Antisense oligo
ggaguuacccaaaccuuccg

SEQ ID NO: 1949 - RNA, 20 nt, Artificial Sequence
  Antisense oligo
agggaguuacccaaaccuuc

SEQ ID NO: 1950 - RNA, 20 nt, Artificial Sequence
  Antisense oligo
aaaagggaguuacccaaacc

SEQ ID NO: 1951 - RNA, 20 nt, Artificial Sequence
  Antisense oligo
acagaguuccaaauuaggca

SEQ ID NO: 1952 - RNA, 20 nt, Artificial Sequence
  Antisense oligo
gacagaguuccaaauuaggc

SEQ ID NO: 1953 - RNA, 20 nt, Artificial Sequence
  Antisense oligo
ugacagaguuccaaauuagg

SEQ ID NO: 1954 - RNA, 20 nt, Artificial Sequence
  Antisense oligo
uuucaaggaacaccauccgu

SEQ ID NO: 1955 - RNA, 20 nt, Artificial Sequence
  Antisense oligo
uuuucaaggaacaccauccg

SEQ ID NO: 1956 - RNA, 20 nt, Artificial Sequence
  Antisense oligo
guuuucaaggaacaccaucc

SEQ ID NO: 1957 - RNA, 20 nt, Artificial Sequence
  Antisense oligo
ggguuuauucauuugccuuc

SEQ ID NO: 1958 - RNA, 20 nt, Artificial Sequence
  Antisense oligo
gauggcaaaggguuuauuca

SEQ ID NO: 1959 - RNA, 20 nt, Artificial Sequence
  Antisense oligo
agccugcacugaggucuucu

SEQ ID NO: 1960 - RNA, 20 nt, Artificial Sequence
  Antisense oligo
uccuuccagccugcacugag

SEQ ID NO: 1961 - RNA, 20 nt, Artificial Sequence
  Antisense oligo
ggacacuccucccacacuca

SEQ ID NO: 1962 - RNA, 20 nt, Artificial Sequence
  Antisense oligo
uggcccugaguugggacacu

SEQ ID NO: 1963 - RNA, 20 nt, Artificial Sequence
  Antisense oligo
agacuggcccugaguuggga

SEQ ID NO: 1964 - RNA, 20 nt, Artificial Sequence
  Antisense oligo
guagacuggcccugaguugg

SEQ ID NO: 1965 - RNA, 20 nt, Artificial Sequence
  Antisense oligo
uguagacuggcccugaguug

SEQ ID NO: 1966 - RNA, 20 nt, Artificial Sequence
  Antisense oligo
cuguagacuggcccugaguu

SEQ ID NO: 1967 - RNA, 20 nt, Artificial Sequence
  Antisense oligo
ucuguagacuggcccugagu

SEQ ID NO: 1968 - RNA, 20 nt, Artificial Sequence
  Antisense oligo
cucuguagacuggcccugag

SEQ ID NO: 1969 - RNA, 20 nt, Artificial Sequence
  Antisense oligo
auacucucucagucucugua

SEQ ID NO: 1970 - RNA, 20 nt, Artificial Sequence
  Antisense oligo
acuccagccugggcaaagga

SEQ ID NO: 1971 - RNA, 20 nt, Artificial Sequence
  Antisense oligo
ugcacuccagccugggcaaa

SEQ ID NO: 1972 - RNA, 20 nt, Artificial Sequence
  Antisense oligo
gcaguugagcugagauggcg

SEQ ID NO: 1973 - RNA, 20 nt, Artificial Sequence
  Antisense oligo
ggugccuguagucccagcua

SEQ ID NO: 1974 - RNA, 20 nt, Artificial Sequence
  Antisense oligo
aaauuagccaggcguggugg

SEQ ID NO: 1975 - RNA, 20 nt, Artificial Sequence
  Antisense oligo
aaaauuagccaggcguggug

SEQ ID NO: 1976 - RNA, 20 nt, Artificial Sequence
  Antisense oligo
agaucgagaccauccuggcc

SEQ ID NO: 1977 - RNA, 20 nt, Artificial Sequence
  Antisense oligo
gagaucgagaccauccuggc

SEQ ID NO: 1978 - RNA, 20 nt, Artificial Sequence
  Antisense oligo
ggagaucgagaccauccugg

SEQ ID NO: 1979 - RNA, 20 nt, Artificial Sequence
  Antisense oligo
ucaggagaucgagaccaucc

SEQ ID NO: 1980 - RNA, 20 nt, Artificial Sequence
  Antisense oligo
gucaggagaucgagaccauc

SEQ ID NO: 1981 - RNA, 20 nt, Artificial Sequence
  Antisense oligo
caaggucaggagaucgagac

SEQ ID NO: 1982 - RNA, 20 nt, Artificial Sequence
  Antisense oligo
acaaggucaggagaucgaga

SEQ ID NO: 1983 - RNA, 20 nt, Artificial Sequence
  Antisense oligo
cacaaggucaggagaucgag

SEQ ID NO: 1984 - RNA, 20 nt, Artificial Sequence
  Antisense oligo
ucacaaggucaggagaucga

SEQ ID NO: 1985 - RNA, 20 nt, Artificial Sequence
  Antisense oligo
aucacaaggucaggagaucg

SEQ ID NO: 1986 - RNA, 20 nt, Artificial Sequence
  Antisense oligo
ggaucacaaggucaggagau

SEQ ID NO: 1987 - RNA, 20 nt, Artificial Sequence
  Antisense oligo
uggaucacaaggucaggaga

SEQ ID NO: 1988 - RNA, 20 nt, Artificial Sequence
  Antisense oligo
guggaucacaaggucaggag

SEQ ID NO: 1989 - RNA, 20 nt, Artificial Sequence
  Antisense oligo
gguggaucacaaggucagga

SEQ ID NO: 1990 - RNA, 20 nt, Artificial Sequence
  Antisense oligo
ggguggaucacaaggucagg

SEQ ID NO: 1991 - RNA, 20 nt, Artificial Sequence
  Antisense oligo
cggguggaucacaaggucag

SEQ ID NO: 1992 - RNA, 20 nt, Artificial Sequence
  Antisense oligo
gcggguggaucacaagguca

SEQ ID NO: 1993 - RNA, 20 nt, Artificial Sequence
  Antisense oligo
ccuguaaucccaacauucug

SEQ ID NO: 1994 - RNA, 20 nt, Artificial Sequence
  Antisense oligo
gccuguaaucccaacauucu

SEQ ID NO: 1995 - RNA, 20 nt, Artificial Sequence
  Antisense oligo
cgccuguaaucccaacauuc

SEQ ID NO: 1996 - RNA, 20 nt, Artificial Sequence
  Antisense oligo
acgccuguaaucccaacauu

SEQ ID NO: 1997 - RNA, 20 nt, Artificial Sequence
  Antisense oligo
cacgccuguaaucccaacau

SEQ ID NO: 1998 - RNA, 20 nt, Artificial Sequence
  Antisense oligo
ucacgccuguaaucccaaca

SEQ ID NO: 1999 - RNA, 20 nt, Artificial Sequence
  Antisense oligo
cucacgccuguaaucccaac

SEQ ID NO: 2000 - RNA, 20 nt, Artificial Sequence
  Antisense oligo
gcucacgccuguaaucccaa

SEQ ID NO: 2001 - RNA, 20 nt, Artificial Sequence
  Antisense oligo
ggcucacgccuguaauccca

SEQ ID NO: 2002 - RNA, 20 nt, Artificial Sequence
  Antisense oligo
uggcucacgccuguaauccc

SEQ ID NO: 2003 - RNA, 20 nt, Artificial Sequence
  Antisense oligo
guggcucacgccuguaaucc

SEQ ID NO: 2004 - RNA, 20 nt, Artificial Sequence
  Antisense oligo
gguggcucacgccuguaauc

SEQ ID NO: 2005 - RNA, 20 nt, Artificial Sequence
  Antisense oligo
ugguggcucacgccuguaau

SEQ ID NO: 2006 - RNA, 20 nt, Artificial Sequence
  Antisense oligo
augguggcucacgccuguaa

SEQ ID NO: 2007 - RNA, 20 nt, Artificial Sequence
  Antisense oligo
caugguggcucacgccugua

SEQ ID NO: 2008 - RNA, 20 nt, Artificial Sequence
  Antisense oligo
caccuacagccaaaacaugg

SEQ ID NO: 2009 - RNA, 20 nt, Artificial Sequence
  Antisense oligo
acaccuacagccaaaacaug

SEQ ID NO: 2010 - RNA, 20 nt, Artificial Sequence
  Antisense oligo
cuuaaacaccuacagccaaa

SEQ ID NO: 2011 - RNA, 20 nt, Artificial Sequence
  Antisense oligo
ccuuaaacaccuacagccaa

SEQ ID NO: 2012 - RNA, 20 nt, Artificial Sequence
  Antisense oligo
uuccuuaaacaccuacagcc

SEQ ID NO: 2013 - RNA, 20 nt, Artificial Sequence
  Antisense oligo
gcuuguugccaauuaguagu

SEQ ID NO: 2014 - RNA, 20 nt, Artificial Sequence
  Antisense oligo
ggcuuguugccaauuaguag

SEQ ID NO: 2015 - RNA, 20 nt, Artificial Sequence
  Antisense oligo
gucuauguuccuuuggcuug

SEQ ID NO: 2016 - RNA, 20 nt, Artificial Sequence
  Antisense oligo
agucuauguuccuuuggcuu

SEQ ID NO: 2017 - RNA, 20 nt, Artificial Sequence
  Antisense oligo
aagucuauguuccuuuggcu

SEQ ID NO: 2018 - RNA, 20 nt, Artificial Sequence
  Antisense oligo
agcgaaacuccaucucaaaa

SEQ ID NO: 2019 - RNA, 20 nt, Artificial Sequence
  Antisense oligo
gagcgaaacuccaucucaaa

SEQ ID NO: 2020 - RNA, 20 nt, Artificial Sequence
  Antisense oligo
agcuuggcaacaggagcgaa

SEQ ID NO: 2021 - RNA, 20 nt, Artificial Sequence
  Antisense oligo
ccuagcuuggcaacaggagc

SEQ ID NO: 2022 - RNA, 20 nt, Artificial Sequence
  Antisense oligo
cacccuagcuuggcaacagg

SEQ ID NO: 2023 - RNA, 20 nt, Artificial Sequence
  Antisense oligo
gcacccuagcuuggcaacag

SEQ ID NO: 2024 - RNA, 20 nt, Artificial Sequence
  Antisense oligo
ugcacccuagcuuggcaaca

SEQ ID NO: 2025 - RNA, 20 nt, Artificial Sequence
  Antisense oligo
ggagguggagguugcuguga

SEQ ID NO: 2026 - RNA, 20 nt, Artificial Sequence
  Antisense oligo
ggagaaucgcuugaacccgg

SEQ ID NO: 2027 - RNA, 20 nt, Artificial Sequence
  Antisense oligo
aggagaaucgcuugaacccg

SEQ ID NO: 2028 - RNA, 20 nt, Artificial Sequence
  Antisense oligo
caggagaaucgcuugaaccc

SEQ ID NO: 2029 - RNA, 20 nt, Artificial Sequence
  Antisense oligo
gcaggagaaucgcuugaacc

SEQ ID NO: 2030 - RNA, 20 nt, Artificial Sequence
  Antisense oligo
ggcaggagaaucgcuugaac

SEQ ID NO: 2031 - RNA, 20 nt, Artificial Sequence
  Antisense oligo
aggcaggagaaucgcuugaa

SEQ ID NO: 2032 - RNA, 20 nt, Artificial Sequence
  Antisense oligo
gaggcaggagaaucgcuuga

SEQ ID NO: 2033 - RNA, 20 nt, Artificial Sequence
  Antisense oligo
ugaggcaggagaaucgcuug

SEQ ID NO: 2034 - RNA, 20 nt, Artificial Sequence
  Antisense oligo
cugaggcaggagaaucgcuu

SEQ ID NO: 2035 - RNA, 20 nt, Artificial Sequence
  Antisense oligo
gcugaggcaggagaaucgcu

SEQ ID NO: 2036 - RNA, 20 nt, Artificial Sequence
  Antisense oligo
aggcugaggcaggagaaucg

SEQ ID NO: 2037 - RNA, 20 nt, Artificial Sequence
  Antisense oligo
gaggcugaggcaggagaauc

SEQ ID NO: 2038 - RNA, 20 nt, Artificial Sequence
  Antisense oligo
ggaggcugaggcaggagaau

SEQ ID NO: 2039 - RNA, 20 nt, Artificial Sequence
  Antisense oligo
augccuguaaucccagcuag

SEQ ID NO: 2040 - RNA, 20 nt, Artificial Sequence
  Antisense oligo
caugccuguaaucccagcua

SEQ ID NO: 2041 - RNA, 20 nt, Artificial Sequence
  Antisense oligo
ugaccaacauggagaaaccc

SEQ ID NO: 2042 - RNA, 20 nt, Artificial Sequence
  Antisense oligo
cugaccaacauggagaaacc

SEQ ID NO: 2043 - RNA, 20 nt, Artificial Sequence
  Antisense oligo
ccugaccaacauggagaaac

SEQ ID NO: 2044 - RNA, 20 nt, Artificial Sequence
  Antisense oligo
gccugaccaacauggagaaa

SEQ ID NO: 2045 - RNA, 20 nt, Artificial Sequence
  Antisense oligo
agccugaccaacauggagaa

SEQ ID NO: 2046 - RNA, 20 nt, Artificial Sequence
  Antisense oligo
cagccugaccaacauggaga

SEQ ID NO: 2047 - RNA, 20 nt, Artificial Sequence
  Antisense oligo
ccagccugaccaacauggag

SEQ ID NO: 2048 - RNA, 20 nt, Artificial Sequence
  Antisense oligo
accagccugaccaacaugga

SEQ ID NO: 2049 - RNA, 20 nt, Artificial Sequence
  Antisense oligo
gaccagccugaccaacaugg

SEQ ID NO: 2050 - RNA, 20 nt, Artificial Sequence
  Antisense oligo
agaccagccugaccaacaug

SEQ ID NO: 2051 - RNA, 20 nt, Artificial Sequence
  Antisense oligo
aagaccagccugaccaacau

SEQ ID NO: 2052 - RNA, 20 nt, Artificial Sequence
  Antisense oligo
caagaccagccugaccaaca

SEQ ID NO: 2053 - RNA, 20 nt, Artificial Sequence
  Antisense oligo
ucaagaccagccugaccaac

SEQ ID NO: 2054 - RNA, 20 nt, Artificial Sequence
  Antisense oligo
uucaagaccagccugaccaa

SEQ ID NO: 2055 - RNA, 20 nt, Artificial Sequence
  Antisense oligo
guucaagaccagccugacca

SEQ ID NO: 2056 - RNA, 20 nt, Artificial Sequence
  Antisense oligo
aguucaagaccagccugacc

SEQ ID NO: 2057 - RNA, 20 nt, Artificial Sequence
  Antisense oligo
gaguucaagaccagccugac

SEQ ID NO: 2058 - RNA, 20 nt, Artificial Sequence
  Antisense oligo
ggaguucaagaccagccuga

SEQ ID NO: 2059 - RNA, 20 nt, Artificial Sequence
  Antisense oligo
aggaguucaagaccagccug

SEQ ID NO: 2060 - RNA, 20 nt, Artificial Sequence
  Antisense oligo
caggaguucaagaccagccu

SEQ ID NO: 2061 - RNA, 20 nt, Artificial Sequence
  Antisense oligo
ucaggaguucaagaccagcc

SEQ ID NO: 2062 - RNA, 20 nt, Artificial Sequence
  Antisense oligo
gucaggaguucaagaccagc

SEQ ID NO: 2063 - RNA, 20 nt, Artificial Sequence
  Antisense oligo
agucaggaguucaagaccag

SEQ ID NO: 2064 - RNA, 20 nt, Artificial Sequence
  Antisense oligo
aagucaggaguucaagacca

SEQ ID NO: 2065 - RNA, 20 nt, Artificial Sequence
  Antisense oligo
gaagucaggaguucaagacc

SEQ ID NO: 2066 - RNA, 20 nt, Artificial Sequence
  Antisense oligo
acuuugggaggcugaggugg

SEQ ID NO: 2067 - RNA, 20 nt, Artificial Sequence
  Antisense oligo
cacuuugggaggcugaggug

SEQ ID NO: 2068 - RNA, 20 nt, Artificial Sequence
  Antisense oligo
gcacuuugggaggcugaggu

SEQ ID NO: 2069 - RNA, 20 nt, Artificial Sequence
  Antisense oligo
agcacuuugggaggcugagg

SEQ ID NO: 2070 - RNA, 20 nt, Artificial Sequence
  Antisense oligo
aaauagggcaggcguggugg

SEQ ID NO: 2071 - RNA, 20 nt, Artificial Sequence
  Antisense oligo
aaaauagggcaggcguggug

SEQ ID NO: 2072 - RNA, 20 nt, Artificial Sequence
  Antisense oligo
cuucugugucaacucuacau

SEQ ID NO: 2073 - RNA, 20 nt, Artificial Sequence
  Antisense oligo
aucuucugugucaacucuac

SEQ ID NO: 2074 - RNA, 20 nt, Artificial Sequence
  Antisense oligo
caucuucugugucaacucua

SEQ ID NO: 2075 - RNA, 20 nt, Artificial Sequence
  Antisense oligo
acaucuucugugucaacucu

SEQ ID NO: 2076 - RNA, 20 nt, Artificial Sequence
  Antisense oligo
cuuguucaagauucccuaga

SEQ ID NO: 2077 - RNA, 20 nt, Artificial Sequence
  Antisense oligo
ugucgguuuucucuuguuca

SEQ ID NO: 2078 - RNA, 20 nt, Artificial Sequence
  Antisense oligo
augucgguuuucucuuguuc

SEQ ID NO: 2079 - RNA, 20 nt, Artificial Sequence
  Antisense oligo
caugucgguuuucucuuguu

SEQ ID NO: 2080 - RNA, 20 nt, Artificial Sequence
  Antisense oligo
ucaugucgguuuucucuugu

SEQ ID NO: 2081 - RNA, 20 nt, Artificial Sequence
  Antisense oligo
uucaugucgguuuucucuug

SEQ ID NO: 2082 - RNA, 20 nt, Artificial Sequence
  Antisense oligo
guucaugucgguuuucucuu

SEQ ID NO: 2083 - RNA, 20 nt, Artificial Sequence
  Antisense oligo
uguucaugucgguuuucucu

SEQ ID NO: 2084 - RNA, 20 nt, Artificial Sequence
  Antisense oligo
uuguucaugucgguuuucuc

SEQ ID NO: 2085 - RNA, 20 nt, Artificial Sequence
  Antisense oligo
cuuguucaugucgguuuucu

SEQ ID NO: 2086 - RNA, 20 nt, Artificial Sequence
  Antisense oligo
ucuuguucaugucgguuuuc

SEQ ID NO: 2087 - RNA, 20 nt, Artificial Sequence
  Antisense oligo
cucuuguucaugucgguuuu

SEQ ID NO: 2088 - RNA, 20 nt, Artificial Sequence
  Antisense oligo
ucucuuguucaugucgguuu

SEQ ID NO: 2089 - RNA, 20 nt, Artificial Sequence
  Antisense oligo
uucucuuguucaugucgguu

SEQ ID NO: 2090 - RNA, 20 nt, Artificial Sequence
  Antisense oligo
guucucuuguucaugucggu

SEQ ID NO: 2091 - RNA, 20 nt, Artificial Sequence
  Antisense oligo
uuguucucuuguucaugucg

SEQ ID NO: 2092 - RNA, 20 nt, Artificial Sequence
  Antisense oligo
ggaaggaucucacagucacc

SEQ ID NO: 2093 - RNA, 20 nt, Artificial Sequence
  Antisense oligo
cucucucuuugaggaaggau

SEQ ID NO: 2094 - RNA, 20 nt, Artificial Sequence
  Antisense oligo
ucucucucucucuuugagga

SEQ ID NO: 2095 - RNA, 20 nt, Artificial Sequence
  Antisense oligo
cucucucucucucuuugagg

SEQ ID NO: 2096 - RNA, 20 nt, Artificial Sequence
  Antisense oligo
ucucucucucucucuuugag

SEQ ID NO: 2097 - RNA, 20 nt, Artificial Sequence
  Antisense oligo
uucucucucucucucuuuga

SEQ ID NO: 2098 - RNA, 20 nt, Artificial Sequence
  Antisense oligo
cuucucucucucucucuuug

SEQ ID NO: 2099 - RNA, 20 nt, Artificial Sequence
  Antisense oligo
ccuucucucucucucucuuu

SEQ ID NO: 2100 - RNA, 20 nt, Artificial Sequence
  Antisense oligo
uccuucucucucucucucuu

SEQ ID NO: 2101 - RNA, 20 nt, Artificial Sequence
  Antisense oligo
uuccuucucucucucucucu

SEQ ID NO: 2102 - RNA, 20 nt, Artificial Sequence
  Antisense oligo
cuuccuucucucucucucuc

SEQ ID NO: 2103 - RNA, 20 nt, Artificial Sequence
  Antisense oligo
uccuuccuuccuucucucuc

SEQ ID NO: 2104 - RNA, 20 nt, Artificial Sequence
  Antisense oligo
uuccuuccuuccuucucucu

SEQ ID NO: 2105 - RNA, 20 nt, Artificial Sequence
  Antisense oligo
uuuccuuccuuccuucucuc

SEQ ID NO: 2106 - RNA, 20 nt, Artificial Sequence
  Antisense oligo
cuuuccuuccuuccuucucu

SEQ ID NO: 2107 - RNA, 20 nt, Artificial Sequence
  Antisense oligo
ucuuuccuuccuuccuucuc

SEQ ID NO: 2108 - RNA, 20 nt, Artificial Sequence
  Antisense oligo
gucuuuccuuccuuccuucu

SEQ ID NO: 2109 - RNA, 20 nt, Artificial Sequence
  Antisense oligo
ugucuuuccuuccuuccuuc

SEQ ID NO: 2110 - RNA, 20 nt, Artificial Sequence
  Antisense oligo
uugucuuuccuuccuuccuu

SEQ ID NO: 2111 - RNA, 20 nt, Artificial Sequence
  Antisense oligo
auugucuuuccuuccuuccu

SEQ ID NO: 2112 - RNA, 20 nt, Artificial Sequence
  Antisense oligo
uauugucuuuccuuccuucc

SEQ ID NO: 2113 - RNA, 20 nt, Artificial Sequence
  Antisense oligo
uuucuccacauccucaucaa

SEQ ID NO: 2114 - RNA, 20 nt, Artificial Sequence
  Antisense oligo
auuucuccacauccucauca

SEQ ID NO: 2115 - RNA, 20 nt, Artificial Sequence
  Antisense oligo
aauuucuccacauccucauc

SEQ ID NO: 2116 - RNA, 20 nt, Artificial Sequence
  Antisense oligo
caauuucuccacauccucau

SEQ ID NO: 2117 - RNA, 20 nt, Artificial Sequence
  Antisense oligo
ccaauuucuccacauccuca

SEQ ID NO: 2118 - RNA, 20 nt, Artificial Sequence
  Antisense oligo
uccaauuucuccacauccuc

SEQ ID NO: 2119 - RNA, 20 nt, Artificial Sequence
  Antisense oligo
cagcguuuaacauuuccacc

SEQ ID NO: 2120 - RNA, 20 nt, Artificial Sequence
  Antisense oligo
uaacuuuuggaucaacugcc

SEQ ID NO: 2121 - RNA, 20 nt, Artificial Sequence
  Antisense oligo
guaacuuuuggaucaacugc

SEQ ID NO: 2122 - RNA, 20 nt, Artificial Sequence
  Antisense oligo
cguaacuuuuggaucaacug

SEQ ID NO: 2123 - RNA, 20 nt, Artificial Sequence
  Antisense oligo
gcguaacuuuuggaucaacu

SEQ ID NO: 2124 - RNA, 20 nt, Artificial Sequence
  Antisense oligo
ugcguaacuuuuggaucaac

SEQ ID NO: 2125 - RNA, 20 nt, Artificial Sequence
  Antisense oligo
ggaugacaggugugagccac

SEQ ID NO: 2126 - RNA, 20 nt, Artificial Sequence
  Antisense oligo
ccaaagugcugggaugacag

SEQ ID NO: 2127 - RNA, 20 nt, Artificial Sequence
  Antisense oligo
ccucagccucccaaagugcu

SEQ ID NO: 2128 - RNA, 20 nt, Artificial Sequence
  Antisense oligo
accucagccucccaaagugc

SEQ ID NO: 2129 - RNA, 20 nt, Artificial Sequence
  Antisense oligo
caccucagccucccaaagug

SEQ ID NO: 2130 - RNA, 20 nt, Artificial Sequence
  Antisense oligo
ccaccucagccucccaaagu

SEQ ID NO: 2131 - RNA, 20 nt, Artificial Sequence
  Antisense oligo
acccaccucagccucccaaa

SEQ ID NO: 2132 - RNA, 20 nt, Artificial Sequence
  Antisense oligo
ugauccacccaccucagccu

SEQ ID NO: 2133 - RNA, 20 nt, Artificial Sequence
  Antisense oligo
ucgugauccacccaccucag

SEQ ID NO: 2134 - RNA, 20 nt, Artificial Sequence
  Antisense oligo
cucgugauccacccaccuca

SEQ ID NO: 2135 - RNA, 20 nt, Artificial Sequence
  Antisense oligo
accucgugauccacccaccu

SEQ ID NO: 2136 - RNA, 20 nt, Artificial Sequence
  Antisense oligo
ugaccucgugauccacccac

SEQ ID NO: 2137 - RNA, 20 nt, Artificial Sequence
  Antisense oligo
cugaccucgugauccaccca

SEQ ID NO: 2138 - RNA, 20 nt, Artificial Sequence
  Antisense oligo
uccugaccucgugauccacc

SEQ ID NO: 2139 - RNA, 20 nt, Artificial Sequence
  Antisense oligo
cuccugaccucgugauccac

SEQ ID NO: 2140 - RNA, 20 nt, Artificial Sequence
  Antisense oligo
ucuccugaccucgugaucca

SEQ ID NO: 2141 - RNA, 20 nt, Artificial Sequence
  Antisense oligo
aucuccugaccucgugaucc

SEQ ID NO: 2142 - RNA, 20 nt, Artificial Sequence
  Antisense oligo
aaucuccugaccucgugauc

SEQ ID NO: 2143 - RNA, 20 nt, Artificial Sequence
  Antisense oligo
caaucuccugaccucgugau

SEQ ID NO: 2144 - RNA, 20 nt, Artificial Sequence
  Antisense oligo
acaaucuccugaccucguga

SEQ ID NO: 2145 - RNA, 20 nt, Artificial Sequence
  Antisense oligo
cacaaucuccugaccucgug

SEQ ID NO: 2146 - RNA, 20 nt, Artificial Sequence
  Antisense oligo
ucacaaucuccugaccucgu

SEQ ID NO: 2147 - RNA, 20 nt, Artificial Sequence
  Antisense oligo
uucacaaucuccugaccucg

SEQ ID NO: 2148 - RNA, 20 nt, Artificial Sequence
  Antisense oligo
guucacaaucuccugaccuc

SEQ ID NO: 2149 - RNA, 20 nt, Artificial Sequence
  Antisense oligo
uguucacaaucuccugaccu

SEQ ID NO: 2150 - RNA, 20 nt, Artificial Sequence
  Antisense oligo
auguucacaaucuccugacc

SEQ ID NO: 2151 - RNA, 20 nt, Artificial Sequence
  Antisense oligo
caccacgcccagcuaauuuu

SEQ ID NO: 2152 - RNA, 20 nt, Artificial Sequence
  Antisense oligo
ccaccacgcccagcuaauuu

SEQ ID NO: 2153 - RNA, 20 nt, Artificial Sequence
  Antisense oligo
gccaccacgcccagcuaauu

SEQ ID NO: 2154 - RNA, 20 nt, Artificial Sequence
  Antisense oligo
ugauucuccugccucagccg

SEQ ID NO: 2155 - RNA, 20 nt, Artificial Sequence
  Antisense oligo
gugauucuccugccucagcc

SEQ ID NO: 2156 - RNA, 20 nt, Artificial Sequence
  Antisense oligo
agugauucuccugccucagc

SEQ ID NO: 2157 - RNA, 20 nt, Artificial Sequence
  Antisense oligo
aagugauucuccugccucag

SEQ ID NO: 2158 - RNA, 20 nt, Artificial Sequence
  Antisense oligo
caagugauucuccugccuca

SEQ ID NO: 2159 - RNA, 20 nt, Artificial Sequence
  Antisense oligo
ucaagugauucuccugccuc

SEQ ID NO: 2160 - RNA, 20 nt, Artificial Sequence
  Antisense oligo
uucaagugauucuccugccu

SEQ ID NO: 2161 - RNA, 20 nt, Artificial Sequence
  Antisense oligo
guucaagugauucuccugcc

SEQ ID NO: 2162 - RNA, 20 nt, Artificial Sequence
  Antisense oligo
gguucaagugauucuccugc

SEQ ID NO: 2163 - RNA, 20 nt, Artificial Sequence
  Antisense oligo
ggguucaagugauucuccug

SEQ ID NO: 2164 - RNA, 20 nt, Artificial Sequence
  Antisense oligo
cggguucaagugauucuccu

SEQ ID NO: 2165 - RNA, 20 nt, Artificial Sequence
  Antisense oligo
ccggguucaagugauucucc

SEQ ID NO: 2166 - RNA, 20 nt, Artificial Sequence
  Antisense oligo
gaucucggcucacugaaacc

SEQ ID NO: 2167 - RNA, 20 nt, Artificial Sequence
  Antisense oligo
cgaucucggcucacugaaac

SEQ ID NO: 2168 - RNA, 20 nt, Artificial Sequence
  Antisense oligo
gcgaucucggcucacugaaa

SEQ ID NO: 2169 - RNA, 20 nt, Artificial Sequence
  Antisense oligo
ugcgaucucggcucacugaa

SEQ ID NO: 2170 - RNA, 20 nt, Artificial Sequence
  Antisense oligo
gugcgaucucggcucacuga

SEQ ID NO: 2171 - RNA, 20 nt, Artificial Sequence
  Antisense oligo
uggugcgaucucggcucacu

SEQ ID NO: 2172 - RNA, 20 nt, Artificial Sequence
  Antisense oligo
aguggugcgaucucggcuca

SEQ ID NO: 2173 - RNA, 20 nt, Artificial Sequence
  Antisense oligo
agugcaguggugcgaucucg

SEQ ID NO: 2174 - RNA, 20 nt, Artificial Sequence
  Antisense oligo
gagugcaguggugcgaucuc

SEQ ID NO: 2175 - RNA, 20 nt, Artificial Sequence
  Antisense oligo
ggagugcaguggugcgaucu

SEQ ID NO: 2176 - RNA, 20 nt, Artificial Sequence
  Antisense oligo
uggagugcaguggugcgauc

SEQ ID NO: 2177 - RNA, 20 nt, Artificial Sequence
  Antisense oligo
cuggagugcaguggugcgau

SEQ ID NO: 2178 - RNA, 20 nt, Artificial Sequence
  Antisense oligo
uugccaggcuggagugcagu

SEQ ID NO: 2179 - RNA, 20 nt, Artificial Sequence
  Antisense oligo
uguugccaggcuggagugca

SEQ ID NO: 2180 - RNA, 20 nt, Artificial Sequence
  Antisense oligo
ucucgcucuguugccaggcu

SEQ ID NO: 2181 - RNA, 20 nt, Artificial Sequence
  Antisense oligo
agucucgcucuguugccagg

SEQ ID NO: 2182 - RNA, 20 nt, Artificial Sequence
  Antisense oligo
gagucucgcucuguugccag

SEQ ID NO: 2183 - RNA, 20 nt, Artificial Sequence
  Antisense oligo
ugagucucgcucuguugcca

SEQ ID NO: 2184 - RNA, 20 nt, Artificial Sequence
  Antisense oligo
gugagucucgcucuguugcc

SEQ ID NO: 2185 - RNA, 20 nt, Artificial Sequence
  Antisense oligo
agugagucucgcucuguugc

SEQ ID NO: 2186 - RNA, 20 nt, Artificial Sequence
  Antisense oligo
gagugagucucgcucuguug

SEQ ID NO: 2187 - RNA, 20 nt, Artificial Sequence
  Antisense oligo
cuuuguuuugagagugaguc

SEQ ID NO: 2188 - RNA, 20 nt, Artificial Sequence
  Antisense oligo
gcuuuguuuugagagugagu

SEQ ID NO: 2189 - RNA, 20 nt, Artificial Sequence
  Antisense oligo
cacagauccauaucguauuc

SEQ ID NO: 2190 - RNA, 20 nt, Artificial Sequence
  Antisense oligo
gcacagauccauaucguauu

SEQ ID NO: 2191 - RNA, 20 nt, Artificial Sequence
  Antisense oligo
agcacagauccauaucguau

SEQ ID NO: 2192 - RNA, 20 nt, Artificial Sequence
  Antisense oligo
cagcacagauccauaucgua

SEQ ID NO: 2193 - RNA, 20 nt, Artificial Sequence
  Antisense oligo
cuacagcacagauccauauc

SEQ ID NO: 2194 - RNA, 20 nt, Artificial Sequence
  Antisense oligo
gcuacagcacagauccauau

SEQ ID NO: 2195 - RNA, 20 nt, Artificial Sequence
  Antisense oligo
ggcuacagcacagauccaua

SEQ ID NO: 2196 - RNA, 20 nt, Artificial Sequence
  Antisense oligo
aggcuacagcacagauccau

SEQ ID NO: 2197 - RNA, 20 nt, Artificial Sequence
  Antisense oligo
caggcuacagcacagaucca

SEQ ID NO: 2198 - RNA, 20 nt, Artificial Sequence
  Antisense oligo
uccaggcuacagcacagauc

SEQ ID NO: 2199 - RNA, 20 nt, Artificial Sequence
  Antisense oligo
auccaggcuacagcacagau

SEQ ID NO: 2200 - RNA, 20 nt, Artificial Sequence
  Antisense oligo
cauccaggcuacagcacaga

SEQ ID NO: 2201 - RNA, 20 nt, Artificial Sequence
  Antisense oligo
guccauccaggcuacagcac

SEQ ID NO: 2202 - RNA, 20 nt, Artificial Sequence
  Antisense oligo
gguccauccaggcuacagca

SEQ ID NO: 2203 - RNA, 20 nt, Artificial Sequence
  Antisense oligo
uggccucuuguaucuggcuu

SEQ ID NO: 2204 - RNA, 20 nt, Artificial Sequence
  Antisense oligo
auggccucuuguaucuggcu

SEQ ID NO: 2205 - RNA, 20 nt, Artificial Sequence
  Antisense oligo
cauggccucuuguaucuggc

SEQ ID NO: 2206 - RNA, 20 nt, Artificial Sequence
  Antisense oligo
acauggccucuuguaucugg

SEQ ID NO: 2207 - RNA, 20 nt, Artificial Sequence
  Antisense oligo
aaucauacauggccucuugu

SEQ ID NO: 2208 - RNA, 20 nt, Artificial Sequence
  Antisense oligo
ggaaucauacauggccucuu

SEQ ID NO: 2209 - RNA, 20 nt, Artificial Sequence
  Antisense oligo
caaaggaaucauacauggcc

SEQ ID NO: 2210 - RNA, 20 nt, Artificial Sequence
  Antisense oligo
ucaaaggaaucauacauggc

SEQ ID NO: 2211 - RNA, 20 nt, Artificial Sequence
  Antisense oligo
cagcaaugacucccuccucc

SEQ ID NO: 2212 - RNA, 20 nt, Artificial Sequence
  Antisense oligo
acagcaaugacucccuccuc

SEQ ID NO: 2213 - RNA, 20 nt, Artificial Sequence
  Antisense oligo
ucccacagcaaugacucccu

SEQ ID NO: 2214 - RNA, 20 nt, Artificial Sequence
  Antisense oligo
aaaucccacagcaaugacuc

SEQ ID NO: 2215 - RNA, 20 nt, Artificial Sequence
  Antisense oligo
gaaaucccacagcaaugacu

SEQ ID NO: 2216 - RNA, 20 nt, Artificial Sequence
  Antisense oligo
aagaaaucccacagcaauga

SEQ ID NO: 2217 - RNA, 20 nt, Artificial Sequence
  Antisense oligo
aucccagaaagaaaucccac

SEQ ID NO: 2218 - RNA, 20 nt, Artificial Sequence
  Antisense oligo
cuucaucccagaaagaaauc

SEQ ID NO: 2219 - RNA, 20 nt, Artificial Sequence
  Antisense oligo
ccuaguucccauuuucuuca

SEQ ID NO: 2220 - RNA, 20 nt, Artificial Sequence
  Antisense oligo
ggauuacaggugagaagcca

SEQ ID NO: 2221 - RNA, 20 nt, Artificial Sequence
  Antisense oligo
gggauuacaggugagaagcc

SEQ ID NO: 2222 - RNA, 20 nt, Artificial Sequence
  Antisense oligo
ugaccucaagugauccaccc

SEQ ID NO: 2223 - RNA, 20 nt, Artificial Sequence
  Antisense oligo
cugaccucaagugauccacc

SEQ ID NO: 2224 - RNA, 20 nt, Artificial Sequence
  Antisense oligo
ccugaccucaagugauccac

SEQ ID NO: 2225 - RNA, 20 nt, Artificial Sequence
  Antisense oligo
uccugaccucaagugaucca

SEQ ID NO: 2226 - RNA, 20 nt, Artificial Sequence
  Antisense oligo
cuccugaccucaagugaucc

SEQ ID NO: 2227 - RNA, 20 nt, Artificial Sequence
  Antisense oligo
acuccugaccucaagugauc

SEQ ID NO: 2228 - RNA, 20 nt, Artificial Sequence
  Antisense oligo
aacuccugaccucaagugau

SEQ ID NO: 2229 - RNA, 20 nt, Artificial Sequence
  Antisense oligo
gaacuccugaccucaaguga

SEQ ID NO: 2230 - RNA, 20 nt, Artificial Sequence
  Antisense oligo
ugaacuccugaccucaagug

SEQ ID NO: 2231 - RNA, 20 nt, Artificial Sequence
  Antisense oligo
gucuugaacuccugaccuca

SEQ ID NO: 2232 - RNA, 20 nt, Artificial Sequence
  Antisense oligo
guuggucuugaacuccugac

SEQ ID NO: 2233 - RNA, 20 nt, Artificial Sequence
  Antisense oligo
gguuggucuugaacuccuga

SEQ ID NO: 2234 - RNA, 20 nt, Artificial Sequence
  Antisense oligo
agguuggucuugaacuccug

SEQ ID NO: 2235 - RNA, 20 nt, Artificial Sequence
  Antisense oligo
cagguuggucuugaacuccu

SEQ ID NO: 2236 - RNA, 20 nt, Artificial Sequence
  Antisense oligo
cugggauuacaggcaagcac

SEQ ID NO: 2237 - RNA, 20 nt, Artificial Sequence
  Antisense oligo
gcugggauuacaggcaagca

SEQ ID NO: 2238 - RNA, 20 nt, Artificial Sequence
  Antisense oligo
agcugggauuacaggcaagc

SEQ ID NO: 2239 - RNA, 20 nt, Artificial Sequence
  Antisense oligo
uagcugggauuacaggcaag

SEQ ID NO: 2240 - RNA, 20 nt, Artificial Sequence
  Antisense oligo
guagcugggauuacaggcaa

SEQ ID NO: 2241 - RNA, 20 nt, Artificial Sequence
  Antisense oligo
aguagcugggauuacaggca

SEQ ID NO: 2242 - RNA, 20 nt, Artificial Sequence
  Antisense oligo
gaguagcugggauuacaggc

SEQ ID NO: 2243 - RNA, 20 nt, Artificial Sequence
  Antisense oligo
ugaguagcugggauuacagg

SEQ ID NO: 2244 - RNA, 20 nt, Artificial Sequence
  Antisense oligo
cugaguagcugggauuacag

SEQ ID NO: 2245 - RNA, 20 nt, Artificial Sequence
  Antisense oligo
ccugaguagcugggauuaca

SEQ ID NO: 2246 - RNA, 20 nt, Artificial Sequence
  Antisense oligo
uccugaguagcugggauuac

SEQ ID NO: 2247 - RNA, 20 nt, Artificial Sequence
  Antisense oligo
cuccugaguagcugggauua

SEQ ID NO: 2248 - RNA, 20 nt, Artificial Sequence
  Antisense oligo
ccuccugaguagcugggauu

SEQ ID NO: 2249 - RNA, 20 nt, Artificial Sequence
  Antisense oligo
accuccugaguagcugggau

SEQ ID NO: 2250 - RNA, 20 nt, Artificial Sequence
  Antisense oligo
aaccuccugaguagcuggga

SEQ ID NO: 2251 - RNA, 20 nt, Artificial Sequence
  Antisense oligo
caaccuccugaguagcuggg

SEQ ID NO: 2252 - RNA, 20 nt, Artificial Sequence
  Antisense oligo
ucaaccuccugaguagcugg

SEQ ID NO: 2253 - RNA, 20 nt, Artificial Sequence
  Antisense oligo
auucuccugccucaaccucc

SEQ ID NO: 2254 - RNA, 20 nt, Artificial Sequence
  Antisense oligo
aauucuccugccucaaccuc

SEQ ID NO: 2255 - RNA, 20 nt, Artificial Sequence
  Antisense oligo
caauucuccugccucaaccu

SEQ ID NO: 2256 - RNA, 20 nt, Artificial Sequence
  Antisense oligo
gcaauucuccugccucaacc

SEQ ID NO: 2257 - RNA, 20 nt, Artificial Sequence
  Antisense oligo
agcaauucuccugccucaac

SEQ ID NO: 2258 - RNA, 20 nt, Artificial Sequence
  Antisense oligo
aagcaauucuccugccucaa

SEQ ID NO: 2259 - RNA, 20 nt, Artificial Sequence
  Antisense oligo
caagcaauucuccugccuca

SEQ ID NO: 2260 - RNA, 20 nt, Artificial Sequence
  Antisense oligo
ucaagcaauucuccugccuc

SEQ ID NO: 2261 - RNA, 20 nt, Artificial Sequence
  Antisense oligo
uucaagcaauucuccugccu

SEQ ID NO: 2262 - RNA, 20 nt, Artificial Sequence
  Antisense oligo
guucaagcaauucuccugcc

SEQ ID NO: 2263 - RNA, 20 nt, Artificial Sequence
  Antisense oligo
gguucaagcaauucuccugc

SEQ ID NO: 2264 - RNA, 20 nt, Artificial Sequence
  Antisense oligo
agguucaagcaauucuccug

SEQ ID NO: 2265 - RNA, 20 nt, Artificial Sequence
  Antisense oligo
uagguucaagcaauucuccu

SEQ ID NO: 2266 - RNA, 20 nt, Artificial Sequence
  Antisense oligo
cuagguucaagcaauucucc

SEQ ID NO: 2267 - RNA, 20 nt, Artificial Sequence
  Antisense oligo
cugcaaccucugccuccuag

SEQ ID NO: 2268 - RNA, 20 nt, Artificial Sequence
  Antisense oligo
acugcaaccucugccuccua

SEQ ID NO: 2269 - RNA, 20 nt, Artificial Sequence
  Antisense oligo
cacugcaaccucugccuccu

SEQ ID NO: 2270 - RNA, 20 nt, Artificial Sequence
  Antisense oligo
ucacugcaaccucugccucc

SEQ ID NO: 2271 - RNA, 20 nt, Artificial Sequence
  Antisense oligo
cucacugcaaccucugccuc

SEQ ID NO: 2272 - RNA, 20 nt, Artificial Sequence
  Antisense oligo
gcucacugcaaccucugccu

SEQ ID NO: 2273 - RNA, 20 nt, Artificial Sequence
  Antisense oligo
ucggcucacugcaaccucug

SEQ ID NO: 2274 - RNA, 20 nt, Artificial Sequence
  Antisense oligo
cucggcucacugcaaccucu

SEQ ID NO: 2275 - RNA, 20 nt, Artificial Sequence
  Antisense oligo
ucucggcucacugcaaccuc

SEQ ID NO: 2276 - RNA, 20 nt, Artificial Sequence
  Antisense oligo
aucucggcucacugcaaccu

SEQ ID NO: 2277 - RNA, 20 nt, Artificial Sequence
  Antisense oligo
aaucucggcucacugcaacc

SEQ ID NO: 2278 - RNA, 20 nt, Artificial Sequence
  Antisense oligo
caaucucggcucacugcaac

SEQ ID NO: 2279 - RNA, 20 nt, Artificial Sequence
  Antisense oligo
ucaaucucggcucacugcaa

SEQ ID NO: 2280 - RNA, 20 nt, Artificial Sequence
  Antisense oligo
cucaaucucggcucacugca

SEQ ID NO: 2281 - RNA, 20 nt, Artificial Sequence
  Antisense oligo
ucucaaucucggcucacugc

SEQ ID NO: 2282 - RNA, 20 nt, Artificial Sequence
  Antisense oligo
gucucaaucucggcucacug

SEQ ID NO: 2283 - RNA, 20 nt, Artificial Sequence
  Antisense oligo
ugucucaaucucggcucacu

SEQ ID NO: 2284 - RNA, 20 nt, Artificial Sequence
  Antisense oligo
gugucucaaucucggcucac

SEQ ID NO: 2285 - RNA, 20 nt, Artificial Sequence
  Antisense oligo
ggugucucaaucucggcuca

SEQ ID NO: 2286 - RNA, 20 nt, Artificial Sequence
  Antisense oligo
cggugucucaaucucggcuc

SEQ ID NO: 2287 - RNA, 20 nt, Artificial Sequence
  Antisense oligo
gcggugucucaaucucggcu

SEQ ID NO: 2288 - RNA, 20 nt, Artificial Sequence
  Antisense oligo
ugcggugucucaaucucggc

SEQ ID NO: 2289 - RNA, 20 nt, Artificial Sequence
  Antisense oligo
gugcggugucucaaucucgg

SEQ ID NO: 2290 - RNA, 20 nt, Artificial Sequence
  Antisense oligo
agugcggugucucaaucucg

SEQ ID NO: 2291 - RNA, 20 nt, Artificial Sequence
  Antisense oligo
gagugcggugucucaaucuc

SEQ ID NO: 2292 - RNA, 20 nt, Artificial Sequence
  Antisense oligo
uucucucauguguggauaug

SEQ ID NO: 2293 - RNA, 20 nt, Artificial Sequence
  Antisense oligo
acuucucucauguguggaua

SEQ ID NO: 2294 - RNA, 20 nt, Artificial Sequence
  Antisense oligo
aacuucucucauguguggau

SEQ ID NO: 2295 - RNA, 20 nt, Artificial Sequence
  Antisense oligo
gaacuucucucaugugugga

SEQ ID NO: 2296 - RNA, 20 nt, Artificial Sequence
  Antisense oligo
ucugaacuucucucaugugu

SEQ ID NO: 2297 - RNA, 20 nt, Artificial Sequence
  Antisense oligo
cucugaacuucucucaugug

SEQ ID NO: 2298 - RNA, 20 nt, Artificial Sequence
  Antisense oligo
acucugaacuucucucaugu

SEQ ID NO: 2299 - RNA, 20 nt, Artificial Sequence
  Antisense oligo
ucaccuguguauucacucug

SEQ ID NO: 2300 - RNA, 20 nt, Artificial Sequence
  Antisense oligo
gcauucaccuguguauucac

SEQ ID NO: 2301 - RNA, 20 nt, Artificial Sequence
  Antisense oligo
ucggcauucaccuguguauu

SEQ ID NO: 2302 - RNA, 20 nt, Artificial Sequence
  Antisense oligo
aucggcauucaccuguguau

SEQ ID NO: 2303 - RNA, 20 nt, Artificial Sequence
  Antisense oligo
caucggcauucaccugugua

SEQ ID NO: 2304 - RNA, 20 nt, Artificial Sequence
  Antisense oligo
ccaucggcauucaccugugu

SEQ ID NO: 2305 - RNA, 20 nt, Artificial Sequence
  Antisense oligo
cccaucggcauucaccugug

SEQ ID NO: 2306 - RNA, 20 nt, Artificial Sequence
  Antisense oligo
uaaacucaucaccagagaca

SEQ ID NO: 2307 - RNA, 20 nt, Artificial Sequence
  Antisense oligo
aauucaauaggcucccugug

SEQ ID NO: 2308 - RNA, 20 nt, Artificial Sequence
  Antisense oligo
auacacugcucucagcuuca

SEQ ID NO: 2309 - RNA, 20 nt, Artificial Sequence
  Antisense oligo
cauacacugcucucagcuuc

SEQ ID NO: 2310 - RNA, 20 nt, Artificial Sequence
  Antisense oligo
gcauacacugcucucagcuu

SEQ ID NO: 2311 - RNA, 20 nt, Artificial Sequence
  Antisense oligo
cgcauacacugcucucagcu

SEQ ID NO: 2312 - RNA, 20 nt, Artificial Sequence
  Antisense oligo
acgcauacacugcucucagc

SEQ ID NO: 2313 - RNA, 20 nt, Artificial Sequence
  Antisense oligo
cacgcauacacugcucucag

SEQ ID NO: 2314 - RNA, 20 nt, Artificial Sequence
  Antisense oligo
ucacgcauacacugcucuca

SEQ ID NO: 2315 - RNA, 20 nt, Artificial Sequence
  Antisense oligo
uucacgcauacacugcucuc

SEQ ID NO: 2316 - RNA, 20 nt, Artificial Sequence
  Antisense oligo
aggacugaccaccugacucu

SEQ ID NO: 2317 - RNA, 20 nt, Artificial Sequence
  Antisense oligo
gaggacugaccaccugacuc

SEQ ID NO: 2318 - RNA, 20 nt, Artificial Sequence
  Antisense oligo
ugaggacugaccaccugacu

SEQ ID NO: 2319 - RNA, 20 nt, Artificial Sequence
  Antisense oligo
gugaggacugaccaccugac

SEQ ID NO: 2320 - RNA, 20 nt, Artificial Sequence
  Antisense oligo
ugcaggugaggacugaccac

SEQ ID NO: 2321 - RNA, 20 nt, Artificial Sequence
  Antisense oligo
caaguggaggauggcugugc

SEQ ID NO: 2322 - RNA, 20 nt, Artificial Sequence
  Antisense oligo
ccaaguggaggauggcugug

SEQ ID NO: 2323 - RNA, 20 nt, Artificial Sequence
  Antisense oligo
gccaccaaaggagaggccaa

SEQ ID NO: 2324 - RNA, 20 nt, Artificial Sequence
  Antisense oligo
guuagucagcaaccagcggc

SEQ ID NO: 2325 - RNA, 20 nt, Artificial Sequence
  Antisense oligo
uguuagucagcaaccagcgg

SEQ ID NO: 2326 - RNA, 20 nt, Artificial Sequence
  Antisense oligo
cuguuagucagcaaccagcg

SEQ ID NO: 2327 - RNA, 20 nt, Artificial Sequence
  Antisense oligo
cacccuguuagucagcaacc

SEQ ID NO: 2328 - RNA, 20 nt, Artificial Sequence
  Antisense oligo
acacccuguuagucagcaac

SEQ ID NO: 2329 - RNA, 20 nt, Artificial Sequence
  Antisense oligo
gacacccuguuagucagcaa

SEQ ID NO: 2330 - RNA, 20 nt, Artificial Sequence
  Antisense oligo
ggacacccuguuagucagca

SEQ ID NO: 2331 - RNA, 20 nt, Artificial Sequence
  Antisense oligo
aggacacccuguuagucagc

SEQ ID NO: 2332 - RNA, 20 nt, Artificial Sequence
  Antisense oligo
aaggacacccuguuagucag

SEQ ID NO: 2333 - RNA, 20 nt, Artificial Sequence
  Antisense oligo
acaaaggacacccuguuagu

SEQ ID NO: 2334 - RNA, 20 nt, Artificial Sequence
  Antisense oligo
cacaaaggacacccuguuag

SEQ ID NO: 2335 - RNA, 20 nt, Artificial Sequence
  Antisense oligo
aagcccaguagccucuccag

SEQ ID NO: 2336 - RNA, 20 nt, Artificial Sequence
  Antisense oligo
guacaacccagcagccaagc

SEQ ID NO: 2337 - RNA, 20 nt, Artificial Sequence
  Antisense oligo
aaguacaacccagcagccaa

SEQ ID NO: 2338 - RNA, 20 nt, Artificial Sequence
  Antisense oligo
gaaguacaacccagcagcca

SEQ ID NO: 2339 - RNA, 20 nt, Artificial Sequence
  Antisense oligo
caggaaguacaacccagcag

SEQ ID NO: 2340 - RNA, 20 nt, Artificial Sequence
  Antisense oligo
acaggaaguacaacccagca

SEQ ID NO: 2341 - RNA, 20 nt, Artificial Sequence
  Antisense oligo
cacaggaaguacaacccagc

SEQ ID NO: 2342 - RNA, 20 nt, Artificial Sequence
  Antisense oligo
gccuccaacccaaaugaccc

SEQ ID NO: 2343 - RNA, 20 nt, Artificial Sequence
  Antisense oligo
ugccuccaacccaaaugacc

SEQ ID NO: 2344 - RNA, 20 nt, Artificial Sequence
  Antisense oligo
cgaugccuccaacccaaaug

SEQ ID NO: 2345 - RNA, 20 nt, Artificial Sequence
  Antisense oligo
ccgaugccuccaacccaaau

SEQ ID NO: 2346 - RNA, 20 nt, Artificial Sequence
  Antisense oligo
gccgaugccuccaacccaaa

SEQ ID NO: 2347 - RNA, 20 nt, Artificial Sequence
  Antisense oligo
ugccgaugccuccaacccaa

SEQ ID NO: 2348 - RNA, 20 nt, Artificial Sequence
  Antisense oligo
gaaaggaagcuccaccagca

SEQ ID NO: 2349 - RNA, 20 nt, Artificial Sequence
  Antisense oligo
ggaaaggaagcuccaccagc

SEQ ID NO: 2350 - RNA, 20 nt, Artificial Sequence
  Antisense oligo
aggaaaggaagcuccaccag

SEQ ID NO: 2351 - RNA, 20 nt, Artificial Sequence
  Antisense oligo
gaggaaaggaagcuccacca

SEQ ID NO: 2352 - RNA, 20 nt, Artificial Sequence
  Antisense oligo
cugaggaaaggaagcuccac

SEQ ID NO: 2353 - RNA, 20 nt, Artificial Sequence
  Antisense oligo
gcugaggaaaggaagcucca

SEQ ID NO: 2354 - RNA, 20 nt, Artificial Sequence
  Antisense oligo
cgggagaccucacagcaaga

SEQ ID NO: 2355 - RNA, 20 nt, Artificial Sequence
  Antisense oligo
uccgacaccucccuuccaca

SEQ ID NO: 2356 - RNA, 20 nt, Artificial Sequence
  Antisense oligo
cauccgacaccucccuucca

SEQ ID NO: 2357 - RNA, 20 nt, Artificial Sequence
  Antisense oligo
ucauccgacaccucccuucc

SEQ ID NO: 2358 - RNA, 20 nt, Artificial Sequence
  Antisense oligo
cucauccgacaccucccuuc

SEQ ID NO: 2359 - RNA, 20 nt, Artificial Sequence
  Antisense oligo
gcucauccgacaccucccuu

SEQ ID NO: 2360 - RNA, 20 nt, Artificial Sequence
  Antisense oligo
ugcucauccgacaccucccu

SEQ ID NO: 2361 - RNA, 20 nt, Artificial Sequence
  Antisense oligo
augcucauccgacaccuccc

SEQ ID NO: 2362 - RNA, 20 nt, Artificial Sequence
  Antisense oligo
caugcucauccgacaccucc

SEQ ID NO: 2363 - RNA, 20 nt, Artificial Sequence
  Antisense oligo
ccagaagguauaggcaggcc

SEQ ID NO: 2364 - RNA, 20 nt, Artificial Sequence
  Antisense oligo
cccagaagguauaggcaggc

SEQ ID NO: 2365 - RNA, 20 nt, Artificial Sequence
  Antisense oligo
acccagaagguauaggcagg

SEQ ID NO: 2366 - RNA, 20 nt, Artificial Sequence
  Antisense oligo
cgacccagaagguauaggca

SEQ ID NO: 2367 - RNA, 20 nt, Artificial Sequence
  Antisense oligo
ccgacccagaagguauaggc

SEQ ID NO: 2368 - RNA, 20 nt, Artificial Sequence
  Antisense oligo
accgacccagaagguauagg

SEQ ID NO: 2369 - RNA, 20 nt, Artificial Sequence
  Antisense oligo
gaccgacccagaagguauag

SEQ ID NO: 2370 - RNA, 20 nt, Artificial Sequence
  Antisense oligo
agaccgacccagaagguaua

SEQ ID NO: 2371 - RNA, 20 nt, Artificial Sequence
  Antisense oligo
gagaccgacccagaagguau

SEQ ID NO: 2372 - RNA, 20 nt, Artificial Sequence
  Antisense oligo
agagaccgacccagaaggua

SEQ ID NO: 2373 - RNA, 20 nt, Artificial Sequence
  Antisense oligo
cagagaccgacccagaaggu

SEQ ID NO: 2374 - RNA, 20 nt, Artificial Sequence
  Antisense oligo
ugcagagaccgacccagaag

SEQ ID NO: 2375 - RNA, 20 nt, Artificial Sequence
  Antisense oligo
cucagagcacagaugcacug

SEQ ID NO: 2376 - RNA, 20 nt, Artificial Sequence
  Antisense oligo
ccuuggcuugugcucagagc

SEQ ID NO: 2377 - RNA, 20 nt, Artificial Sequence
  Antisense oligo
gaaugccuuggcuugugcuc

SEQ ID NO: 2378 - RNA, 20 nt, Artificial Sequence
  Antisense oligo
cacgaaugccuuggcuugug

SEQ ID NO: 2379 - RNA, 20 nt, Artificial Sequence
  Antisense oligo
acacgaaugccuuggcuugu

SEQ ID NO: 2380 - RNA, 20 nt, Artificial Sequence
  Antisense oligo
cacacgaaugccuuggcuug

SEQ ID NO: 2381 - RNA, 20 nt, Artificial Sequence
  Antisense oligo
ccacacgaaugccuuggcuu

SEQ ID NO: 2382 - RNA, 20 nt, Artificial Sequence
  Antisense oligo
uccacacgaaugccuuggcu

SEQ ID NO: 2383 - RNA, 20 nt, Artificial Sequence
  Antisense oligo
cuccacacgaaugccuuggc

SEQ ID NO: 2384 - RNA, 20 nt, Artificial Sequence
  Antisense oligo
ccuccacacgaaugccuugg

SEQ ID NO: 2385 - RNA, 20 nt, Artificial Sequence
  Antisense oligo
gccuccacacgaaugccuug

SEQ ID NO: 2386 - RNA, 20 nt, Artificial Sequence
  Antisense oligo
ggccuccacacgaaugccuu

SEQ ID NO: 2387 - RNA, 20 nt, Artificial Sequence
  Antisense oligo
aagcucccagcacccuacca

SEQ ID NO: 2388 - RNA, 20 nt, Artificial Sequence
  Antisense oligo
ggagaacugcccacaccaga

SEQ ID NO: 2389 - RNA, 20 nt, Artificial Sequence
  Antisense oligo
aggagaacugcccacaccag

SEQ ID NO: 2390 - RNA, 20 nt, Artificial Sequence
  Antisense oligo
gaggagaacugcccacacca

SEQ ID NO: 2391 - RNA, 20 nt, Artificial Sequence
  Antisense oligo
aagaggagaacugcccacac

SEQ ID NO: 2392 - RNA, 20 nt, Artificial Sequence
  Antisense oligo
uaagaggagaacugcccaca

SEQ ID NO: 2393 - RNA, 20 nt, Artificial Sequence
  Antisense oligo
guaagaggagaacugcccac

SEQ ID NO: 2394 - RNA, 20 nt, Artificial Sequence
  Antisense oligo
cguaagaggagaacugccca

SEQ ID NO: 2395 - RNA, 20 nt, Artificial Sequence
  Antisense oligo
acguaagaggagaacugccc

SEQ ID NO: 2396 - RNA, 20 nt, Artificial Sequence
  Antisense oligo
cacguaagaggagaacugcc

SEQ ID NO: 2397 - RNA, 20 nt, Artificial Sequence
  Antisense oligo
ccacguaagaggagaacugc

SEQ ID NO: 2398 - RNA, 20 nt, Artificial Sequence
  Antisense oligo
uccacguaagaggagaacug

SEQ ID NO: 2399 - RNA, 20 nt, Artificial Sequence
  Antisense oligo
guccacguaagaggagaacu

SEQ ID NO: 2400 - RNA, 20 nt, Artificial Sequence
  Antisense oligo
aguccacguaagaggagaac

SEQ ID NO: 2401 - RNA, 20 nt, Artificial Sequence
  Antisense oligo
aaguccacguaagaggagaa

SEQ ID NO: 2402 - RNA, 20 nt, Artificial Sequence
  Antisense oligo
caaguccacguaagaggaga

SEQ ID NO: 2403 - RNA, 20 nt, Artificial Sequence
  Antisense oligo
acaaguccacguaagaggag

SEQ ID NO: 2404 - RNA, 20 nt, Artificial Sequence
  Antisense oligo
gacaaguccacguaagagga

SEQ ID NO: 2405 - RNA, 20 nt, Artificial Sequence
  Antisense oligo
ggacaaguccacguaagagg

SEQ ID NO: 2406 - RNA, 20 nt, Artificial Sequence
  Antisense oligo
aggacaaguccacguaagag

SEQ ID NO: 2407 - RNA, 20 nt, Artificial Sequence
  Antisense oligo
caggacaaguccacguaaga

SEQ ID NO: 2408 - RNA, 20 nt, Artificial Sequence
  Antisense oligo
gcaggacaaguccacguaag

SEQ ID NO: 2409 - RNA, 20 nt, Artificial Sequence
  Antisense oligo
ugcaggacaaguccacguaa

SEQ ID NO: 2410 - RNA, 20 nt, Artificial Sequence
  Antisense oligo
agacgaagaagcagcuccug

SEQ ID NO: 2411 - RNA, 20 nt, Artificial Sequence
  Antisense oligo
aagacgaagaagcagcuccu

SEQ ID NO: 2412 - RNA, 20 nt, Artificial Sequence
  Antisense oligo
ggaagacgaagaagcagcuc

SEQ ID NO: 2413 - RNA, 20 nt, Artificial Sequence
  Antisense oligo
gggaagacgaagaagcagcu

SEQ ID NO: 2414 - RNA, 20 nt, Artificial Sequence
  Antisense oligo
gugggaagacgaagaagcag

SEQ ID NO: 2415 - RNA, 20 nt, Artificial Sequence
  Antisense oligo
gugugggaagacgaagaagc

SEQ ID NO: 2416 - RNA, 20 nt, Artificial Sequence
  Antisense oligo
ggugugggaagacgaagaag

SEQ ID NO: 2417 - RNA, 20 nt, Artificial Sequence
  Antisense oligo
gggugugggaagacgaagaa

SEQ ID NO: 2418 - RNA, 20 nt, Artificial Sequence
  Antisense oligo
agggugugggaagacgaaga

SEQ ID NO: 2419 - RNA, 20 nt, Artificial Sequence
  Antisense oligo
gagggugugggaagacgaag

SEQ ID NO: 2420 - RNA, 20 nt, Artificial Sequence
  Antisense oligo
ggagggugugggaagacgaa

SEQ ID NO: 2421 - RNA, 20 nt, Artificial Sequence
  Antisense oligo
aggagggugugggaagacga

SEQ ID NO: 2422 - RNA, 20 nt, Artificial Sequence
  Antisense oligo
augugggcacugaccagcuu

SEQ ID NO: 2423 - RNA, 20 nt, Artificial Sequence
  Antisense oligo
caugugggcacugaccagcu

SEQ ID NO: 2424 - RNA, 20 nt, Artificial Sequence
  Antisense oligo
caguagacucgcaaagaccc

SEQ ID NO: 2425 - RNA, 20 nt, Artificial Sequence
  Antisense oligo
ccaguagacucgcaaagacc

SEQ ID NO: 2426 - RNA, 20 nt, Artificial Sequence
  Antisense oligo
uccaguagacucgcaaagac

SEQ ID NO: 2427 - RNA, 20 nt, Artificial Sequence
  Antisense oligo
cuccaguagacucgcaaaga

SEQ ID NO: 2428 - RNA, 20 nt, Artificial Sequence
  Antisense oligo
gcuccaguagacucgcaaag

SEQ ID NO: 2429 - RNA, 20 nt, Artificial Sequence
  Antisense oligo
agcuccaguagacucgcaaa

SEQ ID NO: 2430 - RNA, 20 nt, Artificial Sequence
  Antisense oligo
cagcuccaguagacucgcaa

SEQ ID NO: 2431 - RNA, 20 nt, Artificial Sequence
  Antisense oligo
acagcuccaguagacucgca

SEQ ID NO: 2432 - RNA, 20 nt, Artificial Sequence
  Antisense oligo
gcacagcuccaguagacucg

SEQ ID NO: 2433 - RNA, 20 nt, Artificial Sequence
  Antisense oligo
cgcacagcuccaguagacuc

SEQ ID NO: 2434 - RNA, 20 nt, Artificial Sequence
  Antisense oligo
ccacgcacagcuccaguaga

SEQ ID NO: 2435 - RNA, 20 nt, Artificial Sequence
  Antisense oligo
ucccuguugaaacacgaccc

SEQ ID NO: 2436 - RNA, 20 nt, Artificial Sequence
  Antisense oligo
cucccuguugaaacacgacc

SEQ ID NO: 2437 - RNA, 20 nt, Artificial Sequence
  Antisense oligo
gcucccuguugaaacacgac

SEQ ID NO: 2438 - RNA, 20 nt, Artificial Sequence
  Antisense oligo
agcucccuguugaaacacga

SEQ ID NO: 2439 - RNA, 20 nt, Artificial Sequence
  Antisense oligo
uagcucccuguugaaacacg

SEQ ID NO: 2440 - RNA, 20 nt, Artificial Sequence
  Antisense oligo
uguagcucccuguugaaaca

SEQ ID NO: 2441 - RNA, 20 nt, Artificial Sequence
  Antisense oligo
gauguagcucccuguugaaa

SEQ ID NO: 2442 - RNA, 20 nt, Artificial Sequence
  Antisense oligo
ugauguagcucccuguugaa

SEQ ID NO: 2443 - RNA, 20 nt, Artificial Sequence
  Antisense oligo
cugauguagcucccuguuga

SEQ ID NO: 2444 - RNA, 20 nt, Artificial Sequence
  Antisense oligo
ucugauguagcucccuguug

SEQ ID NO: 2445 - RNA, 20 nt, Artificial Sequence
  Antisense oligo
cucugauguagcucccuguu

SEQ ID NO: 2446 - RNA, 20 nt, Artificial Sequence
  Antisense oligo
ccucugauguagcucccugu

SEQ ID NO: 2447 - RNA, 20 nt, Artificial Sequence
  Antisense oligo
accucugauguagcucccug

SEQ ID NO: 2448 - RNA, 20 nt, Artificial Sequence
  Antisense oligo
aaaccucugauguagcuccc

SEQ ID NO: 2449 - RNA, 20 nt, Artificial Sequence
  Antisense oligo
aaaaccucugauguagcucc

SEQ ID NO: 2450 - RNA, 20 nt, Artificial Sequence
  Antisense oligo
caaaaccucugauguagcuc

SEQ ID NO: 2451 - RNA, 20 nt, Artificial Sequence
  Antisense oligo
cuaccaaaaccucugaugua

SEQ ID NO: 2452 - RNA, 20 nt, Artificial Sequence
  Antisense oligo
ucuaccaaaaccucugaugu

SEQ ID NO: 2453 - RNA, 20 nt, Artificial Sequence
  Antisense oligo
gucuacagcagcaucuacca

SEQ ID NO: 2454 - RNA, 20 nt, Artificial Sequence
  Antisense oligo
ggucuacagcagcaucuacc

SEQ ID NO: 2455 - RNA, 20 nt, Artificial Sequence
  Antisense oligo
aggucuacagcagcaucuac

SEQ ID NO: 2456 - RNA, 20 nt, Artificial Sequence
  Antisense oligo
ugaggucuacagcagcaucu

SEQ ID NO: 2457 - RNA, 20 nt, Artificial Sequence
  Antisense oligo
augaggucuacagcagcauc

SEQ ID NO: 2458 - RNA, 20 nt, Artificial Sequence
  Antisense oligo
uaugaggucuacagcagcau

SEQ ID NO: 2459 - RNA, 20 nt, Artificial Sequence
  Antisense oligo
auaugaggucuacagcagca

SEQ ID NO: 2460 - RNA, 20 nt, Artificial Sequence
  Antisense oligo
gauaugaggucuacagcagc

SEQ ID NO: 2461 - RNA, 20 nt, Artificial Sequence
  Antisense oligo
ggauaugaggucuacagcag

SEQ ID NO: 2462 - RNA, 20 nt, Artificial Sequence
  Antisense oligo
cggauaugaggucuacagca

SEQ ID NO: 2463 - RNA, 20 nt, Artificial Sequence
  Antisense oligo
ucggauaugaggucuacagc

SEQ ID NO: 2464 - RNA, 20 nt, Artificial Sequence
  Antisense oligo
aucggauaugaggucuacag

SEQ ID NO: 2465 - RNA, 20 nt, Artificial Sequence
  Antisense oligo
caucggauaugaggucuaca

SEQ ID NO: 2466 - RNA, 20 nt, Artificial Sequence
  Antisense oligo
cuucccauucaucggauaug

SEQ ID NO: 2467 - RNA, 20 nt, Artificial Sequence
  Antisense oligo
gcuucccauucaucggauau

SEQ ID NO: 2468 - RNA, 20 nt, Artificial Sequence
  Antisense oligo
agcuucccauucaucggaua

SEQ ID NO: 2469 - RNA, 20 nt, Artificial Sequence
  Antisense oligo
cagcuucccauucaucggau

SEQ ID NO: 2470 - RNA, 20 nt, Artificial Sequence
  Antisense oligo
agcagcuucccauucaucgg

SEQ ID NO: 2471 - RNA, 20 nt, Artificial Sequence
  Antisense oligo
uagcagcuucccauucaucg

SEQ ID NO: 2472 - RNA, 20 nt, Artificial Sequence
  Antisense oligo
cauuagcagcuucccauuca

SEQ ID NO: 2473 - RNA, 20 nt, Artificial Sequence
  Antisense oligo
uggcauuagcagcuucccau

SEQ ID NO: 2474 - RNA, 20 nt, Artificial Sequence
  Antisense oligo
auggcauuagcagcuuccca

SEQ ID NO: 2475 - RNA, 20 nt, Artificial Sequence
  Antisense oligo
uauggcauuagcagcuuccc

SEQ ID NO: 2476 - RNA, 20 nt, Artificial Sequence
  Antisense oligo
guauggcauuagcagcuucc

SEQ ID NO: 2477 - RNA, 20 nt, Artificial Sequence
  Antisense oligo
ggguauggcauuagcagcuu

SEQ ID NO: 2478 - RNA, 20 nt, Artificial Sequence
  Antisense oligo
uggguauggcauuagcagcu

SEQ ID NO: 2479 - RNA, 20 nt, Artificial Sequence
  Antisense oligo
cuggguauggcauuagcagc

SEQ ID NO: 2480 - RNA, 20 nt, Artificial Sequence
  Antisense oligo
gcuggguauggcauuagcag

SEQ ID NO: 2481 - RNA, 20 nt, Artificial Sequence
  Antisense oligo
uugcuggguauggcauuagc

SEQ ID NO: 2482 - RNA, 20 nt, Artificial Sequence
  Antisense oligo
ucuugcuggguauggcauua

SEQ ID NO: 2483 - RNA, 20 nt, Artificial Sequence
  Antisense oligo
cucuugcuggguauggcauu

SEQ ID NO: 2484 - RNA, 20 nt, Artificial Sequence
  Antisense oligo
ucucuugcuggguauggcau

SEQ ID NO: 2485 - RNA, 20 nt, Artificial Sequence
  Antisense oligo
cuucucuugcuggguauggc

SEQ ID NO: 2486 - RNA, 20 nt, Artificial Sequence
  Antisense oligo
gcuuccuucucuugcugggu

SEQ ID NO: 2487 - RNA, 20 nt, Artificial Sequence
  Antisense oligo
ugcuuccuucucuugcuggg

SEQ ID NO: 2488 - RNA, 20 nt, Artificial Sequence
  Antisense oligo
cuaccugcucacagucugca

SEQ ID NO: 2489 - RNA, 20 nt, Artificial Sequence
  Antisense oligo
acuaccugcucacagucugc

SEQ ID NO: 2490 - RNA, 20 nt, Artificial Sequence
  Antisense oligo
auucugcccaaacuauugac

SEQ ID NO: 2491 - RNA, 20 nt, Artificial Sequence
  Antisense oligo
gcauucugcccaaacuauug

SEQ ID NO: 2492 - RNA, 20 nt, Artificial Sequence
  Antisense oligo
agcauucugcccaaacuauu

SEQ ID NO: 2493 - RNA, 20 nt, Artificial Sequence
  Antisense oligo
gagcauucugcccaaacuau

SEQ ID NO: 2494 - RNA, 20 nt, Artificial Sequence
  Antisense oligo
ggagcauucugcccaaacua

SEQ ID NO: 2495 - RNA, 20 nt, Artificial Sequence
  Antisense oligo
gggagcauucugcccaaacu

SEQ ID NO: 2496 - RNA, 20 nt, Artificial Sequence
  Antisense oligo
agggagcauucugcccaaac

SEQ ID NO: 2497 - RNA, 20 nt, Artificial Sequence
  Antisense oligo
cagggagcauucugcccaaa

SEQ ID NO: 2498 - RNA, 20 nt, Artificial Sequence
  Antisense oligo
ucgacuggcagggacucaag

SEQ ID NO: 2499 - RNA, 20 nt, Artificial Sequence
  Antisense oligo
uuccucgacuggcagggacu

SEQ ID NO: 2500 - RNA, 20 nt, Artificial Sequence
  Antisense oligo
aagggugacccgaaaacgcc

SEQ ID NO: 2501 - RNA, 20 nt, Artificial Sequence
  Antisense oligo
caagggugacccgaaaacgc

SEQ ID NO: 2502 - RNA, 20 nt, Artificial Sequence
  Antisense oligo
ccaagggugacccgaaaacg

SEQ ID NO: 2503 - RNA, 20 nt, Artificial Sequence
  Antisense oligo
cccaagggugacccgaaaac

SEQ ID NO: 2504 - RNA, 20 nt, Artificial Sequence
  Antisense oligo
gcccaagggugacccgaaaa

SEQ ID NO: 2505 - RNA, 20 nt, Artificial Sequence
  Antisense oligo
agcccaagggugacccgaaa

SEQ ID NO: 2506 - RNA, 20 nt, Artificial Sequence
  Antisense oligo
ucuuucacagcccaagggug

SEQ ID NO: 2507 - RNA, 20 nt, Artificial Sequence
  Antisense oligo
cucuuucacagcccaagggu

SEQ ID NO: 2508 - RNA, 20 nt, Artificial Sequence
  Antisense oligo
ugcucuuucacagcccaagg

SEQ ID NO: 2509 - RNA, 20 nt, Artificial Sequence
  Antisense oligo
guugcucuuucacagcccaa

SEQ ID NO: 2510 - RNA, 20 nt, Artificial Sequence
  Antisense oligo
gcguugcucuuucacagccc

SEQ ID NO: 2511 - RNA, 20 nt, Artificial Sequence
  Antisense oligo
gaaucagcguugcucuuuca

SEQ ID NO: 2512 - RNA, 20 nt, Artificial Sequence
  Antisense oligo
ugaaucagcguugcucuuuc

SEQ ID NO: 2513 - RNA, 20 nt, Artificial Sequence
  Antisense oligo
cugaaucagcguugcucuuu

SEQ ID NO: 2514 - RNA, 20 nt, Artificial Sequence
  Antisense oligo
ccugaaucagcguugcucuu

SEQ ID NO: 2515 - RNA, 20 nt, Artificial Sequence
  Antisense oligo
gccugaaucagcguugcucu

SEQ ID NO: 2516 - RNA, 20 nt, Artificial Sequence
  Antisense oligo
agccugaaucagcguugcuc

SEQ ID NO: 2517 - RNA, 20 nt, Artificial Sequence
  Antisense oligo
aagccugaaucagcguugcu

SEQ ID NO: 2518 - RNA, 20 nt, Artificial Sequence
  Antisense oligo
caagccugaaucagcguugc

SEQ ID NO: 2519 - RNA, 20 nt, Artificial Sequence
  Antisense oligo
ccaagccugaaucagcguug

SEQ ID NO: 2520 - RNA, 20 nt, Artificial Sequence
  Antisense oligo
gccaagccugaaucagcguu

SEQ ID NO: 2521 - RNA, 20 nt, Artificial Sequence
  Antisense oligo
gagccaagccugaaucagcg

SEQ ID NO: 2522 - RNA, 20 nt, Artificial Sequence
  Antisense oligo
acaagagccaagccugaauc

SEQ ID NO: 2523 - RNA, 20 nt, Artificial Sequence
  Antisense oligo
cacaagagccaagccugaau

SEQ ID NO: 2524 - RNA, 20 nt, Artificial Sequence
  Antisense oligo
ucacaagagccaagccugaa

SEQ ID NO: 2525 - RNA, 20 nt, Artificial Sequence
  Antisense oligo
gucacaagagccaagccuga

SEQ ID NO: 2526 - RNA, 20 nt, Artificial Sequence
  Antisense oligo
ccucagagucacaagagcca

SEQ ID NO: 2527 - RNA, 20 nt, Artificial Sequence
  Antisense oligo
uccucagagucacaagagcc

SEQ ID NO: 2528 - RNA, 20 nt, Artificial Sequence
  Antisense oligo
aaacauccucagagucacaa

SEQ ID NO: 2529 - RNA, 20 nt, Artificial Sequence
  Antisense oligo
aaaacauccucagagucaca

SEQ ID NO: 2530 - RNA, 20 nt, Artificial Sequence
  Antisense oligo
gcaaaacauccucagaguca

SEQ ID NO: 2531 - RNA, 20 nt, Artificial Sequence
  Antisense oligo
ggcaagcacaauaaagcuga

SEQ ID NO: 2532 - RNA, 20 nt, Artificial Sequence
  Antisense oligo
gggcaagcacaauaaagcug

SEQ ID NO: 2533 - RNA, 20 nt, Artificial Sequence
  Antisense oligo
agggcaagcacaauaaagcu

SEQ ID NO: 2534 - RNA, 20 nt, Artificial Sequence
  Antisense oligo
gccagaagggcaagcacaau

SEQ ID NO: 2535 - RNA, 20 nt, Artificial Sequence
  Antisense oligo
aaggaugugggccagaaggg

SEQ ID NO: 2536 - RNA, 20 nt, Artificial Sequence
  Antisense oligo
gaaggaugugggccagaagg

SEQ ID NO: 2537 - RNA, 20 nt, Artificial Sequence
  Antisense oligo
uggaaggaugugggccagaa

SEQ ID NO: 2538 - RNA, 20 nt, Artificial Sequence
  Antisense oligo
caaguggaaggaugugggcc

SEQ ID NO: 2539 - RNA, 20 nt, Artificial Sequence
  Antisense oligo
ggcaaguggaaggauguggg

SEQ ID NO: 2540 - RNA, 20 nt, Artificial Sequence
  Antisense oligo
aggcaaguggaaggaugugg

SEQ ID NO: 2541 - RNA, 20 nt, Artificial Sequence
  Antisense oligo
aaggcaaguggaaggaugug

SEQ ID NO: 2542 - RNA, 20 nt, Artificial Sequence
  Antisense oligo
aaaaggcaaguggaaggaug

SEQ ID NO: 2543 - RNA, 20 nt, Artificial Sequence
  Antisense oligo
uuaaguuucuccaggugucc

SEQ ID NO: 2544 - RNA, 20 nt, Artificial Sequence
  Antisense oligo
gguuaaguuucuccaggugu

SEQ ID NO: 2545 - RNA, 20 nt, Artificial Sequence
  Antisense oligo
agguuaaguuucuccaggug

SEQ ID NO: 2546 - RNA, 20 nt, Artificial Sequence
  Antisense oligo
gccagguuaaguuucuccag

SEQ ID NO: 2547 - RNA, 20 nt, Artificial Sequence
  Antisense oligo
agccagguuaaguuucucca

SEQ ID NO: 2548 - RNA, 20 nt, Artificial Sequence
  Antisense oligo
cagccagguuaaguuucucc

SEQ ID NO: 2549 - RNA, 20 nt, Artificial Sequence
  Antisense oligo
gagugcagccagguuaaguu

SEQ ID NO: 2550 - RNA, 20 nt, Artificial Sequence
  Antisense oligo
ugagugcagccagguuaagu

SEQ ID NO: 2551 - RNA, 20 nt, Artificial Sequence
  Antisense oligo
gugagugcagccagguuaag

SEQ ID NO: 2552 - RNA, 20 nt, Artificial Sequence
  Antisense oligo
ggugagugcagccagguuaa

SEQ ID NO: 2553 - RNA, 20 nt, Artificial Sequence
  Antisense oligo
caggugagugcagccagguu

SEQ ID NO: 2554 - RNA, 20 nt, Artificial Sequence
  Antisense oligo
agcuuuagccaggugagugc

SEQ ID NO: 2555 - RNA, 20 nt, Artificial Sequence
  Antisense oligo
gagcuuuagccaggugagug

SEQ ID NO: 2556 - RNA, 20 nt, Artificial Sequence
  Antisense oligo
uggagcuuuagccaggugag

SEQ ID NO: 2557 - RNA, 20 nt, Artificial Sequence
  Antisense oligo
guggagcuuuagccagguga

SEQ ID NO: 2558 - RNA, 20 nt, Artificial Sequence
  Antisense oligo
ugguggagcuuuagccaggu

SEQ ID NO: 2559 - RNA, 20 nt, Artificial Sequence
  Antisense oligo
uugcugguggagcuuuagcc

SEQ ID NO: 2560 - RNA, 20 nt, Artificial Sequence
  Antisense oligo
guugcugguggagcuuuagc

SEQ ID NO: 2561 - RNA, 20 nt, Artificial Sequence
  Antisense oligo
uguugcugguggagcuuuag

SEQ ID NO: 2562 - RNA, 20 nt, Artificial Sequence
  Antisense oligo
guguugcugguggagcuuua

SEQ ID NO: 2563 - RNA, 20 nt, Artificial Sequence
  Antisense oligo
uguguugcugguggagcuuu

SEQ ID NO: 2564 - RNA, 20 nt, Artificial Sequence
  Antisense oligo
agcagggcuuccacuacacc

SEQ ID NO: 2565 - RNA, 20 nt, Artificial Sequence
  Antisense oligo
gagcagggcuuccacuacac

SEQ ID NO: 2566 - RNA, 20 nt, Artificial Sequence
  Antisense oligo
ugagcagggcuuccacuaca

SEQ ID NO: 2567 - RNA, 20 nt, Artificial Sequence
  Antisense oligo
cugagcagggcuuccacuac

SEQ ID NO: 2568 - RNA, 20 nt, Artificial Sequence
  Antisense oligo
acugagcagggcuuccacua

SEQ ID NO: 2569 - RNA, 20 nt, Artificial Sequence
  Antisense oligo
aacugagcagggcuuccacu

SEQ ID NO: 2570 - RNA, 20 nt, Artificial Sequence
  Antisense oligo
acuaaacugagcagggcuuc

SEQ ID NO: 2571 - RNA, 20 nt, Artificial Sequence
  Antisense oligo
gacuaaacugagcagggcuu

SEQ ID NO: 2572 - RNA, 20 nt, Artificial Sequence
  Antisense oligo
agagacuaaacugagcaggg

SEQ ID NO: 2573 - RNA, 20 nt, Artificial Sequence
  Antisense oligo
cagagacuaaacugagcagg

SEQ ID NO: 2574 - RNA, 20 nt, Artificial Sequence
  Antisense oligo
uugggcgacagagcgagacu

SEQ ID NO: 2575 - RNA, 20 nt, Artificial Sequence
  Antisense oligo
ugccacugcacuccagcuug

SEQ ID NO: 2576 - RNA, 20 nt, Artificial Sequence
  Antisense oligo
acugagaucgugccacugca

SEQ ID NO: 2577 - RNA, 20 nt, Artificial Sequence
  Antisense oligo
aacugagaucgugccacugc

SEQ ID NO: 2578 - RNA, 20 nt, Artificial Sequence
  Antisense oligo
gaacugagaucgugccacug

SEQ ID NO: 2579 - RNA, 20 nt, Artificial Sequence
  Antisense oligo
agaaucgcuugaacccugca

SEQ ID NO: 2580 - RNA, 20 nt, Artificial Sequence
  Antisense oligo
gagaaucgcuugaacccugc

SEQ ID NO: 2581 - RNA, 20 nt, Artificial Sequence
  Antisense oligo
ggagaaucgcuugaacccug

SEQ ID NO: 2582 - RNA, 20 nt, Artificial Sequence
  Antisense oligo
aggagaaucgcuugaacccu

SEQ ID NO: 2583 - RNA, 20 nt, Artificial Sequence
  Antisense oligo
caggagaaucgcuugaaccc

SEQ ID NO: 2584 - RNA, 20 nt, Artificial Sequence
  Antisense oligo
gcaggagaaucgcuugaacc

SEQ ID NO: 2585 - RNA, 20 nt, Artificial Sequence
  Antisense oligo
ggcaggagaaucgcuugaac

SEQ ID NO: 2586 - RNA, 20 nt, Artificial Sequence
  Antisense oligo
aggcaggagaaucgcuugaa

SEQ ID NO: 2587 - RNA, 20 nt, Artificial Sequence
  Antisense oligo
gaggcaggagaaucgcuuga

SEQ ID NO: 2588 - RNA, 20 nt, Artificial Sequence
  Antisense oligo
ugaggcaggagaaucgcuug

SEQ ID NO: 2589 - RNA, 20 nt, Artificial Sequence
  Antisense oligo
gugaggcaggagaaucgcuu

SEQ ID NO: 2590 - RNA, 20 nt, Artificial Sequence
  Antisense oligo
ggugaggcaggagaaucgcu

SEQ ID NO: 2591 - RNA, 20 nt, Artificial Sequence
  Antisense oligo
agggugaggcaggagaaucg

SEQ ID NO: 2592 - RNA, 20 nt, Artificial Sequence
  Antisense oligo
gagggugaggcaggagaauc

SEQ ID NO: 2593 - RNA, 20 nt, Artificial Sequence
  Antisense oligo
ugccuguaaucccagcuacu

SEQ ID NO: 2594 - RNA, 20 nt, Artificial Sequence
  Antisense oligo
gugccuguaaucccagcuac

SEQ ID NO: 2595 - RNA, 20 nt, Artificial Sequence
  Antisense oligo
ggugccuguaaucccagcua

SEQ ID NO: 2596 - RNA, 20 nt, Artificial Sequence
  Antisense oligo
aggugccuguaaucccagcu

SEQ ID NO: 2597 - RNA, 20 nt, Artificial Sequence
  Antisense oligo
caggugccuguaaucccagc

SEQ ID NO: 2598 - RNA, 20 nt, Artificial Sequence
  Antisense oligo
gcaggugccuguaaucccag

SEQ ID NO: 2599 - RNA, 20 nt, Artificial Sequence
  Antisense oligo
ggcaggugccuguaauccca

SEQ ID NO: 2600 - RNA, 20 nt, Artificial Sequence
  Antisense oligo
uggcaggugccuguaauccc

SEQ ID NO: 2601 - RNA, 20 nt, Artificial Sequence
  Antisense oligo
guggcaggugccuguaaucc

SEQ ID NO: 2602 - RNA, 20 nt, Artificial Sequence
  Antisense oligo
gguggcaggugccuguaauc

SEQ ID NO: 2603 - RNA, 20 nt, Artificial Sequence
  Antisense oligo
ugguggcaggugccuguaau

SEQ ID NO: 2604 - RNA, 20 nt, Artificial Sequence
  Antisense oligo
aggaguucgagaccagccug

SEQ ID NO: 2605 - RNA, 20 nt, Artificial Sequence
  Antisense oligo
caggaguucgagaccagccu

SEQ ID NO: 2606 - RNA, 20 nt, Artificial Sequence
  Antisense oligo
aggccaggaguucgagacca

SEQ ID NO: 2607 - RNA, 20 nt, Artificial Sequence
  Antisense oligo
ugaggccaggaguucgagac

SEQ ID NO: 2608 - RNA, 20 nt, Artificial Sequence
  Antisense oligo
uugaggccaggaguucgaga

SEQ ID NO: 2609 - RNA, 20 nt, Artificial Sequence
  Antisense oligo
uuugaggccaggaguucgag

SEQ ID NO: 2610 - RNA, 20 nt, Artificial Sequence
  Antisense oligo
auuugaggccaggaguucga

SEQ ID NO: 2611 - RNA, 20 nt, Artificial Sequence
  Antisense oligo
cauuugaggccaggaguucg

SEQ ID NO: 2612 - RNA, 20 nt, Artificial Sequence
  Antisense oligo
ucauuugaggccaggaguuc

SEQ ID NO: 2613 - RNA, 20 nt, Artificial Sequence
  Antisense oligo
aucauuugaggccaggaguu

SEQ ID NO: 2614 - RNA, 20 nt, Artificial Sequence
  Antisense oligo
ccuguaauacuccuaaaugc

SEQ ID NO: 2615 - RNA, 20 nt, Artificial Sequence
  Antisense oligo
agguaugaagcucccuugcu

SEQ ID NO: 2616 - RNA, 20 nt, Artificial Sequence
  Antisense oligo
caucacucuucaagguauga

SEQ ID NO: 2617 - RNA, 20 nt, Artificial Sequence
  Antisense oligo
gcaucacucuucaagguaug

SEQ ID NO: 2618 - RNA, 20 nt, Artificial Sequence
  Antisense oligo
agcaucacucuucaagguau

SEQ ID NO: 2619 - RNA, 20 nt, Artificial Sequence
  Antisense oligo
aagcaucacucuucaaggua

SEQ ID NO: 2620 - RNA, 20 nt, Artificial Sequence
  Antisense oligo
caagcaucacucuucaaggu

SEQ ID NO: 2621 - RNA, 20 nt, Artificial Sequence
  Antisense oligo
cacaagcaucacucuucaag

SEQ ID NO: 2622 - RNA, 20 nt, Artificial Sequence
  Antisense oligo
ucacaagcaucacucuucaa

SEQ ID NO: 2623 - RNA, 20 nt, Artificial Sequence
  Antisense oligo
cuucacaagcaucacucuuc

SEQ ID NO: 2624 - RNA, 20 nt, Artificial Sequence
  Antisense oligo
acuucacaagcaucacucuu

SEQ ID NO: 2625 - RNA, 20 nt, Artificial Sequence
  Antisense oligo
aacuucacaagcaucacucu

SEQ ID NO: 2626 - RNA, 20 nt, Artificial Sequence
  Antisense oligo
caaugaacacaugaccaucu

SEQ ID NO: 2627 - RNA, 20 nt, Artificial Sequence
  Antisense oligo
ucaaugaacacaugaccauc

SEQ ID NO: 2628 - RNA, 20 nt, Artificial Sequence
  Antisense oligo
gguaagucuccguucaauga

SEQ ID NO: 2629 - RNA, 20 nt, Artificial Sequence
  Antisense oligo
cgguaagucuccguucaaug

SEQ ID NO: 2630 - RNA, 20 nt, Artificial Sequence
  Antisense oligo
ucgguaagucuccguucaau

SEQ ID NO: 2631 - RNA, 20 nt, Artificial Sequence
  Antisense oligo
cucgguaagucuccguucaa

SEQ ID NO: 2632 - RNA, 20 nt, Artificial Sequence
  Antisense oligo
gcucgguaagucuccguuca

SEQ ID NO: 2633 - RNA, 20 nt, Artificial Sequence
  Antisense oligo
ugcucgguaagucuccguuc

SEQ ID NO: 2634 - RNA, 20 nt, Artificial Sequence
  Antisense oligo
augcucgguaagucuccguu

SEQ ID NO: 2635 - RNA, 20 nt, Artificial Sequence
  Antisense oligo
ggaugcucgguaagucuccg

SEQ ID NO: 2636 - RNA, 20 nt, Artificial Sequence
  Antisense oligo
uggaugcucgguaagucucc

SEQ ID NO: 2637 - RNA, 20 nt, Artificial Sequence
  Antisense oligo
guggaugcucgguaagucuc

SEQ ID NO: 2638 - RNA, 20 nt, Artificial Sequence
  Antisense oligo
gguggaugcucgguaagucu

SEQ ID NO: 2639 - RNA, 20 nt, Artificial Sequence
  Antisense oligo
ugguggaugcucgguaaguc

SEQ ID NO: 2640 - RNA, 20 nt, Artificial Sequence
  Antisense oligo
gugguggaugcucgguaagu

SEQ ID NO: 2641 - RNA, 20 nt, Artificial Sequence
  Antisense oligo
cgugguggaugcucgguaag

SEQ ID NO: 2642 - RNA, 20 nt, Artificial Sequence
  Antisense oligo
gcgugguggaugcucgguaa

SEQ ID NO: 2643 - RNA, 20 nt, Artificial Sequence
  Antisense oligo
cugugccuuaggucuggcua

SEQ ID NO: 2644 - RNA, 20 nt, Artificial Sequence
  Antisense oligo
acugugccuuaggucuggcu

SEQ ID NO: 2645 - RNA, 20 nt, Artificial Sequence
  Antisense oligo
cacugugccuuaggucuggc

SEQ ID NO: 2646 - RNA, 20 nt, Artificial Sequence
  Antisense oligo
acacugugccuuaggucugg

SEQ ID NO: 2647 - RNA, 20 nt, Artificial Sequence
  Antisense oligo
cacacugugccuuaggucug

SEQ ID NO: 2648 - RNA, 20 nt, Artificial Sequence
  Antisense oligo
ccacacugugccuuaggucu

SEQ ID NO: 2649 - RNA, 20 nt, Artificial Sequence
  Antisense oligo
cccacacugugccuuagguc

SEQ ID NO: 2650 - RNA, 20 nt, Artificial Sequence
  Antisense oligo
acccacacugugccuuaggu

SEQ ID NO: 2651 - RNA, 20 nt, Artificial Sequence
  Antisense oligo
cacccacacugugccuuagg

SEQ ID NO: 2652 - RNA, 20 nt, Artificial Sequence
  Antisense oligo
ccacccacacugugccuuag

SEQ ID NO: 2653 - RNA, 20 nt, Artificial Sequence
  Antisense oligo
uccacccacacugugccuua

SEQ ID NO: 2654 - RNA, 20 nt, Artificial Sequence
  Antisense oligo
ucacugucugcugagcccga

SEQ ID NO: 2655 - RNA, 20 nt, Artificial Sequence
  Antisense oligo
cggacuucacugucugcuga

SEQ ID NO: 2656 - RNA, 20 nt, Artificial Sequence
  Antisense oligo
ccacggacuucacugucugc

SEQ ID NO: 2657 - RNA, 20 nt, Artificial Sequence
  Antisense oligo
uccacggacuucacugucug

SEQ ID NO: 2658 - RNA, 20 nt, Artificial Sequence
  Antisense oligo
cuccacggacuucacugucu

SEQ ID NO: 2659 - RNA, 20 nt, Artificial Sequence
  Antisense oligo
ucuccacggacuucacuguc

SEQ ID NO: 2660 - RNA, 20 nt, Artificial Sequence
  Antisense oligo
cucuccacggacuucacugu

SEQ ID NO: 2661 - RNA, 20 nt, Artificial Sequence
  Antisense oligo
ccucuccacggacuucacug

SEQ ID NO: 2662 - RNA, 20 nt, Artificial Sequence
  Antisense oligo
cagugcuaaaccuuccaugu

SEQ ID NO: 2663 - RNA, 20 nt, Artificial Sequence
  Antisense oligo
gcagugcuaaaccuuccaug

SEQ ID NO: 2664 - RNA, 20 nt, Artificial Sequence
  Antisense oligo
ugcagugcuaaaccuuccau

SEQ ID NO: 2665 - RNA, 20 nt, Artificial Sequence
  Antisense oligo
uucccgugucauucugggug

SEQ ID NO: 2666 - RNA, 20 nt, Artificial Sequence
  Antisense oligo
guucccgugucauucugggu

SEQ ID NO: 2667 - RNA, 20 nt, Artificial Sequence
  Antisense oligo
aguucccgugucauucuggg

SEQ ID NO: 2668 - RNA, 20 nt, Artificial Sequence
  Antisense oligo
aaguucccgugucauucugg

SEQ ID NO: 2669 - RNA, 20 nt, Artificial Sequence
  Antisense oligo
uaaguucccgugucauucug

SEQ ID NO: 2670 - RNA, 20 nt, Artificial Sequence
  Antisense oligo
uuaaguucccgugucauucu

SEQ ID NO: 2671 - RNA, 20 nt, Artificial Sequence
  Antisense oligo
guuaaguucccgugucauuc

SEQ ID NO: 2672 - RNA, 20 nt, Artificial Sequence
  Antisense oligo
gguuaaguucccgugucauu

SEQ ID NO: 2673 - RNA, 20 nt, Artificial Sequence
  Antisense oligo
ugguuaaguucccgugucau

SEQ ID NO: 2674 - RNA, 20 nt, Artificial Sequence
  Antisense oligo
uugguuaaguucccguguca

SEQ ID NO: 2675 - RNA, 20 nt, Artificial Sequence
  Antisense oligo
guugguuaaguucccguguc

SEQ ID NO: 2676 - RNA, 20 nt, Artificial Sequence
  Antisense oligo
aguugguuaaguucccgugu

SEQ ID NO: 2677 - RNA, 20 nt, Artificial Sequence
  Antisense oligo
uaguugguuaaguucccgug

SEQ ID NO: 2678 - RNA, 20 nt, Artificial Sequence
  Antisense oligo
auuaguugguuaaguucccg

SEQ ID NO: 2679 - RNA, 20 nt, Artificial Sequence
  Antisense oligo
cauucagagcuauacuacug

SEQ ID NO: 2680 - RNA, 20 nt, Artificial Sequence
  Antisense oligo
ccauucagagcuauacuacu

SEQ ID NO: 2681 - RNA, 20 nt, Artificial Sequence
  Antisense oligo
cccauucagagcuauacuac

SEQ ID NO: 2682 - RNA, 20 nt, Artificial Sequence
  Antisense oligo
acccauucagagcuauacua

SEQ ID NO: 2683 - RNA, 20 nt, Artificial Sequence
  Antisense oligo
aacccauucagagcuauacu

SEQ ID NO: 2684 - RNA, 20 nt, Artificial Sequence
  Antisense oligo
caaacccauucagagcuaua

SEQ ID NO: 2685 - RNA, 20 nt, Artificial Sequence
  Antisense oligo
ccaaacccauucagagcuau

SEQ ID NO: 2686 - RNA, 20 nt, Artificial Sequence
  Antisense oligo
ccaccaaacccauucagagc

SEQ ID NO: 2687 - RNA, 20 nt, Artificial Sequence
  Antisense oligo
cccaccaaacccauucagag

SEQ ID NO: 2688 - RNA, 20 nt, Artificial Sequence
  Antisense oligo
acccaccaaacccauucaga

SEQ ID NO: 2689 - RNA, 20 nt, Artificial Sequence
  Antisense oligo
aacccaccaaacccauucag

SEQ ID NO: 2690 - RNA, 20 nt, Artificial Sequence
  Antisense oligo
gcagugagcuaugauuuugc

SEQ ID NO: 2691 - RNA, 20 nt, Artificial Sequence
  Antisense oligo
ugcagugagcuaugauuuug

SEQ ID NO: 2692 - RNA, 20 nt, Artificial Sequence
  Antisense oligo
cacgccuguagucccagcua

SEQ ID NO: 2693 - RNA, 20 nt, Artificial Sequence
  Antisense oligo
uaauugggugugguggugca

SEQ ID NO: 2694 - RNA, 20 nt, Artificial Sequence
  Antisense oligo
uuaauugggugugguggugc

SEQ ID NO: 2695 - RNA, 20 nt, Artificial Sequence
  Antisense oligo
gaguuugagaccagcguggg

SEQ ID NO: 2696 - RNA, 20 nt, Artificial Sequence
  Antisense oligo
aggcuaggguggugguuuau

SEQ ID NO: 2697 - RNA, 20 nt, Artificial Sequence
  Antisense oligo
gaggcuaggguggugguuua

SEQ ID NO: 2698 - RNA, 20 nt, Artificial Sequence
  Antisense oligo
cgaggcuaggguggugguuu

SEQ ID NO: 2699 - RNA, 20 nt, Artificial Sequence
  Antisense oligo
acgaggcuaggguggugguu

SEQ ID NO: 2700 - RNA, 20 nt, Artificial Sequence
  Antisense oligo
aacgaggcuagggugguggu

SEQ ID NO: 2701 - RNA, 20 nt, Artificial Sequence
  Antisense oligo
aaacgaggcuaggguggugg

SEQ ID NO: 2702 - RNA, 20 nt, Artificial Sequence
  Antisense oligo
aaaacgaggcuaggguggug

SEQ ID NO: 2703 - RNA, 20 nt, Artificial Sequence
  Antisense oligo
caaaacgaggcuaggguggu

SEQ ID NO: 2704 - RNA, 20 nt, Artificial Sequence
  Antisense oligo
acaaaacgaggcuagggugg

SEQ ID NO: 2705 - RNA, 20 nt, Artificial Sequence
  Antisense oligo
uacaaaacgaggcuagggug

SEQ ID NO: 2706 - RNA, 20 nt, Artificial Sequence
  Antisense oligo
auacaaaacgaggcuagggu

SEQ ID NO: 2707 - RNA, 20 nt, Artificial Sequence
  Antisense oligo
aauacaaaacgaggcuaggg

SEQ ID NO: 2708 - RNA, 20 nt, Artificial Sequence
  Antisense oligo
cuguuaaguauccucaccaa

SEQ ID NO: 2709 - RNA, 20 nt, Artificial Sequence
  Antisense oligo
ucuguuaaguauccucacca

SEQ ID NO: 2710 - RNA, 20 nt, Artificial Sequence
  Antisense oligo
aucuguuaaguauccucacc

SEQ ID NO: 2711 - RNA, 20 nt, Artificial Sequence
  Antisense oligo
caucuguuaaguauccucac

SEQ ID NO: 2712 - RNA, 20 nt, Artificial Sequence
  Antisense oligo
cucacaucuguuaaguaucc

SEQ ID NO: 2713 - RNA, 20 nt, Artificial Sequence
  Antisense oligo
ccucacaucuguuaaguauc

SEQ ID NO: 2714 - RNA, 20 nt, Artificial Sequence
  Antisense oligo
cuccucacaucuguuaagua

SEQ ID NO: 2715 - RNA, 20 nt, Artificial Sequence
  Antisense oligo
ccuccucacaucuguuaagu

SEQ ID NO: 2716 - RNA, 20 nt, Artificial Sequence
  Antisense oligo
uccuccucacaucuguuaag

SEQ ID NO: 2717 - RNA, 20 nt, Artificial Sequence
  Antisense oligo
cuccuccucacaucuguuaa

SEQ ID NO: 2718 - RNA, 20 nt, Artificial Sequence
  Antisense oligo
uucuccuccucacaucuguu

SEQ ID NO: 2719 - RNA, 20 nt, Artificial Sequence
  Antisense oligo
uuucuccuccucacaucugu

SEQ ID NO: 2720 - RNA, 20 nt, Artificial Sequence
  Antisense oligo
auuucuccuccucacaucug

SEQ ID NO: 2721 - RNA, 20 nt, Artificial Sequence
  Antisense oligo
uccauuucuccuccucacau

SEQ ID NO: 2722 - RNA, 20 nt, Artificial Sequence
  Antisense oligo
cauccauuucuccuccucac

SEQ ID NO: 2723 - RNA, 20 nt, Artificial Sequence
  Antisense oligo
ccauccauuucuccuccuca

SEQ ID NO: 2724 - RNA, 20 nt, Artificial Sequence
  Antisense oligo
gcucacaucucaugcuccgu

SEQ ID NO: 2725 - RNA, 20 nt, Artificial Sequence
  Antisense oligo
agcucacaucucaugcuccg

SEQ ID NO: 2726 - RNA, 20 nt, Artificial Sequence
  Antisense oligo
ccagcucacaucucaugcuc

SEQ ID NO: 2727 - RNA, 20 nt, Artificial Sequence
  Antisense oligo
cuccagcucacaucucaugc

SEQ ID NO: 2728 - RNA, 20 nt, Artificial Sequence
  Antisense oligo
gcccuaacuccagcucacau

SEQ ID NO: 2729 - RNA, 20 nt, Artificial Sequence
  Antisense oligo
gugcccuaacuccagcucac

SEQ ID NO: 2730 - RNA, 20 nt, Artificial Sequence
  Antisense oligo
agugcccuaacuccagcuca

SEQ ID NO: 2731 - RNA, 20 nt, Artificial Sequence
  Antisense oligo
ugcagugcccuaacuccagc

SEQ ID NO: 2732 - RNA, 20 nt, Artificial Sequence
  Antisense oligo
uaugcagugcccuaacucca

SEQ ID NO: 2733 - RNA, 20 nt, Artificial Sequence
  Antisense oligo
auaugcagugcccuaacucc

SEQ ID NO: 2734 - RNA, 20 nt, Artificial Sequence
  Antisense oligo
acacgcuccgguccgcauau

SEQ ID NO: 2735 - RNA, 20 nt, Artificial Sequence
  Antisense oligo
aacacgcuccgguccgcaua

SEQ ID NO: 2736 - RNA, 20 nt, Artificial Sequence
  Antisense oligo
uacacccugaccaacacgcu

SEQ ID NO: 2737 - RNA, 20 nt, Artificial Sequence
  Antisense oligo
auacacccugaccaacacgc

SEQ ID NO: 2738 - RNA, 20 nt, Artificial Sequence
  Antisense oligo
acuuuccacacccguguaua

SEQ ID NO: 2739 - RNA, 20 nt, Artificial Sequence
  Antisense oligo
cacuuuccacacccguguau

SEQ ID NO: 2740 - RNA, 20 nt, Artificial Sequence
  Antisense oligo
ccacuuuccacacccgugua

SEQ ID NO: 2741 - RNA, 20 nt, Artificial Sequence
  Antisense oligo
acccaaaugcugagcccaug

SEQ ID NO: 2742 - RNA, 20 nt, Artificial Sequence
  Antisense oligo
uacccaaaugcugagcccau

SEQ ID NO: 2743 - RNA, 20 nt, Artificial Sequence
  Antisense oligo
uuuacccaaaugcugagccc

SEQ ID NO: 2744 - RNA, 20 nt, Artificial Sequence
  Antisense oligo
uguuuuacccaaaugcugag

SEQ ID NO: 2745 - RNA, 20 nt, Artificial Sequence
  Antisense oligo
guguguguguuuuacccaaa

SEQ ID NO: 2746 - RNA, 20 nt, Artificial Sequence
  Antisense oligo
aguguguguguuuuacccaa

SEQ ID NO: 2747 - RNA, 20 nt, Artificial Sequence
  Antisense oligo
ggaguguguguguuuuaccc

SEQ ID NO: 2748 - RNA, 20 nt, Artificial Sequence
  Antisense oligo
uggaguguguguguuuuacc

SEQ ID NO: 2749 - RNA, 20 nt, Artificial Sequence
  Antisense oligo
guggaguguguguguuuuac

SEQ ID NO: 2750 - RNA, 20 nt, Artificial Sequence
  Antisense oligo
ugaguggaguguguguguuu

SEQ ID NO: 2751 - RNA, 20 nt, Artificial Sequence
  Antisense oligo
gugaguggaguguguguguu

SEQ ID NO: 2752 - RNA, 20 nt, Artificial Sequence
  Antisense oligo
uauguguguguggaggguau

SEQ ID NO: 2753 - RNA, 20 nt, Artificial Sequence
  Antisense oligo
guauguguguguggagggua

SEQ ID NO: 2754 - RNA, 20 nt, Artificial Sequence
  Antisense oligo
gguauguguguguggagggu

SEQ ID NO: 2755 - RNA, 20 nt, Artificial Sequence
  Antisense oligo
ggguauguguguguggaggg

SEQ ID NO: 2756 - RNA, 20 nt, Artificial Sequence
  Antisense oligo
uguguugaggugugugugag

SEQ ID NO: 2757 - RNA, 20 nt, Artificial Sequence
  Antisense oligo
guguguugagguguguguga

SEQ ID NO: 2758 - RNA, 20 nt, Artificial Sequence
  Antisense oligo
uauguguguguggaggguau

SEQ ID NO: 2759 - RNA, 20 nt, Artificial Sequence
  Antisense oligo
guauguguguguggagggua

SEQ ID NO: 2760 - RNA, 20 nt, Artificial Sequence
  Antisense oligo
gguauguguguguggagggu

SEQ ID NO: 2761 - RNA, 20 nt, Artificial Sequence
  Antisense oligo
ggguauguguguguggaggg

SEQ ID NO: 2762 - RNA, 20 nt, Artificial Sequence
  Antisense oligo
agggugugugagugguguga

SEQ ID NO: 2763 - RNA, 20 nt, Artificial Sequence
  Antisense oligo
ugcagggugugugaguggug

SEQ ID NO: 2764 - RNA, 20 nt, Artificial Sequence
  Antisense oligo
uauguugcagggugugugag

SEQ ID NO: 2765 - RNA, 20 nt, Artificial Sequence
  Antisense oligo
guguauguugcagggugugu

SEQ ID NO: 2766 - RNA, 20 nt, Artificial Sequence
  Antisense oligo
gugugaguguugugaguggg

SEQ ID NO: 2767 - RNA, 20 nt, Artificial Sequence
  Antisense oligo
ugugugaguguugugagugg

SEQ ID NO: 2768 - RNA, 20 nt, Artificial Sequence
  Antisense oligo
ggugugugaguguugugagu

SEQ ID NO: 2769 - RNA, 20 nt, Artificial Sequence
  Antisense oligo
gugugagugguaugaguggg

SEQ ID NO: 2770 - RNA, 20 nt, Artificial Sequence
  Antisense oligo
gggugugugagugguaugag

SEQ ID NO: 2771 - RNA, 20 nt, Artificial Sequence
  Antisense oligo
uguuggcagugugugagugg

SEQ ID NO: 2772 - RNA, 20 nt, Artificial Sequence
  Antisense oligo
guguguuggcagugugugag

SEQ ID NO: 2773 - RNA, 20 nt, Artificial Sequence
  Antisense oligo
ugggacuugcguauguuggg

SEQ ID NO: 2774 - RNA, 20 nt, Artificial Sequence
  Antisense oligo
gugggacuugcguauguugg

SEQ ID NO: 2775 - RNA, 20 nt, Artificial Sequence
  Antisense oligo
agugggacuugcguauguug

SEQ ID NO: 2776 - RNA, 20 nt, Artificial Sequence
  Antisense oligo
gagugggacuugcguauguu

SEQ ID NO: 2777 - RNA, 20 nt, Artificial Sequence
  Antisense oligo
ugagugggacuugcguaugu

SEQ ID NO: 2778 - RNA, 20 nt, Artificial Sequence
  Antisense oligo
ugugagugggacuugcguau

SEQ ID NO: 2779 - RNA, 20 nt, Artificial Sequence
  Antisense oligo
gugugagugggacuugcgua

SEQ ID NO: 2780 - RNA, 20 nt, Artificial Sequence
  Antisense oligo
ugggugugagugggacuugc

SEQ ID NO: 2781 - RNA, 20 nt, Artificial Sequence
  Antisense oligo
guaugagaugggugugagug

SEQ ID NO: 2782 - RNA, 20 nt, Artificial Sequence
  Antisense oligo
aguaugagaugggugugagu

SEQ ID NO: 2783 - RNA, 20 nt, Artificial Sequence
  Antisense oligo
gaguaugagaugggugugag

SEQ ID NO: 2784 - RNA, 20 nt, Artificial Sequence
  Antisense oligo
agggaccacuguguguuuca

SEQ ID NO: 2785 - RNA, 20 nt, Artificial Sequence
  Antisense oligo
aagggaccacuguguguuuc

SEQ ID NO: 2786 - RNA, 20 nt, Artificial Sequence
  Antisense oligo
caagggaccacuguguguuu

SEQ ID NO: 2787 - RNA, 20 nt, Artificial Sequence
  Antisense oligo
aacaagggaccacugugugu

SEQ ID NO: 2788 - RNA, 20 nt, Artificial Sequence
  Antisense oligo
caacaagggaccacugugug

SEQ ID NO: 2789 - RNA, 20 nt, Artificial Sequence
  Antisense oligo
gggcaacaagggaccacugu

SEQ ID NO: 2790 - RNA, 20 nt, Artificial Sequence
  Antisense oligo
ugggcaacaagggaccacug

SEQ ID NO: 2791 - RNA, 20 nt, Artificial Sequence
  Antisense oligo
cugugggcaacaagggacca

SEQ ID NO: 2792 - RNA, 20 nt, Artificial Sequence
  Antisense oligo
gggacugggcauccuuggau

SEQ ID NO: 2793 - RNA, 20 nt, Artificial Sequence
  Antisense oligo
caaugccacgccguuucaua

SEQ ID NO: 2794 - RNA, 20 nt, Artificial Sequence
  Antisense oligo
ccaaugccacgccguuucau

SEQ ID NO: 2795 - RNA, 20 nt, Artificial Sequence
  Antisense oligo
accaaugccacgccguuuca

SEQ ID NO: 2796 - RNA, 20 nt, Artificial Sequence
  Antisense oligo
uaccaaugccacgccguuuc

SEQ ID NO: 2797 - RNA, 20 nt, Artificial Sequence
  Antisense oligo
guaccaaugccacgccguuu

SEQ ID NO: 2798 - RNA, 20 nt, Artificial Sequence
  Antisense oligo
uguaccaaugccacgccguu

SEQ ID NO: 2799 - RNA, 20 nt, Artificial Sequence
  Antisense oligo
auguaccaaugccacgccgu

SEQ ID NO: 2800 - RNA, 20 nt, Artificial Sequence
  Antisense oligo
uauguaccaaugccacgccg

SEQ ID NO: 2801 - RNA, 20 nt, Artificial Sequence
  Antisense oligo
uuauguaccaaugccacgcc

SEQ ID NO: 2802 - RNA, 20 nt, Artificial Sequence
  Antisense oligo
guuauguaccaaugccacgc

SEQ ID NO: 2803 - RNA, 20 nt, Artificial Sequence
  Antisense oligo
gguuauguaccaaugccacg

SEQ ID NO: 2804 - RNA, 20 nt, Artificial Sequence
  Antisense oligo
ggguuauguaccaaugccac

SEQ ID NO: 2805 - RNA, 20 nt, Artificial Sequence
  Antisense oligo
uggguuauguaccaaugcca

SEQ ID NO: 2806 - RNA, 20 nt, Artificial Sequence
  Antisense oligo
guggguuauguaccaaugcc

SEQ ID NO: 2807 - RNA, 20 nt, Artificial Sequence
  Antisense oligo
uguggguuauguaccaaugc

SEQ ID NO: 2808 - RNA, 20 nt, Artificial Sequence
  Antisense oligo
gcuguggguuauguaccaau

SEQ ID NO: 2809 - RNA, 20 nt, Artificial Sequence
  Antisense oligo
ugcuguggguuauguaccaa

SEQ ID NO: 2810 - RNA, 20 nt, Artificial Sequence
  Antisense oligo
augcuguggguuauguacca

SEQ ID NO: 2811 - RNA, 20 nt, Artificial Sequence
  Antisense oligo
gaugcuguggguuauguacc

SEQ ID NO: 2812 - RNA, 20 nt, Artificial Sequence
  Antisense oligo
ggaugcuguggguuauguac

SEQ ID NO: 2813 - RNA, 20 nt, Artificial Sequence
  Antisense oligo
cggaugcuguggguuaugua

SEQ ID NO: 2814 - RNA, 20 nt, Artificial Sequence
  Antisense oligo
gcggaugcuguggguuaugu

SEQ ID NO: 2815 - RNA, 20 nt, Artificial Sequence
  Antisense oligo
ggcggaugcuguggguuaug

SEQ ID NO: 2816 - RNA, 20 nt, Artificial Sequence
  Antisense oligo
aggcggaugcuguggguuau

SEQ ID NO: 2817 - RNA, 20 nt, Artificial Sequence
  Antisense oligo
caggcggaugcuguggguua

SEQ ID NO: 2818 - RNA, 20 nt, Artificial Sequence
  Antisense oligo
gcaaaagagagagaauccgu

SEQ ID NO: 2819 - RNA, 20 nt, Artificial Sequence
  Antisense oligo
ggcaaaagagagagaauccg

SEQ ID NO: 2820 - RNA, 20 nt, Artificial Sequence
  Antisense oligo
gggcaaaagagagagaaucc

SEQ ID NO: 2821 - RNA, 20 nt, Artificial Sequence
  Antisense oligo
cuccagccugggcaaaagag

SEQ ID NO: 2822 - RNA, 20 nt, Artificial Sequence
  Antisense oligo
acuccagccugggcaaaaga

SEQ ID NO: 2823 - RNA, 20 nt, Artificial Sequence
  Antisense oligo
cacuccagccugggcaaaag

SEQ ID NO: 2824 - RNA, 20 nt, Artificial Sequence
  Antisense oligo
gcacuccagccugggcaaaa

SEQ ID NO: 2825 - RNA, 20 nt, Artificial Sequence
  Antisense oligo
ugcacuccagccugggcaaa

SEQ ID NO: 2826 - RNA, 20 nt, Artificial Sequence
  Antisense oligo
auugcacuccagccugggca

SEQ ID NO: 2827 - RNA, 20 nt, Artificial Sequence
  Antisense oligo
acgccauugcacuccagccu

SEQ ID NO: 2828 - RNA, 20 nt, Artificial Sequence
  Antisense oligo
ucacgccauugcacuccagc

SEQ ID NO: 2829 - RNA, 20 nt, Artificial Sequence
  Antisense oligo
aucacgccauugcacuccag

SEQ ID NO: 2830 - RNA, 20 nt, Artificial Sequence
  Antisense oligo
gaucacgccauugcacucca

SEQ ID NO: 2831 - RNA, 20 nt, Artificial Sequence
  Antisense oligo
agaucacgccauugcacucc

SEQ ID NO: 2832 - RNA, 20 nt, Artificial Sequence
  Antisense oligo
gagaucacgccauugcacuc

SEQ ID NO: 2833 - RNA, 20 nt, Artificial Sequence
  Antisense oligo
acucgcuugaacccaggagg

SEQ ID NO: 2834 - RNA, 20 nt, Artificial Sequence
  Antisense oligo
gacucgcuugaacccaggag

SEQ ID NO: 2835 - RNA, 20 nt, Artificial Sequence
  Antisense oligo
ggacucgcuugaacccagga

SEQ ID NO: 2836 - RNA, 20 nt, Artificial Sequence
  Antisense oligo
aaauuagccagguguggugg

SEQ ID NO: 2837 - RNA, 20 nt, Artificial Sequence
  Antisense oligo
aaaauuagccagguguggug

SEQ ID NO: 2838 - RNA, 20 nt, Artificial Sequence
  Antisense oligo
uuaaagugcauggugucggg

SEQ ID NO: 2839 - RNA, 20 nt, Artificial Sequence
  Antisense oligo
auuaaagugcauggugucgg

SEQ ID NO: 2840 - RNA, 20 nt, Artificial Sequence
  Antisense oligo
aauuaaagugcauggugucg

SEQ ID NO: 2841 - RNA, 20 nt, Artificial Sequence
  Antisense oligo
gaauuaaagugcaugguguc

SEQ ID NO: 2842 - RNA, 20 nt, Artificial Sequence
  Antisense oligo
gccugugguaaggaaucuag

SEQ ID NO: 2843 - RNA, 20 nt, Artificial Sequence
  Antisense oligo
ugccugugguaaggaaucua

SEQ ID NO: 2844 - RNA, 20 nt, Artificial Sequence
  Antisense oligo
augccugugguaaggaaucu

SEQ ID NO: 2845 - RNA, 20 nt, Artificial Sequence
  Antisense oligo
gaugccugugguaaggaauc

SEQ ID NO: 2846 - RNA, 20 nt, Artificial Sequence
  Antisense oligo
agaugccugugguaaggaau

SEQ ID NO: 2847 - RNA, 20 nt, Artificial Sequence
  Antisense oligo
cagaugccugugguaaggaa

SEQ ID NO: 2848 - RNA, 20 nt, Artificial Sequence
  Antisense oligo
cuaugucauacagaugccug

SEQ ID NO: 2849 - RNA, 20 nt, Artificial Sequence
  Antisense oligo
ucuaugucauacagaugccu

SEQ ID NO: 2850 - RNA, 20 nt, Artificial Sequence
  Antisense oligo
acagcaucuaugucauacag

SEQ ID NO: 2851 - RNA, 20 nt, Artificial Sequence
  Antisense oligo
cguguagcaacuguucauac

SEQ ID NO: 2852 - RNA, 20 nt, Artificial Sequence
  Antisense oligo
ccguguagcaacuguucaua

SEQ ID NO: 2853 - RNA, 20 nt, Artificial Sequence
  Antisense oligo
gcagccacagauucagccaa

SEQ ID NO: 2854 - RNA, 20 nt, Artificial Sequence
  Antisense oligo
ugcagccacagauucagcca

SEQ ID NO: 2855 - RNA, 20 nt, Artificial Sequence
  Antisense oligo
cugggcgacagagugagacu

SEQ ID NO: 2856 - RNA, 20 nt, Artificial Sequence
  Antisense oligo
gccgagauugugccacugca

SEQ ID NO: 2857 - RNA, 20 nt, Artificial Sequence
  Antisense oligo
agccgagauugugccacugc

SEQ ID NO: 2858 - RNA, 20 nt, Artificial Sequence
  Antisense oligo
gagccgagauugugccacug

SEQ ID NO: 2859 - RNA, 20 nt, Artificial Sequence
  Antisense oligo
ugagccgagauugugccacu

SEQ ID NO: 2860 - RNA, 20 nt, Artificial Sequence
  Antisense oligo
gugagccgagauugugccac

SEQ ID NO: 2861 - RNA, 20 nt, Artificial Sequence
  Antisense oligo
agugagccgagauugugcca

SEQ ID NO: 2862 - RNA, 20 nt, Artificial Sequence
  Antisense oligo
cagugagccgagauugugcc

SEQ ID NO: 2863 - RNA, 20 nt, Artificial Sequence
  Antisense oligo
gcagugagccgagauugugc

SEQ ID NO: 2864 - RNA, 20 nt, Artificial Sequence
  Antisense oligo
ugcagugagccgagauugug

SEQ ID NO: 2865 - RNA, 20 nt, Artificial Sequence
  Antisense oligo
uugcagugagccgagauugu

SEQ ID NO: 2866 - RNA, 20 nt, Artificial Sequence
  Antisense oligo
cuugcagugagccgagauug

SEQ ID NO: 2867 - RNA, 20 nt, Artificial Sequence
  Antisense oligo
gcuugcagugagccgagauu

SEQ ID NO: 2868 - RNA, 20 nt, Artificial Sequence
  Antisense oligo
agcuugcagugagccgagau

SEQ ID NO: 2869 - RNA, 20 nt, Artificial Sequence
  Antisense oligo
gagcuugcagugagccgaga

SEQ ID NO: 2870 - RNA, 20 nt, Artificial Sequence
  Antisense oligo
aggcugaggcaggagaaugg

SEQ ID NO: 2871 - RNA, 20 nt, Artificial Sequence
  Antisense oligo
gaggcugaggcaggagaaug

SEQ ID NO: 2872 - RNA, 20 nt, Artificial Sequence
  Antisense oligo
ggaggcugaggcaggagaau

SEQ ID NO: 2873 - RNA, 20 nt, Artificial Sequence
  Antisense oligo
aauuggcugggcgugguggu

SEQ ID NO: 2874 - RNA, 20 nt, Artificial Sequence
  Antisense oligo
uggcuaacacggugaaaccc

SEQ ID NO: 2875 - RNA, 20 nt, Artificial Sequence
  Antisense oligo
cuggcuaacacggugaaacc

SEQ ID NO: 2876 - RNA, 20 nt, Artificial Sequence
  Antisense oligo
ccuggcuaacacggugaaac

SEQ ID NO: 2877 - RNA, 20 nt, Artificial Sequence
  Antisense oligo
uccuggcuaacacggugaaa

SEQ ID NO: 2878 - RNA, 20 nt, Artificial Sequence
  Antisense oligo
auccuggcuaacacggugaa

SEQ ID NO: 2879 - RNA, 20 nt, Artificial Sequence
  Antisense oligo
cauccuggcuaacacgguga

SEQ ID NO: 2880 - RNA, 20 nt, Artificial Sequence
  Antisense oligo
ccauccuggcuaacacggug

SEQ ID NO: 2881 - RNA, 20 nt, Artificial Sequence
  Antisense oligo
accauccuggcuaacacggu

SEQ ID NO: 2882 - RNA, 20 nt, Artificial Sequence
  Antisense oligo
gaccauccuggcuaacacgg

SEQ ID NO: 2883 - RNA, 20 nt, Artificial Sequence
  Antisense oligo
agaccauccuggcuaacacg

SEQ ID NO: 2884 - RNA, 20 nt, Artificial Sequence
  Antisense oligo
cagaccauccuggcuaacac

SEQ ID NO: 2885 - RNA, 20 nt, Artificial Sequence
  Antisense oligo
cuguaaucccagcacuuugg

SEQ ID NO: 2886 - RNA, 20 nt, Artificial Sequence
  Antisense oligo
ccuguaaucccagcacuuug

SEQ ID NO: 2887 - RNA, 20 nt, Artificial Sequence
  Antisense oligo
gccuguaaucccagcacuuu

SEQ ID NO: 2888 - RNA, 20 nt, Artificial Sequence
  Antisense oligo
cgccuguaaucccagcacuu

SEQ ID NO: 2889 - RNA, 20 nt, Artificial Sequence
  Antisense oligo
acgccuguaaucccagcacu

SEQ ID NO: 2890 - RNA, 20 nt, Artificial Sequence
  Antisense oligo
cacgccuguaaucccagcac

SEQ ID NO: 2891 - RNA, 20 nt, Artificial Sequence
  Antisense oligo
ucacgccuguaaucccagca

SEQ ID NO: 2892 - RNA, 20 nt, Artificial Sequence
  Antisense oligo
cucacgccuguaaucccagc

SEQ ID NO: 2893 - RNA, 20 nt, Artificial Sequence
  Antisense oligo
gcucacgccuguaaucccag

SEQ ID NO: 2894 - RNA, 20 nt, Artificial Sequence
  Antisense oligo
ggcucacgccuguaauccca

SEQ ID NO: 2895 - RNA, 20 nt, Artificial Sequence
  Antisense oligo
uggcucacgccuguaauccc

SEQ ID NO: 2896 - RNA, 20 nt, Artificial Sequence
  Antisense oligo
guggcucacgccuguaaucc

SEQ ID NO: 2897 - RNA, 20 nt, Artificial Sequence
  Antisense oligo
aguggcucacgccuguaauc

SEQ ID NO: 2898 - RNA, 20 nt, Artificial Sequence
  Antisense oligo
caguggcucacgccuguaau

SEQ ID NO: 2899 - RNA, 20 nt, Artificial Sequence
  Antisense oligo
gcaguggcucacgccuguaa

SEQ ID NO: 2900 - RNA, 20 nt, Artificial Sequence
  Antisense oligo
ugcaguggcucacgccugua

SEQ ID NO: 2901 - RNA, 20 nt, Artificial Sequence
  Antisense oligo
gcaacacucugccuugaaaa

SEQ ID NO: 2902 - RNA, 20 nt, Artificial Sequence
  Antisense oligo
agccaagauugcaccacugc

SEQ ID NO: 2903 - RNA, 20 nt, Artificial Sequence
  Antisense oligo
gagccaagauugcaccacug

SEQ ID NO: 2904 - RNA, 20 nt, Artificial Sequence
  Antisense oligo
ugagccaagauugcaccacu

SEQ ID NO: 2905 - RNA, 20 nt, Artificial Sequence
  Antisense oligo
gugagccaagauugcaccac

SEQ ID NO: 2906 - RNA, 20 nt, Artificial Sequence
  Antisense oligo
agugagccaagauugcacca

SEQ ID NO: 2907 - RNA, 20 nt, Artificial Sequence
  Antisense oligo
cagugagccaagauugcacc

SEQ ID NO: 2908 - RNA, 20 nt, Artificial Sequence
  Antisense oligo
gcagugagccaagauugcac

SEQ ID NO: 2909 - RNA, 20 nt, Artificial Sequence
  Antisense oligo
uugcagugagccaagauugc

SEQ ID NO: 2910 - RNA, 20 nt, Artificial Sequence
  Antisense oligo
guugcagugagccaagauug

SEQ ID NO: 2911 - RNA, 20 nt, Artificial Sequence
  Antisense oligo
gguugcagugagccaagauu

SEQ ID NO: 2912 - RNA, 20 nt, Artificial Sequence
  Antisense oligo
agguugcagugagccaagau

SEQ ID NO: 2913 - RNA, 20 nt, Artificial Sequence
  Antisense oligo
gagguugcagugagccaaga

SEQ ID NO: 2914 - RNA, 20 nt, Artificial Sequence
  Antisense oligo
agagguugcagugagccaag

SEQ ID NO: 2915 - RNA, 20 nt, Artificial Sequence
  Antisense oligo
cagagguugcagugagccaa

SEQ ID NO: 2916 - RNA, 20 nt, Artificial Sequence
  Antisense oligo
gcagagguugcagugagcca

SEQ ID NO: 2917 - RNA, 20 nt, Artificial Sequence
  Antisense oligo
aggcagagguugcagugagc

SEQ ID NO: 2918 - RNA, 20 nt, Artificial Sequence
  Antisense oligo
gaggcagagguugcagugag

SEQ ID NO: 2919 - RNA, 20 nt, Artificial Sequence
  Antisense oligo
ggaggcagagguugcaguga

SEQ ID NO: 2920 - RNA, 20 nt, Artificial Sequence
  Antisense oligo
aggaggcagagguugcagug

SEQ ID NO: 2921 - RNA, 20 nt, Artificial Sequence
  Antisense oligo
uaggaggcagagguugcagu

SEQ ID NO: 2922 - RNA, 20 nt, Artificial Sequence
  Antisense oligo
cuaggaggcagagguugcag

SEQ ID NO: 2923 - RNA, 20 nt, Artificial Sequence
  Antisense oligo
gcugaggcaggagaaaucac

SEQ ID NO: 2924 - RNA, 20 nt, Artificial Sequence
  Antisense oligo
ggcugaggcaggagaaauca

SEQ ID NO: 2925 - RNA, 20 nt, Artificial Sequence
  Antisense oligo
aggcugaggcaggagaaauc

SEQ ID NO: 2926 - RNA, 20 nt, Artificial Sequence
  Antisense oligo
gaggcugaggcaggagaaau

SEQ ID NO: 2927 - RNA, 20 nt, Artificial Sequence
  Antisense oligo
agaggcugaggcaggagaaa

SEQ ID NO: 2928 - RNA, 20 nt, Artificial Sequence
  Antisense oligo
uagaggcugaggcaggagaa

SEQ ID NO: 2929 - RNA, 20 nt, Artificial Sequence
  Antisense oligo
cuagaggcugaggcaggaga

SEQ ID NO: 2930 - RNA, 20 nt, Artificial Sequence
  Antisense oligo
uguaaucccagcuacucuag

SEQ ID NO: 2931 - RNA, 20 nt, Artificial Sequence
  Antisense oligo
cuguaaucccagcuacucua

SEQ ID NO: 2932 - RNA, 20 nt, Artificial Sequence
  Antisense oligo
ccuguaaucccagcuacucu

SEQ ID NO: 2933 - RNA, 20 nt, Artificial Sequence
  Antisense oligo
accuguaaucccagcuacuc

SEQ ID NO: 2934 - RNA, 20 nt, Artificial Sequence
  Antisense oligo
caccuguaaucccagcuacu

SEQ ID NO: 2935 - RNA, 20 nt, Artificial Sequence
  Antisense oligo
acaccuguaaucccagcuac

SEQ ID NO: 2936 - RNA, 20 nt, Artificial Sequence
  Antisense oligo
cacaccuguaaucccagcua

SEQ ID NO: 2937 - RNA, 20 nt, Artificial Sequence
  Antisense oligo
acacaccuguaaucccagcu

SEQ ID NO: 2938 - RNA, 20 nt, Artificial Sequence
  Antisense oligo
cacacaccuguaaucccagc

SEQ ID NO: 2939 - RNA, 20 nt, Artificial Sequence
  Antisense oligo
gcacacaccuguaaucccag

SEQ ID NO: 2940 - RNA, 20 nt, Artificial Sequence
  Antisense oligo
ggcacacaccuguaauccca

SEQ ID NO: 2941 - RNA, 20 nt, Artificial Sequence
  Antisense oligo
uggcacacaccuguaauccc

SEQ ID NO: 2942 - RNA, 20 nt, Artificial Sequence
  Antisense oligo
aaauuagccaggcguggugg

SEQ ID NO: 2943 - RNA, 20 nt, Artificial Sequence
  Antisense oligo
aaaauuagccaggcguggug

SEQ ID NO: 2944 - RNA, 20 nt, Artificial Sequence
  Antisense oligo
aggaguucgagaccagccug

SEQ ID NO: 2945 - RNA, 20 nt, Artificial Sequence
  Antisense oligo
caggaguucgagaccagccu

SEQ ID NO: 2946 - RNA, 20 nt, Artificial Sequence
  Antisense oligo
ucaggaguucgagaccagcc

SEQ ID NO: 2947 - RNA, 20 nt, Artificial Sequence
  Antisense oligo
gucaggaguucgagaccagc

SEQ ID NO: 2948 - RNA, 20 nt, Artificial Sequence
  Antisense oligo
ugaggucaggaguucgagac

SEQ ID NO: 2949 - RNA, 20 nt, Artificial Sequence
  Antisense oligo
cugaggucaggaguucgaga

SEQ ID NO: 2950 - RNA, 20 nt, Artificial Sequence
  Antisense oligo
cagcacuuugagagaacgag

SEQ ID NO: 2951 - RNA, 20 nt, Artificial Sequence
  Antisense oligo
ccagcacuuugagagaacga

SEQ ID NO: 2952 - RNA, 20 nt, Artificial Sequence
  Antisense oligo
cccagcacuuugagagaacg

SEQ ID NO: 2953 - RNA, 20 nt, Artificial Sequence
  Antisense oligo
ucccagcacuuugagagaac

SEQ ID NO: 2954 - RNA, 20 nt, Artificial Sequence
  Antisense oligo
aucccagcacuuugagagaa

SEQ ID NO: 2955 - RNA, 20 nt, Artificial Sequence
  Antisense oligo
aaucccagcacuuugagaga

SEQ ID NO: 2956 - RNA, 20 nt, Artificial Sequence
  Antisense oligo
uaaucccagcacuuugagag

SEQ ID NO: 2957 - RNA, 20 nt, Artificial Sequence
  Antisense oligo
guaaucccagcacuuugaga

SEQ ID NO: 2958 - RNA, 20 nt, Artificial Sequence
  Antisense oligo
uguaaucccagcacuuugag

SEQ ID NO: 2959 - RNA, 20 nt, Artificial Sequence
  Antisense oligo
cuguaaucccagcacuuuga

SEQ ID NO: 2960 - RNA, 20 nt, Artificial Sequence
  Antisense oligo
ccuguaaucccagcacuuug

SEQ ID NO: 2961 - RNA, 20 nt, Artificial Sequence
  Antisense oligo
accuguaaucccagcacuuu

SEQ ID NO: 2962 - RNA, 20 nt, Artificial Sequence
  Antisense oligo
caccuguaaucccagcacuu

SEQ ID NO: 2963 - RNA, 20 nt, Artificial Sequence
  Antisense oligo
acaccuguaaucccagcacu

SEQ ID NO: 2964 - RNA, 20 nt, Artificial Sequence
  Antisense oligo
cacaccuguaaucccagcac

SEQ ID NO: 2965 - RNA, 20 nt, Artificial Sequence
  Antisense oligo
ucacaccuguaaucccagca

SEQ ID NO: 2966 - RNA, 20 nt, Artificial Sequence
  Antisense oligo
cucacaccuguaaucccagc

SEQ ID NO: 2967 - RNA, 20 nt, Artificial Sequence
  Antisense oligo
gcucacaccuguaaucccag

SEQ ID NO: 2968 - RNA, 20 nt, Artificial Sequence
  Antisense oligo
ggcucacaccuguaauccca

SEQ ID NO: 2969 - RNA, 20 nt, Artificial Sequence
  Antisense oligo
uggcucacaccuguaauccc

SEQ ID NO: 2970 - RNA, 20 nt, Artificial Sequence
  Antisense oligo
guggcucacaccuguaaucc

SEQ ID NO: 2971 - RNA, 20 nt, Artificial Sequence
  Antisense oligo
ggugaggcuuagaaguauuu

SEQ ID NO: 2972 - RNA, 20 nt, Artificial Sequence
  Antisense oligo
gggugaggcuuagaaguauu

SEQ ID NO: 2973 - RNA, 20 nt, Artificial Sequence
  Antisense oligo
gaaucucgaacuacauaacc

SEQ ID NO: 2974 - RNA, 20 nt, Artificial Sequence
  Antisense oligo
ccagaaucucgaacuacaua

SEQ ID NO: 2975 - RNA, 20 nt, Artificial Sequence
  Antisense oligo
cccagaaucucgaacuacau

SEQ ID NO: 2976 - RNA, 20 nt, Artificial Sequence
  Antisense oligo
acccagaaucucgaacuaca

SEQ ID NO: 2977 - RNA, 20 nt, Artificial Sequence
  Antisense oligo
gacccagaaucucgaacuac

SEQ ID NO: 2978 - RNA, 20 nt, Artificial Sequence
  Antisense oligo
ugacccagaaucucgaacua

SEQ ID NO: 2979 - RNA, 20 nt, Artificial Sequence
  Antisense oligo
cuuugacccagaaucucgaa

SEQ ID NO: 2980 - RNA, 20 nt, Artificial Sequence
  Antisense oligo
ucuuugacccagaaucucga

SEQ ID NO: 2981 - RNA, 20 nt, Artificial Sequence
  Antisense oligo
auagucuucuuugacccaga

SEQ ID NO: 2982 - RNA, 20 nt, Artificial Sequence
  Antisense oligo
cauagucuucuuugacccag

SEQ ID NO: 2983 - RNA, 20 nt, Artificial Sequence
  Antisense oligo
ccugcugucugcuuuuccau

SEQ ID NO: 2984 - RNA, 20 nt, Artificial Sequence
  Antisense oligo
uccugcugucugcuuuucca

SEQ ID NO: 2985 - RNA, 20 nt, Artificial Sequence
  Antisense oligo
cuccugcugucugcuuuucc

SEQ ID NO: 2986 - RNA, 20 nt, Artificial Sequence
  Antisense oligo
acuucucggugaggacuggc

SEQ ID NO: 2987 - RNA, 20 nt, Artificial Sequence
  Antisense oligo
uacuucucggugaggacugg

SEQ ID NO: 2988 - RNA, 20 nt, Artificial Sequence
  Antisense oligo
uuacuucucggugaggacug

SEQ ID NO: 2989 - RNA, 20 nt, Artificial Sequence
  Antisense oligo
cuuacuucucggugaggacu

SEQ ID NO: 2990 - RNA, 20 nt, Artificial Sequence
  Antisense oligo
acuuacuucucggugaggac

SEQ ID NO: 2991 - RNA, 20 nt, Artificial Sequence
  Antisense oligo
ccacuuacuucucggugagg

SEQ ID NO: 2992 - RNA, 20 nt, Artificial Sequence
  Antisense oligo
accacuuacuucucggugag

SEQ ID NO: 2993 - RNA, 20 nt, Artificial Sequence
  Antisense oligo
gaccacuuacuucucgguga

SEQ ID NO: 2994 - RNA, 20 nt, Artificial Sequence
  Antisense oligo
ggaccacuuacuucucggug

SEQ ID NO: 2995 - RNA, 20 nt, Artificial Sequence
  Antisense oligo
gggaccacuuacuucucggu

SEQ ID NO: 2996 - RNA, 20 nt, Artificial Sequence
  Antisense oligo
agggaccacuuacuucucgg

SEQ ID NO: 2997 - RNA, 20 nt, Artificial Sequence
  Antisense oligo
uagggaccacuuacuucucg

SEQ ID NO: 2998 - RNA, 20 nt, Artificial Sequence
  Antisense oligo
uuagggaccacuuacuucuc

SEQ ID NO: 2999 - RNA, 20 nt, Artificial Sequence
  Antisense oligo
guuagggaccacuuacuucu

SEQ ID NO: 3000 - RNA, 20 nt, Artificial Sequence
  Antisense oligo
aguuagggaccacuuacuuc

SEQ ID NO: 3001 - RNA, 20 nt, Artificial Sequence
  Antisense oligo
gaguuagggaccacuuacuu

SEQ ID NO: 3002 - RNA, 20 nt, Artificial Sequence
  Antisense oligo
ugaguuagggaccacuuacu

SEQ ID NO: 3003 - RNA, 20 nt, Artificial Sequence
  Antisense oligo
cugaguuagggaccacuuac

SEQ ID NO: 3004 - RNA, 20 nt, Artificial Sequence
  Antisense oligo
ccugaguuagggaccacuua

SEQ ID NO: 3005 - RNA, 20 nt, Artificial Sequence
  Antisense oligo
uucccgugugaacugccacc

SEQ ID NO: 3006 - RNA, 20 nt, Artificial Sequence
  Antisense oligo
cuucccgugugaacugccac

SEQ ID NO: 3007 - RNA, 20 nt, Artificial Sequence
  Antisense oligo
ucuucccgugugaacugcca

SEQ ID NO: 3008 - RNA, 20 nt, Artificial Sequence
  Antisense oligo
cagcucuucccgugugaacu

SEQ ID NO: 3009 - RNA, 20 nt, Artificial Sequence
  Antisense oligo
ucagcucuucccgugugaac

SEQ ID NO: 3010 - RNA, 20 nt, Artificial Sequence
  Antisense oligo
cucagcucuucccgugugaa

SEQ ID NO: 3011 - RNA, 20 nt, Artificial Sequence
  Antisense oligo
ccucagcucuucccguguga

SEQ ID NO: 3012 - RNA, 20 nt, Artificial Sequence
  Antisense oligo
accaucugacaucaucacac

SEQ ID NO: 3013 - RNA, 20 nt, Artificial Sequence
  Antisense oligo
ccaaccaucugacaucauca

SEQ ID NO: 3014 - RNA, 20 nt, Artificial Sequence
  Antisense oligo
accaaccaucugacaucauc

SEQ ID NO: 3015 - RNA, 20 nt, Artificial Sequence
  Antisense oligo
aaaaccaaccaucugacauc

SEQ ID NO: 3016 - RNA, 20 nt, Artificial Sequence
  Antisense oligo
cccagaaccucuuuucaaua

SEQ ID NO: 3017 - RNA, 20 nt, Artificial Sequence
  Antisense oligo
ucccagaaccucuuuucaau

SEQ ID NO: 3018 - RNA, 20 nt, Artificial Sequence
  Antisense oligo
aucccagaaccucuuuucaa

SEQ ID NO: 3019 - RNA, 20 nt, Artificial Sequence
  Antisense oligo
caucccagaaccucuuuuca

SEQ ID NO: 3020 - RNA, 20 nt, Artificial Sequence
  Antisense oligo
uggaagaccacugcccucaa

SEQ ID NO: 3021 - RNA, 20 nt, Artificial Sequence
  Antisense oligo
uuccuggaagaccacugccc

SEQ ID NO: 3022 - RNA, 20 nt, Artificial Sequence
  Antisense oligo
guuccuggaagaccacugcc

SEQ ID NO: 3023 - RNA, 20 nt, Artificial Sequence
  Antisense oligo
aguuccuggaagaccacugc

SEQ ID NO: 3024 - RNA, 20 nt, Artificial Sequence
  Antisense oligo
gagggaccgugauccaguuc

SEQ ID NO: 3025 - RNA, 20 nt, Artificial Sequence
  Antisense oligo
ggagggaccgugauccaguu

SEQ ID NO: 3026 - RNA, 20 nt, Artificial Sequence
  Antisense oligo
ugcaggagagacccuuggag

SEQ ID NO: 3027 - RNA, 20 nt, Artificial Sequence
  Antisense oligo
aguaagcgcagacgcaacug

SEQ ID NO: 3028 - RNA, 20 nt, Artificial Sequence
  Antisense oligo
caguaagcgcagacgcaacu

SEQ ID NO: 3029 - RNA, 20 nt, Artificial Sequence
  Antisense oligo
gcaguaagcgcagacgcaac

SEQ ID NO: 3030 - RNA, 20 nt, Artificial Sequence
  Antisense oligo
ugcaguaagcgcagacgcaa

SEQ ID NO: 3031 - RNA, 20 nt, Artificial Sequence
  Antisense oligo
ccagccaggaagaaacagca

SEQ ID NO: 3032 - RNA, 20 nt, Artificial Sequence
  Antisense oligo
gccagccaggaagaaacagc

SEQ ID NO: 3033 - RNA, 20 nt, Artificial Sequence
  Antisense oligo
cucagaccuuaggaacagcu

SEQ ID NO: 3034 - RNA, 20 nt, Artificial Sequence
  Antisense oligo
ggcucagaccuuaggaacag

SEQ ID NO: 3035 - RNA, 20 nt, Artificial Sequence
  Antisense oligo
gggcucagaccuuaggaaca

SEQ ID NO: 3036 - RNA, 20 nt, Artificial Sequence
  Antisense oligo
auguagcaaagggcucagac

SEQ ID NO: 3037 - RNA, 20 nt, Artificial Sequence
  Antisense oligo
gauguagcaaagggcucaga

SEQ ID NO: 3038 - RNA, 20 nt, Artificial Sequence
  Antisense oligo
ugauguagcaaagggcucag

SEQ ID NO: 3039 - RNA, 20 nt, Artificial Sequence
  Antisense oligo
cuugauguagcaaagggcuc

SEQ ID NO: 3040 - RNA, 20 nt, Artificial Sequence
  Antisense oligo
ccgcuucuuuccuugaugua

SEQ ID NO: 3041 - RNA, 20 nt, Artificial Sequence
  Antisense oligo
accgcuucuuuccuugaugu

SEQ ID NO: 3042 - RNA, 20 nt, Artificial Sequence
  Antisense oligo
cuaccgcuucuuuccuugau

SEQ ID NO: 3043 - RNA, 20 nt, Artificial Sequence
  Antisense oligo
ccuaccgcuucuuuccuuga

SEQ ID NO: 3044 - RNA, 20 nt, Artificial Sequence
  Antisense oligo
ucccaccagcauggaagaug

SEQ ID NO: 3045 - RNA, 20 nt, Artificial Sequence
  Antisense oligo
cucccaccagcauggaagau

SEQ ID NO: 3046 - RNA, 20 nt, Artificial Sequence
  Antisense oligo
accucccaccagcauggaag

SEQ ID NO: 3047 - RNA, 20 nt, Artificial Sequence
  Antisense oligo
gaacaggaggagcccacuga

SEQ ID NO: 3048 - RNA, 20 nt, Artificial Sequence
  Antisense oligo
cagaaauagacggagaaucc

SEQ ID NO: 3049 - RNA, 20 nt, Artificial Sequence
  Antisense oligo
gcagaaauagacggagaauc

SEQ ID NO: 3050 - RNA, 20 nt, Artificial Sequence
  Antisense oligo
ggcagaaauagacggagaau

SEQ ID NO: 3051 - RNA, 20 nt, Artificial Sequence
  Antisense oligo
ucuggcagaaauagacggag

SEQ ID NO: 3052 - RNA, 20 nt, Artificial Sequence
  Antisense oligo
gcucuggcagaaauagacgg

SEQ ID NO: 3053 - RNA, 20 nt, Artificial Sequence
  Antisense oligo
aucaggcucuggcagaaaua

SEQ ID NO: 3054 - RNA, 20 nt, Artificial Sequence
  Antisense oligo
aaucaggcucuggcagaaau

SEQ ID NO: 3055 - RNA, 20 nt, Artificial Sequence
  Antisense oligo
uaaucaggcucuggcagaaa

SEQ ID NO: 3056 - RNA, 20 nt, Artificial Sequence
  Antisense oligo
gacauaaucaggcucuggca

SEQ ID NO: 3057 - RNA, 20 nt, Artificial Sequence
  Antisense oligo
ugacauaaucaggcucuggc

SEQ ID NO: 3058 - RNA, 20 nt, Artificial Sequence
  Antisense oligo
augacauaaucaggcucugg

SEQ ID NO: 3059 - RNA, 20 nt, Artificial Sequence
  Antisense oligo
cgaugacauaaucaggcucu

SEQ ID NO: 3060 - RNA, 20 nt, Artificial Sequence
  Antisense oligo
uucgaugacauaaucaggcu

SEQ ID NO: 3061 - RNA, 20 nt, Artificial Sequence
  Antisense oligo
cuucgaugacauaaucaggc

SEQ ID NO: 3062 - RNA, 20 nt, Artificial Sequence
  Antisense oligo
gcuucgaugacauaaucagg

SEQ ID NO: 3063 - RNA, 20 nt, Artificial Sequence
  Antisense oligo
cagcuucgaugacauaauca

SEQ ID NO: 3064 - RNA, 20 nt, Artificial Sequence
  Antisense oligo
gcagcuucgaugacauaauc

SEQ ID NO: 3065 - RNA, 20 nt, Artificial Sequence
  Antisense oligo
agcagcuucgaugacauaau

SEQ ID NO: 3066 - RNA, 20 nt, Artificial Sequence
  Antisense oligo
uagcagcuucgaugacauaa

SEQ ID NO: 3067 - RNA, 20 nt, Artificial Sequence
  Antisense oligo
cuagcagcuucgaugacaua

SEQ ID NO: 3068 - RNA, 20 nt, Artificial Sequence
  Antisense oligo
cucuagcagcuucgaugaca

SEQ ID NO: 3069 - RNA, 20 nt, Artificial Sequence
  Antisense oligo
gcucuagcagcuucgaugac

SEQ ID NO: 3070 - RNA, 20 nt, Artificial Sequence
  Antisense oligo
ugcucuagcagcuucgauga

SEQ ID NO: 3071 - RNA, 20 nt, Artificial Sequence
  Antisense oligo
augcucuagcagcuucgaug

SEQ ID NO: 3072 - RNA, 20 nt, Artificial Sequence
  Antisense oligo
gaugcucuagcagcuucgau

SEQ ID NO: 3073 - RNA, 20 nt, Artificial Sequence
  Antisense oligo
ggaugcucuagcagcuucga

SEQ ID NO: 3074 - RNA, 20 nt, Artificial Sequence
  Antisense oligo
uggaugcucuagcagcuucg

SEQ ID NO: 3075 - RNA, 20 nt, Artificial Sequence
  Antisense oligo
auggaugcucuagcagcuuc

SEQ ID NO: 3076 - RNA, 20 nt, Artificial Sequence
  Antisense oligo
cauggaugcucuagcagcuu

SEQ ID NO: 3077 - RNA, 20 nt, Artificial Sequence
  Antisense oligo
ucauggaugcucuagcagcu

SEQ ID NO: 3078 - RNA, 20 nt, Artificial Sequence
  Antisense oligo
gucauggaugcucuagcagc

SEQ ID NO: 3079 - RNA, 20 nt, Artificial Sequence
  Antisense oligo
ggucauggaugcucuagcag

SEQ ID NO: 3080 - RNA, 20 nt, Artificial Sequence
  Antisense oligo
aaggucauggaugcucuagc

SEQ ID NO: 3081 - RNA, 20 nt, Artificial Sequence
  Antisense oligo
caaggucauggaugcucuag

SEQ ID NO: 3082 - RNA, 20 nt, Artificial Sequence
  Antisense oligo
ccaaggucauggaugcucua

SEQ ID NO: 3083 - RNA, 20 nt, Artificial Sequence
  Antisense oligo
gccaaggucauggaugcucu

SEQ ID NO: 3084 - RNA, 20 nt, Artificial Sequence
  Antisense oligo
agccaaggucauggaugcuc

SEQ ID NO: 3085 - RNA, 20 nt, Artificial Sequence
  Antisense oligo
aauaagccaaggucauggau

SEQ ID NO: 3086 - RNA, 20 nt, Artificial Sequence
  Antisense oligo
aaauaagccaaggucaugga

SEQ ID NO: 3087 - RNA, 20 nt, Artificial Sequence
  Antisense oligo
aaaauaagccaaggucaugg

SEQ ID NO: 3088 - RNA, 20 nt, Artificial Sequence
  Antisense oligo
gaaaauaagccaaggucaug

SEQ ID NO: 3089 - RNA, 20 nt, Artificial Sequence
  Antisense oligo
aggugugagccacugugccu

SEQ ID NO: 3090 - RNA, 20 nt, Artificial Sequence
  Antisense oligo
gccucccaaagugcugugau

SEQ ID NO: 3091 - RNA, 20 nt, Artificial Sequence
  Antisense oligo
ggccucccaaagugcuguga

SEQ ID NO: 3092 - RNA, 20 nt, Artificial Sequence
  Antisense oligo
ucggccucccaaagugcugu

SEQ ID NO: 3093 - RNA, 20 nt, Artificial Sequence
  Antisense oligo
acugaccucaggugauccac

SEQ ID NO: 3094 - RNA, 20 nt, Artificial Sequence
  Antisense oligo
aacugaccucaggugaucca

SEQ ID NO: 3095 - RNA, 20 nt, Artificial Sequence
  Antisense oligo
gaacugaccucaggugaucc

SEQ ID NO: 3096 - RNA, 20 nt, Artificial Sequence
  Antisense oligo
ugaacugaccucaggugauc

SEQ ID NO: 3097 - RNA, 20 nt, Artificial Sequence
  Antisense oligo
uugaacugaccucaggugau

SEQ ID NO: 3098 - RNA, 20 nt, Artificial Sequence
  Antisense oligo
caggcuggucuugaacugac

SEQ ID NO: 3099 - RNA, 20 nt, Artificial Sequence
  Antisense oligo
ccaggcuggucuugaacuga

SEQ ID NO: 3100 - RNA, 20 nt, Artificial Sequence
  Antisense oligo
gccaggcuggucuugaacug

SEQ ID NO: 3101 - RNA, 20 nt, Artificial Sequence
  Antisense oligo
ggccaggcuggucuugaacu

SEQ ID NO: 3102 - RNA, 20 nt, Artificial Sequence
  Antisense oligo
ccucagccucccaaguagcu

SEQ ID NO: 3103 - RNA, 20 nt, Artificial Sequence
  Antisense oligo
ugccucagccucccaaguag

SEQ ID NO: 3104 - RNA, 20 nt, Artificial Sequence
  Antisense oligo
cugccucagccucccaagua

SEQ ID NO: 3105 - RNA, 20 nt, Artificial Sequence
  Antisense oligo
auccugccucagccucccaa

SEQ ID NO: 3106 - RNA, 20 nt, Artificial Sequence
  Antisense oligo
uauccugccucagccuccca

SEQ ID NO: 3107 - RNA, 20 nt, Artificial Sequence
  Antisense oligo
uuauccugccucagccuccc

SEQ ID NO: 3108 - RNA, 20 nt, Artificial Sequence
  Antisense oligo
auuauccugccucagccucc

SEQ ID NO: 3109 - RNA, 20 nt, Artificial Sequence
  Antisense oligo
gauuauccugccucagccuc

SEQ ID NO: 3110 - RNA, 20 nt, Artificial Sequence
  Antisense oligo
caugaucugagcccauugca

SEQ ID NO: 3111 - RNA, 20 nt, Artificial Sequence
  Antisense oligo
gcaugaucugagcccauugc

SEQ ID NO: 3112 - RNA, 20 nt, Artificial Sequence
  Antisense oligo
uggcaugaucugagcccauu

SEQ ID NO: 3113 - RNA, 20 nt, Artificial Sequence
  Antisense oligo
ggagugcaauggcaugaucu

SEQ ID NO: 3114 - RNA, 20 nt, Artificial Sequence
  Antisense oligo
uggagugcaauggcaugauc

SEQ ID NO: 3115 - RNA, 20 nt, Artificial Sequence
  Antisense oligo
cuggagugcaauggcaugau

SEQ ID NO: 3116 - RNA, 20 nt, Artificial Sequence
  Antisense oligo
gcuggagugcaauggcauga

SEQ ID NO: 3117 - RNA, 20 nt, Artificial Sequence
  Antisense oligo
ggcuggagugcaauggcaug

SEQ ID NO: 3118 - RNA, 20 nt, Artificial Sequence
  Antisense oligo
aggcuggagugcaauggcau

SEQ ID NO: 3119 - RNA, 20 nt, Artificial Sequence
  Antisense oligo
caggcuggagugcaauggca

SEQ ID NO: 3120 - RNA, 20 nt, Artificial Sequence
  Antisense oligo
ugcccaggcuggagugcaau

SEQ ID NO: 3121 - RNA, 20 nt, Artificial Sequence
  Antisense oligo
uuguugcccaggcuggagug

SEQ ID NO: 3122 - RNA, 20 nt, Artificial Sequence
  Antisense oligo
cuuguugcccaggcuggagu

SEQ ID NO: 3123 - RNA, 20 nt, Artificial Sequence
  Antisense oligo
ucuuguugcccaggcuggag

SEQ ID NO: 3124 - RNA, 20 nt, Artificial Sequence
  Antisense oligo
cucuuguugcccaggcugga

SEQ ID NO: 3125 - RNA, 20 nt, Artificial Sequence
  Antisense oligo
acucuuguugcccaggcugg

SEQ ID NO: 3126 - RNA, 20 nt, Artificial Sequence
  Antisense oligo
cacucuuguugcccaggcug

SEQ ID NO: 3127 - RNA, 20 nt, Artificial Sequence
  Antisense oligo
ucacucuuguugcccaggcu

SEQ ID NO: 3128 - RNA, 20 nt, Artificial Sequence
  Antisense oligo
uucacucuuguugcccaggc

SEQ ID NO: 3129 - RNA, 20 nt, Artificial Sequence
  Antisense oligo
uuucacucuuguugcccagg

SEQ ID NO: 3130 - RNA, 20 nt, Artificial Sequence
  Antisense oligo
guuucacucuuguugcccag

SEQ ID NO: 3131 - RNA, 20 nt, Artificial Sequence
  Antisense oligo
aguuucacucuuguugccca

SEQ ID NO: 3132 - RNA, 20 nt, Artificial Sequence
  Antisense oligo
ccaccacgcccagcuauuuu

SEQ ID NO: 3133 - RNA, 20 nt, Artificial Sequence
  Antisense oligo
gccaccacgcccagcuauuu

SEQ ID NO: 3134 - RNA, 20 nt, Artificial Sequence
  Antisense oligo
ugccaccacgcccagcuauu

SEQ ID NO: 3135 - RNA, 20 nt, Artificial Sequence
  Antisense oligo
augccaccacgcccagcuau

SEQ ID NO: 3136 - RNA, 20 nt, Artificial Sequence
  Antisense oligo
ugggauuacaggcacaugcc

SEQ ID NO: 3137 - RNA, 20 nt, Artificial Sequence
  Antisense oligo
cugggauuacaggcacaugc

SEQ ID NO: 3138 - RNA, 20 nt, Artificial Sequence
  Antisense oligo
gcugggauuacaggcacaug

SEQ ID NO: 3139 - RNA, 20 nt, Artificial Sequence
  Antisense oligo
agcugggauuacaggcacau

SEQ ID NO: 3140 - RNA, 20 nt, Artificial Sequence
  Antisense oligo
uagcugggauuacaggcaca

SEQ ID NO: 3141 - RNA, 20 nt, Artificial Sequence
  Antisense oligo
guagcugggauuacaggcac

SEQ ID NO: 3142 - RNA, 20 nt, Artificial Sequence
  Antisense oligo
aguagcugggauuacaggca

SEQ ID NO: 3143 - RNA, 20 nt, Artificial Sequence
  Antisense oligo
gaguagcugggauuacaggc

SEQ ID NO: 3144 - RNA, 20 nt, Artificial Sequence
  Antisense oligo
auucuccugccucagccucc

SEQ ID NO: 3145 - RNA, 20 nt, Artificial Sequence
  Antisense oligo
cauucuccugccucagccuc

SEQ ID NO: 3146 - RNA, 20 nt, Artificial Sequence
  Antisense oligo
ccauucuccugccucagccu

SEQ ID NO: 3147 - RNA, 20 nt, Artificial Sequence
  Antisense oligo
ugccauucuccugccucagc

SEQ ID NO: 3148 - RNA, 20 nt, Artificial Sequence
  Antisense oligo
ucacugcaaccucuguuucc

SEQ ID NO: 3149 - RNA, 20 nt, Artificial Sequence
  Antisense oligo
cucacugcaaccucuguuuc

SEQ ID NO: 3150 - RNA, 20 nt, Artificial Sequence
  Antisense oligo
gcucacugcaaccucuguuu

SEQ ID NO: 3151 - RNA, 20 nt, Artificial Sequence
  Antisense oligo
agcucacugcaaccucuguu

SEQ ID NO: 3152 - RNA, 20 nt, Artificial Sequence
  Antisense oligo
cagcucacugcaaccucugu

SEQ ID NO: 3153 - RNA, 20 nt, Artificial Sequence
  Antisense oligo
ucagcucacugcaaccucug

SEQ ID NO: 3154 - RNA, 20 nt, Artificial Sequence
  Antisense oligo
cucagcucacugcaaccucu

SEQ ID NO: 3155 - RNA, 20 nt, Artificial Sequence
  Antisense oligo
ucucagcucacugcaaccuc

SEQ ID NO: 3156 - RNA, 20 nt, Artificial Sequence
  Antisense oligo
aucucagcucacugcaaccu

SEQ ID NO: 3157 - RNA, 20 nt, Artificial Sequence
  Antisense oligo
aaucucagcucacugcaacc

SEQ ID NO: 3158 - RNA, 20 nt, Artificial Sequence
  Antisense oligo
caaucucagcucacugcaac

SEQ ID NO: 3159 - RNA, 20 nt, Artificial Sequence
  Antisense oligo
acaaucucagcucacugcaa

SEQ ID NO: 3160 - RNA, 20 nt, Artificial Sequence
  Antisense oligo
cacaaucucagcucacugca

SEQ ID NO: 3161 - RNA, 20 nt, Artificial Sequence
  Antisense oligo
gcacaaucucagcucacugc

SEQ ID NO: 3162 - RNA, 20 nt, Artificial Sequence
  Antisense oligo
ggcacaaucucagcucacug

SEQ ID NO: 3163 - RNA, 20 nt, Artificial Sequence
  Antisense oligo
uggcacaaucucagcucacu

SEQ ID NO: 3164 - RNA, 20 nt, Artificial Sequence
  Antisense oligo
guggcacaaucucagcucac

SEQ ID NO: 3165 - RNA, 20 nt, Artificial Sequence
  Antisense oligo
aguggcacaaucucagcuca

SEQ ID NO: 3166 - RNA, 20 nt, Artificial Sequence
  Antisense oligo
caguggcacaaucucagcuc

SEQ ID NO: 3167 - RNA, 20 nt, Artificial Sequence
  Antisense oligo
gcaguggcacaaucucagcu

SEQ ID NO: 3168 - RNA, 20 nt, Artificial Sequence
  Antisense oligo
ugcaguggcacaaucucagc

SEQ ID NO: 3169 - RNA, 20 nt, Artificial Sequence
  Antisense oligo
ucugucacccaggcuggagu

SEQ ID NO: 3170 - RNA, 20 nt, Artificial Sequence
  Antisense oligo
acucugucacccaggcugga

SEQ ID NO: 3171 - RNA, 20 nt, Artificial Sequence
  Antisense oligo
ucacucugucacccaggcug

SEQ ID NO: 3172 - RNA, 20 nt, Artificial Sequence
  Antisense oligo
cucacucugucacccaggcu

SEQ ID NO: 3173 - RNA, 20 nt, Artificial Sequence
  Antisense oligo
ucucacucugucacccaggc

SEQ ID NO: 3174 - RNA, 20 nt, Artificial Sequence
  Antisense oligo
gucucacucugucacccagg

SEQ ID NO: 3175 - RNA, 20 nt, Artificial Sequence
  Antisense oligo
agucucacucugucacccag

SEQ ID NO: 3176 - RNA, 20 nt, Artificial Sequence
  Antisense oligo
agcugggcuuuccauuauuu

SEQ ID NO: 3177 - RNA, 20 nt, Artificial Sequence
  Antisense oligo
uagaaagguggagcugggcu

SEQ ID NO: 3178 - RNA, 20 nt, Artificial Sequence
  Antisense oligo
uuagaaagguggagcugggc

SEQ ID NO: 3179 - RNA, 20 nt, Artificial Sequence
  Antisense oligo
augggauuagaaagguggag

SEQ ID NO: 3180 - RNA, 20 nt, Artificial Sequence
  Antisense oligo
aaugggauuagaaaggugga

SEQ ID NO: 3181 - RNA, 20 nt, Artificial Sequence
  Antisense oligo
cucaaugggauuagaaaggu

SEQ ID NO: 3182 - RNA, 20 nt, Artificial Sequence
  Antisense oligo
acuuccucaaugggauuaga

SEQ ID NO: 3183 - RNA, 20 nt, Artificial Sequence
  Antisense oligo
aacuuccucaaugggauuag

SEQ ID NO: 3184 - RNA, 20 nt, Artificial Sequence
  Antisense oligo
cagguguguccauaauaaac

SEQ ID NO: 3185 - RNA, 20 nt, Artificial Sequence
  Antisense oligo
caucagguguguccauaaua

SEQ ID NO: 3186 - RNA, 20 nt, Artificial Sequence
  Antisense oligo
ucaucagguguguccauaau

SEQ ID NO: 3187 - RNA, 20 nt, Artificial Sequence
  Antisense oligo
cucaucagguguguccauaa

SEQ ID NO: 3188 - RNA, 20 nt, Artificial Sequence
  Antisense oligo
gcucaucagguguguccaua

SEQ ID NO: 3189 - RNA, 20 nt, Artificial Sequence
  Antisense oligo
ggcucaucagguguguccau

SEQ ID NO: 3190 - RNA, 20 nt, Artificial Sequence
  Antisense oligo
caccaagccucaccuacagg

SEQ ID NO: 3191 - RNA, 20 nt, Artificial Sequence
  Antisense oligo
gcaccaagccucaccuacag

SEQ ID NO: 3192 - RNA, 20 nt, Artificial Sequence
  Antisense oligo
ugcaccaagccucaccuaca

SEQ ID NO: 3193 - RNA, 20 nt, Artificial Sequence
  Antisense oligo
aaggcagaguagacagggcc

SEQ ID NO: 3194 - RNA, 20 nt, Artificial Sequence
  Antisense oligo
gaaggcagaguagacagggc

SEQ ID NO: 3195 - RNA, 20 nt, Artificial Sequence
  Antisense oligo
ggaaggcagaguagacaggg

SEQ ID NO: 3196 - RNA, 20 nt, Artificial Sequence
  Antisense oligo
cggaaggcagaguagacagg

SEQ ID NO: 3197 - RNA, 20 nt, Artificial Sequence
  Antisense oligo
gggaguaacgggaaacagcu

SEQ ID NO: 3198 - RNA, 20 nt, Artificial Sequence
  Antisense oligo
gacagaguagcagguggauc

SEQ ID NO: 3199 - RNA, 20 nt, Artificial Sequence
  Antisense oligo
gaaggacagaguagcaggug

SEQ ID NO: 3200 - RNA, 20 nt, Artificial Sequence
  Antisense oligo
ugaaggacagaguagcaggu

SEQ ID NO: 3201 - RNA, 20 nt, Artificial Sequence
  Antisense oligo
cugaaggacagaguagcagg

SEQ ID NO: 3202 - RNA, 20 nt, Artificial Sequence
  Antisense oligo
agaggaggcgcugucuuguc

SEQ ID NO: 3203 - RNA, 20 nt, Artificial Sequence
  Antisense oligo
cagaggaggcgcugucuugu

SEQ ID NO: 3204 - RNA, 20 nt, Artificial Sequence
  Antisense oligo
accagaggaggcgcugucuu

SEQ ID NO: 3205 - RNA, 20 nt, Artificial Sequence
  Antisense oligo
aucaccagaggaggcgcugu

SEQ ID NO: 3206 - RNA, 20 nt, Artificial Sequence
  Antisense oligo
aaucaccagaggaggcgcug

SEQ ID NO: 3207 - RNA, 20 nt, Artificial Sequence
  Antisense oligo
caaucaccagaggaggcgcu

SEQ ID NO: 3208 - RNA, 20 nt, Artificial Sequence
  Antisense oligo
ucaaucaccagaggaggcgc

SEQ ID NO: 3209 - RNA, 20 nt, Artificial Sequence
  Antisense oligo
agaggaaucaaucaccagag

SEQ ID NO: 3210 - RNA, 20 nt, Artificial Sequence
  Antisense oligo
cagaggaaucaaucaccaga

SEQ ID NO: 3211 - RNA, 20 nt, Artificial Sequence
  Antisense oligo
cuccagaggaaucaaucacc

SEQ ID NO: 3212 - RNA, 20 nt, Artificial Sequence
  Antisense oligo
cucuccagaggaaucaauca

SEQ ID NO: 3213 - RNA, 20 nt, Artificial Sequence
  Antisense oligo
ucucuccagaggaaucaauc

SEQ ID NO: 3214 - RNA, 20 nt, Artificial Sequence
  Antisense oligo
caaugagauuugaggaagcg

SEQ ID NO: 3215 - RNA, 20 nt, Artificial Sequence
  Antisense oligo
ccaaugagauuugaggaagc

SEQ ID NO: 3216 - RNA, 20 nt, Artificial Sequence
  Antisense oligo
uugugcgugggcugguguca

SEQ ID NO: 3217 - RNA, 20 nt, Artificial Sequence
  Antisense oligo
ucuugugcgugggcuggugu

SEQ ID NO: 3218 - RNA, 20 nt, Artificial Sequence
  Antisense oligo
aagggcagcucuugugcgug

SEQ ID NO: 3219 - RNA, 20 nt, Artificial Sequence
  Antisense oligo
gucccuuggcucucccuguu

SEQ ID NO: 3220 - RNA, 20 nt, Artificial Sequence
  Antisense oligo
gaauggucccuuggcucucc

SEQ ID NO: 3221 - RNA, 20 nt, Artificial Sequence
  Antisense oligo
ggaauggucccuuggcucuc

SEQ ID NO: 3222 - RNA, 20 nt, Artificial Sequence
  Antisense oligo
acugccugguacacgcaagg

SEQ ID NO: 3223 - RNA, 20 nt, Artificial Sequence
  Antisense oligo
gacacugccugguacacgca

SEQ ID NO: 3224 - RNA, 20 nt, Artificial Sequence
  Antisense oligo
guuguaggacacugccuggu

SEQ ID NO: 3225 - RNA, 20 nt, Artificial Sequence
  Antisense oligo
aguuguaggacacugccugg

SEQ ID NO: 3226 - RNA, 20 nt, Artificial Sequence
  Antisense oligo
gagaguuguaggacacugcc

SEQ ID NO: 3227 - RNA, 20 nt, Artificial Sequence
  Antisense oligo
ggagaguuguaggacacugc

SEQ ID NO: 3228 - RNA, 20 nt, Artificial Sequence
  Antisense oligo
acggagaguuguaggacacu

SEQ ID NO: 3229 - RNA, 20 nt, Artificial Sequence
  Antisense oligo
cacggagaguuguaggacac

SEQ ID NO: 3230 - RNA, 20 nt, Artificial Sequence
  Antisense oligo
acacggagaguuguaggaca

SEQ ID NO: 3231 - RNA, 20 nt, Artificial Sequence
  Antisense oligo
cacacggagaguuguaggac

SEQ ID NO: 3232 - RNA, 20 nt, Artificial Sequence
  Antisense oligo
gcacacggagaguuguagga

SEQ ID NO: 3233 - RNA, 20 nt, Artificial Sequence
  Antisense oligo
agcacacggagaguuguagg

SEQ ID NO: 3234 - RNA, 20 nt, Artificial Sequence
  Antisense oligo
aagcacacggagaguuguag

SEQ ID NO: 3235 - RNA, 20 nt, Artificial Sequence
  Antisense oligo
aaagcacacggagaguugua

SEQ ID NO: 3236 - RNA, 20 nt, Artificial Sequence
  Antisense oligo
caaagcacacggagaguugu

SEQ ID NO: 3237 - RNA, 20 nt, Artificial Sequence
  Antisense oligo
acaaagcacacggagaguug

SEQ ID NO: 3238 - RNA, 20 nt, Artificial Sequence
  Antisense oligo
gacaaagcacacggagaguu

SEQ ID NO: 3239 - RNA, 20 nt, Artificial Sequence
  Antisense oligo
ggacaaagcacacggagagu

SEQ ID NO: 3240 - RNA, 20 nt, Artificial Sequence
  Antisense oligo
gggacaaagcacacggagag

SEQ ID NO: 3241 - RNA, 20 nt, Artificial Sequence
  Antisense oligo
ugggacaaagcacacggaga

SEQ ID NO: 3242 - RNA, 20 nt, Artificial Sequence
  Antisense oligo
augggacaaagcacacggag

SEQ ID NO: 3243 - RNA, 20 nt, Artificial Sequence
  Antisense oligo
aaugggacaaagcacacgga

SEQ ID NO: 3244 - RNA, 20 nt, Artificial Sequence
  Antisense oligo
aaaugggacaaagcacacgg

SEQ ID NO: 3245 - RNA, 20 nt, Artificial Sequence
  Antisense oligo
caaaugggacaaagcacacg

SEQ ID NO: 3246 - RNA, 20 nt, Artificial Sequence
  Antisense oligo
ccaaaugggacaaagcacac

SEQ ID NO: 3247 - RNA, 20 nt, Artificial Sequence
  Antisense oligo
ugaccaaaugggacaaagca

SEQ ID NO: 3248 - RNA, 20 nt, Artificial Sequence
  Antisense oligo
gugaccaaaugggacaaagc

SEQ ID NO: 3249 - RNA, 20 nt, Artificial Sequence
  Antisense oligo
uccacaucagagcaucacug

SEQ ID NO: 3250 - RNA, 20 nt, Artificial Sequence
  Antisense oligo
guccacaucagagcaucacu

SEQ ID NO: 3251 - RNA, 20 nt, Artificial Sequence
  Antisense oligo
uguccacaucagagcaucac

SEQ ID NO: 3252 - RNA, 20 nt, Artificial Sequence
  Antisense oligo
aguggagacagcagaugugu

SEQ ID NO: 3253 - RNA, 20 nt, Artificial Sequence
  Antisense oligo
aaaguggagacagcagaugu

SEQ ID NO: 3254 - RNA, 20 nt, Artificial Sequence
  Antisense oligo
uaaaguggagacagcagaug

SEQ ID NO: 3255 - RNA, 20 nt, Artificial Sequence
  Antisense oligo
gaguucccauccagcucacc

SEQ ID NO: 3256 - RNA, 20 nt, Artificial Sequence
  Antisense oligo
ccugaguucccauccagcuc

SEQ ID NO: 3257 - RNA, 20 nt, Artificial Sequence
  Antisense oligo
ugccugaguucccauccagc

SEQ ID NO: 3258 - RNA, 20 nt, Artificial Sequence
  Antisense oligo
ccugccugaguucccaucca

SEQ ID NO: 3259 - RNA, 20 nt, Artificial Sequence
  Antisense oligo
uuagagggccugccugaguu

SEQ ID NO: 3260 - RNA, 20 nt, Artificial Sequence
  Antisense oligo
uuuagagggccugccugagu

SEQ ID NO: 3261 - RNA, 20 nt, Artificial Sequence
  Antisense oligo
guuuagagggccugccugag

SEQ ID NO: 3262 - RNA, 20 nt, Artificial Sequence
  Antisense oligo
gguuuagagggccugccuga

SEQ ID NO: 3263 - RNA, 20 nt, Artificial Sequence
  Antisense oligo
acccaucguccucagugugc

SEQ ID NO: 3264 - RNA, 20 nt, Artificial Sequence
  Antisense oligo
cacccaucguccucagugug

SEQ ID NO: 3265 - RNA, 20 nt, Artificial Sequence
  Antisense oligo
gcacccaucguccucagugu

SEQ ID NO: 3266 - RNA, 20 nt, Artificial Sequence
  Antisense oligo
aggcacccaucguccucagu

SEQ ID NO: 3267 - RNA, 20 nt, Artificial Sequence
  Antisense oligo
gcugcacaacccuucacugc

SEQ ID NO: 3268 - RNA, 20 nt, Artificial Sequence
  Antisense oligo
ugcugcacaacccuucacug

SEQ ID NO: 3269 - RNA, 20 nt, Artificial Sequence
  Antisense oligo
gugcugcacaacccuucacu

SEQ ID NO: 3270 - RNA, 20 nt, Artificial Sequence
  Antisense oligo
aggccgucaagaaacaggca

SEQ ID NO: 3271 - RNA, 20 nt, Artificial Sequence
  Antisense oligo
gaggccgucaagaaacaggc

SEQ ID NO: 3272 - RNA, 20 nt, Artificial Sequence
  Antisense oligo
agaggccgucaagaaacagg

SEQ ID NO: 3273 - RNA, 20 nt, Artificial Sequence
  Antisense oligo
aagaggccgucaagaaacag

SEQ ID NO: 3274 - RNA, 20 nt, Artificial Sequence
  Antisense oligo
caagaggccgucaagaaaca

SEQ ID NO: 3275 - RNA, 20 nt, Artificial Sequence
  Antisense oligo
gcaagaggccgucaagaaac

SEQ ID NO: 3276 - RNA, 20 nt, Artificial Sequence
  Antisense oligo
agcaagaggccgucaagaaa

SEQ ID NO: 3277 - RNA, 20 nt, Artificial Sequence
  Antisense oligo
aagcaagaggccgucaagaa

SEQ ID NO: 3278 - RNA, 20 nt, Artificial Sequence
  Antisense oligo
gaagcaagaggccgucaaga

SEQ ID NO: 3279 - RNA, 20 nt, Artificial Sequence
  Antisense oligo
ggaagcaagaggccgucaag

SEQ ID NO: 3280 - RNA, 20 nt, Artificial Sequence
  Antisense oligo
gggaagcaagaggccgucaa

SEQ ID NO: 3281 - RNA, 20 nt, Artificial Sequence
  Antisense oligo
cucugaaugacaggcugguc

SEQ ID NO: 3282 - RNA, 20 nt, Artificial Sequence
  Antisense oligo
ccucugaaugacaggcuggu

SEQ ID NO: 3283 - RNA, 20 nt, Artificial Sequence
  Antisense oligo
ucagcagguaucagccucug

SEQ ID NO: 3284 - RNA, 20 nt, Artificial Sequence
  Antisense oligo
aucagcagguaucagccucu

SEQ ID NO: 3285 - RNA, 20 nt, Artificial Sequence
  Antisense oligo
caucagcagguaucagccuc

SEQ ID NO: 3286 - RNA, 20 nt, Artificial Sequence
  Antisense oligo
ucaucagcagguaucagccu

SEQ ID NO: 3287 - RNA, 20 nt, Artificial Sequence
  Antisense oligo
gucaucagcagguaucagcc

SEQ ID NO: 3288 - RNA, 20 nt, Artificial Sequence
  Antisense oligo
cgucaucagcagguaucagc

SEQ ID NO: 3289 - RNA, 20 nt, Artificial Sequence
  Antisense oligo
gcgucaucagcagguaucag

SEQ ID NO: 3290 - RNA, 20 nt, Artificial Sequence
  Antisense oligo
ggcgucaucagcagguauca

SEQ ID NO: 3291 - RNA, 20 nt, Artificial Sequence
  Antisense oligo
uggcgucaucagcagguauc

SEQ ID NO: 3292 - RNA, 20 nt, Artificial Sequence
  Antisense oligo
guggcgucaucagcagguau

SEQ ID NO: 3293 - RNA, 20 nt, Artificial Sequence
  Antisense oligo
aguggcgucaucagcaggua

SEQ ID NO: 3294 - RNA, 20 nt, Artificial Sequence
  Antisense oligo
gaguggcgucaucagcaggu

SEQ ID NO: 3295 - RNA, 20 nt, Artificial Sequence
  Antisense oligo
agaguggcgucaucagcagg

SEQ ID NO: 3296 - RNA, 20 nt, Artificial Sequence
  Antisense oligo
uagaguggcgucaucagcag

SEQ ID NO: 3297 - RNA, 20 nt, Artificial Sequence
  Antisense oligo
guagaguggcgucaucagca

SEQ ID NO: 3298 - RNA, 20 nt, Artificial Sequence
  Antisense oligo
uguagaguggcgucaucagc

SEQ ID NO: 3299 - RNA, 20 nt, Artificial Sequence
  Antisense oligo
cuguagaguggcgucaucag

SEQ ID NO: 3300 - RNA, 20 nt, Artificial Sequence
  Antisense oligo
acuguagaguggcgucauca

SEQ ID NO: 3301 - RNA, 20 nt, Artificial Sequence
  Antisense oligo
uagagcaagacuccaucuca

SEQ ID NO: 3302 - RNA, 20 nt, Artificial Sequence
  Antisense oligo
auagagcaagacuccaucuc

SEQ ID NO: 3303 - RNA, 20 nt, Artificial Sequence
  Antisense oligo
aauagagcaagacuccaucu

SEQ ID NO: 3304 - RNA, 20 nt, Artificial Sequence
  Antisense oligo
caauagagcaagacuccauc

SEQ ID NO: 3305 - RNA, 20 nt, Artificial Sequence
  Antisense oligo
gcaauagagcaagacuccau

SEQ ID NO: 3306 - RNA, 20 nt, Artificial Sequence
  Antisense oligo
cuccagccugagcaauagag

SEQ ID NO: 3307 - RNA, 20 nt, Artificial Sequence
  Antisense oligo
acuccagccugagcaauaga

SEQ ID NO: 3308 - RNA, 20 nt, Artificial Sequence
  Antisense oligo
cacuccagccugagcaauag

SEQ ID NO: 3309 - RNA, 20 nt, Artificial Sequence
  Antisense oligo
gcacuccagccugagcaaua

SEQ ID NO: 3310 - RNA, 20 nt, Artificial Sequence
  Antisense oligo
ugcacuccagccugagcaau

SEQ ID NO: 3311 - RNA, 20 nt, Artificial Sequence
  Antisense oligo
cugcacuccagccugagcaa

SEQ ID NO: 3312 - RNA, 20 nt, Artificial Sequence
  Antisense oligo
acugcacuccagccugagca

SEQ ID NO: 3313 - RNA, 20 nt, Artificial Sequence
  Antisense oligo
aacugcacuccagccugagc

SEQ ID NO: 3314 - RNA, 20 nt, Artificial Sequence
  Antisense oligo
caacugcacuccagccugag

SEQ ID NO: 3315 - RNA, 20 nt, Artificial Sequence
  Antisense oligo
gcaacugcacuccagccuga

SEQ ID NO: 3316 - RNA, 20 nt, Artificial Sequence
  Antisense oligo
acgcaacugcacuccagccu

SEQ ID NO: 3317 - RNA, 20 nt, Artificial Sequence
  Antisense oligo
ccgauauuacgcaacugcac

SEQ ID NO: 3318 - RNA, 20 nt, Artificial Sequence
  Antisense oligo
gccgauauuacgcaacugca

SEQ ID NO: 3319 - RNA, 20 nt, Artificial Sequence
  Antisense oligo
agccgauauuacgcaacugc

SEQ ID NO: 3320 - RNA, 20 nt, Artificial Sequence
  Antisense oligo
ggagaauugcuugaacccgg

SEQ ID NO: 3321 - RNA, 20 nt, Artificial Sequence
  Antisense oligo
aggagaauugcuugaacccg

SEQ ID NO: 3322 - RNA, 20 nt, Artificial Sequence
  Antisense oligo
caggagaauugcuugaaccc

SEQ ID NO: 3323 - RNA, 20 nt, Artificial Sequence
  Antisense oligo
gcaggagaauugcuugaacc

SEQ ID NO: 3324 - RNA, 20 nt, Artificial Sequence
  Antisense oligo
ggcugaagcaggagaauugc

SEQ ID NO: 3325 - RNA, 20 nt, Artificial Sequence
  Antisense oligo
aggcugaagcaggagaauug

SEQ ID NO: 3326 - RNA, 20 nt, Artificial Sequence
  Antisense oligo
gaggcugaagcaggagaauu

SEQ ID NO: 3327 - RNA, 20 nt, Artificial Sequence
  Antisense oligo
ggaggcugaagcaggagaau

SEQ ID NO: 3328 - RNA, 20 nt, Artificial Sequence
  Antisense oligo
gggaggcugaagcaggagaa

SEQ ID NO: 3329 - RNA, 20 nt, Artificial Sequence
  Antisense oligo
ugggaggcugaagcaggaga

SEQ ID NO: 3330 - RNA, 20 nt, Artificial Sequence
  Antisense oligo
uugggaggcugaagcaggag

SEQ ID NO: 3331 - RNA, 20 nt, Artificial Sequence
  Antisense oligo
cuugggaggcugaagcagga

SEQ ID NO: 3332 - RNA, 20 nt, Artificial Sequence
  Antisense oligo
acuugggaggcugaagcagg

SEQ ID NO: 3333 - RNA, 20 nt, Artificial Sequence
  Antisense oligo
uacuugggaggcugaagcag

SEQ ID NO: 3334 - RNA, 20 nt, Artificial Sequence
  Antisense oligo
cuacuugggaggcugaagca

SEQ ID NO: 3335 - RNA, 20 nt, Artificial Sequence
  Antisense oligo
gcuacuugggaggcugaagc

SEQ ID NO: 3336 - RNA, 20 nt, Artificial Sequence
  Antisense oligo
agcuacuugggaggcugaag

SEQ ID NO: 3337 - RNA, 20 nt, Artificial Sequence
  Antisense oligo
uccuagcacuuugggaggcc

SEQ ID NO: 3338 - RNA, 20 nt, Artificial Sequence
  Antisense oligo
auccuagcacuuugggaggc

SEQ ID NO: 3339 - RNA, 20 nt, Artificial Sequence
  Antisense oligo
aauccuagcacuuugggagg

SEQ ID NO: 3340 - RNA, 20 nt, Artificial Sequence
  Antisense oligo
uaauccuagcacuuugggag

SEQ ID NO: 3341 - RNA, 20 nt, Artificial Sequence
  Antisense oligo
guaauccuagcacuuuggga

SEQ ID NO: 3342 - RNA, 20 nt, Artificial Sequence
  Antisense oligo
uguaauccuagcacuuuggg

SEQ ID NO: 3343 - RNA, 20 nt, Artificial Sequence
  Antisense oligo
cuguaauccuagcacuuugg

SEQ ID NO: 3344 - RNA, 20 nt, Artificial Sequence
  Antisense oligo
ccuguaauccuagcacuuug

SEQ ID NO: 3345 - RNA, 20 nt, Artificial Sequence
  Antisense oligo
gccuguaauccuagcacuuu

SEQ ID NO: 3346 - RNA, 20 nt, Artificial Sequence
  Antisense oligo
ggccuguaauccuagcacuu

SEQ ID NO: 3347 - RNA, 20 nt, Artificial Sequence
  Antisense oligo
uaaaacaauaggucaggugc

SEQ ID NO: 3348 - RNA, 20 nt, Artificial Sequence
  Antisense oligo
cugggcgacagagugagacu

SEQ ID NO: 3349 - RNA, 20 nt, Artificial Sequence
  Antisense oligo
cgcaggcugacucuaaaaca

SEQ ID NO: 3350 - RNA, 20 nt, Artificial Sequence
  Antisense oligo
gcgcaggcugacucuaaaac

SEQ ID NO: 3351 - RNA, 20 nt, Artificial Sequence
  Antisense oligo
agcgcaggcugacucuaaaa

SEQ ID NO: 3352 - RNA, 20 nt, Artificial Sequence
  Antisense oligo
guggacagaggagacucacu

SEQ ID NO: 3353 - RNA, 20 nt, Artificial Sequence
  Antisense oligo
uuuggguguggacagaggag

SEQ ID NO: 3354 - RNA, 20 nt, Artificial Sequence
  Antisense oligo
guuuggguguggacagagga

SEQ ID NO: 3355 - RNA, 20 nt, Artificial Sequence
  Antisense oligo
gugcguuuggguguggacag

SEQ ID NO: 3356 - RNA, 20 nt, Artificial Sequence
  Antisense oligo
ggugcguuuggguguggaca

SEQ ID NO: 3357 - RNA, 20 nt, Artificial Sequence
  Antisense oligo
uggugcguuuggguguggac

SEQ ID NO: 3358 - RNA, 20 nt, Artificial Sequence
  Antisense oligo
uuggugcguuugggugugga

SEQ ID NO: 3359 - RNA, 20 nt, Artificial Sequence
  Antisense oligo
cacuuggugcguuugggugu

SEQ ID NO: 3360 - RNA, 20 nt, Artificial Sequence
  Antisense oligo
acacuuggugcguuugggug

SEQ ID NO: 3361 - RNA, 20 nt, Artificial Sequence
  Antisense oligo
cacacuuggugcguuugggu

SEQ ID NO: 3362 - RNA, 20 nt, Artificial Sequence
  Antisense oligo
cugaaauggcacacuuggug

SEQ ID NO: 3363 - RNA, 20 nt, Artificial Sequence
  Antisense oligo
ugcugaaauggcacacuugg

SEQ ID NO: 3364 - RNA, 20 nt, Artificial Sequence
  Antisense oligo
cugcugaaauggcacacuug

SEQ ID NO: 3365 - RNA, 20 nt, Artificial Sequence
  Antisense oligo
cacugcugaaauggcacacu

SEQ ID NO: 3366 - RNA, 20 nt, Artificial Sequence
  Antisense oligo
caccacugcugaaauggcac

SEQ ID NO: 3367 - RNA, 20 nt, Artificial Sequence
  Antisense oligo
uuccagggagcaagcaccac

SEQ ID NO: 3368 - RNA, 20 nt, Artificial Sequence
  Antisense oligo
auuccagggagcaagcacca

SEQ ID NO: 3369 - RNA, 20 nt, Artificial Sequence
  Antisense oligo
cauuccagggagcaagcacc

SEQ ID NO: 3370 - RNA, 20 nt, Artificial Sequence
  Antisense oligo
cccauuccagggagcaagca

SEQ ID NO: 3371 - RNA, 20 nt, Artificial Sequence
  Antisense oligo
ugagagcaccuggucccauu

SEQ ID NO: 3372 - RNA, 20 nt, Artificial Sequence
  Antisense oligo
cugagagcaccuggucccau

SEQ ID NO: 3373 - RNA, 20 nt, Artificial Sequence
  Antisense oligo
uccgacccauaacaucuccc

SEQ ID NO: 3374 - RNA, 20 nt, Artificial Sequence
  Antisense oligo
cuccgacccauaacaucucc

SEQ ID NO: 3375 - RNA, 20 nt, Artificial Sequence
  Antisense oligo
ccuccgacccauaacaucuc

SEQ ID NO: 3376 - RNA, 20 nt, Artificial Sequence
  Antisense oligo
cccuccgacccauaacaucu

SEQ ID NO: 3377 - RNA, 20 nt, Artificial Sequence
  Antisense oligo
acccuccgacccauaacauc

SEQ ID NO: 3378 - RNA, 20 nt, Artificial Sequence
  Antisense oligo
gacccuccgacccauaacau

SEQ ID NO: 3379 - RNA, 20 nt, Artificial Sequence
  Antisense oligo
acacaaagcacaggaggcgc

SEQ ID NO: 3380 - RNA, 20 nt, Artificial Sequence
  Antisense oligo
uacacaaagcacaggaggcg

SEQ ID NO: 3381 - RNA, 20 nt, Artificial Sequence
  Antisense oligo
guacacaaagcacaggaggc

SEQ ID NO: 3382 - RNA, 20 nt, Artificial Sequence
  Antisense oligo
ggaaacccaugcucagugua

SEQ ID NO: 3383 - RNA, 20 nt, Artificial Sequence
  Antisense oligo
cagaggaaacccaugcucag

SEQ ID NO: 3384 - RNA, 20 nt, Artificial Sequence
  Antisense oligo
aaauucagaggaaacccaug

SEQ ID NO: 3385 - RNA, 20 nt, Artificial Sequence
  Antisense oligo
auuccgauuuucuccuccuu

SEQ ID NO: 3386 - RNA, 20 nt, Artificial Sequence
  Antisense oligo
aauuccgauuuucuccuccu

SEQ ID NO: 3387 - RNA, 20 nt, Artificial Sequence
  Antisense oligo
acacuuccugccagaaccag

SEQ ID NO: 3388 - RNA, 20 nt, Artificial Sequence
  Antisense oligo
caucacugccacuucaggag

SEQ ID NO: 3389 - RNA, 20 nt, Artificial Sequence
  Antisense oligo
ucccaucacugccacuucag

SEQ ID NO: 3390 - RNA, 20 nt, Artificial Sequence
  Antisense oligo
ugaggaagcgccacaggauc

SEQ ID NO: 3391 - RNA, 20 nt, Artificial Sequence
  Antisense oligo
augaggaagcgccacaggau

SEQ ID NO: 3392 - RNA, 20 nt, Artificial Sequence
  Antisense oligo
gaugaggaagcgccacagga

SEQ ID NO: 3393 - RNA, 20 nt, Artificial Sequence
  Antisense oligo
ucagcaacugguaacaaggg

SEQ ID NO: 3394 - RNA, 20 nt, Artificial Sequence
  Antisense oligo
ccucuccucagcaacuggua

SEQ ID NO: 3395 - RNA, 20 nt, Artificial Sequence
  Antisense oligo
cccucuccucagcaacuggu

SEQ ID NO: 3396 - RNA, 20 nt, Artificial Sequence
  Antisense oligo
acccucuccucagcaacugg

SEQ ID NO: 3397 - RNA, 20 nt, Artificial Sequence
  Antisense oligo
ggcuaauccacccucuccuc

SEQ ID NO: 3398 - RNA, 20 nt, Artificial Sequence
  Antisense oligo
gggcuaauccacccucuccu

SEQ ID NO: 3399 - RNA, 20 nt, Artificial Sequence
  Antisense oligo
acacacugaggugcagccca

SEQ ID NO: 3400 - RNA, 20 nt, Artificial Sequence
  Antisense oligo
ggaagaccugcacacacuga

SEQ ID NO: 3401 - RNA, 20 nt, Artificial Sequence
  Antisense oligo
cugggaagaccugcacacac

SEQ ID NO: 3402 - RNA, 20 nt, Artificial Sequence
  Antisense oligo
auaccugggaagaccugcac

SEQ ID NO: 3403 - RNA, 20 nt, Artificial Sequence
  Antisense oligo
acauaccugggaagaccugc

SEQ ID NO: 3404 - RNA, 20 nt, Artificial Sequence
  Antisense oligo
cacauaccugggaagaccug

SEQ ID NO: 3405 - RNA, 20 nt, Artificial Sequence
  Antisense oligo
ccacauaccugggaagaccu

SEQ ID NO: 3406 - RNA, 20 nt, Artificial Sequence
  Antisense oligo
ugaaccugugcccacuccac

SEQ ID NO: 3407 - RNA, 20 nt, Artificial Sequence
  Antisense oligo
gugaaccugugcccacucca

SEQ ID NO: 3408 - RNA, 20 nt, Artificial Sequence
  Antisense oligo
aaaccugguggugugugaug

SEQ ID NO: 3409 - RNA, 20 nt, Artificial Sequence
  Antisense oligo
cugaaaccugguggugugug

SEQ ID NO: 3410 - RNA, 20 nt, Artificial Sequence
  Antisense oligo
ccugaaaccugguggugugu

SEQ ID NO: 3411 - RNA, 20 nt, Artificial Sequence
  Antisense oligo
cccugaaaccugguggugug

SEQ ID NO: 3412 - RNA, 20 nt, Artificial Sequence
  Antisense oligo
ggaaagugacuuguagaucc

SEQ ID NO: 3413 - RNA, 20 nt, Artificial Sequence
  Antisense oligo
aggaaagugacuuguagauc

SEQ ID NO: 3414 - RNA, 20 nt, Artificial Sequence
  Antisense oligo
caggaaagugacuuguagau

SEQ ID NO: 3415 - RNA, 20 nt, Artificial Sequence
  Antisense oligo
caggucaguacaggaaagug

SEQ ID NO: 3416 - RNA, 20 nt, Artificial Sequence
  Antisense oligo
ucaggucaguacaggaaagu

SEQ ID NO: 3417 - RNA, 20 nt, Artificial Sequence
  Antisense oligo
guguggaucaggucaguaca

SEQ ID NO: 3418 - RNA, 20 nt, Artificial Sequence
  Antisense oligo
agguucagguguacgguccc

SEQ ID NO: 3419 - RNA, 20 nt, Artificial Sequence
  Antisense oligo
cagguucagguguacggucc

SEQ ID NO: 3420 - RNA, 20 nt, Artificial Sequence
  Antisense oligo
ccagguucagguguacgguc

SEQ ID NO: 3421 - RNA, 20 nt, Artificial Sequence
  Antisense oligo
cauccagguucagguguacg

SEQ ID NO: 3422 - RNA, 20 nt, Artificial Sequence
  Antisense oligo
cacauccagguucaggugua

SEQ ID NO: 3423 - RNA, 20 nt, Artificial Sequence
  Antisense oligo
gcacauccagguucaggugu

SEQ ID NO: 3424 - RNA, 20 nt, Artificial Sequence
  Antisense oligo
ggcacauccagguucaggug

SEQ ID NO: 3425 - RNA, 20 nt, Artificial Sequence
  Antisense oligo
aggcacauccagguucaggu

SEQ ID NO: 3426 - RNA, 20 nt, Artificial Sequence
  Antisense oligo
aaggcacauccagguucagg

SEQ ID NO: 3427 - RNA, 20 nt, Artificial Sequence
  Antisense oligo
cucaaaggcacauccagguu

SEQ ID NO: 3428 - RNA, 20 nt, Artificial Sequence
  Antisense oligo
gcucaaaggcacauccaggu

SEQ ID NO: 3429 - RNA, 20 nt, Artificial Sequence
  Antisense oligo
aggcucaaaggcacauccag

SEQ ID NO: 3430 - RNA, 20 nt, Artificial Sequence
  Antisense oligo
caggcucaaaggcacaucca

SEQ ID NO: 3431 - RNA, 20 nt, Artificial Sequence
  Antisense oligo
ccaggcucaaaggcacaucc

SEQ ID NO: 3432 - RNA, 20 nt, Artificial Sequence
  Antisense oligo
gccaggcucaaaggcacauc

SEQ ID NO: 3433 - RNA, 20 nt, Artificial Sequence
  Antisense oligo
cagccaggcucaaaggcaca

SEQ ID NO: 3434 - RNA, 20 nt, Artificial Sequence
  Antisense oligo
acagccaggcucaaaggcac

SEQ ID NO: 3435 - RNA, 20 nt, Artificial Sequence
  Antisense oligo
cacagccaggcucaaaggca

SEQ ID NO: 3436 - RNA, 20 nt, Artificial Sequence
  Antisense oligo
augaguagcagcucccaccg

SEQ ID NO: 3437 - RNA, 20 nt, Artificial Sequence
  Antisense oligo
aaugaguagcagcucccacc

SEQ ID NO: 3438 - RNA, 20 nt, Artificial Sequence
  Antisense oligo
aaaugaguagcagcucccac

SEQ ID NO: 3439 - RNA, 20 nt, Artificial Sequence
  Antisense oligo
gccugguuuugaacauuaga

SEQ ID NO: 3440 - RNA, 20 nt, Artificial Sequence
  Antisense oligo
gccuggccugguuuugaaca

SEQ ID NO: 3441 - RNA, 20 nt, Artificial Sequence
  Antisense oligo
ucaccauguugcccaagcug

SEQ ID NO: 3442 - RNA, 20 nt, Artificial Sequence
  Antisense oligo
uucaccauguugcccaagcu

SEQ ID NO: 3443 - RNA, 20 nt, Artificial Sequence
  Antisense oligo
uuucaccauguugcccaagc

SEQ ID NO: 3444 - RNA, 20 nt, Artificial Sequence
  Antisense oligo
guuucaccauguugcccaag

SEQ ID NO: 3445 - RNA, 20 nt, Artificial Sequence
  Antisense oligo
gguuucaccauguugcccaa

SEQ ID NO: 3446 - RNA, 20 nt, Artificial Sequence
  Antisense oligo
ggguuucaccauguugccca

SEQ ID NO: 3447 - RNA, 20 nt, Artificial Sequence
  Antisense oligo
cacuacgcccagcuaauuuu

SEQ ID NO: 3448 - RNA, 20 nt, Artificial Sequence
  Antisense oligo
ucacuacgcccagcuaauuu

SEQ ID NO: 3449 - RNA, 20 nt, Artificial Sequence
  Antisense oligo
ugggcucaagugauccuccc

SEQ ID NO: 3450 - RNA, 20 nt, Artificial Sequence
  Antisense oligo
cugggcucaagugauccucc

SEQ ID NO: 3451 - RNA, 20 nt, Artificial Sequence
  Antisense oligo
ccugggcucaagugauccuc

SEQ ID NO: 3452 - RNA, 20 nt, Artificial Sequence
  Antisense oligo
uccugggcucaagugauccu

SEQ ID NO: 3453 - RNA, 20 nt, Artificial Sequence
  Antisense oligo
cuccugggcucaagugaucc

SEQ ID NO: 3454 - RNA, 20 nt, Artificial Sequence
  Antisense oligo
ccuccugggcucaagugauc

SEQ ID NO: 3455 - RNA, 20 nt, Artificial Sequence
  Antisense oligo
accuccugggcucaagugau

SEQ ID NO: 3456 - RNA, 20 nt, Artificial Sequence
  Antisense oligo
gaccuccugggcucaaguga

SEQ ID NO: 3457 - RNA, 20 nt, Artificial Sequence
  Antisense oligo
ugaccuccugggcucaagug

SEQ ID NO: 3458 - RNA, 20 nt, Artificial Sequence
  Antisense oligo
gcaaacccagcucacuguag

SEQ ID NO: 3459 - RNA, 20 nt, Artificial Sequence
  Antisense oligo
ugcaaacccagcucacugua

SEQ ID NO: 3460 - RNA, 20 nt, Artificial Sequence
  Antisense oligo
gugcaaacccagcucacugu

SEQ ID NO: 3461 - RNA, 20 nt, Artificial Sequence
  Antisense oligo
uauuggacauccacugagau

SEQ ID NO: 3462 - RNA, 20 nt, Artificial Sequence
  Antisense oligo
uuauuggacauccacugaga

SEQ ID NO: 3463 - RNA, 20 nt, Artificial Sequence
  Antisense oligo
cuuauuggacauccacugag

SEQ ID NO: 3464 - RNA, 20 nt, Artificial Sequence
  Antisense oligo
gcuuauuggacauccacuga

SEQ ID NO: 3465 - RNA, 20 nt, Artificial Sequence
  Antisense oligo
ugcuuauuggacauccacug

SEQ ID NO: 3466 - RNA, 20 nt, Artificial Sequence
  Antisense oligo
acugcuuauuggacauccac

SEQ ID NO: 3467 - RNA, 20 nt, Artificial Sequence
  Antisense oligo
cacugcuuauuggacaucca

SEQ ID NO: 3468 - RNA, 20 nt, Artificial Sequence
  Antisense oligo
ucacugcuuauuggacaucc

SEQ ID NO: 3469 - RNA, 20 nt, Artificial Sequence
  Antisense oligo
ggcucacugcuuauuggaca

SEQ ID NO: 3470 - RNA, 20 nt, Artificial Sequence
  Antisense oligo
gggcucacugcuuauuggac

SEQ ID NO: 3471 - RNA, 20 nt, Artificial Sequence
  Antisense oligo
cgggcucacugcuuauugga

SEQ ID NO: 3472 - RNA, 20 nt, Artificial Sequence
  Antisense oligo
acgggcucacugcuuauugg

SEQ ID NO: 3473 - RNA, 20 nt, Artificial Sequence
  Antisense oligo
cacgggcucacugcuuauug

SEQ ID NO: 3474 - RNA, 20 nt, Artificial Sequence
  Antisense oligo
acacgggcucacugcuuauu

SEQ ID NO: 3475 - RNA, 20 nt, Artificial Sequence
  Antisense oligo
cacacgggcucacugcuuau

SEQ ID NO: 3476 - RNA, 20 nt, Artificial Sequence
  Antisense oligo
ucacacgggcucacugcuua

SEQ ID NO: 3477 - RNA, 20 nt, Artificial Sequence
  Antisense oligo
cucacacgggcucacugcuu

SEQ ID NO: 3478 - RNA, 20 nt, Artificial Sequence
  Antisense oligo
ccaaaguaccuaacaucugu

SEQ ID NO: 3479 - RNA, 20 nt, Artificial Sequence
  Antisense oligo
accaaaguaccuaacaucug

SEQ ID NO: 3480 - RNA, 20 nt, Artificial Sequence
  Antisense oligo
gaccaaaguaccuaacaucu

SEQ ID NO: 3481 - RNA, 20 nt, Artificial Sequence
  Antisense oligo
cgaccaaaguaccuaacauc

SEQ ID NO: 3482 - RNA, 20 nt, Artificial Sequence
  Antisense oligo
ucgaccaaaguaccuaacau

SEQ ID NO: 3483 - RNA, 20 nt, Artificial Sequence
  Antisense oligo
cucgaccaaaguaccuaaca

SEQ ID NO: 3484 - RNA, 20 nt, Artificial Sequence
  Antisense oligo
gcucgaccaaaguaccuaac

SEQ ID NO: 3485 - RNA, 20 nt, Artificial Sequence
  Antisense oligo
ggcucgaccaaaguaccuaa

SEQ ID NO: 3486 - RNA, 20 nt, Artificial Sequence
  Antisense oligo
uggcucgaccaaaguaccua

SEQ ID NO: 3487 - RNA, 20 nt, Artificial Sequence
  Antisense oligo
cguuccucaacuacaucaag

SEQ ID NO: 3488 - RNA, 20 nt, Artificial Sequence
  Antisense oligo
ccguuccucaacuacaucaa

SEQ ID NO: 3489 - RNA, 20 nt, Artificial Sequence
  Antisense oligo
uccguuccucaacuacauca

SEQ ID NO: 3490 - RNA, 20 nt, Artificial Sequence
  Antisense oligo
uuccguuccucaacuacauc

SEQ ID NO: 3491 - RNA, 20 nt, Artificial Sequence
  Antisense oligo
cuuccguuccucaacuacau

SEQ ID NO: 3492 - RNA, 20 nt, Artificial Sequence
  Antisense oligo
ucuuccguuccucaacuaca

SEQ ID NO: 3493 - RNA, 20 nt, Artificial Sequence
  Antisense oligo
cucuuccguuccucaacuac

SEQ ID NO: 3494 - RNA, 20 nt, Artificial Sequence
  Antisense oligo
uuucucuuccguuccucaac

SEQ ID NO: 3495 - RNA, 20 nt, Artificial Sequence
  Antisense oligo
aacuuucucuuccguuccuc

SEQ ID NO: 3496 - RNA, 20 nt, Artificial Sequence
  Antisense oligo
caacuuucucuuccguuccu

SEQ ID NO: 3497 - RNA, 20 nt, Artificial Sequence
  Antisense oligo
ccaacuuucucuuccguucc

SEQ ID NO: 3498 - RNA, 20 nt, Artificial Sequence
  Antisense oligo
uccaacuuucucuuccguuc

SEQ ID NO: 3499 - RNA, 20 nt, Artificial Sequence
  Antisense oligo
cccguguuucccuccaacuu

SEQ ID NO: 3500 - RNA, 20 nt, Artificial Sequence
  Antisense oligo
gcccguguuucccuccaacu

SEQ ID NO: 3501 - RNA, 20 nt, Artificial Sequence
  Antisense oligo
agcccguguuucccuccaac

SEQ ID NO: 3502 - RNA, 20 nt, Artificial Sequence
  Antisense oligo
uagcccguguuucccuccaa

SEQ ID NO: 3503 - RNA, 20 nt, Artificial Sequence
  Antisense oligo
cuagcccguguuucccucca

SEQ ID NO: 3504 - RNA, 20 nt, Artificial Sequence
  Antisense oligo
ucuagcccguguuucccucc

SEQ ID NO: 3505 - RNA, 20 nt, Artificial Sequence
  Antisense oligo
cucuagcccguguuucccuc

SEQ ID NO: 3506 - RNA, 20 nt, Artificial Sequence
  Antisense oligo
acucuagcccguguuucccu

SEQ ID NO: 3507 - RNA, 20 nt, Artificial Sequence
  Antisense oligo
uacucuagcccguguuuccc

SEQ ID NO: 3508 - RNA, 20 nt, Artificial Sequence
  Antisense oligo
cuacucuagcccguguuucc

SEQ ID NO: 3509 - RNA, 20 nt, Artificial Sequence
  Antisense oligo
ucuacucuagcccguguuuc

SEQ ID NO: 3510 - RNA, 20 nt, Artificial Sequence
  Antisense oligo
cucuacucuagcccguguuu

SEQ ID NO: 3511 - RNA, 20 nt, Artificial Sequence
  Antisense oligo
acucuacucuagcccguguu

SEQ ID NO: 3512 - RNA, 20 nt, Artificial Sequence
  Antisense oligo
uacucuacucuagcccgugu

SEQ ID NO: 3513 - RNA, 20 nt, Artificial Sequence
  Antisense oligo
uuacucuacucuagcccgug

SEQ ID NO: 3514 - RNA, 20 nt, Artificial Sequence
  Antisense oligo
uuuacucuacucuagcccgu

SEQ ID NO: 3515 - RNA, 20 nt, Artificial Sequence
  Antisense oligo
auuuacucuacucuagcccg

SEQ ID NO: 3516 - RNA, 20 nt, Artificial Sequence
  Antisense oligo
gauuuacucuacucuagccc

SEQ ID NO: 3517 - RNA, 20 nt, Artificial Sequence
  Antisense oligo
cugaggaagcggacuuguuc

SEQ ID NO: 3518 - RNA, 20 nt, Artificial Sequence
  Antisense oligo
ucugaggaagcggacuuguu

SEQ ID NO: 3519 - RNA, 20 nt, Artificial Sequence
  Antisense oligo
cucugaggaagcggacuugu

SEQ ID NO: 3520 - RNA, 20 nt, Artificial Sequence
  Antisense oligo
gcucugaggaagcggacuug

SEQ ID NO: 3521 - RNA, 20 nt, Artificial Sequence
  Antisense oligo
agcucugaggaagcggacuu

SEQ ID NO: 3522 - RNA, 20 nt, Artificial Sequence
  Antisense oligo
cagcucugaggaagcggacu

SEQ ID NO: 3523 - RNA, 20 nt, Artificial Sequence
  Antisense oligo
caaggaagccagcucugagg

SEQ ID NO: 3524 - RNA, 20 nt, Artificial Sequence
  Antisense oligo
ggcaaggaagccagcucuga

SEQ ID NO: 3525 - RNA, 20 nt, Artificial Sequence
  Antisense oligo
uugaaagcaaagucagguga

SEQ ID NO: 3526 - RNA, 20 nt, Artificial Sequence
  Antisense oligo
acucugcugggcuuggcugu

SEQ ID NO: 3527 - RNA, 20 nt, Artificial Sequence
  Antisense oligo
cgugugguccuggaauugcg

SEQ ID NO: 3528 - RNA, 20 nt, Artificial Sequence
  Antisense oligo
uggccuucaccagcagaggu

SEQ ID NO: 3529 - RNA, 20 nt, Artificial Sequence
  Antisense oligo
auggccuucaccagcagagg

SEQ ID NO: 3530 - RNA, 20 nt, Artificial Sequence
  Antisense oligo
uagaauggccuucaccagca

SEQ ID NO: 3531 - RNA, 20 nt, Artificial Sequence
  Antisense oligo
cuagaauggccuucaccagc

SEQ ID NO: 3532 - RNA, 20 nt, Artificial Sequence
  Antisense oligo
ccuagaauggccuucaccag

SEQ ID NO: 3533 - RNA, 20 nt, Artificial Sequence
  Antisense oligo
aguccuagaauggccuucac

SEQ ID NO: 3534 - RNA, 20 nt, Artificial Sequence
  Antisense oligo
uucaguccuagaauggccuu

SEQ ID NO: 3535 - RNA, 20 nt, Artificial Sequence
  Antisense oligo
ucuucaguccuagaauggcc

SEQ ID NO: 3536 - RNA, 20 nt, Artificial Sequence
  Antisense oligo
aucuucaguccuagaauggc

SEQ ID NO: 3537 - RNA, 20 nt, Artificial Sequence
  Antisense oligo
cagcaucuucaguccuagaa

SEQ ID NO: 3538 - RNA, 20 nt, Artificial Sequence
  Antisense oligo
gcagcaucuucaguccuaga

SEQ ID NO: 3539 - RNA, 20 nt, Artificial Sequence
  Antisense oligo
uugacucaggcaacaggagc

SEQ ID NO: 3540 - RNA, 20 nt, Artificial Sequence
  Antisense oligo
uuugacucaggcaacaggag

SEQ ID NO: 3541 - RNA, 20 nt, Artificial Sequence
  Antisense oligo
uuuugacucaggcaacagga

SEQ ID NO: 3542 - RNA, 20 nt, Artificial Sequence
  Antisense oligo
ccuuuugacucaggcaacag

SEQ ID NO: 3543 - RNA, 20 nt, Artificial Sequence
  Antisense oligo
uccuuuugacucaggcaaca

SEQ ID NO: 3544 - RNA, 20 nt, Artificial Sequence
  Antisense oligo
cuccuuuugacucaggcaac

SEQ ID NO: 3545 - RNA, 20 nt, Artificial Sequence
  Antisense oligo
ccuccuuuugacucaggcaa

SEQ ID NO: 3546 - RNA, 20 nt, Artificial Sequence
  Antisense oligo
gcugccuccuuuugacucag

SEQ ID NO: 3547 - RNA, 20 nt, Artificial Sequence
  Antisense oligo
agcugccuccuuuugacuca

SEQ ID NO: 3548 - RNA, 20 nt, Artificial Sequence
  Antisense oligo
ucagagcugccuccuuuuga

SEQ ID NO: 3549 - RNA, 20 nt, Artificial Sequence
  Antisense oligo
cuguugcucgguggucugca

SEQ ID NO: 3550 - RNA, 20 nt, Artificial Sequence
  Antisense oligo
ugccuguugcucgguggucu

SEQ ID NO: 3551 - RNA, 20 nt, Artificial Sequence
  Antisense oligo
ucucucccggaugacucacc

SEQ ID NO: 3552 - RNA, 20 nt, Artificial Sequence
  Antisense oligo
aucucucccggaugacucac

SEQ ID NO: 3553 - RNA, 20 nt, Artificial Sequence
  Antisense oligo
aacgccagcaccuugcagca

SEQ ID NO: 3554 - RNA, 20 nt, Artificial Sequence
  Antisense oligo
gaagcaacgccagcaccuug

SEQ ID NO: 3555 - RNA, 20 nt, Artificial Sequence
  Antisense oligo
ggaagcaacgccagcaccuu

SEQ ID NO: 3556 - RNA, 20 nt, Artificial Sequence
  Antisense oligo
agcaucugccacaagccgag

SEQ ID NO: 3557 - RNA, 20 nt, Artificial Sequence
  Antisense oligo
ccgacucaaugguuuaaggg

SEQ ID NO: 3558 - RNA, 20 nt, Artificial Sequence
  Antisense oligo
uccgacucaaugguuuaagg

SEQ ID NO: 3559 - RNA, 20 nt, Artificial Sequence
  Antisense oligo
cuccgacucaaugguuuaag

SEQ ID NO: 3560 - RNA, 20 nt, Artificial Sequence
  Antisense oligo
acuccgacucaaugguuuaa

SEQ ID NO: 3561 - RNA, 20 nt, Artificial Sequence
  Antisense oligo
gacuccgacucaaugguuua

SEQ ID NO: 3562 - RNA, 20 nt, Artificial Sequence
  Antisense oligo
ugacuccgacucaaugguuu

SEQ ID NO: 3563 - RNA, 20 nt, Artificial Sequence
  Antisense oligo
gugacuccgacucaaugguu

SEQ ID NO: 3564 - RNA, 20 nt, Artificial Sequence
  Antisense oligo
ggugacuccgacucaauggu

SEQ ID NO: 3565 - RNA, 20 nt, Artificial Sequence
  Antisense oligo
gggugacuccgacucaaugg

SEQ ID NO: 3566 - RNA, 20 nt, Artificial Sequence
  Antisense oligo
agggugacuccgacucaaug

SEQ ID NO: 3567 - RNA, 20 nt, Artificial Sequence
  Antisense oligo
cagggugacuccgacucaau

SEQ ID NO: 3568 - RNA, 20 nt, Artificial Sequence
  Antisense oligo
ccagggugacuccgacucaa

SEQ ID NO: 3569 - RNA, 20 nt, Artificial Sequence
  Antisense oligo
aaaugggccagggugacucc

SEQ ID NO: 3570 - RNA, 20 nt, Artificial Sequence
  Antisense oligo
caaaaugggccagggugacu

SEQ ID NO: 3571 - RNA, 20 nt, Artificial Sequence
  Antisense oligo
acaaaaugggccagggugac

SEQ ID NO: 3572 - RNA, 20 nt, Artificial Sequence
  Antisense oligo
gugacaaaaugggccagggu

SEQ ID NO: 3573 - RNA, 20 nt, Artificial Sequence
  Antisense oligo
ggugacaaaaugggccaggg

SEQ ID NO: 3574 - RNA, 20 nt, Artificial Sequence
  Antisense oligo
aaggugacaaaaugggccag

SEQ ID NO: 3575 - RNA, 20 nt, Artificial Sequence
  Antisense oligo
caaggugacaaaaugggcca

SEQ ID NO: 3576 - RNA, 20 nt, Artificial Sequence
  Antisense oligo
ccaaggugacaaaaugggcc

SEQ ID NO: 3577 - RNA, 20 nt, Artificial Sequence
  Antisense oligo
gccaaggugacaaaaugggc

SEQ ID NO: 3578 - RNA, 20 nt, Artificial Sequence
  Antisense oligo
agccaaggugacaaaauggg

SEQ ID NO: 3579 - RNA, 20 nt, Artificial Sequence
  Antisense oligo
agagccaaggugacaaaaug

SEQ ID NO: 3580 - RNA, 20 nt, Artificial Sequence
  Antisense oligo
cagagccaaggugacaaaau

SEQ ID NO: 3581 - RNA, 20 nt, Artificial Sequence
  Antisense oligo
aucaacugccugaaagaccc

SEQ ID NO: 3582 - RNA, 20 nt, Artificial Sequence
  Antisense oligo
acagcaucaacugccugaaa

SEQ ID NO: 3583 - RNA, 20 nt, Artificial Sequence
  Antisense oligo
uacagcaucaacugccugaa

SEQ ID NO: 3584 - RNA, 20 nt, Artificial Sequence
  Antisense oligo
cuacagcaucaacugccuga

SEQ ID NO: 3585 - RNA, 20 nt, Artificial Sequence
  Antisense oligo
uggcucagcuacagcaucaa

SEQ ID NO: 3586 - RNA, 20 nt, Artificial Sequence
  Antisense oligo
aacugcauuggcuggcucag

SEQ ID NO: 3587 - RNA, 20 nt, Artificial Sequence
  Antisense oligo
uuaacugcauuggcuggcuc

SEQ ID NO: 3588 - RNA, 20 nt, Artificial Sequence
  Antisense oligo
uuuaacugcauuggcuggcu

SEQ ID NO: 3589 - RNA, 20 nt, Artificial Sequence
  Antisense oligo
cuuuaacugcauuggcuggc

SEQ ID NO: 3590 - RNA, 20 nt, Artificial Sequence
  Antisense oligo
cccuuuaacugcauuggcug

SEQ ID NO: 3591 - RNA, 20 nt, Artificial Sequence
  Antisense oligo
uggcuguuucauucucuggg

SEQ ID NO: 3592 - RNA, 20 nt, Artificial Sequence
  Antisense oligo
guggcuguuucauucucugg

SEQ ID NO: 3593 - RNA, 20 nt, Artificial Sequence
  Antisense oligo
gcugguggcuguuucauucu

SEQ ID NO: 3594 - RNA, 20 nt, Artificial Sequence
  Antisense oligo
ugcugguggcuguuucauuc

SEQ ID NO: 3595 - RNA, 20 nt, Artificial Sequence
  Antisense oligo
gugguugcugguggcuguuu

SEQ ID NO: 3596 - RNA, 20 nt, Artificial Sequence
  Antisense oligo
ugaaaggaggagugguugcu

SEQ ID NO: 3597 - RNA, 20 nt, Artificial Sequence
  Antisense oligo
uugaaaggaggagugguugc

SEQ ID NO: 3598 - RNA, 20 nt, Artificial Sequence
  Antisense oligo
uuugaaaggaggagugguug

SEQ ID NO: 3599 - RNA, 20 nt, Artificial Sequence
  Antisense oligo
guuuugaaaggaggaguggu

SEQ ID NO: 3600 - RNA, 20 nt, Artificial Sequence
  Antisense oligo
guguuuugaaaggaggagug

SEQ ID NO: 3601 - RNA, 20 nt, Artificial Sequence
  Antisense oligo
uguguuuugaaaggaggagu

SEQ ID NO: 3602 - RNA, 20 nt, Artificial Sequence
  Antisense oligo
ggcaguguguuuugaaagga

SEQ ID NO: 3603 - RNA, 20 nt, Artificial Sequence
  Antisense oligo
accuggcaguguguuuugaa

SEQ ID NO: 3604 - RNA, 20 nt, Artificial Sequence
  Antisense oligo
aaggagacgcaccuggcagu

SEQ ID NO: 3605 - RNA, 20 nt, Artificial Sequence
  Antisense oligo
augaaagaggcgcagccgug

SEQ ID NO: 3606 - RNA, 20 nt, Artificial Sequence
  Antisense oligo
aaugaaagaggcgcagccgu

SEQ ID NO: 3607 - RNA, 20 nt, Artificial Sequence
  Antisense oligo
aaaugaaagaggcgcagccg

SEQ ID NO: 3608 - RNA, 20 nt, Artificial Sequence
  Antisense oligo
uaaaugaaagaggcgcagcc

SEQ ID NO: 3609 - RNA, 20 nt, Artificial Sequence
  Antisense oligo
uuaaaugaaagaggcgcagc

SEQ ID NO: 3610 - RNA, 20 nt, Artificial Sequence
  Antisense oligo
auuaaaugaaagaggcgcag

SEQ ID NO: 3611 - RNA, 20 nt, Artificial Sequence
  Antisense oligo
cugaaucauggcuauauccc

SEQ ID NO: 3612 - RNA, 20 nt, Artificial Sequence
  Antisense oligo
gucugaaucauggcuauauc

SEQ ID NO: 3613 - RNA, 20 nt, Artificial Sequence
  Antisense oligo
cuuugucugaaucauggcua

SEQ ID NO: 3614 - RNA, 20 nt, Artificial Sequence
  Antisense oligo
cgaaggccagagcuuugucu

SEQ ID NO: 3615 - RNA, 20 nt, Artificial Sequence
  Antisense oligo
ccgaaggccagagcuuuguc

SEQ ID NO: 3616 - RNA, 20 nt, Artificial Sequence
  Antisense oligo
cccgaaggccagagcuuugu

SEQ ID NO: 3617 - RNA, 20 nt, Artificial Sequence
  Antisense oligo
uccugacucucucuccgcug

SEQ ID NO: 3618 - RNA, 20 nt, Artificial Sequence
  Antisense oligo
uuuccugacucucucuccgc

SEQ ID NO: 3619 - RNA, 20 nt, Artificial Sequence
  Antisense oligo
guuuccugacucucucuccg

SEQ ID NO: 3620 - RNA, 20 nt, Artificial Sequence
  Antisense oligo
cgguuuccugacucucucuc

SEQ ID NO: 3621 - RNA, 20 nt, Artificial Sequence
  Antisense oligo
gucgguuuccugacucucuc

SEQ ID NO: 3622 - RNA, 20 nt, Artificial Sequence
  Antisense oligo
gcugaagucgguuuccugac

SEQ ID NO: 3623 - RNA, 20 nt, Artificial Sequence
  Antisense oligo
cgcugaagucgguuuccuga

SEQ ID NO: 3624 - RNA, 20 nt, Artificial Sequence
  Antisense oligo
ccgcugaagucgguuuccug

SEQ ID NO: 3625 - RNA, 20 nt, Artificial Sequence
  Antisense oligo
acgcucuucucaccgcugaa

SEQ ID NO: 3626 - RNA, 20 nt, Artificial Sequence
  Antisense oligo
cacgcucuucucaccgcuga

SEQ ID NO: 3627 - RNA, 20 nt, Artificial Sequence
  Antisense oligo
uccacgcucuucucaccgcu

SEQ ID NO: 3628 - RNA, 20 nt, Artificial Sequence
  Antisense oligo
ucccuccacgcucuucucac

SEQ ID NO: 3629 - RNA, 20 nt, Artificial Sequence
  Antisense oligo
cacaugaccuucccagacac

SEQ ID NO: 3630 - RNA, 20 nt, Artificial Sequence
  Antisense oligo
ugcacaugaccuucccagac

SEQ ID NO: 3631 - RNA, 20 nt, Artificial Sequence
  Antisense oligo
gccucugcacaugaccuucc

SEQ ID NO: 3632 - RNA, 20 nt, Artificial Sequence
  Antisense oligo
ccucauugguggccucuccu

SEQ ID NO: 3633 - RNA, 20 nt, Artificial Sequence
  Antisense oligo
agccucauugguggccucuc

SEQ ID NO: 3634 - RNA, 20 nt, Artificial Sequence
  Antisense oligo
cagccucauugguggccucu

SEQ ID NO: 3635 - RNA, 20 nt, Artificial Sequence
  Antisense oligo
uccagccucauugguggccu

SEQ ID NO: 3636 - RNA, 20 nt, Artificial Sequence
  Antisense oligo
cuaaucacagccuccagagg

SEQ ID NO: 3637 - RNA, 20 nt, Artificial Sequence
  Antisense oligo
acuaaucacagccuccagag

SEQ ID NO: 3638 - RNA, 20 nt, Artificial Sequence
  Antisense oligo
cacuaaucacagccuccaga

SEQ ID NO: 3639 - RNA, 20 nt, Artificial Sequence
  Antisense oligo
ccacuaaucacagccuccag

SEQ ID NO: 3640 - RNA, 20 nt, Artificial Sequence
  Antisense oligo
ggccacuaaucacagccucc

SEQ ID NO: 3641 - RNA, 20 nt, Artificial Sequence
  Antisense oligo
gaauguucacgacccuuccc

SEQ ID NO: 3642 - RNA, 20 nt, Artificial Sequence
  Antisense oligo
agaauguucacgacccuucc

SEQ ID NO: 3643 - RNA, 20 nt, Artificial Sequence
  Antisense oligo
cagaauguucacgacccuuc

SEQ ID NO: 3644 - RNA, 20 nt, Artificial Sequence
  Antisense oligo
ccagaauguucacgacccuu

SEQ ID NO: 3645 - RNA, 20 nt, Artificial Sequence
  Antisense oligo
gccagaauguucacgacccu

SEQ ID NO: 3646 - RNA, 20 nt, Artificial Sequence
  Antisense oligo
ggccagaauguucacgaccc

SEQ ID NO: 3647 - RNA, 20 nt, Artificial Sequence
  Antisense oligo
cggccagaauguucacgacc

SEQ ID NO: 3648 - RNA, 20 nt, Artificial Sequence
  Antisense oligo
gggaugcuucuuacagcggc

SEQ ID NO: 3649 - RNA, 20 nt, Artificial Sequence
  Antisense oligo
cugggauuauaggugugagc

SEQ ID NO: 3650 - RNA, 20 nt, Artificial Sequence
  Antisense oligo
gcugggauuauaggugugag

SEQ ID NO: 3651 - RNA, 20 nt, Artificial Sequence
  Antisense oligo
ugcugggauuauagguguga

SEQ ID NO: 3652 - RNA, 20 nt, Artificial Sequence
  Antisense oligo
gugcugggauuauaggugug

SEQ ID NO: 3653 - RNA, 20 nt, Artificial Sequence
  Antisense oligo
agugcugggauuauaggugu

SEQ ID NO: 3654 - RNA, 20 nt, Artificial Sequence
  Antisense oligo
aagugcugggauuauaggug

SEQ ID NO: 3655 - RNA, 20 nt, Artificial Sequence
  Antisense oligo
aaagugcugggauuauaggu

SEQ ID NO: 3656 - RNA, 20 nt, Artificial Sequence
  Antisense oligo
caaagugcugggauuauagg

SEQ ID NO: 3657 - RNA, 20 nt, Artificial Sequence
  Antisense oligo
ccaaagugcugggauuauag

SEQ ID NO: 3658 - RNA, 20 nt, Artificial Sequence
  Antisense oligo
gucuugaacuccugaacuca

SEQ ID NO: 3659 - RNA, 20 nt, Artificial Sequence
  Antisense oligo
ggucuugaacuccugaacuc

SEQ ID NO: 3660 - RNA, 20 nt, Artificial Sequence
  Antisense oligo
uggucuugaacuccugaacu

SEQ ID NO: 3661 - RNA, 20 nt, Artificial Sequence
  Antisense oligo
cuggucuugaacuccugaac

SEQ ID NO: 3662 - RNA, 20 nt, Artificial Sequence
  Antisense oligo
gcuggucuugaacuccugaa

SEQ ID NO: 3663 - RNA, 20 nt, Artificial Sequence
  Antisense oligo
ggcuggucuugaacuccuga

SEQ ID NO: 3664 - RNA, 20 nt, Artificial Sequence
  Antisense oligo
aggcuggucuugaacuccug

SEQ ID NO: 3665 - RNA, 20 nt, Artificial Sequence
  Antisense oligo
caggcuggucuugaacuccu

SEQ ID NO: 3666 - RNA, 20 nt, Artificial Sequence
  Antisense oligo
ccaggcuggucuugaacucc

SEQ ID NO: 3667 - RNA, 20 nt, Artificial Sequence
  Antisense oligo
gccaggcuggucuugaacuc

SEQ ID NO: 3668 - RNA, 20 nt, Artificial Sequence
  Antisense oligo
ggccaggcuggucuugaacu

SEQ ID NO: 3669 - RNA, 20 nt, Artificial Sequence
  Antisense oligo
ugggauuacaggcacaugcc

SEQ ID NO: 3670 - RNA, 20 nt, Artificial Sequence
  Antisense oligo
cugggauuacaggcacaugc

SEQ ID NO: 3671 - RNA, 20 nt, Artificial Sequence
  Antisense oligo
gcugggauuacaggcacaug

SEQ ID NO: 3672 - RNA, 20 nt, Artificial Sequence
  Antisense oligo
agcugggauuacaggcacau

SEQ ID NO: 3673 - RNA, 20 nt, Artificial Sequence
  Antisense oligo
uagcugggauuacaggcaca

SEQ ID NO: 3674 - RNA, 20 nt, Artificial Sequence
  Antisense oligo
guagcugggauuacaggcac

SEQ ID NO: 3675 - RNA, 20 nt, Artificial Sequence
  Antisense oligo
aguagcugggauuacaggca

SEQ ID NO: 3676 - RNA, 20 nt, Artificial Sequence
  Antisense oligo
gaguagcugggauuacaggc

SEQ ID NO: 3677 - RNA, 20 nt, Artificial Sequence
  Antisense oligo
cgaguagcugggauuacagg

SEQ ID NO: 3678 - RNA, 20 nt, Artificial Sequence
  Antisense oligo
ccgaguagcugggauuacag

SEQ ID NO: 3679 - RNA, 20 nt, Artificial Sequence
  Antisense oligo
cccgaguagcugggauuaca

SEQ ID NO: 3680 - RNA, 20 nt, Artificial Sequence
  Antisense oligo
gcaauucuccugcgacagcc

SEQ ID NO: 3681 - RNA, 20 nt, Artificial Sequence
  Antisense oligo
agcaauucuccugcgacagc

SEQ ID NO: 3682 - RNA, 20 nt, Artificial Sequence
  Antisense oligo
aagcaauucuccugcgacag

SEQ ID NO: 3683 - RNA, 20 nt, Artificial Sequence
  Antisense oligo
caagcaauucuccugcgaca

SEQ ID NO: 3684 - RNA, 20 nt, Artificial Sequence
  Antisense oligo
ucaagcaauucuccugcgac

SEQ ID NO: 3685 - RNA, 20 nt, Artificial Sequence
  Antisense oligo
cucaagcaauucuccugcga

SEQ ID NO: 3686 - RNA, 20 nt, Artificial Sequence
  Antisense oligo
gcucaagcaauucuccugcg

SEQ ID NO: 3687 - RNA, 20 nt, Artificial Sequence
  Antisense oligo
ggcucaagcaauucuccugc

SEQ ID NO: 3688 - RNA, 20 nt, Artificial Sequence
  Antisense oligo
aggcucaagcaauucuccug

SEQ ID NO: 3689 - RNA, 20 nt, Artificial Sequence
  Antisense oligo
caggcucaagcaauucuccu

SEQ ID NO: 3690 - RNA, 20 nt, Artificial Sequence
  Antisense oligo
ccaggcucaagcaauucucc

SEQ ID NO: 3691 - RNA, 20 nt, Artificial Sequence
  Antisense oligo
cccaggcucaagcaauucuc

SEQ ID NO: 3692 - RNA, 20 nt, Artificial Sequence
  Antisense oligo
ucccaggcucaagcaauucu

SEQ ID NO: 3693 - RNA, 20 nt, Artificial Sequence
  Antisense oligo
cucccaggcucaagcaauuc

SEQ ID NO: 3694 - RNA, 20 nt, Artificial Sequence
  Antisense oligo
ccucccaggcucaagcaauu

SEQ ID NO: 3695 - RNA, 20 nt, Artificial Sequence
  Antisense oligo
ucucagcucacugcaaccuc

SEQ ID NO: 3696 - RNA, 20 nt, Artificial Sequence
  Antisense oligo
aucucagcucacugcaaccu

SEQ ID NO: 3697 - RNA, 20 nt, Artificial Sequence
  Antisense oligo
gaucucagcucacugcaacc

SEQ ID NO: 3698 - RNA, 20 nt, Artificial Sequence
  Antisense oligo
cgaucucagcucacugcaac

SEQ ID NO: 3699 - RNA, 20 nt, Artificial Sequence
  Antisense oligo
gcgaucucagcucacugcaa

SEQ ID NO: 3700 - RNA, 20 nt, Artificial Sequence
  Antisense oligo
ugcgaucucagcucacugca

SEQ ID NO: 3701 - RNA, 20 nt, Artificial Sequence
  Antisense oligo
cugcgaucucagcucacugc

SEQ ID NO: 3702 - RNA, 20 nt, Artificial Sequence
  Antisense oligo
acugcgaucucagcucacug

SEQ ID NO: 3703 - RNA, 20 nt, Artificial Sequence
  Antisense oligo
uacugcgaucucagcucacu

SEQ ID NO: 3704 - RNA, 20 nt, Artificial Sequence
  Antisense oligo
guacugcgaucucagcucac

SEQ ID NO: 3705 - RNA, 20 nt, Artificial Sequence
  Antisense oligo
ccaaggcuggagugcaguac

SEQ ID NO: 3706 - RNA, 20 nt, Artificial Sequence
  Antisense oligo
accaaggcuggagugcagua

SEQ ID NO: 3707 - RNA, 20 nt, Artificial Sequence
  Antisense oligo
uaccaaggcuggagugcagu

SEQ ID NO: 3708 - RNA, 20 nt, Artificial Sequence
  Antisense oligo
cucuuauuaccaaggcugga

SEQ ID NO: 3709 - RNA, 20 nt, Artificial Sequence
  Antisense oligo
gcucuuauuaccaaggcugg

SEQ ID NO: 3710 - RNA, 20 nt, Artificial Sequence
  Antisense oligo
cgcucuuauuaccaaggcug

SEQ ID NO: 3711 - RNA, 20 nt, Artificial Sequence
  Antisense oligo
ucgcucuuauuaccaaggcu

SEQ ID NO: 3712 - RNA, 20 nt, Artificial Sequence
  Antisense oligo
cucgcucuuauuaccaaggc

SEQ ID NO: 3713 - RNA, 20 nt, Artificial Sequence
  Antisense oligo
aggaaccaaacccugaccuu

SEQ ID NO: 3714 - RNA, 20 nt, Artificial Sequence
  Antisense oligo
aaggaaccaaacccugaccu

SEQ ID NO: 3715 - RNA, 20 nt, Artificial Sequence
  Antisense oligo
acaaggaaccaaacccugac

SEQ ID NO: 3716 - RNA, 20 nt, Artificial Sequence
  Antisense oligo
aacaaggaaccaaacccuga

SEQ ID NO: 3717 - RNA, 20 nt, Artificial Sequence
  Antisense oligo
gaacaaggaaccaaacccug

SEQ ID NO: 3718 - RNA, 20 nt, Artificial Sequence
  Antisense oligo
ggaacaaggaaccaaacccu

SEQ ID NO: 3719 - RNA, 20 nt, Artificial Sequence
  Antisense oligo
uggaacaaggaaccaaaccc

SEQ ID NO: 3720 - RNA, 20 nt, Artificial Sequence
  Antisense oligo
ccuggaacaaggaaccaaac

SEQ ID NO: 3721 - RNA, 20 nt, Artificial Sequence
  Antisense oligo
uggucucagcuuccuggaac

SEQ ID NO: 3722 - RNA, 20 nt, Artificial Sequence
  Antisense oligo
cuuggucucagcuuccugga

SEQ ID NO: 3723 - RNA, 20 nt, Artificial Sequence
  Antisense oligo
gucuuggucucagcuuccug

SEQ ID NO: 3724 - RNA, 20 nt, Artificial Sequence
  Antisense oligo
ggucuuggucucagcuuccu

SEQ ID NO: 3725 - RNA, 20 nt, Artificial Sequence
  Antisense oligo
cuuggucuuggucucagcuu

SEQ ID NO: 3726 - RNA, 20 nt, Artificial Sequence
  Antisense oligo
uccuuggucuuggucucagc

SEQ ID NO: 3727 - RNA, 20 nt, Artificial Sequence
  Antisense oligo
guccuuggucuuggucucag

SEQ ID NO: 3728 - RNA, 20 nt, Artificial Sequence
  Antisense oligo
ucguccuuggucuuggucuc

SEQ ID NO: 3729 - RNA, 20 nt, Artificial Sequence
  Antisense oligo
cucguccuuggucuuggucu

SEQ ID NO: 3730 - RNA, 20 nt, Artificial Sequence
  Antisense oligo
ucucguccuuggucuugguc

SEQ ID NO: 3731 - RNA, 20 nt, Artificial Sequence
  Antisense oligo
cuugaggucuucaggcuccc

SEQ ID NO: 3732 - RNA, 20 nt, Artificial Sequence
  Antisense oligo
uucuugaggucuucaggcuc

SEQ ID NO: 3733 - RNA, 20 nt, Artificial Sequence
  Antisense oligo
cuucuugaggucuucaggcu

SEQ ID NO: 3734 - RNA, 20 nt, Artificial Sequence
  Antisense oligo
cuuccuggacaucugcuucc

SEQ ID NO: 3735 - RNA, 20 nt, Artificial Sequence
  Antisense oligo
acuuccuggacaucugcuuc

SEQ ID NO: 3736 - RNA, 20 nt, Artificial Sequence
  Antisense oligo
cuucacuuccuggacaucug

SEQ ID NO: 3737 - RNA, 20 nt, Artificial Sequence
  Antisense oligo
cucaggcagggucuccuuug

SEQ ID NO: 3738 - RNA, 20 nt, Artificial Sequence
  Antisense oligo
ucucaggcagggucuccuuu

SEQ ID NO: 3739 - RNA, 20 nt, Artificial Sequence
  Antisense oligo
aacaagaaacuggcacaggu

SEQ ID NO: 3740 - RNA, 20 nt, Artificial Sequence
  Antisense oligo
gaaacaagaaacuggcacag

SEQ ID NO: 3741 - RNA, 20 nt, Artificial Sequence
  Antisense oligo
cugcccaccucugaagugcu

SEQ ID NO: 3742 - RNA, 20 nt, Artificial Sequence
  Antisense oligo
cuucacugccuccaaaaugg

SEQ ID NO: 3743 - RNA, 20 nt, Artificial Sequence
  Antisense oligo
ucucuucacugccuccaaaa

SEQ ID NO: 3744 - RNA, 20 nt, Artificial Sequence
  Antisense oligo
gaggucucucuucacugccu

SEQ ID NO: 3745 - RNA, 20 nt, Artificial Sequence
  Antisense oligo
ggaggucucucuucacugcc

SEQ ID NO: 3746 - RNA, 20 nt, Artificial Sequence
  Antisense oligo
uggaggucucucuucacugc

SEQ ID NO: 3747 - RNA, 20 nt, Artificial Sequence
  Antisense oligo
cauggaggucucucuucacu

SEQ ID NO: 3748 - RNA, 20 nt, Artificial Sequence
  Antisense oligo
acaugcaagcacguccacgu

SEQ ID NO: 3749 - RNA, 20 nt, Artificial Sequence
  Antisense oligo
aacaugcaagcacguccacg

SEQ ID NO: 3750 - RNA, 20 nt, Artificial Sequence
  Antisense oligo
aaacaugcaagcacguccac

SEQ ID NO: 3751 - RNA, 20 nt, Artificial Sequence
  Antisense oligo
caaacaugcaagcacgucca

SEQ ID NO: 3752 - RNA, 20 nt, Artificial Sequence
  Antisense oligo
agcaaacaugcaagcacguc

SEQ ID NO: 3753 - RNA, 20 nt, Artificial Sequence
  Antisense oligo
cuagcaaacaugcaagcacg

SEQ ID NO: 3754 - RNA, 20 nt, Artificial Sequence
  Antisense oligo
cccuagcaaacaugcaagca

SEQ ID NO: 3755 - RNA, 20 nt, Artificial Sequence
  Antisense oligo
uaucacacccuagcaaacau

SEQ ID NO: 3756 - RNA, 20 nt, Artificial Sequence
  Antisense oligo
uuaucacacccuagcaaaca

SEQ ID NO: 3757 - RNA, 20 nt, Artificial Sequence
  Antisense oligo
auuaucacacccuagcaaac

SEQ ID NO: 3758 - RNA, 20 nt, Artificial Sequence
  Antisense oligo
cauuaucacacccuagcaaa

SEQ ID NO: 3759 - RNA, 20 nt, Artificial Sequence
  Antisense oligo
acauuaucacacccuagcaa

SEQ ID NO: 3760 - RNA, 20 nt, Artificial Sequence
  Antisense oligo
cacauuaucacacccuagca

SEQ ID NO: 3761 - RNA, 20 nt, Artificial Sequence
  Antisense oligo
gcacauuaucacacccuagc

SEQ ID NO: 3762 - RNA, 20 nt, Artificial Sequence
  Antisense oligo
ugcacauuaucacacccuag

SEQ ID NO: 3763 - RNA, 20 nt, Artificial Sequence
  Antisense oligo
augcacauuaucacacccua

SEQ ID NO: 3764 - RNA, 20 nt, Artificial Sequence
  Antisense oligo
uccuuguguucguaaugcac

SEQ ID NO: 3765 - RNA, 20 nt, Artificial Sequence
  Antisense oligo
guccuuguguucguaaugca

SEQ ID NO: 3766 - RNA, 20 nt, Artificial Sequence
  Antisense oligo
gguccuuguguucguaaugc

SEQ ID NO: 3767 - RNA, 20 nt, Artificial Sequence
  Antisense oligo
ugguccuuguguucguaaug

SEQ ID NO: 3768 - RNA, 20 nt, Artificial Sequence
  Antisense oligo
augguccuuguguucguaau

SEQ ID NO: 3769 - RNA, 20 nt, Artificial Sequence
  Antisense oligo
caugguccuuguguucguaa

SEQ ID NO: 3770 - RNA, 20 nt, Artificial Sequence
  Antisense oligo
caugcacacacacaggcaca

SEQ ID NO: 3771 - RNA, 20 nt, Artificial Sequence
  Antisense oligo
acaugcacacacacaggcac

SEQ ID NO: 3772 - RNA, 20 nt, Artificial Sequence
  Antisense oligo
cacaugcacacacacaggca

SEQ ID NO: 3773 - RNA, 20 nt, Artificial Sequence
  Antisense oligo
ccacaugcacacacacaggc

SEQ ID NO: 3774 - RNA, 20 nt, Artificial Sequence
  Antisense oligo
cccacaugcacacacacagg

SEQ ID NO: 3775 - RNA, 20 nt, Artificial Sequence
  Antisense oligo
acccacaugcacacacacag

SEQ ID NO: 3776 - RNA, 20 nt, Artificial Sequence
  Antisense oligo
cacccacaugcacacacaca

SEQ ID NO: 3777 - RNA, 20 nt, Artificial Sequence
  Antisense oligo
acacccacaugcacacacac

SEQ ID NO: 3778 - RNA, 20 nt, Artificial Sequence
  Antisense oligo
ugaacgcacacgcacacacc

SEQ ID NO: 3779 - RNA, 20 nt, Artificial Sequence
  Antisense oligo
cuguccaccugccaugugca

SEQ ID NO: 3780 - RNA, 20 nt, Artificial Sequence
  Antisense oligo
gaucuguccaccugccaugu

SEQ ID NO: 3781 - RNA, 20 nt, Artificial Sequence
  Antisense oligo
gaaaucugauucccgugaga

SEQ ID NO: 3782 - RNA, 20 nt, Artificial Sequence
  Antisense oligo
agaaaucugauucccgugag

SEQ ID NO: 3783 - RNA, 20 nt, Artificial Sequence
  Antisense oligo
cagaaaucugauucccguga

SEQ ID NO: 3784 - RNA, 20 nt, Artificial Sequence
  Antisense oligo
aacagaaaucugauucccgu

SEQ ID NO: 3785 - RNA, 20 nt, Artificial Sequence
  Antisense oligo
cagcgugcugguggaaaacc

SEQ ID NO: 3786 - RNA, 20 nt, Artificial Sequence
  Antisense oligo
gaacacggugacuccuccac

SEQ ID NO: 3787 - RNA, 20 nt, Artificial Sequence
  Antisense oligo
agaacacggugacuccucca

SEQ ID NO: 3788 - RNA, 20 nt, Artificial Sequence
  Antisense oligo
gaagaacacggugacuccuc

SEQ ID NO: 3789 - RNA, 20 nt, Artificial Sequence
  Antisense oligo
ggaagaacacggugacuccu

SEQ ID NO: 3790 - RNA, 20 nt, Artificial Sequence
  Antisense oligo
uggaagaacacggugacucc

SEQ ID NO: 3791 - RNA, 20 nt, Artificial Sequence
  Antisense oligo
augauggcguggaagaacac

SEQ ID NO: 3792 - RNA, 20 nt, Artificial Sequence
  Antisense oligo
gaugauggcguggaagaaca

SEQ ID NO: 3793 - RNA, 20 nt, Artificial Sequence
  Antisense oligo
agaugauggcguggaagaac

SEQ ID NO: 3794 - RNA, 20 nt, Artificial Sequence
  Antisense oligo
gagagaugauggcguggaag

SEQ ID NO: 3795 - RNA, 20 nt, Artificial Sequence
  Antisense oligo
agagagaugauggcguggaa

SEQ ID NO: 3796 - RNA, 20 nt, Artificial Sequence
  Antisense oligo
ugaagagagaugauggcgug

SEQ ID NO: 3797 - RNA, 20 nt, Artificial Sequence
  Antisense oligo
augaagagagaugauggcgu

SEQ ID NO: 3798 - RNA, 20 nt, Artificial Sequence
  Antisense oligo
aaugaagagagaugauggcg

SEQ ID NO: 3799 - RNA, 20 nt, Artificial Sequence
  Antisense oligo
aaaugaagagagaugauggc

SEQ ID NO: 3800 - RNA, 20 nt, Artificial Sequence
  Antisense oligo
gacuuuauggaggucaggau

SEQ ID NO: 3801 - RNA, 20 nt, Artificial Sequence
  Antisense oligo
gaagacuuuauggaggucag

SEQ ID NO: 3802 - RNA, 20 nt, Artificial Sequence
  Antisense oligo
augaagacuuuauggagguc

SEQ ID NO: 3803 - RNA, 20 nt, Artificial Sequence
  Antisense oligo
gaugaagacuuuauggaggu

SEQ ID NO: 3804 - RNA, 20 nt, Artificial Sequence
  Antisense oligo
ugaugaagacuuuauggagg

SEQ ID NO: 3805 - RNA, 20 nt, Artificial Sequence
  Antisense oligo
cugaugaagacuuuauggag

SEQ ID NO: 3806 - RNA, 20 nt, Artificial Sequence
  Antisense oligo
ccucugaugaagacuuuaug

SEQ ID NO: 3807 - RNA, 20 nt, Artificial Sequence
  Antisense oligo
ccuccucugaugaagacuuu

SEQ ID NO: 3808 - RNA, 20 nt, Artificial Sequence
  Antisense oligo
ucuccuccucugaugaagac

SEQ ID NO: 3809 - RNA, 20 nt, Artificial Sequence
  Antisense oligo
uucuccuccucugaugaaga

SEQ ID NO: 3810 - RNA, 20 nt, Artificial Sequence
  Antisense oligo
ucuucuccuccucugaugaa

SEQ ID NO: 3811 - RNA, 20 nt, Artificial Sequence
  Antisense oligo
gcugucccauuuugacuccc

SEQ ID NO: 3812 - RNA, 20 nt, Artificial Sequence
  Antisense oligo
uugcugucccauuuugacuc

SEQ ID NO: 3813 - RNA, 20 nt, Artificial Sequence
  Antisense oligo
cagauauugcugucccauuu

SEQ ID NO: 3814 - RNA, 20 nt, Artificial Sequence
  Antisense oligo
uagugcagcucacagauauu

SEQ ID NO: 3815 - RNA, 20 nt, Artificial Sequence
  Antisense oligo
guagugcagcucacagauau

SEQ ID NO: 3816 - RNA, 20 nt, Artificial Sequence
  Antisense oligo
uguagugcagcucacagaua

SEQ ID NO: 3817 - RNA, 20 nt, Artificial Sequence
  Antisense oligo
guguagugcagcucacagau

SEQ ID NO: 3818 - RNA, 20 nt, Artificial Sequence
  Antisense oligo
gguguagugcagcucacaga

SEQ ID NO: 3819 - RNA, 20 nt, Artificial Sequence
  Antisense oligo
ugguguagugcagcucacag

SEQ ID NO: 3820 - RNA, 20 nt, Artificial Sequence
  Antisense oligo
cugguguagugcagcucaca

SEQ ID NO: 3821 - RNA, 20 nt, Artificial Sequence
  Antisense oligo
ccugguguagugcagcucac

SEQ ID NO: 3822 - RNA, 20 nt, Artificial Sequence
  Antisense oligo
ucaccugguguagugcagcu

SEQ ID NO: 3823 - RNA, 20 nt, Artificial Sequence
  Antisense oligo
cucaccugguguagugcagc

SEQ ID NO: 3824 - RNA, 20 nt, Artificial Sequence
  Antisense oligo
gcucaccugguguagugcag

SEQ ID NO: 3825 - RNA, 20 nt, Artificial Sequence
  Antisense oligo
cgcucaccugguguagugca

SEQ ID NO: 3826 - RNA, 20 nt, Artificial Sequence
  Antisense oligo
acgcucaccugguguagugc

SEQ ID NO: 3827 - RNA, 20 nt, Artificial Sequence
  Antisense oligo
cacgcucaccugguguagug

SEQ ID NO: 3828 - RNA, 20 nt, Artificial Sequence
  Antisense oligo
acagacacgcucaccuggug

SEQ ID NO: 3829 - RNA, 20 nt, Artificial Sequence
  Antisense oligo
uacagacacgcucaccuggu

SEQ ID NO: 3830 - RNA, 20 nt, Artificial Sequence
  Antisense oligo
cuacagacacgcucaccugg

SEQ ID NO: 3831 - RNA, 20 nt, Artificial Sequence
  Antisense oligo
ccuacagacacgcucaccug

SEQ ID NO: 3832 - RNA, 20 nt, Artificial Sequence
  Antisense oligo
uccuaugccuucccugaggg

SEQ ID NO: 3833 - RNA, 20 nt, Artificial Sequence
  Antisense oligo
auccuaugccuucccugagg

SEQ ID NO: 3834 - RNA, 20 nt, Artificial Sequence
  Antisense oligo
ucacaggcugggcauccuau

SEQ ID NO: 3835 - RNA, 20 nt, Artificial Sequence
  Antisense oligo
aacuacgugucacaggcugg

SEQ ID NO: 3836 - RNA, 20 nt, Artificial Sequence
  Antisense oligo
uuaaacuacgugucacaggc

SEQ ID NO: 3837 - RNA, 20 nt, Artificial Sequence
  Antisense oligo
acuccagccugggugacaca

SEQ ID NO: 3838 - RNA, 20 nt, Artificial Sequence
  Antisense oligo
acacuccagccugggugaca

SEQ ID NO: 3839 - RNA, 20 nt, Artificial Sequence
  Antisense oligo
aaucgcuugaacccaggagg

SEQ ID NO: 3840 - RNA, 20 nt, Artificial Sequence
  Antisense oligo
gaaucgcuugaacccaggag

SEQ ID NO: 3841 - RNA, 20 nt, Artificial Sequence
  Antisense oligo
agaaucgcuugaacccagga

SEQ ID NO: 3842 - RNA, 20 nt, Artificial Sequence
  Antisense oligo
gagaaucgcuugaacccagg

SEQ ID NO: 3843 - RNA, 20 nt, Artificial Sequence
  Antisense oligo
ugagaaucgcuugaacccag

SEQ ID NO: 3844 - RNA, 20 nt, Artificial Sequence
  Antisense oligo
augagaaucgcuugaaccca

SEQ ID NO: 3845 - RNA, 20 nt, Artificial Sequence
  Antisense oligo
caugagaaucgcuugaaccc

SEQ ID NO: 3846 - RNA, 20 nt, Artificial Sequence
  Antisense oligo
gcaugagaaucgcuugaacc

SEQ ID NO: 3847 - RNA, 20 nt, Artificial Sequence
  Antisense oligo
ggcaugagaaucgcuugaac

SEQ ID NO: 3848 - RNA, 20 nt, Artificial Sequence
  Antisense oligo
cacaccuguagucccagcua

SEQ ID NO: 3849 - RNA, 20 nt, Artificial Sequence
  Antisense oligo
acacaccuguagucccagcu

SEQ ID NO: 3850 - RNA, 20 nt, Artificial Sequence
  Antisense oligo
gaaacuccgucucuacuaaa

SEQ ID NO: 3851 - RNA, 20 nt, Artificial Sequence
  Antisense oligo
uuaguagaaacuccgucucu

SEQ ID NO: 3852 - RNA, 20 nt, Artificial Sequence
  Antisense oligo
uuuaguagaaacuccgucuc

SEQ ID NO: 3853 - RNA, 20 nt, Artificial Sequence
  Antisense oligo
cauuuaguagaaacuccguc

SEQ ID NO: 3854 - RNA, 20 nt, Artificial Sequence
  Antisense oligo
agccagcauuuaguagaaac

SEQ ID NO: 3855 - RNA, 20 nt, Artificial Sequence
  Antisense oligo
cuagccagcauuuaguagaa

SEQ ID NO: 3856 - RNA, 20 nt, Artificial Sequence
  Antisense oligo
gccuagccagcauuuaguag

SEQ ID NO: 3857 - RNA, 20 nt, Artificial Sequence
  Antisense oligo
agccuagccagcauuuagua

SEQ ID NO: 3858 - RNA, 20 nt, Artificial Sequence
  Antisense oligo
uagccuagccagcauuuagu

SEQ ID NO: 3859 - RNA, 20 nt, Artificial Sequence
  Antisense oligo
cuagccuagccagcauuuag

SEQ ID NO: 3860 - RNA, 20 nt, Artificial Sequence
  Antisense oligo
acuagccuagccagcauuua

SEQ ID NO: 3861 - RNA, 20 nt, Artificial Sequence
  Antisense oligo
ucaggaguuugagacuagcc

SEQ ID NO: 3862 - RNA, 20 nt, Artificial Sequence
  Antisense oligo
gucaggaguuugagacuagc

SEQ ID NO: 3863 - RNA, 20 nt, Artificial Sequence
  Antisense oligo
ggucaggaguuugagacuag

SEQ ID NO: 3864 - RNA, 20 nt, Artificial Sequence
  Antisense oligo
aggucaggaguuugagacua

SEQ ID NO: 3865 - RNA, 20 nt, Artificial Sequence
  Antisense oligo
gaggucaggaguuugagacu

SEQ ID NO: 3866 - RNA, 20 nt, Artificial Sequence
  Antisense oligo
ugaggucaggaguuugagac

SEQ ID NO: 3867 - RNA, 20 nt, Artificial Sequence
  Antisense oligo
cugaggucaggaguuugaga

SEQ ID NO: 3868 - RNA, 20 nt, Artificial Sequence
  Antisense oligo
gucaucaacucacuggauaa

SEQ ID NO: 3869 - RNA, 20 nt, Artificial Sequence
  Antisense oligo
ugucaucaacucacuggaua

SEQ ID NO: 3870 - RNA, 20 nt, Artificial Sequence
  Antisense oligo
aaugucaucaacucacugga

SEQ ID NO: 3871 - RNA, 20 nt, Artificial Sequence
  Antisense oligo
gaaugucaucaacucacugg

SEQ ID NO: 3872 - RNA, 20 nt, Artificial Sequence
  Antisense oligo
cgaagaaugucaucaacuca

SEQ ID NO: 3873 - RNA, 20 nt, Artificial Sequence
  Antisense oligo
ccgaagaaugucaucaacuc

SEQ ID NO: 3874 - RNA, 20 nt, Artificial Sequence
  Antisense oligo
acccgaagaaugucaucaac

SEQ ID NO: 3875 - RNA, 20 nt, Artificial Sequence
  Antisense oligo
aacccgaagaaugucaucaa

SEQ ID NO: 3876 - RNA, 20 nt, Artificial Sequence
  Antisense oligo
gaacccgaagaaugucauca

SEQ ID NO: 3877 - RNA, 20 nt, Artificial Sequence
  Antisense oligo
agaacccgaagaaugucauc

SEQ ID NO: 3878 - RNA, 20 nt, Artificial Sequence
  Antisense oligo
ccagaacccgaagaauguca

SEQ ID NO: 3879 - RNA, 20 nt, Artificial Sequence
  Antisense oligo
uuccagaacccgaagaaugu

SEQ ID NO: 3880 - RNA, 20 nt, Artificial Sequence
  Antisense oligo
uucaucuuccagaacccgaa

SEQ ID NO: 3881 - RNA, 20 nt, Artificial Sequence
  Antisense oligo
auucaucuuccagaacccga

SEQ ID NO: 3882 - RNA, 20 nt, Artificial Sequence
  Antisense oligo
ggaagagcugucugaaauau

SEQ ID NO: 3883 - RNA, 20 nt, Artificial Sequence
  Antisense oligo
ccaggaagagcugucugaaa

SEQ ID NO: 3884 - RNA, 20 nt, Artificial Sequence
  Antisense oligo
caugauggaauaugacacca

SEQ ID NO: 3885 - RNA, 20 nt, Artificial Sequence
  Antisense oligo
ccaugauggaauaugacacc

SEQ ID NO: 3886 - RNA, 20 nt, Artificial Sequence
  Antisense oligo
caugauugcacuccagccua

SEQ ID NO: 3887 - RNA, 20 nt, Artificial Sequence
  Antisense oligo
ugauggcccaggagauugag

SEQ ID NO: 3888 - RNA, 20 nt, Artificial Sequence
  Antisense oligo
augauggcccaggagauuga

SEQ ID NO: 3889 - RNA, 20 nt, Artificial Sequence
  Antisense oligo
caugauggcccaggagauug

SEQ ID NO: 3890 - RNA, 20 nt, Artificial Sequence
  Antisense oligo
gcaugauggcccaggagauu

SEQ ID NO: 3891 - RNA, 20 nt, Artificial Sequence
  Antisense oligo
auaaacaaagcugggcauga

SEQ ID NO: 3892 - RNA, 20 nt, Artificial Sequence
  Antisense oligo
ugggugacagagcaagacuc

SEQ ID NO: 3893 - RNA, 20 nt, Artificial Sequence
  Antisense oligo
aucccaccacugcacuccag

SEQ ID NO: 3894 - RNA, 20 nt, Artificial Sequence
  Antisense oligo
gaucccaccacugcacucca

SEQ ID NO: 3895 - RNA, 20 nt, Artificial Sequence
  Antisense oligo
gcauugaccugugaucccac

SEQ ID NO: 3896 - RNA, 20 nt, Artificial Sequence
  Antisense oligo
ugcauugaccugugauccca

SEQ ID NO: 3897 - RNA, 20 nt, Artificial Sequence
  Antisense oligo
gcugcauugaccugugaucc

SEQ ID NO: 3898 - RNA, 20 nt, Artificial Sequence
  Antisense oligo
caaggcugcauugaccugug

SEQ ID NO: 3899 - RNA, 20 nt, Artificial Sequence
  Antisense oligo
ccugaaaucccaacaccaug

SEQ ID NO: 3900 - RNA, 20 nt, Artificial Sequence
  Antisense oligo
guggcaaggcuggguucagu

SEQ ID NO: 3901 - RNA, 20 nt, Artificial Sequence
  Antisense oligo
uguggcaaggcuggguucag

SEQ ID NO: 3902 - RNA, 20 nt, Artificial Sequence
  Antisense oligo
auguggcaaggcuggguuca

SEQ ID NO: 3903 - RNA, 20 nt, Artificial Sequence
  Antisense oligo
ugauguggcaaggcuggguu

SEQ ID NO: 3904 - RNA, 20 nt, Artificial Sequence
  Antisense oligo
aguugauguggcaaggcugg

SEQ ID NO: 3905 - RNA, 20 nt, Artificial Sequence
  Antisense oligo
aaguugauguggcaaggcug

SEQ ID NO: 3906 - RNA, 20 nt, Artificial Sequence
  Antisense oligo
auaaguugauguggcaaggc

SEQ ID NO: 3907 - RNA, 20 nt, Artificial Sequence
  Antisense oligo
uauaaguugauguggcaagg

SEQ ID NO: 3908 - RNA, 20 nt, Artificial Sequence
  Antisense oligo
cuauaaguugauguggcaag

SEQ ID NO: 3909 - RNA, 20 nt, Artificial Sequence
  Antisense oligo
gcuauaaguugauguggcaa

SEQ ID NO: 3910 - RNA, 20 nt, Artificial Sequence
  Antisense oligo
agcuauaaguugauguggca

SEQ ID NO: 3911 - RNA, 20 nt, Artificial Sequence
  Antisense oligo
aagcuauaaguugauguggc

SEQ ID NO: 3912 - RNA, 20 nt, Artificial Sequence
  Antisense oligo
gagugcaaagcuauaaguug

SEQ ID NO: 3913 - RNA, 20 nt, Artificial Sequence
  Antisense oligo
ggagugcaaagcuauaaguu

SEQ ID NO: 3914 - RNA, 20 nt, Artificial Sequence
  Antisense oligo
uggagugcaaagcuauaagu

SEQ ID NO: 3915 - RNA, 20 nt, Artificial Sequence
  Antisense oligo
auggagugcaaagcuauaag

SEQ ID NO: 3916 - RNA, 20 nt, Artificial Sequence
  Antisense oligo
cauggagugcaaagcuauaa

SEQ ID NO: 3917 - RNA, 20 nt, Artificial Sequence
  Antisense oligo
gcauggagugcaaagcuaua

SEQ ID NO: 3918 - RNA, 20 nt, Artificial Sequence
  Antisense oligo
agcauggagugcaaagcuau

SEQ ID NO: 3919 - RNA, 20 nt, Artificial Sequence
  Antisense oligo
guagcauggagugcaaagcu

SEQ ID NO: 3920 - RNA, 20 nt, Artificial Sequence
  Antisense oligo
cguagcauggagugcaaagc

SEQ ID NO: 3921 - RNA, 20 nt, Artificial Sequence
  Antisense oligo
acguagcauggagugcaaag

SEQ ID NO: 3922 - RNA, 20 nt, Artificial Sequence
  Antisense oligo
aacguagcauggagugcaaa

SEQ ID NO: 3923 - RNA, 20 nt, Artificial Sequence
  Antisense oligo
aaacguagcauggagugcaa

SEQ ID NO: 3924 - RNA, 20 nt, Artificial Sequence
  Antisense oligo
caaacguagcauggagugca

SEQ ID NO: 3925 - RNA, 20 nt, Artificial Sequence
  Antisense oligo
ucaaacguagcauggagugc

SEQ ID NO: 3926 - RNA, 20 nt, Artificial Sequence
  Antisense oligo
cucaaacguagcauggagug

SEQ ID NO: 3927 - RNA, 20 nt, Artificial Sequence
  Antisense oligo
ucucaaacguagcauggagu

SEQ ID NO: 3928 - RNA, 20 nt, Artificial Sequence
  Antisense oligo
uucucaaacguagcauggag

SEQ ID NO: 3929 - RNA, 20 nt, Artificial Sequence
  Antisense oligo
auucucaaacguagcaugga

SEQ ID NO: 3930 - RNA, 20 nt, Artificial Sequence
  Antisense oligo
uauucucaaacguagcaugg

SEQ ID NO: 3931 - RNA, 20 nt, Artificial Sequence
  Antisense oligo
ggcuauccaaaauuccuacc

SEQ ID NO: 3932 - RNA, 20 nt, Artificial Sequence
  Antisense oligo
uggcuauccaaaauuccuac

SEQ ID NO: 3933 - RNA, 20 nt, Artificial Sequence
  Antisense oligo
aacaggauacgguuggcuau

SEQ ID NO: 3934 - RNA, 20 nt, Artificial Sequence
  Antisense oligo
gaacaggauacgguuggcua

SEQ ID NO: 3935 - RNA, 20 nt, Artificial Sequence
  Antisense oligo
ugaacaggauacgguuggcu

SEQ ID NO: 3936 - RNA, 20 nt, Artificial Sequence
  Antisense oligo
augaacaggauacgguuggc

SEQ ID NO: 3937 - RNA, 20 nt, Artificial Sequence
  Antisense oligo
aaugaacaggauacgguugg

SEQ ID NO: 3938 - RNA, 20 nt, Artificial Sequence
  Antisense oligo
gaaugaacaggauacgguug

SEQ ID NO: 3939 - RNA, 20 nt, Artificial Sequence
  Antisense oligo
ugaaugaacaggauacgguu

SEQ ID NO: 3940 - RNA, 20 nt, Artificial Sequence
  Antisense oligo
ccaagucucugugaaugaac

SEQ ID NO: 3941 - RNA, 20 nt, Artificial Sequence
  Antisense oligo
acccaagucucugugaauga

SEQ ID NO: 3942 - RNA, 20 nt, Artificial Sequence
  Antisense oligo
gacccaagucucugugaaug

SEQ ID NO: 3943 - RNA, 20 nt, Artificial Sequence
  Antisense oligo
caugacccaagucucuguga

SEQ ID NO: 3944 - RNA, 20 nt, Artificial Sequence
  Antisense oligo
ucaacaagaacgcggucaug

SEQ ID NO: 3945 - RNA, 20 nt, Artificial Sequence
  Antisense oligo
uucaacaagaacgcggucau

SEQ ID NO: 3946 - RNA, 20 nt, Artificial Sequence
  Antisense oligo
cuucaacaagaacgcgguca

SEQ ID NO: 3947 - RNA, 20 nt, Artificial Sequence
  Antisense oligo
ccuucaacaagaacgcgguc

SEQ ID NO: 3948 - RNA, 20 nt, Artificial Sequence
  Antisense oligo
gccuucaacaagaacgcggu

SEQ ID NO: 3949 - RNA, 20 nt, Artificial Sequence
  Antisense oligo
ugccuucaacaagaacgcgg

SEQ ID NO: 3950 - RNA, 20 nt, Artificial Sequence
  Antisense oligo
augccuucaacaagaacgcg

SEQ ID NO: 3951 - RNA, 20 nt, Artificial Sequence
  Antisense oligo
aaugccuucaacaagaacgc

SEQ ID NO: 3952 - RNA, 20 nt, Artificial Sequence
  Antisense oligo
caaugccuucaacaagaacg

SEQ ID NO: 3953 - RNA, 20 nt, Artificial Sequence
  Antisense oligo
acaaugccuucaacaagaac

SEQ ID NO: 3954 - RNA, 20 nt, Artificial Sequence
  Antisense oligo
cagacaaugccuucaacaag

SEQ ID NO: 3955 - RNA, 20 nt, Artificial Sequence
  Antisense oligo
uggaaaugcagacaaugccu

SEQ ID NO: 3956 - RNA, 20 nt, Artificial Sequence
  Antisense oligo
gugcuucuuggaaaugcaga

SEQ ID NO: 3957 - RNA, 20 nt, Artificial Sequence
  Antisense oligo
uaggugcuucuuggaaaugc

SEQ ID NO: 3958 - RNA, 20 nt, Artificial Sequence
  Antisense oligo
cuaggugcuucuuggaaaug

SEQ ID NO: 3959 - RNA, 20 nt, Artificial Sequence
  Antisense oligo
ucuaggugcuucuuggaaau

SEQ ID NO: 3960 - RNA, 20 nt, Artificial Sequence
  Antisense oligo
aucuaggugcuucuuggaaa

SEQ ID NO: 3961 - RNA, 20 nt, Artificial Sequence
  Antisense oligo
uaucuaggugcuucuuggaa

SEQ ID NO: 3962 - RNA, 20 nt, Artificial Sequence
  Antisense oligo
uuaucuaggugcuucuugga

SEQ ID NO: 3963 - RNA, 20 nt, Artificial Sequence
  Antisense oligo
uuuaucuaggugcuucuugg

SEQ ID NO: 3964 - RNA, 20 nt, Artificial Sequence
  Antisense oligo
gacguacuuguaaggaaugu

SEQ ID NO: 3965 - RNA, 20 nt, Artificial Sequence
  Antisense oligo
ugacguacuuguaaggaaug

SEQ ID NO: 3966 - RNA, 20 nt, Artificial Sequence
  Antisense oligo
cucauacucaaaagauuccc

SEQ ID NO: 3967 - RNA, 20 nt, Artificial Sequence
  Antisense oligo
acguacucgcccuucuucug

SEQ ID NO: 3968 - RNA, 20 nt, Artificial Sequence
  Antisense oligo
uugacguacucgcccuucuu

SEQ ID NO: 3969 - RNA, 20 nt, Artificial Sequence
  Antisense oligo
guugacguacucgcccuucu

SEQ ID NO: 3970 - RNA, 20 nt, Artificial Sequence
  Antisense oligo
gguugacguacucgcccuuc

SEQ ID NO: 3971 - RNA, 20 nt, Artificial Sequence
  Antisense oligo
cgguugacguacucgcccuu

SEQ ID NO: 3972 - RNA, 20 nt, Artificial Sequence
  Antisense oligo
acagcgguugacguacucgc

SEQ ID NO: 3973 - RNA, 20 nt, Artificial Sequence
  Antisense oligo
gacagcgguugacguacucg

SEQ ID NO: 3974 - RNA, 20 nt, Artificial Sequence
  Antisense oligo
agacagcgguugacguacuc

SEQ ID NO: 3975 - RNA, 20 nt, Artificial Sequence
  Antisense oligo
cagacagcgguugacguacu

SEQ ID NO: 3976 - RNA, 20 nt, Artificial Sequence
  Antisense oligo
acagacagcgguugacguac

SEQ ID NO: 3977 - RNA, 20 nt, Artificial Sequence
  Antisense oligo
aacagacagcgguugacgua

SEQ ID NO: 3978 - RNA, 20 nt, Artificial Sequence
  Antisense oligo
gaacagacagcgguugacgu

SEQ ID NO: 3979 - RNA, 20 nt, Artificial Sequence
  Antisense oligo
ugaacagacagcgguugacg

SEQ ID NO: 3980 - RNA, 20 nt, Artificial Sequence
  Antisense oligo
augaacagacagcgguugac

SEQ ID NO: 3981 - RNA, 20 nt, Artificial Sequence
  Antisense oligo
uaugaacagacagcgguuga

SEQ ID NO: 3982 - RNA, 20 nt, Artificial Sequence
  Antisense oligo
uuaugaacagacagcgguug

SEQ ID NO: 3983 - RNA, 20 nt, Artificial Sequence
  Antisense oligo
uuuaugaacagacagcgguu

SEQ ID NO: 3984 - RNA, 20 nt, Artificial Sequence
  Antisense oligo
uuuuaugaacagacagcggu

SEQ ID NO: 3985 - RNA, 20 nt, Artificial Sequence
  Antisense oligo
auuuuaugaacagacagcgg

SEQ ID NO: 3986 - RNA, 20 nt, Artificial Sequence
  Antisense oligo
gauuuuaugaacagacagcg

SEQ ID NO: 3987 - RNA, 20 nt, Artificial Sequence
  Antisense oligo
gcugccacgacuuaccuccu

SEQ ID NO: 3988 - RNA, 20 nt, Artificial Sequence
  Antisense oligo
ugcugccacgacuuaccucc

SEQ ID NO: 3989 - RNA, 20 nt, Artificial Sequence
  Antisense oligo
cugcugccacgacuuaccuc

SEQ ID NO: 3990 - RNA, 20 nt, Artificial Sequence
  Antisense oligo
ccugcugccacgacuuaccu

SEQ ID NO: 3991 - RNA, 20 nt, Artificial Sequence
  Antisense oligo
agccugcugccacgacuuac

SEQ ID NO: 3992 - RNA, 20 nt, Artificial Sequence
  Antisense oligo
cagccugcugccacgacuua

SEQ ID NO: 3993 - RNA, 20 nt, Artificial Sequence
  Antisense oligo
acagccugcugccacgacuu

SEQ ID NO: 3994 - RNA, 20 nt, Artificial Sequence
  Antisense oligo
ccaggcaaagucugugcucu

SEQ ID NO: 3995 - RNA, 20 nt, Artificial Sequence
  Antisense oligo
cugcccaggcaaagucugug

SEQ ID NO: 3996 - RNA, 20 nt, Artificial Sequence
  Antisense oligo
cacugcccaggcaaagucug

SEQ ID NO: 3997 - RNA, 20 nt, Artificial Sequence
  Antisense oligo
ucacugcccaggcaaagucu

SEQ ID NO: 3998 - RNA, 20 nt, Artificial Sequence
  Antisense oligo
aagaggaccucacugcccag

SEQ ID NO: 3999 - RNA, 20 nt, Artificial Sequence
  Antisense oligo
aaagaggaccucacugccca

SEQ ID NO: 4000 - RNA, 20 nt, Artificial Sequence
  Antisense oligo
gcaaagaggaccucacugcc

SEQ ID NO: 4001 - RNA, 20 nt, Artificial Sequence
  Antisense oligo
gagcaaagaggaccucacug

SEQ ID NO: 4002 - RNA, 20 nt, Artificial Sequence
  Antisense oligo
gugucacugaaccuggaggc

SEQ ID NO: 4003 - RNA, 20 nt, Artificial Sequence
  Antisense oligo
cacaacccagagucaguguc

SEQ ID NO: 4004 - RNA, 20 nt, Artificial Sequence
  Antisense oligo
gacacaacccagagucagug

SEQ ID NO: 4005 - RNA, 20 nt, Artificial Sequence
  Antisense oligo
agacacaacccagagucagu

SEQ ID NO: 4006 - RNA, 20 nt, Artificial Sequence
  Antisense oligo
ccagagacacaacccagagu

SEQ ID NO: 4007 - RNA, 20 nt, Artificial Sequence
  Antisense oligo
ccaaccagagacacaaccca

SEQ ID NO: 4008 - RNA, 20 nt, Artificial Sequence
  Antisense oligo
aaccaaccagagacacaacc

SEQ ID NO: 4009 - RNA, 20 nt, Artificial Sequence
  Antisense oligo
uaaccaaccagagacacaac

SEQ ID NO: 4010 - RNA, 20 nt, Artificial Sequence
  Antisense oligo
uuaaccaaccagagacacaa

SEQ ID NO: 4011 - RNA, 20 nt, Artificial Sequence
  Antisense oligo
uuuaaccaaccagagacaca

SEQ ID NO: 4012 - RNA, 20 nt, Artificial Sequence
  Antisense oligo
cuuuaaccaaccagagacac

SEQ ID NO: 4013 - RNA, 20 nt, Artificial Sequence
  Antisense oligo
ucuuuaaccaaccagagaca

SEQ ID NO: 4014 - RNA, 20 nt, Artificial Sequence
  Antisense oligo
aucuuuaaccaaccagagac

SEQ ID NO: 4015 - RNA, 20 nt, Artificial Sequence
  Antisense oligo
acaucuuuaaccaaccagag

SEQ ID NO: 4016 - RNA, 20 nt, Artificial Sequence
  Antisense oligo
cacaucuuuaaccaaccaga

SEQ ID NO: 4017 - RNA, 20 nt, Artificial Sequence
  Antisense oligo
caacacaucuuuaaccaacc

SEQ ID NO: 4018 - RNA, 20 nt, Artificial Sequence
  Antisense oligo
gaagccaacacaucuuuaac

SEQ ID NO: 4019 - RNA, 20 nt, Artificial Sequence
  Antisense oligo
gagaagccaacacaucuuua

SEQ ID NO: 4020 - RNA, 20 nt, Artificial Sequence
  Antisense oligo
ggagaagccaacacaucuuu

SEQ ID NO: 4021 - RNA, 20 nt, Artificial Sequence
  Antisense oligo
aggagaagccaacacaucuu

SEQ ID NO: 4022 - RNA, 20 nt, Artificial Sequence
  Antisense oligo
aaaggagaagccaacacauc

SEQ ID NO: 4023 - RNA, 20 nt, Artificial Sequence
  Antisense oligo
caaaggagaagccaacacau

SEQ ID NO: 4024 - RNA, 20 nt, Artificial Sequence
  Antisense oligo
gcaagugaguagguaaguca

SEQ ID NO: 4025 - RNA, 20 nt, Artificial Sequence
  Antisense oligo
ugcaagugaguagguaaguc

SEQ ID NO: 4026 - RNA, 20 nt, Artificial Sequence
  Antisense oligo
ccugcaagugaguagguaag

SEQ ID NO: 4027 - RNA, 20 nt, Artificial Sequence
  Antisense oligo
uccugcaagugaguagguaa

SEQ ID NO: 4028 - RNA, 20 nt, Artificial Sequence
  Antisense oligo
cuccugcaagugaguaggua

SEQ ID NO: 4029 - RNA, 20 nt, Artificial Sequence
  Antisense oligo
ccuccugcaagugaguaggu

SEQ ID NO: 4030 - RNA, 20 nt, Artificial Sequence
  Antisense oligo
uccuccugcaagugaguagg

SEQ ID NO: 4031 - RNA, 20 nt, Artificial Sequence
  Antisense oligo
ccacuguacuccagccugag

SEQ ID NO: 4032 - RNA, 20 nt, Artificial Sequence
  Antisense oligo
accacuguacuccagccuga

SEQ ID NO: 4033 - RNA, 20 nt, Artificial Sequence
  Antisense oligo
caccacuguacuccagccug

SEQ ID NO: 4034 - RNA, 20 nt, Artificial Sequence
  Antisense oligo
gcaccacuguacuccagccu

SEQ ID NO: 4035 - RNA, 20 nt, Artificial Sequence
  Antisense oligo
ucgcaccacuguacuccagc

SEQ ID NO: 4036 - RNA, 20 nt, Artificial Sequence
  Antisense oligo
aucgcaccacuguacuccag

SEQ ID NO: 4037 - RNA, 20 nt, Artificial Sequence
  Antisense oligo
gaucgcaccacuguacucca

SEQ ID NO: 4038 - RNA, 20 nt, Artificial Sequence
  Antisense oligo
agaucgcaccacuguacucc

SEQ ID NO: 4039 - RNA, 20 nt, Artificial Sequence
  Antisense oligo
gagaucgcaccacuguacuc

SEQ ID NO: 4040 - RNA, 20 nt, Artificial Sequence
  Antisense oligo
cgagaucgcaccacuguacu

SEQ ID NO: 4041 - RNA, 20 nt, Artificial Sequence
  Antisense oligo
ccgagaucgcaccacuguac

SEQ ID NO: 4042 - RNA, 20 nt, Artificial Sequence
  Antisense oligo
gccgagaucgcaccacugua

SEQ ID NO: 4043 - RNA, 20 nt, Artificial Sequence
  Antisense oligo
agccgagaucgcaccacugu

SEQ ID NO: 4044 - RNA, 20 nt, Artificial Sequence
  Antisense oligo
ugagccgagaucgcaccacu

SEQ ID NO: 4045 - RNA, 20 nt, Artificial Sequence
  Antisense oligo
agugagccgagaucgcacca

SEQ ID NO: 4046 - RNA, 20 nt, Artificial Sequence
  Antisense oligo
ugcagugagccgagaucgca

SEQ ID NO: 4047 - RNA, 20 nt, Artificial Sequence
  Antisense oligo
uguaaucccagcuacucggg

SEQ ID NO: 4048 - RNA, 20 nt, Artificial Sequence
  Antisense oligo
cuguaaucccagcuacucgg

SEQ ID NO: 4049 - RNA, 20 nt, Artificial Sequence
  Antisense oligo
ccuguaaucccagcuacucg

SEQ ID NO: 4050 - RNA, 20 nt, Artificial Sequence
  Antisense oligo
uccuguaaucccagcuacuc

SEQ ID NO: 4051 - RNA, 20 nt, Artificial Sequence
  Antisense oligo
cuccuguaaucccagcuacu

SEQ ID NO: 4052 - RNA, 20 nt, Artificial Sequence
  Antisense oligo
gcuccuguaaucccagcuac

SEQ ID NO: 4053 - RNA, 20 nt, Artificial Sequence
  Antisense oligo
ggcuccuguaaucccagcua

SEQ ID NO: 4054 - RNA, 20 nt, Artificial Sequence
  Antisense oligo
aggcuccuguaaucccagcu

SEQ ID NO: 4055 - RNA, 20 nt, Artificial Sequence
  Antisense oligo
ugaaacccugucucucuaaa

SEQ ID NO: 4056 - RNA, 20 nt, Artificial Sequence
  Antisense oligo
gugaaacccugucucucuaa

SEQ ID NO: 4057 - RNA, 20 nt, Artificial Sequence
  Antisense oligo
ggugaaacccugucucucua

SEQ ID NO: 4058 - RNA, 20 nt, Artificial Sequence
  Antisense oligo
uggugaaacccugucucucu

SEQ ID NO: 4059 - RNA, 20 nt, Artificial Sequence
  Antisense oligo
auggugaaacccugucucuc

SEQ ID NO: 4060 - RNA, 20 nt, Artificial Sequence
  Antisense oligo
cauggugaaacccugucucu

SEQ ID NO: 4061 - RNA, 20 nt, Artificial Sequence
  Antisense oligo
acauggugaaacccugucuc

SEQ ID NO: 4062 - RNA, 20 nt, Artificial Sequence
  Antisense oligo
aacauggugaaacccugucu

SEQ ID NO: 4063 - RNA, 20 nt, Artificial Sequence
  Antisense oligo
caacauggugaaacccuguc

SEQ ID NO: 4064 - RNA, 20 nt, Artificial Sequence
  Antisense oligo
ccaacauggugaaacccugu

SEQ ID NO: 4065 - RNA, 20 nt, Artificial Sequence
  Antisense oligo
uccaacauggugaaacccug

SEQ ID NO: 4066 - RNA, 20 nt, Artificial Sequence
  Antisense oligo
guccaacauggugaaacccu

SEQ ID NO: 4067 - RNA, 20 nt, Artificial Sequence
  Antisense oligo
gguccaacauggugaaaccc

SEQ ID NO: 4068 - RNA, 20 nt, Artificial Sequence
  Antisense oligo
agguccaacauggugaaacc

SEQ ID NO: 4069 - RNA, 20 nt, Artificial Sequence
  Antisense oligo
aagguccaacauggugaaac

SEQ ID NO: 4070 - RNA, 20 nt, Artificial Sequence
  Antisense oligo
caagguccaacauggugaaa

SEQ ID NO: 4071 - RNA, 20 nt, Artificial Sequence
  Antisense oligo
ucaagguccaacauggugaa

SEQ ID NO: 4072 - RNA, 20 nt, Artificial Sequence
  Antisense oligo
gucaagguccaacaugguga

SEQ ID NO: 4073 - RNA, 20 nt, Artificial Sequence
  Antisense oligo
ggucaagguccaacauggug

SEQ ID NO: 4074 - RNA, 20 nt, Artificial Sequence
  Antisense oligo
aggucaagguccaacauggu

SEQ ID NO: 4075 - RNA, 20 nt, Artificial Sequence
  Antisense oligo
ugaggucaagguccaacaug

SEQ ID NO: 4076 - RNA, 20 nt, Artificial Sequence
  Antisense oligo
ccugaggucaagguccaaca

SEQ ID NO: 4077 - RNA, 20 nt, Artificial Sequence
  Antisense oligo
cagaucaccugaggucaagg

SEQ ID NO: 4078 - RNA, 20 nt, Artificial Sequence
  Antisense oligo
gcagaucaccugaggucaag

SEQ ID NO: 4079 - RNA, 20 nt, Artificial Sequence
  Antisense oligo
ggcagaucaccugaggucaa

SEQ ID NO: 4080 - RNA, 20 nt, Artificial Sequence
  Antisense oligo
gggcagaucaccugagguca

SEQ ID NO: 4081 - RNA, 20 nt, Artificial Sequence
  Antisense oligo
agggcagaucaccugagguc

SEQ ID NO: 4082 - RNA, 20 nt, Artificial Sequence
  Antisense oligo
gagggcagaucaccugaggu

SEQ ID NO: 4083 - RNA, 20 nt, Artificial Sequence
  Antisense oligo
aggagggcagaucaccugag

SEQ ID NO: 4084 - RNA, 20 nt, Artificial Sequence
  Antisense oligo
gaggagggcagaucaccuga

SEQ ID NO: 4085 - RNA, 20 nt, Artificial Sequence
  Antisense oligo
gcuucguuuucucuccuuuc

SEQ ID NO: 4086 - RNA, 20 nt, Artificial Sequence
  Antisense oligo
ggcuucguuuucucuccuuu

SEQ ID NO: 4087 - RNA, 20 nt, Artificial Sequence
  Antisense oligo
uggcuucguuuucucuccuu

SEQ ID NO: 4088 - RNA, 20 nt, Artificial Sequence
  Antisense oligo
uucuggcuucguuuucucuc

SEQ ID NO: 4089 - RNA, 20 nt, Artificial Sequence
  Antisense oligo
ucuucuggcuucguuuucuc

SEQ ID NO: 4090 - RNA, 20 nt, Artificial Sequence
  Antisense oligo
uucuucuggcuucguuuucu

SEQ ID NO: 4091 - RNA, 20 nt, Artificial Sequence
  Antisense oligo
cuucuucuggcuucguuuuc

SEQ ID NO: 4092 - RNA, 20 nt, Artificial Sequence
  Antisense oligo
ccuucuucuggcuucguuuu

SEQ ID NO: 4093 - RNA, 20 nt, Artificial Sequence
  Antisense oligo
cacuugucccugacccagcu

SEQ ID NO: 4094 - RNA, 20 nt, Artificial Sequence
  Antisense oligo
acugcacuugucccugaccc

SEQ ID NO: 4095 - RNA, 20 nt, Artificial Sequence
  Antisense oligo
uccuggucacugcacuuguc

SEQ ID NO: 4096 - RNA, 20 nt, Artificial Sequence
  Antisense oligo
gccuccuggucacugcacuu

SEQ ID NO: 4097 - RNA, 20 nt, Artificial Sequence
  Antisense oligo
acaagucccaguggccuccu

SEQ ID NO: 4098 - RNA, 20 nt, Artificial Sequence
  Antisense oligo
gucaaccaucugaaaaucuc

SEQ ID NO: 4099 - RNA, 20 nt, Artificial Sequence
  Antisense oligo
aucuccagucaaccaucuga

SEQ ID NO: 4100 - RNA, 20 nt, Artificial Sequence
  Antisense oligo
caucuccagucaaccaucug

SEQ ID NO: 4101 - RNA, 20 nt, Artificial Sequence
  Antisense oligo
gucaucuccagucaaccauc

SEQ ID NO: 4102 - RNA, 20 nt, Artificial Sequence
  Antisense oligo
augucaucuccagucaacca

SEQ ID NO: 4103 - RNA, 20 nt, Artificial Sequence
  Antisense oligo
gaugucaucuccagucaacc

SEQ ID NO: 4104 - RNA, 20 nt, Artificial Sequence
  Antisense oligo
gggcucuggaugucaucucc

SEQ ID NO: 4105 - RNA, 20 nt, Artificial Sequence
  Antisense oligo
ggcugaugugcugaggauga

SEQ ID NO: 4106 - RNA, 20 nt, Artificial Sequence
  Antisense oligo
ugcagacagagaacccaggu

SEQ ID NO: 4107 - RNA, 20 nt, Artificial Sequence
  Antisense oligo
guuugcagacagagaaccca

SEQ ID NO: 4108 - RNA, 20 nt, Artificial Sequence
  Antisense oligo
aguuugcagacagagaaccc

SEQ ID NO: 4109 - RNA, 20 nt, Artificial Sequence
  Antisense oligo
aaguuugcagacagagaacc

SEQ ID NO: 4110 - RNA, 20 nt, Artificial Sequence
  Antisense oligo
aucaacacagucaagucuug

SEQ ID NO: 4111 - RNA, 20 nt, Artificial Sequence
  Antisense oligo
caagggaaagcaacaaccag

SEQ ID NO: 4112 - RNA, 20 nt, Artificial Sequence
  Antisense oligo
gccaagggaaagcaacaacc

SEQ ID NO: 4113 - RNA, 20 nt, Artificial Sequence
  Antisense oligo
ugccaagggaaagcaacaac

SEQ ID NO: 4114 - RNA, 20 nt, Artificial Sequence
  Antisense oligo
ucugucuuuguccaaggugg

SEQ ID NO: 4115 - RNA, 20 nt, Artificial Sequence
  Antisense oligo
uucugucuuuguccaaggug

SEQ ID NO: 4116 - RNA, 20 nt, Artificial Sequence
  Antisense oligo
cuucugucuuuguccaaggu

SEQ ID NO: 4117 - RNA, 20 nt, Artificial Sequence
  Antisense oligo
gacuucugucuuuguccaag

SEQ ID NO: 4118 - RNA, 20 nt, Artificial Sequence
  Antisense oligo
ggugacagagcgagauccug

SEQ ID NO: 4119 - RNA, 20 nt, Artificial Sequence
  Antisense oligo
gggugacagagcgagauccu

SEQ ID NO: 4120 - RNA, 20 nt, Artificial Sequence
  Antisense oligo
ugggugacagagcgagaucc

SEQ ID NO: 4121 - RNA, 20 nt, Artificial Sequence
  Antisense oligo
uugggugacagagcgagauc

SEQ ID NO: 4122 - RNA, 20 nt, Artificial Sequence
  Antisense oligo
cuugggugacagagcgagau

SEQ ID NO: 4123 - RNA, 20 nt, Artificial Sequence
  Antisense oligo
gcuugggugacagagcgaga

SEQ ID NO: 4124 - RNA, 20 nt, Artificial Sequence
  Antisense oligo
agcuugggugacagagcgag

SEQ ID NO: 4125 - RNA, 20 nt, Artificial Sequence
  Antisense oligo
cagcuugggugacagagcga

SEQ ID NO: 4126 - RNA, 20 nt, Artificial Sequence
  Antisense oligo
ugccacugcacuccagcuug

SEQ ID NO: 4127 - RNA, 20 nt, Artificial Sequence
  Antisense oligo
ugagccgagaucgugccacu

SEQ ID NO: 4128 - RNA, 20 nt, Artificial Sequence
  Antisense oligo
agugagccgagaucgugcca

SEQ ID NO: 4129 - RNA, 20 nt, Artificial Sequence
  Antisense oligo
uagugagccgagaucgugcc

SEQ ID NO: 4130 - RNA, 20 nt, Artificial Sequence
  Antisense oligo
guagugagccgagaucgugc

SEQ ID NO: 4131 - RNA, 20 nt, Artificial Sequence
  Antisense oligo
uguagugagccgagaucgug

SEQ ID NO: 4132 - RNA, 20 nt, Artificial Sequence
  Antisense oligo
cuguagugagccgagaucgu

SEQ ID NO: 4133 - RNA, 20 nt, Artificial Sequence
  Antisense oligo
gcuguagugagccgagaucg

SEQ ID NO: 4134 - RNA, 20 nt, Artificial Sequence
  Antisense oligo
ggaguucgagaccagacugg

SEQ ID NO: 4135 - RNA, 20 nt, Artificial Sequence
  Antisense oligo
aggaguucgagaccagacug

SEQ ID NO: 4136 - RNA, 20 nt, Artificial Sequence
  Antisense oligo
caggaguucgagaccagacu

SEQ ID NO: 4137 - RNA, 20 nt, Artificial Sequence
  Antisense oligo
ccaggaguucgagaccagac

SEQ ID NO: 4138 - RNA, 20 nt, Artificial Sequence
  Antisense oligo
cccaggaguucgagaccaga

SEQ ID NO: 4139 - RNA, 20 nt, Artificial Sequence
  Antisense oligo
agcccaggaguucgagacca

SEQ ID NO: 4140 - RNA, 20 nt, Artificial Sequence
  Antisense oligo
ugagcccaggaguucgagac

SEQ ID NO: 4141 - RNA, 20 nt, Artificial Sequence
  Antisense oligo
uugagcccaggaguucgaga

SEQ ID NO: 4142 - RNA, 20 nt, Artificial Sequence
  Antisense oligo
cuugagcccaggaguucgag

SEQ ID NO: 4143 - RNA, 20 nt, Artificial Sequence
  Antisense oligo
gcuugagcccaggaguucga

SEQ ID NO: 4144 - RNA, 20 nt, Artificial Sequence
  Antisense oligo
ugcuugagcccaggaguucg

SEQ ID NO: 4145 - RNA, 20 nt, Artificial Sequence
  Antisense oligo
uugcuugagcccaggaguuc

SEQ ID NO: 4146 - RNA, 20 nt, Artificial Sequence
  Antisense oligo
auugcuugagcccaggaguu

SEQ ID NO: 4147 - RNA, 20 nt, Artificial Sequence
  Antisense oligo
gauugcuugagcccaggagu

SEQ ID NO: 4148 - RNA, 20 nt, Artificial Sequence
  Antisense oligo
ggauugcuugagcccaggag

SEQ ID NO: 4149 - RNA, 20 nt, Artificial Sequence
  Antisense oligo
cggauugcuugagcccagga

SEQ ID NO: 4150 - RNA, 20 nt, Artificial Sequence
  Antisense oligo
ucuuaaucccagcacuuugg

SEQ ID NO: 4151 - RNA, 20 nt, Artificial Sequence
  Antisense oligo
gucuuaaucccagcacuuug

SEQ ID NO: 4152 - RNA, 20 nt, Artificial Sequence
  Antisense oligo
uuuggcugggcacaguggcu

SEQ ID NO: 4153 - RNA, 20 nt, Artificial Sequence
  Antisense oligo
uguuuggcugggcacagugg

SEQ ID NO: 4154 - RNA, 20 nt, Artificial Sequence
  Antisense oligo
aaaucauguuuggcugggca

SEQ ID NO: 4155 - RNA, 20 nt, Artificial Sequence
  Antisense oligo
uauguucucagaguacacuc

SEQ ID NO: 4156 - RNA, 20 nt, Artificial Sequence
  Antisense oligo
cuuauguucucagaguacac

SEQ ID NO: 4157 - RNA, 20 nt, Artificial Sequence
  Antisense oligo
gcuuauguucucagaguaca

SEQ ID NO: 4158 - RNA, 20 nt, Artificial Sequence
  Antisense oligo
agcuuauguucucagaguac

SEQ ID NO: 4159 - RNA, 20 nt, Artificial Sequence
  Antisense oligo
ggacuaaugccuauucuuuc

SEQ ID NO: 4160 - RNA, 20 nt, Artificial Sequence
  Antisense oligo
gcauuuaucagagcaggaau

SEQ ID NO: 4161 - RNA, 20 nt, Artificial Sequence
  Antisense oligo
ggcauuuaucagagcaggaa

SEQ ID NO: 4162 - RNA, 20 nt, Artificial Sequence
  Antisense oligo
uggcauuuaucagagcagga

SEQ ID NO: 4163 - RNA, 20 nt, Artificial Sequence
  Antisense oligo
auggcauuuaucagagcagg

SEQ ID NO: 4164 - RNA, 20 nt, Artificial Sequence
  Antisense oligo
accgagccaucaaugccaug

SEQ ID NO: 4165 - RNA, 20 nt, Artificial Sequence
  Antisense oligo
uaaccgagccaucaaugcca

SEQ ID NO: 4166 - RNA, 20 nt, Artificial Sequence
  Antisense oligo
uuaaccgagccaucaaugcc

SEQ ID NO: 4167 - RNA, 20 nt, Artificial Sequence
  Antisense oligo
uuuaaccgagccaucaaugc

SEQ ID NO: 4168 - RNA, 20 nt, Artificial Sequence
  Antisense oligo
uuuuaaccgagccaucaaug

SEQ ID NO: 4169 - RNA, 20 nt, Artificial Sequence
  Antisense oligo
cuuuuaaccgagccaucaau

SEQ ID NO: 4170 - RNA, 20 nt, Artificial Sequence
  Antisense oligo
ccuuuuaaccgagccaucaa

SEQ ID NO: 4171 - RNA, 20 nt, Artificial Sequence
  Antisense oligo
cccuuuuaaccgagccauca

SEQ ID NO: 4172 - RNA, 20 nt, Artificial Sequence
  Antisense oligo
gcccuuuuaaccgagccauc

SEQ ID NO: 4173 - RNA, 20 nt, Artificial Sequence
  Antisense oligo
gugcccuuuuaaccgagcca

SEQ ID NO: 4174 - RNA, 20 nt, Artificial Sequence
  Antisense oligo
cgugcccuuuuaaccgagcc

SEQ ID NO: 4175 - RNA, 20 nt, Artificial Sequence
  Antisense oligo
acgugcccuuuuaaccgagc

SEQ ID NO: 4176 - RNA, 20 nt, Artificial Sequence
  Antisense oligo
uuacaggcgugagccaccac

SEQ ID NO: 4177 - RNA, 20 nt, Artificial Sequence
  Antisense oligo
auuacaggcgugagccacca

SEQ ID NO: 4178 - RNA, 20 nt, Artificial Sequence
  Antisense oligo
gauuacaggcgugagccacc

SEQ ID NO: 4179 - RNA, 20 nt, Artificial Sequence
  Antisense oligo
ggauuacaggcgugagccac

SEQ ID NO: 4180 - RNA, 20 nt, Artificial Sequence
  Antisense oligo
gggauuacaggcgugagcca

SEQ ID NO: 4181 - RNA, 20 nt, Artificial Sequence
  Antisense oligo
ugggauuacaggcgugagcc

SEQ ID NO: 4182 - RNA, 20 nt, Artificial Sequence
  Antisense oligo
cugggauuacaggcgugagc

SEQ ID NO: 4183 - RNA, 20 nt, Artificial Sequence
  Antisense oligo
gcugggauuacaggcgugag

SEQ ID NO: 4184 - RNA, 20 nt, Artificial Sequence
  Antisense oligo
ugcugggauuacaggcguga

SEQ ID NO: 4185 - RNA, 20 nt, Artificial Sequence
  Antisense oligo
augcugggauuacaggcgug

SEQ ID NO: 4186 - RNA, 20 nt, Artificial Sequence
  Antisense oligo
aaugcugggauuacaggcgu

SEQ ID NO: 4187 - RNA, 20 nt, Artificial Sequence
  Antisense oligo
aaaugcugggauuacaggcg

SEQ ID NO: 4188 - RNA, 20 nt, Artificial Sequence
  Antisense oligo
aaaaugcugggauuacaggc

SEQ ID NO: 4189 - RNA, 20 nt, Artificial Sequence
  Antisense oligo
caaaaugcugggauuacagg

SEQ ID NO: 4190 - RNA, 20 nt, Artificial Sequence
  Antisense oligo
ccaaaaugcugggauuacag

SEQ ID NO: 4191 - RNA, 20 nt, Artificial Sequence
  Antisense oligo
ucggccucccaaaaugcugg

SEQ ID NO: 4192 - RNA, 20 nt, Artificial Sequence
  Antisense oligo
cucggccucccaaaaugcug

SEQ ID NO: 4193 - RNA, 20 nt, Artificial Sequence
  Antisense oligo
ccucggccucccaaaaugcu

SEQ ID NO: 4194 - RNA, 20 nt, Artificial Sequence
  Antisense oligo
cguguuagccaggauggucu

SEQ ID NO: 4195 - RNA, 20 nt, Artificial Sequence
  Antisense oligo
ccguguuagccaggaugguc

SEQ ID NO: 4196 - RNA, 20 nt, Artificial Sequence
  Antisense oligo
accguguuagccaggauggu

SEQ ID NO: 4197 - RNA, 20 nt, Artificial Sequence
  Antisense oligo
caccguguuagccaggaugg

SEQ ID NO: 4198 - RNA, 20 nt, Artificial Sequence
  Antisense oligo
ucaccguguuagccaggaug

SEQ ID NO: 4199 - RNA, 20 nt, Artificial Sequence
  Antisense oligo
uucaccguguuagccaggau

SEQ ID NO: 4200 - RNA, 20 nt, Artificial Sequence
  Antisense oligo
uuucaccguguuagccagga

SEQ ID NO: 4201 - RNA, 20 nt, Artificial Sequence
  Antisense oligo
guuucaccguguuagccagg

SEQ ID NO: 4202 - RNA, 20 nt, Artificial Sequence
  Antisense oligo
gguuucaccguguuagccag

SEQ ID NO: 4203 - RNA, 20 nt, Artificial Sequence
  Antisense oligo
ggguuucaccguguuagcca

SEQ ID NO: 4204 - RNA, 20 nt, Artificial Sequence
  Antisense oligo
auucuccugccucagccucc

SEQ ID NO: 4205 - RNA, 20 nt, Artificial Sequence
  Antisense oligo
cauucuccugccucagccuc

SEQ ID NO: 4206 - RNA, 20 nt, Artificial Sequence
  Antisense oligo
ccauucuccugccucagccu

SEQ ID NO: 4207 - RNA, 20 nt, Artificial Sequence
  Antisense oligo
acgccauucuccugccucag

SEQ ID NO: 4208 - RNA, 20 nt, Artificial Sequence
  Antisense oligo
cacgccauucuccugccuca

SEQ ID NO: 4209 - RNA, 20 nt, Artificial Sequence
  Antisense oligo
ucacgccauucuccugccuc

SEQ ID NO: 4210 - RNA, 20 nt, Artificial Sequence
  Antisense oligo
uucacgccauucuccugccu

SEQ ID NO: 4211 - RNA, 20 nt, Artificial Sequence
  Antisense oligo
guucacgccauucuccugcc

SEQ ID NO: 4212 - RNA, 20 nt, Artificial Sequence
  Antisense oligo
gguucacgccauucuccugc

SEQ ID NO: 4213 - RNA, 20 nt, Artificial Sequence
  Antisense oligo
ggguucacgccauucuccug

SEQ ID NO: 4214 - RNA, 20 nt, Artificial Sequence
  Antisense oligo
cggguucacgccauucuccu

SEQ ID NO: 4215 - RNA, 20 nt, Artificial Sequence
  Antisense oligo
uggcacgaucuuggcucacu

SEQ ID NO: 4216 - RNA, 20 nt, Artificial Sequence
  Antisense oligo
guggcacgaucuuggcucac

SEQ ID NO: 4217 - RNA, 20 nt, Artificial Sequence
  Antisense oligo
aguggcacgaucuuggcuca

SEQ ID NO: 4218 - RNA, 20 nt, Artificial Sequence
  Antisense oligo
caguggcacgaucuuggcuc

SEQ ID NO: 4219 - RNA, 20 nt, Artificial Sequence
  Antisense oligo
gcaguggcacgaucuuggcu

SEQ ID NO: 4220 - RNA, 20 nt, Artificial Sequence
  Antisense oligo
ugcaguggcacgaucuuggc

SEQ ID NO: 4221 - RNA, 20 nt, Artificial Sequence
  Antisense oligo
aucaccuccuuguggaagcu

SEQ ID NO: 4222 - RNA, 20 nt, Artificial Sequence
  Antisense oligo
caucaccuccuuguggaagc

SEQ ID NO: 4223 - RNA, 20 nt, Artificial Sequence
  Antisense oligo
ucaucaccuccuuguggaag

SEQ ID NO: 4224 - RNA, 20 nt, Artificial Sequence
  Antisense oligo
gucaucaccuccuuguggaa

SEQ ID NO: 4225 - RNA, 20 nt, Artificial Sequence
  Antisense oligo
cggucaucaccuccuugugg

SEQ ID NO: 4226 - RNA, 20 nt, Artificial Sequence
  Antisense oligo
ucggucaucaccuccuugug

SEQ ID NO: 4227 - RNA, 20 nt, Artificial Sequence
  Antisense oligo
aacucggucaucaccuccuu

SEQ ID NO: 4228 - RNA, 20 nt, Artificial Sequence
  Antisense oligo
caacucggucaucaccuccu

SEQ ID NO: 4229 - RNA, 20 nt, Artificial Sequence
  Antisense oligo
ucaacucggucaucaccucc

SEQ ID NO: 4230 - RNA, 20 nt, Artificial Sequence
  Antisense oligo
cucaacucggucaucaccuc

SEQ ID NO: 4231 - RNA, 20 nt, Artificial Sequence
  Antisense oligo
ucucaacucggucaucaccu

SEQ ID NO: 4232 - RNA, 20 nt, Artificial Sequence
  Antisense oligo
uucucaacucggucaucacc

SEQ ID NO: 4233 - RNA, 20 nt, Artificial Sequence
  Antisense oligo
guucucaacucggucaucac

SEQ ID NO: 4234 - RNA, 20 nt, Artificial Sequence
  Antisense oligo
uucgacccacaguugucuag

SEQ ID NO: 4235 - RNA, 20 nt, Artificial Sequence
  Antisense oligo
uuucgacccacaguugucua

SEQ ID NO: 4236 - RNA, 20 nt, Artificial Sequence
  Antisense oligo
cuuucgacccacaguugucu

SEQ ID NO: 4237 - RNA, 20 nt, Artificial Sequence
  Antisense oligo
gcuuucgacccacaguuguc

SEQ ID NO: 4238 - RNA, 20 nt, Artificial Sequence
  Antisense oligo
ugcuuucgacccacaguugu

SEQ ID NO: 4239 - RNA, 20 nt, Artificial Sequence
  Antisense oligo
augcuuucgacccacaguug

SEQ ID NO: 4240 - RNA, 20 nt, Artificial Sequence
  Antisense oligo
caugcuuucgacccacaguu

SEQ ID NO: 4241 - RNA, 20 nt, Artificial Sequence
  Antisense oligo
ccaugcuuucgacccacagu

SEQ ID NO: 4242 - RNA, 20 nt, Artificial Sequence
  Antisense oligo
gccaugcuuucgacccacag

SEQ ID NO: 4243 - RNA, 20 nt, Artificial Sequence
  Antisense oligo
ugccaugcuuucgacccaca

SEQ ID NO: 4244 - RNA, 20 nt, Artificial Sequence
  Antisense oligo
cugccaugcuuucgacccac

SEQ ID NO: 4245 - RNA, 20 nt, Artificial Sequence
  Antisense oligo
ccugccaugcuuucgaccca

SEQ ID NO: 4246 - RNA, 20 nt, Artificial Sequence
  Antisense oligo
cauugcagaaaacccaguga

SEQ ID NO: 4247 - RNA, 20 nt, Artificial Sequence
  Antisense oligo
ucauugcagaaaacccagug

SEQ ID NO: 4248 - RNA, 20 nt, Artificial Sequence
  Antisense oligo
accucauugcagaaaaccca

SEQ ID NO: 4249 - RNA, 20 nt, Artificial Sequence
  Antisense oligo
cagaccucauugcagaaaac

SEQ ID NO: 4250 - RNA, 20 nt, Artificial Sequence
  Antisense oligo
gcagaccucauugcagaaaa

SEQ ID NO: 4251 - RNA, 20 nt, Artificial Sequence
  Antisense oligo
acgauaugagugcagaccuc

SEQ ID NO: 4252 - RNA, 20 nt, Artificial Sequence
  Antisense oligo
aacgauaugagugcagaccu

SEQ ID NO: 4253 - RNA, 20 nt, Artificial Sequence
  Antisense oligo
aaacgauaugagugcagacc

SEQ ID NO: 4254 - RNA, 20 nt, Artificial Sequence
  Antisense oligo
caaacgauaugagugcagac

SEQ ID NO: 4255 - RNA, 20 nt, Artificial Sequence
  Antisense oligo
gcaaacgauaugagugcaga

SEQ ID NO: 4256 - RNA, 20 nt, Artificial Sequence
  Antisense oligo
uguucuuaggcuccauugca

SEQ ID NO: 4257 - RNA, 20 nt, Artificial Sequence
  Antisense oligo
cuguucuuaggcuccauugc

SEQ ID NO: 4258 - RNA, 20 nt, Artificial Sequence
  Antisense oligo
acuguucuuaggcuccauug

SEQ ID NO: 4259 - RNA, 20 nt, Artificial Sequence
  Antisense oligo
gugacuguucuuaggcucca

SEQ ID NO: 4260 - RNA, 20 nt, Artificial Sequence
  Antisense oligo
cgugacuguucuuaggcucc

SEQ ID NO: 4261 - RNA, 20 nt, Artificial Sequence
  Antisense oligo
ucgugacuguucuuaggcuc

SEQ ID NO: 4262 - RNA, 20 nt, Artificial Sequence
  Antisense oligo
uucgugacuguucuuaggcu

SEQ ID NO: 4263 - RNA, 20 nt, Artificial Sequence
  Antisense oligo
cacagggcaagggcugaauu

SEQ ID NO: 4264 - RNA, 20 nt, Artificial Sequence
  Antisense oligo
acacagggcaagggcugaau

SEQ ID NO: 4265 - RNA, 20 nt, Artificial Sequence
  Antisense oligo
cuuggcaugguggcugacac

SEQ ID NO: 4266 - RNA, 20 nt, Artificial Sequence
  Antisense oligo
agauggcccuuggcauggug

SEQ ID NO: 4267 - RNA, 20 nt, Artificial Sequence
  Antisense oligo
uacuaggaacgggacacagc

SEQ ID NO: 4268 - RNA, 20 nt, Artificial Sequence
  Antisense oligo
guacuaggaacgggacacag

SEQ ID NO: 4269 - RNA, 20 nt, Artificial Sequence
  Antisense oligo
uguacuaggaacgggacaca

SEQ ID NO: 4270 - RNA, 20 nt, Artificial Sequence
  Antisense oligo
cuguacuaggaacgggacac

SEQ ID NO: 4271 - RNA, 20 nt, Artificial Sequence
  Antisense oligo
ucuguacuaggaacgggaca

SEQ ID NO: 4272 - RNA, 20 nt, Artificial Sequence
  Antisense oligo
cucuguacuaggaacgggac

SEQ ID NO: 4273 - RNA, 20 nt, Artificial Sequence
  Antisense oligo
ccucuguacuaggaacggga

SEQ ID NO: 4274 - RNA, 20 nt, Artificial Sequence
  Antisense oligo
uugguuuccucuguacuagg

SEQ ID NO: 4275 - RNA, 20 nt, Artificial Sequence
  Antisense oligo
aguugguuuccucuguacua

SEQ ID NO: 4276 - RNA, 20 nt, Artificial Sequence
  Antisense oligo
ucacugaguugguuuccucu

SEQ ID NO: 4277 - RNA, 20 nt, Artificial Sequence
  Antisense oligo
ucaaucacugaguugguuuc

SEQ ID NO: 4278 - RNA, 20 nt, Artificial Sequence
  Antisense oligo
gucaaucacugaguugguuu

SEQ ID NO: 4279 - RNA, 20 nt, Artificial Sequence
  Antisense oligo
ggucaaucacugaguugguu

SEQ ID NO: 4280 - RNA, 20 nt, Artificial Sequence
  Antisense oligo
uggucaaucacugaguuggu

SEQ ID NO: 4281 - RNA, 20 nt, Artificial Sequence
  Antisense oligo
cuggucaaucacugaguugg

SEQ ID NO: 4282 - RNA, 20 nt, Artificial Sequence
  Antisense oligo
ccuggucaaucacugaguug

SEQ ID NO: 4283 - RNA, 20 nt, Artificial Sequence
  Antisense oligo
uccuggucaaucacugaguu

SEQ ID NO: 4284 - RNA, 20 nt, Artificial Sequence
  Antisense oligo
guccuggucaaucacugagu

SEQ ID NO: 4285 - RNA, 20 nt, Artificial Sequence
  Antisense oligo
cacuguccuggucaaucacu

SEQ ID NO: 4286 - RNA, 20 nt, Artificial Sequence
  Antisense oligo
gcacuguccuggucaaucac

SEQ ID NO: 4287 - RNA, 20 nt, Artificial Sequence
  Antisense oligo
agcacuguccuggucaauca

SEQ ID NO: 4288 - RNA, 20 nt, Artificial Sequence
  Antisense oligo
gagcacuguccuggucaauc

SEQ ID NO: 4289 - RNA, 20 nt, Artificial Sequence
  Antisense oligo
ugagcacuguccuggucaau

SEQ ID NO: 4290 - RNA, 20 nt, Artificial Sequence
  Antisense oligo
gugagcacuguccuggucaa

SEQ ID NO: 4291 - RNA, 20 nt, Artificial Sequence
  Antisense oligo
aagugagcacuguccugguc

SEQ ID NO: 4292 - RNA, 20 nt, Artificial Sequence
  Antisense oligo
agcaagugagcacuguccug

SEQ ID NO: 4293 - RNA, 20 nt, Artificial Sequence
  Antisense oligo
cuagcaagugagcacugucc

SEQ ID NO: 4294 - RNA, 20 nt, Artificial Sequence
  Antisense oligo
acuagcaagugagcacuguc

SEQ ID NO: 4295 - RNA, 20 nt, Artificial Sequence
  Antisense oligo
ucauacagaaaccgcauccc

SEQ ID NO: 4296 - RNA, 20 nt, Artificial Sequence
  Antisense oligo
gucauacagaaaccgcaucc

SEQ ID NO: 4297 - RNA, 20 nt, Artificial Sequence
  Antisense oligo
ugucauacagaaaccgcauc

SEQ ID NO: 4298 - RNA, 20 nt, Artificial Sequence
  Antisense oligo
gugucauacagaaaccgcau

SEQ ID NO: 4299 - RNA, 20 nt, Artificial Sequence
  Antisense oligo
augugucauacagaaaccgc

SEQ ID NO: 4300 - RNA, 20 nt, Artificial Sequence
  Antisense oligo
aaugugucauacagaaaccg

SEQ ID NO: 4301 - RNA, 20 nt, Artificial Sequence
  Antisense oligo
ggaaugugucauacagaaac

SEQ ID NO: 4302 - RNA, 20 nt, Artificial Sequence
  Antisense oligo
guggaaugugucauacagaa

SEQ ID NO: 4303 - RNA, 20 nt, Artificial Sequence
  Antisense oligo
gguggaaugugucauacaga

SEQ ID NO: 4304 - RNA, 20 nt, Artificial Sequence
  Antisense oligo
gagguggaaugugucauaca

SEQ ID NO: 4305 - RNA, 20 nt, Artificial Sequence
  Antisense oligo
ggagguggaaugugucauac

SEQ ID NO: 4306 - RNA, 20 nt, Artificial Sequence
  Antisense oligo
aaggagguggaaugugucau

SEQ ID NO: 4307 - RNA, 20 nt, Artificial Sequence
  Antisense oligo
caaggagguggaauguguca

SEQ ID NO: 4308 - RNA, 20 nt, Artificial Sequence
  Antisense oligo
acaaggagguggaauguguc

SEQ ID NO: 4309 - RNA, 20 nt, Artificial Sequence
  Antisense oligo
aucaucacaaggagguggaa

SEQ ID NO: 4310 - RNA, 20 nt, Artificial Sequence
  Antisense oligo
caucaucacaaggaggugga

SEQ ID NO: 4311 - RNA, 20 nt, Artificial Sequence
  Antisense oligo
acaucaucacaaggaggugg

SEQ ID NO: 4312 - RNA, 20 nt, Artificial Sequence
  Antisense oligo
aacaucaucacaaggaggug

SEQ ID NO: 4313 - RNA, 20 nt, Artificial Sequence
  Antisense oligo
guagcucagcaaacuugauc

SEQ ID NO: 4314 - RNA, 20 nt, Artificial Sequence
  Antisense oligo
uguagcucagcaaacuugau

SEQ ID NO: 4315 - RNA, 20 nt, Artificial Sequence
  Antisense oligo
auguagcucagcaaacuuga

SEQ ID NO: 4316 - RNA, 20 nt, Artificial Sequence
  Antisense oligo
uauguagcucagcaaacuug

SEQ ID NO: 4317 - RNA, 20 nt, Artificial Sequence
  Antisense oligo
cuauguagcucagcaaacuu

SEQ ID NO: 4318 - RNA, 20 nt, Artificial Sequence
  Antisense oligo
acuauguagcucagcaaacu

SEQ ID NO: 4319 - RNA, 20 nt, Artificial Sequence
  Antisense oligo
aacuauguagcucagcaaac

SEQ ID NO: 4320 - RNA, 20 nt, Artificial Sequence
  Antisense oligo
ucuaacuauguagcucagca

SEQ ID NO: 4321 - RNA, 20 nt, Artificial Sequence
  Antisense oligo
cucuaacuauguagcucagc

SEQ ID NO: 4322 - RNA, 20 nt, Artificial Sequence
  Antisense oligo
gaucucuaacuauguagcuc

SEQ ID NO: 4323 - RNA, 20 nt, Artificial Sequence
  Antisense oligo
ggaucucuaacuauguagcu

SEQ ID NO: 4324 - RNA, 20 nt, Artificial Sequence
  Antisense oligo
uggaaagcccagggucaugg

SEQ ID NO: 4325 - RNA, 20 nt, Artificial Sequence
  Antisense oligo
guggaaagcccagggucaug

SEQ ID NO: 4326 - RNA, 20 nt, Artificial Sequence
  Antisense oligo
ugaguggaaagcccaggguc

SEQ ID NO: 4327 - RNA, 20 nt, Artificial Sequence
  Antisense oligo
augaguggaaagcccagggu

SEQ ID NO: 4328 - RNA, 20 nt, Artificial Sequence
  Antisense oligo
guaaugaguggaaagcccag

SEQ ID NO: 4329 - RNA, 20 nt, Artificial Sequence
  Antisense oligo
caaacagacauccuagacgu

SEQ ID NO: 4330 - RNA, 20 nt, Artificial Sequence
  Antisense oligo
gugcaaacagacauccuaga

SEQ ID NO: 4331 - RNA, 20 nt, Artificial Sequence
  Antisense oligo
cgugcaaacagacauccuag

SEQ ID NO: 4332 - RNA, 20 nt, Artificial Sequence
  Antisense oligo
ccgugcaaacagacauccua

SEQ ID NO: 4333 - RNA, 20 nt, Artificial Sequence
  Antisense oligo
cuucucaucugaggccagcc

SEQ ID NO: 4334 - RNA, 20 nt, Artificial Sequence
  Antisense oligo
acuucucaucugaggccagc

SEQ ID NO: 4335 - RNA, 20 nt, Artificial Sequence
  Antisense oligo
acugacuucucaucugaggc

SEQ ID NO: 4336 - RNA, 20 nt, Artificial Sequence
  Antisense oligo
aacugacuucucaucugagg

SEQ ID NO: 4337 - RNA, 20 nt, Artificial Sequence
  Antisense oligo
ccagacuccuccaacugacu

SEQ ID NO: 4338 - RNA, 20 nt, Artificial Sequence
  Antisense oligo
gccagacuccuccaacugac

SEQ ID NO: 4339 - RNA, 20 nt, Artificial Sequence
  Antisense oligo
agccagacuccuccaacuga

SEQ ID NO: 4340 - RNA, 20 nt, Artificial Sequence
  Antisense oligo
cagccagacuccuccaacug

SEQ ID NO: 4341 - RNA, 20 nt, Artificial Sequence
  Antisense oligo
gacagccagacuccuccaac

SEQ ID NO: 4342 - RNA, 20 nt, Artificial Sequence
  Antisense oligo
acgacagccagacuccucca

SEQ ID NO: 4343 - RNA, 20 nt, Artificial Sequence
  Antisense oligo
ugacgacagccagacuccuc

SEQ ID NO: 4344 - RNA, 20 nt, Artificial Sequence
  Antisense oligo
cugacgacagccagacuccu

SEQ ID NO: 4345 - RNA, 20 nt, Artificial Sequence
  Antisense oligo
acugacgacagccagacucc

SEQ ID NO: 4346 - RNA, 20 nt, Artificial Sequence
  Antisense oligo
cacugacgacagccagacuc

SEQ ID NO: 4347 - RNA, 20 nt, Artificial Sequence
  Antisense oligo
acacugacgacagccagacu

SEQ ID NO: 4348 - RNA, 20 nt, Artificial Sequence
  Antisense oligo
cacacugacgacagccagac

SEQ ID NO: 4349 - RNA, 20 nt, Artificial Sequence
  Antisense oligo
acacacugacgacagccaga

SEQ ID NO: 4350 - RNA, 20 nt, Artificial Sequence
  Antisense oligo
cacacacugacgacagccag

SEQ ID NO: 4351 - RNA, 20 nt, Artificial Sequence
  Antisense oligo
ccacacacugacgacagcca

SEQ ID NO: 4352 - RNA, 20 nt, Artificial Sequence
  Antisense oligo
acccacacacugacgacagc

SEQ ID NO: 4353 - RNA, 20 nt, Artificial Sequence
  Antisense oligo
aacccacacacugacgacag

SEQ ID NO: 4354 - RNA, 20 nt, Artificial Sequence
  Antisense oligo
acagauauggaguaaauggg

SEQ ID NO: 4355 - RNA, 20 nt, Artificial Sequence
  Antisense oligo
cugguacagauauggaguaa

SEQ ID NO: 4356 - RNA, 20 nt, Artificial Sequence
  Antisense oligo
acugguacagauauggagua

SEQ ID NO: 4357 - RNA, 20 nt, Artificial Sequence
  Antisense oligo
cgacugguacagauauggag

SEQ ID NO: 4358 - RNA, 20 nt, Artificial Sequence
  Antisense oligo
acgacugguacagauaugga

SEQ ID NO: 4359 - RNA, 20 nt, Artificial Sequence
  Antisense oligo
cacgacugguacagauaugg

SEQ ID NO: 4360 - RNA, 20 nt, Artificial Sequence
  Antisense oligo
ucacgacugguacagauaug

SEQ ID NO: 4361 - RNA, 20 nt, Artificial Sequence
  Antisense oligo
aucacgacugguacagauau

SEQ ID NO: 4362 - RNA, 20 nt, Artificial Sequence
  Antisense oligo
gaucacgacugguacagaua

SEQ ID NO: 4363 - RNA, 20 nt, Artificial Sequence
  Antisense oligo
cccuggagaccuagacacua

SEQ ID NO: 4364 - RNA, 20 nt, Artificial Sequence
  Antisense oligo
acccuggagaccuagacacu

SEQ ID NO: 4365 - RNA, 20 nt, Artificial Sequence
  Antisense oligo
aacccuggagaccuagacac

SEQ ID NO: 4366 - RNA, 20 nt, Artificial Sequence
  Antisense oligo
aaacccuggagaccuagaca

SEQ ID NO: 4367 - RNA, 20 nt, Artificial Sequence
  Antisense oligo
aaaacccuggagaccuagac

SEQ ID NO: 4368 - RNA, 20 nt, Artificial Sequence
  Antisense oligo
caaaacccuggagaccuaga

SEQ ID NO: 4369 - RNA, 20 nt, Artificial Sequence
  Antisense oligo
ucaaaacccuggagaccuag

SEQ ID NO: 4370 - RNA, 20 nt, Artificial Sequence
  Antisense oligo
caucaaaacccuggagaccu

SEQ ID NO: 4371 - RNA, 20 nt, Artificial Sequence
  Antisense oligo
ccaucaaaacccuggagacc

SEQ ID NO: 4372 - RNA, 20 nt, Artificial Sequence
  Antisense oligo
agaccaucaaaacccuggag

SEQ ID NO: 4373 - RNA, 20 nt, Artificial Sequence
  Antisense oligo
aagaccaucaaaacccugga

SEQ ID NO: 4374 - RNA, 20 nt, Artificial Sequence
  Antisense oligo
uaagaccaucaaaacccugg

SEQ ID NO: 4375 - RNA, 20 nt, Artificial Sequence
  Antisense oligo
uaccuaagaccaucaaaacc

SEQ ID NO: 4376 - RNA, 20 nt, Artificial Sequence
  Antisense oligo
cuaccuaagaccaucaaaac

SEQ ID NO: 4377 - RNA, 20 nt, Artificial Sequence
  Antisense oligo
gccuaccuaagaccaucaaa

SEQ ID NO: 4378 - RNA, 20 nt, Artificial Sequence
  Antisense oligo
agucuaagagggacagaagg

SEQ ID NO: 4379 - RNA, 20 nt, Artificial Sequence
  Antisense oligo
cagucuaagagggacagaag

SEQ ID NO: 4380 - RNA, 20 nt, Artificial Sequence
  Antisense oligo
gccagucuaagagggacaga

SEQ ID NO: 4381 - RNA, 20 nt, Artificial Sequence
  Antisense oligo
ugccagucuaagagggacag

SEQ ID NO: 4382 - RNA, 20 nt, Artificial Sequence
  Antisense oligo
augccagucuaagagggaca

SEQ ID NO: 4383 - RNA, 20 nt, Artificial Sequence
  Antisense oligo
ugaugccagucuaagaggga

SEQ ID NO: 4384 - RNA, 20 nt, Artificial Sequence
  Antisense oligo
ucuggagucucccaugaggc

SEQ ID NO: 4385 - RNA, 20 nt, Artificial Sequence
  Antisense oligo
acuuucuggagucucccaug

SEQ ID NO: 4386 - RNA, 20 nt, Artificial Sequence
  Antisense oligo
ccgucugugaugugguucau

SEQ ID NO: 4387 - RNA, 20 nt, Artificial Sequence
  Antisense oligo
gcccgucugugaugugguuc

SEQ ID NO: 4388 - RNA, 20 nt, Artificial Sequence
  Antisense oligo
cccuucaccagguccuuccu

SEQ ID NO: 4389 - RNA, 20 nt, Artificial Sequence
  Antisense oligo
augagcgcagcggcaaucug

SEQ ID NO: 4390 - RNA, 20 nt, Artificial Sequence
  Antisense oligo
caugagcgcagcggcaaucu

SEQ ID NO: 4391 - RNA, 20 nt, Artificial Sequence
  Antisense oligo
agcaugagcgcagcggcaau

SEQ ID NO: 4392 - RNA, 20 nt, Artificial Sequence
  Antisense oligo
caggaugcugaaggugcugu

SEQ ID NO: 4393 - RNA, 20 nt, Artificial Sequence
  Antisense oligo
gcaggaugcugaaggugcug

SEQ ID NO: 4394 - RNA, 20 nt, Artificial Sequence
  Antisense oligo
ugauggugucccaggucugc

SEQ ID NO: 4395 - RNA, 20 nt, Artificial Sequence
  Antisense oligo
guugauggugucccaggucu

SEQ ID NO: 4396 - RNA, 20 nt, Artificial Sequence
  Antisense oligo
gguugauggugucccagguc

SEQ ID NO: 4397 - RNA, 20 nt, Artificial Sequence
  Antisense oligo
agguugauggugucccaggu

SEQ ID NO: 4398 - RNA, 20 nt, Artificial Sequence
  Antisense oligo
uucagguugaugguguccca

SEQ ID NO: 4399 - RNA, 20 nt, Artificial Sequence
  Antisense oligo
guucagguugaugguguccc

SEQ ID NO: 4400 - RNA, 20 nt, Artificial Sequence
  Antisense oligo
uguucagguugauggugucc

SEQ ID NO: 4401 - RNA, 20 nt, Artificial Sequence
  Antisense oligo
aagcuguucagguugauggu

SEQ ID NO: 4402 - RNA, 20 nt, Artificial Sequence
  Antisense oligo
gaagcuguucagguugaugg

SEQ ID NO: 4403 - RNA, 20 nt, Artificial Sequence
  Antisense oligo
agaagcuguucagguugaug

SEQ ID NO: 4404 - RNA, 20 nt, Artificial Sequence
  Antisense oligo
gaagaagcuguucagguuga

SEQ ID NO: 4405 - RNA, 20 nt, Artificial Sequence
  Antisense oligo
acugggugaagaagcuguuc

SEQ ID NO: 4406 - RNA, 20 nt, Artificial Sequence
  Antisense oligo
aacugggugaagaagcuguu

SEQ ID NO: 4407 - RNA, 20 nt, Artificial Sequence
  Antisense oligo
ugcucgaacugggugaagaa

SEQ ID NO: 4408 - RNA, 20 nt, Artificial Sequence
  Antisense oligo
cugcucgaacugggugaaga

SEQ ID NO: 4409 - RNA, 20 nt, Artificial Sequence
  Antisense oligo
aaacugcucgaacuggguga

SEQ ID NO: 4410 - RNA, 20 nt, Artificial Sequence
  Antisense oligo
aaaacugcucgaacugggug

SEQ ID NO: 4411 - RNA, 20 nt, Artificial Sequence
  Antisense oligo
caaaacugcucgaacugggu

SEQ ID NO: 4412 - RNA, 20 nt, Artificial Sequence
  Antisense oligo
gcaaaacugcucgaacuggg

SEQ ID NO: 4413 - RNA, 20 nt, Artificial Sequence
  Antisense oligo
ugcaggacaaagcaaaacug

SEQ ID NO: 4414 - RNA, 20 nt, Artificial Sequence
  Antisense oligo
ggcuguugcaggacaaagca

SEQ ID NO: 4415 - RNA, 20 nt, Artificial Sequence
  Antisense oligo
aggcuguugcaggacaaagc

SEQ ID NO: 4416 - RNA, 20 nt, Artificial Sequence
  Antisense oligo
uaggcuguugcaggacaaag

SEQ ID NO: 4417 - RNA, 20 nt, Artificial Sequence
  Antisense oligo
auaggcuguugcaggacaaa

SEQ ID NO: 4418 - RNA, 20 nt, Artificial Sequence
  Antisense oligo
aucauaggcuguugcaggac

SEQ ID NO: 4419 - RNA, 20 nt, Artificial Sequence
  Antisense oligo
aaucauaggcuguugcagga

SEQ ID NO: 4420 - RNA, 20 nt, Artificial Sequence
  Antisense oligo
aaaucauaggcuguugcagg

SEQ ID NO: 4421 - RNA, 20 nt, Artificial Sequence
  Antisense oligo
cauaaaucauaggcuguugc

SEQ ID NO: 4422 - RNA, 20 nt, Artificial Sequence
  Antisense oligo
ccuucauaaaucauaggcug

SEQ ID NO: 4423 - RNA, 20 nt, Artificial Sequence
  Antisense oligo
gccuguccuucauaaaucau

SEQ ID NO: 4424 - RNA, 20 nt, Artificial Sequence
  Antisense oligo
ugccuguccuucauaaauca

SEQ ID NO: 4425 - RNA, 20 nt, Artificial Sequence
  Antisense oligo
gugccuguccuucauaaauc

SEQ ID NO: 4426 - RNA, 20 nt, Artificial Sequence
  Antisense oligo
ugugccuguccuucauaaau

SEQ ID NO: 4427 - RNA, 20 nt, Artificial Sequence
  Antisense oligo
cugcaaaucgguccacagcu

SEQ ID NO: 4428 - RNA, 20 nt, Artificial Sequence
  Antisense oligo
acugcaaaucgguccacagc

SEQ ID NO: 4429 - RNA, 20 nt, Artificial Sequence
  Antisense oligo
uacugcaaaucgguccacag

SEQ ID NO: 4430 - RNA, 20 nt, Artificial Sequence
  Antisense oligo
guacugcaaaucgguccaca

SEQ ID NO: 4431 - RNA, 20 nt, Artificial Sequence
  Antisense oligo
uguacugcaaaucgguccac

SEQ ID NO: 4432 - RNA, 20 nt, Artificial Sequence
  Antisense oligo
cuguacugcaaaucggucca

SEQ ID NO: 4433 - RNA, 20 nt, Artificial Sequence
  Antisense oligo
ccuguacugcaaaucggucc

SEQ ID NO: 4434 - RNA, 20 nt, Artificial Sequence
  Antisense oligo
cccuguacugcaaaucgguc

SEQ ID NO: 4435 - RNA, 20 nt, Artificial Sequence
  Antisense oligo
cucccuguacugcaaaucgg

SEQ ID NO: 4436 - RNA, 20 nt, Artificial Sequence
  Antisense oligo
ucucccuguacugcaaaucg

SEQ ID NO: 4437 - RNA, 20 nt, Artificial Sequence
  Antisense oligo
uucucccuguacugcaaauc

SEQ ID NO: 4438 - RNA, 20 nt, Artificial Sequence
  Antisense oligo
uuucucccuguacugcaaau

SEQ ID NO: 4439 - RNA, 20 nt, Artificial Sequence
  Antisense oligo
ugauaccucuuucucccugu

SEQ ID NO: 4440 - RNA, 20 nt, Artificial Sequence
  Antisense oligo
cugauaccucuuucucccug

SEQ ID NO: 4441 - RNA, 20 nt, Artificial Sequence
  Antisense oligo
gccugauaccucuuucuccc

SEQ ID NO: 4442 - RNA, 20 nt, Artificial Sequence
  Antisense oligo
agccugauaccucuuucucc

SEQ ID NO: 4443 - RNA, 20 nt, Artificial Sequence
  Antisense oligo
aagccugauaccucuuucuc

SEQ ID NO: 4444 - RNA, 20 nt, Artificial Sequence
  Antisense oligo
gcaagccugauaccucuuuc

SEQ ID NO: 4445 - RNA, 20 nt, Artificial Sequence
  Antisense oligo
ggcaagccugauaccucuuu

SEQ ID NO: 4446 - RNA, 20 nt, Artificial Sequence
  Antisense oligo
uggcaagccugauaccucuu

SEQ ID NO: 4447 - RNA, 20 nt, Artificial Sequence
  Antisense oligo
gguggcaagccugauaccuc

SEQ ID NO: 4448 - RNA, 20 nt, Artificial Sequence
  Antisense oligo
ugguggcaagccugauaccu

SEQ ID NO: 4449 - RNA, 20 nt, Artificial Sequence
  Antisense oligo
agcugguggcaagccugaua

SEQ ID NO: 4450 - RNA, 20 nt, Artificial Sequence
  Antisense oligo
cuagcaggucagguguggcu

SEQ ID NO: 4451 - RNA, 20 nt, Artificial Sequence
  Antisense oligo
acuagcaggucagguguggc

SEQ ID NO: 4452 - RNA, 20 nt, Artificial Sequence
  Antisense oligo
ccacuagcaggucaggugug

SEQ ID NO: 4453 - RNA, 20 nt, Artificial Sequence
  Antisense oligo
gccacuagcaggucaggugu

SEQ ID NO: 4454 - RNA, 20 nt, Artificial Sequence
  Antisense oligo
ucuacacauucccauuugca

SEQ ID NO: 4455 - RNA, 20 nt, Artificial Sequence
  Antisense oligo
cuggaaaguucuacacauuc

SEQ ID NO: 4456 - RNA, 20 nt, Artificial Sequence
  Antisense oligo
gcuggaaaguucuacacauu

SEQ ID NO: 4457 - RNA, 20 nt, Artificial Sequence
  Antisense oligo
ggcuggaaaguucuacacau

SEQ ID NO: 4458 - RNA, 20 nt, Artificial Sequence
  Antisense oligo
aggcuggaaaguucuacaca

SEQ ID NO: 4459 - RNA, 20 nt, Artificial Sequence
  Antisense oligo
aaggcuggaaaguucuacac

SEQ ID NO: 4460 - RNA, 20 nt, Artificial Sequence
  Antisense oligo
aaaggcuggaaaguucuaca

SEQ ID NO: 4461 - RNA, 20 nt, Artificial Sequence
  Antisense oligo
aaaaggcuggaaaguucuac

SEQ ID NO: 4462 - RNA, 20 nt, Artificial Sequence
  Antisense oligo
agugguaggagaaaaggcug

SEQ ID NO: 4463 - RNA, 20 nt, Artificial Sequence
  Antisense oligo
cagugguaggagaaaaggcu

SEQ ID NO: 4464 - RNA, 20 nt, Artificial Sequence
  Antisense oligo
agagacagugguaggagaaa

SEQ ID NO: 4465 - RNA, 20 nt, Artificial Sequence
  Antisense oligo
aagagacagugguaggagaa

SEQ ID NO: 4466 - RNA, 20 nt, Artificial Sequence
  Antisense oligo
caagagacagugguaggaga

SEQ ID NO: 4467 - RNA, 20 nt, Artificial Sequence
  Antisense oligo
cccaagagacagugguagga

SEQ ID NO: 4468 - RNA, 20 nt, Artificial Sequence
  Antisense oligo
ucccaagagacagugguagg

SEQ ID NO: 4469 - RNA, 20 nt, Artificial Sequence
  Antisense oligo
aucccaagagacagugguag

SEQ ID NO: 4470 - RNA, 20 nt, Artificial Sequence
  Antisense oligo
aaucccaagagacaguggua

SEQ ID NO: 4471 - RNA, 20 nt, Artificial Sequence
  Antisense oligo
aaaucccaagagacaguggu

SEQ ID NO: 4472 - RNA, 20 nt, Artificial Sequence
  Antisense oligo
agggcagagaaaucccaaga

SEQ ID NO: 4473 - RNA, 20 nt, Artificial Sequence
  Antisense oligo
acaaccaguaaaaggaggaa

SEQ ID NO: 4474 - RNA, 20 nt, Artificial Sequence
  Antisense oligo
aggacucaggacuggugcug

SEQ ID NO: 4475 - RNA, 20 nt, Artificial Sequence
  Antisense oligo
aggugcagugacagagggug

SEQ ID NO: 4476 - RNA, 20 nt, Artificial Sequence
  Antisense oligo
aaaggugcagugacagaggg

SEQ ID NO: 4477 - RNA, 20 nt, Artificial Sequence
  Antisense oligo
guaaaggugcagugacagag

SEQ ID NO: 4478 - RNA, 20 nt, Artificial Sequence
  Antisense oligo
gguaaaggugcagugacaga

SEQ ID NO: 4479 - RNA, 20 nt, Artificial Sequence
  Antisense oligo
ggguaaaggugcagugacag

SEQ ID NO: 4480 - RNA, 20 nt, Artificial Sequence
  Antisense oligo
uggguaaaggugcagugaca

SEQ ID NO: 4481 - RNA, 20 nt, Artificial Sequence
  Antisense oligo
guggguaaaggugcagugac

SEQ ID NO: 4482 - RNA, 20 nt, Artificial Sequence
  Antisense oligo
guguggguaaaggugcagug

SEQ ID NO: 4483 - RNA, 20 nt, Artificial Sequence
  Antisense oligo
caguguggguaaaggugcag

SEQ ID NO: 4484 - RNA, 20 nt, Artificial Sequence
  Antisense oligo
gcaguguggguaaaggugca

SEQ ID NO: 4485 - RNA, 20 nt, Artificial Sequence
  Antisense oligo
cgcaguguggguaaaggugc

SEQ ID NO: 4486 - RNA, 20 nt, Artificial Sequence
  Antisense oligo
ccgcaguguggguaaaggug

SEQ ID NO: 4487 - RNA, 20 nt, Artificial Sequence
  Antisense oligo
accgcaguguggguaaaggu

SEQ ID NO: 4488 - RNA, 20 nt, Artificial Sequence
  Antisense oligo
caccgcaguguggguaaagg

SEQ ID NO: 4489 - RNA, 20 nt, Artificial Sequence
  Antisense oligo
gcaccgcaguguggguaaag

SEQ ID NO: 4490 - RNA, 20 nt, Artificial Sequence
  Antisense oligo
ugcaccgcaguguggguaaa

SEQ ID NO: 4491 - RNA, 20 nt, Artificial Sequence
  Antisense oligo
ucagaaacagcuccaggccg

SEQ ID NO: 4492 - RNA, 20 nt, Artificial Sequence
  Antisense oligo
ucagcuucagcucagaaaca

SEQ ID NO: 4493 - RNA, 20 nt, Artificial Sequence
  Antisense oligo
ggcucagcuucagcucagaa

SEQ ID NO: 4494 - RNA, 20 nt, Artificial Sequence
  Antisense oligo
aucagggcucagcuucagcu

SEQ ID NO: 4495 - RNA, 20 nt, Artificial Sequence
  Antisense oligo
caucagggcucagcuucagc

SEQ ID NO: 4496 - RNA, 20 nt, Artificial Sequence
  Antisense oligo
cucaucagggcucagcuuca

SEQ ID NO: 4497 - RNA, 20 nt, Artificial Sequence
  Antisense oligo
ugcagugcagccaagacccu

SEQ ID NO: 4498 - RNA, 20 nt, Artificial Sequence
  Antisense oligo
accacaccugugagagccac

SEQ ID NO: 4499 - RNA, 20 nt, Artificial Sequence
  Antisense oligo
accacagcuagggcagcaga

SEQ ID NO: 4500 - RNA, 20 nt, Artificial Sequence
  Antisense oligo
uucaccggcaguguccagag

SEQ ID NO: 4501 - RNA, 20 nt, Artificial Sequence
  Antisense oligo
auucaccggcaguguccaga

SEQ ID NO: 4502 - RNA, 20 nt, Artificial Sequence
  Antisense oligo
aauucaccggcaguguccag

SEQ ID NO: 4503 - RNA, 20 nt, Artificial Sequence
  Antisense oligo
guaucucuucaccugauggu

SEQ ID NO: 4504 - RNA, 20 nt, Artificial Sequence
  Antisense oligo
uugccacagguaucucuuca

SEQ ID NO: 4505 - RNA, 20 nt, Artificial Sequence
  Antisense oligo
guugccacagguaucucuuc

SEQ ID NO: 4506 - RNA, 20 nt, Artificial Sequence
  Antisense oligo
uguugccacagguaucucuu

SEQ ID NO: 4507 - RNA, 20 nt, Artificial Sequence
  Antisense oligo
gauguugccacagguaucuc

SEQ ID NO: 4508 - RNA, 20 nt, Artificial Sequence
  Antisense oligo
cagauguugccacagguauc

SEQ ID NO: 4509 - RNA, 20 nt, Artificial Sequence
  Antisense oligo
uuuccguccggcaaugguac

SEQ ID NO: 4510 - RNA, 20 nt, Artificial Sequence
  Antisense oligo
uuuuccguccggcaauggua

SEQ ID NO: 4511 - RNA, 20 nt, Artificial Sequence
  Antisense oligo
ugggcaguccacaggcaaaa

SEQ ID NO: 4512 - RNA, 20 nt, Artificial Sequence
  Antisense oligo
cugggcaguccacaggcaaa

SEQ ID NO: 4513 - RNA, 20 nt, Artificial Sequence
  Antisense oligo
uccucacugggcaguccaca

SEQ ID NO: 4514 - RNA, 20 nt, Artificial Sequence
  Antisense oligo
gccuguuuucaguuuacucc

SEQ ID NO: 4515 - RNA, 20 nt, Artificial Sequence
  Antisense oligo
gcugccuucuaauaaaagcu

SEQ ID NO: 4516 - RNA, 20 nt, Artificial Sequence
  Antisense oligo
ggcugccuucuaauaaaagc

SEQ ID NO: 4517 - RNA, 20 nt, Artificial Sequence
  Antisense oligo
aggcugccuucuaauaaaag

SEQ ID NO: 4518 - RNA, 20 nt, Artificial Sequence
  Antisense oligo
caggcugccuucuaauaaaa

SEQ ID NO: 4519 - RNA, 20 nt, Artificial Sequence
  Antisense oligo
uccaggcugccuucuaauaa

SEQ ID NO: 4520 - RNA, 20 nt, Artificial Sequence
  Antisense oligo
guccaggcugccuucuaaua

SEQ ID NO: 4521 - RNA, 20 nt, Artificial Sequence
  Antisense oligo
gacacaaccaguccaggcug

SEQ ID NO: 4522 - RNA, 20 nt, Artificial Sequence
  Antisense oligo
ugacacaaccaguccaggcu

SEQ ID NO: 4523 - RNA, 20 nt, Artificial Sequence
  Antisense oligo
gugacacaaccaguccaggc

SEQ ID NO: 4524 - RNA, 20 nt, Artificial Sequence
  Antisense oligo
gaggugacacaaccagucca

SEQ ID NO: 4525 - RNA, 20 nt, Artificial Sequence
  Antisense oligo
ggaggugacacaaccagucc

SEQ ID NO: 4526 - RNA, 20 nt, Artificial Sequence
  Antisense oligo
aggaggugacacaaccaguc

SEQ ID NO: 4527 - RNA, 20 nt, Artificial Sequence
  Antisense oligo
agcuggcaucugagguuagg

SEQ ID NO: 4528 - RNA, 20 nt, Artificial Sequence
  Antisense oligo
gagcuggcaucugagguuag

SEQ ID NO: 4529 - RNA, 20 nt, Artificial Sequence
  Antisense oligo
ugagcuggcaucugagguua

SEQ ID NO: 4530 - RNA, 20 nt, Artificial Sequence
  Antisense oligo
cuggugagcuggcaucugag

SEQ ID NO: 4531 - RNA, 20 nt, Artificial Sequence
  Antisense oligo
ucuggugagcuggcaucuga

SEQ ID NO: 4532 - RNA, 20 nt, Artificial Sequence
  Antisense oligo
aucuggugagcuggcaucug

SEQ ID NO: 4533 - RNA, 20 nt, Artificial Sequence
  Antisense oligo
caucuggugagcuggcaucu

SEQ ID NO: 4534 - RNA, 20 nt, Artificial Sequence
  Antisense oligo
ucaucuggugagcuggcauc

SEQ ID NO: 4535 - RNA, 20 nt, Artificial Sequence
  Antisense oligo
cggugaaacucaucugguga

SEQ ID NO: 4536 - RNA, 20 nt, Artificial Sequence
  Antisense oligo
acggugaaacucaucuggug

SEQ ID NO: 4537 - RNA, 20 nt, Artificial Sequence
  Antisense oligo
cacggugaaacucaucuggu

SEQ ID NO: 4538 - RNA, 20 nt, Artificial Sequence
  Antisense oligo
ucacggugaaacucaucugg

SEQ ID NO: 4539 - RNA, 20 nt, Artificial Sequence
  Antisense oligo
gucacggugaaacucaucug

SEQ ID NO: 4540 - RNA, 20 nt, Artificial Sequence
  Antisense oligo
aggucacggugaaacucauc

SEQ ID NO: 4541 - RNA, 20 nt, Artificial Sequence
  Antisense oligo
uaggucacggugaaacucau

SEQ ID NO: 4542 - RNA, 20 nt, Artificial Sequence
  Antisense oligo
uuaggucacggugaaacuca

SEQ ID NO: 4543 - RNA, 20 nt, Artificial Sequence
  Antisense oligo
cuuaggucacggugaaacuc

SEQ ID NO: 4544 - RNA, 20 nt, Artificial Sequence
  Antisense oligo
ggcuuaggucacggugaaac

SEQ ID NO: 4545 - RNA, 20 nt, Artificial Sequence
  Antisense oligo
uguggcuuaggucacgguga

SEQ ID NO: 4546 - RNA, 20 nt, Artificial Sequence
  Antisense oligo
auguggcuuaggucacggug

SEQ ID NO: 4547 - RNA, 20 nt, Artificial Sequence
  Antisense oligo
gauguggcuuaggucacggu

SEQ ID NO: 4548 - RNA, 20 nt, Artificial Sequence
  Antisense oligo
ggauguggcuuaggucacgg

SEQ ID NO: 4549 - RNA, 20 nt, Artificial Sequence
  Antisense oligo
aggauguggcuuaggucacg

SEQ ID NO: 4550 - RNA, 20 nt, Artificial Sequence
  Antisense oligo
ccucugagguaucccaagga

SEQ ID NO: 4551 - RNA, 20 nt, Artificial Sequence
  Antisense oligo
cacucuagucaagcacuuau

SEQ ID NO: 4552 - RNA, 20 nt, Artificial Sequence
  Antisense oligo
ucacucuagucaagcacuua

SEQ ID NO: 4553 - RNA, 20 nt, Artificial Sequence
  Antisense oligo
gucacucuagucaagcacuu

SEQ ID NO: 4554 - RNA, 20 nt, Artificial Sequence
  Antisense oligo
uuucagucacucuagucaag

SEQ ID NO: 4555 - RNA, 20 nt, Artificial Sequence
  Antisense oligo
gugcuuucagucacucuagu

SEQ ID NO: 4556 - RNA, 20 nt, Artificial Sequence
  Antisense oligo
cugugugcuuucagucacuc

SEQ ID NO: 4557 - RNA, 20 nt, Artificial Sequence
  Antisense oligo
gccugugugcuuucagucac

SEQ ID NO: 4558 - RNA, 20 nt, Artificial Sequence
  Antisense oligo
ugccugugugcuuucaguca

SEQ ID NO: 4559 - RNA, 20 nt, Artificial Sequence
  Antisense oligo
ggugguuuuauuucuugccu

SEQ ID NO: 4560 - RNA, 20 nt, Artificial Sequence
  Antisense oligo
gggugguuuuauuucuugcc

SEQ ID NO: 4561 - RNA, 20 nt, Artificial Sequence
  Antisense oligo
cacgggugguuuuauuucuu

SEQ ID NO: 4562 - RNA, 20 nt, Artificial Sequence
  Antisense oligo
aucacgggugguuuuauuuc

SEQ ID NO: 4563 - RNA, 20 nt, Artificial Sequence
  Antisense oligo
gguaaaaucacgggugguuu

SEQ ID NO: 4564 - RNA, 20 nt, Artificial Sequence
  Antisense oligo
ugguaaaaucacgggugguu

SEQ ID NO: 4565 - RNA, 20 nt, Artificial Sequence
  Antisense oligo
gugguaaaaucacggguggu

SEQ ID NO: 4566 - RNA, 20 nt, Artificial Sequence
  Antisense oligo
agugguaaaaucacgggugg

SEQ ID NO: 4567 - RNA, 20 nt, Artificial Sequence
  Antisense oligo
gagugguaaaaucacgggug

SEQ ID NO: 4568 - RNA, 20 nt, Artificial Sequence
  Antisense oligo
ugagugguaaaaucacgggu

SEQ ID NO: 4569 - RNA, 20 nt, Artificial Sequence
  Antisense oligo
aaaacuacugacaugaccac

SEQ ID NO: 4570 - RNA, 20 nt, Artificial Sequence
  Antisense oligo
uugcgccacuguacuccagc

SEQ ID NO: 4571 - RNA, 20 nt, Artificial Sequence
  Antisense oligo
auugcgccacuguacuccag

SEQ ID NO: 4572 - RNA, 20 nt, Artificial Sequence
  Antisense oligo
gauugcgccacuguacucca

SEQ ID NO: 4573 - RNA, 20 nt, Artificial Sequence
  Antisense oligo
agauugcgccacuguacucc

SEQ ID NO: 4574 - RNA, 20 nt, Artificial Sequence
  Antisense oligo
gagccaagauugcgccacug

SEQ ID NO: 4575 - RNA, 20 nt, Artificial Sequence
  Antisense oligo
ugagccaagauugcgccacu

SEQ ID NO: 4576 - RNA, 20 nt, Artificial Sequence
  Antisense oligo
gugagccaagauugcgccac

SEQ ID NO: 4577 - RNA, 20 nt, Artificial Sequence
  Antisense oligo
agugagccaagauugcgcca

SEQ ID NO: 4578 - RNA, 20 nt, Artificial Sequence
  Antisense oligo
cagugagccaagauugcgcc

SEQ ID NO: 4579 - RNA, 20 nt, Artificial Sequence
  Antisense oligo
gcagugagccaagauugcgc

SEQ ID NO: 4580 - RNA, 20 nt, Artificial Sequence
  Antisense oligo
ugcagugagccaagauugcg

SEQ ID NO: 4581 - RNA, 20 nt, Artificial Sequence
  Antisense oligo
ggcugaagcaggagaauugc

SEQ ID NO: 4582 - RNA, 20 nt, Artificial Sequence
  Antisense oligo
aggcugaagcaggagaauug

SEQ ID NO: 4583 - RNA, 20 nt, Artificial Sequence
  Antisense oligo
gaggcugaagcaggagaauu

SEQ ID NO: 4584 - RNA, 20 nt, Artificial Sequence
  Antisense oligo
ggaggcugaagcaggagaau

SEQ ID NO: 4585 - RNA, 20 nt, Artificial Sequence
  Antisense oligo
aggaggcugaagcaggagaa

SEQ ID NO: 4586 - RNA, 20 nt, Artificial Sequence
  Antisense oligo
aaggaggcugaagcaggaga

SEQ ID NO: 4587 - RNA, 20 nt, Artificial Sequence
  Antisense oligo
uaaggaggcugaagcaggag

SEQ ID NO: 4588 - RNA, 20 nt, Artificial Sequence
  Antisense oligo
cuaaggaggcugaagcagga

SEQ ID NO: 4589 - RNA, 20 nt, Artificial Sequence
  Antisense oligo
acuaaggaggcugaagcagg

SEQ ID NO: 4590 - RNA, 20 nt, Artificial Sequence
  Antisense oligo
acuugaggucaggaguucga

SEQ ID NO: 4591 - RNA, 20 nt, Artificial Sequence
  Antisense oligo
cacuugaggucaggaguucg

SEQ ID NO: 4592 - RNA, 20 nt, Artificial Sequence
  Antisense oligo
ucacuugaggucaggaguuc

SEQ ID NO: 4593 - RNA, 20 nt, Artificial Sequence
  Antisense oligo
aucacuugaggucaggaguu

SEQ ID NO: 4594 - RNA, 20 nt, Artificial Sequence
  Antisense oligo
gaucacuugaggucaggagu

SEQ ID NO: 4595 - RNA, 20 nt, Artificial Sequence
  Antisense oligo
ggaucacuugaggucaggag

SEQ ID NO: 4596 - RNA, 20 nt, Artificial Sequence
  Antisense oligo
uggaucacuugaggucagga

SEQ ID NO: 4597 - RNA, 20 nt, Artificial Sequence
  Antisense oligo
guggaucacuugaggucagg

SEQ ID NO: 4598 - RNA, 20 nt, Artificial Sequence
  Antisense oligo
gguggaucacuugaggucag

SEQ ID NO: 4599 - RNA, 20 nt, Artificial Sequence
  Antisense oligo
ggguggaucacuugagguca

SEQ ID NO: 4600 - RNA, 20 nt, Artificial Sequence
  Antisense oligo
uggguggaucacuugagguc

SEQ ID NO: 4601 - RNA, 20 nt, Artificial Sequence
  Antisense oligo
guggguggaucacuugaggu

SEQ ID NO: 4602 - RNA, 20 nt, Artificial Sequence
  Antisense oligo
gguggguggaucacuugagg

SEQ ID NO: 4603 - RNA, 20 nt, Artificial Sequence
  Antisense oligo
agguggguggaucacuugag

SEQ ID NO: 4604 - RNA, 20 nt, Artificial Sequence
  Antisense oligo
gagguggguggaucacuuga

SEQ ID NO: 4605 - RNA, 20 nt, Artificial Sequence
  Antisense oligo
cgagguggguggaucacuug

SEQ ID NO: 4606 - RNA, 20 nt, Artificial Sequence
  Antisense oligo
ccgagguggguggaucacuu

SEQ ID NO: 4607 - RNA, 20 nt, Artificial Sequence
  Antisense oligo
uagcacuuugggaggccgag

SEQ ID NO: 4608 - RNA, 20 nt, Artificial Sequence
  Antisense oligo
cuagcacuuugggaggccga

SEQ ID NO: 4609 - RNA, 20 nt, Artificial Sequence
  Antisense oligo
uccuagcacuuugggaggcc

SEQ ID NO: 4610 - RNA, 20 nt, Artificial Sequence
  Antisense oligo
auccuagcacuuugggaggc

SEQ ID NO: 4611 - RNA, 20 nt, Artificial Sequence
  Antisense oligo
aauccuagcacuuugggagg

SEQ ID NO: 4612 - RNA, 20 nt, Artificial Sequence
  Antisense oligo
caauccuagcacuuugggag

SEQ ID NO: 4613 - RNA, 20 nt, Artificial Sequence
  Antisense oligo
acaauccuagcacuuuggga

SEQ ID NO: 4614 - RNA, 20 nt, Artificial Sequence
  Antisense oligo
uacaauccuagcacuuuggg

SEQ ID NO: 4615 - RNA, 20 nt, Artificial Sequence
  Antisense oligo
cuacaauccuagcacuuugg

SEQ ID NO: 4616 - RNA, 20 nt, Artificial Sequence
  Antisense oligo
ccuacaauccuagcacuuug

SEQ ID NO: 4617 - RNA, 20 nt, Artificial Sequence
  Antisense oligo
cgguggcucacgccuacaau

SEQ ID NO: 4618 - RNA, 20 nt, Artificial Sequence
  Antisense oligo
acgguggcucacgccuacaa

SEQ ID NO: 4619 - RNA, 20 nt, Artificial Sequence
  Antisense oligo
auucagacccagcacggugg

SEQ ID NO: 4620 - RNA, 20 nt, Artificial Sequence
  Antisense oligo
guauucagacccagcacggu

SEQ ID NO: 4621 - RNA, 20 nt, Artificial Sequence
  Antisense oligo
gguauucagacccagcacgg

SEQ ID NO: 4622 - RNA, 20 nt, Artificial Sequence
  Antisense oligo
aacacgcgcacacagaggcu

SEQ ID NO: 4623 - RNA, 20 nt, Artificial Sequence
  Antisense oligo
aaacacgcgcacacagaggc

SEQ ID NO: 4624 - RNA, 20 nt, Artificial Sequence
  Antisense oligo
uaaacacgcgcacacagagg

SEQ ID NO: 4625 - RNA, 20 nt, Artificial Sequence
  Antisense oligo
cuaaacacgcgcacacagag

SEQ ID NO: 4626 - RNA, 20 nt, Artificial Sequence
  Antisense oligo
ccuaaacacgcgcacacaga

SEQ ID NO: 4627 - RNA, 20 nt, Artificial Sequence
  Antisense oligo
uccuaaacacgcgcacacag

SEQ ID NO: 4628 - RNA, 20 nt, Artificial Sequence
  Antisense oligo
ccuccuaaacacgcgcacac

SEQ ID NO: 4629 - RNA, 20 nt, Artificial Sequence
  Antisense oligo
accuccuaaacacgcgcaca

SEQ ID NO: 4630 - RNA, 20 nt, Artificial Sequence
  Antisense oligo
aaccuccuaaacacgcgcac

SEQ ID NO: 4631 - RNA, 20 nt, Artificial Sequence
  Antisense oligo
caaccuccuaaacacgcgca

SEQ ID NO: 4632 - RNA, 20 nt, Artificial Sequence
  Antisense oligo
acaaccuccuaaacacgcgc

SEQ ID NO: 4633 - RNA, 20 nt, Artificial Sequence
  Antisense oligo
cacaaccuccuaaacacgcg

SEQ ID NO: 4634 - RNA, 20 nt, Artificial Sequence
  Antisense oligo
gccacaaccuccuaaacacg

SEQ ID NO: 4635 - RNA, 20 nt, Artificial Sequence
  Antisense oligo
augaguucaggcuggcguca

SEQ ID NO: 4636 - RNA, 20 nt, Artificial Sequence
  Antisense oligo
ggaugaguucaggcuggcgu

SEQ ID NO: 4637 - RNA, 20 nt, Artificial Sequence
  Antisense oligo
acauucacgcugcuucugca

SEQ ID NO: 4638 - RNA, 20 nt, Artificial Sequence
  Antisense oligo
aacauucacgcugcuucugc

SEQ ID NO: 4639 - RNA, 20 nt, Artificial Sequence
  Antisense oligo
gaacauucacgcugcuucug

SEQ ID NO: 4640 - RNA, 20 nt, Artificial Sequence
  Antisense oligo
ggagaacauucacgcugcuu

SEQ ID NO: 4641 - RNA, 20 nt, Artificial Sequence
  Antisense oligo
gggagaacauucacgcugcu

SEQ ID NO: 4642 - RNA, 20 nt, Artificial Sequence
  Antisense oligo
ugaacuagacacggcacagg

SEQ ID NO: 4643 - RNA, 20 nt, Artificial Sequence
  Antisense oligo
cugaacuagacacggcacag

SEQ ID NO: 4644 - RNA, 20 nt, Artificial Sequence
  Antisense oligo
ccugaacuagacacggcaca

SEQ ID NO: 4645 - RNA, 20 nt, Artificial Sequence
  Antisense oligo
uuccugaacuagacacggca

SEQ ID NO: 4646 - RNA, 20 nt, Artificial Sequence
  Antisense oligo
uuuccugaacuagacacggc

SEQ ID NO: 4647 - RNA, 20 nt, Artificial Sequence
  Antisense oligo
guuuccugaacuagacacgg

SEQ ID NO: 4648 - RNA, 20 nt, Artificial Sequence
  Antisense oligo
uguguuuccugaacuagaca

SEQ ID NO: 4649 - RNA, 20 nt, Artificial Sequence
  Antisense oligo
cuguguuuccugaacuagac

SEQ ID NO: 4650 - RNA, 20 nt, Artificial Sequence
  Antisense oligo
acuguguuuccugaacuaga

SEQ ID NO: 4651 - RNA, 20 nt, Artificial Sequence
  Antisense oligo
aggcccaggacagucacacu

SEQ ID NO: 4652 - RNA, 20 nt, Artificial Sequence
  Antisense oligo
ucaggcccaggacagucaca

SEQ ID NO: 4653 - RNA, 20 nt, Artificial Sequence
  Antisense oligo
uuucaggcccaggacaguca

SEQ ID NO: 4654 - RNA, 20 nt, Artificial Sequence
  Antisense oligo
gaacauuucaggcccaggac

SEQ ID NO: 4655 - RNA, 20 nt, Artificial Sequence
  Antisense oligo
cuucucaccacugaacauuu

SEQ ID NO: 4656 - RNA, 20 nt, Artificial Sequence
  Antisense oligo
ccuucucaccacugaacauu

SEQ ID NO: 4657 - RNA, 20 nt, Artificial Sequence
  Antisense oligo
gccuucucaccacugaacau

SEQ ID NO: 4658 - RNA, 20 nt, Artificial Sequence
  Antisense oligo
ucgccuucucaccacugaac

SEQ ID NO: 4659 - RNA, 20 nt, Artificial Sequence
  Antisense oligo
caucgccuucucaccacuga

SEQ ID NO: 4660 - RNA, 20 nt, Artificial Sequence
  Antisense oligo
gccaucgccuucucaccacu

SEQ ID NO: 4661 - RNA, 20 nt, Artificial Sequence
  Antisense oligo
ccaagucaaaggccaucgcc

SEQ ID NO: 4662 - RNA, 20 nt, Artificial Sequence
  Antisense oligo
accaagucaaaggccaucgc

SEQ ID NO: 4663 - RNA, 20 nt, Artificial Sequence
  Antisense oligo
uaccaagucaaaggccaucg

SEQ ID NO: 4664 - RNA, 20 nt, Artificial Sequence
  Antisense oligo
cacacgcagagagagugcag

SEQ ID NO: 4665 - RNA, 20 nt, Artificial Sequence
  Antisense oligo
aacacacgcagagagagugc

SEQ ID NO: 4666 - RNA, 20 nt, Artificial Sequence
  Antisense oligo
aaucaacacacgcagagaga

SEQ ID NO: 4667 - RNA, 20 nt, Artificial Sequence
  Antisense oligo
aaaucaacacacgcagagag

SEQ ID NO: 4668 - RNA, 20 nt, Artificial Sequence
  Antisense oligo
caaaucaacacacgcagaga

SEQ ID NO: 4669 - RNA, 20 nt, Artificial Sequence
  Antisense oligo
ucaaaucaacacacgcagag

SEQ ID NO: 4670 - RNA, 20 nt, Artificial Sequence
  Antisense oligo
uucaaaucaacacacgcaga

SEQ ID NO: 4671 - RNA, 20 nt, Artificial Sequence
  Antisense oligo
guucaaaucaacacacgcag

SEQ ID NO: 4672 - RNA, 20 nt, Artificial Sequence
  Antisense oligo
cguucaaaucaacacacgca

SEQ ID NO: 4673 - RNA, 20 nt, Artificial Sequence
  Antisense oligo
acguucaaaucaacacacgc

SEQ ID NO: 4674 - RNA, 20 nt, Artificial Sequence
  Antisense oligo
cacguucaaaucaacacacg

SEQ ID NO: 4675 - RNA, 20 nt, Artificial Sequence
  Antisense oligo
ucacguucaaaucaacacac

SEQ ID NO: 4676 - RNA, 20 nt, Artificial Sequence
  Antisense oligo
cucacguucaaaucaacaca

SEQ ID NO: 4677 - RNA, 20 nt, Artificial Sequence
  Antisense oligo
ucucacguucaaaucaacac

SEQ ID NO: 4678 - RNA, 20 nt, Artificial Sequence
  Antisense oligo
cuaaugucauucucacguuc

SEQ ID NO: 4679 - RNA, 20 nt, Artificial Sequence
  Antisense oligo
ccuaaugucauucucacguu

SEQ ID NO: 4680 - RNA, 20 nt, Artificial Sequence
  Antisense oligo
ggcuaccuaaugucauucuc

SEQ ID NO: 4681 - RNA, 20 nt, Artificial Sequence
  Antisense oligo
aggcuaccuaaugucauucu

SEQ ID NO: 4682 - RNA, 20 nt, Artificial Sequence
  Antisense oligo
aaggcuaccuaaugucauuc

SEQ ID NO: 4683 - RNA, 20 nt, Artificial Sequence
  Antisense oligo
aggaaaggcuaccuaauguc

SEQ ID NO: 4684 - RNA, 20 nt, Artificial Sequence
  Antisense oligo
ucaggaaaggcuaccuaaug

SEQ ID NO: 4685 - RNA, 20 nt, Artificial Sequence
  Antisense oligo
ggucaggaaaggcuaccuaa

SEQ ID NO: 4686 - RNA, 20 nt, Artificial Sequence
  Antisense oligo
agacaugcuggucaggaaag

SEQ ID NO: 4687 - RNA, 20 nt, Artificial Sequence
  Antisense oligo
gauaagacaugcuggucagg

SEQ ID NO: 4688 - RNA, 20 nt, Artificial Sequence
  Antisense oligo
gugauaagacaugcugguca

SEQ ID NO: 4689 - RNA, 20 nt, Artificial Sequence
  Antisense oligo
cgugauaagacaugcugguc

SEQ ID NO: 4690 - RNA, 20 nt, Artificial Sequence
  Antisense oligo
ucgugauaagacaugcuggu

SEQ ID NO: 4691 - RNA, 20 nt, Artificial Sequence
  Antisense oligo
gucgugauaagacaugcugg

SEQ ID NO: 4692 - RNA, 20 nt, Artificial Sequence
  Antisense oligo
ggcagaugucgugauaagac

SEQ ID NO: 4693 - RNA, 20 nt, Artificial Sequence
  Antisense oligo
aggcagaugucgugauaaga

SEQ ID NO: 4694 - RNA, 20 nt, Artificial Sequence
  Antisense oligo
gaggcagaugucgugauaag

SEQ ID NO: 4695 - RNA, 20 nt, Artificial Sequence
  Antisense oligo
agaggcagaugucgugauaa

SEQ ID NO: 4696 - RNA, 20 nt, Artificial Sequence
  Antisense oligo
gagaggcagaugucgugaua

SEQ ID NO: 4697 - RNA, 20 nt, Artificial Sequence
  Antisense oligo
ugagaggcagaugucgugau

SEQ ID NO: 4698 - RNA, 20 nt, Artificial Sequence
  Antisense oligo
cugagaggcagaugucguga

SEQ ID NO: 4699 - RNA, 20 nt, Artificial Sequence
  Antisense oligo
aaacugagaggcagaugucg

SEQ ID NO: 4700 - RNA, 20 nt, Artificial Sequence
  Antisense oligo
uguguaaaacugagaggcag

SEQ ID NO: 4701 - RNA, 20 nt, Artificial Sequence
  Antisense oligo
ucugugaggcugaagcugca

SEQ ID NO: 4702 - RNA, 20 nt, Artificial Sequence
  Antisense oligo
gucugugaggcugaagcugc

SEQ ID NO: 4703 - RNA, 20 nt, Artificial Sequence
  Antisense oligo
aaccaccugagucugugagg

SEQ ID NO: 4704 - RNA, 20 nt, Artificial Sequence
  Antisense oligo
gaaccaccugagucugugag

SEQ ID NO: 4705 - RNA, 20 nt, Artificial Sequence
  Antisense oligo
agaaccaccugagucuguga

SEQ ID NO: 4706 - RNA, 20 nt, Artificial Sequence
  Antisense oligo
ggagaaccaccugagucugu

SEQ ID NO: 4707 - RNA, 20 nt, Artificial Sequence
  Antisense oligo
aggcugaggugggagaacca

SEQ ID NO: 4708 - RNA, 20 nt, Artificial Sequence
  Antisense oligo
aggaggcugaggugggagaa

SEQ ID NO: 4709 - RNA, 20 nt, Artificial Sequence
  Antisense oligo
ucccagcuacucaggaggcu

SEQ ID NO: 4710 - RNA, 20 nt, Artificial Sequence
  Antisense oligo
agucccagcuacucaggagg

SEQ ID NO: 4711 - RNA, 20 nt, Artificial Sequence
  Antisense oligo
cagucccagcuacucaggag

SEQ ID NO: 4712 - RNA, 20 nt, Artificial Sequence
  Antisense oligo
gcagucccagcuacucagga

SEQ ID NO: 4713 - RNA, 20 nt, Artificial Sequence
  Antisense oligo
ugcagucccagcuacucagg

SEQ ID NO: 4714 - RNA, 20 nt, Artificial Sequence
  Antisense oligo
agaccaccguggcaacaugg

SEQ ID NO: 4715 - RNA, 20 nt, Artificial Sequence
  Antisense oligo
aagaccaccguggcaacaug

SEQ ID NO: 4716 - RNA, 20 nt, Artificial Sequence
  Antisense oligo
caagaccaccguggcaacau

SEQ ID NO: 4717 - RNA, 20 nt, Artificial Sequence
  Antisense oligo
ucaagaccaccguggcaaca

SEQ ID NO: 4718 - RNA, 20 nt, Artificial Sequence
  Antisense oligo
cucaagaccaccguggcaac

SEQ ID NO: 4719 - RNA, 20 nt, Artificial Sequence
  Antisense oligo
gcucaagaccaccguggcaa

SEQ ID NO: 4720 - RNA, 20 nt, Artificial Sequence
  Antisense oligo
ggaucacaaggucaggagcu

SEQ ID NO: 4721 - RNA, 20 nt, Artificial Sequence
  Antisense oligo
cggaucacaaggucaggagc

SEQ ID NO: 4722 - RNA, 20 nt, Artificial Sequence
  Antisense oligo
gcggaucacaaggucaggag

SEQ ID NO: 4723 - RNA, 20 nt, Artificial Sequence
  Antisense oligo
ggcggaucacaaggucagga

SEQ ID NO: 4724 - RNA, 20 nt, Artificial Sequence
  Antisense oligo
aggcggaucacaaggucagg

SEQ ID NO: 4725 - RNA, 20 nt, Artificial Sequence
  Antisense oligo
caggcggaucacaaggucag

SEQ ID NO: 4726 - RNA, 20 nt, Artificial Sequence
  Antisense oligo
gcaggcggaucacaagguca

SEQ ID NO: 4727 - RNA, 20 nt, Artificial Sequence
  Antisense oligo
aggcaggcggaucacaaggu

SEQ ID NO: 4728 - RNA, 20 nt, Artificial Sequence
  Antisense oligo
ucgaggcaggcggaucacaa

SEQ ID NO: 4729 - RNA, 20 nt, Artificial Sequence
  Antisense oligo
agcacuuugggaggucgagg

SEQ ID NO: 4730 - RNA, 20 nt, Artificial Sequence
  Antisense oligo
cagcacuuugggaggucgag

SEQ ID NO: 4731 - RNA, 20 nt, Artificial Sequence
  Antisense oligo
ccagcacuuugggaggucga

SEQ ID NO: 4732 - RNA, 20 nt, Artificial Sequence
  Antisense oligo
cuauaaucccagcacuuugg

SEQ ID NO: 4733 - RNA, 20 nt, Artificial Sequence
  Antisense oligo
ucuauaaucccagcacuuug

SEQ ID NO: 4734 - RNA, 20 nt, Artificial Sequence
  Antisense oligo
gucuauaaucccagcacuuu

SEQ ID NO: 4735 - RNA, 20 nt, Artificial Sequence
  Antisense oligo
ugucuauaaucccagcacuu

SEQ ID NO: 4736 - RNA, 20 nt, Artificial Sequence
  Antisense oligo
augucuauaaucccagcacu

SEQ ID NO: 4737 - RNA, 20 nt, Artificial Sequence
  Antisense oligo
caugucuauaaucccagcac

SEQ ID NO: 4738 - RNA, 20 nt, Artificial Sequence
  Antisense oligo
gcacaguggcucaugucuau

SEQ ID NO: 4739 - RNA, 20 nt, Artificial Sequence
  Antisense oligo
ggcacaguggcucaugucua

SEQ ID NO: 4740 - RNA, 20 nt, Artificial Sequence
  Antisense oligo
aggcacaguggcucaugucu

SEQ ID NO: 4741 - RNA, 20 nt, Artificial Sequence
  Antisense oligo
caggcacaguggcucauguc

SEQ ID NO: 4742 - RNA, 20 nt, Artificial Sequence
  Antisense oligo
ccaggcacaguggcucaugu

SEQ ID NO: 4743 - RNA, 20 nt, Artificial Sequence
  Antisense oligo
uuuguaaaaccaggccaggc

SEQ ID NO: 4744 - RNA, 20 nt, Artificial Sequence
  Antisense oligo
ucuuugucaaaaugugcggc

SEQ ID NO: 4745 - RNA, 20 nt, Artificial Sequence
  Antisense oligo
acuccuccucuuugucaaaa

SEQ ID NO: 4746 - RNA, 20 nt, Artificial Sequence
  Antisense oligo
auugccuuugccuccacucc

SEQ ID NO: 4747 - RNA, 20 nt, Artificial Sequence
  Antisense oligo
cauugccuuugccuccacuc

SEQ ID NO: 4748 - RNA, 20 nt, Artificial Sequence
  Antisense oligo
gugaaucuccuacagucaaa

SEQ ID NO: 4749 - RNA, 20 nt, Artificial Sequence
  Antisense oligo
ggugaaucuccuacagucaa

SEQ ID NO: 4750 - RNA, 20 nt, Artificial Sequence
  Antisense oligo
auggugaaucuccuacaguc

SEQ ID NO: 4751 - RNA, 20 nt, Artificial Sequence
  Antisense oligo
cauggugaaucuccuacagu

SEQ ID NO: 4752 - RNA, 20 nt, Artificial Sequence
  Antisense oligo
acauggugaaucuccuacag

SEQ ID NO: 4753 - RNA, 20 nt, Artificial Sequence
  Antisense oligo
caauacauggugaaucuccu

SEQ ID NO: 4754 - RNA, 20 nt, Artificial Sequence
  Antisense oligo
acaauacauggugaaucucc

SEQ ID NO: 4755 - RNA, 20 nt, Artificial Sequence
  Antisense oligo
ggguugagccuauaaacaau

SEQ ID NO: 4756 - RNA, 20 nt, Artificial Sequence
  Antisense oligo
aggguugagccuauaaacaa

SEQ ID NO: 4757 - RNA, 20 nt, Artificial Sequence
  Antisense oligo
aaggguugagccuauaaaca

SEQ ID NO: 4758 - RNA, 20 nt, Artificial Sequence
  Antisense oligo
uaaggguugagccuauaaac

SEQ ID NO: 4759 - RNA, 20 nt, Artificial Sequence
  Antisense oligo
caaagugcugggauuacagg

SEQ ID NO: 4760 - RNA, 20 nt, Artificial Sequence
  Antisense oligo
ccaaagugcugggauuacag

SEQ ID NO: 4761 - RNA, 20 nt, Artificial Sequence
  Antisense oligo
accuugugauccgccugccu

SEQ ID NO: 4762 - RNA, 20 nt, Artificial Sequence
  Antisense oligo
ugaccuugugauccgccugc

SEQ ID NO: 4763 - RNA, 20 nt, Artificial Sequence
  Antisense oligo
cugaccuugugauccgccug

SEQ ID NO: 4764 - RNA, 20 nt, Artificial Sequence
  Antisense oligo
ccugaccuugugauccgccu

SEQ ID NO: 4765 - RNA, 20 nt, Artificial Sequence
  Antisense oligo
uccugaccuugugauccgcc

SEQ ID NO: 4766 - RNA, 20 nt, Artificial Sequence
  Antisense oligo
cuccugaccuugugauccgc

SEQ ID NO: 4767 - RNA, 20 nt, Artificial Sequence
  Antisense oligo
acuccugaccuugugauccg

SEQ ID NO: 4768 - RNA, 20 nt, Artificial Sequence
  Antisense oligo
aacuccugaccuugugaucc

SEQ ID NO: 4769 - RNA, 20 nt, Artificial Sequence
  Antisense oligo
gaacuccugaccuugugauc

SEQ ID NO: 4770 - RNA, 20 nt, Artificial Sequence
  Antisense oligo
cauguuggucaggcuggucu

SEQ ID NO: 4771 - RNA, 20 nt, Artificial Sequence
  Antisense oligo
ccauguuggucaggcugguc

SEQ ID NO: 4772 - RNA, 20 nt, Artificial Sequence
  Antisense oligo
acaguguuucaccauguugg

SEQ ID NO: 4773 - RNA, 20 nt, Artificial Sequence
  Antisense oligo
uagcugggauuacaggcaug

SEQ ID NO: 4774 - RNA, 20 nt, Artificial Sequence
  Antisense oligo
guagcugggauuacaggcau

SEQ ID NO: 4775 - RNA, 20 nt, Artificial Sequence
  Antisense oligo
aguagcugggauuacaggca

SEQ ID NO: 4776 - RNA, 20 nt, Artificial Sequence
  Antisense oligo
gaguagcugggauuacaggc

SEQ ID NO: 4777 - RNA, 20 nt, Artificial Sequence
  Antisense oligo
ugaguagcugggauuacagg

SEQ ID NO: 4778 - RNA, 20 nt, Artificial Sequence
  Antisense oligo
cugaguagcugggauuacag

SEQ ID NO: 4779 - RNA, 20 nt, Artificial Sequence
  Antisense oligo
ccugaguagcugggauuaca

SEQ ID NO: 4780 - RNA, 20 nt, Artificial Sequence
  Antisense oligo
uccugaguagcugggauuac

SEQ ID NO: 4781 - RNA, 20 nt, Artificial Sequence
  Antisense oligo
cuccugaguagcugggauua

SEQ ID NO: 4782 - RNA, 20 nt, Artificial Sequence
  Antisense oligo
ccuccugaguagcugggauu

SEQ ID NO: 4783 - RNA, 20 nt, Artificial Sequence
  Antisense oligo
gccuccugaguagcugggau

SEQ ID NO: 4784 - RNA, 20 nt, Artificial Sequence
  Antisense oligo
agccuccugaguagcuggga

SEQ ID NO: 4785 - RNA, 20 nt, Artificial Sequence
  Antisense oligo
uucuccugccucagccuccu

SEQ ID NO: 4786 - RNA, 20 nt, Artificial Sequence
  Antisense oligo
auucuccugccucagccucc

SEQ ID NO: 4787 - RNA, 20 nt, Artificial Sequence
  Antisense oligo
gauucuccugccucagccuc

SEQ ID NO: 4788 - RNA, 20 nt, Artificial Sequence
  Antisense oligo
ugauucuccugccucagccu

SEQ ID NO: 4789 - RNA, 20 nt, Artificial Sequence
  Antisense oligo
gugauucuccugccucagcc

SEQ ID NO: 4790 - RNA, 20 nt, Artificial Sequence
  Antisense oligo
cgugauucuccugccucagc

SEQ ID NO: 4791 - RNA, 20 nt, Artificial Sequence
  Antisense oligo
acgugauucuccugccucag

SEQ ID NO: 4792 - RNA, 20 nt, Artificial Sequence
  Antisense oligo
ucucggcucacugcaaccuc

SEQ ID NO: 4793 - RNA, 20 nt, Artificial Sequence
  Antisense oligo
aucucggcucacugcaaccu

SEQ ID NO: 4794 - RNA, 20 nt, Artificial Sequence
  Antisense oligo
aaucucggcucacugcaacc

SEQ ID NO: 4795 - RNA, 20 nt, Artificial Sequence
  Antisense oligo
caaucucggcucacugcaac

SEQ ID NO: 4796 - RNA, 20 nt, Artificial Sequence
  Antisense oligo
acaaucucggcucacugcaa

SEQ ID NO: 4797 - RNA, 20 nt, Artificial Sequence
  Antisense oligo
cacaaucucggcucacugca

SEQ ID NO: 4798 - RNA, 20 nt, Artificial Sequence
  Antisense oligo
gcacaaucucggcucacugc

SEQ ID NO: 4799 - RNA, 20 nt, Artificial Sequence
  Antisense oligo
ggcacaaucucggcucacug

SEQ ID NO: 4800 - RNA, 20 nt, Artificial Sequence
  Antisense oligo
uggcacaaucucggcucacu

SEQ ID NO: 4801 - RNA, 20 nt, Artificial Sequence
  Antisense oligo
guggcacaaucucggcucac

SEQ ID NO: 4802 - RNA, 20 nt, Artificial Sequence
  Antisense oligo
aguggcacaaucucggcuca

SEQ ID NO: 4803 - RNA, 20 nt, Artificial Sequence
  Antisense oligo
caguggcacaaucucggcuc

SEQ ID NO: 4804 - RNA, 20 nt, Artificial Sequence
  Antisense oligo
gcaguggcacaaucucggcu

SEQ ID NO: 4805 - RNA, 20 nt, Artificial Sequence
  Antisense oligo
ugcaguggcacaaucucggc

SEQ ID NO: 4806 - RNA, 20 nt, Artificial Sequence
  Antisense oligo
uacaggugugagccauaaug

SEQ ID NO: 4807 - RNA, 20 nt, Artificial Sequence
  Antisense oligo
uuacaggugugagccauaau

SEQ ID NO: 4808 - RNA, 20 nt, Artificial Sequence
  Antisense oligo
auuacaggugugagccauaa

SEQ ID NO: 4809 - RNA, 20 nt, Artificial Sequence
  Antisense oligo
gauuacaggugugagccaua

SEQ ID NO: 4810 - RNA, 20 nt, Artificial Sequence
  Antisense oligo
ggauuacaggugugagccau

SEQ ID NO: 4811 - RNA, 20 nt, Artificial Sequence
  Antisense oligo
gggauuacaggugugagcca

SEQ ID NO: 4812 - RNA, 20 nt, Artificial Sequence
  Antisense oligo
ugggauuacaggugugagcc

SEQ ID NO: 4813 - RNA, 20 nt, Artificial Sequence
  Antisense oligo
cugggauuacaggugugagc

SEQ ID NO: 4814 - RNA, 20 nt, Artificial Sequence
  Antisense oligo
acugggauuacaggugugag

SEQ ID NO: 4815 - RNA, 20 nt, Artificial Sequence
  Antisense oligo
cacugggauuacagguguga

SEQ ID NO: 4816 - RNA, 20 nt, Artificial Sequence
  Antisense oligo
gcacugggauuacaggugug

SEQ ID NO: 4817 - RNA, 20 nt, Artificial Sequence
  Antisense oligo
agcacugggauuacaggugu

SEQ ID NO: 4818 - RNA, 20 nt, Artificial Sequence
  Antisense oligo
aagcacugggauuacaggug

SEQ ID NO: 4819 - RNA, 20 nt, Artificial Sequence
  Antisense oligo
aaagcacugggauuacaggu

SEQ ID NO: 4820 - RNA, 20 nt, Artificial Sequence
  Antisense oligo
cucagccucccaaagcacug

SEQ ID NO: 4821 - RNA, 20 nt, Artificial Sequence
  Antisense oligo
ccucagccucccaaagcacu

SEQ ID NO: 4822 - RNA, 20 nt, Artificial Sequence
  Antisense oligo
ugccucagccucccaaagca

SEQ ID NO: 4823 - RNA, 20 nt, Artificial Sequence
  Antisense oligo
uccugccucagccucccaaa

SEQ ID NO: 4824 - RNA, 20 nt, Artificial Sequence
  Antisense oligo
aaucccuccugccucagccu

SEQ ID NO: 4825 - RNA, 20 nt, Artificial Sequence
  Antisense oligo
ggguuucacuguguuggccg

SEQ ID NO: 4826 - RNA, 20 nt, Artificial Sequence
  Antisense oligo
aggguuucacuguguuggcc

SEQ ID NO: 4827 - RNA, 20 nt, Artificial Sequence
  Antisense oligo
caggguuucacuguguuggc

SEQ ID NO: 4828 - RNA, 20 nt, Artificial Sequence
  Antisense oligo
guagagacaggguuucacug

SEQ ID NO: 4829 - RNA, 20 nt, Artificial Sequence
  Antisense oligo
uguagagacaggguuucacu

SEQ ID NO: 4830 - RNA, 20 nt, Artificial Sequence
  Antisense oligo
uuguagagacaggguuucac

SEQ ID NO: 4831 - RNA, 20 nt, Artificial Sequence
  Antisense oligo
uuuguagagacaggguuuca

SEQ ID NO: 4832 - RNA, 20 nt, Artificial Sequence
  Antisense oligo
uuuuguagagacaggguuuc

SEQ ID NO: 4833 - RNA, 20 nt, Artificial Sequence
  Antisense oligo
caccaugccuggcuaguuuu

SEQ ID NO: 4834 - RNA, 20 nt, Artificial Sequence
  Antisense oligo
ccaccaugccuggcuaguuu

SEQ ID NO: 4835 - RNA, 20 nt, Artificial Sequence
  Antisense oligo
uagcugggacuacaggugcc

SEQ ID NO: 4836 - RNA, 20 nt, Artificial Sequence
  Antisense oligo
auucuccugccucagccucc

SEQ ID NO: 4837 - RNA, 20 nt, Artificial Sequence
  Antisense oligo
cauucuccugccucagccuc

SEQ ID NO: 4838 - RNA, 20 nt, Artificial Sequence
  Antisense oligo
ccauucuccugccucagccu

SEQ ID NO: 4839 - RNA, 20 nt, Artificial Sequence
  Antisense oligo
acgccauucuccugccucag

SEQ ID NO: 4840 - RNA, 20 nt, Artificial Sequence
  Antisense oligo
cacgccauucuccugccuca

SEQ ID NO: 4841 - RNA, 20 nt, Artificial Sequence
  Antisense oligo
ucacgccauucuccugccuc

SEQ ID NO: 4842 - RNA, 20 nt, Artificial Sequence
  Antisense oligo
uucacgccauucuccugccu

SEQ ID NO: 4843 - RNA, 20 nt, Artificial Sequence
  Antisense oligo
guucacgccauucuccugcc

SEQ ID NO: 4844 - RNA, 20 nt, Artificial Sequence
  Antisense oligo
gguucacgccauucuccugc

SEQ ID NO: 4845 - RNA, 20 nt, Artificial Sequence
  Antisense oligo
ggguucacgccauucuccug

SEQ ID NO: 4846 - RNA, 20 nt, Artificial Sequence
  Antisense oligo
ucacugcaagcucugccucu

SEQ ID NO: 4847 - RNA, 20 nt, Artificial Sequence
  Antisense oligo
cucacugcaagcucugccuc

SEQ ID NO: 4848 - RNA, 20 nt, Artificial Sequence
  Antisense oligo
gcucacugcaagcucugccu

SEQ ID NO: 4849 - RNA, 20 nt, Artificial Sequence
  Antisense oligo
uggcucacugcaagcucugc

SEQ ID NO: 4850 - RNA, 20 nt, Artificial Sequence
  Antisense oligo
uuggcucacugcaagcucug

SEQ ID NO: 4851 - RNA, 20 nt, Artificial Sequence
  Antisense oligo
acgaucuuggcucacugcaa

SEQ ID NO: 4852 - RNA, 20 nt, Artificial Sequence
  Antisense oligo
cacgaucuuggcucacugca

SEQ ID NO: 4853 - RNA, 20 nt, Artificial Sequence
  Antisense oligo
gcacgaucuuggcucacugc

SEQ ID NO: 4854 - RNA, 20 nt, Artificial Sequence
  Antisense oligo
ggcacgaucuuggcucacug

SEQ ID NO: 4855 - RNA, 20 nt, Artificial Sequence
  Antisense oligo
uggcacgaucuuggcucacu

SEQ ID NO: 4856 - RNA, 20 nt, Artificial Sequence
  Antisense oligo
guggcacgaucuuggcucac

SEQ ID NO: 4857 - RNA, 20 nt, Artificial Sequence
  Antisense oligo
aguggcacgaucuuggcuca

SEQ ID NO: 4858 - RNA, 20 nt, Artificial Sequence
  Antisense oligo
caguggcacgaucuuggcuc

SEQ ID NO: 4859 - RNA, 20 nt, Artificial Sequence
  Antisense oligo
gcaguggcacgaucuuggcu

SEQ ID NO: 4860 - RNA, 20 nt, Artificial Sequence
  Antisense oligo
agcgcaguggcacgaucuug

SEQ ID NO: 4861 - RNA, 20 nt, Artificial Sequence
  Antisense oligo
gagcgcaguggcacgaucuu

SEQ ID NO: 4862 - RNA, 20 nt, Artificial Sequence
  Antisense oligo
acucuguugcccaggcugga

SEQ ID NO: 4863 - RNA, 20 nt, Artificial Sequence
  Antisense oligo
ucacucuguugcccaggcug

SEQ ID NO: 4864 - RNA, 20 nt, Artificial Sequence
  Antisense oligo
cucacucuguugcccaggcu

SEQ ID NO: 4865 - RNA, 20 nt, Artificial Sequence
  Antisense oligo
ucucacucuguugcccaggc

SEQ ID NO: 4866 - RNA, 20 nt, Artificial Sequence
  Antisense oligo
gucucacucuguugcccagg

SEQ ID NO: 4867 - RNA, 20 nt, Artificial Sequence
  Antisense oligo
agucucacucuguugcccag

SEQ ID NO: 4868 - RNA, 20 nt, Artificial Sequence
  Antisense oligo
auccuccugccucagccucu

SEQ ID NO: 4869 - RNA, 20 nt, Artificial Sequence
  Antisense oligo
agucucacucugucaucaag

SEQ ID NO: 4870 - RNA, 20 nt, Artificial Sequence
  Antisense oligo
ccaucuggcaacaguaaauc

SEQ ID NO: 4871 - RNA, 20 nt, Artificial Sequence
  Antisense oligo
gccaucuggcaacaguaaau

SEQ ID NO: 4872 - RNA, 20 nt, Artificial Sequence
  Antisense oligo
ggccaucuggcaacaguaaa

SEQ ID NO: 4873 - RNA, 20 nt, Artificial Sequence
  Antisense oligo
caggccaucuggcaacagua

SEQ ID NO: 4874 - RNA, 20 nt, Artificial Sequence
  Antisense oligo
gcaggguccugacugacaga

SEQ ID NO: 4875 - RNA, 20 nt, Artificial Sequence
  Antisense oligo
acgcaggguccugacugaca

SEQ ID NO: 4876 - RNA, 20 nt, Artificial Sequence
  Antisense oligo
aacgcaggguccugacugac

SEQ ID NO: 4877 - RNA, 20 nt, Artificial Sequence
  Antisense oligo
caacgcaggguccugacuga

SEQ ID NO: 4878 - RNA, 20 nt, Artificial Sequence
  Antisense oligo
uugcaggcccucaccgaauc

SEQ ID NO: 4879 - RNA, 20 nt, Artificial Sequence
  Antisense oligo
cuuugcaggcccucaccgaa

SEQ ID NO: 4880 - RNA, 20 nt, Artificial Sequence
  Antisense oligo
agcuccuuugcaggcccuca

SEQ ID NO: 4881 - RNA, 20 nt, Artificial Sequence
  Antisense oligo
ucagcuccuuugcaggcccu

SEQ ID NO: 4882 - RNA, 20 nt, Artificial Sequence
  Antisense oligo
agggcgucagcuccuuugca

SEQ ID NO: 4883 - RNA, 20 nt, Artificial Sequence
  Antisense oligo
uagggcgucagcuccuuugc

SEQ ID NO: 4884 - RNA, 20 nt, Artificial Sequence
  Antisense oligo
cuagggcgucagcuccuuug

SEQ ID NO: 4885 - RNA, 20 nt, Artificial Sequence
  Antisense oligo
uuaacucacgcaggagacag

SEQ ID NO: 4886 - RNA, 20 nt, Artificial Sequence
  Antisense oligo
uuuaacucacgcaggagaca

SEQ ID NO: 4887 - RNA, 20 nt, Artificial Sequence
  Antisense oligo
uggcugagcagaguuuaacu

SEQ ID NO: 4888 - RNA, 20 nt, Artificial Sequence
  Antisense oligo
gcguggcugagcagaguuua

SEQ ID NO: 4889 - RNA, 20 nt, Artificial Sequence
  Antisense oligo
cgcguggcugagcagaguuu

SEQ ID NO: 4890 - RNA, 20 nt, Artificial Sequence
  Antisense oligo
acagagcaagaggagcaccg

SEQ ID NO: 4891 - RNA, 20 nt, Artificial Sequence
  Antisense oligo
cacagagcaagaggagcacc

SEQ ID NO: 4892 - RNA, 20 nt, Artificial Sequence
  Antisense oligo
caggaagcaagcaccgugca

SEQ ID NO: 4893 - RNA, 20 nt, Artificial Sequence
  Antisense oligo
acaggaagcaagcaccgugc

SEQ ID NO: 4894 - RNA, 20 nt, Artificial Sequence
  Antisense oligo
ccaacaggaagcaagcaccg

SEQ ID NO: 4895 - RNA, 20 nt, Artificial Sequence
  Antisense oligo
agucccaacaggaagcaagc

SEQ ID NO: 4896 - RNA, 20 nt, Artificial Sequence
  Antisense oligo
cuggagucccaacaggaagc

SEQ ID NO: 4897 - RNA, 20 nt, Artificial Sequence
  Antisense oligo
gucuggagucccaacaggaa

SEQ ID NO: 4898 - RNA, 20 nt, Artificial Sequence
  Antisense oligo
agucuggagucccaacagga

SEQ ID NO: 4899 - RNA, 20 nt, Artificial Sequence
  Antisense oligo
aucccgcagugagcugagcu

SEQ ID NO: 4900 - RNA, 20 nt, Artificial Sequence
  Antisense oligo
agaucccgcagugagcugag

SEQ ID NO: 4901 - RNA, 20 nt, Artificial Sequence
  Antisense oligo
aagaucccgcagugagcuga

SEQ ID NO: 4902 - RNA, 20 nt, Artificial Sequence
  Antisense oligo
aaagaucccgcagugagcug

SEQ ID NO: 4903 - RNA, 20 nt, Artificial Sequence
  Antisense oligo
uaaagaucccgcagugagcu

SEQ ID NO: 4904 - RNA, 20 nt, Artificial Sequence
  Antisense oligo
auaaagaucccgcagugagc

SEQ ID NO: 4905 - RNA, 20 nt, Artificial Sequence
  Antisense oligo
aauaaagaucccgcagugag

SEQ ID NO: 4906 - RNA, 20 nt, Artificial Sequence
  Antisense oligo
cuggaagggaauaaagaucc

SEQ ID NO: 4907 - RNA, 20 nt, Artificial Sequence
  Antisense oligo
gcuggaagggaauaaagauc

SEQ ID NO: 4908 - RNA, 20 nt, Artificial Sequence
  Antisense oligo
cagguucaccagguacagcc

SEQ ID NO: 4909 - RNA, 20 nt, Artificial Sequence
  Antisense oligo
acagguucaccagguacagc

SEQ ID NO: 4910 - RNA, 20 nt, Artificial Sequence
  Antisense oligo
cacagguucaccagguacag

SEQ ID NO: 4911 - RNA, 20 nt, Artificial Sequence
  Antisense oligo
gcacagguucaccagguaca

SEQ ID NO: 4912 - RNA, 20 nt, Artificial Sequence
  Antisense oligo
ggcacagguucaccagguac

SEQ ID NO: 4913 - RNA, 20 nt, Artificial Sequence
  Antisense oligo
uggcacagguucaccaggua

SEQ ID NO: 4914 - RNA, 20 nt, Artificial Sequence
  Antisense oligo
uuggcacagguucaccaggu

SEQ ID NO: 4915 - RNA, 20 nt, Artificial Sequence
  Antisense oligo
cuuuggcacagguucaccag

SEQ ID NO: 4916 - RNA, 20 nt, Artificial Sequence
  Antisense oligo
ucuuuggcacagguucacca

SEQ ID NO: 4917 - RNA, 20 nt, Artificial Sequence
  Antisense oligo
caucuuuggcacagguucac

SEQ ID NO: 4918 - RNA, 20 nt, Artificial Sequence
  Antisense oligo
gcaucuuuggcacagguuca

SEQ ID NO: 4919 - RNA, 20 nt, Artificial Sequence
  Antisense oligo
ugcaucuuuggcacagguuc

SEQ ID NO: 4920 - RNA, 20 nt, Artificial Sequence
  Antisense oligo
guacguccuuguguccaugc

SEQ ID NO: 4921 - RNA, 20 nt, Artificial Sequence
  Antisense oligo
uguacguccuuguguccaug

SEQ ID NO: 4922 - RNA, 20 nt, Artificial Sequence
  Antisense oligo
guguacguccuuguguccau

SEQ ID NO: 4923 - RNA, 20 nt, Artificial Sequence
  Antisense oligo
gguguacguccuugugucca

SEQ ID NO: 4924 - RNA, 20 nt, Artificial Sequence
  Antisense oligo
agguguacguccuugugucc

SEQ ID NO: 4925 - RNA, 20 nt, Artificial Sequence
  Antisense oligo
cagguguacguccuuguguc

SEQ ID NO: 4926 - RNA, 20 nt, Artificial Sequence
  Antisense oligo
ccagguguacguccuugugu

SEQ ID NO: 4927 - RNA, 20 nt, Artificial Sequence
  Antisense oligo
gccagguguacguccuugug

SEQ ID NO: 4928 - RNA, 20 nt, Artificial Sequence
  Antisense oligo
agccagguguacguccuugu

SEQ ID NO: 4929 - RNA, 20 nt, Artificial Sequence
  Antisense oligo
cagccagguguacguccuug

SEQ ID NO: 4930 - RNA, 20 nt, Artificial Sequence
  Antisense oligo
ccagccagguguacguccuu

SEQ ID NO: 4931 - RNA, 20 nt, Artificial Sequence
  Antisense oligo
uacagcagugcaggacaggc

SEQ ID NO: 4932 - RNA, 20 nt, Artificial Sequence
  Antisense oligo
cauacagcagugcaggacag

SEQ ID NO: 4933 - RNA, 20 nt, Artificial Sequence
  Antisense oligo
uccauacagcagugcaggac

SEQ ID NO: 4934 - RNA, 20 nt, Artificial Sequence
  Antisense oligo
agcuccauacagcagugcag

SEQ ID NO: 4935 - RNA, 20 nt, Artificial Sequence
  Antisense oligo
cagcuccauacagcagugca

SEQ ID NO: 4936 - RNA, 20 nt, Artificial Sequence
  Antisense oligo
ccagcuccauacagcagugc

SEQ ID NO: 4937 - RNA, 20 nt, Artificial Sequence
  Antisense oligo
gccagcuccauacagcagug

SEQ ID NO: 4938 - RNA, 20 nt, Artificial Sequence
  Antisense oligo
ggccagcuccauacagcagu

SEQ ID NO: 4939 - RNA, 20 nt, Artificial Sequence
  Antisense oligo
guguccucaggcugucucca

SEQ ID NO: 4940 - RNA, 20 nt, Artificial Sequence
  Antisense oligo
agguguccucaggcugucuc

SEQ ID NO: 4941 - RNA, 20 nt, Artificial Sequence
  Antisense oligo
ucuagcauuuguucccggaa

SEQ ID NO: 4942 - RNA, 20 nt, Artificial Sequence
  Antisense oligo
aucuagcauuuguucccgga

SEQ ID NO: 4943 - RNA, 20 nt, Artificial Sequence
  Antisense oligo
uaucuagcauuuguucccgg

SEQ ID NO: 4944 - RNA, 20 nt, Artificial Sequence
  Antisense oligo
guaucuagcauuuguucccg

SEQ ID NO: 4945 - RNA, 20 nt, Artificial Sequence
  Antisense oligo
cguaucuagcauuuguuccc

SEQ ID NO: 4946 - RNA, 20 nt, Artificial Sequence
  Antisense oligo
acguaucuagcauuuguucc

SEQ ID NO: 4947 - RNA, 20 nt, Artificial Sequence
  Antisense oligo
cacaacucuacgacuuacgu

SEQ ID NO: 4948 - RNA, 20 nt, Artificial Sequence
  Antisense oligo
gcacaacucuacgacuuacg

SEQ ID NO: 4949 - RNA, 20 nt, Artificial Sequence
  Antisense oligo
agcacaacucuacgacuuac

SEQ ID NO: 4950 - RNA, 20 nt, Artificial Sequence
  Antisense oligo
aagcacaacucuacgacuua

SEQ ID NO: 4951 - RNA, 20 nt, Artificial Sequence
  Antisense oligo
uaagcacaacucuacgacuu

SEQ ID NO: 4952 - RNA, 20 nt, Artificial Sequence
  Antisense oligo
auaagcacaacucuacgacu

SEQ ID NO: 4953 - RNA, 20 nt, Artificial Sequence
  Antisense oligo
gauaagcacaacucuacgac

SEQ ID NO: 4954 - RNA, 20 nt, Artificial Sequence
  Antisense oligo
agauaagcacaacucuacga

SEQ ID NO: 4955 - RNA, 20 nt, Artificial Sequence
  Antisense oligo
cauguagauaagcacaacuc

SEQ ID NO: 4956 - RNA, 20 nt, Artificial Sequence
  Antisense oligo
ccagauucauguagauaagc

SEQ ID NO: 4957 - RNA, 20 nt, Artificial Sequence
  Antisense oligo
cccagauucauguagauaag

SEQ ID NO: 4958 - RNA, 20 nt, Artificial Sequence
  Antisense oligo
agucuucccagauucaugua

SEQ ID NO: 4959 - RNA, 20 nt, Artificial Sequence
  Antisense oligo
cagucuucccagauucaugu

SEQ ID NO: 4960 - RNA, 20 nt, Artificial Sequence
  Antisense oligo
ucagucuucccagauucaug

SEQ ID NO: 4961 - RNA, 20 nt, Artificial Sequence
  Antisense oligo
gucagucuucccagauucau

SEQ ID NO: 4962 - RNA, 20 nt, Artificial Sequence
  Antisense oligo
agucagucuucccagauuca

SEQ ID NO: 4963 - RNA, 20 nt, Artificial Sequence
  Antisense oligo
gagucagucuucccagauuc

SEQ ID NO: 4964 - RNA, 20 nt, Artificial Sequence
  Antisense oligo
ggagucagucuucccagauu

SEQ ID NO: 4965 - RNA, 20 nt, Artificial Sequence
  Antisense oligo
guaggagucagucuucccag

SEQ ID NO: 4966 - RNA, 20 nt, Artificial Sequence
  Antisense oligo
auguaggagucagucuuccc

SEQ ID NO: 4967 - RNA, 20 nt, Artificial Sequence
  Antisense oligo
aauguaggagucagucuucc

SEQ ID NO: 4968 - RNA, 20 nt, Artificial Sequence
  Antisense oligo
caauguaggagucagucuuc

SEQ ID NO: 4969 - RNA, 20 nt, Artificial Sequence
  Antisense oligo
gcacaauguaggagucaguc

SEQ ID NO: 4970 - RNA, 20 nt, Artificial Sequence
  Antisense oligo
ugcacaauguaggagucagu

SEQ ID NO: 4971 - RNA, 20 nt, Artificial Sequence
  Antisense oligo
aaucaggaauggagucacug

SEQ ID NO: 4972 - RNA, 20 nt, Artificial Sequence
  Antisense oligo
gaaucaggaauggagucacu

SEQ ID NO: 4973 - RNA, 20 nt, Artificial Sequence
  Antisense oligo
cagccuauucuugacaguuu

SEQ ID NO: 4974 - RNA, 20 nt, Artificial Sequence
  Antisense oligo
acagccuauucuugacaguu

SEQ ID NO: 4975 - RNA, 20 nt, Artificial Sequence
  Antisense oligo
cacagccuauucuugacagu

SEQ ID NO: 4976 - RNA, 20 nt, Artificial Sequence
  Antisense oligo
gcacagccuauucuugacag

SEQ ID NO: 4977 - RNA, 20 nt, Artificial Sequence
  Antisense oligo
ugcacagccuauucuugaca

SEQ ID NO: 4978 - RNA, 20 nt, Artificial Sequence
  Antisense oligo
auuacaggcgugagccacug

SEQ ID NO: 4979 - RNA, 20 nt, Artificial Sequence
  Antisense oligo
gauuacaggcgugagccacu

SEQ ID NO: 4980 - RNA, 20 nt, Artificial Sequence
  Antisense oligo
ggauuacaggcgugagccac

SEQ ID NO: 4981 - RNA, 20 nt, Artificial Sequence
  Antisense oligo
gggauuacaggcgugagcca

SEQ ID NO: 4982 - RNA, 20 nt, Artificial Sequence
  Antisense oligo
ugggauuacaggcgugagcc

SEQ ID NO: 4983 - RNA, 20 nt, Artificial Sequence
  Antisense oligo
cugggauuacaggcgugagc

SEQ ID NO: 4984 - RNA, 20 nt, Artificial Sequence
  Antisense oligo
gcugggauuacaggcgugag

SEQ ID NO: 4985 - RNA, 20 nt, Artificial Sequence
  Antisense oligo
ugcugggauuacaggcguga

SEQ ID NO: 4986 - RNA, 20 nt, Artificial Sequence
  Antisense oligo
gugcugggauuacaggcgug

SEQ ID NO: 4987 - RNA, 20 nt, Artificial Sequence
  Antisense oligo
agugcugggauuacaggcgu

SEQ ID NO: 4988 - RNA, 20 nt, Artificial Sequence
  Antisense oligo
aagugcugggauuacaggcg

SEQ ID NO: 4989 - RNA, 20 nt, Artificial Sequence
  Antisense oligo
aaagugcugggauuacaggc

SEQ ID NO: 4990 - RNA, 20 nt, Artificial Sequence
  Antisense oligo
caaagugcugggauuacagg

SEQ ID NO: 4991 - RNA, 20 nt, Artificial Sequence
  Antisense oligo
ccaaagugcugggauuacag

SEQ ID NO: 4992 - RNA, 20 nt, Artificial Sequence
  Antisense oligo
ucucagccucccaaagugcu

SEQ ID NO: 4993 - RNA, 20 nt, Artificial Sequence
  Antisense oligo
gucucagccucccaaagugc

SEQ ID NO: 4994 - RNA, 20 nt, Artificial Sequence
  Antisense oligo
cgucucagccucccaaagug

SEQ ID NO: 4995 - RNA, 20 nt, Artificial Sequence
  Antisense oligo
ccgucucagccucccaaagu

SEQ ID NO: 4996 - RNA, 20 nt, Artificial Sequence
  Antisense oligo
acccgucucagccucccaaa

SEQ ID NO: 4997 - RNA, 20 nt, Artificial Sequence
  Antisense oligo
ucucgaacuccugaccucag

SEQ ID NO: 4998 - RNA, 20 nt, Artificial Sequence
  Antisense oligo
gucucgaacuccugaccuca

SEQ ID NO: 4999 - RNA, 20 nt, Artificial Sequence
  Antisense oligo
gcuggucucgaacuccugac

SEQ ID NO: 5000 - RNA, 20 nt, Artificial Sequence
  Antisense oligo
ggcuggucucgaacuccuga

SEQ ID NO: 5001 - RNA, 20 nt, Artificial Sequence
  Antisense oligo
aggcuggucucgaacuccug

SEQ ID NO: 5002 - RNA, 20 nt, Artificial Sequence
  Antisense oligo
caggcuggucucgaacuccu

SEQ ID NO: 5003 - RNA, 20 nt, Artificial Sequence
  Antisense oligo
caccacaccuggcuaauuuu

SEQ ID NO: 5004 - RNA, 20 nt, Artificial Sequence
  Antisense oligo
ccaccacaccuggcuaauuu

SEQ ID NO: 5005 - RNA, 20 nt, Artificial Sequence
  Antisense oligo
cuaccucagccuccagagua

SEQ ID NO: 5006 - RNA, 20 nt, Artificial Sequence
  Antisense oligo
ccuaccucagccuccagagu

SEQ ID NO: 5007 - RNA, 20 nt, Artificial Sequence
  Antisense oligo
uccuaccucagccuccagag

SEQ ID NO: 5008 - RNA, 20 nt, Artificial Sequence
  Antisense oligo
cuccuaccucagccuccaga

SEQ ID NO: 5009 - RNA, 20 nt, Artificial Sequence
  Antisense oligo
ucuccuaccucagccuccag

SEQ ID NO: 5010 - RNA, 20 nt, Artificial Sequence
  Antisense oligo
uucuccuaccucagccucca

SEQ ID NO: 5011 - RNA, 20 nt, Artificial Sequence
  Antisense oligo
auucuccuaccucagccucc

SEQ ID NO: 5012 - RNA, 20 nt, Artificial Sequence
  Antisense oligo
gauucuccuaccucagccuc

SEQ ID NO: 5013 - RNA, 20 nt, Artificial Sequence
  Antisense oligo
ucacugcaaccuccaccucc

SEQ ID NO: 5014 - RNA, 20 nt, Artificial Sequence
  Antisense oligo
cucacugcaaccuccaccuc

SEQ ID NO: 5015 - RNA, 20 nt, Artificial Sequence
  Antisense oligo
gcucacugcaaccuccaccu

SEQ ID NO: 5016 - RNA, 20 nt, Artificial Sequence
  Antisense oligo
agcucacugcaaccuccacc

SEQ ID NO: 5017 - RNA, 20 nt, Artificial Sequence
  Antisense oligo
cagcucacugcaaccuccac

SEQ ID NO: 5018 - RNA, 20 nt, Artificial Sequence
  Antisense oligo
ccagcucacugcaaccucca

SEQ ID NO: 5019 - RNA, 20 nt, Artificial Sequence
  Antisense oligo
ucccagcucacugcaaccuc

SEQ ID NO: 5020 - RNA, 20 nt, Artificial Sequence
  Antisense oligo
aucccagcucacugcaaccu

SEQ ID NO: 5021 - RNA, 20 nt, Artificial Sequence
  Antisense oligo
gaucccagcucacugcaacc

SEQ ID NO: 5022 - RNA, 20 nt, Artificial Sequence
  Antisense oligo
cugccucugagguuacaagu

SEQ ID NO: 5023 - RNA, 20 nt, Artificial Sequence
  Antisense oligo
cggcugccucugagguuaca

SEQ ID NO: 5024 - RNA, 20 nt, Artificial Sequence
  Antisense oligo
acggcugccucugagguuac

SEQ ID NO: 5025 - RNA, 20 nt, Artificial Sequence
  Antisense oligo
aacggcugccucugagguua

SEQ ID NO: 5026 - RNA, 20 nt, Artificial Sequence
  Antisense oligo
caacggcugccucugagguu

SEQ ID NO: 5027 - RNA, 20 nt, Artificial Sequence
  Antisense oligo
acaacggcugccucugaggu

SEQ ID NO: 5028 - RNA, 20 nt, Artificial Sequence
  Antisense oligo
aacaacggcugccucugagg

SEQ ID NO: 5029 - RNA, 20 nt, Artificial Sequence
  Antisense oligo
uaacaacggcugccucugag

SEQ ID NO: 5030 - RNA, 20 nt, Artificial Sequence
  Antisense oligo
cuaacaacggcugccucuga

SEQ ID NO: 5031 - RNA, 20 nt, Artificial Sequence
  Antisense oligo
gcuaacaacggcugccucug

SEQ ID NO: 5032 - RNA, 20 nt, Artificial Sequence
  Antisense oligo
ugcuaacaacggcugccucu

SEQ ID NO: 5033 - RNA, 20 nt, Artificial Sequence
  Antisense oligo
gugcuaacaacggcugccuc

SEQ ID NO: 5034 - RNA, 20 nt, Artificial Sequence
  Antisense oligo
cgugcuaacaacggcugccu

SEQ ID NO: 5035 - RNA, 20 nt, Artificial Sequence
  Antisense oligo
augccaccgugcuaacaacg

SEQ ID NO: 5036 - RNA, 20 nt, Artificial Sequence
  Antisense oligo
uaugccaccgugcuaacaac

SEQ ID NO: 5037 - RNA, 20 nt, Artificial Sequence
  Antisense oligo
guaugccaccgugcuaacaa

SEQ ID NO: 5038 - RNA, 20 nt, Artificial Sequence
  Antisense oligo
gguaugccaccgugcuaaca

SEQ ID NO: 5039 - RNA, 20 nt, Artificial Sequence
  Antisense oligo
agguaugccaccgugcuaac

SEQ ID NO: 5040 - RNA, 20 nt, Artificial Sequence
  Antisense oligo
auagguaugccaccgugcua

SEQ ID NO: 5041 - RNA, 20 nt, Artificial Sequence
  Antisense oligo
aauagguaugccaccgugcu

SEQ ID NO: 5042 - RNA, 20 nt, Artificial Sequence
  Antisense oligo
aaauagguaugccaccgugc

SEQ ID NO: 5043 - RNA, 20 nt, Artificial Sequence
  Antisense oligo
caaauagguaugccaccgug

SEQ ID NO: 5044 - RNA, 20 nt, Artificial Sequence
  Antisense oligo
acaaauagguaugccaccgu

SEQ ID NO: 5045 - RNA, 20 nt, Artificial Sequence
  Antisense oligo
cacaaauagguaugccaccg

SEQ ID NO: 5046 - RNA, 20 nt, Artificial Sequence
  Antisense oligo
ccacaaauagguaugccacc

SEQ ID NO: 5047 - RNA, 20 nt, Artificial Sequence
  Antisense oligo
aaaccacaaauagguaugcc

SEQ ID NO: 5048 - RNA, 20 nt, Artificial Sequence
  Antisense oligo
uggacaaaaccacaaauagg

SEQ ID NO: 5049 - RNA, 20 nt, Artificial Sequence
  Antisense oligo
acccacgaauccauauuugg

SEQ ID NO: 5050 - RNA, 20 nt, Artificial Sequence
  Antisense oligo
cacccacgaauccauauuug

SEQ ID NO: 5051 - RNA, 20 nt, Artificial Sequence
  Antisense oligo
acacccacgaauccauauuu

SEQ ID NO: 5052 - RNA, 20 nt, Artificial Sequence
  Antisense oligo
aacacccacgaauccauauu

SEQ ID NO: 5053 - RNA, 20 nt, Artificial Sequence
  Antisense oligo
aaacacccacgaauccauau

SEQ ID NO: 5054 - RNA, 20 nt, Artificial Sequence
  Antisense oligo
aaaacacccacgaauccaua

SEQ ID NO: 5055 - RNA, 20 nt, Artificial Sequence
  Antisense oligo
uaaaacacccacgaauccau

SEQ ID NO: 5056 - RNA, 20 nt, Artificial Sequence
  Antisense oligo
auaaaacacccacgaaucca

SEQ ID NO: 5057 - RNA, 20 nt, Artificial Sequence
  Antisense oligo
cauaaaacacccacgaaucc

SEQ ID NO: 5058 - RNA, 20 nt, Artificial Sequence
  Antisense oligo
acauaaaacacccacgaauc

SEQ ID NO: 5059 - RNA, 20 nt, Artificial Sequence
  Antisense oligo
acgcuaagacauagacaaga

SEQ ID NO: 5060 - RNA, 20 nt, Artificial Sequence
  Antisense oligo
aacgcuaagacauagacaag

SEQ ID NO: 5061 - RNA, 20 nt, Artificial Sequence
  Antisense oligo
gaacgcuaagacauagacaa

SEQ ID NO: 5062 - RNA, 20 nt, Artificial Sequence
  Antisense oligo
ggaacgcuaagacauagaca

SEQ ID NO: 5063 - RNA, 20 nt, Artificial Sequence
  Antisense oligo
uggaacgcuaagacauagac

SEQ ID NO: 5064 - RNA, 20 nt, Artificial Sequence
  Antisense oligo
cuggaacgcuaagacauaga

SEQ ID NO: 5065 - RNA, 20 nt, Artificial Sequence
  Antisense oligo
gcuggaacgcuaagacauag

SEQ ID NO: 5066 - RNA, 20 nt, Artificial Sequence
  Antisense oligo
ggcuggaacgcuaagacaua

SEQ ID NO: 5067 - RNA, 20 nt, Artificial Sequence
  Antisense oligo
uggcuggaacgcuaagacau

SEQ ID NO: 5068 - RNA, 20 nt, Artificial Sequence
  Antisense oligo
cuggcuggaacgcuaagaca

SEQ ID NO: 5069 - RNA, 20 nt, Artificial Sequence
  Antisense oligo
ucuggcuggaacgcuaagac

SEQ ID NO: 5070 - RNA, 20 nt, Artificial Sequence
  Antisense oligo
cucuggcuggaacgcuaaga

SEQ ID NO: 5071 - RNA, 20 nt, Artificial Sequence
  Antisense oligo
ucucuggcuggaacgcuaag

SEQ ID NO: 5072 - RNA, 20 nt, Artificial Sequence
  Antisense oligo
cucucuggcuggaacgcuaa

SEQ ID NO: 5073 - RNA, 20 nt, Artificial Sequence
  Antisense oligo
ucucucuggcuggaacgcua

SEQ ID NO: 5074 - RNA, 20 nt, Artificial Sequence
  Antisense oligo
acucucucuggcuggaacgc

SEQ ID NO: 5075 - RNA, 20 nt, Artificial Sequence
  Antisense oligo
cacucucucuggcuggaacg

SEQ ID NO: 5076 - RNA, 20 nt, Artificial Sequence
  Antisense oligo
gcacucucucuggcuggaac

SEQ ID NO: 5077 - RNA, 20 nt, Artificial Sequence
  Antisense oligo
caaggcuggcacucucucug

SEQ ID NO: 5078 - RNA, 20 nt, Artificial Sequence
  Antisense oligo
acaaggcuggcacucucucu

SEQ ID NO: 5079 - RNA, 20 nt, Artificial Sequence
  Antisense oligo
uacaaggcuggcacucucuc

SEQ ID NO: 5080 - RNA, 20 nt, Artificial Sequence
  Antisense oligo
auacaaggcuggcacucucu

SEQ ID NO: 5081 - RNA, 20 nt, Artificial Sequence
  Antisense oligo
aauacaaggcuggcacucuc

SEQ ID NO: 5082 - RNA, 20 nt, Artificial Sequence
  Antisense oligo
ucaauacaaggcuggcacuc

SEQ ID NO: 5083 - RNA, 20 nt, Artificial Sequence
  Antisense oligo
gcucaauacaaggcuggcac

SEQ ID NO: 5084 - RNA, 20 nt, Artificial Sequence
  Antisense oligo
ggcucaauacaaggcuggca

SEQ ID NO: 5085 - RNA, 20 nt, Artificial Sequence
  Antisense oligo
uggcucaauacaaggcuggc

SEQ ID NO: 5086 - RNA, 20 nt, Artificial Sequence
  Antisense oligo
acuggcucaauacaaggcug

SEQ ID NO: 5087 - RNA, 20 nt, Artificial Sequence
  Antisense oligo
aacuggcucaauacaaggcu

SEQ ID NO: 5088 - RNA, 20 nt, Artificial Sequence
  Antisense oligo
gaacuggcucaauacaaggc

SEQ ID NO: 5089 - RNA, 20 nt, Artificial Sequence
  Antisense oligo
agaacuggcucaauacaagg

SEQ ID NO: 5090 - RNA, 20 nt, Artificial Sequence
  Antisense oligo
gagaacuggcucaauacaag

SEQ ID NO: 5091 - RNA, 20 nt, Artificial Sequence
  Antisense oligo
agagaacuggcucaauacaa

SEQ ID NO: 5092 - RNA, 20 nt, Artificial Sequence
  Antisense oligo
aacagagaacuggcucaaua

SEQ ID NO: 5093 - RNA, 20 nt, Artificial Sequence
  Antisense oligo
guaacagagaacuggcucaa

SEQ ID NO: 5094 - RNA, 20 nt, Artificial Sequence
  Antisense oligo
ccuguaacagagaacuggcu

SEQ ID NO: 5095 - RNA, 20 nt, Artificial Sequence
  Antisense oligo
uccuguaacagagaacuggc

SEQ ID NO: 5096 - RNA, 20 nt, Artificial Sequence
  Antisense oligo
ccaaauguccuguaacagag

SEQ ID NO: 5097 - RNA, 20 nt, Artificial Sequence
  Antisense oligo
accaaauguccuguaacaga

SEQ ID NO: 5098 - RNA, 20 nt, Artificial Sequence
  Antisense oligo
caaccaaccaaauguccugu

SEQ ID NO: 5099 - RNA, 20 nt, Artificial Sequence
  Antisense oligo
aacugcacaaccaaccaaau

SEQ ID NO: 5100 - RNA, 20 nt, Artificial Sequence
  Antisense oligo
aaacugcacaaccaaccaaa

SEQ ID NO: 5101 - RNA, 20 nt, Artificial Sequence
  Antisense oligo
cgaaacugcacaaccaacca

SEQ ID NO: 5102 - RNA, 20 nt, Artificial Sequence
  Antisense oligo
acgaaacugcacaaccaacc

SEQ ID NO: 5103 - RNA, 20 nt, Artificial Sequence
  Antisense oligo
aacgaaacugcacaaccaac

SEQ ID NO: 5104 - RNA, 20 nt, Artificial Sequence
  Antisense oligo
aaacgaaacugcacaaccaa

SEQ ID NO: 5105 - RNA, 20 nt, Artificial Sequence
  Antisense oligo
gacagagaaagcuaaggaug

SEQ ID NO: 5106 - RNA, 20 nt, Artificial Sequence
  Antisense oligo
augggacagagaaagcuaag

SEQ ID NO: 5107 - RNA, 20 nt, Artificial Sequence
  Antisense oligo
uaugggacagagaaagcuaa

SEQ ID NO: 5108 - RNA, 20 nt, Artificial Sequence
  Antisense oligo
augaaguuaugggacagaga

SEQ ID NO: 5109 - RNA, 20 nt, Artificial Sequence
  Antisense oligo
aaugaaguuaugggacagag

SEQ ID NO: 5110 - RNA, 20 nt, Artificial Sequence
  Antisense oligo
caaugaaguuaugggacaga

SEQ ID NO: 5111 - RNA, 20 nt, Artificial Sequence
  Antisense oligo
augccuuugaccuagcaguu

SEQ ID NO: 5112 - RNA, 20 nt, Artificial Sequence
  Antisense oligo
aaugccuuugaccuagcagu

SEQ ID NO: 5113 - RNA, 20 nt, Artificial Sequence
  Antisense oligo
caaugccuuugaccuagcag

SEQ ID NO: 5114 - RNA, 20 nt, Artificial Sequence
  Antisense oligo
uucacaaugccuuugaccua

SEQ ID NO: 5115 - RNA, 20 nt, Artificial Sequence
  Antisense oligo
gaguucacaaugccuuugac

SEQ ID NO: 5116 - RNA, 20 nt, Artificial Sequence
  Antisense oligo
agaguucacaaugccuuuga

SEQ ID NO: 5117 - RNA, 20 nt, Artificial Sequence
  Antisense oligo
uagaguucacaaugccuuug

SEQ ID NO: 5118 - RNA, 20 nt, Artificial Sequence
  Antisense oligo
guuuagaguucacaaugccu

SEQ ID NO: 5119 - RNA, 20 nt, Artificial Sequence
  Antisense oligo
gguuuagaguucacaaugcc

SEQ ID NO: 5120 - RNA, 20 nt, Artificial Sequence
  Antisense oligo
ugguuuagaguucacaaugc

SEQ ID NO: 5121 - RNA, 20 nt, Artificial Sequence
  Antisense oligo
ccagcauuaugcaaagguau

SEQ ID NO: 5122 - RNA, 20 nt, Artificial Sequence
  Antisense oligo
gccagcauuaugcaaaggua

SEQ ID NO: 5123 - RNA, 20 nt, Artificial Sequence
  Antisense oligo
aagccagcauuaugcaaagg

SEQ ID NO: 5124 - RNA, 20 nt, Artificial Sequence
  Antisense oligo
uaagccagcauuaugcaaag

SEQ ID NO: 5125 - RNA, 20 nt, Artificial Sequence
  Antisense oligo
cuccuuuaagccagcauuau

SEQ ID NO: 5126 - RNA, 20 nt, Artificial Sequence
  Antisense oligo
ccucuccuuuaagccagcau

SEQ ID NO: 5127 - RNA, 20 nt, Artificial Sequence
  Antisense oligo
uccucuccuuuaagccagca

SEQ ID NO: 5128 - RNA, 20 nt, Artificial Sequence
  Antisense oligo
uuccucuccuuuaagccagc

SEQ ID NO: 5129 - RNA, 20 nt, Artificial Sequence
  Antisense oligo
auuccucuccuuuaagccag

SEQ ID NO: 5130 - RNA, 20 nt, Artificial Sequence
  Antisense oligo
gugauaaaggagaggucauu

SEQ ID NO: 5131 - RNA, 20 nt, Artificial Sequence
  Antisense oligo
uugugauaaaggagagguca

SEQ ID NO: 5132 - RNA, 20 nt, Artificial Sequence
  Antisense oligo
cuugugauaaaggagagguc

SEQ ID NO: 5133 - RNA, 20 nt, Artificial Sequence
  Antisense oligo
ucuugugauaaaggagaggu

SEQ ID NO: 5134 - RNA, 20 nt, Artificial Sequence
  Antisense oligo
aggaacgagaaccaaauacc

SEQ ID NO: 5135 - RNA, 20 nt, Artificial Sequence
  Antisense oligo
caggaacgagaaccaaauac

SEQ ID NO: 5136 - RNA, 20 nt, Artificial Sequence
  Antisense oligo
ucaggaacgagaaccaaaua

SEQ ID NO: 5137 - RNA, 20 nt, Artificial Sequence
  Antisense oligo
cucaggaacgagaaccaaau

SEQ ID NO: 5138 - RNA, 20 nt, Artificial Sequence
  Antisense oligo
acucaggaacgagaaccaaa

SEQ ID NO: 5139 - RNA, 20 nt, Artificial Sequence
  Antisense oligo
aacucaggaacgagaaccaa

SEQ ID NO: 5140 - RNA, 20 nt, Artificial Sequence
  Antisense oligo
uaacucaggaacgagaacca

SEQ ID NO: 5141 - RNA, 20 nt, Artificial Sequence
  Antisense oligo
uuaacucaggaacgagaacc

SEQ ID NO: 5142 - RNA, 20 nt, Artificial Sequence
  Antisense oligo
auuaacucaggaacgagaac

SEQ ID NO: 5143 - RNA, 20 nt, Artificial Sequence
  Antisense oligo
cauggaauacuaugcagcca

SEQ ID NO: 5144 - RNA, 20 nt, Artificial Sequence
  Antisense oligo
cacaauagcaaagacaugga

SEQ ID NO: 5145 - RNA, 20 nt, Artificial Sequence
  Antisense oligo
ucacaauagcaaagacaugg

SEQ ID NO: 5146 - RNA, 20 nt, Artificial Sequence
  Antisense oligo
cauucaccgcagcaauccca

SEQ ID NO: 5147 - RNA, 20 nt, Artificial Sequence
  Antisense oligo
ccauucaccgcagcaauccc

SEQ ID NO: 5148 - RNA, 20 nt, Artificial Sequence
  Antisense oligo
accauucaccgcagcaaucc

SEQ ID NO: 5149 - RNA, 20 nt, Artificial Sequence
  Antisense oligo
uaccauucaccgcagcaauc

SEQ ID NO: 5150 - RNA, 20 nt, Artificial Sequence
  Antisense oligo
auaccauucaccgcagcaau

SEQ ID NO: 5151 - RNA, 20 nt, Artificial Sequence
  Antisense oligo
aauaccauucaccgcagcaa

SEQ ID NO: 5152 - RNA, 20 nt, Artificial Sequence
  Antisense oligo
aaauaccauucaccgcagca

SEQ ID NO: 5153 - RNA, 20 nt, Artificial Sequence
  Antisense oligo
caaauaccauucaccgcagc

SEQ ID NO: 5154 - RNA, 20 nt, Artificial Sequence
  Antisense oligo
acaaauaccauucaccgcag

SEQ ID NO: 5155 - RNA, 20 nt, Artificial Sequence
  Antisense oligo
cacaaauaccauucaccgca

SEQ ID NO: 5156 - RNA, 20 nt, Artificial Sequence
  Antisense oligo
ccacaaauaccauucaccgc

SEQ ID NO: 5157 - RNA, 20 nt, Artificial Sequence
  Antisense oligo
uccacaaauaccauucaccg

SEQ ID NO: 5158 - RNA, 20 nt, Artificial Sequence
  Antisense oligo
uuccacaaauaccauucacc

SEQ ID NO: 5159 - RNA, 20 nt, Artificial Sequence
  Antisense oligo
aaucgcuugugccgaggagg

SEQ ID NO: 5160 - RNA, 20 nt, Artificial Sequence
  Antisense oligo
caacccugucucuacuaaaa

SEQ ID NO: 5161 - RNA, 20 nt, Artificial Sequence
  Antisense oligo
gcaacccugucucuacuaaa

SEQ ID NO: 5162 - RNA, 20 nt, Artificial Sequence
  Antisense oligo
ugcaacccugucucuacuaa

SEQ ID NO: 5163 - RNA, 20 nt, Artificial Sequence
  Antisense oligo
gugcaacccugucucuacua

SEQ ID NO: 5164 - RNA, 20 nt, Artificial Sequence
  Antisense oligo
ggugcaacccugucucuacu

SEQ ID NO: 5165 - RNA, 20 nt, Artificial Sequence
  Antisense oligo
ugaggucaggaguugaagaa

SEQ ID NO: 5166 - RNA, 20 nt, Artificial Sequence
  Antisense oligo
uugaggucaggaguugaaga

SEQ ID NO: 5167 - RNA, 20 nt, Artificial Sequence
  Antisense oligo
cuugaggucaggaguugaag

SEQ ID NO: 5168 - RNA, 20 nt, Artificial Sequence
  Antisense oligo
acuugaggucaggaguugaa

SEQ ID NO: 5169 - RNA, 20 nt, Artificial Sequence
  Antisense oligo
cacuugaggucaggaguuga

SEQ ID NO: 5170 - RNA, 20 nt, Artificial Sequence
  Antisense oligo
ucacuugaggucaggaguug

SEQ ID NO: 5171 - RNA, 20 nt, Artificial Sequence
  Antisense oligo
aucacuugaggucaggaguu

SEQ ID NO: 5172 - RNA, 20 nt, Artificial Sequence
  Antisense oligo
gaucacuugaggucaggagu

SEQ ID NO: 5173 - RNA, 20 nt, Artificial Sequence
  Antisense oligo
ggaucacuugaggucaggag

SEQ ID NO: 5174 - RNA, 20 nt, Artificial Sequence
  Antisense oligo
uggaucacuugaggucagga

SEQ ID NO: 5175 - RNA, 20 nt, Artificial Sequence
  Antisense oligo
guggaucacuugaggucagg

SEQ ID NO: 5176 - RNA, 20 nt, Artificial Sequence
  Antisense oligo
gguggaucacuugaggucag

SEQ ID NO: 5177 - RNA, 20 nt, Artificial Sequence
  Antisense oligo
agguggaucacuugagguca

SEQ ID NO: 5178 - RNA, 20 nt, Artificial Sequence
  Antisense oligo
cagguggaucacuugagguc

SEQ ID NO: 5179 - RNA, 20 nt, Artificial Sequence
  Antisense oligo
gcagguggaucacuugaggu

SEQ ID NO: 5180 - RNA, 20 nt, Artificial Sequence
  Antisense oligo
ggcagguggaucacuugagg

SEQ ID NO: 5181 - RNA, 20 nt, Artificial Sequence
  Antisense oligo
aggcagguggaucacuugag

SEQ ID NO: 5182 - RNA, 20 nt, Artificial Sequence
  Antisense oligo
gaggcagguggaucacuuga

SEQ ID NO: 5183 - RNA, 20 nt, Artificial Sequence
  Antisense oligo
cgaggcagguggaucacuug

SEQ ID NO: 5184 - RNA, 20 nt, Artificial Sequence
  Antisense oligo
ccgaggcagguggaucacuu

SEQ ID NO: 5185 - RNA, 20 nt, Artificial Sequence
  Antisense oligo
aacuuugggaggccgaggca

SEQ ID NO: 5186 - RNA, 20 nt, Artificial Sequence
  Antisense oligo
agaacuuugggaggccgagg

SEQ ID NO: 5187 - RNA, 20 nt, Artificial Sequence
  Antisense oligo
uagaacuuugggaggccgag

SEQ ID NO: 5188 - RNA, 20 nt, Artificial Sequence
  Antisense oligo
cuagaacuuugggaggccga

SEQ ID NO: 5189 - RNA, 20 nt, Artificial Sequence
  Antisense oligo
cgaaacuccaucucaaacaa

SEQ ID NO: 5190 - RNA, 20 nt, Artificial Sequence
  Antisense oligo
gcgaaacuccaucucaaaca

SEQ ID NO: 5191 - RNA, 20 nt, Artificial Sequence
  Antisense oligo
agcgaaacuccaucucaaac

SEQ ID NO: 5192 - RNA, 20 nt, Artificial Sequence
  Antisense oligo
aagcgaaacuccaucucaaa

SEQ ID NO: 5193 - RNA, 20 nt, Artificial Sequence
  Antisense oligo
aaagcgaaacuccaucucaa

SEQ ID NO: 5194 - RNA, 20 nt, Artificial Sequence
  Antisense oligo
uaaagcgaaacuccaucuca

SEQ ID NO: 5195 - RNA, 20 nt, Artificial Sequence
  Antisense oligo
auaaagcgaaacuccaucuc

SEQ ID NO: 5196 - RNA, 20 nt, Artificial Sequence
  Antisense oligo
gugauaaagcgaaacuccau

SEQ ID NO: 5197 - RNA, 20 nt, Artificial Sequence
  Antisense oligo
ggugauaaagcgaaacucca

SEQ ID NO: 5198 - RNA, 20 nt, Artificial Sequence
  Antisense oligo
cugagauugugccacugcaa

SEQ ID NO: 5199 - RNA, 20 nt, Artificial Sequence
  Antisense oligo
ugggaggcagagguuacagu

SEQ ID NO: 5200 - RNA, 20 nt, Artificial Sequence
  Antisense oligo
cugggaggcagagguuacag

SEQ ID NO: 5201 - RNA, 20 nt, Artificial Sequence
  Antisense oligo
ccugggaggcagagguuaca

SEQ ID NO: 5202 - RNA, 20 nt, Artificial Sequence
  Antisense oligo
uugaaccugggaggcagagg

SEQ ID NO: 5203 - RNA, 20 nt, Artificial Sequence
  Antisense oligo
cuugaaccugggaggcagag

SEQ ID NO: 5204 - RNA, 20 nt, Artificial Sequence
  Antisense oligo
acuugaaccugggaggcaga

SEQ ID NO: 5205 - RNA, 20 nt, Artificial Sequence
  Antisense oligo
cacuugaaccugggaggcag

SEQ ID NO: 5206 - RNA, 20 nt, Artificial Sequence
  Antisense oligo
ucacuugaaccugggaggca

SEQ ID NO: 5207 - RNA, 20 nt, Artificial Sequence
  Antisense oligo
aucacuugaaccugggaggc

SEQ ID NO: 5208 - RNA, 20 nt, Artificial Sequence
  Antisense oligo
aaucacuugaaccugggagg

SEQ ID NO: 5209 - RNA, 20 nt, Artificial Sequence
  Antisense oligo
caaucacuugaaccugggag

SEQ ID NO: 5210 - RNA, 20 nt, Artificial Sequence
  Antisense oligo
acaaucacuugaaccuggga

SEQ ID NO: 5211 - RNA, 20 nt, Artificial Sequence
  Antisense oligo
gacaaucacuugaaccuggg

SEQ ID NO: 5212 - RNA, 20 nt, Artificial Sequence
  Antisense oligo
ggacaaucacuugaaccugg

SEQ ID NO: 5213 - RNA, 20 nt, Artificial Sequence
  Antisense oligo
aggacaaucacuugaaccug

SEQ ID NO: 5214 - RNA, 20 nt, Artificial Sequence
  Antisense oligo
agaagacugaggcaggacaa

SEQ ID NO: 5215 - RNA, 20 nt, Artificial Sequence
  Antisense oligo
cagaagacugaggcaggaca

SEQ ID NO: 5216 - RNA, 20 nt, Artificial Sequence
  Antisense oligo
uguggucccagcuacccaga

SEQ ID NO: 5217 - RNA, 20 nt, Artificial Sequence
  Antisense oligo
aauuagccaggcaugguggg

SEQ ID NO: 5218 - RNA, 20 nt, Artificial Sequence
  Antisense oligo
aaauuagccaggcauggugg

SEQ ID NO: 5219 - RNA, 20 nt, Artificial Sequence
  Antisense oligo
aaaauuagccaggcauggug

SEQ ID NO: 5220 - RNA, 20 nt, Artificial Sequence
  Antisense oligo
augguggcucacacaugcaa

SEQ ID NO: 5221 - RNA, 20 nt, Artificial Sequence
  Antisense oligo
gggcaugguggcucacacau

SEQ ID NO: 5222 - RNA, 20 nt, Artificial Sequence
  Antisense oligo
aaggacaugaacagacacuu

SEQ ID NO: 5223 - RNA, 20 nt, Artificial Sequence
  Antisense oligo
aaaggacaugaacagacacu

SEQ ID NO: 5224 - RNA, 20 nt, Artificial Sequence
  Antisense oligo
caaaggacaugaacagacac

SEQ ID NO: 5225 - RNA, 20 nt, Artificial Sequence
  Antisense oligo
gcaaaggacaugaacagaca

SEQ ID NO: 5226 - RNA, 20 nt, Artificial Sequence
  Antisense oligo
ggcaaaggacaugaacagac

SEQ ID NO: 5227 - RNA, 20 nt, Artificial Sequence
  Antisense oligo
gggcaaaggacaugaacaga

SEQ ID NO: 5228 - RNA, 20 nt, Artificial Sequence
  Antisense oligo
ugggcaaaggacaugaacag

SEQ ID NO: 5229 - RNA, 20 nt, Artificial Sequence
  Antisense oligo
gugggcaaaggacaugaaca

SEQ ID NO: 5230 - RNA, 20 nt, Artificial Sequence
  Antisense oligo
agugggcaaaggacaugaac

SEQ ID NO: 5231 - RNA, 20 nt, Artificial Sequence
  Antisense oligo
ccacagaaugggagaaaauu

SEQ ID NO: 5232 - RNA, 20 nt, Artificial Sequence
  Antisense oligo
gcacagcaaaagaaacuauc

SEQ ID NO: 5233 - RNA, 20 nt, Artificial Sequence
  Antisense oligo
caaucuuugcccagaccuag

SEQ ID NO: 5234 - RNA, 20 nt, Artificial Sequence
  Antisense oligo
uuucuccaaucuuugcccag

SEQ ID NO: 5235 - RNA, 20 nt, Artificial Sequence
  Antisense oligo
cuuuacuuuugucgccugug

SEQ ID NO: 5236 - RNA, 20 nt, Artificial Sequence
  Antisense oligo
acuuuacuuuugucgccugu

SEQ ID NO: 5237 - RNA, 20 nt, Artificial Sequence
  Antisense oligo
cacuuuacuuuugucgccug

SEQ ID NO: 5238 - RNA, 20 nt, Artificial Sequence
  Antisense oligo
cucacuuuacuuuugucgcc

SEQ ID NO: 5239 - RNA, 20 nt, Artificial Sequence
  Antisense oligo
ucucacuuuacuuuugucgc

SEQ ID NO: 5240 - RNA, 20 nt, Artificial Sequence
  Antisense oligo
ccaacguguagaugacaaau

SEQ ID NO: 5241 - RNA, 20 nt, Artificial Sequence
  Antisense oligo
uccaacguguagaugacaaa

SEQ ID NO: 5242 - RNA, 20 nt, Artificial Sequence
  Antisense oligo
auccaacguguagaugacaa

SEQ ID NO: 5243 - RNA, 20 nt, Artificial Sequence
  Antisense oligo
cuauccaacguguagaugac

SEQ ID NO: 5244 - RNA, 20 nt, Artificial Sequence
  Antisense oligo
ccuauccaacguguagauga

SEQ ID NO: 5245 - RNA, 20 nt, Artificial Sequence
  Antisense oligo
cccuauccaacguguagaug

SEQ ID NO: 5246 - RNA, 20 nt, Artificial Sequence
  Antisense oligo
uguucacuuguuugaguucc

SEQ ID NO: 5247 - RNA, 20 nt, Artificial Sequence
  Antisense oligo
cuguucacuuguuugaguuc

SEQ ID NO: 5248 - RNA, 20 nt, Artificial Sequence
  Antisense oligo
cuacucaacucauuugucca

SEQ ID NO: 5249 - RNA, 20 nt, Artificial Sequence
  Antisense oligo
acuacucaacucauuugucc

SEQ ID NO: 5250 - RNA, 20 nt, Artificial Sequence
  Antisense oligo
gacuacucaacucauuuguc

SEQ ID NO: 5251 - RNA, 20 nt, Artificial Sequence
  Antisense oligo
gccuguugguuauuugugug

SEQ ID NO: 5252 - RNA, 20 nt, Artificial Sequence
  Antisense oligo
ggguaagaccauaucucauu

SEQ ID NO: 5253 - RNA, 20 nt, Artificial Sequence
  Antisense oligo
uggguaagaccauaucucau

SEQ ID NO: 5254 - RNA, 20 nt, Artificial Sequence
  Antisense oligo
cuuggguaagaccauaucuc

SEQ ID NO: 5255 - RNA, 20 nt, Artificial Sequence
  Antisense oligo
acuuggguaagaccauaucu

SEQ ID NO: 5256 - RNA, 20 nt, Artificial Sequence
  Antisense oligo
aacuuggguaagaccauauc

SEQ ID NO: 5257 - RNA, 20 nt, Artificial Sequence
  Antisense oligo
cuaacuuggguaagaccaua

SEQ ID NO: 5258 - RNA, 20 nt, Artificial Sequence
  Antisense oligo
ucuaacuuggguaagaccau

SEQ ID NO: 5259 - RNA, 20 nt, Artificial Sequence
  Antisense oligo
uucuaacuuggguaagacca

SEQ ID NO: 5260 - RNA, 20 nt, Artificial Sequence
  Antisense oligo
gcuauucuaacuuggguaag

SEQ ID NO: 5261 - RNA, 20 nt, Artificial Sequence
  Antisense oligo
ucacagcuauucuaacuugg

SEQ ID NO: 5262 - RNA, 20 nt, Artificial Sequence
  Antisense oligo
uucucuuucccacauccuca

SEQ ID NO: 5263 - RNA, 20 nt, Artificial Sequence
  Antisense oligo
cuuuauacuguccuccauag

SEQ ID NO: 5264 - RNA, 20 nt, Artificial Sequence
  Antisense oligo
accuuuauacuguccuccau

SEQ ID NO: 5265 - RNA, 20 nt, Artificial Sequence
  Antisense oligo
aaccuuuauacuguccucca

SEQ ID NO: 5266 - RNA, 20 nt, Artificial Sequence
  Antisense oligo
gaaccuuuauacuguccucc

SEQ ID NO: 5267 - RNA, 20 nt, Artificial Sequence
  Antisense oligo
caggaaccuuuauacugucc

SEQ ID NO: 5268 - RNA, 20 nt, Artificial Sequence
  Antisense oligo
gauaaauauaggagugcagc

SEQ ID NO: 5269 - RNA, 20 nt, Artificial Sequence
  Antisense oligo
ggcuauugaguguuacgaua

SEQ ID NO: 5270 - RNA, 20 nt, Artificial Sequence
  Antisense oligo
uggcuauugaguguuacgau

SEQ ID NO: 5271 - RNA, 20 nt, Artificial Sequence
  Antisense oligo
auggcuauugaguguuacga

SEQ ID NO: 5272 - RNA, 20 nt, Artificial Sequence
  Antisense oligo
uauggcuauugaguguuacg

SEQ ID NO: 5273 - RNA, 20 nt, Artificial Sequence
  Antisense oligo
cacucaggaugauuccauau

SEQ ID NO: 5274 - RNA, 20 nt, Artificial Sequence
  Antisense oligo
guggacacucaggaugauuc

SEQ ID NO: 5275 - RNA, 20 nt, Artificial Sequence
  Antisense oligo
gguggacacucaggaugauu

SEQ ID NO: 5276 - RNA, 20 nt, Artificial Sequence
  Antisense oligo
cggguggacacucaggauga

SEQ ID NO: 5277 - RNA, 20 nt, Artificial Sequence
  Antisense oligo
aucugcggguggacacucag

SEQ ID NO: 5278 - RNA, 20 nt, Artificial Sequence
  Antisense oligo
caucugcggguggacacuca

SEQ ID NO: 5279 - RNA, 20 nt, Artificial Sequence
  Antisense oligo
ucaucugcggguggacacuc

SEQ ID NO: 5280 - RNA, 20 nt, Artificial Sequence
  Antisense oligo
cucaucugcggguggacacu

SEQ ID NO: 5281 - RNA, 20 nt, Artificial Sequence
  Antisense oligo
acucaucugcggguggacac

SEQ ID NO: 5282 - RNA, 20 nt, Artificial Sequence
  Antisense oligo
cacucaucugcggguggaca

SEQ ID NO: 5283 - RNA, 20 nt, Artificial Sequence
  Antisense oligo
cauccacucaucugcgggug

SEQ ID NO: 5284 - RNA, 20 nt, Artificial Sequence
  Antisense oligo
ugcugcgaaagacagaauuu

SEQ ID NO: 5285 - RNA, 20 nt, Artificial Sequence
  Antisense oligo
uugcugcgaaagacagaauu

SEQ ID NO: 5286 - RNA, 20 nt, Artificial Sequence
  Antisense oligo
gcuuguccauguugcugcga

SEQ ID NO: 5287 - RNA, 20 nt, Artificial Sequence
  Antisense oligo
agcuuguccauguugcugcg

SEQ ID NO: 5288 - RNA, 20 nt, Artificial Sequence
  Antisense oligo
uucacauccacguaugagug

SEQ ID NO: 5289 - RNA, 20 nt, Artificial Sequence
  Antisense oligo
cuuuucacauccacguauga

SEQ ID NO: 5290 - RNA, 20 nt, Artificial Sequence
  Antisense oligo
ucuuuucacauccacguaug

SEQ ID NO: 5291 - RNA, 20 nt, Artificial Sequence
  Antisense oligo
cucuuuucacauccacguau

SEQ ID NO: 5292 - RNA, 20 nt, Artificial Sequence
  Antisense oligo
acucuuuucacauccacgua

SEQ ID NO: 5293 - RNA, 20 nt, Artificial Sequence
  Antisense oligo
aacucuuuucacauccacgu

SEQ ID NO: 5294 - RNA, 20 nt, Artificial Sequence
  Antisense oligo
caacucuuuucacauccacg

SEQ ID NO: 5295 - RNA, 20 nt, Artificial Sequence
  Antisense oligo
ucaacucuuuucacauccac

SEQ ID NO: 5296 - RNA, 20 nt, Artificial Sequence
  Antisense oligo
gaucaacucuuuucacaucc

SEQ ID NO: 5297 - RNA, 20 nt, Artificial Sequence
  Antisense oligo
uauccacuagccaaccuuug

SEQ ID NO: 5298 - RNA, 20 nt, Artificial Sequence
  Antisense oligo
uguauccacuagccaaccuu

SEQ ID NO: 5299 - RNA, 20 nt, Artificial Sequence
  Antisense oligo
uuuguauccacuagccaacc

SEQ ID NO: 5300 - RNA, 20 nt, Artificial Sequence
  Antisense oligo
uuuuguauccacuagccaac

SEQ ID NO: 5301 - RNA, 20 nt, Artificial Sequence
  Antisense oligo
acuuuuguauccacuagcca

SEQ ID NO: 5302 - RNA, 20 nt, Artificial Sequence
  Antisense oligo
uacuuuuguauccacuagcc

SEQ ID NO: 5303 - RNA, 20 nt, Artificial Sequence
  Antisense oligo
ucguccuaucuagccauacu

SEQ ID NO: 5304 - RNA, 20 nt, Artificial Sequence
  Antisense oligo
cucguccuaucuagccauac

SEQ ID NO: 5305 - RNA, 20 nt, Artificial Sequence
  Antisense oligo
cuuacucguccuaucuagcc

SEQ ID NO: 5306 - RNA, 20 nt, Artificial Sequence
  Antisense oligo
acuuacucguccuaucuagc

SEQ ID NO: 5307 - RNA, 20 nt, Artificial Sequence
  Antisense oligo
aacuuacucguccuaucuag

SEQ ID NO: 5308 - RNA, 20 nt, Artificial Sequence
  Antisense oligo
gaacuuacucguccuaucua

SEQ ID NO: 5309 - RNA, 20 nt, Artificial Sequence
  Antisense oligo
uagaacuuacucguccuauc

SEQ ID NO: 5310 - RNA, 20 nt, Artificial Sequence
  Antisense oligo
acccuagaacuuacucgucc

SEQ ID NO: 5311 - RNA, 20 nt, Artificial Sequence
  Antisense oligo
ggacccuagaacuuacucgu

SEQ ID NO: 5312 - RNA, 20 nt, Artificial Sequence
  Antisense oligo
aggacccuagaacuuacucg

SEQ ID NO: 5313 - RNA, 20 nt, Artificial Sequence
  Antisense oligo
cauacugcucuaggacccua

SEQ ID NO: 5314 - RNA, 20 nt, Artificial Sequence
  Antisense oligo
ccauacugcucuaggacccu

SEQ ID NO: 5315 - RNA, 20 nt, Artificial Sequence
  Antisense oligo
uccauacugcucuaggaccc

SEQ ID NO: 5316 - RNA, 20 nt, Artificial Sequence
  Antisense oligo
uuccauacugcucuaggacc

SEQ ID NO: 5317 - RNA, 20 nt, Artificial Sequence
  Antisense oligo
guuccauacugcucuaggac

SEQ ID NO: 5318 - RNA, 20 nt, Artificial Sequence
  Antisense oligo
cguuccauacugcucuagga

SEQ ID NO: 5319 - RNA, 20 nt, Artificial Sequence
  Antisense oligo
agucguuccauacugcucua

SEQ ID NO: 5320 - RNA, 20 nt, Artificial Sequence
  Antisense oligo
aacuccacucuuccagcuau

SEQ ID NO: 5321 - RNA, 20 nt, Artificial Sequence
  Antisense oligo
uucaaacuccacucuuccag

SEQ ID NO: 5322 - RNA, 20 nt, Artificial Sequence
  Antisense oligo
uaggcaugagccaccaagcc

SEQ ID NO: 5323 - RNA, 20 nt, Artificial Sequence
  Antisense oligo
auaggcaugagccaccaagc

SEQ ID NO: 5324 - RNA, 20 nt, Artificial Sequence
  Antisense oligo
uauaggcaugagccaccaag

SEQ ID NO: 5325 - RNA, 20 nt, Artificial Sequence
  Antisense oligo
uuauaggcaugagccaccaa

SEQ ID NO: 5326 - RNA, 20 nt, Artificial Sequence
  Antisense oligo
auuauaggcaugagccacca

SEQ ID NO: 5327 - RNA, 20 nt, Artificial Sequence
  Antisense oligo
gauuauaggcaugagccacc

SEQ ID NO: 5328 - RNA, 20 nt, Artificial Sequence
  Antisense oligo
ggauuauaggcaugagccac

SEQ ID NO: 5329 - RNA, 20 nt, Artificial Sequence
  Antisense oligo
gggauuauaggcaugagcca

SEQ ID NO: 5330 - RNA, 20 nt, Artificial Sequence
  Antisense oligo
ugggauuauaggcaugagcc

SEQ ID NO: 5331 - RNA, 20 nt, Artificial Sequence
  Antisense oligo
cugggauuauaggcaugagc

SEQ ID NO: 5332 - RNA, 20 nt, Artificial Sequence
  Antisense oligo
acugggauuauaggcaugag

SEQ ID NO: 5333 - RNA, 20 nt, Artificial Sequence
  Antisense oligo
uacugggauuauaggcauga

SEQ ID NO: 5334 - RNA, 20 nt, Artificial Sequence
  Antisense oligo
guacugggauuauaggcaug

SEQ ID NO: 5335 - RNA, 20 nt, Artificial Sequence
  Antisense oligo
gucuugaacuccuggccuca

SEQ ID NO: 5336 - RNA, 20 nt, Artificial Sequence
  Antisense oligo
ggucuugaacuccuggccuc

SEQ ID NO: 5337 - RNA, 20 nt, Artificial Sequence
  Antisense oligo
uggucuugaacuccuggccu

SEQ ID NO: 5338 - RNA, 20 nt, Artificial Sequence
  Antisense oligo
cuggucuugaacuccuggcc

SEQ ID NO: 5339 - RNA, 20 nt, Artificial Sequence
  Antisense oligo
acuggucuugaacuccuggc

SEQ ID NO: 5340 - RNA, 20 nt, Artificial Sequence
  Antisense oligo
gacuggucuugaacuccugg

SEQ ID NO: 5341 - RNA, 20 nt, Artificial Sequence
  Antisense oligo
agacuggucuugaacuccug

SEQ ID NO: 5342 - RNA, 20 nt, Artificial Sequence
  Antisense oligo
cagacuggucuugaacuccu

SEQ ID NO: 5343 - RNA, 20 nt, Artificial Sequence
  Antisense oligo
ccagacuggucuugaacucc

SEQ ID NO: 5344 - RNA, 20 nt, Artificial Sequence
  Antisense oligo
guuuuacuaugugcccagac

SEQ ID NO: 5345 - RNA, 20 nt, Artificial Sequence
  Antisense oligo
gguuuuacuaugugcccaga

SEQ ID NO: 5346 - RNA, 20 nt, Artificial Sequence
  Antisense oligo
uaagccucccaaguagcugg

SEQ ID NO: 5347 - RNA, 20 nt, Artificial Sequence
  Antisense oligo
guaagccucccaaguagcug

SEQ ID NO: 5348 - RNA, 20 nt, Artificial Sequence
  Antisense oligo
uguaagccucccaaguagcu

SEQ ID NO: 5349 - RNA, 20 nt, Artificial Sequence
  Antisense oligo
auguaagccucccaaguagc

SEQ ID NO: 5350 - RNA, 20 nt, Artificial Sequence
  Antisense oligo
ucauguaagccucccaagua

SEQ ID NO: 5351 - RNA, 20 nt, Artificial Sequence
  Antisense oligo
cucauguaagccucccaagu

SEQ ID NO: 5352 - RNA, 20 nt, Artificial Sequence
  Antisense oligo
ucucauguaagccucccaag

SEQ ID NO: 5353 - RNA, 20 nt, Artificial Sequence
  Antisense oligo
ucuggacuucuaccacugca

SEQ ID NO: 5354 - RNA, 20 nt, Artificial Sequence
  Antisense oligo
aucuggacuucuaccacugc

SEQ ID NO: 5355 - RNA, 20 nt, Artificial Sequence
  Antisense oligo
aaucuggacuucuaccacug

SEQ ID NO: 5356 - RNA, 20 nt, Artificial Sequence
  Antisense oligo
acuucuagggaaucuggacu

SEQ ID NO: 5357 - RNA, 20 nt, Artificial Sequence
  Antisense oligo
aacuucuagggaaucuggac

SEQ ID NO: 5358 - RNA, 20 nt, Artificial Sequence
  Antisense oligo
caacuucuagggaaucugga

SEQ ID NO: 5359 - RNA, 20 nt, Artificial Sequence
  Antisense oligo
ucaacuucuagggaaucugg

SEQ ID NO: 5360 - RNA, 20 nt, Artificial Sequence
  Antisense oligo
gguuaccugucaagaaucug

SEQ ID NO: 5361 - RNA, 20 nt, Artificial Sequence
  Antisense oligo
uugugguuaccugucaagaa

SEQ ID NO: 5362 - RNA, 20 nt, Artificial Sequence
  Antisense oligo
uuugugguuaccugucaaga

SEQ ID NO: 5363 - RNA, 20 nt, Artificial Sequence
  Antisense oligo
guuugugguuaccugucaag

SEQ ID NO: 5364 - RNA, 20 nt, Artificial Sequence
  Antisense oligo
aaaguuugugguuaccuguc

SEQ ID NO: 5365 - RNA, 20 nt, Artificial Sequence
  Antisense oligo
gagaaaguuugugguuaccu

SEQ ID NO: 5366 - RNA, 20 nt, Artificial Sequence
  Antisense oligo
agagaaaguuugugguuacc

SEQ ID NO: 5367 - RNA, 20 nt, Artificial Sequence
  Antisense oligo
aaggguuaaucuguggucau

SEQ ID NO: 5368 - RNA, 20 nt, Artificial Sequence
  Antisense oligo
gaaggguuaaucugugguca

SEQ ID NO: 5369 - RNA, 20 nt, Artificial Sequence
  Antisense oligo
agaaggguuaaucugugguc

SEQ ID NO: 5370 - RNA, 20 nt, Artificial Sequence
  Antisense oligo
uagaaggguuaaucuguggu

SEQ ID NO: 5371 - RNA, 20 nt, Artificial Sequence
  Antisense oligo
uuagaaggguuaaucugugg

SEQ ID NO: 5372 - RNA, 20 nt, Artificial Sequence
  Antisense oligo
cuuagaaggguuaaucugug

SEQ ID NO: 5373 - RNA, 20 nt, Artificial Sequence
  Antisense oligo
ugcuuagaaggguuaaucug

SEQ ID NO: 5374 - RNA, 20 nt, Artificial Sequence
  Antisense oligo
aagaccauuucaaggccaaa

SEQ ID NO: 5375 - RNA, 20 nt, Artificial Sequence
  Antisense oligo
aaagaccauuucaaggccaa

SEQ ID NO: 5376 - RNA, 20 nt, Artificial Sequence
  Antisense oligo
cuucaaguauucauccagug

SEQ ID NO: 5377 - RNA, 20 nt, Artificial Sequence
  Antisense oligo
cucuucaaguauucauccag

SEQ ID NO: 5378 - RNA, 20 nt, Artificial Sequence
  Antisense oligo
gcucuucaaguauucaucca

SEQ ID NO: 5379 - RNA, 20 nt, Artificial Sequence
  Antisense oligo
gugcucuucaaguauucauc

SEQ ID NO: 5380 - RNA, 20 nt, Artificial Sequence
  Antisense oligo
aggugcucuucaaguauuca

SEQ ID NO: 5381 - RNA, 20 nt, Artificial Sequence
  Antisense oligo
cgcugugccuugaguaguac

SEQ ID NO: 5382 - RNA, 20 nt, Artificial Sequence
  Antisense oligo
acgcugugccuugaguagua

SEQ ID NO: 5383 - RNA, 20 nt, Artificial Sequence
  Antisense oligo
uacacgcugugccuugagua

SEQ ID NO: 5384 - RNA, 20 nt, Artificial Sequence
  Antisense oligo
guacacgcugugccuugagu

SEQ ID NO: 5385 - RNA, 20 nt, Artificial Sequence
  Antisense oligo
uguuuugagcagugcuguac

SEQ ID NO: 5386 - RNA, 20 nt, Artificial Sequence
  Antisense oligo
cuguuuugagcagugcugua

SEQ ID NO: 5387 - RNA, 20 nt, Artificial Sequence
  Antisense oligo
ucuguuuugagcagugcugu

SEQ ID NO: 5388 - RNA, 20 nt, Artificial Sequence
  Antisense oligo
gccucuccagcuagaaugca

SEQ ID NO: 5389 - RNA, 20 nt, Artificial Sequence
  Antisense oligo
cugccucuccagcuagaaug

SEQ ID NO: 5390 - RNA, 20 nt, Artificial Sequence
  Antisense oligo
ccugccucuccagcuagaau

SEQ ID NO: 5391 - RNA, 20 nt, Artificial Sequence
  Antisense oligo
uuaacugccugccucuccag

SEQ ID NO: 5392 - RNA, 20 nt, Artificial Sequence
  Antisense oligo
auuaacugccugccucucca

SEQ ID NO: 5393 - RNA, 20 nt, Artificial Sequence
  Antisense oligo
uauuaacugccugccucucc

SEQ ID NO: 5394 - RNA, 20 nt, Artificial Sequence
  Antisense oligo
guauuaacugccugccucuc

SEQ ID NO: 5395 - RNA, 20 nt, Artificial Sequence
  Antisense oligo
uguauuaacugccugccucu

SEQ ID NO: 5396 - RNA, 20 nt, Artificial Sequence
  Antisense oligo
auguauuaacugccugccuc

SEQ ID NO: 5397 - RNA, 20 nt, Artificial Sequence
  Antisense oligo
gauguauuaacugccugccu

SEQ ID NO: 5398 - RNA, 20 nt, Artificial Sequence
  Antisense oligo
ugauguauuaacugccugcc

SEQ ID NO: 5399 - RNA, 20 nt, Artificial Sequence
  Antisense oligo
cugauguauuaacugccugc

SEQ ID NO: 5400 - RNA, 20 nt, Artificial Sequence
  Antisense oligo
cucaucaauaggacuuacug

SEQ ID NO: 5401 - RNA, 20 nt, Artificial Sequence
  Antisense oligo
cucucaucaauaggacuuac

SEQ ID NO: 5402 - RNA, 20 nt, Artificial Sequence
  Antisense oligo
agcucucucaucaauaggac

SEQ ID NO: 5403 - RNA, 20 nt, Artificial Sequence
  Antisense oligo
gauucuguggccugagccuc

SEQ ID NO: 5404 - RNA, 20 nt, Artificial Sequence
  Antisense oligo
agauucuguggccugagccu

SEQ ID NO: 5405 - RNA, 20 nt, Artificial Sequence
  Antisense oligo
cagauucuguggccugagcc

SEQ ID NO: 5406 - RNA, 20 nt, Artificial Sequence
  Antisense oligo
agcagauucuguggccugag

SEQ ID NO: 5407 - RNA, 20 nt, Artificial Sequence
  Antisense oligo
cuuagcagauucuguggccu

SEQ ID NO: 5408 - RNA, 20 nt, Artificial Sequence
  Antisense oligo
accuuagcagauucuguggc

SEQ ID NO: 5409 - RNA, 20 nt, Artificial Sequence
  Antisense oligo
cuaccuucagaccuuagcag

SEQ ID NO: 5410 - RNA, 20 nt, Artificial Sequence
  Antisense oligo
ccuaccuucagaccuuagca

SEQ ID NO: 5411 - RNA, 20 nt, Artificial Sequence
  Antisense oligo
cccuaccuucagaccuuagc

SEQ ID NO: 5412 - RNA, 20 nt, Artificial Sequence
  Antisense oligo
acccuaccuucagaccuuag

SEQ ID NO: 5413 - RNA, 20 nt, Artificial Sequence
  Antisense oligo
uacccuaccuucagaccuua

SEQ ID NO: 5414 - RNA, 20 nt, Artificial Sequence
  Antisense oligo
cuacccuaccuucagaccuu

SEQ ID NO: 5415 - RNA, 20 nt, Artificial Sequence
  Antisense oligo
ccuacccuaccuucagaccu

SEQ ID NO: 5416 - RNA, 20 nt, Artificial Sequence
  Antisense oligo
cuccuacccuaccuucagac

SEQ ID NO: 5417 - RNA, 20 nt, Artificial Sequence
  Antisense oligo
uguucuccuacccuaccuuc

SEQ ID NO: 5418 - RNA, 20 nt, Artificial Sequence
  Antisense oligo
uaccucuguucuccuacccu

SEQ ID NO: 5419 - RNA, 20 nt, Artificial Sequence
  Antisense oligo
auuaccucuguucuccuacc

SEQ ID NO: 5420 - RNA, 20 nt, Artificial Sequence
  Antisense oligo
cauuaccucuguucuccuac

SEQ ID NO: 5421 - RNA, 20 nt, Artificial Sequence
  Antisense oligo
ucauuaccucuguucuccua

SEQ ID NO: 5422 - RNA, 20 nt, Artificial Sequence
  Antisense oligo
gucauuaccucuguucuccu

SEQ ID NO: 5423 - RNA, 20 nt, Artificial Sequence
  Antisense oligo
agucauuaccucuguucucc

SEQ ID NO: 5424 - RNA, 20 nt, Artificial Sequence
  Antisense oligo
cucacugcaaggcccagagu

SEQ ID NO: 5425 - RNA, 20 nt, Artificial Sequence
  Antisense oligo
uguucucacugcaaggccca

SEQ ID NO: 5426 - RNA, 20 nt, Artificial Sequence
  Antisense oligo
uuguucucacugcaaggccc

SEQ ID NO: 5427 - RNA, 20 nt, Artificial Sequence
  Antisense oligo
ggucacugucuuguucucac

SEQ ID NO: 5428 - RNA, 20 nt, Artificial Sequence
  Antisense oligo
auggucacugucuuguucuc

SEQ ID NO: 5429 - RNA, 20 nt, Artificial Sequence
  Antisense oligo
gauggucacugucuuguucu

SEQ ID NO: 5430 - RNA, 20 nt, Artificial Sequence
  Antisense oligo
uuggauggucacugucuugu

SEQ ID NO: 5431 - RNA, 20 nt, Artificial Sequence
  Antisense oligo
auuggauggucacugucuug

SEQ ID NO: 5432 - RNA, 20 nt, Artificial Sequence
  Antisense oligo
aauuggauggucacugucuu

SEQ ID NO: 5433 - RNA, 20 nt, Artificial Sequence
  Antisense oligo
gcaggcucugagcaucaugc

SEQ ID NO: 5434 - RNA, 20 nt, Artificial Sequence
  Antisense oligo
uuggcaggcucugagcauca

SEQ ID NO: 5435 - RNA, 20 nt, Artificial Sequence
  Antisense oligo
uuuggcaggcucugagcauc

SEQ ID NO: 5436 - RNA, 20 nt, Artificial Sequence
  Antisense oligo
ggcauuuggcaggcucugag

SEQ ID NO: 5437 - RNA, 20 nt, Artificial Sequence
  Antisense oligo
uggcauuuggcaggcucuga

SEQ ID NO: 5438 - RNA, 20 nt, Artificial Sequence
  Antisense oligo
uuggcauuuggcaggcucug

SEQ ID NO: 5439 - RNA, 20 nt, Artificial Sequence
  Antisense oligo
cuuuggcauuuggcaggcuc

SEQ ID NO: 5440 - RNA, 20 nt, Artificial Sequence
  Antisense oligo
gucuuuggcauuuggcaggc

SEQ ID NO: 5441 - RNA, 20 nt, Artificial Sequence
  Antisense oligo
cacagagcaacugccucauu

SEQ ID NO: 5442 - RNA, 20 nt, Artificial Sequence
  Antisense oligo
ccuuuagcagaaguugggau

SEQ ID NO: 5443 - RNA, 20 nt, Artificial Sequence
  Antisense oligo
uaaaggcaagaccguaacac

SEQ ID NO: 5444 - RNA, 20 nt, Artificial Sequence
  Antisense oligo
cuaaaggcaagaccguaaca

SEQ ID NO: 5445 - RNA, 20 nt, Artificial Sequence
  Antisense oligo
ucuaaaggcaagaccguaac

SEQ ID NO: 5446 - RNA, 20 nt, Artificial Sequence
  Antisense oligo
uucuaaaggcaagaccguaa

SEQ ID NO: 5447 - RNA, 20 nt, Artificial Sequence
  Antisense oligo
cuucuaaaggcaagaccgua

SEQ ID NO: 5448 - RNA, 20 nt, Artificial Sequence
  Antisense oligo
gguuuccaaaggcuuuuacg

SEQ ID NO: 5449 - RNA, 20 nt, Artificial Sequence
  Antisense oligo
ugguuuccaaaggcuuuuac

SEQ ID NO: 5450 - RNA, 20 nt, Artificial Sequence
  Antisense oligo
uugaaccugggaggcgaagg

SEQ ID NO: 5451 - RNA, 20 nt, Artificial Sequence
  Antisense oligo
cuugaaccugggaggcgaag

SEQ ID NO: 5452 - RNA, 20 nt, Artificial Sequence
  Antisense oligo
acuugaaccugggaggcgaa

SEQ ID NO: 5453 - RNA, 20 nt, Artificial Sequence
  Antisense oligo
cacuugaaccugggaggcga

SEQ ID NO: 5454 - RNA, 20 nt, Artificial Sequence
  Antisense oligo
ucacuugaaccugggaggcg

SEQ ID NO: 5455 - RNA, 20 nt, Artificial Sequence
  Antisense oligo
aucacuugaaccugggaggc

SEQ ID NO: 5456 - RNA, 20 nt, Artificial Sequence
  Antisense oligo
aaucacuugaaccugggagg

SEQ ID NO: 5457 - RNA, 20 nt, Artificial Sequence
  Antisense oligo
gaaucacuugaaccugggag

SEQ ID NO: 5458 - RNA, 20 nt, Artificial Sequence
  Antisense oligo
agaaucacuugaaccuggga

SEQ ID NO: 5459 - RNA, 20 nt, Artificial Sequence
  Antisense oligo
aagaaucacuugaaccuggg

SEQ ID NO: 5460 - RNA, 20 nt, Artificial Sequence
  Antisense oligo
gggaggcugaggcacaagaa

SEQ ID NO: 5461 - RNA, 20 nt, Artificial Sequence
  Antisense oligo
ugggaggcugaggcacaaga

SEQ ID NO: 5462 - RNA, 20 nt, Artificial Sequence
  Antisense oligo
uugggaggcugaggcacaag

SEQ ID NO: 5463 - RNA, 20 nt, Artificial Sequence
  Antisense oligo
cuugggaggcugaggcacaa

SEQ ID NO: 5464 - RNA, 20 nt, Artificial Sequence
  Antisense oligo
acuugggaggcugaggcaca

SEQ ID NO: 5465 - RNA, 20 nt, Artificial Sequence
  Antisense oligo
uacuugggaggcugaggcac

SEQ ID NO: 5466 - RNA, 20 nt, Artificial Sequence
  Antisense oligo
cuacuugggaggcugaggca

SEQ ID NO: 5467 - RNA, 20 nt, Artificial Sequence
  Antisense oligo
agcuacuugggaggcugagg

SEQ ID NO: 5468 - RNA, 20 nt, Artificial Sequence
  Antisense oligo
ugcaccuguagucccagcua

SEQ ID NO: 5469 - RNA, 20 nt, Artificial Sequence
  Antisense oligo
augcaccuguagucccagcu

SEQ ID NO: 5470 - RNA, 20 nt, Artificial Sequence
  Antisense oligo
caugcaccuguagucccagc

SEQ ID NO: 5471 - RNA, 20 nt, Artificial Sequence
  Antisense oligo
acaugcaccuguagucccag

SEQ ID NO: 5472 - RNA, 20 nt, Artificial Sequence
  Antisense oligo
gacaugcaccuguaguccca

SEQ ID NO: 5473 - RNA, 20 nt, Artificial Sequence
  Antisense oligo
ugacaugcaccuguaguccc

SEQ ID NO: 5474 - RNA, 20 nt, Artificial Sequence
  Antisense oligo
aguucaagaccagccuggcc

SEQ ID NO: 5475 - RNA, 20 nt, Artificial Sequence
  Antisense oligo
gaguucaagaccagccuggc

SEQ ID NO: 5476 - RNA, 20 nt, Artificial Sequence
  Antisense oligo
ggaguucaagaccagccugg

SEQ ID NO: 5477 - RNA, 20 nt, Artificial Sequence
  Antisense oligo
aggaguucaagaccagccug

SEQ ID NO: 5478 - RNA, 20 nt, Artificial Sequence
  Antisense oligo
caggaguucaagaccagccu

SEQ ID NO: 5479 - RNA, 20 nt, Artificial Sequence
  Antisense oligo
ccaggaguucaagaccagcc

SEQ ID NO: 5480 - RNA, 20 nt, Artificial Sequence
  Antisense oligo
gccaggaguucaagaccagc

SEQ ID NO: 5481 - RNA, 20 nt, Artificial Sequence
  Antisense oligo
ggccaggaguucaagaccag

SEQ ID NO: 5482 - RNA, 20 nt, Artificial Sequence
  Antisense oligo
aggccaggaguucaagacca

SEQ ID NO: 5483 - RNA, 20 nt, Artificial Sequence
  Antisense oligo
gaggccaggaguucaagacc

SEQ ID NO: 5484 - RNA, 20 nt, Artificial Sequence
  Antisense oligo
ugaggccaggaguucaagac

SEQ ID NO: 5485 - RNA, 20 nt, Artificial Sequence
  Antisense oligo
cacuugaggccaggaguuca

SEQ ID NO: 5486 - RNA, 20 nt, Artificial Sequence
  Antisense oligo
ucacuugaggccaggaguuc

SEQ ID NO: 5487 - RNA, 20 nt, Artificial Sequence
  Antisense oligo
aucacuugaggccaggaguu

SEQ ID NO: 5488 - RNA, 20 nt, Artificial Sequence
  Antisense oligo
gaucacuugaggccaggagu

SEQ ID NO: 5489 - RNA, 20 nt, Artificial Sequence
  Antisense oligo
agaucacuugaggccaggag

SEQ ID NO: 5490 - RNA, 20 nt, Artificial Sequence
  Antisense oligo
cagaucacuugaggccagga

SEQ ID NO: 5491 - RNA, 20 nt, Artificial Sequence
  Antisense oligo
gcagaucacuugaggccagg

SEQ ID NO: 5492 - RNA, 20 nt, Artificial Sequence
  Antisense oligo
ggcagaucacuugaggccag

SEQ ID NO: 5493 - RNA, 20 nt, Artificial Sequence
  Antisense oligo
gggcagaucacuugaggcca

SEQ ID NO: 5494 - RNA, 20 nt, Artificial Sequence
  Antisense oligo
acuuuggaaggcugaggcgg

SEQ ID NO: 5495 - RNA, 20 nt, Artificial Sequence
  Antisense oligo
cacuuuggaaggcugaggcg

SEQ ID NO: 5496 - RNA, 20 nt, Artificial Sequence
  Antisense oligo
gcacuuuggaaggcugaggc

SEQ ID NO: 5497 - RNA, 20 nt, Artificial Sequence
  Antisense oligo
agcacuuuggaaggcugagg

SEQ ID NO: 5498 - RNA, 20 nt, Artificial Sequence
  Antisense oligo
ucccagcacuuuggaaggcu

SEQ ID NO: 5499 - RNA, 20 nt, Artificial Sequence
  Antisense oligo
aucccagcacuuuggaaggc

SEQ ID NO: 5500 - RNA, 20 nt, Artificial Sequence
  Antisense oligo
aaucccagcacuuuggaagg

SEQ ID NO: 5501 - RNA, 20 nt, Artificial Sequence
  Antisense oligo
uaaucccagcacuuuggaag

SEQ ID NO: 5502 - RNA, 20 nt, Artificial Sequence
  Antisense oligo
guaaucccagcacuuuggaa

SEQ ID NO: 5503 - RNA, 20 nt, Artificial Sequence
  Antisense oligo
uguaaucccagcacuuugga

SEQ ID NO: 5504 - RNA, 20 nt, Artificial Sequence
  Antisense oligo
cuguaaucccagcacuuugg

SEQ ID NO: 5505 - RNA, 20 nt, Artificial Sequence
  Antisense oligo
ccuguaaucccagcacuuug

SEQ ID NO: 5506 - RNA, 20 nt, Artificial Sequence
  Antisense oligo
gaugaacuacagcuuuguug

SEQ ID NO: 5507 - RNA, 20 nt, Artificial Sequence
  Antisense oligo
ggccucuucuguuaucaggg

SEQ ID NO: 5508 - RNA, 20 nt, Artificial Sequence
  Antisense oligo
aguggccucuucuguuauca

SEQ ID NO: 5509 - RNA, 20 nt, Artificial Sequence
  Antisense oligo
uaguggccucuucuguuauc

SEQ ID NO: 5510 - RNA, 20 nt, Artificial Sequence
  Antisense oligo
cuaguggccucuucuguuau

SEQ ID NO: 5511 - RNA, 20 nt, Artificial Sequence
  Antisense oligo
caucuaguggccucuucugu

SEQ ID NO: 5512 - RNA, 20 nt, Artificial Sequence
  Antisense oligo
aucaucuaguggccucuucu

SEQ ID NO: 5513 - RNA, 20 nt, Artificial Sequence
  Antisense oligo
gaucaucuaguggccucuuc

SEQ ID NO: 5514 - RNA, 20 nt, Artificial Sequence
  Antisense oligo
ggucugacuauauugacugu

SEQ ID NO: 5515 - RNA, 20 nt, Artificial Sequence
  Antisense oligo
ugggucugacuauauugacu

SEQ ID NO: 5516 - RNA, 20 nt, Artificial Sequence
  Antisense oligo
augggucugacuauauugac

SEQ ID NO: 5517 - RNA, 20 nt, Artificial Sequence
  Antisense oligo
caugggucugacuauauuga

SEQ ID NO: 5518 - RNA, 20 nt, Artificial Sequence
  Antisense oligo
uagguaaauauggaccaucc

SEQ ID NO: 5519 - RNA, 20 nt, Artificial Sequence
  Antisense oligo
cccuagaaguaacagaaguu

SEQ ID NO: 5520 - RNA, 20 nt, Artificial Sequence
  Antisense oligo
ucccuagaaguaacagaagu

SEQ ID NO: 5521 - RNA, 20 nt, Artificial Sequence
  Antisense oligo
aggcucccuagaaguaacag

SEQ ID NO: 5522 - RNA, 20 nt, Artificial Sequence
  Antisense oligo
aaggcucccuagaaguaaca

SEQ ID NO: 5523 - RNA, 20 nt, Artificial Sequence
  Antisense oligo
caaggcucccuagaaguaac

SEQ ID NO: 5524 - RNA, 20 nt, Artificial Sequence
  Antisense oligo
gcaaggcucccuagaaguaa

SEQ ID NO: 5525 - RNA, 20 nt, Artificial Sequence
  Antisense oligo
uaaagcaaggcucccuagaa

SEQ ID NO: 5526 - RNA, 20 nt, Artificial Sequence
  Antisense oligo
auaaagcaaggcucccuaga

SEQ ID NO: 5527 - RNA, 20 nt, Artificial Sequence
  Antisense oligo
aaauaaagcaaggcucccua

SEQ ID NO: 5528 - RNA, 20 nt, Artificial Sequence
  Antisense oligo
gaaauaaagcaaggcucccu

SEQ ID NO: 5529 - RNA, 20 nt, Artificial Sequence
  Antisense oligo
uggagacccaaaauguugac

SEQ ID NO: 5530 - RNA, 20 nt, Artificial Sequence
  Antisense oligo
uacuggagacccaaaauguu

SEQ ID NO: 5531 - RNA, 20 nt, Artificial Sequence
  Antisense oligo
cugauucuggaacacaguac

SEQ ID NO: 5532 - RNA, 20 nt, Artificial Sequence
  Antisense oligo
augcugauucuggaacacag

SEQ ID NO: 5533 - RNA, 20 nt, Artificial Sequence
  Antisense oligo
aaugcugauucuggaacaca

SEQ ID NO: 5534 - RNA, 20 nt, Artificial Sequence
  Antisense oligo
uaaugcugauucuggaacac

SEQ ID NO: 5535 - RNA, 20 nt, Artificial Sequence
  Antisense oligo
ggcccuuaaauaaugcugau

SEQ ID NO: 5536 - RNA, 20 nt, Artificial Sequence
  Antisense oligo
aaggcccuuaaauaaugcug

SEQ ID NO: 5537 - RNA, 20 nt, Artificial Sequence
  Antisense oligo
gaaggcccuuaaauaaugcu

SEQ ID NO: 5538 - RNA, 20 nt, Artificial Sequence
  Antisense oligo
aggaucaaacagcccaagug

SEQ ID NO: 5539 - RNA, 20 nt, Artificial Sequence
  Antisense oligo
uccaggaucaaacagcccaa

SEQ ID NO: 5540 - RNA, 20 nt, Artificial Sequence
  Antisense oligo
guccaggaucaaacagccca

SEQ ID NO: 5541 - RNA, 20 nt, Artificial Sequence
  Antisense oligo
acgaguguccaggaucaaac

SEQ ID NO: 5542 - RNA, 20 nt, Artificial Sequence
  Antisense oligo
aacgaguguccaggaucaaa

SEQ ID NO: 5543 - RNA, 20 nt, Artificial Sequence
  Antisense oligo
uaacgaguguccaggaucaa

SEQ ID NO: 5544 - RNA, 20 nt, Artificial Sequence
  Antisense oligo
uuaacgaguguccaggauca

SEQ ID NO: 5545 - RNA, 20 nt, Artificial Sequence
  Antisense oligo
auuaacgaguguccaggauc

SEQ ID NO: 5546 - RNA, 20 nt, Artificial Sequence
  Antisense oligo
uauuaacgaguguccaggau

SEQ ID NO: 5547 - RNA, 20 nt, Artificial Sequence
  Antisense oligo
auuauuaacgaguguccagg

SEQ ID NO: 5548 - RNA, 20 nt, Artificial Sequence
  Antisense oligo
cccagccaagccucuuaauu

SEQ ID NO: 5549 - RNA, 20 nt, Artificial Sequence
  Antisense oligo
acaggugugagccacugcac

SEQ ID NO: 5550 - RNA, 20 nt, Artificial Sequence
  Antisense oligo
uacaggugugagccacugca

SEQ ID NO: 5551 - RNA, 20 nt, Artificial Sequence
  Antisense oligo
uuacaggugugagccacugc

SEQ ID NO: 5552 - RNA, 20 nt, Artificial Sequence
  Antisense oligo
auuacaggugugagccacug

SEQ ID NO: 5553 - RNA, 20 nt, Artificial Sequence
  Antisense oligo
gauuacaggugugagccacu

SEQ ID NO: 5554 - RNA, 20 nt, Artificial Sequence
  Antisense oligo
ggauuacaggugugagccac

SEQ ID NO: 5555 - RNA, 20 nt, Artificial Sequence
  Antisense oligo
gggauuacaggugugagcca

SEQ ID NO: 5556 - RNA, 20 nt, Artificial Sequence
  Antisense oligo
ugggauuacaggugugagcc

SEQ ID NO: 5557 - RNA, 20 nt, Artificial Sequence
  Antisense oligo
cugggauuacaggugugagc

SEQ ID NO: 5558 - RNA, 20 nt, Artificial Sequence
  Antisense oligo
gcugggauuacaggugugag

SEQ ID NO: 5559 - RNA, 20 nt, Artificial Sequence
  Antisense oligo
ugcugggauuacagguguga

SEQ ID NO: 5560 - RNA, 20 nt, Artificial Sequence
  Antisense oligo
gugcugggauuacaggugug

SEQ ID NO: 5561 - RNA, 20 nt, Artificial Sequence
  Antisense oligo
agugcugggauuacaggugu

SEQ ID NO: 5562 - RNA, 20 nt, Artificial Sequence
  Antisense oligo
aagugcugggauuacaggug

SEQ ID NO: 5563 - RNA, 20 nt, Artificial Sequence
  Antisense oligo
aaagugcugggauuacaggu

SEQ ID NO: 5564 - RNA, 20 nt, Artificial Sequence
  Antisense oligo
caaagugcugggauuacagg

SEQ ID NO: 5565 - RNA, 20 nt, Artificial Sequence
  Antisense oligo
ccaaagugcugggauuacag

SEQ ID NO: 5566 - RNA, 20 nt, Artificial Sequence
  Antisense oligo
accuugugauccaccugccu

SEQ ID NO: 5567 - RNA, 20 nt, Artificial Sequence
  Antisense oligo
gaccuugugauccaccugcc

SEQ ID NO: 5568 - RNA, 20 nt, Artificial Sequence
  Antisense oligo
ugaccuugugauccaccugc

SEQ ID NO: 5569 - RNA, 20 nt, Artificial Sequence
  Antisense oligo
cugaccuugugauccaccug

SEQ ID NO: 5570 - RNA, 20 nt, Artificial Sequence
  Antisense oligo
ccugaccuugugauccaccu

SEQ ID NO: 5571 - RNA, 20 nt, Artificial Sequence
  Antisense oligo
uccugaccuugugauccacc

SEQ ID NO: 5572 - RNA, 20 nt, Artificial Sequence
  Antisense oligo
cuccugaccuugugauccac

SEQ ID NO: 5573 - RNA, 20 nt, Artificial Sequence
  Antisense oligo
ucuccugaccuugugaucca

SEQ ID NO: 5574 - RNA, 20 nt, Artificial Sequence
  Antisense oligo
aucuccugaccuugugaucc

SEQ ID NO: 5575 - RNA, 20 nt, Artificial Sequence
  Antisense oligo
guuucacuguguuagccagg

SEQ ID NO: 5576 - RNA, 20 nt, Artificial Sequence
  Antisense oligo
gguuucacuguguuagccag

SEQ ID NO: 5577 - RNA, 20 nt, Artificial Sequence
  Antisense oligo
ggguuucacuguguuagcca

SEQ ID NO: 5578 - RNA, 20 nt, Artificial Sequence
  Antisense oligo
cugcaagcucugccuaccag

SEQ ID NO: 5579 - RNA, 20 nt, Artificial Sequence
  Antisense oligo
acugcaagcucugccuacca

SEQ ID NO: 5580 - RNA, 20 nt, Artificial Sequence
  Antisense oligo
cacugcaagcucugccuacc

SEQ ID NO: 5581 - RNA, 20 nt, Artificial Sequence
  Antisense oligo
ucacugcaagcucugccuac

SEQ ID NO: 5582 - RNA, 20 nt, Artificial Sequence
  Antisense oligo
cucacugcaagcucugccua

SEQ ID NO: 5583 - RNA, 20 nt, Artificial Sequence
  Antisense oligo
gcucacugcaagcucugccu

SEQ ID NO: 5584 - RNA, 20 nt, Artificial Sequence
  Antisense oligo
auuuguguuggagucucacu

SEQ ID NO: 5585 - RNA, 20 nt, Artificial Sequence
  Antisense oligo
uauuuguguuggagucucac

SEQ ID NO: 5586 - RNA, 20 nt, Artificial Sequence
  Antisense oligo
agggaacugugccuugaaaa

SEQ ID NO: 5587 - RNA, 20 nt, Artificial Sequence
  Antisense oligo
cagggaacugugccuugaaa

SEQ ID NO: 5588 - RNA, 20 nt, Artificial Sequence
  Antisense oligo
ccagggaacugugccuugaa

SEQ ID NO: 5589 - RNA, 20 nt, Artificial Sequence
  Antisense oligo
gugccagggaacugugccuu

SEQ ID NO: 5590 - RNA, 20 nt, Artificial Sequence
  Antisense oligo
augugcuuggugccagggaa

SEQ ID NO: 5591 - RNA, 20 nt, Artificial Sequence
  Antisense oligo
ugugaaugugcuuggugcca

SEQ ID NO: 5592 - RNA, 20 nt, Artificial Sequence
  Antisense oligo
gugugaaugugcuuggugcc

SEQ ID NO: 5593 - RNA, 20 nt, Artificial Sequence
  Antisense oligo
gcagugugaaugugcuuggu

SEQ ID NO: 5594 - RNA, 20 nt, Artificial Sequence
  Antisense oligo
uggugcugacggcuacacag

SEQ ID NO: 5595 - RNA, 20 nt, Artificial Sequence
  Antisense oligo
auggugcugacggcuacaca

SEQ ID NO: 5596 - RNA, 20 nt, Artificial Sequence
  Antisense oligo
gauggugcugacggcuacac

SEQ ID NO: 5597 - RNA, 20 nt, Artificial Sequence
  Antisense oligo
ggauggugcugacggcuaca

SEQ ID NO: 5598 - RNA, 20 nt, Artificial Sequence
  Antisense oligo
uggauggugcugacggcuac

SEQ ID NO: 5599 - RNA, 20 nt, Artificial Sequence
  Antisense oligo
guggauggugcugacggcua

SEQ ID NO: 5600 - RNA, 20 nt, Artificial Sequence
  Antisense oligo
aguucgggagguggauggug

SEQ ID NO: 5601 - RNA, 20 nt, Artificial Sequence
  Antisense oligo
gaguucgggagguggauggu

SEQ ID NO: 5602 - RNA, 20 nt, Artificial Sequence
  Antisense oligo
cugaguucgggagguggaug

SEQ ID NO: 5603 - RNA, 20 nt, Artificial Sequence
  Antisense oligo
gcugaguucgggagguggau

SEQ ID NO: 5604 - RNA, 20 nt, Artificial Sequence
  Antisense oligo
agcugaguucgggaggugga

SEQ ID NO: 5605 - RNA, 20 nt, Artificial Sequence
  Antisense oligo
aagcugaguucgggaggugg

SEQ ID NO: 5606 - RNA, 20 nt, Artificial Sequence
  Antisense oligo
gaagcugaguucgggaggug

SEQ ID NO: 5607 - RNA, 20 nt, Artificial Sequence
  Antisense oligo
ggaagcugaguucgggaggu

SEQ ID NO: 5608 - RNA, 20 nt, Artificial Sequence
  Antisense oligo
cagagaagucaaaauccuag

SEQ ID NO: 5609 - RNA, 20 nt, Artificial Sequence
  Antisense oligo
ccugggcaacauagcaagau

SEQ ID NO: 5610 - RNA, 20 nt, Artificial Sequence
  Antisense oligo
accugggcaacauagcaaga

SEQ ID NO: 5611 - RNA, 20 nt, Artificial Sequence
  Antisense oligo
aaccugggcaacauagcaag

SEQ ID NO: 5612 - RNA, 20 nt, Artificial Sequence
  Antisense oligo
caaccugggcaacauagcaa

SEQ ID NO: 5613 - RNA, 20 nt, Artificial Sequence
  Antisense oligo
ccaaccugggcaacauagca

SEQ ID NO: 5614 - RNA, 20 nt, Artificial Sequence
  Antisense oligo
accaaccugggcaacauagc

SEQ ID NO: 5615 - RNA, 20 nt, Artificial Sequence
  Antisense oligo
gcaggaggauggauagcuug

SEQ ID NO: 5616 - RNA, 20 nt, Artificial Sequence
  Antisense oligo
aagcaggaggauggauagcu

SEQ ID NO: 5617 - RNA, 20 nt, Artificial Sequence
  Antisense oligo
gugcaguggcucaugucugu

SEQ ID NO: 5618 - RNA, 20 nt, Artificial Sequence
  Antisense oligo
ggugcaguggcucaugucug

SEQ ID NO: 5619 - RNA, 20 nt, Artificial Sequence
  Antisense oligo
gggugcaguggcucaugucu

SEQ ID NO: 5620 - RNA, 20 nt, Artificial Sequence
  Antisense oligo
ugggugcaguggcucauguc

SEQ ID NO: 5621 - RNA, 20 nt, Artificial Sequence
  Antisense oligo
cugggugcaguggcucaugu

SEQ ID NO: 5622 - RNA, 20 nt, Artificial Sequence
  Antisense oligo
ugcugggugcaguggcucau

SEQ ID NO: 5623 - RNA, 20 nt, Artificial Sequence
  Antisense oligo
aggcaaugagaccaaaacug

SEQ ID NO: 5624 - RNA, 20 nt, Artificial Sequence
  Antisense oligo
gcauaggcaaugagaccaaa

SEQ ID NO: 5625 - RNA, 20 nt, Artificial Sequence
  Antisense oligo
agcauaggcaaugagaccaa

SEQ ID NO: 5626 - RNA, 20 nt, Artificial Sequence
  Antisense oligo
cagcauaggcaaugagacca

SEQ ID NO: 5627 - RNA, 20 nt, Artificial Sequence
  Antisense oligo
ccagcauaggcaaugagacc

SEQ ID NO: 5628 - RNA, 20 nt, Artificial Sequence
  Antisense oligo
ugaacccaggaggcagaggu

SEQ ID NO: 5629 - RNA, 20 nt, Artificial Sequence
  Antisense oligo
uugaacccaggaggcagagg

SEQ ID NO: 5630 - RNA, 20 nt, Artificial Sequence
  Antisense oligo
cuugaacccaggaggcagag

SEQ ID NO: 5631 - RNA, 20 nt, Artificial Sequence
  Antisense oligo
acuugaacccaggaggcaga

SEQ ID NO: 5632 - RNA, 20 nt, Artificial Sequence
  Antisense oligo
cacuugaacccaggaggcag

SEQ ID NO: 5633 - RNA, 20 nt, Artificial Sequence
  Antisense oligo
ucacuugaacccaggaggca

SEQ ID NO: 5634 - RNA, 20 nt, Artificial Sequence
  Antisense oligo
aucacuugaacccaggaggc

SEQ ID NO: 5635 - RNA, 20 nt, Artificial Sequence
  Antisense oligo
aaucacuugaacccaggagg

SEQ ID NO: 5636 - RNA, 20 nt, Artificial Sequence
  Antisense oligo
gaaucacuugaacccaggag

SEQ ID NO: 5637 - RNA, 20 nt, Artificial Sequence
  Antisense oligo
agaaucacuugaacccagga

SEQ ID NO: 5638 - RNA, 20 nt, Artificial Sequence
  Antisense oligo
uacuugggaggcugaggcag

SEQ ID NO: 5639 - RNA, 20 nt, Artificial Sequence
  Antisense oligo
cuacuugggaggcugaggca

SEQ ID NO: 5640 - RNA, 20 nt, Artificial Sequence
  Antisense oligo
agcuacuugggaggcugagg

SEQ ID NO: 5641 - RNA, 20 nt, Artificial Sequence
  Antisense oligo
cuguaaucccagcuacuugg

SEQ ID NO: 5642 - RNA, 20 nt, Artificial Sequence
  Antisense oligo
ccuguaaucccagcuacuug

SEQ ID NO: 5643 - RNA, 20 nt, Artificial Sequence
  Antisense oligo
accuguaaucccagcuacuu

SEQ ID NO: 5644 - RNA, 20 nt, Artificial Sequence
  Antisense oligo
caccuguaaucccagcuacu

SEQ ID NO: 5645 - RNA, 20 nt, Artificial Sequence
  Antisense oligo
acaccuguaaucccagcuac

SEQ ID NO: 5646 - RNA, 20 nt, Artificial Sequence
  Antisense oligo
cacaccuguaaucccagcua

SEQ ID NO: 5647 - RNA, 20 nt, Artificial Sequence
  Antisense oligo
gcacaccuguaaucccagcu

SEQ ID NO: 5648 - RNA, 20 nt, Artificial Sequence
  Antisense oligo
cgcacaccuguaaucccagc

SEQ ID NO: 5649 - RNA, 20 nt, Artificial Sequence
  Antisense oligo
gcgcacaccuguaaucccag

SEQ ID NO: 5650 - RNA, 20 nt, Artificial Sequence
  Antisense oligo
ggcgcacaccuguaauccca

SEQ ID NO: 5651 - RNA, 20 nt, Artificial Sequence
  Antisense oligo
uggcgcacaccuguaauccc

SEQ ID NO: 5652 - RNA, 20 nt, Artificial Sequence
  Antisense oligo
guggcgcacaccuguaaucc

SEQ ID NO: 5653 - RNA, 20 nt, Artificial Sequence
  Antisense oligo
aaauuagccaggcguggugg

SEQ ID NO: 5654 - RNA, 20 nt, Artificial Sequence
  Antisense oligo
uaaauuagccaggcguggug

SEQ ID NO: 5655 - RNA, 20 nt, Artificial Sequence
  Antisense oligo
cuaaauuagccaggcguggu

SEQ ID NO: 5656 - RNA, 20 nt, Artificial Sequence
  Antisense oligo
ccuaaauuagccaggcgugg

SEQ ID NO: 5657 - RNA, 20 nt, Artificial Sequence
  Antisense oligo
uccuaaauuagccaggcgug

SEQ ID NO: 5658 - RNA, 20 nt, Artificial Sequence
  Antisense oligo
auccuaaauuagccaggcgu

SEQ ID NO: 5659 - RNA, 20 nt, Artificial Sequence
  Antisense oligo
aauccuaaauuagccaggcg

SEQ ID NO: 5660 - RNA, 20 nt, Artificial Sequence
  Antisense oligo
aaauccuaaauuagccaggc

SEQ ID NO: 5661 - RNA, 20 nt, Artificial Sequence
  Antisense oligo
gaaaucccgucucuacuaaa

SEQ ID NO: 5662 - RNA, 20 nt, Artificial Sequence
  Antisense oligo
accaacauggagaaaucccg

SEQ ID NO: 5663 - RNA, 20 nt, Artificial Sequence
  Antisense oligo
gaccaacauggagaaauccc

SEQ ID NO: 5664 - RNA, 20 nt, Artificial Sequence
  Antisense oligo
ugaccaacauggagaaaucc

SEQ ID NO: 5665 - RNA, 20 nt, Artificial Sequence
  Antisense oligo
cugaccaacauggagaaauc

SEQ ID NO: 5666 - RNA, 20 nt, Artificial Sequence
  Antisense oligo
ccugaccaacauggagaaau

SEQ ID NO: 5667 - RNA, 20 nt, Artificial Sequence
  Antisense oligo
gccugaccaacauggagaaa

SEQ ID NO: 5668 - RNA, 20 nt, Artificial Sequence
  Antisense oligo
agccugaccaacauggagaa

SEQ ID NO: 5669 - RNA, 20 nt, Artificial Sequence
  Antisense oligo
cagccugaccaacauggaga

SEQ ID NO: 5670 - RNA, 20 nt, Artificial Sequence
  Antisense oligo
ccagccugaccaacauggag

SEQ ID NO: 5671 - RNA, 20 nt, Artificial Sequence
  Antisense oligo
accagccugaccaacaugga

SEQ ID NO: 5672 - RNA, 20 nt, Artificial Sequence
  Antisense oligo
gaccagccugaccaacaugg

SEQ ID NO: 5673 - RNA, 20 nt, Artificial Sequence
  Antisense oligo
agaccagccugaccaacaug

SEQ ID NO: 5674 - RNA, 20 nt, Artificial Sequence
  Antisense oligo
aagaccagccugaccaacau

SEQ ID NO: 5675 - RNA, 20 nt, Artificial Sequence
  Antisense oligo
caagaccagccugaccaaca

SEQ ID NO: 5676 - RNA, 20 nt, Artificial Sequence
  Antisense oligo
ucaagaccagccugaccaac

SEQ ID NO: 5677 - RNA, 20 nt, Artificial Sequence
  Antisense oligo
uucaagaccagccugaccaa

SEQ ID NO: 5678 - RNA, 20 nt, Artificial Sequence
  Antisense oligo
guucaagaccagccugacca

SEQ ID NO: 5679 - RNA, 20 nt, Artificial Sequence
  Antisense oligo
aguucaagaccagccugacc

SEQ ID NO: 5680 - RNA, 20 nt, Artificial Sequence
  Antisense oligo
gaguucaagaccagccugac

SEQ ID NO: 5681 - RNA, 20 nt, Artificial Sequence
  Antisense oligo
ggaguucaagaccagccuga

SEQ ID NO: 5682 - RNA, 20 nt, Artificial Sequence
  Antisense oligo
gggaguucaagaccagccug

SEQ ID NO: 5683 - RNA, 20 nt, Artificial Sequence
  Antisense oligo
ugggaguucaagaccagccu

SEQ ID NO: 5684 - RNA, 20 nt, Artificial Sequence
  Antisense oligo
uugggaguucaagaccagcc

SEQ ID NO: 5685 - RNA, 20 nt, Artificial Sequence
  Antisense oligo
guugggaguucaagaccagc

SEQ ID NO: 5686 - RNA, 20 nt, Artificial Sequence
  Antisense oligo
gguugggaguucaagaccag

SEQ ID NO: 5687 - RNA, 20 nt, Artificial Sequence
  Antisense oligo
cagaucaccugagguuggga

SEQ ID NO: 5688 - RNA, 20 nt, Artificial Sequence
  Antisense oligo
gcagaucaccugagguuggg

SEQ ID NO: 5689 - RNA, 20 nt, Artificial Sequence
  Antisense oligo
ggcagaucaccugagguugg

SEQ ID NO: 5690 - RNA, 20 nt, Artificial Sequence
  Antisense oligo
aggcagaucaccugagguug

SEQ ID NO: 5691 - RNA, 20 nt, Artificial Sequence
  Antisense oligo
cuguaaucccagcacuuugg

SEQ ID NO: 5692 - RNA, 20 nt, Artificial Sequence
  Antisense oligo
ucuguaaucccagcacuuug

SEQ ID NO: 5693 - RNA, 20 nt, Artificial Sequence
  Antisense oligo
guucuacaaggagcaguaau

SEQ ID NO: 5694 - RNA, 20 nt, Artificial Sequence
  Antisense oligo
cuguucuacaaggagcagua

SEQ ID NO: 5695 - RNA, 20 nt, Artificial Sequence
  Antisense oligo
ccuguucuacaaggagcagu

SEQ ID NO: 5696 - RNA, 20 nt, Artificial Sequence
  Antisense oligo
cccuguucuacaaggagcag

SEQ ID NO: 5697 - RNA, 20 nt, Artificial Sequence
  Antisense oligo
gcccuguucuacaaggagca

SEQ ID NO: 5698 - RNA, 20 nt, Artificial Sequence
  Antisense oligo
uagcccuguucuacaaggag

SEQ ID NO: 5699 - RNA, 20 nt, Artificial Sequence
  Antisense oligo
cugggcaacagagugagacu

SEQ ID NO: 5700 - RNA, 20 nt, Artificial Sequence
  Antisense oligo
ccugggcaacagagugagac

SEQ ID NO: 5701 - RNA, 20 nt, Artificial Sequence
  Antisense oligo
gccugggcaacagagugaga

SEQ ID NO: 5702 - RNA, 20 nt, Artificial Sequence
  Antisense oligo
agccugggcaacagagugag

SEQ ID NO: 5703 - RNA, 20 nt, Artificial Sequence
  Antisense oligo
cagccugggcaacagaguga

SEQ ID NO: 5704 - RNA, 20 nt, Artificial Sequence
  Antisense oligo
uccagccugggcaacagagu

SEQ ID NO: 5705 - RNA, 20 nt, Artificial Sequence
  Antisense oligo
acuccagccugggcaacaga

SEQ ID NO: 5706 - RNA, 20 nt, Artificial Sequence
  Antisense oligo
aucacgccacugcacuccag

SEQ ID NO: 5707 - RNA, 20 nt, Artificial Sequence
  Antisense oligo
gaucacgccacugcacucca

SEQ ID NO: 5708 - RNA, 20 nt, Artificial Sequence
  Antisense oligo
agaucacgccacugcacucc

SEQ ID NO: 5709 - RNA, 20 nt, Artificial Sequence
  Antisense oligo
gagaucacgccacugcacuc

SEQ ID NO: 5710 - RNA, 20 nt, Artificial Sequence
  Antisense oligo
cgagaucacgccacugcacu

SEQ ID NO: 5711 - RNA, 20 nt, Artificial Sequence
  Antisense oligo
ugagccgagaucacgccacu

SEQ ID NO: 5712 - RNA, 20 nt, Artificial Sequence
  Antisense oligo
auugcagugagccgagauca

SEQ ID NO: 5713 - RNA, 20 nt, Artificial Sequence
  Antisense oligo
gauugcagugagccgagauc

SEQ ID NO: 5714 - RNA, 20 nt, Artificial Sequence
  Antisense oligo
agauugcagugagccgagau

SEQ ID NO: 5715 - RNA, 20 nt, Artificial Sequence
  Antisense oligo
gagauugcagugagccgaga

SEQ ID NO: 5716 - RNA, 20 nt, Artificial Sequence
  Antisense oligo
agagauugcagugagccgag

SEQ ID NO: 5717 - RNA, 20 nt, Artificial Sequence
  Antisense oligo
gaggcagaagaaucacuuga

SEQ ID NO: 5718 - RNA, 20 nt, Artificial Sequence
  Antisense oligo
ugaggcagaagaaucacuug

SEQ ID NO: 5719 - RNA, 20 nt, Artificial Sequence
  Antisense oligo
cugaggcagaagaaucacuu

SEQ ID NO: 5720 - RNA, 20 nt, Artificial Sequence
  Antisense oligo
gcugaggcagaagaaucacu

SEQ ID NO: 5721 - RNA, 20 nt, Artificial Sequence
  Antisense oligo
ggcugaggcagaagaaucac

SEQ ID NO: 5722 - RNA, 20 nt, Artificial Sequence
  Antisense oligo
aggcugaggcagaagaauca

SEQ ID NO: 5723 - RNA, 20 nt, Artificial Sequence
  Antisense oligo
gaggcugaggcagaagaauc

SEQ ID NO: 5724 - RNA, 20 nt, Artificial Sequence
  Antisense oligo
ggaggcugaggcagaagaau

SEQ ID NO: 5725 - RNA, 20 nt, Artificial Sequence
  Antisense oligo
aggaggcugaggcagaagaa

SEQ ID NO: 5726 - RNA, 20 nt, Artificial Sequence
  Antisense oligo
caggaggcugaggcagaaga

SEQ ID NO: 5727 - RNA, 20 nt, Artificial Sequence
  Antisense oligo
ucccagcuacucaggaggcu

SEQ ID NO: 5728 - RNA, 20 nt, Artificial Sequence
  Antisense oligo
aucccagcuacucaggaggc

SEQ ID NO: 5729 - RNA, 20 nt, Artificial Sequence
  Antisense oligo
aaucccagcuacucaggagg

SEQ ID NO: 5730 - RNA, 20 nt, Artificial Sequence
  Antisense oligo
uaaucccagcuacucaggag

SEQ ID NO: 5731 - RNA, 20 nt, Artificial Sequence
  Antisense oligo
guaaucccagcuacucagga

SEQ ID NO: 5732 - RNA, 20 nt, Artificial Sequence
  Antisense oligo
uguaaucccagcuacucagg

SEQ ID NO: 5733 - RNA, 20 nt, Artificial Sequence
  Antisense oligo
cuguaaucccagcuacucag

SEQ ID NO: 5734 - RNA, 20 nt, Artificial Sequence
  Antisense oligo
ccuguaaucccagcuacuca

SEQ ID NO: 5735 - RNA, 20 nt, Artificial Sequence
  Antisense oligo
uccuguaaucccagcuacuc

SEQ ID NO: 5736 - RNA, 20 nt, Artificial Sequence
  Antisense oligo
auccuguaaucccagcuacu

SEQ ID NO: 5737 - RNA, 20 nt, Artificial Sequence
  Antisense oligo
aauccuguaaucccagcuac

SEQ ID NO: 5738 - RNA, 20 nt, Artificial Sequence
  Antisense oligo
uaauccuguaaucccagcua

SEQ ID NO: 5739 - RNA, 20 nt, Artificial Sequence
  Antisense oligo
guaauccuguaaucccagcu

SEQ ID NO: 5740 - RNA, 20 nt, Artificial Sequence
  Antisense oligo
caugccuguaauccuguaau

SEQ ID NO: 5741 - RNA, 20 nt, Artificial Sequence
  Antisense oligo
acaugccuguaauccuguaa

SEQ ID NO: 5742 - RNA, 20 nt, Artificial Sequence
  Antisense oligo
cacaugccuguaauccugua

SEQ ID NO: 5743 - RNA, 20 nt, Artificial Sequence
  Antisense oligo
gcacaugccuguaauccugu

SEQ ID NO: 5744 - RNA, 20 nt, Artificial Sequence
  Antisense oligo
ggcacaugccuguaauccug

SEQ ID NO: 5745 - RNA, 20 nt, Artificial Sequence
  Antisense oligo
uggcacaugccuguaauccu

SEQ ID NO: 5746 - RNA, 20 nt, Artificial Sequence
  Antisense oligo
guggcacaugccuguaaucc

SEQ ID NO: 5747 - RNA, 20 nt, Artificial Sequence
  Antisense oligo
gguggcacaugccuguaauc

SEQ ID NO: 5748 - RNA, 20 nt, Artificial Sequence
  Antisense oligo
ugguggcacaugccuguaau

SEQ ID NO: 5749 - RNA, 20 nt, Artificial Sequence
  Antisense oligo
augguggcacaugccuguaa

SEQ ID NO: 5750 - RNA, 20 nt, Artificial Sequence
  Antisense oligo
aaaucagccaggcauggugg

SEQ ID NO: 5751 - RNA, 20 nt, Artificial Sequence
  Antisense oligo
guugagguuagaaguuugca

SEQ ID NO: 5752 - RNA, 20 nt, Artificial Sequence
  Antisense oligo
aguugagguuagaaguuugc

SEQ ID NO: 5753 - RNA, 20 nt, Artificial Sequence
  Antisense oligo
gaggcagguggaucaguuga

SEQ ID NO: 5754 - RNA, 20 nt, Artificial Sequence
  Antisense oligo
ugaggcagguggaucaguug

SEQ ID NO: 5755 - RNA, 20 nt, Artificial Sequence
  Antisense oligo
aggcugaggcagguggauca

SEQ ID NO: 5756 - RNA, 20 nt, Artificial Sequence
  Antisense oligo
uuugggaggcugaggcaggu

SEQ ID NO: 5757 - RNA, 20 nt, Artificial Sequence
  Antisense oligo
acuuugggaggcugaggcag

SEQ ID NO: 5758 - RNA, 20 nt, Artificial Sequence
  Antisense oligo
cacuuugggaggcugaggca

SEQ ID NO: 5759 - RNA, 20 nt, Artificial Sequence
  Antisense oligo
agcacuuugggaggcugagg

SEQ ID NO: 5760 - RNA, 20 nt, Artificial Sequence
  Antisense oligo
ugguggcucacgccugaauc

SEQ ID NO: 5761 - RNA, 20 nt, Artificial Sequence
  Antisense oligo
gugguggcucacgccugaau

SEQ ID NO: 5762 - RNA, 20 nt, Artificial Sequence
  Antisense oligo
cagaacaaccuacugagaau

SEQ ID NO: 5763 - RNA, 20 nt, Artificial Sequence
  Antisense oligo
acagaacaaccuacugagaa

SEQ ID NO: 5764 - RNA, 20 nt, Artificial Sequence
  Antisense oligo
uacagaacaaccuacugaga

SEQ ID NO: 5765 - RNA, 20 nt, Artificial Sequence
  Antisense oligo
guacagaacaaccuacugag

SEQ ID NO: 5766 - RNA, 20 nt, Artificial Sequence
  Antisense oligo
acuugagcccaggagcuuga

SEQ ID NO: 5767 - RNA, 20 nt, Artificial Sequence
  Antisense oligo
cacuugagcccaggagcuug

SEQ ID NO: 5768 - RNA, 20 nt, Artificial Sequence
  Antisense oligo
ucacuugagcccaggagcuu

SEQ ID NO: 5769 - RNA, 20 nt, Artificial Sequence
  Antisense oligo
aucacuugagcccaggagcu

SEQ ID NO: 5770 - RNA, 20 nt, Artificial Sequence
  Antisense oligo
gaucacuugagcccaggagc

SEQ ID NO: 5771 - RNA, 20 nt, Artificial Sequence
  Antisense oligo
ggaucacuugagcccaggag

SEQ ID NO: 5772 - RNA, 20 nt, Artificial Sequence
  Antisense oligo
aggaucacuugagcccagga

SEQ ID NO: 5773 - RNA, 20 nt, Artificial Sequence
  Antisense oligo
gaggaucacuugagcccagg

SEQ ID NO: 5774 - RNA, 20 nt, Artificial Sequence
  Antisense oligo
ggaggaucacuugagcccag

SEQ ID NO: 5775 - RNA, 20 nt, Artificial Sequence
  Antisense oligo
gggaggaucacuugagccca

SEQ ID NO: 5776 - RNA, 20 nt, Artificial Sequence
  Antisense oligo
ucgggaggaucacuugagcc

SEQ ID NO: 5777 - RNA, 20 nt, Artificial Sequence
  Antisense oligo
cucgggaggaucacuugagc

SEQ ID NO: 5778 - RNA, 20 nt, Artificial Sequence
  Antisense oligo
acucgggaggaucacuugag

SEQ ID NO: 5779 - RNA, 20 nt, Artificial Sequence
  Antisense oligo
gacucgggaggaucacuuga

SEQ ID NO: 5780 - RNA, 20 nt, Artificial Sequence
  Antisense oligo
ugacucgggaggaucacuug

SEQ ID NO: 5781 - RNA, 20 nt, Artificial Sequence
  Antisense oligo
cugacucgggaggaucacuu

SEQ ID NO: 5782 - RNA, 20 nt, Artificial Sequence
  Antisense oligo
gcugacucgggaggaucacu

SEQ ID NO: 5783 - RNA, 20 nt, Artificial Sequence
  Antisense oligo
acaccugaaucccaauacuu

SEQ ID NO: 5784 - RNA, 20 nt, Artificial Sequence
  Antisense oligo
cacaccugaaucccaauacu

SEQ ID NO: 5785 - RNA, 20 nt, Artificial Sequence
  Antisense oligo
auacuacuugagggcaggcg

SEQ ID NO: 5786 - RNA, 20 nt, Artificial Sequence
  Antisense oligo
uaaauacuacuugagggcag

SEQ ID NO: 5787 - RNA, 20 nt, Artificial Sequence
  Antisense oligo
gacagaaacagucccgaauu

SEQ ID NO: 5788 - RNA, 20 nt, Artificial Sequence
  Antisense oligo
ccaaugcuggagggacagaa

SEQ ID NO: 5789 - RNA, 20 nt, Artificial Sequence
  Antisense oligo
accaaugcuggagggacaga

SEQ ID NO: 5790 - RNA, 20 nt, Artificial Sequence
  Antisense oligo
aaccaaugcuggagggacag

SEQ ID NO: 5791 - RNA, 20 nt, Artificial Sequence
  Antisense oligo
aaaccaaugcuggagggaca

SEQ ID NO: 5792 - RNA, 20 nt, Artificial Sequence
  Antisense oligo
uggaggaaaccaaugcugga

SEQ ID NO: 5793 - RNA, 20 nt, Artificial Sequence
  Antisense oligo
aauggaggaaaccaaugcug

SEQ ID NO: 5794 - RNA, 20 nt, Artificial Sequence
  Antisense oligo
ggaaaauggaggaaaccaau

SEQ ID NO: 5795 - RNA, 20 nt, Artificial Sequence
  Antisense oligo
gagggaaaauggaggaaacc

SEQ ID NO: 5796 - RNA, 20 nt, Artificial Sequence
  Antisense oligo
cagugagaucagugagggaa

SEQ ID NO: 5797 - RNA, 20 nt, Artificial Sequence
  Antisense oligo
gcagugagaucagugaggga

SEQ ID NO: 5798 - RNA, 20 nt, Artificial Sequence
  Antisense oligo
acgcagugagaucagugagg

SEQ ID NO: 5799 - RNA, 20 nt, Artificial Sequence
  Antisense oligo
gagacgcagugagaucagug

SEQ ID NO: 5800 - RNA, 20 nt, Artificial Sequence
  Antisense oligo
agagacgcagugagaucagu

SEQ ID NO: 5801 - RNA, 20 nt, Artificial Sequence
  Antisense oligo
aagagacgcagugagaucag

SEQ ID NO: 5802 - RNA, 20 nt, Artificial Sequence
  Antisense oligo
aaagagacgcagugagauca

SEQ ID NO: 5803 - RNA, 20 nt, Artificial Sequence
  Antisense oligo
aaaagagacgcagugagauc

SEQ ID NO: 5804 - RNA, 20 nt, Artificial Sequence
  Antisense oligo
gaaaagagacgcagugagau

SEQ ID NO: 5805 - RNA, 20 nt, Artificial Sequence
  Antisense oligo
agaaaagagacgcagugaga

SEQ ID NO: 5806 - RNA, 20 nt, Artificial Sequence
  Antisense oligo
ggaacuccugcauaagagaa

SEQ ID NO: 5807 - RNA, 20 nt, Artificial Sequence
  Antisense oligo
gggaacuccugcauaagaga

SEQ ID NO: 5808 - RNA, 20 nt, Artificial Sequence
  Antisense oligo
agggaacuccugcauaagag

SEQ ID NO: 5809 - RNA, 20 nt, Artificial Sequence
  Antisense oligo
guagggaacuccugcauaag

SEQ ID NO: 5810 - RNA, 20 nt, Artificial Sequence
  Antisense oligo
aguagggaacuccugcauaa

SEQ ID NO: 5811 - RNA, 20 nt, Artificial Sequence
  Antisense oligo
aaguagggaacuccugcaua

SEQ ID NO: 5812 - RNA, 20 nt, Artificial Sequence
  Antisense oligo
cgucuaugcucagcaaaugc

SEQ ID NO: 5813 - RNA, 20 nt, Artificial Sequence
  Antisense oligo
ucgucuaugcucagcaaaug

SEQ ID NO: 5814 - RNA, 20 nt, Artificial Sequence
  Antisense oligo
gcucgucuaugcucagcaaa

SEQ ID NO: 5815 - RNA, 20 nt, Artificial Sequence
  Antisense oligo
ggcucgucuaugcucagcaa

SEQ ID NO: 5816 - RNA, 20 nt, Artificial Sequence
  Antisense oligo
aggcucgucuaugcucagca

SEQ ID NO: 5817 - RNA, 20 nt, Artificial Sequence
  Antisense oligo
gaggcucgucuaugcucagc

SEQ ID NO: 5818 - RNA, 20 nt, Artificial Sequence
  Antisense oligo
agaggcucgucuaugcucag

SEQ ID NO: 5819 - RNA, 20 nt, Artificial Sequence
  Antisense oligo
gagaggcucgucuaugcuca

SEQ ID NO: 5820 - RNA, 20 nt, Artificial Sequence
  Antisense oligo
agagaggcucgucuaugcuc

SEQ ID NO: 5821 - RNA, 20 nt, Artificial Sequence
  Antisense oligo
aagagaggcucgucuaugcu

SEQ ID NO: 5822 - RNA, 20 nt, Artificial Sequence
  Antisense oligo
gaagagaggcucgucuaugc

SEQ ID NO: 5823 - RNA, 20 nt, Artificial Sequence
  Antisense oligo
cggaagagaggcucgucuau

SEQ ID NO: 5824 - RNA, 20 nt, Artificial Sequence
  Antisense oligo
ccggaagagaggcucgucua

SEQ ID NO: 5825 - RNA, 20 nt, Artificial Sequence
  Antisense oligo
accggaagagaggcucgucu

SEQ ID NO: 5826 - RNA, 20 nt, Artificial Sequence
  Antisense oligo
aaccaggaccggaagagagg

SEQ ID NO: 5827 - RNA, 20 nt, Artificial Sequence
  Antisense oligo
aaaccaggaccggaagagag

SEQ ID NO: 5828 - RNA, 20 nt, Artificial Sequence
  Antisense oligo
uaaaccaggaccggaagaga

SEQ ID NO: 5829 - RNA, 20 nt, Artificial Sequence
  Antisense oligo
cuaaaccaggaccggaagag

SEQ ID NO: 5830 - RNA, 20 nt, Artificial Sequence
  Antisense oligo
acuaaaccaggaccggaaga

SEQ ID NO: 5831 - RNA, 20 nt, Artificial Sequence
  Antisense oligo
gacuaaaccaggaccggaag

SEQ ID NO: 5832 - RNA, 20 nt, Artificial Sequence
  Antisense oligo
agacuaaaccaggaccggaa

SEQ ID NO: 5833 - RNA, 20 nt, Artificial Sequence
  Antisense oligo
agcagacuaaaccaggaccg

SEQ ID NO: 5834 - RNA, 20 nt, Artificial Sequence
  Antisense oligo
uagcagacuaaaccaggacc

SEQ ID NO: 5835 - RNA, 20 nt, Artificial Sequence
  Antisense oligo
guagcagacuaaaccaggac

SEQ ID NO: 5836 - RNA, 20 nt, Artificial Sequence
  Antisense oligo
gguagcagacuaaaccagga

SEQ ID NO: 5837 - RNA, 20 nt, Artificial Sequence
  Antisense oligo
gagguagcagacuaaaccag

SEQ ID NO: 5838 - RNA, 20 nt, Artificial Sequence
  Antisense oligo
agagguagcagacuaaacca

SEQ ID NO: 5839 - RNA, 20 nt, Artificial Sequence
  Antisense oligo
cagagguagcagacuaaacc

SEQ ID NO: 5840 - RNA, 20 nt, Artificial Sequence
  Antisense oligo
ucagagguagcagacuaaac

SEQ ID NO: 5841 - RNA, 20 nt, Artificial Sequence
  Antisense oligo
cucagagguagcagacuaaa

SEQ ID NO: 5842 - RNA, 20 nt, Artificial Sequence
  Antisense oligo
gacucagagguagcagacua

SEQ ID NO: 5843 - RNA, 20 nt, Artificial Sequence
  Antisense oligo
ugacucagagguagcagacu

SEQ ID NO: 5844 - RNA, 20 nt, Artificial Sequence
  Antisense oligo
gugacucagagguagcagac

SEQ ID NO: 5845 - RNA, 20 nt, Artificial Sequence
  Antisense oligo
caggugacucagagguagca

SEQ ID NO: 5846 - RNA, 20 nt, Artificial Sequence
  Antisense oligo
aaccaggugacucagaggua

SEQ ID NO: 5847 - RNA, 20 nt, Artificial Sequence
  Antisense oligo
uaaccaggugacucagaggu

SEQ ID NO: 5848 - RNA, 20 nt, Artificial Sequence
  Antisense oligo
uacauaaccaggugacucag

SEQ ID NO: 5849 - RNA, 20 nt, Artificial Sequence
  Antisense oligo
auacauaaccaggugacuca

SEQ ID NO: 5850 - RNA, 20 nt, Artificial Sequence
  Antisense oligo
cauauacauaaccaggugac

SEQ ID NO: 5851 - RNA, 20 nt, Artificial Sequence
  Antisense oligo
ccauauacauaaccagguga

SEQ ID NO: 5852 - RNA, 20 nt, Artificial Sequence
  Antisense oligo
uccauauacauaaccaggug

SEQ ID NO: 5853 - RNA, 20 nt, Artificial Sequence
  Antisense oligo
cccaggugcucaaugaaguu

SEQ ID NO: 5854 - RNA, 20 nt, Artificial Sequence
  Antisense oligo
gacccaggugcucaaugaag

SEQ ID NO: 5855 - RNA, 20 nt, Artificial Sequence
  Antisense oligo
cgacccaggugcucaaugaa

SEQ ID NO: 5856 - RNA, 20 nt, Artificial Sequence
  Antisense oligo
acgacccaggugcucaauga

SEQ ID NO: 5857 - RNA, 20 nt, Artificial Sequence
  Antisense oligo
aaaacgacccaggugcucaa

SEQ ID NO: 5858 - RNA, 20 nt, Artificial Sequence
  Antisense oligo
gaaaacgacccaggugcuca

SEQ ID NO: 5859 - RNA, 20 nt, Artificial Sequence
  Antisense oligo
ggaaaacgacccaggugcuc

SEQ ID NO: 5860 - RNA, 20 nt, Artificial Sequence
  Antisense oligo
gcaggaaaacgacccaggug

SEQ ID NO: 5861 - RNA, 20 nt, Artificial Sequence
  Antisense oligo
gagcaggaaaacgacccagg

SEQ ID NO: 5862 - RNA, 20 nt, Artificial Sequence
  Antisense oligo
ugagcaggaaaacgacccag

SEQ ID NO: 5863 - RNA, 20 nt, Artificial Sequence
  Antisense oligo
augagcaggaaaacgaccca

SEQ ID NO: 5864 - RNA, 20 nt, Artificial Sequence
  Antisense oligo
uaugagcaggaaaacgaccc

SEQ ID NO: 5865 - RNA, 20 nt, Artificial Sequence
  Antisense oligo
auaugagcaggaaaacgacc

SEQ ID NO: 5866 - RNA, 20 nt, Artificial Sequence
  Antisense oligo
gauaugagcaggaaaacgac

SEQ ID NO: 5867 - RNA, 20 nt, Artificial Sequence
  Antisense oligo
ggauaugagcaggaaaacga

SEQ ID NO: 5868 - RNA, 20 nt, Artificial Sequence
  Antisense oligo
aggauaugagcaggaaaacg

SEQ ID NO: 5869 - RNA, 20 nt, Artificial Sequence
  Antisense oligo
caggauaugagcaggaaaac

SEQ ID NO: 5870 - RNA, 20 nt, Artificial Sequence
  Antisense oligo
ccaggauaugagcaggaaaa

SEQ ID NO: 5871 - RNA, 20 nt, Artificial Sequence
  Antisense oligo
guccaggauaugagcaggaa

SEQ ID NO: 5872 - RNA, 20 nt, Artificial Sequence
  Antisense oligo
aguccaggauaugagcagga

SEQ ID NO: 5873 - RNA, 20 nt, Artificial Sequence
  Antisense oligo
caguccaggauaugagcagg

SEQ ID NO: 5874 - RNA, 20 nt, Artificial Sequence
  Antisense oligo
acaguccaggauaugagcag

SEQ ID NO: 5875 - RNA, 20 nt, Artificial Sequence
  Antisense oligo
gacaguccaggauaugagca

SEQ ID NO: 5876 - RNA, 20 nt, Artificial Sequence
  Antisense oligo
agacaguccaggauaugagc

SEQ ID NO: 5877 - RNA, 20 nt, Artificial Sequence
  Antisense oligo
aagacaguccaggauaugag

SEQ ID NO: 5878 - RNA, 20 nt, Artificial Sequence
  Antisense oligo
aaagacaguccaggauauga

SEQ ID NO: 5879 - RNA, 20 nt, Artificial Sequence
  Antisense oligo
gaaagacaguccaggauaug

SEQ ID NO: 5880 - RNA, 20 nt, Artificial Sequence
  Antisense oligo
guaguaaaucccugaaagac

SEQ ID NO: 5881 - RNA, 20 nt, Artificial Sequence
  Antisense oligo
gguaguaaaucccugaaaga

SEQ ID NO: 5882 - RNA, 20 nt, Artificial Sequence
  Antisense oligo
cgguaguaaaucccugaaag

SEQ ID NO: 5883 - RNA, 20 nt, Artificial Sequence
  Antisense oligo
ccgguaguaaaucccugaaa

SEQ ID NO: 5884 - RNA, 20 nt, Artificial Sequence
  Antisense oligo
gccgguaguaaaucccugaa

SEQ ID NO: 5885 - RNA, 20 nt, Artificial Sequence
  Antisense oligo
agccgguaguaaaucccuga

SEQ ID NO: 5886 - RNA, 20 nt, Artificial Sequence
  Antisense oligo
aagccgguaguaaaucccug

SEQ ID NO: 5887 - RNA, 20 nt, Artificial Sequence
  Antisense oligo
gaagccgguaguaaaucccu

SEQ ID NO: 5888 - RNA, 20 nt, Artificial Sequence
  Antisense oligo
ggaagccgguaguaaauccc

SEQ ID NO: 5889 - RNA, 20 nt, Artificial Sequence
  Antisense oligo
cggaagccgguaguaaaucc

SEQ ID NO: 5890 - RNA, 20 nt, Artificial Sequence
  Antisense oligo
cuugcucaagucccggaagc

SEQ ID NO: 5891 - RNA, 20 nt, Artificial Sequence
  Antisense oligo
cgacuucagacacaaaccug

SEQ ID NO: 5892 - RNA, 20 nt, Artificial Sequence
  Antisense oligo
ccgacuucagacacaaaccu

SEQ ID NO: 5893 - RNA, 20 nt, Artificial Sequence
  Antisense oligo
gccgacuucagacacaaacc

SEQ ID NO: 5894 - RNA, 20 nt, Artificial Sequence
  Antisense oligo
agccgacuucagacacaaac

SEQ ID NO: 5895 - RNA, 20 nt, Artificial Sequence
  Antisense oligo
gagccgacuucagacacaaa

SEQ ID NO: 5896 - RNA, 20 nt, Artificial Sequence
  Antisense oligo
agagccgacuucagacacaa

SEQ ID NO: 5897 - RNA, 20 nt, Artificial Sequence
  Antisense oligo
cagagccgacuucagacaca

SEQ ID NO: 5898 - RNA, 20 nt, Artificial Sequence
  Antisense oligo
ccagagccgacuucagacac

SEQ ID NO: 5899 - RNA, 20 nt, Artificial Sequence
  Antisense oligo
uccagagccgacuucagaca

SEQ ID NO: 5900 - RNA, 20 nt, Artificial Sequence
  Antisense oligo
cuccagagccgacuucagac

SEQ ID NO: 5901 - RNA, 20 nt, Artificial Sequence
  Antisense oligo
acuccagagccgacuucaga

SEQ ID NO: 5902 - RNA, 20 nt, Artificial Sequence
  Antisense oligo
caggacuccagagccgacuu

SEQ ID NO: 5903 - RNA, 20 nt, Artificial Sequence
  Antisense oligo
cuaagccaggacuccagagc

SEQ ID NO: 5904 - RNA, 20 nt, Artificial Sequence
  Antisense oligo
ugcuaagccaggacuccaga

SEQ ID NO: 5905 - RNA, 20 nt, Artificial Sequence
  Antisense oligo
uugcuaagccaggacuccag

SEQ ID NO: 5906 - RNA, 20 nt, Artificial Sequence
  Antisense oligo
uuugcuaagccaggacucca

SEQ ID NO: 5907 - RNA, 20 nt, Artificial Sequence
  Antisense oligo
cuuuugcuaagccaggacuc

SEQ ID NO: 5908 - RNA, 20 nt, Artificial Sequence
  Antisense oligo
guuaucuagucugcuuuugc

SEQ ID NO: 5909 - RNA, 20 nt, Artificial Sequence
  Antisense oligo
agaauccugagcuuuccaug

SEQ ID NO: 5910 - RNA, 20 nt, Artificial Sequence
  Antisense oligo
aagaauccugagcuuuccau

SEQ ID NO: 5911 - RNA, 20 nt, Artificial Sequence
  Antisense oligo
uaagaauccugagcuuucca

SEQ ID NO: 5912 - RNA, 20 nt, Artificial Sequence
  Antisense oligo
auaagaauccugagcuuucc

SEQ ID NO: 5913 - RNA, 20 nt, Artificial Sequence
  Antisense oligo
caaagugcugggauucaggc

SEQ ID NO: 5914 - RNA, 20 nt, Artificial Sequence
  Antisense oligo
ccaaagugcugggauucagg

SEQ ID NO: 5915 - RNA, 20 nt, Artificial Sequence
  Antisense oligo
uccugaccucgugaucugcc

SEQ ID NO: 5916 - RNA, 20 nt, Artificial Sequence
  Antisense oligo
cuccugaccucgugaucugc

SEQ ID NO: 5917 - RNA, 20 nt, Artificial Sequence
  Antisense oligo
ucuccugaccucgugaucug

SEQ ID NO: 5918 - RNA, 20 nt, Artificial Sequence
  Antisense oligo
aucuccugaccucgugaucu

SEQ ID NO: 5919 - RNA, 20 nt, Artificial Sequence
  Antisense oligo
caccacgcccagcuaauuuu

SEQ ID NO: 5920 - RNA, 20 nt, Artificial Sequence
  Antisense oligo
ccaccacgcccagcuaauuu

SEQ ID NO: 5921 - RNA, 20 nt, Artificial Sequence
  Antisense oligo
accaccacgcccagcuaauu

SEQ ID NO: 5922 - RNA, 20 nt, Artificial Sequence
  Antisense oligo
caccaccacgcccagcuaau

SEQ ID NO: 5923 - RNA, 20 nt, Artificial Sequence
  Antisense oligo
cuccugaguagcugggacua

SEQ ID NO: 5924 - RNA, 20 nt, Artificial Sequence
  Antisense oligo
ccuccugaguagcugggacu

SEQ ID NO: 5925 - RNA, 20 nt, Artificial Sequence
  Antisense oligo
agccuccugaguagcuggga

SEQ ID NO: 5926 - RNA, 20 nt, Artificial Sequence
  Antisense oligo
uucuccugccucagccuccu

SEQ ID NO: 5927 - RNA, 20 nt, Artificial Sequence
  Antisense oligo
auucuccugccucagccucc

SEQ ID NO: 5928 - RNA, 20 nt, Artificial Sequence
  Antisense oligo
cauucuccugccucagccuc

SEQ ID NO: 5929 - RNA, 20 nt, Artificial Sequence
  Antisense oligo
ccauucuccugccucagccu

SEQ ID NO: 5930 - RNA, 20 nt, Artificial Sequence
  Antisense oligo
accauucuccugccucagcc

SEQ ID NO: 5931 - RNA, 20 nt, Artificial Sequence
  Antisense oligo
caccauucuccugccucagc

SEQ ID NO: 5932 - RNA, 20 nt, Artificial Sequence
  Antisense oligo
acaccauucuccugccucag

SEQ ID NO: 5933 - RNA, 20 nt, Artificial Sequence
  Antisense oligo
cacaccauucuccugccuca

SEQ ID NO: 5934 - RNA, 20 nt, Artificial Sequence
  Antisense oligo
ucacaccauucuccugccuc

SEQ ID NO: 5935 - RNA, 20 nt, Artificial Sequence
  Antisense oligo
cacaugagacgccuucuuuu

SEQ ID NO: 5936 - RNA, 20 nt, Artificial Sequence
  Antisense oligo
ucacaugagacgccuucuuu

SEQ ID NO: 5937 - RNA, 20 nt, Artificial Sequence
  Antisense oligo
aucacaugagacgccuucuu

SEQ ID NO: 5938 - RNA, 20 nt, Artificial Sequence
  Antisense oligo
caucacaugagacgccuucu

SEQ ID NO: 5939 - RNA, 20 nt, Artificial Sequence
  Antisense oligo
gcaucacaugagacgccuuc

SEQ ID NO: 5940 - RNA, 20 nt, Artificial Sequence
  Antisense oligo
ugcaucacaugagacgccuu

SEQ ID NO: 5941 - RNA, 20 nt, Artificial Sequence
  Antisense oligo
gugcaucacaugagacgccu

SEQ ID NO: 5942 - RNA, 20 nt, Artificial Sequence
  Antisense oligo
agugcaucacaugagacgcc

SEQ ID NO: 5943 - RNA, 20 nt, Artificial Sequence
  Antisense oligo
aagugcaucacaugagacgc

SEQ ID NO: 5944 - RNA, 20 nt, Artificial Sequence
  Antisense oligo
gaagugcaucacaugagacg

SEQ ID NO: 5945 - RNA, 20 nt, Artificial Sequence
  Antisense oligo
cgaagugcaucacaugagac

SEQ ID NO: 5946 - RNA, 20 nt, Artificial Sequence
  Antisense oligo
acgaagugcaucacaugaga

SEQ ID NO: 5947 - RNA, 20 nt, Artificial Sequence
  Antisense oligo
uacgaagugcaucacaugag

SEQ ID NO: 5948 - RNA, 20 nt, Artificial Sequence
  Antisense oligo
cuacgaagugcaucacauga

SEQ ID NO: 5949 - RNA, 20 nt, Artificial Sequence
  Antisense oligo
gcuacgaagugcaucacaug

SEQ ID NO: 5950 - RNA, 20 nt, Artificial Sequence
  Antisense oligo
agcuacgaagugcaucacau

SEQ ID NO: 5951 - RNA, 20 nt, Artificial Sequence
  Antisense oligo
cagcuacgaagugcaucaca

SEQ ID NO: 5952 - RNA, 20 nt, Artificial Sequence
  Antisense oligo
gcagcuacgaagugcaucac

SEQ ID NO: 5953 - RNA, 20 nt, Artificial Sequence
  Antisense oligo
ggcagcuacgaagugcauca

SEQ ID NO: 5954 - RNA, 20 nt, Artificial Sequence
  Antisense oligo
uggcagcuacgaagugcauc

SEQ ID NO: 5955 - RNA, 20 nt, Artificial Sequence
  Antisense oligo
auggcagcuacgaagugcau

SEQ ID NO: 5956 - RNA, 20 nt, Artificial Sequence
  Antisense oligo
aauggcagcuacgaagugca

SEQ ID NO: 5957 - RNA, 20 nt, Artificial Sequence
  Antisense oligo
gaauggcagcuacgaagugc

SEQ ID NO: 5958 - RNA, 20 nt, Artificial Sequence
  Antisense oligo
agaauggcagcuacgaagug

SEQ ID NO: 5959 - RNA, 20 nt, Artificial Sequence
  Antisense oligo
aagaauggcagcuacgaagu

SEQ ID NO: 5960 - RNA, 20 nt, Artificial Sequence
  Antisense oligo
gaagaauggcagcuacgaag

SEQ ID NO: 5961 - RNA, 20 nt, Artificial Sequence
  Antisense oligo
ggaagaauggcagcuacgaa

SEQ ID NO: 5962 - RNA, 20 nt, Artificial Sequence
  Antisense oligo
aaggaagaauggcagcuacg

SEQ ID NO: 5963 - RNA, 20 nt, Artificial Sequence
  Antisense oligo
aggugcucacauacuaaucu

SEQ ID NO: 5964 - RNA, 20 nt, Artificial Sequence
  Antisense oligo
aaggugcucacauacuaauc

SEQ ID NO: 5965 - RNA, 20 nt, Artificial Sequence
  Antisense oligo
cauugcuaaaacagagcuga

SEQ ID NO: 5966 - RNA, 20 nt, Artificial Sequence
  Antisense oligo
gaacauccuaaggcagagaa

SEQ ID NO: 5967 - RNA, 20 nt, Artificial Sequence
  Antisense oligo
ugaacauccuaaggcagaga

SEQ ID NO: 5968 - RNA, 20 nt, Artificial Sequence
  Antisense oligo
cugaacauccuaaggcagag

SEQ ID NO: 5969 - RNA, 20 nt, Artificial Sequence
  Antisense oligo
ccugaacauccuaaggcaga

SEQ ID NO: 5970 - RNA, 20 nt, Artificial Sequence
  Antisense oligo
uccugaacauccuaaggcag

SEQ ID NO: 5971 - RNA, 20 nt, Artificial Sequence
  Antisense oligo
auccugaacauccuaaggca

SEQ ID NO: 5972 - RNA, 20 nt, Artificial Sequence
  Antisense oligo
cauccugaacauccuaaggc

SEQ ID NO: 5973 - RNA, 20 nt, Artificial Sequence
  Antisense oligo
ugaacauccugaacauccua

SEQ ID NO: 5974 - RNA, 20 nt, Artificial Sequence
  Antisense oligo
gagucgcaacagcauuucua

SEQ ID NO: 5975 - RNA, 20 nt, Artificial Sequence
  Antisense oligo
ggagucgcaacagcauuucu

SEQ ID NO: 5976 - RNA, 20 nt, Artificial Sequence
  Antisense oligo
aggagucgcaacagcauuuc

SEQ ID NO: 5977 - RNA, 20 nt, Artificial Sequence
  Antisense oligo
caggagucgcaacagcauuu

SEQ ID NO: 5978 - RNA, 20 nt, Artificial Sequence
  Antisense oligo
ccaggagucgcaacagcauu

SEQ ID NO: 5979 - RNA, 20 nt, Artificial Sequence
  Antisense oligo
uccaggagucgcaacagcau

SEQ ID NO: 5980 - RNA, 20 nt, Artificial Sequence
  Antisense oligo
guccaggagucgcaacagca

SEQ ID NO: 5981 - RNA, 20 nt, Artificial Sequence
  Antisense oligo
uguccaggagucgcaacagc

SEQ ID NO: 5982 - RNA, 20 nt, Artificial Sequence
  Antisense oligo
guguccaggagucgcaacag

SEQ ID NO: 5983 - RNA, 20 nt, Artificial Sequence
  Antisense oligo
aguguccaggagucgcaaca

SEQ ID NO: 5984 - RNA, 20 nt, Artificial Sequence
  Antisense oligo
aaguguccaggagucgcaac

SEQ ID NO: 5985 - RNA, 20 nt, Artificial Sequence
  Antisense oligo
guaaguguccaggagucgca

SEQ ID NO: 5986 - RNA, 20 nt, Artificial Sequence
  Antisense oligo
gguaaguguccaggagucgc

SEQ ID NO: 5987 - RNA, 20 nt, Artificial Sequence
  Antisense oligo
cgguaaguguccaggagucg

SEQ ID NO: 5988 - RNA, 20 nt, Artificial Sequence
  Antisense oligo
ucccgguaaguguccaggag

SEQ ID NO: 5989 - RNA, 20 nt, Artificial Sequence
  Antisense oligo
gucccgguaaguguccagga

SEQ ID NO: 5990 - RNA, 20 nt, Artificial Sequence
  Antisense oligo
ugucccgguaaguguccagg

SEQ ID NO: 5991 - RNA, 20 nt, Artificial Sequence
  Antisense oligo
uugucccgguaaguguccag

SEQ ID NO: 5992 - RNA, 20 nt, Artificial Sequence
  Antisense oligo
cuugucccgguaagugucca

SEQ ID NO: 5993 - RNA, 20 nt, Artificial Sequence
  Antisense oligo
uccacuuacuugucccggua

SEQ ID NO: 5994 - RNA, 20 nt, Artificial Sequence
  Antisense oligo
uuccacuuacuugucccggu

SEQ ID NO: 5995 - RNA, 20 nt, Artificial Sequence
  Antisense oligo
uuuccacuuacuugucccgg

SEQ ID NO: 5996 - RNA, 20 nt, Artificial Sequence
  Antisense oligo
cgugcuuuccacuuacuugu

SEQ ID NO: 5997 - RNA, 20 nt, Artificial Sequence
  Antisense oligo
ucgugcuuuccacuuacuug

SEQ ID NO: 5998 - RNA, 20 nt, Artificial Sequence
  Antisense oligo
caucgugcuuuccacuuacu

SEQ ID NO: 5999 - RNA, 20 nt, Artificial Sequence
  Antisense oligo
gcaucgugcuuuccacuuac

SEQ ID NO: 6000 - RNA, 20 nt, Artificial Sequence
  Antisense oligo
ugcaucgugcuuuccacuua

SEQ ID NO: 6001 - RNA, 20 nt, Artificial Sequence
  Antisense oligo
cugcaucgugcuuuccacuu

SEQ ID NO: 6002 - RNA, 20 nt, Artificial Sequence
  Antisense oligo
acugcaucgugcuuuccacu

SEQ ID NO: 6003 - RNA, 20 nt, Artificial Sequence
  Antisense oligo
gacugcaucgugcuuuccac

SEQ ID NO: 6004 - RNA, 20 nt, Artificial Sequence
  Antisense oligo
agacugcaucgugcuuucca

SEQ ID NO: 6005 - RNA, 20 nt, Artificial Sequence
  Antisense oligo
gagacugcaucgugcuuucc

SEQ ID NO: 6006 - RNA, 20 nt, Artificial Sequence
  Antisense oligo
agagacugcaucgugcuuuc

SEQ ID NO: 6007 - RNA, 20 nt, Artificial Sequence
  Antisense oligo
gagagacugcaucgugcuuu

SEQ ID NO: 6008 - RNA, 20 nt, Artificial Sequence
  Antisense oligo
ggagagacugcaucgugcuu

SEQ ID NO: 6009 - RNA, 20 nt, Artificial Sequence
  Antisense oligo
gggagagacugcaucgugcu

SEQ ID NO: 6010 - RNA, 20 nt, Artificial Sequence
  Antisense oligo
agggagagacugcaucgugc

SEQ ID NO: 6011 - RNA, 20 nt, Artificial Sequence
  Antisense oligo
gagggagagacugcaucgug

SEQ ID NO: 6012 - RNA, 20 nt, Artificial Sequence
  Antisense oligo
ugagggagagacugcaucgu

SEQ ID NO: 6013 - RNA, 20 nt, Artificial Sequence
  Antisense oligo
gugagggagagacugcaucg

SEQ ID NO: 6014 - RNA, 20 nt, Artificial Sequence
  Antisense oligo
ugugagggagagacugcauc

SEQ ID NO: 6015 - RNA, 20 nt, Artificial Sequence
  Antisense oligo
augugagggagagacugcau

SEQ ID NO: 6016 - RNA, 20 nt, Artificial Sequence
  Antisense oligo
caugugagggagagacugca

SEQ ID NO: 6017 - RNA, 20 nt, Artificial Sequence
  Antisense oligo
ggucacggccaauuauaggg

SEQ ID NO: 6018 - RNA, 20 nt, Artificial Sequence
  Antisense oligo
gggucacggccaauuauagg

SEQ ID NO: 6019 - RNA, 20 nt, Artificial Sequence
  Antisense oligo
ugggucacggccaauuauag

SEQ ID NO: 6020 - RNA, 20 nt, Artificial Sequence
  Antisense oligo
gugggucacggccaauuaua

SEQ ID NO: 6021 - RNA, 20 nt, Artificial Sequence
  Antisense oligo
ugugggucacggccaauuau

SEQ ID NO: 6022 - RNA, 20 nt, Artificial Sequence
  Antisense oligo
augugggucacggccaauua

SEQ ID NO: 6023 - RNA, 20 nt, Artificial Sequence
  Antisense oligo
augaccuugcuguuacaaca

SEQ ID NO: 6024 - RNA, 20 nt, Artificial Sequence
  Antisense oligo
uaugaccuugcuguuacaac

SEQ ID NO: 6025 - RNA, 20 nt, Artificial Sequence
  Antisense oligo
agaagugggccacauauuaa

SEQ ID NO: 6026 - RNA, 20 nt, Artificial Sequence
  Antisense oligo
gagaagugggccacauauua

SEQ ID NO: 6027 - RNA, 20 nt, Artificial Sequence
  Antisense oligo
agagaagugggccacauauu

SEQ ID NO: 6028 - RNA, 20 nt, Artificial Sequence
  Antisense oligo
aagagaagugggccacauau

SEQ ID NO: 6029 - RNA, 20 nt, Artificial Sequence
  Antisense oligo
agaagagaagugggccacau

SEQ ID NO: 6030 - RNA, 20 nt, Artificial Sequence
  Antisense oligo
uaaccugagaagagaagugg

SEQ ID NO: 6031 - RNA, 20 nt, Artificial Sequence
  Antisense oligo
ccugggcaacagaguaagac

SEQ ID NO: 6032 - RNA, 20 nt, Artificial Sequence
  Antisense oligo
gccugggcaacagaguaaga

SEQ ID NO: 6033 - RNA, 20 nt, Artificial Sequence
  Antisense oligo
agccugggcaacagaguaag

SEQ ID NO: 6034 - RNA, 20 nt, Artificial Sequence
  Antisense oligo
cagccugggcaacagaguaa

SEQ ID NO: 6035 - RNA, 20 nt, Artificial Sequence
  Antisense oligo
ccagccugggcaacagagua

SEQ ID NO: 6036 - RNA, 20 nt, Artificial Sequence
  Antisense oligo
uccagccugggcaacagagu

SEQ ID NO: 6037 - RNA, 20 nt, Artificial Sequence
  Antisense oligo
acuccagccugggcaacaga

SEQ ID NO: 6038 - RNA, 20 nt, Artificial Sequence
  Antisense oligo
uugcgucacugcacuccagc

SEQ ID NO: 6039 - RNA, 20 nt, Artificial Sequence
  Antisense oligo
accaggagauagaaguugua

SEQ ID NO: 6040 - RNA, 20 nt, Artificial Sequence
  Antisense oligo
uugaaccaggagauagaagu

SEQ ID NO: 6041 - RNA, 20 nt, Artificial Sequence
  Antisense oligo
agaaucacuugaaccaggag

SEQ ID NO: 6042 - RNA, 20 nt, Artificial Sequence
  Antisense oligo
gagaaucacuugaaccagga

SEQ ID NO: 6043 - RNA, 20 nt, Artificial Sequence
  Antisense oligo
ggagaaucacuugaaccagg

SEQ ID NO: 6044 - RNA, 20 nt, Artificial Sequence
  Antisense oligo
aggagaaucacuugaaccag

SEQ ID NO: 6045 - RNA, 20 nt, Artificial Sequence
  Antisense oligo
caggagaaucacuugaacca

SEQ ID NO: 6046 - RNA, 20 nt, Artificial Sequence
  Antisense oligo
acaggagaaucacuugaacc

SEQ ID NO: 6047 - RNA, 20 nt, Artificial Sequence
  Antisense oligo
gacaggagaaucacuugaac

SEQ ID NO: 6048 - RNA, 20 nt, Artificial Sequence
  Antisense oligo
agacaggagaaucacuugaa

SEQ ID NO: 6049 - RNA, 20 nt, Artificial Sequence
  Antisense oligo
gagacaggagaaucacuuga

SEQ ID NO: 6050 - RNA, 20 nt, Artificial Sequence
  Antisense oligo
ugagacaggagaaucacuug

SEQ ID NO: 6051 - RNA, 20 nt, Artificial Sequence
  Antisense oligo
cugagacaggagaaucacuu

SEQ ID NO: 6052 - RNA, 20 nt, Artificial Sequence
  Antisense oligo
gcugagacaggagaaucacu

SEQ ID NO: 6053 - RNA, 20 nt, Artificial Sequence
  Antisense oligo
ggcugagacaggagaaucac

SEQ ID NO: 6054 - RNA, 20 nt, Artificial Sequence
  Antisense oligo
aggcugagacaggagaauca

SEQ ID NO: 6055 - RNA, 20 nt, Artificial Sequence
  Antisense oligo
gaggcugagacaggagaauc

SEQ ID NO: 6056 - RNA, 20 nt, Artificial Sequence
  Antisense oligo
ggaggcugagacaggagaau

SEQ ID NO: 6057 - RNA, 20 nt, Artificial Sequence
  Antisense oligo
gggaggcugagacaggagaa

SEQ ID NO: 6058 - RNA, 20 nt, Artificial Sequence
  Antisense oligo
uacucgggaggcugagacag

SEQ ID NO: 6059 - RNA, 20 nt, Artificial Sequence
  Antisense oligo
cuacucgggaggcugagaca

SEQ ID NO: 6060 - RNA, 20 nt, Artificial Sequence
  Antisense oligo
agcuacucgggaggcugaga

SEQ ID NO: 6061 - RNA, 20 nt, Artificial Sequence
  Antisense oligo
uguaaucccagcuacucggg

SEQ ID NO: 6062 - RNA, 20 nt, Artificial Sequence
  Antisense oligo
cuguaaucccagcuacucgg

SEQ ID NO: 6063 - RNA, 20 nt, Artificial Sequence
  Antisense oligo
ccuguaaucccagcuacucg

SEQ ID NO: 6064 - RNA, 20 nt, Artificial Sequence
  Antisense oligo
gccuguaaucccagcuacuc

SEQ ID NO: 6065 - RNA, 20 nt, Artificial Sequence
  Antisense oligo
cgccuguaaucccagcuacu

SEQ ID NO: 6066 - RNA, 20 nt, Artificial Sequence
  Antisense oligo
gcgccuguaaucccagcuac

SEQ ID NO: 6067 - RNA, 20 nt, Artificial Sequence
  Antisense oligo
ugcgccuguaaucccagcua

SEQ ID NO: 6068 - RNA, 20 nt, Artificial Sequence
  Antisense oligo
gugcgccuguaaucccagcu

SEQ ID NO: 6069 - RNA, 20 nt, Artificial Sequence
  Antisense oligo
aauuagcugggcgugguggg

SEQ ID NO: 6070 - RNA, 20 nt, Artificial Sequence
  Antisense oligo
aaauuagcugggcguggugg

SEQ ID NO: 6071 - RNA, 20 nt, Artificial Sequence
  Antisense oligo
aaaauuagcugggcguggug

SEQ ID NO: 6072 - RNA, 20 nt, Artificial Sequence
  Antisense oligo
ugggcaacaagagugagacu

SEQ ID NO: 6073 - RNA, 20 nt, Artificial Sequence
  Antisense oligo
uugggcaacaagagugagac

SEQ ID NO: 6074 - RNA, 20 nt, Artificial Sequence
  Antisense oligo
ccauugcacuccagcuuggg

SEQ ID NO: 6075 - RNA, 20 nt, Artificial Sequence
  Antisense oligo
gccauugcacuccagcuugg

SEQ ID NO: 6076 - RNA, 20 nt, Artificial Sequence
  Antisense oligo
ugccauugcacuccagcuug

SEQ ID NO: 6077 - RNA, 20 nt, Artificial Sequence
  Antisense oligo
ucacuugaaccugggaagca

SEQ ID NO: 6078 - RNA, 20 nt, Artificial Sequence
  Antisense oligo
aucacuugaaccugggaagc

SEQ ID NO: 6079 - RNA, 20 nt, Artificial Sequence
  Antisense oligo
aaucacuugaaccugggaag

SEQ ID NO: 6080 - RNA, 20 nt, Artificial Sequence
  Antisense oligo
gaaucacuugaaccugggaa

SEQ ID NO: 6081 - RNA, 20 nt, Artificial Sequence
  Antisense oligo
agaaucacuugaaccuggga

SEQ ID NO: 6082 - RNA, 20 nt, Artificial Sequence
  Antisense oligo
gagaaucacuugaaccuggg

SEQ ID NO: 6083 - RNA, 20 nt, Artificial Sequence
  Antisense oligo
ggagaaucacuugaaccugg

SEQ ID NO: 6084 - RNA, 20 nt, Artificial Sequence
  Antisense oligo
aggagaaucacuugaaccug

SEQ ID NO: 6085 - RNA, 20 nt, Artificial Sequence
  Antisense oligo
aaggagaaucacuugaaccu

SEQ ID NO: 6086 - RNA, 20 nt, Artificial Sequence
  Antisense oligo
gaaggagaaucacuugaacc

SEQ ID NO: 6087 - RNA, 20 nt, Artificial Sequence
  Antisense oligo
ggaaggagaaucacuugaac

SEQ ID NO: 6088 - RNA, 20 nt, Artificial Sequence
  Antisense oligo
aggaaggagaaucacuugaa

SEQ ID NO: 6089 - RNA, 20 nt, Artificial Sequence
  Antisense oligo
gaggaaggagaaucacuuga

SEQ ID NO: 6090 - RNA, 20 nt, Artificial Sequence
  Antisense oligo
ucccagcuacucaggaggcu

SEQ ID NO: 6091 - RNA, 20 nt, Artificial Sequence
  Antisense oligo
aucccagcuacucaggaggc

SEQ ID NO: 6092 - RNA, 20 nt, Artificial Sequence
  Antisense oligo
aaucccagcuacucaggagg

SEQ ID NO: 6093 - RNA, 20 nt, Artificial Sequence
  Antisense oligo
uaaucccagcuacucaggag

SEQ ID NO: 6094 - RNA, 20 nt, Artificial Sequence
  Antisense oligo
guaaucccagcuacucagga

SEQ ID NO: 6095 - RNA, 20 nt, Artificial Sequence
  Antisense oligo
uguaaucccagcuacucagg

SEQ ID NO: 6096 - RNA, 20 nt, Artificial Sequence
  Antisense oligo
cuguaaucccagcuacucag

SEQ ID NO: 6097 - RNA, 20 nt, Artificial Sequence
  Antisense oligo
ccuguaaucccagcuacuca

SEQ ID NO: 6098 - RNA, 20 nt, Artificial Sequence
  Antisense oligo
gccuguaaucccagcuacuc

SEQ ID NO: 6099 - RNA, 20 nt, Artificial Sequence
  Antisense oligo
cgccuguaaucccagcuacu

SEQ ID NO: 6100 - RNA, 20 nt, Artificial Sequence
  Antisense oligo
gcgccuguaaucccagcuac

SEQ ID NO: 6101 - RNA, 20 nt, Artificial Sequence
  Antisense oligo
ugcgccuguaaucccagcua

SEQ ID NO: 6102 - RNA, 20 nt, Artificial Sequence
  Antisense oligo
augcgccuguaaucccagcu

SEQ ID NO: 6103 - RNA, 20 nt, Artificial Sequence
  Antisense oligo
caugcgccuguaaucccagc

SEQ ID NO: 6104 - RNA, 20 nt, Artificial Sequence
  Antisense oligo
aguucaagaccagccuggcc

SEQ ID NO: 6105 - RNA, 20 nt, Artificial Sequence
  Antisense oligo
aggcggaucaccugagguca

SEQ ID NO: 6106 - RNA, 20 nt, Artificial Sequence
  Antisense oligo
cuguaaucccagcacuuugg

SEQ ID NO: 6107 - RNA, 20 nt, Artificial Sequence
  Antisense oligo
ccuguaaucccagcacuuug

SEQ ID NO: 6108 - RNA, 20 nt, Artificial Sequence
  Antisense oligo
gccuguaaucccagcacuuu

SEQ ID NO: 6109 - RNA, 20 nt, Artificial Sequence
  Antisense oligo
cgccuguaaucccagcacuu

SEQ ID NO: 6110 - RNA, 20 nt, Artificial Sequence
  Antisense oligo
acgccuguaaucccagcacu

SEQ ID NO: 6111 - RNA, 20 nt, Artificial Sequence
  Antisense oligo
cacgccuguaaucccagcac

SEQ ID NO: 6112 - RNA, 20 nt, Artificial Sequence
  Antisense oligo
ucacgccuguaaucccagca

SEQ ID NO: 6113 - RNA, 20 nt, Artificial Sequence
  Antisense oligo
cucacgccuguaaucccagc

SEQ ID NO: 6114 - RNA, 20 nt, Artificial Sequence
  Antisense oligo
gcucacgccuguaaucccag

SEQ ID NO: 6115 - RNA, 20 nt, Artificial Sequence
  Antisense oligo
ggcucacgccuguaauccca

SEQ ID NO: 6116 - RNA, 20 nt, Artificial Sequence
  Antisense oligo
uggcucacgccuguaauccc

SEQ ID NO: 6117 - RNA, 20 nt, Artificial Sequence
  Antisense oligo
guggcucacgccuguaaucc

SEQ ID NO: 6118 - RNA, 20 nt, Artificial Sequence
  Antisense oligo
gguggcucacgccuguaauc

SEQ ID NO: 6119 - RNA, 20 nt, Artificial Sequence
  Antisense oligo
ugguggcucacgccuguaau

SEQ ID NO: 6120 - RNA, 20 nt, Artificial Sequence
  Antisense oligo
augguggcucacgccuguaa

SEQ ID NO: 6121 - RNA, 20 nt, Artificial Sequence
  Antisense oligo
caugguggcucacgccugua

SEQ ID NO: 6122 - RNA, 20 nt, Artificial Sequence
  Antisense oligo
aaacagacggccaggcaugg

SEQ ID NO: 6123 - RNA, 20 nt, Artificial Sequence
  Antisense oligo
aaacccaaaucuuagcagcu

SEQ ID NO: 6124 - RNA, 20 nt, Artificial Sequence
  Antisense oligo
uaaacccaaaucuuagcagc

SEQ ID NO: 6125 - RNA, 20 nt, Artificial Sequence
  Antisense oligo
agaacgcccaccaggcauau

SEQ ID NO: 6126 - RNA, 20 nt, Artificial Sequence
  Antisense oligo
cagaacgcccaccaggcaua

SEQ ID NO: 6127 - RNA, 20 nt, Artificial Sequence
  Antisense oligo
aaugcagaacgcccaccagg

SEQ ID NO: 6128 - RNA, 20 nt, Artificial Sequence
  Antisense oligo
aaaugcagaacgcccaccag

SEQ ID NO: 6129 - RNA, 20 nt, Artificial Sequence
  Antisense oligo
aaaaugcagaacgcccacca

SEQ ID NO: 6130 - RNA, 20 nt, Artificial Sequence
  Antisense oligo
caggguaucagaggucacaa

SEQ ID NO: 6131 - RNA, 20 nt, Artificial Sequence
  Antisense oligo
ucaggguaucagaggucaca

SEQ ID NO: 6132 - RNA, 20 nt, Artificial Sequence
  Antisense oligo
ucugcauucugucugcugac

SEQ ID NO: 6133 - RNA, 20 nt, Artificial Sequence
  Antisense oligo
agugguucugcauucugucu

SEQ ID NO: 6134 - RNA, 20 nt, Artificial Sequence
  Antisense oligo
cagugguucugcauucuguc

SEQ ID NO: 6135 - RNA, 20 nt, Artificial Sequence
  Antisense oligo
uucagugguucugcauucug

SEQ ID NO: 6136 - RNA, 20 nt, Artificial Sequence
  Antisense oligo
cgcucacuggcacauuucag

SEQ ID NO: 6137 - RNA, 20 nt, Artificial Sequence
  Antisense oligo
ucgcucacuggcacauuuca

SEQ ID NO: 6138 - RNA, 20 nt, Artificial Sequence
  Antisense oligo
aucgcucacuggcacauuuc

SEQ ID NO: 6139 - RNA, 20 nt, Artificial Sequence
  Antisense oligo
ccaucgcucacuggcacauu

SEQ ID NO: 6140 - RNA, 20 nt, Artificial Sequence
  Antisense oligo
ucccaucgcucacuggcaca

SEQ ID NO: 6141 - RNA, 20 nt, Artificial Sequence
  Antisense oligo
aucccaucgcucacuggcac

SEQ ID NO: 6142 - RNA, 20 nt, Artificial Sequence
  Antisense oligo
acccaucccaucgcucacug

SEQ ID NO: 6143 - RNA, 20 nt, Artificial Sequence
  Antisense oligo
cacccaucccaucgcucacu

SEQ ID NO: 6144 - RNA, 20 nt, Artificial Sequence
  Antisense oligo
acacccaucccaucgcucac

SEQ ID NO: 6145 - RNA, 20 nt, Artificial Sequence
  Antisense oligo
aacacccaucccaucgcuca

SEQ ID NO: 6146 - RNA, 20 nt, Artificial Sequence
  Antisense oligo
caacacccaucccaucgcuc

SEQ ID NO: 6147 - RNA, 20 nt, Artificial Sequence
  Antisense oligo
acaacacccaucccaucgcu

SEQ ID NO: 6148 - RNA, 20 nt, Artificial Sequence
  Antisense oligo
gacaacacccaucccaucgc

SEQ ID NO: 6149 - RNA, 20 nt, Artificial Sequence
  Antisense oligo
agacaacacccaucccaucg

SEQ ID NO: 6150 - RNA, 20 nt, Artificial Sequence
  Antisense oligo
cagacaacacccaucccauc

SEQ ID NO: 6151 - RNA, 20 nt, Artificial Sequence
  Antisense oligo
ucagacaacacccaucccau

SEQ ID NO: 6152 - RNA, 20 nt, Artificial Sequence
  Antisense oligo
cucagacaacacccauccca

SEQ ID NO: 6153 - RNA, 20 nt, Artificial Sequence
  Antisense oligo
gcucagacaacacccauccc

SEQ ID NO: 6154 - RNA, 20 nt, Artificial Sequence
  Antisense oligo
ucagagaacagcucagacaa

SEQ ID NO: 6155 - RNA, 20 nt, Artificial Sequence
  Antisense oligo
cucagagaacagcucagaca

SEQ ID NO: 6156 - RNA, 20 nt, Artificial Sequence
  Antisense oligo
ccgcucagagaacagcucag

SEQ ID NO: 6157 - RNA, 20 nt, Artificial Sequence
  Antisense oligo
gagccgcucagagaacagcu

SEQ ID NO: 6158 - RNA, 20 nt, Artificial Sequence
  Antisense oligo
aagacuggaagugcccgagc

SEQ ID NO: 6159 - RNA, 20 nt, Artificial Sequence
  Antisense oligo
acgaagacuggaagugcccg

SEQ ID NO: 6160 - RNA, 20 nt, Artificial Sequence
  Antisense oligo
aacgaagacuggaagugccc

SEQ ID NO: 6161 - RNA, 20 nt, Artificial Sequence
  Antisense oligo
ugaacgaagacuggaagugc

SEQ ID NO: 6162 - RNA, 20 nt, Artificial Sequence
  Antisense oligo
gugaacgaagacuggaagug

SEQ ID NO: 6163 - RNA, 20 nt, Artificial Sequence
  Antisense oligo
ggugaacgaagacuggaagu

SEQ ID NO: 6164 - RNA, 20 nt, Artificial Sequence
  Antisense oligo
ggaggugaacgaagacugga

SEQ ID NO: 6165 - RNA, 20 nt, Artificial Sequence
  Antisense oligo
aggaggugaacgaagacugg

SEQ ID NO: 6166 - RNA, 20 nt, Artificial Sequence
  Antisense oligo
aaggaggugaacgaagacug

SEQ ID NO: 6167 - RNA, 20 nt, Artificial Sequence
  Antisense oligo
aaaggaggugaacgaagacu

SEQ ID NO: 6168 - RNA, 20 nt, Artificial Sequence
  Antisense oligo
caaaggaggugaacgaagac

SEQ ID NO: 6169 - RNA, 20 nt, Artificial Sequence
  Antisense oligo
acaaaggaggugaacgaaga

SEQ ID NO: 6170 - RNA, 20 nt, Artificial Sequence
  Antisense oligo
acaggugcuggaucaacauc

SEQ ID NO: 6171 - RNA, 20 nt, Artificial Sequence
  Antisense oligo
gucacaggugcuggaucaac

SEQ ID NO: 6172 - RNA, 20 nt, Artificial Sequence
  Antisense oligo
agucacaggugcuggaucaa

SEQ ID NO: 6173 - RNA, 20 nt, Artificial Sequence
  Antisense oligo
gauccucaagucacaggugc

SEQ ID NO: 6174 - RNA, 20 nt, Artificial Sequence
  Antisense oligo
ugggcugagaaugugacaca

SEQ ID NO: 6175 - RNA, 20 nt, Artificial Sequence
  Antisense oligo
cccugggcugagaaugugac

SEQ ID NO: 6176 - RNA, 20 nt, Artificial Sequence
  Antisense oligo
acucccugggcugagaaugu

SEQ ID NO: 6177 - RNA, 20 nt, Artificial Sequence
  Antisense oligo
ggacucccugggcugagaau

SEQ ID NO: 6178 - RNA, 20 nt, Artificial Sequence
  Antisense oligo
gaaaggacucccugggcuga

SEQ ID NO: 6179 - RNA, 20 nt, Artificial Sequence
  Antisense oligo
agaaaggacucccugggcug

SEQ ID NO: 6180 - RNA, 20 nt, Artificial Sequence
  Antisense oligo
aagaaaggacucccugggcu

SEQ ID NO: 6181 - RNA, 20 nt, Artificial Sequence
  Antisense oligo
uaagaaaggacucccugggc

SEQ ID NO: 6182 - RNA, 20 nt, Artificial Sequence
  Antisense oligo
guguaagaaaggacucccug

SEQ ID NO: 6183 - RNA, 20 nt, Artificial Sequence
  Antisense oligo
uuaagaggagaguugaugga

SEQ ID NO: 6184 - RNA, 20 nt, Artificial Sequence
  Antisense oligo
gacacuuaggaggagcuuaa

SEQ ID NO: 6185 - RNA, 20 nt, Artificial Sequence
  Antisense oligo
ggacacuuaggaggagcuua

SEQ ID NO: 6186 - RNA, 20 nt, Artificial Sequence
  Antisense oligo
aggacacuuaggaggagcuu

SEQ ID NO: 6187 - RNA, 20 nt, Artificial Sequence
  Antisense oligo
gaggacacuuaggaggagcu

SEQ ID NO: 6188 - RNA, 20 nt, Artificial Sequence
  Antisense oligo
gggacucaggagagacuuaa

SEQ ID NO: 6189 - RNA, 20 nt, Artificial Sequence
  Antisense oligo
ggcuuaggagggacucagga

SEQ ID NO: 6190 - RNA, 20 nt, Artificial Sequence
  Antisense oligo
aggcuuaggagggacucagg

SEQ ID NO: 6191 - RNA, 20 nt, Artificial Sequence
  Antisense oligo
gaggcuuaggagggacucag

SEQ ID NO: 6192 - RNA, 20 nt, Artificial Sequence
  Antisense oligo
acucagaaggaggcuuagga

SEQ ID NO: 6193 - RNA, 20 nt, Artificial Sequence
  Antisense oligo
gacucagaaggaggcuuagg

SEQ ID NO: 6194 - RNA, 20 nt, Artificial Sequence
  Antisense oligo
gggacucagaaggaggcuua

SEQ ID NO: 6195 - RNA, 20 nt, Artificial Sequence
  Antisense oligo
aggagggacucagaaggagg

SEQ ID NO: 6196 - RNA, 20 nt, Artificial Sequence
  Antisense oligo
uaggagggacucagaaggag

SEQ ID NO: 6197 - RNA, 20 nt, Artificial Sequence
  Antisense oligo
uuaggagggacucagaagga

SEQ ID NO: 6198 - RNA, 20 nt, Artificial Sequence
  Antisense oligo
cuuaggagggacucagaagg

SEQ ID NO: 6199 - RNA, 20 nt, Artificial Sequence
  Antisense oligo
gcuuaggagggacucagaag

SEQ ID NO: 6200 - RNA, 20 nt, Artificial Sequence
  Antisense oligo
ggcuuaggagggacucagaa

SEQ ID NO: 6201 - RNA, 20 nt, Artificial Sequence
  Antisense oligo
gaggcuuaggagggacucag

SEQ ID NO: 6202 - RNA, 20 nt, Artificial Sequence
  Antisense oligo
cuuaggaggaggcuuaggag

SEQ ID NO: 6203 - RNA, 20 nt, Artificial Sequence
  Antisense oligo
gacuuaggaggaggcuuagg

SEQ ID NO: 6204 - RNA, 20 nt, Artificial Sequence
  Antisense oligo
ggacuuaggaggaggcuuag

SEQ ID NO: 6205 - RNA, 20 nt, Artificial Sequence
  Antisense oligo
uaggagggacucgguaggga

SEQ ID NO: 6206 - RNA, 20 nt, Artificial Sequence
  Antisense oligo
uuaggagggacucgguaggg

SEQ ID NO: 6207 - RNA, 20 nt, Artificial Sequence
  Antisense oligo
cuuaggagggacucgguagg

SEQ ID NO: 6208 - RNA, 20 nt, Artificial Sequence
  Antisense oligo
ccuuaggagggacucgguag

SEQ ID NO: 6209 - RNA, 20 nt, Artificial Sequence
  Antisense oligo
gccuuaggagggacucggua

SEQ ID NO: 6210 - RNA, 20 nt, Artificial Sequence
  Antisense oligo
cuuaggaggagccuuaggag

SEQ ID NO: 6211 - RNA, 20 nt, Artificial Sequence
  Antisense oligo
gacuuaggaggagccuuagg

SEQ ID NO: 6212 - RNA, 20 nt, Artificial Sequence
  Antisense oligo
ggacuuaggaggagccuuag

SEQ ID NO: 6213 - RNA, 20 nt, Artificial Sequence
  Antisense oligo
gggacuuaggaggagccuua

SEQ ID NO: 6214 - RNA, 20 nt, Artificial Sequence
  Antisense oligo
agggacuuaggaggagccuu

SEQ ID NO: 6215 - RNA, 20 nt, Artificial Sequence
  Antisense oligo
cagggacuuaggaggagccu

SEQ ID NO: 6216 - RNA, 20 nt, Artificial Sequence
  Antisense oligo
cagagcagggacuuaggagg

SEQ ID NO: 6217 - RNA, 20 nt, Artificial Sequence
  Antisense oligo
acagagcagggacuuaggag

SEQ ID NO: 6218 - RNA, 20 nt, Artificial Sequence
  Antisense oligo
agggacacauggacagagca

SEQ ID NO: 6219 - RNA, 20 nt, Artificial Sequence
  Antisense oligo
gagggacacauggacagagc

SEQ ID NO: 6220 - RNA, 20 nt, Artificial Sequence
  Antisense oligo
ugagggacacauggacagag

SEQ ID NO: 6221 - RNA, 20 nt, Artificial Sequence
  Antisense oligo
cugagggacacauggacaga

SEQ ID NO: 6222 - RNA, 20 nt, Artificial Sequence
  Antisense oligo
ucugagggacacauggacag

SEQ ID NO: 6223 - RNA, 20 nt, Artificial Sequence
  Antisense oligo
uucugagggacacauggaca

SEQ ID NO: 6224 - RNA, 20 nt, Artificial Sequence
  Antisense oligo
uuuuguguuuucugagggac

SEQ ID NO: 6225 - RNA, 20 nt, Artificial Sequence
  Antisense oligo
aauuggcuccagcucugccg

SEQ ID NO: 6226 - RNA, 20 nt, Artificial Sequence
  Antisense oligo
ugcagcccguguggaauugg

SEQ ID NO: 6227 - RNA, 20 nt, Artificial Sequence
  Antisense oligo
aaguccaaacacuccucagu

SEQ ID NO: 6228 - RNA, 20 nt, Artificial Sequence
  Antisense oligo
gcaaguccaaacacuccuca

SEQ ID NO: 6229 - RNA, 20 nt, Artificial Sequence
  Antisense oligo
agcaaguccaaacacuccuc

SEQ ID NO: 6230 - RNA, 20 nt, Artificial Sequence
  Antisense oligo
uaaccaaagcaaguccaaac

SEQ ID NO: 6231 - RNA, 20 nt, Artificial Sequence
  Antisense oligo
cuaaccaaagcaaguccaaa

SEQ ID NO: 6232 - RNA, 20 nt, Artificial Sequence
  Antisense oligo
ucuaaccaaagcaaguccaa

SEQ ID NO: 6233 - RNA, 20 nt, Artificial Sequence
  Antisense oligo
uguucuaaccaaagcaaguc

SEQ ID NO: 6234 - RNA, 20 nt, Artificial Sequence
  Antisense oligo
cuguucuaaccaaagcaagu

SEQ ID NO: 6235 - RNA, 20 nt, Artificial Sequence
  Antisense oligo
acuguucuaaccaaagcaag

SEQ ID NO: 6236 - RNA, 20 nt, Artificial Sequence
  Antisense oligo
caacuguucuaaccaaagca

SEQ ID NO: 6237 - RNA, 20 nt, Artificial Sequence
  Antisense oligo
ucaacuguucuaaccaaagc

SEQ ID NO: 6238 - RNA, 20 nt, Artificial Sequence
  Antisense oligo
cucaacuguucuaaccaaag

SEQ ID NO: 6239 - RNA, 20 nt, Artificial Sequence
  Antisense oligo
gucucaacuguucuaaccaa

SEQ ID NO: 6240 - RNA, 20 nt, Artificial Sequence
  Antisense oligo
agucucaacuguucuaacca

SEQ ID NO: 6241 - RNA, 20 nt, Artificial Sequence
  Antisense oligo
cuguagucucaacuguucua

SEQ ID NO: 6242 - RNA, 20 nt, Artificial Sequence
  Antisense oligo
ucuguagucucaacuguucu

SEQ ID NO: 6243 - RNA, 20 nt, Artificial Sequence
  Antisense oligo
ugucucuguagucucaacug

SEQ ID NO: 6244 - RNA, 20 nt, Artificial Sequence
  Antisense oligo
uuugucucuguagucucaac

SEQ ID NO: 6245 - RNA, 20 nt, Artificial Sequence
  Antisense oligo
cuuguuuugucucuguaguc

SEQ ID NO: 6246 - RNA, 20 nt, Artificial Sequence
  Antisense oligo
aaguccucuuguuuugucuc

SEQ ID NO: 6247 - RNA, 20 nt, Artificial Sequence
  Antisense oligo
gaagcaaaguccucuuguuu

SEQ ID NO: 6248 - RNA, 20 nt, Artificial Sequence
  Antisense oligo
ggaagcaaaguccucuuguu

SEQ ID NO: 6249 - RNA, 20 nt, Artificial Sequence
  Antisense oligo
ccugaacuugugacuaagau

SEQ ID NO: 6250 - RNA, 20 nt, Artificial Sequence
  Antisense oligo
guccugaacuugugacuaag

SEQ ID NO: 6251 - RNA, 20 nt, Artificial Sequence
  Antisense oligo
ggcauuuguuugaccuuauc

SEQ ID NO: 6252 - RNA, 20 nt, Artificial Sequence
  Antisense oligo
agggcauuuguuugaccuua

SEQ ID NO: 6253 - RNA, 20 nt, Artificial Sequence
  Antisense oligo
acagggcauuuguuugaccu

SEQ ID NO: 6254 - RNA, 20 nt, Artificial Sequence
  Antisense oligo
acuaccaacagggcauuugu

SEQ ID NO: 6255 - RNA, 20 nt, Artificial Sequence
  Antisense oligo
aacuaccaacagggcauuug

SEQ ID NO: 6256 - RNA, 20 nt, Artificial Sequence
  Antisense oligo
uaacuaccaacagggcauuu

SEQ ID NO: 6257 - RNA, 20 nt, Artificial Sequence
  Antisense oligo
auaacuaccaacagggcauu

SEQ ID NO: 6258 - RNA, 20 nt, Artificial Sequence
  Antisense oligo
cuagcuccuuccuucaaaau

SEQ ID NO: 6259 - RNA, 20 nt, Artificial Sequence
  Antisense oligo
acuagcuccuuccuucaaaa

SEQ ID NO: 6260 - RNA, 20 nt, Artificial Sequence
  Antisense oligo
ugacuagcuccuuccuucaa

SEQ ID NO: 6261 - RNA, 20 nt, Artificial Sequence
  Antisense oligo
auugaugacuagcuccuucc

SEQ ID NO: 6262 - RNA, 20 nt, Artificial Sequence
  Antisense oligo
cauugaugacuagcuccuuc

SEQ ID NO: 6263 - RNA, 20 nt, Artificial Sequence
  Antisense oligo
ccauugaugacuagcuccuu

SEQ ID NO: 6264 - RNA, 20 nt, Artificial Sequence
  Antisense oligo
accauugaugacuagcuccu

SEQ ID NO: 6265 - RNA, 20 nt, Artificial Sequence
  Antisense oligo
agaguuaagagaaaucccgg

SEQ ID NO: 6266 - RNA, 20 nt, Artificial Sequence
  Antisense oligo
gguaggauggugacaaggcc

SEQ ID NO: 6267 - RNA, 20 nt, Artificial Sequence
  Antisense oligo
agguaggauggugacaaggc

SEQ ID NO: 6268 - RNA, 20 nt, Artificial Sequence
  Antisense oligo
cagguaggauggugacaagg

SEQ ID NO: 6269 - RNA, 20 nt, Artificial Sequence
  Antisense oligo
ucagguaggauggugacaag

SEQ ID NO: 6270 - RNA, 20 nt, Artificial Sequence
  Antisense oligo
acacagucagguaggauggu

SEQ ID NO: 6271 - RNA, 20 nt, Artificial Sequence
  Antisense oligo
cacacagucagguaggaugg

SEQ ID NO: 6272 - RNA, 20 nt, Artificial Sequence
  Antisense oligo
acacacagucagguaggaug

SEQ ID NO: 6273 - RNA, 20 nt, Artificial Sequence
  Antisense oligo
ucagacacacagucagguag

SEQ ID NO: 6274 - RNA, 20 nt, Artificial Sequence
  Antisense oligo
uucagacacacagucaggua

SEQ ID NO: 6275 - RNA, 20 nt, Artificial Sequence
  Antisense oligo
uuucagacacacagucaggu

SEQ ID NO: 6276 - RNA, 20 nt, Artificial Sequence
  Antisense oligo
gcaguuucagacacacaguc

SEQ ID NO: 6277 - RNA, 20 nt, Artificial Sequence
  Antisense oligo
ucaugcaguuucagacacac

SEQ ID NO: 6278 - RNA, 20 nt, Artificial Sequence
  Antisense oligo
uucaugcaguuucagacaca

SEQ ID NO: 6279 - RNA, 20 nt, Artificial Sequence
  Antisense oligo
cuucaugcaguuucagacac

SEQ ID NO: 6280 - RNA, 20 nt, Artificial Sequence
  Antisense oligo
ggcuucaugcaguuucagac

SEQ ID NO: 6281 - RNA, 20 nt, Artificial Sequence
  Antisense oligo
agauggcuucaugcaguuuc

SEQ ID NO: 6282 - RNA, 20 nt, Artificial Sequence
  Antisense oligo
aguagcuuugugcugcugca

SEQ ID NO: 6283 - RNA, 20 nt, Artificial Sequence
  Antisense oligo
aaguagcuuugugcugcugc

SEQ ID NO: 6284 - RNA, 20 nt, Artificial Sequence
  Antisense oligo
uggcagcucguaaaacuuaa

SEQ ID NO: 6285 - RNA, 20 nt, Artificial Sequence
  Antisense oligo
cuggcagcucguaaaacuua

SEQ ID NO: 6286 - RNA, 20 nt, Artificial Sequence
  Antisense oligo
gcuggcagcucguaaaacuu

SEQ ID NO: 6287 - RNA, 20 nt, Artificial Sequence
  Antisense oligo
ggcuggcagcucguaaaacu

SEQ ID NO: 6288 - RNA, 20 nt, Artificial Sequence
  Antisense oligo
aggcuggcagcucguaaaac

SEQ ID NO: 6289 - RNA, 20 nt, Artificial Sequence
  Antisense oligo
aaggcuggcagcucguaaaa

SEQ ID NO: 6290 - RNA, 20 nt, Artificial Sequence
  Antisense oligo
uaaggcuggcagcucguaaa

SEQ ID NO: 6291 - RNA, 20 nt, Artificial Sequence
  Antisense oligo
gauaaggcuggcagcucgua

SEQ ID NO: 6292 - RNA, 20 nt, Artificial Sequence
  Antisense oligo
agauaaggcuggcagcucgu

SEQ ID NO: 6293 - RNA, 20 nt, Artificial Sequence
  Antisense oligo
cagauaaggcuggcagcucg

SEQ ID NO: 6294 - RNA, 20 nt, Artificial Sequence
  Antisense oligo
gcagauaaggcuggcagcuc

SEQ ID NO: 6295 - RNA, 20 nt, Artificial Sequence
  Antisense oligo
ucucggcagauaaggcuggc

SEQ ID NO: 6296 - RNA, 20 nt, Artificial Sequence
  Antisense oligo
ccagagauagaagucuaauc

SEQ ID NO: 6297 - RNA, 20 nt, Artificial Sequence
  Antisense oligo
caccagagauagaagucuaa

SEQ ID NO: 6298 - RNA, 20 nt, Artificial Sequence
  Antisense oligo
accaccagagauagaagucu

SEQ ID NO: 6299 - RNA, 20 nt, Artificial Sequence
  Antisense oligo
uaccaccagagauagaaguc

SEQ ID NO: 6300 - RNA, 20 nt, Artificial Sequence
  Antisense oligo
uuaccaccagagauagaagu

SEQ ID NO: 6301 - RNA, 20 nt, Artificial Sequence
  Antisense oligo
acuuaccaccagagauagaa

SEQ ID NO: 6302 - RNA, 20 nt, Artificial Sequence
  Antisense oligo
ccacuuaccaccagagauag

SEQ ID NO: 6303 - RNA, 20 nt, Artificial Sequence
  Antisense oligo
cuccacuuaccaccagagau

SEQ ID NO: 6304 - RNA, 20 nt, Artificial Sequence
  Antisense oligo
uguugacuccacuuaccacc

SEQ ID NO: 6305 - RNA, 20 nt, Artificial Sequence
  Antisense oligo
guguugacuccacuuaccac

SEQ ID NO: 6306 - RNA, 20 nt, Artificial Sequence
  Antisense oligo
uguguugacuccacuuacca

SEQ ID NO: 6307 - RNA, 20 nt, Artificial Sequence
  Antisense oligo
guguguugacuccacuuacc

SEQ ID NO: 6308 - RNA, 20 nt, Artificial Sequence
  Antisense oligo
cuuguguguugacuccacuu

SEQ ID NO: 6309 - RNA, 20 nt, Artificial Sequence
  Antisense oligo
ccuuguguguugacuccacu

SEQ ID NO: 6310 - RNA, 20 nt, Artificial Sequence
  Antisense oligo
accuuguguguugacuccac

SEQ ID NO: 6311 - RNA, 20 nt, Artificial Sequence
  Antisense oligo
auaccuuguguguugacucc

SEQ ID NO: 6312 - RNA, 20 nt, Artificial Sequence
  Antisense oligo
gauaccuuguguguugacuc

SEQ ID NO: 6313 - RNA, 20 nt, Artificial Sequence
  Antisense oligo
ugauaccuuguguguugacu

SEQ ID NO: 6314 - RNA, 20 nt, Artificial Sequence
  Antisense oligo
ugugauaccuuguguguuga

SEQ ID NO: 6315 - RNA, 20 nt, Artificial Sequence
  Antisense oligo
gugugauaccuuguguguug

SEQ ID NO: 6316 - RNA, 20 nt, Artificial Sequence
  Antisense oligo
ggugugauaccuuguguguu

SEQ ID NO: 6317 - RNA, 20 nt, Artificial Sequence
  Antisense oligo
gggugugauaccuugugugu

SEQ ID NO: 6318 - RNA, 20 nt, Artificial Sequence
  Antisense oligo
cgggugugauaccuugugug

SEQ ID NO: 6319 - RNA, 20 nt, Artificial Sequence
  Antisense oligo
ccgggugugauaccuugugu

SEQ ID NO: 6320 - RNA, 20 nt, Artificial Sequence
  Antisense oligo
aaauuccgcaccuaucccgg

SEQ ID NO: 6321 - RNA, 20 nt, Artificial Sequence
  Antisense oligo
gaaauuccgcaccuaucccg

SEQ ID NO: 6322 - RNA, 20 nt, Artificial Sequence
  Antisense oligo
ugaaauuccgcaccuauccc

SEQ ID NO: 6323 - RNA, 20 nt, Artificial Sequence
  Antisense oligo
uugaaauuccgcaccuaucc

SEQ ID NO: 6324 - RNA, 20 nt, Artificial Sequence
  Antisense oligo
cuugaaauuccgcaccuauc

SEQ ID NO: 6325 - RNA, 20 nt, Artificial Sequence
  Antisense oligo
gcuugaaauuccgcaccuau

SEQ ID NO: 6326 - RNA, 20 nt, Artificial Sequence
  Antisense oligo
ugcuugaaauuccgcaccua

SEQ ID NO: 6327 - RNA, 20 nt, Artificial Sequence
  Antisense oligo
cugcuugaaauuccgcaccu

SEQ ID NO: 6328 - RNA, 20 nt, Artificial Sequence
  Antisense oligo
gcugcuugaaauuccgcacc

SEQ ID NO: 6329 - RNA, 20 nt, Artificial Sequence
  Antisense oligo
uugaggcugcuugaaauucc

SEQ ID NO: 6330 - RNA, 20 nt, Artificial Sequence
  Antisense oligo
auugaggcugcuugaaauuc

SEQ ID NO: 6331 - RNA, 20 nt, Artificial Sequence
  Antisense oligo
caaauugaggcugcuugaaa

SEQ ID NO: 6332 - RNA, 20 nt, Artificial Sequence
  Antisense oligo
ccaaauugaggcugcuugaa

SEQ ID NO: 6333 - RNA, 20 nt, Artificial Sequence
  Antisense oligo
uccaaauugaggcugcuuga

SEQ ID NO: 6334 - RNA, 20 nt, Artificial Sequence
  Antisense oligo
cuuuccaaauugaggcugcu

SEQ ID NO: 6335 - RNA, 20 nt, Artificial Sequence
  Antisense oligo
ccuuuccaaauugaggcugc

SEQ ID NO: 6336 - RNA, 20 nt, Artificial Sequence
  Antisense oligo
uuccuuuccaaauugaggcu

SEQ ID NO: 6337 - RNA, 20 nt, Artificial Sequence
  Antisense oligo
aucagucuguuuccuuucca

SEQ ID NO: 6338 - RNA, 20 nt, Artificial Sequence
  Antisense oligo
gcuccaucucaucccagcac

SEQ ID NO: 6339 - RNA, 20 nt, Artificial Sequence
  Antisense oligo
auguccacugcugaaaccac

SEQ ID NO: 6340 - RNA, 20 nt, Artificial Sequence
  Antisense oligo
aaauguccacugcugaaacc

SEQ ID NO: 6341 - RNA, 20 nt, Artificial Sequence
  Antisense oligo
gaaauguccacugcugaaac

SEQ ID NO: 6342 - RNA, 20 nt, Artificial Sequence
  Antisense oligo
aagaaauguccacugcugaa

SEQ ID NO: 6343 - RNA, 20 nt, Artificial Sequence
  Antisense oligo
caagaaauguccacugcuga

SEQ ID NO: 6344 - RNA, 20 nt, Artificial Sequence
  Antisense oligo
acaagaaauguccacugcug

SEQ ID NO: 6345 - RNA, 20 nt, Artificial Sequence
  Antisense oligo
cacaagaaauguccacugcu

SEQ ID NO: 6346 - RNA, 20 nt, Artificial Sequence
  Antisense oligo
cccagcaucaagcaggugca

SEQ ID NO: 6347 - RNA, 20 nt, Artificial Sequence
  Antisense oligo
acccagcaucaagcaggugc

SEQ ID NO: 6348 - RNA, 20 nt, Artificial Sequence
  Antisense oligo
cagaacagaacccagcauca

SEQ ID NO: 6349 - RNA, 20 nt, Artificial Sequence
  Antisense oligo
ccagaacagaacccagcauc

SEQ ID NO: 6350 - RNA, 20 nt, Artificial Sequence
  Antisense oligo
cccagaacagaacccagcau

SEQ ID NO: 6351 - RNA, 20 nt, Artificial Sequence
  Antisense oligo
acacccagaacagaacccag

SEQ ID NO: 6352 - RNA, 20 nt, Artificial Sequence
  Antisense oligo
ccacacccagaacagaaccc

SEQ ID NO: 6353 - RNA, 20 nt, Artificial Sequence
  Antisense oligo
aaagcccaagguggcagaag

SEQ ID NO: 6354 - RNA, 20 nt, Artificial Sequence
  Antisense oligo
caggaaagcccaagguggca

SEQ ID NO: 6355 - RNA, 20 nt, Artificial Sequence
  Antisense oligo
aagucgucuucuccgcgugg

SEQ ID NO: 6356 - RNA, 20 nt, Artificial Sequence
  Antisense oligo
aaagucgucuucuccgcgug

SEQ ID NO: 6357 - RNA, 20 nt, Artificial Sequence
  Antisense oligo
aaaagucgucuucuccgcgu

SEQ ID NO: 6358 - RNA, 20 nt, Artificial Sequence
  Antisense oligo
gaaaagucgucuucuccgcg

SEQ ID NO: 6359 - RNA, 20 nt, Artificial Sequence
  Antisense oligo
cguaguucucugcaaacaac

SEQ ID NO: 6360 - RNA, 20 nt, Artificial Sequence
  Antisense oligo
ccguaguucucugcaaacaa

SEQ ID NO: 6361 - RNA, 20 nt, Artificial Sequence
  Antisense oligo
cccguaguucucugcaaaca

SEQ ID NO: 6362 - RNA, 20 nt, Artificial Sequence
  Antisense oligo
ggaaagaccauguuuggaca

SEQ ID NO: 6363 - RNA, 20 nt, Artificial Sequence
  Antisense oligo
ugggaaagaccauguuugga

SEQ ID NO: 6364 - RNA, 20 nt, Artificial Sequence
  Antisense oligo
gugggaaagaccauguuugg

SEQ ID NO: 6365 - RNA, 20 nt, Artificial Sequence
  Antisense oligo
agaaggugggaaagaccaug

SEQ ID NO: 6366 - RNA, 20 nt, Artificial Sequence
  Antisense oligo
gucaagaaggugggaaagac

SEQ ID NO: 6367 - RNA, 20 nt, Artificial Sequence
  Antisense oligo
acaaugucaagaagguggga

SEQ ID NO: 6368 - RNA, 20 nt, Artificial Sequence
  Antisense oligo
uacaaugucaagaagguggg

SEQ ID NO: 6369 - RNA, 20 nt, Artificial Sequence
  Antisense oligo
cuacaaugucaagaaggugg

SEQ ID NO: 6370 - RNA, 20 nt, Artificial Sequence
  Antisense oligo
aagcuacaaugucaagaagg

SEQ ID NO: 6371 - RNA, 20 nt, Artificial Sequence
  Antisense oligo
caagcuacaaugucaagaag

SEQ ID NO: 6372 - RNA, 20 nt, Artificial Sequence
  Antisense oligo
cgcuauggccuuuguuacug

SEQ ID NO: 6373 - RNA, 20 nt, Artificial Sequence
  Antisense oligo
gcgcuauggccuuuguuacu

SEQ ID NO: 6374 - RNA, 20 nt, Artificial Sequence
  Antisense oligo
ggcgcuauggccuuuguuac

SEQ ID NO: 6375 - RNA, 20 nt, Artificial Sequence
  Antisense oligo
uggcgcuauggccuuuguua

SEQ ID NO: 6376 - RNA, 20 nt, Artificial Sequence
  Antisense oligo
guggcgcuauggccuuuguu

SEQ ID NO: 6377 - RNA, 20 nt, Artificial Sequence
  Antisense oligo
uguggcgcuauggccuuugu

SEQ ID NO: 6378 - RNA, 20 nt, Artificial Sequence
  Antisense oligo
uguguggcgcuauggccuuu

SEQ ID NO: 6379 - RNA, 20 nt, Artificial Sequence
  Antisense oligo
auguguggcgcuauggccuu

SEQ ID NO: 6380 - RNA, 20 nt, Artificial Sequence
  Antisense oligo
gauguguggcgcuauggccu

SEQ ID NO: 6381 - RNA, 20 nt, Artificial Sequence
  Antisense oligo
cagauguguggcgcuauggc

SEQ ID NO: 6382 - RNA, 20 nt, Artificial Sequence
  Antisense oligo
gcagauguguggcgcuaugg

SEQ ID NO: 6383 - RNA, 20 nt, Artificial Sequence
  Antisense oligo
ggcagauguguggcgcuaug

SEQ ID NO: 6384 - RNA, 20 nt, Artificial Sequence
  Antisense oligo
gggcagauguguggcgcuau

SEQ ID NO: 6385 - RNA, 20 nt, Artificial Sequence
  Antisense oligo
accugggacacgacaugcag

SEQ ID NO: 6386 - RNA, 20 nt, Artificial Sequence
  Antisense oligo
gaccugggacacgacaugca

SEQ ID NO: 6387 - RNA, 20 nt, Artificial Sequence
  Antisense oligo
agaccugggacacgacaugc

SEQ ID NO: 6388 - RNA, 20 nt, Artificial Sequence
  Antisense oligo
cagaccugggacacgacaug

SEQ ID NO: 6389 - RNA, 20 nt, Artificial Sequence
  Antisense oligo
ucagaccugggacacgacau

SEQ ID NO: 6390 - RNA, 20 nt, Artificial Sequence
  Antisense oligo
ccaucagaccugggacacga

SEQ ID NO: 6391 - RNA, 20 nt, Artificial Sequence
  Antisense oligo
ugccaucagaccugggacac

SEQ ID NO: 6392 - RNA, 20 nt, Artificial Sequence
  Antisense oligo
gucauccugccaucagaccu

SEQ ID NO: 6393 - RNA, 20 nt, Artificial Sequence
  Antisense oligo
gggucauccugccaucagac

SEQ ID NO: 6394 - RNA, 20 nt, Artificial Sequence
  Antisense oligo
uucuuugggacggaggagcc

SEQ ID NO: 6395 - RNA, 20 nt, Artificial Sequence
  Antisense oligo
uuucuuugggacggaggagc

SEQ ID NO: 6396 - RNA, 20 nt, Artificial Sequence
  Antisense oligo
cuuucuuugggacggaggag

SEQ ID NO: 6397 - RNA, 20 nt, Artificial Sequence
  Antisense oligo
gcuuucuuugggacggagga

SEQ ID NO: 6398 - RNA, 20 nt, Artificial Sequence
  Antisense oligo
ggcuuucuuugggacggagg

SEQ ID NO: 6399 - RNA, 20 nt, Artificial Sequence
  Antisense oligo
caguggcuuucuuugggacg

SEQ ID NO: 6400 - RNA, 20 nt, Artificial Sequence
  Antisense oligo
aacaguggcuuucuuuggga

SEQ ID NO: 6401 - RNA, 20 nt, Artificial Sequence
  Antisense oligo
acaacaguggcuuucuuugg

SEQ ID NO: 6402 - RNA, 20 nt, Artificial Sequence
  Antisense oligo
gaagucacaacaguggcuuu

SEQ ID NO: 6403 - RNA, 20 nt, Artificial Sequence
  Antisense oligo
agaagucacaacaguggcuu

SEQ ID NO: 6404 - RNA, 20 nt, Artificial Sequence
  Antisense oligo
ggagaagucacaacaguggc

SEQ ID NO: 6405 - RNA, 20 nt, Artificial Sequence
  Antisense oligo
caugggagaagucacaacag

SEQ ID NO: 6406 - RNA, 20 nt, Artificial Sequence
  Antisense oligo
cugggugacagagugagacc

SEQ ID NO: 6407 - RNA, 20 nt, Artificial Sequence
  Antisense oligo
ccugggugacagagugagac

SEQ ID NO: 6408 - RNA, 20 nt, Artificial Sequence
  Antisense oligo
gccugggugacagagugaga

SEQ ID NO: 6409 - RNA, 20 nt, Artificial Sequence
  Antisense oligo
agccugggugacagagugag

SEQ ID NO: 6410 - RNA, 20 nt, Artificial Sequence
  Antisense oligo
cagccugggugacagaguga

SEQ ID NO: 6411 - RNA, 20 nt, Artificial Sequence
  Antisense oligo
uccagccugggugacagagu

SEQ ID NO: 6412 - RNA, 20 nt, Artificial Sequence
  Antisense oligo
acuccagccugggugacaga

SEQ ID NO: 6413 - RNA, 20 nt, Artificial Sequence
  Antisense oligo
aucacgccacugcacuccag

SEQ ID NO: 6414 - RNA, 20 nt, Artificial Sequence
  Antisense oligo
gaucacgccacugcacucca

SEQ ID NO: 6415 - RNA, 20 nt, Artificial Sequence
  Antisense oligo
agaucacgccacugcacucc

SEQ ID NO: 6416 - RNA, 20 nt, Artificial Sequence
  Antisense oligo
gagaucacgccacugcacuc

SEQ ID NO: 6417 - RNA, 20 nt, Artificial Sequence
  Antisense oligo
cgagaucacgccacugcacu

SEQ ID NO: 6418 - RNA, 20 nt, Artificial Sequence
  Antisense oligo
aagccgagaucacgccacug

SEQ ID NO: 6419 - RNA, 20 nt, Artificial Sequence
  Antisense oligo
uaagccgagaucacgccacu

SEQ ID NO: 6420 - RNA, 20 nt, Artificial Sequence
  Antisense oligo
guaagccgagaucacgccac

SEQ ID NO: 6421 - RNA, 20 nt, Artificial Sequence
  Antisense oligo
aguaagccgagaucacgcca

SEQ ID NO: 6422 - RNA, 20 nt, Artificial Sequence
  Antisense oligo
caguaagccgagaucacgcc

SEQ ID NO: 6423 - RNA, 20 nt, Artificial Sequence
  Antisense oligo
gaggcggagcuugcaguaag

SEQ ID NO: 6424 - RNA, 20 nt, Artificial Sequence
  Antisense oligo
ggaggcggagcuugcaguaa

SEQ ID NO: 6425 - RNA, 20 nt, Artificial Sequence
  Antisense oligo
aggaggcggagcuugcagua

SEQ ID NO: 6426 - RNA, 20 nt, Artificial Sequence
  Antisense oligo
aauggcgugaacccaggagg

SEQ ID NO: 6427 - RNA, 20 nt, Artificial Sequence
  Antisense oligo
gaauggcgugaacccaggag

SEQ ID NO: 6428 - RNA, 20 nt, Artificial Sequence
  Antisense oligo
agaauggcgugaacccagga

SEQ ID NO: 6429 - RNA, 20 nt, Artificial Sequence
  Antisense oligo
gagaauggcgugaacccagg

SEQ ID NO: 6430 - RNA, 20 nt, Artificial Sequence
  Antisense oligo
ggagaauggcgugaacccag

SEQ ID NO: 6431 - RNA, 20 nt, Artificial Sequence
  Antisense oligo
aggagaauggcgugaaccca

SEQ ID NO: 6432 - RNA, 20 nt, Artificial Sequence
  Antisense oligo
caggagaauggcgugaaccc

SEQ ID NO: 6433 - RNA, 20 nt, Artificial Sequence
  Antisense oligo
acaggagaauggcgugaacc

SEQ ID NO: 6434 - RNA, 20 nt, Artificial Sequence
  Antisense oligo
gacaggagaauggcgugaac

SEQ ID NO: 6435 - RNA, 20 nt, Artificial Sequence
  Antisense oligo
agacaggagaauggcgugaa

SEQ ID NO: 6436 - RNA, 20 nt, Artificial Sequence
  Antisense oligo
gagacaggagaauggcguga

SEQ ID NO: 6437 - RNA, 20 nt, Artificial Sequence
  Antisense oligo
ugagacaggagaauggcgug

SEQ ID NO: 6438 - RNA, 20 nt, Artificial Sequence
  Antisense oligo
cagcuacuugggagguugag

SEQ ID NO: 6439 - RNA, 20 nt, Artificial Sequence
  Antisense oligo
ccagcuacuugggagguuga

SEQ ID NO: 6440 - RNA, 20 nt, Artificial Sequence
  Antisense oligo
aaauuagccaggcguggugg

SEQ ID NO: 6441 - RNA, 20 nt, Artificial Sequence
  Antisense oligo
aaaauuagccaggcguggug

SEQ ID NO: 6442 - RNA, 20 nt, Artificial Sequence
  Antisense oligo
uggcuaacacggugaaaccc

SEQ ID NO: 6443 - RNA, 20 nt, Artificial Sequence
  Antisense oligo
cuggcuaacacggugaaacc

SEQ ID NO: 6444 - RNA, 20 nt, Artificial Sequence
  Antisense oligo
ccuggcuaacacggugaaac

SEQ ID NO: 6445 - RNA, 20 nt, Artificial Sequence
  Antisense oligo
uccuggcuaacacggugaaa

SEQ ID NO: 6446 - RNA, 20 nt, Artificial Sequence
  Antisense oligo
auccuggcuaacacggugaa

SEQ ID NO: 6447 - RNA, 20 nt, Artificial Sequence
  Antisense oligo
cauccuggcuaacacgguga

SEQ ID NO: 6448 - RNA, 20 nt, Artificial Sequence
  Antisense oligo
ccauccuggcuaacacggug

SEQ ID NO: 6449 - RNA, 20 nt, Artificial Sequence
  Antisense oligo
accauccuggcuaacacggu

SEQ ID NO: 6450 - RNA, 20 nt, Artificial Sequence
  Antisense oligo
gaccauccuggcuaacacgg

SEQ ID NO: 6451 - RNA, 20 nt, Artificial Sequence
  Antisense oligo
agaccauccuggcuaacacg

SEQ ID NO: 6452 - RNA, 20 nt, Artificial Sequence
  Antisense oligo
gagaccauccuggcuaacac

SEQ ID NO: 6453 - RNA, 20 nt, Artificial Sequence
  Antisense oligo
cgagaccauccuggcuaaca

SEQ ID NO: 6454 - RNA, 20 nt, Artificial Sequence
  Antisense oligo
ucgagaccauccuggcuaac

SEQ ID NO: 6455 - RNA, 20 nt, Artificial Sequence
  Antisense oligo
aucgagaccauccuggcuaa

SEQ ID NO: 6456 - RNA, 20 nt, Artificial Sequence
  Antisense oligo
gaucgagaccauccuggcua

SEQ ID NO: 6457 - RNA, 20 nt, Artificial Sequence
  Antisense oligo
agaucgagaccauccuggcu

SEQ ID NO: 6458 - RNA, 20 nt, Artificial Sequence
  Antisense oligo
gagaucgagaccauccuggc

SEQ ID NO: 6459 - RNA, 20 nt, Artificial Sequence
  Antisense oligo
ugagaucgagaccauccugg

SEQ ID NO: 6460 - RNA, 20 nt, Artificial Sequence
  Antisense oligo
augagaucgagaccauccug

SEQ ID NO: 6461 - RNA, 20 nt, Artificial Sequence
  Antisense oligo
caugagaucgagaccauccu

SEQ ID NO: 6462 - RNA, 20 nt, Artificial Sequence
  Antisense oligo
ucccagcacuuuggaggcca

SEQ ID NO: 6463 - RNA, 20 nt, Artificial Sequence
  Antisense oligo
aucccagcacuuuggaggcc

SEQ ID NO: 6464 - RNA, 20 nt, Artificial Sequence
  Antisense oligo
aaucccagcacuuuggaggc

SEQ ID NO: 6465 - RNA, 20 nt, Artificial Sequence
  Antisense oligo
uaaucccagcacuuuggagg

SEQ ID NO: 6466 - RNA, 20 nt, Artificial Sequence
  Antisense oligo
guaaucccagcacuuuggag

SEQ ID NO: 6467 - RNA, 20 nt, Artificial Sequence
  Antisense oligo
uguaaucccagcacuuugga

SEQ ID NO: 6468 - RNA, 20 nt, Artificial Sequence
  Antisense oligo
cuguaaucccagcacuuugg

SEQ ID NO: 6469 - RNA, 20 nt, Artificial Sequence
  Antisense oligo
ccuguaaucccagcacuuug

SEQ ID NO: 6470 - RNA, 20 nt, Artificial Sequence
  Antisense oligo
gccuguaaucccagcacuuu

SEQ ID NO: 6471 - RNA, 20 nt, Artificial Sequence
  Antisense oligo
agccuguaaucccagcacuu

SEQ ID NO: 6472 - RNA, 20 nt, Artificial Sequence
  Antisense oligo
aagccuguaaucccagcacu

SEQ ID NO: 6473 - RNA, 20 nt, Artificial Sequence
  Antisense oligo
uaagccuguaaucccagcac

SEQ ID NO: 6474 - RNA, 20 nt, Artificial Sequence
  Antisense oligo
uuaagccuguaaucccagca

SEQ ID NO: 6475 - RNA, 20 nt, Artificial Sequence
  Antisense oligo
uuuaagccuguaaucccagc

SEQ ID NO: 6476 - RNA, 20 nt, Artificial Sequence
  Antisense oligo
aagacagguaaaacugaucc

SEQ ID NO: 6477 - RNA, 20 nt, Artificial Sequence
  Antisense oligo
ggaagacagguaaaacugau

SEQ ID NO: 6478 - RNA, 20 nt, Artificial Sequence
  Antisense oligo
uggaagacagguaaaacuga

SEQ ID NO: 6479 - RNA, 20 nt, Artificial Sequence
  Antisense oligo
cuggaagacagguaaaacug

SEQ ID NO: 6480 - RNA, 20 nt, Artificial Sequence
  Antisense oligo
caaagcuggaagacagguaa

SEQ ID NO: 6481 - RNA, 20 nt, Artificial Sequence
  Antisense oligo
gucaaagcuggaagacaggu

SEQ ID NO: 6482 - RNA, 20 nt, Artificial Sequence
  Antisense oligo
ggucaaagcuggaagacagg

SEQ ID NO: 6483 - RNA, 20 nt, Artificial Sequence
  Antisense oligo
gaaagucggaggcagaaagg

SEQ ID NO: 6484 - RNA, 20 nt, Artificial Sequence
  Antisense oligo
ggaaagucggaggcagaaag

SEQ ID NO: 6485 - RNA, 20 nt, Artificial Sequence
  Antisense oligo
gggaaagucggaggcagaaa

SEQ ID NO: 6486 - RNA, 20 nt, Artificial Sequence
  Antisense oligo
aauugccgaucucugcacca

SEQ ID NO: 6487 - RNA, 20 nt, Artificial Sequence
  Antisense oligo
gaauugccgaucucugcacc

SEQ ID NO: 6488 - RNA, 20 nt, Artificial Sequence
  Antisense oligo
ggaauugccgaucucugcac

SEQ ID NO: 6489 - RNA, 20 nt, Artificial Sequence
  Antisense oligo
aggaauugccgaucucugca

SEQ ID NO: 6490 - RNA, 20 nt, Artificial Sequence
  Antisense oligo
aaggaauugccgaucucugc

SEQ ID NO: 6491 - RNA, 20 nt, Artificial Sequence
  Antisense oligo
gaaggaauugccgaucucug

SEQ ID NO: 6492 - RNA, 20 nt, Artificial Sequence
  Antisense oligo
agaaggaauugccgaucucu

SEQ ID NO: 6493 - RNA, 20 nt, Artificial Sequence
  Antisense oligo
aagaaggaauugccgaucuc

SEQ ID NO: 6494 - RNA, 20 nt, Artificial Sequence
  Antisense oligo
gaaagaaggaauugccgauc

SEQ ID NO: 6495 - RNA, 20 nt, Artificial Sequence
  Antisense oligo
ggaaagaaggaauugccgau

SEQ ID NO: 6496 - RNA, 20 nt, Artificial Sequence
  Antisense oligo
gggaaagaaggaauugccga

SEQ ID NO: 6497 - RNA, 20 nt, Artificial Sequence
  Antisense oligo
cgggaaagaaggaauugccg

SEQ ID NO: 6498 - RNA, 20 nt, Artificial Sequence
  Antisense oligo
acgggaaagaaggaauugcc

SEQ ID NO: 6499 - RNA, 20 nt, Artificial Sequence
  Antisense oligo
cacagagacgggaaagaagg

SEQ ID NO: 6500 - RNA, 20 nt, Artificial Sequence
  Antisense oligo
augaacucaagugggugaaa

SEQ ID NO: 6501 - RNA, 20 nt, Artificial Sequence
  Antisense oligo
caugaacucaagugggugaa

SEQ ID NO: 6502 - RNA, 20 nt, Artificial Sequence
  Antisense oligo
gagcaaaacuccaucucaaa

SEQ ID NO: 6503 - RNA, 20 nt, Artificial Sequence
  Antisense oligo
agagcaaaacuccaucucaa

SEQ ID NO: 6504 - RNA, 20 nt, Artificial Sequence
  Antisense oligo
aagagcaaaacuccaucuca

SEQ ID NO: 6505 - RNA, 20 nt, Artificial Sequence
  Antisense oligo
caagagcaaaacuccaucuc

SEQ ID NO: 6506 - RNA, 20 nt, Artificial Sequence
  Antisense oligo
acaagagcaaaacuccaucu

SEQ ID NO: 6507 - RNA, 20 nt, Artificial Sequence
  Antisense oligo
aacaagagcaaaacuccauc

SEQ ID NO: 6508 - RNA, 20 nt, Artificial Sequence
  Antisense oligo
caacaagagcaaaacuccau

SEQ ID NO: 6509 - RNA, 20 nt, Artificial Sequence
  Antisense oligo
gcaacaagagcaaaacucca

SEQ ID NO: 6510 - RNA, 20 nt, Artificial Sequence
  Antisense oligo
ggcaacaagagcaaaacucc

SEQ ID NO: 6511 - RNA, 20 nt, Artificial Sequence
  Antisense oligo
gggcaacaagagcaaaacuc

SEQ ID NO: 6512 - RNA, 20 nt, Artificial Sequence
  Antisense oligo
ugggcaacaagagcaaaacu

SEQ ID NO: 6513 - RNA, 20 nt, Artificial Sequence
  Antisense oligo
cugggcaacaagagcaaaac

SEQ ID NO: 6514 - RNA, 20 nt, Artificial Sequence
  Antisense oligo
ccugggcaacaagagcaaaa

SEQ ID NO: 6515 - RNA, 20 nt, Artificial Sequence
  Antisense oligo
gccugggcaacaagagcaaa

SEQ ID NO: 6516 - RNA, 20 nt, Artificial Sequence
  Antisense oligo
agccugggcaacaagagcaa

SEQ ID NO: 6517 - RNA, 20 nt, Artificial Sequence
  Antisense oligo
cagccugggcaacaagagca

SEQ ID NO: 6518 - RNA, 20 nt, Artificial Sequence
  Antisense oligo
uccagccugggcaacaagag

SEQ ID NO: 6519 - RNA, 20 nt, Artificial Sequence
  Antisense oligo
cuccagccugggcaacaaga

SEQ ID NO: 6520 - RNA, 20 nt, Artificial Sequence
  Antisense oligo
acuccagccugggcaacaag

SEQ ID NO: 6521 - RNA, 20 nt, Artificial Sequence
  Antisense oligo
cacuccagccugggcaacaa

SEQ ID NO: 6522 - RNA, 20 nt, Artificial Sequence
  Antisense oligo
auugcagugagcugagaugg

SEQ ID NO: 6523 - RNA, 20 nt, Artificial Sequence
  Antisense oligo
gauugcagugagcugagaug

SEQ ID NO: 6524 - RNA, 20 nt, Artificial Sequence
  Antisense oligo
agauugcagugagcugagau

SEQ ID NO: 6525 - RNA, 20 nt, Artificial Sequence
  Antisense oligo
gagauugcagugagcugaga

SEQ ID NO: 6526 - RNA, 20 nt, Artificial Sequence
  Antisense oligo
ggagaaucacuugaaccuag

SEQ ID NO: 6527 - RNA, 20 nt, Artificial Sequence
  Antisense oligo
aggagaaucacuugaaccua

SEQ ID NO: 6528 - RNA, 20 nt, Artificial Sequence
  Antisense oligo
caggagaaucacuugaaccu

SEQ ID NO: 6529 - RNA, 20 nt, Artificial Sequence
  Antisense oligo
gcaggagaaucacuugaacc

SEQ ID NO: 6530 - RNA, 20 nt, Artificial Sequence
  Antisense oligo
ggcaggagaaucacuugaac

SEQ ID NO: 6531 - RNA, 20 nt, Artificial Sequence
  Antisense oligo
aggcaggagaaucacuugaa

SEQ ID NO: 6532 - RNA, 20 nt, Artificial Sequence
  Antisense oligo
gaggcaggagaaucacuuga

SEQ ID NO: 6533 - RNA, 20 nt, Artificial Sequence
  Antisense oligo
ugaggcaggagaaucacuug

SEQ ID NO: 6534 - RNA, 20 nt, Artificial Sequence
  Antisense oligo
cugaggcaggagaaucacuu

SEQ ID NO: 6535 - RNA, 20 nt, Artificial Sequence
  Antisense oligo
gcugaggcaggagaaucacu

SEQ ID NO: 6536 - RNA, 20 nt, Artificial Sequence
  Antisense oligo
ggcugaggcaggagaaucac

SEQ ID NO: 6537 - RNA, 20 nt, Artificial Sequence
  Antisense oligo
aggcugaggcaggagaauca

SEQ ID NO: 6538 - RNA, 20 nt, Artificial Sequence
  Antisense oligo
gaggcugaggcaggagaauc

SEQ ID NO: 6539 - RNA, 20 nt, Artificial Sequence
  Antisense oligo
ggaggcugaggcaggagaau

SEQ ID NO: 6540 - RNA, 20 nt, Artificial Sequence
  Antisense oligo
accuguagucccagccacuu

SEQ ID NO: 6541 - RNA, 20 nt, Artificial Sequence
  Antisense oligo
caccuguagucccagccacu

SEQ ID NO: 6542 - RNA, 20 nt, Artificial Sequence
  Antisense oligo
acaccuguagucccagccac

SEQ ID NO: 6543 - RNA, 20 nt, Artificial Sequence
  Antisense oligo
cacaccuguagucccagcca

SEQ ID NO: 6544 - RNA, 20 nt, Artificial Sequence
  Antisense oligo
ugcacaccuguagucccagc

SEQ ID NO: 6545 - RNA, 20 nt, Artificial Sequence
  Antisense oligo
uagcugggugugguggugca

SEQ ID NO: 6546 - RNA, 20 nt, Artificial Sequence
  Antisense oligo
uuagcugggugugguggugc

SEQ ID NO: 6547 - RNA, 20 nt, Artificial Sequence
  Antisense oligo
auuagcugggugugguggug

SEQ ID NO: 6548 - RNA, 20 nt, Artificial Sequence
  Antisense oligo
aauuagcugggugugguggu

SEQ ID NO: 6549 - RNA, 20 nt, Artificial Sequence
  Antisense oligo
aaauuagcuggguguggugg

SEQ ID NO: 6550 - RNA, 20 nt, Artificial Sequence
  Antisense oligo
aaaauuagcuggguguggug

SEQ ID NO: 6551 - RNA, 20 nt, Artificial Sequence
  Antisense oligo
ccaaggcagguggaucacgu

SEQ ID NO: 6552 - RNA, 20 nt, Artificial Sequence
  Antisense oligo
aggccaaggcagguggauca

SEQ ID NO: 6553 - RNA, 20 nt, Artificial Sequence
  Antisense oligo
caucggcaaucccagcacuc

SEQ ID NO: 6554 - RNA, 20 nt, Artificial Sequence
  Antisense oligo
acaucggcaaucccagcacu

SEQ ID NO: 6555 - RNA, 20 nt, Artificial Sequence
  Antisense oligo
cacaucggcaaucccagcac

SEQ ID NO: 6556 - RNA, 20 nt, Artificial Sequence
  Antisense oligo
ucacaucggcaaucccagca

SEQ ID NO: 6557 - RNA, 20 nt, Artificial Sequence
  Antisense oligo
cucacaucggcaaucccagc

SEQ ID NO: 6558 - RNA, 20 nt, Artificial Sequence
  Antisense oligo
gcucacaucggcaaucccag

SEQ ID NO: 6559 - RNA, 20 nt, Artificial Sequence
  Antisense oligo
ggcucacaucggcaauccca

SEQ ID NO: 6560 - RNA, 20 nt, Artificial Sequence
  Antisense oligo
uggcucacaucggcaauccc

SEQ ID NO: 6561 - RNA, 20 nt, Artificial Sequence
  Antisense oligo
guggcucacaucggcaaucc

SEQ ID NO: 6562 - RNA, 20 nt, Artificial Sequence
  Antisense oligo
aguggcucacaucggcaauc

SEQ ID NO: 6563 - RNA, 20 nt, Artificial Sequence
  Antisense oligo
caguggcucacaucggcaau

SEQ ID NO: 6564 - RNA, 20 nt, Artificial Sequence
  Antisense oligo
gcaguggcucacaucggcaa

SEQ ID NO: 6565 - RNA, 20 nt, Artificial Sequence
  Antisense oligo
ugcaguggcucacaucggca

SEQ ID NO: 6566 - RNA, 20 nt, Artificial Sequence
  Antisense oligo
ugggugcaguggcucacauc

SEQ ID NO: 6567 - RNA, 20 nt, Artificial Sequence
  Antisense oligo
cugggugcaguggcucacau

SEQ ID NO: 6568 - RNA, 20 nt, Artificial Sequence
  Antisense oligo
uugugcugggugcaguggcu

SEQ ID NO: 6569 - RNA, 20 nt, Artificial Sequence
  Antisense oligo
auugugcugggugcaguggc

SEQ ID NO: 6570 - RNA, 20 nt, Artificial Sequence
  Antisense oligo
aauugugcugggugcagugg

SEQ ID NO: 6571 - RNA, 20 nt, Artificial Sequence
  Antisense oligo
aaauugugcugggugcagug

SEQ ID NO: 6572 - RNA, 20 nt, Artificial Sequence
  Antisense oligo
ccugggcaacaagagugaaa

SEQ ID NO: 6573 - RNA, 20 nt, Artificial Sequence
  Antisense oligo
gccugggcaacaagagugaa

SEQ ID NO: 6574 - RNA, 20 nt, Artificial Sequence
  Antisense oligo
agccugggcaacaagaguga

SEQ ID NO: 6575 - RNA, 20 nt, Artificial Sequence
  Antisense oligo
cagccugggcaacaagagug

SEQ ID NO: 6576 - RNA, 20 nt, Artificial Sequence
  Antisense oligo
acagccugggcaacaagagu

SEQ ID NO: 6577 - RNA, 20 nt, Artificial Sequence
  Antisense oligo
uacagccugggcaacaagag

SEQ ID NO: 6578 - RNA, 20 nt, Artificial Sequence
  Antisense oligo
cuacagccugggcaacaaga

SEQ ID NO: 6579 - RNA, 20 nt, Artificial Sequence
  Antisense oligo
acuacagccugggcaacaag

SEQ ID NO: 6580 - RNA, 20 nt, Artificial Sequence
  Antisense oligo
cacuacagccugggcaacaa

SEQ ID NO: 6581 - RNA, 20 nt, Artificial Sequence
  Antisense oligo
cgagaucacgccauugcacu

SEQ ID NO: 6582 - RNA, 20 nt, Artificial Sequence
  Antisense oligo
ccgagaucacgccauugcac

SEQ ID NO: 6583 - RNA, 20 nt, Artificial Sequence
  Antisense oligo
gccgagaucacgccauugca

SEQ ID NO: 6584 - RNA, 20 nt, Artificial Sequence
  Antisense oligo
agccgagaucacgccauugc

SEQ ID NO: 6585 - RNA, 20 nt, Artificial Sequence
  Antisense oligo
gagccgagaucacgccauug

SEQ ID NO: 6586 - RNA, 20 nt, Artificial Sequence
  Antisense oligo
ugagccgagaucacgccauu

SEQ ID NO: 6587 - RNA, 20 nt, Artificial Sequence
  Antisense oligo
acuugaacccaggaggcgga

SEQ ID NO: 6588 - RNA, 20 nt, Artificial Sequence
  Antisense oligo
ucacuugaacccaggaggcg

SEQ ID NO: 6589 - RNA, 20 nt, Artificial Sequence
  Antisense oligo
aucacuugaacccaggaggc

SEQ ID NO: 6590 - RNA, 20 nt, Artificial Sequence
  Antisense oligo
aaucacuugaacccaggagg

SEQ ID NO: 6591 - RNA, 20 nt, Artificial Sequence
  Antisense oligo
gaaucacuugaacccaggag

SEQ ID NO: 6592 - RNA, 20 nt, Artificial Sequence
  Antisense oligo
agaaucacuugaacccagga

SEQ ID NO: 6593 - RNA, 20 nt, Artificial Sequence
  Antisense oligo
gagaaucacuugaacccagg

SEQ ID NO: 6594 - RNA, 20 nt, Artificial Sequence
  Antisense oligo
ggagaaucacuugaacccag

SEQ ID NO: 6595 - RNA, 20 nt, Artificial Sequence
  Antisense oligo
aggagaaucacuugaaccca

SEQ ID NO: 6596 - RNA, 20 nt, Artificial Sequence
  Antisense oligo
caggagaaucacuugaaccc

SEQ ID NO: 6597 - RNA, 20 nt, Artificial Sequence
  Antisense oligo
gcaggagaaucacuugaacc

SEQ ID NO: 6598 - RNA, 20 nt, Artificial Sequence
  Antisense oligo
ggcaggagaaucacuugaac

SEQ ID NO: 6599 - RNA, 20 nt, Artificial Sequence
  Antisense oligo
aggcaggagaaucacuugaa

SEQ ID NO: 6600 - RNA, 20 nt, Artificial Sequence
  Antisense oligo
gaggcaggagaaucacuuga

SEQ ID NO: 6601 - RNA, 20 nt, Artificial Sequence
  Antisense oligo
ugaggcaggagaaucacuug

SEQ ID NO: 6602 - RNA, 20 nt, Artificial Sequence
  Antisense oligo
cugaggcaggagaaucacuu

SEQ ID NO: 6603 - RNA, 20 nt, Artificial Sequence
  Antisense oligo
gcugaggcaggagaaucacu

SEQ ID NO: 6604 - RNA, 20 nt, Artificial Sequence
  Antisense oligo
ggcugaggcaggagaaucac

SEQ ID NO: 6605 - RNA, 20 nt, Artificial Sequence
  Antisense oligo
aggcugaggcaggagaauca

SEQ ID NO: 6606 - RNA, 20 nt, Artificial Sequence
  Antisense oligo
gaggcugaggcaggagaauc

SEQ ID NO: 6607 - RNA, 20 nt, Artificial Sequence
  Antisense oligo
ggaggcugaggcaggagaau

SEQ ID NO: 6608 - RNA, 20 nt, Artificial Sequence
  Antisense oligo
uguaaucccagcuacucggg

SEQ ID NO: 6609 - RNA, 20 nt, Artificial Sequence
  Antisense oligo
cuguaaucccagcuacucgg

SEQ ID NO: 6610 - RNA, 20 nt, Artificial Sequence
  Antisense oligo
ccuguaaucccagcuacucg

SEQ ID NO: 6611 - RNA, 20 nt, Artificial Sequence
  Antisense oligo
gccuguaaucccagcuacuc

SEQ ID NO: 6612 - RNA, 20 nt, Artificial Sequence
  Antisense oligo
ugccuguaaucccagcuacu

SEQ ID NO: 6613 - RNA, 20 nt, Artificial Sequence
  Antisense oligo
augccuguaaucccagcuac

SEQ ID NO: 6614 - RNA, 20 nt, Artificial Sequence
  Antisense oligo
caugccuguaaucccagcua

SEQ ID NO: 6615 - RNA, 20 nt, Artificial Sequence
  Antisense oligo
acaugccuguaaucccagcu

SEQ ID NO: 6616 - RNA, 20 nt, Artificial Sequence
  Antisense oligo
cacaugccuguaaucccagc

SEQ ID NO: 6617 - RNA, 20 nt, Artificial Sequence
  Antisense oligo
gcacaugccuguaaucccag

SEQ ID NO: 6618 - RNA, 20 nt, Artificial Sequence
  Antisense oligo
ggcacaugccuguaauccca

SEQ ID NO: 6619 - RNA, 20 nt, Artificial Sequence
  Antisense oligo
uggcacaugccuguaauccc

SEQ ID NO: 6620 - RNA, 20 nt, Artificial Sequence
  Antisense oligo
guggcacaugccuguaaucc

SEQ ID NO: 6621 - RNA, 20 nt, Artificial Sequence
  Antisense oligo
aguggcacaugccuguaauc

SEQ ID NO: 6622 - RNA, 20 nt, Artificial Sequence
  Antisense oligo
uaguggcacaugccuguaau

SEQ ID NO: 6623 - RNA, 20 nt, Artificial Sequence
  Antisense oligo
uuaguggcacaugccuguaa

SEQ ID NO: 6624 - RNA, 20 nt, Artificial Sequence
  Antisense oligo
uuuaguggcacaugccugua

SEQ ID NO: 6625 - RNA, 20 nt, Artificial Sequence
  Antisense oligo
guuuaguggcacaugccugu

SEQ ID NO: 6626 - RNA, 20 nt, Artificial Sequence
  Antisense oligo
gguuuaguggcacaugccug

SEQ ID NO: 6627 - RNA, 20 nt, Artificial Sequence
  Antisense oligo
ggguuuaguggcacaugccu

SEQ ID NO: 6628 - RNA, 20 nt, Artificial Sequence
  Antisense oligo
uggguuuaguggcacaugcc

SEQ ID NO: 6629 - RNA, 20 nt, Artificial Sequence
  Antisense oligo
cauguagaaauccugucucg

SEQ ID NO: 6630 - RNA, 20 nt, Artificial Sequence
  Antisense oligo
aggccagccugaccaacaug

SEQ ID NO: 6631 - RNA, 20 nt, Artificial Sequence
  Antisense oligo
aaggccagccugaccaacau

SEQ ID NO: 6632 - RNA, 20 nt, Artificial Sequence
  Antisense oligo
caaggccagccugaccaaca

SEQ ID NO: 6633 - RNA, 20 nt, Artificial Sequence
  Antisense oligo
ggucaggaguucaaggccag

SEQ ID NO: 6634 - RNA, 20 nt, Artificial Sequence
  Antisense oligo
aggucaggaguucaaggcca

SEQ ID NO: 6635 - RNA, 20 nt, Artificial Sequence
  Antisense oligo
gaggucaggaguucaaggcc

SEQ ID NO: 6636 - RNA, 20 nt, Artificial Sequence
  Antisense oligo
ugaggucaggaguucaaggc

SEQ ID NO: 6637 - RNA, 20 nt, Artificial Sequence
  Antisense oligo
cugaggucaggaguucaagg

SEQ ID NO: 6638 - RNA, 20 nt, Artificial Sequence
  Antisense oligo
ggcgaaucaccugaggucag

SEQ ID NO: 6639 - RNA, 20 nt, Artificial Sequence
  Antisense oligo
acuuugggaggcugaggcag

SEQ ID NO: 6640 - RNA, 20 nt, Artificial Sequence
  Antisense oligo
cacuuugggaggcugaggca

SEQ ID NO: 6641 - RNA, 20 nt, Artificial Sequence
  Antisense oligo
agcacuuugggaggcugagg

SEQ ID NO: 6642 - RNA, 20 nt, Artificial Sequence
  Antisense oligo
uagcacuuugggaggcugag

SEQ ID NO: 6643 - RNA, 20 nt, Artificial Sequence
  Antisense oligo
cuagcacuuugggaggcuga

SEQ ID NO: 6644 - RNA, 20 nt, Artificial Sequence
  Antisense oligo
ccuagcacuuugggaggcug

SEQ ID NO: 6645 - RNA, 20 nt, Artificial Sequence
  Antisense oligo
uccuagcacuuugggaggcu

SEQ ID NO: 6646 - RNA, 20 nt, Artificial Sequence
  Antisense oligo
auccuagcacuuugggaggc

SEQ ID NO: 6647 - RNA, 20 nt, Artificial Sequence
  Antisense oligo
aauccuagcacuuugggagg

SEQ ID NO: 6648 - RNA, 20 nt, Artificial Sequence
  Antisense oligo
uaauccuagcacuuugggag

SEQ ID NO: 6649 - RNA, 20 nt, Artificial Sequence
  Antisense oligo
guaauccuagcacuuuggga

SEQ ID NO: 6650 - RNA, 20 nt, Artificial Sequence
  Antisense oligo
uguaauccuagcacuuuggg

SEQ ID NO: 6651 - RNA, 20 nt, Artificial Sequence
  Antisense oligo
cuguaauccuagcacuuugg

SEQ ID NO: 6652 - RNA, 20 nt, Artificial Sequence
  Antisense oligo
ccuguaauccuagcacuuug

SEQ ID NO: 6653 - RNA, 20 nt, Artificial Sequence
  Antisense oligo
gccuguaauccuagcacuuu

SEQ ID NO: 6654 - RNA, 20 nt, Artificial Sequence
  Antisense oligo
ugccuguaauccuagcacuu

SEQ ID NO: 6655 - RNA, 20 nt, Artificial Sequence
  Antisense oligo
augccuguaauccuagcacu

SEQ ID NO: 6656 - RNA, 20 nt, Artificial Sequence
  Antisense oligo
caugccuguaauccuagcac

SEQ ID NO: 6657 - RNA, 20 nt, Artificial Sequence
  Antisense oligo
ucaugccuguaauccuagca

SEQ ID NO: 6658 - RNA, 20 nt, Artificial Sequence
  Antisense oligo
cucaugccuguaauccuagc

SEQ ID NO: 6659 - RNA, 20 nt, Artificial Sequence
  Antisense oligo
gcucaugccuguaauccuag

SEQ ID NO: 6660 - RNA, 20 nt, Artificial Sequence
  Antisense oligo
agcucaugccuguaauccua

SEQ ID NO: 6661 - RNA, 20 nt, Artificial Sequence
  Antisense oligo
uagcucaugccuguaauccu

SEQ ID NO: 6662 - RNA, 20 nt, Artificial Sequence
  Antisense oligo
guagcucaugccuguaaucc

SEQ ID NO: 6663 - RNA, 20 nt, Artificial Sequence
  Antisense oligo
aguagcucaugccuguaauc

SEQ ID NO: 6664 - RNA, 20 nt, Artificial Sequence
  Antisense oligo
caguagcucaugccuguaau

SEQ ID NO: 6665 - RNA, 20 nt, Artificial Sequence
  Antisense oligo
gucacaguucuaacuugaag

SEQ ID NO: 6666 - RNA, 20 nt, Artificial Sequence
  Antisense oligo
aacgucacaguucuaacuug

SEQ ID NO: 6667 - RNA, 20 nt, Artificial Sequence
  Antisense oligo
cuaacgucacaguucuaacu

SEQ ID NO: 6668 - RNA, 20 nt, Artificial Sequence
  Antisense oligo
acuaacgucacaguucuaac

SEQ ID NO: 6669 - RNA, 20 nt, Artificial Sequence
  Antisense oligo
cacuaacgucacaguucuaa

SEQ ID NO: 6670 - RNA, 20 nt, Artificial Sequence
  Antisense oligo
ucacuaacgucacaguucua

SEQ ID NO: 6671 - RNA, 20 nt, Artificial Sequence
  Antisense oligo
aucacuaacgucacaguucu

SEQ ID NO: 6672 - RNA, 20 nt, Artificial Sequence
  Antisense oligo
uaucacuaacgucacaguuc

SEQ ID NO: 6673 - RNA, 20 nt, Artificial Sequence
  Antisense oligo
cuaucacuaacgucacaguu

SEQ ID NO: 6674 - RNA, 20 nt, Artificial Sequence
  Antisense oligo
ucuaucacuaacgucacagu

SEQ ID NO: 6675 - RNA, 20 nt, Artificial Sequence
  Antisense oligo
uucuaucacuaacgucacag

SEQ ID NO: 6676 - RNA, 20 nt, Artificial Sequence
  Antisense oligo
ugucugugguacuuuaacac

SEQ ID NO: 6677 - RNA, 20 nt, Artificial Sequence
  Antisense oligo
gugucugugguacuuuaaca

SEQ ID NO: 6678 - RNA, 20 nt, Artificial Sequence
  Antisense oligo
cuuaaacugugucuguggua

SEQ ID NO: 6679 - RNA, 20 nt, Artificial Sequence
  Antisense oligo
ucuuaaacugugucuguggu

SEQ ID NO: 6680 - RNA, 20 nt, Artificial Sequence
  Antisense oligo
uucuuaaacugugucugugg

SEQ ID NO: 6681 - RNA, 20 nt, Artificial Sequence
  Antisense oligo
ccacuccagagaacgugauc

SEQ ID NO: 6682 - RNA, 20 nt, Artificial Sequence
  Antisense oligo
gccacuccagagaacgugau

SEQ ID NO: 6683 - RNA, 20 nt, Artificial Sequence
  Antisense oligo
agccacuccagagaacguga

SEQ ID NO: 6684 - RNA, 20 nt, Artificial Sequence
  Antisense oligo
uuauguggaaguuggcagcu

SEQ ID NO: 6685 - RNA, 20 nt, Artificial Sequence
  Antisense oligo
agaucccagccaacauuuaa

SEQ ID NO: 6686 - RNA, 20 nt, Artificial Sequence
  Antisense oligo
gguagagaguauuuugucca

SEQ ID NO: 6687 - RNA, 20 nt, Artificial Sequence
  Antisense oligo
cacagguagagaguauuuug

SEQ ID NO: 6688 - RNA, 20 nt, Artificial Sequence
  Antisense oligo
ggcacagguagagaguauuu

SEQ ID NO: 6689 - RNA, 20 nt, Artificial Sequence
  Antisense oligo
uggcacagguagagaguauu

SEQ ID NO: 6690 - RNA, 20 nt, Artificial Sequence
  Antisense oligo
uauggcacagguagagagua

SEQ ID NO: 6691 - RNA, 20 nt, Artificial Sequence
  Antisense oligo
uuuauggcacagguagagag

SEQ ID NO: 6692 - RNA, 20 nt, Artificial Sequence
  Antisense oligo
cuuuuauggcacagguagag

SEQ ID NO: 6693 - RNA, 20 nt, Artificial Sequence
  Antisense oligo
gcuuuuauggcacagguaga

SEQ ID NO: 6694 - RNA, 20 nt, Artificial Sequence
  Antisense oligo
ugcuuuuauggcacagguag

SEQ ID NO: 6695 - RNA, 20 nt, Artificial Sequence
  Antisense oligo
uugcuuuuauggcacaggua

SEQ ID NO: 6696 - RNA, 20 nt, Artificial Sequence
  Antisense oligo
uuugcuuuuauggcacaggu

SEQ ID NO: 6697 - RNA, 20 nt, Artificial Sequence
  Antisense oligo
gcagacaccuaaaaguuucu

SEQ ID NO: 6698 - RNA, 20 nt, Artificial Sequence
  Antisense oligo
agcagacaccuaaaaguuuc

SEQ ID NO: 6699 - RNA, 20 nt, Artificial Sequence
  Antisense oligo
cagcagacaccuaaaaguuu

SEQ ID NO: 6700 - RNA, 20 nt, Artificial Sequence
  Antisense oligo
acagcagcagacaccuaaaa

SEQ ID NO: 6701 - RNA, 20 nt, Artificial Sequence
  Antisense oligo
uucacagcagcagacaccua

SEQ ID NO: 6702 - RNA, 20 nt, Artificial Sequence
  Antisense oligo
agccuucacagcagcagaca

SEQ ID NO: 6703 - RNA, 20 nt, Artificial Sequence
  Antisense oligo
cuggagccuucacagcagca

SEQ ID NO: 6704 - RNA, 20 nt, Artificial Sequence
  Antisense oligo
acccuggagccuucacagca

SEQ ID NO: 6705 - RNA, 20 nt, Artificial Sequence
  Antisense oligo
aacccuggagccuucacagc

SEQ ID NO: 6706 - RNA, 20 nt, Artificial Sequence
  Antisense oligo
caacccuggagccuucacag

SEQ ID NO: 6707 - RNA, 20 nt, Artificial Sequence
  Antisense oligo
ucaacccuggagccuucaca

SEQ ID NO: 6708 - RNA, 20 nt, Artificial Sequence
  Antisense oligo
gucaacccuggagccuucac

SEQ ID NO: 6709 - RNA, 20 nt, Artificial Sequence
  Antisense oligo
uccgucaacccuggagccuu

SEQ ID NO: 6710 - RNA, 20 nt, Artificial Sequence
  Antisense oligo
aguguccgucaacccuggag

SEQ ID NO: 6711 - RNA, 20 nt, Artificial Sequence
  Antisense oligo
aaguguccgucaacccugga

SEQ ID NO: 6712 - RNA, 20 nt, Artificial Sequence
  Antisense oligo
caaguguccgucaacccugg

SEQ ID NO: 6713 - RNA, 20 nt, Artificial Sequence
  Antisense oligo
uccaaguguccgucaacccu

SEQ ID NO: 6714 - RNA, 20 nt, Artificial Sequence
  Antisense oligo
cuccaaguguccgucaaccc

SEQ ID NO: 6715 - RNA, 20 nt, Artificial Sequence
  Antisense oligo
ucuccaaguguccgucaacc

SEQ ID NO: 6716 - RNA, 20 nt, Artificial Sequence
  Antisense oligo
guucuccaaguguccgucaa

SEQ ID NO: 6717 - RNA, 20 nt, Artificial Sequence
  Antisense oligo
uguucuccaaguguccguca

SEQ ID NO: 6718 - RNA, 20 nt, Artificial Sequence
  Antisense oligo
uuguucuccaaguguccguc

SEQ ID NO: 6719 - RNA, 20 nt, Artificial Sequence
  Antisense oligo
cacgggcaccuuguucucca

SEQ ID NO: 6720 - RNA, 20 nt, Artificial Sequence
  Antisense oligo
acacgggcaccuuguucucc

SEQ ID NO: 6721 - RNA, 20 nt, Artificial Sequence
  Antisense oligo
ugacacgggcaccuuguucu

SEQ ID NO: 6722 - RNA, 20 nt, Artificial Sequence
  Antisense oligo
cugacacgggcaccuuguuc

SEQ ID NO: 6723 - RNA, 20 nt, Artificial Sequence
  Antisense oligo
ccugacacgggcaccuuguu

SEQ ID NO: 6724 - RNA, 20 nt, Artificial Sequence
  Antisense oligo
aaugaccgcucagaggcugc

SEQ ID NO: 6725 - RNA, 20 nt, Artificial Sequence
  Antisense oligo
gaaugaccgcucagaggcug

SEQ ID NO: 6726 - RNA, 20 nt, Artificial Sequence
  Antisense oligo
ugaaugaccgcucagaggcu

SEQ ID NO: 6727 - RNA, 20 nt, Artificial Sequence
  Antisense oligo
acaggcacugcugaaggucc

SEQ ID NO: 6728 - RNA, 20 nt, Artificial Sequence
  Antisense oligo
acuagagcacagcacgcagg

SEQ ID NO: 6729 - RNA, 20 nt, Artificial Sequence
  Antisense oligo
gacuagagcacagcacgcag

SEQ ID NO: 6730 - RNA, 20 nt, Artificial Sequence
  Antisense oligo
ugacuagagcacagcacgca

SEQ ID NO: 6731 - RNA, 20 nt, Artificial Sequence
  Antisense oligo
gugacuagagcacagcacgc

SEQ ID NO: 6732 - RNA, 20 nt, Artificial Sequence
  Antisense oligo
agugacuagagcacagcacg

SEQ ID NO: 6733 - RNA, 20 nt, Artificial Sequence
  Antisense oligo
gugcugcugugaaagagagc

SEQ ID NO: 6734 - RNA, 20 nt, Artificial Sequence
  Antisense oligo
aggugcugcugugaaagaga

SEQ ID NO: 6735 - RNA, 20 nt, Artificial Sequence
  Antisense oligo
caggugcugcugugaaagag

SEQ ID NO: 6736 - RNA, 20 nt, Artificial Sequence
  Antisense oligo
acaggcaggagcuuucaaag

SEQ ID NO: 6737 - RNA, 20 nt, Artificial Sequence
  Antisense oligo
auacaggcaggagcuuucaa

SEQ ID NO: 6738 - RNA, 20 nt, Artificial Sequence
  Antisense oligo
cgggaagauacaggcaggag

SEQ ID NO: 6739 - RNA, 20 nt, Artificial Sequence
  Antisense oligo
gcgggaagauacaggcagga

SEQ ID NO: 6740 - RNA, 20 nt, Artificial Sequence
  Antisense oligo
cacuauaccugggaagggcc

SEQ ID NO: 6741 - RNA, 20 nt, Artificial Sequence
  Antisense oligo
ucacuauaccugggaagggc

SEQ ID NO: 6742 - RNA, 20 nt, Artificial Sequence
  Antisense oligo
gucacuauaccugggaaggg

SEQ ID NO: 6743 - RNA, 20 nt, Artificial Sequence
  Antisense oligo
cgucacuauaccugggaagg

SEQ ID NO: 6744 - RNA, 20 nt, Artificial Sequence
  Antisense oligo
gcgucacuauaccugggaag

SEQ ID NO: 6745 - RNA, 20 nt, Artificial Sequence
  Antisense oligo
agcgucacuauaccugggaa

SEQ ID NO: 6746 - RNA, 20 nt, Artificial Sequence
  Antisense oligo
cagcgucacuauaccuggga

SEQ ID NO: 6747 - RNA, 20 nt, Artificial Sequence
  Antisense oligo
acagcgucacuauaccuggg

SEQ ID NO: 6748 - RNA, 20 nt, Artificial Sequence
  Antisense oligo
cacagcgucacuauaccugg

SEQ ID NO: 6749 - RNA, 20 nt, Artificial Sequence
  Antisense oligo
acacagcgucacuauaccug

SEQ ID NO: 6750 - RNA, 20 nt, Artificial Sequence
  Antisense oligo
aacacagcgucacuauaccu

SEQ ID NO: 6751 - RNA, 20 nt, Artificial Sequence
  Antisense oligo
gaacacagcgucacuauacc

SEQ ID NO: 6752 - RNA, 20 nt, Artificial Sequence
  Antisense oligo
ggaacacagcgucacuauac

SEQ ID NO: 6753 - RNA, 20 nt, Artificial Sequence
  Antisense oligo
gggaacacagcgucacuaua

SEQ ID NO: 6754 - RNA, 20 nt, Artificial Sequence
  Antisense oligo
ucacuggaagcaccgagagg

SEQ ID NO: 6755 - RNA, 20 nt, Artificial Sequence
  Antisense oligo
cucacuggaagcaccgagag

SEQ ID NO: 6756 - RNA, 20 nt, Artificial Sequence
  Antisense oligo
cucaggugcucacuggaagc

SEQ ID NO: 6757 - RNA, 20 nt, Artificial Sequence
  Antisense oligo
gcucaggugcucacuggaag

SEQ ID NO: 6758 - RNA, 20 nt, Artificial Sequence
  Antisense oligo
acgcucaggugcucacugga

SEQ ID NO: 6759 - RNA, 20 nt, Artificial Sequence
  Antisense oligo
uacgcucaggugcucacugg

SEQ ID NO: 6760 - RNA, 20 nt, Artificial Sequence
  Antisense oligo
auacgcucaggugcucacug

SEQ ID NO: 6761 - RNA, 20 nt, Artificial Sequence
  Antisense oligo
gauacgcucaggugcucacu

SEQ ID NO: 6762 - RNA, 20 nt, Artificial Sequence
  Antisense oligo
ggauacgcucaggugcucac

SEQ ID NO: 6763 - RNA, 20 nt, Artificial Sequence
  Antisense oligo
uggauacgcucaggugcuca

SEQ ID NO: 6764 - RNA, 20 nt, Artificial Sequence
  Antisense oligo
cuggauacgcucaggugcuc

SEQ ID NO: 6765 - RNA, 20 nt, Artificial Sequence
  Antisense oligo
cagaaccuggauacgcucag

SEQ ID NO: 6766 - RNA, 20 nt, Artificial Sequence
  Antisense oligo
acagaaccuggauacgcuca

SEQ ID NO: 6767 - RNA, 20 nt, Artificial Sequence
  Antisense oligo
cacagaaccuggauacgcuc

SEQ ID NO: 6768 - RNA, 20 nt, Artificial Sequence
  Antisense oligo
ccacagaaccuggauacgcu

SEQ ID NO: 6769 - RNA, 20 nt, Artificial Sequence
  Antisense oligo
gccacagaaccuggauacgc

SEQ ID NO: 6770 - RNA, 20 nt, Artificial Sequence
  Antisense oligo
caagugucaggagccacaga

SEQ ID NO: 6771 - RNA, 20 nt, Artificial Sequence
  Antisense oligo
ugcaagugucaggagccaca

SEQ ID NO: 6772 - RNA, 20 nt, Artificial Sequence
  Antisense oligo
gugcaagugucaggagccac

SEQ ID NO: 6773 - RNA, 20 nt, Artificial Sequence
  Antisense oligo
cgugcaagugucaggagcca

SEQ ID NO: 6774 - RNA, 20 nt, Artificial Sequence
  Antisense oligo
ucgugcaagugucaggagcc

SEQ ID NO: 6775 - RNA, 20 nt, Artificial Sequence
  Antisense oligo
aucgugcaagugucaggagc

SEQ ID NO: 6776 - RNA, 20 nt, Artificial Sequence
  Antisense oligo
cagccaagugugugaucuuu

SEQ ID NO: 6777 - RNA, 20 nt, Artificial Sequence
  Antisense oligo
ccagccaagugugugaucuu

SEQ ID NO: 6778 - RNA, 20 nt, Artificial Sequence
  Antisense oligo
cccagccaagugugugaucu

SEQ ID NO: 6779 - RNA, 20 nt, Artificial Sequence
  Antisense oligo
auuacaggugugagcuacua

SEQ ID NO: 6780 - RNA, 20 nt, Artificial Sequence
  Antisense oligo
gauuacaggugugagcuacu

SEQ ID NO: 6781 - RNA, 20 nt, Artificial Sequence
  Antisense oligo
ggauuacaggugugagcuac

SEQ ID NO: 6782 - RNA, 20 nt, Artificial Sequence
  Antisense oligo
gggauuacaggugugagcua

SEQ ID NO: 6783 - RNA, 20 nt, Artificial Sequence
  Antisense oligo
ugggauuacaggugugagcu

SEQ ID NO: 6784 - RNA, 20 nt, Artificial Sequence
  Antisense oligo
cugggauuacaggugugagc

SEQ ID NO: 6785 - RNA, 20 nt, Artificial Sequence
  Antisense oligo
gcugggauuacaggugugag

SEQ ID NO: 6786 - RNA, 20 nt, Artificial Sequence
  Antisense oligo
ugcugggauuacagguguga

SEQ ID NO: 6787 - RNA, 20 nt, Artificial Sequence
  Antisense oligo
gugcugggauuacaggugug

SEQ ID NO: 6788 - RNA, 20 nt, Artificial Sequence
  Antisense oligo
agugcugggauuacaggugu

SEQ ID NO: 6789 - RNA, 20 nt, Artificial Sequence
  Antisense oligo
aagugcugggauuacaggug

SEQ ID NO: 6790 - RNA, 20 nt, Artificial Sequence
  Antisense oligo
aaagugcugggauuacaggu

SEQ ID NO: 6791 - RNA, 20 nt, Artificial Sequence
  Antisense oligo
caaagugcugggauuacagg

SEQ ID NO: 6792 - RNA, 20 nt, Artificial Sequence
  Antisense oligo
ccaaagugcugggauuacag

SEQ ID NO: 6793 - RNA, 20 nt, Artificial Sequence
  Antisense oligo
uccaaagugcugggauuaca

SEQ ID NO: 6794 - RNA, 20 nt, Artificial Sequence
  Antisense oligo
uuccaaagugcugggauuac

SEQ ID NO: 6795 - RNA, 20 nt, Artificial Sequence
  Antisense oligo
cuuccaaagugcugggauua

SEQ ID NO: 6796 - RNA, 20 nt, Artificial Sequence
  Antisense oligo
ccuuccaaagugcugggauu

SEQ ID NO: 6797 - RNA, 20 nt, Artificial Sequence
  Antisense oligo
gccuuccaaagugcugggau

SEQ ID NO: 6798 - RNA, 20 nt, Artificial Sequence
  Antisense oligo
ggccuuccaaagugcuggga

SEQ ID NO: 6799 - RNA, 20 nt, Artificial Sequence
  Antisense oligo
uggccuuccaaagugcuggg

SEQ ID NO: 6800 - RNA, 20 nt, Artificial Sequence
  Antisense oligo
uggucucgaacuccuaaccu

SEQ ID NO: 6801 - RNA, 20 nt, Artificial Sequence
  Antisense oligo
cuggucucgaacuccuaacc

SEQ ID NO: 6802 - RNA, 20 nt, Artificial Sequence
  Antisense oligo
gcuggucucgaacuccuaac

SEQ ID NO: 6803 - RNA, 20 nt, Artificial Sequence
  Antisense oligo
ggcuggucucgaacuccuaa

SEQ ID NO: 6804 - RNA, 20 nt, Artificial Sequence
  Antisense oligo
aggcuggucucgaacuccua

SEQ ID NO: 6805 - RNA, 20 nt, Artificial Sequence
  Antisense oligo
caggcuggucucgaacuccu

SEQ ID NO: 6806 - RNA, 20 nt, Artificial Sequence
  Antisense oligo
aggguuucaccauguuggcc

SEQ ID NO: 6807 - RNA, 20 nt, Artificial Sequence
  Antisense oligo
caggguuucaccauguuggc

SEQ ID NO: 6808 - RNA, 20 nt, Artificial Sequence
  Antisense oligo
acaggguuucaccauguugg

SEQ ID NO: 6809 - RNA, 20 nt, Artificial Sequence
  Antisense oligo
gacaggguuucaccauguug

SEQ ID NO: 6810 - RNA, 20 nt, Artificial Sequence
  Antisense oligo
agacaggguuucaccauguu

SEQ ID NO: 6811 - RNA, 20 nt, Artificial Sequence
  Antisense oligo
gagacaggguuucaccaugu

SEQ ID NO: 6812 - RNA, 20 nt, Artificial Sequence
  Antisense oligo
agagacaggguuucaccaug

SEQ ID NO: 6813 - RNA, 20 nt, Artificial Sequence
  Antisense oligo
uagagacaggguuucaccau

SEQ ID NO: 6814 - RNA, 20 nt, Artificial Sequence
  Antisense oligo
guagagacaggguuucacca

SEQ ID NO: 6815 - RNA, 20 nt, Artificial Sequence
  Antisense oligo
aguagagacaggguuucacc

SEQ ID NO: 6816 - RNA, 20 nt, Artificial Sequence
  Antisense oligo
uaguagagacaggguuucac

SEQ ID NO: 6817 - RNA, 20 nt, Artificial Sequence
  Antisense oligo
uuaguagagacaggguuuca

SEQ ID NO: 6818 - RNA, 20 nt, Artificial Sequence
  Antisense oligo
uuuaguagagacaggguuuc

SEQ ID NO: 6819 - RNA, 20 nt, Artificial Sequence
  Antisense oligo
agcugggauuacaagugcau

SEQ ID NO: 6820 - RNA, 20 nt, Artificial Sequence
  Antisense oligo
uagcugggauuacaagugca

SEQ ID NO: 6821 - RNA, 20 nt, Artificial Sequence
  Antisense oligo
guagcugggauuacaagugc

SEQ ID NO: 6822 - RNA, 20 nt, Artificial Sequence
  Antisense oligo
aguagcugggauuacaagug

SEQ ID NO: 6823 - RNA, 20 nt, Artificial Sequence
  Antisense oligo
aaguagcugggauuacaagu

SEQ ID NO: 6824 - RNA, 20 nt, Artificial Sequence
  Antisense oligo
caaguagcugggauuacaag

SEQ ID NO: 6825 - RNA, 20 nt, Artificial Sequence
  Antisense oligo
ccaaguagcugggauuacaa

SEQ ID NO: 6826 - RNA, 20 nt, Artificial Sequence
  Antisense oligo
cuucagccucccaaguagcu

SEQ ID NO: 6827 - RNA, 20 nt, Artificial Sequence
  Antisense oligo
gcuucagccucccaaguagc

SEQ ID NO: 6828 - RNA, 20 nt, Artificial Sequence
  Antisense oligo
ugcuucagccucccaaguag

SEQ ID NO: 6829 - RNA, 20 nt, Artificial Sequence
  Antisense oligo
cugcuucagccucccaagua

SEQ ID NO: 6830 - RNA, 20 nt, Artificial Sequence
  Antisense oligo
ccugcuucagccucccaagu

SEQ ID NO: 6831 - RNA, 20 nt, Artificial Sequence
  Antisense oligo
uccugcuucagccucccaag

SEQ ID NO: 6832 - RNA, 20 nt, Artificial Sequence
  Antisense oligo
cuccugcuucagccucccaa

SEQ ID NO: 6833 - RNA, 20 nt, Artificial Sequence
  Antisense oligo
auccuccugcuucagccucc

SEQ ID NO: 6834 - RNA, 20 nt, Artificial Sequence
  Antisense oligo
gauccuccugcuucagccuc

SEQ ID NO: 6835 - RNA, 20 nt, Artificial Sequence
  Antisense oligo
ugauccuccugcuucagccu

SEQ ID NO: 6836 - RNA, 20 nt, Artificial Sequence
  Antisense oligo
gugauccuccugcuucagcc

SEQ ID NO: 6837 - RNA, 20 nt, Artificial Sequence
  Antisense oligo
agugauccuccugcuucagc

SEQ ID NO: 6838 - RNA, 20 nt, Artificial Sequence
  Antisense oligo
aagugauccuccugcuucag

SEQ ID NO: 6839 - RNA, 20 nt, Artificial Sequence
  Antisense oligo
caagugauccuccugcuuca

SEQ ID NO: 6840 - RNA, 20 nt, Artificial Sequence
  Antisense oligo
ucaagugauccuccugcuuc

SEQ ID NO: 6841 - RNA, 20 nt, Artificial Sequence
  Antisense oligo
uucaagugauccuccugcuu

SEQ ID NO: 6842 - RNA, 20 nt, Artificial Sequence
  Antisense oligo
guucaagugauccuccugcu

SEQ ID NO: 6843 - RNA, 20 nt, Artificial Sequence
  Antisense oligo
acugcaaccuccaccuccug

SEQ ID NO: 6844 - RNA, 20 nt, Artificial Sequence
  Antisense oligo
cacugcaaccuccaccuccu

SEQ ID NO: 6845 - RNA, 20 nt, Artificial Sequence
  Antisense oligo
ucacugcaaccuccaccucc

SEQ ID NO: 6846 - RNA, 20 nt, Artificial Sequence
  Antisense oligo
cucacugcaaccuccaccuc

SEQ ID NO: 6847 - RNA, 20 nt, Artificial Sequence
  Antisense oligo
gcucacugcaaccuccaccu

SEQ ID NO: 6848 - RNA, 20 nt, Artificial Sequence
  Antisense oligo
uggcucacugcaaccuccac

SEQ ID NO: 6849 - RNA, 20 nt, Artificial Sequence
  Antisense oligo
uuggcucacugcaaccucca

SEQ ID NO: 6850 - RNA, 20 nt, Artificial Sequence
  Antisense oligo
cuuggcucacugcaaccucc

SEQ ID NO: 6851 - RNA, 20 nt, Artificial Sequence
  Antisense oligo
ucuuggcucacugcaaccuc

SEQ ID NO: 6852 - RNA, 20 nt, Artificial Sequence
  Antisense oligo
aucuuggcucacugcaaccu

SEQ ID NO: 6853 - RNA, 20 nt, Artificial Sequence
  Antisense oligo
gaucuuggcucacugcaacc

SEQ ID NO: 6854 - RNA, 20 nt, Artificial Sequence
  Antisense oligo
cgaucuuggcucacugcaac

SEQ ID NO: 6855 - RNA, 20 nt, Artificial Sequence
  Antisense oligo
gcgaucuuggcucacugcaa

SEQ ID NO: 6856 - RNA, 20 nt, Artificial Sequence
  Antisense oligo
cgcgaucuuggcucacugca

SEQ ID NO: 6857 - RNA, 20 nt, Artificial Sequence
  Antisense oligo
acccaggcuggaguacagug

SEQ ID NO: 6858 - RNA, 20 nt, Artificial Sequence
  Antisense oligo
aacccaggcuggaguacagu

SEQ ID NO: 6859 - RNA, 20 nt, Artificial Sequence
  Antisense oligo
uaacccaggcuggaguacag

SEQ ID NO: 6860 - RNA, 20 nt, Artificial Sequence
  Antisense oligo
guaacccaggcuggaguaca

SEQ ID NO: 6861 - RNA, 20 nt, Artificial Sequence
  Antisense oligo
uguaacccaggcuggaguac

SEQ ID NO: 6862 - RNA, 20 nt, Artificial Sequence
  Antisense oligo
cuguaacccaggcuggagua

SEQ ID NO: 6863 - RNA, 20 nt, Artificial Sequence
  Antisense oligo
ccaggaagcauacaggucag

SEQ ID NO: 6864 - RNA, 20 nt, Artificial Sequence
  Antisense oligo
cccaggaagcauacagguca

SEQ ID NO: 6865 - RNA, 20 nt, Artificial Sequence
  Antisense oligo
ucccaggaagcauacagguc

SEQ ID NO: 6866 - RNA, 20 nt, Artificial Sequence
  Antisense oligo
auuucccaggaagcauacag

SEQ ID NO: 6867 - RNA, 20 nt, Artificial Sequence
  Antisense oligo
agaagcacauuucccaggaa

SEQ ID NO: 6868 - RNA, 20 nt, Artificial Sequence
  Antisense oligo
uguaaugccucccuucucuc

SEQ ID NO: 6869 - RNA, 20 nt, Artificial Sequence
  Antisense oligo
gccuccuguaaugccucccu

SEQ ID NO: 6870 - RNA, 20 nt, Artificial Sequence
  Antisense oligo
agccuccuguaaugccuccc

SEQ ID NO: 6871 - RNA, 20 nt, Artificial Sequence
  Antisense oligo
aagccuccuguaaugccucc

SEQ ID NO: 6872 - RNA, 20 nt, Artificial Sequence
  Antisense oligo
ucaaagccuccuguaaugcc

SEQ ID NO: 6873 - RNA, 20 nt, Artificial Sequence
  Antisense oligo
accagaccagagggaaaacc

SEQ ID NO: 6874 - RNA, 20 nt, Artificial Sequence
  Antisense oligo
acccaccagaccagagggaa

SEQ ID NO: 6875 - RNA, 20 nt, Artificial Sequence
  Antisense oligo
cugugcucccaucaugcucu

SEQ ID NO: 6876 - RNA, 20 nt, Artificial Sequence
  Antisense oligo
acugugcucccaucaugcuc

SEQ ID NO: 6877 - RNA, 20 nt, Artificial Sequence
  Antisense oligo
cacugugcucccaucaugcu

SEQ ID NO: 6878 - RNA, 20 nt, Artificial Sequence
  Antisense oligo
ccacugugcucccaucaugc

SEQ ID NO: 6879 - RNA, 20 nt, Artificial Sequence
  Antisense oligo
cccacugugcucccaucaug

SEQ ID NO: 6880 - RNA, 20 nt, Artificial Sequence
  Antisense oligo
ucccacugugcucccaucau

SEQ ID NO: 6881 - RNA, 20 nt, Artificial Sequence
  Antisense oligo
ugacccggagguaaaccugg

SEQ ID NO: 6882 - RNA, 20 nt, Artificial Sequence
  Antisense oligo
cugacccggagguaaaccug

SEQ ID NO: 6883 - RNA, 20 nt, Artificial Sequence
  Antisense oligo
ccugacccggagguaaaccu

SEQ ID NO: 6884 - RNA, 20 nt, Artificial Sequence
  Antisense oligo
uccugacccggagguaaacc

SEQ ID NO: 6885 - RNA, 20 nt, Artificial Sequence
  Antisense oligo
ugccuccaugccagaccaca

SEQ ID NO: 6886 - RNA, 20 nt, Artificial Sequence
  Antisense oligo
cacugugcucccaucaugcc

SEQ ID NO: 6887 - RNA, 20 nt, Artificial Sequence
  Antisense oligo
ccacugugcucccaucaugc

SEQ ID NO: 6888 - RNA, 20 nt, Artificial Sequence
  Antisense oligo
cccacugugcucccaucaug

SEQ ID NO: 6889 - RNA, 20 nt, Artificial Sequence
  Antisense oligo
ucccacugugcucccaucau

SEQ ID NO: 6890 - RNA, 20 nt, Artificial Sequence
  Antisense oligo
ugacccggagguaaaccugg

SEQ ID NO: 6891 - RNA, 20 nt, Artificial Sequence
  Antisense oligo
cugacccggagguaaaccug

SEQ ID NO: 6892 - RNA, 20 nt, Artificial Sequence
  Antisense oligo
ccugacccggagguaaaccu

SEQ ID NO: 6893 - RNA, 20 nt, Artificial Sequence
  Antisense oligo
uccugacccggagguaaacc

SEQ ID NO: 6894 - RNA, 20 nt, Artificial Sequence
  Antisense oligo
ugccuccaugccagaccaca

SEQ ID NO: 6895 - RNA, 20 nt, Artificial Sequence
  Antisense oligo
cacugugcucccaucaugcc

SEQ ID NO: 6896 - RNA, 20 nt, Artificial Sequence
  Antisense oligo
ccacugugcucccaucaugc

SEQ ID NO: 6897 - RNA, 20 nt, Artificial Sequence
  Antisense oligo
cccacugugcucccaucaug

SEQ ID NO: 6898 - RNA, 20 nt, Artificial Sequence
  Antisense oligo
ucccacugugcucccaucau

SEQ ID NO: 6899 - RNA, 20 nt, Artificial Sequence
  Antisense oligo
ugacccggagguaaaccugg

SEQ ID NO: 6900 - RNA, 20 nt, Artificial Sequence
  Antisense oligo
cugacccggagguaaaccug

SEQ ID NO: 6901 - RNA, 20 nt, Artificial Sequence
  Antisense oligo
ccugacccggagguaaaccu

SEQ ID NO: 6902 - RNA, 20 nt, Artificial Sequence
  Antisense oligo
uccugacccggagguaaacc

SEQ ID NO: 6903 - RNA, 20 nt, Artificial Sequence
  Antisense oligo
cucuguccugccaaugagca

SEQ ID NO: 6904 - RNA, 20 nt, Artificial Sequence
  Antisense oligo
ccucuguccugccaaugagc

SEQ ID NO: 6905 - RNA, 20 nt, Artificial Sequence
  Antisense oligo
agccucuguccugccaauga

SEQ ID NO: 6906 - RNA, 20 nt, Artificial Sequence
  Antisense oligo
gauacgggagaaaagaggga

SEQ ID NO: 6907 - RNA, 20 nt, Artificial Sequence
  Antisense oligo
agauacgggagaaaagaggg

SEQ ID NO: 6908 - RNA, 20 nt, Artificial Sequence
  Antisense oligo
gagauacgggagaaaagagg

SEQ ID NO: 6909 - RNA, 20 nt, Artificial Sequence
  Antisense oligo
ggagauacgggagaaaagag

SEQ ID NO: 6910 - RNA, 20 nt, Artificial Sequence
  Antisense oligo
gggagauacgggagaaaaga

SEQ ID NO: 6911 - RNA, 20 nt, Artificial Sequence
  Antisense oligo
ugggagauacgggagaaaag

SEQ ID NO: 6912 - RNA, 20 nt, Artificial Sequence
  Antisense oligo
gugggagauacgggagaaaa

SEQ ID NO: 6913 - RNA, 20 nt, Artificial Sequence
  Antisense oligo
cgugggagauacgggagaaa

SEQ ID NO: 6914 - RNA, 20 nt, Artificial Sequence
  Antisense oligo
acgugggagauacgggagaa

SEQ ID NO: 6915 - RNA, 20 nt, Artificial Sequence
  Antisense oligo
gaacgugggagauacgggag

SEQ ID NO: 6916 - RNA, 20 nt, Artificial Sequence
  Antisense oligo
ugaacgugggagauacggga

SEQ ID NO: 6917 - RNA, 20 nt, Artificial Sequence
  Antisense oligo
cugaacgugggagauacggg

SEQ ID NO: 6918 - RNA, 20 nt, Artificial Sequence
  Antisense oligo
ccugaacgugggagauacgg

SEQ ID NO: 6919 - RNA, 20 nt, Artificial Sequence
  Antisense oligo
cccugaacgugggagauacg

SEQ ID NO: 6920 - RNA, 20 nt, Artificial Sequence
  Antisense oligo
acccugaacgugggagauac

SEQ ID NO: 6921 - RNA, 20 nt, Artificial Sequence
  Antisense oligo
cacccugaacgugggagaua

SEQ ID NO: 6922 - RNA, 20 nt, Artificial Sequence
  Antisense oligo
ucacccugaacgugggagau

SEQ ID NO: 6923 - RNA, 20 nt, Artificial Sequence
  Antisense oligo
guuuucuggguucacccuga

SEQ ID NO: 6924 - RNA, 20 nt, Artificial Sequence
  Antisense oligo
gguuuucuggguucacccug

SEQ ID NO: 6925 - RNA, 20 nt, Artificial Sequence
  Antisense oligo
cccacauucccaaagcacuu

SEQ ID NO: 6926 - RNA, 20 nt, Artificial Sequence
  Antisense oligo
gcccacauucccaaagcacu

SEQ ID NO: 6927 - RNA, 20 nt, Artificial Sequence
  Antisense oligo
ggcagaagcccacauuccca

SEQ ID NO: 6928 - RNA, 20 nt, Artificial Sequence
  Antisense oligo
uggcagaagcccacauuccc

SEQ ID NO: 6929 - RNA, 20 nt, Artificial Sequence
  Antisense oligo
ccuuggcagaagcccacauu

SEQ ID NO: 6930 - RNA, 20 nt, Artificial Sequence
  Antisense oligo
gccuuggcagaagcccacau

SEQ ID NO: 6931 - RNA, 20 nt, Artificial Sequence
  Antisense oligo
uacgauggagggaccacagg

SEQ ID NO: 6932 - RNA, 20 nt, Artificial Sequence
  Antisense oligo
cuacgauggagggaccacag

SEQ ID NO: 6933 - RNA, 20 nt, Artificial Sequence
  Antisense oligo
gcuacgauggagggaccaca

SEQ ID NO: 6934 - RNA, 20 nt, Artificial Sequence
  Antisense oligo
uggcuacgauggagggacca

SEQ ID NO: 6935 - RNA, 20 nt, Artificial Sequence
  Antisense oligo
gaguggcuacgauggaggga

SEQ ID NO: 6936 - RNA, 20 nt, Artificial Sequence
  Antisense oligo
aggaguggcuacgauggagg

SEQ ID NO: 6937 - RNA, 20 nt, Artificial Sequence
  Antisense oligo
aaggaguggcuacgauggag

SEQ ID NO: 6938 - RNA, 20 nt, Artificial Sequence
  Antisense oligo
caaggaguggcuacgaugga

SEQ ID NO: 6939 - RNA, 20 nt, Artificial Sequence
  Antisense oligo
ucaaggaguggcuacgaugg

SEQ ID NO: 6940 - RNA, 20 nt, Artificial Sequence
  Antisense oligo
cucaaggaguggcuacgaug

SEQ ID NO: 6941 - RNA, 20 nt, Artificial Sequence
  Antisense oligo
cugcucaaggaguggcuacg

SEQ ID NO: 6942 - RNA, 20 nt, Artificial Sequence
  Antisense oligo
gcugcucaaggaguggcuac

SEQ ID NO: 6943 - RNA, 20 nt, Artificial Sequence
  Antisense oligo
ggcugcucaaggaguggcua

SEQ ID NO: 6944 - RNA, 20 nt, Artificial Sequence
  Antisense oligo
aggcugcucaaggaguggcu

SEQ ID NO: 6945 - RNA, 20 nt, Artificial Sequence
  Antisense oligo
acaggcugcucaaggagugg

SEQ ID NO: 6946 - RNA, 20 nt, Artificial Sequence
  Antisense oligo
cacaggcugcucaaggagug

SEQ ID NO: 6947 - RNA, 20 nt, Artificial Sequence
  Antisense oligo
ucggcuguggacucagguuc

SEQ ID NO: 6948 - RNA, 20 nt, Artificial Sequence
  Antisense oligo
auccucggcuguggacucag

SEQ ID NO: 6949 - RNA, 20 nt, Artificial Sequence
  Antisense oligo
cauccucggcuguggacuca

SEQ ID NO: 6950 - RNA, 20 nt, Artificial Sequence
  Antisense oligo
ucauccucggcuguggacuc

SEQ ID NO: 6951 - RNA, 20 nt, Artificial Sequence
  Antisense oligo
gucauccucggcuguggacu

SEQ ID NO: 6952 - RNA, 20 nt, Artificial Sequence
  Antisense oligo
agucauccucggcuguggac

SEQ ID NO: 6953 - RNA, 20 nt, Artificial Sequence
  Antisense oligo
cagucauccucggcugugga

SEQ ID NO: 6954 - RNA, 20 nt, Artificial Sequence
  Antisense oligo
ucagucauccucggcugugg

SEQ ID NO: 6955 - RNA, 20 nt, Artificial Sequence
  Antisense oligo
gucagucauccucggcugug

SEQ ID NO: 6956 - RNA, 20 nt, Artificial Sequence
  Antisense oligo
ggucagucauccucggcugu

SEQ ID NO: 6957 - RNA, 20 nt, Artificial Sequence
  Antisense oligo
agggucagucauccucggcu

SEQ ID NO: 6958 - RNA, 20 nt, Artificial Sequence
  Antisense oligo
gagggagggucagucauccu

SEQ ID NO: 6959 - RNA, 20 nt, Artificial Sequence
  Antisense oligo
cacaagagggagggucaguc

SEQ ID NO: 6960 - RNA, 20 nt, Artificial Sequence
  Antisense oligo
cacacaagagggagggucag

SEQ ID NO: 6961 - RNA, 20 nt, Artificial Sequence
  Antisense oligo
ucacacaagagggaggguca

SEQ ID NO: 6962 - RNA, 20 nt, Artificial Sequence
  Antisense oligo
gucacacaagagggaggguc

SEQ ID NO: 6963 - RNA, 20 nt, Artificial Sequence
  Antisense oligo
ugucacacaagagggagggu

SEQ ID NO: 6964 - RNA, 20 nt, Artificial Sequence
  Antisense oligo
cagaauccuguugucacaca

SEQ ID NO: 6965 - RNA, 20 nt, Artificial Sequence
  Antisense oligo
gcagaauccuguugucacac

SEQ ID NO: 6966 - RNA, 20 nt, Artificial Sequence
  Antisense oligo
ugcagaauccuguugucaca

SEQ ID NO: 6967 - RNA, 20 nt, Artificial Sequence
  Antisense oligo
guuucaucucucuguccugc

SEQ ID NO: 6968 - RNA, 20 nt, Artificial Sequence
  Antisense oligo
ccaguuucaucucucugucc

SEQ ID NO: 6969 - RNA, 20 nt, Artificial Sequence
  Antisense oligo
gaagacuguuuggacugaau

SEQ ID NO: 6970 - RNA, 20 nt, Artificial Sequence
  Antisense oligo
ggaagacuguuuggacugaa

SEQ ID NO: 6971 - RNA, 20 nt, Artificial Sequence
  Antisense oligo
uggaagacuguuuggacuga

SEQ ID NO: 6972 - RNA, 20 nt, Artificial Sequence
  Antisense oligo
cccuuggaagacuguuugga

SEQ ID NO: 6973 - RNA, 20 nt, Artificial Sequence
  Antisense oligo
gucccuuggaagacuguuug

SEQ ID NO: 6974 - RNA, 20 nt, Artificial Sequence
  Antisense oligo
ggucccuuggaagacuguuu

SEQ ID NO: 6975 - RNA, 20 nt, Artificial Sequence
  Antisense oligo
gggucccuuggaagacuguu

SEQ ID NO: 6976 - RNA, 20 nt, Artificial Sequence
  Antisense oligo
ucguagcagcaagggucccu

SEQ ID NO: 6977 - RNA, 20 nt, Artificial Sequence
  Antisense oligo
uucguagcagcaaggguccc

SEQ ID NO: 6978 - RNA, 20 nt, Artificial Sequence
  Antisense oligo
uuucguagcagcaagggucc

SEQ ID NO: 6979 - RNA, 20 nt, Artificial Sequence
  Antisense oligo
uuuucguagcagcaaggguc

SEQ ID NO: 6980 - RNA, 20 nt, Artificial Sequence
  Antisense oligo
cuuuucguagcagcaagggu

SEQ ID NO: 6981 - RNA, 20 nt, Artificial Sequence
  Antisense oligo
caccuuuucguagcagcaag

SEQ ID NO: 6982 - RNA, 20 nt, Artificial Sequence
  Antisense oligo
ccaccuuuucguagcagcaa

SEQ ID NO: 6983 - RNA, 20 nt, Artificial Sequence
  Antisense oligo
gccaccuuuucguagcagca

SEQ ID NO: 6984 - RNA, 20 nt, Artificial Sequence
  Antisense oligo
agccaccuuuucguagcagc

SEQ ID NO: 6985 - RNA, 20 nt, Artificial Sequence
  Antisense oligo
cggagccaccuuuucguagc

SEQ ID NO: 6986 - RNA, 20 nt, Artificial Sequence
  Antisense oligo
ucggagccaccuuuucguag

SEQ ID NO: 6987 - RNA, 20 nt, Artificial Sequence
  Antisense oligo
cucggagccaccuuuucgua

SEQ ID NO: 6988 - RNA, 20 nt, Artificial Sequence
  Antisense oligo
ucucggagccaccuuuucgu

SEQ ID NO: 6989 - RNA, 20 nt, Artificial Sequence
  Antisense oligo
uucucggagccaccuuuucg

SEQ ID NO: 6990 - RNA, 20 nt, Artificial Sequence
  Antisense oligo
cuucucggagccaccuuuuc

SEQ ID NO: 6991 - RNA, 20 nt, Artificial Sequence
  Antisense oligo
acuucucggagccaccuuuu

SEQ ID NO: 6992 - RNA, 20 nt, Artificial Sequence
  Antisense oligo
aacuucucggagccaccuuu

SEQ ID NO: 6993 - RNA, 20 nt, Artificial Sequence
  Antisense oligo
aaacuucucggagccaccuu

SEQ ID NO: 6994 - RNA, 20 nt, Artificial Sequence
  Antisense oligo
aaaacuucucggagccaccu

SEQ ID NO: 6995 - RNA, 20 nt, Artificial Sequence
  Antisense oligo
agaugugagcauguucuuug

SEQ ID NO: 6996 - RNA, 20 nt, Artificial Sequence
  Antisense oligo
caccugaagaugugagcaug

SEQ ID NO: 6997 - RNA, 20 nt, Artificial Sequence
  Antisense oligo
aggcaccugaagaugugagc

SEQ ID NO: 6998 - RNA, 20 nt, Artificial Sequence
  Antisense oligo
ugaggcaccugaagauguga

SEQ ID NO: 6999 - RNA, 20 nt, Artificial Sequence
  Antisense oligo
aaugaggcaccugaagaugu

SEQ ID NO: 7000 - RNA, 20 nt, Artificial Sequence
  Antisense oligo
gaaugaggcaccugaagaug

SEQ ID NO: 7001 - RNA, 20 nt, Artificial Sequence
  Antisense oligo
augugaaugaggcaccugaa

SEQ ID NO: 7002 - RNA, 20 nt, Artificial Sequence
  Antisense oligo
acguaugugaaugaggcacc

SEQ ID NO: 7003 - RNA, 20 nt, Artificial Sequence
  Antisense oligo
gacguaugugaaugaggcac

SEQ ID NO: 7004 - RNA, 20 nt, Artificial Sequence
  Antisense oligo
ugacguaugugaaugaggca

SEQ ID NO: 7005 - RNA, 20 nt, Artificial Sequence
  Antisense oligo
uugacguaugugaaugaggc

SEQ ID NO: 7006 - RNA, 20 nt, Artificial Sequence
  Antisense oligo
cuugacguaugugaaugagg

SEQ ID NO: 7007 - RNA, 20 nt, Artificial Sequence
  Antisense oligo
ccuugacguaugugaaugag

SEQ ID NO: 7008 - RNA, 20 nt, Artificial Sequence
  Antisense oligo
uccuugacguaugugaauga

SEQ ID NO: 7009 - RNA, 20 nt, Artificial Sequence
  Antisense oligo
uuccuugacguaugugaaug

SEQ ID NO: 7010 - RNA, 20 nt, Artificial Sequence
  Antisense oligo
augccuaccucaauuuccuu

SEQ ID NO: 7011 - RNA, 20 nt, Artificial Sequence
  Antisense oligo
aaugccuaccucaauuuccu

SEQ ID NO: 7012 - RNA, 20 nt, Artificial Sequence
  Antisense oligo
gccaaaugccuaccucaauu

SEQ ID NO: 7013 - RNA, 20 nt, Artificial Sequence
  Antisense oligo
uucggccaaaugccuaccuc

SEQ ID NO: 7014 - RNA, 20 nt, Artificial Sequence
  Antisense oligo
cuucggccaaaugccuaccu

SEQ ID NO: 7015 - RNA, 20 nt, Artificial Sequence
  Antisense oligo
aucagucacaucccuaccca

SEQ ID NO: 7016 - RNA, 20 nt, Artificial Sequence
  Antisense oligo
gaucagucacaucccuaccc

SEQ ID NO: 7017 - RNA, 20 nt, Artificial Sequence
  Antisense oligo
cgaucagucacaucccuacc

SEQ ID NO: 7018 - RNA, 20 nt, Artificial Sequence
  Antisense oligo
acgaucagucacaucccuac

SEQ ID NO: 7019 - RNA, 20 nt, Artificial Sequence
  Antisense oligo
cacgaucagucacaucccua

SEQ ID NO: 7020 - RNA, 20 nt, Artificial Sequence
  Antisense oligo
ucacgaucagucacaucccu

SEQ ID NO: 7021 - RNA, 20 nt, Artificial Sequence
  Antisense oligo
aucacgaucagucacauccc

SEQ ID NO: 7022 - RNA, 20 nt, Artificial Sequence
  Antisense oligo
aaucacgaucagucacaucc

SEQ ID NO: 7023 - RNA, 20 nt, Artificial Sequence
  Antisense oligo
gaaucacgaucagucacauc

SEQ ID NO: 7024 - RNA, 20 nt, Artificial Sequence
  Antisense oligo
ggaaucacgaucagucacau

SEQ ID NO: 7025 - RNA, 20 nt, Artificial Sequence
  Antisense oligo
aggaaucacgaucagucaca

SEQ ID NO: 7026 - RNA, 20 nt, Artificial Sequence
  Antisense oligo
gaggaaucacgaucagucac

SEQ ID NO: 7027 - RNA, 20 nt, Artificial Sequence
  Antisense oligo
ugaggaaucacgaucaguca

SEQ ID NO: 7028 - RNA, 20 nt, Artificial Sequence
  Antisense oligo
augaggaaucacgaucaguc

SEQ ID NO: 7029 - RNA, 20 nt, Artificial Sequence
  Antisense oligo
caugaggaaucacgaucagu

SEQ ID NO: 7030 - RNA, 20 nt, Artificial Sequence
  Antisense oligo
ccaugaggaaucacgaucag

SEQ ID NO: 7031 - RNA, 20 nt, Artificial Sequence
  Antisense oligo
gccaugaggaaucacgauca

SEQ ID NO: 7032 - RNA, 20 nt, Artificial Sequence
  Antisense oligo
ggccaugaggaaucacgauc

SEQ ID NO: 7033 - RNA, 20 nt, Artificial Sequence
  Antisense oligo
uugaggccaugaggaaucac

SEQ ID NO: 7034 - RNA, 20 nt, Artificial Sequence
  Antisense oligo
uuugaggccaugaggaauca

SEQ ID NO: 7035 - RNA, 20 nt, Artificial Sequence
  Antisense oligo
auuugaggccaugaggaauc

SEQ ID NO: 7036 - RNA, 20 nt, Artificial Sequence
  Antisense oligo
gugaaggccaacaacugccc

SEQ ID NO: 7037 - RNA, 20 nt, Artificial Sequence
  Antisense oligo
aggugaaggccaacaacugc

SEQ ID NO: 7038 - RNA, 20 nt, Artificial Sequence
  Antisense oligo
caggugaaggccaacaacug

SEQ ID NO: 7039 - RNA, 20 nt, Artificial Sequence
  Antisense oligo
ucaggugaaggccaacaacu

SEQ ID NO: 7040 - RNA, 20 nt, Artificial Sequence
  Antisense oligo
gcucaggugaaggccaacaa

SEQ ID NO: 7041 - RNA, 20 nt, Artificial Sequence
  Antisense oligo
aggcucaggugaaggccaac

SEQ ID NO: 7042 - RNA, 20 nt, Artificial Sequence
  Antisense oligo
cagguagacaggagcaacuc

SEQ ID NO: 7043 - RNA, 20 nt, Artificial Sequence
  Antisense oligo
gccagguagacaggagcaac

SEQ ID NO: 7044 - RNA, 20 nt, Artificial Sequence
  Antisense oligo
cuccaucaccacagggacug

SEQ ID NO: 7045 - RNA, 20 nt, Artificial Sequence
  Antisense oligo
ccuccaucaccacagggacu

SEQ ID NO: 7046 - RNA, 20 nt, Artificial Sequence
  Antisense oligo
cacaccuccaucaccacagg

SEQ ID NO: 7047 - RNA, 20 nt, Artificial Sequence
  Antisense oligo
caccaccaccaccaaccauc

SEQ ID NO: 7048 - RNA, 20 nt, Artificial Sequence
  Antisense oligo
ccaccaccaccaccaaccau

SEQ ID NO: 7049 - RNA, 20 nt, Artificial Sequence
  Antisense oligo
accaccaccaccaccaacca

SEQ ID NO: 7050 - RNA, 20 nt, Artificial Sequence
  Antisense oligo
uaccaccaccaccaccaacc

SEQ ID NO: 7051 - RNA, 20 nt, Artificial Sequence
  Antisense oligo
cuaccaccaccaccaccaac

SEQ ID NO: 7052 - RNA, 20 nt, Artificial Sequence
  Antisense oligo
ucuaccaccaccaccaccaa

SEQ ID NO: 7053 - RNA, 20 nt, Artificial Sequence
  Antisense oligo
cucuaccaccaccaccacca

SEQ ID NO: 7054 - RNA, 20 nt, Artificial Sequence
  Antisense oligo
caccaccaccaccaaccauc

SEQ ID NO: 7055 - RNA, 20 nt, Artificial Sequence
  Antisense oligo
ccaccaccaccaccaaccau

SEQ ID NO: 7056 - RNA, 20 nt, Artificial Sequence
  Antisense oligo
accaccaccaccaccaacca

SEQ ID NO: 7057 - RNA, 20 nt, Artificial Sequence
  Antisense oligo
uaccaccaccaccaccaacc

SEQ ID NO: 7058 - RNA, 20 nt, Artificial Sequence
  Antisense oligo
cuaccaccaccaccaccaac

SEQ ID NO: 7059 - RNA, 20 nt, Artificial Sequence
  Antisense oligo
ucuaccaccaccaccaccaa

SEQ ID NO: 7060 - RNA, 20 nt, Artificial Sequence
  Antisense oligo
cucuaccaccaccaccacca

SEQ ID NO: 7061 - RNA, 20 nt, Artificial Sequence
  Antisense oligo
uacguccaccaucaccauca

SEQ ID NO: 7062 - RNA, 20 nt, Artificial Sequence
  Antisense oligo
uuacguccaccaucaccauc

SEQ ID NO: 7063 - RNA, 20 nt, Artificial Sequence
  Antisense oligo
auuacguccaccaucaccau

SEQ ID NO: 7064 - RNA, 20 nt, Artificial Sequence
  Antisense oligo
cauuacguccaccaucacca

SEQ ID NO: 7065 - RNA, 20 nt, Artificial Sequence
  Antisense oligo
ccauuacguccaccaucacc

SEQ ID NO: 7066 - RNA, 20 nt, Artificial Sequence
  Antisense oligo
uccauuacguccaccaucac

SEQ ID NO: 7067 - RNA, 20 nt, Artificial Sequence
  Antisense oligo
cuccauuacguccaccauca

SEQ ID NO: 7068 - RNA, 20 nt, Artificial Sequence
  Antisense oligo
ccuccauuacguccaccauc

SEQ ID NO: 7069 - RNA, 20 nt, Artificial Sequence
  Antisense oligo
accuccauuacguccaccau

SEQ ID NO: 7070 - RNA, 20 nt, Artificial Sequence
  Antisense oligo
caccuccauuacguccacca

SEQ ID NO: 7071 - RNA, 20 nt, Artificial Sequence
  Antisense oligo
ucaccuccauuacguccacc

SEQ ID NO: 7072 - RNA, 20 nt, Artificial Sequence
  Antisense oligo
aucaccuccauuacguccac

SEQ ID NO: 7073 - RNA, 20 nt, Artificial Sequence
  Antisense oligo
caucaccuccauuacgucca

SEQ ID NO: 7074 - RNA, 20 nt, Artificial Sequence
  Antisense oligo
ccaucaccuccauuacgucc

SEQ ID NO: 7075 - RNA, 20 nt, Artificial Sequence
  Antisense oligo
accaucaccuccauuacguc

SEQ ID NO: 7076 - RNA, 20 nt, Artificial Sequence
  Antisense oligo
caccaucaccuccauuacgu

SEQ ID NO: 7077 - RNA, 20 nt, Artificial Sequence
  Antisense oligo
ucaccuccacaaccaucacc

SEQ ID NO: 7078 - RNA, 20 nt, Artificial Sequence
  Antisense oligo
caucaccuccacaaccauca

SEQ ID NO: 7079 - RNA, 20 nt, Artificial Sequence
  Antisense oligo
accaucaccuccacaaccau

SEQ ID NO: 7080 - RNA, 20 nt, Artificial Sequence
  Antisense oligo
accaccaccaccaccaucac

SEQ ID NO: 7081 - RNA, 20 nt, Artificial Sequence
  Antisense oligo
caccaccaccaccaccauca

SEQ ID NO: 7082 - RNA, 20 nt, Artificial Sequence
  Antisense oligo
ucaccaccaccaccaccauc

SEQ ID NO: 7083 - RNA, 20 nt, Artificial Sequence
  Antisense oligo
aucaccaccaccaccaccau

SEQ ID NO: 7084 - RNA, 20 nt, Artificial Sequence
  Antisense oligo
caucaccaccaccaccacca

SEQ ID NO: 7085 - RNA, 20 nt, Artificial Sequence
  Antisense oligo
accaucaccaccaccaccac

SEQ ID NO: 7086 - RNA, 20 nt, Artificial Sequence
  Antisense oligo
accaccaccaccaccaucac

SEQ ID NO: 7087 - RNA, 20 nt, Artificial Sequence
  Antisense oligo
caccaccaccaccaccauca

SEQ ID NO: 7088 - RNA, 20 nt, Artificial Sequence
  Antisense oligo
ucaccaccaccaccaccauc

SEQ ID NO: 7089 - RNA, 20 nt, Artificial Sequence
  Antisense oligo
aucaccaccaccaccaccau

SEQ ID NO: 7090 - RNA, 20 nt, Artificial Sequence
  Antisense oligo
caucaccaccaccaccacca

SEQ ID NO: 7091 - RNA, 20 nt, Artificial Sequence
  Antisense oligo
accaucaccaccaccaccac

SEQ ID NO: 7092 - RNA, 20 nt, Artificial Sequence
  Antisense oligo
aucaccuacaccaccaccau

SEQ ID NO: 7093 - RNA, 20 nt, Artificial Sequence
  Antisense oligo
caccaucaccuacaccacca

SEQ ID NO: 7094 - RNA, 20 nt, Artificial Sequence
  Antisense oligo
ccaccaucaccuacaccacc

SEQ ID NO: 7095 - RNA, 20 nt, Artificial Sequence
  Antisense oligo
cuccaccaucaccuacacca

SEQ ID NO: 7096 - RNA, 20 nt, Artificial Sequence
  Antisense oligo
ccuccaccaucaccuacacc

SEQ ID NO: 7097 - RNA, 20 nt, Artificial Sequence
  Antisense oligo
accaccaccaccaccaucac

SEQ ID NO: 7098 - RNA, 20 nt, Artificial Sequence
  Antisense oligo
caccaccaccaccaccauca

SEQ ID NO: 7099 - RNA, 20 nt, Artificial Sequence
  Antisense oligo
accaccaccaccaccaccau

SEQ ID NO: 7100 - RNA, 20 nt, Artificial Sequence
  Antisense oligo
uaccuccaccaccaccacca

SEQ ID NO: 7101 - RNA, 20 nt, Artificial Sequence
  Antisense oligo
accaccaccaccaccuccau

SEQ ID NO: 7102 - RNA, 20 nt, Artificial Sequence
  Antisense oligo
uaccuccaccaccaccacca

SEQ ID NO: 7103 - RNA, 20 nt, Artificial Sequence
  Antisense oligo
uccaccaccaccaccaucac

SEQ ID NO: 7104 - RNA, 20 nt, Artificial Sequence
  Antisense oligo
cuccaccaccaccaccauca

SEQ ID NO: 7105 - RNA, 20 nt, Artificial Sequence
  Antisense oligo
accuccaccaccaccaccau

SEQ ID NO: 7106 - RNA, 20 nt, Artificial Sequence
  Antisense oligo
uaccuccaccaccaccacca

SEQ ID NO: 7107 - RNA, 20 nt, Artificial Sequence
  Antisense oligo
uuaccuccaccaccaccacc

SEQ ID NO: 7108 - RNA, 20 nt, Artificial Sequence
  Antisense oligo
accaccaccaccaccaucac

SEQ ID NO: 7109 - RNA, 20 nt, Artificial Sequence
  Antisense oligo
caccaccaccaccaccauca

SEQ ID NO: 7110 - RNA, 20 nt, Artificial Sequence
  Antisense oligo
accaccaccaccaccaccau

SEQ ID NO: 7111 - RNA, 20 nt, Artificial Sequence
  Antisense oligo
uaccuccaccaccaccacca

SEQ ID NO: 7112 - RNA, 20 nt, Artificial Sequence
  Antisense oligo
uuaccuccaccaccaccacc

SEQ ID NO: 7113 - RNA, 20 nt, Artificial Sequence
  Antisense oligo
accaccaccaccaccaucac

SEQ ID NO: 7114 - RNA, 20 nt, Artificial Sequence
  Antisense oligo
caccaccaccaccaccauca

SEQ ID NO: 7115 - RNA, 20 nt, Artificial Sequence
  Antisense oligo
accaccaccaccaccaccau

SEQ ID NO: 7116 - RNA, 20 nt, Artificial Sequence
  Antisense oligo
uaccuccaccaccaccacca

SEQ ID NO: 7117 - RNA, 20 nt, Artificial Sequence
  Antisense oligo
accaccaccaccaccuccau

SEQ ID NO: 7118 - RNA, 20 nt, Artificial Sequence
  Antisense oligo
uaccuccaccaccaccacca

SEQ ID NO: 7119 - RNA, 20 nt, Artificial Sequence
  Antisense oligo
uccaccaccaccaccaucac

SEQ ID NO: 7120 - RNA, 20 nt, Artificial Sequence
  Antisense oligo
cuccaccaccaccaccauca

SEQ ID NO: 7121 - RNA, 20 nt, Artificial Sequence
  Antisense oligo
accuccaccaccaccaccau

SEQ ID NO: 7122 - RNA, 20 nt, Artificial Sequence
  Antisense oligo
uaccuccaccaccaccacca

SEQ ID NO: 7123 - RNA, 20 nt, Artificial Sequence
  Antisense oligo
uuaccuccaccaccaccacc

SEQ ID NO: 7124 - RNA, 20 nt, Artificial Sequence
  Antisense oligo
accaccaccaccaccaucac

SEQ ID NO: 7125 - RNA, 20 nt, Artificial Sequence
  Antisense oligo
caccaccaccaccaccauca

SEQ ID NO: 7126 - RNA, 20 nt, Artificial Sequence
  Antisense oligo
accaccaccaccaccaccau

SEQ ID NO: 7127 - RNA, 20 nt, Artificial Sequence
  Antisense oligo
uaccuccaccaccaccacca

SEQ ID NO: 7128 - RNA, 20 nt, Artificial Sequence
  Antisense oligo
uuaccuccaccaccaccacc

SEQ ID NO: 7129 - RNA, 20 nt, Artificial Sequence
  Antisense oligo
ccaguaccuccaccaacacc

SEQ ID NO: 7130 - RNA, 20 nt, Artificial Sequence
  Antisense oligo
cuccaguaccuccaccaaca

SEQ ID NO: 7131 - RNA, 20 nt, Artificial Sequence
  Antisense oligo
ccuccaguaccuccaccaac

SEQ ID NO: 7132 - RNA, 20 nt, Artificial Sequence
  Antisense oligo
accuccaguaccuccaccaa

SEQ ID NO: 7133 - RNA, 20 nt, Artificial Sequence
  Antisense oligo
uacacgaccaccaucaccuc

SEQ ID NO: 7134 - RNA, 20 nt, Artificial Sequence
  Antisense oligo
cuacacgaccaccaucaccu

SEQ ID NO: 7135 - RNA, 20 nt, Artificial Sequence
  Antisense oligo
ccuacacgaccaccaucacc

SEQ ID NO: 7136 - RNA, 20 nt, Artificial Sequence
  Antisense oligo
accuacacgaccaccaucac

SEQ ID NO: 7137 - RNA, 20 nt, Artificial Sequence
  Antisense oligo
caccuacacgaccaccauca

SEQ ID NO: 7138 - RNA, 20 nt, Artificial Sequence
  Antisense oligo
ucaccuacacgaccaccauc

SEQ ID NO: 7139 - RNA, 20 nt, Artificial Sequence
  Antisense oligo
aucaccuacacgaccaccau

SEQ ID NO: 7140 - RNA, 20 nt, Artificial Sequence
  Antisense oligo
caucaccuacacgaccacca

SEQ ID NO: 7141 - RNA, 20 nt, Artificial Sequence
  Antisense oligo
ccaucaccuacacgaccacc

SEQ ID NO: 7142 - RNA, 20 nt, Artificial Sequence
  Antisense oligo
accaucaccuacacgaccac

SEQ ID NO: 7143 - RNA, 20 nt, Artificial Sequence
  Antisense oligo
caccaucaccuacacgacca

SEQ ID NO: 7144 - RNA, 20 nt, Artificial Sequence
  Antisense oligo
ccaccaucaccuacacgacc

SEQ ID NO: 7145 - RNA, 20 nt, Artificial Sequence
  Antisense oligo
cuccaccaucaccuacacga

SEQ ID NO: 7146 - RNA, 20 nt, Artificial Sequence
  Antisense oligo
ccuccaccaucaccuacacg

SEQ ID NO: 7147 - RNA, 20 nt, Artificial Sequence
  Antisense oligo
accaccaccaccaccaucac

SEQ ID NO: 7148 - RNA, 20 nt, Artificial Sequence
  Antisense oligo
caccaccaccaccaccauca

SEQ ID NO: 7149 - RNA, 20 nt, Artificial Sequence
  Antisense oligo
uccaccaccaccaccaccau

SEQ ID NO: 7150 - RNA, 20 nt, Artificial Sequence
  Antisense oligo
uaccuccaccaccaccacca

SEQ ID NO: 7151 - RNA, 20 nt, Artificial Sequence
  Antisense oligo
accaccaccaccaccaucac

SEQ ID NO: 7152 - RNA, 20 nt, Artificial Sequence
  Antisense oligo
caccaccaccaccaccauca

SEQ ID NO: 7153 - RNA, 20 nt, Artificial Sequence
  Antisense oligo
uccaccaccaccaccaccau

SEQ ID NO: 7154 - RNA, 20 nt, Artificial Sequence
  Antisense oligo
uaccuccaccaccaccacca

SEQ ID NO: 7155 - RNA, 20 nt, Artificial Sequence
  Antisense oligo
uuaccuccaccaccaccacc

SEQ ID NO: 7156 - RNA, 20 nt, Artificial Sequence
  Antisense oligo
accucuaguaccuccaccau

SEQ ID NO: 7157 - RNA, 20 nt, Artificial Sequence
  Antisense oligo
aucaccucuaguaccuccac

SEQ ID NO: 7158 - RNA, 20 nt, Artificial Sequence
  Antisense oligo
caucaccucuaguaccucca

SEQ ID NO: 7159 - RNA, 20 nt, Artificial Sequence
  Antisense oligo
ccaucaccucuaguaccucc

SEQ ID NO: 7160 - RNA, 20 nt, Artificial Sequence
  Antisense oligo
gccaucaccucuaguaccuc

SEQ ID NO: 7161 - RNA, 20 nt, Artificial Sequence
  Antisense oligo
cgccaucaccucuaguaccu

SEQ ID NO: 7162 - RNA, 20 nt, Artificial Sequence
  Antisense oligo
ccgccaucaccucuaguacc

SEQ ID NO: 7163 - RNA, 20 nt, Artificial Sequence
  Antisense oligo
accgccaucaccucuaguac

SEQ ID NO: 7164 - RNA, 20 nt, Artificial Sequence
  Antisense oligo
gaccgccaucaccucuagua

SEQ ID NO: 7165 - RNA, 20 nt, Artificial Sequence
  Antisense oligo
cgaccgccaucaccucuagu

SEQ ID NO: 7166 - RNA, 20 nt, Artificial Sequence
  Antisense oligo
acgaccgccaucaccucuag

SEQ ID NO: 7167 - RNA, 20 nt, Artificial Sequence
  Antisense oligo
cacgaccgccaucaccucua

SEQ ID NO: 7168 - RNA, 20 nt, Artificial Sequence
  Antisense oligo
accaccaccaccaccaucac

SEQ ID NO: 7169 - RNA, 20 nt, Artificial Sequence
  Antisense oligo
caccaccaccaccaccauca

SEQ ID NO: 7170 - RNA, 20 nt, Artificial Sequence
  Antisense oligo
accaccaccaccaccaccau

SEQ ID NO: 7171 - RNA, 20 nt, Artificial Sequence
  Antisense oligo
uaccaccaccaccaccacca

SEQ ID NO: 7172 - RNA, 20 nt, Artificial Sequence
  Antisense oligo
aguaccaccaccaccaccac

SEQ ID NO: 7173 - RNA, 20 nt, Artificial Sequence
  Antisense oligo
caguaccaccaccaccacca

SEQ ID NO: 7174 - RNA, 20 nt, Artificial Sequence
  Antisense oligo
cuccaguaccaccaccacca

SEQ ID NO: 7175 - RNA, 20 nt, Artificial Sequence
  Antisense oligo
accaccaccaccaccaucac

SEQ ID NO: 7176 - RNA, 20 nt, Artificial Sequence
  Antisense oligo
caccaccaccaccaccauca

SEQ ID NO: 7177 - RNA, 20 nt, Artificial Sequence
  Antisense oligo
accaccaccaccaccaccau

SEQ ID NO: 7178 - RNA, 20 nt, Artificial Sequence
  Antisense oligo
uaccaccaccaccaccacca

SEQ ID NO: 7179 - RNA, 20 nt, Artificial Sequence
  Antisense oligo
aguaccaccaccaccaccac

SEQ ID NO: 7180 - RNA, 20 nt, Artificial Sequence
  Antisense oligo
caguaccaccaccaccacca

SEQ ID NO: 7181 - RNA, 20 nt, Artificial Sequence
  Antisense oligo
cuccaguaccaccaccacca

SEQ ID NO: 7182 - RNA, 20 nt, Artificial Sequence
  Antisense oligo
accaccaccaccaccuccau

SEQ ID NO: 7183 - RNA, 20 nt, Artificial Sequence
  Antisense oligo
uaccuccaccaccaccacca

SEQ ID NO: 7184 - RNA, 20 nt, Artificial Sequence
  Antisense oligo
ucaccuccacgaccaccauc

SEQ ID NO: 7185 - RNA, 20 nt, Artificial Sequence
  Antisense oligo
aucaccuccacgaccaccau

SEQ ID NO: 7186 - RNA, 20 nt, Artificial Sequence
  Antisense oligo
accaucaccuccacgaccac

SEQ ID NO: 7187 - RNA, 20 nt, Artificial Sequence
  Antisense oligo
caccaucaccuccacgacca

SEQ ID NO: 7188 - RNA, 20 nt, Artificial Sequence
  Antisense oligo
accaccaccaccaccaucac

SEQ ID NO: 7189 - RNA, 20 nt, Artificial Sequence
  Antisense oligo
caccaccaccaccaccauca

SEQ ID NO: 7190 - RNA, 20 nt, Artificial Sequence
  Antisense oligo
accaccaccaccaccaccau

SEQ ID NO: 7191 - RNA, 20 nt, Artificial Sequence
  Antisense oligo
uaccaccaccaccaccacca

SEQ ID NO: 7192 - RNA, 20 nt, Artificial Sequence
  Antisense oligo
aguaccaccaccaccaccac

SEQ ID NO: 7193 - RNA, 20 nt, Artificial Sequence
  Antisense oligo
caguaccaccaccaccacca

SEQ ID NO: 7194 - RNA, 20 nt, Artificial Sequence
  Antisense oligo
cuccaguaccaccaccacca

SEQ ID NO: 7195 - RNA, 20 nt, Artificial Sequence
  Antisense oligo
uccacggaccaccaucaccu

SEQ ID NO: 7196 - RNA, 20 nt, Artificial Sequence
  Antisense oligo
accuccacggaccaccauca

SEQ ID NO: 7197 - RNA, 20 nt, Artificial Sequence
  Antisense oligo
ucaccuccacggaccaccau

SEQ ID NO: 7198 - RNA, 20 nt, Artificial Sequence
  Antisense oligo
aucaccuccacggaccacca

SEQ ID NO: 7199 - RNA, 20 nt, Artificial Sequence
  Antisense oligo
accaucaccuccacggacca

SEQ ID NO: 7200 - RNA, 20 nt, Artificial Sequence
  Antisense oligo
accuccauuaccaccaccac

SEQ ID NO: 7201 - RNA, 20 nt, Artificial Sequence
  Antisense oligo
uuaccucuaccaucaccuuc

SEQ ID NO: 7202 - RNA, 20 nt, Artificial Sequence
  Antisense oligo
cauuaccucuaccaucaccu

SEQ ID NO: 7203 - RNA, 20 nt, Artificial Sequence
  Antisense oligo
cuuccauuaccucuaccauc

SEQ ID NO: 7204 - RNA, 20 nt, Artificial Sequence
  Antisense oligo
cacuuccauuaccucuacca

SEQ ID NO: 7205 - RNA, 20 nt, Artificial Sequence
  Antisense oligo
aucacuuccauuaccucuac

SEQ ID NO: 7206 - RNA, 20 nt, Artificial Sequence
  Antisense oligo
caccaucacuuccauuaccu

SEQ ID NO: 7207 - RNA, 20 nt, Artificial Sequence
  Antisense oligo
ccaguaccuccaccaucacu

SEQ ID NO: 7208 - RNA, 20 nt, Artificial Sequence
  Antisense oligo
accaccaccaccaccagcau

SEQ ID NO: 7209 - RNA, 20 nt, Artificial Sequence
  Antisense oligo
aucaccaccaccaccaccac

SEQ ID NO: 7210 - RNA, 20 nt, Artificial Sequence
  Antisense oligo
caucaccaccaccaccacca

SEQ ID NO: 7211 - RNA, 20 nt, Artificial Sequence
  Antisense oligo
accaucaccaccaccaccac

SEQ ID NO: 7212 - RNA, 20 nt, Artificial Sequence
  Antisense oligo
ccaugaccuccaguaccucc

SEQ ID NO: 7213 - RNA, 20 nt, Artificial Sequence
  Antisense oligo
accaugaccuccaguaccuc

SEQ ID NO: 7214 - RNA, 20 nt, Artificial Sequence
  Antisense oligo
accaccaccaugaccuccag

SEQ ID NO: 7215 - RNA, 20 nt, Artificial Sequence
  Antisense oligo
caccaccaccaugaccucca

SEQ ID NO: 7216 - RNA, 20 nt, Artificial Sequence
  Antisense oligo
accuucaccacuaucaccuc

SEQ ID NO: 7217 - RNA, 20 nt, Artificial Sequence
  Antisense oligo
aucaccuucaccacuaucac

SEQ ID NO: 7218 - RNA, 20 nt, Artificial Sequence
  Antisense oligo
uccaucaccuucaccacuau

SEQ ID NO: 7219 - RNA, 20 nt, Artificial Sequence
  Antisense oligo
uccauaaccuccaccaccuc

SEQ ID NO: 7220 - RNA, 20 nt, Artificial Sequence
  Antisense oligo
cuccauaaccuccaccaccu

SEQ ID NO: 7221 - RNA, 20 nt, Artificial Sequence
  Antisense oligo
uaucuccauaaccuccacca

SEQ ID NO: 7222 - RNA, 20 nt, Artificial Sequence
  Antisense oligo
ccaccaccauuaucuccaua

SEQ ID NO: 7223 - RNA, 20 nt, Artificial Sequence
  Antisense oligo
accuccaccaccaccauuau

SEQ ID NO: 7224 - RNA, 20 nt, Artificial Sequence
  Antisense oligo
aaauaucuaucaccuccacc

SEQ ID NO: 7225 - RNA, 20 nt, Artificial Sequence
  Antisense oligo
caaauaucuaucaccuccac

SEQ ID NO: 7226 - RNA, 20 nt, Artificial Sequence
  Antisense oligo
gucaggcauguucaaauauc

SEQ ID NO: 7227 - RNA, 20 nt, Artificial Sequence
  Antisense oligo
aggucaggcauguucaaaua

SEQ ID NO: 7228 - RNA, 20 nt, Artificial Sequence
  Antisense oligo
uaggucaggcauguucaaau

SEQ ID NO: 7229 - RNA, 20 nt, Artificial Sequence
  Antisense oligo
uuaggucaggcauguucaaa

SEQ ID NO: 7230 - RNA, 20 nt, Artificial Sequence
  Antisense oligo
cuuaggucaggcauguucaa

SEQ ID NO: 7231 - RNA, 20 nt, Artificial Sequence
  Antisense oligo
gaacuuuucuuaggucaggc

SEQ ID NO: 7232 - RNA, 20 nt, Artificial Sequence
  Antisense oligo
aggcuuccuaaagaguuggg

SEQ ID NO: 7233 - RNA, 20 nt, Artificial Sequence
  Antisense oligo
accuccuggguucaagccac

SEQ ID NO: 7234 - RNA, 20 nt, Artificial Sequence
  Antisense oligo
gaccuccuggguucaagcca

SEQ ID NO: 7235 - RNA, 20 nt, Artificial Sequence
  Antisense oligo
ugaccuccuggguucaagcc

SEQ ID NO: 7236 - RNA, 20 nt, Artificial Sequence
  Antisense oligo
cugaccuccuggguucaagc

SEQ ID NO: 7237 - RNA, 20 nt, Artificial Sequence
  Antisense oligo
ccugaccuccuggguucaag

SEQ ID NO: 7238 - RNA, 20 nt, Artificial Sequence
  Antisense oligo
cccugaccuccuggguucaa

SEQ ID NO: 7239 - RNA, 20 nt, Artificial Sequence
  Antisense oligo
uggguuggagugcaguggca

SEQ ID NO: 7240 - RNA, 20 nt, Artificial Sequence
  Antisense oligo
cuuuugaccugauuugucuc

SEQ ID NO: 7241 - RNA, 20 nt, Artificial Sequence
  Antisense oligo
gucuuuugaccugauuuguc

SEQ ID NO: 7242 - RNA, 20 nt, Artificial Sequence
  Antisense oligo
aagaguucccuggucauuuu

SEQ ID NO: 7243 - RNA, 20 nt, Artificial Sequence
  Antisense oligo
agaagaguucccuggucauu

SEQ ID NO: 7244 - RNA, 20 nt, Artificial Sequence
  Antisense oligo
uagaagaguucccuggucau

SEQ ID NO: 7245 - RNA, 20 nt, Artificial Sequence
  Antisense oligo
ucacgucucuuuucugcauu

SEQ ID NO: 7246 - RNA, 20 nt, Artificial Sequence
  Antisense oligo
uaucacgucucuuuucugca

SEQ ID NO: 7247 - RNA, 20 nt, Artificial Sequence
  Antisense oligo
uuaucacgucucuuuucugc

SEQ ID NO: 7248 - RNA, 20 nt, Artificial Sequence
  Antisense oligo
cuuaucacgucucuuuucug

SEQ ID NO: 7249 - RNA, 20 nt, Artificial Sequence
  Antisense oligo
guacuuacuuaucacgucuc

SEQ ID NO: 7250 - RNA, 20 nt, Artificial Sequence
  Antisense oligo
cuguacuuacuuaucacguc

SEQ ID NO: 7251 - RNA, 20 nt, Artificial Sequence
  Antisense oligo
gcuguacuuacuuaucacgu

SEQ ID NO: 7252 - RNA, 20 nt, Artificial Sequence
  Antisense oligo
cuagauccuccugggacaca

SEQ ID NO: 7253 - RNA, 20 nt, Artificial Sequence
  Antisense oligo
auccuagauccuccugggac

SEQ ID NO: 7254 - RNA, 20 nt, Artificial Sequence
  Antisense oligo
gcuccuguccugacuggauc

SEQ ID NO: 7255 - RNA, 20 nt, Artificial Sequence
  Antisense oligo
agcuccuguccugacuggau

SEQ ID NO: 7256 - RNA, 20 nt, Artificial Sequence
  Antisense oligo
cagcuccuguccugacugga

SEQ ID NO: 7257 - RNA, 20 nt, Artificial Sequence
  Antisense oligo
acguggagaggaggacacuc

SEQ ID NO: 7258 - RNA, 20 nt, Artificial Sequence
  Antisense oligo
gcaacguggagaggaggaca

SEQ ID NO: 7259 - RNA, 20 nt, Artificial Sequence
  Antisense oligo
ugcaacguggagaggaggac

SEQ ID NO: 7260 - RNA, 20 nt, Artificial Sequence
  Antisense oligo
gugcaacguggagaggagga

SEQ ID NO: 7261 - RNA, 20 nt, Artificial Sequence
  Antisense oligo
ucccacucaggacgugcaac

SEQ ID NO: 7262 - RNA, 20 nt, Artificial Sequence
  Antisense oligo
uucccacucaggacgugcaa

SEQ ID NO: 7263 - RNA, 20 nt, Artificial Sequence
  Antisense oligo
uuucccacucaggacgugca

SEQ ID NO: 7264 - RNA, 20 nt, Artificial Sequence
  Antisense oligo
gguuucccacucaggacgug

SEQ ID NO: 7265 - RNA, 20 nt, Artificial Sequence
  Antisense oligo
agguuucccacucaggacgu

SEQ ID NO: 7266 - RNA, 20 nt, Artificial Sequence
  Antisense oligo
gcagguuucccacucaggac

SEQ ID NO: 7267 - RNA, 20 nt, Artificial Sequence
  Antisense oligo
ugcagguuucccacucagga

SEQ ID NO: 7268 - RNA, 20 nt, Artificial Sequence
  Antisense oligo
gugcagguuucccacucagg

SEQ ID NO: 7269 - RNA, 20 nt, Artificial Sequence
  Antisense oligo
cuccagugcagguuucccac

SEQ ID NO: 7270 - RNA, 20 nt, Artificial Sequence
  Antisense oligo
aacuccagugcagguuuccc

SEQ ID NO: 7271 - RNA, 20 nt, Artificial Sequence
  Antisense oligo
caacuccagugcagguuucc

SEQ ID NO: 7272 - RNA, 20 nt, Artificial Sequence
  Antisense oligo
ucccugugcaacuccagugc

SEQ ID NO: 7273 - RNA, 20 nt, Artificial Sequence
  Antisense oligo
agacccuagcccuucccugu

SEQ ID NO: 7274 - RNA, 20 nt, Artificial Sequence
  Antisense oligo
aagacccuagcccuucccug

SEQ ID NO: 7275 - RNA, 20 nt, Artificial Sequence
  Antisense oligo
uaagacccuagcccuucccu

SEQ ID NO: 7276 - RNA, 20 nt, Artificial Sequence
  Antisense oligo
cuaagacccuagcccuuccc

SEQ ID NO: 7277 - RNA, 20 nt, Artificial Sequence
  Antisense oligo
uccuaagacccuagcccuuc

SEQ ID NO: 7278 - RNA, 20 nt, Artificial Sequence
  Antisense oligo
uaccugggcagggucuccua

SEQ ID NO: 7279 - RNA, 20 nt, Artificial Sequence
  Antisense oligo
uacauaccugggcagggucu

SEQ ID NO: 7280 - RNA, 20 nt, Artificial Sequence
  Antisense oligo
cuacauaccugggcaggguc

SEQ ID NO: 7281 - RNA, 20 nt, Artificial Sequence
  Antisense oligo
guugcaggcaucauggcacc

SEQ ID NO: 7282 - RNA, 20 nt, Artificial Sequence
  Antisense oligo
ccguuggaaaguaaguugca

SEQ ID NO: 7283 - RNA, 20 nt, Artificial Sequence
  Antisense oligo
caaaccguuggaaaguaagu

SEQ ID NO: 7284 - RNA, 20 nt, Artificial Sequence
  Antisense oligo
uuuucucucccaaaccguug

SEQ ID NO: 7285 - RNA, 20 nt, Artificial Sequence
  Antisense oligo
auuuucucucccaaaccguu

SEQ ID NO: 7286 - RNA, 20 nt, Artificial Sequence
  Antisense oligo
gcauuuucucucccaaaccg

SEQ ID NO: 7287 - RNA, 20 nt, Artificial Sequence
  Antisense oligo
gacucugcacaaaugagcau

SEQ ID NO: 7288 - RNA, 20 nt, Artificial Sequence
  Antisense oligo
ggacucugcacaaaugagca

SEQ ID NO: 7289 - RNA, 20 nt, Artificial Sequence
  Antisense oligo
cggacucugcacaaaugagc

SEQ ID NO: 7290 - RNA, 20 nt, Artificial Sequence
  Antisense oligo
ucggacucugcacaaaugag

SEQ ID NO: 7291 - RNA, 20 nt, Artificial Sequence
  Antisense oligo
uucggacucugcacaaauga

SEQ ID NO: 7292 - RNA, 20 nt, Artificial Sequence
  Antisense oligo
cuucggacucugcacaaaug

SEQ ID NO: 7293 - RNA, 20 nt, Artificial Sequence
  Antisense oligo
ucuucggacucugcacaaau

SEQ ID NO: 7294 - RNA, 20 nt, Artificial Sequence
  Antisense oligo
cucuucggacucugcacaaa

SEQ ID NO: 7295 - RNA, 20 nt, Artificial Sequence
  Antisense oligo
ccucuucggacucugcacaa

SEQ ID NO: 7296 - RNA, 20 nt, Artificial Sequence
  Antisense oligo
cccucuucggacucugcaca

SEQ ID NO: 7297 - RNA, 20 nt, Artificial Sequence
  Antisense oligo
ucccucuucggacucugcac

SEQ ID NO: 7298 - RNA, 20 nt, Artificial Sequence
  Antisense oligo
cucccucuucggacucugca

SEQ ID NO: 7299 - RNA, 20 nt, Artificial Sequence
  Antisense oligo
ugcucccucuucggacucug

SEQ ID NO: 7300 - RNA, 20 nt, Artificial Sequence
  Antisense oligo
gugcucccucuucggacucu

SEQ ID NO: 7301 - RNA, 20 nt, Artificial Sequence
  Antisense oligo
ugugcucccucuucggacuc

SEQ ID NO: 7302 - RNA, 20 nt, Artificial Sequence
  Antisense oligo
cugugcucccucuucggacu

SEQ ID NO: 7303 - RNA, 20 nt, Artificial Sequence
  Antisense oligo
gauucacgcuucacacagcu

SEQ ID NO: 7304 - RNA, 20 nt, Artificial Sequence
  Antisense oligo
cgauucacgcuucacacagc

SEQ ID NO: 7305 - RNA, 20 nt, Artificial Sequence
  Antisense oligo
ugcgauucacgcuucacaca

SEQ ID NO: 7306 - RNA, 20 nt, Artificial Sequence
  Antisense oligo
gugcgauucacgcuucacac

SEQ ID NO: 7307 - RNA, 20 nt, Artificial Sequence
  Antisense oligo
cugugcgauucacgcuucac

SEQ ID NO: 7308 - RNA, 20 nt, Artificial Sequence
  Antisense oligo
ccugugcgauucacgcuuca

SEQ ID NO: 7309 - RNA, 20 nt, Artificial Sequence
  Antisense oligo
uccugugcgauucacgcuuc

SEQ ID NO: 7310 - RNA, 20 nt, Artificial Sequence
  Antisense oligo
guccugugcgauucacgcuu

SEQ ID NO: 7311 - RNA, 20 nt, Artificial Sequence
  Antisense oligo
aguccugugcgauucacgcu

SEQ ID NO: 7312 - RNA, 20 nt, Artificial Sequence
  Antisense oligo
caguccugugcgauucacgc

SEQ ID NO: 7313 - RNA, 20 nt, Artificial Sequence
  Antisense oligo
ccaguccugugcgauucacg

SEQ ID NO: 7314 - RNA, 20 nt, Artificial Sequence
  Antisense oligo
uccaguccugugcgauucac

SEQ ID NO: 7315 - RNA, 20 nt, Artificial Sequence
  Antisense oligo
cuccaguccugugcgauuca

SEQ ID NO: 7316 - RNA, 20 nt, Artificial Sequence
  Antisense oligo
acuccaguccugugcgauuc

SEQ ID NO: 7317 - RNA, 20 nt, Artificial Sequence
  Antisense oligo
aacuccaguccugugcgauu

SEQ ID NO: 7318 - RNA, 20 nt, Artificial Sequence
  Antisense oligo
caacuccaguccugugcgau

SEQ ID NO: 7319 - RNA, 20 nt, Artificial Sequence
  Antisense oligo
ucaacuccaguccugugcga

SEQ ID NO: 7320 - RNA, 20 nt, Artificial Sequence
  Antisense oligo
uucaacuccaguccugugcg

SEQ ID NO: 7321 - RNA, 20 nt, Artificial Sequence
  Antisense oligo
auucaacuccaguccugugc

SEQ ID NO: 7322 - RNA, 20 nt, Artificial Sequence
  Antisense oligo
cauucaacuccaguccugug

SEQ ID NO: 7323 - RNA, 20 nt, Artificial Sequence
  Antisense oligo
ucauucaacuccaguccugu

SEQ ID NO: 7324 - RNA, 20 nt, Artificial Sequence
  Antisense oligo
caccacccacauucauucaa

SEQ ID NO: 7325 - RNA, 20 nt, Artificial Sequence
  Antisense oligo
agcacaccaccacccacauu

SEQ ID NO: 7326 - RNA, 20 nt, Artificial Sequence
  Antisense oligo
uagcacaccaccacccacau

SEQ ID NO: 7327 - RNA, 20 nt, Artificial Sequence
  Antisense oligo
aagaauagcacaccaccacc

SEQ ID NO: 7328 - RNA, 20 nt, Artificial Sequence
  Antisense oligo
gcaagaauagcacaccacca

SEQ ID NO: 7329 - RNA, 20 nt, Artificial Sequence
  Antisense oligo
cgcaagaauagcacaccacc

SEQ ID NO: 7330 - RNA, 20 nt, Artificial Sequence
  Antisense oligo
ucgcaagaauagcacaccac

SEQ ID NO: 7331 - RNA, 20 nt, Artificial Sequence
  Antisense oligo
gucgcaagaauagcacacca

SEQ ID NO: 7332 - RNA, 20 nt, Artificial Sequence
  Antisense oligo
ggucgcaagaauagcacacc

SEQ ID NO: 7333 - RNA, 20 nt, Artificial Sequence
  Antisense oligo
aggucgcaagaauagcacac

SEQ ID NO: 7334 - RNA, 20 nt, Artificial Sequence
  Antisense oligo
aaggucgcaagaauagcaca

SEQ ID NO: 7335 - RNA, 20 nt, Artificial Sequence
  Antisense oligo
aaaggucgcaagaauagcac

SEQ ID NO: 7336 - RNA, 20 nt, Artificial Sequence
  Antisense oligo
aaaaggucgcaagaauagca

SEQ ID NO: 7337 - RNA, 20 nt, Artificial Sequence
  Antisense oligo
cugaaaggacuuaucucuca

SEQ ID NO: 7338 - RNA, 20 nt, Artificial Sequence
  Antisense oligo
ucugaaaggacuuaucucuc

SEQ ID NO: 7339 - RNA, 20 nt, Artificial Sequence
  Antisense oligo
gguccuccuacugcacaacc

SEQ ID NO: 7340 - RNA, 20 nt, Artificial Sequence
  Antisense oligo
ugguccuccuacugcacaac

SEQ ID NO: 7341 - RNA, 20 nt, Artificial Sequence
  Antisense oligo
acugguccuccuacugcaca

SEQ ID NO: 7342 - RNA, 20 nt, Artificial Sequence
  Antisense oligo
uacugguccuccuacugcac

SEQ ID NO: 7343 - RNA, 20 nt, Artificial Sequence
  Antisense oligo
cuacugguccuccuacugca

SEQ ID NO: 7344 - RNA, 20 nt, Artificial Sequence
  Antisense oligo
acuacugguccuccuacugc

SEQ ID NO: 7345 - RNA, 20 nt, Artificial Sequence
  Antisense oligo
cacuacugguccuccuacug

SEQ ID NO: 7346 - RNA, 20 nt, Artificial Sequence
  Antisense oligo
ccacuacugguccuccuacu

SEQ ID NO: 7347 - RNA, 20 nt, Artificial Sequence
  Antisense oligo
gccacuacugguccuccuac

SEQ ID NO: 7348 - RNA, 20 nt, Artificial Sequence
  Antisense oligo
ggccacuacugguccuccua

SEQ ID NO: 7349 - RNA, 20 nt, Artificial Sequence
  Antisense oligo
aaucagagacccaaccaggg

SEQ ID NO: 7350 - RNA, 20 nt, Artificial Sequence
  Antisense oligo
gaaucagagacccaaccagg

SEQ ID NO: 7351 - RNA, 20 nt, Artificial Sequence
  Antisense oligo
agaaucagagacccaaccag

SEQ ID NO: 7352 - RNA, 20 nt, Artificial Sequence
  Antisense oligo
acagucagccaugcuagugg

SEQ ID NO: 7353 - RNA, 20 nt, Artificial Sequence
  Antisense oligo
aacagucagccaugcuagug

SEQ ID NO: 7354 - RNA, 20 nt, Artificial Sequence
  Antisense oligo
caacagucagccaugcuagu

SEQ ID NO: 7355 - RNA, 20 nt, Artificial Sequence
  Antisense oligo
ucaacagucagccaugcuag

SEQ ID NO: 7356 - RNA, 20 nt, Artificial Sequence
  Antisense oligo
cuucaucaacagucagccau

SEQ ID NO: 7357 - RNA, 20 nt, Artificial Sequence
  Antisense oligo
aaccuucaucaacagucagc

SEQ ID NO: 7358 - RNA, 20 nt, Artificial Sequence
  Antisense oligo
caaccuucaucaacagucag

SEQ ID NO: 7359 - RNA, 20 nt, Artificial Sequence
  Antisense oligo
ccaaccuucaucaacaguca

SEQ ID NO: 7360 - RNA, 20 nt, Artificial Sequence
  Antisense oligo
uuacggcaauacagagagcg

SEQ ID NO: 7361 - RNA, 20 nt, Artificial Sequence
  Antisense oligo
auuacggcaauacagagagc

SEQ ID NO: 7362 - RNA, 20 nt, Artificial Sequence
  Antisense oligo
cauuacggcaauacagagag

SEQ ID NO: 7363 - RNA, 20 nt, Artificial Sequence
  Antisense oligo
gcauuacggcaauacagaga

SEQ ID NO: 7364 - RNA, 20 nt, Artificial Sequence
  Antisense oligo
agcauuacggcaauacagag

SEQ ID NO: 7365 - RNA, 20 nt, Artificial Sequence
  Antisense oligo
gagcauuacggcaauacaga

SEQ ID NO: 7366 - RNA, 20 nt, Artificial Sequence
  Antisense oligo
agagcauuacggcaauacag

SEQ ID NO: 7367 - RNA, 20 nt, Artificial Sequence
  Antisense oligo
cagagcauuacggcaauaca

SEQ ID NO: 7368 - RNA, 20 nt, Artificial Sequence
  Antisense oligo
acagagcauuacggcaauac

SEQ ID NO: 7369 - RNA, 20 nt, Artificial Sequence
  Antisense oligo
gacagagcauuacggcaaua

SEQ ID NO: 7370 - RNA, 20 nt, Artificial Sequence
  Antisense oligo
agacagagcauuacggcaau

SEQ ID NO: 7371 - RNA, 20 nt, Artificial Sequence
  Antisense oligo
aaagacagagcauuacggca

SEQ ID NO: 7372 - RNA, 20 nt, Artificial Sequence
  Antisense oligo
gaaagacagagcauuacggc

SEQ ID NO: 7373 - RNA, 20 nt, Artificial Sequence
  Antisense oligo
agaaagacagagcauuacgg

SEQ ID NO: 7374 - RNA, 20 nt, Artificial Sequence
  Antisense oligo
gagaaagacagagcauuacg

SEQ ID NO: 7375 - RNA, 20 nt, Artificial Sequence
  Antisense oligo
cccaugaaaggagaaagaca

SEQ ID NO: 7376 - RNA, 20 nt, Artificial Sequence
  Antisense oligo
ggcacacucccaugaaagga

SEQ ID NO: 7377 - RNA, 20 nt, Artificial Sequence
  Antisense oligo
cacggcacacucccaugaaa

SEQ ID NO: 7378 - RNA, 20 nt, Artificial Sequence
  Antisense oligo
augccacggcacacucccau

SEQ ID NO: 7379 - RNA, 20 nt, Artificial Sequence
  Antisense oligo
aaugccacggcacacuccca

SEQ ID NO: 7380 - RNA, 20 nt, Artificial Sequence
  Antisense oligo
cuaaaugccacggcacacuc

SEQ ID NO: 7381 - RNA, 20 nt, Artificial Sequence
  Antisense oligo
acuaaaugccacggcacacu

SEQ ID NO: 7382 - RNA, 20 nt, Artificial Sequence
  Antisense oligo
gacuaaaugccacggcacac

SEQ ID NO: 7383 - RNA, 20 nt, Artificial Sequence
  Antisense oligo
cgacuaaaugccacggcaca

SEQ ID NO: 7384 - RNA, 20 nt, Artificial Sequence
  Antisense oligo
acgacuaaaugccacggcac

SEQ ID NO: 7385 - RNA, 20 nt, Artificial Sequence
  Antisense oligo
cacgacuaaaugccacggca

SEQ ID NO: 7386 - RNA, 20 nt, Artificial Sequence
  Antisense oligo
ucacgacuaaaugccacggc

SEQ ID NO: 7387 - RNA, 20 nt, Artificial Sequence
  Antisense oligo
cucacgacuaaaugccacgg

SEQ ID NO: 7388 - RNA, 20 nt, Artificial Sequence
  Antisense oligo
ucucacgacuaaaugccacg

SEQ ID NO: 7389 - RNA, 20 nt, Artificial Sequence
  Antisense oligo
cucucacgacuaaaugccac

SEQ ID NO: 7390 - RNA, 20 nt, Artificial Sequence
  Antisense oligo
acucucacgacuaaaugcca

SEQ ID NO: 7391 - RNA, 20 nt, Artificial Sequence
  Antisense oligo
cacucucacgacuaaaugcc

SEQ ID NO: 7392 - RNA, 20 nt, Artificial Sequence
  Antisense oligo
ccacucucacgacuaaaugc

SEQ ID NO: 7393 - RNA, 20 nt, Artificial Sequence
  Antisense oligo
cccacucucacgacuaaaug

SEQ ID NO: 7394 - RNA, 20 nt, Artificial Sequence
  Antisense oligo
acccacucucacgacuaaau

SEQ ID NO: 7395 - RNA, 20 nt, Artificial Sequence
  Antisense oligo
cacccacucucacgacuaaa

SEQ ID NO: 7396 - RNA, 20 nt, Artificial Sequence
  Antisense oligo
acacccacucucacgacuaa

SEQ ID NO: 7397 - RNA, 20 nt, Artificial Sequence
  Antisense oligo
cacacccacucucacgacua

SEQ ID NO: 7398 - RNA, 20 nt, Artificial Sequence
  Antisense oligo
gucacacccacucucacgac

SEQ ID NO: 7399 - RNA, 20 nt, Artificial Sequence
  Antisense oligo
ggucacacccacucucacga

SEQ ID NO: 7400 - RNA, 20 nt, Artificial Sequence
  Antisense oligo
aggucacacccacucucacg

SEQ ID NO: 7401 - RNA, 20 nt, Artificial Sequence
  Antisense oligo
caggucacacccacucucac

SEQ ID NO: 7402 - RNA, 20 nt, Artificial Sequence
  Antisense oligo
acaggucacacccacucuca

SEQ ID NO: 7403 - RNA, 20 nt, Artificial Sequence
  Antisense oligo
cacacaggucacacccacuc

SEQ ID NO: 7404 - RNA, 20 nt, Artificial Sequence
  Antisense oligo
gcacacaggucacacccacu

SEQ ID NO: 7405 - RNA, 20 nt, Artificial Sequence
  Antisense oligo
aacccgcacacaggucacac

SEQ ID NO: 7406 - RNA, 20 nt, Artificial Sequence
  Antisense oligo
aaaacccgcacacaggucac

SEQ ID NO: 7407 - RNA, 20 nt, Artificial Sequence
  Antisense oligo
gcaaaacccgcacacagguc

SEQ ID NO: 7408 - RNA, 20 nt, Artificial Sequence
  Antisense oligo
ugcaaaacccgcacacaggu

SEQ ID NO: 7409 - RNA, 20 nt, Artificial Sequence
  Antisense oligo
cugcaaaacccgcacacagg

SEQ ID NO: 7410 - RNA, 20 nt, Artificial Sequence
  Antisense oligo
ccugcaaaacccgcacacag

SEQ ID NO: 7411 - RNA, 20 nt, Artificial Sequence
  Antisense oligo
accugcaaaacccgcacaca

SEQ ID NO: 7412 - RNA, 20 nt, Artificial Sequence
  Antisense oligo
gaccugcaaaacccgcacac

SEQ ID NO: 7413 - RNA, 20 nt, Artificial Sequence
  Antisense oligo
ccagaccugcaaaacccgca

SEQ ID NO: 7414 - RNA, 20 nt, Artificial Sequence
  Antisense oligo
uccagaccugcaaaacccgc

SEQ ID NO: 7415 - RNA, 20 nt, Artificial Sequence
  Antisense oligo
ccuccagaccugcaaaaccc

SEQ ID NO: 7416 - RNA, 20 nt, Artificial Sequence
  Antisense oligo
gccuccagaccugcaaaacc

SEQ ID NO: 7417 - RNA, 20 nt, Artificial Sequence
  Antisense oligo
cgccuccagaccugcaaaac

SEQ ID NO: 7418 - RNA, 20 nt, Artificial Sequence
  Antisense oligo
gacuccuuccagccaugcuc

SEQ ID NO: 7419 - RNA, 20 nt, Artificial Sequence
  Antisense oligo
cgacuccuuccagccaugcu

SEQ ID NO: 7420 - RNA, 20 nt, Artificial Sequence
  Antisense oligo
aacgacuccuuccagccaug

SEQ ID NO: 7421 - RNA, 20 nt, Artificial Sequence
  Antisense oligo
caacgacuccuuccagccau

SEQ ID NO: 7422 - RNA, 20 nt, Artificial Sequence
  Antisense oligo
gcaacgacuccuuccagcca

SEQ ID NO: 7423 - RNA, 20 nt, Artificial Sequence
  Antisense oligo
agcaacgacuccuuccagcc

SEQ ID NO: 7424 - RNA, 20 nt, Artificial Sequence
  Antisense oligo
cagcaacgacuccuuccagc

SEQ ID NO: 7425 - RNA, 20 nt, Artificial Sequence
  Antisense oligo
ccagcaacgacuccuuccag

SEQ ID NO: 7426 - RNA, 20 nt, Artificial Sequence
  Antisense oligo
cccagcaacgacuccuucca

SEQ ID NO: 7427 - RNA, 20 nt, Artificial Sequence
  Antisense oligo
ucccagcaacgacuccuucc

SEQ ID NO: 7428 - RNA, 20 nt, Artificial Sequence
  Antisense oligo
cucccagcaacgacuccuuc

SEQ ID NO: 7429 - RNA, 20 nt, Artificial Sequence
  Antisense oligo
ucucccagcaacgacuccuu

SEQ ID NO: 7430 - RNA, 20 nt, Artificial Sequence
  Antisense oligo
gucucccagcaacgacuccu

SEQ ID NO: 7431 - RNA, 20 nt, Artificial Sequence
  Antisense oligo
ugucucccagcaacgacucc

SEQ ID NO: 7432 - RNA, 20 nt, Artificial Sequence
  Antisense oligo
augucucccagcaacgacuc

SEQ ID NO: 7433 - RNA, 20 nt, Artificial Sequence
  Antisense oligo
caugucucccagcaacgacu

SEQ ID NO: 7434 - RNA, 20 nt, Artificial Sequence
  Antisense oligo
uccaugucucccagcaacga

SEQ ID NO: 7435 - RNA, 20 nt, Artificial Sequence
  Antisense oligo
uuccaugucucccagcaacg

SEQ ID NO: 7436 - RNA, 20 nt, Artificial Sequence
  Antisense oligo
cauuccaugucucccagcaa

SEQ ID NO: 7437 - RNA, 20 nt, Artificial Sequence
  Antisense oligo
ugagccuccauuccaugucu

SEQ ID NO: 7438 - RNA, 20 nt, Artificial Sequence
  Antisense oligo
gugagccuccauuccauguc

SEQ ID NO: 7439 - RNA, 20 nt, Artificial Sequence
  Antisense oligo
ugugagccuccauuccaugu

SEQ ID NO: 7440 - RNA, 20 nt, Artificial Sequence
  Antisense oligo
cacgcccugaaaagacugcc

SEQ ID NO: 7441 - RNA, 20 nt, Artificial Sequence
  Antisense oligo
ucacgcccugaaaagacugc

SEQ ID NO: 7442 - RNA, 20 nt, Artificial Sequence
  Antisense oligo
agcuugccuucacgcccuga

SEQ ID NO: 7443 - RNA, 20 nt, Artificial Sequence
  Antisense oligo
uucuccagcuugccuucacg

SEQ ID NO: 7444 - RNA, 20 nt, Artificial Sequence
  Antisense oligo
guucuccagcuugccuucac

SEQ ID NO: 7445 - RNA, 20 nt, Artificial Sequence
  Antisense oligo
gcugucgcuaauggucuggg

SEQ ID NO: 7446 - RNA, 20 nt, Artificial Sequence
  Antisense oligo
ggcugucgcuaauggucugg

SEQ ID NO: 7447 - RNA, 20 nt, Artificial Sequence
  Antisense oligo
uggcugucgcuaauggucug

SEQ ID NO: 7448 - RNA, 20 nt, Artificial Sequence
  Antisense oligo
agaaacagaaacacggagcu

SEQ ID NO: 7449 - RNA, 20 nt, Artificial Sequence
  Antisense oligo
cagaaacagaaacacggagc

SEQ ID NO: 7450 - RNA, 20 nt, Artificial Sequence
  Antisense oligo
ggaucagaaacagaaacacg

SEQ ID NO: 7451 - RNA, 20 nt, Artificial Sequence
  Antisense oligo
gcuggaucagaaacagaaac

SEQ ID NO: 7452 - RNA, 20 nt, Artificial Sequence
  Antisense oligo
ggcuggaucagaaacagaaa

SEQ ID NO: 7453 - RNA, 20 nt, Artificial Sequence
  Antisense oligo
gggcuggaucagaaacagaa

SEQ ID NO: 7454 - RNA, 20 nt, Artificial Sequence
  Antisense oligo
aagggcuggaucagaaacag

SEQ ID NO: 7455 - RNA, 20 nt, Artificial Sequence
  Antisense oligo
uaagggcuggaucagaaaca

SEQ ID NO: 7456 - RNA, 20 nt, Artificial Sequence
  Antisense oligo
uauaagggcuggaucagaaa

SEQ ID NO: 7457 - RNA, 20 nt, Artificial Sequence
  Antisense oligo
ggcccuuguucuucucuguc

SEQ ID NO: 7458 - RNA, 20 nt, Artificial Sequence
  Antisense oligo
augauggugagauccugggc

SEQ ID NO: 7459 - RNA, 20 nt, Artificial Sequence
  Antisense oligo
caugauggugagauccuggg

SEQ ID NO: 7460 - RNA, 20 nt, Artificial Sequence
  Antisense oligo
ccaugauggugagauccugg

SEQ ID NO: 7461 - RNA, 20 nt, Artificial Sequence
  Antisense oligo
ccugucgcaaguccaacgaa

SEQ ID NO: 7462 - RNA, 20 nt, Artificial Sequence
  Antisense oligo
ucccugucgcaaguccaacg

SEQ ID NO: 7463 - RNA, 20 nt, Artificial Sequence
  Antisense oligo
aucccugucgcaaguccaac

SEQ ID NO: 7464 - RNA, 20 nt, Artificial Sequence
  Antisense oligo
caucccugucgcaaguccaa

SEQ ID NO: 7465 - RNA, 20 nt, Artificial Sequence
  Antisense oligo
cagcaucccugucgcaaguc

SEQ ID NO: 7466 - RNA, 20 nt, Artificial Sequence
  Antisense oligo
gggccaaguaaacacagcau

SEQ ID NO: 7467 - RNA, 20 nt, Artificial Sequence
  Antisense oligo
gccagaugccacacucacuc

SEQ ID NO: 7468 - RNA, 20 nt, Artificial Sequence
  Antisense oligo
ggccagaugccacacucacu

SEQ ID NO: 7469 - RNA, 20 nt, Artificial Sequence
  Antisense oligo
uccugccagcucccaaagca

SEQ ID NO: 7470 - RNA, 20 nt, Artificial Sequence
  Antisense oligo
uugcuccugccagcucccaa

SEQ ID NO: 7471 - RNA, 20 nt, Artificial Sequence
  Antisense oligo
ccucaaucugggcacugcug

SEQ ID NO: 7472 - RNA, 20 nt, Artificial Sequence
  Antisense oligo
accucaaucugggcacugcu

SEQ ID NO: 7473 - RNA, 20 nt, Artificial Sequence
  Antisense oligo
caccucaaucugggcacugc

SEQ ID NO: 7474 - RNA, 20 nt, Artificial Sequence
  Antisense oligo
gcaccucaaucugggcacug

SEQ ID NO: 7475 - RNA, 20 nt, Artificial Sequence
  Antisense oligo
ggcaccucaaucugggcacu

SEQ ID NO: 7476 - RNA, 20 nt, Artificial Sequence
  Antisense oligo
aggcaccucaaucugggcac

SEQ ID NO: 7477 - RNA, 20 nt, Artificial Sequence
  Antisense oligo
ugcaggcaccucaaucuggg

SEQ ID NO: 7478 - RNA, 20 nt, Artificial Sequence
  Antisense oligo
guugcaggcaccucaaucug

SEQ ID NO: 7479 - RNA, 20 nt, Artificial Sequence
  Antisense oligo
agggacccacugagcugaua

SEQ ID NO: 7480 - RNA, 20 nt, Artificial Sequence
  Antisense oligo
aaggcaagggacccacugag

SEQ ID NO: 7481 - RNA, 20 nt, Artificial Sequence
  Antisense oligo
caaggcaagggacccacuga

SEQ ID NO: 7482 - RNA, 20 nt, Artificial Sequence
  Antisense oligo
acaaggcaagggacccacug

SEQ ID NO: 7483 - RNA, 20 nt, Artificial Sequence
  Antisense oligo
aacaaggcaagggacccacu

SEQ ID NO: 7484 - RNA, 20 nt, Artificial Sequence
  Antisense oligo
caacaaggcaagggacccac

SEQ ID NO: 7485 - RNA, 20 nt, Artificial Sequence
  Antisense oligo
gcaacaaggcaagggaccca

SEQ ID NO: 7486 - RNA, 20 nt, Artificial Sequence
  Antisense oligo
ugucacauuggcccuggcag

SEQ ID NO: 7487 - RNA, 20 nt, Artificial Sequence
  Antisense oligo
ccuaaaagaggcugucacau

SEQ ID NO: 7488 - RNA, 20 nt, Artificial Sequence
  Antisense oligo
ccuggaccagaggaagauuc

SEQ ID NO: 7489 - RNA, 20 nt, Artificial Sequence
  Antisense oligo
accuggaccagaggaagauu

SEQ ID NO: 7490 - RNA, 20 nt, Artificial Sequence
  Antisense oligo
caccuggaccagaggaagau

SEQ ID NO: 7491 - RNA, 20 nt, Artificial Sequence
  Antisense oligo
aaggagagacgguuuaacuu

SEQ ID NO: 7492 - RNA, 20 nt, Artificial Sequence
  Antisense oligo
caaggagagacgguuuaacu

SEQ ID NO: 7493 - RNA, 20 nt, Artificial Sequence
  Antisense oligo
ccaaggagagacgguuuaac

SEQ ID NO: 7494 - RNA, 20 nt, Artificial Sequence
  Antisense oligo
uccaaggagagacgguuuaa

SEQ ID NO: 7495 - RNA, 20 nt, Artificial Sequence
  Antisense oligo
uuccaaggagagacgguuua

SEQ ID NO: 7496 - RNA, 20 nt, Artificial Sequence
  Antisense oligo
cuuccaaggagagacgguuu

SEQ ID NO: 7497 - RNA, 20 nt, Artificial Sequence
  Antisense oligo
acuuccaaggagagacgguu

SEQ ID NO: 7498 - RNA, 20 nt, Artificial Sequence
  Antisense oligo
cuggacuuccaaggagagac

SEQ ID NO: 7499 - RNA, 20 nt, Artificial Sequence
  Antisense oligo
uggcuggacuuccaaggaga

SEQ ID NO: 7500 - RNA, 20 nt, Artificial Sequence
  Antisense oligo
auggcuggacuuccaaggag

SEQ ID NO: 7501 - RNA, 20 nt, Artificial Sequence
  Antisense oligo
gauggcuggacuuccaagga

SEQ ID NO: 7502 - RNA, 20 nt, Artificial Sequence
  Antisense oligo
agcuucacuggaaacaggug

SEQ ID NO: 7503 - RNA, 20 nt, Artificial Sequence
  Antisense oligo
uagcuucacuggaaacaggu

SEQ ID NO: 7504 - RNA, 20 nt, Artificial Sequence
  Antisense oligo
aguagcuucacuggaaacag

SEQ ID NO: 7505 - RNA, 20 nt, Artificial Sequence
  Antisense oligo
aaguagcuucacuggaaaca

SEQ ID NO: 7506 - RNA, 20 nt, Artificial Sequence
  Antisense oligo
gguagugagagagaaguagc

SEQ ID NO: 7507 - RNA, 20 nt, Artificial Sequence
  Antisense oligo
uugguagugagagagaagua

SEQ ID NO: 7508 - RNA, 20 nt, Artificial Sequence
  Antisense oligo
cagacuugguagugagagag

SEQ ID NO: 7509 - RNA, 20 nt, Artificial Sequence
  Antisense oligo
ccagacuugguagugagaga

SEQ ID NO: 7510 - RNA, 20 nt, Artificial Sequence
  Antisense oligo
gagaaauccuacgcagacag

SEQ ID NO: 7511 - RNA, 20 nt, Artificial Sequence
  Antisense oligo
agagaaauccuacgcagaca

SEQ ID NO: 7512 - RNA, 20 nt, Artificial Sequence
  Antisense oligo
cagagaaauccuacgcagac

SEQ ID NO: 7513 - RNA, 20 nt, Artificial Sequence
  Antisense oligo
gcagagaaauccuacgcaga

SEQ ID NO: 7514 - RNA, 20 nt, Artificial Sequence
  Antisense oligo
ggcagagaaauccuacgcag

SEQ ID NO: 7515 - RNA, 20 nt, Artificial Sequence
  Antisense oligo
ccauugauggaggcaggagg

SEQ ID NO: 7516 - RNA, 20 nt, Artificial Sequence
  Antisense oligo
cccauugauggaggcaggag

SEQ ID NO: 7517 - RNA, 20 nt, Artificial Sequence
  Antisense oligo
ccacuuagacuuccugccua

SEQ ID NO: 7518 - RNA, 20 nt, Artificial Sequence
  Antisense oligo
aggccacuuagacuuccugc

SEQ ID NO: 7519 - RNA, 20 nt, Artificial Sequence
  Antisense oligo
acaggccacuuagacuuccu

SEQ ID NO: 7520 - RNA, 20 nt, Artificial Sequence
  Antisense oligo
aacaggccacuuagacuucc

SEQ ID NO: 7521 - RNA, 20 nt, Artificial Sequence
  Antisense oligo
caacaggccacuuagacuuc

SEQ ID NO: 7522 - RNA, 20 nt, Artificial Sequence
  Antisense oligo
accaacaggccacuuagacu

SEQ ID NO: 7523 - RNA, 20 nt, Artificial Sequence
  Antisense oligo
caccaacaggccacuuagac

SEQ ID NO: 7524 - RNA, 20 nt, Artificial Sequence
  Antisense oligo
ucaccaacaggccacuuaga

SEQ ID NO: 7525 - RNA, 20 nt, Artificial Sequence
  Antisense oligo
gucaccaacaggccacuuag

SEQ ID NO: 7526 - RNA, 20 nt, Artificial Sequence
  Antisense oligo
ugagguuccugucaccaaca

SEQ ID NO: 7527 - RNA, 20 nt, Artificial Sequence
  Antisense oligo
augagguuccugucaccaac

SEQ ID NO: 7528 - RNA, 20 nt, Artificial Sequence
  Antisense oligo
caugagguuccugucaccaa

SEQ ID NO: 7529 - RNA, 20 nt, Artificial Sequence
  Antisense oligo
guucuccacuugugugucau

SEQ ID NO: 7530 - RNA, 20 nt, Artificial Sequence
  Antisense oligo
guguucuccacuuguguguc

SEQ ID NO: 7531 - RNA, 20 nt, Artificial Sequence
  Antisense oligo
guguguucuccacuugugug

SEQ ID NO: 7532 - RNA, 20 nt, Artificial Sequence
  Antisense oligo
cuguguguucuccacuugug

SEQ ID NO: 7533 - RNA, 20 nt, Artificial Sequence
  Antisense oligo
caugucuguguguucuccac

SEQ ID NO: 7534 - RNA, 20 nt, Artificial Sequence
  Antisense oligo
gccuuaauucagcaugaggg

SEQ ID NO: 7535 - RNA, 20 nt, Artificial Sequence
  Antisense oligo
ggccuuaauucagcaugagg

SEQ ID NO: 7536 - RNA, 20 nt, Artificial Sequence
  Antisense oligo
acuaauuuuccuugagccuc

SEQ ID NO: 7537 - RNA, 20 nt, Artificial Sequence
  Antisense oligo
acuccagccugggcgauaga

SEQ ID NO: 7538 - RNA, 20 nt, Artificial Sequence
  Antisense oligo
aggcugaggcaggagaaugg

SEQ ID NO: 7539 - RNA, 20 nt, Artificial Sequence
  Antisense oligo
uggcuaacacggugaaaccc

SEQ ID NO: 7540 - RNA, 20 nt, Artificial Sequence
  Antisense oligo
cuggcuaacacggugaaacc

SEQ ID NO: 7541 - RNA, 20 nt, Artificial Sequence
  Antisense oligo
ccuggcuaacacggugaaac

SEQ ID NO: 7542 - RNA, 20 nt, Artificial Sequence
  Antisense oligo
uccuggcuaacacggugaaa

SEQ ID NO: 7543 - RNA, 20 nt, Artificial Sequence
  Antisense oligo
auccuggcuaacacggugaa

SEQ ID NO: 7544 - RNA, 20 nt, Artificial Sequence
  Antisense oligo
cauccuggcuaacacgguga

SEQ ID NO: 7545 - RNA, 20 nt, Artificial Sequence
  Antisense oligo
ccauccuggcuaacacggug

SEQ ID NO: 7546 - RNA, 20 nt, Artificial Sequence
  Antisense oligo
accauccuggcuaacacggu

SEQ ID NO: 7547 - RNA, 20 nt, Artificial Sequence
  Antisense oligo
gaccauccuggcuaacacgg

SEQ ID NO: 7548 - RNA, 20 nt, Artificial Sequence
  Antisense oligo
agaccauccuggcuaacacg

SEQ ID NO: 7549 - RNA, 20 nt, Artificial Sequence
  Antisense oligo
gagaccauccuggcuaacac

SEQ ID NO: 7550 - RNA, 20 nt, Artificial Sequence
  Antisense oligo
cgagaccauccuggcuaaca

SEQ ID NO: 7551 - RNA, 20 nt, Artificial Sequence
  Antisense oligo
ucgagaccauccuggcuaac

SEQ ID NO: 7552 - RNA, 20 nt, Artificial Sequence
  Antisense oligo
aucgagaccauccuggcuaa

SEQ ID NO: 7553 - RNA, 20 nt, Artificial Sequence
  Antisense oligo
gaucgagaccauccuggcua

SEQ ID NO: 7554 - RNA, 20 nt, Artificial Sequence
  Antisense oligo
agaucgagaccauccuggcu

SEQ ID NO: 7555 - RNA, 20 nt, Artificial Sequence
  Antisense oligo
gagaucgagaccauccuggc

SEQ ID NO: 7556 - RNA, 20 nt, Artificial Sequence
  Antisense oligo
ggagaucgagaccauccugg

SEQ ID NO: 7557 - RNA, 20 nt, Artificial Sequence
  Antisense oligo
ucaggagaucgagaccaucc

SEQ ID NO: 7558 - RNA, 20 nt, Artificial Sequence
  Antisense oligo
gucaggagaucgagaccauc

SEQ ID NO: 7559 - RNA, 20 nt, Artificial Sequence
  Antisense oligo
cgaggucaggagaucgagac

SEQ ID NO: 7560 - RNA, 20 nt, Artificial Sequence
  Antisense oligo
acgaggucaggagaucgaga

SEQ ID NO: 7561 - RNA, 20 nt, Artificial Sequence
  Antisense oligo
cacgaggucaggagaucgag

SEQ ID NO: 7562 - RNA, 20 nt, Artificial Sequence
  Antisense oligo
ucacgaggucaggagaucga

SEQ ID NO: 7563 - RNA, 20 nt, Artificial Sequence
  Antisense oligo
aucacgaggucaggagaucg

SEQ ID NO: 7564 - RNA, 20 nt, Artificial Sequence
  Antisense oligo
ggaucacgaggucaggagau

SEQ ID NO: 7565 - RNA, 20 nt, Artificial Sequence
  Antisense oligo
uggaucacgaggucaggaga

SEQ ID NO: 7566 - RNA, 20 nt, Artificial Sequence
  Antisense oligo
guggaucacgaggucaggag

SEQ ID NO: 7567 - RNA, 20 nt, Artificial Sequence
  Antisense oligo
gguggaucacgaggucagga

SEQ ID NO: 7568 - RNA, 20 nt, Artificial Sequence
  Antisense oligo
ccuuguuucugacuuuuccc

SEQ ID NO: 7569 - RNA, 20 nt, Artificial Sequence
  Antisense oligo
caccaguagaccaaaggcua

SEQ ID NO: 7570 - RNA, 20 nt, Artificial Sequence
  Antisense oligo
ccaccaguagaccaaaggcu

SEQ ID NO: 7571 - RNA, 20 nt, Artificial Sequence
  Antisense oligo
cccaccaguagaccaaaggc

SEQ ID NO: 7572 - RNA, 20 nt, Artificial Sequence
  Antisense oligo
caaagcauguccucccugcc

SEQ ID NO: 7573 - RNA, 20 nt, Artificial Sequence
  Antisense oligo
cgcaaagcauguccucccug

SEQ ID NO: 7574 - RNA, 20 nt, Artificial Sequence
  Antisense oligo
acgcaaagcauguccucccu

SEQ ID NO: 7575 - RNA, 20 nt, Artificial Sequence
  Antisense oligo
ccacgcaaagcauguccucc

SEQ ID NO: 7576 - RNA, 20 nt, Artificial Sequence
  Antisense oligo
cccacgcaaagcauguccuc

SEQ ID NO: 7577 - RNA, 20 nt, Artificial Sequence
  Antisense oligo
uggcccacgcaaagcauguc

SEQ ID NO: 7578 - RNA, 20 nt, Artificial Sequence
  Antisense oligo
cuggcccacgcaaagcaugu

SEQ ID NO: 7579 - RNA, 20 nt, Artificial Sequence
  Antisense oligo
uucuccuggcccacgcaaag

SEQ ID NO: 7580 - RNA, 20 nt, Artificial Sequence
  Antisense oligo
cuucuccuggcccacgcaaa

SEQ ID NO: 7581 - RNA, 20 nt, Artificial Sequence
  Antisense oligo
uccugcuguuuuacuguuuc

SEQ ID NO: 7582 - RNA, 20 nt, Artificial Sequence
  Antisense oligo
acuuuccugcuguuuuacug

SEQ ID NO: 7583 - RNA, 20 nt, Artificial Sequence
  Antisense oligo
cagugcucuaugggaugaaa

SEQ ID NO: 7584 - RNA, 20 nt, Artificial Sequence
  Antisense oligo
uccagugcucuaugggauga

SEQ ID NO: 7585 - RNA, 20 nt, Artificial Sequence
  Antisense oligo
gcuccagugcucuaugggau

SEQ ID NO: 7586 - RNA, 20 nt, Artificial Sequence
  Antisense oligo
uucagagcuuucggaugcag

SEQ ID NO: 7587 - RNA, 20 nt, Artificial Sequence
  Antisense oligo
guuucagagcuuucggaugc

SEQ ID NO: 7588 - RNA, 20 nt, Artificial Sequence
  Antisense oligo
gguuucagagcuuucggaug

SEQ ID NO: 7589 - RNA, 20 nt, Artificial Sequence
  Antisense oligo
ggugguuucagagcuuucgg

SEQ ID NO: 7590 - RNA, 20 nt, Artificial Sequence
  Antisense oligo
gggugguuucagagcuuucg

SEQ ID NO: 7591 - RNA, 20 nt, Artificial Sequence
  Antisense oligo
aguaggcagugaucugggag

SEQ ID NO: 7592 - RNA, 20 nt, Artificial Sequence
  Antisense oligo
caguaggcagugaucuggga

SEQ ID NO: 7593 - RNA, 20 nt, Artificial Sequence
  Antisense oligo
gcaguaggcagugaucuggg

SEQ ID NO: 7594 - RNA, 20 nt, Artificial Sequence
  Antisense oligo
ugcaguaggcagugaucugg

SEQ ID NO: 7595 - RNA, 20 nt, Artificial Sequence
  Antisense oligo
auugcaguaggcagugaucu

SEQ ID NO: 7596 - RNA, 20 nt, Artificial Sequence
  Antisense oligo
cuauugcaguaggcagugau

SEQ ID NO: 7597 - RNA, 20 nt, Artificial Sequence
  Antisense oligo
acuauugcaguaggcaguga

SEQ ID NO: 7598 - RNA, 20 nt, Artificial Sequence
  Antisense oligo
aacuauugcaguaggcagug

SEQ ID NO: 7599 - RNA, 20 nt, Artificial Sequence
  Antisense oligo
caacuauugcaguaggcagu

SEQ ID NO: 7600 - RNA, 20 nt, Artificial Sequence
  Antisense oligo
uggugucccagcaacuauug

SEQ ID NO: 7601 - RNA, 20 nt, Artificial Sequence
  Antisense oligo
uuggugucccagcaacuauu

SEQ ID NO: 7602 - RNA, 20 nt, Artificial Sequence
  Antisense oligo
uuuggugucccagcaacuau

SEQ ID NO: 7603 - RNA, 20 nt, Artificial Sequence
  Antisense oligo
cuuuggugucccagcaacua

SEQ ID NO: 7604 - RNA, 20 nt, Artificial Sequence
  Antisense oligo
gccuuuggugucccagcaac

SEQ ID NO: 7605 - RNA, 20 nt, Artificial Sequence
  Antisense oligo
agccuuuggugucccagcaa

SEQ ID NO: 7606 - RNA, 20 nt, Artificial Sequence
  Antisense oligo
aagccuuuggugucccagca

SEQ ID NO: 7607 - RNA, 20 nt, Artificial Sequence
  Antisense oligo
uaagccuuuggugucccagc

SEQ ID NO: 7608 - RNA, 20 nt, Artificial Sequence
  Antisense oligo
ucuaagccuuugguguccca

SEQ ID NO: 7609 - RNA, 20 nt, Artificial Sequence
  Antisense oligo
cucuaagccuuugguguccc

SEQ ID NO: 7610 - RNA, 20 nt, Artificial Sequence
  Antisense oligo
ccucuaagccuuuggugucc

SEQ ID NO: 7611 - RNA, 20 nt, Artificial Sequence
  Antisense oligo
uccucuaagccuuugguguc

SEQ ID NO: 7612 - RNA, 20 nt, Artificial Sequence
  Antisense oligo
guccucuaagccuuuggugu

SEQ ID NO: 7613 - RNA, 20 nt, Artificial Sequence
  Antisense oligo
cuguccucuaagccuuuggu

SEQ ID NO: 7614 - RNA, 20 nt, Artificial Sequence
  Antisense oligo
acuguccucuaagccuuugg

SEQ ID NO: 7615 - RNA, 20 nt, Artificial Sequence
  Antisense oligo
cacuguccucuaagccuuug

SEQ ID NO: 7616 - RNA, 20 nt, Artificial Sequence
  Antisense oligo
cacacuguccucuaagccuu

SEQ ID NO: 7617 - RNA, 20 nt, Artificial Sequence
  Antisense oligo
auuucucgaaggucuuggcc

SEQ ID NO: 7618 - RNA, 20 nt, Artificial Sequence
  Antisense oligo
cauuucucgaaggucuuggc

SEQ ID NO: 7619 - RNA, 20 nt, Artificial Sequence
  Antisense oligo
gcauuucucgaaggucuugg

SEQ ID NO: 7620 - RNA, 20 nt, Artificial Sequence
  Antisense oligo
ugcauuucucgaaggucuug

SEQ ID NO: 7621 - RNA, 20 nt, Artificial Sequence
  Antisense oligo
cucacggcuucaaugaugca

SEQ ID NO: 7622 - RNA, 20 nt, Artificial Sequence
  Antisense oligo
gcucacggcuucaaugaugc

SEQ ID NO: 7623 - RNA, 20 nt, Artificial Sequence
  Antisense oligo
agcucacggcuucaaugaug

SEQ ID NO: 7624 - RNA, 20 nt, Artificial Sequence
  Antisense oligo
uguucaccuggcaggcugag

SEQ ID NO: 7625 - RNA, 20 nt, Artificial Sequence
  Antisense oligo
uuguucaccuggcaggcuga

SEQ ID NO: 7626 - RNA, 20 nt, Artificial Sequence
  Antisense oligo
gauuguucaccuggcaggcu

SEQ ID NO: 7627 - RNA, 20 nt, Artificial Sequence
  Antisense oligo
agauuguucaccuggcaggc

SEQ ID NO: 7628 - RNA, 20 nt, Artificial Sequence
  Antisense oligo
agagauuguucaccuggcag

SEQ ID NO: 7629 - RNA, 20 nt, Artificial Sequence
  Antisense oligo
aggagagauuguucaccugg

SEQ ID NO: 7630 - RNA, 20 nt, Artificial Sequence
  Antisense oligo
gaggagagauuguucaccug

SEQ ID NO: 7631 - RNA, 20 nt, Artificial Sequence
  Antisense oligo
ggaggagagauuguucaccu

SEQ ID NO: 7632 - RNA, 20 nt, Artificial Sequence
  Antisense oligo
aggaggagagauuguucacc

SEQ ID NO: 7633 - RNA, 20 nt, Artificial Sequence
  Antisense oligo
caggaggagagauuguucac

SEQ ID NO: 7634 - RNA, 20 nt, Artificial Sequence
  Antisense oligo
cguuucccaggaggagagau

SEQ ID NO: 7635 - RNA, 20 nt, Artificial Sequence
  Antisense oligo
uccguuucccaggaggagag

SEQ ID NO: 7636 - RNA, 20 nt, Artificial Sequence
  Antisense oligo
gggucauggcagaacacagc

SEQ ID NO: 7637 - RNA, 20 nt, Artificial Sequence
  Antisense oligo
ugggucauggcagaacacag

SEQ ID NO: 7638 - RNA, 20 nt, Artificial Sequence
  Antisense oligo
cugggucauggcagaacaca

SEQ ID NO: 7639 - RNA, 20 nt, Artificial Sequence
  Antisense oligo
gcugggucauggcagaacac

SEQ ID NO: 7640 - RNA, 20 nt, Artificial Sequence
  Antisense oligo
uagcugggucauggcagaac

SEQ ID NO: 7641 - RNA, 20 nt, Artificial Sequence
  Antisense oligo
uuagcugggucauggcagaa

SEQ ID NO: 7642 - RNA, 20 nt, Artificial Sequence
  Antisense oligo
agcccuuagcugggucaugg

SEQ ID NO: 7643 - RNA, 20 nt, Artificial Sequence
  Antisense oligo
uagcccuuagcugggucaug

SEQ ID NO: 7644 - RNA, 20 nt, Artificial Sequence
  Antisense oligo
auagcccuuagcugggucau

SEQ ID NO: 7645 - RNA, 20 nt, Artificial Sequence
  Antisense oligo
cauagcccuuagcuggguca

SEQ ID NO: 7646 - RNA, 20 nt, Artificial Sequence
  Antisense oligo
uuagcggaggagcugagacc

SEQ ID NO: 7647 - RNA, 20 nt, Artificial Sequence
  Antisense oligo
guuagcggaggagcugagac

SEQ ID NO: 7648 - RNA, 20 nt, Artificial Sequence
  Antisense oligo
aguuagcggaggagcugaga

SEQ ID NO: 7649 - RNA, 20 nt, Artificial Sequence
  Antisense oligo
gaguuagcggaggagcugag

SEQ ID NO: 7650 - RNA, 20 nt, Artificial Sequence
  Antisense oligo
ugaguuagcggaggagcuga

SEQ ID NO: 7651 - RNA, 20 nt, Artificial Sequence
  Antisense oligo
cugaguuagcggaggagcug

SEQ ID NO: 7652 - RNA, 20 nt, Artificial Sequence
  Antisense oligo
ucugaguuagcggaggagcu

SEQ ID NO: 7653 - RNA, 20 nt, Artificial Sequence
  Antisense oligo
cucugaguuagcggaggagc

SEQ ID NO: 7654 - RNA, 20 nt, Artificial Sequence
  Antisense oligo
ucucugaguuagcggaggag

SEQ ID NO: 7655 - RNA, 20 nt, Artificial Sequence
  Antisense oligo
aucucugaguuagcggagga

SEQ ID NO: 7656 - RNA, 20 nt, Artificial Sequence
  Antisense oligo
aaucucugaguuagcggagg

SEQ ID NO: 7657 - RNA, 20 nt, Artificial Sequence
  Antisense oligo
ccaaucucugaguuagcgga

SEQ ID NO: 7658 - RNA, 20 nt, Artificial Sequence
  Antisense oligo
cccaaucucugaguuagcgg

SEQ ID NO: 7659 - RNA, 20 nt, Artificial Sequence
  Antisense oligo
ucccaaucucugaguuagcg

SEQ ID NO: 7660 - RNA, 20 nt, Artificial Sequence
  Antisense oligo
uucccaaucucugaguuagc

SEQ ID NO: 7661 - RNA, 20 nt, Artificial Sequence
  Antisense oligo
cuucccaaucucugaguuag

SEQ ID NO: 7662 - RNA, 20 nt, Artificial Sequence
  Antisense oligo
acuucccaaucucugaguua

SEQ ID NO: 7663 - RNA, 20 nt, Artificial Sequence
  Antisense oligo
cacuucccaaucucugaguu

SEQ ID NO: 7664 - RNA, 20 nt, Artificial Sequence
  Antisense oligo
cccacuucccaaucucugag

SEQ ID NO: 7665 - RNA, 20 nt, Artificial Sequence
  Antisense oligo
uucagcgccauugcccuugg

SEQ ID NO: 7666 - RNA, 20 nt, Artificial Sequence
  Antisense oligo
uuucagcgccauugcccuug

SEQ ID NO: 7667 - RNA, 20 nt, Artificial Sequence
  Antisense oligo
auuucagcgccauugcccuu

SEQ ID NO: 7668 - RNA, 20 nt, Artificial Sequence
  Antisense oligo
gauuucagcgccauugcccu

SEQ ID NO: 7669 - RNA, 20 nt, Artificial Sequence
  Antisense oligo
agauuucagcgccauugccc

SEQ ID NO: 7670 - RNA, 20 nt, Artificial Sequence
  Antisense oligo
uagauuucagcgccauugcc

SEQ ID NO: 7671 - RNA, 20 nt, Artificial Sequence
  Antisense oligo
cuagauuucagcgccauugc

SEQ ID NO: 7672 - RNA, 20 nt, Artificial Sequence
  Antisense oligo
acuagauuucagcgccauug

SEQ ID NO: 7673 - RNA, 20 nt, Artificial Sequence
  Antisense oligo
aacuagauuucagcgccauu

SEQ ID NO: 7674 - RNA, 20 nt, Artificial Sequence
  Antisense oligo
gaacuagauuucagcgccau

SEQ ID NO: 7675 - RNA, 20 nt, Artificial Sequence
  Antisense oligo
agaacuagauuucagcgcca

SEQ ID NO: 7676 - RNA, 20 nt, Artificial Sequence
  Antisense oligo
ggagagaacuagauuucagc

SEQ ID NO: 7677 - RNA, 20 nt, Artificial Sequence
  Antisense oligo
cagcacacugaggaauccgg

SEQ ID NO: 7678 - RNA, 20 nt, Artificial Sequence
  Antisense oligo
caugcaggauggugcgagca

SEQ ID NO: 7679 - RNA, 20 nt, Artificial Sequence
  Antisense oligo
acaugcaggauggugcgagc

SEQ ID NO: 7680 - RNA, 20 nt, Artificial Sequence
  Antisense oligo
acacaugcaggauggugcga

SEQ ID NO: 7681 - RNA, 20 nt, Artificial Sequence
  Antisense oligo
ggaacacaugcaggauggug

SEQ ID NO: 7682 - RNA, 20 nt, Artificial Sequence
  Antisense oligo
uggaacacaugcaggauggu

SEQ ID NO: 7683 - RNA, 20 nt, Artificial Sequence
  Antisense oligo
auggaacacaugcaggaugg

SEQ ID NO: 7684 - RNA, 20 nt, Artificial Sequence
  Antisense oligo
uauggaacacaugcaggaug

SEQ ID NO: 7685 - RNA, 20 nt, Artificial Sequence
  Antisense oligo
auauggaacacaugcaggau

SEQ ID NO: 7686 - RNA, 20 nt, Artificial Sequence
  Antisense oligo
ugacuugugccacacgcgca

SEQ ID NO: 7687 - RNA, 20 nt, Artificial Sequence
  Antisense oligo
agcccgugugacuugugcca

SEQ ID NO: 7688 - RNA, 20 nt, Artificial Sequence
  Antisense oligo
aagcccgugugacuugugcc

SEQ ID NO: 7689 - RNA, 20 nt, Artificial Sequence
  Antisense oligo
ccugcaagcccgugugacuu

SEQ ID NO: 7690 - RNA, 20 nt, Artificial Sequence
  Antisense oligo
ucugaggaacggccugcaag

SEQ ID NO: 7691 - RNA, 20 nt, Artificial Sequence
  Antisense oligo
aucugaggaacggccugcaa

SEQ ID NO: 7692 - RNA, 20 nt, Artificial Sequence
  Antisense oligo
cacagugaugacagggccau

SEQ ID NO: 7693 - RNA, 20 nt, Artificial Sequence
  Antisense oligo
accagcagccacagugauga

SEQ ID NO: 7694 - RNA, 20 nt, Artificial Sequence
  Antisense oligo
aaccagcagccacagugaug

SEQ ID NO: 7695 - RNA, 20 nt, Artificial Sequence
  Antisense oligo
aucaaaccagcagccacagu

SEQ ID NO: 7696 - RNA, 20 nt, Artificial Sequence
  Antisense oligo
caaucaaaccagcagccaca

SEQ ID NO: 7697 - RNA, 20 nt, Artificial Sequence
  Antisense oligo
caaucaaucaaaccagcagc

SEQ ID NO: 7698 - RNA, 20 nt, Artificial Sequence
  Antisense oligo
gucaaccuuuggagucucuu

SEQ ID NO: 7699 - RNA, 20 nt, Artificial Sequence
  Antisense oligo
cugucaaccuuuggagucuc

SEQ ID NO: 7700 - RNA, 20 nt, Artificial Sequence
  Antisense oligo
ucugucaaccuuuggagucu

SEQ ID NO: 7701 - RNA, 20 nt, Artificial Sequence
  Antisense oligo
uucugucaaccuuuggaguc

SEQ ID NO: 7702 - RNA, 20 nt, Artificial Sequence
  Antisense oligo
guucugucaaccuuuggagu

SEQ ID NO: 7703 - RNA, 20 nt, Artificial Sequence
  Antisense oligo
uguucugucaaccuuuggag

SEQ ID NO: 7704 - RNA, 20 nt, Artificial Sequence
  Antisense oligo
auguucugucaaccuuugga

SEQ ID NO: 7705 - RNA, 20 nt, Artificial Sequence
  Antisense oligo
aauguucugucaaccuuugg

SEQ ID NO: 7706 - RNA, 20 nt, Artificial Sequence
  Antisense oligo
ccauaaauguucugucaacc

SEQ ID NO: 7707 - RNA, 20 nt, Artificial Sequence
  Antisense oligo
gcuuccauaaauguucuguc

SEQ ID NO: 7708 - RNA, 20 nt, Artificial Sequence
  Antisense oligo
uggcauugccugcgagacug

SEQ ID NO: 7709 - RNA, 20 nt, Artificial Sequence
  Antisense oligo
guggcauugccugcgagacu

SEQ ID NO: 7710 - RNA, 20 nt, Artificial Sequence
  Antisense oligo
uguggcauugccugcgagac

SEQ ID NO: 7711 - RNA, 20 nt, Artificial Sequence
  Antisense oligo
auguggcauugccugcgaga

SEQ ID NO: 7712 - RNA, 20 nt, Artificial Sequence
  Antisense oligo
ucauguggcauugccugcga

SEQ ID NO: 7713 - RNA, 20 nt, Artificial Sequence
  Antisense oligo
cucauguggcauugccugcg

SEQ ID NO: 7714 - RNA, 20 nt, Artificial Sequence
  Antisense oligo
uccucauguggcauugccug

SEQ ID NO: 7715 - RNA, 20 nt, Artificial Sequence
  Antisense oligo
gcuuccucauguggcauugc

SEQ ID NO: 7716 - RNA, 20 nt, Artificial Sequence
  Antisense oligo
agcuuccucauguggcauug

SEQ ID NO: 7717 - RNA, 20 nt, Artificial Sequence
  Antisense oligo
gagcuuccucauguggcauu

SEQ ID NO: 7718 - RNA, 20 nt, Artificial Sequence
  Antisense oligo
ggagcuuccucauguggcau

SEQ ID NO: 7719 - RNA, 20 nt, Artificial Sequence
  Antisense oligo
gcagggagcuuccucaugug

SEQ ID NO: 7720 - RNA, 20 nt, Artificial Sequence
  Antisense oligo
agcagggagcuuccucaugu

SEQ ID NO: 7721 - RNA, 20 nt, Artificial Sequence
  Antisense oligo
ggaaaugugagcagggcagc

SEQ ID NO: 7722 - RNA, 20 nt, Artificial Sequence
  Antisense oligo
uaggaaaugugagcagggca

SEQ ID NO: 7723 - RNA, 20 nt, Artificial Sequence
  Antisense oligo
uuaggaaaugugagcagggc

SEQ ID NO: 7724 - RNA, 20 nt, Artificial Sequence
  Antisense oligo
auuaggaaaugugagcaggg

SEQ ID NO: 7725 - RNA, 20 nt, Artificial Sequence
  Antisense oligo
uccaauuaggaaaugugagc

SEQ ID NO: 7726 - RNA, 20 nt, Artificial Sequence
  Antisense oligo
ccucaauguuucuggacuuc

SEQ ID NO: 7727 - RNA, 20 nt, Artificial Sequence
  Antisense oligo
accucaauguuucuggacuu

SEQ ID NO: 7728 - RNA, 20 nt, Artificial Sequence
  Antisense oligo
gaccucaauguuucuggacu

SEQ ID NO: 7729 - RNA, 20 nt, Artificial Sequence
  Antisense oligo
aaugaccucaauguuucugg

SEQ ID NO: 7730 - RNA, 20 nt, Artificial Sequence
  Antisense oligo
uggcauacgaacaauaucuc

SEQ ID NO: 7731 - RNA, 20 nt, Artificial Sequence
  Antisense oligo
cuggaacuuuugacagaugu

SEQ ID NO: 7732 - RNA, 20 nt, Artificial Sequence
  Antisense oligo
gcugaacuggaacuuuugac

SEQ ID NO: 7733 - RNA, 20 nt, Artificial Sequence
  Antisense oligo
ugcugaacuggaacuuuuga

SEQ ID NO: 7734 - RNA, 20 nt, Artificial Sequence
  Antisense oligo
cugcugaacuggaacuuuug

SEQ ID NO: 7735 - RNA, 20 nt, Artificial Sequence
  Antisense oligo
ccugcugaacuggaacuuuu

SEQ ID NO: 7736 - RNA, 20 nt, Artificial Sequence
  Antisense oligo
aaaccugcugaacuggaacu

SEQ ID NO: 7737 - RNA, 20 nt, Artificial Sequence
  Antisense oligo
aaaaccugcugaacuggaac

SEQ ID NO: 7738 - RNA, 20 nt, Artificial Sequence
  Antisense oligo
caaaaccugcugaacuggaa

SEQ ID NO: 7739 - RNA, 20 nt, Artificial Sequence
  Antisense oligo
ccaaaaccugcugaacugga

SEQ ID NO: 7740 - RNA, 20 nt, Artificial Sequence
  Antisense oligo
ucugucauuaacugugguga

SEQ ID NO: 7741 - RNA, 20 nt, Artificial Sequence
  Antisense oligo
aagccacagaagcaguuguu

SEQ ID NO: 7742 - RNA, 20 nt, Artificial Sequence
  Antisense oligo
aagccauacccaaaaggcca

SEQ ID NO: 7743 - RNA, 20 nt, Artificial Sequence
  Antisense oligo
uaagccauacccaaaaggcc

SEQ ID NO: 7744 - RNA, 20 nt, Artificial Sequence
  Antisense oligo
auaagccauacccaaaaggc

SEQ ID NO: 7745 - RNA, 20 nt, Artificial Sequence
  Antisense oligo
aauaagccauacccaaaagg

SEQ ID NO: 7746 - RNA, 20 nt, Artificial Sequence
  Antisense oligo
cagugaaauaagccauaccc

SEQ ID NO: 7747 - RNA, 20 nt, Artificial Sequence
  Antisense oligo
gcacuccagccugggcaaaa

SEQ ID NO: 7748 - RNA, 20 nt, Artificial Sequence
  Antisense oligo
ugcacuccagccugggcaaa

SEQ ID NO: 7749 - RNA, 20 nt, Artificial Sequence
  Antisense oligo
auugcacuccagccugggca

SEQ ID NO: 7750 - RNA, 20 nt, Artificial Sequence
  Antisense oligo
accauugcacuccagccugg

SEQ ID NO: 7751 - RNA, 20 nt, Artificial Sequence
  Antisense oligo
caccauugcacuccagccug

SEQ ID NO: 7752 - RNA, 20 nt, Artificial Sequence
  Antisense oligo
gcaccauugcacuccagccu

SEQ ID NO: 7753 - RNA, 20 nt, Artificial Sequence
  Antisense oligo
ucgcaccauugcacuccagc

SEQ ID NO: 7754 - RNA, 20 nt, Artificial Sequence
  Antisense oligo
aucgcaccauugcacuccag

SEQ ID NO: 7755 - RNA, 20 nt, Artificial Sequence
  Antisense oligo
gaucgcaccauugcacucca

SEQ ID NO: 7756 - RNA, 20 nt, Artificial Sequence
  Antisense oligo
ggaucgcaccauugcacucc

SEQ ID NO: 7757 - RNA, 20 nt, Artificial Sequence
  Antisense oligo
gcaggagaaucacuugaacc

SEQ ID NO: 7758 - RNA, 20 nt, Artificial Sequence
  Antisense oligo
ggcaggagaaucacuugaac

SEQ ID NO: 7759 - RNA, 20 nt, Artificial Sequence
  Antisense oligo
aggcaggagaaucacuugaa

SEQ ID NO: 7760 - RNA, 20 nt, Artificial Sequence
  Antisense oligo
gaggcaggagaaucacuuga

SEQ ID NO: 7761 - RNA, 20 nt, Artificial Sequence
  Antisense oligo
ugaggcaggagaaucacuug

SEQ ID NO: 7762 - RNA, 20 nt, Artificial Sequence
  Antisense oligo
cugaggcaggagaaucacuu

SEQ ID NO: 7763 - RNA, 20 nt, Artificial Sequence
  Antisense oligo
gcugaggcaggagaaucacu

SEQ ID NO: 7764 - RNA, 20 nt, Artificial Sequence
  Antisense oligo
ggcugaggcaggagaaucac

SEQ ID NO: 7765 - RNA, 20 nt, Artificial Sequence
  Antisense oligo
aggcugaggcaggagaauca

SEQ ID NO: 7766 - RNA, 20 nt, Artificial Sequence
  Antisense oligo
gaggcugaggcaggagaauc

SEQ ID NO: 7767 - RNA, 20 nt, Artificial Sequence
  Antisense oligo
ggaggcugaggcaggagaau

SEQ ID NO: 7768 - RNA, 20 nt, Artificial Sequence
  Antisense oligo
guaauuccagcacuugggag

SEQ ID NO: 7769 - RNA, 20 nt, Artificial Sequence
  Antisense oligo
uguaauuccagcacuuggga

SEQ ID NO: 7770 - RNA, 20 nt, Artificial Sequence
  Antisense oligo
cuguaauuccagcacuuggg

SEQ ID NO: 7771 - RNA, 20 nt, Artificial Sequence
  Antisense oligo
aaaggaaccgaguguggcgg

SEQ ID NO: 7772 - RNA, 20 nt, Artificial Sequence
  Antisense oligo
aaaaggaaccgaguguggcg

SEQ ID NO: 7773 - RNA, 20 nt, Artificial Sequence
  Antisense oligo
caaaaggaaccgaguguggc

SEQ ID NO: 7774 - RNA, 20 nt, Artificial Sequence
  Antisense oligo
acaaaaggaaccgagugugg

SEQ ID NO: 7775 - RNA, 20 nt, Artificial Sequence
  Antisense oligo
uacaaaaggaaccgagugug

SEQ ID NO: 7776 - RNA, 20 nt, Artificial Sequence
  Antisense oligo
auacaaaaggaaccgagugu

SEQ ID NO: 7777 - RNA, 20 nt, Artificial Sequence
  Antisense oligo
aauacaaaaggaaccgagug

SEQ ID NO: 7778 - RNA, 20 nt, Artificial Sequence
  Antisense oligo
gccugaccaacauggagaaa

SEQ ID NO: 7779 - RNA, 20 nt, Artificial Sequence
  Antisense oligo
agccugaccaacauggagaa

SEQ ID NO: 7780 - RNA, 20 nt, Artificial Sequence
  Antisense oligo
cagccugaccaacauggaga

SEQ ID NO: 7781 - RNA, 20 nt, Artificial Sequence
  Antisense oligo
ccagccugaccaacauggag

SEQ ID NO: 7782 - RNA, 20 nt, Artificial Sequence
  Antisense oligo
accagccugaccaacaugga

SEQ ID NO: 7783 - RNA, 20 nt, Artificial Sequence
  Antisense oligo
gaccagccugaccaacaugg

SEQ ID NO: 7784 - RNA, 20 nt, Artificial Sequence
  Antisense oligo
agaccagccugaccaacaug

SEQ ID NO: 7785 - RNA, 20 nt, Artificial Sequence
  Antisense oligo
uggaucaccugaggucggga

SEQ ID NO: 7786 - RNA, 20 nt, Artificial Sequence
  Antisense oligo
aggccaagguggguggauca

SEQ ID NO: 7787 - RNA, 20 nt, Artificial Sequence
  Antisense oligo
cucacaccuguaaucucggc

SEQ ID NO: 7788 - RNA, 20 nt, Artificial Sequence
  Antisense oligo
gcucacaccuguaaucucgg

SEQ ID NO: 7789 - RNA, 20 nt, Artificial Sequence
  Antisense oligo
ggcucacaccuguaaucucg

SEQ ID NO: 7790 - RNA, 20 nt, Artificial Sequence
  Antisense oligo
uggcucacaccuguaaucuc

SEQ ID NO: 7791 - RNA, 20 nt, Artificial Sequence
  Antisense oligo
guggcucacaccuguaaucu

SEQ ID NO: 7792 - RNA, 20 nt, Artificial Sequence
  Antisense oligo
ucaaaacauuaugcucggcc

SEQ ID NO: 7793 - RNA, 20 nt, Artificial Sequence
  Antisense oligo
gagcggucuuucaaaacauu

SEQ ID NO: 7794 - RNA, 20 nt, Artificial Sequence
  Antisense oligo
ugagcggucuuucaaaacau

SEQ ID NO: 7795 - RNA, 20 nt, Artificial Sequence
  Antisense oligo
cugagcggucuuucaaaaca

SEQ ID NO: 7796 - RNA, 20 nt, Artificial Sequence
  Antisense oligo
ccugagcggucuuucaaaac

SEQ ID NO: 7797 - RNA, 20 nt, Artificial Sequence
  Antisense oligo
gccugagcggucuuucaaaa

SEQ ID NO: 7798 - RNA, 20 nt, Artificial Sequence
  Antisense oligo
agccugagcggucuuucaaa

SEQ ID NO: 7799 - RNA, 20 nt, Artificial Sequence
  Antisense oligo
cagccugagcggucuuucaa

SEQ ID NO: 7800 - RNA, 20 nt, Artificial Sequence
  Antisense oligo
ccagccugagcggucuuuca

SEQ ID NO: 7801 - RNA, 20 nt, Artificial Sequence
  Antisense oligo
uccagccugagcggucuuuc

SEQ ID NO: 7802 - RNA, 20 nt, Artificial Sequence
  Antisense oligo
guccagccugagcggucuuu

SEQ ID NO: 7803 - RNA, 20 nt, Artificial Sequence
  Antisense oligo
uguccagccugagcggucuu

SEQ ID NO: 7804 - RNA, 20 nt, Artificial Sequence
  Antisense oligo
auuacaggcgugagcaaccg

SEQ ID NO: 7805 - RNA, 20 nt, Artificial Sequence
  Antisense oligo
gauuacaggcgugagcaacc

SEQ ID NO: 7806 - RNA, 20 nt, Artificial Sequence
  Antisense oligo
ugauuacaggcgugagcaac

SEQ ID NO: 7807 - RNA, 20 nt, Artificial Sequence
  Antisense oligo
gugauuacaggcgugagcaa

SEQ ID NO: 7808 - RNA, 20 nt, Artificial Sequence
  Antisense oligo
cgugauuacaggcgugagca

SEQ ID NO: 7809 - RNA, 20 nt, Artificial Sequence
  Antisense oligo
ccgugauuacaggcgugagc

SEQ ID NO: 7810 - RNA, 20 nt, Artificial Sequence
  Antisense oligo
gccgugauuacaggcgugag

SEQ ID NO: 7811 - RNA, 20 nt, Artificial Sequence
  Antisense oligo
gaacuccugggcucccaaag

SEQ ID NO: 7812 - RNA, 20 nt, Artificial Sequence
  Antisense oligo
ugaacuccugggcucccaaa

SEQ ID NO: 7813 - RNA, 20 nt, Artificial Sequence
  Antisense oligo
uugaacuccugggcucccaa

SEQ ID NO: 7814 - RNA, 20 nt, Artificial Sequence
  Antisense oligo
cuugaacuccugggcuccca

SEQ ID NO: 7815 - RNA, 20 nt, Artificial Sequence
  Antisense oligo
ucuugaacuccugggcuccc

SEQ ID NO: 7816 - RNA, 20 nt, Artificial Sequence
  Antisense oligo
uagcugggaccacaggugug

SEQ ID NO: 7817 - RNA, 20 nt, Artificial Sequence
  Antisense oligo
guagcugggaccacaggugu

SEQ ID NO: 7818 - RNA, 20 nt, Artificial Sequence
  Antisense oligo
aguagcugggaccacaggug

SEQ ID NO: 7819 - RNA, 20 nt, Artificial Sequence
  Antisense oligo
aaguagcugggaccacaggu

SEQ ID NO: 7820 - RNA, 20 nt, Artificial Sequence
  Antisense oligo
caaguagcugggaccacagg

SEQ ID NO: 7821 - RNA, 20 nt, Artificial Sequence
  Antisense oligo
ccaaguagcugggaccacag

SEQ ID NO: 7822 - RNA, 20 nt, Artificial Sequence
  Antisense oligo
ccucagccucccaaguagcu

SEQ ID NO: 7823 - RNA, 20 nt, Artificial Sequence
  Antisense oligo
accucagccucccaaguagc

SEQ ID NO: 7824 - RNA, 20 nt, Artificial Sequence
  Antisense oligo
caccucagccucccaaguag

SEQ ID NO: 7825 - RNA, 20 nt, Artificial Sequence
  Antisense oligo
ccaccucagccucccaagua

SEQ ID NO: 7826 - RNA, 20 nt, Artificial Sequence
  Antisense oligo
aucauggcucacugcugccu

SEQ ID NO: 7827 - RNA, 20 nt, Artificial Sequence
  Antisense oligo
gaucauggcucacugcugcc

SEQ ID NO: 7828 - RNA, 20 nt, Artificial Sequence
  Antisense oligo
ugaagugcaguggugugauc

SEQ ID NO: 7829 - RNA, 20 nt, Artificial Sequence
  Antisense oligo
uugaagugcaguggugugau

SEQ ID NO: 7830 - RNA, 20 nt, Artificial Sequence
  Antisense oligo
guugaagugcagugguguga

SEQ ID NO: 7831 - RNA, 20 nt, Artificial Sequence
  Antisense oligo
ggacacaagcuacaauaugg

SEQ ID NO: 7832 - RNA, 20 nt, Artificial Sequence
  Antisense oligo
ucccaucuggaagacaucuc

SEQ ID NO: 7833 - RNA, 20 nt, Artificial Sequence
  Antisense oligo
gucccaucuggaagacaucu

SEQ ID NO: 7834 - RNA, 20 nt, Artificial Sequence
  Antisense oligo
ggucccaucuggaagacauc

SEQ ID NO: 7835 - RNA, 20 nt, Artificial Sequence
  Antisense oligo
gggucccaucuggaagacau

SEQ ID NO: 7836 - RNA, 20 nt, Artificial Sequence
  Antisense oligo
agacucugggucccaucugg

SEQ ID NO: 7837 - RNA, 20 nt, Artificial Sequence
  Antisense oligo
guuagacucugggucccauc

SEQ ID NO: 7838 - RNA, 20 nt, Artificial Sequence
  Antisense oligo
gugguuagacucuggguccc

SEQ ID NO: 7839 - RNA, 20 nt, Artificial Sequence
  Antisense oligo
ugugguuagacucugggucc

SEQ ID NO: 7840 - RNA, 20 nt, Artificial Sequence
  Antisense oligo
uugugguuagacucuggguc

SEQ ID NO: 7841 - RNA, 20 nt, Artificial Sequence
  Antisense oligo
uuugugguuagacucugggu

SEQ ID NO: 7842 - RNA, 20 nt, Artificial Sequence
  Antisense oligo
uuuugugguuagacucuggg

SEQ ID NO: 7843 - RNA, 20 nt, Artificial Sequence
  Antisense oligo
guauaaugaugccacaagug

SEQ ID NO: 7844 - RNA, 20 nt, Artificial Sequence
  Antisense oligo
gaguauaaugaugccacaag

SEQ ID NO: 7845 - RNA, 20 nt, Artificial Sequence
  Antisense oligo
uggccgucaauggacacaug

SEQ ID NO: 7846 - RNA, 20 nt, Artificial Sequence
  Antisense oligo
auggccgucaauggacacau

SEQ ID NO: 7847 - RNA, 20 nt, Artificial Sequence
  Antisense oligo
gauggccgucaauggacaca

SEQ ID NO: 7848 - RNA, 20 nt, Artificial Sequence
  Antisense oligo
agauggccgucaauggacac

SEQ ID NO: 7849 - RNA, 20 nt, Artificial Sequence
  Antisense oligo
uagauggccgucaauggaca

SEQ ID NO: 7850 - RNA, 20 nt, Artificial Sequence
  Antisense oligo
auagauggccgucaauggac

SEQ ID NO: 7851 - RNA, 20 nt, Artificial Sequence
  Antisense oligo
cauagauggccgucaaugga

SEQ ID NO: 7852 - RNA, 20 nt, Artificial Sequence
  Antisense oligo
acauagauggccgucaaugg

SEQ ID NO: 7853 - RNA, 20 nt, Artificial Sequence
  Antisense oligo
aacauagauggccgucaaug

SEQ ID NO: 7854 - RNA, 20 nt, Artificial Sequence
  Antisense oligo
caacauagauggccgucaau

SEQ ID NO: 7855 - RNA, 20 nt, Artificial Sequence
  Antisense oligo
gcaacauagauggccgucaa

SEQ ID NO: 7856 - RNA, 20 nt, Artificial Sequence
  Antisense oligo
agcaacauagauggccguca

SEQ ID NO: 7857 - RNA, 20 nt, Artificial Sequence
  Antisense oligo
aagcaacauagauggccguc

SEQ ID NO: 7858 - RNA, 20 nt, Artificial Sequence
  Antisense oligo
gaagcaacauagauggccgu

SEQ ID NO: 7859 - RNA, 20 nt, Artificial Sequence
  Antisense oligo
agaagcaacauagauggccg

SEQ ID NO: 7860 - RNA, 20 nt, Artificial Sequence
  Antisense oligo
uagccgaagaagcaacauag

SEQ ID NO: 7861 - RNA, 20 nt, Artificial Sequence
  Antisense oligo
auagccgaagaagcaacaua

SEQ ID NO: 7862 - RNA, 20 nt, Artificial Sequence
  Antisense oligo
auaauagccgaagaagcaac

SEQ ID NO: 7863 - RNA, 20 nt, Artificial Sequence
  Antisense oligo
aaugaagacauacacccaca

SEQ ID NO: 7864 - RNA, 20 nt, Artificial Sequence
  Antisense oligo
aaaugaagacauacacccac

SEQ ID NO: 7865 - RNA, 20 nt, Artificial Sequence
  Antisense oligo
gcaauucuacaucgagguau

SEQ ID NO: 7866 - RNA, 20 nt, Artificial Sequence
  Antisense oligo
agcaauucuacaucgaggua

SEQ ID NO: 7867 - RNA, 20 nt, Artificial Sequence
  Antisense oligo
cagcaauucuacaucgaggu

SEQ ID NO: 7868 - RNA, 20 nt, Artificial Sequence
  Antisense oligo
ucagcaauucuacaucgagg

SEQ ID NO: 7869 - RNA, 20 nt, Artificial Sequence
  Antisense oligo
ggagggauugaaaaugguuc

SEQ ID NO: 7870 - RNA, 20 nt, Artificial Sequence
  Antisense oligo
cuggagggauugaaaauggu

SEQ ID NO: 7871 - RNA, 20 nt, Artificial Sequence
  Antisense oligo
ugcuggagggauugaaaaug

SEQ ID NO: 7872 - RNA, 20 nt, Artificial Sequence
  Antisense oligo
uaugcugcuggagggauuga

SEQ ID NO: 7873 - RNA, 20 nt, Artificial Sequence
  Antisense oligo
cuaugcugcuggagggauug

SEQ ID NO: 7874 - RNA, 20 nt, Artificial Sequence
  Antisense oligo
ccuaugcugcuggagggauu

SEQ ID NO: 7875 - RNA, 20 nt, Artificial Sequence
  Antisense oligo
aagccuccuaugcugcugga

SEQ ID NO: 7876 - RNA, 20 nt, Artificial Sequence
  Antisense oligo
uggaagccuccuaugcugcu

SEQ ID NO: 7877 - RNA, 20 nt, Artificial Sequence
  Antisense oligo
cuggaagccuccuaugcugc

SEQ ID NO: 7878 - RNA, 20 nt, Artificial Sequence
  Antisense oligo
ccuggaagccuccuaugcug

SEQ ID NO: 7879 - RNA, 20 nt, Artificial Sequence
  Antisense oligo
accuggaagccuccuaugcu

SEQ ID NO: 7880 - RNA, 20 nt, Artificial Sequence
  Antisense oligo
agugaggauguggagaaccu

SEQ ID NO: 7881 - RNA, 20 nt, Artificial Sequence
  Antisense oligo
uagugaggauguggagaacc

SEQ ID NO: 7882 - RNA, 20 nt, Artificial Sequence
  Antisense oligo
uuagugaggauguggagaac

SEQ ID NO: 7883 - RNA, 20 nt, Artificial Sequence
  Antisense oligo
ggcaagacuccaucucaaaa

SEQ ID NO: 7884 - RNA, 20 nt, Artificial Sequence
  Antisense oligo
gggcaagacuccaucucaaa

SEQ ID NO: 7885 - RNA, 20 nt, Artificial Sequence
  Antisense oligo
agggcaagacuccaucucaa

SEQ ID NO: 7886 - RNA, 20 nt, Artificial Sequence
  Antisense oligo
cagggcaagacuccaucuca

SEQ ID NO: 7887 - RNA, 20 nt, Artificial Sequence
  Antisense oligo
acagggcaagacuccaucuc

SEQ ID NO: 7888 - RNA, 20 nt, Artificial Sequence
  Antisense oligo
aucacgccacugcacuccag

SEQ ID NO: 7889 - RNA, 20 nt, Artificial Sequence
  Antisense oligo
gaucacgccacugcacucca

SEQ ID NO: 7890 - RNA, 20 nt, Artificial Sequence
  Antisense oligo
agaucacgccacugcacucc

SEQ ID NO: 7891 - RNA, 20 nt, Artificial Sequence
  Antisense oligo
aagaucacgccacugcacuc

SEQ ID NO: 7892 - RNA, 20 nt, Artificial Sequence
  Antisense oligo
caagaucacgccacugcacu

SEQ ID NO: 7893 - RNA, 20 nt, Artificial Sequence
  Antisense oligo
ccaagaucacgccacugcac

SEQ ID NO: 7894 - RNA, 20 nt, Artificial Sequence
  Antisense oligo
gccaagaucacgccacugca

SEQ ID NO: 7895 - RNA, 20 nt, Artificial Sequence
  Antisense oligo
agccaagaucacgccacugc

SEQ ID NO: 7896 - RNA, 20 nt, Artificial Sequence
  Antisense oligo
gagccaagaucacgccacug

SEQ ID NO: 7897 - RNA, 20 nt, Artificial Sequence
  Antisense oligo
ugagccaagaucacgccacu

SEQ ID NO: 7898 - RNA, 20 nt, Artificial Sequence
  Antisense oligo
gucgcagugagccaagauca

SEQ ID NO: 7899 - RNA, 20 nt, Artificial Sequence
  Antisense oligo
ugucgcagugagccaagauc

SEQ ID NO: 7900 - RNA, 20 nt, Artificial Sequence
  Antisense oligo
gugucgcagugagccaagau

SEQ ID NO: 7901 - RNA, 20 nt, Artificial Sequence
  Antisense oligo
ggugucgcagugagccaaga

SEQ ID NO: 7902 - RNA, 20 nt, Artificial Sequence
  Antisense oligo
aggugucgcagugagccaag

SEQ ID NO: 7903 - RNA, 20 nt, Artificial Sequence
  Antisense oligo
gaggugucgcagugagccaa

SEQ ID NO: 7904 - RNA, 20 nt, Artificial Sequence
  Antisense oligo
agguggaggugucgcaguga

SEQ ID NO: 7905 - RNA, 20 nt, Artificial Sequence
  Antisense oligo
aacccaggagguggaggugu

SEQ ID NO: 7906 - RNA, 20 nt, Artificial Sequence
  Antisense oligo
ugaacccaggagguggaggu

SEQ ID NO: 7907 - RNA, 20 nt, Artificial Sequence
  Antisense oligo
uugaacccaggagguggagg

SEQ ID NO: 7908 - RNA, 20 nt, Artificial Sequence
  Antisense oligo
cuugaacccaggagguggag

SEQ ID NO: 7909 - RNA, 20 nt, Artificial Sequence
  Antisense oligo
gcuugaacccaggaggugga

SEQ ID NO: 7910 - RNA, 20 nt, Artificial Sequence
  Antisense oligo
ugcuugaacccaggaggugg

SEQ ID NO: 7911 - RNA, 20 nt, Artificial Sequence
  Antisense oligo
uugcuugaacccaggaggug

SEQ ID NO: 7912 - RNA, 20 nt, Artificial Sequence
  Antisense oligo
auugcuugaacccaggaggu

SEQ ID NO: 7913 - RNA, 20 nt, Artificial Sequence
  Antisense oligo
aauugcuugaacccaggagg

SEQ ID NO: 7914 - RNA, 20 nt, Artificial Sequence
  Antisense oligo
gaauugcuugaacccaggag

SEQ ID NO: 7915 - RNA, 20 nt, Artificial Sequence
  Antisense oligo
agaauugcuugaacccagga

SEQ ID NO: 7916 - RNA, 20 nt, Artificial Sequence
  Antisense oligo
gagaauugcuugaacccagg

SEQ ID NO: 7917 - RNA, 20 nt, Artificial Sequence
  Antisense oligo
ggagaauugcuugaacccag

SEQ ID NO: 7918 - RNA, 20 nt, Artificial Sequence
  Antisense oligo
aggagaauugcuugaaccca

SEQ ID NO: 7919 - RNA, 20 nt, Artificial Sequence
  Antisense oligo
caggagaauugcuugaaccc

SEQ ID NO: 7920 - RNA, 20 nt, Artificial Sequence
  Antisense oligo
gcaggagaauugcuugaacc

SEQ ID NO: 7921 - RNA, 20 nt, Artificial Sequence
  Antisense oligo
ggcaggagaauugcuugaac

SEQ ID NO: 7922 - RNA, 20 nt, Artificial Sequence
  Antisense oligo
aggcaggagaauugcuugaa

SEQ ID NO: 7923 - RNA, 20 nt, Artificial Sequence
  Antisense oligo
gaggcaggagaauugcuuga

SEQ ID NO: 7924 - RNA, 20 nt, Artificial Sequence
  Antisense oligo
ugaggcaggagaauugcuug

SEQ ID NO: 7925 - RNA, 20 nt, Artificial Sequence
  Antisense oligo
cugaggcaggagaauugcuu

SEQ ID NO: 7926 - RNA, 20 nt, Artificial Sequence
  Antisense oligo
acugaggcaggagaauugcu

SEQ ID NO: 7927 - RNA, 20 nt, Artificial Sequence
  Antisense oligo
gacugaggcaggagaauugc

SEQ ID NO: 7928 - RNA, 20 nt, Artificial Sequence
  Antisense oligo
agacugaggcaggagaauug

SEQ ID NO: 7929 - RNA, 20 nt, Artificial Sequence
  Antisense oligo
gagacugaggcaggagaauu

SEQ ID NO: 7930 - RNA, 20 nt, Artificial Sequence
  Antisense oligo
agagacugaggcaggagaau

SEQ ID NO: 7931 - RNA, 20 nt, Artificial Sequence
  Antisense oligo
gagagacugaggcaggagaa

SEQ ID NO: 7932 - RNA, 20 nt, Artificial Sequence
  Antisense oligo
caugccuguagucccagcua

SEQ ID NO: 7933 - RNA, 20 nt, Artificial Sequence
  Antisense oligo
acaugccuguagucccagcu

SEQ ID NO: 7934 - RNA, 20 nt, Artificial Sequence
  Antisense oligo
cacaugccuguagucccagc

SEQ ID NO: 7935 - RNA, 20 nt, Artificial Sequence
  Antisense oligo
gcacaugccuguagucccag

SEQ ID NO: 7936 - RNA, 20 nt, Artificial Sequence
  Antisense oligo
ggcacaugccuguaguccca

SEQ ID NO: 7937 - RNA, 20 nt, Artificial Sequence
  Antisense oligo
uggcacaugccuguaguccc

SEQ ID NO: 7938 - RNA, 20 nt, Artificial Sequence
  Antisense oligo
guggcacaugccuguagucc

SEQ ID NO: 7939 - RNA, 20 nt, Artificial Sequence
  Antisense oligo
gguggcacaugccuguaguc

SEQ ID NO: 7940 - RNA, 20 nt, Artificial Sequence
  Antisense oligo
ugguggcacaugccuguagu

SEQ ID NO: 7941 - RNA, 20 nt, Artificial Sequence
  Antisense oligo
augguggcacaugccuguag

SEQ ID NO: 7942 - RNA, 20 nt, Artificial Sequence
  Antisense oligo
agcugggcaugguggcacau

SEQ ID NO: 7943 - RNA, 20 nt, Artificial Sequence
  Antisense oligo
uagcugggcaugguggcaca

SEQ ID NO: 7944 - RNA, 20 nt, Artificial Sequence
  Antisense oligo
uuagcugggcaugguggcac

SEQ ID NO: 7945 - RNA, 20 nt, Artificial Sequence
  Antisense oligo
auuagcugggcaugguggca

SEQ ID NO: 7946 - RNA, 20 nt, Artificial Sequence
  Antisense oligo
aauuagcugggcaugguggc

SEQ ID NO: 7947 - RNA, 20 nt, Artificial Sequence
  Antisense oligo
aaauuagcugggcauggugg

SEQ ID NO: 7948 - RNA, 20 nt, Artificial Sequence
  Antisense oligo
aaaauuagcugggcauggug

SEQ ID NO: 7949 - RNA, 20 nt, Artificial Sequence
  Antisense oligo
caugacccacacggcaaaac

SEQ ID NO: 7950 - RNA, 20 nt, Artificial Sequence
  Antisense oligo
cuguaaucccagcacuuugg

SEQ ID NO: 7951 - RNA, 20 nt, Artificial Sequence
  Antisense oligo
ccuguaaucccagcacuuug

SEQ ID NO: 7952 - RNA, 20 nt, Artificial Sequence
  Antisense oligo
gccuguaaucccagcacuuu

SEQ ID NO: 7953 - RNA, 20 nt, Artificial Sequence
  Antisense oligo
cgccuguaaucccagcacuu

SEQ ID NO: 7954 - RNA, 20 nt, Artificial Sequence
  Antisense oligo
acgccuguaaucccagcacu

SEQ ID NO: 7955 - RNA, 20 nt, Artificial Sequence
  Antisense oligo
cacgccuguaaucccagcac

SEQ ID NO: 7956 - RNA, 20 nt, Artificial Sequence
  Antisense oligo
ucacgccuguaaucccagca

SEQ ID NO: 7957 - RNA, 20 nt, Artificial Sequence
  Antisense oligo
cucacgccuguaaucccagc

SEQ ID NO: 7958 - RNA, 20 nt, Artificial Sequence
  Antisense oligo
gcucacgccuguaaucccag

SEQ ID NO: 7959 - RNA, 20 nt, Artificial Sequence
  Antisense oligo
ggcucacgccuguaauccca

SEQ ID NO: 7960 - RNA, 20 nt, Artificial Sequence
  Antisense oligo
uggcucacgccuguaauccc

SEQ ID NO: 7961 - RNA, 20 nt, Artificial Sequence
  Antisense oligo
guggcucacgccuguaaucc

SEQ ID NO: 7962 - RNA, 20 nt, Artificial Sequence
  Antisense oligo
aguggcucacgccuguaauc

SEQ ID NO: 7963 - RNA, 20 nt, Artificial Sequence
  Antisense oligo
caguggcucacgccuguaau

SEQ ID NO: 7964 - RNA, 20 nt, Artificial Sequence
  Antisense oligo
cagccugggugacaaagcga

SEQ ID NO: 7965 - RNA, 20 nt, Artificial Sequence
  Antisense oligo
uccagccugggugacaaagc

SEQ ID NO: 7966 - RNA, 20 nt, Artificial Sequence
  Antisense oligo
uuccagccugggugacaaag

SEQ ID NO: 7967 - RNA, 20 nt, Artificial Sequence
  Antisense oligo
auuccagccugggugacaaa

SEQ ID NO: 7968 - RNA, 20 nt, Artificial Sequence
  Antisense oligo
uauuccagccugggugacaa

SEQ ID NO: 7969 - RNA, 20 nt, Artificial Sequence
  Antisense oligo
guauuccagccugggugaca

SEQ ID NO: 7970 - RNA, 20 nt, Artificial Sequence
  Antisense oligo
uguauuccagccugggugac

SEQ ID NO: 7971 - RNA, 20 nt, Artificial Sequence
  Antisense oligo
uuguauuccagccuggguga

SEQ ID NO: 7972 - RNA, 20 nt, Artificial Sequence
  Antisense oligo
auuguauuccagccugggug

SEQ ID NO: 7973 - RNA, 20 nt, Artificial Sequence
  Antisense oligo
caugccuguagucccugcua

SEQ ID NO: 7974 - RNA, 20 nt, Artificial Sequence
  Antisense oligo
acaugccuguagucccugcu

SEQ ID NO: 7975 - RNA, 20 nt, Artificial Sequence
  Antisense oligo
cacaugccuguagucccugc

SEQ ID NO: 7976 - RNA, 20 nt, Artificial Sequence
  Antisense oligo
gcacaugccuguagucccug

SEQ ID NO: 7977 - RNA, 20 nt, Artificial Sequence
  Antisense oligo
ggcacaugccuguagucccu

SEQ ID NO: 7978 - RNA, 20 nt, Artificial Sequence
  Antisense oligo
uggcacaugccuguaguccc

SEQ ID NO: 7979 - RNA, 20 nt, Artificial Sequence
  Antisense oligo
guggcacaugccuguagucc

SEQ ID NO: 7980 - RNA, 20 nt, Artificial Sequence
  Antisense oligo
gguggcacaugccuguaguc

SEQ ID NO: 7981 - RNA, 20 nt, Artificial Sequence
  Antisense oligo
ugguggcacaugccuguagu

SEQ ID NO: 7982 - RNA, 20 nt, Artificial Sequence
  Antisense oligo
cuacaggcaugagccaccau

SEQ ID NO: 7983 - RNA, 20 nt, Artificial Sequence
  Antisense oligo
ucuacaggcaugagccacca

SEQ ID NO: 7984 - RNA, 20 nt, Artificial Sequence
  Antisense oligo
gucuacaggcaugagccacc

SEQ ID NO: 7985 - RNA, 20 nt, Artificial Sequence
  Antisense oligo
ggucuacaggcaugagccac

SEQ ID NO: 7986 - RNA, 20 nt, Artificial Sequence
  Antisense oligo
uggucuacaggcaugagcca

SEQ ID NO: 7987 - RNA, 20 nt, Artificial Sequence
  Antisense oligo
auggucuacaggcaugagcc

SEQ ID NO: 7988 - RNA, 20 nt, Artificial Sequence
  Antisense oligo
gauggucuacaggcaugagc

SEQ ID NO: 7989 - RNA, 20 nt, Artificial Sequence
  Antisense oligo
ggauggucuacaggcaugag

SEQ ID NO: 7990 - RNA, 20 nt, Artificial Sequence
  Antisense oligo
aggauggucuacaggcauga

SEQ ID NO: 7991 - RNA, 20 nt, Artificial Sequence
  Antisense oligo
caggauggucuacaggcaug

SEQ ID NO: 7992 - RNA, 20 nt, Artificial Sequence
  Antisense oligo
ccaggauggucuacaggcau

SEQ ID NO: 7993 - RNA, 20 nt, Artificial Sequence
  Antisense oligo
gccaggauggucuacaggca

SEQ ID NO: 7994 - RNA, 20 nt, Artificial Sequence
  Antisense oligo
agccaggauggucuacaggc

SEQ ID NO: 7995 - RNA, 20 nt, Artificial Sequence
  Antisense oligo
uagccaggauggucuacagg

SEQ ID NO: 7996 - RNA, 20 nt, Artificial Sequence
  Antisense oligo
uuagccaggauggucuacag

SEQ ID NO: 7997 - RNA, 20 nt, Artificial Sequence
  Antisense oligo
guuagccaggauggucuaca

SEQ ID NO: 7998 - RNA, 20 nt, Artificial Sequence
  Antisense oligo
uguuagccaggauggucuac

SEQ ID NO: 7999 - RNA, 20 nt, Artificial Sequence
  Antisense oligo
guguuagccaggauggucua

SEQ ID NO: 8000 - RNA, 20 nt, Artificial Sequence
  Antisense oligo
cguguuagccaggauggucu

SEQ ID NO: 8001 - RNA, 20 nt, Artificial Sequence
  Antisense oligo
uuuuaguagagacagggugu

SEQ ID NO: 8002 - RNA, 20 nt, Artificial Sequence
  Antisense oligo
caugcccagcuaauuguuug

SEQ ID NO: 8003 - RNA, 20 nt, Artificial Sequence
  Antisense oligo
ccaugcccagcuaauuguuu

SEQ ID NO: 8004 - RNA, 20 nt, Artificial Sequence
  Antisense oligo
accaugcccagcuaauuguu

SEQ ID NO: 8005 - RNA, 20 nt, Artificial Sequence
  Antisense oligo
caccaugcccagcuaauugu

SEQ ID NO: 8006 - RNA, 20 nt, Artificial Sequence
  Antisense oligo
ccaccaugcccagcuaauug

SEQ ID NO: 8007 - RNA, 20 nt, Artificial Sequence
  Antisense oligo
gccaccaugcccagcuaauu

SEQ ID NO: 8008 - RNA, 20 nt, Artificial Sequence
  Antisense oligo
ugccaccaugcccagcuaau

SEQ ID NO: 8009 - RNA, 20 nt, Artificial Sequence
  Antisense oligo
augccaccaugcccagcuaa

SEQ ID NO: 8010 - RNA, 20 nt, Artificial Sequence
  Antisense oligo
uccaccucauggcuucaagu

SEQ ID NO: 8011 - RNA, 20 nt, Artificial Sequence
  Antisense oligo
cuccaccucauggcuucaag

SEQ ID NO: 8012 - RNA, 20 nt, Artificial Sequence
  Antisense oligo
accuccaccucauggcuuca

SEQ ID NO: 8013 - RNA, 20 nt, Artificial Sequence
  Antisense oligo
aaccuccaccucauggcuuc

SEQ ID NO: 8014 - RNA, 20 nt, Artificial Sequence
  Antisense oligo
caaccuccaccucauggcuu

SEQ ID NO: 8015 - RNA, 20 nt, Artificial Sequence
  Antisense oligo
gcaaccuccaccucauggcu

SEQ ID NO: 8016 - RNA, 20 nt, Artificial Sequence
  Antisense oligo
ugcaaccuccaccucauggc

SEQ ID NO: 8017 - RNA, 20 nt, Artificial Sequence
  Antisense oligo
cugcaaccuccaccucaugg

SEQ ID NO: 8018 - RNA, 20 nt, Artificial Sequence
  Antisense oligo
acugcaaccuccaccucaug

SEQ ID NO: 8019 - RNA, 20 nt, Artificial Sequence
  Antisense oligo
cacugcaaccuccaccucau

SEQ ID NO: 8020 - RNA, 20 nt, Artificial Sequence
  Antisense oligo
ucacugcaaccuccaccuca

SEQ ID NO: 8021 - RNA, 20 nt, Artificial Sequence
  Antisense oligo
cucacugcaaccuccaccuc

SEQ ID NO: 8022 - RNA, 20 nt, Artificial Sequence
  Antisense oligo
gcucacugcaaccuccaccu

SEQ ID NO: 8023 - RNA, 20 nt, Artificial Sequence
  Antisense oligo
agcucacugcaaccuccacc

SEQ ID NO: 8024 - RNA, 20 nt, Artificial Sequence
  Antisense oligo
cagcucacugcaaccuccac

SEQ ID NO: 8025 - RNA, 20 nt, Artificial Sequence
  Antisense oligo
ucagcucacugcaaccucca

SEQ ID NO: 8026 - RNA, 20 nt, Artificial Sequence
  Antisense oligo
cucagcucacugcaaccucc

SEQ ID NO: 8027 - RNA, 20 nt, Artificial Sequence
  Antisense oligo
ucucagcucacugcaaccuc

SEQ ID NO: 8028 - RNA, 20 nt, Artificial Sequence
  Antisense oligo
aucucagcucacugcaaccu

SEQ ID NO: 8029 - RNA, 20 nt, Artificial Sequence
  Antisense oligo
aaucucagcucacugcaacc

SEQ ID NO: 8030 - RNA, 20 nt, Artificial Sequence
  Antisense oligo
caaucucagcucacugcaac

SEQ ID NO: 8031 - RNA, 20 nt, Artificial Sequence
  Antisense oligo
acaaucucagcucacugcaa

SEQ ID NO: 8032 - RNA, 20 nt, Artificial Sequence
  Antisense oligo
cacaaucucagcucacugca

SEQ ID NO: 8033 - RNA, 20 nt, Artificial Sequence
  Antisense oligo
gcacaaucucagcucacugc

SEQ ID NO: 8034 - RNA, 20 nt, Artificial Sequence
  Antisense oligo
ggcacaaucucagcucacug

SEQ ID NO: 8035 - RNA, 20 nt, Artificial Sequence
  Antisense oligo
uggcacaaucucagcucacu

SEQ ID NO: 8036 - RNA, 20 nt, Artificial Sequence
  Antisense oligo
guggcacaaucucagcucac

SEQ ID NO: 8037 - RNA, 20 nt, Artificial Sequence
  Antisense oligo
aguggcacaaucucagcuca

SEQ ID NO: 8038 - RNA, 20 nt, Artificial Sequence
  Antisense oligo
caguggcacaaucucagcuc

SEQ ID NO: 8039 - RNA, 20 nt, Artificial Sequence
  Antisense oligo
gcaguggcacaaucucagcu

SEQ ID NO: 8040 - RNA, 20 nt, Artificial Sequence
  Antisense oligo
ugcaguggcacaaucucagc

SEQ ID NO: 8041 - RNA, 20 nt, Artificial Sequence
  Antisense oligo
cagccugggcaacaucucaa

SEQ ID NO: 8042 - RNA, 20 nt, Artificial Sequence
  Antisense oligo
ccagccugggcaacaucuca

SEQ ID NO: 8043 - RNA, 20 nt, Artificial Sequence
  Antisense oligo
accagccugggcaacaucuc

SEQ ID NO: 8044 - RNA, 20 nt, Artificial Sequence
  Antisense oligo
gaccagccugggcaacaucu

SEQ ID NO: 8045 - RNA, 20 nt, Artificial Sequence
  Antisense oligo
agaccagccugggcaacauc

SEQ ID NO: 8046 - RNA, 20 nt, Artificial Sequence
  Antisense oligo
aagaccagccugggcaacau

SEQ ID NO: 8047 - RNA, 20 nt, Artificial Sequence
  Antisense oligo
caagaccagccugggcaaca

SEQ ID NO: 8048 - RNA, 20 nt, Artificial Sequence
  Antisense oligo
ucaagaccagccugggcaac

SEQ ID NO: 8049 - RNA, 20 nt, Artificial Sequence
  Antisense oligo
uucaagaccagccugggcaa

SEQ ID NO: 8050 - RNA, 20 nt, Artificial Sequence
  Antisense oligo
guucaagaccagccugggca

SEQ ID NO: 8051 - RNA, 20 nt, Artificial Sequence
  Antisense oligo
aguucaagaccagccugggc

SEQ ID NO: 8052 - RNA, 20 nt, Artificial Sequence
  Antisense oligo
gaguucaagaccagccuggg

SEQ ID NO: 8053 - RNA, 20 nt, Artificial Sequence
  Antisense oligo
ggaguucaagaccagccugg

SEQ ID NO: 8054 - RNA, 20 nt, Artificial Sequence
  Antisense oligo
aggaguucaagaccagccug

SEQ ID NO: 8055 - RNA, 20 nt, Artificial Sequence
  Antisense oligo
caggaguucaagaccagccu

SEQ ID NO: 8056 - RNA, 20 nt, Artificial Sequence
  Antisense oligo
ccaggaguucaagaccagcc

SEQ ID NO: 8057 - RNA, 20 nt, Artificial Sequence
  Antisense oligo
uccaggaguucaagaccagc

SEQ ID NO: 8058 - RNA, 20 nt, Artificial Sequence
  Antisense oligo
guccaggaguucaagaccag

SEQ ID NO: 8059 - RNA, 20 nt, Artificial Sequence
  Antisense oligo
aguccaggaguucaagacca

SEQ ID NO: 8060 - RNA, 20 nt, Artificial Sequence
  Antisense oligo
gaguccaggaguucaagacc

SEQ ID NO: 8061 - RNA, 20 nt, Artificial Sequence
  Antisense oligo
ugaguccaggaguucaagac

SEQ ID NO: 8062 - RNA, 20 nt, Artificial Sequence
  Antisense oligo
ggagguucaugugaguccag

SEQ ID NO: 8063 - RNA, 20 nt, Artificial Sequence
  Antisense oligo
agggagguucaugugagucc

SEQ ID NO: 8064 - RNA, 20 nt, Artificial Sequence
  Antisense oligo
aaggagggagguucauguga

SEQ ID NO: 8065 - RNA, 20 nt, Artificial Sequence
  Antisense oligo
caaggagggagguucaugug

SEQ ID NO: 8066 - RNA, 20 nt, Artificial Sequence
  Antisense oligo
ccuucaaucccaacacuuug

SEQ ID NO: 8067 - RNA, 20 nt, Artificial Sequence
  Antisense oligo
gccuucaaucccaacacuuu

SEQ ID NO: 8068 - RNA, 20 nt, Artificial Sequence
  Antisense oligo
cgguggcucaugccuucaau

SEQ ID NO: 8069 - RNA, 20 nt, Artificial Sequence
  Antisense oligo
gcgguggcucaugccuucaa

SEQ ID NO: 8070 - RNA, 20 nt, Artificial Sequence
  Antisense oligo
ugcgguggcucaugccuuca

SEQ ID NO: 8071 - RNA, 20 nt, Artificial Sequence
  Antisense oligo
agaauaaagacucccaacuc

SEQ ID NO: 8072 - RNA, 20 nt, Artificial Sequence
  Antisense oligo
aaacagaacccuuaccucac

SEQ ID NO: 8073 - RNA, 20 nt, Artificial Sequence
  Antisense oligo
gaaacagaacccuuaccuca

SEQ ID NO: 8074 - RNA, 20 nt, Artificial Sequence
  Antisense oligo
ugaaacagaacccuuaccuc

SEQ ID NO: 8075 - RNA, 20 nt, Artificial Sequence
  Antisense oligo
gagaaugaaacagaacccuu

SEQ ID NO: 8076 - RNA, 20 nt, Artificial Sequence
  Antisense oligo
aacaaaugcugggacaacug

SEQ ID NO: 8077 - RNA, 20 nt, Artificial Sequence
  Antisense oligo
caacaaaugcugggacaacu

SEQ ID NO: 8078 - RNA, 20 nt, Artificial Sequence
  Antisense oligo
ucaacaaaugcugggacaac

SEQ ID NO: 8079 - RNA, 20 nt, Artificial Sequence
  Antisense oligo
uucaacaaaugcugggacaa

SEQ ID NO: 8080 - RNA, 20 nt, Artificial Sequence
  Antisense oligo
uuucaacaaaugcugggaca

SEQ ID NO: 8081 - RNA, 20 nt, Artificial Sequence
  Antisense oligo
cuuucaacaaaugcugggac

SEQ ID NO: 8082 - RNA, 20 nt, Artificial Sequence
  Antisense oligo
agaguccuuucaacaaaugc

SEQ ID NO: 8083 - RNA, 20 nt, Artificial Sequence
  Antisense oligo
gaauguagaguccuuucaac

SEQ ID NO: 8084 - RNA, 20 nt, Artificial Sequence
  Antisense oligo
acagggaauguagaguccuu

SEQ ID NO: 8085 - RNA, 20 nt, Artificial Sequence
  Antisense oligo
caacagggaauguagagucc

SEQ ID NO: 8086 - RNA, 20 nt, Artificial Sequence
  Antisense oligo
ucaacagggaauguagaguc

SEQ ID NO: 8087 - RNA, 20 nt, Artificial Sequence
  Antisense oligo
cucaacagggaauguagagu

SEQ ID NO: 8088 - RNA, 20 nt, Artificial Sequence
  Antisense oligo
acucaacagggaauguagag

SEQ ID NO: 8089 - RNA, 20 nt, Artificial Sequence
  Antisense oligo
caucacucaacagggaaugu

SEQ ID NO: 8090 - RNA, 20 nt, Artificial Sequence
  Antisense oligo
acaucacucaacagggaaug

SEQ ID NO: 8091 - RNA, 20 nt, Artificial Sequence
  Antisense oligo
aacaucacucaacagggaau

SEQ ID NO: 8092 - RNA, 20 nt, Artificial Sequence
  Antisense oligo
caacaucacucaacagggaa

SEQ ID NO: 8093 - RNA, 20 nt, Artificial Sequence
  Antisense oligo
ccaacaucacucaacaggga

SEQ ID NO: 8094 - RNA, 20 nt, Artificial Sequence
  Antisense oligo
gccaacaucacucaacaggg

SEQ ID NO: 8095 - RNA, 20 nt, Artificial Sequence
  Antisense oligo
ugccaacaucacucaacagg

SEQ ID NO: 8096 - RNA, 20 nt, Artificial Sequence
  Antisense oligo
gugccaacaucacucaacag

SEQ ID NO: 8097 - RNA, 20 nt, Artificial Sequence
  Antisense oligo
gacaagagugccaacaucac

SEQ ID NO: 8098 - RNA, 20 nt, Artificial Sequence
  Antisense oligo
caaguagaucaccacauaga

SEQ ID NO: 8099 - RNA, 20 nt, Artificial Sequence
  Antisense oligo
gcaaguagaucaccacauag

SEQ ID NO: 8100 - RNA, 20 nt, Artificial Sequence
  Antisense oligo
gauaggcaaguagaucacca

SEQ ID NO: 8101 - RNA, 20 nt, Artificial Sequence
  Antisense oligo
aggauaggcaaguagaucac

SEQ ID NO: 8102 - RNA, 20 nt, Artificial Sequence
  Antisense oligo
aaggauaggcaaguagauca

SEQ ID NO: 8103 - RNA, 20 nt, Artificial Sequence
  Antisense oligo
caaggauaggcaaguagauc

SEQ ID NO: 8104 - RNA, 20 nt, Artificial Sequence
  Antisense oligo
acaaggauaggcaaguagau

SEQ ID NO: 8105 - RNA, 20 nt, Artificial Sequence
  Antisense oligo
cacaaggauaggcaaguaga

SEQ ID NO: 8106 - RNA, 20 nt, Artificial Sequence
  Antisense oligo
acacaaggauaggcaaguag

SEQ ID NO: 8107 - RNA, 20 nt, Artificial Sequence
  Antisense oligo
gacacaaggauaggcaagua

SEQ ID NO: 8108 - RNA, 20 nt, Artificial Sequence
  Antisense oligo
ugacacaaggauaggcaagu

SEQ ID NO: 8109 - RNA, 20 nt, Artificial Sequence
  Antisense oligo
cugacacaaggauaggcaag

SEQ ID NO: 8110 - RNA, 20 nt, Artificial Sequence
  Antisense oligo
acugacacaaggauaggcaa

SEQ ID NO: 8111 - RNA, 20 nt, Artificial Sequence
  Antisense oligo
uacugacacaaggauaggca

SEQ ID NO: 8112 - RNA, 20 nt, Artificial Sequence
  Antisense oligo
guacugacacaaggauaggc

SEQ ID NO: 8113 - RNA, 20 nt, Artificial Sequence
  Antisense oligo
gguacugacacaaggauagg

SEQ ID NO: 8114 - RNA, 20 nt, Artificial Sequence
  Antisense oligo
guaguccaaacaguguggua

SEQ ID NO: 8115 - RNA, 20 nt, Artificial Sequence
  Antisense oligo
gguaguccaaacaguguggu

SEQ ID NO: 8116 - RNA, 20 nt, Artificial Sequence
  Antisense oligo
ugguaguccaaacagugugg

SEQ ID NO: 8117 - RNA, 20 nt, Artificial Sequence
  Antisense oligo
augguaguccaaacagugug

SEQ ID NO: 8118 - RNA, 20 nt, Artificial Sequence
  Antisense oligo
aaugguaguccaaacagugu

SEQ ID NO: 8119 - RNA, 20 nt, Artificial Sequence
  Antisense oligo
caaugguaguccaaacagug

SEQ ID NO: 8120 - RNA, 20 nt, Artificial Sequence
  Antisense oligo
gcaaugguaguccaaacagu

SEQ ID NO: 8121 - RNA, 20 nt, Artificial Sequence
  Antisense oligo
agcaaugguaguccaaacag

SEQ ID NO: 8122 - RNA, 20 nt, Artificial Sequence
  Antisense oligo
aagcaaugguaguccaaaca

SEQ ID NO: 8123 - RNA, 20 nt, Artificial Sequence
  Antisense oligo
aaagcaaugguaguccaaac

SEQ ID NO: 8124 - RNA, 20 nt, Artificial Sequence
  Antisense oligo
gaaagcaaugguaguccaaa

SEQ ID NO: 8125 - RNA, 20 nt, Artificial Sequence
  Antisense oligo
uagaaagcaaugguagucca

SEQ ID NO: 8126 - RNA, 20 nt, Artificial Sequence
  Antisense oligo
cuagaaagcaaugguagucc

SEQ ID NO: 8127 - RNA, 20 nt, Artificial Sequence
  Antisense oligo
aggacucacacaucccaauu

SEQ ID NO: 8128 - RNA, 20 nt, Artificial Sequence
  Antisense oligo
agcccuaccagaaucccagc

SEQ ID NO: 8129 - RNA, 20 nt, Artificial Sequence
  Antisense oligo
aauaccagcccuaccagaau

SEQ ID NO: 8130 - RNA, 20 nt, Artificial Sequence
  Antisense oligo
gaauaccagcccuaccagaa

SEQ ID NO: 8131 - RNA, 20 nt, Artificial Sequence
  Antisense oligo
ugaauaccagcccuaccaga

SEQ ID NO: 8132 - RNA, 20 nt, Artificial Sequence
  Antisense oligo
uugaauaccagcccuaccag

SEQ ID NO: 8133 - RNA, 20 nt, Artificial Sequence
  Antisense oligo
cauugaauaccagcccuacc

SEQ ID NO: 8134 - RNA, 20 nt, Artificial Sequence
  Antisense oligo
acauugaauaccagcccuac

SEQ ID NO: 8135 - RNA, 20 nt, Artificial Sequence
  Antisense oligo
uacauugaauaccagcccua

SEQ ID NO: 8136 - RNA, 20 nt, Artificial Sequence
  Antisense oligo
auacauugaauaccagcccu

SEQ ID NO: 8137 - RNA, 20 nt, Artificial Sequence
  Antisense oligo
caaugcucuccaaacugauc

SEQ ID NO: 8138 - RNA, 20 nt, Artificial Sequence
  Antisense oligo
gcaaugcucuccaaacugau

SEQ ID NO: 8139 - RNA, 20 nt, Artificial Sequence
  Antisense oligo
acuugggcacuccagcuugg

SEQ ID NO: 8140 - RNA, 20 nt, Artificial Sequence
  Antisense oligo
uacuugggcacuccagcuug

SEQ ID NO: 8141 - RNA, 20 nt, Artificial Sequence
  Antisense oligo
cuacuugggcacuccagcuu

SEQ ID NO: 8142 - RNA, 20 nt, Artificial Sequence
  Antisense oligo
cagcuacuugggcacuccag

SEQ ID NO: 8143 - RNA, 20 nt, Artificial Sequence
  Antisense oligo
ccagcuacuugggcacucca

SEQ ID NO: 8144 - RNA, 20 nt, Artificial Sequence
  Antisense oligo
gacaccuguagucccagcua

SEQ ID NO: 8145 - RNA, 20 nt, Artificial Sequence
  Antisense oligo
uagccaggcaugguggugga

SEQ ID NO: 8146 - RNA, 20 nt, Artificial Sequence
  Antisense oligo
uuagccaggcaugguggugg

SEQ ID NO: 8147 - RNA, 20 nt, Artificial Sequence
  Antisense oligo
auuagccaggcaugguggug

SEQ ID NO: 8148 - RNA, 20 nt, Artificial Sequence
  Antisense oligo
aauuagccaggcaugguggu

SEQ ID NO: 8149 - RNA, 20 nt, Artificial Sequence
  Antisense oligo
aaauuagccaggcauggugg

SEQ ID NO: 8150 - RNA, 20 nt, Artificial Sequence
  Antisense oligo
aaaauuagccaggcauggug

SEQ ID NO: 8151 - RNA, 20 nt, Artificial Sequence
  Antisense oligo
aggaguucgagaccacccug

SEQ ID NO: 8152 - RNA, 20 nt, Artificial Sequence
  Antisense oligo
caggaguucgagaccacccu

SEQ ID NO: 8153 - RNA, 20 nt, Artificial Sequence
  Antisense oligo
ucaggaguucgagaccaccc

SEQ ID NO: 8154 - RNA, 20 nt, Artificial Sequence
  Antisense oligo
gucaggaguucgagaccacc

SEQ ID NO: 8155 - RNA, 20 nt, Artificial Sequence
  Antisense oligo
ugaggucaggaguucgagac

SEQ ID NO: 8156 - RNA, 20 nt, Artificial Sequence
  Antisense oligo
cugaggucaggaguucgaga

SEQ ID NO: 8157 - RNA, 20 nt, Artificial Sequence
  Antisense oligo
ucugaggucaggaguucgag

SEQ ID NO: 8158 - RNA, 20 nt, Artificial Sequence
  Antisense oligo
aucugaggucaggaguucga

SEQ ID NO: 8159 - RNA, 20 nt, Artificial Sequence
  Antisense oligo
caucugaggucaggaguucg

SEQ ID NO: 8160 - RNA, 20 nt, Artificial Sequence
  Antisense oligo
ucaucugaggucaggaguuc

SEQ ID NO: 8161 - RNA, 20 nt, Artificial Sequence
  Antisense oligo
aucaucugaggucaggaguu

SEQ ID NO: 8162 - RNA, 20 nt, Artificial Sequence
  Antisense oligo
gcucaugccuguaaucccag

SEQ ID NO: 8163 - RNA, 20 nt, Artificial Sequence
  Antisense oligo
ggcucaugccuguaauccca

SEQ ID NO: 8164 - RNA, 20 nt, Artificial Sequence
  Antisense oligo
uggcucaugccuguaauccc

SEQ ID NO: 8165 - RNA, 20 nt, Artificial Sequence
  Antisense oligo
guggcucaugccuguaaucc

SEQ ID NO: 8166 - RNA, 20 nt, Artificial Sequence
  Antisense oligo
gguggcucaugccuguaauc

SEQ ID NO: 8167 - RNA, 20 nt, Artificial Sequence
  Antisense oligo
ugguggcucaugccuguaau

SEQ ID NO: 8168 - RNA, 20 nt, Artificial Sequence
  Antisense oligo
augguggcucaugccuguaa

SEQ ID NO: 8169 - RNA, 20 nt, Artificial Sequence
  Antisense oligo
aaugguggcucaugccugua

SEQ ID NO: 8170 - RNA, 20 nt, Artificial Sequence
  Antisense oligo
gaaugguggcucaugccugu

SEQ ID NO: 8171 - RNA, 20 nt, Artificial Sequence
  Antisense oligo
ggaaugguggcucaugccug

SEQ ID NO: 8172 - RNA, 20 nt, Artificial Sequence
  Antisense oligo
aggaaugguggcucaugccu

SEQ ID NO: 8173 - RNA, 20 nt, Artificial Sequence
  Antisense oligo
caggaaugguggcucaugcc

SEQ ID NO: 8174 - RNA, 20 nt, Artificial Sequence
  Antisense oligo
uuccaauuacaauagcaccc

SEQ ID NO: 8175 - RNA, 20 nt, Artificial Sequence
  Antisense oligo
gcaaggaacaaucuggaaac

SEQ ID NO: 8176 - RNA, 20 nt, Artificial Sequence
  Antisense oligo
cauggagcacugugugucua

SEQ ID NO: 8177 - RNA, 20 nt, Artificial Sequence
  Antisense oligo
gcauggagcacugugugucu

SEQ ID NO: 8178 - RNA, 20 nt, Artificial Sequence
  Antisense oligo
cgcauggagcacuguguguc

SEQ ID NO: 8179 - RNA, 20 nt, Artificial Sequence
  Antisense oligo
acgcauggagcacugugugu

SEQ ID NO: 8180 - RNA, 20 nt, Artificial Sequence
  Antisense oligo
gacgcauggagcacugugug

SEQ ID NO: 8181 - RNA, 20 nt, Artificial Sequence
  Antisense oligo
aagacgcauggagcacugug

SEQ ID NO: 8182 - RNA, 20 nt, Artificial Sequence
  Antisense oligo
caagacgcauggagcacugu

SEQ ID NO: 8183 - RNA, 20 nt, Artificial Sequence
  Antisense oligo
acaagacgcauggagcacug

SEQ ID NO: 8184 - RNA, 20 nt, Artificial Sequence
  Antisense oligo
uacaagacgcauggagcacu

SEQ ID NO: 8185 - RNA, 20 nt, Artificial Sequence
  Antisense oligo
gauacaagacgcauggagca

SEQ ID NO: 8186 - RNA, 20 nt, Artificial Sequence
  Antisense oligo
ggauacaagacgcauggagc

SEQ ID NO: 8187 - RNA, 20 nt, Artificial Sequence
  Antisense oligo
aggauacaagacgcauggag

SEQ ID NO: 8188 - RNA, 20 nt, Artificial Sequence
  Antisense oligo
caggauacaagacgcaugga

SEQ ID NO: 8189 - RNA, 20 nt, Artificial Sequence
  Antisense oligo
gcaggauacaagacgcaugg

SEQ ID NO: 8190 - RNA, 20 nt, Artificial Sequence
  Antisense oligo
ugcaggauacaagacgcaug

SEQ ID NO: 8191 - RNA, 20 nt, Artificial Sequence
  Antisense oligo
cacacacaauuugagcuacc

SEQ ID NO: 8192 - RNA, 20 nt, Artificial Sequence
  Antisense oligo
gcacacacaauuugagcuac

SEQ ID NO: 8193 - RNA, 20 nt, Artificial Sequence
  Antisense oligo
caugcacacacacacacaca

SEQ ID NO: 8194 - RNA, 20 nt, Artificial Sequence
  Antisense oligo
ucaugcacacacacacacac

SEQ ID NO: 8195 - RNA, 20 nt, Artificial Sequence
  Antisense oligo
cucaugcacacacacacaca

SEQ ID NO: 8196 - RNA, 20 nt, Artificial Sequence
  Antisense oligo
ucucaugcacacacacacac

SEQ ID NO: 8197 - RNA, 20 nt, Artificial Sequence
  Antisense oligo
cucucaugcacacacacaca

SEQ ID NO: 8198 - RNA, 20 nt, Artificial Sequence
  Antisense oligo
ucucucaugcacacacacac

SEQ ID NO: 8199 - RNA, 20 nt, Artificial Sequence
  Antisense oligo
cagggcaguuaugcaagaga

SEQ ID NO: 8200 - RNA, 20 nt, Artificial Sequence
  Antisense oligo
ccagggcaguuaugcaagag

SEQ ID NO: 8201 - RNA, 20 nt, Artificial Sequence
  Antisense oligo
gccagggcaguuaugcaaga

SEQ ID NO: 8202 - RNA, 20 nt, Artificial Sequence
  Antisense oligo
agccagggcaguuaugcaag

SEQ ID NO: 8203 - RNA, 20 nt, Artificial Sequence
  Antisense oligo
uagccagggcaguuaugcaa

SEQ ID NO: 8204 - RNA, 20 nt, Artificial Sequence
  Antisense oligo
ggcaaaagacugaaaccuuc

SEQ ID NO: 8205 - RNA, 20 nt, Artificial Sequence
  Antisense oligo
gguggcaaaagacugaaacc

SEQ ID NO: 8206 - RNA, 20 nt, Artificial Sequence
  Antisense oligo
cacaccugguggcaaaagac

SEQ ID NO: 8207 - RNA, 20 nt, Artificial Sequence
  Antisense oligo
ucacaccugguggcaaaaga

SEQ ID NO: 8208 - RNA, 20 nt, Artificial Sequence
  Antisense oligo
caucacaccugguggcaaaa

SEQ ID NO: 8209 - RNA, 20 nt, Artificial Sequence
  Antisense oligo
acaucacaccugguggcaaa

SEQ ID NO: 8210 - RNA, 20 nt, Artificial Sequence
  Antisense oligo
gacaucacaccugguggcaa

SEQ ID NO: 8211 - RNA, 20 nt, Artificial Sequence
  Antisense oligo
ugacaucacaccugguggca

SEQ ID NO: 8212 - RNA, 20 nt, Artificial Sequence
  Antisense oligo
uugacaucacaccugguggc

SEQ ID NO: 8213 - RNA, 20 nt, Artificial Sequence
  Antisense oligo
cguugacaucacaccuggug

SEQ ID NO: 8214 - RNA, 20 nt, Artificial Sequence
  Antisense oligo
cacguugacaucacaccugg

SEQ ID NO: 8215 - RNA, 20 nt, Artificial Sequence
  Antisense oligo
ucacguugacaucacaccug

SEQ ID NO: 8216 - RNA, 20 nt, Artificial Sequence
  Antisense oligo
cucacguugacaucacaccu

SEQ ID NO: 8217 - RNA, 20 nt, Artificial Sequence
  Antisense oligo
gcucacguugacaucacacc

SEQ ID NO: 8218 - RNA, 20 nt, Artificial Sequence
  Antisense oligo
agcucacguugacaucacac

SEQ ID NO: 8219 - RNA, 20 nt, Artificial Sequence
  Antisense oligo
aagcucacguugacaucaca

SEQ ID NO: 8220 - RNA, 20 nt, Artificial Sequence
  Antisense oligo
aaagcucacguugacaucac

SEQ ID NO: 8221 - RNA, 20 nt, Artificial Sequence
  Antisense oligo
aaaagcucacguugacauca

SEQ ID NO: 8222 - RNA, 20 nt, Artificial Sequence
  Antisense oligo
gaaaagcucacguugacauc

SEQ ID NO: 8223 - RNA, 20 nt, Artificial Sequence
  Antisense oligo
ugaaaagcucacguugacau

SEQ ID NO: 8224 - RNA, 20 nt, Artificial Sequence
  Antisense oligo
augaaaagcucacguugaca

SEQ ID NO: 8225 - RNA, 20 nt, Artificial Sequence
  Antisense oligo
uaugaaaagcucacguugac

SEQ ID NO: 8226 - RNA, 20 nt, Artificial Sequence
  Antisense oligo
cuaugaaaagcucacguuga

SEQ ID NO: 8227 - RNA, 20 nt, Artificial Sequence
  Antisense oligo
uccacaaacugauaaagggc

SEQ ID NO: 8228 - RNA, 20 nt, Artificial Sequence
  Antisense oligo
uuccacaaacugauaaaggg

SEQ ID NO: 8229 - RNA, 20 nt, Artificial Sequence
  Antisense oligo
cuuccacaaacugauaaagg

SEQ ID NO: 8230 - RNA, 20 nt, Artificial Sequence
  Antisense oligo
aggaacuuccacaaacugau

SEQ ID NO: 8231 - RNA, 20 nt, Artificial Sequence
  Antisense oligo
aaaggaacuuccacaaacug

SEQ ID NO: 8232 - RNA, 20 nt, Artificial Sequence
  Antisense oligo
auacgggaaaagcauuugac

SEQ ID NO: 8233 - RNA, 20 nt, Artificial Sequence
  Antisense oligo
gauacgggaaaagcauuuga

SEQ ID NO: 8234 - RNA, 20 nt, Artificial Sequence
  Antisense oligo
agauacgggaaaagcauuug

SEQ ID NO: 8235 - RNA, 20 nt, Artificial Sequence
  Antisense oligo
guagauacgggaaaagcauu

SEQ ID NO: 8236 - RNA, 20 nt, Artificial Sequence
  Antisense oligo
aguagauacgggaaaagcau

SEQ ID NO: 8237 - RNA, 20 nt, Artificial Sequence
  Antisense oligo
caguagauacgggaaaagca

SEQ ID NO: 8238 - RNA, 20 nt, Artificial Sequence
  Antisense oligo
ucaguagauacgggaaaagc

SEQ ID NO: 8239 - RNA, 20 nt, Artificial Sequence
  Antisense oligo
uucaguagauacgggaaaag

SEQ ID NO: 8240 - RNA, 20 nt, Artificial Sequence
  Antisense oligo
cauuucaguagauacgggaa

SEQ ID NO: 8241 - RNA, 20 nt, Artificial Sequence
  Antisense oligo
ucauuucaguagauacggga

SEQ ID NO: 8242 - RNA, 20 nt, Artificial Sequence
  Antisense oligo
ucagggaugaaagguugauu

SEQ ID NO: 8243 - RNA, 20 nt, Artificial Sequence
  Antisense oligo
cucagggaugaaagguugau

SEQ ID NO: 8244 - RNA, 20 nt, Artificial Sequence
  Antisense oligo
ucucagggaugaaagguuga

SEQ ID NO: 8245 - RNA, 20 nt, Artificial Sequence
  Antisense oligo
caccacgaucaaguguaauu

SEQ ID NO: 8246 - RNA, 20 nt, Artificial Sequence
  Antisense oligo
ggaacuauacaccacgauca

SEQ ID NO: 8247 - RNA, 20 nt, Artificial Sequence
  Antisense oligo
aggaacuauacaccacgauc

SEQ ID NO: 8248 - RNA, 20 nt, Artificial Sequence
  Antisense oligo
aaggaacuauacaccacgau

SEQ ID NO: 8249 - RNA, 20 nt, Artificial Sequence
  Antisense oligo
aaaggaacuauacaccacga

SEQ ID NO: 8250 - RNA, 20 nt, Artificial Sequence
  Antisense oligo
uaaaggaacuauacaccacg

SEQ ID NO: 8251 - RNA, 20 nt, Artificial Sequence
  Antisense oligo
auaaccagucacccuccuuc

SEQ ID NO: 8252 - RNA, 20 nt, Artificial Sequence
  Antisense oligo
cauaaccagucacccuccuu

SEQ ID NO: 8253 - RNA, 20 nt, Artificial Sequence
  Antisense oligo
aacauaaccagucacccucc

SEQ ID NO: 8254 - RNA, 20 nt, Artificial Sequence
  Antisense oligo
caacauaaccagucacccuc

SEQ ID NO: 8255 - RNA, 20 nt, Artificial Sequence
  Antisense oligo
accaacauaaccagucaccc

SEQ ID NO: 8256 - RNA, 20 nt, Artificial Sequence
  Antisense oligo
caccaacauaaccagucacc

SEQ ID NO: 8257 - RNA, 20 nt, Artificial Sequence
  Antisense oligo
cacaccaacauaaccaguca

SEQ ID NO: 8258 - RNA, 20 nt, Artificial Sequence
  Antisense oligo
acacaccaacauaaccaguc

SEQ ID NO: 8259 - RNA, 20 nt, Artificial Sequence
  Antisense oligo
cacacaccaacauaaccagu

SEQ ID NO: 8260 - RNA, 20 nt, Artificial Sequence
  Antisense oligo
acacacaccaacauaaccag

SEQ ID NO: 8261 - RNA, 20 nt, Artificial Sequence
  Antisense oligo
agcaccagagaugugaagac

SEQ ID NO: 8262 - RNA, 20 nt, Artificial Sequence
  Antisense oligo
cagcaccagagaugugaaga

SEQ ID NO: 8263 - RNA, 20 nt, Artificial Sequence
  Antisense oligo
uccagcaccagagaugugaa

SEQ ID NO: 8264 - RNA, 20 nt, Artificial Sequence
  Antisense oligo
aguguccagcaccagagaug

SEQ ID NO: 8265 - RNA, 20 nt, Artificial Sequence
  Antisense oligo
aaguguccagcaccagagau

SEQ ID NO: 8266 - RNA, 20 nt, Artificial Sequence
  Antisense oligo
cuacucgauagcauuucuga

SEQ ID NO: 8267 - RNA, 20 nt, Artificial Sequence
  Antisense oligo
ccuacucgauagcauuucug

SEQ ID NO: 8268 - RNA, 20 nt, Artificial Sequence
  Antisense oligo
accuacucgauagcauuucu

SEQ ID NO: 8269 - RNA, 20 nt, Artificial Sequence
  Antisense oligo
uaccuacucgauagcauuuc

SEQ ID NO: 8270 - RNA, 20 nt, Artificial Sequence
  Antisense oligo
caaauuaccuacucgauagc

SEQ ID NO: 8271 - RNA, 20 nt, Artificial Sequence
  Antisense oligo
gcaaauuaccuacucgauag

SEQ ID NO: 8272 - RNA, 20 nt, Artificial Sequence
  Antisense oligo
ggucugagacuacaagaaaa

SEQ ID NO: 8273 - RNA, 20 nt, Artificial Sequence
  Antisense oligo
uggucugagacuacaagaaa

SEQ ID NO: 8274 - RNA, 20 nt, Artificial Sequence
  Antisense oligo
cuggucugagacuacaagaa

SEQ ID NO: 8275 - RNA, 20 nt, Artificial Sequence
  Antisense oligo
acuggucugagacuacaaga

SEQ ID NO: 8276 - RNA, 20 nt, Artificial Sequence
  Antisense oligo
auacuggucugagacuacaa

SEQ ID NO: 8277 - RNA, 20 nt, Artificial Sequence
  Antisense oligo
gauacuggucugagacuaca

SEQ ID NO: 8278 - RNA, 20 nt, Artificial Sequence
  Antisense oligo
aggauacuggucugagacua

SEQ ID NO: 8279 - RNA, 20 nt, Artificial Sequence
  Antisense oligo
ugaaggauacuggucugaga

SEQ ID NO: 8280 - RNA, 20 nt, Artificial Sequence
  Antisense oligo
ccugaaggauacuggucuga

SEQ ID NO: 8281 - RNA, 20 nt, Artificial Sequence
  Antisense oligo
aaaucagaguaagagaaccc

SEQ ID NO: 8282 - RNA, 20 nt, Artificial Sequence
  Antisense oligo
ccgcaaaucagaguaagaga

SEQ ID NO: 8283 - RNA, 20 nt, Artificial Sequence
  Antisense oligo
uccgcaaaucagaguaagag

SEQ ID NO: 8284 - RNA, 20 nt, Artificial Sequence
  Antisense oligo
uuccgcaaaucagaguaaga

SEQ ID NO: 8285 - RNA, 20 nt, Artificial Sequence
  Antisense oligo
uuuccgcaaaucagaguaag

SEQ ID NO: 8286 - RNA, 20 nt, Artificial Sequence
  Antisense oligo
cagacaagacgaugccaaau

SEQ ID NO: 8287 - RNA, 20 nt, Artificial Sequence
  Antisense oligo
gcagacaagacgaugccaaa

SEQ ID NO: 8288 - RNA, 20 nt, Artificial Sequence
  Antisense oligo
agcagacaagacgaugccaa

SEQ ID NO: 8289 - RNA, 20 nt, Artificial Sequence
  Antisense oligo
cagcagacaagacgaugcca

SEQ ID NO: 8290 - RNA, 20 nt, Artificial Sequence
  Antisense oligo
acagcagacaagacgaugcc

SEQ ID NO: 8291 - RNA, 20 nt, Artificial Sequence
  Antisense oligo
cacagcagacaagacgaugc

SEQ ID NO: 8292 - RNA, 20 nt, Artificial Sequence
  Antisense oligo
gaucacagcagacaagacga

SEQ ID NO: 8293 - RNA, 20 nt, Artificial Sequence
  Antisense oligo
uaggccaggacuuagugauc

SEQ ID NO: 8294 - RNA, 20 nt, Artificial Sequence
  Antisense oligo
aaugucaucgaaguuguccg

SEQ ID NO: 8295 - RNA, 20 nt, Artificial Sequence
  Antisense oligo
aaaugucaucgaaguugucc

SEQ ID NO: 8296 - RNA, 20 nt, Artificial Sequence
  Antisense oligo
acgugcuugacaucugccaa

SEQ ID NO: 8297 - RNA, 20 nt, Artificial Sequence
  Antisense oligo
gacgugcuugacaucugcca

SEQ ID NO: 8298 - RNA, 20 nt, Artificial Sequence
  Antisense oligo
aagacgugcuugacaucugc

SEQ ID NO: 8299 - RNA, 20 nt, Artificial Sequence
  Antisense oligo
gaagacgugcuugacaucug

SEQ ID NO: 8300 - RNA, 20 nt, Artificial Sequence
  Antisense oligo
ugaagacgugcuugacaucu

SEQ ID NO: 8301 - RNA, 20 nt, Artificial Sequence
  Antisense oligo
cugaagacgugcuugacauc

SEQ ID NO: 8302 - RNA, 20 nt, Artificial Sequence
  Antisense oligo
ucugaagacgugcuugacau

SEQ ID NO: 8303 - RNA, 20 nt, Artificial Sequence
  Antisense oligo
aucugaagacgugcuugaca

SEQ ID NO: 8304 - RNA, 20 nt, Artificial Sequence
  Antisense oligo
aaucugaagacgugcuugac

SEQ ID NO: 8305 - RNA, 20 nt, Artificial Sequence
  Antisense oligo
caaucugaagacgugcuuga

SEQ ID NO: 8306 - RNA, 20 nt, Artificial Sequence
  Antisense oligo
acaaucugaagacgugcuug

SEQ ID NO: 8307 - RNA, 20 nt, Artificial Sequence
  Antisense oligo
cacaaucugaagacgugcuu

SEQ ID NO: 8308 - RNA, 20 nt, Artificial Sequence
  Antisense oligo
acacaaucugaagacgugcu

SEQ ID NO: 8309 - RNA, 20 nt, Artificial Sequence
  Antisense oligo
cacacaaucugaagacgugc

SEQ ID NO: 8310 - RNA, 20 nt, Artificial Sequence
  Antisense oligo
ccacacaaucugaagacgug

SEQ ID NO: 8311 - RNA, 20 nt, Artificial Sequence
  Antisense oligo
accacacaaucugaagacgu

SEQ ID NO: 8312 - RNA, 20 nt, Artificial Sequence
  Antisense oligo
auaccacacaaucugaagac

SEQ ID NO: 8313 - RNA, 20 nt, Artificial Sequence
  Antisense oligo
acauaccacacaaucugaag

SEQ ID NO: 8314 - RNA, 20 nt, Artificial Sequence
  Antisense oligo
caaacauaccacacaaucug

SEQ ID NO: 8315 - RNA, 20 nt, Artificial Sequence
  Antisense oligo
cgcaaacauaccacacaauc

SEQ ID NO: 8316 - RNA, 20 nt, Artificial Sequence
  Antisense oligo
ccgcaaacauaccacacaau

SEQ ID NO: 8317 - RNA, 20 nt, Artificial Sequence
  Antisense oligo
cccgcaaacauaccacacaa

SEQ ID NO: 8318 - RNA, 20 nt, Artificial Sequence
  Antisense oligo
cucccgcaaacauaccacac

SEQ ID NO: 8319 - RNA, 20 nt, Artificial Sequence
  Antisense oligo
acucccgcaaacauaccaca

SEQ ID NO: 8320 - RNA, 20 nt, Artificial Sequence
  Antisense oligo
cacucccgcaaacauaccac

SEQ ID NO: 8321 - RNA, 20 nt, Artificial Sequence
  Antisense oligo
gcacucccgcaaacauacca

SEQ ID NO: 8322 - RNA, 20 nt, Artificial Sequence
  Antisense oligo
agcacucccgcaaacauacc

SEQ ID NO: 8323 - RNA, 20 nt, Artificial Sequence
  Antisense oligo
cagcacucccgcaaacauac

SEQ ID NO: 8324 - RNA, 20 nt, Artificial Sequence
  Antisense oligo
ccagcacucccgcaaacaua

SEQ ID NO: 8325 - RNA, 20 nt, Artificial Sequence
  Antisense oligo
uucccagcacucccgcaaac

SEQ ID NO: 8326 - RNA, 20 nt, Artificial Sequence
  Antisense oligo
guucccagcacucccgcaaa

SEQ ID NO: 8327 - RNA, 20 nt, Artificial Sequence
  Antisense oligo
ugauguucccagcacucccg

SEQ ID NO: 8328 - RNA, 20 nt, Artificial Sequence
  Antisense oligo
gccugagcugauguucccag

SEQ ID NO: 8329 - RNA, 20 nt, Artificial Sequence
  Antisense oligo
accuugccugagcugauguu

SEQ ID NO: 8330 - RNA, 20 nt, Artificial Sequence
  Antisense oligo
caccuugccugagcugaugu

SEQ ID NO: 8331 - RNA, 20 nt, Artificial Sequence
  Antisense oligo
cugccucccaccuuucccaa

SEQ ID NO: 8332 - RNA, 20 nt, Artificial Sequence
  Antisense oligo
ucugccucccaccuuuccca

SEQ ID NO: 8333 - RNA, 20 nt, Artificial Sequence
  Antisense oligo
ucuucugccucccaccuuuc

SEQ ID NO: 8334 - RNA, 20 nt, Artificial Sequence
  Antisense oligo
ucaaaucuucugccucccac

SEQ ID NO: 8335 - RNA, 20 nt, Artificial Sequence
  Antisense oligo
augucaaaucuucugccucc

SEQ ID NO: 8336 - RNA, 20 nt, Artificial Sequence
  Antisense oligo
caugucaaaucuucugccuc

SEQ ID NO: 8337 - RNA, 20 nt, Artificial Sequence
  Antisense oligo
ucaugucaaaucuucugccu

SEQ ID NO: 8338 - RNA, 20 nt, Artificial Sequence
  Antisense oligo
gcccaucccaauucaguauc

SEQ ID NO: 8339 - RNA, 20 nt, Artificial Sequence
  Antisense oligo
cagcccaucccaauucagua

SEQ ID NO: 8340 - RNA, 20 nt, Artificial Sequence
  Antisense oligo
ucagcccaucccaauucagu

SEQ ID NO: 8341 - RNA, 20 nt, Artificial Sequence
  Antisense oligo
aucagcccaucccaauucag

SEQ ID NO: 8342 - RNA, 20 nt, Artificial Sequence
  Antisense oligo
caucagcccaucccaauuca

SEQ ID NO: 8343 - RNA, 20 nt, Artificial Sequence
  Antisense oligo
acaucagcccaucccaauuc

SEQ ID NO: 8344 - RNA, 20 nt, Artificial Sequence
  Antisense oligo
aacaucagcccaucccaauu

SEQ ID NO: 8345 - RNA, 20 nt, Artificial Sequence
  Antisense oligo
caaacaucagcccaucccaa

SEQ ID NO: 8346 - RNA, 20 nt, Artificial Sequence
  Antisense oligo
ucaaacaucagcccauccca

SEQ ID NO: 8347 - RNA, 20 nt, Artificial Sequence
  Antisense oligo
uugucaaacaucagcccauc

SEQ ID NO: 8348 - RNA, 20 nt, Artificial Sequence
  Antisense oligo
ugcagccuuugucaaacauc

SEQ ID NO: 8349 - RNA, 20 nt, Artificial Sequence
  Antisense oligo
ggucucucuguccaaacugc

SEQ ID NO: 8350 - RNA, 20 nt, Artificial Sequence
  Antisense oligo
gggucucucuguccaaacug

SEQ ID NO: 8351 - RNA, 20 nt, Artificial Sequence
  Antisense oligo
cagggucucucuguccaaac

SEQ ID NO: 8352 - RNA, 20 nt, Artificial Sequence
  Antisense oligo
cgcaagacacucugagccuu

SEQ ID NO: 8353 - RNA, 20 nt, Artificial Sequence
  Antisense oligo
acgcaagacacucugagccu

SEQ ID NO: 8354 - RNA, 20 nt, Artificial Sequence
  Antisense oligo
aacgcaagacacucugagcc

SEQ ID NO: 8355 - RNA, 20 nt, Artificial Sequence
  Antisense oligo
caacgcaagacacucugagc

SEQ ID NO: 8356 - RNA, 20 nt, Artificial Sequence
  Antisense oligo
acaacgcaagacacucugag

SEQ ID NO: 8357 - RNA, 20 nt, Artificial Sequence
  Antisense oligo
uacaacgcaagacacucuga

SEQ ID NO: 8358 - RNA, 20 nt, Artificial Sequence
  Antisense oligo
uuacaacgcaagacacucug

SEQ ID NO: 8359 - RNA, 20 nt, Artificial Sequence
  Antisense oligo
uuuacaacgcaagacacucu

SEQ ID NO: 8360 - RNA, 20 nt, Artificial Sequence
  Antisense oligo
auuuacaacgcaagacacuc

SEQ ID NO: 8361 - RNA, 20 nt, Artificial Sequence
  Antisense oligo
guggcuguuagcauuaguua

SEQ ID NO: 8362 - RNA, 20 nt, Artificial Sequence
  Antisense oligo
aguggcuguuagcauuaguu

SEQ ID NO: 8363 - RNA, 20 nt, Artificial Sequence
  Antisense oligo
uaguggcuguuagcauuagu

SEQ ID NO: 8364 - RNA, 20 nt, Artificial Sequence
  Antisense oligo
auaguggcuguuagcauuag

SEQ ID NO: 8365 - RNA, 20 nt, Artificial Sequence
  Antisense oligo
ugaauaguggcuguuagcau

SEQ ID NO: 8366 - RNA, 20 nt, Artificial Sequence
  Antisense oligo
augaauaguggcuguuagca

SEQ ID NO: 8367 - RNA, 20 nt, Artificial Sequence
  Antisense oligo
cuaggguacagcaagcauuc

SEQ ID NO: 8368 - RNA, 20 nt, Artificial Sequence
  Antisense oligo
gcuaggguacagcaagcauu

SEQ ID NO: 8369 - RNA, 20 nt, Artificial Sequence
  Antisense oligo
cgcuaggguacagcaagcau

SEQ ID NO: 8370 - RNA, 20 nt, Artificial Sequence
  Antisense oligo
gucgcuaggguacagcaagc

SEQ ID NO: 8371 - RNA, 20 nt, Artificial Sequence
  Antisense oligo
agucgcuaggguacagcaag

SEQ ID NO: 8372 - RNA, 20 nt, Artificial Sequence
  Antisense oligo
cagucgcuaggguacagcaa

SEQ ID NO: 8373 - RNA, 20 nt, Artificial Sequence
  Antisense oligo
acagucgcuaggguacagca

SEQ ID NO: 8374 - RNA, 20 nt, Artificial Sequence
  Antisense oligo
cacagucgcuaggguacagc

SEQ ID NO: 8375 - RNA, 20 nt, Artificial Sequence
  Antisense oligo
gcacagucgcuaggguacag

SEQ ID NO: 8376 - RNA, 20 nt, Artificial Sequence
  Antisense oligo
agcacagucgcuaggguaca

SEQ ID NO: 8377 - RNA, 20 nt, Artificial Sequence
  Antisense oligo
cagcacagucgcuaggguac

SEQ ID NO: 8378 - RNA, 20 nt, Artificial Sequence
  Antisense oligo
ccagcacagucgcuagggua

SEQ ID NO: 8379 - RNA, 20 nt, Artificial Sequence
  Antisense oligo
uucccuugcgacccagcaca

SEQ ID NO: 8380 - RNA, 20 nt, Artificial Sequence
  Antisense oligo
acuucccuugcgacccagca

SEQ ID NO: 8381 - RNA, 20 nt, Artificial Sequence
  Antisense oligo
uuguuucaagggcacuuccc

SEQ ID NO: 8382 - RNA, 20 nt, Artificial Sequence
  Antisense oligo
guuguuucaagggcacuucc

SEQ ID NO: 8383 - RNA, 20 nt, Artificial Sequence
  Antisense oligo
aggguuguuucaagggcacu

SEQ ID NO: 8384 - RNA, 20 nt, Artificial Sequence
  Antisense oligo
gaaggguuguuucaagggca

SEQ ID NO: 8385 - RNA, 20 nt, Artificial Sequence
  Antisense oligo
ucagaaggguuguuucaagg

SEQ ID NO: 8386 - RNA, 20 nt, Artificial Sequence
  Antisense oligo
cuuucagaaggguuguuuca

SEQ ID NO: 8387 - RNA, 20 nt, Artificial Sequence
  Antisense oligo
acuuucagaaggguuguuuc

SEQ ID NO: 8388 - RNA, 20 nt, Artificial Sequence
  Antisense oligo
gacuuucagaaggguuguuu

SEQ ID NO: 8389 - RNA, 20 nt, Artificial Sequence
  Antisense oligo
gggacuuucagaaggguugu

SEQ ID NO: 8390 - RNA, 20 nt, Artificial Sequence
  Antisense oligo
uuccugaucugaaaacuggg

SEQ ID NO: 8391 - RNA, 20 nt, Artificial Sequence
  Antisense oligo
cuuugagaccuuagguaagu

SEQ ID NO: 8392 - RNA, 20 nt, Artificial Sequence
  Antisense oligo
uaccugggucuggauuuuag

SEQ ID NO: 8393 - RNA, 20 nt, Artificial Sequence
  Antisense oligo
cauaccugggucuggauuuu

SEQ ID NO: 8394 - RNA, 20 nt, Artificial Sequence
  Antisense oligo
acauaccugggucuggauuu

SEQ ID NO: 8395 - RNA, 20 nt, Artificial Sequence
  Antisense oligo
ggcuuggacauucuauauug

SEQ ID NO: 8396 - RNA, 20 nt, Artificial Sequence
  Antisense oligo
guuggcuuggacauucuaua

SEQ ID NO: 8397 - RNA, 20 nt, Artificial Sequence
  Antisense oligo
uguuggcuuggacauucuau

SEQ ID NO: 8398 - RNA, 20 nt, Artificial Sequence
  Antisense oligo
caucaauguuggcuuggaca

SEQ ID NO: 8399 - RNA, 20 nt, Artificial Sequence
  Antisense oligo
ucaucaauguuggcuuggac

SEQ ID NO: 8400 - RNA, 20 nt, Artificial Sequence
  Antisense oligo
ggucaucaauguuggcuugg

SEQ ID NO: 8401 - RNA, 20 nt, Artificial Sequence
  Antisense oligo
aggucaucaauguuggcuug

SEQ ID NO: 8402 - RNA, 20 nt, Artificial Sequence
  Antisense oligo
gaggucaucaauguuggcuu

SEQ ID NO: 8403 - RNA, 20 nt, Artificial Sequence
  Antisense oligo
ugaggucaucaauguuggcu

SEQ ID NO: 8404 - RNA, 20 nt, Artificial Sequence
  Antisense oligo
acuuucuguugaggucauca

SEQ ID NO: 8405 - RNA, 20 nt, Artificial Sequence
  Antisense oligo
cacuuucuguugaggucauc

SEQ ID NO: 8406 - RNA, 20 nt, Artificial Sequence
  Antisense oligo
acuucacuuucuguugaggu

SEQ ID NO: 8407 - RNA, 20 nt, Artificial Sequence
  Antisense oligo
uacuucacuuucuguugagg

SEQ ID NO: 8408 - RNA, 20 nt, Artificial Sequence
  Antisense oligo
guacuucacuuucuguugag

SEQ ID NO: 8409 - RNA, 20 nt, Artificial Sequence
  Antisense oligo
ucccuccuugaccacaaaac

SEQ ID NO: 8410 - RNA, 20 nt, Artificial Sequence
  Antisense oligo
cucccuccuugaccacaaaa

SEQ ID NO: 8411 - RNA, 20 nt, Artificial Sequence
  Antisense oligo
ucucccuccuugaccacaaa

SEQ ID NO: 8412 - RNA, 20 nt, Artificial Sequence
  Antisense oligo
ucucucccuccuugaccaca

SEQ ID NO: 8413 - RNA, 20 nt, Artificial Sequence
  Antisense oligo
cucucucccuccuugaccac

SEQ ID NO: 8414 - RNA, 20 nt, Artificial Sequence
  Antisense oligo
ucucucucccuccuugacca

SEQ ID NO: 8415 - RNA, 20 nt, Artificial Sequence
  Antisense oligo
cucucucucccuccuugacc

SEQ ID NO: 8416 - RNA, 20 nt, Artificial Sequence
  Antisense oligo
ucucucucucccuccuugac

SEQ ID NO: 8417 - RNA, 20 nt, Artificial Sequence
  Antisense oligo
cucucucucucccuccuuga

SEQ ID NO: 8418 - RNA, 20 nt, Artificial Sequence
  Antisense oligo
ucucucucucucccuccuug

SEQ ID NO: 8419 - RNA, 20 nt, Artificial Sequence
  Antisense oligo
gucucucucucucccuccuu

SEQ ID NO: 8420 - RNA, 20 nt, Artificial Sequence
  Antisense oligo
aaugucucucucucucccuc

SEQ ID NO: 8421 - RNA, 20 nt, Artificial Sequence
  Antisense oligo
gaaugucucucucucucccu

SEQ ID NO: 8422 - RNA, 20 nt, Artificial Sequence
  Antisense oligo
ggaaugucucucucucuccc

SEQ ID NO: 8423 - RNA, 20 nt, Artificial Sequence
  Antisense oligo
uggaaugucucucucucucc

SEQ ID NO: 8424 - RNA, 20 nt, Artificial Sequence
  Antisense oligo
auggaaugucucucucucuc

SEQ ID NO: 8425 - RNA, 20 nt, Artificial Sequence
  Antisense oligo
gauggaaugucucucucucu

SEQ ID NO: 8426 - RNA, 20 nt, Artificial Sequence
  Antisense oligo
aggauggaaugucucucucu

SEQ ID NO: 8427 - RNA, 20 nt, Artificial Sequence
  Antisense oligo
uaggauggaaugucucucuc

SEQ ID NO: 8428 - RNA, 20 nt, Artificial Sequence
  Antisense oligo
uuaggauggaaugucucucu

SEQ ID NO: 8429 - RNA, 20 nt, Artificial Sequence
  Antisense oligo
uuuaggauggaaugucucuc

SEQ ID NO: 8430 - RNA, 20 nt, Artificial Sequence
  Antisense oligo
cgccaacuggacucuaacgu

SEQ ID NO: 8431 - RNA, 20 nt, Artificial Sequence
  Antisense oligo
acgccaacuggacucuaacg

SEQ ID NO: 8432 - RNA, 20 nt, Artificial Sequence
  Antisense oligo
cacgccaacuggacucuaac

SEQ ID NO: 8433 - RNA, 20 nt, Artificial Sequence
  Antisense oligo
acacgccaacuggacucuaa

SEQ ID NO: 8434 - RNA, 20 nt, Artificial Sequence
  Antisense oligo
cacacgccaacuggacucua

SEQ ID NO: 8435 - RNA, 20 nt, Artificial Sequence
  Antisense oligo
ucacacgccaacuggacucu

SEQ ID NO: 8436 - RNA, 20 nt, Artificial Sequence
  Antisense oligo
cucacacgccaacuggacuc

SEQ ID NO: 8437 - RNA, 20 nt, Artificial Sequence
  Antisense oligo
ucucacacgccaacuggacu

SEQ ID NO: 8438 - RNA, 20 nt, Artificial Sequence
  Antisense oligo
gucucacacgccaacuggac

SEQ ID NO: 8439 - RNA, 20 nt, Artificial Sequence
  Antisense oligo
aggucucacacgccaacugg

SEQ ID NO: 8440 - RNA, 20 nt, Artificial Sequence
  Antisense oligo
aaggucucacacgccaacug

SEQ ID NO: 8441 - RNA, 20 nt, Artificial Sequence
  Antisense oligo
uaaggucucacacgccaacu

SEQ ID NO: 8442 - RNA, 20 nt, Artificial Sequence
  Antisense oligo
cuaaggucucacacgccaac

SEQ ID NO: 8443 - RNA, 20 nt, Artificial Sequence
  Antisense oligo
ucuaaggucucacacgccaa

SEQ ID NO: 8444 - RNA, 20 nt, Artificial Sequence
  Antisense oligo
aucuaaggucucacacgcca

SEQ ID NO: 8445 - RNA, 20 nt, Artificial Sequence
  Antisense oligo
aaucuaaggucucacacgcc

SEQ ID NO: 8446 - RNA, 20 nt, Artificial Sequence
  Antisense oligo
gaaucuaaggucucacacgc

SEQ ID NO: 8447 - RNA, 20 nt, Artificial Sequence
  Antisense oligo
ugaaucuaaggucucacacg

SEQ ID NO: 8448 - RNA, 20 nt, Artificial Sequence
  Antisense oligo
augaaucuaaggucucacac

SEQ ID NO: 8449 - RNA, 20 nt, Artificial Sequence
  Antisense oligo
cagcgccuucucacugaaag

SEQ ID NO: 8450 - RNA, 20 nt, Artificial Sequence
  Antisense oligo
ccagcgccuucucacugaaa

SEQ ID NO: 8451 - RNA, 20 nt, Artificial Sequence
  Antisense oligo
uccagcgccuucucacugaa

SEQ ID NO: 8452 - RNA, 20 nt, Artificial Sequence
  Antisense oligo
auccagcgccuucucacuga

SEQ ID NO: 8453 - RNA, 20 nt, Artificial Sequence
  Antisense oligo
acauccagcgccuucucacu

SEQ ID NO: 8454 - RNA, 20 nt, Artificial Sequence
  Antisense oligo
cacauccagcgccuucucac

SEQ ID NO: 8455 - RNA, 20 nt, Artificial Sequence
  Antisense oligo
ccacauccagcgccuucuca

SEQ ID NO: 8456 - RNA, 20 nt, Artificial Sequence
  Antisense oligo
uccacauccagcgccuucuc

SEQ ID NO: 8457 - RNA, 20 nt, Artificial Sequence
  Antisense oligo
uuccacauccagcgccuucu

SEQ ID NO: 8458 - RNA, 20 nt, Artificial Sequence
  Antisense oligo
guuccacauccagcgccuuc

SEQ ID NO: 8459 - RNA, 20 nt, Artificial Sequence
  Antisense oligo
uguuccacauccagcgccuu

SEQ ID NO: 8460 - RNA, 20 nt, Artificial Sequence
  Antisense oligo
cuguuccacauccagcgccu

SEQ ID NO: 8461 - RNA, 20 nt, Artificial Sequence
  Antisense oligo
uuuggcuguuccacauccag

SEQ ID NO: 8462 - RNA, 20 nt, Artificial Sequence
  Antisense oligo
auuuuggcuguuccacaucc

SEQ ID NO: 8463 - RNA, 20 nt, Artificial Sequence
  Antisense oligo
agcauugauuuuggcuguuc

SEQ ID NO: 8464 - RNA, 20 nt, Artificial Sequence
  Antisense oligo
gcucagcauugauuuuggcu

SEQ ID NO: 8465 - RNA, 20 nt, Artificial Sequence
  Antisense oligo
uaggaagcucagcauugauu

SEQ ID NO: 8466 - RNA, 20 nt, Artificial Sequence
  Antisense oligo
guaggaagcucagcauugau

SEQ ID NO: 8467 - RNA, 20 nt, Artificial Sequence
  Antisense oligo
uguaggaagcucagcauuga

SEQ ID NO: 8468 - RNA, 20 nt, Artificial Sequence
  Antisense oligo
guguaggaagcucagcauug

SEQ ID NO: 8469 - RNA, 20 nt, Artificial Sequence
  Antisense oligo
auguguaggaagcucagcau

SEQ ID NO: 8470 - RNA, 20 nt, Artificial Sequence
  Antisense oligo
gauguguaggaagcucagca

SEQ ID NO: 8471 - RNA, 20 nt, Artificial Sequence
  Antisense oligo
ccugauguguaggaagcuca

SEQ ID NO: 8472 - RNA, 20 nt, Artificial Sequence
  Antisense oligo
cccugauguguaggaagcuc

SEQ ID NO: 8473 - RNA, 20 nt, Artificial Sequence
  Antisense oligo
ucccugauguguaggaagcu

SEQ ID NO: 8474 - RNA, 20 nt, Artificial Sequence
  Antisense oligo
agcuucccugauguguagga

SEQ ID NO: 8475 - RNA, 20 nt, Artificial Sequence
  Antisense oligo
acuccagccugggugagaga

SEQ ID NO: 8476 - RNA, 20 nt, Artificial Sequence
  Antisense oligo
acagcacugcacuccagccu

SEQ ID NO: 8477 - RNA, 20 nt, Artificial Sequence
  Antisense oligo
guugcagugagcugagauca

SEQ ID NO: 8478 - RNA, 20 nt, Artificial Sequence
  Antisense oligo
gguugcagugagcugagauc

SEQ ID NO: 8479 - RNA, 20 nt, Artificial Sequence
  Antisense oligo
agguugcagugagcugagau

SEQ ID NO: 8480 - RNA, 20 nt, Artificial Sequence
  Antisense oligo
gagguugcagugagcugaga

SEQ ID NO: 8481 - RNA, 20 nt, Artificial Sequence
  Antisense oligo
agagguugcagugagcugag

SEQ ID NO: 8482 - RNA, 20 nt, Artificial Sequence
  Antisense oligo
cagagguugcagugagcuga

SEQ ID NO: 8483 - RNA, 20 nt, Artificial Sequence
  Antisense oligo
gcagagguugcagugagcug

SEQ ID NO: 8484 - RNA, 20 nt, Artificial Sequence
  Antisense oligo
ggcagagguugcagugagcu

SEQ ID NO: 8485 - RNA, 20 nt, Artificial Sequence
  Antisense oligo
aggcagagguugcagugagc

SEQ ID NO: 8486 - RNA, 20 nt, Artificial Sequence
  Antisense oligo
gaggcagagguugcagugag

SEQ ID NO: 8487 - RNA, 20 nt, Artificial Sequence
  Antisense oligo
ggaggcagagguugcaguga

SEQ ID NO: 8488 - RNA, 20 nt, Artificial Sequence
  Antisense oligo
ggagaaucgcuugaacccgg

SEQ ID NO: 8489 - RNA, 20 nt, Artificial Sequence
  Antisense oligo
aggagaaucgcuugaacccg

SEQ ID NO: 8490 - RNA, 20 nt, Artificial Sequence
  Antisense oligo
caggagaaucgcuugaaccc

SEQ ID NO: 8491 - RNA, 20 nt, Artificial Sequence
  Antisense oligo
gcaggagaaucgcuugaacc

SEQ ID NO: 8492 - RNA, 20 nt, Artificial Sequence
  Antisense oligo
ggcaggagaaucgcuugaac

SEQ ID NO: 8493 - RNA, 20 nt, Artificial Sequence
  Antisense oligo
aggcaggagaaucgcuugaa

SEQ ID NO: 8494 - RNA, 20 nt, Artificial Sequence
  Antisense oligo
gaggcaggagaaucgcuuga

SEQ ID NO: 8495 - RNA, 20 nt, Artificial Sequence
  Antisense oligo
ugaggcaggagaaucgcuug

SEQ ID NO: 8496 - RNA, 20 nt, Artificial Sequence
  Antisense oligo
cugaggcaggagaaucgcuu

SEQ ID NO: 8497 - RNA, 20 nt, Artificial Sequence
  Antisense oligo
gcugaggcaggagaaucgcu

SEQ ID NO: 8498 - RNA, 20 nt, Artificial Sequence
  Antisense oligo
aggcugaggcaggagaaucg

SEQ ID NO: 8499 - RNA, 20 nt, Artificial Sequence
  Antisense oligo
gaggcugaggcaggagaauc

SEQ ID NO: 8500 - RNA, 20 nt, Artificial Sequence
  Antisense oligo
ggaggcugaggcaggagaau

SEQ ID NO: 8501 - RNA, 20 nt, Artificial Sequence
  Antisense oligo
uacuugggaggcugaggcag

SEQ ID NO: 8502 - RNA, 20 nt, Artificial Sequence
  Antisense oligo
cuacuugggaggcugaggca

SEQ ID NO: 8503 - RNA, 20 nt, Artificial Sequence
  Antisense oligo
agcuacuugggaggcugagg

SEQ ID NO: 8504 - RNA, 20 nt, Artificial Sequence
  Antisense oligo
cuguaaucccagcuacuugg

SEQ ID NO: 8505 - RNA, 20 nt, Artificial Sequence
  Antisense oligo
ucuguaaucccagcuacuug

SEQ ID NO: 8506 - RNA, 20 nt, Artificial Sequence
  Antisense oligo
aucuguaaucccagcuacuu

SEQ ID NO: 8507 - RNA, 20 nt, Artificial Sequence
  Antisense oligo
caucuguaaucccagcuacu

SEQ ID NO: 8508 - RNA, 20 nt, Artificial Sequence
  Antisense oligo
acaucuguaaucccagcuac

SEQ ID NO: 8509 - RNA, 20 nt, Artificial Sequence
  Antisense oligo
cacaucuguaaucccagcua

SEQ ID NO: 8510 - RNA, 20 nt, Artificial Sequence
  Antisense oligo
ucacaucuguaaucccagcu

SEQ ID NO: 8511 - RNA, 20 nt, Artificial Sequence
  Antisense oligo
gauggcaucacucuacuaca

SEQ ID NO: 8512 - RNA, 20 nt, Artificial Sequence
  Antisense oligo
acggugagcgaugauggcau

SEQ ID NO: 8513 - RNA, 20 nt, Artificial Sequence
  Antisense oligo
uacggugagcgaugauggca

SEQ ID NO: 8514 - RNA, 20 nt, Artificial Sequence
  Antisense oligo
uuacggugagcgaugauggc

SEQ ID NO: 8515 - RNA, 20 nt, Artificial Sequence
  Antisense oligo
cuuacggugagcgaugaugg

SEQ ID NO: 8516 - RNA, 20 nt, Artificial Sequence
  Antisense oligo
gcuuacggugagcgaugaug

SEQ ID NO: 8517 - RNA, 20 nt, Artificial Sequence
  Antisense oligo
cugaggcaggaggaucacgu

SEQ ID NO: 8518 - RNA, 20 nt, Artificial Sequence
  Antisense oligo
aggcugaggcaggaggauca

SEQ ID NO: 8519 - RNA, 20 nt, Artificial Sequence
  Antisense oligo
gaugacaacucucuguacuu

SEQ ID NO: 8520 - RNA, 20 nt, Artificial Sequence
  Antisense oligo
uacugcccgugugauggugg

SEQ ID NO: 8521 - RNA, 20 nt, Artificial Sequence
  Antisense oligo
guacugcccgugugauggug

SEQ ID NO: 8522 - RNA, 20 nt, Artificial Sequence
  Antisense oligo
gguacugcccgugugauggu

SEQ ID NO: 8523 - RNA, 20 nt, Artificial Sequence
  Antisense oligo
aggguacugcccgugugaug

SEQ ID NO: 8524 - RNA, 20 nt, Artificial Sequence
  Antisense oligo
caggguacugcccgugugau

SEQ ID NO: 8525 - RNA, 20 nt, Artificial Sequence
  Antisense oligo
acaggguacugcccguguga

SEQ ID NO: 8526 - RNA, 20 nt, Artificial Sequence
  Antisense oligo
aacaggguacugcccgugug

SEQ ID NO: 8527 - RNA, 20 nt, Artificial Sequence
  Antisense oligo
uaacaggguacugcccgugu

SEQ ID NO: 8528 - RNA, 20 nt, Artificial Sequence
  Antisense oligo
cuaacaggguacugcccgug

SEQ ID NO: 8529 - RNA, 20 nt, Artificial Sequence
  Antisense oligo
acuaacaggguacugcccgu

SEQ ID NO: 8530 - RNA, 20 nt, Artificial Sequence
  Antisense oligo
uacuaacaggguacugcccg

SEQ ID NO: 8531 - RNA, 20 nt, Artificial Sequence
  Antisense oligo
uuacuaacaggguacugccc

SEQ ID NO: 8532 - RNA, 20 nt, Artificial Sequence
  Antisense oligo
guuacuaacaggguacugcc

SEQ ID NO: 8533 - RNA, 20 nt, Artificial Sequence
  Antisense oligo
caaaagcaccacacuaaugc

SEQ ID NO: 8534 - RNA, 20 nt, Artificial Sequence
  Antisense oligo
gaacgaacuauggacuuuag

SEQ ID NO: 8535 - RNA, 20 nt, Artificial Sequence
  Antisense oligo
ggaacgaacuauggacuuua

SEQ ID NO: 8536 - RNA, 20 nt, Artificial Sequence
  Antisense oligo
aggaacgaacuauggacuuu

SEQ ID NO: 8537 - RNA, 20 nt, Artificial Sequence
  Antisense oligo
caggaacgaacuauggacuu

SEQ ID NO: 8538 - RNA, 20 nt, Artificial Sequence
  Antisense oligo
ccaggaacgaacuauggacu

SEQ ID NO: 8539 - RNA, 20 nt, Artificial Sequence
  Antisense oligo
accaggaacgaacuauggac

SEQ ID NO: 8540 - RNA, 20 nt, Artificial Sequence
  Antisense oligo
caccaggaacgaacuaugga

SEQ ID NO: 8541 - RNA, 20 nt, Artificial Sequence
  Antisense oligo
acaccaggaacgaacuaugg

SEQ ID NO: 8542 - RNA, 20 nt, Artificial Sequence
  Antisense oligo
aacaccaggaacgaacuaug

SEQ ID NO: 8543 - RNA, 20 nt, Artificial Sequence
  Antisense oligo
caacaccaggaacgaacuau

SEQ ID NO: 8544 - RNA, 20 nt, Artificial Sequence
  Antisense oligo
acaacaccaggaacgaacua

SEQ ID NO: 8545 - RNA, 20 nt, Artificial Sequence
  Antisense oligo
gacaacaccaggaacgaacu

SEQ ID NO: 8546 - RNA, 20 nt, Artificial Sequence
  Antisense oligo
ggacaacaccaggaacgaac

SEQ ID NO: 8547 - RNA, 20 nt, Artificial Sequence
  Antisense oligo
uggacaacaccaggaacgaa

SEQ ID NO: 8548 - RNA, 20 nt, Artificial Sequence
  Antisense oligo
auggacaacaccaggaacga

SEQ ID NO: 8549 - RNA, 20 nt, Artificial Sequence
  Antisense oligo
aauggacaacaccaggaacg

SEQ ID NO: 8550 - RNA, 20 nt, Artificial Sequence
  Antisense oligo
ccucagagaauggacaacac

SEQ ID NO: 8551 - RNA, 20 nt, Artificial Sequence
  Antisense oligo
accucagagaauggacaaca

SEQ ID NO: 8552 - RNA, 20 nt, Artificial Sequence
  Antisense oligo
caaaccucagagaauggaca

SEQ ID NO: 8553 - RNA, 20 nt, Artificial Sequence
  Antisense oligo
uauccaaaccucagagaaug

SEQ ID NO: 8554 - RNA, 20 nt, Artificial Sequence
  Antisense oligo
uggaaugguggacacaggcc

SEQ ID NO: 8555 - RNA, 20 nt, Artificial Sequence
  Antisense oligo
acuggaaugguggacacagg

SEQ ID NO: 8556 - RNA, 20 nt, Artificial Sequence
  Antisense oligo
cgauacuggaaugguggaca

SEQ ID NO: 8557 - RNA, 20 nt, Artificial Sequence
  Antisense oligo
ugcacgauacuggaauggug

SEQ ID NO: 8558 - RNA, 20 nt, Artificial Sequence
  Antisense oligo
cugcacgauacuggaauggu

SEQ ID NO: 8559 - RNA, 20 nt, Artificial Sequence
  Antisense oligo
ucugcacgauacuggaaugg

SEQ ID NO: 8560 - RNA, 20 nt, Artificial Sequence
  Antisense oligo
uucugcacgauacuggaaug

SEQ ID NO: 8561 - RNA, 20 nt, Artificial Sequence
  Antisense oligo
uauucugcacgauacuggaa

SEQ ID NO: 8562 - RNA, 20 nt, Artificial Sequence
  Antisense oligo
cuauucugcacgauacugga

SEQ ID NO: 8563 - RNA, 20 nt, Artificial Sequence
  Antisense oligo
caacuauucugcacgauacu

SEQ ID NO: 8564 - RNA, 20 nt, Artificial Sequence
  Antisense oligo
ggagcaugggauuuuguagg

SEQ ID NO: 8565 - RNA, 20 nt, Artificial Sequence
  Antisense oligo
ggguggagcaugggauuuug

SEQ ID NO: 8566 - RNA, 20 nt, Artificial Sequence
  Antisense oligo
gacuaaaggaaaugggaggg

SEQ ID NO: 8567 - RNA, 20 nt, Artificial Sequence
  Antisense oligo
caaccauaggacauucugga

SEQ ID NO: 8568 - RNA, 20 nt, Artificial Sequence
  Antisense oligo
ccaaccauaggacauucugg

SEQ ID NO: 8569 - RNA, 20 nt, Artificial Sequence
  Antisense oligo
agauuccaaccauaggacau

SEQ ID NO: 8570 - RNA, 20 nt, Artificial Sequence
  Antisense oligo
uaagauuccaaccauaggac

SEQ ID NO: 8571 - RNA, 20 nt, Artificial Sequence
  Antisense oligo
cauccuauaagauuccaacc

SEQ ID NO: 8572 - RNA, 20 nt, Artificial Sequence
  Antisense oligo
ggcgacauccuauaagauuc

SEQ ID NO: 8573 - RNA, 20 nt, Artificial Sequence
  Antisense oligo
aaggcgacauccuauaagau

SEQ ID NO: 8574 - RNA, 20 nt, Artificial Sequence
  Antisense oligo
aaaggcgacauccuauaaga

SEQ ID NO: 8575 - RNA, 20 nt, Artificial Sequence
  Antisense oligo
uaaaggcgacauccuauaag

SEQ ID NO: 8576 - RNA, 20 nt, Artificial Sequence
  Antisense oligo
cuaaaggcgacauccuauaa

SEQ ID NO: 8577 - RNA, 20 nt, Artificial Sequence
  Antisense oligo
ucuaaaggcgacauccuaua

SEQ ID NO: 8578 - RNA, 20 nt, Artificial Sequence
  Antisense oligo
gucuaaaggcgacauccuau

SEQ ID NO: 8579 - RNA, 20 nt, Artificial Sequence
  Antisense oligo
agucuaaaggcgacauccua

SEQ ID NO: 8580 - RNA, 20 nt, Artificial Sequence
  Antisense oligo
cagucuaaaggcgacauccu

SEQ ID NO: 8581 - RNA, 20 nt, Artificial Sequence
  Antisense oligo
ccagucuaaaggcgacaucc

SEQ ID NO: 8582 - RNA, 20 nt, Artificial Sequence
  Antisense oligo
gccagucuaaaggcgacauc

SEQ ID NO: 8583 - RNA, 20 nt, Artificial Sequence
  Antisense oligo
agccagucuaaaggcgacau

SEQ ID NO: 8584 - RNA, 20 nt, Artificial Sequence
  Antisense oligo
aagccagucuaaaggcgaca

SEQ ID NO: 8585 - RNA, 20 nt, Artificial Sequence
  Antisense oligo
gaagccagucuaaaggcgac

SEQ ID NO: 8586 - RNA, 20 nt, Artificial Sequence
  Antisense oligo
ggaagccagucuaaaggcga

SEQ ID NO: 8587 - RNA, 20 nt, Artificial Sequence
  Antisense oligo
gaaguuagcucucaagccau

SEQ ID NO: 8588 - RNA, 20 nt, Artificial Sequence
  Antisense oligo
cgaaguuagcucucaagcca

SEQ ID NO: 8589 - RNA, 20 nt, Artificial Sequence
  Antisense oligo
acgaaguuagcucucaagcc

SEQ ID NO: 8590 - RNA, 20 nt, Artificial Sequence
  Antisense oligo
aacgaaguuagcucucaagc

SEQ ID NO: 8591 - RNA, 20 nt, Artificial Sequence
  Antisense oligo
agcgaaugguagcacaucca

SEQ ID NO: 8592 - RNA, 20 nt, Artificial Sequence
  Antisense oligo
aagcgaaugguagcacaucc

SEQ ID NO: 8593 - RNA, 20 nt, Artificial Sequence
  Antisense oligo
uaagcgaaugguagcacauc

SEQ ID NO: 8594 - RNA, 20 nt, Artificial Sequence
  Antisense oligo
guaagcgaaugguagcacau

SEQ ID NO: 8595 - RNA, 20 nt, Artificial Sequence
  Antisense oligo
gguaagcgaaugguagcaca

SEQ ID NO: 8596 - RNA, 20 nt, Artificial Sequence
  Antisense oligo
ggguaagcgaaugguagcac

SEQ ID NO: 8597 - RNA, 20 nt, Artificial Sequence
  Antisense oligo
cggguaagcgaaugguagca

SEQ ID NO: 8598 - RNA, 20 nt, Artificial Sequence
  Antisense oligo
acggguaagcgaaugguagc

SEQ ID NO: 8599 - RNA, 20 nt, Artificial Sequence
  Antisense oligo
aacggguaagcgaaugguag

SEQ ID NO: 8600 - RNA, 20 nt, Artificial Sequence
  Antisense oligo
gaacggguaagcgaauggua

SEQ ID NO: 8601 - RNA, 20 nt, Artificial Sequence
  Antisense oligo
ugaacggguaagcgaauggu

SEQ ID NO: 8602 - RNA, 20 nt, Artificial Sequence
  Antisense oligo
gugaacggguaagcgaaugg

SEQ ID NO: 8603 - RNA, 20 nt, Artificial Sequence
  Antisense oligo
ggugaacggguaagcgaaug

SEQ ID NO: 8604 - RNA, 20 nt, Artificial Sequence
  Antisense oligo
aggugaacggguaagcgaau

SEQ ID NO: 8605 - RNA, 20 nt, Artificial Sequence
  Antisense oligo
gaggugaacggguaagcgaa

SEQ ID NO: 8606 - RNA, 20 nt, Artificial Sequence
  Antisense oligo
ugaggugaacggguaagcga

SEQ ID NO: 8607 - RNA, 20 nt, Artificial Sequence
  Antisense oligo
augaggugaacggguaagcg

SEQ ID NO: 8608 - RNA, 20 nt, Artificial Sequence
  Antisense oligo
caugaggugaacggguaagc

SEQ ID NO: 8609 - RNA, 20 nt, Artificial Sequence
  Antisense oligo
cugcaccauaagaaacaaac

SEQ ID NO: 8610 - RNA, 20 nt, Artificial Sequence
  Antisense oligo
uagggagacacuuucauagc

SEQ ID NO: 8611 - RNA, 20 nt, Artificial Sequence
  Antisense oligo
cuuagggagacacuuucaua

SEQ ID NO: 8612 - RNA, 20 nt, Artificial Sequence
  Antisense oligo
ucuuagggagacacuuucau

SEQ ID NO: 8613 - RNA, 20 nt, Artificial Sequence
  Antisense oligo
ucaggauggucuuagggaga

SEQ ID NO: 8614 - RNA, 20 nt, Artificial Sequence
  Antisense oligo
aucaggauggucuuagggag

SEQ ID NO: 8615 - RNA, 20 nt, Artificial Sequence
  Antisense oligo
uaucaggauggucuuaggga

SEQ ID NO: 8616 - RNA, 20 nt, Artificial Sequence
  Antisense oligo
cuaucaggauggucuuaggg

SEQ ID NO: 8617 - RNA, 20 nt, Artificial Sequence
  Antisense oligo
ucuaucaggauggucuuagg

SEQ ID NO: 8618 - RNA, 20 nt, Artificial Sequence
  Antisense oligo
gucuaucaggauggucuuag

SEQ ID NO: 8619 - RNA, 20 nt, Artificial Sequence
  Antisense oligo
ugucuaucaggauggucuua

SEQ ID NO: 8620 - RNA, 20 nt, Artificial Sequence
  Antisense oligo
augucuaucaggauggucuu

SEQ ID NO: 8621 - RNA, 20 nt, Artificial Sequence
  Antisense oligo
aaugucuaucaggauggucu

SEQ ID NO: 8622 - RNA, 20 nt, Artificial Sequence
  Antisense oligo
caaugucuaucaggaugguc

SEQ ID NO: 8623 - RNA, 20 nt, Artificial Sequence
  Antisense oligo
gcaaugucuaucaggauggu

SEQ ID NO: 8624 - RNA, 20 nt, Artificial Sequence
  Antisense oligo
agcaaugucuaucaggaugg

SEQ ID NO: 8625 - RNA, 20 nt, Artificial Sequence
  Antisense oligo
uagcaaugucuaucaggaug

SEQ ID NO: 8626 - RNA, 20 nt, Artificial Sequence
  Antisense oligo
cuagcaaugucuaucaggau

SEQ ID NO: 8627 - RNA, 20 nt, Artificial Sequence
  Antisense oligo
ccuagcaaugucuaucagga

SEQ ID NO: 8628 - RNA, 20 nt, Artificial Sequence
  Antisense oligo
accuagcaaugucuaucagg

SEQ ID NO: 8629 - RNA, 20 nt, Artificial Sequence
  Antisense oligo
ugcagacauaccuagcaaug

SEQ ID NO: 8630 - RNA, 20 nt, Artificial Sequence
  Antisense oligo
augcagacauaccuagcaau

SEQ ID NO: 8631 - RNA, 20 nt, Artificial Sequence
  Antisense oligo
gaugcagacauaccuagcaa

SEQ ID NO: 8632 - RNA, 20 nt, Artificial Sequence
  Antisense oligo
ggaugcagacauaccuagca

SEQ ID NO: 8633 - RNA, 20 nt, Artificial Sequence
  Antisense oligo
ggaauaccuacaacagaaga

SEQ ID NO: 8634 - RNA, 20 nt, Artificial Sequence
  Antisense oligo
aggaauaccuacaacagaag

SEQ ID NO: 8635 - RNA, 20 nt, Artificial Sequence
  Antisense oligo
cacauggccugaguauauuu

SEQ ID NO: 8636 - RNA, 20 nt, Artificial Sequence
  Antisense oligo
ucacauggccugaguauauu

SEQ ID NO: 8637 - RNA, 20 nt, Artificial Sequence
  Antisense oligo
aaccaccucacauggccuga

SEQ ID NO: 8638 - RNA, 20 nt, Artificial Sequence
  Antisense oligo
acuccugggcucaagagauc

SEQ ID NO: 8639 - RNA, 20 nt, Artificial Sequence
  Antisense oligo
aacuccugggcucaagagau

SEQ ID NO: 8640 - RNA, 20 nt, Artificial Sequence
  Antisense oligo
aaacuccugggcucaagaga

SEQ ID NO: 8641 - RNA, 20 nt, Artificial Sequence
  Antisense oligo
caaacuccugggcucaagag

SEQ ID NO: 8642 - RNA, 20 nt, Artificial Sequence
  Antisense oligo
ucaaacuccugggcucaaga

SEQ ID NO: 8643 - RNA, 20 nt, Artificial Sequence
  Antisense oligo
cucaaacuccugggcucaag

SEQ ID NO: 8644 - RNA, 20 nt, Artificial Sequence
  Antisense oligo
ucucaaacuccugggcucaa

SEQ ID NO: 8645 - RNA, 20 nt, Artificial Sequence
  Antisense oligo
gucucaaacuccugggcuca

SEQ ID NO: 8646 - RNA, 20 nt, Artificial Sequence
  Antisense oligo
ggucucaaacuccugggcuc

SEQ ID NO: 8647 - RNA, 20 nt, Artificial Sequence
  Antisense oligo
uggucucaaacuccugggcu

SEQ ID NO: 8648 - RNA, 20 nt, Artificial Sequence
  Antisense oligo
cuggucucaaacuccugggc

SEQ ID NO: 8649 - RNA, 20 nt, Artificial Sequence
  Antisense oligo
gcuggucucaaacuccuggg

SEQ ID NO: 8650 - RNA, 20 nt, Artificial Sequence
  Antisense oligo
ggcuggucucaaacuccugg

SEQ ID NO: 8651 - RNA, 20 nt, Artificial Sequence
  Antisense oligo
aggcuggucucaaacuccug

SEQ ID NO: 8652 - RNA, 20 nt, Artificial Sequence
  Antisense oligo
caggcuggucucaaacuccu

SEQ ID NO: 8653 - RNA, 20 nt, Artificial Sequence
  Antisense oligo
ccaggcuggucucaaacucc

SEQ ID NO: 8654 - RNA, 20 nt, Artificial Sequence
  Antisense oligo
cccaggcuggucucaaacuc

SEQ ID NO: 8655 - RNA, 20 nt, Artificial Sequence
  Antisense oligo
gcccaggcuggucucaaacu

SEQ ID NO: 8656 - RNA, 20 nt, Artificial Sequence
  Antisense oligo
ugcccaggcuggucucaaac

SEQ ID NO: 8657 - RNA, 20 nt, Artificial Sequence
  Antisense oligo
uugcccaggcuggucucaaa

SEQ ID NO: 8658 - RNA, 20 nt, Artificial Sequence
  Antisense oligo
guugcccaggcuggucucaa

SEQ ID NO: 8659 - RNA, 20 nt, Artificial Sequence
  Antisense oligo
uguugcccaggcuggucuca

SEQ ID NO: 8660 - RNA, 20 nt, Artificial Sequence
  Antisense oligo
uuguugcccaggcuggucuc

SEQ ID NO: 8661 - RNA, 20 nt, Artificial Sequence
  Antisense oligo
uuuguugcccaggcuggucu

SEQ ID NO: 8662 - RNA, 20 nt, Artificial Sequence
  Antisense oligo
cuuuguugcccaggcugguc

SEQ ID NO: 8663 - RNA, 20 nt, Artificial Sequence
  Antisense oligo
acuuuguugcccaggcuggu

SEQ ID NO: 8664 - RNA, 20 nt, Artificial Sequence
  Antisense oligo
cacuuuguugcccaggcugg

SEQ ID NO: 8665 - RNA, 20 nt, Artificial Sequence
  Antisense oligo
ucacuuuguugcccaggcug

SEQ ID NO: 8666 - RNA, 20 nt, Artificial Sequence
  Antisense oligo
gccuggcaaacuuucaaaau

SEQ ID NO: 8667 - RNA, 20 nt, Artificial Sequence
  Antisense oligo
ugccuggcaaacuuucaaaa

SEQ ID NO: 8668 - RNA, 20 nt, Artificial Sequence
  Antisense oligo
uuuuccugccucagccuccc

SEQ ID NO: 8669 - RNA, 20 nt, Artificial Sequence
  Antisense oligo
auuuuccugccucagccucc

SEQ ID NO: 8670 - RNA, 20 nt, Artificial Sequence
  Antisense oligo
cauuuuccugccucagccuc

SEQ ID NO: 8671 - RNA, 20 nt, Artificial Sequence
  Antisense oligo
ucauuuuccugccucagccu

SEQ ID NO: 8672 - RNA, 20 nt, Artificial Sequence
  Antisense oligo
acuguaaccucauuuuccug

SEQ ID NO: 8673 - RNA, 20 nt, Artificial Sequence
  Antisense oligo
cccacuguaaccucauuuuc

SEQ ID NO: 8674 - RNA, 20 nt, Artificial Sequence
  Antisense oligo
ucugucacccaggcuggagu

SEQ ID NO: 8675 - RNA, 20 nt, Artificial Sequence
  Antisense oligo
ucucugucacccaggcugga

SEQ ID NO: 8676 - RNA, 20 nt, Artificial Sequence
  Antisense oligo
ucucucugucacccaggcug

SEQ ID NO: 8677 - RNA, 20 nt, Artificial Sequence
  Antisense oligo
cucucucugucacccaggcu

SEQ ID NO: 8678 - RNA, 20 nt, Artificial Sequence
  Antisense oligo
ucucucucugucacccaggc

SEQ ID NO: 8679 - RNA, 20 nt, Artificial Sequence
  Antisense oligo
ggauggacugacuuccuuuu

SEQ ID NO: 8680 - RNA, 20 nt, Artificial Sequence
  Antisense oligo
cggauggacugacuuccuuu

SEQ ID NO: 8681 - RNA, 20 nt, Artificial Sequence
  Antisense oligo
acggauggacugacuuccuu

SEQ ID NO: 8682 - RNA, 20 nt, Artificial Sequence
  Antisense oligo
uacggauggacugacuuccu

SEQ ID NO: 8683 - RNA, 20 nt, Artificial Sequence
  Antisense oligo
auacggauggacugacuucc

SEQ ID NO: 8684 - RNA, 20 nt, Artificial Sequence
  Antisense oligo
uauacggauggacugacuuc

SEQ ID NO: 8685 - RNA, 20 nt, Artificial Sequence
  Antisense oligo
uuucucagguuaaaacccac

SEQ ID NO: 8686 - RNA, 20 nt, Artificial Sequence
  Antisense oligo
uccuuguccaagaagaugac

SEQ ID NO: 8687 - RNA, 20 nt, Artificial Sequence
  Antisense oligo
caaacacaggcaauggcugg

SEQ ID NO: 8688 - RNA, 20 nt, Artificial Sequence
  Antisense oligo
ucaaacacaggcaauggcug

SEQ ID NO: 8689 - RNA, 20 nt, Artificial Sequence
  Antisense oligo
ccucaaacacaggcaauggc

SEQ ID NO: 8690 - RNA, 20 nt, Artificial Sequence
  Antisense oligo
cacuuccucaaacacaggca

SEQ ID NO: 8691 - RNA, 20 nt, Artificial Sequence
  Antisense oligo
gauaaccucuuguucugccc

SEQ ID NO: 8692 - RNA, 20 nt, Artificial Sequence
  Antisense oligo
agauaaccucuuguucugcc

SEQ ID NO: 8693 - RNA, 20 nt, Artificial Sequence
  Antisense oligo
uccagauaaccucuuguucu

SEQ ID NO: 8694 - RNA, 20 nt, Artificial Sequence
  Antisense oligo
uuccagauaaccucuuguuc

SEQ ID NO: 8695 - RNA, 20 nt, Artificial Sequence
  Antisense oligo
uugccguuaccgugggaauu

SEQ ID NO: 8696 - RNA, 20 nt, Artificial Sequence
  Antisense oligo
uuugccguuaccgugggaau

SEQ ID NO: 8697 - RNA, 20 nt, Artificial Sequence
  Antisense oligo
cuuugccguuaccgugggaa

SEQ ID NO: 8698 - RNA, 20 nt, Artificial Sequence
  Antisense oligo
ucuuugccguuaccguggga

SEQ ID NO: 8699 - RNA, 20 nt, Artificial Sequence
  Antisense oligo
cucuuugccguuaccguggg

SEQ ID NO: 8700 - RNA, 20 nt, Artificial Sequence
  Antisense oligo
ccucuuugccguuaccgugg

SEQ ID NO: 8701 - RNA, 20 nt, Artificial Sequence
  Antisense oligo
gccucuuugccguuaccgug

SEQ ID NO: 8702 - RNA, 20 nt, Artificial Sequence
  Antisense oligo
ugccucuuugccguuaccgu

SEQ ID NO: 8703 - RNA, 20 nt, Artificial Sequence
  Antisense oligo
cugccucuuugccguuaccg

SEQ ID NO: 8704 - RNA, 20 nt, Artificial Sequence
  Antisense oligo
ccugccucuuugccguuacc

SEQ ID NO: 8705 - RNA, 20 nt, Artificial Sequence
  Antisense oligo
uccugccucuuugccguuac

SEQ ID NO: 8706 - RNA, 20 nt, Artificial Sequence
  Antisense oligo
ccuccugccucuuugccguu

SEQ ID NO: 8707 - RNA, 20 nt, Artificial Sequence
  Antisense oligo
accuccugccucuuugccgu

SEQ ID NO: 8708 - RNA, 20 nt, Artificial Sequence
  Antisense oligo
gguuccugaauagaugaaga

SEQ ID NO: 8709 - RNA, 20 nt, Artificial Sequence
  Antisense oligo
cgucgguuccugaauagaug

SEQ ID NO: 8710 - RNA, 20 nt, Artificial Sequence
  Antisense oligo
ucgucgguuccugaauagau

SEQ ID NO: 8711 - RNA, 20 nt, Artificial Sequence
  Antisense oligo
cucgucgguuccugaauaga

SEQ ID NO: 8712 - RNA, 20 nt, Artificial Sequence
  Antisense oligo
ucucgucgguuccugaauag

SEQ ID NO: 8713 - RNA, 20 nt, Artificial Sequence
  Antisense oligo
uucucgucgguuccugaaua

SEQ ID NO: 8714 - RNA, 20 nt, Artificial Sequence
  Antisense oligo
uuucucgucgguuccugaau

SEQ ID NO: 8715 - RNA, 20 nt, Artificial Sequence
  Antisense oligo
uuuucucgucgguuccugaa

SEQ ID NO: 8716 - RNA, 20 nt, Artificial Sequence
  Antisense oligo
auuuucucgucgguuccuga

SEQ ID NO: 8717 - RNA, 20 nt, Artificial Sequence
  Antisense oligo
uauuuucucgucgguuccug

SEQ ID NO: 8718 - RNA, 20 nt, Artificial Sequence
  Antisense oligo
guauuuucucgucgguuccu

SEQ ID NO: 8719 - RNA, 20 nt, Artificial Sequence
  Antisense oligo
aguauuuucucgucgguucc

SEQ ID NO: 8720 - RNA, 20 nt, Artificial Sequence
  Antisense oligo
uaguauuuucucgucgguuc

SEQ ID NO: 8721 - RNA, 20 nt, Artificial Sequence
  Antisense oligo
cuaguauuuucucgucgguu

SEQ ID NO: 8722 - RNA, 20 nt, Artificial Sequence
  Antisense oligo
gcuaguauuuucucgucggu

SEQ ID NO: 8723 - RNA, 20 nt, Artificial Sequence
  Antisense oligo
ugcuaguauuuucucgucgg

SEQ ID NO: 8724 - RNA, 20 nt, Artificial Sequence
  Antisense oligo
ccucugugacauuugcuagu

SEQ ID NO: 8725 - RNA, 20 nt, Artificial Sequence
  Antisense oligo
ccucuuggcauccucuguga

SEQ ID NO: 8726 - RNA, 20 nt, Artificial Sequence
  Antisense oligo
gcuaucagccucuuggcauc

SEQ ID NO: 8727 - RNA, 20 nt, Artificial Sequence
  Antisense oligo
agcuaucagccucuuggcau

SEQ ID NO: 8728 - RNA, 20 nt, Artificial Sequence
  Antisense oligo
cagcuaucagccucuuggca

SEQ ID NO: 8729 - RNA, 20 nt, Artificial Sequence
  Antisense oligo
acagcuaucagccucuuggc

SEQ ID NO: 8730 - RNA, 20 nt, Artificial Sequence
  Antisense oligo
aacagcuaucagccucuugg

SEQ ID NO: 8731 - RNA, 20 nt, Artificial Sequence
  Antisense oligo
caacagcuaucagccucuug

SEQ ID NO: 8732 - RNA, 20 nt, Artificial Sequence
  Antisense oligo
ggcaacagcuaucagccucu

SEQ ID NO: 8733 - RNA, 20 nt, Artificial Sequence
  Antisense oligo
cggcaacagcuaucagccuc

SEQ ID NO: 8734 - RNA, 20 nt, Artificial Sequence
  Antisense oligo
ucggcaacagcuaucagccu

SEQ ID NO: 8735 - RNA, 20 nt, Artificial Sequence
  Antisense oligo
gucggcaacagcuaucagcc

SEQ ID NO: 8736 - RNA, 20 nt, Artificial Sequence
  Antisense oligo
agucggcaacagcuaucagc

SEQ ID NO: 8737 - RNA, 20 nt, Artificial Sequence
  Antisense oligo
gagucggcaacagcuaucag

SEQ ID NO: 8738 - RNA, 20 nt, Artificial Sequence
  Antisense oligo
agagucggcaacagcuauca

SEQ ID NO: 8739 - RNA, 20 nt, Artificial Sequence
  Antisense oligo
cagagucggcaacagcuauc

SEQ ID NO: 8740 - RNA, 20 nt, Artificial Sequence
  Antisense oligo
acagagucggcaacagcuau

SEQ ID NO: 8741 - RNA, 20 nt, Artificial Sequence
  Antisense oligo
cacagagucggcaacagcua

SEQ ID NO: 8742 - RNA, 20 nt, Artificial Sequence
  Antisense oligo
acacagagucggcaacagcu

SEQ ID NO: 8743 - RNA, 20 nt, Artificial Sequence
  Antisense oligo
aacacagagucggcaacagc

SEQ ID NO: 8744 - RNA, 20 nt, Artificial Sequence
  Antisense oligo
caacacagagucggcaacag

SEQ ID NO: 8745 - RNA, 20 nt, Artificial Sequence
  Antisense oligo
ucaacacagagucggcaaca

SEQ ID NO: 8746 - RNA, 20 nt, Artificial Sequence
  Antisense oligo
gucaacacagagucggcaac

SEQ ID NO: 8747 - RNA, 20 nt, Artificial Sequence
  Antisense oligo
cgucaacacagagucggcaa

SEQ ID NO: 8748 - RNA, 20 nt, Artificial Sequence
  Antisense oligo
ucgucaacacagagucggca

SEQ ID NO: 8749 - RNA, 20 nt, Artificial Sequence
  Antisense oligo
uucgucaacacagagucggc

SEQ ID NO: 8750 - RNA, 20 nt, Artificial Sequence
  Antisense oligo
uuucgucaacacagagucgg

SEQ ID NO: 8751 - RNA, 20 nt, Artificial Sequence
  Antisense oligo
cuuucgucaacacagagucg

SEQ ID NO: 8752 - RNA, 20 nt, Artificial Sequence
  Antisense oligo
caacuuucgucaacacagag

SEQ ID NO: 8753 - RNA, 20 nt, Artificial Sequence
  Antisense oligo
acaacuuucgucaacacaga

SEQ ID NO: 8754 - RNA, 20 nt, Artificial Sequence
  Antisense oligo
aacaacuuucgucaacacag

SEQ ID NO: 8755 - RNA, 20 nt, Artificial Sequence
  Antisense oligo
caacaacuuucgucaacaca

SEQ ID NO: 8756 - RNA, 20 nt, Artificial Sequence
  Antisense oligo
ccaacaacuuucgucaacac

SEQ ID NO: 8757 - RNA, 20 nt, Artificial Sequence
  Antisense oligo
accaacaacuuucgucaaca

SEQ ID NO: 8758 - RNA, 20 nt, Artificial Sequence
  Antisense oligo
caccaacaacuuucgucaac

SEQ ID NO: 8759 - RNA, 20 nt, Artificial Sequence
  Antisense oligo
ucaccaacaacuuucgucaa

SEQ ID NO: 8760 - RNA, 20 nt, Artificial Sequence
  Antisense oligo
gucaccaacaacuuucguca

SEQ ID NO: 8761 - RNA, 20 nt, Artificial Sequence
  Antisense oligo
ggucaccaacaacuuucguc

SEQ ID NO: 8762 - RNA, 20 nt, Artificial Sequence
  Antisense oligo
aggucaccaacaacuuucgu

SEQ ID NO: 8763 - RNA, 20 nt, Artificial Sequence
  Antisense oligo
gaggucaccaacaacuuucg

SEQ ID NO: 8764 - RNA, 20 nt, Artificial Sequence
  Antisense oligo
ggaggucaccaacaacuuuc

SEQ ID NO: 8765 - RNA, 20 nt, Artificial Sequence
  Antisense oligo
aggaggucaccaacaacuuu

SEQ ID NO: 8766 - RNA, 20 nt, Artificial Sequence
  Antisense oligo
uaggaggucaccaacaacuu

SEQ ID NO: 8767 - RNA, 20 nt, Artificial Sequence
  Antisense oligo
uuaggaggucaccaacaacu

SEQ ID NO: 8768 - RNA, 20 nt, Artificial Sequence
  Antisense oligo
acuuaggaggucaccaacaa

SEQ ID NO: 8769 - RNA, 20 nt, Artificial Sequence
  Antisense oligo
cacuuaggaggucaccaaca

SEQ ID NO: 8770 - RNA, 20 nt, Artificial Sequence
  Antisense oligo
ccacuuaggaggucaccaac

SEQ ID NO: 8771 - RNA, 20 nt, Artificial Sequence
  Antisense oligo
gccacuuaggaggucaccaa

SEQ ID NO: 8772 - RNA, 20 nt, Artificial Sequence
  Antisense oligo
ugccacuuaggaggucacca

SEQ ID NO: 8773 - RNA, 20 nt, Artificial Sequence
  Antisense oligo
gugccacuuaggaggucacc

SEQ ID NO: 8774 - RNA, 20 nt, Artificial Sequence
  Antisense oligo
cgugccacuuaggaggucac

SEQ ID NO: 8775 - RNA, 20 nt, Artificial Sequence
  Antisense oligo
aucgugccacuuaggagguc

SEQ ID NO: 8776 - RNA, 20 nt, Artificial Sequence
  Antisense oligo
aaucgugccacuuaggaggu

SEQ ID NO: 8777 - RNA, 20 nt, Artificial Sequence
  Antisense oligo
uaaaaucgugccacuuagga

SEQ ID NO: 8778 - RNA, 20 nt, Artificial Sequence
  Antisense oligo
caacuaaaaucgugccacuu

SEQ ID NO: 8779 - RNA, 20 nt, Artificial Sequence
  Antisense oligo
ccaacuaaaaucgugccacu

SEQ ID NO: 8780 - RNA, 20 nt, Artificial Sequence
  Antisense oligo
uccaacuaaaaucgugccac

SEQ ID NO: 8781 - RNA, 20 nt, Artificial Sequence
  Antisense oligo
guccaacuaaaaucgugcca

SEQ ID NO: 8782 - RNA, 20 nt, Artificial Sequence
  Antisense oligo
uguccaacuaaaaucgugcc

SEQ ID NO: 8783 - RNA, 20 nt, Artificial Sequence
  Antisense oligo
uuguccaacuaaaaucgugc

SEQ ID NO: 8784 - RNA, 20 nt, Artificial Sequence
  Antisense oligo
guuguccaacuaaaaucgug

SEQ ID NO: 8785 - RNA, 20 nt, Artificial Sequence
  Antisense oligo
aucagcuccaguuguccaac

SEQ ID NO: 8786 - RNA, 20 nt, Artificial Sequence
  Antisense oligo
aaucagcuccaguuguccaa

SEQ ID NO: 8787 - RNA, 20 nt, Artificial Sequence
  Antisense oligo
uaaucagcuccaguugucca

SEQ ID NO: 8788 - RNA, 20 nt, Artificial Sequence
  Antisense oligo
auaaucagcuccaguugucc

SEQ ID NO: 8789 - RNA, 20 nt, Artificial Sequence
  Antisense oligo
uauaaucagcuccaguuguc

SEQ ID NO: 8790 - RNA, 20 nt, Artificial Sequence
  Antisense oligo
ccagaugucaagaaacugau

SEQ ID NO: 8791 - RNA, 20 nt, Artificial Sequence
  Antisense oligo
gccagaugucaagaaacuga

SEQ ID NO: 8792 - RNA, 20 nt, Artificial Sequence
  Antisense oligo
ugccagaugucaagaaacug

SEQ ID NO: 8793 - RNA, 20 nt, Artificial Sequence
  Antisense oligo
aguugccagaugucaagaaa

SEQ ID NO: 8794 - RNA, 20 nt, Artificial Sequence
  Antisense oligo
ucaguugccagaugucaaga

SEQ ID NO: 8795 - RNA, 20 nt, Artificial Sequence
  Antisense oligo
cucaguugccagaugucaag

SEQ ID NO: 8796 - RNA, 20 nt, Artificial Sequence
  Antisense oligo
acucaguugccagaugucaa

SEQ ID NO: 8797 - RNA, 20 nt, Artificial Sequence
  Antisense oligo
uacucaguugccagauguca

SEQ ID NO: 8798 - RNA, 20 nt, Artificial Sequence
  Antisense oligo
cuuacucaguugccagaugu

SEQ ID NO: 8799 - RNA, 20 nt, Artificial Sequence
  Antisense oligo
gcuuacucaguugccagaug

SEQ ID NO: 8800 - RNA, 20 nt, Artificial Sequence
  Antisense oligo
ugcuuacucaguugccagau

SEQ ID NO: 8801 - RNA, 20 nt, Artificial Sequence
  Antisense oligo
cgaugcuuacucaguugcca

SEQ ID NO: 8802 - RNA, 20 nt, Artificial Sequence
  Antisense oligo
ucgaugcuuacucaguugcc

SEQ ID NO: 8803 - RNA, 20 nt, Artificial Sequence
  Antisense oligo
cucgaugcuuacucaguugc

SEQ ID NO: 8804 - RNA, 20 nt, Artificial Sequence
  Antisense oligo
acucgaugcuuacucaguug

SEQ ID NO: 8805 - RNA, 20 nt, Artificial Sequence
  Antisense oligo
gacucgaugcuuacucaguu

SEQ ID NO: 8806 - RNA, 20 nt, Artificial Sequence
  Antisense oligo
cgacucgaugcuuacucagu

SEQ ID NO: 8807 - RNA, 20 nt, Artificial Sequence
  Antisense oligo
ucgacucgaugcuuacucag

SEQ ID NO: 8808 - RNA, 20 nt, Artificial Sequence
  Antisense oligo
cuuaaugccucaggagccug

SEQ ID NO: 8809 - RNA, 20 nt, Artificial Sequence
  Antisense oligo
gcuacuuaaugccucaggag

SEQ ID NO: 8810 - RNA, 20 nt, Artificial Sequence
  Antisense oligo
agcuacuuaaugccucagga

SEQ ID NO: 8811 - RNA, 20 nt, Artificial Sequence
  Antisense oligo
cagcuacuuaaugccucagg

SEQ ID NO: 8812 - RNA, 20 nt, Artificial Sequence
  Antisense oligo
ccagcuacuuaaugccucag

SEQ ID NO: 8813 - RNA, 20 nt, Artificial Sequence
  Antisense oligo
uccagcuacuuaaugccuca

SEQ ID NO: 8814 - RNA, 20 nt, Artificial Sequence
  Antisense oligo
cuuccagcuacuuaaugccu

SEQ ID NO: 8815 - RNA, 20 nt, Artificial Sequence
  Antisense oligo
ucuuccagcuacuuaaugcc

SEQ ID NO: 8816 - RNA, 20 nt, Artificial Sequence
  Antisense oligo
gucuuccagcuacuuaaugc

SEQ ID NO: 8817 - RNA, 20 nt, Artificial Sequence
  Antisense oligo
gugucuuccagcuacuuaau

SEQ ID NO: 8818 - RNA, 20 nt, Artificial Sequence
  Antisense oligo
acgugucuuccagcuacuua

SEQ ID NO: 8819 - RNA, 20 nt, Artificial Sequence
  Antisense oligo
aaacgugucuuccagcuacu

SEQ ID NO: 8820 - RNA, 20 nt, Artificial Sequence
  Antisense oligo
caaacgugucuuccagcuac

SEQ ID NO: 8821 - RNA, 20 nt, Artificial Sequence
  Antisense oligo
acaaacgugucuuccagcua

SEQ ID NO: 8822 - RNA, 20 nt, Artificial Sequence
  Antisense oligo
cacaaacgugucuuccagcu

SEQ ID NO: 8823 - RNA, 20 nt, Artificial Sequence
  Antisense oligo
augagcaagaagagauacuc

SEQ ID NO: 8824 - RNA, 20 nt, Artificial Sequence
  Antisense oligo
caacuuaugagcaagaagag

SEQ ID NO: 8825 - RNA, 20 nt, Artificial Sequence
  Antisense oligo
ccuaucaacuuaugagcaag

SEQ ID NO: 8826 - RNA, 20 nt, Artificial Sequence
  Antisense oligo
cccgugauguucuugagaau

SEQ ID NO: 8827 - RNA, 20 nt, Artificial Sequence
  Antisense oligo
uucccgugauguucuugaga

SEQ ID NO: 8828 - RNA, 20 nt, Artificial Sequence
  Antisense oligo
uuucccgugauguucuugag

SEQ ID NO: 8829 - RNA, 20 nt, Artificial Sequence
  Antisense oligo
ggacuaggaugguuuugcgc

SEQ ID NO: 8830 - RNA, 20 nt, Artificial Sequence
  Antisense oligo
aggacuaggaugguuuugcg

SEQ ID NO: 8831 - RNA, 20 nt, Artificial Sequence
  Antisense oligo
aaggacuaggaugguuuugc

SEQ ID NO: 8832 - RNA, 20 nt, Artificial Sequence
  Antisense oligo
agaaggacuaggaugguuuu

SEQ ID NO: 8833 - RNA, 20 nt, Artificial Sequence
  Antisense oligo
gagaaggacuaggaugguuu

SEQ ID NO: 8834 - RNA, 20 nt, Artificial Sequence
  Antisense oligo
ccaggagaaggacuaggaug

SEQ ID NO: 8835 - RNA, 20 nt, Artificial Sequence
  Antisense oligo
ccaccaggagaaggacuagg

SEQ ID NO: 8836 - RNA, 20 nt, Artificial Sequence
  Antisense oligo
cgccaccaggagaaggacua

SEQ ID NO: 8837 - RNA, 20 nt, Artificial Sequence
  Antisense oligo
caauacagcaacaaaugcca

SEQ ID NO: 8838 - RNA, 20 nt, Artificial Sequence
  Antisense oligo
cccaauacagcaacaaaugc

SEQ ID NO: 8839 - RNA, 20 nt, Artificial Sequence
  Antisense oligo
acccaauacagcaacaaaug

SEQ ID NO: 8840 - RNA, 20 nt, Artificial Sequence
  Antisense oligo
guaacccaauacagcaacaa

SEQ ID NO: 8841 - RNA, 20 nt, Artificial Sequence
  Antisense oligo
aguaacccaauacagcaaca

SEQ ID NO: 8842 - RNA, 20 nt, Artificial Sequence
  Antisense oligo
aaguaacccaauacagcaac

SEQ ID NO: 8843 - RNA, 20 nt, Artificial Sequence
  Antisense oligo
gaacaccaauaaaguaaccc

SEQ ID NO: 8844 - RNA, 20 nt, Artificial Sequence
  Antisense oligo
ccaauccagugcuuccucca

SEQ ID NO: 8845 - RNA, 20 nt, Artificial Sequence
  Antisense oligo
uccaauccagugcuuccucc

SEQ ID NO: 8846 - RNA, 20 nt, Artificial Sequence
  Antisense oligo
cuccaauccagugcuuccuc

SEQ ID NO: 8847 - RNA, 20 nt, Artificial Sequence
  Antisense oligo
aacaguuccucccuucucca

SEQ ID NO: 8848 - RNA, 20 nt, Artificial Sequence
  Antisense oligo
guaacaguuccucccuucuc

SEQ ID NO: 8849 - RNA, 20 nt, Artificial Sequence
  Antisense oligo
aguaacaguuccucccuucu

SEQ ID NO: 8850 - RNA, 20 nt, Artificial Sequence
  Antisense oligo
aaguaacaguuccucccuuc

SEQ ID NO: 8851 - RNA, 20 nt, Artificial Sequence
  Antisense oligo
agaaguaacaguuccucccu

SEQ ID NO: 8852 - RNA, 20 nt, Artificial Sequence
  Antisense oligo
uuagaaguaacaguuccucc

SEQ ID NO: 8853 - RNA, 20 nt, Artificial Sequence
  Antisense oligo
caggagacuaucaacacauc

SEQ ID NO: 8854 - RNA, 20 nt, Artificial Sequence
  Antisense oligo
ucaggagacuaucaacacau

SEQ ID NO: 8855 - RNA, 20 nt, Artificial Sequence
  Antisense oligo
cuucaggagacuaucaacac

SEQ ID NO: 8856 - RNA, 20 nt, Artificial Sequence
  Antisense oligo
ucuucaggagacuaucaaca

SEQ ID NO: 8857 - RNA, 20 nt, Artificial Sequence
  Antisense oligo
aucuucaggagacuaucaac

SEQ ID NO: 8858 - RNA, 20 nt, Artificial Sequence
  Antisense oligo
caucuucaggagacuaucaa

SEQ ID NO: 8859 - RNA, 20 nt, Artificial Sequence
  Antisense oligo
acaucuucaggagacuauca

SEQ ID NO: 8860 - RNA, 20 nt, Artificial Sequence
  Antisense oligo
cacaucuucaggagacuauc

SEQ ID NO: 8861 - RNA, 20 nt, Artificial Sequence
  Antisense oligo
cacacaucuucaggagacua

SEQ ID NO: 8862 - RNA, 20 nt, Artificial Sequence
  Antisense oligo
acguucccacacaucuucag

SEQ ID NO: 8863 - RNA, 20 nt, Artificial Sequence
  Antisense oligo
cacguucccacacaucuuca

SEQ ID NO: 8864 - RNA, 20 nt, Artificial Sequence
  Antisense oligo
ucacguucccacacaucuuc

SEQ ID NO: 8865 - RNA, 20 nt, Artificial Sequence
  Antisense oligo
uucacguucccacacaucuu

SEQ ID NO: 8866 - RNA, 20 nt, Artificial Sequence
  Antisense oligo
uuucacguucccacacaucu

SEQ ID NO: 8867 - RNA, 20 nt, Artificial Sequence
  Antisense oligo
guuucacguucccacacauc

SEQ ID NO: 8868 - RNA, 20 nt, Artificial Sequence
  Antisense oligo
uguuucacguucccacacau

SEQ ID NO: 8869 - RNA, 20 nt, Artificial Sequence
  Antisense oligo
auguuucacguucccacaca

SEQ ID NO: 8870 - RNA, 20 nt, Artificial Sequence
  Antisense oligo
gauguuucacguucccacac

SEQ ID NO: 8871 - RNA, 20 nt, Artificial Sequence
  Antisense oligo
agauguuucacguucccaca

SEQ ID NO: 8872 - RNA, 20 nt, Artificial Sequence
  Antisense oligo
cagauguuucacguucccac

SEQ ID NO: 8873 - RNA, 20 nt, Artificial Sequence
  Antisense oligo
uaucagauguuucacguucc

SEQ ID NO: 8874 - RNA, 20 nt, Artificial Sequence
  Antisense oligo
guaucagauguuucacguuc

SEQ ID NO: 8875 - RNA, 20 nt, Artificial Sequence
  Antisense oligo
cuuguaucagauguuucacg

SEQ ID NO: 8876 - RNA, 20 nt, Artificial Sequence
  Antisense oligo
ccuuguaucagauguuucac

SEQ ID NO: 8877 - RNA, 20 nt, Artificial Sequence
  Antisense oligo
caccuuguaucagauguuuc

SEQ ID NO: 8878 - RNA, 20 nt, Artificial Sequence
  Antisense oligo
ccaccuuguaucagauguuu

SEQ ID NO: 8879 - RNA, 20 nt, Artificial Sequence
  Antisense oligo
accaccuuguaucagauguu

SEQ ID NO: 8880 - RNA, 20 nt, Artificial Sequence
  Antisense oligo
uaccaccuuguaucagaugu

SEQ ID NO: 8881 - RNA, 20 nt, Artificial Sequence
  Antisense oligo
cuucucaggaauaccaccuu

SEQ ID NO: 8882 - RNA, 20 nt, Artificial Sequence
  Antisense oligo
acuucucaggaauaccaccu

SEQ ID NO: 8883 - RNA, 20 nt, Artificial Sequence
  Antisense oligo
cacuucucaggaauaccacc

SEQ ID NO: 8884 - RNA, 20 nt, Artificial Sequence
  Antisense oligo
ucacuucucaggaauaccac

SEQ ID NO: 8885 - RNA, 20 nt, Artificial Sequence
  Antisense oligo
uguucacuucucaggaauac

SEQ ID NO: 8886 - RNA, 20 nt, Artificial Sequence
  Antisense oligo
ccucaacuuuguucacuucu

SEQ ID NO: 8887 - RNA, 20 nt, Artificial Sequence
  Antisense oligo
cccucaacuuuguucacuuc

SEQ ID NO: 8888 - RNA, 20 nt, Artificial Sequence
  Antisense oligo
gcccucaacuuuguucacuu

SEQ ID NO: 8889 - RNA, 20 nt, Artificial Sequence
  Antisense oligo
gagcccucaacuuuguucac

SEQ ID NO: 8890 - RNA, 20 nt, Artificial Sequence
  Antisense oligo
agagcccucaacuuuguuca

SEQ ID NO: 8891 - RNA, 20 nt, Artificial Sequence
  Antisense oligo
gagagcccucaacuuuguuc

SEQ ID NO: 8892 - RNA, 20 nt, Artificial Sequence
  Antisense oligo
cuaacccuuugagagcccuc

SEQ ID NO: 8893 - RNA, 20 nt, Artificial Sequence
  Antisense oligo
uacuguguucuccucuaacc

SEQ ID NO: 8894 - RNA, 20 nt, Artificial Sequence
  Antisense oligo
ucuuacuguguucuccucua

SEQ ID NO: 8895 - RNA, 20 nt, Artificial Sequence
  Antisense oligo
gugauccauucuuacugugu

SEQ ID NO: 8896 - RNA, 20 nt, Artificial Sequence
  Antisense oligo
ugugauccauucuuacugug

SEQ ID NO: 8897 - RNA, 20 nt, Artificial Sequence
  Antisense oligo
acugugauccauucuuacug

SEQ ID NO: 8898 - RNA, 20 nt, Artificial Sequence
  Antisense oligo
cuacugugauccauucuuac

SEQ ID NO: 8899 - RNA, 20 nt, Artificial Sequence
  Antisense oligo
ugcuacugugauccauucuu

SEQ ID NO: 8900 - RNA, 20 nt, Artificial Sequence
  Antisense oligo
cugcuacugugauccauucu

SEQ ID NO: 8901 - RNA, 20 nt, Artificial Sequence
  Antisense oligo
ucugcuacugugauccauuc

SEQ ID NO: 8902 - RNA, 20 nt, Artificial Sequence
  Antisense oligo
aaagaggugaaagcgauccc

SEQ ID NO: 8903 - RNA, 20 nt, Artificial Sequence
  Antisense oligo
aaaagaggugaaagcgaucc

SEQ ID NO: 8904 - RNA, 20 nt, Artificial Sequence
  Antisense oligo
uaaaagaggugaaagcgauc

SEQ ID NO: 8905 - RNA, 20 nt, Artificial Sequence
  Antisense oligo
gcucuaagcccucaucuucu

SEQ ID NO: 8906 - RNA, 20 nt, Artificial Sequence
  Antisense oligo
cagaaauguguggcucuaag

SEQ ID NO: 8907 - RNA, 20 nt, Artificial Sequence
  Antisense oligo
agaccagaaauguguggcuc

SEQ ID NO: 8908 - RNA, 20 nt, Artificial Sequence
  Antisense oligo
cagaccagaaauguguggcu

SEQ ID NO: 8909 - RNA, 20 nt, Artificial Sequence
  Antisense oligo
acagaccagaaauguguggc

SEQ ID NO: 8910 - RNA, 20 nt, Artificial Sequence
  Antisense oligo
gagguggaaaggugaugugu

SEQ ID NO: 8911 - RNA, 20 nt, Artificial Sequence
  Antisense oligo
ggagguggaaaggugaugug

SEQ ID NO: 8912 - RNA, 20 nt, Artificial Sequence
  Antisense oligo
aggagguggaaaggugaugu

SEQ ID NO: 8913 - RNA, 20 nt, Artificial Sequence
  Antisense oligo
caggagguggaaaggugaug

SEQ ID NO: 8914 - RNA, 20 nt, Artificial Sequence
  Antisense oligo
aagcaacaggagguggaaag

SEQ ID NO: 8915 - RNA, 20 nt, Artificial Sequence
  Antisense oligo
gaagcaacaggagguggaaa

SEQ ID NO: 8916 - RNA, 20 nt, Artificial Sequence
  Antisense oligo
ggaagcaacaggagguggaa

SEQ ID NO: 8917 - RNA, 20 nt, Artificial Sequence
  Antisense oligo
aggaagcaacaggaggugga

SEQ ID NO: 8918 - RNA, 20 nt, Artificial Sequence
  Antisense oligo
cuccguuaugagaaaacagg

SEQ ID NO: 8919 - RNA, 20 nt, Artificial Sequence
  Antisense oligo
acuccguuaugagaaaacag

SEQ ID NO: 8920 - RNA, 20 nt, Artificial Sequence
  Antisense oligo
caacuccguuaugagaaaac

SEQ ID NO: 8921 - RNA, 20 nt, Artificial Sequence
  Antisense oligo
gcaacuccguuaugagaaaa

SEQ ID NO: 8922 - RNA, 20 nt, Artificial Sequence
  Antisense oligo
ugcaacuccguuaugagaaa

SEQ ID NO: 8923 - RNA, 20 nt, Artificial Sequence
  Antisense oligo
augcaacuccguuaugagaa

SEQ ID NO: 8924 - RNA, 20 nt, Artificial Sequence
  Antisense oligo
gaugcaacuccguuaugaga

SEQ ID NO: 8925 - RNA, 20 nt, Artificial Sequence
  Antisense oligo
ugaugcaacuccguuaugag

SEQ ID NO: 8926 - RNA, 20 nt, Artificial Sequence
  Antisense oligo
augaugcaacuccguuauga

SEQ ID NO: 8927 - RNA, 20 nt, Artificial Sequence
  Antisense oligo
aaugaugcaacuccguuaug

SEQ ID NO: 8928 - RNA, 20 nt, Artificial Sequence
  Antisense oligo
caaugaugcaacuccguuau

SEQ ID NO: 8929 - RNA, 20 nt, Artificial Sequence
  Antisense oligo
acaaugaugcaacuccguua

SEQ ID NO: 8930 - RNA, 20 nt, Artificial Sequence
  Antisense oligo
ccuaaacaaugaugcaacuc

SEQ ID NO: 8931 - RNA, 20 nt, Artificial Sequence
  Antisense oligo
cccuaaacaaugaugcaacu

SEQ ID NO: 8932 - RNA, 20 nt, Artificial Sequence
  Antisense oligo
gguccugaugauuuaacccu

SEQ ID NO: 8933 - RNA, 20 nt, Artificial Sequence
  Antisense oligo
guguggguccugaugauuua

SEQ ID NO: 8934 - RNA, 20 nt, Artificial Sequence
  Antisense oligo
cguguggguccugaugauuu

SEQ ID NO: 8935 - RNA, 20 nt, Artificial Sequence
  Antisense oligo
ccguguggguccugaugauu

SEQ ID NO: 8936 - RNA, 20 nt, Artificial Sequence
  Antisense oligo
uccguguggguccugaugau

SEQ ID NO: 8937 - RNA, 20 nt, Artificial Sequence
  Antisense oligo
auccguguggguccugauga

SEQ ID NO: 8938 - RNA, 20 nt, Artificial Sequence
  Antisense oligo
gauccguguggguccugaug

SEQ ID NO: 8939 - RNA, 20 nt, Artificial Sequence
  Antisense oligo
ugauccguguggguccugau

SEQ ID NO: 8940 - RNA, 20 nt, Artificial Sequence
  Antisense oligo
gugauccguguggguccuga

SEQ ID NO: 8941 - RNA, 20 nt, Artificial Sequence
  Antisense oligo
ugugauccguguggguccug

SEQ ID NO: 8942 - RNA, 20 nt, Artificial Sequence
  Antisense oligo
uugugauccguguggguccu

SEQ ID NO: 8943 - RNA, 20 nt, Artificial Sequence
  Antisense oligo
cuugugauccgugugggucc

SEQ ID NO: 8944 - RNA, 20 nt, Artificial Sequence
  Antisense oligo
acuugugauccguguggguc

SEQ ID NO: 8945 - RNA, 20 nt, Artificial Sequence
  Antisense oligo
cacuugugauccgugugggu

SEQ ID NO: 8946 - RNA, 20 nt, Artificial Sequence
  Antisense oligo
ucacuugugauccguguggg

SEQ ID NO: 8947 - RNA, 20 nt, Artificial Sequence
  Antisense oligo
uucacuugugauccgugugg

SEQ ID NO: 8948 - RNA, 20 nt, Artificial Sequence
  Antisense oligo
guucacuugugauccgugug

SEQ ID NO: 8949 - RNA, 20 nt, Artificial Sequence
  Antisense oligo
gguucacuugugauccgugu

SEQ ID NO: 8950 - RNA, 20 nt, Artificial Sequence
  Antisense oligo
gugguucacuugugauccgu

SEQ ID NO: 8951 - RNA, 20 nt, Artificial Sequence
  Antisense oligo
cgugguucacuugugauccg

SEQ ID NO: 8952 - RNA, 20 nt, Artificial Sequence
  Antisense oligo
ucgugguucacuugugaucc

SEQ ID NO: 8953 - RNA, 20 nt, Artificial Sequence
  Antisense oligo
uucgugguucacuugugauc

SEQ ID NO: 8954 - RNA, 20 nt, Artificial Sequence
  Antisense oligo
uuucgugguucacuugugau

SEQ ID NO: 8955 - RNA, 20 nt, Artificial Sequence
  Antisense oligo
cuuucgugguucacuuguga

SEQ ID NO: 8956 - RNA, 20 nt, Artificial Sequence
  Antisense oligo
ucuuucgugguucacuugug

SEQ ID NO: 8957 - RNA, 20 nt, Artificial Sequence
  Antisense oligo
uucuuucgugguucacuugu

SEQ ID NO: 8958 - RNA, 20 nt, Artificial Sequence
  Antisense oligo
guuucuuucgugguucacuu

SEQ ID NO: 8959 - RNA, 20 nt, Artificial Sequence
  Antisense oligo
gcaucugacaggaaauguaa

SEQ ID NO: 8960 - RNA, 20 nt, Artificial Sequence
  Antisense oligo
agcaucugacaggaaaugua

SEQ ID NO: 8961 - RNA, 20 nt, Artificial Sequence
  Antisense oligo
aacagcaucugacaggaaau

SEQ ID NO: 8962 - RNA, 20 nt, Artificial Sequence
  Antisense oligo
gaaaacagcaucugacagga

SEQ ID NO: 8963 - RNA, 20 nt, Artificial Sequence
  Antisense oligo
agacacucggcagagauugc

SEQ ID NO: 8964 - RNA, 20 nt, Artificial Sequence
  Antisense oligo
cagacacucggcagagauug

SEQ ID NO: 8965 - RNA, 20 nt, Artificial Sequence
  Antisense oligo
ucagacacucggcagagauu

SEQ ID NO: 8966 - RNA, 20 nt, Artificial Sequence
  Antisense oligo
uucagacacucggcagagau

SEQ ID NO: 8967 - RNA, 20 nt, Artificial Sequence
  Antisense oligo
aauucagacacucggcagag

SEQ ID NO: 8968 - RNA, 20 nt, Artificial Sequence
  Antisense oligo
aaauucagacacucggcaga

SEQ ID NO: 8969 - RNA, 20 nt, Artificial Sequence
  Antisense oligo
caaggaaauucagacacucg

SEQ ID NO: 8970 - RNA, 20 nt, Artificial Sequence
  Antisense oligo
ucaaggaaauucagacacuc

SEQ ID NO: 8971 - RNA, 20 nt, Artificial Sequence
  Antisense oligo
guuggcagguuccuuuucaa

SEQ ID NO: 8972 - RNA, 20 nt, Artificial Sequence
  Antisense oligo
ggguuggcagguuccuuuuc

SEQ ID NO: 8973 - RNA, 20 nt, Artificial Sequence
  Antisense oligo
aggguuggcagguuccuuuu

SEQ ID NO: 8974 - RNA, 20 nt, Artificial Sequence
  Antisense oligo
caggguuggcagguuccuuu

SEQ ID NO: 8975 - RNA, 20 nt, Artificial Sequence
  Antisense oligo
ccaggguuggcagguuccuu

SEQ ID NO: 8976 - RNA, 20 nt, Artificial Sequence
  Antisense oligo
gacuccacccuacgucugca

SEQ ID NO: 8977 - RNA, 20 nt, Artificial Sequence
  Antisense oligo
gugccaggcaaaggcuccua

SEQ ID NO: 8978 - RNA, 20 nt, Artificial Sequence
  Antisense oligo
ucuaacccaggugccaggca

SEQ ID NO: 8979 - RNA, 20 nt, Artificial Sequence
  Antisense oligo
acgucuaacccaggugccag

SEQ ID NO: 8980 - RNA, 20 nt, Artificial Sequence
  Antisense oligo
accacgucuaacccaggugc

SEQ ID NO: 8981 - RNA, 20 nt, Artificial Sequence
  Antisense oligo
aaccacgucuaacccaggug

SEQ ID NO: 8982 - RNA, 20 nt, Artificial Sequence
  Antisense oligo
gaaccacgucuaacccaggu

SEQ ID NO: 8983 - RNA, 20 nt, Artificial Sequence
  Antisense oligo
ggaaccacgucuaacccagg

SEQ ID NO: 8984 - RNA, 20 nt, Artificial Sequence
  Antisense oligo
gggaaccacgucuaacccag

SEQ ID NO: 8985 - RNA, 20 nt, Artificial Sequence
  Antisense oligo
gaagcaggagugaguagcgg

SEQ ID NO: 8986 - RNA, 20 nt, Artificial Sequence
  Antisense oligo
ggaagcaggagugaguagcg

SEQ ID NO: 8987 - RNA, 20 nt, Artificial Sequence
  Antisense oligo
ugccaacagaggaagcagga

SEQ ID NO: 8988 - RNA, 20 nt, Artificial Sequence
  Antisense oligo
gagggugugcucugccaaca

SEQ ID NO: 8989 - RNA, 20 nt, Artificial Sequence
  Antisense oligo
ugagggugugcucugccaac

SEQ ID NO: 8990 - RNA, 20 nt, Artificial Sequence
  Antisense oligo
gugagggugugcucugccaa

SEQ ID NO: 8991 - RNA, 20 nt, Artificial Sequence
  Antisense oligo
aggauucgaggguuuaaccu

SEQ ID NO: 8992 - RNA, 20 nt, Artificial Sequence
  Antisense oligo
aaggauucgaggguuuaacc

SEQ ID NO: 8993 - RNA, 20 nt, Artificial Sequence
  Antisense oligo
caaggauucgaggguuuaac

SEQ ID NO: 8994 - RNA, 20 nt, Artificial Sequence
  Antisense oligo
acaaggauucgaggguuuaa

SEQ ID NO: 8995 - RNA, 20 nt, Artificial Sequence
  Antisense oligo
cacaaggauucgaggguuua

SEQ ID NO: 8996 - RNA, 20 nt, Artificial Sequence
  Antisense oligo
acacaaggauucgaggguuu

SEQ ID NO: 8997 - RNA, 20 nt, Artificial Sequence
  Antisense oligo
cacacaaggauucgaggguu

SEQ ID NO: 8998 - RNA, 20 nt, Artificial Sequence
  Antisense oligo
acacacaaggauucgagggu

SEQ ID NO: 8999 - RNA, 20 nt, Artificial Sequence
  Antisense oligo
gacacacaaggauucgaggg

SEQ ID NO: 9000 - RNA, 20 nt, Artificial Sequence
  Antisense oligo
agacacacaaggauucgagg

SEQ ID NO: 9001 - RNA, 20 nt, Artificial Sequence
  Antisense oligo
uagacacacaaggauucgag

SEQ ID NO: 9002 - RNA, 20 nt, Artificial Sequence
  Antisense oligo
uuagacacacaaggauucga

SEQ ID NO: 9003 - RNA, 20 nt, Artificial Sequence
  Antisense oligo
uuuagacacacaaggauucg

SEQ ID NO: 9004 - RNA, 20 nt, Artificial Sequence
  Antisense oligo
cuuuagacacacaaggauuc

SEQ ID NO: 9005 - RNA, 20 nt, Artificial Sequence
  Antisense oligo
caucuuuagacacacaagga

SEQ ID NO: 9006 - RNA, 20 nt, Artificial Sequence
  Antisense oligo
acaucuuuagacacacaagg

SEQ ID NO: 9007 - RNA, 20 nt, Artificial Sequence
  Antisense oligo
gacaucuuuagacacacaag

SEQ ID NO: 9008 - RNA, 20 nt, Artificial Sequence
  Antisense oligo
cagacaucuuuagacacaca

SEQ ID NO: 9009 - RNA, 20 nt, Artificial Sequence
  Antisense oligo
gaccuaguaagaggacagac

SEQ ID NO: 9010 - RNA, 20 nt, Artificial Sequence
  Antisense oligo
ugaccuaguaagaggacaga

SEQ ID NO: 9011 - RNA, 20 nt, Artificial Sequence
  Antisense oligo
cugaccuaguaagaggacag

SEQ ID NO: 9012 - RNA, 20 nt, Artificial Sequence
  Antisense oligo
acugaccuaguaagaggaca

SEQ ID NO: 9013 - RNA, 20 nt, Artificial Sequence
  Antisense oligo
gacugaccuaguaagaggac

SEQ ID NO: 9014 - RNA, 20 nt, Artificial Sequence
  Antisense oligo
cgacugaccuaguaagagga

SEQ ID NO: 9015 - RNA, 20 nt, Artificial Sequence
  Antisense oligo
gcgacugaccuaguaagagg

SEQ ID NO: 9016 - RNA, 20 nt, Artificial Sequence
  Antisense oligo
agcgacugaccuaguaagag

SEQ ID NO: 9017 - RNA, 20 nt, Artificial Sequence
  Antisense oligo
gagcgacugaccuaguaaga

SEQ ID NO: 9018 - RNA, 20 nt, Artificial Sequence
  Antisense oligo
cgagcgacugaccuaguaag

SEQ ID NO: 9019 - RNA, 20 nt, Artificial Sequence
  Antisense oligo
ccgagcgacugaccuaguaa

SEQ ID NO: 9020 - RNA, 20 nt, Artificial Sequence
  Antisense oligo
uagccgagcgacugaccuag

SEQ ID NO: 9021 - RNA, 20 nt, Artificial Sequence
  Antisense oligo
cuagccgagcgacugaccua

SEQ ID NO: 9022 - RNA, 20 nt, Artificial Sequence
  Antisense oligo
agaccuagccgagcgacuga

SEQ ID NO: 9023 - RNA, 20 nt, Artificial Sequence
  Antisense oligo
uagaccuagccgagcgacug

SEQ ID NO: 9024 - RNA, 20 nt, Artificial Sequence
  Antisense oligo
cuagaccuagccgagcgacu

SEQ ID NO: 9025 - RNA, 20 nt, Artificial Sequence
  Antisense oligo
cuuccggucuguaauucuag

SEQ ID NO: 9026 - RNA, 20 nt, Artificial Sequence
  Antisense oligo
acuuccggucuguaauucua

SEQ ID NO: 9027 - RNA, 20 nt, Artificial Sequence
  Antisense oligo
gacuuccggucuguaauucu

SEQ ID NO: 9028 - RNA, 20 nt, Artificial Sequence
  Antisense oligo
ugacuuccggucuguaauuc

SEQ ID NO: 9029 - RNA, 20 nt, Artificial Sequence
  Antisense oligo
augacuuccggucuguaauu

SEQ ID NO: 9030 - RNA, 20 nt, Artificial Sequence
  Antisense oligo
aaugacuuccggucuguaau

SEQ ID NO: 9031 - RNA, 20 nt, Artificial Sequence
  Antisense oligo
aaaugacuuccggucuguaa

SEQ ID NO: 9032 - RNA, 20 nt, Artificial Sequence
  Antisense oligo
aaaaugacuuccggucugua

SEQ ID NO: 9033 - RNA, 20 nt, Artificial Sequence
  Antisense oligo
gaaaaugacuuccggucugu

SEQ ID NO: 9034 - RNA, 20 nt, Artificial Sequence
  Antisense oligo
cacacuguggaggcaaugau

SEQ ID NO: 9035 - RNA, 20 nt, Artificial Sequence
  Antisense oligo
uccauacauagccacacugu

SEQ ID NO: 9036 - RNA, 20 nt, Artificial Sequence
  Antisense oligo
cuccauacauagccacacug

SEQ ID NO: 9037 - RNA, 20 nt, Artificial Sequence
  Antisense oligo
ucuccauacauagccacacu

SEQ ID NO: 9038 - RNA, 20 nt, Artificial Sequence
  Antisense oligo
uucuccauacauagccacac

SEQ ID NO: 9039 - RNA, 20 nt, Artificial Sequence
  Antisense oligo
cuucuccauacauagccaca

SEQ ID NO: 9040 - RNA, 20 nt, Artificial Sequence
  Antisense oligo
acuucuccauacauagccac

SEQ ID NO: 9041 - RNA, 20 nt, Artificial Sequence
  Antisense oligo
gacuucuccauacauagcca

SEQ ID NO: 9042 - RNA, 20 nt, Artificial Sequence
  Antisense oligo
ggacuucuccauacauagcc

SEQ ID NO: 9043 - RNA, 20 nt, Artificial Sequence
  Antisense oligo
cggacuucuccauacauagc

SEQ ID NO: 9044 - RNA, 20 nt, Artificial Sequence
  Antisense oligo
ucggacuucuccauacauag

SEQ ID NO: 9045 - RNA, 20 nt, Artificial Sequence
  Antisense oligo
aucggacuucuccauacaua

SEQ ID NO: 9046 - RNA, 20 nt, Artificial Sequence
  Antisense oligo
caucggacuucuccauacau

SEQ ID NO: 9047 - RNA, 20 nt, Artificial Sequence
  Antisense oligo
gcaucggacuucuccauaca

SEQ ID NO: 9048 - RNA, 20 nt, Artificial Sequence
  Antisense oligo
ugcaucggacuucuccauac

SEQ ID NO: 9049 - RNA, 20 nt, Artificial Sequence
  Antisense oligo
cacugcaucggacuucucca

SEQ ID NO: 9050 - RNA, 20 nt, Artificial Sequence
  Antisense oligo
gcacugcaucggacuucucc

SEQ ID NO: 9051 - RNA, 20 nt, Artificial Sequence
  Antisense oligo
ggcacugcaucggacuucuc

SEQ ID NO: 9052 - RNA, 20 nt, Artificial Sequence
  Antisense oligo
uggcacugcaucggacuucu

SEQ ID NO: 9053 - RNA, 20 nt, Artificial Sequence
  Antisense oligo
cuggcacugcaucggacuuc

SEQ ID NO: 9054 - RNA, 20 nt, Artificial Sequence
  Antisense oligo
acuggcacugcaucggacuu

SEQ ID NO: 9055 - RNA, 20 nt, Artificial Sequence
  Antisense oligo
aacuggcacugcaucggacu

SEQ ID NO: 9056 - RNA, 20 nt, Artificial Sequence
  Antisense oligo
uaacuggcacugcaucggac

SEQ ID NO: 9057 - RNA, 20 nt, Artificial Sequence
  Antisense oligo
guaacuggcacugcaucgga

SEQ ID NO: 9058 - RNA, 20 nt, Artificial Sequence
  Antisense oligo
guguaacuggcacugcaucg

SEQ ID NO: 9059 - RNA, 20 nt, Artificial Sequence
  Antisense oligo
uguguaacuggcacugcauc

SEQ ID NO: 9060 - RNA, 20 nt, Artificial Sequence
  Antisense oligo
auguguaacuggcacugcau

SEQ ID NO: 9061 - RNA, 20 nt, Artificial Sequence
  Antisense oligo
gauguguaacuggcacugca

SEQ ID NO: 9062 - RNA, 20 nt, Artificial Sequence
  Antisense oligo
ggauguguaacuggcacugc

SEQ ID NO: 9063 - RNA, 20 nt, Artificial Sequence
  Antisense oligo
aggauguguaacuggcacug

SEQ ID NO: 9064 - RNA, 20 nt, Artificial Sequence
  Antisense oligo
gaaggauguguaacuggcac

SEQ ID NO: 9065 - RNA, 20 nt, Artificial Sequence
  Antisense oligo
ugaaggauguguaacuggca

SEQ ID NO: 9066 - RNA, 20 nt, Artificial Sequence
  Antisense oligo
augaaggauguguaacuggc

SEQ ID NO: 9067 - RNA, 20 nt, Artificial Sequence
  Antisense oligo
caugaaggauguguaacugg

SEQ ID NO: 9068 - RNA, 20 nt, Artificial Sequence
  Antisense oligo
aacaggucacacacaugaag

SEQ ID NO: 9069 - RNA, 20 nt, Artificial Sequence
  Antisense oligo
aaacaggucacacacaugaa

SEQ ID NO: 9070 - RNA, 20 nt, Artificial Sequence
  Antisense oligo
gcucaagagcuucaagaaag

SEQ ID NO: 9071 - RNA, 20 nt, Artificial Sequence
  Antisense oligo
aggccaagacacguuauuau

SEQ ID NO: 9072 - RNA, 20 nt, Artificial Sequence
  Antisense oligo
caggccaagacacguuauua

SEQ ID NO: 9073 - RNA, 20 nt, Artificial Sequence
  Antisense oligo
ccaggccaagacacguuauu

SEQ ID NO: 9074 - RNA, 20 nt, Artificial Sequence
  Antisense oligo
uccaggccaagacacguuau

SEQ ID NO: 9075 - RNA, 20 nt, Artificial Sequence
  Antisense oligo
auccaggccaagacacguua

SEQ ID NO: 9076 - RNA, 20 nt, Artificial Sequence
  Antisense oligo
uagauccaggccaagacacg

SEQ ID NO: 9077 - RNA, 20 nt, Artificial Sequence
  Antisense oligo
auagauccaggccaagacac

SEQ ID NO: 9078 - RNA, 20 nt, Artificial Sequence
  Antisense oligo
acauagauccaggccaagac

SEQ ID NO: 9079 - RNA, 20 nt, Artificial Sequence
  Antisense oligo
aacauagauccaggccaaga

SEQ ID NO: 9080 - RNA, 20 nt, Artificial Sequence
  Antisense oligo
gaacauagauccaggccaag

SEQ ID NO: 9081 - RNA, 20 nt, Artificial Sequence
  Antisense oligo
ggaacauagauccaggccaa

SEQ ID NO: 9082 - RNA, 20 nt, Artificial Sequence
  Antisense oligo
ccucgauggaacauagaucc

SEQ ID NO: 9083 - RNA, 20 nt, Artificial Sequence
  Antisense oligo
gccucgauggaacauagauc

SEQ ID NO: 9084 - RNA, 20 nt, Artificial Sequence
  Antisense oligo
agccucgauggaacauagau

SEQ ID NO: 9085 - RNA, 20 nt, Artificial Sequence
  Antisense oligo
cagccucgauggaacauaga

SEQ ID NO: 9086 - RNA, 20 nt, Artificial Sequence
  Antisense oligo
ccagccucgauggaacauag

SEQ ID NO: 9087 - RNA, 20 nt, Artificial Sequence
  Antisense oligo
cccagccucgauggaacaua

SEQ ID NO: 9088 - RNA, 20 nt, Artificial Sequence
  Antisense oligo
gcccagccucgauggaacau

SEQ ID NO: 9089 - RNA, 20 nt, Artificial Sequence
  Antisense oligo
ugcccagccucgauggaaca

SEQ ID NO: 9090 - RNA, 20 nt, Artificial Sequence
  Antisense oligo
caugcccagccucgauggaa

SEQ ID NO: 9091 - RNA, 20 nt, Artificial Sequence
  Antisense oligo
acaugcccagccucgaugga

SEQ ID NO: 9092 - RNA, 20 nt, Artificial Sequence
  Antisense oligo
cugggauuacaggugggagc

SEQ ID NO: 9093 - RNA, 20 nt, Artificial Sequence
  Antisense oligo
gcugggauuacaggugggag

SEQ ID NO: 9094 - RNA, 20 nt, Artificial Sequence
  Antisense oligo
ugcugggauuacagguggga

SEQ ID NO: 9095 - RNA, 20 nt, Artificial Sequence
  Antisense oligo
gugcugggauuacagguggg

SEQ ID NO: 9096 - RNA, 20 nt, Artificial Sequence
  Antisense oligo
agugcugggauuacaggugg

SEQ ID NO: 9097 - RNA, 20 nt, Artificial Sequence
  Antisense oligo
aagugcugggauuacaggug

SEQ ID NO: 9098 - RNA, 20 nt, Artificial Sequence
  Antisense oligo
gaagugcugggauuacaggu

SEQ ID NO: 9099 - RNA, 20 nt, Artificial Sequence
  Antisense oligo
ugaagugcugggauuacagg

SEQ ID NO: 9100 - RNA, 20 nt, Artificial Sequence
  Antisense oligo
cugaagugcugggauuacag

SEQ ID NO: 9101 - RNA, 20 nt, Artificial Sequence
  Antisense oligo
ccugaagugcugggauuaca

SEQ ID NO: 9102 - RNA, 20 nt, Artificial Sequence
  Antisense oligo
uccugaagugcugggauuac

SEQ ID NO: 9103 - RNA, 20 nt, Artificial Sequence
  Antisense oligo
uccugccuuggccuccugaa

SEQ ID NO: 9104 - RNA, 20 nt, Artificial Sequence
  Antisense oligo
ugcuauguugcccaggcugg

SEQ ID NO: 9105 - RNA, 20 nt, Artificial Sequence
  Antisense oligo
uugcuauguugcccaggcug

SEQ ID NO: 9106 - RNA, 20 nt, Artificial Sequence
  Antisense oligo
cuugcuauguugcccaggcu

SEQ ID NO: 9107 - RNA, 20 nt, Artificial Sequence
  Antisense oligo
ucuugcuauguugcccaggc

SEQ ID NO: 9108 - RNA, 20 nt, Artificial Sequence
  Antisense oligo
gucuugcuauguugcccagg

SEQ ID NO: 9109 - RNA, 20 nt, Artificial Sequence
  Antisense oligo
caccaccgugucuugcuaau

SEQ ID NO: 9110 - RNA, 20 nt, Artificial Sequence
  Antisense oligo
gcaccaccgugucuugcuaa

SEQ ID NO: 9111 - RNA, 20 nt, Artificial Sequence
  Antisense oligo
ugcaccaccgugucuugcua

SEQ ID NO: 9112 - RNA, 20 nt, Artificial Sequence
  Antisense oligo
cucagccucccaaguaguug

SEQ ID NO: 9113 - RNA, 20 nt, Artificial Sequence
  Antisense oligo
ccucagccucccaaguaguu

SEQ ID NO: 9114 - RNA, 20 nt, Artificial Sequence
  Antisense oligo
gccucagccucccaaguagu

SEQ ID NO: 9115 - RNA, 20 nt, Artificial Sequence
  Antisense oligo
ugccucagccucccaaguag

SEQ ID NO: 9116 - RNA, 20 nt, Artificial Sequence
  Antisense oligo
cugccucagccucccaagua

SEQ ID NO: 9117 - RNA, 20 nt, Artificial Sequence
  Antisense oligo
ugauccuccugccucagccu

SEQ ID NO: 9118 - RNA, 20 nt, Artificial Sequence
  Antisense oligo
agugauccuccugccucagc

SEQ ID NO: 9119 - RNA, 20 nt, Artificial Sequence
  Antisense oligo
aagugauccuccugccucag

SEQ ID NO: 9120 - RNA, 20 nt, Artificial Sequence
  Antisense oligo
caagugauccuccugccuca

SEQ ID NO: 9121 - RNA, 20 nt, Artificial Sequence
  Antisense oligo
ucaagugauccuccugccuc

SEQ ID NO: 9122 - RNA, 20 nt, Artificial Sequence
  Antisense oligo
cucaagugauccuccugccu

SEQ ID NO: 9123 - RNA, 20 nt, Artificial Sequence
  Antisense oligo
gcucaagugauccuccugcc

SEQ ID NO: 9124 - RNA, 20 nt, Artificial Sequence
  Antisense oligo
ggcucaagugauccuccugc

SEQ ID NO: 9125 - RNA, 20 nt, Artificial Sequence
  Antisense oligo
aggcucaagugauccuccug

SEQ ID NO: 9126 - RNA, 20 nt, Artificial Sequence
  Antisense oligo
caggcucaagugauccuccu

SEQ ID NO: 9127 - RNA, 20 nt, Artificial Sequence
  Antisense oligo
ccaggcucaagugauccucc

SEQ ID NO: 9128 - RNA, 20 nt, Artificial Sequence
  Antisense oligo
cccaggcucaagugauccuc

SEQ ID NO: 9129 - RNA, 20 nt, Artificial Sequence
  Antisense oligo
ucccaggcucaagugauccu

SEQ ID NO: 9130 - RNA, 20 nt, Artificial Sequence
  Antisense oligo
auuucccagaacucaaggau

SEQ ID NO: 9131 - RNA, 20 nt, Artificial Sequence
  Antisense oligo
ucccauauccaauuaacagg

SEQ ID NO: 9132 - RNA, 20 nt, Artificial Sequence
  Antisense oligo
gucccauauccaauuaacag

SEQ ID NO: 9133 - RNA, 20 nt, Artificial Sequence
  Antisense oligo
aggaggucccauauccaauu

SEQ ID NO: 9134 - RNA, 20 nt, Artificial Sequence
  Antisense oligo
caggaggucccauauccaau

SEQ ID NO: 9135 - RNA, 20 nt, Artificial Sequence
  Antisense oligo
ccaggaggucccauauccaa

SEQ ID NO: 9136 - RNA, 20 nt, Artificial Sequence
  Antisense oligo
uccaggaggucccauaucca

SEQ ID NO: 9137 - RNA, 20 nt, Artificial Sequence
  Antisense oligo
auccaggaggucccauaucc

SEQ ID NO: 9138 - RNA, 20 nt, Artificial Sequence
  Antisense oligo
cauccaggaggucccauauc

SEQ ID NO: 9139 - RNA, 20 nt, Artificial Sequence
  Antisense oligo
ucauccaggaggucccauau

SEQ ID NO: 9140 - RNA, 20 nt, Artificial Sequence
  Antisense oligo
aucauccaggaggucccaua

SEQ ID NO: 9141 - RNA, 20 nt, Artificial Sequence
  Antisense oligo
gaucauccaggaggucccau

SEQ ID NO: 9142 - RNA, 20 nt, Artificial Sequence
  Antisense oligo
cuaagcagaaaguuugguuc

SEQ ID NO: 9143 - RNA, 20 nt, Artificial Sequence
  Antisense oligo
aaccuaagcagaaaguuugg

SEQ ID NO: 9144 - RNA, 20 nt, Artificial Sequence
  Antisense oligo
ugacaugaaaaccuaagcag

SEQ ID NO: 9145 - RNA, 20 nt, Artificial Sequence
  Antisense oligo
cugacaugaaaaccuaagca

SEQ ID NO: 9146 - RNA, 20 nt, Artificial Sequence
  Antisense oligo
agcugacaugaaaaccuaag

SEQ ID NO: 9147 - RNA, 20 nt, Artificial Sequence
  Antisense oligo
gaaagcugacaugaaaaccu

SEQ ID NO: 9148 - RNA, 20 nt, Artificial Sequence
  Antisense oligo
gaacaagaacaggacagaau

SEQ ID NO: 9149 - RNA, 20 nt, Artificial Sequence
  Antisense oligo
ugcaacgugaacaagaacag

SEQ ID NO: 9150 - RNA, 20 nt, Artificial Sequence
  Antisense oligo
cugcaacgugaacaagaaca

SEQ ID NO: 9151 - RNA, 20 nt, Artificial Sequence
  Antisense oligo
gcugcaacgugaacaagaac

SEQ ID NO: 9152 - RNA, 20 nt, Artificial Sequence
  Antisense oligo
ugcugcaacgugaacaagaa

SEQ ID NO: 9153 - RNA, 20 nt, Artificial Sequence
  Antisense oligo
augcugcaacgugaacaaga

SEQ ID NO: 9154 - RNA, 20 nt, Artificial Sequence
  Antisense oligo
gaugcugcaacgugaacaag

SEQ ID NO: 9155 - RNA, 20 nt, Artificial Sequence
  Antisense oligo
agaugcugcaacgugaacaa

SEQ ID NO: 9156 - RNA, 20 nt, Artificial Sequence
  Antisense oligo
aagaugcugcaacgugaaca

SEQ ID NO: 9157 - RNA, 20 nt, Artificial Sequence
  Antisense oligo
gaagaugcugcaacgugaac

SEQ ID NO: 9158 - RNA, 20 nt, Artificial Sequence
  Antisense oligo
ggaagaugcugcaacgugaa

SEQ ID NO: 9159 - RNA, 20 nt, Artificial Sequence
  Antisense oligo
gggaagaugcugcaacguga

SEQ ID NO: 9160 - RNA, 20 nt, Artificial Sequence
  Antisense oligo
agggaagaugcugcaacgug

SEQ ID NO: 9161 - RNA, 20 nt, Artificial Sequence
  Antisense oligo
aagggaagaugcugcaacgu

SEQ ID NO: 9162 - RNA, 20 nt, Artificial Sequence
  Antisense oligo
gaagggaagaugcugcaacg

SEQ ID NO: 9163 - RNA, 20 nt, Artificial Sequence
  Antisense oligo
ugaauaacccagaagggaag

SEQ ID NO: 9164 - RNA, 20 nt, Artificial Sequence
  Antisense oligo
gugaauaacccagaagggaa

SEQ ID NO: 9165 - RNA, 20 nt, Artificial Sequence
  Antisense oligo
ggugaauaacccagaaggga

SEQ ID NO: 9166 - RNA, 20 nt, Artificial Sequence
  Antisense oligo
cggugaauaacccagaaggg

SEQ ID NO: 9167 - RNA, 20 nt, Artificial Sequence
  Antisense oligo
aacggugaauaacccagaag

SEQ ID NO: 9168 - RNA, 20 nt, Artificial Sequence
  Antisense oligo
aaacggugaauaacccagaa

SEQ ID NO: 9169 - RNA, 20 nt, Artificial Sequence
  Antisense oligo
aaaacggugaauaacccaga

SEQ ID NO: 9170 - RNA, 20 nt, Artificial Sequence
  Antisense oligo
caaaacggugaauaacccag

SEQ ID NO: 9171 - RNA, 20 nt, Artificial Sequence
  Antisense oligo
acaaaacggugaauaaccca

SEQ ID NO: 9172 - RNA, 20 nt, Artificial Sequence
  Antisense oligo
aacaaaacggugaauaaccc

SEQ ID NO: 9173 - RNA, 20 nt, Artificial Sequence
  Antisense oligo
cuccaaaacaaaacggugaa

SEQ ID NO: 9174 - RNA, 20 nt, Artificial Sequence
  Antisense oligo
ccuccaaaacaaaacgguga

SEQ ID NO: 9175 - RNA, 20 nt, Artificial Sequence
  Antisense oligo
accuccaaaacaaaacggug

SEQ ID NO: 9176 - RNA, 20 nt, Artificial Sequence
  Antisense oligo
aaccuccaaaacaaaacggu

SEQ ID NO: 9177 - RNA, 20 nt, Artificial Sequence
  Antisense oligo
caugaugccaggaaaagcaa

SEQ ID NO: 9178 - RNA, 20 nt, Artificial Sequence
  Antisense oligo
agcagcacaugaugccagga

SEQ ID NO: 9179 - RNA, 20 nt, Artificial Sequence
  Antisense oligo
aagcagcacaugaugccagg

SEQ ID NO: 9180 - RNA, 20 nt, Artificial Sequence
  Antisense oligo
gaagcagcacaugaugccag

SEQ ID NO: 9181 - RNA, 20 nt, Artificial Sequence
  Antisense oligo
ggaagcagcacaugaugcca

SEQ ID NO: 9182 - RNA, 20 nt, Artificial Sequence
  Antisense oligo
gaggaagcagcacaugaugc

SEQ ID NO: 9183 - RNA, 20 nt, Artificial Sequence
  Antisense oligo
ggaggaagcagcacaugaug

SEQ ID NO: 9184 - RNA, 20 nt, Artificial Sequence
  Antisense oligo
aaccuggaggaagcagcaca

SEQ ID NO: 9185 - RNA, 20 nt, Artificial Sequence
  Antisense oligo
gaaccuggaggaagcagcac

SEQ ID NO: 9186 - RNA, 20 nt, Artificial Sequence
  Antisense oligo
aaggaaccuggaggaagcag

SEQ ID NO: 9187 - RNA, 20 nt, Artificial Sequence
  Antisense oligo
aagugaaaggaaccuggagg

SEQ ID NO: 9188 - RNA, 20 nt, Artificial Sequence
  Antisense oligo
caagugaaaggaaccuggag

SEQ ID NO: 9189 - RNA, 20 nt, Artificial Sequence
  Antisense oligo
aucaacaagugaaaggaacc

SEQ ID NO: 9190 - RNA, 20 nt, Artificial Sequence
  Antisense oligo
uccagacauaggaggaaaau

SEQ ID NO: 9191 - RNA, 20 nt, Artificial Sequence
  Antisense oligo
uguccagacauaggaggaaa

SEQ ID NO: 9192 - RNA, 20 nt, Artificial Sequence
  Antisense oligo
caaacaagaauguccagaca

SEQ ID NO: 9193 - RNA, 20 nt, Artificial Sequence
  Antisense oligo
acaaacaagaauguccagac

SEQ ID NO: 9194 - RNA, 20 nt, Artificial Sequence
  Antisense oligo
acuugugagggcuuucucuu

SEQ ID NO: 9195 - RNA, 20 nt, Artificial Sequence
  Antisense oligo
ccacuugugagggcuuucuc

SEQ ID NO: 9196 - RNA, 20 nt, Artificial Sequence
  Antisense oligo
acccacuugugagggcuuuc

SEQ ID NO: 9197 - RNA, 20 nt, Artificial Sequence
  Antisense oligo
caacccacuugugagggcuu

SEQ ID NO: 9198 - RNA, 20 nt, Artificial Sequence
  Antisense oligo
agggccaacccacuugugag

SEQ ID NO: 9199 - RNA, 20 nt, Artificial Sequence
  Antisense oligo
gagggccaacccacuuguga

SEQ ID NO: 9200 - RNA, 20 nt, Artificial Sequence
  Antisense oligo
agagggccaacccacuugug

SEQ ID NO: 9201 - RNA, 20 nt, Artificial Sequence
  Antisense oligo
uuccaggucgagccacagca

SEQ ID NO: 9202 - RNA, 20 nt, Artificial Sequence
  Antisense oligo
acuuccaggucgagccacag

SEQ ID NO: 9203 - RNA, 20 nt, Artificial Sequence
  Antisense oligo
aacuuccaggucgagccaca

SEQ ID NO: 9204 - RNA, 20 nt, Artificial Sequence
  Antisense oligo
caacuuccaggucgagccac

SEQ ID NO: 9205 - RNA, 20 nt, Artificial Sequence
  Antisense oligo
ccaacuuccaggucgagcca

SEQ ID NO: 9206 - RNA, 20 nt, Artificial Sequence
  Antisense oligo
aggccaacuuccaggucgag

SEQ ID NO: 9207 - RNA, 20 nt, Artificial Sequence
  Antisense oligo
caggccaacuuccaggucga

SEQ ID NO: 9208 - RNA, 20 nt, Artificial Sequence
  Antisense oligo
acaggccaacuuccaggucg

SEQ ID NO: 9209 - RNA, 20 nt, Artificial Sequence
  Antisense oligo
gacaggccaacuuccagguc

SEQ ID NO: 9210 - RNA, 20 nt, Artificial Sequence
  Antisense oligo
agacaggccaacuuccaggu

SEQ ID NO: 9211 - RNA, 20 nt, Artificial Sequence
  Antisense oligo
ggagacaggccaacuuccag

SEQ ID NO: 9212 - RNA, 20 nt, Artificial Sequence
  Antisense oligo
uucaggagacaggccaacuu

SEQ ID NO: 9213 - RNA, 20 nt, Artificial Sequence
  Antisense oligo
cuucaggagacaggccaacu

SEQ ID NO: 9214 - RNA, 20 nt, Artificial Sequence
  Antisense oligo
gacagaagacuucaggagac

SEQ ID NO: 9215 - RNA, 20 nt, Artificial Sequence
  Antisense oligo
agacagaagacuucaggaga

SEQ ID NO: 9216 - RNA, 20 nt, Artificial Sequence
  Antisense oligo
accacacugagaacacgggc

SEQ ID NO: 9217 - RNA, 20 nt, Artificial Sequence
  Antisense oligo
aaccacacugagaacacggg

SEQ ID NO: 9218 - RNA, 20 nt, Artificial Sequence
  Antisense oligo
agaaccacacugagaacacg

SEQ ID NO: 9219 - RNA, 20 nt, Artificial Sequence
  Antisense oligo
cggagaaccacacugagaac

SEQ ID NO: 9220 - RNA, 20 nt, Artificial Sequence
  Antisense oligo
uggcggagaaccacacugag

SEQ ID NO: 9221 - RNA, 20 nt, Artificial Sequence
  Antisense oligo
gaagcuaacagaagacauga

SEQ ID NO: 9222 - RNA, 20 nt, Artificial Sequence
  Antisense oligo
ggaagcuaacagaagacaug

SEQ ID NO: 9223 - RNA, 20 nt, Artificial Sequence
  Antisense oligo
acauggcagaacaaagggcc

SEQ ID NO: 9224 - RNA, 20 nt, Artificial Sequence
  Antisense oligo
gauacauggcagaacaaagg

SEQ ID NO: 9225 - RNA, 20 nt, Artificial Sequence
  Antisense oligo
agauacauggcagaacaaag

SEQ ID NO: 9226 - RNA, 20 nt, Artificial Sequence
  Antisense oligo
cacagauacauggcagaaca

SEQ ID NO: 9227 - RNA, 20 nt, Artificial Sequence
  Antisense oligo
ccacagauacauggcagaac

SEQ ID NO: 9228 - RNA, 20 nt, Artificial Sequence
  Antisense oligo
uuggaggccacagauacaug

SEQ ID NO: 9229 - RNA, 20 nt, Artificial Sequence
  Antisense oligo
gauuggaggccacagauaca

SEQ ID NO: 9230 - RNA, 20 nt, Artificial Sequence
  Antisense oligo
ggauuggaggccacagauac

SEQ ID NO: 9231 - RNA, 20 nt, Artificial Sequence
  Antisense oligo
uggauuggaggccacagaua

SEQ ID NO: 9232 - RNA, 20 nt, Artificial Sequence
  Antisense oligo
cuagaaaggauaacgcaggg

SEQ ID NO: 9233 - RNA, 20 nt, Artificial Sequence
  Antisense oligo
agccaagagaugguucauuu

SEQ ID NO: 9234 - RNA, 20 nt, Artificial Sequence
  Antisense oligo
ccaaugcccugacacagcag

SEQ ID NO: 9235 - RNA, 20 nt, Artificial Sequence
  Antisense oligo
cccaaugcccugacacagca

SEQ ID NO: 9236 - RNA, 20 nt, Artificial Sequence
  Antisense oligo
cagcacaccaacugucaccc

SEQ ID NO: 9237 - RNA, 20 nt, Artificial Sequence
  Antisense oligo
ccagcacaccaacugucacc

SEQ ID NO: 9238 - RNA, 20 nt, Artificial Sequence
  Antisense oligo
uccagcacaccaacugucac

SEQ ID NO: 9239 - RNA, 20 nt, Artificial Sequence
  Antisense oligo
ccauccagcacaccaacugu

SEQ ID NO: 9240 - RNA, 20 nt, Artificial Sequence
  Antisense oligo
uccauccagcacaccaacug

SEQ ID NO: 9241 - RNA, 20 nt, Artificial Sequence
  Antisense oligo
aaagacaugguccauccagc

SEQ ID NO: 9242 - RNA, 20 nt, Artificial Sequence
  Antisense oligo
aaaagacaugguccauccag

SEQ ID NO: 9243 - RNA, 20 nt, Artificial Sequence
  Antisense oligo
acugagccacugcacuccag

SEQ ID NO: 9244 - RNA, 20 nt, Artificial Sequence
  Antisense oligo
gacugagccacugcacucca

SEQ ID NO: 9245 - RNA, 20 nt, Artificial Sequence
  Antisense oligo
agacugagccacugcacucc

SEQ ID NO: 9246 - RNA, 20 nt, Artificial Sequence
  Antisense oligo
gagacugagccacugcacuc

SEQ ID NO: 9247 - RNA, 20 nt, Artificial Sequence
  Antisense oligo
gguugcagugagccgagacu

SEQ ID NO: 9248 - RNA, 20 nt, Artificial Sequence
  Antisense oligo
agguugcagugagccgagac

SEQ ID NO: 9249 - RNA, 20 nt, Artificial Sequence
  Antisense oligo
gagguugcagugagccgaga

SEQ ID NO: 9250 - RNA, 20 nt, Artificial Sequence
  Antisense oligo
agagguugcagugagccgag

SEQ ID NO: 9251 - RNA, 20 nt, Artificial Sequence
  Antisense oligo
cagagguugcagugagccga

SEQ ID NO: 9252 - RNA, 20 nt, Artificial Sequence
  Antisense oligo
agcagagguugcagugagcc

SEQ ID NO: 9253 - RNA, 20 nt, Artificial Sequence
  Antisense oligo
aagcagagguugcagugagc

SEQ ID NO: 9254 - RNA, 20 nt, Artificial Sequence
  Antisense oligo
gaagcagagguugcagugag

SEQ ID NO: 9255 - RNA, 20 nt, Artificial Sequence
  Antisense oligo
ggaagcagagguugcaguga

SEQ ID NO: 9256 - RNA, 20 nt, Artificial Sequence
  Antisense oligo
aggaagcagagguugcagug

SEQ ID NO: 9257 - RNA, 20 nt, Artificial Sequence
  Antisense oligo
cacuugaacccaggaagcag

SEQ ID NO: 9258 - RNA, 20 nt, Artificial Sequence
  Antisense oligo
ucacuugaacccaggaagca

SEQ ID NO: 9259 - RNA, 20 nt, Artificial Sequence
  Antisense oligo
uucacuugaacccaggaagc

SEQ ID NO: 9260 - RNA, 20 nt, Artificial Sequence
  Antisense oligo
auucacuugaacccaggaag

SEQ ID NO: 9261 - RNA, 20 nt, Artificial Sequence
  Antisense oligo
gauucacuugaacccaggaa

SEQ ID NO: 9262 - RNA, 20 nt, Artificial Sequence
  Antisense oligo
agauucacuugaacccagga

SEQ ID NO: 9263 - RNA, 20 nt, Artificial Sequence
  Antisense oligo
aagauucacuugaacccagg

SEQ ID NO: 9264 - RNA, 20 nt, Artificial Sequence
  Antisense oligo
gcugagacacaagauucacu

SEQ ID NO: 9265 - RNA, 20 nt, Artificial Sequence
  Antisense oligo
ggcugagacacaagauucac

SEQ ID NO: 9266 - RNA, 20 nt, Artificial Sequence
  Antisense oligo
aggcugagacacaagauuca

SEQ ID NO: 9267 - RNA, 20 nt, Artificial Sequence
  Antisense oligo
gaggcugagacacaagauuc

SEQ ID NO: 9268 - RNA, 20 nt, Artificial Sequence
  Antisense oligo
ggaggcugagacacaagauu

SEQ ID NO: 9269 - RNA, 20 nt, Artificial Sequence
  Antisense oligo
gggaggcugagacacaagau

SEQ ID NO: 9270 - RNA, 20 nt, Artificial Sequence
  Antisense oligo
agggaggcugagacacaaga

SEQ ID NO: 9271 - RNA, 20 nt, Artificial Sequence
  Antisense oligo
uagggaggcugagacacaag

SEQ ID NO: 9272 - RNA, 20 nt, Artificial Sequence
  Antisense oligo
cuagggaggcugagacacaa

SEQ ID NO: 9273 - RNA, 20 nt, Artificial Sequence
  Antisense oligo
acuagggaggcugagacaca

SEQ ID NO: 9274 - RNA, 20 nt, Artificial Sequence
  Antisense oligo
uacuagggaggcugagacac

SEQ ID NO: 9275 - RNA, 20 nt, Artificial Sequence
  Antisense oligo
cuacuagggaggcugagaca

SEQ ID NO: 9276 - RNA, 20 nt, Artificial Sequence
  Antisense oligo
ccuguaaucucagcuacuag

SEQ ID NO: 9277 - RNA, 20 nt, Artificial Sequence
  Antisense oligo
accuguaaucucagcuacua

SEQ ID NO: 9278 - RNA, 20 nt, Artificial Sequence
  Antisense oligo
caccuguaaucucagcuacu

SEQ ID NO: 9279 - RNA, 20 nt, Artificial Sequence
  Antisense oligo
acaccuguaaucucagcuac

SEQ ID NO: 9280 - RNA, 20 nt, Artificial Sequence
  Antisense oligo
gacaccuguaaucucagcua

SEQ ID NO: 9281 - RNA, 20 nt, Artificial Sequence
  Antisense oligo
ggacaccuguaaucucagcu

SEQ ID NO: 9282 - RNA, 20 nt, Artificial Sequence
  Antisense oligo
aguucaagaccagccuggcc

SEQ ID NO: 9283 - RNA, 20 nt, Artificial Sequence
  Antisense oligo
gaguucaagaccagccuggc

SEQ ID NO: 9284 - RNA, 20 nt, Artificial Sequence
  Antisense oligo
ggaguucaagaccagccugg

SEQ ID NO: 9285 - RNA, 20 nt, Artificial Sequence
  Antisense oligo
aggaguucaagaccagccug

SEQ ID NO: 9286 - RNA, 20 nt, Artificial Sequence
  Antisense oligo
caggaguucaagaccagccu

SEQ ID NO: 9287 - RNA, 20 nt, Artificial Sequence
  Antisense oligo
ucaggaguucaagaccagcc

SEQ ID NO: 9288 - RNA, 20 nt, Artificial Sequence
  Antisense oligo
gucaggaguucaagaccagc

SEQ ID NO: 9289 - RNA, 20 nt, Artificial Sequence
  Antisense oligo
ugaggucaggaguucaagac

SEQ ID NO: 9290 - RNA, 20 nt, Artificial Sequence
  Antisense oligo
cacuugaggucaggaguuca

SEQ ID NO: 9291 - RNA, 20 nt, Artificial Sequence
  Antisense oligo
ucacuugaggucaggaguuc

SEQ ID NO: 9292 - RNA, 20 nt, Artificial Sequence
  Antisense oligo
aucacuugaggucaggaguu

SEQ ID NO: 9293 - RNA, 20 nt, Artificial Sequence
  Antisense oligo
gaucacuugaggucaggagu

SEQ ID NO: 9294 - RNA, 20 nt, Artificial Sequence
  Antisense oligo
ggaucacuugaggucaggag

SEQ ID NO: 9295 - RNA, 20 nt, Artificial Sequence
  Antisense oligo
uggaucacuugaggucagga

SEQ ID NO: 9296 - RNA, 20 nt, Artificial Sequence
  Antisense oligo
auggaucacuugaggucagg

SEQ ID NO: 9297 - RNA, 20 nt, Artificial Sequence
  Antisense oligo
gauggaucacuugaggucag

SEQ ID NO: 9298 - RNA, 20 nt, Artificial Sequence
  Antisense oligo
ggauggaucacuugagguca

SEQ ID NO: 9299 - RNA, 20 nt, Artificial Sequence
  Antisense oligo
cggauggaucacuugagguc

SEQ ID NO: 9300 - RNA, 20 nt, Artificial Sequence
  Antisense oligo
gcggauggaucacuugaggu

SEQ ID NO: 9301 - RNA, 20 nt, Artificial Sequence
  Antisense oligo
uuugggaggcugaggcggau

SEQ ID NO: 9302 - RNA, 20 nt, Artificial Sequence
  Antisense oligo
uaagacacgguccaggcugg

SEQ ID NO: 9303 - RNA, 20 nt, Artificial Sequence
  Antisense oligo
uuaagacacgguccaggcug

SEQ ID NO: 9304 - RNA, 20 nt, Artificial Sequence
  Antisense oligo
uuuaagacacgguccaggcu

SEQ ID NO: 9305 - RNA, 20 nt, Artificial Sequence
  Antisense oligo
guuuaagacacgguccaggc

SEQ ID NO: 9306 - RNA, 20 nt, Artificial Sequence
  Antisense oligo
uguuuaagacacgguccagg

SEQ ID NO: 9307 - RNA, 20 nt, Artificial Sequence
  Antisense oligo
cuguuuaagacacgguccag

SEQ ID NO: 9308 - RNA, 20 nt, Artificial Sequence
  Antisense oligo
ucuguuuaagacacggucca

SEQ ID NO: 9309 - RNA, 20 nt, Artificial Sequence
  Antisense oligo
aggaagacuggguucaaagu

SEQ ID NO: 9310 - RNA, 20 nt, Artificial Sequence
  Antisense oligo
aaggaagacuggguucaaag

SEQ ID NO: 9311 - RNA, 20 nt, Artificial Sequence
  Antisense oligo
uaaggaagacuggguucaaa

SEQ ID NO: 9312 - RNA, 20 nt, Artificial Sequence
  Antisense oligo
auaaggaagacuggguucaa

SEQ ID NO: 9313 - RNA, 20 nt, Artificial Sequence
  Antisense oligo
gcagacugggagguggugau

SEQ ID NO: 9314 - RNA, 20 nt, Artificial Sequence
  Antisense oligo
ugcagacugggaggugguga

SEQ ID NO: 9315 - RNA, 20 nt, Artificial Sequence
  Antisense oligo
gugggcaacacugagagcug

SEQ ID NO: 9316 - RNA, 20 nt, Artificial Sequence
  Antisense oligo
uagggucccagugggcaaca

SEQ ID NO: 9317 - RNA, 20 nt, Artificial Sequence
  Antisense oligo
cugguaacauggaguccuag

SEQ ID NO: 9318 - RNA, 20 nt, Artificial Sequence
  Antisense oligo
ccugguaacauggaguccua

SEQ ID NO: 9319 - RNA, 20 nt, Artificial Sequence
  Antisense oligo
gccugguaacauggaguccu

SEQ ID NO: 9320 - RNA, 20 nt, Artificial Sequence
  Antisense oligo
ggccugguaacauggagucc

SEQ ID NO: 9321 - RNA, 20 nt, Artificial Sequence
  Antisense oligo
gguaaaugacacaugaggcc

SEQ ID NO: 9322 - RNA, 20 nt, Artificial Sequence
  Antisense oligo
ugguaaaugacacaugaggc

SEQ ID NO: 9323 - RNA, 20 nt, Artificial Sequence
  Antisense oligo
aaccagugguaaaugacaca

SEQ ID NO: 9324 - RNA, 20 nt, Artificial Sequence
  Antisense oligo
gcugaaccagugguaaauga

SEQ ID NO: 9325 - RNA, 20 nt, Artificial Sequence
  Antisense oligo
agcugaaccagugguaaaug

SEQ ID NO: 9326 - RNA, 20 nt, Artificial Sequence
  Antisense oligo
gagcugaaccagugguaaau

SEQ ID NO: 9327 - RNA, 20 nt, Artificial Sequence
  Antisense oligo
cgagcugaaccagugguaaa

SEQ ID NO: 9328 - RNA, 20 nt, Artificial Sequence
  Antisense oligo
acgagcugaaccagugguaa

SEQ ID NO: 9329 - RNA, 20 nt, Artificial Sequence
  Antisense oligo
aacgagcugaaccaguggua

SEQ ID NO: 9330 - RNA, 20 nt, Artificial Sequence
  Antisense oligo
aaacgagcugaaccaguggu

SEQ ID NO: 9331 - RNA, 20 nt, Artificial Sequence
  Antisense oligo
aaaacgagcugaaccagugg

SEQ ID NO: 9332 - RNA, 20 nt, Artificial Sequence
  Antisense oligo
gaaaacgagcugaaccagug

SEQ ID NO: 9333 - RNA, 20 nt, Artificial Sequence
  Antisense oligo
ugaaaacgagcugaaccagu

SEQ ID NO: 9334 - RNA, 20 nt, Artificial Sequence
  Antisense oligo
uugaaaacgagcugaaccag

SEQ ID NO: 9335 - RNA, 20 nt, Artificial Sequence
  Antisense oligo
guugaaaacgagcugaacca

SEQ ID NO: 9336 - RNA, 20 nt, Artificial Sequence
  Antisense oligo
aguugaaaacgagcugaacc

SEQ ID NO: 9337 - RNA, 20 nt, Artificial Sequence
  Antisense oligo
aaguugaaaacgagcugaac

SEQ ID NO: 9338 - RNA, 20 nt, Artificial Sequence
  Antisense oligo
gaaguugaaaacgagcugaa

SEQ ID NO: 9339 - RNA, 20 nt, Artificial Sequence
  Antisense oligo
agaaguugaaaacgagcuga

SEQ ID NO: 9340 - RNA, 20 nt, Artificial Sequence
  Antisense oligo
uagaaguugaaaacgagcug

SEQ ID NO: 9341 - RNA, 20 nt, Artificial Sequence
  Antisense oligo
cgaacaggauaacaggaaca

SEQ ID NO: 9342 - RNA, 20 nt, Artificial Sequence
  Antisense oligo
gcgaacaggauaacaggaac

SEQ ID NO: 9343 - RNA, 20 nt, Artificial Sequence
  Antisense oligo
ggcgaacaggauaacaggaa

SEQ ID NO: 9344 - RNA, 20 nt, Artificial Sequence
  Antisense oligo
auggcgaacaggauaacagg

SEQ ID NO: 9345 - RNA, 20 nt, Artificial Sequence
  Antisense oligo
aauggcgaacaggauaacag

SEQ ID NO: 9346 - RNA, 20 nt, Artificial Sequence
  Antisense oligo
gaauggcgaacaggauaaca

SEQ ID NO: 9347 - RNA, 20 nt, Artificial Sequence
  Antisense oligo
ggaauggcgaacaggauaac

SEQ ID NO: 9348 - RNA, 20 nt, Artificial Sequence
  Antisense oligo
aggaauggcgaacaggauaa

SEQ ID NO: 9349 - RNA, 20 nt, Artificial Sequence
  Antisense oligo
gaggaauggcgaacaggaua

SEQ ID NO: 9350 - RNA, 20 nt, Artificial Sequence
  Antisense oligo
aggaggaauggcgaacagga

SEQ ID NO: 9351 - RNA, 20 nt, Artificial Sequence
  Antisense oligo
gaggaggaauggcgaacagg

SEQ ID NO: 9352 - RNA, 20 nt, Artificial Sequence
  Antisense oligo
ggaggaggaauggcgaacag

SEQ ID NO: 9353 - RNA, 20 nt, Artificial Sequence
  Antisense oligo
aggaggaggaauggcgaaca

SEQ ID NO: 9354 - RNA, 20 nt, Artificial Sequence
  Antisense oligo
acugacaaggacaggaggag

SEQ ID NO: 9355 - RNA, 20 nt, Artificial Sequence
  Antisense oligo
aacugacaaggacaggagga

SEQ ID NO: 9356 - RNA, 20 nt, Artificial Sequence
  Antisense oligo
uaaacugacaaggacaggag

SEQ ID NO: 9357 - RNA, 20 nt, Artificial Sequence
  Antisense oligo
cauaaacugacaaggacagg

SEQ ID NO: 9358 - RNA, 20 nt, Artificial Sequence
  Antisense oligo
ucauaaacugacaaggacag

SEQ ID NO: 9359 - RNA, 20 nt, Artificial Sequence
  Antisense oligo
cugggugacagagugagacu

SEQ ID NO: 9360 - RNA, 20 nt, Artificial Sequence
  Antisense oligo
ccugggugacagagugagac

SEQ ID NO: 9361 - RNA, 20 nt, Artificial Sequence
  Antisense oligo
gccugggugacagagugaga

SEQ ID NO: 9362 - RNA, 20 nt, Artificial Sequence
  Antisense oligo
agccugggugacagagugag

SEQ ID NO: 9363 - RNA, 20 nt, Artificial Sequence
  Antisense oligo
cagccugggugacagaguga

SEQ ID NO: 9364 - RNA, 20 nt, Artificial Sequence
  Antisense oligo
uccagccugggugacagagu

SEQ ID NO: 9365 - RNA, 20 nt, Artificial Sequence
  Antisense oligo
acuccagccugggugacaga

SEQ ID NO: 9366 - RNA, 20 nt, Artificial Sequence
  Antisense oligo
ugucacugcacuccagccug

SEQ ID NO: 9367 - RNA, 20 nt, Artificial Sequence
  Antisense oligo
gugucacugcacuccagccu

SEQ ID NO: 9368 - RNA, 20 nt, Artificial Sequence
  Antisense oligo
ugugucacugcacuccagcc

SEQ ID NO: 9369 - RNA, 20 nt, Artificial Sequence
  Antisense oligo
cugugucacugcacuccagc

SEQ ID NO: 9370 - RNA, 20 nt, Artificial Sequence
  Antisense oligo
gguugcagugagcugagacu

SEQ ID NO: 9371 - RNA, 20 nt, Artificial Sequence
  Antisense oligo
agguugcagugagcugagac

SEQ ID NO: 9372 - RNA, 20 nt, Artificial Sequence
  Antisense oligo
gagguugcagugagcugaga

SEQ ID NO: 9373 - RNA, 20 nt, Artificial Sequence
  Antisense oligo
ggagguugcagugagcugag

SEQ ID NO: 9374 - RNA, 20 nt, Artificial Sequence
  Antisense oligo
uggagguugcagugagcuga

SEQ ID NO: 9375 - RNA, 20 nt, Artificial Sequence
  Antisense oligo
guggagguugcagugagcug

SEQ ID NO: 9376 - RNA, 20 nt, Artificial Sequence
  Antisense oligo
gguggagguugcagugagcu

SEQ ID NO: 9377 - RNA, 20 nt, Artificial Sequence
  Antisense oligo
agguggagguugcagugagc

SEQ ID NO: 9378 - RNA, 20 nt, Artificial Sequence
  Antisense oligo
gagguggagguugcagugag

SEQ ID NO: 9379 - RNA, 20 nt, Artificial Sequence
  Antisense oligo
ggagguggagguugcaguga

SEQ ID NO: 9380 - RNA, 20 nt, Artificial Sequence
  Antisense oligo
ugggagguggagguugcagu

SEQ ID NO: 9381 - RNA, 20 nt, Artificial Sequence
  Antisense oligo
aaucacuugaaccugggagg

SEQ ID NO: 9382 - RNA, 20 nt, Artificial Sequence
  Antisense oligo
gaaucacuugaaccugggag

SEQ ID NO: 9383 - RNA, 20 nt, Artificial Sequence
  Antisense oligo
agaaucacuugaaccuggga

SEQ ID NO: 9384 - RNA, 20 nt, Artificial Sequence
  Antisense oligo
gagaaucacuugaaccuggg

SEQ ID NO: 9385 - RNA, 20 nt, Artificial Sequence
  Antisense oligo
ggagaaucacuugaaccugg

SEQ ID NO: 9386 - RNA, 20 nt, Artificial Sequence
  Antisense oligo
aggagaaucacuugaaccug

SEQ ID NO: 9387 - RNA, 20 nt, Artificial Sequence
  Antisense oligo
caggagaaucacuugaaccu

SEQ ID NO: 9388 - RNA, 20 nt, Artificial Sequence
  Antisense oligo
gcaggagaaucacuugaacc

SEQ ID NO: 9389 - RNA, 20 nt, Artificial Sequence
  Antisense oligo
ggcaggagaaucacuugaac

SEQ ID NO: 9390 - RNA, 20 nt, Artificial Sequence
  Antisense oligo
aggcaggagaaucacuugaa

SEQ ID NO: 9391 - RNA, 20 nt, Artificial Sequence
  Antisense oligo
gaggcaggagaaucacuuga

SEQ ID NO: 9392 - RNA, 20 nt, Artificial Sequence
  Antisense oligo
ugaggcaggagaaucacuug

SEQ ID NO: 9393 - RNA, 20 nt, Artificial Sequence
  Antisense oligo
cugaggcaggagaaucacuu

SEQ ID NO: 9394 - RNA, 20 nt, Artificial Sequence
  Antisense oligo
gcugaggcaggagaaucacu

SEQ ID NO: 9395 - RNA, 20 nt, Artificial Sequence
  Antisense oligo
ggcugaggcaggagaaucac

SEQ ID NO: 9396 - RNA, 20 nt, Artificial Sequence
  Antisense oligo
aggcugaggcaggagaauca

SEQ ID NO: 9397 - RNA, 20 nt, Artificial Sequence
  Antisense oligo
gaggcugaggcaggagaauc

SEQ ID NO: 9398 - RNA, 20 nt, Artificial Sequence
  Antisense oligo
ggaggcugaggcaggagaau

SEQ ID NO: 9399 - RNA, 20 nt, Artificial Sequence
  Antisense oligo
aggaggcugaggcaggagaa

SEQ ID NO: 9400 - RNA, 20 nt, Artificial Sequence
  Antisense oligo
ucccagcuacucaggaggcu

SEQ ID NO: 9401 - RNA, 20 nt, Artificial Sequence
  Antisense oligo
aucccagcuacucaggaggc

SEQ ID NO: 9402 - RNA, 20 nt, Artificial Sequence
  Antisense oligo
aaucccagcuacucaggagg

SEQ ID NO: 9403 - RNA, 20 nt, Artificial Sequence
  Antisense oligo
uaaucccagcuacucaggag

SEQ ID NO: 9404 - RNA, 20 nt, Artificial Sequence
  Antisense oligo
guaaucccagcuacucagga

SEQ ID NO: 9405 - RNA, 20 nt, Artificial Sequence
  Antisense oligo
uguaaucccagcuacucagg

SEQ ID NO: 9406 - RNA, 20 nt, Artificial Sequence
  Antisense oligo
cuguaaucccagcuacucag

SEQ ID NO: 9407 - RNA, 20 nt, Artificial Sequence
  Antisense oligo
ccuguaaucccagcuacuca

SEQ ID NO: 9408 - RNA, 20 nt, Artificial Sequence
  Antisense oligo
accuguaaucccagcuacuc

SEQ ID NO: 9409 - RNA, 20 nt, Artificial Sequence
  Antisense oligo
caccuguaaucccagcuacu

SEQ ID NO: 9410 - RNA, 20 nt, Artificial Sequence
  Antisense oligo
gcaccuguaaucccagcuac

SEQ ID NO: 9411 - RNA, 20 nt, Artificial Sequence
  Antisense oligo
cgcaccuguaaucccagcua

SEQ ID NO: 9412 - RNA, 20 nt, Artificial Sequence
  Antisense oligo
gcgcaccuguaaucccagcu

SEQ ID NO: 9413 - RNA, 20 nt, Artificial Sequence
  Antisense oligo
agcgcaccuguaaucccagc

SEQ ID NO: 9414 - RNA, 20 nt, Artificial Sequence
  Antisense oligo
aaaauuagccaggcguggug

SEQ ID NO: 9415 - RNA, 20 nt, Artificial Sequence
  Antisense oligo
caaaacccugucucuacuaa

SEQ ID NO: 9416 - RNA, 20 nt, Artificial Sequence
  Antisense oligo
acaaaacccugucucuacua

SEQ ID NO: 9417 - RNA, 20 nt, Artificial Sequence
  Antisense oligo
augccuguaaucccacccag

SEQ ID NO: 9418 - RNA, 20 nt, Artificial Sequence
  Antisense oligo
caugccuguaaucccaccca

SEQ ID NO: 9419 - RNA, 20 nt, Artificial Sequence
  Antisense oligo
ucaugccuguaaucccaccc

SEQ ID NO: 9420 - RNA, 20 nt, Artificial Sequence
  Antisense oligo
cucaugccuguaaucccacc

SEQ ID NO: 9421 - RNA, 20 nt, Artificial Sequence
  Antisense oligo
gcucaugccuguaaucccac

SEQ ID NO: 9422 - RNA, 20 nt, Artificial Sequence
  Antisense oligo
ggcucaugccuguaauccca

SEQ ID NO: 9423 - RNA, 20 nt, Artificial Sequence
  Antisense oligo
uggcucaugccuguaauccc

SEQ ID NO: 9424 - RNA, 20 nt, Artificial Sequence
  Antisense oligo
guggcucaugccuguaaucc

SEQ ID NO: 9425 - RNA, 20 nt, Artificial Sequence
  Antisense oligo
aguggcucaugccuguaauc

SEQ ID NO: 9426 - RNA, 20 nt, Artificial Sequence
  Antisense oligo
caguggcucaugccuguaau

SEQ ID NO: 9427 - RNA, 20 nt, Artificial Sequence
  Antisense oligo
gcaguggcucaugccuguaa

SEQ ID NO: 9428 - RNA, 20 nt, Artificial Sequence
  Antisense oligo
cgcaguggcucaugccugua

SEQ ID NO: 9429 - RNA, 20 nt, Artificial Sequence
  Antisense oligo
uuacucucuuugccaaaccc

SEQ ID NO: 9430 - RNA, 20 nt, Artificial Sequence
  Antisense oligo
accuauuuacucucuuugcc

SEQ ID NO: 9431 - RNA, 20 nt, Artificial Sequence
  Antisense oligo
cacgcaccuauuuacucucu

SEQ ID NO: 9432 - RNA, 20 nt, Artificial Sequence
  Antisense oligo
acacgcaccuauuuacucuc

SEQ ID NO: 9433 - RNA, 20 nt, Artificial Sequence
  Antisense oligo
aacacgcaccuauuuacucu

SEQ ID NO: 9434 - RNA, 20 nt, Artificial Sequence
  Antisense oligo
aaacacgcaccuauuuacuc

SEQ ID NO: 9435 - RNA, 20 nt, Artificial Sequence
  Antisense oligo
gaaaacacgcaccuauuuac

SEQ ID NO: 9436 - RNA, 20 nt, Artificial Sequence
  Antisense oligo
ggaaaacacgcaccuauuua

SEQ ID NO: 9437 - RNA, 20 nt, Artificial Sequence
  Antisense oligo
gggaaaacacgcaccuauuu

SEQ ID NO: 9438 - RNA, 20 nt, Artificial Sequence
  Antisense oligo
ugggaaaacacgcaccuauu

SEQ ID NO: 9439 - RNA, 20 nt, Artificial Sequence
  Antisense oligo
agugggaaaacacgcaccua

SEQ ID NO: 9440 - RNA, 20 nt, Artificial Sequence
  Antisense oligo
cagugggaaaacacgcaccu

SEQ ID NO: 9441 - RNA, 20 nt, Artificial Sequence
  Antisense oligo
gcagugggaaaacacgcacc

SEQ ID NO: 9442 - RNA, 20 nt, Artificial Sequence
  Antisense oligo
auggcagugggaaaacacgc

SEQ ID NO: 9443 - RNA, 20 nt, Artificial Sequence
  Antisense oligo
aaagauggcagugggaaaac

SEQ ID NO: 9444 - RNA, 20 nt, Artificial Sequence
  Antisense oligo
uaaagauggcagugggaaaa

SEQ ID NO: 9445 - RNA, 20 nt, Artificial Sequence
  Antisense oligo
ggguaaagauggcaguggga

SEQ ID NO: 9446 - RNA, 20 nt, Artificial Sequence
  Antisense oligo
uucuggguaaagauggcagu

SEQ ID NO: 9447 - RNA, 20 nt, Artificial Sequence
  Antisense oligo
gcaucauaaacuucugggua

SEQ ID NO: 9448 - RNA, 20 nt, Artificial Sequence
  Antisense oligo
agcaucauaaacuucugggu

SEQ ID NO: 9449 - RNA, 20 nt, Artificial Sequence
  Antisense oligo
aagcaucauaaacuucuggg

SEQ ID NO: 9450 - RNA, 20 nt, Artificial Sequence
  Antisense oligo
cugcuaggauuucuuucuca

SEQ ID NO: 9451 - RNA, 20 nt, Artificial Sequence
  Antisense oligo
gcugcuaggauuucuuucuc

SEQ ID NO: 9452 - RNA, 20 nt, Artificial Sequence
  Antisense oligo
cgaacucaagagcacacagc

SEQ ID NO: 9453 - RNA, 20 nt, Artificial Sequence
  Antisense oligo
gagcgaacucaagagcacac

SEQ ID NO: 9454 - RNA, 20 nt, Artificial Sequence
  Antisense oligo
ucacuucucugagcgaacuc

SEQ ID NO: 9455 - RNA, 20 nt, Artificial Sequence
  Antisense oligo
cuaagacuuucucuccucac

SEQ ID NO: 9456 - RNA, 20 nt, Artificial Sequence
  Antisense oligo
uccuaagacuuucucuccuc

SEQ ID NO: 9457 - RNA, 20 nt, Artificial Sequence
  Antisense oligo
gucagaagucaaagcucuaa

SEQ ID NO: 9458 - RNA, 20 nt, Artificial Sequence
  Antisense oligo
ugcaagcacuccaaagucca

SEQ ID NO: 9459 - RNA, 20 nt, Artificial Sequence
  Antisense oligo
uacugcaagcacuccaaagu

SEQ ID NO: 9460 - RNA, 20 nt, Artificial Sequence
  Antisense oligo
uuacugcaagcacuccaaag

SEQ ID NO: 9461 - RNA, 20 nt, Artificial Sequence
  Antisense oligo
ugucuuacugcaagcacucc

SEQ ID NO: 9462 - RNA, 20 nt, Artificial Sequence
  Antisense oligo
gugucuuacugcaagcacuc

SEQ ID NO: 9463 - RNA, 20 nt, Artificial Sequence
  Antisense oligo
gagugucuuacugcaagcac

SEQ ID NO: 9464 - RNA, 20 nt, Artificial Sequence
  Antisense oligo
ugagugucuuacugcaagca

SEQ ID NO: 9465 - RNA, 20 nt, Artificial Sequence
  Antisense oligo
cuugugagugucuuacugca

SEQ ID NO: 9466 - RNA, 20 nt, Artificial Sequence
  Antisense oligo
ucuugugagugucuuacugc

SEQ ID NO: 9467 - RNA, 20 nt, Artificial Sequence
  Antisense oligo
gucuugugagugucuuacug

SEQ ID NO: 9468 - RNA, 20 nt, Artificial Sequence
  Antisense oligo
ugcugaggucuugugagugu

SEQ ID NO: 9469 - RNA, 20 nt, Artificial Sequence
  Antisense oligo
cugcugaggucuugugagug

SEQ ID NO: 9470 - RNA, 20 nt, Artificial Sequence
  Antisense oligo
uuuuacugcugaggucuugu

SEQ ID NO: 9471 - RNA, 20 nt, Artificial Sequence
  Antisense oligo
cuuuuacugcugaggucuug

SEQ ID NO: 9472 - RNA, 20 nt, Artificial Sequence
  Antisense oligo
ucuuuuacugcugaggucuu

SEQ ID NO: 9473 - RNA, 20 nt, Artificial Sequence
  Antisense oligo
gaggagguggacagucucac

SEQ ID NO: 9474 - RNA, 20 nt, Artificial Sequence
  Antisense oligo
uucgaggagguggacagucu

SEQ ID NO: 9475 - RNA, 20 nt, Artificial Sequence
  Antisense oligo
cgaguucgaggagguggaca

SEQ ID NO: 9476 - RNA, 20 nt, Artificial Sequence
  Antisense oligo
ugcgaguucgaggaggugga

SEQ ID NO: 9477 - RNA, 20 nt, Artificial Sequence
  Antisense oligo
ucugcgaguucgaggaggug

SEQ ID NO: 9478 - RNA, 20 nt, Artificial Sequence
  Antisense oligo
cucugcgaguucgaggaggu

SEQ ID NO: 9479 - RNA, 20 nt, Artificial Sequence
  Antisense oligo
uugcccucugcgaguucgag

SEQ ID NO: 9480 - RNA, 20 nt, Artificial Sequence
  Antisense oligo
guugcccucugcgaguucga

SEQ ID NO: 9481 - RNA, 20 nt, Artificial Sequence
  Antisense oligo
ugcguugcccucugcgaguu

SEQ ID NO: 9482 - RNA, 20 nt, Artificial Sequence
  Antisense oligo
augcguugcccucugcgagu

SEQ ID NO: 9483 - RNA, 20 nt, Artificial Sequence
  Antisense oligo
aaugcguugcccucugcgag

SEQ ID NO: 9484 - RNA, 20 nt, Artificial Sequence
  Antisense oligo
uaaugcguugcccucugcga

SEQ ID NO: 9485 - RNA, 20 nt, Artificial Sequence
  Antisense oligo
guaaugcguugcccucugcg

SEQ ID NO: 9486 - RNA, 20 nt, Artificial Sequence
  Antisense oligo
gguaaugcguugcccucugc

SEQ ID NO: 9487 - RNA, 20 nt, Artificial Sequence
  Antisense oligo
ugguaaugcguugcccucug

SEQ ID NO: 9488 - RNA, 20 nt, Artificial Sequence
  Antisense oligo
gugguaaugcguugcccucu

SEQ ID NO: 9489 - RNA, 20 nt, Artificial Sequence
  Antisense oligo
ggugguaaugcguugcccuc

SEQ ID NO: 9490 - RNA, 20 nt, Artificial Sequence
  Antisense oligo
aggugguaaugcguugcccu

SEQ ID NO: 9491 - RNA, 20 nt, Artificial Sequence
  Antisense oligo
caggugguaaugcguugccc

SEQ ID NO: 9492 - RNA, 20 nt, Artificial Sequence
  Antisense oligo
ucaggugguaaugcguugcc

SEQ ID NO: 9493 - RNA, 20 nt, Artificial Sequence
  Antisense oligo
ccagccauuucuuggaccug

SEQ ID NO: 9494 - RNA, 20 nt, Artificial Sequence
  Antisense oligo
ucccagccauuucuuggacc

SEQ ID NO: 9495 - RNA, 20 nt, Artificial Sequence
  Antisense oligo
cugagcaagucuaucuuccc

SEQ ID NO: 9496 - RNA, 20 nt, Artificial Sequence
  Antisense oligo
cucugagcaagucuaucuuc

SEQ ID NO: 9497 - RNA, 20 nt, Artificial Sequence
  Antisense oligo
gucucugagcaagucuaucu

SEQ ID NO: 9498 - RNA, 20 nt, Artificial Sequence
  Antisense oligo
ugucucugagcaagucuauc

SEQ ID NO: 9499 - RNA, 20 nt, Artificial Sequence
  Antisense oligo
gcugucucugagcaagucua

SEQ ID NO: 9500 - RNA, 20 nt, Artificial Sequence
  Antisense oligo
uguggcugucucugagcaag

SEQ ID NO: 9501 - RNA, 20 nt, Artificial Sequence
  Antisense oligo
auguggcugucucugagcaa

SEQ ID NO: 9502 - RNA, 20 nt, Artificial Sequence
  Antisense oligo
uaggcucacucagcggcucu

SEQ ID NO: 9503 - RNA, 20 nt, Artificial Sequence
  Antisense oligo
uuaggcucacucagcggcuc

SEQ ID NO: 9504 - RNA, 20 nt, Artificial Sequence
  Antisense oligo
uccuuaggcucacucagcgg

SEQ ID NO: 9505 - RNA, 20 nt, Artificial Sequence
  Antisense oligo
cuccuuaggcucacucagcg

SEQ ID NO: 9506 - RNA, 20 nt, Artificial Sequence
  Antisense oligo
uccuccuuaggcucacucag

SEQ ID NO: 9507 - RNA, 20 nt, Artificial Sequence
  Antisense oligo
ugguccuccuuaggcucacu

SEQ ID NO: 9508 - RNA, 20 nt, Artificial Sequence
  Antisense oligo
cugguccuccuuaggcucac

SEQ ID NO: 9509 - RNA, 20 nt, Artificial Sequence
  Antisense oligo
ccugguccuccuuaggcuca

SEQ ID NO: 9510 - RNA, 20 nt, Artificial Sequence
  Antisense oligo
uccugguccuccuuaggcuc

SEQ ID NO: 9511 - RNA, 20 nt, Artificial Sequence
  Antisense oligo
uuccugguccuccuuaggcu

SEQ ID NO: 9512 - RNA, 20 nt, Artificial Sequence
  Antisense oligo
agcaacucugcggcuuccug

SEQ ID NO: 9513 - RNA, 20 nt, Artificial Sequence
  Antisense oligo
cagcaacucugcggcuuccu

SEQ ID NO: 9514 - RNA, 20 nt, Artificial Sequence
  Antisense oligo
ucagcaacucugcggcuucc

SEQ ID NO: 9515 - RNA, 20 nt, Artificial Sequence
  Antisense oligo
cucagcaacucugcggcuuc

SEQ ID NO: 9516 - RNA, 20 nt, Artificial Sequence
  Antisense oligo
acucagcaacucugcggcuu

SEQ ID NO: 9517 - RNA, 20 nt, Artificial Sequence
  Antisense oligo
ucacucagcaacucugcggc

SEQ ID NO: 9518 - RNA, 20 nt, Artificial Sequence
  Antisense oligo
gaaggcugauacaaauaguc

SEQ ID NO: 9519 - RNA, 20 nt, Artificial Sequence
  Antisense oligo
cuggugcaacuuaaugaacu

SEQ ID NO: 9520 - RNA, 20 nt, Artificial Sequence
  Antisense oligo
ccuggugcaacuuaaugaac

SEQ ID NO: 9521 - RNA, 20 nt, Artificial Sequence
  Antisense oligo
auccuggugcaacuuaauga

SEQ ID NO: 9522 - RNA, 20 nt, Artificial Sequence
  Antisense oligo
gauccuggugcaacuuaaug

SEQ ID NO: 9523 - RNA, 20 nt, Artificial Sequence
  Antisense oligo
agauccuggugcaacuuaau

SEQ ID NO: 9524 - RNA, 20 nt, Artificial Sequence
  Antisense oligo
uagauccuggugcaacuuaa

SEQ ID NO: 9525 - RNA, 20 nt, Artificial Sequence
  Antisense oligo
uuagauccuggugcaacuua

SEQ ID NO: 9526 - RNA, 20 nt, Artificial Sequence
  Antisense oligo
uuuagauccuggugcaacuu

SEQ ID NO: 9527 - RNA, 20 nt, Artificial Sequence
  Antisense oligo
cuuuagauccuggugcaacu

SEQ ID NO: 9528 - RNA, 20 nt, Artificial Sequence
  Antisense oligo
gacuuuagauccuggugcaa

SEQ ID NO: 9529 - RNA, 20 nt, Artificial Sequence
  Antisense oligo
ccugacuuuagauccuggug

SEQ ID NO: 9530 - RNA, 20 nt, Artificial Sequence
  Antisense oligo
uccugacuuuagauccuggu

SEQ ID NO: 9531 - RNA, 20 nt, Artificial Sequence
  Antisense oligo
ggugaccucuccugacuuua

SEQ ID NO: 9532 - RNA, 20 nt, Artificial Sequence
  Antisense oligo
gggugaccucuccugacuuu

SEQ ID NO: 9533 - RNA, 20 nt, Artificial Sequence
  Antisense oligo
caagggugaccucuccugac

SEQ ID NO: 9534 - RNA, 20 nt, Artificial Sequence
  Antisense oligo
gcaagggugaccucuccuga

SEQ ID NO: 9535 - RNA, 20 nt, Artificial Sequence
  Antisense oligo
cucugcaagggugaccucuc

SEQ ID NO: 9536 - RNA, 20 nt, Artificial Sequence
  Antisense oligo
ucucugcaagggugaccucu

SEQ ID NO: 9537 - RNA, 20 nt, Artificial Sequence
  Antisense oligo
aucucugcaagggugaccuc

SEQ ID NO: 9538 - RNA, 20 nt, Artificial Sequence
  Antisense oligo
aaucucugcaagggugaccu

SEQ ID NO: 9539 - RNA, 20 nt, Artificial Sequence
  Antisense oligo
caaucucugcaagggugacc

SEQ ID NO: 9540 - RNA, 20 nt, Artificial Sequence
  Antisense oligo
ucaaucucugcaagggugac

SEQ ID NO: 9541 - RNA, 20 nt, Artificial Sequence
  Antisense oligo
aucaaucucugcaaggguga

SEQ ID NO: 9542 - RNA, 20 nt, Artificial Sequence
  Antisense oligo
caucaaucucugcaagggug

SEQ ID NO: 9543 - RNA, 20 nt, Artificial Sequence
  Antisense oligo
acaucaaucucugcaagggu

SEQ ID NO: 9544 - RNA, 20 nt, Artificial Sequence
  Antisense oligo
ucacaaaguccuugaagaug

SEQ ID NO: 9545 - RNA, 20 nt, Artificial Sequence
  Antisense oligo
gguccguguauuuauucaca

SEQ ID NO: 9546 - RNA, 20 nt, Artificial Sequence
  Antisense oligo
agguccguguauuuauucac

SEQ ID NO: 9547 - RNA, 20 nt, Artificial Sequence
  Antisense oligo
ccagguccguguauuuauuc

SEQ ID NO: 9548 - RNA, 20 nt, Artificial Sequence
  Antisense oligo
uccagguccguguauuuauu

SEQ ID NO: 9549 - RNA, 20 nt, Artificial Sequence
  Antisense oligo
auccagguccguguauuuau

SEQ ID NO: 9550 - RNA, 20 nt, Artificial Sequence
  Antisense oligo
aauccagguccguguauuua

SEQ ID NO: 9551 - RNA, 20 nt, Artificial Sequence
  Antisense oligo
gaauccagguccguguauuu

SEQ ID NO: 9552 - RNA, 20 nt, Artificial Sequence
  Antisense oligo
ugaauccagguccguguauu

SEQ ID NO: 9553 - RNA, 20 nt, Artificial Sequence
  Antisense oligo
cugaauccagguccguguau

SEQ ID NO: 9554 - RNA, 20 nt, Artificial Sequence
  Antisense oligo
ucugaauccagguccgugua

SEQ ID NO: 9555 - RNA, 20 nt, Artificial Sequence
  Antisense oligo
uucugaauccagguccgugu

SEQ ID NO: 9556 - RNA, 20 nt, Artificial Sequence
  Antisense oligo
guucugaauccagguccgug

SEQ ID NO: 9557 - RNA, 20 nt, Artificial Sequence
  Antisense oligo
aguucugaauccagguccgu

SEQ ID NO: 9558 - RNA, 20 nt, Artificial Sequence
  Antisense oligo
aaguucugaauccagguccg

SEQ ID NO: 9559 - RNA, 20 nt, Artificial Sequence
  Antisense oligo
cucgguccuugauccaaucu

SEQ ID NO: 9560 - RNA, 20 nt, Artificial Sequence
  Antisense oligo
acucgguccuugauccaauc

SEQ ID NO: 9561 - RNA, 20 nt, Artificial Sequence
  Antisense oligo
ugguauuccuugaucuguuc

SEQ ID NO: 9562 - RNA, 20 nt, Artificial Sequence
  Antisense oligo
gaugguauuccuugaucugu

SEQ ID NO: 9563 - RNA, 20 nt, Artificial Sequence
  Antisense oligo
ugaugguauuccuugaucug

SEQ ID NO: 9564 - RNA, 20 nt, Artificial Sequence
  Antisense oligo
gugaugguauuccuugaucu

SEQ ID NO: 9565 - RNA, 20 nt, Artificial Sequence
  Antisense oligo
ggugaugguauuccuugauc

SEQ ID NO: 9566 - RNA, 20 nt, Artificial Sequence
  Antisense oligo
aggugaugguauuccuugau

SEQ ID NO: 9567 - RNA, 20 nt, Artificial Sequence
  Antisense oligo
caggugaugguauuccuuga

SEQ ID NO: 9568 - RNA, 20 nt, Artificial Sequence
  Antisense oligo
gugcaggugaugguauuccu

SEQ ID NO: 9569 - RNA, 20 nt, Artificial Sequence
  Antisense oligo
ggugcaggugaugguauucc

SEQ ID NO: 9570 - RNA, 20 nt, Artificial Sequence
  Antisense oligo
ugaccuuggcugcguggaca

SEQ ID NO: 9571 - RNA, 20 nt, Artificial Sequence
  Antisense oligo
augaccuuggcugcguggac

SEQ ID NO: 9572 - RNA, 20 nt, Artificial Sequence
  Antisense oligo
gaugaccuuggcugcgugga

SEQ ID NO: 9573 - RNA, 20 nt, Artificial Sequence
  Antisense oligo
agaugaccuuggcugcgugg

SEQ ID NO: 9574 - RNA, 20 nt, Artificial Sequence
  Antisense oligo
uuugaccugcaagaugaccu

SEQ ID NO: 9575 - RNA, 20 nt, Artificial Sequence
  Antisense oligo
ggcucucuuugaccugcaag

SEQ ID NO: 9576 - RNA, 20 nt, Artificial Sequence
  Antisense oligo
aggcucucuuugaccugcaa

SEQ ID NO: 9577 - RNA, 20 nt, Artificial Sequence
  Antisense oligo
cagucccaggcucucuuuga

SEQ ID NO: 9578 - RNA, 20 nt, Artificial Sequence
  Antisense oligo
cguucagucccaggcucucu

SEQ ID NO: 9579 - RNA, 20 nt, Artificial Sequence
  Antisense oligo
accguucagucccaggcucu

SEQ ID NO: 9580 - RNA, 20 nt, Artificial Sequence
  Antisense oligo
ucaccguucagucccaggcu

SEQ ID NO: 9581 - RNA, 20 nt, Artificial Sequence
  Antisense oligo
agucaccguucagucccagg

SEQ ID NO: 9582 - RNA, 20 nt, Artificial Sequence
  Antisense oligo
aagucaccguucagucccag

SEQ ID NO: 9583 - RNA, 20 nt, Artificial Sequence
  Antisense oligo
gaagucaccguucaguccca

SEQ ID NO: 9584 - RNA, 20 nt, Artificial Sequence
  Antisense oligo
ugagaacacugaagucaccg

SEQ ID NO: 9585 - RNA, 20 nt, Artificial Sequence
  Antisense oligo
guugagaacacugaagucac

SEQ ID NO: 9586 - RNA, 20 nt, Artificial Sequence
  Antisense oligo
ugaagaggcugaggcaggac

SEQ ID NO: 9587 - RNA, 20 nt, Artificial Sequence
  Antisense oligo
cugaagaggcugaggcagga

SEQ ID NO: 9588 - RNA, 20 nt, Artificial Sequence
  Antisense oligo
uccugaagaggcugaggcag

SEQ ID NO: 9589 - RNA, 20 nt, Artificial Sequence
  Antisense oligo
cuccugaagaggcugaggca

SEQ ID NO: 9590 - RNA, 20 nt, Artificial Sequence
  Antisense oligo
uuucaaagccacaaagccca

SEQ ID NO: 9591 - RNA, 20 nt, Artificial Sequence
  Antisense oligo
acggaagcucuaagucaucc

SEQ ID NO: 9592 - RNA, 20 nt, Artificial Sequence
  Antisense oligo
gacggaagcucuaagucauc

SEQ ID NO: 9593 - RNA, 20 nt, Artificial Sequence
  Antisense oligo
ccugacggaagcucuaaguc

SEQ ID NO: 9594 - RNA, 20 nt, Artificial Sequence
  Antisense oligo
cccugacggaagcucuaagu

SEQ ID NO: 9595 - RNA, 20 nt, Artificial Sequence
  Antisense oligo
uaccacacacacaggagccc

SEQ ID NO: 9596 - RNA, 20 nt, Artificial Sequence
  Antisense oligo
gcccuugggauauucaggcc

SEQ ID NO: 9597 - RNA, 20 nt, Artificial Sequence
  Antisense oligo
agcccuugggauauucaggc

SEQ ID NO: 9598 - RNA, 20 nt, Artificial Sequence
  Antisense oligo
aagcccuugggauauucagg

SEQ ID NO: 9599 - RNA, 20 nt, Artificial Sequence
  Antisense oligo
aaagcccuugggauauucag

SEQ ID NO: 9600 - RNA, 20 nt, Artificial Sequence
  Antisense oligo
caaagcccuugggauauuca

SEQ ID NO: 9601 - RNA, 20 nt, Artificial Sequence
  Antisense oligo
acaaagcccuugggauauuc

SEQ ID NO: 9602 - RNA, 20 nt, Artificial Sequence
  Antisense oligo
aaacaaagcccuugggauau

SEQ ID NO: 9603 - RNA, 20 nt, Artificial Sequence
  Antisense oligo
ggagcagugguacuauuuau

SEQ ID NO: 9604 - RNA, 20 nt, Artificial Sequence
  Antisense oligo
aggagcagugguacuauuua

SEQ ID NO: 9605 - RNA, 20 nt, Artificial Sequence
  Antisense oligo
uaaggagcagugguacuauu

SEQ ID NO: 9606 - RNA, 20 nt, Artificial Sequence
  Antisense oligo
ggcuaaggagcagugguacu

SEQ ID NO: 9607 - RNA, 20 nt, Artificial Sequence
  Antisense oligo
uggcuaaggagcagugguac

SEQ ID NO: 9608 - RNA, 20 nt, Artificial Sequence
  Antisense oligo
ucccucuggcuaaggagcag

SEQ ID NO: 9609 - RNA, 20 nt, Artificial Sequence
  Antisense oligo
ggaaacucccucuggcuaag

SEQ ID NO: 9610 - RNA, 20 nt, Artificial Sequence
  Antisense oligo
cccaaggaaacucccucugg

SEQ ID NO: 9611 - RNA, 20 nt, Artificial Sequence
  Antisense oligo
acccaaggaaacucccucug

SEQ ID NO: 9612 - RNA, 20 nt, Artificial Sequence
  Antisense oligo
gacccaaggaaacucccucu

SEQ ID NO: 9613 - RNA, 20 nt, Artificial Sequence
  Antisense oligo
agacccaaggaaacucccuc

SEQ ID NO: 9614 - RNA, 20 nt, Artificial Sequence
  Antisense oligo
cagacccaaggaaacucccu

SEQ ID NO: 9615 - RNA, 20 nt, Artificial Sequence
  Antisense oligo
cgcagacccaaggaaacucc

SEQ ID NO: 9616 - RNA, 20 nt, Artificial Sequence
  Antisense oligo
acgcagacccaaggaaacuc

SEQ ID NO: 9617 - RNA, 20 nt, Artificial Sequence
  Antisense oligo
cacgcagacccaaggaaacu

SEQ ID NO: 9618 - RNA, 20 nt, Artificial Sequence
  Antisense oligo
ucacgcagacccaaggaaac

SEQ ID NO: 9619 - RNA, 20 nt, Artificial Sequence
  Antisense oligo
uucacgcagacccaaggaaa

SEQ ID NO: 9620 - RNA, 20 nt, Artificial Sequence
  Antisense oligo
cuucacgcagacccaaggaa

SEQ ID NO: 9621 - RNA, 20 nt, Artificial Sequence
  Antisense oligo
ucuucacgcagacccaagga

SEQ ID NO: 9622 - RNA, 20 nt, Artificial Sequence
  Antisense oligo
gaucuucacgcagacccaag

SEQ ID NO: 9623 - RNA, 20 nt, Artificial Sequence
  Antisense oligo
ugaucuucacgcagacccaa

SEQ ID NO: 9624 - RNA, 20 nt, Artificial Sequence
  Antisense oligo
uugaucuucacgcagaccca

SEQ ID NO: 9625 - RNA, 20 nt, Artificial Sequence
  Antisense oligo
cuugaucuucacgcagaccc

SEQ ID NO: 9626 - RNA, 20 nt, Artificial Sequence
  Antisense oligo
ucuugaucuucacgcagacc

SEQ ID NO: 9627 - RNA, 20 nt, Artificial Sequence
  Antisense oligo
aguucuugaucuucacgcag

SEQ ID NO: 9628 - RNA, 20 nt, Artificial Sequence
  Antisense oligo
ugaguucuugaucuucacgc

SEQ ID NO: 9629 - RNA, 20 nt, Artificial Sequence
  Antisense oligo
uuccugaguucuugaucuuc

SEQ ID NO: 9630 - RNA, 20 nt, Artificial Sequence
  Antisense oligo
cuuuccugaguucuugaucu

SEQ ID NO: 9631 - RNA, 20 nt, Artificial Sequence
  Antisense oligo
ugcccuuuccugaguucuug

SEQ ID NO: 9632 - RNA, 20 nt, Artificial Sequence
  Antisense oligo
uguugcccuuuccugaguuc

SEQ ID NO: 9633 - RNA, 20 nt, Artificial Sequence
  Antisense oligo
uuguugcccuuuccugaguu

SEQ ID NO: 9634 - RNA, 20 nt, Artificial Sequence
  Antisense oligo
auuguugcccuuuccugagu

SEQ ID NO: 9635 - RNA, 20 nt, Artificial Sequence
  Antisense oligo
gauuguugcccuuuccugag

SEQ ID NO: 9636 - RNA, 20 nt, Artificial Sequence
  Antisense oligo
ggauuguugcccuuuccuga

SEQ ID NO: 9637 - RNA, 20 nt, Artificial Sequence
  Antisense oligo
agaggauuguugcccuuucc

SEQ ID NO: 9638 - RNA, 20 nt, Artificial Sequence
  Antisense oligo
aagaggauuguugcccuuuc

SEQ ID NO: 9639 - RNA, 20 nt, Artificial Sequence
  Antisense oligo
aaaagaggauuguugcccuu

SEQ ID NO: 9640 - RNA, 20 nt, Artificial Sequence
  Antisense oligo
gaaaagaggauuguugcccu

SEQ ID NO: 9641 - RNA, 20 nt, Artificial Sequence
  Antisense oligo
ugaaaagaggauuguugccc

SEQ ID NO: 9642 - RNA, 20 nt, Artificial Sequence
  Antisense oligo
augaaaagaggauuguugcc

SEQ ID NO: 9643 - RNA, 20 nt, Artificial Sequence
  Antisense oligo
ccguuaugaaaagaggauug

SEQ ID NO: 9644 - RNA, 20 nt, Artificial Sequence
  Antisense oligo
cccguuaugaaaagaggauu

SEQ ID NO: 9645 - RNA, 20 nt, Artificial Sequence
  Antisense oligo
gcccguuaugaaaagaggau

SEQ ID NO: 9646 - RNA, 20 nt, Artificial Sequence
  Antisense oligo
augcccguuaugaaaagagg

SEQ ID NO: 9647 - RNA, 20 nt, Artificial Sequence
  Antisense oligo
aaugcccguuaugaaaagag

SEQ ID NO: 9648 - RNA, 20 nt, Artificial Sequence
  Antisense oligo
caaaugcccguuaugaaaag

SEQ ID NO: 9649 - RNA, 20 nt, Artificial Sequence
  Antisense oligo
cuuuacaaaugcccguuaug

SEQ ID NO: 9650 - RNA, 20 nt, Artificial Sequence
  Antisense oligo
ccuuuacaaaugcccguuau

SEQ ID NO: 9651 - RNA, 20 nt, Artificial Sequence
  Antisense oligo
cccuuuacaaaugcccguua

SEQ ID NO: 9652 - RNA, 20 nt, Artificial Sequence
  Antisense oligo
acccuuuacaaaugcccguu

SEQ ID NO: 9653 - RNA, 20 nt, Artificial Sequence
  Antisense oligo
augacccuuuacaaaugccc

SEQ ID NO: 9654 - RNA, 20 nt, Artificial Sequence
  Antisense oligo
cuaugacccuuuacaaaugc

SEQ ID NO: 9655 - RNA, 20 nt, Artificial Sequence
  Antisense oligo
ccuaugacccuuuacaaaug

SEQ ID NO: 9656 - RNA, 20 nt, Artificial Sequence
  Antisense oligo
agccuaugacccuuuacaaa

SEQ ID NO: 9657 - RNA, 20 nt, Artificial Sequence
  Antisense oligo
gagccuaugacccuuuacaa

SEQ ID NO: 9658 - RNA, 20 nt, Artificial Sequence
  Antisense oligo
agagccuaugacccuuuaca

SEQ ID NO: 9659 - RNA, 20 nt, Artificial Sequence
  Antisense oligo
gagagccuaugacccuuuac

SEQ ID NO: 9660 - RNA, 20 nt, Artificial Sequence
  Antisense oligo
agagagccuaugacccuuua

SEQ ID NO: 9661 - RNA, 20 nt, Artificial Sequence
  Antisense oligo
gagagagccuaugacccuuu

SEQ ID NO: 9662 - RNA, 20 nt, Artificial Sequence
  Antisense oligo
uagagagagccuaugacccu

SEQ ID NO: 9663 - RNA, 20 nt, Artificial Sequence
  Antisense oligo
cuagagagagccuaugaccc

SEQ ID NO: 9664 - RNA, 20 nt, Artificial Sequence
  Antisense oligo
ccuagagagagccuaugacc

SEQ ID NO: 9665 - RNA, 20 nt, Artificial Sequence
  Antisense oligo
accuagagagagccuaugac

SEQ ID NO: 9666 - RNA, 20 nt, Artificial Sequence
  Antisense oligo
aaccuagagagagccuauga

SEQ ID NO: 9667 - RNA, 20 nt, Artificial Sequence
  Antisense oligo
uaaccuagagagagccuaug

SEQ ID NO: 9668 - RNA, 20 nt, Artificial Sequence
  Antisense oligo
guaaccuagagagagccuau

SEQ ID NO: 9669 - RNA, 20 nt, Artificial Sequence
  Antisense oligo
cuguaaccuagagagagccu

SEQ ID NO: 9670 - RNA, 20 nt, Artificial Sequence
  Antisense oligo
ucuguaaccuagagagagcc

SEQ ID NO: 9671 - RNA, 20 nt, Artificial Sequence
  Antisense oligo
uucuguaaccuagagagagc

SEQ ID NO: 9672 - RNA, 20 nt, Artificial Sequence
  Antisense oligo
ggcuucuguaaccuagagag

SEQ ID NO: 9673 - RNA, 20 nt, Artificial Sequence
  Antisense oligo
uggcuucuguaaccuagaga

SEQ ID NO: 9674 - RNA, 20 nt, Artificial Sequence
  Antisense oligo
uuggcuucuguaaccuagag

SEQ ID NO: 9675 - RNA, 20 nt, Artificial Sequence
  Antisense oligo
uuuggcuucuguaaccuaga

SEQ ID NO: 9676 - RNA, 20 nt, Artificial Sequence
  Antisense oligo
ggcagccgacaaaguguuuu

SEQ ID NO: 9677 - RNA, 20 nt, Artificial Sequence
  Antisense oligo
gggcagccgacaaaguguuu

SEQ ID NO: 9678 - RNA, 20 nt, Artificial Sequence
  Antisense oligo
ugggcagccgacaaaguguu

SEQ ID NO: 9679 - RNA, 20 nt, Artificial Sequence
  Antisense oligo
uugggcagccgacaaagugu

SEQ ID NO: 9680 - RNA, 20 nt, Artificial Sequence
  Antisense oligo
guugggcagccgacaaagug

SEQ ID NO: 9681 - RNA, 20 nt, Artificial Sequence
  Antisense oligo
aguugggcagccgacaaagu

SEQ ID NO: 9682 - RNA, 20 nt, Artificial Sequence
  Antisense oligo
caguugggcagccgacaaag

SEQ ID NO: 9683 - RNA, 20 nt, Artificial Sequence
  Antisense oligo
gcaguugggcagccgacaaa

SEQ ID NO: 9684 - RNA, 20 nt, Artificial Sequence
  Antisense oligo
augcaguugggcagccgaca

SEQ ID NO: 9685 - RNA, 20 nt, Artificial Sequence
  Antisense oligo
agaugcaguugggcagccga

SEQ ID NO: 9686 - RNA, 20 nt, Artificial Sequence
  Antisense oligo
ugggagaugcaguugggcag

SEQ ID NO: 9687 - RNA, 20 nt, Artificial Sequence
  Antisense oligo
cugggagaugcaguugggca

SEQ ID NO: 9688 - RNA, 20 nt, Artificial Sequence
  Antisense oligo
ggguggaacugggagaugca

SEQ ID NO: 9689 - RNA, 20 nt, Artificial Sequence
  Antisense oligo
uggguggaacugggagaugc

SEQ ID NO: 9690 - RNA, 20 nt, Artificial Sequence
  Antisense oligo
uuuuggguggaacugggaga

SEQ ID NO: 9691 - RNA, 20 nt, Artificial Sequence
  Antisense oligo
cuuuuggguggaacugggag

SEQ ID NO: 9692 - RNA, 20 nt, Artificial Sequence
  Antisense oligo
gcuuuuggguggaacuggga

SEQ ID NO: 9693 - RNA, 20 nt, Artificial Sequence
  Antisense oligo
ccgcuuuuggguggaacugg

SEQ ID NO: 9694 - RNA, 20 nt, Artificial Sequence
  Antisense oligo
accgcuuuuggguggaacug

SEQ ID NO: 9695 - RNA, 20 nt, Artificial Sequence
  Antisense oligo
uaccgcuuuuggguggaacu

SEQ ID NO: 9696 - RNA, 20 nt, Artificial Sequence
  Antisense oligo
uuaccgcuuuuggguggaac

SEQ ID NO: 9697 - RNA, 20 nt, Artificial Sequence
  Antisense oligo
uuuaccgcuuuuggguggaa

SEQ ID NO: 9698 - RNA, 20 nt, Artificial Sequence
  Antisense oligo
auuuaccgcuuuugggugga

SEQ ID NO: 9699 - RNA, 20 nt, Artificial Sequence
  Antisense oligo
gauuuaccgcuuuugggugg

SEQ ID NO: 9700 - RNA, 20 nt, Artificial Sequence
  Antisense oligo
cugauuuaccgcuuuugggu

SEQ ID NO: 9701 - RNA, 20 nt, Artificial Sequence
  Antisense oligo
acugauuuaccgcuuuuggg

SEQ ID NO: 9702 - RNA, 20 nt, Artificial Sequence
  Antisense oligo
aacugauuuaccgcuuuugg

SEQ ID NO: 9703 - RNA, 20 nt, Artificial Sequence
  Antisense oligo
caacugauuuaccgcuuuug

SEQ ID NO: 9704 - RNA, 20 nt, Artificial Sequence
  Antisense oligo
gaaacaacugauuuaccgcu

SEQ ID NO: 9705 - RNA, 20 nt, Artificial Sequence
  Antisense oligo
agaaacaacugauuuaccgc

SEQ ID NO: 9706 - RNA, 20 nt, Artificial Sequence
  Antisense oligo
ugcagugagccaagaucgcg

SEQ ID NO: 9707 - RNA, 20 nt, Artificial Sequence
  Antisense oligo
uugcagugagccaagaucgc

SEQ ID NO: 9708 - RNA, 20 nt, Artificial Sequence
  Antisense oligo
ugaaccugggaggcgaagcu

SEQ ID NO: 9709 - RNA, 20 nt, Artificial Sequence
  Antisense oligo
gggaggcugagacaggagaa

SEQ ID NO: 9710 - RNA, 20 nt, Artificial Sequence
  Antisense oligo
ugggaggcugagacaggaga

SEQ ID NO: 9711 - RNA, 20 nt, Artificial Sequence
  Antisense oligo
uugggaggcugagacaggag

SEQ ID NO: 9712 - RNA, 20 nt, Artificial Sequence
  Antisense oligo
cuugggaggcugagacagga

SEQ ID NO: 9713 - RNA, 20 nt, Artificial Sequence
  Antisense oligo
acuugggaggcugagacagg

SEQ ID NO: 9714 - RNA, 20 nt, Artificial Sequence
  Antisense oligo
uacuugggaggcugagacag

SEQ ID NO: 9715 - RNA, 20 nt, Artificial Sequence
  Antisense oligo
cuacuugggaggcugagaca

SEQ ID NO: 9716 - RNA, 20 nt, Artificial Sequence
  Antisense oligo
gcuacuugggaggcugagac

SEQ ID NO: 9717 - RNA, 20 nt, Artificial Sequence
  Antisense oligo
agcuacuugggaggcugaga

SEQ ID NO: 9718 - RNA, 20 nt, Artificial Sequence
  Antisense oligo
cuguggucccagcuacuugg

SEQ ID NO: 9719 - RNA, 20 nt, Artificial Sequence
  Antisense oligo
ccuguggucccagcuacuug

SEQ ID NO: 9720 - RNA, 20 nt, Artificial Sequence
  Antisense oligo
accuguggucccagcuacuu

SEQ ID NO: 9721 - RNA, 20 nt, Artificial Sequence
  Antisense oligo
caccuguggucccagcuacu

SEQ ID NO: 9722 - RNA, 20 nt, Artificial Sequence
  Antisense oligo
ugaaacccugucucugcuaa

SEQ ID NO: 9723 - RNA, 20 nt, Artificial Sequence
  Antisense oligo
gugaaacccugucucugcua

SEQ ID NO: 9724 - RNA, 20 nt, Artificial Sequence
  Antisense oligo
ggugaaacccugucucugcu

SEQ ID NO: 9725 - RNA, 20 nt, Artificial Sequence
  Antisense oligo
cggugaaacccugucucugc

SEQ ID NO: 9726 - RNA, 20 nt, Artificial Sequence
  Antisense oligo
acggugaaacccugucucug

SEQ ID NO: 9727 - RNA, 20 nt, Artificial Sequence
  Antisense oligo
cacggugaaacccugucucu

SEQ ID NO: 9728 - RNA, 20 nt, Artificial Sequence
  Antisense oligo
acacggugaaacccugucuc

SEQ ID NO: 9729 - RNA, 20 nt, Artificial Sequence
  Antisense oligo
aacacggugaaacccugucu

SEQ ID NO: 9730 - RNA, 20 nt, Artificial Sequence
  Antisense oligo
uaacacggugaaacccuguc

SEQ ID NO: 9731 - RNA, 20 nt, Artificial Sequence
  Antisense oligo
cuaacacggugaaacccugu

SEQ ID NO: 9732 - RNA, 20 nt, Artificial Sequence
  Antisense oligo
gcuaacacggugaaacccug

SEQ ID NO: 9733 - RNA, 20 nt, Artificial Sequence
  Antisense oligo
ggcuaacacggugaaacccu

SEQ ID NO: 9734 - RNA, 20 nt, Artificial Sequence
  Antisense oligo
uggcuaacacggugaaaccc

SEQ ID NO: 9735 - RNA, 20 nt, Artificial Sequence
  Antisense oligo
cuggcuaacacggugaaacc

SEQ ID NO: 9736 - RNA, 20 nt, Artificial Sequence
  Antisense oligo
ccuggcuaacacggugaaac

SEQ ID NO: 9737 - RNA, 20 nt, Artificial Sequence
  Antisense oligo
uccuggcuaacacggugaaa

SEQ ID NO: 9738 - RNA, 20 nt, Artificial Sequence
  Antisense oligo
auccuggcuaacacggugaa

SEQ ID NO: 9739 - RNA, 20 nt, Artificial Sequence
  Antisense oligo
cauccuggcuaacacgguga

SEQ ID NO: 9740 - RNA, 20 nt, Artificial Sequence
  Antisense oligo
ccauccuggcuaacacggug

SEQ ID NO: 9741 - RNA, 20 nt, Artificial Sequence
  Antisense oligo
accauccuggcuaacacggu

SEQ ID NO: 9742 - RNA, 20 nt, Artificial Sequence
  Antisense oligo
gaccauccuggcuaacacgg

SEQ ID NO: 9743 - RNA, 20 nt, Artificial Sequence
  Antisense oligo
agaccauccuggcuaacacg

SEQ ID NO: 9744 - RNA, 20 nt, Artificial Sequence
  Antisense oligo
gagaccauccuggcuaacac

SEQ ID NO: 9745 - RNA, 20 nt, Artificial Sequence
  Antisense oligo
cgagaccauccuggcuaaca

SEQ ID NO: 9746 - RNA, 20 nt, Artificial Sequence
  Antisense oligo
ucgagaccauccuggcuaac

SEQ ID NO: 9747 - RNA, 20 nt, Artificial Sequence
  Antisense oligo
aucgagaccauccuggcuaa

SEQ ID NO: 9748 - RNA, 20 nt, Artificial Sequence
  Antisense oligo
gaucgagaccauccuggcua

SEQ ID NO: 9749 - RNA, 20 nt, Artificial Sequence
  Antisense oligo
agaucgagaccauccuggcu

SEQ ID NO: 9750 - RNA, 20 nt, Artificial Sequence
  Antisense oligo
gagaucgagaccauccuggc

SEQ ID NO: 9751 - RNA, 20 nt, Artificial Sequence
  Antisense oligo
ggagaucgagaccauccugg

SEQ ID NO: 9752 - RNA, 20 nt, Artificial Sequence
  Antisense oligo
ucaggagaucgagaccaucc

SEQ ID NO: 9753 - RNA, 20 nt, Artificial Sequence
  Antisense oligo
gucaggagaucgagaccauc

SEQ ID NO: 9754 - RNA, 20 nt, Artificial Sequence
  Antisense oligo
cgaggucaggagaucgagac

SEQ ID NO: 9755 - RNA, 20 nt, Artificial Sequence
  Antisense oligo
acgaggucaggagaucgaga

SEQ ID NO: 9756 - RNA, 20 nt, Artificial Sequence
  Antisense oligo
cacgaggucaggagaucgag

SEQ ID NO: 9757 - RNA, 20 nt, Artificial Sequence
  Antisense oligo
ucacgaggucaggagaucga

SEQ ID NO: 9758 - RNA, 20 nt, Artificial Sequence
  Antisense oligo
aucacgaggucaggagaucg

SEQ ID NO: 9759 - RNA, 20 nt, Artificial Sequence
  Antisense oligo
ggaucacgaggucaggagau

SEQ ID NO: 9760 - RNA, 20 nt, Artificial Sequence
  Antisense oligo
uggaucacgaggucaggaga

SEQ ID NO: 9761 - RNA, 20 nt, Artificial Sequence
  Antisense oligo
guggaucacgaggucaggag

SEQ ID NO: 9762 - RNA, 20 nt, Artificial Sequence
  Antisense oligo
gguggaucacgaggucagga

SEQ ID NO: 9763 - RNA, 20 nt, Artificial Sequence
  Antisense oligo
uggguggaucacgaggucag

SEQ ID NO: 9764 - RNA, 20 nt, Artificial Sequence
  Antisense oligo
guggguggaucacgagguca

SEQ ID NO: 9765 - RNA, 20 nt, Artificial Sequence
  Antisense oligo
cuguaaucccagcacuuugg

SEQ ID NO: 9766 - RNA, 20 nt, Artificial Sequence
  Antisense oligo
ccuguaaucccagcacuuug

SEQ ID NO: 9767 - RNA, 20 nt, Artificial Sequence
  Antisense oligo
gccuguaaucccagcacuuu

SEQ ID NO: 9768 - RNA, 20 nt, Artificial Sequence
  Antisense oligo
cgccuguaaucccagcacuu

SEQ ID NO: 9769 - RNA, 20 nt, Artificial Sequence
  Antisense oligo
acgccuguaaucccagcacu

SEQ ID NO: 9770 - RNA, 20 nt, Artificial Sequence
  Antisense oligo
cacgccuguaaucccagcac

SEQ ID NO: 9771 - RNA, 20 nt, Artificial Sequence
  Antisense oligo
ucacgccuguaaucccagca

SEQ ID NO: 9772 - RNA, 20 nt, Artificial Sequence
  Antisense oligo
cucacgccuguaaucccagc

SEQ ID NO: 9773 - RNA, 20 nt, Artificial Sequence
  Antisense oligo
gcucacgccuguaaucccag

SEQ ID NO: 9774 - RNA, 20 nt, Artificial Sequence
  Antisense oligo
ggcucacgccuguaauccca

SEQ ID NO: 9775 - RNA, 20 nt, Artificial Sequence
  Antisense oligo
uggcucacgccuguaauccc

SEQ ID NO: 9776 - RNA, 20 nt, Artificial Sequence
  Antisense oligo
guggcucacgccuguaaucc

SEQ ID NO: 9777 - RNA, 20 nt, Artificial Sequence
  Antisense oligo
gguggcucacgccuguaauc

SEQ ID NO: 9778 - RNA, 20 nt, Artificial Sequence
  Antisense oligo
cgguggcucacgccuguaau

SEQ ID NO: 9779 - RNA, 20 nt, Artificial Sequence
  Antisense oligo
acgguggcucacgccuguaa

SEQ ID NO: 9780 - RNA, 20 nt, Artificial Sequence
  Antisense oligo
agaagcagaagacucagccg

SEQ ID NO: 9781 - RNA, 20 nt, Artificial Sequence
  Antisense oligo
cauuaucucggucuaccuaa

SEQ ID NO: 9782 - RNA, 20 nt, Artificial Sequence
  Antisense oligo
ucauuaucucggucuaccua

SEQ ID NO: 9783 - RNA, 20 nt, Artificial Sequence
  Antisense oligo
aucauuaucucggucuaccu

SEQ ID NO: 9784 - RNA, 20 nt, Artificial Sequence
  Antisense oligo
aaucauuaucucggucuacc

SEQ ID NO: 9785 - RNA, 20 nt, Artificial Sequence
  Antisense oligo
ugcccagcuaaauucuaauc

SEQ ID NO: 9786 - RNA, 20 nt, Artificial Sequence
  Antisense oligo
gugcccagcuaaauucuaau

SEQ ID NO: 9787 - RNA, 20 nt, Artificial Sequence
  Antisense oligo
gccacugugcccagcuaaau

SEQ ID NO: 9788 - RNA, 20 nt, Artificial Sequence
  Antisense oligo
agccacugugcccagcuaaa

SEQ ID NO: 9789 - RNA, 20 nt, Artificial Sequence
  Antisense oligo
gagccacugugcccagcuaa

SEQ ID NO: 9790 - RNA, 20 nt, Artificial Sequence
  Antisense oligo
ugagccacugugcccagcua

SEQ ID NO: 9791 - RNA, 20 nt, Artificial Sequence
  Antisense oligo
augagccacugugcccagcu

SEQ ID NO: 9792 - RNA, 20 nt, Artificial Sequence
  Antisense oligo
auuacaggcaugagccacug

SEQ ID NO: 9793 - RNA, 20 nt, Artificial Sequence
  Antisense oligo
gauuacaggcaugagccacu

SEQ ID NO: 9794 - RNA, 20 nt, Artificial Sequence
  Antisense oligo
ggauuacaggcaugagccac

SEQ ID NO: 9795 - RNA, 20 nt, Artificial Sequence
  Antisense oligo
gggauuacaggcaugagcca

SEQ ID NO: 9796 - RNA, 20 nt, Artificial Sequence
  Antisense oligo
ugggauuacaggcaugagcc

SEQ ID NO: 9797 - RNA, 20 nt, Artificial Sequence
  Antisense oligo
cugggauuacaggcaugagc

SEQ ID NO: 9798 - RNA, 20 nt, Artificial Sequence
  Antisense oligo
gcugggauuacaggcaugag

SEQ ID NO: 9799 - RNA, 20 nt, Artificial Sequence
  Antisense oligo
ugcugggauuacaggcauga

SEQ ID NO: 9800 - RNA, 20 nt, Artificial Sequence
  Antisense oligo
gugcugggauuacaggcaug

SEQ ID NO: 9801 - RNA, 20 nt, Artificial Sequence
  Antisense oligo
agugcugggauuacaggcau

SEQ ID NO: 9802 - RNA, 20 nt, Artificial Sequence
  Antisense oligo
aagugcugggauuacaggca

SEQ ID NO: 9803 - RNA, 20 nt, Artificial Sequence
  Antisense oligo
aaagugcugggauuacaggc

SEQ ID NO: 9804 - RNA, 20 nt, Artificial Sequence
  Antisense oligo
caaagugcugggauuacagg

SEQ ID NO: 9805 - RNA, 20 nt, Artificial Sequence
  Antisense oligo
ccaaagugcugggauuacag

SEQ ID NO: 9806 - RNA, 20 nt, Artificial Sequence
  Antisense oligo
ccucagccucccaaagugcu

SEQ ID NO: 9807 - RNA, 20 nt, Artificial Sequence
  Antisense oligo
accucagccucccaaagugc

SEQ ID NO: 9808 - RNA, 20 nt, Artificial Sequence
  Antisense oligo
caccucagccucccaaagug

SEQ ID NO: 9809 - RNA, 20 nt, Artificial Sequence
  Antisense oligo
ccaccucagccucccaaagu

SEQ ID NO: 9810 - RNA, 20 nt, Artificial Sequence
  Antisense oligo
ugaucugcccaccucagccu

SEQ ID NO: 9811 - RNA, 20 nt, Artificial Sequence
  Antisense oligo
accucaggugaucugcccac

SEQ ID NO: 9812 - RNA, 20 nt, Artificial Sequence
  Antisense oligo
cauguuggucaggcuggucu

SEQ ID NO: 9813 - RNA, 20 nt, Artificial Sequence
  Antisense oligo
ccauguuggucaggcugguc

SEQ ID NO: 9814 - RNA, 20 nt, Artificial Sequence
  Antisense oligo
uccauguuggucaggcuggu

SEQ ID NO: 9815 - RNA, 20 nt, Artificial Sequence
  Antisense oligo
cuccauguuggucaggcugg

SEQ ID NO: 9816 - RNA, 20 nt, Artificial Sequence
  Antisense oligo
ucuccauguuggucaggcug

SEQ ID NO: 9817 - RNA, 20 nt, Artificial Sequence
  Antisense oligo
uucuccauguuggucaggcu

SEQ ID NO: 9818 - RNA, 20 nt, Artificial Sequence
  Antisense oligo
uuucuccauguuggucaggc

SEQ ID NO: 9819 - RNA, 20 nt, Artificial Sequence
  Antisense oligo
guuucuccauguuggucagg

SEQ ID NO: 9820 - RNA, 20 nt, Artificial Sequence
  Antisense oligo
gguuucuccauguuggucag

SEQ ID NO: 9821 - RNA, 20 nt, Artificial Sequence
  Antisense oligo
ggguuucuccauguugguca

SEQ ID NO: 9822 - RNA, 20 nt, Artificial Sequence
  Antisense oligo
gauuacaggcaccugacacc

SEQ ID NO: 9823 - RNA, 20 nt, Artificial Sequence
  Antisense oligo
agauuacaggcaccugacac

SEQ ID NO: 9824 - RNA, 20 nt, Artificial Sequence
  Antisense oligo
gagauuacaggcaccugaca

SEQ ID NO: 9825 - RNA, 20 nt, Artificial Sequence
  Antisense oligo
ugagauuacaggcaccugac

SEQ ID NO: 9826 - RNA, 20 nt, Artificial Sequence
  Antisense oligo
cugagauuacaggcaccuga

SEQ ID NO: 9827 - RNA, 20 nt, Artificial Sequence
  Antisense oligo
gcugagauuacaggcaccug

SEQ ID NO: 9828 - RNA, 20 nt, Artificial Sequence
  Antisense oligo
agcugagauuacaggcaccu

SEQ ID NO: 9829 - RNA, 20 nt, Artificial Sequence
  Antisense oligo
uagcugagauuacaggcacc

SEQ ID NO: 9830 - RNA, 20 nt, Artificial Sequence
  Antisense oligo
guagcugagauuacaggcac

SEQ ID NO: 9831 - RNA, 20 nt, Artificial Sequence
  Antisense oligo
aguagcugagauuacaggca

SEQ ID NO: 9832 - RNA, 20 nt, Artificial Sequence
  Antisense oligo
uaguagcugagauuacaggc

SEQ ID NO: 9833 - RNA, 20 nt, Artificial Sequence
  Antisense oligo
cuaguagcugagauuacagg

SEQ ID NO: 9834 - RNA, 20 nt, Artificial Sequence
  Antisense oligo
cugccucagccucucuagua

SEQ ID NO: 9835 - RNA, 20 nt, Artificial Sequence
  Antisense oligo
ccugccucagccucucuagu

SEQ ID NO: 9836 - RNA, 20 nt, Artificial Sequence
  Antisense oligo
uccugccucagccucucuag

SEQ ID NO: 9837 - RNA, 20 nt, Artificial Sequence
  Antisense oligo
cuccugccucagccucucua

SEQ ID NO: 9838 - RNA, 20 nt, Artificial Sequence
  Antisense oligo
auccuccugccucagccucu

SEQ ID NO: 9839 - RNA, 20 nt, Artificial Sequence
  Antisense oligo
aagcgauccuccugccucag

SEQ ID NO: 9840 - RNA, 20 nt, Artificial Sequence
  Antisense oligo
caagcgauccuccugccuca

SEQ ID NO: 9841 - RNA, 20 nt, Artificial Sequence
  Antisense oligo
ucaagcgauccuccugccuc

SEQ ID NO: 9842 - RNA, 20 nt, Artificial Sequence
  Antisense oligo
cgugguucaagcgauccucc

SEQ ID NO: 9843 - RNA, 20 nt, Artificial Sequence
  Antisense oligo
ccgugguucaagcgauccuc

SEQ ID NO: 9844 - RNA, 20 nt, Artificial Sequence
  Antisense oligo
uccgugguucaagcgauccu

SEQ ID NO: 9845 - RNA, 20 nt, Artificial Sequence
  Antisense oligo
uucacugcaaccuccgccuc

SEQ ID NO: 9846 - RNA, 20 nt, Artificial Sequence
  Antisense oligo
guucacugcaaccuccgccu

SEQ ID NO: 9847 - RNA, 20 nt, Artificial Sequence
  Antisense oligo
guggcacgaucucgguucac

SEQ ID NO: 9848 - RNA, 20 nt, Artificial Sequence
  Antisense oligo
aguggcacgaucucgguuca

SEQ ID NO: 9849 - RNA, 20 nt, Artificial Sequence
  Antisense oligo
caguggcacgaucucgguuc

SEQ ID NO: 9850 - RNA, 20 nt, Artificial Sequence
  Antisense oligo
gcaguggcacgaucucgguu

SEQ ID NO: 9851 - RNA, 20 nt, Artificial Sequence
  Antisense oligo
ugcaguggcacgaucucggu

SEQ ID NO: 9852 - RNA, 20 nt, Artificial Sequence
  Antisense oligo
agucucacucugucgcccag

SEQ ID NO: 9853 - RNA, 20 nt, Artificial Sequence
  Antisense oligo
guguaaauggaugggauucc

SEQ ID NO: 9854 - RNA, 20 nt, Artificial Sequence
  Antisense oligo
aguguaaauggaugggauuc

SEQ ID NO: 9855 - RNA, 20 nt, Artificial Sequence
  Antisense oligo
guucaaguguaaauggaugg

SEQ ID NO: 9856 - RNA, 20 nt, Artificial Sequence
  Antisense oligo
gguucaaguguaaauggaug

SEQ ID NO: 9857 - RNA, 20 nt, Artificial Sequence
  Antisense oligo
ggguucaaguguaaauggau

SEQ ID NO: 9858 - RNA, 20 nt, Artificial Sequence
  Antisense oligo
aggguucaaguguaaaugga

SEQ ID NO: 9859 - RNA, 20 nt, Artificial Sequence
  Antisense oligo
uaggguucaaguguaaaugg

SEQ ID NO: 9860 - RNA, 20 nt, Artificial Sequence
  Antisense oligo
cuaggguucaaguguaaaug

SEQ ID NO: 9861 - RNA, 20 nt, Artificial Sequence
  Antisense oligo
ccagagcaguugcuuccucg

SEQ ID NO: 9862 - RNA, 20 nt, Artificial Sequence
  Antisense oligo
aauaaaggcccagagcaguu

SEQ ID NO: 9863 - RNA, 20 nt, Artificial Sequence
  Antisense oligo
caauaaaggcccagagcagu

SEQ ID NO: 9864 - RNA, 20 nt, Artificial Sequence
  Antisense oligo
ucaauaaaggcccagagcag

SEQ ID NO: 9865 - RNA, 20 nt, Artificial Sequence
  Antisense oligo
gucaauaaaggcccagagca

SEQ ID NO: 9866 - RNA, 20 nt, Artificial Sequence
  Antisense oligo
uugucaauaaaggcccagag

SEQ ID NO: 9867 - RNA, 20 nt, Artificial Sequence
  Antisense oligo
uuugucaauaaaggcccaga

SEQ ID NO: 9868 - RNA, 20 nt, Artificial Sequence
  Antisense oligo
gccaaguaacuacuguugcu

SEQ ID NO: 9869 - RNA, 20 nt, Artificial Sequence
  Antisense oligo
ugccaaguaacuacuguugc

SEQ ID NO: 9870 - RNA, 20 nt, Artificial Sequence
  Antisense oligo
cugccaaguaacuacuguug

SEQ ID NO: 9871 - RNA, 20 nt, Artificial Sequence
  Antisense oligo
ccugccaaguaacuacuguu

SEQ ID NO: 9872 - RNA, 20 nt, Artificial Sequence
  Antisense oligo
cccugccaaguaacuacugu

SEQ ID NO: 9873 - RNA, 20 nt, Artificial Sequence
  Antisense oligo
aacccugccaaguaacuacu

SEQ ID NO: 9874 - RNA, 20 nt, Artificial Sequence
  Antisense oligo
uaacccugccaaguaacuac

SEQ ID NO: 9875 - RNA, 20 nt, Artificial Sequence
  Antisense oligo
auaacccugccaaguaacua

SEQ ID NO: 9876 - RNA, 20 nt, Artificial Sequence
  Antisense oligo
cauaacccugccaaguaacu

SEQ ID NO: 9877 - RNA, 20 nt, Artificial Sequence
  Antisense oligo
acauaacccugccaaguaac

SEQ ID NO: 9878 - RNA, 20 nt, Artificial Sequence
  Antisense oligo
cacauaacccugccaaguaa

SEQ ID NO: 9879 - RNA, 20 nt, Artificial Sequence
  Antisense oligo
ucacauaacccugccaagua

SEQ ID NO: 9880 - RNA, 20 nt, Artificial Sequence
  Antisense oligo
ccucacauaacccugccaag

SEQ ID NO: 9881 - RNA, 20 nt, Artificial Sequence
  Antisense oligo
ccugauauucugcuaagcau

SEQ ID NO: 9882 - RNA, 20 nt, Artificial Sequence
  Antisense oligo
accugauauucugcuaagca

SEQ ID NO: 9883 - RNA, 20 nt, Artificial Sequence
  Antisense oligo
aaccugauauucugcuaagc

SEQ ID NO: 9884 - RNA, 20 nt, Artificial Sequence
  Antisense oligo
gggaaccugauauucugcua

SEQ ID NO: 9885 - RNA, 20 nt, Artificial Sequence
  Antisense oligo
ugggaaccugauauucugcu

SEQ ID NO: 9886 - RNA, 20 nt, Artificial Sequence
  Antisense oligo
cugggaaccugauauucugc

SEQ ID NO: 9887 - RNA, 20 nt, Artificial Sequence
  Antisense oligo
uccugggaaccugauauucu

SEQ ID NO: 9888 - RNA, 20 nt, Artificial Sequence
  Antisense oligo
auuccugggaaccugauauu

SEQ ID NO: 9889 - RNA, 20 nt, Artificial Sequence
  Antisense oligo
ugugauuccugggaaccuga

SEQ ID NO: 9890 - RNA, 20 nt, Artificial Sequence
  Antisense oligo
ggcacaccaagcucuuaccc

SEQ ID NO: 9891 - RNA, 20 nt, Artificial Sequence
  Antisense oligo
aggcacaccaagcucuuacc

SEQ ID NO: 9892 - RNA, 20 nt, Artificial Sequence
  Antisense oligo
caggcacaccaagcucuuac

SEQ ID NO: 9893 - RNA, 20 nt, Artificial Sequence
  Antisense oligo
acaggcacaccaagcucuua

SEQ ID NO: 9894 - RNA, 20 nt, Artificial Sequence
  Antisense oligo
gacaacaggcacaccaagcu

SEQ ID NO: 9895 - RNA, 20 nt, Artificial Sequence
  Antisense oligo
uugccacugcugugacaaca

SEQ ID NO: 9896 - RNA, 20 nt, Artificial Sequence
  Antisense oligo
gauuugccacugcugugaca

SEQ ID NO: 9897 - RNA, 20 nt, Artificial Sequence
  Antisense oligo
gccuagauuugccacugcug

SEQ ID NO: 9898 - RNA, 20 nt, Artificial Sequence
  Antisense oligo
ugccuagauuugccacugcu

SEQ ID NO: 9899 - RNA, 20 nt, Artificial Sequence
  Antisense oligo
augccuagauuugccacugc

SEQ ID NO: 9900 - RNA, 20 nt, Artificial Sequence
  Antisense oligo
caaugccuagauuugccacu

SEQ ID NO: 9901 - RNA, 20 nt, Artificial Sequence
  Antisense oligo
ucaaugccuagauuugccac

SEQ ID NO: 9902 - RNA, 20 nt, Artificial Sequence
  Antisense oligo
cucaaugccuagauuugcca

SEQ ID NO: 9903 - RNA, 20 nt, Artificial Sequence
  Antisense oligo
ccucaaugccuagauuugcc

SEQ ID NO: 9904 - RNA, 20 nt, Artificial Sequence
  Antisense oligo
ccucccucaaugccuagauu

SEQ ID NO: 9905 - RNA, 20 nt, Artificial Sequence
  Antisense oligo
acccucccucaaugccuaga

SEQ ID NO: 9906 - RNA, 20 nt, Artificial Sequence
  Antisense oligo
cacccucccucaaugccuag

SEQ ID NO: 9907 - RNA, 20 nt, Artificial Sequence
  Antisense oligo
aagcacugaccgucccagca

SEQ ID NO: 9908 - RNA, 20 nt, Artificial Sequence
  Antisense oligo
ugcaagcacugaccguccca

SEQ ID NO: 9909 - RNA, 20 nt, Artificial Sequence
  Antisense oligo
agcugcaagcacugaccguc

SEQ ID NO: 9910 - RNA, 20 nt, Artificial Sequence
  Antisense oligo
gagcugcaagcacugaccgu

SEQ ID NO: 9911 - RNA, 20 nt, Artificial Sequence
  Antisense oligo
ugagcugcaagcacugaccg

SEQ ID NO: 9912 - RNA, 20 nt, Artificial Sequence
  Antisense oligo
gugagcugcaagcacugacc

SEQ ID NO: 9913 - RNA, 20 nt, Artificial Sequence
  Antisense oligo
ugugagcugcaagcacugac

SEQ ID NO: 9914 - RNA, 20 nt, Artificial Sequence
  Antisense oligo
cugugagcugcaagcacuga

SEQ ID NO: 9915 - RNA, 20 nt, Artificial Sequence
  Antisense oligo
aaucugugagcugcaagcac

SEQ ID NO: 9916 - RNA, 20 nt, Artificial Sequence
  Antisense oligo
ccagaaucugugagcugcaa

SEQ ID NO: 9917 - RNA, 20 nt, Artificial Sequence
  Antisense oligo
cccagaaucugugagcugca

SEQ ID NO: 9918 - RNA, 20 nt, Artificial Sequence
  Antisense oligo
gaacucauuaaccagaaccc

SEQ ID NO: 9919 - RNA, 20 nt, Artificial Sequence
  Antisense oligo
uggacuggaacucauuaacc

SEQ ID NO: 9920 - RNA, 20 nt, Artificial Sequence
  Antisense oligo
guggacuggaacucauuaac

SEQ ID NO: 9921 - RNA, 20 nt, Artificial Sequence
  Antisense oligo
acuguggacuggaacucauu

SEQ ID NO: 9922 - RNA, 20 nt, Artificial Sequence
  Antisense oligo
uacuguggacuggaacucau

SEQ ID NO: 9923 - RNA, 20 nt, Artificial Sequence
  Antisense oligo
ucuacuguggacuggaacuc

SEQ ID NO: 9924 - RNA, 20 nt, Artificial Sequence
  Antisense oligo
aagcucuacuguggacugga

SEQ ID NO: 9925 - RNA, 20 nt, Artificial Sequence
  Antisense oligo
aaaagcucuacuguggacug

SEQ ID NO: 9926 - RNA, 20 nt, Artificial Sequence
  Antisense oligo
guccaguguuucacggcgaa

SEQ ID NO: 9927 - RNA, 20 nt, Artificial Sequence
  Antisense oligo
gguccaguguuucacggcga

SEQ ID NO: 9928 - RNA, 20 nt, Artificial Sequence
  Antisense oligo
ugguccaguguuucacggcg

SEQ ID NO: 9929 - RNA, 20 nt, Artificial Sequence
  Antisense oligo
ucugguccaguguuucacgg

SEQ ID NO: 9930 - RNA, 20 nt, Artificial Sequence
  Antisense oligo
aucugguccaguguuucacg

SEQ ID NO: 9931 - RNA, 20 nt, Artificial Sequence
  Antisense oligo
gaucugguccaguguuucac

SEQ ID NO: 9932 - RNA, 20 nt, Artificial Sequence
  Antisense oligo
guugaucugguccaguguuu

SEQ ID NO: 9933 - RNA, 20 nt, Artificial Sequence
  Antisense oligo
gguugaucugguccaguguu

SEQ ID NO: 9934 - RNA, 20 nt, Artificial Sequence
  Antisense oligo
ugguugaucugguccagugu

SEQ ID NO: 9935 - RNA, 20 nt, Artificial Sequence
  Antisense oligo
agcuccugguugaucugguc

SEQ ID NO: 9936 - RNA, 20 nt, Artificial Sequence
  Antisense oligo
acuccuuucucagggacaga

SEQ ID NO: 9937 - RNA, 20 nt, Artificial Sequence
  Antisense oligo
gaugaacuccuuucucaggg

SEQ ID NO: 9938 - RNA, 20 nt, Artificial Sequence
  Antisense oligo
cccagcagaugaacuccuuu

SEQ ID NO: 9939 - RNA, 20 nt, Artificial Sequence
  Antisense oligo
gacccagcagaugaacuccu

SEQ ID NO: 9940 - RNA, 20 nt, Artificial Sequence
  Antisense oligo
cggacccagcagaugaacuc

SEQ ID NO: 9941 - RNA, 20 nt, Artificial Sequence
  Antisense oligo
gauuuuaccuccaagagccu

SEQ ID NO: 9942 - RNA, 20 nt, Artificial Sequence
  Antisense oligo
aggcugauuuuaccuccaag

SEQ ID NO: 9943 - RNA, 20 nt, Artificial Sequence
  Antisense oligo
cccaaaggcugauuuuaccu

SEQ ID NO: 9944 - RNA, 20 nt, Artificial Sequence
  Antisense oligo
uccacacuuccacgcaaccc

SEQ ID NO: 9945 - RNA, 20 nt, Artificial Sequence
  Antisense oligo
cuccacacuuccacgcaacc

SEQ ID NO: 9946 - RNA, 20 nt, Artificial Sequence
  Antisense oligo
ucuccacacuuccacgcaac

SEQ ID NO: 9947 - RNA, 20 nt, Artificial Sequence
  Antisense oligo
cuuucuccacacuuccacgc

SEQ ID NO: 9948 - RNA, 20 nt, Artificial Sequence
  Antisense oligo
acuuucuccacacuuccacg

SEQ ID NO: 9949 - RNA, 20 nt, Artificial Sequence
  Antisense oligo
aacuuucuccacacuuccac

SEQ ID NO: 9950 - RNA, 20 nt, Artificial Sequence
  Antisense oligo
cugaaaacuuucuccacacu

SEQ ID NO: 9951 - RNA, 20 nt, Artificial Sequence
  Antisense oligo
guauugccaaagaguuuagg

SEQ ID NO: 9952 - RNA, 20 nt, Artificial Sequence
  Antisense oligo
gcaacgucuuucugcccuuu

SEQ ID NO: 9953 - RNA, 20 nt, Artificial Sequence
  Antisense oligo
augcaggcaacgucuuucug

SEQ ID NO: 9954 - RNA, 20 nt, Artificial Sequence
  Antisense oligo
caugcaggcaacgucuuucu

SEQ ID NO: 9955 - RNA, 20 nt, Artificial Sequence
  Antisense oligo
uuuacagcagcacaugggaa

SEQ ID NO: 9956 - RNA, 20 nt, Artificial Sequence
  Antisense oligo
cuuuuacagcagcacauggg

SEQ ID NO: 9957 - RNA, 20 nt, Artificial Sequence
  Antisense oligo
gcuuuuacagcagcacaugg

SEQ ID NO: 9958 - RNA, 20 nt, Artificial Sequence
  Antisense oligo
aguggcuuuuacagcagcac

SEQ ID NO: 9959 - RNA, 20 nt, Artificial Sequence
  Antisense oligo
gaguggcuuuuacagcagca

SEQ ID NO: 9960 - RNA, 20 nt, Artificial Sequence
  Antisense oligo
ugaguggcuuuuacagcagc

SEQ ID NO: 9961 - RNA, 20 nt, Artificial Sequence
  Antisense oligo
gugaguggcuuuuacagcag

SEQ ID NO: 9962 - RNA, 20 nt, Artificial Sequence
  Antisense oligo
ggcaaggugaguggcuuuua

SEQ ID NO: 9963 - RNA, 20 nt, Artificial Sequence
  Antisense oligo
uggcaaggugaguggcuuuu

SEQ ID NO: 9964 - RNA, 20 nt, Artificial Sequence
  Antisense oligo
uguggcaaggugaguggcuu

SEQ ID NO: 9965 - RNA, 20 nt, Artificial Sequence
  Antisense oligo
guguggcaaggugaguggcu

SEQ ID NO: 9966 - RNA, 20 nt, Artificial Sequence
  Antisense oligo
uacagcuuccgaaguggcgg

SEQ ID NO: 9967 - RNA, 20 nt, Artificial Sequence
  Antisense oligo
uuacagcuuccgaaguggcg

SEQ ID NO: 9968 - RNA, 20 nt, Artificial Sequence
  Antisense oligo
uuuacagcuuccgaaguggc

SEQ ID NO: 9969 - RNA, 20 nt, Artificial Sequence
  Antisense oligo
auuuacagcuuccgaagugg

SEQ ID NO: 9970 - RNA, 20 nt, Artificial Sequence
  Antisense oligo
cauuuacagcuuccgaagug

SEQ ID NO: 9971 - RNA, 20 nt, Artificial Sequence
  Antisense oligo
agccauuuacagcuuccgaa

SEQ ID NO: 9972 - RNA, 20 nt, Artificial Sequence
  Antisense oligo
gagccauuuacagcuuccga

SEQ ID NO: 9973 - RNA, 20 nt, Artificial Sequence
  Antisense oligo
ugagccauuuacagcuuccg

SEQ ID NO: 9974 - RNA, 20 nt, Artificial Sequence
  Antisense oligo
cugagccauuuacagcuucc

SEQ ID NO: 9975 - RNA, 20 nt, Artificial Sequence
  Antisense oligo
ggaaccugagccauuuacag

SEQ ID NO: 9976 - RNA, 20 nt, Artificial Sequence
  Antisense oligo
aggaaccugagccauuuaca

SEQ ID NO: 9977 - RNA, 20 nt, Artificial Sequence
  Antisense oligo
ucugugggcaggaacucucc

SEQ ID NO: 9978 - RNA, 20 nt, Artificial Sequence
  Antisense oligo
cucugugggcaggaacucuc

SEQ ID NO: 9979 - RNA, 20 nt, Artificial Sequence
  Antisense oligo
aucacgccacugcacuccag

SEQ ID NO: 9980 - RNA, 20 nt, Artificial Sequence
  Antisense oligo
gaucacgccacugcacucca

SEQ ID NO: 9981 - RNA, 20 nt, Artificial Sequence
  Antisense oligo
agaucacgccacugcacucc

SEQ ID NO: 9982 - RNA, 20 nt, Artificial Sequence
  Antisense oligo
aagaucacgccacugcacuc

SEQ ID NO: 9983 - RNA, 20 nt, Artificial Sequence
  Antisense oligo
caagaucacgccacugcacu

SEQ ID NO: 9984 - RNA, 20 nt, Artificial Sequence
  Antisense oligo
ccaagaucacgccacugcac

SEQ ID NO: 9985 - RNA, 20 nt, Artificial Sequence
  Antisense oligo
gccaagaucacgccacugca

SEQ ID NO: 9986 - RNA, 20 nt, Artificial Sequence
  Antisense oligo
agccaagaucacgccacugc

SEQ ID NO: 9987 - RNA, 20 nt, Artificial Sequence
  Antisense oligo
gagccaagaucacgccacug

SEQ ID NO: 9988 - RNA, 20 nt, Artificial Sequence
  Antisense oligo
ugagccaagaucacgccacu

SEQ ID NO: 9989 - RNA, 20 nt, Artificial Sequence
  Antisense oligo
cagagcuugcagugagccaa

SEQ ID NO: 9990 - RNA, 20 nt, Artificial Sequence
  Antisense oligo
gcagagcuugcagugagcca

SEQ ID NO: 9991 - RNA, 20 nt, Artificial Sequence
  Antisense oligo
aggcagagcuugcagugagc

SEQ ID NO: 9992 - RNA, 20 nt, Artificial Sequence
  Antisense oligo
gaggcagagcuugcagugag

SEQ ID NO: 9993 - RNA, 20 nt, Artificial Sequence
  Antisense oligo
ggaggcagagcuugcaguga

SEQ ID NO: 9994 - RNA, 20 nt, Artificial Sequence
  Antisense oligo
agagaauggcgugaacccgg

SEQ ID NO: 9995 - RNA, 20 nt, Artificial Sequence
  Antisense oligo
aagagaauggcgugaacccg

SEQ ID NO: 9996 - RNA, 20 nt, Artificial Sequence
  Antisense oligo
caagagaauggcgugaaccc

SEQ ID NO: 9997 - RNA, 20 nt, Artificial Sequence
  Antisense oligo
gcaagagaauggcgugaacc

SEQ ID NO: 9998 - RNA, 20 nt, Artificial Sequence
  Antisense oligo
ggcaagagaauggcgugaac

SEQ ID NO: 9999 - RNA, 20 nt, Artificial Sequence
  Antisense oligo
aggcaagagaauggcgugaa

SEQ ID NO: 10000 - RNA, 20 nt, Artificial Sequence
  Antisense oligo
gaggcaagagaauggcguga

SEQ ID NO: 10001 - RNA, 20 nt, Artificial Sequence
  Antisense oligo
ugaggcaagagaauggcgug

SEQ ID NO: 10002 - RNA, 20 nt, Artificial Sequence
  Antisense oligo
cugaggcaagagaauggcgu

SEQ ID NO: 10003 - RNA, 20 nt, Artificial Sequence
  Antisense oligo
gcugaggcaagagaauggcg

SEQ ID NO: 10004 - RNA, 20 nt, Artificial Sequence
  Antisense oligo
ggcugaggcaagagaauggc

SEQ ID NO: 10005 - RNA, 20 nt, Artificial Sequence
  Antisense oligo
aggcugaggcaagagaaugg

SEQ ID NO: 10006 - RNA, 20 nt, Artificial Sequence
  Antisense oligo
gaggcugaggcaagagaaug

SEQ ID NO: 10007 - RNA, 20 nt, Artificial Sequence
  Antisense oligo
ggaggcugaggcaagagaau

SEQ ID NO: 10008 - RNA, 20 nt, Artificial Sequence
  Antisense oligo
gucgccuguagucccagcua

SEQ ID NO: 10009 - RNA, 20 nt, Artificial Sequence
  Antisense oligo
uggcuaacacagugaaaccc

SEQ ID NO: 10010 - RNA, 20 nt, Artificial Sequence
  Antisense oligo
gucaggagaucgagaccauc

SEQ ID NO: 10011 - RNA, 20 nt, Artificial Sequence
  Antisense oligo
cgaggucaggagaucgagac

SEQ ID NO: 10012 - RNA, 20 nt, Artificial Sequence
  Antisense oligo
acgaggucaggagaucgaga

SEQ ID NO: 10013 - RNA, 20 nt, Artificial Sequence
  Antisense oligo
cacgaggucaggagaucgag

SEQ ID NO: 10014 - RNA, 20 nt, Artificial Sequence
  Antisense oligo
ucacgaggucaggagaucga

SEQ ID NO: 10015 - RNA, 20 nt, Artificial Sequence
  Antisense oligo
aucacgaggucaggagaucg

SEQ ID NO: 10016 - RNA, 20 nt, Artificial Sequence
  Antisense oligo
cuguaaucccagcacuuugg

SEQ ID NO: 10017 - RNA, 20 nt, Artificial Sequence
  Antisense oligo
ccuguaaucccagcacuuug

SEQ ID NO: 10018 - RNA, 20 nt, Artificial Sequence
  Antisense oligo
gccuguaaucccagcacuuu

SEQ ID NO: 10019 - RNA, 20 nt, Artificial Sequence
  Antisense oligo
ugccuguaaucccagcacuu

SEQ ID NO: 10020 - RNA, 20 nt, Artificial Sequence
  Antisense oligo
augccuguaaucccagcacu

SEQ ID NO: 10021 - RNA, 20 nt, Artificial Sequence
  Antisense oligo
caugccuguaaucccagcac

SEQ ID NO: 10022 - RNA, 20 nt, Artificial Sequence
  Antisense oligo
ucaugccuguaaucccagca

SEQ ID NO: 10023 - RNA, 20 nt, Artificial Sequence
  Antisense oligo
cucaugccuguaaucccagc

SEQ ID NO: 10024 - RNA, 20 nt, Artificial Sequence
  Antisense oligo
gcucaugccuguaaucccag

SEQ ID NO: 10025 - RNA, 20 nt, Artificial Sequence
  Antisense oligo
ggcucaugccuguaauccca

SEQ ID NO: 10026 - RNA, 20 nt, Artificial Sequence
  Antisense oligo
agcgaaacuccgucucaaaa

SEQ ID NO: 10027 - RNA, 20 nt, Artificial Sequence
  Antisense oligo
gagcgaaacuccgucucaaa

SEQ ID NO: 10028 - RNA, 20 nt, Artificial Sequence
  Antisense oligo
agagcgaaacuccgucucaa

SEQ ID NO: 10029 - RNA, 20 nt, Artificial Sequence
  Antisense oligo
gggcaacaagagcgaaacuc

SEQ ID NO: 10030 - RNA, 20 nt, Artificial Sequence
  Antisense oligo
ugggcaacaagagcgaaacu

SEQ ID NO: 10031 - RNA, 20 nt, Artificial Sequence
  Antisense oligo
cugggcaacaagagcgaaac

SEQ ID NO: 10032 - RNA, 20 nt, Artificial Sequence
  Antisense oligo
ccugggcaacaagagcgaaa

SEQ ID NO: 10033 - RNA, 20 nt, Artificial Sequence
  Antisense oligo
gccugggcaacaagagcgaa

SEQ ID NO: 10034 - RNA, 20 nt, Artificial Sequence
  Antisense oligo
agccugggcaacaagagcga

SEQ ID NO: 10035 - RNA, 20 nt, Artificial Sequence
  Antisense oligo
uccagccugggcaacaagag

SEQ ID NO: 10036 - RNA, 20 nt, Artificial Sequence
  Antisense oligo
cuccagccugggcaacaaga

SEQ ID NO: 10037 - RNA, 20 nt, Artificial Sequence
  Antisense oligo
acuccagccugggcaacaag

SEQ ID NO: 10038 - RNA, 20 nt, Artificial Sequence
  Antisense oligo
cacuccagccugggcaacaa

SEQ ID NO: 10039 - RNA, 20 nt, Artificial Sequence
  Antisense oligo
cccagcuacucaggagacug

SEQ ID NO: 10040 - RNA, 20 nt, Artificial Sequence
  Antisense oligo
ucccagcuacucaggagacu

SEQ ID NO: 10041 - RNA, 20 nt, Artificial Sequence
  Antisense oligo
aucccagcuacucaggagac

SEQ ID NO: 10042 - RNA, 20 nt, Artificial Sequence
  Antisense oligo
aaucccagcuacucaggaga

SEQ ID NO: 10043 - RNA, 20 nt, Artificial Sequence
  Antisense oligo
uaaucccagcuacucaggag

SEQ ID NO: 10044 - RNA, 20 nt, Artificial Sequence
  Antisense oligo
guaaucccagcuacucagga

SEQ ID NO: 10045 - RNA, 20 nt, Artificial Sequence
  Antisense oligo
uguaaucccagcuacucagg

SEQ ID NO: 10046 - RNA, 20 nt, Artificial Sequence
  Antisense oligo
cuguaaucccagcuacucag

SEQ ID NO: 10047 - RNA, 20 nt, Artificial Sequence
  Antisense oligo
ccuguaaucccagcuacuca

SEQ ID NO: 10048 - RNA, 20 nt, Artificial Sequence
  Antisense oligo
aaguagcugggugugguggc

SEQ ID NO: 10049 - RNA, 20 nt, Artificial Sequence
  Antisense oligo
aaaguagcuggguguggugg

SEQ ID NO: 10050 - RNA, 20 nt, Artificial Sequence
  Antisense oligo
aaaaguagcuggguguggug

SEQ ID NO: 10051 - RNA, 20 nt, Artificial Sequence
  Antisense oligo
aguucaagaccagccuggcc

SEQ ID NO: 10052 - RNA, 20 nt, Artificial Sequence
  Antisense oligo
gaguucaagaccagccuggc

SEQ ID NO: 10053 - RNA, 20 nt, Artificial Sequence
  Antisense oligo
ggaguucaagaccagccugg

SEQ ID NO: 10054 - RNA, 20 nt, Artificial Sequence
  Antisense oligo
aggaguucaagaccagccug

SEQ ID NO: 10055 - RNA, 20 nt, Artificial Sequence
  Antisense oligo
caggaguucaagaccagccu

SEQ ID NO: 10056 - RNA, 20 nt, Artificial Sequence
  Antisense oligo
ucaggaguucaagaccagcc

SEQ ID NO: 10057 - RNA, 20 nt, Artificial Sequence
  Antisense oligo
gucaggaguucaagaccagc

SEQ ID NO: 10058 - RNA, 20 nt, Artificial Sequence
  Antisense oligo
ugaggucaggaguucaagac

SEQ ID NO: 10059 - RNA, 20 nt, Artificial Sequence
  Antisense oligo
cugaggucaggaguucaaga

SEQ ID NO: 10060 - RNA, 20 nt, Artificial Sequence
  Antisense oligo
uuugggaggcugagaugggu

SEQ ID NO: 10061 - RNA, 20 nt, Artificial Sequence
  Antisense oligo
cuuugggaggcugagauggg

SEQ ID NO: 10062 - RNA, 20 nt, Artificial Sequence
  Antisense oligo
acuuugggaggcugagaugg

SEQ ID NO: 10063 - RNA, 20 nt, Artificial Sequence
  Antisense oligo
cacuuugggaggcugagaug

SEQ ID NO: 10064 - RNA, 20 nt, Artificial Sequence
  Antisense oligo
gcacuuugggaggcugagau

SEQ ID NO: 10065 - RNA, 20 nt, Artificial Sequence
  Antisense oligo
ugcacuuugggaggcugaga

SEQ ID NO: 10066 - RNA, 20 nt, Artificial Sequence
  Antisense oligo
cugcacuuugggaggcugag

SEQ ID NO: 10067 - RNA, 20 nt, Artificial Sequence
  Antisense oligo
ccugcacuuugggaggcuga

SEQ ID NO: 10068 - RNA, 20 nt, Artificial Sequence
  Antisense oligo
acuugcucacgccugcacuu

SEQ ID NO: 10069 - RNA, 20 nt, Artificial Sequence
  Antisense oligo
uacuugcucacgccugcacu

SEQ ID NO: 10070 - RNA, 20 nt, Artificial Sequence
  Antisense oligo
guacuugcucacgccugcac

SEQ ID NO: 10071 - RNA, 20 nt, Artificial Sequence
  Antisense oligo
cuguacuugcucacgccugc

SEQ ID NO: 10072 - RNA, 20 nt, Artificial Sequence
  Antisense oligo
ccuguacuugcucacgccug

SEQ ID NO: 10073 - RNA, 20 nt, Artificial Sequence
  Antisense oligo
caucaauggagaagugagaa

SEQ ID NO: 10074 - RNA, 20 nt, Artificial Sequence
  Antisense oligo
gcaucaauggagaagugaga

SEQ ID NO: 10075 - RNA, 20 nt, Artificial Sequence
  Antisense oligo
acagcaucaauggagaagug

SEQ ID NO: 10076 - RNA, 20 nt, Artificial Sequence
  Antisense oligo
acaccugcacugccaccugu

SEQ ID NO: 10077 - RNA, 20 nt, Artificial Sequence
  Antisense oligo
ugagauccagcagguggugg

SEQ ID NO: 10078 - RNA, 20 nt, Artificial Sequence
  Antisense oligo
cugagauccagcagguggug

SEQ ID NO: 10079 - RNA, 20 nt, Artificial Sequence
  Antisense oligo
ccagagccugagauccagca

SEQ ID NO: 10080 - RNA, 20 nt, Artificial Sequence
  Antisense oligo
agccagagccugagauccag

SEQ ID NO: 10081 - RNA, 20 nt, Artificial Sequence
  Antisense oligo
gagccagagccugagaucca

SEQ ID NO: 10082 - RNA, 20 nt, Artificial Sequence
  Antisense oligo
gagagccagagccugagauc

SEQ ID NO: 10083 - RNA, 20 nt, Artificial Sequence
  Antisense oligo
ucccaagagagccagagccu

SEQ ID NO: 10084 - RNA, 20 nt, Artificial Sequence
  Antisense oligo
cagagaguccaccacugaaa

SEQ ID NO: 10085 - RNA, 20 nt, Artificial Sequence
  Antisense oligo
ccagagaguccaccacugaa

SEQ ID NO: 10086 - RNA, 20 nt, Artificial Sequence
  Antisense oligo
accagagaguccaccacuga

SEQ ID NO: 10087 - RNA, 20 nt, Artificial Sequence
  Antisense oligo
gaccagagaguccaccacug

SEQ ID NO: 10088 - RNA, 20 nt, Artificial Sequence
  Antisense oligo
ucaguguggaccagagaguc

SEQ ID NO: 10089 - RNA, 20 nt, Artificial Sequence
  Antisense oligo
gcaucaguguggaccagaga

SEQ ID NO: 10090 - RNA, 20 nt, Artificial Sequence
  Antisense oligo
gugcaucaguguggaccaga

SEQ ID NO: 10091 - RNA, 20 nt, Artificial Sequence
  Antisense oligo
ugugcaucaguguggaccag

SEQ ID NO: 10092 - RNA, 20 nt, Artificial Sequence
  Antisense oligo
augugcaucaguguggacca

SEQ ID NO: 10093 - RNA, 20 nt, Artificial Sequence
  Antisense oligo
ggaugugcaucaguguggac

SEQ ID NO: 10094 - RNA, 20 nt, Artificial Sequence
  Antisense oligo
aggaugugcaucagugugga

SEQ ID NO: 10095 - RNA, 20 nt, Artificial Sequence
  Antisense oligo
aaggaugugcaucagugugg

SEQ ID NO: 10096 - RNA, 20 nt, Artificial Sequence
  Antisense oligo
gaaggaugugcaucagugug

SEQ ID NO: 10097 - RNA, 20 nt, Artificial Sequence
  Antisense oligo
ugaaggaugugcaucagugu

SEQ ID NO: 10098 - RNA, 20 nt, Artificial Sequence
  Antisense oligo
acucacugaaggaugugcau

SEQ ID NO: 10099 - RNA, 20 nt, Artificial Sequence
  Antisense oligo
ucaauccacacaacauuacc

SEQ ID NO: 10100 - RNA, 20 nt, Artificial Sequence
  Antisense oligo
uccuucaauccacacaacau

SEQ ID NO: 10101 - RNA, 20 nt, Artificial Sequence
  Antisense oligo
cuuuccuucaauccacacaa

SEQ ID NO: 10102 - RNA, 20 nt, Artificial Sequence
  Antisense oligo
ucuuuccuucaauccacaca

SEQ ID NO: 10103 - RNA, 20 nt, Artificial Sequence
  Antisense oligo
uaugcucuuuccuucaaucc

SEQ ID NO: 10104 - RNA, 20 nt, Artificial Sequence
  Antisense oligo
guguaugcucuuuccuucaa

SEQ ID NO: 10105 - RNA, 20 nt, Artificial Sequence
  Antisense oligo
uguguaugcucuuuccuuca

SEQ ID NO: 10106 - RNA, 20 nt, Artificial Sequence
  Antisense oligo
ucuguguaugcucuuuccuu

SEQ ID NO: 10107 - RNA, 20 nt, Artificial Sequence
  Antisense oligo
cacuucuguguaugcucuuu

SEQ ID NO: 10108 - RNA, 20 nt, Artificial Sequence
  Antisense oligo
gcacuucuguguaugcucuu

SEQ ID NO: 10109 - RNA, 20 nt, Artificial Sequence
  Antisense oligo
cugcacuucuguguaugcuc

SEQ ID NO: 10110 - RNA, 20 nt, Artificial Sequence
  Antisense oligo
acugcacuucuguguaugcu

SEQ ID NO: 10111 - RNA, 20 nt, Artificial Sequence
  Antisense oligo
uacugcacuucuguguaugc

SEQ ID NO: 10112 - RNA, 20 nt, Artificial Sequence
  Antisense oligo
uguacugcacuucuguguau

SEQ ID NO: 10113 - RNA, 20 nt, Artificial Sequence
  Antisense oligo
cuguacugcacuucugugua

SEQ ID NO: 10114 - RNA, 20 nt, Artificial Sequence
  Antisense oligo
acuguacugcacuucugugu

SEQ ID NO: 10115 - RNA, 20 nt, Artificial Sequence
  Antisense oligo
cacuguacugcacuucugug

SEQ ID NO: 10116 - RNA, 20 nt, Artificial Sequence
  Antisense oligo
gcacuguacugcacuucugu

SEQ ID NO: 10117 - RNA, 20 nt, Artificial Sequence
  Antisense oligo
ggcacuguacugcacuucug

SEQ ID NO: 10118 - RNA, 20 nt, Artificial Sequence
  Antisense oligo
aggcacuguacugcacuucu

SEQ ID NO: 10119 - RNA, 20 nt, Artificial Sequence
  Antisense oligo
caggcacuguacugcacuuc

SEQ ID NO: 10120 - RNA, 20 nt, Artificial Sequence
  Antisense oligo
ccaggcacuguacugcacuu

SEQ ID NO: 10121 - RNA, 20 nt, Artificial Sequence
  Antisense oligo
cccaggcacuguacugcacu

SEQ ID NO: 10122 - RNA, 20 nt, Artificial Sequence
  Antisense oligo
ccugagcaauuucaaugucc

SEQ ID NO: 10123 - RNA, 20 nt, Artificial Sequence
  Antisense oligo
agauuacaggugugagccac

SEQ ID NO: 10124 - RNA, 20 nt, Artificial Sequence
  Antisense oligo
gagauuacaggugugagcca

SEQ ID NO: 10125 - RNA, 20 nt, Artificial Sequence
  Antisense oligo
ugagauuacaggugugagcc

SEQ ID NO: 10126 - RNA, 20 nt, Artificial Sequence
  Antisense oligo
cugagauuacaggugugagc

SEQ ID NO: 10127 - RNA, 20 nt, Artificial Sequence
  Antisense oligo
gcugagauuacaggugugag

SEQ ID NO: 10128 - RNA, 20 nt, Artificial Sequence
  Antisense oligo
ugcugagauuacagguguga

SEQ ID NO: 10129 - RNA, 20 nt, Artificial Sequence
  Antisense oligo
gugcugagauuacaggugug

SEQ ID NO: 10130 - RNA, 20 nt, Artificial Sequence
  Antisense oligo
agugcugagauuacaggugu

SEQ ID NO: 10131 - RNA, 20 nt, Artificial Sequence
  Antisense oligo
aagugcugagauuacaggug

SEQ ID NO: 10132 - RNA, 20 nt, Artificial Sequence
  Antisense oligo
aaagugcugagauuacaggu

SEQ ID NO: 10133 - RNA, 20 nt, Artificial Sequence
  Antisense oligo
caaagugcugagauuacagg

SEQ ID NO: 10134 - RNA, 20 nt, Artificial Sequence
  Antisense oligo
ccaaagugcugagauuacag

SEQ ID NO: 10135 - RNA, 20 nt, Artificial Sequence
  Antisense oligo
cccaaagugcugagauuaca

SEQ ID NO: 10136 - RNA, 20 nt, Artificial Sequence
  Antisense oligo
ucccaaagugcugagauuac

SEQ ID NO: 10137 - RNA, 20 nt, Artificial Sequence
  Antisense oligo
cucccaaagugcugagauua

SEQ ID NO: 10138 - RNA, 20 nt, Artificial Sequence
  Antisense oligo
ccucccaaagugcugagauu

SEQ ID NO: 10139 - RNA, 20 nt, Artificial Sequence
  Antisense oligo
gccucccaaagugcugagau

SEQ ID NO: 10140 - RNA, 20 nt, Artificial Sequence
  Antisense oligo
ggccucccaaagugcugaga

SEQ ID NO: 10141 - RNA, 20 nt, Artificial Sequence
  Antisense oligo
uggccucccaaagugcugag

SEQ ID NO: 10142 - RNA, 20 nt, Artificial Sequence
  Antisense oligo
aggugauccacacgacuugg

SEQ ID NO: 10143 - RNA, 20 nt, Artificial Sequence
  Antisense oligo
caggugauccacacgacuug

SEQ ID NO: 10144 - RNA, 20 nt, Artificial Sequence
  Antisense oligo
ucaggugauccacacgacuu

SEQ ID NO: 10145 - RNA, 20 nt, Artificial Sequence
  Antisense oligo
cucaggugauccacacgacu

SEQ ID NO: 10146 - RNA, 20 nt, Artificial Sequence
  Antisense oligo
ccucaggugauccacacgac

SEQ ID NO: 10147 - RNA, 20 nt, Artificial Sequence
  Antisense oligo
accucaggugauccacacga

SEQ ID NO: 10148 - RNA, 20 nt, Artificial Sequence
  Antisense oligo
gaccucaggugauccacacg

SEQ ID NO: 10149 - RNA, 20 nt, Artificial Sequence
  Antisense oligo
ugaccucaggugauccacac

SEQ ID NO: 10150 - RNA, 20 nt, Artificial Sequence
  Antisense oligo
cugaccucaggugauccaca

SEQ ID NO: 10151 - RNA, 20 nt, Artificial Sequence
  Antisense oligo
ucuccaacuccugaccucag

SEQ ID NO: 10152 - RNA, 20 nt, Artificial Sequence
  Antisense oligo
ggucaggcuggucuccaacu

SEQ ID NO: 10153 - RNA, 20 nt, Artificial Sequence
  Antisense oligo
uggucaggcuggucuccaac

SEQ ID NO: 10154 - RNA, 20 nt, Artificial Sequence
  Antisense oligo
guuggucaggcuggucucca

SEQ ID NO: 10155 - RNA, 20 nt, Artificial Sequence
  Antisense oligo
uguuggucaggcuggucucc

SEQ ID NO: 10156 - RNA, 20 nt, Artificial Sequence
  Antisense oligo
auguuggucaggcuggucuc

SEQ ID NO: 10157 - RNA, 20 nt, Artificial Sequence
  Antisense oligo
cauguuggucaggcuggucu

SEQ ID NO: 10158 - RNA, 20 nt, Artificial Sequence
  Antisense oligo
ccauguuggucaggcugguc

SEQ ID NO: 10159 - RNA, 20 nt, Artificial Sequence
  Antisense oligo
accagguuucaccauguugg

SEQ ID NO: 10160 - RNA, 20 nt, Artificial Sequence
  Antisense oligo
gaccagguuucaccauguug

SEQ ID NO: 10161 - RNA, 20 nt, Artificial Sequence
  Antisense oligo
agaccagguuucaccauguu

SEQ ID NO: 10162 - RNA, 20 nt, Artificial Sequence
  Antisense oligo
caccacgccuggcuaauuuu

SEQ ID NO: 10163 - RNA, 20 nt, Artificial Sequence
  Antisense oligo
ccaccacgccuggcuaauuu

SEQ ID NO: 10164 - RNA, 20 nt, Artificial Sequence
  Antisense oligo
accaccacgccuggcuaauu

SEQ ID NO: 10165 - RNA, 20 nt, Artificial Sequence
  Antisense oligo
caccaccacgccuggcuaau

SEQ ID NO: 10166 - RNA, 20 nt, Artificial Sequence
  Antisense oligo
guguagcugggauuacuggc

SEQ ID NO: 10167 - RNA, 20 nt, Artificial Sequence
  Antisense oligo
uugccucagccucccgugua

SEQ ID NO: 10168 - RNA, 20 nt, Artificial Sequence
  Antisense oligo
uucucuugccucagccuccc

SEQ ID NO: 10169 - RNA, 20 nt, Artificial Sequence
  Antisense oligo
auucucuugccucagccucc

SEQ ID NO: 10170 - RNA, 20 nt, Artificial Sequence
  Antisense oligo
gauucucuugccucagccuc

SEQ ID NO: 10171 - RNA, 20 nt, Artificial Sequence
  Antisense oligo
ugauucucuugccucagccu

SEQ ID NO: 10172 - RNA, 20 nt, Artificial Sequence
  Antisense oligo
gugauucucuugccucagcc

SEQ ID NO: 10173 - RNA, 20 nt, Artificial Sequence
  Antisense oligo
agugauucucuugccucagc

SEQ ID NO: 10174 - RNA, 20 nt, Artificial Sequence
  Antisense oligo
aagugauucucuugccucag

SEQ ID NO: 10175 - RNA, 20 nt, Artificial Sequence
  Antisense oligo
cugcaaccuccaccuuccag

SEQ ID NO: 10176 - RNA, 20 nt, Artificial Sequence
  Antisense oligo
acugcaaccuccaccuucca

SEQ ID NO: 10177 - RNA, 20 nt, Artificial Sequence
  Antisense oligo
cacugcaaccuccaccuucc

SEQ ID NO: 10178 - RNA, 20 nt, Artificial Sequence
  Antisense oligo
ucacugcaaccuccaccuuc

SEQ ID NO: 10179 - RNA, 20 nt, Artificial Sequence
  Antisense oligo
cucacugcaaccuccaccuu

SEQ ID NO: 10180 - RNA, 20 nt, Artificial Sequence
  Antisense oligo
gcucacugcaaccuccaccu

SEQ ID NO: 10181 - RNA, 20 nt, Artificial Sequence
  Antisense oligo
ucggcucacugcaaccucca

SEQ ID NO: 10182 - RNA, 20 nt, Artificial Sequence
  Antisense oligo
ucucggcucacugcaaccuc

SEQ ID NO: 10183 - RNA, 20 nt, Artificial Sequence
  Antisense oligo
aucucggcucacugcaaccu

SEQ ID NO: 10184 - RNA, 20 nt, Artificial Sequence
  Antisense oligo
gaucucggcucacugcaacc

SEQ ID NO: 10185 - RNA, 20 nt, Artificial Sequence
  Antisense oligo
cggaacaccuaaucuuuugu

SEQ ID NO: 10186 - RNA, 20 nt, Artificial Sequence
  Antisense oligo
ccggaacaccuaaucuuuug

SEQ ID NO: 10187 - RNA, 20 nt, Artificial Sequence
  Antisense oligo
ugcuuucaguaagaguccgg

SEQ ID NO: 10188 - RNA, 20 nt, Artificial Sequence
  Antisense oligo
cugcuuucaguaagaguccg

SEQ ID NO: 10189 - RNA, 20 nt, Artificial Sequence
  Antisense oligo
ucugcuuucaguaagagucc

SEQ ID NO: 10190 - RNA, 20 nt, Artificial Sequence
  Antisense oligo
cacuuucugcuuucaguaag

SEQ ID NO: 10191 - RNA, 20 nt, Artificial Sequence
  Antisense oligo
uucuguccacuuucugcuuu

SEQ ID NO: 10192 - RNA, 20 nt, Artificial Sequence
  Antisense oligo
guucuguccacuuucugcuu

SEQ ID NO: 10193 - RNA, 20 nt, Artificial Sequence
  Antisense oligo
agguucuguccacuuucugc

SEQ ID NO: 10194 - RNA, 20 nt, Artificial Sequence
  Antisense oligo
aagguucuguccacuuucug

SEQ ID NO: 10195 - RNA, 20 nt, Artificial Sequence
  Antisense oligo
uaagguucuguccacuuucu

SEQ ID NO: 10196 - RNA, 20 nt, Artificial Sequence
  Antisense oligo
uuaagguucuguccacuuuc

SEQ ID NO: 10197 - RNA, 20 nt, Artificial Sequence
  Antisense oligo
cuuacugaagcugaaaugga

SEQ ID NO: 10198 - RNA, 20 nt, Artificial Sequence
  Antisense oligo
ccuuacugaagcugaaaugg

SEQ ID NO: 10199 - RNA, 20 nt, Artificial Sequence
  Antisense oligo
cggucuugggcaguaauccu

SEQ ID NO: 10200 - RNA, 20 nt, Artificial Sequence
  Antisense oligo
ucggucuugggcaguaaucc

SEQ ID NO: 10201 - RNA, 20 nt, Artificial Sequence
  Antisense oligo
cucggucuugggcaguaauc

SEQ ID NO: 10202 - RNA, 20 nt, Artificial Sequence
  Antisense oligo
acucggucuugggcaguaau

SEQ ID NO: 10203 - RNA, 20 nt, Artificial Sequence
  Antisense oligo
gacucggucuugggcaguaa

SEQ ID NO: 10204 - RNA, 20 nt, Artificial Sequence
  Antisense oligo
cgauagcacaagacucgguc

SEQ ID NO: 10205 - RNA, 20 nt, Artificial Sequence
  Antisense oligo
acgauagcacaagacucggu

SEQ ID NO: 10206 - RNA, 20 nt, Artificial Sequence
  Antisense oligo
cacgauagcacaagacucgg

SEQ ID NO: 10207 - RNA, 20 nt, Artificial Sequence
  Antisense oligo
ccacgauagcacaagacucg

SEQ ID NO: 10208 - RNA, 20 nt, Artificial Sequence
  Antisense oligo
uccacgauagcacaagacuc

SEQ ID NO: 10209 - RNA, 20 nt, Artificial Sequence
  Antisense oligo
uuccacgauagcacaagacu

SEQ ID NO: 10210 - RNA, 20 nt, Artificial Sequence
  Antisense oligo
auuccacgauagcacaagac

SEQ ID NO: 10211 - RNA, 20 nt, Artificial Sequence
  Antisense oligo
uauuccacgauagcacaaga

SEQ ID NO: 10212 - RNA, 20 nt, Artificial Sequence
  Antisense oligo
uucagcgugggacuauucca

SEQ ID NO: 10213 - RNA, 20 nt, Artificial Sequence
  Antisense oligo
guucagcgugggacuauucc

SEQ ID NO: 10214 - RNA, 20 nt, Artificial Sequence
  Antisense oligo
aguucagcgugggacuauuc

SEQ ID NO: 10215 - RNA, 20 nt, Artificial Sequence
  Antisense oligo
ggaguucagcgugggacuau

SEQ ID NO: 10216 - RNA, 20 nt, Artificial Sequence
  Antisense oligo
gggaguucagcgugggacua

SEQ ID NO: 10217 - RNA, 20 nt, Artificial Sequence
  Antisense oligo
ucagcucauugaugccuggg

SEQ ID NO: 10218 - RNA, 20 nt, Artificial Sequence
  Antisense oligo
accuucagcucauugaugcc

SEQ ID NO: 10219 - RNA, 20 nt, Artificial Sequence
  Antisense oligo
caccuucagcucauugaugc

SEQ ID NO: 10220 - RNA, 20 nt, Artificial Sequence
  Antisense oligo
aacaccuucagcucauugau

SEQ ID NO: 10221 - RNA, 20 nt, Artificial Sequence
  Antisense oligo
acaaacaccuucagcucauu

SEQ ID NO: 10222 - RNA, 20 nt, Artificial Sequence
  Antisense oligo
guccacaaacaccuucagcu

SEQ ID NO: 10223 - RNA, 20 nt, Artificial Sequence
  Antisense oligo
aggccagguccacaaacacc

SEQ ID NO: 10224 - RNA, 20 nt, Artificial Sequence
  Antisense oligo
ggaggccagguccacaaaca

SEQ ID NO: 10225 - RNA, 20 nt, Artificial Sequence
  Antisense oligo
cacaucaaugucauucuccc

SEQ ID NO: 10226 - RNA, 20 nt, Artificial Sequence
  Antisense oligo
gguccacaucaaugucauuc

SEQ ID NO: 10227 - RNA, 20 nt, Artificial Sequence
  Antisense oligo
cgguccacaucaaugucauu

SEQ ID NO: 10228 - RNA, 20 nt, Artificial Sequence
  Antisense oligo
cccgguccacaucaauguca

SEQ ID NO: 10229 - RNA, 20 nt, Artificial Sequence
  Antisense oligo
acccgguccacaucaauguc

SEQ ID NO: 10230 - RNA, 20 nt, Artificial Sequence
  Antisense oligo
cacccgguccacaucaaugu

SEQ ID NO: 10231 - RNA, 20 nt, Artificial Sequence
  Antisense oligo
ccacccgguccacaucaaug

SEQ ID NO: 10232 - RNA, 20 nt, Artificial Sequence
  Antisense oligo
gccacccgguccacaucaau

SEQ ID NO: 10233 - RNA, 20 nt, Artificial Sequence
  Antisense oligo
agcgucauggaagcaggcca

SEQ ID NO: 10234 - RNA, 20 nt, Artificial Sequence
  Antisense oligo
auagcagggaugcguagccc

SEQ ID NO: 10235 - RNA, 20 nt, Artificial Sequence
  Antisense oligo
aauagcagggaugcguagcc

SEQ ID NO: 10236 - RNA, 20 nt, Artificial Sequence
  Antisense oligo
aaauagcagggaugcguagc

SEQ ID NO: 10237 - RNA, 20 nt, Artificial Sequence
  Antisense oligo
uaaauagcagggaugcguag

SEQ ID NO: 10238 - RNA, 20 nt, Artificial Sequence
  Antisense oligo
cuuaaauagcagggaugcgu

SEQ ID NO: 10239 - RNA, 20 nt, Artificial Sequence
  Antisense oligo
gcuuaaauagcagggaugcg

SEQ ID NO: 10240 - RNA, 20 nt, Artificial Sequence
  Antisense oligo
ccagcuuaaauagcagggau

SEQ ID NO: 10241 - RNA, 20 nt, Artificial Sequence
  Antisense oligo
uccagcuuaaauagcaggga

SEQ ID NO: 10242 - RNA, 20 nt, Artificial Sequence
  Antisense oligo
guccagcuuaaauagcaggg

SEQ ID NO: 10243 - RNA, 20 nt, Artificial Sequence
  Antisense oligo
gguccagcuuaaauagcagg

SEQ ID NO: 10244 - RNA, 20 nt, Artificial Sequence
  Antisense oligo
ggguccagcuuaaauagcag

SEQ ID NO: 10245 - RNA, 20 nt, Artificial Sequence
  Antisense oligo
augcacugaaguccacgcug

SEQ ID NO: 10246 - RNA, 20 nt, Artificial Sequence
  Antisense oligo
aaugcacugaaguccacgcu

SEQ ID NO: 10247 - RNA, 20 nt, Artificial Sequence
  Antisense oligo
gaaugcacugaaguccacgc

SEQ ID NO: 10248 - RNA, 20 nt, Artificial Sequence
  Antisense oligo
ugaaugcacugaaguccacg

SEQ ID NO: 10249 - RNA, 20 nt, Artificial Sequence
  Antisense oligo
cuuauccagagccuuccaca

SEQ ID NO: 10250 - RNA, 20 nt, Artificial Sequence
  Antisense oligo
ccuuauccagagccuuccac

SEQ ID NO: 10251 - RNA, 20 nt, Artificial Sequence
  Antisense oligo
uccuuauccagagccuucca

SEQ ID NO: 10252 - RNA, 20 nt, Artificial Sequence
  Antisense oligo
ugguccuuauccagagccuu

SEQ ID NO: 10253 - RNA, 20 nt, Artificial Sequence
  Antisense oligo
cagguacugguccuuaucca

SEQ ID NO: 10254 - RNA, 20 nt, Artificial Sequence
  Antisense oligo
gcagguacugguccuuaucc

SEQ ID NO: 10255 - RNA, 20 nt, Artificial Sequence
  Antisense oligo
ggcagguacugguccuuauc

SEQ ID NO: 10256 - RNA, 20 nt, Artificial Sequence
  Antisense oligo
gggcagguacugguccuuau

SEQ ID NO: 10257 - RNA, 20 nt, Artificial Sequence
  Antisense oligo
ugggcagguacugguccuua

SEQ ID NO: 10258 - RNA, 20 nt, Artificial Sequence
  Antisense oligo
cugggcagguacugguccuu

SEQ ID NO: 10259 - RNA, 20 nt, Artificial Sequence
  Antisense oligo
uuccugggcagguacugguc

SEQ ID NO: 10260 - RNA, 20 nt, Artificial Sequence
  Antisense oligo
uaagacucaccaguuuccug

SEQ ID NO: 10261 - RNA, 20 nt, Artificial Sequence
  Antisense oligo
auaagacucaccaguuuccu

SEQ ID NO: 10262 - RNA, 20 nt, Artificial Sequence
  Antisense oligo
aauaagacucaccaguuucc

SEQ ID NO: 10263 - RNA, 20 nt, Artificial Sequence
  Antisense oligo
gaauaagacucaccaguuuc

SEQ ID NO: 10264 - RNA, 20 nt, Artificial Sequence
  Antisense oligo
cagaauaagacucaccaguu

SEQ ID NO: 10265 - RNA, 20 nt, Artificial Sequence
  Antisense oligo
acagaauaagacucaccagu

SEQ ID NO: 10266 - RNA, 20 nt, Artificial Sequence
  Antisense oligo
gacagaauaagacucaccag

SEQ ID NO: 10267 - RNA, 20 nt, Artificial Sequence
  Antisense oligo
gagacagaauaagacucacc

SEQ ID NO: 10268 - RNA, 20 nt, Artificial Sequence
  Antisense oligo
ugcuaagcaaugcucuauuc

SEQ ID NO: 10269 - RNA, 20 nt, Artificial Sequence
  Antisense oligo
cacagucacugcccuaacgu

SEQ ID NO: 10270 - RNA, 20 nt, Artificial Sequence
  Antisense oligo
ccaccauuuccacagucacu

SEQ ID NO: 10271 - RNA, 20 nt, Artificial Sequence
  Antisense oligo
ugccaccauuuccacaguca

SEQ ID NO: 10272 - RNA, 20 nt, Artificial Sequence
  Antisense oligo
guacaaaccuaccacacagg

SEQ ID NO: 10273 - RNA, 20 nt, Artificial Sequence
  Antisense oligo
cuuucuagguaacaagaugg

SEQ ID NO: 10274 - RNA, 20 nt, Artificial Sequence
  Antisense oligo
gcaccuuagagauuacuaug

SEQ ID NO: 10275 - RNA, 20 nt, Artificial Sequence
  Antisense oligo
uguguuuugcaccuuagaga

SEQ ID NO: 10276 - RNA, 20 nt, Artificial Sequence
  Antisense oligo
guguguuuugcaccuuagag

SEQ ID NO: 10277 - RNA, 20 nt, Artificial Sequence
  Antisense oligo
acguguguuuugcaccuuag

SEQ ID NO: 10278 - RNA, 20 nt, Artificial Sequence
  Antisense oligo
gcauauuucccuucugucuu

SEQ ID NO: 10279 - RNA, 20 nt, Artificial Sequence
  Antisense oligo
agcauauuucccuucugucu

SEQ ID NO: 10280 - RNA, 20 nt, Artificial Sequence
  Antisense oligo
cagcauauuucccuucuguc

SEQ ID NO: 10281 - RNA, 20 nt, Artificial Sequence
  Antisense oligo
ucagcauauuucccuucugu

SEQ ID NO: 10282 - RNA, 20 nt, Artificial Sequence
  Antisense oligo
guuucagcauauuucccuuc

SEQ ID NO: 10283 - RNA, 20 nt, Artificial Sequence
  Antisense oligo
cguuucagcauauuucccuu

SEQ ID NO: 10284 - RNA, 20 nt, Artificial Sequence
  Antisense oligo
acguuucagcauauuucccu

SEQ ID NO: 10285 - RNA, 20 nt, Artificial Sequence
  Antisense oligo
agagaaaacuccuggcaacg

SEQ ID NO: 10286 - RNA, 20 nt, Artificial Sequence
  Antisense oligo
cauucagagaaaacuccugg

SEQ ID NO: 10287 - RNA, 20 nt, Artificial Sequence
  Antisense oligo
ccauucagagaaaacuccug

SEQ ID NO: 10288 - RNA, 20 nt, Artificial Sequence
  Antisense oligo
accauucagagaaaacuccu

SEQ ID NO: 10289 - RNA, 20 nt, Artificial Sequence
  Antisense oligo
caaccauucagagaaaacuc

SEQ ID NO: 10290 - RNA, 20 nt, Artificial Sequence
  Antisense oligo
ugggauuacaggcgcacacc

SEQ ID NO: 10291 - RNA, 20 nt, Artificial Sequence
  Antisense oligo
cugggauuacaggcgcacac

SEQ ID NO: 10292 - RNA, 20 nt, Artificial Sequence
  Antisense oligo
gcugggauuacaggcgcaca

SEQ ID NO: 10293 - RNA, 20 nt, Artificial Sequence
  Antisense oligo
agcugggauuacaggcgcac

SEQ ID NO: 10294 - RNA, 20 nt, Artificial Sequence
  Antisense oligo
uagcugggauuacaggcgca

SEQ ID NO: 10295 - RNA, 20 nt, Artificial Sequence
  Antisense oligo
guagcugggauuacaggcgc

SEQ ID NO: 10296 - RNA, 20 nt, Artificial Sequence
  Antisense oligo
aguagcugggauuacaggcg

SEQ ID NO: 10297 - RNA, 20 nt, Artificial Sequence
  Antisense oligo
gaguagcugggauuacaggc

SEQ ID NO: 10298 - RNA, 20 nt, Artificial Sequence
  Antisense oligo
agaguagcugggauuacagg

SEQ ID NO: 10299 - RNA, 20 nt, Artificial Sequence
  Antisense oligo
cagaguagcugggauuacag

SEQ ID NO: 10300 - RNA, 20 nt, Artificial Sequence
  Antisense oligo
gucucagccuccagaguagc

SEQ ID NO: 10301 - RNA, 20 nt, Artificial Sequence
  Antisense oligo
ugucucagccuccagaguag

SEQ ID NO: 10302 - RNA, 20 nt, Artificial Sequence
  Antisense oligo
cugucucagccuccagagua

SEQ ID NO: 10303 - RNA, 20 nt, Artificial Sequence
  Antisense oligo
aauucugucucagccuccag

SEQ ID NO: 10304 - RNA, 20 nt, Artificial Sequence
  Antisense oligo
caauucugucucagccucca

SEQ ID NO: 10305 - RNA, 20 nt, Artificial Sequence
  Antisense oligo
gguucaagcaauucugucuc

SEQ ID NO: 10306 - RNA, 20 nt, Artificial Sequence
  Antisense oligo
ggguucaagcaauucugucu

SEQ ID NO: 10307 - RNA, 20 nt, Artificial Sequence
  Antisense oligo
cucaguucacugcuaucucu

SEQ ID NO: 10308 - RNA, 20 nt, Artificial Sequence
  Antisense oligo
caguggugugaucucaguuc

SEQ ID NO: 10309 - RNA, 20 nt, Artificial Sequence
  Antisense oligo
acaguggugugaucucaguu

SEQ ID NO: 10310 - RNA, 20 nt, Artificial Sequence
  Antisense oligo
uacaguggugugaucucagu

SEQ ID NO: 10311 - RNA, 20 nt, Artificial Sequence
  Antisense oligo
guacaguggugugaucucag

SEQ ID NO: 10312 - RNA, 20 nt, Artificial Sequence
  Antisense oligo
aguacaguggugugaucuca

SEQ ID NO: 10313 - RNA, 20 nt, Artificial Sequence
  Antisense oligo
gaguacaguggugugaucuc

SEQ ID NO: 10314 - RNA, 20 nt, Artificial Sequence
  Antisense oligo
ggaguacaguggugugaucu

SEQ ID NO: 10315 - RNA, 20 nt, Artificial Sequence
  Antisense oligo
uggaguacaguggugugauc

SEQ ID NO: 10316 - RNA, 20 nt, Artificial Sequence
  Antisense oligo
cuggaguacaguggugugau

SEQ ID NO: 10317 - RNA, 20 nt, Artificial Sequence
  Antisense oligo
gcuggaguacagugguguga

SEQ ID NO: 10318 - RNA, 20 nt, Artificial Sequence
  Antisense oligo
ggcuggaguacaguggugug

SEQ ID NO: 10319 - RNA, 20 nt, Artificial Sequence
  Antisense oligo
aggcuggaguacaguggugu

SEQ ID NO: 10320 - RNA, 20 nt, Artificial Sequence
  Antisense oligo
cugcuacagguaguuuacuu

SEQ ID NO: 10321 - RNA, 20 nt, Artificial Sequence
  Antisense oligo
caauucagacccugcuacag

SEQ ID NO: 10322 - RNA, 20 nt, Artificial Sequence
  Antisense oligo
cgucaauucagacccugcua

SEQ ID NO: 10323 - RNA, 20 nt, Artificial Sequence
  Antisense oligo
acgucaauucagacccugcu

SEQ ID NO: 10324 - RNA, 20 nt, Artificial Sequence
  Antisense oligo
uacgucaauucagacccugc

SEQ ID NO: 10325 - RNA, 20 nt, Artificial Sequence
  Antisense oligo
guacgucaauucagacccug

SEQ ID NO: 10326 - RNA, 20 nt, Artificial Sequence
  Antisense oligo
uaucuaguuaagcugcguac

SEQ ID NO: 10327 - RNA, 20 nt, Artificial Sequence
  Antisense oligo
guaucuaguuaagcugcgua

SEQ ID NO: 10328 - RNA, 20 nt, Artificial Sequence
  Antisense oligo
gguaucuaguuaagcugcgu

SEQ ID NO: 10329 - RNA, 20 nt, Artificial Sequence
  Antisense oligo
agguaucuaguuaagcugcg

SEQ ID NO: 10330 - RNA, 20 nt, Artificial Sequence
  Antisense oligo
cagguaucuaguuaagcugc

SEQ ID NO: 10331 - RNA, 20 nt, Artificial Sequence
  Antisense oligo
ccagguaucuaguuaagcug

SEQ ID NO: 10332 - RNA, 20 nt, Artificial Sequence
  Antisense oligo
cccagguaucuaguuaagcu

SEQ ID NO: 10333 - RNA, 20 nt, Artificial Sequence
  Antisense oligo
gcccagguaucuaguuaagc

SEQ ID NO: 10334 - RNA, 20 nt, Artificial Sequence
  Antisense oligo
ggcccagguaucuaguuaag

SEQ ID NO: 10335 - RNA, 20 nt, Artificial Sequence
  Antisense oligo
uggcccagguaucuaguuaa

SEQ ID NO: 10336 - RNA, 20 nt, Artificial Sequence
  Antisense oligo
cuggcccagguaucuaguua

SEQ ID NO: 10337 - RNA, 20 nt, Artificial Sequence
  Antisense oligo
ggcuggcccagguaucuagu

SEQ ID NO: 10338 - RNA, 20 nt, Artificial Sequence
  Antisense oligo
aggcuggcccagguaucuag

SEQ ID NO: 10339 - RNA, 20 nt, Artificial Sequence
  Antisense oligo
gaggcuggcccagguaucua

SEQ ID NO: 10340 - RNA, 20 nt, Artificial Sequence
  Antisense oligo
cuuuaccugcccuuccauau

SEQ ID NO: 10341 - RNA, 20 nt, Artificial Sequence
  Antisense oligo
auagcuuuaccugcccuucc

SEQ ID NO: 10342 - RNA, 20 nt, Artificial Sequence
  Antisense oligo
gauagcuuuaccugcccuuc

SEQ ID NO: 10343 - RNA, 20 nt, Artificial Sequence
  Antisense oligo
agauagcuuuaccugcccuu

SEQ ID NO: 10344 - RNA, 20 nt, Artificial Sequence
  Antisense oligo
aagauagcuuuaccugcccu

SEQ ID NO: 10345 - RNA, 20 nt, Artificial Sequence
  Antisense oligo
gaagauagcuuuaccugccc

SEQ ID NO: 10346 - RNA, 20 nt, Artificial Sequence
  Antisense oligo
ugaagauagcuuuaccugcc

SEQ ID NO: 10347 - RNA, 20 nt, Artificial Sequence
  Antisense oligo
cagaggguuuuguuuggaaa

SEQ ID NO: 10348 - RNA, 20 nt, Artificial Sequence
  Antisense oligo
acagaggguuuuguuuggaa

SEQ ID NO: 10349 - RNA, 20 nt, Artificial Sequence
  Antisense oligo
aaucacaacagaggguuuug

SEQ ID NO: 10350 - RNA, 20 nt, Artificial Sequence
  Antisense oligo
guccucaguguccuucugug

SEQ ID NO: 10351 - RNA, 20 nt, Artificial Sequence
  Antisense oligo
aguccucaguguccuucugu

SEQ ID NO: 10352 - RNA, 20 nt, Artificial Sequence
  Antisense oligo
ucccaaguccucaguguccu

SEQ ID NO: 10353 - RNA, 20 nt, Artificial Sequence
  Antisense oligo
agucccaaguccucaguguc

SEQ ID NO: 10354 - RNA, 20 nt, Artificial Sequence
  Antisense oligo
ggagucccaaguccucagug

SEQ ID NO: 10355 - RNA, 20 nt, Artificial Sequence
  Antisense oligo
guggagucccaaguccucag

SEQ ID NO: 10356 - RNA, 20 nt, Artificial Sequence
  Antisense oligo
uguggagucccaaguccuca

SEQ ID NO: 10357 - RNA, 20 nt, Artificial Sequence
  Antisense oligo
gcuguggagucccaaguccu

SEQ ID NO: 10358 - RNA, 20 nt, Artificial Sequence
  Antisense oligo
gaagcaauggcuguggaguc

SEQ ID NO: 10359 - RNA, 20 nt, Artificial Sequence
  Antisense oligo
ggaagcaauggcuguggagu

SEQ ID NO: 10360 - RNA, 20 nt, Artificial Sequence
  Antisense oligo
cgcuggaagcaauggcugug

SEQ ID NO: 10361 - RNA, 20 nt, Artificial Sequence
  Antisense oligo
acgcuggaagcaauggcugu

SEQ ID NO: 10362 - RNA, 20 nt, Artificial Sequence
  Antisense oligo
gacgcuggaagcaauggcug

SEQ ID NO: 10363 - RNA, 20 nt, Artificial Sequence
  Antisense oligo
ugacgcuggaagcaauggcu

SEQ ID NO: 10364 - RNA, 20 nt, Artificial Sequence
  Antisense oligo
gugacgcuggaagcaauggc

SEQ ID NO: 10365 - RNA, 20 nt, Artificial Sequence
  Antisense oligo
gggugacgcuggaagcaaug

SEQ ID NO: 10366 - RNA, 20 nt, Artificial Sequence
  Antisense oligo
cgccaucauucugccagguc

SEQ ID NO: 10367 - RNA, 20 nt, Artificial Sequence
  Antisense oligo
gacgccaucauucugccagg

SEQ ID NO: 10368 - RNA, 20 nt, Artificial Sequence
  Antisense oligo
cuaccagacgccaucauucu

SEQ ID NO: 10369 - RNA, 20 nt, Artificial Sequence
  Antisense oligo
ucuaccagacgccaucauuc

SEQ ID NO: 10370 - RNA, 20 nt, Artificial Sequence
  Antisense oligo
cucuaccagacgccaucauu

SEQ ID NO: 10371 - RNA, 20 nt, Artificial Sequence
  Antisense oligo
ucucuaccagacgccaucau

SEQ ID NO: 10372 - RNA, 20 nt, Artificial Sequence
  Antisense oligo
cucucuaccagacgccauca

SEQ ID NO: 10373 - RNA, 20 nt, Artificial Sequence
  Antisense oligo
ccucucuaccagacgccauc

SEQ ID NO: 10374 - RNA, 20 nt, Artificial Sequence
  Antisense oligo
gccucucuaccagacgccau

SEQ ID NO: 10375 - RNA, 20 nt, Artificial Sequence
  Antisense oligo
ugccucucuaccagacgcca

SEQ ID NO: 10376 - RNA, 20 nt, Artificial Sequence
  Antisense oligo
uacaucuguggaggagugga

SEQ ID NO: 10377 - RNA, 20 nt, Artificial Sequence
  Antisense oligo
ccacguuuccuccagugccu

SEQ ID NO: 10378 - RNA, 20 nt, Artificial Sequence
  Antisense oligo
uccacguuuccuccagugcc

SEQ ID NO: 10379 - RNA, 20 nt, Artificial Sequence
  Antisense oligo
uuccacguuuccuccagugc

SEQ ID NO: 10380 - RNA, 20 nt, Artificial Sequence
  Antisense oligo
guuccacguuuccuccagug

SEQ ID NO: 10381 - RNA, 20 nt, Artificial Sequence
  Antisense oligo
uguuccacguuuccuccagu

SEQ ID NO: 10382 - RNA, 20 nt, Artificial Sequence
  Antisense oligo
cuguuccacguuuccuccag

SEQ ID NO: 10383 - RNA, 20 nt, Artificial Sequence
  Antisense oligo
gcuguuccacguuuccucca

SEQ ID NO: 10384 - RNA, 20 nt, Artificial Sequence
  Antisense oligo
cgcuguuccacguuuccucc

SEQ ID NO: 10385 - RNA, 20 nt, Artificial Sequence
  Antisense oligo
ucgcuguuccacguuuccuc

SEQ ID NO: 10386 - RNA, 20 nt, Artificial Sequence
  Antisense oligo
cucgcuguuccacguuuccu

SEQ ID NO: 10387 - RNA, 20 nt, Artificial Sequence
  Antisense oligo
acucgcuguuccacguuucc

SEQ ID NO: 10388 - RNA, 20 nt, Artificial Sequence
  Antisense oligo
uacucgcuguuccacguuuc

SEQ ID NO: 10389 - RNA, 20 nt, Artificial Sequence
  Antisense oligo
guacucgcuguuccacguuu

SEQ ID NO: 10390 - RNA, 20 nt, Artificial Sequence
  Antisense oligo
uguacucgcuguuccacguu

SEQ ID NO: 10391 - RNA, 20 nt, Artificial Sequence
  Antisense oligo
gcuuuguacucgcuguucca

SEQ ID NO: 10392 - RNA, 20 nt, Artificial Sequence
  Antisense oligo
ugcuuuguacucgcuguucc

SEQ ID NO: 10393 - RNA, 20 nt, Artificial Sequence
  Antisense oligo
cugcuuuguacucgcuguuc

SEQ ID NO: 10394 - RNA, 20 nt, Artificial Sequence
  Antisense oligo
gcugcuuuguacucgcuguu

SEQ ID NO: 10395 - RNA, 20 nt, Artificial Sequence
  Antisense oligo
ugcugcuuuguacucgcugu

SEQ ID NO: 10396 - RNA, 20 nt, Artificial Sequence
  Antisense oligo
gugcugcuuuguacucgcug

SEQ ID NO: 10397 - RNA, 20 nt, Artificial Sequence
  Antisense oligo
ucagugcugcuuuguacucg

SEQ ID NO: 10398 - RNA, 20 nt, Artificial Sequence
  Antisense oligo
cucagugcugcuuuguacuc

SEQ ID NO: 10399 - RNA, 20 nt, Artificial Sequence
  Antisense oligo
aucugucacucagugcugcu

SEQ ID NO: 10400 - RNA, 20 nt, Artificial Sequence
  Antisense oligo
aacaugaucugucacucagu

SEQ ID NO: 10401 - RNA, 20 nt, Artificial Sequence
  Antisense oligo
gccacccugacaacaugauc

SEQ ID NO: 10402 - RNA, 20 nt, Artificial Sequence
  Antisense oligo
ugccacccugacaacaugau

SEQ ID NO: 10403 - RNA, 20 nt, Artificial Sequence
  Antisense oligo
gugccacccugacaacauga

SEQ ID NO: 10404 - RNA, 20 nt, Artificial Sequence
  Antisense oligo
ggugccacccugacaacaug

SEQ ID NO: 10405 - RNA, 20 nt, Artificial Sequence
  Antisense oligo
aggugccacccugacaacau

SEQ ID NO: 10406 - RNA, 20 nt, Artificial Sequence
  Antisense oligo
gaggaucuugcccuucuccc

SEQ ID NO: 10407 - RNA, 20 nt, Artificial Sequence
  Antisense oligo
cgaggaucuugcccuucucc

SEQ ID NO: 10408 - RNA, 20 nt, Artificial Sequence
  Antisense oligo
gcgaggaucuugcccuucuc

SEQ ID NO: 10409 - RNA, 20 nt, Artificial Sequence
  Antisense oligo
gagcgaggaucuugcccuuc

SEQ ID NO: 10410 - RNA, 20 nt, Artificial Sequence
  Antisense oligo
ggagcgaggaucuugcccuu

SEQ ID NO: 10411 - RNA, 20 nt, Artificial Sequence
  Antisense oligo
uggagcgaggaucuugcccu

SEQ ID NO: 10412 - RNA, 20 nt, Artificial Sequence
  Antisense oligo
uuggagcgaggaucuugccc

SEQ ID NO: 10413 - RNA, 20 nt, Artificial Sequence
  Antisense oligo
guuggagcgaggaucuugcc

SEQ ID NO: 10414 - RNA, 20 nt, Artificial Sequence
  Antisense oligo
gguuggagcgaggaucuugc

SEQ ID NO: 10415 - RNA, 20 nt, Artificial Sequence
  Antisense oligo
cgguuggagcgaggaucuug

SEQ ID NO: 10416 - RNA, 20 nt, Artificial Sequence
  Antisense oligo
acgguuggagcgaggaucuu

SEQ ID NO: 10417 - RNA, 20 nt, Artificial Sequence
  Antisense oligo
gggacaaaaggagagaacac

SEQ ID NO: 10418 - RNA, 20 nt, Artificial Sequence
  Antisense oligo
uggcggagucacacuauggg

SEQ ID NO: 10419 - RNA, 20 nt, Artificial Sequence
  Antisense oligo
cuggcggagucacacuaugg

SEQ ID NO: 10420 - RNA, 20 nt, Artificial Sequence
  Antisense oligo
ccuggcggagucacacuaug

SEQ ID NO: 10421 - RNA, 20 nt, Artificial Sequence
  Antisense oligo
uccuggcggagucacacuau

SEQ ID NO: 10422 - RNA, 20 nt, Artificial Sequence
  Antisense oligo
uuccuggcggagucacacua

SEQ ID NO: 10423 - RNA, 20 nt, Artificial Sequence
  Antisense oligo
guuccuggcggagucacacu

SEQ ID NO: 10424 - RNA, 20 nt, Artificial Sequence
  Antisense oligo
aguuccuggcggagucacac

SEQ ID NO: 10425 - RNA, 20 nt, Artificial Sequence
  Antisense oligo
aaguuccuggcggagucaca

SEQ ID NO: 10426 - RNA, 20 nt, Artificial Sequence
  Antisense oligo
caaguuccuggcggagucac

SEQ ID NO: 10427 - RNA, 20 nt, Artificial Sequence
  Antisense oligo
ccaaguuccuggcggaguca

SEQ ID NO: 10428 - RNA, 20 nt, Artificial Sequence
  Antisense oligo
uccaaguuccuggcggaguc

SEQ ID NO: 10429 - RNA, 20 nt, Artificial Sequence
  Antisense oligo
uuccaaguuccuggcggagu

SEQ ID NO: 10430 - RNA, 20 nt, Artificial Sequence
  Antisense oligo
cauuccaaguuccuggcgga

SEQ ID NO: 10431 - RNA, 20 nt, Artificial Sequence
  Antisense oligo
ccauuccaaguuccuggcgg

SEQ ID NO: 10432 - RNA, 20 nt, Artificial Sequence
  Antisense oligo
cagccauuccaaguuccugg

SEQ ID NO: 10433 - RNA, 20 nt, Artificial Sequence
  Antisense oligo
ucagccauuccaaguuccug

SEQ ID NO: 10434 - RNA, 20 nt, Artificial Sequence
  Antisense oligo
uucagccauuccaaguuccu

SEQ ID NO: 10435 - RNA, 20 nt, Artificial Sequence
  Antisense oligo
cuucagccauuccaaguucc

SEQ ID NO: 10436 - RNA, 20 nt, Artificial Sequence
  Antisense oligo
gucuucagccauuccaaguu

SEQ ID NO: 10437 - RNA, 20 nt, Artificial Sequence
  Antisense oligo
agucuucagccauuccaagu

SEQ ID NO: 10438 - RNA, 20 nt, Artificial Sequence
  Antisense oligo
cagucuucagccauuccaag

SEQ ID NO: 10439 - RNA, 20 nt, Artificial Sequence
  Antisense oligo
cacagucuucagccauucca

SEQ ID NO: 10440 - RNA, 20 nt, Artificial Sequence
  Antisense oligo
cauucacagucuucagccau

SEQ ID NO: 10441 - RNA, 20 nt, Artificial Sequence
  Antisense oligo
ucauucacagucuucagcca

SEQ ID NO: 10442 - RNA, 20 nt, Artificial Sequence
  Antisense oligo
cucauucacagucuucagcc

SEQ ID NO: 10443 - RNA, 20 nt, Artificial Sequence
  Antisense oligo
cucucauucacagucuucag

SEQ ID NO: 10444 - RNA, 20 nt, Artificial Sequence
  Antisense oligo
ccacagacccaugacucuca

SEQ ID NO: 10445 - RNA, 20 nt, Artificial Sequence
  Antisense oligo
uccacagacccaugacucuc

SEQ ID NO: 10446 - RNA, 20 nt, Artificial Sequence
  Antisense oligo
guuccacagacccaugacuc

SEQ ID NO: 10447 - RNA, 20 nt, Artificial Sequence
  Antisense oligo
cguuccacagacccaugacu

SEQ ID NO: 10448 - RNA, 20 nt, Artificial Sequence
  Antisense oligo
gcguuccacagacccaugac

SEQ ID NO: 10449 - RNA, 20 nt, Artificial Sequence
  Antisense oligo
ugagcguuccacagacccau

SEQ ID NO: 10450 - RNA, 20 nt, Artificial Sequence
  Antisense oligo
augagcguuccacagaccca

SEQ ID NO: 10451 - RNA, 20 nt, Artificial Sequence
  Antisense oligo
gaugagcguuccacagaccc

SEQ ID NO: 10452 - RNA, 20 nt, Artificial Sequence
  Antisense oligo
ggaugagcguuccacagacc

SEQ ID NO: 10453 - RNA, 20 nt, Artificial Sequence
  Antisense oligo
gggaugagcguuccacagac

SEQ ID NO: 10454 - RNA, 20 nt, Artificial Sequence
  Antisense oligo
agggaugagcguuccacaga

SEQ ID NO: 10455 - RNA, 20 nt, Artificial Sequence
  Antisense oligo
cagggaugagcguuccacag

SEQ ID NO: 10456 - RNA, 20 nt, Artificial Sequence
  Antisense oligo
ucagggaugagcguuccaca

SEQ ID NO: 10457 - RNA, 20 nt, Artificial Sequence
  Antisense oligo
gucagggaugagcguuccac

SEQ ID NO: 10458 - RNA, 20 nt, Artificial Sequence
  Antisense oligo
ggucagggaugagcguucca

SEQ ID NO: 10459 - RNA, 20 nt, Artificial Sequence
  Antisense oligo
cagggucagggaugagcguu

SEQ ID NO: 10460 - RNA, 20 nt, Artificial Sequence
  Antisense oligo
uuugguugauggccguggcc

SEQ ID NO: 10461 - RNA, 20 nt, Artificial Sequence
  Antisense oligo
cuuugguugauggccguggc

SEQ ID NO: 10462 - RNA, 20 nt, Artificial Sequence
  Antisense oligo
ccucuuugguugauggccgu

SEQ ID NO: 10463 - RNA, 20 nt, Artificial Sequence
  Antisense oligo
gccucuuugguugauggccg

SEQ ID NO: 10464 - RNA, 20 nt, Artificial Sequence
  Antisense oligo
gaugccucuuugguugaugg

SEQ ID NO: 10465 - RNA, 20 nt, Artificial Sequence
  Antisense oligo
uagaugccucuuugguugau

SEQ ID NO: 10466 - RNA, 20 nt, Artificial Sequence
  Antisense oligo
auagaugccucuuugguuga

SEQ ID NO: 10467 - RNA, 20 nt, Artificial Sequence
  Antisense oligo
cauagaugccucuuugguug

SEQ ID NO: 10468 - RNA, 20 nt, Artificial Sequence
  Antisense oligo
acauagaugccucuuugguu

SEQ ID NO: 10469 - RNA, 20 nt, Artificial Sequence
  Antisense oligo
cacauagaugccucuuuggu

SEQ ID NO: 10470 - RNA, 20 nt, Artificial Sequence
  Antisense oligo
ucacauagaugccucuuugg

SEQ ID NO: 10471 - RNA, 20 nt, Artificial Sequence
  Antisense oligo
aucacauagaugccucuuug

SEQ ID NO: 10472 - RNA, 20 nt, Artificial Sequence
  Antisense oligo
uggaucacauagaugccucu

SEQ ID NO: 10473 - RNA, 20 nt, Artificial Sequence
  Antisense oligo
cuggaucacauagaugccuc

SEQ ID NO: 10474 - RNA, 20 nt, Artificial Sequence
  Antisense oligo
ccuggaucacauagaugccu

SEQ ID NO: 10475 - RNA, 20 nt, Artificial Sequence
  Antisense oligo
gccuggaucacauagaugcc

SEQ ID NO: 10476 - RNA, 20 nt, Artificial Sequence
  Antisense oligo
aagaccuggacuggcagcag

SEQ ID NO: 10477 - RNA, 20 nt, Artificial Sequence
  Antisense oligo
gaagaccuggacuggcagca

SEQ ID NO: 10478 - RNA, 20 nt, Artificial Sequence
  Antisense oligo
agaagaccuggacuggcagc

SEQ ID NO: 10479 - RNA, 20 nt, Artificial Sequence
  Antisense oligo
agcauagguuagaagucacu

SEQ ID NO: 10480 - RNA, 20 nt, Artificial Sequence
  Antisense oligo
gagcauagguuagaagucac

SEQ ID NO: 10481 - RNA, 20 nt, Artificial Sequence
  Antisense oligo
aagagcauagguuagaaguc

SEQ ID NO: 10482 - RNA, 20 nt, Artificial Sequence
  Antisense oligo
ugaagagcauagguuagaag

SEQ ID NO: 10483 - RNA, 20 nt, Artificial Sequence
  Antisense oligo
ugugaagagcauagguuaga

SEQ ID NO: 10484 - RNA, 20 nt, Artificial Sequence
  Antisense oligo
cugugaagagcauagguuag

SEQ ID NO: 10485 - RNA, 20 nt, Artificial Sequence
  Antisense oligo
ucugugaagagcauagguua

SEQ ID NO: 10486 - RNA, 20 nt, Artificial Sequence
  Antisense oligo
aaucugugaagagcauaggu

SEQ ID NO: 10487 - RNA, 20 nt, Artificial Sequence
  Antisense oligo
aaaucugugaagagcauagg

SEQ ID NO: 10488 - RNA, 20 nt, Artificial Sequence
  Antisense oligo
gaaaucugugaagagcauag

SEQ ID NO: 10489 - RNA, 20 nt, Artificial Sequence
  Antisense oligo
ggaaggaucaagugcagaac

SEQ ID NO: 10490 - RNA, 20 nt, Artificial Sequence
  Antisense oligo
ucaggaaggaucaagugcag

SEQ ID NO: 10491 - RNA, 20 nt, Artificial Sequence
  Antisense oligo
cucaggaaggaucaagugca

SEQ ID NO: 10492 - RNA, 20 nt, Artificial Sequence
  Antisense oligo
ucucaggaaggaucaagugc

SEQ ID NO: 10493 - RNA, 20 nt, Artificial Sequence
  Antisense oligo
gcucucaggaaggaucaagu

SEQ ID NO: 10494 - RNA, 20 nt, Artificial Sequence
  Antisense oligo
cagggcucucaggaaggauc

SEQ ID NO: 10495 - RNA, 20 nt, Artificial Sequence
  Antisense oligo
acucucgugacuccucgugg

SEQ ID NO: 10496 - RNA, 20 nt, Artificial Sequence
  Antisense oligo
uacucucgugacuccucgug

SEQ ID NO: 10497 - RNA, 20 nt, Artificial Sequence
  Antisense oligo
guacucucgugacuccucgu

SEQ ID NO: 10498 - RNA, 20 nt, Artificial Sequence
  Antisense oligo
ucaccuccucuaaagaguac

SEQ ID NO: 10499 - RNA, 20 nt, Artificial Sequence
  Antisense oligo
cuucaccuccucuaaagagu

SEQ ID NO: 10500 - RNA, 20 nt, Artificial Sequence
  Antisense oligo
ucaaaagcuccuucaccucc

SEQ ID NO: 10501 - RNA, 20 nt, Artificial Sequence
  Antisense oligo
uguucaaaagcuccuucacc

SEQ ID NO: 10502 - RNA, 20 nt, Artificial Sequence
  Antisense oligo
uuguucaaaagcuccuucac

SEQ ID NO: 10503 - RNA, 20 nt, Artificial Sequence
  Antisense oligo
acuuguucaaaagcuccuuc

SEQ ID NO: 10504 - RNA, 20 nt, Artificial Sequence
  Antisense oligo
ucaacuuguucaaaagcucc

SEQ ID NO: 10505 - RNA, 20 nt, Artificial Sequence
  Antisense oligo
gcaucaacuuguucaaaagc

SEQ ID NO: 10506 - RNA, 20 nt, Artificial Sequence
  Antisense oligo
caucagcaucaacuuguuca

SEQ ID NO: 10507 - RNA, 20 nt, Artificial Sequence
  Antisense oligo
acaucagcaucaacuuguuc

SEQ ID NO: 10508 - RNA, 20 nt, Artificial Sequence
  Antisense oligo
gacaucagcaucaacuuguu

SEQ ID NO: 10509 - RNA, 20 nt, Artificial Sequence
  Antisense oligo
agacaucagcaucaacuugu

SEQ ID NO: 10510 - RNA, 20 nt, Artificial Sequence
  Antisense oligo
gccagacaucagcaucaacu

SEQ ID NO: 10511 - RNA, 20 nt, Artificial Sequence
  Antisense oligo
ugccagacaucagcaucaac

SEQ ID NO: 10512 - RNA, 20 nt, Artificial Sequence
  Antisense oligo
uugccagacaucagcaucaa

SEQ ID NO: 10513 - RNA, 20 nt, Artificial Sequence
  Antisense oligo
cuugccagacaucagcauca

SEQ ID NO: 10514 - RNA, 20 nt, Artificial Sequence
  Antisense oligo
uucuugccagacaucagcau

SEQ ID NO: 10515 - RNA, 20 nt, Artificial Sequence
  Antisense oligo
ccuucuugccagacaucagc

SEQ ID NO: 10516 - RNA, 20 nt, Artificial Sequence
  Antisense oligo
uacgauccuucuugccagac

SEQ ID NO: 10517 - RNA, 20 nt, Artificial Sequence
  Antisense oligo
uuacgauccuucuugccaga

SEQ ID NO: 10518 - RNA, 20 nt, Artificial Sequence
  Antisense oligo
guuacgauccuucuugccag

SEQ ID NO: 10519 - RNA, 20 nt, Artificial Sequence
  Antisense oligo
uguuacgauccuucuugcca

SEQ ID NO: 10520 - RNA, 20 nt, Artificial Sequence
  Antisense oligo
uuguuacgauccuucuugcc

SEQ ID NO: 10521 - RNA, 20 nt, Artificial Sequence
  Antisense oligo
guuguuacgauccuucuugc

SEQ ID NO: 10522 - RNA, 20 nt, Artificial Sequence
  Antisense oligo
uguuguuacgauccuucuug

SEQ ID NO: 10523 - RNA, 20 nt, Artificial Sequence
  Antisense oligo
guguuguuacgauccuucuu

SEQ ID NO: 10524 - RNA, 20 nt, Artificial Sequence
  Antisense oligo
cguguuguuacgauccuucu

SEQ ID NO: 10525 - RNA, 20 nt, Artificial Sequence
  Antisense oligo
ccguguuguuacgauccuuc

SEQ ID NO: 10526 - RNA, 20 nt, Artificial Sequence
  Antisense oligo
uccguguuguuacgauccuu

SEQ ID NO: 10527 - RNA, 20 nt, Artificial Sequence
  Antisense oligo
uuccguguuguuacgauccu

SEQ ID NO: 10528 - RNA, 20 nt, Artificial Sequence
  Antisense oligo
cuuccguguuguuacgaucc

SEQ ID NO: 10529 - RNA, 20 nt, Artificial Sequence
  Antisense oligo
acuuccguguuguuacgauc

SEQ ID NO: 10530 - RNA, 20 nt, Artificial Sequence
  Antisense oligo
cacuuccguguuguuacgau

SEQ ID NO: 10531 - RNA, 20 nt, Artificial Sequence
  Antisense oligo
ccacuuccguguuguuacga

SEQ ID NO: 10532 - RNA, 20 nt, Artificial Sequence
  Antisense oligo
uccacuuccguguuguuacg

SEQ ID NO: 10533 - RNA, 20 nt, Artificial Sequence
  Antisense oligo
ucuccacuuccguguuguua

SEQ ID NO: 10534 - RNA, 20 nt, Artificial Sequence
  Antisense oligo
cucuccacuuccguguuguu

SEQ ID NO: 10535 - RNA, 20 nt, Artificial Sequence
  Antisense oligo
accucuccacuuccguguug

SEQ ID NO: 10536 - RNA, 20 nt, Artificial Sequence
  Antisense oligo
aaaaccucuccacuuccgug

SEQ ID NO: 10537 - RNA, 20 nt, Artificial Sequence
  Antisense oligo
gaaaaccucuccacuuccgu

SEQ ID NO: 10538 - RNA, 20 nt, Artificial Sequence
  Antisense oligo
ugaaaaccucuccacuuccg

SEQ ID NO: 10539 - RNA, 20 nt, Artificial Sequence
  Antisense oligo
ccucugaaaaccucuccacu

SEQ ID NO: 10540 - RNA, 20 nt, Artificial Sequence
  Antisense oligo
accucugaaaaccucuccac

SEQ ID NO: 10541 - RNA, 20 nt, Artificial Sequence
  Antisense oligo
cucaccucugaaaaccucuc

SEQ ID NO: 10542 - RNA, 20 nt, Artificial Sequence
  Antisense oligo
ccucaccucugaaaaccucu

SEQ ID NO: 10543 - RNA, 20 nt, Artificial Sequence
  Antisense oligo
cccucaccucugaaaaccuc

SEQ ID NO: 10544 - RNA, 20 nt, Artificial Sequence
  Antisense oligo
gcccucaccucugaaaaccu

SEQ ID NO: 10545 - RNA, 20 nt, Artificial Sequence
  Antisense oligo
agcgccacugcaaagaugcg

SEQ ID NO: 10546 - RNA, 20 nt, Artificial Sequence
  Antisense oligo
uuagcgccacugcaaagaug

SEQ ID NO: 10547 - RNA, 20 nt, Artificial Sequence
  Antisense oligo
cuuagcgccacugcaaagau

SEQ ID NO: 10548 - RNA, 20 nt, Artificial Sequence
  Antisense oligo
gcuuagcgccacugcaaaga

SEQ ID NO: 10549 - RNA, 20 nt, Artificial Sequence
  Antisense oligo
agcuuagcgccacugcaaag

SEQ ID NO: 10550 - RNA, 20 nt, Artificial Sequence
  Antisense oligo
cagcuuagcgccacugcaaa

SEQ ID NO: 10551 - RNA, 20 nt, Artificial Sequence
  Antisense oligo
ccagcuuagcgccacugcaa

SEQ ID NO: 10552 - RNA, 20 nt, Artificial Sequence
  Antisense oligo
accagcuuagcgccacugca

SEQ ID NO: 10553 - RNA, 20 nt, Artificial Sequence
  Antisense oligo
accaccagcuuagcgccacu

SEQ ID NO: 10554 - RNA, 20 nt, Artificial Sequence
  Antisense oligo
acaccaccagcuuagcgcca

SEQ ID NO: 10555 - RNA, 20 nt, Artificial Sequence
  Antisense oligo
ugacaccaccagcuuagcgc

SEQ ID NO: 10556 - RNA, 20 nt, Artificial Sequence
  Antisense oligo
gaugacaccaccagcuuagc

SEQ ID NO: 10557 - RNA, 20 nt, Artificial Sequence
  Antisense oligo
agaugacaccaccagcuuag

SEQ ID NO: 10558 - RNA, 20 nt, Artificial Sequence
  Antisense oligo
gagaugacaccaccagcuua

SEQ ID NO: 10559 - RNA, 20 nt, Artificial Sequence
  Antisense oligo
gaguacacagcccucacgga

SEQ ID NO: 10560 - RNA, 20 nt, Artificial Sequence
  Antisense oligo
ugggaguacacagcccucac

SEQ ID NO: 10561 - RNA, 20 nt, Artificial Sequence
  Antisense oligo
cuugggaguacacagcccuc

SEQ ID NO: 10562 - RNA, 20 nt, Artificial Sequence
  Antisense oligo
uucuugggaguacacagccc

SEQ ID NO: 10563 - RNA, 20 nt, Artificial Sequence
  Antisense oligo
uuucuugggaguacacagcc

SEQ ID NO: 10564 - RNA, 20 nt, Artificial Sequence
  Antisense oligo
guuuucuugggaguacacag

SEQ ID NO: 10565 - RNA, 20 nt, Artificial Sequence
  Antisense oligo
cguuuucuugggaguacaca

SEQ ID NO: 10566 - RNA, 20 nt, Artificial Sequence
  Antisense oligo
ccguuuucuugggaguacac

SEQ ID NO: 10567 - RNA, 20 nt, Artificial Sequence
  Antisense oligo
uuuccguuuucuugggagua

SEQ ID NO: 10568 - RNA, 20 nt, Artificial Sequence
  Antisense oligo
cuuuccguuuucuugggagu

SEQ ID NO: 10569 - RNA, 20 nt, Artificial Sequence
  Antisense oligo
uccuuuccguuuucuuggga

SEQ ID NO: 10570 - RNA, 20 nt, Artificial Sequence
  Antisense oligo
aauccuuuccguuuucuugg

SEQ ID NO: 10571 - RNA, 20 nt, Artificial Sequence
  Antisense oligo
gucaaauccuuuccguuuuc

SEQ ID NO: 10572 - RNA, 20 nt, Artificial Sequence
  Antisense oligo
caagucaaauccuuuccguu

SEQ ID NO: 10573 - RNA, 20 nt, Artificial Sequence
  Antisense oligo
ccaagucaaauccuuuccgu

SEQ ID NO: 10574 - RNA, 20 nt, Artificial Sequence
  Antisense oligo
cccaagucaaauccuuuccg

SEQ ID NO: 10575 - RNA, 20 nt, Artificial Sequence
  Antisense oligo
ucccaagucaaauccuuucc

SEQ ID NO: 10576 - RNA, 20 nt, Artificial Sequence
  Antisense oligo
aucccaagucaaauccuuuc

SEQ ID NO: 10577 - RNA, 20 nt, Artificial Sequence
  Antisense oligo
caaaucccaagucaaauccu

SEQ ID NO: 10578 - RNA, 20 nt, Artificial Sequence
  Antisense oligo
ucaaaucccaagucaaaucc

SEQ ID NO: 10579 - RNA, 20 nt, Artificial Sequence
  Antisense oligo
cagucaaaucccaagucaaa

SEQ ID NO: 10580 - RNA, 20 nt, Artificial Sequence
  Antisense oligo
uaucagucaaaucccaaguc

SEQ ID NO: 10581 - RNA, 20 nt, Artificial Sequence
  Antisense oligo
cuuaucagucaaaucccaag

SEQ ID NO: 10582 - RNA, 20 nt, Artificial Sequence
  Antisense oligo
cuucuuaucagucaaauccc

SEQ ID NO: 10583 - RNA, 20 nt, Artificial Sequence
  Antisense oligo
ccuucuuaucagucaaaucc

SEQ ID NO: 10584 - RNA, 20 nt, Artificial Sequence
  Antisense oligo
cccuucuuaucagucaaauc

SEQ ID NO: 10585 - RNA, 20 nt, Artificial Sequence
  Antisense oligo
gcccuucuuaucagucaaau

SEQ ID NO: 10586 - RNA, 20 nt, Artificial Sequence
  Antisense oligo
agcccuucuuaucagucaaa

SEQ ID NO: 10587 - RNA, 20 nt, Artificial Sequence
  Antisense oligo
gagcccuucuuaucagucaa

SEQ ID NO: 10588 - RNA, 20 nt, Artificial Sequence
  Antisense oligo
agagcccuucuuaucaguca

SEQ ID NO: 10589 - RNA, 20 nt, Artificial Sequence
  Antisense oligo
augggccuaagagcagagcc

SEQ ID NO: 10590 - RNA, 20 nt, Artificial Sequence
  Antisense oligo
gugccaacucuacucuccau

SEQ ID NO: 10591 - RNA, 20 nt, Artificial Sequence
  Antisense oligo
ugugccaacucuacucucca

SEQ ID NO: 10592 - RNA, 20 nt, Artificial Sequence
  Antisense oligo
augugccaacucuacucucc

SEQ ID NO: 10593 - RNA, 20 nt, Artificial Sequence
  Antisense oligo
aaugugccaacucuacucuc

SEQ ID NO: 10594 - RNA, 20 nt, Artificial Sequence
  Antisense oligo
aaaugugccaacucuacucu

SEQ ID NO: 10595 - RNA, 20 nt, Artificial Sequence
  Antisense oligo
caaaugugccaacucuacuc

SEQ ID NO: 10596 - RNA, 20 nt, Artificial Sequence
  Antisense oligo
acaaaugugccaacucuacu

SEQ ID NO: 10597 - RNA, 20 nt, Artificial Sequence
  Antisense oligo
uacaaaugugccaacucuac

SEQ ID NO: 10598 - RNA, 20 nt, Artificial Sequence
  Antisense oligo
ccuacaaaugugccaacucu

SEQ ID NO: 10599 - RNA, 20 nt, Artificial Sequence
  Antisense oligo
cccuacaaaugugccaacuc

SEQ ID NO: 10600 - RNA, 20 nt, Artificial Sequence
  Antisense oligo
acccuacaaaugugccaacu

SEQ ID NO: 10601 - RNA, 20 nt, Artificial Sequence
  Antisense oligo
cacccuacaaaugugccaac

SEQ ID NO: 10602 - RNA, 20 nt, Artificial Sequence
  Antisense oligo
uuccaugcacccuacaaaug

SEQ ID NO: 10603 - RNA, 20 nt, Artificial Sequence
  Antisense oligo
guuccaugcacccuacaaau

SEQ ID NO: 10604 - RNA, 20 nt, Artificial Sequence
  Antisense oligo
aguuccaugcacccuacaaa

SEQ ID NO: 10605 - RNA, 20 nt, Artificial Sequence
  Antisense oligo
gaguuccaugcacccuacaa

SEQ ID NO: 10606 - RNA, 20 nt, Artificial Sequence
  Antisense oligo
agaguuccaugcacccuaca

SEQ ID NO: 10607 - RNA, 20 nt, Artificial Sequence
  Antisense oligo
uagaguuccaugcacccuac

SEQ ID NO: 10608 - RNA, 20 nt, Artificial Sequence
  Antisense oligo
acuagaguuccaugcacccu

SEQ ID NO: 10609 - RNA, 20 nt, Artificial Sequence
  Antisense oligo
ggacuagaguuccaugcacc

SEQ ID NO: 10610 - RNA, 20 nt, Artificial Sequence
  Antisense oligo
cggacuagaguuccaugcac

SEQ ID NO: 10611 - RNA, 20 nt, Artificial Sequence
  Antisense oligo
gcggacuagaguuccaugca

SEQ ID NO: 10612 - RNA, 20 nt, Artificial Sequence
  Antisense oligo
cgcggacuagaguuccaugc

SEQ ID NO: 10613 - RNA, 20 nt, Artificial Sequence
  Antisense oligo
aggagggacugcuaacccag

SEQ ID NO: 10614 - RNA, 20 nt, Artificial Sequence
  Antisense oligo
guaaggagggacugcuaacc

SEQ ID NO: 10615 - RNA, 20 nt, Artificial Sequence
  Antisense oligo
ucguaaggagggacugcuaa

SEQ ID NO: 10616 - RNA, 20 nt, Artificial Sequence
  Antisense oligo
aucguaaggagggacugcua

SEQ ID NO: 10617 - RNA, 20 nt, Artificial Sequence
  Antisense oligo
gaucguaaggagggacugcu

SEQ ID NO: 10618 - RNA, 20 nt, Artificial Sequence
  Antisense oligo
ggaucguaaggagggacugc

SEQ ID NO: 10619 - RNA, 20 nt, Artificial Sequence
  Antisense oligo
cggaucguaaggagggacug

SEQ ID NO: 10620 - RNA, 20 nt, Artificial Sequence
  Antisense oligo
acggaucguaaggagggacu

SEQ ID NO: 10621 - RNA, 20 nt, Artificial Sequence
  Antisense oligo
uucagcguucauccuacgga

SEQ ID NO: 10622 - RNA, 20 nt, Artificial Sequence
  Antisense oligo
cuucagcguucauccuacgg

SEQ ID NO: 10623 - RNA, 20 nt, Artificial Sequence
  Antisense oligo
gcuucagcguucauccuacg

SEQ ID NO: 10624 - RNA, 20 nt, Artificial Sequence
  Antisense oligo
agcuucagcguucauccuac

SEQ ID NO: 10625 - RNA, 20 nt, Artificial Sequence
  Antisense oligo
cagcuucagcguucauccua

SEQ ID NO: 10626 - RNA, 20 nt, Artificial Sequence
  Antisense oligo
ccagcuucagcguucauccu

SEQ ID NO: 10627 - RNA, 20 nt, Artificial Sequence
  Antisense oligo
gccagcuucagcguucaucc

SEQ ID NO: 10628 - RNA, 20 nt, Artificial Sequence
  Antisense oligo
ugccagcuucagcguucauc

SEQ ID NO: 10629 - RNA, 20 nt, Artificial Sequence
  Antisense oligo
uggacaggcugccagcuuca

SEQ ID NO: 10630 - RNA, 20 nt, Artificial Sequence
  Antisense oligo
uucucagugcgguggacagg

SEQ ID NO: 10631 - RNA, 20 nt, Artificial Sequence
  Antisense oligo
cuucucagugcgguggacag

SEQ ID NO: 10632 - RNA, 20 nt, Artificial Sequence
  Antisense oligo
ccuucucagugcgguggaca

SEQ ID NO: 10633 - RNA, 20 nt, Artificial Sequence
  Antisense oligo
uccuucucagugcgguggac

SEQ ID NO: 10634 - RNA, 20 nt, Artificial Sequence
  Antisense oligo
cuccuucucagugcggugga

SEQ ID NO: 10635 - RNA, 20 nt, Artificial Sequence
  Antisense oligo
accuccuucucagugcggug

SEQ ID NO: 10636 - RNA, 20 nt, Artificial Sequence
  Antisense oligo
aaccuccuucucagugcggu

SEQ ID NO: 10637 - RNA, 20 nt, Artificial Sequence
  Antisense oligo
caaccuccuucucagugcgg

SEQ ID NO: 10638 - RNA, 20 nt, Artificial Sequence
  Antisense oligo
ccaaccuccuucucagugcg

SEQ ID NO: 10639 - RNA, 20 nt, Artificial Sequence
  Antisense oligo
accaaccuccuucucagugc

SEQ ID NO: 10640 - RNA, 20 nt, Artificial Sequence
  Antisense oligo
gaccaaccuccuucucagug

SEQ ID NO: 10641 - RNA, 20 nt, Artificial Sequence
  Antisense oligo
ggugaccaaccuccuucuca

SEQ ID NO: 10642 - RNA, 20 nt, Artificial Sequence
  Antisense oligo
gggugaccaaccuccuucuc

SEQ ID NO: 10643 - RNA, 20 nt, Artificial Sequence
  Antisense oligo
ugggugaccaaccuccuucu

SEQ ID NO: 10644 - RNA, 20 nt, Artificial Sequence
  Antisense oligo
ugcugggugaccaaccuccu

SEQ ID NO: 10645 - RNA, 20 nt, Artificial Sequence
  Antisense oligo
uuugcugggugaccaaccuc

SEQ ID NO: 10646 - RNA, 20 nt, Artificial Sequence
  Antisense oligo
auuugcugggugaccaaccu

SEQ ID NO: 10647 - RNA, 20 nt, Artificial Sequence
  Antisense oligo
cuauuugcugggugaccaac

SEQ ID NO: 10648 - RNA, 20 nt, Artificial Sequence
  Antisense oligo
gcuauuugcugggugaccaa

SEQ ID NO: 10649 - RNA, 20 nt, Artificial Sequence
  Antisense oligo
ggcuauuugcugggugacca

SEQ ID NO: 10650 - RNA, 20 nt, Artificial Sequence
  Antisense oligo
aagggcuauuugcuggguga

SEQ ID NO: 10651 - RNA, 20 nt, Artificial Sequence
  Antisense oligo
uaagggcuauuugcugggug

SEQ ID NO: 10652 - RNA, 20 nt, Artificial Sequence
  Antisense oligo
cuaagggcuauuugcugggu

SEQ ID NO: 10653 - RNA, 20 nt, Artificial Sequence
  Antisense oligo
ucuaagggcuauuugcuggg

SEQ ID NO: 10654 - RNA, 20 nt, Artificial Sequence
  Antisense oligo
uucuaagggcuauuugcugg

SEQ ID NO: 10655 - RNA, 20 nt, Artificial Sequence
  Antisense oligo
uuucuaagggcuauuugcug

SEQ ID NO: 10656 - RNA, 20 nt, Artificial Sequence
  Antisense oligo
gucuuucuaagggcuauuug

SEQ ID NO: 10657 - RNA, 20 nt, Artificial Sequence
  Antisense oligo
gugucuuucuaagggcuauu

SEQ ID NO: 10658 - RNA, 20 nt, Artificial Sequence
  Antisense oligo
aagugucuuucuaagggcua

SEQ ID NO: 10659 - RNA, 20 nt, Artificial Sequence
  Antisense oligo
caagugucuuucuaagggcu

SEQ ID NO: 10660 - RNA, 20 nt, Artificial Sequence
  Antisense oligo
ucaagugucuuucuaagggc

SEQ ID NO: 10661 - RNA, 20 nt, Artificial Sequence
  Antisense oligo
uucaagugucuuucuaaggg

SEQ ID NO: 10662 - RNA, 20 nt, Artificial Sequence
  Antisense oligo
agaggcaauucaagugucuu

SEQ ID NO: 10663 - RNA, 20 nt, Artificial Sequence
  Antisense oligo
gagaggcaauucaagugucu

SEQ ID NO: 10664 - RNA, 20 nt, Artificial Sequence
  Antisense oligo
gagugagagaggcaauucaa

SEQ ID NO: 10665 - RNA, 20 nt, Artificial Sequence
  Antisense oligo
auuuacagagugagagaggc

SEQ ID NO: 10666 - RNA, 20 nt, Artificial Sequence
  Antisense oligo
cugauuuacagagugagaga

SEQ ID NO: 10667 - RNA, 20 nt, Artificial Sequence
  Antisense oligo
gcugauuuacagagugagag

SEQ ID NO: 10668 - RNA, 20 nt, Artificial Sequence
  Antisense oligo
ccgguacaccauucucaaua

SEQ ID NO: 10669 - RNA, 20 nt, Artificial Sequence
  Antisense oligo
agagacuauuacuuagaccg

SEQ ID NO: 10670 - RNA, 20 nt, Artificial Sequence
  Antisense oligo
gagagacuauuacuuagacc

SEQ ID NO: 10671 - RNA, 20 nt, Artificial Sequence
  Antisense oligo
gcagagauaaaggauaccau

SEQ ID NO: 10672 - RNA, 20 nt, Artificial Sequence
  Antisense oligo
agcagagauaaaggauacca

SEQ ID NO: 10673 - RNA, 20 nt, Artificial Sequence
  Antisense oligo
cagcagagauaaaggauacc

SEQ ID NO: 10674 - RNA, 20 nt, Artificial Sequence
  Antisense oligo
cccagcagagauaaaggaua

SEQ ID NO: 10675 - RNA, 20 nt, Artificial Sequence
  Antisense oligo
gcacccagcagagauaaagg

SEQ ID NO: 10676 - RNA, 20 nt, Artificial Sequence
  Antisense oligo
acaggugugagccacugcac

SEQ ID NO: 10677 - RNA, 20 nt, Artificial Sequence
  Antisense oligo
uacaggugugagccacugca

SEQ ID NO: 10678 - RNA, 20 nt, Artificial Sequence
  Antisense oligo
uuacaggugugagccacugc

SEQ ID NO: 10679 - RNA, 20 nt, Artificial Sequence
  Antisense oligo
uuuacaggugugagccacug

SEQ ID NO: 10680 - RNA, 20 nt, Artificial Sequence
  Antisense oligo
cuuuacaggugugagccacu

SEQ ID NO: 10681 - RNA, 20 nt, Artificial Sequence
  Antisense oligo
gcuuuacaggugugagccac

SEQ ID NO: 10682 - RNA, 20 nt, Artificial Sequence
  Antisense oligo
ggcucccaaagugcuggcuu

SEQ ID NO: 10683 - RNA, 20 nt, Artificial Sequence
  Antisense oligo
augagccuuccaccuugggc

SEQ ID NO: 10684 - RNA, 20 nt, Artificial Sequence
  Antisense oligo
aaugagccuuccaccuuggg

SEQ ID NO: 10685 - RNA, 20 nt, Artificial Sequence
  Antisense oligo
aaaaugagccuuccaccuug

SEQ ID NO: 10686 - RNA, 20 nt, Artificial Sequence
  Antisense oligo
cuaaaaugagccuuccaccu

SEQ ID NO: 10687 - RNA, 20 nt, Artificial Sequence
  Antisense oligo
gcuaaaaugagccuuccacc

SEQ ID NO: 10688 - RNA, 20 nt, Artificial Sequence
  Antisense oligo
augaacuccugggcuaaaau

SEQ ID NO: 10689 - RNA, 20 nt, Artificial Sequence
  Antisense oligo
caugaacuccugggcuaaaa

SEQ ID NO: 10690 - RNA, 20 nt, Artificial Sequence
  Antisense oligo
accaugaugccuggacuguu

SEQ ID NO: 10691 - RNA, 20 nt, Artificial Sequence
  Antisense oligo
ccaaagugugaaccaugaug

SEQ ID NO: 10692 - RNA, 20 nt, Artificial Sequence
  Antisense oligo
cccaaagugugaaccaugau

SEQ ID NO: 10693 - RNA, 20 nt, Artificial Sequence
  Antisense oligo
ucccaaagugugaaccauga

SEQ ID NO: 10694 - RNA, 20 nt, Artificial Sequence
  Antisense oligo
cucccaaagugugaaccaug

SEQ ID NO: 10695 - RNA, 20 nt, Artificial Sequence
  Antisense oligo
ccucccaaagugugaaccau

SEQ ID NO: 10696 - RNA, 20 nt, Artificial Sequence
  Antisense oligo
gccucccaaagugugaacca

SEQ ID NO: 10697 - RNA, 20 nt, Artificial Sequence
  Antisense oligo
ggccucccaaagugugaacc

SEQ ID NO: 10698 - RNA, 20 nt, Artificial Sequence
  Antisense oligo
cggccucccaaagugugaac

SEQ ID NO: 10699 - RNA, 20 nt, Artificial Sequence
  Antisense oligo
ucggccucccaaagugugaa

SEQ ID NO: 10700 - RNA, 20 nt, Artificial Sequence
  Antisense oligo
cucggccucccaaaguguga

SEQ ID NO: 10701 - RNA, 20 nt, Artificial Sequence
  Antisense oligo
cugaccucaagugauaggcc

SEQ ID NO: 10702 - RNA, 20 nt, Artificial Sequence
  Antisense oligo
ccugaccucaagugauaggc

SEQ ID NO: 10703 - RNA, 20 nt, Artificial Sequence
  Antisense oligo
accugaccucaagugauagg

SEQ ID NO: 10704 - RNA, 20 nt, Artificial Sequence
  Antisense oligo
caccugaccucaagugauag

SEQ ID NO: 10705 - RNA, 20 nt, Artificial Sequence
  Antisense oligo
acaccugaccucaagugaua

SEQ ID NO: 10706 - RNA, 20 nt, Artificial Sequence
  Antisense oligo
aacaccugaccucaagugau

SEQ ID NO: 10707 - RNA, 20 nt, Artificial Sequence
  Antisense oligo
aaacaccugaccucaaguga

SEQ ID NO: 10708 - RNA, 20 nt, Artificial Sequence
  Antisense oligo
aggcuggucucaaacaccug

SEQ ID NO: 10709 - RNA, 20 nt, Artificial Sequence
  Antisense oligo
caggcuggucucaaacaccu

SEQ ID NO: 10710 - RNA, 20 nt, Artificial Sequence
  Antisense oligo
ccaggcuggucucaaacacc

SEQ ID NO: 10711 - RNA, 20 nt, Artificial Sequence
  Antisense oligo
gccaggcuggucucaaacac

SEQ ID NO: 10712 - RNA, 20 nt, Artificial Sequence
  Antisense oligo
cgccaggcuggucucaaaca

SEQ ID NO: 10713 - RNA, 20 nt, Artificial Sequence
  Antisense oligo
ucgccaggcuggucucaaac

SEQ ID NO: 10714 - RNA, 20 nt, Artificial Sequence
  Antisense oligo
aucgccaggcuggucucaaa

SEQ ID NO: 10715 - RNA, 20 nt, Artificial Sequence
  Antisense oligo
uaucgccaggcuggucucaa

SEQ ID NO: 10716 - RNA, 20 nt, Artificial Sequence
  Antisense oligo
auaucgccaggcuggucuca

SEQ ID NO: 10717 - RNA, 20 nt, Artificial Sequence
  Antisense oligo
cauaucgccaggcuggucuc

SEQ ID NO: 10718 - RNA, 20 nt, Artificial Sequence
  Antisense oligo
ccauaucgccaggcuggucu

SEQ ID NO: 10719 - RNA, 20 nt, Artificial Sequence
  Antisense oligo
guuucaccauaucgccaggc

SEQ ID NO: 10720 - RNA, 20 nt, Artificial Sequence
  Antisense oligo
gguuucaccauaucgccagg

SEQ ID NO: 10721 - RNA, 20 nt, Artificial Sequence
  Antisense oligo
ggguuucaccauaucgccag

SEQ ID NO: 10722 - RNA, 20 nt, Artificial Sequence
  Antisense oligo
agcugggauuacaggcacgu

SEQ ID NO: 10723 - RNA, 20 nt, Artificial Sequence
  Antisense oligo
uucuccugccucagucuccg

SEQ ID NO: 10724 - RNA, 20 nt, Artificial Sequence
  Antisense oligo
auucuccugccucagucucc

SEQ ID NO: 10725 - RNA, 20 nt, Artificial Sequence
  Antisense oligo
aauucuccugccucagucuc

SEQ ID NO: 10726 - RNA, 20 nt, Artificial Sequence
  Antisense oligo
caauucuccugccucagucu

SEQ ID NO: 10727 - RNA, 20 nt, Artificial Sequence
  Antisense oligo
gcaauucuccugccucaguc

SEQ ID NO: 10728 - RNA, 20 nt, Artificial Sequence
  Antisense oligo
agcaauucuccugccucagu

SEQ ID NO: 10729 - RNA, 20 nt, Artificial Sequence
  Antisense oligo
aagcaauucuccugccucag

SEQ ID NO: 10730 - RNA, 20 nt, Artificial Sequence
  Antisense oligo
caagcaauucuccugccuca

SEQ ID NO: 10731 - RNA, 20 nt, Artificial Sequence
  Antisense oligo
ucaagcaauucuccugccuc

SEQ ID NO: 10732 - RNA, 20 nt, Artificial Sequence
  Antisense oligo
uucaagcaauucuccugccu

SEQ ID NO: 10733 - RNA, 20 nt, Artificial Sequence
  Antisense oligo
guucaagcaauucuccugcc

SEQ ID NO: 10734 - RNA, 20 nt, Artificial Sequence
  Antisense oligo
gguucaagcaauucuccugc

SEQ ID NO: 10735 - RNA, 20 nt, Artificial Sequence
  Antisense oligo
ggguucaagcaauucuccug

SEQ ID NO: 10736 - RNA, 20 nt, Artificial Sequence
  Antisense oligo
uggguucaagcaauucuccu

SEQ ID NO: 10737 - RNA, 20 nt, Artificial Sequence
  Antisense oligo
cucacugcaaccucugccuc

SEQ ID NO: 10738 - RNA, 20 nt, Artificial Sequence
  Antisense oligo
gcucacugcaaccucugccu

SEQ ID NO: 10739 - RNA, 20 nt, Artificial Sequence
  Antisense oligo
ggagugcaguggugugaucu

SEQ ID NO: 10740 - RNA, 20 nt, Artificial Sequence
  Antisense oligo
uggagugcaguggugugauc

SEQ ID NO: 10741 - RNA, 20 nt, Artificial Sequence
  Antisense oligo
cuggagugcaguggugugau

SEQ ID NO: 10742 - RNA, 20 nt, Artificial Sequence
  Antisense oligo
gcuggagugcagugguguga

SEQ ID NO: 10743 - RNA, 20 nt, Artificial Sequence
  Antisense oligo
aggcuggagugcaguggugu

SEQ ID NO: 10744 - RNA, 20 nt, Artificial Sequence
  Antisense oligo
uuguugcccaggcuggagug

SEQ ID NO: 10745 - RNA, 20 nt, Artificial Sequence
  Antisense oligo
auuguugcccaggcuggagu

SEQ ID NO: 10746 - RNA, 20 nt, Artificial Sequence
  Antisense oligo
cauuguugcccaggcuggag

SEQ ID NO: 10747 - RNA, 20 nt, Artificial Sequence
  Antisense oligo
gcauuguugcccaggcugga

SEQ ID NO: 10748 - RNA, 20 nt, Artificial Sequence
  Antisense oligo
ugcauuguugcccaggcugg

SEQ ID NO: 10749 - RNA, 20 nt, Artificial Sequence
  Antisense oligo
uugcauuguugcccaggcug

SEQ ID NO: 10750 - RNA, 20 nt, Artificial Sequence
  Antisense oligo
agauggagucuugcauuguu

SEQ ID NO: 10751 - RNA, 20 nt, Artificial Sequence
  Antisense oligo
gagauggagucuugcauugu

SEQ ID NO: 10752 - RNA, 20 nt, Artificial Sequence
  Antisense oligo
ugagauggagucuugcauug

SEQ ID NO: 10753 - RNA, 20 nt, Artificial Sequence
  Antisense oligo
uugagauggagucuugcauu

SEQ ID NO: 10754 - RNA, 20 nt, Artificial Sequence
  Antisense oligo
uuugagauggagucuugcau

SEQ ID NO: 10755 - RNA, 20 nt, Artificial Sequence
  Antisense oligo
uuuugagauggagucuugca

SEQ ID NO: 10756 - RNA, 20 nt, Artificial Sequence
  Antisense oligo
ggaaagagucauuguagaga

SEQ ID NO: 10757 - RNA, 20 nt, Artificial Sequence
  Antisense oligo
agggaaagagucauuguaga

SEQ ID NO: 10758 - RNA, 20 nt, Artificial Sequence
  Antisense oligo
cagggaaagagucauuguag

SEQ ID NO: 10759 - RNA, 20 nt, Artificial Sequence
  Antisense oligo
ucaucagggaaagagucauu

SEQ ID NO: 10760 - RNA, 20 nt, Artificial Sequence
  Antisense oligo
ucucaucagggaaagaguca

SEQ ID NO: 10761 - RNA, 20 nt, Artificial Sequence
  Antisense oligo
gcacucucaucagggaaaga

SEQ ID NO: 10762 - RNA, 20 nt, Artificial Sequence
  Antisense oligo
ggcacucucaucagggaaag

SEQ ID NO: 10763 - RNA, 20 nt, Artificial Sequence
  Antisense oligo
auggcacucucaucagggaa

SEQ ID NO: 10764 - RNA, 20 nt, Artificial Sequence
  Antisense oligo
accugagaagauggcacucu

SEQ ID NO: 10765 - RNA, 20 nt, Artificial Sequence
  Antisense oligo
caccugagaagauggcacuc

SEQ ID NO: 10766 - RNA, 20 nt, Artificial Sequence
  Antisense oligo
cccaccugagaagauggcac

SEQ ID NO: 10767 - RNA, 20 nt, Artificial Sequence
  Antisense oligo
acccaccugagaagauggca

SEQ ID NO: 10768 - RNA, 20 nt, Artificial Sequence
  Antisense oligo
caacccaccugagaagaugg

SEQ ID NO: 10769 - RNA, 20 nt, Artificial Sequence
  Antisense oligo
cacaacccaccugagaagau

SEQ ID NO: 10770 - RNA, 20 nt, Artificial Sequence
  Antisense oligo
acacaacccaccugagaaga

SEQ ID NO: 10771 - RNA, 20 nt, Artificial Sequence
  Antisense oligo
uacacaacccaccugagaag

SEQ ID NO: 10772 - RNA, 20 nt, Artificial Sequence
  Antisense oligo
cuacacaacccaccugagaa

SEQ ID NO: 10773 - RNA, 20 nt, Artificial Sequence
  Antisense oligo
ucuacacaacccaccugaga

SEQ ID NO: 10774 - RNA, 20 nt, Artificial Sequence
  Antisense oligo
aucuacacaacccaccugag

SEQ ID NO: 10775 - RNA, 20 nt, Artificial Sequence
  Antisense oligo
ucaucuacacaacccaccug

SEQ ID NO: 10776 - RNA, 20 nt, Artificial Sequence
  Antisense oligo
cucaucuacacaacccaccu

SEQ ID NO: 10777 - RNA, 20 nt, Artificial Sequence
  Antisense oligo
ccucaucuacacaacccacc

SEQ ID NO: 10778 - RNA, 20 nt, Artificial Sequence
  Antisense oligo
cuccucaucuacacaaccca

SEQ ID NO: 10779 - RNA, 20 nt, Artificial Sequence
  Antisense oligo
ccuccucaucuacacaaccc

SEQ ID NO: 10780 - RNA, 20 nt, Artificial Sequence
  Antisense oligo
cucccuccucaucuacacaa

SEQ ID NO: 10781 - RNA, 20 nt, Artificial Sequence
  Antisense oligo
ccucccuccucaucuacaca

SEQ ID NO: 10782 - RNA, 20 nt, Artificial Sequence
  Antisense oligo
ggccucccuccucaucuaca

SEQ ID NO: 10783 - RNA, 20 nt, Artificial Sequence
  Antisense oligo
caggcccacugcaugaucug

SEQ ID NO: 10784 - RNA, 20 nt, Artificial Sequence
  Antisense oligo
acaggcccacugcaugaucu

SEQ ID NO: 10785 - RNA, 20 nt, Artificial Sequence
  Antisense oligo
cacaggcccacugcaugauc

SEQ ID NO: 10786 - RNA, 20 nt, Artificial Sequence
  Antisense oligo
uccacaggcccacugcauga

SEQ ID NO: 10787 - RNA, 20 nt, Artificial Sequence
  Antisense oligo
uguccacaggcccacugcau

SEQ ID NO: 10788 - RNA, 20 nt, Artificial Sequence
  Antisense oligo
cucugcaacagcacacaggc

SEQ ID NO: 10789 - RNA, 20 nt, Artificial Sequence
  Antisense oligo
acucugcaacagcacacagg

SEQ ID NO: 10790 - RNA, 20 nt, Artificial Sequence
  Antisense oligo
gcuacucugcaacagcacac

SEQ ID NO: 10791 - RNA, 20 nt, Artificial Sequence
  Antisense oligo
cgcuacucugcaacagcaca

SEQ ID NO: 10792 - RNA, 20 nt, Artificial Sequence
  Antisense oligo
acgcuacucugcaacagcac

SEQ ID NO: 10793 - RNA, 20 nt, Artificial Sequence
  Antisense oligo
cacgcuacucugcaacagca

SEQ ID NO: 10794 - RNA, 20 nt, Artificial Sequence
  Antisense oligo
acacgcuacucugcaacagc

SEQ ID NO: 10795 - RNA, 20 nt, Artificial Sequence
  Antisense oligo
aacacgcuacucugcaacag

SEQ ID NO: 10796 - RNA, 20 nt, Artificial Sequence
  Antisense oligo
uaacacgcuacucugcaaca

SEQ ID NO: 10797 - RNA, 20 nt, Artificial Sequence
  Antisense oligo
guaacacgcuacucugcaac

SEQ ID NO: 10798 - RNA, 20 nt, Artificial Sequence
  Antisense oligo
gguaacacgcuacucugcaa

SEQ ID NO: 10799 - RNA, 20 nt, Artificial Sequence
  Antisense oligo
ggguaacacgcuacucugca

SEQ ID NO: 10800 - RNA, 20 nt, Artificial Sequence
  Antisense oligo
aggguaacacgcuacucugc

SEQ ID NO: 10801 - RNA, 20 nt, Artificial Sequence
  Antisense oligo
gaggguaacacgcuacucug

SEQ ID NO: 10802 - RNA, 20 nt, Artificial Sequence
  Antisense oligo
gagaggguaacacgcuacuc

SEQ ID NO: 10803 - RNA, 20 nt, Artificial Sequence
  Antisense oligo
cgagaggguaacacgcuacu

SEQ ID NO: 10804 - RNA, 20 nt, Artificial Sequence
  Antisense oligo
gcgagaggguaacacgcuac

SEQ ID NO: 10805 - RNA, 20 nt, Artificial Sequence
  Antisense oligo
ugcgagaggguaacacgcua

SEQ ID NO: 10806 - RNA, 20 nt, Artificial Sequence
  Antisense oligo
augcgagaggguaacacgcu

SEQ ID NO: 10807 - RNA, 20 nt, Artificial Sequence
  Antisense oligo
caugcgagaggguaacacgc

SEQ ID NO: 10808 - RNA, 20 nt, Artificial Sequence
  Antisense oligo
gccaugcgagaggguaacac

SEQ ID NO: 10809 - RNA, 20 nt, Artificial Sequence
  Antisense oligo
agccaugcgagaggguaaca

SEQ ID NO: 10810 - RNA, 20 nt, Artificial Sequence
  Antisense oligo
gagccaugcgagaggguaac

SEQ ID NO: 10811 - RNA, 20 nt, Artificial Sequence
  Antisense oligo
agagccaugcgagaggguaa

SEQ ID NO: 10812 - RNA, 20 nt, Artificial Sequence
  Antisense oligo
cagagccaugcgagagggua

SEQ ID NO: 10813 - RNA, 20 nt, Artificial Sequence
  Antisense oligo
ucacagagccaugcgagagg

SEQ ID NO: 10814 - RNA, 20 nt, Artificial Sequence
  Antisense oligo
cucacagagccaugcgagag

SEQ ID NO: 10815 - RNA, 20 nt, Artificial Sequence
  Antisense oligo
gagaggcagaaccaugaggu

SEQ ID NO: 10816 - RNA, 20 nt, Artificial Sequence
  Antisense oligo
ggagaggcagaaccaugagg

SEQ ID NO: 10817 - RNA, 20 nt, Artificial Sequence
  Antisense oligo
cuggagaggcagaaccauga

SEQ ID NO: 10818 - RNA, 20 nt, Artificial Sequence
  Antisense oligo
gaccuggagaggcagaacca

SEQ ID NO: 10819 - RNA, 20 nt, Artificial Sequence
  Antisense oligo
agugcaggucgaugaaggcc

SEQ ID NO: 10820 - RNA, 20 nt, Artificial Sequence
  Antisense oligo
gagugcaggucgaugaaggc

SEQ ID NO: 10821 - RNA, 20 nt, Artificial Sequence
  Antisense oligo
agagugcaggucgaugaagg

SEQ ID NO: 10822 - RNA, 20 nt, Artificial Sequence
  Antisense oligo
cagagugcaggucgaugaag

SEQ ID NO: 10823 - RNA, 20 nt, Artificial Sequence
  Antisense oligo
gcagagugcaggucgaugaa

SEQ ID NO: 10824 - RNA, 20 nt, Artificial Sequence
  Antisense oligo
agcagagugcaggucgauga

SEQ ID NO: 10825 - RNA, 20 nt, Artificial Sequence
  Antisense oligo
cagcagagugcaggucgaug

SEQ ID NO: 10826 - RNA, 20 nt, Artificial Sequence
  Antisense oligo
ccagcagagugcaggucgau

SEQ ID NO: 10827 - RNA, 20 nt, Artificial Sequence
  Antisense oligo
auucccagcagagugcaggu

SEQ ID NO: 10828 - RNA, 20 nt, Artificial Sequence
  Antisense oligo
uauucccagcagagugcagg

SEQ ID NO: 10829 - RNA, 20 nt, Artificial Sequence
  Antisense oligo
auauucccagcagagugcag

SEQ ID NO: 10830 - RNA, 20 nt, Artificial Sequence
  Antisense oligo
gcauauucccagcagagugc

SEQ ID NO: 10831 - RNA, 20 nt, Artificial Sequence
  Antisense oligo
agcauauucccagcagagug

SEQ ID NO: 10832 - RNA, 20 nt, Artificial Sequence
  Antisense oligo
cagcauauucccagcagagu

SEQ ID NO: 10833 - RNA, 20 nt, Artificial Sequence
  Antisense oligo
aacagcauauucccagcaga

SEQ ID NO: 10834 - RNA, 20 nt, Artificial Sequence
  Antisense oligo
gaacagcauauucccagcag

SEQ ID NO: 10835 - RNA, 20 nt, Artificial Sequence
  Antisense oligo
ugaacagcauauucccagca

SEQ ID NO: 10836 - RNA, 20 nt, Artificial Sequence
  Antisense oligo
cugaacagcauauucccagc

SEQ ID NO: 10837 - RNA, 20 nt, Artificial Sequence
  Antisense oligo
ccugaacagcauauucccag

SEQ ID NO: 10838 - RNA, 20 nt, Artificial Sequence
  Antisense oligo
uccugaacagcauauuccca

SEQ ID NO: 10839 - RNA, 20 nt, Artificial Sequence
  Antisense oligo
guccugaacagcauauuccc

SEQ ID NO: 10840 - RNA, 20 nt, Artificial Sequence
  Antisense oligo
acguccugaacagcauauuc

SEQ ID NO: 10841 - RNA, 20 nt, Artificial Sequence
  Antisense oligo
cacguccugaacagcauauu

SEQ ID NO: 10842 - RNA, 20 nt, Artificial Sequence
  Antisense oligo
ccacguccugaacagcauau

SEQ ID NO: 10843 - RNA, 20 nt, Artificial Sequence
  Antisense oligo
uccacguccugaacagcaua

SEQ ID NO: 10844 - RNA, 20 nt, Artificial Sequence
  Antisense oligo
cgauccacguccugaacagc

SEQ ID NO: 10845 - RNA, 20 nt, Artificial Sequence
  Antisense oligo
gcgauccacguccugaacag

SEQ ID NO: 10846 - RNA, 20 nt, Artificial Sequence
  Antisense oligo
ggcgauccacguccugaaca

SEQ ID NO: 10847 - RNA, 20 nt, Artificial Sequence
  Antisense oligo
uggcgauccacguccugaac

SEQ ID NO: 10848 - RNA, 20 nt, Artificial Sequence
  Antisense oligo
auggcgauccacguccugaa

SEQ ID NO: 10849 - RNA, 20 nt, Artificial Sequence
  Antisense oligo
cauggcgauccacguccuga

SEQ ID NO: 10850 - RNA, 20 nt, Artificial Sequence
  Antisense oligo
ccauuuggagggacacaccc

SEQ ID NO: 10851 - RNA, 20 nt, Artificial Sequence
  Antisense oligo
agguccaagccaaaguccau

SEQ ID NO: 10852 - RNA, 20 nt, Artificial Sequence
  Antisense oligo
ucaccagguccaagccaaag

SEQ ID NO: 10853 - RNA, 20 nt, Artificial Sequence
  Antisense oligo
cgucaccagguccaagccaa

SEQ ID NO: 10854 - RNA, 20 nt, Artificial Sequence
  Antisense oligo
agcuccgucaccagguccaa

SEQ ID NO: 10855 - RNA, 20 nt, Artificial Sequence
  Antisense oligo
aagcuccgucaccaggucca

SEQ ID NO: 10856 - RNA, 20 nt, Artificial Sequence
  Antisense oligo
uaagcuccgucaccaggucc

SEQ ID NO: 10857 - RNA, 20 nt, Artificial Sequence
  Antisense oligo
uuaagcuccgucaccagguc

SEQ ID NO: 10858 - RNA, 20 nt, Artificial Sequence
  Antisense oligo
uuuaagcuccgucaccaggu

SEQ ID NO: 10859 - RNA, 20 nt, Artificial Sequence
  Antisense oligo
cuuuaagcuccgucaccagg

SEQ ID NO: 10860 - RNA, 20 nt, Artificial Sequence
  Antisense oligo
ucuuuaagcuccgucaccag

SEQ ID NO: 10861 - RNA, 20 nt, Artificial Sequence
  Antisense oligo
uucuuuaagcuccgucacca

SEQ ID NO: 10862 - RNA, 20 nt, Artificial Sequence
  Antisense oligo
cuucuuuaagcuccgucacc

SEQ ID NO: 10863 - RNA, 20 nt, Artificial Sequence
  Antisense oligo
ccuucuuuaagcuccgucac

SEQ ID NO: 10864 - RNA, 20 nt, Artificial Sequence
  Antisense oligo
accuucuuuaagcuccguca

SEQ ID NO: 10865 - RNA, 20 nt, Artificial Sequence
  Antisense oligo
caccuucuuuaagcuccguc

SEQ ID NO: 10866 - RNA, 20 nt, Artificial Sequence
  Antisense oligo
ccaccuucuuuaagcuccgu

SEQ ID NO: 10867 - RNA, 20 nt, Artificial Sequence
  Antisense oligo
uccaccuucuuuaagcuccg

SEQ ID NO: 10868 - RNA, 20 nt, Artificial Sequence
  Antisense oligo
caucuccaccuucuuuaagc

SEQ ID NO: 10869 - RNA, 20 nt, Artificial Sequence
  Antisense oligo
gacaucuccaccuucuuuaa

SEQ ID NO: 10870 - RNA, 20 nt, Artificial Sequence
  Antisense oligo
ugacaucuccaccuucuuua

SEQ ID NO: 10871 - RNA, 20 nt, Artificial Sequence
  Antisense oligo
gugacaucuccaccuucuuu

SEQ ID NO: 10872 - RNA, 20 nt, Artificial Sequence
  Antisense oligo
agugacaucuccaccuucuu

SEQ ID NO: 10873 - RNA, 20 nt, Artificial Sequence
  Antisense oligo
gcucagugacaucuccaccu

SEQ ID NO: 10874 - RNA, 20 nt, Artificial Sequence
  Antisense oligo
agcucagugacaucuccacc

SEQ ID NO: 10875 - RNA, 20 nt, Artificial Sequence
  Antisense oligo
cagcucagugacaucuccac

SEQ ID NO: 10876 - RNA, 20 nt, Artificial Sequence
  Antisense oligo
ugucaaggaagugcuccauc

SEQ ID NO: 10877 - RNA, 20 nt, Artificial Sequence
  Antisense oligo
cugucaaggaagugcuccau

SEQ ID NO: 10878 - RNA, 20 nt, Artificial Sequence
  Antisense oligo
gcugucaaggaagugcucca

SEQ ID NO: 10879 - RNA, 20 nt, Artificial Sequence
  Antisense oligo
agcugucaaggaagugcucc

SEQ ID NO: 10880 - RNA, 20 nt, Artificial Sequence
  Antisense oligo
ggucacaaaucucuuccagc

SEQ ID NO: 10881 - RNA, 20 nt, Artificial Sequence
  Antisense oligo
uucugggucacaaaucucuu

SEQ ID NO: 10882 - RNA, 20 nt, Artificial Sequence
  Antisense oligo
auucgcuucugggucacaaa

SEQ ID NO: 10883 - RNA, 20 nt, Artificial Sequence
  Antisense oligo
cauucgcuucugggucacaa

SEQ ID NO: 10884 - RNA, 20 nt, Artificial Sequence
  Antisense oligo
ccauucgcuucugggucaca

SEQ ID NO: 10885 - RNA, 20 nt, Artificial Sequence
  Antisense oligo
uccauucgcuucugggucac

SEQ ID NO: 10886 - RNA, 20 nt, Artificial Sequence
  Antisense oligo
cuccauucgcuucuggguca

SEQ ID NO: 10887 - RNA, 20 nt, Artificial Sequence
  Antisense oligo
gcuccauucgcuucuggguc

SEQ ID NO: 10888 - RNA, 20 nt, Artificial Sequence
  Antisense oligo
ugcuccauucgcuucugggu

SEQ ID NO: 10889 - RNA, 20 nt, Artificial Sequence
  Antisense oligo
gugcuccauucgcuucuggg

SEQ ID NO: 10890 - RNA, 20 nt, Artificial Sequence
  Antisense oligo
aagugcuccauucgcuucug

SEQ ID NO: 10891 - RNA, 20 nt, Artificial Sequence
  Antisense oligo
uaaaagugcuccauucgcuu

SEQ ID NO: 10892 - RNA, 20 nt, Artificial Sequence
  Antisense oligo
gguaaaagugcuccauucgc

SEQ ID NO: 10893 - RNA, 20 nt, Artificial Sequence
  Antisense oligo
agguaaaagugcuccauucg

SEQ ID NO: 10894 - RNA, 20 nt, Artificial Sequence
  Antisense oligo
uucagguaaaagugcuccau

SEQ ID NO: 10895 - RNA, 20 nt, Artificial Sequence
  Antisense oligo
guucagguaaaagugcucca

SEQ ID NO: 10896 - RNA, 20 nt, Artificial Sequence
  Antisense oligo
aguucagguaaaagugcucc

SEQ ID NO: 10897 - RNA, 20 nt, Artificial Sequence
  Antisense oligo
cagugcucagguaaaccagc

SEQ ID NO: 10898 - RNA, 20 nt, Artificial Sequence
  Antisense oligo
ucagugcucagguaaaccag

SEQ ID NO: 10899 - RNA, 20 nt, Artificial Sequence
  Antisense oligo
cucagugcucagguaaacca

SEQ ID NO: 10900 - RNA, 20 nt, Artificial Sequence
  Antisense oligo
gcucagugcucagguaaacc

SEQ ID NO: 10901 - RNA, 20 nt, Artificial Sequence
  Antisense oligo
agcucagugcucagguaaac

SEQ ID NO: 10902 - RNA, 20 nt, Artificial Sequence
  Antisense oligo
aggauagcaucguuagggcg

SEQ ID NO: 10903 - RNA, 20 nt, Artificial Sequence
  Antisense oligo
aaggauagcaucguuagggc

SEQ ID NO: 10904 - RNA, 20 nt, Artificial Sequence
  Antisense oligo
gaaggauagcaucguuaggg

SEQ ID NO: 10905 - RNA, 20 nt, Artificial Sequence
  Antisense oligo
ugaaggauagcaucguuagg

SEQ ID NO: 10906 - RNA, 20 nt, Artificial Sequence
  Antisense oligo
augaaggauagcaucguuag

SEQ ID NO: 10907 - RNA, 20 nt, Artificial Sequence
  Antisense oligo
ugcuuuugaugaaggauagc

SEQ ID NO: 10908 - RNA, 20 nt, Artificial Sequence
  Antisense oligo
cagggugcaguugcuuuuga

SEQ ID NO: 10909 - RNA, 20 nt, Artificial Sequence
  Antisense oligo
cucagggugcaguugcuuuu

SEQ ID NO: 10910 - RNA, 20 nt, Artificial Sequence
  Antisense oligo
ccucagggugcaguugcuuu

SEQ ID NO: 10911 - RNA, 20 nt, Artificial Sequence
  Antisense oligo
cccucagggugcaguugcuu

SEQ ID NO: 10912 - RNA, 20 nt, Artificial Sequence
  Antisense oligo
ucccucagggugcaguugcu

SEQ ID NO: 10913 - RNA, 20 nt, Artificial Sequence
  Antisense oligo
aucccucagggugcaguugc

SEQ ID NO: 10914 - RNA, 20 nt, Artificial Sequence
  Antisense oligo
caucccucagggugcaguug

SEQ ID NO: 10915 - RNA, 20 nt, Artificial Sequence
  Antisense oligo
agacaucccucagggugcag

SEQ ID NO: 10916 - RNA, 20 nt, Artificial Sequence
  Antisense oligo
aagacaucccucagggugca

SEQ ID NO: 10917 - RNA, 20 nt, Artificial Sequence
  Antisense oligo
ugacucuccucaugcgguac

SEQ ID NO: 10918 - RNA, 20 nt, Artificial Sequence
  Antisense oligo
uaagagcaucagcgggagcu

SEQ ID NO: 10919 - RNA, 20 nt, Artificial Sequence
  Antisense oligo
auaagagcaucagcgggagc

SEQ ID NO: 10920 - RNA, 20 nt, Artificial Sequence
  Antisense oligo
gauaagagcaucagcgggag

SEQ ID NO: 10921 - RNA, 20 nt, Artificial Sequence
  Antisense oligo
uguccaccaggcugaacucu

SEQ ID NO: 10922 - RNA, 20 nt, Artificial Sequence
  Antisense oligo
uuguccaccaggcugaacuc

SEQ ID NO: 10923 - RNA, 20 nt, Artificial Sequence
  Antisense oligo
gcuuguccaccaggcugaac

SEQ ID NO: 10924 - RNA, 20 nt, Artificial Sequence
  Antisense oligo
agcuuguccaccaggcugaa

SEQ ID NO: 10925 - RNA, 20 nt, Artificial Sequence
  Antisense oligo
uccucagcuuguccaccagg

SEQ ID NO: 10926 - RNA, 20 nt, Artificial Sequence
  Antisense oligo
auccucagcuuguccaccag

SEQ ID NO: 10927 - RNA, 20 nt, Artificial Sequence
  Antisense oligo
gauccucagcuuguccacca

SEQ ID NO: 10928 - RNA, 20 nt, Artificial Sequence
  Antisense oligo
ugauccucagcuuguccacc

SEQ ID NO: 10929 - RNA, 20 nt, Artificial Sequence
  Antisense oligo
ugaugauccucagcuugucc

SEQ ID NO: 10930 - RNA, 20 nt, Artificial Sequence
  Antisense oligo
augaugauccucagcuuguc

SEQ ID NO: 10931 - RNA, 20 nt, Artificial Sequence
  Antisense oligo
caugaugauccucagcuugu

SEQ ID NO: 10932 - RNA, 20 nt, Artificial Sequence
  Antisense oligo
ccaugaugauccucagcuug

SEQ ID NO: 10933 - RNA, 20 nt, Artificial Sequence
  Antisense oligo
cuccaugaugauccucagcu

SEQ ID NO: 10934 - RNA, 20 nt, Artificial Sequence
  Antisense oligo
gcuccaugaugauccucagc

SEQ ID NO: 10935 - RNA, 20 nt, Artificial Sequence
  Antisense oligo
ugcuccaugaugauccucag

SEQ ID NO: 10936 - RNA, 20 nt, Artificial Sequence
  Antisense oligo
gacugcuccaugaugauccu

SEQ ID NO: 10937 - RNA, 20 nt, Artificial Sequence
  Antisense oligo
aggcaccucauggacugcuc

SEQ ID NO: 10938 - RNA, 20 nt, Artificial Sequence
  Antisense oligo
ggaaggcaccucauggacug

SEQ ID NO: 10939 - RNA, 20 nt, Artificial Sequence
  Antisense oligo
aggaaggcaccucauggacu

SEQ ID NO: 10940 - RNA, 20 nt, Artificial Sequence
  Antisense oligo
caggaaggcaccucauggac

SEQ ID NO: 10941 - RNA, 20 nt, Artificial Sequence
  Antisense oligo
gcaggaaggcaccucaugga

SEQ ID NO: 10942 - RNA, 20 nt, Artificial Sequence
  Antisense oligo
aggcaggaaggcaccucaug

SEQ ID NO: 10943 - RNA, 20 nt, Artificial Sequence
  Antisense oligo
aaggcaggaaggcaccucau

SEQ ID NO: 10944 - RNA, 20 nt, Artificial Sequence
  Antisense oligo
ugccaggugagccagacagu

SEQ ID NO: 10945 - RNA, 20 nt, Artificial Sequence
  Antisense oligo
accucucgggagacaacgcu

SEQ ID NO: 10946 - RNA, 20 nt, Artificial Sequence
  Antisense oligo
agaccucucgggagacaacg

SEQ ID NO: 10947 - RNA, 20 nt, Artificial Sequence
  Antisense oligo
gcagaccucucgggagacaa

SEQ ID NO: 10948 - RNA, 20 nt, Artificial Sequence
  Antisense oligo
ugcagaccucucgggagaca

SEQ ID NO: 10949 - RNA, 20 nt, Artificial Sequence
  Antisense oligo
acagacgacgagguugggcu

SEQ ID NO: 10950 - RNA, 20 nt, Artificial Sequence
  Antisense oligo
ggguuugcauguagacagcc

SEQ ID NO: 10951 - RNA, 20 nt, Artificial Sequence
  Antisense oligo
cucaucguaagugggcaggg

SEQ ID NO: 10952 - RNA, 20 nt, Artificial Sequence
  Antisense oligo
ccucaucguaagugggcagg

SEQ ID NO: 10953 - RNA, 20 nt, Artificial Sequence
  Antisense oligo
accucaucguaagugggcag

SEQ ID NO: 10954 - RNA, 20 nt, Artificial Sequence
  Antisense oligo
caccucaucguaagugggca

SEQ ID NO: 10955 - RNA, 20 nt, Artificial Sequence
  Antisense oligo
gcaccucaucguaagugggc

SEQ ID NO: 10956 - RNA, 20 nt, Artificial Sequence
  Antisense oligo
agcaccucaucguaaguggg

SEQ ID NO: 10957 - RNA, 20 nt, Artificial Sequence
  Antisense oligo
cagcaccucaucguaagugg

SEQ ID NO: 10958 - RNA, 20 nt, Artificial Sequence
  Antisense oligo
gcagcaccucaucguaagug

SEQ ID NO: 10959 - RNA, 20 nt, Artificial Sequence
  Antisense oligo
agcagcaccucaucguaagu

SEQ ID NO: 10960 - RNA, 20 nt, Artificial Sequence
  Antisense oligo
gagcagcaccucaucguaag

SEQ ID NO: 10961 - RNA, 20 nt, Artificial Sequence
  Antisense oligo
agagcagcaccucaucguaa

SEQ ID NO: 10962 - RNA, 20 nt, Artificial Sequence
  Antisense oligo
ugcagagcagcaccucaucg

SEQ ID NO: 10963 - RNA, 20 nt, Artificial Sequence
  Antisense oligo
uccucaaaggugguugccgg

SEQ ID NO: 10964 - RNA, 20 nt, Artificial Sequence
  Antisense oligo
cuccucaaaggugguugccg

SEQ ID NO: 10965 - RNA, 20 nt, Artificial Sequence
  Antisense oligo
ccuccucaaaggugguugcc

SEQ ID NO: 10966 - RNA, 20 nt, Artificial Sequence
  Antisense oligo
acagugccaccuccucaaag

SEQ ID NO: 10967 - RNA, 20 nt, Artificial Sequence
  Antisense oligo
agcaggcuguagaccuugug

SEQ ID NO: 10968 - RNA, 20 nt, Artificial Sequence
  Antisense oligo
cagcaggcuguagaccuugu

SEQ ID NO: 10969 - RNA, 20 nt, Artificial Sequence
  Antisense oligo
ugccaccucguagcucagcu

SEQ ID NO: 10970 - RNA, 20 nt, Artificial Sequence
  Antisense oligo
uguggaaaagcuccuccgcu

SEQ ID NO: 10971 - RNA, 20 nt, Artificial Sequence
  Antisense oligo
auuguggaaaagcuccuccg

SEQ ID NO: 10972 - RNA, 20 nt, Artificial Sequence
  Antisense oligo
gauuguggaaaagcuccucc

SEQ ID NO: 10973 - RNA, 20 nt, Artificial Sequence
  Antisense oligo
agucuucucggugcugcugc

SEQ ID NO: 10974 - RNA, 20 nt, Artificial Sequence
  Antisense oligo
uagucuucucggugcugcug

SEQ ID NO: 10975 - RNA, 20 nt, Artificial Sequence
  Antisense oligo
guagucuucucggugcugcu

SEQ ID NO: 10976 - RNA, 20 nt, Artificial Sequence
  Antisense oligo
gguagucuucucggugcugc

SEQ ID NO: 10977 - RNA, 20 nt, Artificial Sequence
  Antisense oligo
ugguagucuucucggugcug

SEQ ID NO: 10978 - RNA, 20 nt, Artificial Sequence
  Antisense oligo
cugguagucuucucggugcu

SEQ ID NO: 10979 - RNA, 20 nt, Artificial Sequence
  Antisense oligo
gcugguagucuucucggugc

SEQ ID NO: 10980 - RNA, 20 nt, Artificial Sequence
  Antisense oligo
agcugguagucuucucggug

SEQ ID NO: 10981 - RNA, 20 nt, Artificial Sequence
  Antisense oligo
gagcugguagucuucucggu

SEQ ID NO: 10982 - RNA, 20 nt, Artificial Sequence
  Antisense oligo
gacgagcugguagucuucuc

SEQ ID NO: 10983 - RNA, 20 nt, Artificial Sequence
  Antisense oligo
ugacgagcugguagucuucu

SEQ ID NO: 10984 - RNA, 20 nt, Artificial Sequence
  Antisense oligo
augacgagcugguagucuuc

SEQ ID NO: 10985 - RNA, 20 nt, Artificial Sequence
  Antisense oligo
caugacgagcugguagucuu

SEQ ID NO: 10986 - RNA, 20 nt, Artificial Sequence
  Antisense oligo
ccaugacgagcugguagucu

SEQ ID NO: 10987 - RNA, 20 nt, Artificial Sequence
  Antisense oligo
cacagaccaugacgagcugg

SEQ ID NO: 10988 - RNA, 20 nt, Artificial Sequence
  Antisense oligo
ucacagaccaugacgagcug

SEQ ID NO: 10989 - RNA, 20 nt, Artificial Sequence
  Antisense oligo
aucacagaccaugacgagcu

SEQ ID NO: 10990 - RNA, 20 nt, Artificial Sequence
  Antisense oligo
aagaccuugugcuggcugaa

SEQ ID NO: 10991 - RNA, 20 nt, Artificial Sequence
  Antisense oligo
acgaagaccuugugcuggcu

SEQ ID NO: 10992 - RNA, 20 nt, Artificial Sequence
  Antisense oligo
gacgaagaccuugugcuggc

SEQ ID NO: 10993 - RNA, 20 nt, Artificial Sequence
  Antisense oligo
gugacgaagaccuugugcug

SEQ ID NO: 10994 - RNA, 20 nt, Artificial Sequence
  Antisense oligo
ggugacgaagaccuugugcu

SEQ ID NO: 10995 - RNA, 20 nt, Artificial Sequence
  Antisense oligo
gggugacgaagaccuugugc

SEQ ID NO: 10996 - RNA, 20 nt, Artificial Sequence
  Antisense oligo
cugccagguaggcuuggaug

SEQ ID NO: 10997 - RNA, 20 nt, Artificial Sequence
  Antisense oligo
ccugccagguaggcuuggau

SEQ ID NO: 10998 - RNA, 20 nt, Artificial Sequence
  Antisense oligo
ucauugaacacggcugccgc

SEQ ID NO: 10999 - RNA, 20 nt, Artificial Sequence
  Antisense oligo
ggucauugaacacggcugcc

SEQ ID NO: 11000 - RNA, 20 nt, Artificial Sequence
  Antisense oligo
cggucauugaacacggcugc

SEQ ID NO: 11001 - RNA, 20 nt, Artificial Sequence
  Antisense oligo
ccggucauugaacacggcug

SEQ ID NO: 11002 - RNA, 20 nt, Artificial Sequence
  Antisense oligo
cagccggucauugaacacgg

SEQ ID NO: 11003 - RNA, 20 nt, Artificial Sequence
  Antisense oligo
acagccggucauugaacacg

SEQ ID NO: 11004 - RNA, 20 nt, Artificial Sequence
  Antisense oligo
cacagccggucauugaacac

SEQ ID NO: 11005 - RNA, 20 nt, Artificial Sequence
  Antisense oligo
acacagccggucauugaaca

SEQ ID NO: 11006 - RNA, 20 nt, Artificial Sequence
  Antisense oligo
cacacagccggucauugaac

SEQ ID NO: 11007 - RNA, 20 nt, Artificial Sequence
  Antisense oligo
acacacagccggucauugaa

SEQ ID NO: 11008 - RNA, 20 nt, Artificial Sequence
  Antisense oligo
aacacacagccggucauuga

SEQ ID NO: 11009 - RNA, 20 nt, Artificial Sequence
  Antisense oligo
caacacacagccggucauug

SEQ ID NO: 11010 - RNA, 20 nt, Artificial Sequence
  Antisense oligo
ccaacacacagccggucauu

SEQ ID NO: 11011 - RNA, 20 nt, Artificial Sequence
  Antisense oligo
cccaacacacagccggucau

SEQ ID NO: 11012 - RNA, 20 nt, Artificial Sequence
  Antisense oligo
ucccaacacacagccgguca

SEQ ID NO: 11013 - RNA, 20 nt, Artificial Sequence
  Antisense oligo
aucccaacacacagccgguc

SEQ ID NO: 11014 - RNA, 20 nt, Artificial Sequence
  Antisense oligo
gaucccaacacacagccggu

SEQ ID NO: 11015 - RNA, 20 nt, Artificial Sequence
  Antisense oligo
acgaucccaacacacagccg

SEQ ID NO: 11016 - RNA, 20 nt, Artificial Sequence
  Antisense oligo
ccacgaucccaacacacagc

SEQ ID NO: 11017 - RNA, 20 nt, Artificial Sequence
  Antisense oligo
ggccacgaucccaacacaca

SEQ ID NO: 11018 - RNA, 20 nt, Artificial Sequence
  Antisense oligo
aggccacgaucccaacacac

SEQ ID NO: 11019 - RNA, 20 nt, Artificial Sequence
  Antisense oligo
gaggccacgaucccaacaca

SEQ ID NO: 11020 - RNA, 20 nt, Artificial Sequence
  Antisense oligo
uaccaacaccugcucgcucc

SEQ ID NO: 11021 - RNA, 20 nt, Artificial Sequence
  Antisense oligo
uuaccaacaccugcucgcuc

SEQ ID NO: 11022 - RNA, 20 nt, Artificial Sequence
  Antisense oligo
cuuaccaacaccugcucgcu

SEQ ID NO: 11023 - RNA, 20 nt, Artificial Sequence
  Antisense oligo
ccuuaccaacaccugcucgc

SEQ ID NO: 11024 - RNA, 20 nt, Artificial Sequence
  Antisense oligo
cuccuuaccaacaccugcuc

SEQ ID NO: 11025 - RNA, 20 nt, Artificial Sequence
  Antisense oligo
ucuccuuaccaacaccugcu

SEQ ID NO: 11026 - RNA, 20 nt, Artificial Sequence
  Antisense oligo
cucuccuuaccaacaccugc

SEQ ID NO: 11027 - RNA, 20 nt, Artificial Sequence
  Antisense oligo
gcucuccuuaccaacaccug

SEQ ID NO: 11028 - RNA, 20 nt, Artificial Sequence
  Antisense oligo
cgcucuccuuaccaacaccu

SEQ ID NO: 11029 - RNA, 20 nt, Artificial Sequence
  Antisense oligo
ccgcucuccuuaccaacacc

SEQ ID NO: 11030 - RNA, 20 nt, Artificial Sequence
  Antisense oligo
gccgcucuccuuaccaacac

SEQ ID NO: 11031 - RNA, 20 nt, Artificial Sequence
  Antisense oligo
ugccgcucuccuuaccaaca

SEQ ID NO: 11032 - RNA, 20 nt, Artificial Sequence
  Antisense oligo
cugccgcucuccuuaccaac

SEQ ID NO: 11033 - RNA, 20 nt, Artificial Sequence
  Antisense oligo
ccugccgcucuccuuaccaa

SEQ ID NO: 11034 - RNA, 20 nt, Artificial Sequence
  Antisense oligo
aggcuucaucugcuggaggg

SEQ ID NO: 11035 - RNA, 20 nt, Artificial Sequence
  Antisense oligo
caggcuucaucugcuggagg

SEQ ID NO: 11036 - RNA, 20 nt, Artificial Sequence
  Antisense oligo
acaggcuucaucugcuggag

SEQ ID NO: 11037 - RNA, 20 nt, Artificial Sequence
  Antisense oligo
gacaggcuucaucugcugga

SEQ ID NO: 11038 - RNA, 20 nt, Artificial Sequence
  Antisense oligo
agacaggcuucaucugcugg

SEQ ID NO: 11039 - RNA, 20 nt, Artificial Sequence
  Antisense oligo
augaaucacacccucccuga

SEQ ID NO: 11040 - RNA, 20 nt, Artificial Sequence
  Antisense oligo
acagaugaaucacacccucc

SEQ ID NO: 11041 - RNA, 20 nt, Artificial Sequence
  Antisense oligo
cacagaugaaucacacccuc

SEQ ID NO: 11042 - RNA, 20 nt, Artificial Sequence
  Antisense oligo
ccacagaugaaucacacccu

SEQ ID NO: 11043 - RNA, 20 nt, Artificial Sequence
  Antisense oligo
cccacagaugaaucacaccc

SEQ ID NO: 11044 - RNA, 20 nt, Artificial Sequence
  Antisense oligo
gacacccacagaugaaucac

SEQ ID NO: 11045 - RNA, 20 nt, Artificial Sequence
  Antisense oligo
uugacacccacagaugaauc

SEQ ID NO: 11046 - RNA, 20 nt, Artificial Sequence
  Antisense oligo
auugacacccacagaugaau

SEQ ID NO: 11047 - RNA, 20 nt, Artificial Sequence
  Antisense oligo
gauugacacccacagaugaa

SEQ ID NO: 11048 - RNA, 20 nt, Artificial Sequence
  Antisense oligo
ugauugacacccacagauga

SEQ ID NO: 11049 - RNA, 20 nt, Artificial Sequence
  Antisense oligo
ccugauugacacccacagau

SEQ ID NO: 11050 - RNA, 20 nt, Artificial Sequence
  Antisense oligo
acccugauugacacccacag

SEQ ID NO: 11051 - RNA, 20 nt, Artificial Sequence
  Antisense oligo
gacccugauugacacccaca

SEQ ID NO: 11052 - RNA, 20 nt, Artificial Sequence
  Antisense oligo
agacccugauugacacccac

SEQ ID NO: 11053 - RNA, 20 nt, Artificial Sequence
  Antisense oligo
cagacccugauugacaccca

SEQ ID NO: 11054 - RNA, 20 nt, Artificial Sequence
  Antisense oligo
acagacccugauugacaccc

SEQ ID NO: 11055 - RNA, 20 nt, Artificial Sequence
  Antisense oligo
cacagacccugauugacacc

SEQ ID NO: 11056 - RNA, 20 nt, Artificial Sequence
  Antisense oligo
gcacagacccugauugacac

SEQ ID NO: 11057 - RNA, 20 nt, Artificial Sequence
  Antisense oligo
ggcacagacccugauugaca

SEQ ID NO: 11058 - RNA, 20 nt, Artificial Sequence
  Antisense oligo
uggcacagacccugauugac

SEQ ID NO: 11059 - RNA, 20 nt, Artificial Sequence
  Antisense oligo
ccagggaauacccauugugg

SEQ ID NO: 11060 - RNA, 20 nt, Artificial Sequence
  Antisense oligo
uuugcugagaggaggaaggg

SEQ ID NO: 11061 - RNA, 20 nt, Artificial Sequence
  Antisense oligo
cagagauguuugcugagagg

SEQ ID NO: 11062 - RNA, 20 nt, Artificial Sequence
  Antisense oligo
gcagagauguuugcugagag

SEQ ID NO: 11063 - RNA, 20 nt, Artificial Sequence
  Antisense oligo
ugcagagauguuugcugaga

SEQ ID NO: 11064 - RNA, 20 nt, Artificial Sequence
  Antisense oligo
gguugcagugagcuaagauc

SEQ ID NO: 11065 - RNA, 20 nt, Artificial Sequence
  Antisense oligo
agguugcagugagcuaagau

SEQ ID NO: 11066 - RNA, 20 nt, Artificial Sequence
  Antisense oligo
gagguugcagugagcuaaga

SEQ ID NO: 11067 - RNA, 20 nt, Artificial Sequence
  Antisense oligo
ggagguugcagugagcuaag

SEQ ID NO: 11068 - RNA, 20 nt, Artificial Sequence
  Antisense oligo
cggagguugcagugagcuaa

SEQ ID NO: 11069 - RNA, 20 nt, Artificial Sequence
  Antisense oligo
acggagguugcagugagcua

SEQ ID NO: 11070 - RNA, 20 nt, Artificial Sequence
  Antisense oligo
aacggagguugcagugagcu

SEQ ID NO: 11071 - RNA, 20 nt, Artificial Sequence
  Antisense oligo
aaacggagguugcagugagc

SEQ ID NO: 11072 - RNA, 20 nt, Artificial Sequence
  Antisense oligo
aaaacggagguugcagugag

SEQ ID NO: 11073 - RNA, 20 nt, Artificial Sequence
  Antisense oligo
gaaaacggagguugcaguga

SEQ ID NO: 11074 - RNA, 20 nt, Artificial Sequence
  Antisense oligo
aggaggcugaggcaggauaa

SEQ ID NO: 11075 - RNA, 20 nt, Artificial Sequence
  Antisense oligo
caggaggcugaggcaggaua

SEQ ID NO: 11076 - RNA, 20 nt, Artificial Sequence
  Antisense oligo
ucccagcuacucaggaggcu

SEQ ID NO: 11077 - RNA, 20 nt, Artificial Sequence
  Antisense oligo
aucccagcuacucaggaggc

SEQ ID NO: 11078 - RNA, 20 nt, Artificial Sequence
  Antisense oligo
aaucccagcuacucaggagg

SEQ ID NO: 11079 - RNA, 20 nt, Artificial Sequence
  Antisense oligo
uaaucccagcuacucaggag

SEQ ID NO: 11080 - RNA, 20 nt, Artificial Sequence
  Antisense oligo
guaaucccagcuacucagga

SEQ ID NO: 11081 - RNA, 20 nt, Artificial Sequence
  Antisense oligo
uguaaucccagcuacucagg

SEQ ID NO: 11082 - RNA, 20 nt, Artificial Sequence
  Antisense oligo
cuguaaucccagcuacucag

SEQ ID NO: 11083 - RNA, 20 nt, Artificial Sequence
  Antisense oligo
ccuguaaucccagcuacuca

SEQ ID NO: 11084 - RNA, 20 nt, Artificial Sequence
  Antisense oligo
accuguaaucccagcuacuc

SEQ ID NO: 11085 - RNA, 20 nt, Artificial Sequence
  Antisense oligo
uaccuguaaucccagcuacu

SEQ ID NO: 11086 - RNA, 20 nt, Artificial Sequence
  Antisense oligo
guaccuguaaucccagcuac

SEQ ID NO: 11087 - RNA, 20 nt, Artificial Sequence
  Antisense oligo
gaucacgccacuguacucca

SEQ ID NO: 11088 - RNA, 20 nt, Artificial Sequence
  Antisense oligo
agaucacgccacuguacucc

SEQ ID NO: 11089 - RNA, 20 nt, Artificial Sequence
  Antisense oligo
gagaucacgccacuguacuc

SEQ ID NO: 11090 - RNA, 20 nt, Artificial Sequence
  Antisense oligo
cgagaucacgccacuguacu

SEQ ID NO: 11091 - RNA, 20 nt, Artificial Sequence
  Antisense oligo
ccgagaucacgccacuguac

SEQ ID NO: 11092 - RNA, 20 nt, Artificial Sequence
  Antisense oligo
gccgagaucacgccacugua

SEQ ID NO: 11093 - RNA, 20 nt, Artificial Sequence
  Antisense oligo
agccgagaucacgccacugu

SEQ ID NO: 11094 - RNA, 20 nt, Artificial Sequence
  Antisense oligo
ugagccgagaucacgccacu

SEQ ID NO: 11095 - RNA, 20 nt, Artificial Sequence
  Antisense oligo
guugcagugagccgagauca

SEQ ID NO: 11096 - RNA, 20 nt, Artificial Sequence
  Antisense oligo
gguugcagugagccgagauc

SEQ ID NO: 11097 - RNA, 20 nt, Artificial Sequence
  Antisense oligo
agguugcagugagccgagau

SEQ ID NO: 11098 - RNA, 20 nt, Artificial Sequence
  Antisense oligo
aagguugcagugagccgaga

SEQ ID NO: 11099 - RNA, 20 nt, Artificial Sequence
  Antisense oligo
gaagguugcagugagccgag

SEQ ID NO: 11100 - RNA, 20 nt, Artificial Sequence
  Antisense oligo
cgaagguugcagugagccga

SEQ ID NO: 11101 - RNA, 20 nt, Artificial Sequence
  Antisense oligo
aggcugaggcaggaaaaucg

SEQ ID NO: 11102 - RNA, 20 nt, Artificial Sequence
  Antisense oligo
gaggcugaggcaggaaaauc

SEQ ID NO: 11103 - RNA, 20 nt, Artificial Sequence
  Antisense oligo
ggaggcugaggcaggaaaau

SEQ ID NO: 11104 - RNA, 20 nt, Artificial Sequence
  Antisense oligo
gggaggcugaggcaggaaaa

SEQ ID NO: 11105 - RNA, 20 nt, Artificial Sequence
  Antisense oligo
ugggaggcugaggcaggaaa

SEQ ID NO: 11106 - RNA, 20 nt, Artificial Sequence
  Antisense oligo
uugggaggcugaggcaggaa

SEQ ID NO: 11107 - RNA, 20 nt, Artificial Sequence
  Antisense oligo
uacuugggaggcugaggcag

SEQ ID NO: 11108 - RNA, 20 nt, Artificial Sequence
  Antisense oligo
cuacuugggaggcugaggca

SEQ ID NO: 11109 - RNA, 20 nt, Artificial Sequence
  Antisense oligo
agcuacuugggaggcugagg

SEQ ID NO: 11110 - RNA, 20 nt, Artificial Sequence
  Antisense oligo
aauuagcuggguguacuggu

SEQ ID NO: 11111 - RNA, 20 nt, Artificial Sequence
  Antisense oligo
aaauuagcuggguguacugg

SEQ ID NO: 11112 - RNA, 20 nt, Artificial Sequence
  Antisense oligo
aaaauuagcuggguguacug

SEQ ID NO: 11113 - RNA, 20 nt, Artificial Sequence
  Antisense oligo
gcuaacacggugaagccaca

SEQ ID NO: 11114 - RNA, 20 nt, Artificial Sequence
  Antisense oligo
ccuggcuaacacggugaagc

SEQ ID NO: 11115 - RNA, 20 nt, Artificial Sequence
  Antisense oligo
uccuggcuaacacggugaag

SEQ ID NO: 11116 - RNA, 20 nt, Artificial Sequence
  Antisense oligo
auccuggcuaacacggugaa

SEQ ID NO: 11117 - RNA, 20 nt, Artificial Sequence
  Antisense oligo
cauccuggcuaacacgguga

SEQ ID NO: 11118 - RNA, 20 nt, Artificial Sequence
  Antisense oligo
ccauccuggcuaacacggug

SEQ ID NO: 11119 - RNA, 20 nt, Artificial Sequence
  Antisense oligo
accauccuggcuaacacggu

SEQ ID NO: 11120 - RNA, 20 nt, Artificial Sequence
  Antisense oligo
gaccauccuggcuaacacgg

SEQ ID NO: 11121 - RNA, 20 nt, Artificial Sequence
  Antisense oligo
agaccauccuggcuaacacg

SEQ ID NO: 11122 - RNA, 20 nt, Artificial Sequence
  Antisense oligo
gagaccauccuggcuaacac

SEQ ID NO: 11123 - RNA, 20 nt, Artificial Sequence
  Antisense oligo
cgagaccauccuggcuaaca

SEQ ID NO: 11124 - RNA, 20 nt, Artificial Sequence
  Antisense oligo
ucgagaccauccuggcuaac

SEQ ID NO: 11125 - RNA, 20 nt, Artificial Sequence
  Antisense oligo
aucgagaccauccuggcuaa

SEQ ID NO: 11126 - RNA, 20 nt, Artificial Sequence
  Antisense oligo
gaucgagaccauccuggcua

SEQ ID NO: 11127 - RNA, 20 nt, Artificial Sequence
  Antisense oligo
agaucgagaccauccuggcu

SEQ ID NO: 11128 - RNA, 20 nt, Artificial Sequence
  Antisense oligo
gagaucgagaccauccuggc

SEQ ID NO: 11129 - RNA, 20 nt, Artificial Sequence
  Antisense oligo
ggagaucgagaccauccugg

SEQ ID NO: 11130 - RNA, 20 nt, Artificial Sequence
  Antisense oligo
ucaggagaucgagaccaucc

SEQ ID NO: 11131 - RNA, 20 nt, Artificial Sequence
  Antisense oligo
gucaggagaucgagaccauc

SEQ ID NO: 11132 - RNA, 20 nt, Artificial Sequence
  Antisense oligo
ugaggucaggagaucgagac

SEQ ID NO: 11133 - RNA, 20 nt, Artificial Sequence
  Antisense oligo
augaggucaggagaucgaga

SEQ ID NO: 11134 - RNA, 20 nt, Artificial Sequence
  Antisense oligo
caugaggucaggagaucgag

SEQ ID NO: 11135 - RNA, 20 nt, Artificial Sequence
  Antisense oligo
uacuuugggaggccgaggag

SEQ ID NO: 11136 - RNA, 20 nt, Artificial Sequence
  Antisense oligo
guacuuugggaggccgagga

SEQ ID NO: 11137 - RNA, 20 nt, Artificial Sequence
  Antisense oligo
guggcucaugccugugaucc

SEQ ID NO: 11138 - RNA, 20 nt, Artificial Sequence
  Antisense oligo
gguggcucaugccugugauc

SEQ ID NO: 11139 - RNA, 20 nt, Artificial Sequence
  Antisense oligo
cgguggcucaugccugugau

SEQ ID NO: 11140 - RNA, 20 nt, Artificial Sequence
  Antisense oligo
acgguggcucaugccuguga

SEQ ID NO: 11141 - RNA, 20 nt, Artificial Sequence
  Antisense oligo
ugaaacccugucucugcuaa

SEQ ID NO: 11142 - RNA, 20 nt, Artificial Sequence
  Antisense oligo
gugaaacccugucucugcua

SEQ ID NO: 11143 - RNA, 20 nt, Artificial Sequence
  Antisense oligo
ggugaaacccugucucugcu

SEQ ID NO: 11144 - RNA, 20 nt, Artificial Sequence
  Antisense oligo
uggugaaacccugucucugc

SEQ ID NO: 11145 - RNA, 20 nt, Artificial Sequence
  Antisense oligo
auggugaaacccugucucug

SEQ ID NO: 11146 - RNA, 20 nt, Artificial Sequence
  Antisense oligo
cauggugaaacccugucucu

SEQ ID NO: 11147 - RNA, 20 nt, Artificial Sequence
  Antisense oligo
acauggugaaacccugucuc

SEQ ID NO: 11148 - RNA, 20 nt, Artificial Sequence
  Antisense oligo
aacauggugaaacccugucu

SEQ ID NO: 11149 - RNA, 20 nt, Artificial Sequence
  Antisense oligo
caacauggugaaacccuguc

SEQ ID NO: 11150 - RNA, 20 nt, Artificial Sequence
  Antisense oligo
ccaacauggugaaacccugu

SEQ ID NO: 11151 - RNA, 20 nt, Artificial Sequence
  Antisense oligo
gccaacauggugaaacccug

SEQ ID NO: 11152 - RNA, 20 nt, Artificial Sequence
  Antisense oligo
ggccaacauggugaaacccu

SEQ ID NO: 11153 - RNA, 20 nt, Artificial Sequence
  Antisense oligo
ggaguuugagaccagacugg

SEQ ID NO: 11154 - RNA, 20 nt, Artificial Sequence
  Antisense oligo
aggaguuugagaccagacug

SEQ ID NO: 11155 - RNA, 20 nt, Artificial Sequence
  Antisense oligo
caggaguuugagaccagacu

SEQ ID NO: 11156 - RNA, 20 nt, Artificial Sequence
  Antisense oligo
ucaggaguuugagaccagac

SEQ ID NO: 11157 - RNA, 20 nt, Artificial Sequence
  Antisense oligo
gucaggaguuugagaccaga

SEQ ID NO: 11158 - RNA, 20 nt, Artificial Sequence
  Antisense oligo
ugaggucaggaguuugagac

SEQ ID NO: 11159 - RNA, 20 nt, Artificial Sequence
  Antisense oligo
cugaggucaggaguuugaga

SEQ ID NO: 11160 - RNA, 20 nt, Artificial Sequence
  Antisense oligo
acuuugggaggcugaggugg

SEQ ID NO: 11161 - RNA, 20 nt, Artificial Sequence
  Antisense oligo
cacuuugggaggcugaggug

SEQ ID NO: 11162 - RNA, 20 nt, Artificial Sequence
  Antisense oligo
gcacuuugggaggcugaggu

SEQ ID NO: 11163 - RNA, 20 nt, Artificial Sequence
  Antisense oligo
agcacuuugggaggcugagg

SEQ ID NO: 11164 - RNA, 20 nt, Artificial Sequence
  Antisense oligo
cuguaaucccagcacuuugg

SEQ ID NO: 11165 - RNA, 20 nt, Artificial Sequence
  Antisense oligo
ccuguaaucccagcacuuug

SEQ ID NO: 11166 - RNA, 20 nt, Artificial Sequence
  Antisense oligo
accuguaaucccagcacuuu

SEQ ID NO: 11167 - RNA, 20 nt, Artificial Sequence
  Antisense oligo
caccuguaaucccagcacuu

SEQ ID NO: 11168 - RNA, 20 nt, Artificial Sequence
  Antisense oligo
acaccuguaaucccagcacu

SEQ ID NO: 11169 - RNA, 20 nt, Artificial Sequence
  Antisense oligo
cacaccuguaaucccagcac

SEQ ID NO: 11170 - RNA, 20 nt, Artificial Sequence
  Antisense oligo
ucacaccuguaaucccagca

SEQ ID NO: 11171 - RNA, 20 nt, Artificial Sequence
  Antisense oligo
cucacaccuguaaucccagc

SEQ ID NO: 11172 - RNA, 20 nt, Artificial Sequence
  Antisense oligo
gcucacaccuguaaucccag

SEQ ID NO: 11173 - RNA, 20 nt, Artificial Sequence
  Antisense oligo
ggcucacaccuguaauccca

SEQ ID NO: 11174 - RNA, 20 nt, Artificial Sequence
  Antisense oligo
uggcucacaccuguaauccc

SEQ ID NO: 11175 - RNA, 20 nt, Artificial Sequence
  Antisense oligo
guggcucacaccuguaaucc

SEQ ID NO: 11176 - RNA, 20 nt, Artificial Sequence
  Antisense oligo
aagggcagaagaaguaaacu

SEQ ID NO: 11177 - RNA, 20 nt, Artificial Sequence
  Antisense oligo
uggcauuuaagggcagaaga

SEQ ID NO: 11178 - RNA, 20 nt, Artificial Sequence
  Antisense oligo
guggcauuuaagggcagaag

SEQ ID NO: 11179 - RNA, 20 nt, Artificial Sequence
  Antisense oligo
gccaguggcauuuaagggca

SEQ ID NO: 11180 - RNA, 20 nt, Artificial Sequence
  Antisense oligo
gaggccaguggcauuuaagg

SEQ ID NO: 11181 - RNA, 20 nt, Artificial Sequence
  Antisense oligo
aagaggccaguggcauuuaa

SEQ ID NO: 11182 - RNA, 20 nt, Artificial Sequence
  Antisense oligo
cacacgaccaacaucaaccc

SEQ ID NO: 11183 - RNA, 20 nt, Artificial Sequence
  Antisense oligo
ucacacgaccaacaucaacc

SEQ ID NO: 11184 - RNA, 20 nt, Artificial Sequence
  Antisense oligo
gcucacacgaccaacaucaa

SEQ ID NO: 11185 - RNA, 20 nt, Artificial Sequence
  Antisense oligo
ugcucacacgaccaacauca

SEQ ID NO: 11186 - RNA, 20 nt, Artificial Sequence
  Antisense oligo
uugcucacacgaccaacauc

SEQ ID NO: 11187 - RNA, 20 nt, Artificial Sequence
  Antisense oligo
cuugcucacacgaccaacau

SEQ ID NO: 11188 - RNA, 20 nt, Artificial Sequence
  Antisense oligo
ccuugcucacacgaccaaca

SEQ ID NO: 11189 - RNA, 20 nt, Artificial Sequence
  Antisense oligo
cccuugcucacacgaccaac

SEQ ID NO: 11190 - RNA, 20 nt, Artificial Sequence
  Antisense oligo
cauggcuuucucuucaauuc

SEQ ID NO: 11191 - RNA, 20 nt, Artificial Sequence
  Antisense oligo
gcauggcuuucucuucaauu

SEQ ID NO: 11192 - RNA, 20 nt, Artificial Sequence
  Antisense oligo
ucaagaggcauggcuuucuc

SEQ ID NO: 11193 - RNA, 20 nt, Artificial Sequence
  Antisense oligo
gucaagaggcauggcuuucu

SEQ ID NO: 11194 - RNA, 20 nt, Artificial Sequence
  Antisense oligo
ggucaagaggcauggcuuuc

SEQ ID NO: 11195 - RNA, 20 nt, Artificial Sequence
  Antisense oligo
gggucaagaggcauggcuuu

SEQ ID NO: 11196 - RNA, 20 nt, Artificial Sequence
  Antisense oligo
ugggucaagaggcauggcuu

SEQ ID NO: 11197 - RNA, 20 nt, Artificial Sequence
  Antisense oligo
gugggucaagaggcauggcu

SEQ ID NO: 11198 - RNA, 20 nt, Artificial Sequence
  Antisense oligo
aagggugggucaagaggcau

SEQ ID NO: 11199 - RNA, 20 nt, Artificial Sequence
  Antisense oligo
gaagggugggucaagaggca

SEQ ID NO: 11200 - RNA, 20 nt, Artificial Sequence
  Antisense oligo
acgaagggugggucaagagg

SEQ ID NO: 11201 - RNA, 20 nt, Artificial Sequence
  Antisense oligo
aacgaagggugggucaagag

SEQ ID NO: 11202 - RNA, 20 nt, Artificial Sequence
  Antisense oligo
aaacgaagggugggucaaga

SEQ ID NO: 11203 - RNA, 20 nt, Artificial Sequence
  Antisense oligo
caaacgaagggugggucaag

SEQ ID NO: 11204 - RNA, 20 nt, Artificial Sequence
  Antisense oligo
gcaaacgaagggugggucaa

SEQ ID NO: 11205 - RNA, 20 nt, Artificial Sequence
  Antisense oligo
ggcaaacgaaggguggguca

SEQ ID NO: 11206 - RNA, 20 nt, Artificial Sequence
  Antisense oligo
uggcaaacgaaggguggguc

SEQ ID NO: 11207 - RNA, 20 nt, Artificial Sequence
  Antisense oligo
auggcaaacgaagggugggu

SEQ ID NO: 11208 - RNA, 20 nt, Artificial Sequence
  Antisense oligo
gauggcaaacgaaggguggg

SEQ ID NO: 11209 - RNA, 20 nt, Artificial Sequence
  Antisense oligo
agauggcaaacgaagggugg

SEQ ID NO: 11210 - RNA, 20 nt, Artificial Sequence
  Antisense oligo
aagauggcaaacgaagggug

SEQ ID NO: 11211 - RNA, 20 nt, Artificial Sequence
  Antisense oligo
caagauggcaaacgaagggu

SEQ ID NO: 11212 - RNA, 20 nt, Artificial Sequence
  Antisense oligo
acaagauggcaaacgaaggg

SEQ ID NO: 11213 - RNA, 20 nt, Artificial Sequence
  Antisense oligo
aacaagauggcaaacgaagg

SEQ ID NO: 11214 - RNA, 20 nt, Artificial Sequence
  Antisense oligo
gaaacaagauggcaaacgaa

SEQ ID NO: 11215 - RNA, 20 nt, Artificial Sequence
  Antisense oligo
ggaaacaagauggcaaacga

SEQ ID NO: 11216 - RNA, 20 nt, Artificial Sequence
  Antisense oligo
aagggaaacaagauggcaaa

SEQ ID NO: 11217 - RNA, 20 nt, Artificial Sequence
  Antisense oligo
gucaacagaacagaagcuac

SEQ ID NO: 11218 - RNA, 20 nt, Artificial Sequence
  Antisense oligo
cgagguacuguugauaggau

SEQ ID NO: 11219 - RNA, 20 nt, Artificial Sequence
  Antisense oligo
acgagguacuguugauagga

SEQ ID NO: 11220 - RNA, 20 nt, Artificial Sequence
  Antisense oligo
gacgagguacuguugauagg

SEQ ID NO: 11221 - RNA, 20 nt, Artificial Sequence
  Antisense oligo
ggacgagguacuguugauag

SEQ ID NO: 11222 - RNA, 20 nt, Artificial Sequence
  Antisense oligo
aggacgagguacuguugaua

SEQ ID NO: 11223 - RNA, 20 nt, Artificial Sequence
  Antisense oligo
caggacgagguacuguugau

SEQ ID NO: 11224 - RNA, 20 nt, Artificial Sequence
  Antisense oligo
cccaacaggacgagguacug

SEQ ID NO: 11225 - RNA, 20 nt, Artificial Sequence
  Antisense oligo
ucccaacaggacgagguacu

SEQ ID NO: 11226 - RNA, 20 nt, Artificial Sequence
  Antisense oligo
aucccaacaggacgagguac

SEQ ID NO: 11227 - RNA, 20 nt, Artificial Sequence
  Antisense oligo
uaucccaacaggacgaggua

SEQ ID NO: 11228 - RNA, 20 nt, Artificial Sequence
  Antisense oligo
uuaucccaacaggacgaggu

SEQ ID NO: 11229 - RNA, 20 nt, Artificial Sequence
  Antisense oligo
uuuaucccaacaggacgagg

SEQ ID NO: 11230 - RNA, 20 nt, Artificial Sequence
  Antisense oligo
guuuaucccaacaggacgag

SEQ ID NO: 11231 - RNA, 20 nt, Artificial Sequence
  Antisense oligo
ggaagaguaauguuuauccc

SEQ ID NO: 11232 - RNA, 20 nt, Artificial Sequence
  Antisense oligo
aaggagaggcuucagcaggg

SEQ ID NO: 11233 - RNA, 20 nt, Artificial Sequence
  Antisense oligo
aaaggagaggcuucagcagg

SEQ ID NO: 11234 - RNA, 20 nt, Artificial Sequence
  Antisense oligo
aaaaggagaggcuucagcag

SEQ ID NO: 11235 - RNA, 20 nt, Artificial Sequence
  Antisense oligo
cacagcaaaaggagaggcuu

SEQ ID NO: 11236 - RNA, 20 nt, Artificial Sequence
  Antisense oligo
ucacagcaaaaggagaggcu

SEQ ID NO: 11237 - RNA, 20 nt, Artificial Sequence
  Antisense oligo
aaagucacagcaaaaggaga

SEQ ID NO: 11238 - RNA, 20 nt, Artificial Sequence
  Antisense oligo
aaaagucacagcaaaaggag

SEQ ID NO: 11239 - RNA, 20 nt, Artificial Sequence
  Antisense oligo
acguggucugcuguugacug

SEQ ID NO: 11240 - RNA, 20 nt, Artificial Sequence
  Antisense oligo
uacguggucugcuguugacu

SEQ ID NO: 11241 - RNA, 20 nt, Artificial Sequence
  Antisense oligo
uauacguggucugcuguuga

SEQ ID NO: 11242 - RNA, 20 nt, Artificial Sequence
  Antisense oligo
auauacguggucugcuguug

SEQ ID NO: 11243 - RNA, 20 nt, Artificial Sequence
  Antisense oligo
cauauacguggucugcuguu

SEQ ID NO: 11244 - RNA, 20 nt, Artificial Sequence
  Antisense oligo
ggucauauacguggucugcu

SEQ ID NO: 11245 - RNA, 20 nt, Artificial Sequence
  Antisense oligo
ccguggucauauacgugguc

SEQ ID NO: 11246 - RNA, 20 nt, Artificial Sequence
  Antisense oligo
accguggucauauacguggu

SEQ ID NO: 11247 - RNA, 20 nt, Artificial Sequence
  Antisense oligo
gaccguggucauauacgugg

SEQ ID NO: 11248 - RNA, 20 nt, Artificial Sequence
  Antisense oligo
ggaccguggucauauacgug

SEQ ID NO: 11249 - RNA, 20 nt, Artificial Sequence
  Antisense oligo
gggaccguggucauauacgu

SEQ ID NO: 11250 - RNA, 20 nt, Artificial Sequence
  Antisense oligo
ugggaccguggucauauacg

SEQ ID NO: 11251 - RNA, 20 nt, Artificial Sequence
  Antisense oligo
augggaccguggucauauac

SEQ ID NO: 11252 - RNA, 20 nt, Artificial Sequence
  Antisense oligo
ucuuaugggaccguggucau

SEQ ID NO: 11253 - RNA, 20 nt, Artificial Sequence
  Antisense oligo
aucuuaugggaccgugguca

SEQ ID NO: 11254 - RNA, 20 nt, Artificial Sequence
  Antisense oligo
aaucuuaugggaccgugguc

SEQ ID NO: 11255 - RNA, 20 nt, Artificial Sequence
  Antisense oligo
caccaugccuggcuaauuuu

SEQ ID NO: 11256 - RNA, 20 nt, Artificial Sequence
  Antisense oligo
ccaccaugccuggcuaauuu

SEQ ID NO: 11257 - RNA, 20 nt, Artificial Sequence
  Antisense oligo
accaccaugccuggcuaauu

SEQ ID NO: 11258 - RNA, 20 nt, Artificial Sequence
  Antisense oligo
caccaccaugccuggcuaau

SEQ ID NO: 11259 - RNA, 20 nt, Artificial Sequence
  Antisense oligo
gcaccaccaugccuggcuaa

SEQ ID NO: 11260 - RNA, 20 nt, Artificial Sequence
  Antisense oligo
ugcaccaccaugccuggcua

SEQ ID NO: 11261 - RNA, 20 nt, Artificial Sequence
  Antisense oligo
augcaccaccaugccuggcu

SEQ ID NO: 11262 - RNA, 20 nt, Artificial Sequence
  Antisense oligo
uauuugcagcucaccacagc

SEQ ID NO: 11263 - RNA, 20 nt, Artificial Sequence
  Antisense oligo
cguauuugcagcucaccaca

SEQ ID NO: 11264 - RNA, 20 nt, Artificial Sequence
  Antisense oligo
ucguauuugcagcucaccac

SEQ ID NO: 11265 - RNA, 20 nt, Artificial Sequence
  Antisense oligo
ugucguauuugcagcucacc

SEQ ID NO: 11266 - RNA, 20 nt, Artificial Sequence
  Antisense oligo
gugucguauuugcagcucac

SEQ ID NO: 11267 - RNA, 20 nt, Artificial Sequence
  Antisense oligo
agugucguauuugcagcuca

SEQ ID NO: 11268 - RNA, 20 nt, Artificial Sequence
  Antisense oligo
cagugucguauuugcagcuc

SEQ ID NO: 11269 - RNA, 20 nt, Artificial Sequence
  Antisense oligo
gcagugucguauuugcagcu

SEQ ID NO: 11270 - RNA, 20 nt, Artificial Sequence
  Antisense oligo
gagugcagugucguauuugc

SEQ ID NO: 11271 - RNA, 20 nt, Artificial Sequence
  Antisense oligo
ggagugcagugucguauuug

SEQ ID NO: 11272 - RNA, 20 nt, Artificial Sequence
  Antisense oligo
uggagugcagugucguauuu

SEQ ID NO: 11273 - RNA, 20 nt, Artificial Sequence
  Antisense oligo
cuggagugcagugucguauu

SEQ ID NO: 11274 - RNA, 20 nt, Artificial Sequence
  Antisense oligo
gcuggagugcagugucguau

SEQ ID NO: 11275 - RNA, 20 nt, Artificial Sequence
  Antisense oligo
ggcuggagugcagugucgua

SEQ ID NO: 11276 - RNA, 20 nt, Artificial Sequence
  Antisense oligo
aggcuggagugcagugucgu

SEQ ID NO: 11277 - RNA, 20 nt, Artificial Sequence
  Antisense oligo
uaggcuggagugcagugucg

SEQ ID NO: 11278 - RNA, 20 nt, Artificial Sequence
  Antisense oligo
cuaggcuggagugcaguguc

SEQ ID NO: 11279 - RNA, 20 nt, Artificial Sequence
  Antisense oligo
cugggcaacagagugagacu

SEQ ID NO: 11280 - RNA, 20 nt, Artificial Sequence
  Antisense oligo
ccugggcaacagagugagac

SEQ ID NO: 11281 - RNA, 20 nt, Artificial Sequence
  Antisense oligo
gccugggcaacagagugaga

SEQ ID NO: 11282 - RNA, 20 nt, Artificial Sequence
  Antisense oligo
agccugggcaacagagugag

SEQ ID NO: 11283 - RNA, 20 nt, Artificial Sequence
  Antisense oligo
cagccugggcaacagaguga

SEQ ID NO: 11284 - RNA, 20 nt, Artificial Sequence
  Antisense oligo
uccagccugggcaacagagu

SEQ ID NO: 11285 - RNA, 20 nt, Artificial Sequence
  Antisense oligo
acuccagccugggcaacaga

SEQ ID NO: 11286 - RNA, 20 nt, Artificial Sequence
  Antisense oligo
auugcacuccagccugggca

SEQ ID NO: 11287 - RNA, 20 nt, Artificial Sequence
  Antisense oligo
ugccauugcacuccagccug

SEQ ID NO: 11288 - RNA, 20 nt, Artificial Sequence
  Antisense oligo
gccgagaucgugccauugca

SEQ ID NO: 11289 - RNA, 20 nt, Artificial Sequence
  Antisense oligo
agccgagaucgugccauugc

SEQ ID NO: 11290 - RNA, 20 nt, Artificial Sequence
  Antisense oligo
gagccgagaucgugccauug

SEQ ID NO: 11291 - RNA, 20 nt, Artificial Sequence
  Antisense oligo
ugagccgagaucgugccauu

SEQ ID NO: 11292 - RNA, 20 nt, Artificial Sequence
  Antisense oligo
gugagccgagaucgugccau

SEQ ID NO: 11293 - RNA, 20 nt, Artificial Sequence
  Antisense oligo
agugagccgagaucgugcca

SEQ ID NO: 11294 - RNA, 20 nt, Artificial Sequence
  Antisense oligo
ugcagugagccgagaucgug

SEQ ID NO: 11295 - RNA, 20 nt, Artificial Sequence
  Antisense oligo
uugaacccaggaggcagagg

SEQ ID NO: 11296 - RNA, 20 nt, Artificial Sequence
  Antisense oligo
cuugaacccaggaggcagag

SEQ ID NO: 11297 - RNA, 20 nt, Artificial Sequence
  Antisense oligo
gcuugaacccaggaggcaga

SEQ ID NO: 11298 - RNA, 20 nt, Artificial Sequence
  Antisense oligo
ucgcuugaacccaggaggca

SEQ ID NO: 11299 - RNA, 20 nt, Artificial Sequence
  Antisense oligo
aucgcuugaacccaggaggc

SEQ ID NO: 11300 - RNA, 20 nt, Artificial Sequence
  Antisense oligo
aaucgcuugaacccaggagg

SEQ ID NO: 11301 - RNA, 20 nt, Artificial Sequence
  Antisense oligo
gaaucgcuugaacccaggag

SEQ ID NO: 11302 - RNA, 20 nt, Artificial Sequence
  Antisense oligo
agaaucgcuugaacccagga

SEQ ID NO: 11303 - RNA, 20 nt, Artificial Sequence
  Antisense oligo
gagaaucgcuugaacccagg

SEQ ID NO: 11304 - RNA, 20 nt, Artificial Sequence
  Antisense oligo
ggagaaucgcuugaacccag

SEQ ID NO: 11305 - RNA, 20 nt, Artificial Sequence
  Antisense oligo
aggagaaucgcuugaaccca

SEQ ID NO: 11306 - RNA, 20 nt, Artificial Sequence
  Antisense oligo
caggagaaucgcuugaaccc

SEQ ID NO: 11307 - RNA, 20 nt, Artificial Sequence
  Antisense oligo
gcaggagaaucgcuugaacc

SEQ ID NO: 11308 - RNA, 20 nt, Artificial Sequence
  Antisense oligo
ggcaggagaaucgcuugaac

SEQ ID NO: 11309 - RNA, 20 nt, Artificial Sequence
  Antisense oligo
aggcaggagaaucgcuugaa

SEQ ID NO: 11310 - RNA, 20 nt, Artificial Sequence
  Antisense oligo
gaggcaggagaaucgcuuga

SEQ ID NO: 11311 - RNA, 20 nt, Artificial Sequence
  Antisense oligo
ugaggcaggagaaucgcuug

SEQ ID NO: 11312 - RNA, 20 nt, Artificial Sequence
  Antisense oligo
cugaggcaggagaaucgcuu

SEQ ID NO: 11313 - RNA, 20 nt, Artificial Sequence
  Antisense oligo
gcugaggcaggagaaucgcu

SEQ ID NO: 11314 - RNA, 20 nt, Artificial Sequence
  Antisense oligo
aggcugaggcaggagaaucg

SEQ ID NO: 11315 - RNA, 20 nt, Artificial Sequence
  Antisense oligo
gaggcugaggcaggagaauc

SEQ ID NO: 11316 - RNA, 20 nt, Artificial Sequence
  Antisense oligo
ggaggcugaggcaggagaau

SEQ ID NO: 11317 - RNA, 20 nt, Artificial Sequence
  Antisense oligo
ugugccuguagucccagcua

SEQ ID NO: 11318 - RNA, 20 nt, Artificial Sequence
  Antisense oligo
gugugccuguagucccagcu

SEQ ID NO: 11319 - RNA, 20 nt, Artificial Sequence
  Antisense oligo
aguuugagaccagccuggcc

SEQ ID NO: 11320 - RNA, 20 nt, Artificial Sequence
  Antisense oligo
gaguuugagaccagccuggc

SEQ ID NO: 11321 - RNA, 20 nt, Artificial Sequence
  Antisense oligo
ggaguuugagaccagccugg

SEQ ID NO: 11322 - RNA, 20 nt, Artificial Sequence
  Antisense oligo
aggaguuugagaccagccug

SEQ ID NO: 11323 - RNA, 20 nt, Artificial Sequence
  Antisense oligo
caggaguuugagaccagccu

SEQ ID NO: 11324 - RNA, 20 nt, Artificial Sequence
  Antisense oligo
ucaggaguuugagaccagcc

SEQ ID NO: 11325 - RNA, 20 nt, Artificial Sequence
  Antisense oligo
gucaggaguuugagaccagc

SEQ ID NO: 11326 - RNA, 20 nt, Artificial Sequence
  Antisense oligo
caaggucaggaguuugagac

SEQ ID NO: 11327 - RNA, 20 nt, Artificial Sequence
  Antisense oligo
cuguaaucccagcacuuugg

SEQ ID NO: 11328 - RNA, 20 nt, Artificial Sequence
  Antisense oligo
ccuguaaucccagcacuuug

SEQ ID NO: 11329 - RNA, 20 nt, Artificial Sequence
  Antisense oligo
gccuguaaucccagcacuuu

SEQ ID NO: 11330 - RNA, 20 nt, Artificial Sequence
  Antisense oligo
ggccuguaaucccagcacuu

SEQ ID NO: 11331 - RNA, 20 nt, Artificial Sequence
  Antisense oligo
uaaacauauucaggccaggc

SEQ ID NO: 11332 - RNA, 20 nt, Artificial Sequence
  Antisense oligo
cuaaacauauucaggccagg

SEQ ID NO: 11333 - RNA, 20 nt, Artificial Sequence
  Antisense oligo
ggcauccuacauacaguggg

SEQ ID NO: 11334 - RNA, 20 nt, Artificial Sequence
  Antisense oligo
gggcauccuacauacagugg

SEQ ID NO: 11335 - RNA, 20 nt, Artificial Sequence
  Antisense oligo
gguggaauagcccauugccc

SEQ ID NO: 11336 - RNA, 20 nt, Artificial Sequence
  Antisense oligo
agguggaauagcccauugcc

SEQ ID NO: 11337 - RNA, 20 nt, Artificial Sequence
  Antisense oligo
uagguggaauagcccauugc

SEQ ID NO: 11338 - RNA, 20 nt, Artificial Sequence
  Antisense oligo
cuagguggaauagcccauug

SEQ ID NO: 11339 - RNA, 20 nt, Artificial Sequence
  Antisense oligo
acccgagcuagguggaauag

SEQ ID NO: 11340 - RNA, 20 nt, Artificial Sequence
  Antisense oligo
accacacacccgagcuaggu

SEQ ID NO: 11341 - RNA, 20 nt, Artificial Sequence
  Antisense oligo
aacaucagagugugccugca

SEQ ID NO: 11342 - RNA, 20 nt, Artificial Sequence
  Antisense oligo
gaacaucagagugugccugc

SEQ ID NO: 11343 - RNA, 20 nt, Artificial Sequence
  Antisense oligo
acugugaacaucagagugug

SEQ ID NO: 11344 - RNA, 20 nt, Artificial Sequence
  Antisense oligo
uagcacuagggacacguucu

SEQ ID NO: 11345 - RNA, 20 nt, Artificial Sequence
  Antisense oligo
uuagcacuagggacacguuc

SEQ ID NO: 11346 - RNA, 20 nt, Artificial Sequence
  Antisense oligo
cuuagcacuagggacacguu

SEQ ID NO: 11347 - RNA, 20 nt, Artificial Sequence
  Antisense oligo
acuuagcacuagggacacgu

SEQ ID NO: 11348 - RNA, 20 nt, Artificial Sequence
  Antisense oligo
cacuuagcacuagggacacg

SEQ ID NO: 11349 - RNA, 20 nt, Artificial Sequence
  Antisense oligo
ccacuuagcacuagggacac

SEQ ID NO: 11350 - RNA, 20 nt, Artificial Sequence
  Antisense oligo
gccacuuagcacuagggaca

SEQ ID NO: 11351 - RNA, 20 nt, Artificial Sequence
  Antisense oligo
acagcaggcaaagcagaguc

SEQ ID NO: 11352 - RNA, 20 nt, Artificial Sequence
  Antisense oligo
gacagcaggcaaagcagagu

SEQ ID NO: 11353 - RNA, 20 nt, Artificial Sequence
  Antisense oligo
ggacagcaggcaaagcagag

SEQ ID NO: 11354 - RNA, 20 nt, Artificial Sequence
  Antisense oligo
ucccagccguuaccuacuca

SEQ ID NO: 11355 - RNA, 20 nt, Artificial Sequence
  Antisense oligo
uucccagccguuaccuacuc

SEQ ID NO: 11356 - RNA, 20 nt, Artificial Sequence
  Antisense oligo
uuucccagccguuaccuacu

SEQ ID NO: 11357 - RNA, 20 nt, Artificial Sequence
  Antisense oligo
auuucccagccguuaccuac

SEQ ID NO: 11358 - RNA, 20 nt, Artificial Sequence
  Antisense oligo
cauuucccagccguuaccua

SEQ ID NO: 11359 - RNA, 20 nt, Artificial Sequence
  Antisense oligo
acauuucccagccguuaccu

SEQ ID NO: 11360 - RNA, 20 nt, Artificial Sequence
  Antisense oligo
cacauuucccagccguuacc

SEQ ID NO: 11361 - RNA, 20 nt, Artificial Sequence
  Antisense oligo
ucacauuucccagccguuac

SEQ ID NO: 11362 - RNA, 20 nt, Artificial Sequence
  Antisense oligo
cuucacauuucccagccguu

SEQ ID NO: 11363 - RNA, 20 nt, Artificial Sequence
  Antisense oligo
accuucacauuucccagccg

SEQ ID NO: 11364 - RNA, 20 nt, Artificial Sequence
  Antisense oligo
ugaaccuucacauuucccag

SEQ ID NO: 11365 - RNA, 20 nt, Artificial Sequence
  Antisense oligo
ucuugaaccuucacauuucc

SEQ ID NO: 11366 - RNA, 20 nt, Artificial Sequence
  Antisense oligo
ggacaaagaguaagagaauc

SEQ ID NO: 11367 - RNA, 20 nt, Artificial Sequence
  Antisense oligo
ggcuaggacaaagaguaaga

SEQ ID NO: 11368 - RNA, 20 nt, Artificial Sequence
  Antisense oligo
gggcuaggacaaagaguaag

SEQ ID NO: 11369 - RNA, 20 nt, Artificial Sequence
  Antisense oligo
ccagggcuaggacaaagagu

SEQ ID NO: 11370 - RNA, 20 nt, Artificial Sequence
  Antisense oligo
auuaagucccagggcuagga

SEQ ID NO: 11371 - RNA, 20 nt, Artificial Sequence
  Antisense oligo
aauuaagucccagggcuagg

SEQ ID NO: 11372 - RNA, 20 nt, Artificial Sequence
  Antisense oligo
aaauuaagucccagggcuag

SEQ ID NO: 11373 - RNA, 20 nt, Artificial Sequence
  Antisense oligo
agagagagagagagagaaaa

SEQ ID NO: 11374 - RNA, 20 nt, Artificial Sequence
  Antisense oligo
gagagagagagagagagaaa

SEQ ID NO: 11375 - RNA, 20 nt, Artificial Sequence
  Antisense oligo
agagagagagagagagagaa

SEQ ID NO: 11376 - RNA, 20 nt, Artificial Sequence
  Antisense oligo
uagagagagagagagagaga

SEQ ID NO: 11377 - RNA, 20 nt, Artificial Sequence
  Antisense oligo
auagagagagagagagagag

SEQ ID NO: 11378 - RNA, 20 nt, Artificial Sequence
  Antisense oligo
aauagagagagagagagaga

SEQ ID NO: 11379 - RNA, 20 nt, Artificial Sequence
  Antisense oligo
aaauagagagagagagagag

SEQ ID NO: 11380 - RNA, 20 nt, Artificial Sequence
  Antisense oligo
agcgaaacucugucucaaaa

SEQ ID NO: 11381 - RNA, 20 nt, Artificial Sequence
  Antisense oligo
gagcgaaacucugucucaaa

SEQ ID NO: 11382 - RNA, 20 nt, Artificial Sequence
  Antisense oligo
uagggugacagagcgaaacu

SEQ ID NO: 11383 - RNA, 20 nt, Artificial Sequence
  Antisense oligo
uuagggugacagagcgaaac

SEQ ID NO: 11384 - RNA, 20 nt, Artificial Sequence
  Antisense oligo
guuagggugacagagcgaaa

SEQ ID NO: 11385 - RNA, 20 nt, Artificial Sequence
  Antisense oligo
uccagccugggcaucccuua

SEQ ID NO: 11386 - RNA, 20 nt, Artificial Sequence
  Antisense oligo
ugagcugagauugcaccacu

SEQ ID NO: 11387 - RNA, 20 nt, Artificial Sequence
  Antisense oligo
gugagcugagauugcaccac

SEQ ID NO: 11388 - RNA, 20 nt, Artificial Sequence
  Antisense oligo
agugagcugagauugcacca

SEQ ID NO: 11389 - RNA, 20 nt, Artificial Sequence
  Antisense oligo
uagugagcugagauugcacc

SEQ ID NO: 11390 - RNA, 20 nt, Artificial Sequence
  Antisense oligo
guagugagcugagauugcac

SEQ ID NO: 11391 - RNA, 20 nt, Artificial Sequence
  Antisense oligo
uguagugagcugagauugca

SEQ ID NO: 11392 - RNA, 20 nt, Artificial Sequence
  Antisense oligo
uuguagugagcugagauugc

SEQ ID NO: 11393 - RNA, 20 nt, Artificial Sequence
  Antisense oligo
guuguagugagcugagauug

SEQ ID NO: 11394 - RNA, 20 nt, Artificial Sequence
  Antisense oligo
ggagaaucgcuugaacccgg

SEQ ID NO: 11395 - RNA, 20 nt, Artificial Sequence
  Antisense oligo
aggagaaucgcuugaacccg

SEQ ID NO: 11396 - RNA, 20 nt, Artificial Sequence
  Antisense oligo
caggagaaucgcuugaaccc

SEQ ID NO: 11397 - RNA, 20 nt, Artificial Sequence
  Antisense oligo
gcaggagaaucgcuugaacc

SEQ ID NO: 11398 - RNA, 20 nt, Artificial Sequence
  Antisense oligo
ggcaggagaaucgcuugaac

SEQ ID NO: 11399 - RNA, 20 nt, Artificial Sequence
  Antisense oligo
aggcaggagaaucgcuugaa

SEQ ID NO: 11400 - RNA, 20 nt, Artificial Sequence
  Antisense oligo
gaggcaggagaaucgcuuga

SEQ ID NO: 11401 - RNA, 20 nt, Artificial Sequence
  Antisense oligo
ugaggcaggagaaucgcuug

SEQ ID NO: 11402 - RNA, 20 nt, Artificial Sequence
  Antisense oligo
cugaggcaggagaaucgcuu

SEQ ID NO: 11403 - RNA, 20 nt, Artificial Sequence
  Antisense oligo
gcugaggcaggagaaucgcu

SEQ ID NO: 11404 - RNA, 20 nt, Artificial Sequence
  Antisense oligo
aggcugaggcaggagaaucg

SEQ ID NO: 11405 - RNA, 20 nt, Artificial Sequence
  Antisense oligo
gaggcugaggcaggagaauc

SEQ ID NO: 11406 - RNA, 20 nt, Artificial Sequence
  Antisense oligo
ggaggcugaggcaggagaau

SEQ ID NO: 11407 - RNA, 20 nt, Artificial Sequence
  Antisense oligo
aggaggcugaggcaggagaa

SEQ ID NO: 11408 - RNA, 20 nt, Artificial Sequence
  Antisense oligo
ucccagcuacucaggaggcu

SEQ ID NO: 11409 - RNA, 20 nt, Artificial Sequence
  Antisense oligo
aucccagcuacucaggaggc

SEQ ID NO: 11410 - RNA, 20 nt, Artificial Sequence
  Antisense oligo
aaucccagcuacucaggagg

SEQ ID NO: 11411 - RNA, 20 nt, Artificial Sequence
  Antisense oligo
uaaucccagcuacucaggag

SEQ ID NO: 11412 - RNA, 20 nt, Artificial Sequence
  Antisense oligo
guaaucccagcuacucagga

SEQ ID NO: 11413 - RNA, 20 nt, Artificial Sequence
  Antisense oligo
uguaaucccagcuacucagg

SEQ ID NO: 11414 - RNA, 20 nt, Artificial Sequence
  Antisense oligo
cuguaaucccagcuacucag

SEQ ID NO: 11415 - RNA, 20 nt, Artificial Sequence
  Antisense oligo
ccuguaaucccagcuacuca

SEQ ID NO: 11416 - RNA, 20 nt, Artificial Sequence
  Antisense oligo
accuguaaucccagcuacuc

SEQ ID NO: 11417 - RNA, 20 nt, Artificial Sequence
  Antisense oligo
caccuguaaucccagcuacu

SEQ ID NO: 11418 - RNA, 20 nt, Artificial Sequence
  Antisense oligo
gcaccuguaaucccagcuac

SEQ ID NO: 11419 - RNA, 20 nt, Artificial Sequence
  Antisense oligo
ggcaccuguaaucccagcua

SEQ ID NO: 11420 - RNA, 20 nt, Artificial Sequence
  Antisense oligo
aggcaccuguaaucccagcu

SEQ ID NO: 11421 - RNA, 20 nt, Artificial Sequence
  Antisense oligo
caggcaccuguaaucccagc

SEQ ID NO: 11422 - RNA, 20 nt, Artificial Sequence
  Antisense oligo
gcaggcaccuguaaucccag

SEQ ID NO: 11423 - RNA, 20 nt, Artificial Sequence
  Antisense oligo
ggcaggcaccuguaauccca

SEQ ID NO: 11424 - RNA, 20 nt, Artificial Sequence
  Antisense oligo
uggcaggcaccuguaauccc

SEQ ID NO: 11425 - RNA, 20 nt, Artificial Sequence
  Antisense oligo
guggcaggcaccuguaaucc

SEQ ID NO: 11426 - RNA, 20 nt, Artificial Sequence
  Antisense oligo
aaauuagccaggcguggugg

SEQ ID NO: 11427 - RNA, 20 nt, Artificial Sequence
  Antisense oligo
aaaauuagccaggcguggug

SEQ ID NO: 11428 - RNA, 20 nt, Artificial Sequence
  Antisense oligo
aggucaggaguucaaagcca

SEQ ID NO: 11429 - RNA, 20 nt, Artificial Sequence
  Antisense oligo
gaggucaggaguucaaagcc

SEQ ID NO: 11430 - RNA, 20 nt, Artificial Sequence
  Antisense oligo
ugaggucaggaguucaaagc

SEQ ID NO: 11431 - RNA, 20 nt, Artificial Sequence
  Antisense oligo
cacuugaggucaggaguuca

SEQ ID NO: 11432 - RNA, 20 nt, Artificial Sequence
  Antisense oligo
ucacuugaggucaggaguuc

SEQ ID NO: 11433 - RNA, 20 nt, Artificial Sequence
  Antisense oligo
aucacuugaggucaggaguu

SEQ ID NO: 11434 - RNA, 20 nt, Artificial Sequence
  Antisense oligo
gaucacuugaggucaggagu

SEQ ID NO: 11435 - RNA, 20 nt, Artificial Sequence
  Antisense oligo
ggaucacuugaggucaggag

SEQ ID NO: 11436 - RNA, 20 nt, Artificial Sequence
  Antisense oligo
gggaucacuugaggucagga

SEQ ID NO: 11437 - RNA, 20 nt, Artificial Sequence
  Antisense oligo
uagcacuuugggaggccgag

SEQ ID NO: 11438 - RNA, 20 nt, Artificial Sequence
  Antisense oligo
cuagcacuuugggaggccga

SEQ ID NO: 11439 - RNA, 20 nt, Artificial Sequence
  Antisense oligo
uccuagcacuuugggaggcc

SEQ ID NO: 11440 - RNA, 20 nt, Artificial Sequence
  Antisense oligo
auccuagcacuuugggaggc

SEQ ID NO: 11441 - RNA, 20 nt, Artificial Sequence
  Antisense oligo
aauccuagcacuuugggagg

SEQ ID NO: 11442 - RNA, 20 nt, Artificial Sequence
  Antisense oligo
uaauccuagcacuuugggag

SEQ ID NO: 11443 - RNA, 20 nt, Artificial Sequence
  Antisense oligo
guaauccuagcacuuuggga

SEQ ID NO: 11444 - RNA, 20 nt, Artificial Sequence
  Antisense oligo
uguaauccuagcacuuuggg

SEQ ID NO: 11445 - RNA, 20 nt, Artificial Sequence
  Antisense oligo
cuguaauccuagcacuuugg

SEQ ID NO: 11446 - RNA, 20 nt, Artificial Sequence
  Antisense oligo
ccuguaauccuagcacuuug

SEQ ID NO: 11447 - RNA, 20 nt, Artificial Sequence
  Antisense oligo
accuguaauccuagcacuuu

SEQ ID NO: 11448 - RNA, 20 nt, Artificial Sequence
  Antisense oligo
caccuguaauccuagcacuu

SEQ ID NO: 11449 - RNA, 20 nt, Artificial Sequence
  Antisense oligo
acaccuguaauccuagcacu

SEQ ID NO: 11450 - RNA, 20 nt, Artificial Sequence
  Antisense oligo
cacaccuguaauccuagcac

SEQ ID NO: 11451 - RNA, 20 nt, Artificial Sequence
  Antisense oligo
ucacaccuguaauccuagca

SEQ ID NO: 11452 - RNA, 20 nt, Artificial Sequence
  Antisense oligo
cucacaccuguaauccuagc

SEQ ID NO: 11453 - RNA, 20 nt, Artificial Sequence
  Antisense oligo
gcucacaccuguaauccuag

SEQ ID NO: 11454 - RNA, 20 nt, Artificial Sequence
  Antisense oligo
ggcucacaccuguaauccua

SEQ ID NO: 11455 - RNA, 20 nt, Artificial Sequence
  Antisense oligo
uggcucacaccuguaauccu

SEQ ID NO: 11456 - RNA, 20 nt, Artificial Sequence
  Antisense oligo
guggcucacaccuguaaucc

SEQ ID NO: 11457 - RNA, 20 nt, Artificial Sequence
  Antisense oligo
cagaaauuagggcugggagu

SEQ ID NO: 11458 - RNA, 20 nt, Artificial Sequence
  Antisense oligo
acagaaauuagggcugggag

SEQ ID NO: 11459 - RNA, 20 nt, Artificial Sequence
  Antisense oligo
uacagaaauuagggcuggga

SEQ ID NO: 11460 - RNA, 20 nt, Artificial Sequence
  Antisense oligo
cguacagagacuuuccuaua

SEQ ID NO: 11461 - RNA, 20 nt, Artificial Sequence
  Antisense oligo
cacguacagagacuuuccua

SEQ ID NO: 11462 - RNA, 20 nt, Artificial Sequence
  Antisense oligo
ucacguacagagacuuuccu

SEQ ID NO: 11463 - RNA, 20 nt, Artificial Sequence
  Antisense oligo
uucacguacagagacuuucc

SEQ ID NO: 11464 - RNA, 20 nt, Artificial Sequence
  Antisense oligo
cuucacguacagagacuuuc

SEQ ID NO: 11465 - RNA, 20 nt, Artificial Sequence
  Antisense oligo
ucuucacguacagagacuuu

SEQ ID NO: 11466 - RNA, 20 nt, Artificial Sequence
  Antisense oligo
gcaaccucuucacguacaga

SEQ ID NO: 11467 - RNA, 20 nt, Artificial Sequence
  Antisense oligo
ugcaaccucuucacguacag

SEQ ID NO: 11468 - RNA, 20 nt, Artificial Sequence
  Antisense oligo
gugcaaccucuucacguaca

SEQ ID NO: 11469 - RNA, 20 nt, Artificial Sequence
  Antisense oligo
uugucgugcaaccucuucac

SEQ ID NO: 11470 - RNA, 20 nt, Artificial Sequence
  Antisense oligo
uuugucgugcaaccucuuca

SEQ ID NO: 11471 - RNA, 20 nt, Artificial Sequence
  Antisense oligo
uuuugucgugcaaccucuuc

SEQ ID NO: 11472 - RNA, 20 nt, Artificial Sequence
  Antisense oligo
auuuugucgugcaaccucuu

SEQ ID NO: 11473 - RNA, 20 nt, Artificial Sequence
  Antisense oligo
cauuuugucgugcaaccucu

SEQ ID NO: 11474 - RNA, 20 nt, Artificial Sequence
  Antisense oligo
ucauuuugucgugcaaccuc

SEQ ID NO: 11475 - RNA, 20 nt, Artificial Sequence
  Antisense oligo
uucauuuugucgugcaaccu

SEQ ID NO: 11476 - RNA, 20 nt, Artificial Sequence
  Antisense oligo
cuucauuuugucgugcaacc

SEQ ID NO: 11477 - RNA, 20 nt, Artificial Sequence
  Antisense oligo
ucuucauuuugucgugcaac

SEQ ID NO: 11478 - RNA, 20 nt, Artificial Sequence
  Antisense oligo
gaauuguuuucagaggcaca

SEQ ID NO: 11479 - RNA, 20 nt, Artificial Sequence
  Antisense oligo
cgaauuguuuucagaggcac

SEQ ID NO: 11480 - RNA, 20 nt, Artificial Sequence
  Antisense oligo
ucgaauuguuuucagaggca

SEQ ID NO: 11481 - RNA, 20 nt, Artificial Sequence
  Antisense oligo
gucgaauuguuuucagaggc

SEQ ID NO: 11482 - RNA, 20 nt, Artificial Sequence
  Antisense oligo
agucgaauuguuuucagagg

SEQ ID NO: 11483 - RNA, 20 nt, Artificial Sequence
  Antisense oligo
cgaucagucgaauuguuuuc

SEQ ID NO: 11484 - RNA, 20 nt, Artificial Sequence
  Antisense oligo
auccaccugagggucgauca

SEQ ID NO: 11485 - RNA, 20 nt, Artificial Sequence
  Antisense oligo
cucggcucucauccaccuga

SEQ ID NO: 11486 - RNA, 20 nt, Artificial Sequence
  Antisense oligo
acucggcucucauccaccug

SEQ ID NO: 11487 - RNA, 20 nt, Artificial Sequence
  Antisense oligo
gacucggcucucauccaccu

SEQ ID NO: 11488 - RNA, 20 nt, Artificial Sequence
  Antisense oligo
aggacucggcucucauccac

SEQ ID NO: 11489 - RNA, 20 nt, Artificial Sequence
  Antisense oligo
caggacucggcucucaucca

SEQ ID NO: 11490 - RNA, 20 nt, Artificial Sequence
  Antisense oligo
gggaccuucugauacugcgc

SEQ ID NO: 11491 - RNA, 20 nt, Artificial Sequence
  Antisense oligo
acugaggaggucacguccag

SEQ ID NO: 11492 - RNA, 20 nt, Artificial Sequence
  Antisense oligo
uacugaggaggucacgucca

SEQ ID NO: 11493 - RNA, 20 nt, Artificial Sequence
  Antisense oligo
uuacugaggaggucacgucc

SEQ ID NO: 11494 - RNA, 20 nt, Artificial Sequence
  Antisense oligo
cacuuacugaggaggucacg

SEQ ID NO: 11495 - RNA, 20 nt, Artificial Sequence
  Antisense oligo
gggcacuuacugaggagguc

SEQ ID NO: 11496 - RNA, 20 nt, Artificial Sequence
  Antisense oligo
agggcacuuacugaggaggu

SEQ ID NO: 11497 - RNA, 20 nt, Artificial Sequence
  Antisense oligo
gagggcacuuacugaggagg

SEQ ID NO: 11498 - RNA, 20 nt, Artificial Sequence
  Antisense oligo
cgcuggagggcacuuacuga

SEQ ID NO: 11499 - RNA, 20 nt, Artificial Sequence
  Antisense oligo
acgcuggagggcacuuacug

SEQ ID NO: 11500 - RNA, 20 nt, Artificial Sequence
  Antisense oligo
accacgucuuuacugaugug

SEQ ID NO: 11501 - RNA, 20 nt, Artificial Sequence
  Antisense oligo
gaccacgucuuuacugaugu

SEQ ID NO: 11502 - RNA, 20 nt, Artificial Sequence
  Antisense oligo
ggaccacgucuuuacugaug

SEQ ID NO: 11503 - RNA, 20 nt, Artificial Sequence
  Antisense oligo
gggaccacgucuuuacugau

SEQ ID NO: 11504 - RNA, 20 nt, Artificial Sequence
  Antisense oligo
gugcguguggaaacaaggaa

SEQ ID NO: 11505 - RNA, 20 nt, Artificial Sequence
  Antisense oligo
ugugcguguggaaacaagga

SEQ ID NO: 11506 - RNA, 20 nt, Artificial Sequence
  Antisense oligo
cugugcguguggaaacaagg

SEQ ID NO: 11507 - RNA, 20 nt, Artificial Sequence
  Antisense oligo
acugugcguguggaaacaag

SEQ ID NO: 11508 - RNA, 20 nt, Artificial Sequence
  Antisense oligo
gacugugcguguggaaacaa

SEQ ID NO: 11509 - RNA, 20 nt, Artificial Sequence
  Antisense oligo
ggacugugcguguggaaaca

SEQ ID NO: 11510 - RNA, 20 nt, Artificial Sequence
  Antisense oligo
aggacugugcguguggaaac

SEQ ID NO: 11511 - RNA, 20 nt, Artificial Sequence
  Antisense oligo
caggacugugcguguggaaa

SEQ ID NO: 11512 - RNA, 20 nt, Artificial Sequence
  Antisense oligo
acaggacugugcguguggaa

SEQ ID NO: 11513 - RNA, 20 nt, Artificial Sequence
  Antisense oligo
gcacauucccacuguuaagc

SEQ ID NO: 11514 - RNA, 20 nt, Artificial Sequence
  Antisense oligo
gagcacauucccacuguuaa

SEQ ID NO: 11515 - RNA, 20 nt, Artificial Sequence
  Antisense oligo
agagcacauucccacuguua

SEQ ID NO: 11516 - RNA, 20 nt, Artificial Sequence
  Antisense oligo
cucagagcacauucccacug

SEQ ID NO: 11517 - RNA, 20 nt, Artificial Sequence
  Antisense oligo
cacacuucucagagcacauu

SEQ ID NO: 11518 - RNA, 20 nt, Artificial Sequence
  Antisense oligo
acacacuucucagagcacau

SEQ ID NO: 11519 - RNA, 20 nt, Artificial Sequence
  Antisense oligo
aacacacuucucagagcaca

SEQ ID NO: 11520 - RNA, 20 nt, Artificial Sequence
  Antisense oligo
gacaacacacuucucagagc

SEQ ID NO: 11521 - RNA, 20 nt, Artificial Sequence
  Antisense oligo
ugacaacacacuucucagag

SEQ ID NO: 11522 - RNA, 20 nt, Artificial Sequence
  Antisense oligo
acugccugacaacacacuuc

SEQ ID NO: 11523 - RNA, 20 nt, Artificial Sequence
  Antisense oligo
gaaacugccugacaacacac

SEQ ID NO: 11524 - RNA, 20 nt, Artificial Sequence
  Antisense oligo
ggaaacugccugacaacaca

SEQ ID NO: 11525 - RNA, 20 nt, Artificial Sequence
  Antisense oligo
aggaaacugccugacaacac

SEQ ID NO: 11526 - RNA, 20 nt, Artificial Sequence
  Antisense oligo
ggaggaaacugccugacaac

SEQ ID NO: 11527 - RNA, 20 nt, Artificial Sequence
  Antisense oligo
ucacacaaggaggaaacugc

SEQ ID NO: 11528 - RNA, 20 nt, Artificial Sequence
  Antisense oligo
caugacguucacacaaggag

SEQ ID NO: 11529 - RNA, 20 nt, Artificial Sequence
  Antisense oligo
ccaugacguucacacaagga

SEQ ID NO: 11530 - RNA, 20 nt, Artificial Sequence
  Antisense oligo
cuagguuaguguaagcgcac

SEQ ID NO: 11531 - RNA, 20 nt, Artificial Sequence
  Antisense oligo
gucuagguuaguguaagcgc

SEQ ID NO: 11532 - RNA, 20 nt, Artificial Sequence
  Antisense oligo
cgucuagguuaguguaagcg

SEQ ID NO: 11533 - RNA, 20 nt, Artificial Sequence
  Antisense oligo
acgucuagguuaguguaagc

SEQ ID NO: 11534 - RNA, 20 nt, Artificial Sequence
  Antisense oligo
uacgucuagguuaguguaag

SEQ ID NO: 11535 - RNA, 20 nt, Artificial Sequence
  Antisense oligo
cuacgucuagguuaguguaa

SEQ ID NO: 11536 - RNA, 20 nt, Artificial Sequence
  Antisense oligo
ucuacgucuagguuagugua

SEQ ID NO: 11537 - RNA, 20 nt, Artificial Sequence
  Antisense oligo
accauaaagccugugugugc

SEQ ID NO: 11538 - RNA, 20 nt, Artificial Sequence
  Antisense oligo
guaccauaaagccugugugu

SEQ ID NO: 11539 - RNA, 20 nt, Artificial Sequence
  Antisense oligo
uguaccauaaagccugugug

SEQ ID NO: 11540 - RNA, 20 nt, Artificial Sequence
  Antisense oligo
guguaccauaaagccugugu

SEQ ID NO: 11541 - RNA, 20 nt, Artificial Sequence
  Antisense oligo
uguguaccauaaagccugug

SEQ ID NO: 11542 - RNA, 20 nt, Artificial Sequence
  Antisense oligo
guguguaccauaaagccugu

SEQ ID NO: 11543 - RNA, 20 nt, Artificial Sequence
  Antisense oligo
aguguguaccauaaagccug

SEQ ID NO: 11544 - RNA, 20 nt, Artificial Sequence
  Antisense oligo
caguguguaccauaaagccu

SEQ ID NO: 11545 - RNA, 20 nt, Artificial Sequence
  Antisense oligo
acaguguguaccauaaagcc

SEQ ID NO: 11546 - RNA, 20 nt, Artificial Sequence
  Antisense oligo
gacaguguguaccauaaagc

SEQ ID NO: 11547 - RNA, 20 nt, Artificial Sequence
  Antisense oligo
cgacaguguguaccauaaag

SEQ ID NO: 11548 - RNA, 20 nt, Artificial Sequence
  Antisense oligo
gcgacaguguguaccauaaa

SEQ ID NO: 11549 - RNA, 20 nt, Artificial Sequence
  Antisense oligo
agcgacaguguguaccauaa

SEQ ID NO: 11550 - RNA, 20 nt, Artificial Sequence
  Antisense oligo
gagcgacaguguguaccaua

SEQ ID NO: 11551 - RNA, 20 nt, Artificial Sequence
  Antisense oligo
ggagcgacaguguguaccau

SEQ ID NO: 11552 - RNA, 20 nt, Artificial Sequence
  Antisense oligo
aggagcgacaguguguacca

SEQ ID NO: 11553 - RNA, 20 nt, Artificial Sequence
  Antisense oligo
uaggagcgacaguguguacc

SEQ ID NO: 11554 - RNA, 20 nt, Artificial Sequence
  Antisense oligo
cuaggagcgacaguguguac

SEQ ID NO: 11555 - RNA, 20 nt, Artificial Sequence
  Antisense oligo
auaugcagcacagguuugcg

SEQ ID NO: 11556 - RNA, 20 nt, Artificial Sequence
  Antisense oligo
aggauucagaacagccauau

SEQ ID NO: 11557 - RNA, 20 nt, Artificial Sequence
  Antisense oligo
gcuccaggauucagaacagc

SEQ ID NO: 11558 - RNA, 20 nt, Artificial Sequence
  Antisense oligo
uuggcuccaggauucagaac

SEQ ID NO: 11559 - RNA, 20 nt, Artificial Sequence
  Antisense oligo
auuggcuccaggauucagaa

SEQ ID NO: 11560 - RNA, 20 nt, Artificial Sequence
  Antisense oligo
ucaacauuucagccaacaac

SEQ ID NO: 11561 - RNA, 20 nt, Artificial Sequence
  Antisense oligo
caacaucaacauuucagcca

SEQ ID NO: 11562 - RNA, 20 nt, Artificial Sequence
  Antisense oligo
ucaacaucaacauuucagcc

SEQ ID NO: 11563 - RNA, 20 nt, Artificial Sequence
  Antisense oligo
gucacgaugauccugaugau

SEQ ID NO: 11564 - RNA, 20 nt, Artificial Sequence
  Antisense oligo
uuugucacgaugauccugau

SEQ ID NO: 11565 - RNA, 20 nt, Artificial Sequence
  Antisense oligo
cuuugucacgaugauccuga

SEQ ID NO: 11566 - RNA, 20 nt, Artificial Sequence
  Antisense oligo
ucuuugucacgaugauccug

SEQ ID NO: 11567 - RNA, 20 nt, Artificial Sequence
  Antisense oligo
cucuuugucacgaugauccu

SEQ ID NO: 11568 - RNA, 20 nt, Artificial Sequence
  Antisense oligo
gcucuuugucacgaugaucc

SEQ ID NO: 11569 - RNA, 20 nt, Artificial Sequence
  Antisense oligo
ugcucuuugucacgaugauc

SEQ ID NO: 11570 - RNA, 20 nt, Artificial Sequence
  Antisense oligo
uugcucuuugucacgaugau

SEQ ID NO: 11571 - RNA, 20 nt, Artificial Sequence
  Antisense oligo
uuugcucuuugucacgauga

SEQ ID NO: 11572 - RNA, 20 nt, Artificial Sequence
  Antisense oligo
uuuugcucuuugucacgaug

SEQ ID NO: 11573 - RNA, 20 nt, Artificial Sequence
  Antisense oligo
ucucccaacucuaaguaacc

SEQ ID NO: 11574 - RNA, 20 nt, Artificial Sequence
  Antisense oligo
guucucccaacucuaaguaa

SEQ ID NO: 11575 - RNA, 20 nt, Artificial Sequence
  Antisense oligo
cgauggcgaguucucccaac

SEQ ID NO: 11576 - RNA, 20 nt, Artificial Sequence
  Antisense oligo
acgauggcgaguucucccaa

SEQ ID NO: 11577 - RNA, 20 nt, Artificial Sequence
  Antisense oligo
cacgauggcgaguucuccca

SEQ ID NO: 11578 - RNA, 20 nt, Artificial Sequence
  Antisense oligo
acacgauggcgaguucuccc

SEQ ID NO: 11579 - RNA, 20 nt, Artificial Sequence
  Antisense oligo
acgacacgauggcgaguucu

SEQ ID NO: 11580 - RNA, 20 nt, Artificial Sequence
  Antisense oligo
cacgacacgauggcgaguuc

SEQ ID NO: 11581 - RNA, 20 nt, Artificial Sequence
  Antisense oligo
acacgacacgauggcgaguu

SEQ ID NO: 11582 - RNA, 20 nt, Artificial Sequence
  Antisense oligo
cacacgacacgauggcgagu

SEQ ID NO: 11583 - RNA, 20 nt, Artificial Sequence
  Antisense oligo
acacacgacacgauggcgag

SEQ ID NO: 11584 - RNA, 20 nt, Artificial Sequence
  Antisense oligo
aacacacgacacgauggcga

SEQ ID NO: 11585 - RNA, 20 nt, Artificial Sequence
  Antisense oligo
aaacacacgacacgauggcg

SEQ ID NO: 11586 - RNA, 20 nt, Artificial Sequence
  Antisense oligo
uaaacacacgacacgauggc

SEQ ID NO: 11587 - RNA, 20 nt, Artificial Sequence
  Antisense oligo
guaaacacacgacacgaugg

SEQ ID NO: 11588 - RNA, 20 nt, Artificial Sequence
  Antisense oligo
uguaaacacacgacacgaug

SEQ ID NO: 11589 - RNA, 20 nt, Artificial Sequence
  Antisense oligo
gcaccuaagaacagaaucgc

SEQ ID NO: 11590 - RNA, 20 nt, Artificial Sequence
  Antisense oligo
uuccagucugcaccuaagaa

SEQ ID NO: 11591 - RNA, 20 nt, Artificial Sequence
  Antisense oligo
aauuccagucugcaccuaag

SEQ ID NO: 11592 - RNA, 20 nt, Artificial Sequence
  Antisense oligo
aaauuccagucugcaccuaa

SEQ ID NO: 11593 - RNA, 20 nt, Artificial Sequence
  Antisense oligo
caaauuccagucugcaccua

SEQ ID NO: 11594 - RNA, 20 nt, Artificial Sequence
  Antisense oligo
ccaaauuccagucugcaccu

SEQ ID NO: 11595 - RNA, 20 nt, Artificial Sequence
  Antisense oligo
cccaaauuccagucugcacc

SEQ ID NO: 11596 - RNA, 20 nt, Artificial Sequence
  Antisense oligo
acacccaaauuccagucugc

SEQ ID NO: 11597 - RNA, 20 nt, Artificial Sequence
  Antisense oligo
aacacccaaauuccagucug

SEQ ID NO: 11598 - RNA, 20 nt, Artificial Sequence
  Antisense oligo
aaacacccaaauuccagucu

SEQ ID NO: 11599 - RNA, 20 nt, Artificial Sequence
  Antisense oligo
gaaacacccaaauuccaguc

SEQ ID NO: 11600 - RNA, 20 nt, Artificial Sequence
  Antisense oligo
aagaaacacccaaauuccag

SEQ ID NO: 11601 - RNA, 20 nt, Artificial Sequence
  Antisense oligo
ggagcuugaaaagaaacacc

SEQ ID NO: 11602 - RNA, 20 nt, Artificial Sequence
  Antisense oligo
ugaggagcuugaaaagaaac

SEQ ID NO: 11603 - RNA, 20 nt, Artificial Sequence
  Antisense oligo
uccgaagccacauuuuccca

SEQ ID NO: 11604 - RNA, 20 nt, Artificial Sequence
  Antisense oligo
uuccgaagccacauuuuccc

SEQ ID NO: 11605 - RNA, 20 nt, Artificial Sequence
  Antisense oligo
guuccgaagccacauuuucc

SEQ ID NO: 11606 - RNA, 20 nt, Artificial Sequence
  Antisense oligo
gguuccgaagccacauuuuc

SEQ ID NO: 11607 - RNA, 20 nt, Artificial Sequence
  Antisense oligo
ggguuccgaagccacauuuu

SEQ ID NO: 11608 - RNA, 20 nt, Artificial Sequence
  Antisense oligo
accagaaagaacccaagagc

SEQ ID NO: 11609 - RNA, 20 nt, Artificial Sequence
  Antisense oligo
agaccagaaagaacccaaga

SEQ ID NO: 11610 - RNA, 20 nt, Artificial Sequence
  Antisense oligo
aagaccagaaagaacccaag

SEQ ID NO: 11611 - RNA, 20 nt, Artificial Sequence
  Antisense oligo
uaagaccagaaagaacccaa

SEQ ID NO: 11612 - RNA, 20 nt, Artificial Sequence
  Antisense oligo
guaagaccagaaagaaccca

SEQ ID NO: 11613 - RNA, 20 nt, Artificial Sequence
  Antisense oligo
aguaagaccagaaagaaccc

SEQ ID NO: 11614 - RNA, 20 nt, Artificial Sequence
  Antisense oligo
acuucaguaagaccagaaag

SEQ ID NO: 11615 - RNA, 20 nt, Artificial Sequence
  Antisense oligo
cacuucaguaagaccagaaa

SEQ ID NO: 11616 - RNA, 20 nt, Artificial Sequence
  Antisense oligo
ccacuucaguaagaccagaa

SEQ ID NO: 11617 - RNA, 20 nt, Artificial Sequence
  Antisense oligo
uccacuucaguaagaccaga

SEQ ID NO: 11618 - RNA, 20 nt, Artificial Sequence
  Antisense oligo
auuccacuucaguaagacca

SEQ ID NO: 11619 - RNA, 20 nt, Artificial Sequence
  Antisense oligo
cauuccacuucaguaagacc

SEQ ID NO: 11620 - RNA, 20 nt, Artificial Sequence
  Antisense oligo
ccauuccacuucaguaagac

SEQ ID NO: 11621 - RNA, 20 nt, Artificial Sequence
  Antisense oligo
gccauuccacuucaguaaga

SEQ ID NO: 11622 - RNA, 20 nt, Artificial Sequence
  Antisense oligo
cgccauuccacuucaguaag

SEQ ID NO: 11623 - RNA, 20 nt, Artificial Sequence
  Antisense oligo
guggagucuccuaaacgcgc

SEQ ID NO: 11624 - RNA, 20 nt, Artificial Sequence
  Antisense oligo
uguggagucuccuaaacgcg

SEQ ID NO: 11625 - RNA, 20 nt, Artificial Sequence
  Antisense oligo
auguggagucuccuaaacgc

SEQ ID NO: 11626 - RNA, 20 nt, Artificial Sequence
  Antisense oligo
gauguggagucuccuaaacg

SEQ ID NO: 11627 - RNA, 20 nt, Artificial Sequence
  Antisense oligo
guaaggcaaagauguggagu

SEQ ID NO: 11628 - RNA, 20 nt, Artificial Sequence
  Antisense oligo
cuaaguaaggcaaagaugug

SEQ ID NO: 11629 - RNA, 20 nt, Artificial Sequence
  Antisense oligo
ugcacuaaguaaggcaaaga

SEQ ID NO: 11630 - RNA, 20 nt, Artificial Sequence
  Antisense oligo
cugcacuaaguaaggcaaag

SEQ ID NO: 11631 - RNA, 20 nt, Artificial Sequence
  Antisense oligo
gcugcacuaaguaaggcaaa

SEQ ID NO: 11632 - RNA, 20 nt, Artificial Sequence
  Antisense oligo
ugcugcacuaaguaaggcaa

SEQ ID NO: 11633 - RNA, 20 nt, Artificial Sequence
  Antisense oligo
gcugcugcacuaaguaaggc

SEQ ID NO: 11634 - RNA, 20 nt, Artificial Sequence
  Antisense oligo
agcugcugcacuaaguaagg

SEQ ID NO: 11635 - RNA, 20 nt, Artificial Sequence
  Antisense oligo
uacuaacacugcauucagcu

SEQ ID NO: 11636 - RNA, 20 nt, Artificial Sequence
  Antisense oligo
uuacuaacacugcauucagc

SEQ ID NO: 11637 - RNA, 20 nt, Artificial Sequence
  Antisense oligo
augaagccugaauugaacag

SEQ ID NO: 11638 - RNA, 20 nt, Artificial Sequence
  Antisense oligo
caugaagccugaauugaaca

SEQ ID NO: 11639 - RNA, 20 nt, Artificial Sequence
  Antisense oligo
gcaugaagccugaauugaac

SEQ ID NO: 11640 - RNA, 20 nt, Artificial Sequence
  Antisense oligo
uacagcaugaagccugaauu

SEQ ID NO: 11641 - RNA, 20 nt, Artificial Sequence
  Antisense oligo
gcauacagcaugaagccuga

SEQ ID NO: 11642 - RNA, 20 nt, Artificial Sequence
  Antisense oligo
ggcauacagcaugaagccug

SEQ ID NO: 11643 - RNA, 20 nt, Artificial Sequence
  Antisense oligo
gggcauacagcaugaagccu

SEQ ID NO: 11644 - RNA, 20 nt, Artificial Sequence
  Antisense oligo
ugggcauacagcaugaagcc

SEQ ID NO: 11645 - RNA, 20 nt, Artificial Sequence
  Antisense oligo
cugggcauacagcaugaagc

SEQ ID NO: 11646 - RNA, 20 nt, Artificial Sequence
  Antisense oligo
acugggcauacagcaugaag

SEQ ID NO: 11647 - RNA, 20 nt, Artificial Sequence
  Antisense oligo
gacugggcauacagcaugaa

SEQ ID NO: 11648 - RNA, 20 nt, Artificial Sequence
  Antisense oligo
agacugggcauacagcauga

SEQ ID NO: 11649 - RNA, 20 nt, Artificial Sequence
  Antisense oligo
cagacugggcauacagcaug

SEQ ID NO: 11650 - RNA, 20 nt, Artificial Sequence
  Antisense oligo
ucagacugggcauacagcau

SEQ ID NO: 11651 - RNA, 20 nt, Artificial Sequence
  Antisense oligo
uucagacugggcauacagca

SEQ ID NO: 11652 - RNA, 20 nt, Artificial Sequence
  Antisense oligo
auucagacugggcauacagc

SEQ ID NO: 11653 - RNA, 20 nt, Artificial Sequence
  Antisense oligo
gauucagacugggcauacag

SEQ ID NO: 11654 - RNA, 20 nt, Artificial Sequence
  Antisense oligo
ggauucagacugggcauaca

SEQ ID NO: 11655 - RNA, 20 nt, Artificial Sequence
  Antisense oligo
ugggauucagacugggcaua

SEQ ID NO: 11656 - RNA, 20 nt, Artificial Sequence
  Antisense oligo
cugggauucagacugggcau

SEQ ID NO: 11657 - RNA, 20 nt, Artificial Sequence
  Antisense oligo
gcugggauucagacugggca

SEQ ID NO: 11658 - RNA, 20 nt, Artificial Sequence
  Antisense oligo
uuccuagauucagagcacag

SEQ ID NO: 11659 - RNA, 20 nt, Artificial Sequence
  Antisense oligo
auuuccuagauucagagcac

SEQ ID NO: 11660 - RNA, 20 nt, Artificial Sequence
  Antisense oligo
aggugaggucuuucaacaga

SEQ ID NO: 11661 - RNA, 20 nt, Artificial Sequence
  Antisense oligo
auuaggaaaggugaggucuu

SEQ ID NO: 11662 - RNA, 20 nt, Artificial Sequence
  Antisense oligo
gcauuaggaaaggugagguc

SEQ ID NO: 11663 - RNA, 20 nt, Artificial Sequence
  Antisense oligo
agcuggcauuaggaaaggug

SEQ ID NO: 11664 - RNA, 20 nt, Artificial Sequence
  Antisense oligo
uagcuggcauuaggaaaggu

SEQ ID NO: 11665 - RNA, 20 nt, Artificial Sequence
  Antisense oligo
uuagcuggcauuaggaaagg

SEQ ID NO: 11666 - RNA, 20 nt, Artificial Sequence
  Antisense oligo
cuuagcuggcauuaggaaag

SEQ ID NO: 11667 - RNA, 20 nt, Artificial Sequence
  Antisense oligo
ucuuagcuggcauuaggaaa

SEQ ID NO: 11668 - RNA, 20 nt, Artificial Sequence
  Antisense oligo
caucuuagcuggcauuagga

SEQ ID NO: 11669 - RNA, 20 nt, Artificial Sequence
  Antisense oligo
ucaucuuagcuggcauuagg

SEQ ID NO: 11670 - RNA, 20 nt, Artificial Sequence
  Antisense oligo
cucaucuuagcuggcauuag

SEQ ID NO: 11671 - RNA, 20 nt, Artificial Sequence
  Antisense oligo
ucucaucuuagcuggcauua

SEQ ID NO: 11672 - RNA, 20 nt, Artificial Sequence
  Antisense oligo
uucucaucuuagcuggcauu

SEQ ID NO: 11673 - RNA, 20 nt, Artificial Sequence
  Antisense oligo
cuucucaucuuagcuggcau

SEQ ID NO: 11674 - RNA, 20 nt, Artificial Sequence
  Antisense oligo
ucuccacuaagcuauacaug

SEQ ID NO: 11675 - RNA, 20 nt, Artificial Sequence
  Antisense oligo
guuucuccacuaagcuauac

SEQ ID NO: 11676 - RNA, 20 nt, Artificial Sequence
  Antisense oligo
acuaaguuucuccacuaagc

SEQ ID NO: 11677 - RNA, 20 nt, Artificial Sequence
  Antisense oligo
cccaacuuccugaaacuaag

SEQ ID NO: 11678 - RNA, 20 nt, Artificial Sequence
  Antisense oligo
acccaacuuccugaaacuaa

SEQ ID NO: 11679 - RNA, 20 nt, Artificial Sequence
  Antisense oligo
uaacccaacuuccugaaacu

SEQ ID NO: 11680 - RNA, 20 nt, Artificial Sequence
  Antisense oligo
aguaaggcauugcuguggga

SEQ ID NO: 11681 - RNA, 20 nt, Artificial Sequence
  Antisense oligo
aaguaaggcauugcuguggg

SEQ ID NO: 11682 - RNA, 20 nt, Artificial Sequence
  Antisense oligo
uaaguaaggcauugcugugg

SEQ ID NO: 11683 - RNA, 20 nt, Artificial Sequence
  Antisense oligo
uuaaguaaggcauugcugug

SEQ ID NO: 11684 - RNA, 20 nt, Artificial Sequence
  Antisense oligo
cacagcauaucuuuugcaca

SEQ ID NO: 11685 - RNA, 20 nt, Artificial Sequence
  Antisense oligo
ccacagcauaucuuuugcac

SEQ ID NO: 11686 - RNA, 20 nt, Artificial Sequence
  Antisense oligo
uccacagcauaucuuuugca

SEQ ID NO: 11687 - RNA, 20 nt, Artificial Sequence
  Antisense oligo
uuccacagcauaucuuuugc

SEQ ID NO: 11688 - RNA, 20 nt, Artificial Sequence
  Antisense oligo
cuccacguuaucuauauugg

SEQ ID NO: 11689 - RNA, 20 nt, Artificial Sequence
  Antisense oligo
ccuccacguuaucuauauug

SEQ ID NO: 11690 - RNA, 20 nt, Artificial Sequence
  Antisense oligo
cccuccacguuaucuauauu

SEQ ID NO: 11691 - RNA, 20 nt, Artificial Sequence
  Antisense oligo
acccuccacguuaucuauau

SEQ ID NO: 11692 - RNA, 20 nt, Artificial Sequence
  Antisense oligo
aacccuccacguuaucuaua

SEQ ID NO: 11693 - RNA, 20 nt, Artificial Sequence
  Antisense oligo
gugucuuaacccuccacguu

SEQ ID NO: 11694 - RNA, 20 nt, Artificial Sequence
  Antisense oligo
ugugucuuaacccuccacgu

SEQ ID NO: 11695 - RNA, 20 nt, Artificial Sequence
  Antisense oligo
uugugucuuaacccuccacg

SEQ ID NO: 11696 - RNA, 20 nt, Artificial Sequence
  Antisense oligo
uuugugucuuaacccuccac

SEQ ID NO: 11697 - RNA, 20 nt, Artificial Sequence
  Antisense oligo
guacgcuggaaaggagagac

SEQ ID NO: 11698 - RNA, 20 nt, Artificial Sequence
  Antisense oligo
uguacgcuggaaaggagaga

SEQ ID NO: 11699 - RNA, 20 nt, Artificial Sequence
  Antisense oligo
cguguacgcuggaaaggaga

SEQ ID NO: 11700 - RNA, 20 nt, Artificial Sequence
  Antisense oligo
acguguacgcuggaaaggag

SEQ ID NO: 11701 - RNA, 20 nt, Artificial Sequence
  Antisense oligo
gugacuuuugggaagauguc

SEQ ID NO: 11702 - RNA, 20 nt, Artificial Sequence
  Antisense oligo
aggugacuuuugggaagaug

SEQ ID NO: 11703 - RNA, 20 nt, Artificial Sequence
  Antisense oligo
caggugacuuuugggaagau

SEQ ID NO: 11704 - RNA, 20 nt, Artificial Sequence
  Antisense oligo
gcaggugacuuuugggaaga

SEQ ID NO: 11705 - RNA, 20 nt, Artificial Sequence
  Antisense oligo
gucuaucaccucuuugggag

SEQ ID NO: 11706 - RNA, 20 nt, Artificial Sequence
  Antisense oligo
augucuaucaccucuuuggg

SEQ ID NO: 11707 - RNA, 20 nt, Artificial Sequence
  Antisense oligo
cuccaugucuaucaccucuu

SEQ ID NO: 11708 - RNA, 20 nt, Artificial Sequence
  Antisense oligo
cucagcuccaugucuaucac

SEQ ID NO: 11709 - RNA, 20 nt, Artificial Sequence
  Antisense oligo
acucagcuccaugucuauca

SEQ ID NO: 11710 - RNA, 20 nt, Artificial Sequence
  Antisense oligo
cacucagcuccaugucuauc

SEQ ID NO: 11711 - RNA, 20 nt, Artificial Sequence
  Antisense oligo
gcacucagcuccaugucuau

SEQ ID NO: 11712 - RNA, 20 nt, Artificial Sequence
  Antisense oligo
ucagggcacucagcuccaug

SEQ ID NO: 11713 - RNA, 20 nt, Artificial Sequence
  Antisense oligo
acuccucagggcacucagcu

SEQ ID NO: 11714 - RNA, 20 nt, Artificial Sequence
  Antisense oligo
ucacuccucagggcacucag

SEQ ID NO: 11715 - RNA, 20 nt, Artificial Sequence
  Antisense oligo
gucacuccucagggcacuca

SEQ ID NO: 11716 - RNA, 20 nt, Artificial Sequence
  Antisense oligo
cucugugucacuccucaggg

SEQ ID NO: 11717 - RNA, 20 nt, Artificial Sequence
  Antisense oligo
aggcucugugucacuccuca

SEQ ID NO: 11718 - RNA, 20 nt, Artificial Sequence
  Antisense oligo
acucccacagauccauccca

SEQ ID NO: 11719 - RNA, 20 nt, Artificial Sequence
  Antisense oligo
aacucccacagauccauccc

SEQ ID NO: 11720 - RNA, 20 nt, Artificial Sequence
  Antisense oligo
cagaacucccacagauccau

SEQ ID NO: 11721 - RNA, 20 nt, Artificial Sequence
  Antisense oligo
gcagaacucccacagaucca

SEQ ID NO: 11722 - RNA, 20 nt, Artificial Sequence
  Antisense oligo
ugcagaacucccacagaucc

SEQ ID NO: 11723 - RNA, 20 nt, Artificial Sequence
  Antisense oligo
cuuuggaaaguuucgcugca

SEQ ID NO: 11724 - RNA, 20 nt, Artificial Sequence
  Antisense oligo
ucuuuggaaaguuucgcugc

SEQ ID NO: 11725 - RNA, 20 nt, Artificial Sequence
  Antisense oligo
ggucuuuggaaaguuucgcu

SEQ ID NO: 11726 - RNA, 20 nt, Artificial Sequence
  Antisense oligo
aggucuuuggaaaguuucgc

SEQ ID NO: 11727 - RNA, 20 nt, Artificial Sequence
  Antisense oligo
uacugguaaggucuuuggaa

SEQ ID NO: 11728 - RNA, 20 nt, Artificial Sequence
  Antisense oligo
cuaggucuugguuuugauug

SEQ ID NO: 11729 - RNA, 20 nt, Artificial Sequence
  Antisense oligo
gugucuaggucuugguuuug

SEQ ID NO: 11730 - RNA, 20 nt, Artificial Sequence
  Antisense oligo
cgugucuaggucuugguuuu

SEQ ID NO: 11731 - RNA, 20 nt, Artificial Sequence
  Antisense oligo
acgugucuaggucuugguuu

SEQ ID NO: 11732 - RNA, 20 nt, Artificial Sequence
  Antisense oligo
aacgugucuaggucuugguu

SEQ ID NO: 11733 - RNA, 20 nt, Artificial Sequence
  Antisense oligo
aaacgugucuaggucuuggu

SEQ ID NO: 11734 - RNA, 20 nt, Artificial Sequence
  Antisense oligo
gaaacgugucuaggucuugg

SEQ ID NO: 11735 - RNA, 20 nt, Artificial Sequence
  Antisense oligo
cgacagagccuucuugauac

SEQ ID NO: 11736 - RNA, 20 nt, Artificial Sequence
  Antisense oligo
ucgacagagccuucuugaua

SEQ ID NO: 11737 - RNA, 20 nt, Artificial Sequence
  Antisense oligo
uucgacagagccuucuugau

SEQ ID NO: 11738 - RNA, 20 nt, Artificial Sequence
  Antisense oligo
cuucgacagagccuucuuga

SEQ ID NO: 11739 - RNA, 20 nt, Artificial Sequence
  Antisense oligo
ccuucgacagagccuucuug

SEQ ID NO: 11740 - RNA, 20 nt, Artificial Sequence
  Antisense oligo
gccuucgacagagccuucuu

SEQ ID NO: 11741 - RNA, 20 nt, Artificial Sequence
  Antisense oligo
ugccuucgacagagccuucu

SEQ ID NO: 11742 - RNA, 20 nt, Artificial Sequence
  Antisense oligo
gugccuucgacagagccuuc

SEQ ID NO: 11743 - RNA, 20 nt, Artificial Sequence
  Antisense oligo
ggugccuucgacagagccuu

SEQ ID NO: 11744 - RNA, 20 nt, Artificial Sequence
  Antisense oligo
ccgcagugaaacaggaaaug

SEQ ID NO: 11745 - RNA, 20 nt, Artificial Sequence
  Antisense oligo
cccgcagugaaacaggaaau

SEQ ID NO: 11746 - RNA, 20 nt, Artificial Sequence
  Antisense oligo
accaggauggguuuauuacc

SEQ ID NO: 11747 - RNA, 20 nt, Artificial Sequence
  Antisense oligo
gaccaggauggguuuauuac

SEQ ID NO: 11748 - RNA, 20 nt, Artificial Sequence
  Antisense oligo
ugaccaggauggguuuauua

SEQ ID NO: 11749 - RNA, 20 nt, Artificial Sequence
  Antisense oligo
cucugaccaggauggguuua

SEQ ID NO: 11750 - RNA, 20 nt, Artificial Sequence
  Antisense oligo
gcucugaccaggauggguuu

SEQ ID NO: 11751 - RNA, 20 nt, Artificial Sequence
  Antisense oligo
cgaagcucugaccaggaugg

SEQ ID NO: 11752 - RNA, 20 nt, Artificial Sequence
  Antisense oligo
ccgaagcucugaccaggaug

SEQ ID NO: 11753 - RNA, 20 nt, Artificial Sequence
  Antisense oligo
uuccgaagcucugaccagga

SEQ ID NO: 11754 - RNA, 20 nt, Artificial Sequence
  Antisense oligo
guuccgaagcucugaccagg

SEQ ID NO: 11755 - RNA, 20 nt, Artificial Sequence
  Antisense oligo
aguuccgaagcucugaccag

SEQ ID NO: 11756 - RNA, 20 nt, Artificial Sequence
  Antisense oligo
aaguuccgaagcucugacca

SEQ ID NO: 11757 - RNA, 20 nt, Artificial Sequence
  Antisense oligo
aaaguuccgaagcucugacc

SEQ ID NO: 11758 - RNA, 20 nt, Artificial Sequence
  Antisense oligo
caaaguuccgaagcucugac

SEQ ID NO: 11759 - RNA, 20 nt, Artificial Sequence
  Antisense oligo
gcaaaguuccgaagcucuga

SEQ ID NO: 11760 - RNA, 20 nt, Artificial Sequence
  Antisense oligo
agcaaaguuccgaagcucug

SEQ ID NO: 11761 - RNA, 20 nt, Artificial Sequence
  Antisense oligo
ccgagcaaaguuccgaagcu

SEQ ID NO: 11762 - RNA, 20 nt, Artificial Sequence
  Antisense oligo
accgagcaaaguuccgaagc

SEQ ID NO: 11763 - RNA, 20 nt, Artificial Sequence
  Antisense oligo
aaccgagcaaaguuccgaag

SEQ ID NO: 11764 - RNA, 20 nt, Artificial Sequence
  Antisense oligo
uucaggaaccgagcaaaguu

SEQ ID NO: 11765 - RNA, 20 nt, Artificial Sequence
  Antisense oligo
auucaggaaccgagcaaagu

SEQ ID NO: 11766 - RNA, 20 nt, Artificial Sequence
  Antisense oligo
aauucaggaaccgagcaaag

SEQ ID NO: 11767 - RNA, 20 nt, Artificial Sequence
  Antisense oligo
uaauucaggaaccgagcaaa

SEQ ID NO: 11768 - RNA, 20 nt, Artificial Sequence
  Antisense oligo
auaauucaggaaccgagcaa

SEQ ID NO: 11769 - RNA, 20 nt, Artificial Sequence
  Antisense oligo
gauaauucaggaaccgagca

SEQ ID NO: 11770 - RNA, 20 nt, Artificial Sequence
  Antisense oligo
ugauaauucaggaaccgagc

SEQ ID NO: 11771 - RNA, 20 nt, Artificial Sequence
  Antisense oligo
cacaaucucugagcugauaa

SEQ ID NO: 11772 - RNA, 20 nt, Artificial Sequence
  Antisense oligo
ucacaaucucugagcugaua

SEQ ID NO: 11773 - RNA, 20 nt, Artificial Sequence
  Antisense oligo
ggauugcagaagagagaggc

SEQ ID NO: 11774 - RNA, 20 nt, Artificial Sequence
  Antisense oligo
acucggauugcagaagagag

SEQ ID NO: 11775 - RNA, 20 nt, Artificial Sequence
  Antisense oligo
aacucggauugcagaagaga

SEQ ID NO: 11776 - RNA, 20 nt, Artificial Sequence
  Antisense oligo
aaacucggauugcagaagag

SEQ ID NO: 11777 - RNA, 20 nt, Artificial Sequence
  Antisense oligo
aaaacucggauugcagaaga

SEQ ID NO: 11778 - RNA, 20 nt, Artificial Sequence
  Antisense oligo
uaaaacucggauugcagaag

SEQ ID NO: 11779 - RNA, 20 nt, Artificial Sequence
  Antisense oligo
ucgccaauaaaacucggauu

SEQ ID NO: 11780 - RNA, 20 nt, Artificial Sequence
  Antisense oligo
ugucgccaauaaaacucgga

SEQ ID NO: 11781 - RNA, 20 nt, Artificial Sequence
  Antisense oligo
gugucgccaauaaaacucgg

SEQ ID NO: 11782 - RNA, 20 nt, Artificial Sequence
  Antisense oligo
ugugucgccaauaaaacucg

SEQ ID NO: 11783 - RNA, 20 nt, Artificial Sequence
  Antisense oligo
gugugucgccaauaaaacuc

SEQ ID NO: 11784 - RNA, 20 nt, Artificial Sequence
  Antisense oligo
agugugucgccaauaaaacu

SEQ ID NO: 11785 - RNA, 20 nt, Artificial Sequence
  Antisense oligo
cagugugucgccaauaaaac

SEQ ID NO: 11786 - RNA, 20 nt, Artificial Sequence
  Antisense oligo
ucagugugucgccaauaaaa

SEQ ID NO: 11787 - RNA, 20 nt, Artificial Sequence
  Antisense oligo
cucagugugucgccaauaaa

SEQ ID NO: 11788 - RNA, 20 nt, Artificial Sequence
  Antisense oligo
ccacgaacuucuugaagccc

SEQ ID NO: 11789 - RNA, 20 nt, Artificial Sequence
  Antisense oligo
accacgaacuucuugaagcc

SEQ ID NO: 11790 - RNA, 20 nt, Artificial Sequence
  Antisense oligo
ggucaccacgaacuucuuga

SEQ ID NO: 11791 - RNA, 20 nt, Artificial Sequence
  Antisense oligo
aggucaccacgaacuucuug

SEQ ID NO: 11792 - RNA, 20 nt, Artificial Sequence
  Antisense oligo
aaggucaccacgaacuucuu

SEQ ID NO: 11793 - RNA, 20 nt, Artificial Sequence
  Antisense oligo
augaaggucaccacgaacuu

SEQ ID NO: 11794 - RNA, 20 nt, Artificial Sequence
  Antisense oligo
caugaaggucaccacgaacu

SEQ ID NO: 11795 - RNA, 20 nt, Artificial Sequence
  Antisense oligo
ugguguggcaaaaucucuug

SEQ ID NO: 11796 - RNA, 20 nt, Artificial Sequence
  Antisense oligo
augguguggcaaaaucucuu

SEQ ID NO: 11797 - RNA, 20 nt, Artificial Sequence
  Antisense oligo
gaugguguggcaaaaucucu

SEQ ID NO: 11798 - RNA, 20 nt, Artificial Sequence
  Antisense oligo
gagugaugguguggcaaaau

SEQ ID NO: 11799 - RNA, 20 nt, Artificial Sequence
  Antisense oligo
ggagugaugguguggcaaaa

SEQ ID NO: 11800 - RNA, 20 nt, Artificial Sequence
  Antisense oligo
uggagugaugguguggcaaa

SEQ ID NO: 11801 - RNA, 20 nt, Artificial Sequence
  Antisense oligo
guguggagugaugguguggc

SEQ ID NO: 11802 - RNA, 20 nt, Artificial Sequence
  Antisense oligo
gguguggagugauggugugg

SEQ ID NO: 11803 - RNA, 20 nt, Artificial Sequence
  Antisense oligo
agguguggagugauggugug

SEQ ID NO: 11804 - RNA, 20 nt, Artificial Sequence
  Antisense oligo
gagguguggagugauggugu

SEQ ID NO: 11805 - RNA, 20 nt, Artificial Sequence
  Antisense oligo
agagguguggagugauggug

SEQ ID NO: 11806 - RNA, 20 nt, Artificial Sequence
  Antisense oligo
cagagguguggagugauggu

SEQ ID NO: 11807 - RNA, 20 nt, Artificial Sequence
  Antisense oligo
ucagagguguggagugaugg

SEQ ID NO: 11808 - RNA, 20 nt, Artificial Sequence
  Antisense oligo
ggucagagguguggagugau

SEQ ID NO: 11809 - RNA, 20 nt, Artificial Sequence
  Antisense oligo
gggcuuuggucagaggugug

SEQ ID NO: 11810 - RNA, 20 nt, Artificial Sequence
  Antisense oligo
cgggcuuuggucagaggugu

SEQ ID NO: 11811 - RNA, 20 nt, Artificial Sequence
  Antisense oligo
uaugggugaggcuccgacuc

SEQ ID NO: 11812 - RNA, 20 nt, Artificial Sequence
  Antisense oligo
guaugggugaggcuccgacu

SEQ ID NO: 11813 - RNA, 20 nt, Artificial Sequence
  Antisense oligo
acguaugggugaggcuccga

SEQ ID NO: 11814 - RNA, 20 nt, Artificial Sequence
  Antisense oligo
aacguaugggugaggcuccg

SEQ ID NO: 11815 - RNA, 20 nt, Artificial Sequence
  Antisense oligo
aaaacguaugggugaggcuc

SEQ ID NO: 11816 - RNA, 20 nt, Artificial Sequence
  Antisense oligo
gaaaacguaugggugaggcu

SEQ ID NO: 11817 - RNA, 20 nt, Artificial Sequence
  Antisense oligo
agaaaacguaugggugaggc

SEQ ID NO: 11818 - RNA, 20 nt, Artificial Sequence
  Antisense oligo
aagaaaacguaugggugagg

SEQ ID NO: 11819 - RNA, 20 nt, Artificial Sequence
  Antisense oligo
uugaagaaaacguaugggug

SEQ ID NO: 11820 - RNA, 20 nt, Artificial Sequence
  Antisense oligo
cauugaagaaaacguauggg

SEQ ID NO: 11821 - RNA, 20 nt, Artificial Sequence
  Antisense oligo
ggucgucauugaagaaaacg

SEQ ID NO: 11822 - RNA, 20 nt, Artificial Sequence
  Antisense oligo
uggucgucauugaagaaaac

SEQ ID NO: 11823 - RNA, 20 nt, Artificial Sequence
  Antisense oligo
guggucgucauugaagaaaa

SEQ ID NO: 11824 - RNA, 20 nt, Artificial Sequence
  Antisense oligo
uguggucgucauugaagaaa

SEQ ID NO: 11825 - RNA, 20 nt, Artificial Sequence
  Antisense oligo
guguggucgucauugaagaa

SEQ ID NO: 11826 - RNA, 20 nt, Artificial Sequence
  Antisense oligo
uguguggucgucauugaaga

SEQ ID NO: 11827 - RNA, 20 nt, Artificial Sequence
  Antisense oligo
uuguguggucgucauugaag

SEQ ID NO: 11828 - RNA, 20 nt, Artificial Sequence
  Antisense oligo
guuguguggucgucauugaa

SEQ ID NO: 11829 - RNA, 20 nt, Artificial Sequence
  Antisense oligo
gguuguguggucgucauuga

SEQ ID NO: 11830 - RNA, 20 nt, Artificial Sequence
  Antisense oligo
ugguuguguggucgucauug

SEQ ID NO: 11831 - RNA, 20 nt, Artificial Sequence
  Antisense oligo
augguuguguggucgucauu

SEQ ID NO: 11832 - RNA, 20 nt, Artificial Sequence
  Antisense oligo
caugguuguguggucgucau

SEQ ID NO: 11833 - RNA, 20 nt, Artificial Sequence
  Antisense oligo
ucaugguuguguggucguca

SEQ ID NO: 11834 - RNA, 20 nt, Artificial Sequence
  Antisense oligo
gucaugguuguguggucguc

SEQ ID NO: 11835 - RNA, 20 nt, Artificial Sequence
  Antisense oligo
ugucaugguuguguggucgu

SEQ ID NO: 11836 - RNA, 20 nt, Artificial Sequence
  Antisense oligo
gaaugucaugguuguguggu

SEQ ID NO: 11837 - RNA, 20 nt, Artificial Sequence
  Antisense oligo
ugaaugucaugguugugugg

SEQ ID NO: 11838 - RNA, 20 nt, Artificial Sequence
  Antisense oligo
auggaagccgaugaauguca

SEQ ID NO: 11839 - RNA, 20 nt, Artificial Sequence
  Antisense oligo
gauggaagccgaugaauguc

SEQ ID NO: 11840 - RNA, 20 nt, Artificial Sequence
  Antisense oligo
agauggaagccgaugaaugu

SEQ ID NO: 11841 - RNA, 20 nt, Artificial Sequence
  Antisense oligo
cagauggaagccgaugaaug

SEQ ID NO: 11842 - RNA, 20 nt, Artificial Sequence
  Antisense oligo
gcagauggaagccgaugaau

SEQ ID NO: 11843 - RNA, 20 nt, Artificial Sequence
  Antisense oligo
ugcagauggaagccgaugaa

SEQ ID NO: 11844 - RNA, 20 nt, Artificial Sequence
  Antisense oligo
ucuugaugaccuucccaguc

SEQ ID NO: 11845 - RNA, 20 nt, Artificial Sequence
  Antisense oligo
cucuugaugaccuucccagu

SEQ ID NO: 11846 - RNA, 20 nt, Artificial Sequence
  Antisense oligo
cucucuugaugaccuuccca

SEQ ID NO: 11847 - RNA, 20 nt, Artificial Sequence
  Antisense oligo
acgucucucuugaugaccuu

SEQ ID NO: 11848 - RNA, 20 nt, Artificial Sequence
  Antisense oligo
gguacaggucccuggucaug

SEQ ID NO: 11849 - RNA, 20 nt, Artificial Sequence
  Antisense oligo
auugaagggcacccucugga

SEQ ID NO: 11850 - RNA, 20 nt, Artificial Sequence
  Antisense oligo
cauugaagggcacccucugg

SEQ ID NO: 11851 - RNA, 20 nt, Artificial Sequence
  Antisense oligo
acauugaagggcacccucug

SEQ ID NO: 11852 - RNA, 20 nt, Artificial Sequence
  Antisense oligo
gacauugaagggcacccucu

SEQ ID NO: 11853 - RNA, 20 nt, Artificial Sequence
  Antisense oligo
cgacauugaagggcacccuc

SEQ ID NO: 11854 - RNA, 20 nt, Artificial Sequence
  Antisense oligo
ucgacauugaagggcacccu

SEQ ID NO: 11855 - RNA, 20 nt, Artificial Sequence
  Antisense oligo
ugucugggcaguuuaucaaa

SEQ ID NO: 11856 - RNA, 20 nt, Artificial Sequence
  Antisense oligo
gugucugggcaguuuaucaa

SEQ ID NO: 11857 - RNA, 20 nt, Artificial Sequence
  Antisense oligo
uucuugugucugggcaguuu

SEQ ID NO: 11858 - RNA, 20 nt, Artificial Sequence
  Antisense oligo
uuucuugugucugggcaguu

SEQ ID NO: 11859 - RNA, 20 nt, Artificial Sequence
  Antisense oligo
guuucuugugucugggcagu

SEQ ID NO: 11860 - RNA, 20 nt, Artificial Sequence
  Antisense oligo
aguuucuugugucugggcag

SEQ ID NO: 11861 - RNA, 20 nt, Artificial Sequence
  Antisense oligo
aaguuucuugugucugggca

SEQ ID NO: 11862 - RNA, 20 nt, Artificial Sequence
  Antisense oligo
ggcagagccucucaaguuuc

SEQ ID NO: 11863 - RNA, 20 nt, Artificial Sequence
  Antisense oligo
aucccuaaggucaggcagag

SEQ ID NO: 11864 - RNA, 20 nt, Artificial Sequence
  Antisense oligo
gaucccuaaggucaggcaga

SEQ ID NO: 11865 - RNA, 20 nt, Artificial Sequence
  Antisense oligo
agcucauacguuuugucggg

SEQ ID NO: 11866 - RNA, 20 nt, Artificial Sequence
  Antisense oligo
cauauugucgguugugagcu

SEQ ID NO: 11867 - RNA, 20 nt, Artificial Sequence
  Antisense oligo
agcauauugucgguugugag

SEQ ID NO: 11868 - RNA, 20 nt, Artificial Sequence
  Antisense oligo
aagcauauugucgguuguga

SEQ ID NO: 11869 - RNA, 20 nt, Artificial Sequence
  Antisense oligo
uaagcauauugucgguugug

SEQ ID NO: 11870 - RNA, 20 nt, Artificial Sequence
  Antisense oligo
cgauggcaaggauuuuaagc

SEQ ID NO: 11871 - RNA, 20 nt, Artificial Sequence
  Antisense oligo
ucgauggcaaggauuuuaag

SEQ ID NO: 11872 - RNA, 20 nt, Artificial Sequence
  Antisense oligo
cucgauggcaaggauuuuaa

SEQ ID NO: 11873 - RNA, 20 nt, Artificial Sequence
  Antisense oligo
aucucgauggcaaggauuuu

SEQ ID NO: 11874 - RNA, 20 nt, Artificial Sequence
  Antisense oligo
caucucgauggcaaggauuu

SEQ ID NO: 11875 - RNA, 20 nt, Artificial Sequence
  Antisense oligo
gcaucucgauggcaaggauu

SEQ ID NO: 11876 - RNA, 20 nt, Artificial Sequence
  Antisense oligo
cgcaucucgauggcaaggau

SEQ ID NO: 11877 - RNA, 20 nt, Artificial Sequence
  Antisense oligo
ccgcaucucgauggcaagga

SEQ ID NO: 11878 - RNA, 20 nt, Artificial Sequence
  Antisense oligo
accgcaucucgauggcaagg

SEQ ID NO: 11879 - RNA, 20 nt, Artificial Sequence
  Antisense oligo
aaccgcaucucgauggcaag

SEQ ID NO: 11880 - RNA, 20 nt, Artificial Sequence
  Antisense oligo
gaaccgcaucucgauggcaa

SEQ ID NO: 11881 - RNA, 20 nt, Artificial Sequence
  Antisense oligo
ggaaccgcaucucgauggca

SEQ ID NO: 11882 - RNA, 20 nt, Artificial Sequence
  Antisense oligo
accggaaccgcaucucgaug

SEQ ID NO: 11883 - RNA, 20 nt, Artificial Sequence
  Antisense oligo
caccggaaccgcaucucgau

SEQ ID NO: 11884 - RNA, 20 nt, Artificial Sequence
  Antisense oligo
acaccggaaccgcaucucga

SEQ ID NO: 11885 - RNA, 20 nt, Artificial Sequence
  Antisense oligo
aucccacaccggaaccgcau

SEQ ID NO: 11886 - RNA, 20 nt, Artificial Sequence
  Antisense oligo
guuucucccaugaugauaac

SEQ ID NO: 11887 - RNA, 20 nt, Artificial Sequence
  Antisense oligo
ccaguuucucccaugaugau

SEQ ID NO: 11888 - RNA, 20 nt, Artificial Sequence
  Antisense oligo
acagccaguuucucccauga

SEQ ID NO: 11889 - RNA, 20 nt, Artificial Sequence
  Antisense oligo
uucccacagccaguuucucc

SEQ ID NO: 11890 - RNA, 20 nt, Artificial Sequence
  Antisense oligo
uuucccacagccaguuucuc

SEQ ID NO: 11891 - RNA, 20 nt, Artificial Sequence
  Antisense oligo
guuuucccacagccaguuuc

SEQ ID NO: 11892 - RNA, 20 nt, Artificial Sequence
  Antisense oligo
gccugguuuucccacagcca

SEQ ID NO: 11893 - RNA, 20 nt, Artificial Sequence
  Antisense oligo
agccugguuuucccacagcc

SEQ ID NO: 11894 - RNA, 20 nt, Artificial Sequence
  Antisense oligo
uaagccugguuuucccacag

SEQ ID NO: 11895 - RNA, 20 nt, Artificial Sequence
  Antisense oligo
uaauaagccugguuuuccca

SEQ ID NO: 11896 - RNA, 20 nt, Artificial Sequence
  Antisense oligo
uuaauaagccugguuuuccc

SEQ ID NO: 11897 - RNA, 20 nt, Artificial Sequence
  Antisense oligo
caggucgcuaaggaauuuaa

SEQ ID NO: 11898 - RNA, 20 nt, Artificial Sequence
  Antisense oligo
gcaggucgcuaaggaauuua

SEQ ID NO: 11899 - RNA, 20 nt, Artificial Sequence
  Antisense oligo
cgcaggucgcuaaggaauuu

SEQ ID NO: 11900 - RNA, 20 nt, Artificial Sequence
  Antisense oligo
ccgcaggucgcuaaggaauu

SEQ ID NO: 11901 - RNA, 20 nt, Artificial Sequence
  Antisense oligo
gccgcaggucgcuaaggaau

SEQ ID NO: 11902 - RNA, 20 nt, Artificial Sequence
  Antisense oligo
uauggugucagcauugguac

SEQ ID NO: 11903 - RNA, 20 nt, Artificial Sequence
  Antisense oligo
uuuauggugucagcauuggu

SEQ ID NO: 11904 - RNA, 20 nt, Artificial Sequence
  Antisense oligo
cuuuauggugucagcauugg

SEQ ID NO: 11905 - RNA, 20 nt, Artificial Sequence
  Antisense oligo
gcuuuauggugucagcauug

SEQ ID NO: 11906 - RNA, 20 nt, Artificial Sequence
  Antisense oligo
cagcuuuauggugucagcau

SEQ ID NO: 11907 - RNA, 20 nt, Artificial Sequence
  Antisense oligo
ccagcuuuauggugucagca

SEQ ID NO: 11908 - RNA, 20 nt, Artificial Sequence
  Antisense oligo
caccuugaccagcuuuaugg

SEQ ID NO: 11909 - RNA, 20 nt, Artificial Sequence
  Antisense oligo
gcaccuugaccagcuuuaug

SEQ ID NO: 11910 - RNA, 20 nt, Artificial Sequence
  Antisense oligo
uggaguagaucaugucugca

SEQ ID NO: 11911 - RNA, 20 nt, Artificial Sequence
  Antisense oligo
cuggaguagaucaugucugc

SEQ ID NO: 11912 - RNA, 20 nt, Artificial Sequence
  Antisense oligo
cucuggaguagaucaugucu

SEQ ID NO: 11913 - RNA, 20 nt, Artificial Sequence
  Antisense oligo
acucuggaguagaucauguc

SEQ ID NO: 11914 - RNA, 20 nt, Artificial Sequence
  Antisense oligo
cugacucuggaguagaucau

SEQ ID NO: 11915 - RNA, 20 nt, Artificial Sequence
  Antisense oligo
ucccugacucuggaguagau

SEQ ID NO: 11916 - RNA, 20 nt, Artificial Sequence
  Antisense oligo
gccacauuuucagccucccu

SEQ ID NO: 11917 - RNA, 20 nt, Artificial Sequence
  Antisense oligo
ggccacauuuucagccuccc

SEQ ID NO: 11918 - RNA, 20 nt, Artificial Sequence
  Antisense oligo
agaugguguccaacugaugu

SEQ ID NO: 11919 - RNA, 20 nt, Artificial Sequence
  Antisense oligo
aagaugguguccaacugaug

SEQ ID NO: 11920 - RNA, 20 nt, Artificial Sequence
  Antisense oligo
caagaugguguccaacugau

SEQ ID NO: 11921 - RNA, 20 nt, Artificial Sequence
  Antisense oligo
acaagaugguguccaacuga

SEQ ID NO: 11922 - RNA, 20 nt, Artificial Sequence
  Antisense oligo
aacaagaugguguccaacug

SEQ ID NO: 11923 - RNA, 20 nt, Artificial Sequence
  Antisense oligo
aaaacaagaugguguccaac

SEQ ID NO: 11924 - RNA, 20 nt, Artificial Sequence
  Antisense oligo
cguuguguuggcuucaucaa

SEQ ID NO: 11925 - RNA, 20 nt, Artificial Sequence
  Antisense oligo
ccguuguguuggcuucauca

SEQ ID NO: 11926 - RNA, 20 nt, Artificial Sequence
  Antisense oligo
uccguuguguuggcuucauc

SEQ ID NO: 11927 - RNA, 20 nt, Artificial Sequence
  Antisense oligo
uuccguuguguuggcuucau

SEQ ID NO: 11928 - RNA, 20 nt, Artificial Sequence
  Antisense oligo
cuuccguuguguuggcuuca

SEQ ID NO: 11929 - RNA, 20 nt, Artificial Sequence
  Antisense oligo
gcuuccguuguguuggcuuc

SEQ ID NO: 11930 - RNA, 20 nt, Artificial Sequence
  Antisense oligo
agcuuccguuguguuggcuu

SEQ ID NO: 11931 - RNA, 20 nt, Artificial Sequence
  Antisense oligo
uagcuuccguuguguuggcu

SEQ ID NO: 11932 - RNA, 20 nt, Artificial Sequence
  Antisense oligo
auagcuuccguuguguuggc

SEQ ID NO: 11933 - RNA, 20 nt, Artificial Sequence
  Antisense oligo
uauagcuuccguuguguugg

SEQ ID NO: 11934 - RNA, 20 nt, Artificial Sequence
  Antisense oligo
uuauagcuuccguuguguug

SEQ ID NO: 11935 - RNA, 20 nt, Artificial Sequence
  Antisense oligo
cuuauagcuuccguuguguu

SEQ ID NO: 11936 - RNA, 20 nt, Artificial Sequence
  Antisense oligo
gcuuauagcuuccguugugu

SEQ ID NO: 11937 - RNA, 20 nt, Artificial Sequence
  Antisense oligo
aggacuucuuugauacagcu

SEQ ID NO: 11938 - RNA, 20 nt, Artificial Sequence
  Antisense oligo
caggacuucuuugauacagc

SEQ ID NO: 11939 - RNA, 20 nt, Artificial Sequence
  Antisense oligo
acaggacuucuuugauacag

SEQ ID NO: 11940 - RNA, 20 nt, Artificial Sequence
  Antisense oligo
augcaggccagaguccucag

SEQ ID NO: 11941 - RNA, 20 nt, Artificial Sequence
  Antisense oligo
uaugcaggccagaguccuca

SEQ ID NO: 11942 - RNA, 20 nt, Artificial Sequence
  Antisense oligo
auaugcaggccagaguccuc

SEQ ID NO: 11943 - RNA, 20 nt, Artificial Sequence
  Antisense oligo
aauaugcaggccagaguccu

SEQ ID NO: 11944 - RNA, 20 nt, Artificial Sequence
  Antisense oligo
uaauaugcaggccagagucc

SEQ ID NO: 11945 - RNA, 20 nt, Artificial Sequence
  Antisense oligo
auaauaugcaggccagaguc

SEQ ID NO: 11946 - RNA, 20 nt, Artificial Sequence
  Antisense oligo
uauaauaugcaggccagagu

SEQ ID NO: 11947 - RNA, 20 nt, Artificial Sequence
  Antisense oligo
gcuauaauaugcaggccaga

SEQ ID NO: 11948 - RNA, 20 nt, Artificial Sequence
  Antisense oligo
agcuauaauaugcaggccag

SEQ ID NO: 11949 - RNA, 20 nt, Artificial Sequence
  Antisense oligo
cagcuauaauaugcaggcca

SEQ ID NO: 11950 - RNA, 20 nt, Artificial Sequence
  Antisense oligo
gcagcuauaauaugcaggcc

SEQ ID NO: 11951 - RNA, 20 nt, Artificial Sequence
  Antisense oligo
ggcagcuauaauaugcaggc

SEQ ID NO: 11952 - RNA, 20 nt, Artificial Sequence
  Antisense oligo
aggcagcuauaauaugcagg

SEQ ID NO: 11953 - RNA, 20 nt, Artificial Sequence
  Antisense oligo
gcaggcagcuauaauaugca

SEQ ID NO: 11954 - RNA, 20 nt, Artificial Sequence
  Antisense oligo
ugcaggcagcuauaauaugc

SEQ ID NO: 11955 - RNA, 20 nt, Artificial Sequence
  Antisense oligo
uugcaggcagcuauaauaug

SEQ ID NO: 11956 - RNA, 20 nt, Artificial Sequence
  Antisense oligo
gauugcaggcagcuauaaua

SEQ ID NO: 11957 - RNA, 20 nt, Artificial Sequence
  Antisense oligo
ggauugcaggcagcuauaau

SEQ ID NO: 11958 - RNA, 20 nt, Artificial Sequence
  Antisense oligo
uggauugcaggcagcuauaa

SEQ ID NO: 11959 - RNA, 20 nt, Artificial Sequence
  Antisense oligo
auggauugcaggcagcuaua

SEQ ID NO: 11960 - RNA, 20 nt, Artificial Sequence
  Antisense oligo
uauggauugcaggcagcuau

SEQ ID NO: 11961 - RNA, 20 nt, Artificial Sequence
  Antisense oligo
gguauggauugcaggcagcu

SEQ ID NO: 11962 - RNA, 20 nt, Artificial Sequence
  Antisense oligo
cgguauggauugcaggcagc

SEQ ID NO: 11963 - RNA, 20 nt, Artificial Sequence
  Antisense oligo
ccgguauggauugcaggcag

SEQ ID NO: 11964 - RNA, 20 nt, Artificial Sequence
  Antisense oligo
uccgguauggauugcaggca

SEQ ID NO: 11965 - RNA, 20 nt, Artificial Sequence
  Antisense oligo
uuccgguauggauugcaggc

SEQ ID NO: 11966 - RNA, 20 nt, Artificial Sequence
  Antisense oligo
cuuccgguauggauugcagg

SEQ ID NO: 11967 - RNA, 20 nt, Artificial Sequence
  Antisense oligo
gcuuccgguauggauugcag

SEQ ID NO: 11968 - RNA, 20 nt, Artificial Sequence
  Antisense oligo
ugcuuccgguauggauugca

SEQ ID NO: 11969 - RNA, 20 nt, Artificial Sequence
  Antisense oligo
gugcuuccgguauggauugc

SEQ ID NO: 11970 - RNA, 20 nt, Artificial Sequence
  Antisense oligo
agugcuuccgguauggauug

SEQ ID NO: 11971 - RNA, 20 nt, Artificial Sequence
  Antisense oligo
gagugcuuccgguauggauu

SEQ ID NO: 11972 - RNA, 20 nt, Artificial Sequence
  Antisense oligo
agagugcuuccgguauggau

SEQ ID NO: 11973 - RNA, 20 nt, Artificial Sequence
  Antisense oligo
cagagugcuuccgguaugga

SEQ ID NO: 11974 - RNA, 20 nt, Artificial Sequence
  Antisense oligo
ucagagugcuuccgguaugg

SEQ ID NO: 11975 - RNA, 20 nt, Artificial Sequence
  Antisense oligo
cucagagugcuuccgguaug

SEQ ID NO: 11976 - RNA, 20 nt, Artificial Sequence
  Antisense oligo
ccucagagugcuuccgguau

SEQ ID NO: 11977 - RNA, 20 nt, Artificial Sequence
  Antisense oligo
aucuccucagagugcuuccg

SEQ ID NO: 11978 - RNA, 20 nt, Artificial Sequence
  Antisense oligo
aucaucuccucagagugcuu

SEQ ID NO: 11979 - RNA, 20 nt, Artificial Sequence
  Antisense oligo
gaucaucuccucagagugcu

SEQ ID NO: 11980 - RNA, 20 nt, Artificial Sequence
  Antisense oligo
cagaucaucuccucagagug

SEQ ID NO: 11981 - RNA, 20 nt, Artificial Sequence
  Antisense oligo
gcagaucaucuccucagagu

SEQ ID NO: 11982 - RNA, 20 nt, Artificial Sequence
  Antisense oligo
acggcagaucaucuccucag

SEQ ID NO: 11983 - RNA, 20 nt, Artificial Sequence
  Antisense oligo
aacggcagaucaucuccuca

SEQ ID NO: 11984 - RNA, 20 nt, Artificial Sequence
  Antisense oligo
aaacggcagaucaucuccuc

SEQ ID NO: 11985 - RNA, 20 nt, Artificial Sequence
  Antisense oligo
caaacggcagaucaucuccu

SEQ ID NO: 11986 - RNA, 20 nt, Artificial Sequence
  Antisense oligo
ccaaacggcagaucaucucc

SEQ ID NO: 11987 - RNA, 20 nt, Artificial Sequence
  Antisense oligo
uccaaacggcagaucaucuc

SEQ ID NO: 11988 - RNA, 20 nt, Artificial Sequence
  Antisense oligo
cuccaaacggcagaucaucu

SEQ ID NO: 11989 - RNA, 20 nt, Artificial Sequence
  Antisense oligo
acuccaaacggcagaucauc

SEQ ID NO: 11990 - RNA, 20 nt, Artificial Sequence
  Antisense oligo
ugacuccaaacggcagauca

SEQ ID NO: 11991 - RNA, 20 nt, Artificial Sequence
  Antisense oligo
cugacuccaaacggcagauc

SEQ ID NO: 11992 - RNA, 20 nt, Artificial Sequence
  Antisense oligo
gcugacuccaaacggcagau

SEQ ID NO: 11993 - RNA, 20 nt, Artificial Sequence
  Antisense oligo
agcugacuccaaacggcaga

SEQ ID NO: 11994 - RNA, 20 nt, Artificial Sequence
  Antisense oligo
cccuguagcccaaaccagcu

SEQ ID NO: 11995 - RNA, 20 nt, Artificial Sequence
  Antisense oligo
acccuguagcccaaaccagc

SEQ ID NO: 11996 - RNA, 20 nt, Artificial Sequence
  Antisense oligo
aacccuguagcccaaaccag

SEQ ID NO: 11997 - RNA, 20 nt, Artificial Sequence
  Antisense oligo
uaacccuguagcccaaacca

SEQ ID NO: 11998 - RNA, 20 nt, Artificial Sequence
  Antisense oligo
acuaacccuguagcccaaac

SEQ ID NO: 11999 - RNA, 20 nt, Artificial Sequence
  Antisense oligo
uacuaacccuguagcccaaa

SEQ ID NO: 12000 - RNA, 20 nt, Artificial Sequence
  Antisense oligo
auacuaacccuguagcccaa

SEQ ID NO: 12001 - RNA, 20 nt, Artificial Sequence
  Antisense oligo
cauacuaacccuguagccca

SEQ ID NO: 12002 - RNA, 20 nt, Artificial Sequence
  Antisense oligo
ccauacuaacccuguagccc

SEQ ID NO: 12003 - RNA, 20 nt, Artificial Sequence
  Antisense oligo
uccauacuaacccuguagcc

SEQ ID NO: 12004 - RNA, 20 nt, Artificial Sequence
  Antisense oligo
cuccauacuaacccuguagc

SEQ ID NO: 12005 - RNA, 20 nt, Artificial Sequence
  Antisense oligo
ccuccauacuaacccuguag

SEQ ID NO: 12006 - RNA, 20 nt, Artificial Sequence
  Antisense oligo
uccuccauacuaacccugua

SEQ ID NO: 12007 - RNA, 20 nt, Artificial Sequence
  Antisense oligo
cuccuccauacuaacccugu

SEQ ID NO: 12008 - RNA, 20 nt, Artificial Sequence
  Antisense oligo
ucuccuccauacuaacccug

SEQ ID NO: 12009 - RNA, 20 nt, Artificial Sequence
  Antisense oligo
gucuccuccauacuaacccu

SEQ ID NO: 12010 - RNA, 20 nt, Artificial Sequence
  Antisense oligo
cgucuccuccauacuaaccc

SEQ ID NO: 12011 - RNA, 20 nt, Artificial Sequence
  Antisense oligo
ccgucuccuccauacuaacc

SEQ ID NO: 12012 - RNA, 20 nt, Artificial Sequence
  Antisense oligo
gccgucuccuccauacuaac

SEQ ID NO: 12013 - RNA, 20 nt, Artificial Sequence
  Antisense oligo
ggccgucuccuccauacuaa

SEQ ID NO: 12014 - RNA, 20 nt, Artificial Sequence
  Antisense oligo
aggaauggagcccagccugu

SEQ ID NO: 12015 - RNA, 20 nt, Artificial Sequence
  Antisense oligo
agaggaauggagcccagccu

SEQ ID NO: 12016 - RNA, 20 nt, Artificial Sequence
  Antisense oligo
ucagaggaauggagcccagc

SEQ ID NO: 12017 - RNA, 20 nt, Artificial Sequence
  Antisense oligo
ugccucagaggaauggagcc

SEQ ID NO: 12018 - RNA, 20 nt, Artificial Sequence
  Antisense oligo
cugccucagaggaauggagc

SEQ ID NO: 12019 - RNA, 20 nt, Artificial Sequence
  Antisense oligo
gcugccucagaggaauggag

SEQ ID NO: 12020 - RNA, 20 nt, Artificial Sequence
  Antisense oligo
agcugccucagaggaaugga

SEQ ID NO: 12021 - RNA, 20 nt, Artificial Sequence
  Antisense oligo
cagagcauggacccgguaua

SEQ ID NO: 12022 - RNA, 20 nt, Artificial Sequence
  Antisense oligo
gcagagcauggacccgguau

SEQ ID NO: 12023 - RNA, 20 nt, Artificial Sequence
  Antisense oligo
acaccagaggaaucaggcuc

SEQ ID NO: 12024 - RNA, 20 nt, Artificial Sequence
  Antisense oligo
ccacaccagaggaaucaggc

SEQ ID NO: 12025 - RNA, 20 nt, Artificial Sequence
  Antisense oligo
cccacaccagaggaaucagg

SEQ ID NO: 12026 - RNA, 20 nt, Artificial Sequence
  Antisense oligo
aagucccacaccagaggaau

SEQ ID NO: 12027 - RNA, 20 nt, Artificial Sequence
  Antisense oligo
caaagucccacaccagagga

SEQ ID NO: 12028 - RNA, 20 nt, Artificial Sequence
  Antisense oligo
ccaaagucccacaccagagg

SEQ ID NO: 12029 - RNA, 20 nt, Artificial Sequence
  Antisense oligo
guuguccaaagucccacacc

SEQ ID NO: 12030 - RNA, 20 nt, Artificial Sequence
  Antisense oligo
acucaguuguccaaaguccc

SEQ ID NO: 12031 - RNA, 20 nt, Artificial Sequence
  Antisense oligo
cacucaguuguccaaagucc

SEQ ID NO: 12032 - RNA, 20 nt, Artificial Sequence
  Antisense oligo
ucacucaguuguccaaaguc

SEQ ID NO: 12033 - RNA, 20 nt, Artificial Sequence
  Antisense oligo
gucacucaguuguccaaagu

SEQ ID NO: 12034 - RNA, 20 nt, Artificial Sequence
  Antisense oligo
cgucacucaguuguccaaag

SEQ ID NO: 12035 - RNA, 20 nt, Artificial Sequence
  Antisense oligo
acgucacucaguuguccaaa

SEQ ID NO: 12036 - RNA, 20 nt, Artificial Sequence
  Antisense oligo
uucagcaacgucacucaguu

SEQ ID NO: 12037 - RNA, 20 nt, Artificial Sequence
  Antisense oligo
uuucagcaacgucacucagu

SEQ ID NO: 12038 - RNA, 20 nt, Artificial Sequence
  Antisense oligo
uuuucagcaacgucacucag

SEQ ID NO: 12039 - RNA, 20 nt, Artificial Sequence
  Antisense oligo
cuuuucagcaacgucacuca

SEQ ID NO: 12040 - RNA, 20 nt, Artificial Sequence
  Antisense oligo
agcuuuucagcaacgucacu

SEQ ID NO: 12041 - RNA, 20 nt, Artificial Sequence
  Antisense oligo
gagcuuuucagcaacgucac

SEQ ID NO: 12042 - RNA, 20 nt, Artificial Sequence
  Antisense oligo
uagagcuuuucagcaacguc

SEQ ID NO: 12043 - RNA, 20 nt, Artificial Sequence
  Antisense oligo
guagagcuuuucagcaacgu

SEQ ID NO: 12044 - RNA, 20 nt, Artificial Sequence
  Antisense oligo
uguagagcuuuucagcaacg

SEQ ID NO: 12045 - RNA, 20 nt, Artificial Sequence
  Antisense oligo
auguagagcuuuucagcaac

SEQ ID NO: 12046 - RNA, 20 nt, Artificial Sequence
  Antisense oligo
gauguagagcuuuucagcaa

SEQ ID NO: 12047 - RNA, 20 nt, Artificial Sequence
  Antisense oligo
ggauguagagcuuuucagca

SEQ ID NO: 12048 - RNA, 20 nt, Artificial Sequence
  Antisense oligo
uggauguagagcuuuucagc

SEQ ID NO: 12049 - RNA, 20 nt, Artificial Sequence
  Antisense oligo
cuggauguagagcuuuucag

SEQ ID NO: 12050 - RNA, 20 nt, Artificial Sequence
  Antisense oligo
gcuggauguagagcuuuuca

SEQ ID NO: 12051 - RNA, 20 nt, Artificial Sequence
  Antisense oligo
ugcuggauguagagcuuuuc

SEQ ID NO: 12052 - RNA, 20 nt, Artificial Sequence
  Antisense oligo
cugcuggauguagagcuuuu

SEQ ID NO: 12053 - RNA, 20 nt, Artificial Sequence
  Antisense oligo
ucugcuggauguagagcuuu

SEQ ID NO: 12054 - RNA, 20 nt, Artificial Sequence
  Antisense oligo
aucugcuggauguagagcuu

SEQ ID NO: 12055 - RNA, 20 nt, Artificial Sequence
  Antisense oligo
aaucugcuggauguagagcu

SEQ ID NO: 12056 - RNA, 20 nt, Artificial Sequence
  Antisense oligo
caaucugcuggauguagagc

SEQ ID NO: 12057 - RNA, 20 nt, Artificial Sequence
  Antisense oligo
acaaucugcuggauguagag

SEQ ID NO: 12058 - RNA, 20 nt, Artificial Sequence
  Antisense oligo
gacaaucugcuggauguaga

SEQ ID NO: 12059 - RNA, 20 nt, Artificial Sequence
  Antisense oligo
ggacaaucugcuggauguag

SEQ ID NO: 12060 - RNA, 20 nt, Artificial Sequence
  Antisense oligo
uggacaaucugcuggaugua

SEQ ID NO: 12061 - RNA, 20 nt, Artificial Sequence
  Antisense oligo
cuggacaaucugcuggaugu

SEQ ID NO: 12062 - RNA, 20 nt, Artificial Sequence
  Antisense oligo
ucuggacaaucugcuggaug

SEQ ID NO: 12063 - RNA, 20 nt, Artificial Sequence
  Antisense oligo
gucucuggacaaucugcugg

SEQ ID NO: 12064 - RNA, 20 nt, Artificial Sequence
  Antisense oligo
agucucuggacaaucugcug

SEQ ID NO: 12065 - RNA, 20 nt, Artificial Sequence
  Antisense oligo
cagucucuggacaaucugcu

SEQ ID NO: 12066 - RNA, 20 nt, Artificial Sequence
  Antisense oligo
ggcugauggacucaaccagu

SEQ ID NO: 12067 - RNA, 20 nt, Artificial Sequence
  Antisense oligo
aggcugauggacucaaccag

SEQ ID NO: 12068 - RNA, 20 nt, Artificial Sequence
  Antisense oligo
uaggcugauggacucaacca

SEQ ID NO: 12069 - RNA, 20 nt, Artificial Sequence
  Antisense oligo
aucuaggcugauggacucaa

SEQ ID NO: 12070 - RNA, 20 nt, Artificial Sequence
  Antisense oligo
gagaggcgcagaggacuucu

SEQ ID NO: 12071 - RNA, 20 nt, Artificial Sequence
  Antisense oligo
ugagaggcgcagaggacuuc

SEQ ID NO: 12072 - RNA, 20 nt, Artificial Sequence
  Antisense oligo
aaacccugagaggcgcagag

SEQ ID NO: 12073 - RNA, 20 nt, Artificial Sequence
  Antisense oligo
gaaacccugagaggcgcaga

SEQ ID NO: 12074 - RNA, 20 nt, Artificial Sequence
  Antisense oligo
ugaaacccugagaggcgcag

SEQ ID NO: 12075 - RNA, 20 nt, Artificial Sequence
  Antisense oligo
augaaacccugagaggcgca

SEQ ID NO: 12076 - RNA, 20 nt, Artificial Sequence
  Antisense oligo
caugaaacccugagaggcgc

SEQ ID NO: 12077 - RNA, 20 nt, Artificial Sequence
  Antisense oligo
agcugcacucaucuucuguu

SEQ ID NO: 12078 - RNA, 20 nt, Artificial Sequence
  Antisense oligo
aagcugcacucaucuucugu

SEQ ID NO: 12079 - RNA, 20 nt, Artificial Sequence
  Antisense oligo
aaagcugcacucaucuucug

SEQ ID NO: 12080 - RNA, 20 nt, Artificial Sequence
  Antisense oligo
ugacaaagcugcacucaucu

SEQ ID NO: 12081 - RNA, 20 nt, Artificial Sequence
  Antisense oligo
cugacaaagcugcacucauc

SEQ ID NO: 12082 - RNA, 20 nt, Artificial Sequence
  Antisense oligo
gcugacaaagcugcacucau

SEQ ID NO: 12083 - RNA, 20 nt, Artificial Sequence
  Antisense oligo
gaggcugacaaagcugcacu

SEQ ID NO: 12084 - RNA, 20 nt, Artificial Sequence
  Antisense oligo
cccugaggcugacaaagcug

SEQ ID NO: 12085 - RNA, 20 nt, Artificial Sequence
  Antisense oligo
gucccugaggcugacaaagc

SEQ ID NO: 12086 - RNA, 20 nt, Artificial Sequence
  Antisense oligo
cgucccugaggcugacaaag

SEQ ID NO: 12087 - RNA, 20 nt, Artificial Sequence
  Antisense oligo
acgucccugaggcugacaaa

SEQ ID NO: 12088 - RNA, 20 nt, Artificial Sequence
  Antisense oligo
cacgucccugaggcugacaa

SEQ ID NO: 12089 - RNA, 20 nt, Artificial Sequence
  Antisense oligo
guggaaccaccugaaaacuu

SEQ ID NO: 12090 - RNA, 20 nt, Artificial Sequence
  Antisense oligo
ucguggaaccaccugaaaac

SEQ ID NO: 12091 - RNA, 20 nt, Artificial Sequence
  Antisense oligo
gcucguggaaccaccugaaa

SEQ ID NO: 12092 - RNA, 20 nt, Artificial Sequence
  Antisense oligo
ugcucguggaaccaccugaa

SEQ ID NO: 12093 - RNA, 20 nt, Artificial Sequence
  Antisense oligo
gugcucguggaaccaccuga

SEQ ID NO: 12094 - RNA, 20 nt, Artificial Sequence
  Antisense oligo
ugugcucguggaaccaccug

SEQ ID NO: 12095 - RNA, 20 nt, Artificial Sequence
  Antisense oligo
cugugcucguggaaccaccu

SEQ ID NO: 12096 - RNA, 20 nt, Artificial Sequence
  Antisense oligo
aucgcgcugugcucguggaa

SEQ ID NO: 12097 - RNA, 20 nt, Artificial Sequence
  Antisense oligo
cuaagagcaucgcgcugugc

SEQ ID NO: 12098 - RNA, 20 nt, Artificial Sequence
  Antisense oligo
gcuaagagcaucgcgcugug

SEQ ID NO: 12099 - RNA, 20 nt, Artificial Sequence
  Antisense oligo
cuuggagagaaaggcauuca

SEQ ID NO: 12100 - RNA, 20 nt, Artificial Sequence
  Antisense oligo
ugacgcuggacuuggagaga

SEQ ID NO: 12101 - RNA, 20 nt, Artificial Sequence
  Antisense oligo
cugacgcuggacuuggagag

SEQ ID NO: 12102 - RNA, 20 nt, Artificial Sequence
  Antisense oligo
gcugacgcuggacuuggaga

SEQ ID NO: 12103 - RNA, 20 nt, Artificial Sequence
  Antisense oligo
ugcugacgcuggacuuggag

SEQ ID NO: 12104 - RNA, 20 nt, Artificial Sequence
  Antisense oligo
uugcugacgcuggacuugga

SEQ ID NO: 12105 - RNA, 20 nt, Artificial Sequence
  Antisense oligo
uuugcugacgcuggacuugg

SEQ ID NO: 12106 - RNA, 20 nt, Artificial Sequence
  Antisense oligo
uuuugcugacgcuggacuug

SEQ ID NO: 12107 - RNA, 20 nt, Artificial Sequence
  Antisense oligo
aucucucucggugugauuuu

SEQ ID NO: 12108 - RNA, 20 nt, Artificial Sequence
  Antisense oligo
gaucucucucggugugauuu

SEQ ID NO: 12109 - RNA, 20 nt, Artificial Sequence
  Antisense oligo
ggaucucucucggugugauu

SEQ ID NO: 12110 - RNA, 20 nt, Artificial Sequence
  Antisense oligo
gggaucucucucggugugau

SEQ ID NO: 12111 - RNA, 20 nt, Artificial Sequence
  Antisense oligo
cgggaucucucucgguguga

SEQ ID NO: 12112 - RNA, 20 nt, Artificial Sequence
  Antisense oligo
acgggaucucucucggugug

SEQ ID NO: 12113 - RNA, 20 nt, Artificial Sequence
  Antisense oligo
gacgggaucucucucggugu

SEQ ID NO: 12114 - RNA, 20 nt, Artificial Sequence
  Antisense oligo
aggacgggaucucucucggu

SEQ ID NO: 12115 - RNA, 20 nt, Artificial Sequence
  Antisense oligo
acgaccagaggacgggaucu

SEQ ID NO: 12116 - RNA, 20 nt, Artificial Sequence
  Antisense oligo
aacgaccagaggacgggauc

SEQ ID NO: 12117 - RNA, 20 nt, Artificial Sequence
  Antisense oligo
caacgaccagaggacgggau

SEQ ID NO: 12118 - RNA, 20 nt, Artificial Sequence
  Antisense oligo
ucaacgaccagaggacggga

SEQ ID NO: 12119 - RNA, 20 nt, Artificial Sequence
  Antisense oligo
aucaacgaccagaggacggg

SEQ ID NO: 12120 - RNA, 20 nt, Artificial Sequence
  Antisense oligo
caucaacgaccagaggacgg

SEQ ID NO: 12121 - RNA, 20 nt, Artificial Sequence
  Antisense oligo
gcaucaacgaccagaggacg

SEQ ID NO: 12122 - RNA, 20 nt, Artificial Sequence
  Antisense oligo
agcaucaacgaccagaggac

SEQ ID NO: 12123 - RNA, 20 nt, Artificial Sequence
  Antisense oligo
cagcaucaacgaccagagga

SEQ ID NO: 12124 - RNA, 20 nt, Artificial Sequence
  Antisense oligo
ccagcaucaacgaccagagg

SEQ ID NO: 12125 - RNA, 20 nt, Artificial Sequence
  Antisense oligo
gccagcaucaacgaccagag

SEQ ID NO: 12126 - RNA, 20 nt, Artificial Sequence
  Antisense oligo
ggccagcaucaacgaccaga

SEQ ID NO: 12127 - RNA, 20 nt, Artificial Sequence
  Antisense oligo
agaggcaugguaacacaccc

SEQ ID NO: 12128 - RNA, 20 nt, Artificial Sequence
  Antisense oligo
uaaagaggcaugguaacaca

SEQ ID NO: 12129 - RNA, 20 nt, Artificial Sequence
  Antisense oligo
cuaaagaggcaugguaacac

SEQ ID NO: 12130 - RNA, 20 nt, Artificial Sequence
  Antisense oligo
ucuaaagaggcaugguaaca

SEQ ID NO: 12131 - RNA, 20 nt, Artificial Sequence
  Antisense oligo
cuuuccgauaugagucuuuc

SEQ ID NO: 12132 - RNA, 20 nt, Artificial Sequence
  Antisense oligo
gcuuuccgauaugagucuuu

SEQ ID NO: 12133 - RNA, 20 nt, Artificial Sequence
  Antisense oligo
ggcuuuccgauaugagucuu

SEQ ID NO: 12134 - RNA, 20 nt, Artificial Sequence
  Antisense oligo
uggcuuuccgauaugagucu

SEQ ID NO: 12135 - RNA, 20 nt, Artificial Sequence
  Antisense oligo
auggcuuuccgauaugaguc

SEQ ID NO: 12136 - RNA, 20 nt, Artificial Sequence
  Antisense oligo
gauggcuuuccgauaugagu

SEQ ID NO: 12137 - RNA, 20 nt, Artificial Sequence
  Antisense oligo
cgauggcuuuccgauaugag

SEQ ID NO: 12138 - RNA, 20 nt, Artificial Sequence
  Antisense oligo
gcgauggcuuuccgauauga

SEQ ID NO: 12139 - RNA, 20 nt, Artificial Sequence
  Antisense oligo
ggcgauggcuuuccgauaug

SEQ ID NO: 12140 - RNA, 20 nt, Artificial Sequence
  Antisense oligo
uggcgauggcuuuccgauau

SEQ ID NO: 12141 - RNA, 20 nt, Artificial Sequence
  Antisense oligo
cuggcgauggcuuuccgaua

SEQ ID NO: 12142 - RNA, 20 nt, Artificial Sequence
  Antisense oligo
ccuggcgauggcuuuccgau

SEQ ID NO: 12143 - RNA, 20 nt, Artificial Sequence
  Antisense oligo
accuggcgauggcuuuccga

SEQ ID NO: 12144 - RNA, 20 nt, Artificial Sequence
  Antisense oligo
aaccuggcgauggcuuuccg

SEQ ID NO: 12145 - RNA, 20 nt, Artificial Sequence
  Antisense oligo
gaaccuggcgauggcuuucc

SEQ ID NO: 12146 - RNA, 20 nt, Artificial Sequence
  Antisense oligo
agaaccuggcgauggcuuuc

SEQ ID NO: 12147 - RNA, 20 nt, Artificial Sequence
  Antisense oligo
aagaaccuggcgauggcuuu

SEQ ID NO: 12148 - RNA, 20 nt, Artificial Sequence
  Antisense oligo
aaagaaccuggcgauggcuu

SEQ ID NO: 12149 - RNA, 20 nt, Artificial Sequence
  Antisense oligo
gaaagaaccuggcgauggcu

SEQ ID NO: 12150 - RNA, 20 nt, Artificial Sequence
  Antisense oligo
ggaaagaaccuggcgauggc

SEQ ID NO: 12151 - RNA, 20 nt, Artificial Sequence
  Antisense oligo
uuucggaaagaaccuggcga

SEQ ID NO: 12152 - RNA, 20 nt, Artificial Sequence
  Antisense oligo
guuucggaaagaaccuggcg

SEQ ID NO: 12153 - RNA, 20 nt, Artificial Sequence
  Antisense oligo
cauacgguuucggaaagaac

SEQ ID NO: 12154 - RNA, 20 nt, Artificial Sequence
  Antisense oligo
ucauacgguuucggaaagaa

SEQ ID NO: 12155 - RNA, 20 nt, Artificial Sequence
  Antisense oligo
gucauacgguuucggaaaga

SEQ ID NO: 12156 - RNA, 20 nt, Artificial Sequence
  Antisense oligo
cgucauacgguuucggaaag

SEQ ID NO: 12157 - RNA, 20 nt, Artificial Sequence
  Antisense oligo
ucgucauacgguuucggaaa

SEQ ID NO: 12158 - RNA, 20 nt, Artificial Sequence
  Antisense oligo
gucgucauacgguuucggaa

SEQ ID NO: 12159 - RNA, 20 nt, Artificial Sequence
  Antisense oligo
ugucgucauacgguuucgga

SEQ ID NO: 12160 - RNA, 20 nt, Artificial Sequence
  Antisense oligo
cugucgucauacgguuucgg

SEQ ID NO: 12161 - RNA, 20 nt, Artificial Sequence
  Antisense oligo
gcugucgucauacgguuucg

SEQ ID NO: 12162 - RNA, 20 nt, Artificial Sequence
  Antisense oligo
ugcugucgucauacgguuuc

SEQ ID NO: 12163 - RNA, 20 nt, Artificial Sequence
  Antisense oligo
cugcugucgucauacgguuu

SEQ ID NO: 12164 - RNA, 20 nt, Artificial Sequence
  Antisense oligo
ccugcugucgucauacgguu

SEQ ID NO: 12165 - RNA, 20 nt, Artificial Sequence
  Antisense oligo
gccugcugucgucauacggu

SEQ ID NO: 12166 - RNA, 20 nt, Artificial Sequence
  Antisense oligo
agccugcugucgucauacgg

SEQ ID NO: 12167 - RNA, 20 nt, Artificial Sequence
  Antisense oligo
cagccugcugucgucauacg

SEQ ID NO: 12168 - RNA, 20 nt, Artificial Sequence
  Antisense oligo
guguuauuucauccagaagc

SEQ ID NO: 12169 - RNA, 20 nt, Artificial Sequence
  Antisense oligo
ccguguuauuucauccagaa

SEQ ID NO: 12170 - RNA, 20 nt, Artificial Sequence
  Antisense oligo
cccguguuauuucauccaga

SEQ ID NO: 12171 - RNA, 20 nt, Artificial Sequence
  Antisense oligo
gcccguguuauuucauccag

SEQ ID NO: 12172 - RNA, 20 nt, Artificial Sequence
  Antisense oligo
ugcccguguuauuucaucca

SEQ ID NO: 12173 - RNA, 20 nt, Artificial Sequence
  Antisense oligo
gugcccguguuauuucaucc

SEQ ID NO: 12174 - RNA, 20 nt, Artificial Sequence
  Antisense oligo
ugugcccguguuauuucauc

SEQ ID NO: 12175 - RNA, 20 nt, Artificial Sequence
  Antisense oligo
cugugcccguguuauuucau

SEQ ID NO: 12176 - RNA, 20 nt, Artificial Sequence
  Antisense oligo
ccugugcccguguuauuuca

SEQ ID NO: 12177 - RNA, 20 nt, Artificial Sequence
  Antisense oligo
uccugugcccguguuauuuc

SEQ ID NO: 12178 - RNA, 20 nt, Artificial Sequence
  Antisense oligo
gauccugugcccguguuauu

SEQ ID NO: 12179 - RNA, 20 nt, Artificial Sequence
  Antisense oligo
agauccugugcccguguuau

SEQ ID NO: 12180 - RNA, 20 nt, Artificial Sequence
  Antisense oligo
aagauccugugcccguguua

SEQ ID NO: 12181 - RNA, 20 nt, Artificial Sequence
  Antisense oligo
aaagauccugugcccguguu

SEQ ID NO: 12182 - RNA, 20 nt, Artificial Sequence
  Antisense oligo
aaaagauccugugcccgugu

SEQ ID NO: 12183 - RNA, 20 nt, Artificial Sequence
  Antisense oligo
gagguacgccguccagaaaa

SEQ ID NO: 12184 - RNA, 20 nt, Artificial Sequence
  Antisense oligo
agagguacgccguccagaaa

SEQ ID NO: 12185 - RNA, 20 nt, Artificial Sequence
  Antisense oligo
cagagguacgccguccagaa

SEQ ID NO: 12186 - RNA, 20 nt, Artificial Sequence
  Antisense oligo
ucagagguacgccguccaga

SEQ ID NO: 12187 - RNA, 20 nt, Artificial Sequence
  Antisense oligo
uuccucagagguacgccguc

SEQ ID NO: 12188 - RNA, 20 nt, Artificial Sequence
  Antisense oligo
uuuccucagagguacgccgu

SEQ ID NO: 12189 - RNA, 20 nt, Artificial Sequence
  Antisense oligo
uuuuccucagagguacgccg

SEQ ID NO: 12190 - RNA, 20 nt, Artificial Sequence
  Antisense oligo
gguuuuccucagagguacgc

SEQ ID NO: 12191 - RNA, 20 nt, Artificial Sequence
  Antisense oligo
cgaugguuuuccucagaggu

SEQ ID NO: 12192 - RNA, 20 nt, Artificial Sequence
  Antisense oligo
gcgaugguuuuccucagagg

SEQ ID NO: 12193 - RNA, 20 nt, Artificial Sequence
  Antisense oligo
ggcgaugguuuuccucagag

SEQ ID NO: 12194 - RNA, 20 nt, Artificial Sequence
  Antisense oligo
uggcgaugguuuuccucaga

SEQ ID NO: 12195 - RNA, 20 nt, Artificial Sequence
  Antisense oligo
uuggcgaugguuuuccucag

SEQ ID NO: 12196 - RNA, 20 nt, Artificial Sequence
  Antisense oligo
cuuggcgaugguuuuccuca

SEQ ID NO: 12197 - RNA, 20 nt, Artificial Sequence
  Antisense oligo
ucuuggcgaugguuuuccuc

SEQ ID NO: 12198 - RNA, 20 nt, Artificial Sequence
  Antisense oligo
uucuuggcgaugguuuuccu

SEQ ID NO: 12199 - RNA, 20 nt, Artificial Sequence
  Antisense oligo
guucuuggcgaugguuuucc

SEQ ID NO: 12200 - RNA, 20 nt, Artificial Sequence
  Antisense oligo
aguucuuggcgaugguuuuc

SEQ ID NO: 12201 - RNA, 20 nt, Artificial Sequence
  Antisense oligo
aaguucuuggcgaugguuuu

SEQ ID NO: 12202 - RNA, 20 nt, Artificial Sequence
  Antisense oligo
caaguucuuggcgaugguuu

SEQ ID NO: 12203 - RNA, 20 nt, Artificial Sequence
  Antisense oligo
uccuucaaggccaaguucuu

SEQ ID NO: 12204 - RNA, 20 nt, Artificial Sequence
  Antisense oligo
acguucuccuucaaggccaa

SEQ ID NO: 12205 - RNA, 20 nt, Artificial Sequence
  Antisense oligo
aagacguucuccuucaaggc

SEQ ID NO: 12206 - RNA, 20 nt, Artificial Sequence
  Antisense oligo
agcucgaugcagacgaccau

SEQ ID NO: 12207 - RNA, 20 nt, Artificial Sequence
  Antisense oligo
cagcucgaugcagacgacca

SEQ ID NO: 12208 - RNA, 20 nt, Artificial Sequence
  Antisense oligo
ucagcucgaugcagacgacc

SEQ ID NO: 12209 - RNA, 20 nt, Artificial Sequence
  Antisense oligo
uucagcucgaugcagacgac

SEQ ID NO: 12210 - RNA, 20 nt, Artificial Sequence
  Antisense oligo
cuucagcucgaugcagacga

SEQ ID NO: 12211 - RNA, 20 nt, Artificial Sequence
  Antisense oligo
ucuucagcucgaugcagacg

SEQ ID NO: 12212 - RNA, 20 nt, Artificial Sequence
  Antisense oligo
aucuucagcucgaugcagac

SEQ ID NO: 12213 - RNA, 20 nt, Artificial Sequence
  Antisense oligo
aaucuucagcucgaugcaga

SEQ ID NO: 12214 - RNA, 20 nt, Artificial Sequence
  Antisense oligo
gaaucuucagcucgaugcag

SEQ ID NO: 12215 - RNA, 20 nt, Artificial Sequence
  Antisense oligo
ggaaucuucagcucgaugca

SEQ ID NO: 12216 - RNA, 20 nt, Artificial Sequence
  Antisense oligo
uggcgagagacuuggagcug

SEQ ID NO: 12217 - RNA, 20 nt, Artificial Sequence
  Antisense oligo
uuggcgagagacuuggagcu

SEQ ID NO: 12218 - RNA, 20 nt, Artificial Sequence
  Antisense oligo
cuuggcgagagacuuggagc

SEQ ID NO: 12219 - RNA, 20 nt, Artificial Sequence
  Antisense oligo
ucuuggcgagagacuuggag

SEQ ID NO: 12220 - RNA, 20 nt, Artificial Sequence
  Antisense oligo
acgauggucuuggcgagaga

SEQ ID NO: 12221 - RNA, 20 nt, Artificial Sequence
  Antisense oligo
cacgauggucuuggcgagag

SEQ ID NO: 12222 - RNA, 20 nt, Artificial Sequence
  Antisense oligo
ccacgauggucuuggcgaga

SEQ ID NO: 12223 - RNA, 20 nt, Artificial Sequence
  Antisense oligo
gucugccacgauggucuugg

SEQ ID NO: 12224 - RNA, 20 nt, Artificial Sequence
  Antisense oligo
cgucugccacgauggucuug

SEQ ID NO: 12225 - RNA, 20 nt, Artificial Sequence
  Antisense oligo
gcgucugccacgauggucuu

SEQ ID NO: 12226 - RNA, 20 nt, Artificial Sequence
  Antisense oligo
uucaggcugcggaagagauc

SEQ ID NO: 12227 - RNA, 20 nt, Artificial Sequence
  Antisense oligo
gaaggacaccagguggaccu

SEQ ID NO: 12228 - RNA, 20 nt, Artificial Sequence
  Antisense oligo
uggaaggacaccagguggac

SEQ ID NO: 12229 - RNA, 20 nt, Artificial Sequence
  Antisense oligo
ugcugaugaugcccuguggg

SEQ ID NO: 12230 - RNA, 20 nt, Artificial Sequence
  Antisense oligo
aaggugcugaugaugcccug

SEQ ID NO: 12231 - RNA, 20 nt, Artificial Sequence
  Antisense oligo
ggaaggugcugaugaugccc

SEQ ID NO: 12232 - RNA, 20 nt, Artificial Sequence
  Antisense oligo
ugccggaaggugcugaugau

SEQ ID NO: 12233 - RNA, 20 nt, Artificial Sequence
  Antisense oligo
acugccggaaggugcugaug

SEQ ID NO: 12234 - RNA, 20 nt, Artificial Sequence
  Antisense oligo
cacugccggaaggugcugau

SEQ ID NO: 12235 - RNA, 20 nt, Artificial Sequence
  Antisense oligo
cacagagacguacugcugca

SEQ ID NO: 12236 - RNA, 20 nt, Artificial Sequence
  Antisense oligo
ccacagagacguacugcugc

SEQ ID NO: 12237 - RNA, 20 nt, Artificial Sequence
  Antisense oligo
accacagagacguacugcug

SEQ ID NO: 12238 - RNA, 20 nt, Artificial Sequence
  Antisense oligo
caccacagagacguacugcu

SEQ ID NO: 12239 - RNA, 20 nt, Artificial Sequence
  Antisense oligo
ccaccacagagacguacugc

SEQ ID NO: 12240 - RNA, 20 nt, Artificial Sequence
  Antisense oligo
accaccacagagacguacug

SEQ ID NO: 12241 - RNA, 20 nt, Artificial Sequence
  Antisense oligo
caccaccacagagacguacu

SEQ ID NO: 12242 - RNA, 20 nt, Artificial Sequence
  Antisense oligo
aacaccaccacagagacgua

SEQ ID NO: 12243 - RNA, 20 nt, Artificial Sequence
  Antisense oligo
uaacaccaccacagagacgu

SEQ ID NO: 12244 - RNA, 20 nt, Artificial Sequence
  Antisense oligo
cuaacaccaccacagagacg

SEQ ID NO: 12245 - RNA, 20 nt, Artificial Sequence
  Antisense oligo
ucaucuaacaccaccacaga

SEQ ID NO: 12246 - RNA, 20 nt, Artificial Sequence
  Antisense oligo
accucaucuaacaccaccac

SEQ ID NO: 12247 - RNA, 20 nt, Artificial Sequence
  Antisense oligo
uugggugagucuuccgccag

SEQ ID NO: 12248 - RNA, 20 nt, Artificial Sequence
  Antisense oligo
uuugggugagucuuccgcca

SEQ ID NO: 12249 - RNA, 20 nt, Artificial Sequence
  Antisense oligo
cagcgggugcagagucuuca

SEQ ID NO: 12250 - RNA, 20 nt, Artificial Sequence
  Antisense oligo
agcagcgggugcagagucuu

SEQ ID NO: 12251 - RNA, 20 nt, Artificial Sequence
  Antisense oligo
ugcauccgucuuccagcagc

SEQ ID NO: 12252 - RNA, 20 nt, Artificial Sequence
  Antisense oligo
gcgggaucgucuucaaugca

SEQ ID NO: 12253 - RNA, 20 nt, Artificial Sequence
  Antisense oligo
gcccacgaagccgaccuuuu

SEQ ID NO: 12254 - RNA, 20 nt, Artificial Sequence
  Antisense oligo
ugcccacgaagccgaccuuu

SEQ ID NO: 12255 - RNA, 20 nt, Artificial Sequence
  Antisense oligo
augcccacgaagccgaccuu

SEQ ID NO: 12256 - RNA, 20 nt, Artificial Sequence
  Antisense oligo
uuggagaugcccacgaagcc

SEQ ID NO: 12257 - RNA, 20 nt, Artificial Sequence
  Antisense oligo
guuggagaugcccacgaagc

SEQ ID NO: 12258 - RNA, 20 nt, Artificial Sequence
  Antisense oligo
aguuggagaugcccacgaag

SEQ ID NO: 12259 - RNA, 20 nt, Artificial Sequence
  Antisense oligo
ccaguuggagaugcccacga

SEQ ID NO: 12260 - RNA, 20 nt, Artificial Sequence
  Antisense oligo
guucaucuuggcagggucaa

SEQ ID NO: 12261 - RNA, 20 nt, Artificial Sequence
  Antisense oligo
gguucaucuuggcaggguca

SEQ ID NO: 12262 - RNA, 20 nt, Artificial Sequence
  Antisense oligo
cgguucaucuuggcaggguc

SEQ ID NO: 12263 - RNA, 20 nt, Artificial Sequence
  Antisense oligo
cccuuggcgcucucuaugag

SEQ ID NO: 12264 - RNA, 20 nt, Artificial Sequence
  Antisense oligo
gcccuuggcgcucucuauga

SEQ ID NO: 12265 - RNA, 20 nt, Artificial Sequence
  Antisense oligo
ugcccuuggcgcucucuaug

SEQ ID NO: 12266 - RNA, 20 nt, Artificial Sequence
  Antisense oligo
augcccuuggcgcucucuau

SEQ ID NO: 12267 - RNA, 20 nt, Artificial Sequence
  Antisense oligo
gaugcccuuggcgcucucua

SEQ ID NO: 12268 - RNA, 20 nt, Artificial Sequence
  Antisense oligo
agaugcccuuggcgcucucu

SEQ ID NO: 12269 - RNA, 20 nt, Artificial Sequence
  Antisense oligo
cgaggaugucugaggagcag

SEQ ID NO: 12270 - RNA, 20 nt, Artificial Sequence
  Antisense oligo
acgaggaugucugaggagca

SEQ ID NO: 12271 - RNA, 20 nt, Artificial Sequence
  Antisense oligo
gacgaggaugucugaggagc

SEQ ID NO: 12272 - RNA, 20 nt, Artificial Sequence
  Antisense oligo
ggacgaggaugucugaggag

SEQ ID NO: 12273 - RNA, 20 nt, Artificial Sequence
  Antisense oligo
uggacgaggaugucugagga

SEQ ID NO: 12274 - RNA, 20 nt, Artificial Sequence
  Antisense oligo
cuggacgaggaugucugagg

SEQ ID NO: 12275 - RNA, 20 nt, Artificial Sequence
  Antisense oligo
ccuggacgaggaugucugag

SEQ ID NO: 12276 - RNA, 20 nt, Artificial Sequence
  Antisense oligo
guuucguaggcuuuggcaaa

SEQ ID NO: 12277 - RNA, 20 nt, Artificial Sequence
  Antisense oligo
cguuucguaggcuuuggcaa

SEQ ID NO: 12278 - RNA, 20 nt, Artificial Sequence
  Antisense oligo
ccguuucguaggcuuuggca

SEQ ID NO: 12279 - RNA, 20 nt, Artificial Sequence
  Antisense oligo
accguuucguaggcuuuggc

SEQ ID NO: 12280 - RNA, 20 nt, Artificial Sequence
  Antisense oligo
caccguuucguaggcuuugg

SEQ ID NO: 12281 - RNA, 20 nt, Artificial Sequence
  Antisense oligo
acaccguuucguaggcuuug

SEQ ID NO: 12282 - RNA, 20 nt, Artificial Sequence
  Antisense oligo
cacaccguuucguaggcuuu

SEQ ID NO: 12283 - RNA, 20 nt, Artificial Sequence
  Antisense oligo
acacaccguuucguaggcuu

SEQ ID NO: 12284 - RNA, 20 nt, Artificial Sequence
  Antisense oligo
uacacaccguuucguaggcu

SEQ ID NO: 12285 - RNA, 20 nt, Artificial Sequence
  Antisense oligo
uuacacaccguuucguaggc

SEQ ID NO: 12286 - RNA, 20 nt, Artificial Sequence
  Antisense oligo
cuuacacaccguuucguagg

SEQ ID NO: 12287 - RNA, 20 nt, Artificial Sequence
  Antisense oligo
gcuuacacaccguuucguag

SEQ ID NO: 12288 - RNA, 20 nt, Artificial Sequence
  Antisense oligo
cgcuuacacaccguuucgua

SEQ ID NO: 12289 - RNA, 20 nt, Artificial Sequence
  Antisense oligo
gcgcuuacacaccguuucgu

SEQ ID NO: 12290 - RNA, 20 nt, Artificial Sequence
  Antisense oligo
ggcgcuuacacaccguuucg

SEQ ID NO: 12291 - RNA, 20 nt, Artificial Sequence
  Antisense oligo
uggcgcuuacacaccguuuc

SEQ ID NO: 12292 - RNA, 20 nt, Artificial Sequence
  Antisense oligo
cuggcgcuuacacaccguuu

SEQ ID NO: 12293 - RNA, 20 nt, Artificial Sequence
  Antisense oligo
ccuggcgcuuacacaccguu

SEQ ID NO: 12294 - RNA, 20 nt, Artificial Sequence
  Antisense oligo
uccuggcgcuuacacaccgu

SEQ ID NO: 12295 - RNA, 20 nt, Artificial Sequence
  Antisense oligo
uguccuggcgcuuacacacc

SEQ ID NO: 12296 - RNA, 20 nt, Artificial Sequence
  Antisense oligo
uuguccuggcgcuuacacac

SEQ ID NO: 12297 - RNA, 20 nt, Artificial Sequence
  Antisense oligo
cuuguccuggcgcuuacaca

SEQ ID NO: 12298 - RNA, 20 nt, Artificial Sequence
  Antisense oligo
ccuuguccuggcgcuuacac

SEQ ID NO: 12299 - RNA, 20 nt, Artificial Sequence
  Antisense oligo
uccuuguccuggcgcuuaca

SEQ ID NO: 12300 - RNA, 20 nt, Artificial Sequence
  Antisense oligo
uuccuuguccuggcgcuuac

SEQ ID NO: 12301 - RNA, 20 nt, Artificial Sequence
  Antisense oligo
auuccuuguccuggcgcuua

SEQ ID NO: 12302 - RNA, 20 nt, Artificial Sequence
  Antisense oligo
aauuccuuguccuggcgcuu

SEQ ID NO: 12303 - RNA, 20 nt, Artificial Sequence
  Antisense oligo
gucacgaagcccgaagaauu

SEQ ID NO: 12304 - RNA, 20 nt, Artificial Sequence
  Antisense oligo
agucacgaagcccgaagaau

SEQ ID NO: 12305 - RNA, 20 nt, Artificial Sequence
  Antisense oligo
uagucacgaagcccgaagaa

SEQ ID NO: 12306 - RNA, 20 nt, Artificial Sequence
  Antisense oligo
guagucacgaagcccgaaga

SEQ ID NO: 12307 - RNA, 20 nt, Artificial Sequence
  Antisense oligo
aguagucacgaagcccgaag

SEQ ID NO: 12308 - RNA, 20 nt, Artificial Sequence
  Antisense oligo
uaguagucacgaagcccgaa

SEQ ID NO: 12309 - RNA, 20 nt, Artificial Sequence
  Antisense oligo
guaguagucacgaagcccga

SEQ ID NO: 12310 - RNA, 20 nt, Artificial Sequence
  Antisense oligo
uguaguagucacgaagcccg

SEQ ID NO: 12311 - RNA, 20 nt, Artificial Sequence
  Antisense oligo
cuguaguagucacgaagccc

SEQ ID NO: 12312 - RNA, 20 nt, Artificial Sequence
  Antisense oligo
gcuguaguagucacgaagcc

SEQ ID NO: 12313 - RNA, 20 nt, Artificial Sequence
  Antisense oligo
ggcuguaguagucacgaagc

SEQ ID NO: 12314 - RNA, 20 nt, Artificial Sequence
  Antisense oligo
aggcuguaguagucacgaag

SEQ ID NO: 12315 - RNA, 20 nt, Artificial Sequence
  Antisense oligo
gaggcuguaguagucacgaa

SEQ ID NO: 12316 - RNA, 20 nt, Artificial Sequence
  Antisense oligo
ugaggcuguaguagucacga

SEQ ID NO: 12317 - RNA, 20 nt, Artificial Sequence
  Antisense oligo
augaggcuguaguagucacg

SEQ ID NO: 12318 - RNA, 20 nt, Artificial Sequence
  Antisense oligo
gaugaggcuguaguagucac

SEQ ID NO: 12319 - RNA, 20 nt, Artificial Sequence
  Antisense oligo
ugaugaggcuguaguaguca

SEQ ID NO: 12320 - RNA, 20 nt, Artificial Sequence
  Antisense oligo
uugaugaggcuguaguaguc

SEQ ID NO: 12321 - RNA, 20 nt, Artificial Sequence
  Antisense oligo
uuuugaugaggcuguaguag

SEQ ID NO: 12322 - RNA, 20 nt, Artificial Sequence
  Antisense oligo
cauuuugaugaggcuguagu

SEQ ID NO: 12323 - RNA, 20 nt, Artificial Sequence
  Antisense oligo
ccauuuugaugaggcuguag

SEQ ID NO: 12324 - RNA, 20 nt, Artificial Sequence
  Antisense oligo
accauuuugaugaggcugua

SEQ ID NO: 12325 - RNA, 20 nt, Artificial Sequence
  Antisense oligo
uauuugaagccuuugcugca

SEQ ID NO: 12326 - RNA, 20 nt, Artificial Sequence
  Antisense oligo
ggaaggcuuucuauuugaag

SEQ ID NO: 12327 - RNA, 20 nt, Artificial Sequence
  Antisense oligo
gggaaggcuuucuauuugaa

SEQ ID NO: 12328 - RNA, 20 nt, Artificial Sequence
  Antisense oligo
acagccugugcaaugucuug

SEQ ID NO: 12329 - RNA, 20 nt, Artificial Sequence
  Antisense oligo
aaggacagccugugcaaugu

SEQ ID NO: 12330 - RNA, 20 nt, Artificial Sequence
  Antisense oligo
cuaaggacagccugugcaau

SEQ ID NO: 12331 - RNA, 20 nt, Artificial Sequence
  Antisense oligo
ccuaaggacagccugugcaa

SEQ ID NO: 12332 - RNA, 20 nt, Artificial Sequence
  Antisense oligo
guuccuaaggacagccugug

SEQ ID NO: 12333 - RNA, 20 nt, Artificial Sequence
  Antisense oligo
aguuccuaaggacagccugu

SEQ ID NO: 12334 - RNA, 20 nt, Artificial Sequence
  Antisense oligo
aaguuccuaaggacagccug

SEQ ID NO: 12335 - RNA, 20 nt, Artificial Sequence
  Antisense oligo
gaaguuccuaaggacagccu

SEQ ID NO: 12336 - RNA, 20 nt, Artificial Sequence
  Antisense oligo
ugaaguuccuaaggacagcc

SEQ ID NO: 12337 - RNA, 20 nt, Artificial Sequence
  Antisense oligo
gccacugaaguuccuaagga

SEQ ID NO: 12338 - RNA, 20 nt, Artificial Sequence
  Antisense oligo
ugccacugaaguuccuaagg

SEQ ID NO: 12339 - RNA, 20 nt, Artificial Sequence
  Antisense oligo
ccuugccacugaaguuccua

SEQ ID NO: 12340 - RNA, 20 nt, Artificial Sequence
  Antisense oligo
uccuugccacugaaguuccu

SEQ ID NO: 12341 - RNA, 20 nt, Artificial Sequence
  Antisense oligo
auccuugccacugaaguucc

SEQ ID NO: 12342 - RNA, 20 nt, Artificial Sequence
  Antisense oligo
cauccuugccacugaaguuc

SEQ ID NO: 12343 - RNA, 20 nt, Artificial Sequence
  Antisense oligo
ucauccuugccacugaaguu

SEQ ID NO: 12344 - RNA, 20 nt, Artificial Sequence
  Antisense oligo
gucauccuugccacugaagu

SEQ ID NO: 12345 - RNA, 20 nt, Artificial Sequence
  Antisense oligo
augucauccuugccacugaa

SEQ ID NO: 12346 - RNA, 20 nt, Artificial Sequence
  Antisense oligo
gaugucauccuugccacuga

SEQ ID NO: 12347 - RNA, 20 nt, Artificial Sequence
  Antisense oligo
gccagaaagauguccaaagc

SEQ ID NO: 12348 - RNA, 20 nt, Artificial Sequence
  Antisense oligo
aggcccaaagauguucuguu

SEQ ID NO: 12349 - RNA, 20 nt, Artificial Sequence
  Antisense oligo
gaaggcccaaagauguucug

SEQ ID NO: 12350 - RNA, 20 nt, Artificial Sequence
  Antisense oligo
gagaaggcccaaagauguuc

SEQ ID NO: 12351 - RNA, 20 nt, Artificial Sequence
  Antisense oligo
ugagaaggcccaaagauguu

SEQ ID NO: 12352 - RNA, 20 nt, Artificial Sequence
  Antisense oligo
cugagaaggcccaaagaugu

SEQ ID NO: 12353 - RNA, 20 nt, Artificial Sequence
  Antisense oligo
uucugagaaggcccaaagau

SEQ ID NO: 12354 - RNA, 20 nt, Artificial Sequence
  Antisense oligo
gggacucagcaucuuccugc

SEQ ID NO: 12355 - RNA, 20 nt, Artificial Sequence
  Antisense oligo
cgggacucagcaucuuccug

SEQ ID NO: 12356 - RNA, 20 nt, Artificial Sequence
  Antisense oligo
uagcgggacucagcaucuuc

SEQ ID NO: 12357 - RNA, 20 nt, Artificial Sequence
  Antisense oligo
guagcgggacucagcaucuu

SEQ ID NO: 12358 - RNA, 20 nt, Artificial Sequence
  Antisense oligo
aguagcgggacucagcaucu

SEQ ID NO: 12359 - RNA, 20 nt, Artificial Sequence
  Antisense oligo
aaguagcgggacucagcauc

SEQ ID NO: 12360 - RNA, 20 nt, Artificial Sequence
  Antisense oligo
uaaguagcgggacucagcau

SEQ ID NO: 12361 - RNA, 20 nt, Artificial Sequence
  Antisense oligo
guaaguagcgggacucagca

SEQ ID NO: 12362 - RNA, 20 nt, Artificial Sequence
  Antisense oligo
aguaaguagcgggacucagc

SEQ ID NO: 12363 - RNA, 20 nt, Artificial Sequence
  Antisense oligo
cacgaguaaguagcgggacu

SEQ ID NO: 12364 - RNA, 20 nt, Artificial Sequence
  Antisense oligo
gcacgaguaaguagcgggac

SEQ ID NO: 12365 - RNA, 20 nt, Artificial Sequence
  Antisense oligo
agcacgaguaaguagcggga

SEQ ID NO: 12366 - RNA, 20 nt, Artificial Sequence
  Antisense oligo
cagcacgaguaaguagcggg

SEQ ID NO: 12367 - RNA, 20 nt, Artificial Sequence
  Antisense oligo
ucagcacgaguaaguagcgg

SEQ ID NO: 12368 - RNA, 20 nt, Artificial Sequence
  Antisense oligo
gucagcacgaguaaguagcg

SEQ ID NO: 12369 - RNA, 20 nt, Artificial Sequence
  Antisense oligo
ggucagcacgaguaaguagc

SEQ ID NO: 12370 - RNA, 20 nt, Artificial Sequence
  Antisense oligo
uggucagcacgaguaaguag

SEQ ID NO: 12371 - RNA, 20 nt, Artificial Sequence
  Antisense oligo
uuggucagcacgaguaagua

SEQ ID NO: 12372 - RNA, 20 nt, Artificial Sequence
  Antisense oligo
uuuggucagcacgaguaagu

SEQ ID NO: 12373 - RNA, 20 nt, Artificial Sequence
  Antisense oligo
uuuuggucagcacgaguaag

SEQ ID NO: 12374 - RNA, 20 nt, Artificial Sequence
  Antisense oligo
cucgaagaaugucugcugca

SEQ ID NO: 12375 - RNA, 20 nt, Artificial Sequence
  Antisense oligo
ccucgaagaaugucugcugc

SEQ ID NO: 12376 - RNA, 20 nt, Artificial Sequence
  Antisense oligo
cccucgaagaaugucugcug

SEQ ID NO: 12377 - RNA, 20 nt, Artificial Sequence
  Antisense oligo
aauaaucuccggcugcuggu

SEQ ID NO: 12378 - RNA, 20 nt, Artificial Sequence
  Antisense oligo
aaauaaucuccggcugcugg

SEQ ID NO: 12379 - RNA, 20 nt, Artificial Sequence
  Antisense oligo
aaaauaaucuccggcugcug

SEQ ID NO: 12380 - RNA, 20 nt, Artificial Sequence
  Antisense oligo
guguacucuugguccuuggg

SEQ ID NO: 12381 - RNA, 20 nt, Artificial Sequence
  Antisense oligo
cuggguguacucuugguccu

SEQ ID NO: 12382 - RNA, 20 nt, Artificial Sequence
  Antisense oligo
gcuggguguacucuuggucc

SEQ ID NO: 12383 - RNA, 20 nt, Artificial Sequence
  Antisense oligo
agcuggguguacucuugguc

SEQ ID NO: 12384 - RNA, 20 nt, Artificial Sequence
  Antisense oligo
gagcuggguguacucuuggu

SEQ ID NO: 12385 - RNA, 20 nt, Artificial Sequence
  Antisense oligo
acacgauugauguuucugca

SEQ ID NO: 12386 - RNA, 20 nt, Artificial Sequence
  Antisense oligo
cacacgauugauguuucugc

SEQ ID NO: 12387 - RNA, 20 nt, Artificial Sequence
  Antisense oligo
ucacacgauugauguuucug

SEQ ID NO: 12388 - RNA, 20 nt, Artificial Sequence
  Antisense oligo
cuucacacgauugauguuuc

SEQ ID NO: 12389 - RNA, 20 nt, Artificial Sequence
  Antisense oligo
gaucuucacacgauugaugu

SEQ ID NO: 12390 - RNA, 20 nt, Artificial Sequence
  Antisense oligo
uugccuguuuccaugcagau

SEQ ID NO: 12391 - RNA, 20 nt, Artificial Sequence
  Antisense oligo
accaucuugccuguuuccau

SEQ ID NO: 12392 - RNA, 20 nt, Artificial Sequence
  Antisense oligo
caccaucuugccuguuucca

SEQ ID NO: 12393 - RNA, 20 nt, Artificial Sequence
  Antisense oligo
gucguagaggcucucguaga

SEQ ID NO: 12394 - RNA, 20 nt, Artificial Sequence
  Antisense oligo
cgucguagaggcucucguag

SEQ ID NO: 12395 - RNA, 20 nt, Artificial Sequence
  Antisense oligo
gcgucguagaggcucucgua

SEQ ID NO: 12396 - RNA, 20 nt, Artificial Sequence
  Antisense oligo
ugcgucguagaggcucucgu

SEQ ID NO: 12397 - RNA, 20 nt, Artificial Sequence
  Antisense oligo
agugcgucguagaggcucuc

SEQ ID NO: 12398 - RNA, 20 nt, Artificial Sequence
  Antisense oligo
gagugcgucguagaggcucu

SEQ ID NO: 12399 - RNA, 20 nt, Artificial Sequence
  Antisense oligo
ugagugcgucguagaggcuc

SEQ ID NO: 12400 - RNA, 20 nt, Artificial Sequence
  Antisense oligo
uugagugcgucguagaggcu

SEQ ID NO: 12401 - RNA, 20 nt, Artificial Sequence
  Antisense oligo
guugagugcgucguagaggc

SEQ ID NO: 12402 - RNA, 20 nt, Artificial Sequence
  Antisense oligo
gguugagugcgucguagagg

SEQ ID NO: 12403 - RNA, 20 nt, Artificial Sequence
  Antisense oligo
ugguugagugcgucguagag

SEQ ID NO: 12404 - RNA, 20 nt, Artificial Sequence
  Antisense oligo
cugguugagugcgucguaga

SEQ ID NO: 12405 - RNA, 20 nt, Artificial Sequence
  Antisense oligo
acugguugagugcgucguag

SEQ ID NO: 12406 - RNA, 20 nt, Artificial Sequence
  Antisense oligo
uacugguugagugcgucgua

SEQ ID NO: 12407 - RNA, 20 nt, Artificial Sequence
  Antisense oligo
guacugguugagugcgucgu

SEQ ID NO: 12408 - RNA, 20 nt, Artificial Sequence
  Antisense oligo
agguccacguacuucuggcc

SEQ ID NO: 12409 - RNA, 20 nt, Artificial Sequence
  Antisense oligo
gagguccacguacuucuggc

SEQ ID NO: 12410 - RNA, 20 nt, Artificial Sequence
  Antisense oligo
cgagguccacguacuucugg

SEQ ID NO: 12411 - RNA, 20 nt, Artificial Sequence
  Antisense oligo
ccgagguccacguacuucug

SEQ ID NO: 12412 - RNA, 20 nt, Artificial Sequence
  Antisense oligo
accgagguccacguacuucu

SEQ ID NO: 12413 - RNA, 20 nt, Artificial Sequence
  Antisense oligo
gaccgagguccacguacuuc

SEQ ID NO: 12414 - RNA, 20 nt, Artificial Sequence
  Antisense oligo
agaccgagguccacguacuu

SEQ ID NO: 12415 - RNA, 20 nt, Artificial Sequence
  Antisense oligo
cagaccgagguccacguacu

SEQ ID NO: 12416 - RNA, 20 nt, Artificial Sequence
  Antisense oligo
acauuugacgcggugggucc

SEQ ID NO: 12417 - RNA, 20 nt, Artificial Sequence
  Antisense oligo
gacauuugacgcgguggguc

SEQ ID NO: 12418 - RNA, 20 nt, Artificial Sequence
  Antisense oligo
cgacauuugacgcggugggu

SEQ ID NO: 12419 - RNA, 20 nt, Artificial Sequence
  Antisense oligo
acccgacauuugacgcggug

SEQ ID NO: 12420 - RNA, 20 nt, Artificial Sequence
  Antisense oligo
aacccgacauuugacgcggu

SEQ ID NO: 12421 - RNA, 20 nt, Artificial Sequence
  Antisense oligo
gaacccgacauuugacgcgg

SEQ ID NO: 12422 - RNA, 20 nt, Artificial Sequence
  Antisense oligo
ugaacccgacauuugacgcg

SEQ ID NO: 12423 - RNA, 20 nt, Artificial Sequence
  Antisense oligo
gugaacccgacauuugacgc

SEQ ID NO: 12424 - RNA, 20 nt, Artificial Sequence
  Antisense oligo
ggugaacccgacauuugacg

SEQ ID NO: 12425 - RNA, 20 nt, Artificial Sequence
  Antisense oligo
gggugaacccgacauuugac

SEQ ID NO: 12426 - RNA, 20 nt, Artificial Sequence
  Antisense oligo
acaaucaggcggaaguuggg

SEQ ID NO: 12427 - RNA, 20 nt, Artificial Sequence
  Antisense oligo
gacaaucaggcggaaguugg

SEQ ID NO: 12428 - RNA, 20 nt, Artificial Sequence
  Antisense oligo
ugacaaucaggcggaaguug

SEQ ID NO: 12429 - RNA, 20 nt, Artificial Sequence
  Antisense oligo
augacaaucaggcggaaguu

SEQ ID NO: 12430 - RNA, 20 nt, Artificial Sequence
  Antisense oligo
aaugacaaucaggcggaagu

SEQ ID NO: 12431 - RNA, 20 nt, Artificial Sequence
  Antisense oligo
caaugacaaucaggcggaag

SEQ ID NO: 12432 - RNA, 20 nt, Artificial Sequence
  Antisense oligo
ucaaugacaaucaggcggaa

SEQ ID NO: 12433 - RNA, 20 nt, Artificial Sequence
  Antisense oligo
uucaaugacaaucaggcgga

SEQ ID NO: 12434 - RNA, 20 nt, Artificial Sequence
  Antisense oligo
cuucaaugacaaucaggcgg

SEQ ID NO: 12435 - RNA, 20 nt, Artificial Sequence
  Antisense oligo
ucuucaaugacaaucaggcg

SEQ ID NO: 12436 - RNA, 20 nt, Artificial Sequence
  Antisense oligo
cuccagccgguuaaugaggg

SEQ ID NO: 12437 - RNA, 20 nt, Artificial Sequence
  Antisense oligo
ucuccagccgguuaaugagg

SEQ ID NO: 12438 - RNA, 20 nt, Artificial Sequence
  Antisense oligo
uucuccagccgguuaaugag

SEQ ID NO: 12439 - RNA, 20 nt, Artificial Sequence
  Antisense oligo
cuucuccagccgguuaauga

SEQ ID NO: 12440 - RNA, 20 nt, Artificial Sequence
  Antisense oligo
gcuucuccagccgguuaaug

SEQ ID NO: 12441 - RNA, 20 nt, Artificial Sequence
  Antisense oligo
ugcuucuccagccgguuaau

SEQ ID NO: 12442 - RNA, 20 nt, Artificial Sequence
  Antisense oligo
gugcuucuccagccgguuaa

SEQ ID NO: 12443 - RNA, 20 nt, Artificial Sequence
  Antisense oligo
agugcuucuccagccgguua

SEQ ID NO: 12444 - RNA, 20 nt, Artificial Sequence
  Antisense oligo
uagugcuucuccagccgguu

SEQ ID NO: 12445 - RNA, 20 nt, Artificial Sequence
  Antisense oligo
auagugcuucuccagccggu

SEQ ID NO: 12446 - RNA, 20 nt, Artificial Sequence
  Antisense oligo
gauagugcuucuccagccgg

SEQ ID NO: 12447 - RNA, 20 nt, Artificial Sequence
  Antisense oligo
cagauagugcuucuccagcc

SEQ ID NO: 12448 - RNA, 20 nt, Artificial Sequence
  Antisense oligo
ccagauagugcuucuccagc

SEQ ID NO: 12449 - RNA, 20 nt, Artificial Sequence
  Antisense oligo
uccagauagugcuucuccag

SEQ ID NO: 12450 - RNA, 20 nt, Artificial Sequence
  Antisense oligo
auauccagauagugcuucuc

SEQ ID NO: 12451 - RNA, 20 nt, Artificial Sequence
  Antisense oligo
cuccagcaccguguugauau

SEQ ID NO: 12452 - RNA, 20 nt, Artificial Sequence
  Antisense oligo
uucuccagcaccguguugau

SEQ ID NO: 12453 - RNA, 20 nt, Artificial Sequence
  Antisense oligo
uuucuccagcaccguguuga

SEQ ID NO: 12454 - RNA, 20 nt, Artificial Sequence
  Antisense oligo
auuucuccagcaccguguug

SEQ ID NO: 12455 - RNA, 20 nt, Artificial Sequence
  Antisense oligo
cauuucuccagcaccguguu

SEQ ID NO: 12456 - RNA, 20 nt, Artificial Sequence
  Antisense oligo
ccauuucuccagcaccgugu

SEQ ID NO: 12457 - RNA, 20 nt, Artificial Sequence
  Antisense oligo
gccauuucuccagcaccgug

SEQ ID NO: 12458 - RNA, 20 nt, Artificial Sequence
  Antisense oligo
ucugccauuucuccagcacc

SEQ ID NO: 12459 - RNA, 20 nt, Artificial Sequence
  Antisense oligo
cgaugcucuucugccauuuc

SEQ ID NO: 12460 - RNA, 20 nt, Artificial Sequence
  Antisense oligo
acgaugcucuucugccauuu

SEQ ID NO: 12461 - RNA, 20 nt, Artificial Sequence
  Antisense oligo
cacgaugcucuucugccauu

SEQ ID NO: 12462 - RNA, 20 nt, Artificial Sequence
  Antisense oligo
uccacgaugcucuucugcca

SEQ ID NO: 12463 - RNA, 20 nt, Artificial Sequence
  Antisense oligo
cuccacgaugcucuucugcc

SEQ ID NO: 12464 - RNA, 20 nt, Artificial Sequence
  Antisense oligo
ccuccacgaugcucuucugc

SEQ ID NO: 12465 - RNA, 20 nt, Artificial Sequence
  Antisense oligo
uccuccacgaugcucuucug

SEQ ID NO: 12466 - RNA, 20 nt, Artificial Sequence
  Antisense oligo
cuccuccacgaugcucuucu

SEQ ID NO: 12467 - RNA, 20 nt, Artificial Sequence
  Antisense oligo
gcuccuccacgaugcucuuc

SEQ ID NO: 12468 - RNA, 20 nt, Artificial Sequence
  Antisense oligo
agcuccuccacgaugcucuu

SEQ ID NO: 12469 - RNA, 20 nt, Artificial Sequence
  Antisense oligo
aacuucuccacccacgcaca

SEQ ID NO: 12470 - RNA, 20 nt, Artificial Sequence
  Antisense oligo
gaacuucuccacccacgcac

SEQ ID NO: 12471 - RNA, 20 nt, Artificial Sequence
  Antisense oligo
augaacuucuccacccacgc

SEQ ID NO: 12472 - RNA, 20 nt, Artificial Sequence
  Antisense oligo
gaugaacuucuccacccacg

SEQ ID NO: 12473 - RNA, 20 nt, Artificial Sequence
  Antisense oligo
uugaugaacuucuccaccca

SEQ ID NO: 12474 - RNA, 20 nt, Artificial Sequence
  Antisense oligo
auugaugaacuucuccaccc

SEQ ID NO: 12475 - RNA, 20 nt, Artificial Sequence
  Antisense oligo
cauugaugaacuucuccacc

SEQ ID NO: 12476 - RNA, 20 nt, Artificial Sequence
  Antisense oligo
acauugaugaacuucuccac

SEQ ID NO: 12477 - RNA, 20 nt, Artificial Sequence
  Antisense oligo
gacauugaugaacuucucca

SEQ ID NO: 12478 - RNA, 20 nt, Artificial Sequence
  Antisense oligo
ugacauugaugaacuucucc

SEQ ID NO: 12479 - RNA, 20 nt, Artificial Sequence
  Antisense oligo
gugcuuugacauugaugaac

SEQ ID NO: 12480 - RNA, 20 nt, Artificial Sequence
  Antisense oligo
cuucuggaaaugaugugcuu

SEQ ID NO: 12481 - RNA, 20 nt, Artificial Sequence
  Antisense oligo
ucuucuggaaaugaugugcu

SEQ ID NO: 12482 - RNA, 20 nt, Artificial Sequence
  Antisense oligo
cucuucuggaaaugaugugc

SEQ ID NO: 12483 - RNA, 20 nt, Artificial Sequence
  Antisense oligo
ugugccucuucuggaaauga

SEQ ID NO: 12484 - RNA, 20 nt, Artificial Sequence
  Antisense oligo
uugugccucuucuggaaaug

SEQ ID NO: 12485 - RNA, 20 nt, Artificial Sequence
  Antisense oligo
uuugugccucuucuggaaau

SEQ ID NO: 12486 - RNA, 20 nt, Artificial Sequence
  Antisense oligo
uguauuugugccucuucugg

SEQ ID NO: 12487 - RNA, 20 nt, Artificial Sequence
  Antisense oligo
gugguagccgaugaagacgu

SEQ ID NO: 12488 - RNA, 20 nt, Artificial Sequence
  Antisense oligo
agugguagccgaugaagacg

SEQ ID NO: 12489 - RNA, 20 nt, Artificial Sequence
  Antisense oligo
gagugguagccgaugaagac

SEQ ID NO: 12490 - RNA, 20 nt, Artificial Sequence
  Antisense oligo
cgagugguagccgaugaaga

SEQ ID NO: 12491 - RNA, 20 nt, Artificial Sequence
  Antisense oligo
ccgagugguagccgaugaag

SEQ ID NO: 12492 - RNA, 20 nt, Artificial Sequence
  Antisense oligo
uccgagugguagccgaugaa

SEQ ID NO: 12493 - RNA, 20 nt, Artificial Sequence
  Antisense oligo
guccgagugguagccgauga

SEQ ID NO: 12494 - RNA, 20 nt, Artificial Sequence
  Antisense oligo
ccugccucucuaugaccugc

SEQ ID NO: 12495 - RNA, 20 nt, Artificial Sequence
  Antisense oligo
cccugccucucuaugaccug

SEQ ID NO: 12496 - RNA, 20 nt, Artificial Sequence
  Antisense oligo
acccugccucucuaugaccu

SEQ ID NO: 12497 - RNA, 20 nt, Artificial Sequence
  Antisense oligo
gggacccugccucucuauga

SEQ ID NO: 12498 - RNA, 20 nt, Artificial Sequence
  Antisense oligo
cgauuuggccuccucagaca

SEQ ID NO: 12499 - RNA, 20 nt, Artificial Sequence
  Antisense oligo
ucgauuuggccuccucagac

SEQ ID NO: 12500 - RNA, 20 nt, Artificial Sequence
  Antisense oligo
gcgcaguucagcaggaucga

SEQ ID NO: 12501 - RNA, 20 nt, Artificial Sequence
  Antisense oligo
agcgcaguucagcaggaucg

SEQ ID NO: 12502 - RNA, 20 nt, Artificial Sequence
  Antisense oligo
uagcgcaguucagcaggauc

SEQ ID NO: 12503 - RNA, 20 nt, Artificial Sequence
  Antisense oligo
guagcgcaguucagcaggau

SEQ ID NO: 12504 - RNA, 20 nt, Artificial Sequence
  Antisense oligo
cguagcgcaguucagcagga

SEQ ID NO: 12505 - RNA, 20 nt, Artificial Sequence
  Antisense oligo
gccucugucugugaaaguac

SEQ ID NO: 12506 - RNA, 20 nt, Artificial Sequence
  Antisense oligo
gaguugugccucugucugug

SEQ ID NO: 12507 - RNA, 20 nt, Artificial Sequence
  Antisense oligo
aggaguugugccucugucug

SEQ ID NO: 12508 - RNA, 20 nt, Artificial Sequence
  Antisense oligo
aaggaguugugccucugucu

SEQ ID NO: 12509 - RNA, 20 nt, Artificial Sequence
  Antisense oligo
aaaggaguugugccucuguc

SEQ ID NO: 12510 - RNA, 20 nt, Artificial Sequence
  Antisense oligo
caaaggaguugugccucugu

SEQ ID NO: 12511 - RNA, 20 nt, Artificial Sequence
  Antisense oligo
gcaaaggaguugugccucug

SEQ ID NO: 12512 - RNA, 20 nt, Artificial Sequence
  Antisense oligo
ugcaaaggaguugugccucu

SEQ ID NO: 12513 - RNA, 20 nt, Artificial Sequence
  Antisense oligo
ucugcaaaggaguugugccu

SEQ ID NO: 12514 - RNA, 20 nt, Artificial Sequence
  Antisense oligo
aucugcaaaggaguugugcc

SEQ ID NO: 12515 - RNA, 20 nt, Artificial Sequence
  Antisense oligo
aaucugcaaaggaguugugc

SEQ ID NO: 12516 - RNA, 20 nt, Artificial Sequence
  Antisense oligo
aaaucugcaaaggaguugug

SEQ ID NO: 12517 - RNA, 20 nt, Artificial Sequence
  Antisense oligo
gaaaucugcaaaggaguugu

SEQ ID NO: 12518 - RNA, 20 nt, Artificial Sequence
  Antisense oligo
ggaaaucugcaaaggaguug

SEQ ID NO: 12519 - RNA, 20 nt, Artificial Sequence
  Antisense oligo
aaggaaaucugcaaaggagu

SEQ ID NO: 12520 - RNA, 20 nt, Artificial Sequence
  Antisense oligo
cugaaggaaaucugcaaagg

SEQ ID NO: 12521 - RNA, 20 nt, Artificial Sequence
  Antisense oligo
ccugaaggaaaucugcaaag

SEQ ID NO: 12522 - RNA, 20 nt, Artificial Sequence
  Antisense oligo
gccugaaggaaaucugcaaa

SEQ ID NO: 12523 - RNA, 20 nt, Artificial Sequence
  Antisense oligo
gugccugaaggaaaucugca

SEQ ID NO: 12524 - RNA, 20 nt, Artificial Sequence
  Antisense oligo
aggugugccugaaggaaauc

SEQ ID NO: 12525 - RNA, 20 nt, Artificial Sequence
  Antisense oligo
ugugaagauggcguggcgcu

SEQ ID NO: 12526 - RNA, 20 nt, Artificial Sequence
  Antisense oligo
ucugugaagauggcguggcg

SEQ ID NO: 12527 - RNA, 20 nt, Artificial Sequence
  Antisense oligo
cucugugaagauggcguggc

SEQ ID NO: 12528 - RNA, 20 nt, Artificial Sequence
  Antisense oligo
ccucugugaagauggcgugg

SEQ ID NO: 12529 - RNA, 20 nt, Artificial Sequence
  Antisense oligo
accucugugaagauggcgug

SEQ ID NO: 12530 - RNA, 20 nt, Artificial Sequence
  Antisense oligo
caccucugugaagauggcgu

SEQ ID NO: 12531 - RNA, 20 nt, Artificial Sequence
  Antisense oligo
gaaagacaaucaccucugug

SEQ ID NO: 12532 - RNA, 20 nt, Artificial Sequence
  Antisense oligo
gcagaaagacaaucaccucu

SEQ ID NO: 12533 - RNA, 20 nt, Artificial Sequence
  Antisense oligo
gugcagaaagacaaucaccu

SEQ ID NO: 12534 - RNA, 20 nt, Artificial Sequence
  Antisense oligo
uuaggacucuugggugacag

SEQ ID NO: 12535 - RNA, 20 nt, Artificial Sequence
  Antisense oligo
uuuaggacucuugggugaca

SEQ ID NO: 12536 - RNA, 20 nt, Artificial Sequence
  Antisense oligo
ucuugaauccugacacgagg

SEQ ID NO: 12537 - RNA, 20 nt, Artificial Sequence
  Antisense oligo
aaucuugaauccugacacga

SEQ ID NO: 12538 - RNA, 20 nt, Artificial Sequence
  Antisense oligo
gaaucuugaauccugacacg

SEQ ID NO: 12539 - RNA, 20 nt, Artificial Sequence
  Antisense oligo
agaaucuugaauccugacac

SEQ ID NO: 12540 - RNA, 20 nt, Artificial Sequence
  Antisense oligo
gggaagaaucuugaauccug

SEQ ID NO: 12541 - RNA, 20 nt, Artificial Sequence
  Antisense oligo
ucagcgucucagcaucuccc

SEQ ID NO: 12542 - RNA, 20 nt, Artificial Sequence
  Antisense oligo
cucagcgucucagcaucucc

SEQ ID NO: 12543 - RNA, 20 nt, Artificial Sequence
  Antisense oligo
gcucagcgucucagcaucuc

SEQ ID NO: 12544 - RNA, 20 nt, Artificial Sequence
  Antisense oligo
agcucagcgucucagcaucu

SEQ ID NO: 12545 - RNA, 20 nt, Artificial Sequence
  Antisense oligo
ggcacucagcaccugguuaa

SEQ ID NO: 12546 - RNA, 20 nt, Artificial Sequence
  Antisense oligo
aggcacucagcaccugguua

SEQ ID NO: 12547 - RNA, 20 nt, Artificial Sequence
  Antisense oligo
cuguguauggugcuguuacc

SEQ ID NO: 12548 - RNA, 20 nt, Artificial Sequence
  Antisense oligo
gaacacuguguauggugcug

SEQ ID NO: 12549 - RNA, 20 nt, Artificial Sequence
  Antisense oligo
ugaacacuguguauggugcu

SEQ ID NO: 12550 - RNA, 20 nt, Artificial Sequence
  Antisense oligo
gugaacacuguguauggugc

SEQ ID NO: 12551 - RNA, 20 nt, Artificial Sequence
  Antisense oligo
ugugaacacuguguauggug

SEQ ID NO: 12552 - RNA, 20 nt, Artificial Sequence
  Antisense oligo
ggugugaacacuguguaugg

SEQ ID NO: 12553 - RNA, 20 nt, Artificial Sequence
  Antisense oligo
uuggugugaacacuguguau

SEQ ID NO: 12554 - RNA, 20 nt, Artificial Sequence
  Antisense oligo
cgugguacuuuauuuguugg

SEQ ID NO: 12555 - RNA, 20 nt, Artificial Sequence
  Antisense oligo
guccugggacgugguacuuu

SEQ ID NO: 12556 - RNA, 20 nt, Artificial Sequence
  Antisense oligo
aguccugggacgugguacuu

SEQ ID NO: 12557 - RNA, 20 nt, Artificial Sequence
  Antisense oligo
caguccugggacgugguacu

SEQ ID NO: 12558 - RNA, 20 nt, Artificial Sequence
  Antisense oligo
ugugcgucccuagugcccuu

SEQ ID NO: 12559 - RNA, 20 nt, Artificial Sequence
  Antisense oligo
aucugugcgucccuagugcc

SEQ ID NO: 12560 - RNA, 20 nt, Artificial Sequence
  Antisense oligo
caucugugcgucccuagugc

SEQ ID NO: 12561 - RNA, 20 nt, Artificial Sequence
  Antisense oligo
ucaucugugcgucccuagug

SEQ ID NO: 12562 - RNA, 20 nt, Artificial Sequence
  Antisense oligo
auucaucugugcgucccuag

SEQ ID NO: 12563 - RNA, 20 nt, Artificial Sequence
  Antisense oligo
gauucaucugugcgucccua

SEQ ID NO: 12564 - RNA, 20 nt, Artificial Sequence
  Antisense oligo
agauucaucugugcgucccu

SEQ ID NO: 12565 - RNA, 20 nt, Artificial Sequence
  Antisense oligo
acaagggcuacagauucauc

SEQ ID NO: 12566 - RNA, 20 nt, Artificial Sequence
  Antisense oligo
aggacaagggcuacagauuc

SEQ ID NO: 12567 - RNA, 20 nt, Artificial Sequence
  Antisense oligo
aaggacaagggcuacagauu

SEQ ID NO: 12568 - RNA, 20 nt, Artificial Sequence
  Antisense oligo
aaaggacaagggcuacagau

SEQ ID NO: 12569 - RNA, 20 nt, Artificial Sequence
  Antisense oligo
cuaacaaaggacaagggcua

SEQ ID NO: 12570 - RNA, 20 nt, Artificial Sequence
  Antisense oligo
gcuaacaaaggacaagggcu

SEQ ID NO: 12571 - RNA, 20 nt, Artificial Sequence
  Antisense oligo
aaugcuaacaaaggacaagg

SEQ ID NO: 12572 - RNA, 20 nt, Artificial Sequence
  Antisense oligo
cucccuaaugcuaacaaagg

SEQ ID NO: 12573 - RNA, 20 nt, Artificial Sequence
  Antisense oligo
gcucccuaaugcuaacaaag

SEQ ID NO: 12574 - RNA, 20 nt, Artificial Sequence
  Antisense oligo
ugcucccuaaugcuaacaaa

SEQ ID NO: 12575 - RNA, 20 nt, Artificial Sequence
  Antisense oligo
augcucccuaaugcuaacaa

SEQ ID NO: 12576 - RNA, 20 nt, Artificial Sequence
  Antisense oligo
ccaugcucccuaaugcuaac

SEQ ID NO: 12577 - RNA, 20 nt, Artificial Sequence
  Antisense oligo
uccaugcucccuaaugcuaa

SEQ ID NO: 12578 - RNA, 20 nt, Artificial Sequence
  Antisense oligo
cuccaugcucccuaaugcua

SEQ ID NO: 12579 - RNA, 20 nt, Artificial Sequence
  Antisense oligo
cucuccaugcucccuaaugc

SEQ ID NO: 12580 - RNA, 20 nt, Artificial Sequence
  Antisense oligo
gucucuccaugcucccuaau

SEQ ID NO: 12581 - RNA, 20 nt, Artificial Sequence
  Antisense oligo
ggucucuccaugcucccuaa

SEQ ID NO: 12582 - RNA, 20 nt, Artificial Sequence
  Antisense oligo
uggucucuccaugcucccua

SEQ ID NO: 12583 - RNA, 20 nt, Artificial Sequence
  Antisense oligo
gugcuggucucuccaugcuc

SEQ ID NO: 12584 - RNA, 20 nt, Artificial Sequence
  Antisense oligo
augugcuggucucuccaugc

SEQ ID NO: 12585 - RNA, 20 nt, Artificial Sequence
  Antisense oligo
ucaugugcuggucucuccau

SEQ ID NO: 12586 - RNA, 20 nt, Artificial Sequence
  Antisense oligo
uucaugugcuggucucucca

SEQ ID NO: 12587 - RNA, 20 nt, Artificial Sequence
  Antisense oligo
guucaugugcuggucucucc

SEQ ID NO: 12588 - RNA, 20 nt, Artificial Sequence
  Antisense oligo
uguucaugugcuggucucuc

SEQ ID NO: 12589 - RNA, 20 nt, Artificial Sequence
  Antisense oligo
cuguucaugugcuggucucu

SEQ ID NO: 12590 - RNA, 20 nt, Artificial Sequence
  Antisense oligo
ucuguucaugugcuggucuc

SEQ ID NO: 12591 - RNA, 20 nt, Artificial Sequence
  Antisense oligo
uggcaucuguucaugugcug

SEQ ID NO: 12592 - RNA, 20 nt, Artificial Sequence
  Antisense oligo
gauauugauggcaucuguuc

SEQ ID NO: 12593 - RNA, 20 nt, Artificial Sequence
  Antisense oligo
cucuaagcacagcauuuauc

SEQ ID NO: 12594 - RNA, 20 nt, Artificial Sequence
  Antisense oligo
ccucuaagcacagcauuuau

SEQ ID NO: 12595 - RNA, 20 nt, Artificial Sequence
  Antisense oligo
gccucuaagcacagcauuua

SEQ ID NO: 12596 - RNA, 20 nt, Artificial Sequence
  Antisense oligo
agcucgcauccuggucugca

SEQ ID NO: 12597 - RNA, 20 nt, Artificial Sequence
  Antisense oligo
uagggaacaucucaucugag

SEQ ID NO: 12598 - RNA, 20 nt, Artificial Sequence
  Antisense oligo
ucagccuacaaucccuuccc

SEQ ID NO: 12599 - RNA, 20 nt, Artificial Sequence
  Antisense oligo
gcccucagccuacaaucccu

SEQ ID NO: 12600 - RNA, 20 nt, Artificial Sequence
  Antisense oligo
ccuaagagcugucagcggcu

SEQ ID NO: 12601 - RNA, 20 nt, Artificial Sequence
  Antisense oligo
acccuaagagcugucagcgg

SEQ ID NO: 12602 - RNA, 20 nt, Artificial Sequence
  Antisense oligo
aacccuaagagcugucagcg

SEQ ID NO: 12603 - RNA, 20 nt, Artificial Sequence
  Antisense oligo
gaacccuaagagcugucagc

SEQ ID NO: 12604 - RNA, 20 nt, Artificial Sequence
  Antisense oligo
uugaacccuaagagcuguca

SEQ ID NO: 12605 - RNA, 20 nt, Artificial Sequence
  Antisense oligo
cuugaacccuaagagcuguc

SEQ ID NO: 12606 - RNA, 20 nt, Artificial Sequence
  Antisense oligo
ccuugaacccuaagagcugu

SEQ ID NO: 12607 - RNA, 20 nt, Artificial Sequence
  Antisense oligo
gccuugaacccuaagagcug

SEQ ID NO: 12608 - RNA, 20 nt, Artificial Sequence
  Antisense oligo
agccuugaacccuaagagcu

SEQ ID NO: 12609 - RNA, 20 nt, Artificial Sequence
  Antisense oligo
acagccuugaacccuaagag

SEQ ID NO: 12610 - RNA, 20 nt, Artificial Sequence
  Antisense oligo
aucucagcacuacagccuug

SEQ ID NO: 12611 - RNA, 20 nt, Artificial Sequence
  Antisense oligo
caucucagcacuacagccuu

SEQ ID NO: 12612 - RNA, 20 nt, Artificial Sequence
  Antisense oligo
ccaucucagcacuacagccu

SEQ ID NO: 12613 - RNA, 20 nt, Artificial Sequence
  Antisense oligo
cccaucucagcacuacagcc

SEQ ID NO: 12614 - RNA, 20 nt, Artificial Sequence
  Antisense oligo
ucugacugcaccucaucgcc

SEQ ID NO: 12615 - RNA, 20 nt, Artificial Sequence
  Antisense oligo
ucucucugacugcaccucau

SEQ ID NO: 12616 - RNA, 20 nt, Artificial Sequence
  Antisense oligo
uaguucucucugacugcacc

SEQ ID NO: 12617 - RNA, 20 nt, Artificial Sequence
  Antisense oligo
gagggccuccaguaguucuc

SEQ ID NO: 12618 - RNA, 20 nt, Artificial Sequence
  Antisense oligo
ugagggccuccaguaguucu

SEQ ID NO: 12619 - RNA, 20 nt, Artificial Sequence
  Antisense oligo
cugagggccuccaguaguuc

SEQ ID NO: 12620 - RNA, 20 nt, Artificial Sequence
  Antisense oligo
uccauagggcugagaugugg

SEQ ID NO: 12621 - RNA, 20 nt, Artificial Sequence
  Antisense oligo
cuccauagggcugagaugug

SEQ ID NO: 12622 - RNA, 20 nt, Artificial Sequence
  Antisense oligo
gcuccauagggcugagaugu

SEQ ID NO: 12623 - RNA, 20 nt, Artificial Sequence
  Antisense oligo
cgcuccauagggcugagaug

SEQ ID NO: 12624 - RNA, 20 nt, Artificial Sequence
  Antisense oligo
ccgcuccauagggcugagau

SEQ ID NO: 12625 - RNA, 20 nt, Artificial Sequence
  Antisense oligo
agacaagcgugccuccagug

SEQ ID NO: 12626 - RNA, 20 nt, Artificial Sequence
  Antisense oligo
gagacaagcgugccuccagu

SEQ ID NO: 12627 - RNA, 20 nt, Artificial Sequence
  Antisense oligo
caucagacucccuucaccca

SEQ ID NO: 12628 - RNA, 20 nt, Artificial Sequence
  Antisense oligo
ucaucagacucccuucaccc

SEQ ID NO: 12629 - RNA, 20 nt, Artificial Sequence
  Antisense oligo
uucaucagacucccuucacc

SEQ ID NO: 12630 - RNA, 20 nt, Artificial Sequence
  Antisense oligo
cuuucaucagacucccuuca

SEQ ID NO: 12631 - RNA, 20 nt, Artificial Sequence
  Antisense oligo
agccuuucaucagacucccu

SEQ ID NO: 12632 - RNA, 20 nt, Artificial Sequence
  Antisense oligo
caacagccuuucaucagacu

SEQ ID NO: 12633 - RNA, 20 nt, Artificial Sequence
  Antisense oligo
acaacagccuuucaucagac

SEQ ID NO: 12634 - RNA, 20 nt, Artificial Sequence
  Antisense oligo
ucuuuuccacaacagccuuu

SEQ ID NO: 12635 - RNA, 20 nt, Artificial Sequence
  Antisense oligo
cgucuuuuccacaacagccu

SEQ ID NO: 12636 - RNA, 20 nt, Artificial Sequence
  Antisense oligo
ccaucugcuccucuccuuug

SEQ ID NO: 12637 - RNA, 20 nt, Artificial Sequence
  Antisense oligo
guuccaucugcuccucuccu

SEQ ID NO: 12638 - RNA, 20 nt, Artificial Sequence
  Antisense oligo
ucgguuccaucugcuccucu

SEQ ID NO: 12639 - RNA, 20 nt, Artificial Sequence
  Antisense oligo
ucucgguuccaucugcuccu

SEQ ID NO: 12640 - RNA, 20 nt, Artificial Sequence
  Antisense oligo
cucucgguuccaucugcucc

SEQ ID NO: 12641 - RNA, 20 nt, Artificial Sequence
  Antisense oligo
ucucucgguuccaucugcuc

SEQ ID NO: 12642 - RNA, 20 nt, Artificial Sequence
  Antisense oligo
aucucucgguuccaucugcu

SEQ ID NO: 12643 - RNA, 20 nt, Artificial Sequence
  Antisense oligo
uaucucucgguuccaucugc

SEQ ID NO: 12644 - RNA, 20 nt, Artificial Sequence
  Antisense oligo
guaucucucgguuccaucug

SEQ ID NO: 12645 - RNA, 20 nt, Artificial Sequence
  Antisense oligo
aguaucucucgguuccaucu

SEQ ID NO: 12646 - RNA, 20 nt, Artificial Sequence
  Antisense oligo
gaguaucucucgguuccauc

SEQ ID NO: 12647 - RNA, 20 nt, Artificial Sequence
  Antisense oligo
ugaguaucucucgguuccau

SEQ ID NO: 12648 - RNA, 20 nt, Artificial Sequence
  Antisense oligo
cugaguaucucucgguucca

SEQ ID NO: 12649 - RNA, 20 nt, Artificial Sequence
  Antisense oligo
ccugaguaucucucgguucc

SEQ ID NO: 12650 - RNA, 20 nt, Artificial Sequence
  Antisense oligo
uccugaguaucucucgguuc

SEQ ID NO: 12651 - RNA, 20 nt, Artificial Sequence
  Antisense oligo
cuccugaguaucucucgguu

SEQ ID NO: 12652 - RNA, 20 nt, Artificial Sequence
  Antisense oligo
ccuccugaguaucucucggu

SEQ ID NO: 12653 - RNA, 20 nt, Artificial Sequence
  Antisense oligo
gccuccugaguaucucucgg

SEQ ID NO: 12654 - RNA, 20 nt, Artificial Sequence
  Antisense oligo
aauugccuccugaguaucuc

SEQ ID NO: 12655 - RNA, 20 nt, Artificial Sequence
  Antisense oligo
ccaaauugccuccugaguau

SEQ ID NO: 12656 - RNA, 20 nt, Artificial Sequence
  Antisense oligo
gccaaauugccuccugagua

SEQ ID NO: 12657 - RNA, 20 nt, Artificial Sequence
  Antisense oligo
ugccaaauugccuccugagu

SEQ ID NO: 12658 - RNA, 20 nt, Artificial Sequence
  Antisense oligo
gcccugccaaauugccuccu

SEQ ID NO: 12659 - RNA, 20 nt, Artificial Sequence
  Antisense oligo
uccacucaucuaaggaggaa

SEQ ID NO: 12660 - RNA, 20 nt, Artificial Sequence
  Antisense oligo
guccacucaucuaaggagga

SEQ ID NO: 12661 - RNA, 20 nt, Artificial Sequence
  Antisense oligo
uguccacucaucuaaggagg

SEQ ID NO: 12662 - RNA, 20 nt, Artificial Sequence
  Antisense oligo
auguccacucaucuaaggag

SEQ ID NO: 12663 - RNA, 20 nt, Artificial Sequence
  Antisense oligo
aauguccacucaucuaagga

SEQ ID NO: 12664 - RNA, 20 nt, Artificial Sequence
  Antisense oligo
caauguccacucaucuaagg

SEQ ID NO: 12665 - RNA, 20 nt, Artificial Sequence
  Antisense oligo
gcaauguccacucaucuaag

SEQ ID NO: 12666 - RNA, 20 nt, Artificial Sequence
  Antisense oligo
agcaauguccacucaucuaa

SEQ ID NO: 12667 - RNA, 20 nt, Artificial Sequence
  Antisense oligo
gaugaagcaauguccacuca

SEQ ID NO: 12668 - RNA, 20 nt, Artificial Sequence
  Antisense oligo
ugaugaagcaauguccacuc

SEQ ID NO: 12669 - RNA, 20 nt, Artificial Sequence
  Antisense oligo
augaugaagcaauguccacu

SEQ ID NO: 12670 - RNA, 20 nt, Artificial Sequence
  Antisense oligo
caugaugaagcaauguccac

SEQ ID NO: 12671 - RNA, 20 nt, Artificial Sequence
  Antisense oligo
uuccugcgguaucugucaug

SEQ ID NO: 12672 - RNA, 20 nt, Artificial Sequence
  Antisense oligo
guuccugcgguaucugucau

SEQ ID NO: 12673 - RNA, 20 nt, Artificial Sequence
  Antisense oligo
acuagccucccacaaccugc

SEQ ID NO: 12674 - RNA, 20 nt, Artificial Sequence
  Antisense oligo
ucacuagccucccacaaccu

SEQ ID NO: 12675 - RNA, 20 nt, Artificial Sequence
  Antisense oligo
aucaucacuagccucccaca

SEQ ID NO: 12676 - RNA, 20 nt, Artificial Sequence
  Antisense oligo
acaucaucacuagccuccca

SEQ ID NO: 12677 - RNA, 20 nt, Artificial Sequence
  Antisense oligo
gacaucaucacuagccuccc

SEQ ID NO: 12678 - RNA, 20 nt, Artificial Sequence
  Antisense oligo
ggacaucaucacuagccucc

SEQ ID NO: 12679 - RNA, 20 nt, Artificial Sequence
  Antisense oligo
cggacaucaucacuagccuc

SEQ ID NO: 12680 - RNA, 20 nt, Artificial Sequence
  Antisense oligo
gcggacaucaucacuagccu

SEQ ID NO: 12681 - RNA, 20 nt, Artificial Sequence
  Antisense oligo
ggcggacaucaucacuagcc

SEQ ID NO: 12682 - RNA, 20 nt, Artificial Sequence
  Antisense oligo
ucagauuccuacguccagcu

SEQ ID NO: 12683 - RNA, 20 nt, Artificial Sequence
  Antisense oligo
cucagauuccuacguccagc

SEQ ID NO: 12684 - RNA, 20 nt, Artificial Sequence
  Antisense oligo
gcucagauuccuacguccag

SEQ ID NO: 12685 - RNA, 20 nt, Artificial Sequence
  Antisense oligo
agcucagauuccuacgucca

SEQ ID NO: 12686 - RNA, 20 nt, Artificial Sequence
  Antisense oligo
aaucccugccucaccacuga

SEQ ID NO: 12687 - RNA, 20 nt, Artificial Sequence
  Antisense oligo
gcugcucuagcccaggaauc

SEQ ID NO: 12688 - RNA, 20 nt, Artificial Sequence
  Antisense oligo
cugcugcucuagcccaggaa

SEQ ID NO: 12689 - RNA, 20 nt, Artificial Sequence
  Antisense oligo
cacagugcaagucgaaacgu

SEQ ID NO: 12690 - RNA, 20 nt, Artificial Sequence
  Antisense oligo
ucacagugcaagucgaaacg

SEQ ID NO: 12691 - RNA, 20 nt, Artificial Sequence
  Antisense oligo
aucacagugcaagucgaaac

SEQ ID NO: 12692 - RNA, 20 nt, Artificial Sequence
  Antisense oligo
ccaucacagugcaagucgaa

SEQ ID NO: 12693 - RNA, 20 nt, Artificial Sequence
  Antisense oligo
cccaucacagugcaagucga

SEQ ID NO: 12694 - RNA, 20 nt, Artificial Sequence
  Antisense oligo
ccugucccaaaggucacucc

SEQ ID NO: 12695 - RNA, 20 nt, Artificial Sequence
  Antisense oligo
cuccugucccaaaggucacu

SEQ ID NO: 12696 - RNA, 20 nt, Artificial Sequence
  Antisense oligo
auucuccugucccaaagguc

SEQ ID NO: 12697 - RNA, 20 nt, Artificial Sequence
  Antisense oligo
aauucuccugucccaaaggu

SEQ ID NO: 12698 - RNA, 20 nt, Artificial Sequence
  Antisense oligo
caauucuccugucccaaagg

SEQ ID NO: 12699 - RNA, 20 nt, Artificial Sequence
  Antisense oligo
gcaauucuccugucccaaag

SEQ ID NO: 12700 - RNA, 20 nt, Artificial Sequence
  Antisense oligo
agcaauucuccugucccaaa

SEQ ID NO: 12701 - RNA, 20 nt, Artificial Sequence
  Antisense oligo
cagcaauucuccugucccaa

SEQ ID NO: 12702 - RNA, 20 nt, Artificial Sequence
  Antisense oligo
gucagcaauucuccuguccc

SEQ ID NO: 12703 - RNA, 20 nt, Artificial Sequence
  Antisense oligo
ugucagcaauucuccugucc

SEQ ID NO: 12704 - RNA, 20 nt, Artificial Sequence
  Antisense oligo
augucagcaauucuccuguc

SEQ ID NO: 12705 - RNA, 20 nt, Artificial Sequence
  Antisense oligo
gaugucagcaauucuccugu

SEQ ID NO: 12706 - RNA, 20 nt, Artificial Sequence
  Antisense oligo
cagaugucagcaauucuccu

SEQ ID NO: 12707 - RNA, 20 nt, Artificial Sequence
  Antisense oligo
aguucgugguuggugcuguc

SEQ ID NO: 12708 - RNA, 20 nt, Artificial Sequence
  Antisense oligo
gaguucgugguuggugcugu

SEQ ID NO: 12709 - RNA, 20 nt, Artificial Sequence
  Antisense oligo
ggaguucgugguuggugcug

SEQ ID NO: 12710 - RNA, 20 nt, Artificial Sequence
  Antisense oligo
uggaguucgugguuggugcu

SEQ ID NO: 12711 - RNA, 20 nt, Artificial Sequence
  Antisense oligo
auggaguucgugguuggugc

SEQ ID NO: 12712 - RNA, 20 nt, Artificial Sequence
  Antisense oligo
gauggaguucgugguuggug

SEQ ID NO: 12713 - RNA, 20 nt, Artificial Sequence
  Antisense oligo
agauggaguucgugguuggu

SEQ ID NO: 12714 - RNA, 20 nt, Artificial Sequence
  Antisense oligo
cagauggaguucgugguugg

SEQ ID NO: 12715 - RNA, 20 nt, Artificial Sequence
  Antisense oligo
ucagauggaguucgugguug

SEQ ID NO: 12716 - RNA, 20 nt, Artificial Sequence
  Antisense oligo
uucagauggaguucgugguu

SEQ ID NO: 12717 - RNA, 20 nt, Artificial Sequence
  Antisense oligo
uuucagauggaguucguggu

SEQ ID NO: 12718 - RNA, 20 nt, Artificial Sequence
  Antisense oligo
cuuucagauggaguucgugg

SEQ ID NO: 12719 - RNA, 20 nt, Artificial Sequence
  Antisense oligo
caugcuuucagauggaguuc

SEQ ID NO: 12720 - RNA, 20 nt, Artificial Sequence
  Antisense oligo
acucaugcuuucagauggag

SEQ ID NO: 12721 - RNA, 20 nt, Artificial Sequence
  Antisense oligo
gacucaugcuuucagaugga

SEQ ID NO: 12722 - RNA, 20 nt, Artificial Sequence
  Antisense oligo
cgacucaugcuuucagaugg

SEQ ID NO: 12723 - RNA, 20 nt, Artificial Sequence
  Antisense oligo
acgacucaugcuuucagaug

SEQ ID NO: 12724 - RNA, 20 nt, Artificial Sequence
  Antisense oligo
guacgacucaugcuuucaga

SEQ ID NO: 12725 - RNA, 20 nt, Artificial Sequence
  Antisense oligo
aguacgacucaugcuuucag

SEQ ID NO: 12726 - RNA, 20 nt, Artificial Sequence
  Antisense oligo
uaguacgacucaugcuuuca

SEQ ID NO: 12727 - RNA, 20 nt, Artificial Sequence
  Antisense oligo
auaguacgacucaugcuuuc

SEQ ID NO: 12728 - RNA, 20 nt, Artificial Sequence
  Antisense oligo
guuauaguacgacucaugcu

SEQ ID NO: 12729 - RNA, 20 nt, Artificial Sequence
  Antisense oligo
uguuauaguacgacucaugc

SEQ ID NO: 12730 - RNA, 20 nt, Artificial Sequence
  Antisense oligo
cuguuauaguacgacucaug

SEQ ID NO: 12731 - RNA, 20 nt, Artificial Sequence
  Antisense oligo
ccuguuauaguacgacucau

SEQ ID NO: 12732 - RNA, 20 nt, Artificial Sequence
  Antisense oligo
uccuguuauaguacgacuca

SEQ ID NO: 12733 - RNA, 20 nt, Artificial Sequence
  Antisense oligo
uuccuguuauaguacgacuc

SEQ ID NO: 12734 - RNA, 20 nt, Artificial Sequence
  Antisense oligo
ccauuuccuguuauaguacg

SEQ ID NO: 12735 - RNA, 20 nt, Artificial Sequence
  Antisense oligo
ucccuuagggcucagcacaa

SEQ ID NO: 12736 - RNA, 20 nt, Artificial Sequence
  Antisense oligo
aucccuuagggcucagcaca

SEQ ID NO: 12737 - RNA, 20 nt, Artificial Sequence
  Antisense oligo
gaucccuuagggcucagcac

SEQ ID NO: 12738 - RNA, 20 nt, Artificial Sequence
  Antisense oligo
ugaucccuuagggcucagca

SEQ ID NO: 12739 - RNA, 20 nt, Artificial Sequence
  Antisense oligo
aggcauuggagagacgaccc

SEQ ID NO: 12740 - RNA, 20 nt, Artificial Sequence
  Antisense oligo
cuacagggccaaaggcauug

SEQ ID NO: 12741 - RNA, 20 nt, Artificial Sequence
  Antisense oligo
ccuacagggccaaaggcauu

SEQ ID NO: 12742 - RNA, 20 nt, Artificial Sequence
  Antisense oligo
cccuacagggccaaaggcau

SEQ ID NO: 12743 - RNA, 20 nt, Artificial Sequence
  Antisense oligo
uucccaaaacacggcagcgc

SEQ ID NO: 12744 - RNA, 20 nt, Artificial Sequence
  Antisense oligo
uuucccaaaacacggcagcg

SEQ ID NO: 12745 - RNA, 20 nt, Artificial Sequence
  Antisense oligo
cccaaaggaguuucccaaaa

SEQ ID NO: 12746 - RNA, 20 nt, Artificial Sequence
  Antisense oligo
acccaaaggaguuucccaaa

SEQ ID NO: 12747 - RNA, 20 nt, Artificial Sequence
  Antisense oligo
aacccaaaggaguuucccaa

SEQ ID NO: 12748 - RNA, 20 nt, Artificial Sequence
  Antisense oligo
aauccaaacccaaaggaguu

SEQ ID NO: 12749 - RNA, 20 nt, Artificial Sequence
  Antisense oligo
gaauccaaacccaaaggagu

SEQ ID NO: 12750 - RNA, 20 nt, Artificial Sequence
  Antisense oligo
gcaagucugcugccagguuu

SEQ ID NO: 12751 - RNA, 20 nt, Artificial Sequence
  Antisense oligo
ugcaagucugcugccagguu

SEQ ID NO: 12752 - RNA, 20 nt, Artificial Sequence
  Antisense oligo
gacuucaaggaaagguugca

SEQ ID NO: 12753 - RNA, 20 nt, Artificial Sequence
  Antisense oligo
agacuucaaggaaagguugc

SEQ ID NO: 12754 - RNA, 20 nt, Artificial Sequence
  Antisense oligo
cagacuucaaggaaagguug

SEQ ID NO: 12755 - RNA, 20 nt, Artificial Sequence
  Antisense oligo
ccagacuucaaggaaagguu

SEQ ID NO: 12756 - RNA, 20 nt, Artificial Sequence
  Antisense oligo
ugccagacuucaaggaaagg

SEQ ID NO: 12757 - RNA, 20 nt, Artificial Sequence
  Antisense oligo
uugccagacuucaaggaaag

SEQ ID NO: 12758 - RNA, 20 nt, Artificial Sequence
  Antisense oligo
caaauuacuugccagacuuc

SEQ ID NO: 12759 - RNA, 20 nt, Artificial Sequence
  Antisense oligo
guuagcagccuggagaaagu

SEQ ID NO: 12760 - RNA, 20 nt, Artificial Sequence
  Antisense oligo
cuuguuagcagccuggagaa

SEQ ID NO: 12761 - RNA, 20 nt, Artificial Sequence
  Antisense oligo
acuuguuagcagccuggaga

SEQ ID NO: 12762 - RNA, 20 nt, Artificial Sequence
  Antisense oligo
gacuuguuagcagccuggag

SEQ ID NO: 12763 - RNA, 20 nt, Artificial Sequence
  Antisense oligo
ugacuuguuagcagccugga

SEQ ID NO: 12764 - RNA, 20 nt, Artificial Sequence
  Antisense oligo
gugacuuguuagcagccugg

SEQ ID NO: 12765 - RNA, 20 nt, Artificial Sequence
  Antisense oligo
cgugacuuguuagcagccug

SEQ ID NO: 12766 - RNA, 20 nt, Artificial Sequence
  Antisense oligo
ucgugacuuguuagcagccu

SEQ ID NO: 12767 - RNA, 20 nt, Artificial Sequence
  Antisense oligo
gucgugacuuguuagcagcc

SEQ ID NO: 12768 - RNA, 20 nt, Artificial Sequence
  Antisense oligo
agucgugacuuguuagcagc

SEQ ID NO: 12769 - RNA, 20 nt, Artificial Sequence
  Antisense oligo
cagucgugacuuguuagcag

SEQ ID NO: 12770 - RNA, 20 nt, Artificial Sequence
  Antisense oligo
acagucgugacuuguuagca

SEQ ID NO: 12771 - RNA, 20 nt, Artificial Sequence
  Antisense oligo
cacagucgugacuuguuagc

SEQ ID NO: 12772 - RNA, 20 nt, Artificial Sequence
  Antisense oligo
cugugaccucugauucuaaa

SEQ ID NO: 12773 - RNA, 20 nt, Artificial Sequence
  Antisense oligo
ccugugaccucugauucuaa

SEQ ID NO: 12774 - RNA, 20 nt, Artificial Sequence
  Antisense oligo
uuucggagcccugccuguga

SEQ ID NO: 12775 - RNA, 20 nt, Artificial Sequence
  Antisense oligo
aguguggguuucggagcccu

SEQ ID NO: 12776 - RNA, 20 nt, Artificial Sequence
  Antisense oligo
aggaguguggguuucggagc

SEQ ID NO: 12777 - RNA, 20 nt, Artificial Sequence
  Antisense oligo
acaggaguguggguuucgga

SEQ ID NO: 12778 - RNA, 20 nt, Artificial Sequence
  Antisense oligo
cucggugucaaacugcugca

SEQ ID NO: 12779 - RNA, 20 nt, Artificial Sequence
  Antisense oligo
acucggugucaaacugcugc

SEQ ID NO: 12780 - RNA, 20 nt, Artificial Sequence
  Antisense oligo
uacucggugucaaacugcug

SEQ ID NO: 12781 - RNA, 20 nt, Artificial Sequence
  Antisense oligo
guacucggugucaaacugcu

SEQ ID NO: 12782 - RNA, 20 nt, Artificial Sequence
  Antisense oligo
cggacuucuuugaggaauga

SEQ ID NO: 12783 - RNA, 20 nt, Artificial Sequence
  Antisense oligo
caccggacuucuuugaggaa

SEQ ID NO: 12784 - RNA, 20 nt, Artificial Sequence
  Antisense oligo
ucaccggacuucuuugagga

SEQ ID NO: 12785 - RNA, 20 nt, Artificial Sequence
  Antisense oligo
accucaccggacuucuuuga

SEQ ID NO: 12786 - RNA, 20 nt, Artificial Sequence
  Antisense oligo
aaccucaccggacuucuuug

SEQ ID NO: 12787 - RNA, 20 nt, Artificial Sequence
  Antisense oligo
gaaccucaccggacuucuuu

SEQ ID NO: 12788 - RNA, 20 nt, Artificial Sequence
  Antisense oligo
ggaaccucaccggacuucuu

SEQ ID NO: 12789 - RNA, 20 nt, Artificial Sequence
  Antisense oligo
gggaaccucaccggacuucu

SEQ ID NO: 12790 - RNA, 20 nt, Artificial Sequence
  Antisense oligo
agggaaccucaccggacuuc

SEQ ID NO: 12791 - RNA, 20 nt, Artificial Sequence
  Antisense oligo
cagggaaccucaccggacuu

SEQ ID NO: 12792 - RNA, 20 nt, Artificial Sequence
  Antisense oligo
uaccaucgccacgcagaagc

SEQ ID NO: 12793 - RNA, 20 nt, Artificial Sequence
  Antisense oligo
guaccaucgccacgcagaag

SEQ ID NO: 12794 - RNA, 20 nt, Artificial Sequence
  Antisense oligo
uguggcgcucauuaaccggc

SEQ ID NO: 12795 - RNA, 20 nt, Artificial Sequence
  Antisense oligo
cuguggcgcucauuaaccgg

SEQ ID NO: 12796 - RNA, 20 nt, Artificial Sequence
  Antisense oligo
acuguggcgcucauuaaccg

SEQ ID NO: 12797 - RNA, 20 nt, Artificial Sequence
  Antisense oligo
gacuguggcgcucauuaacc

SEQ ID NO: 12798 - RNA, 20 nt, Artificial Sequence
  Antisense oligo
ugacuguggcgcucauuaac

SEQ ID NO: 12799 - RNA, 20 nt, Artificial Sequence
  Antisense oligo
gugacuguggcgcucauuaa

SEQ ID NO: 12800 - RNA, 20 nt, Artificial Sequence
  Antisense oligo
cgugacuguggcgcucauua

SEQ ID NO: 12801 - RNA, 20 nt, Artificial Sequence
  Antisense oligo
acgugacuguggcgcucauu

SEQ ID NO: 12802 - RNA, 20 nt, Artificial Sequence
  Antisense oligo
gaucuauuucacagucacgu

SEQ ID NO: 12803 - RNA, 20 nt, Artificial Sequence
  Antisense oligo
caaggaucuauuucacaguc

SEQ ID NO: 12804 - RNA, 20 nt, Artificial Sequence
  Antisense oligo
ggagagauuuaacaaggauc

SEQ ID NO: 12805 - RNA, 20 nt, Artificial Sequence
  Antisense oligo
gggagagauuuaacaaggau

SEQ ID NO: 12806 - RNA, 20 nt, Artificial Sequence
  Antisense oligo
ugggagagauuuaacaagga

SEQ ID NO: 12807 - RNA, 20 nt, Artificial Sequence
  Antisense oligo
cugggagagauuuaacaagg

SEQ ID NO: 12808 - RNA, 20 nt, Artificial Sequence
  Antisense oligo
gcugggagagauuuaacaag

SEQ ID NO: 12809 - RNA, 20 nt, Artificial Sequence
  Antisense oligo
augagagggaugcugggaga

SEQ ID NO: 12810 - RNA, 20 nt, Artificial Sequence
  Antisense oligo
agaugagagggaugcuggga

SEQ ID NO: 12811 - RNA, 20 nt, Artificial Sequence
  Antisense oligo
gagaugagagggaugcuggg

SEQ ID NO: 12812 - RNA, 20 nt, Artificial Sequence
  Antisense oligo
ggagaugagagggaugcugg

SEQ ID NO: 12813 - RNA, 20 nt, Artificial Sequence
  Antisense oligo
uggagaugagagggaugcug

SEQ ID NO: 12814 - RNA, 20 nt, Artificial Sequence
  Antisense oligo
auggagaugagagggaugcu

SEQ ID NO: 12815 - RNA, 20 nt, Artificial Sequence
  Antisense oligo
cagaagaugauggagaugag

SEQ ID NO: 12816 - RNA, 20 nt, Artificial Sequence
  Antisense oligo
uugcagaagaugauggagau

SEQ ID NO: 12817 - RNA, 20 nt, Artificial Sequence
  Antisense oligo
guugcagaagaugauggaga

SEQ ID NO: 12818 - RNA, 20 nt, Artificial Sequence
  Antisense oligo
aggauguuaggccagacacc

SEQ ID NO: 12819 - RNA, 20 nt, Artificial Sequence
  Antisense oligo
ggaggauguuaggccagaca

SEQ ID NO: 12820 - RNA, 20 nt, Artificial Sequence
  Antisense oligo
aggaggauguuaggccagac

SEQ ID NO: 12821 - RNA, 20 nt, Artificial Sequence
  Antisense oligo
gaggaggauguuaggccaga

SEQ ID NO: 12822 - RNA, 20 nt, Artificial Sequence
  Antisense oligo
ggaggaggauguuaggccag

SEQ ID NO: 12823 - RNA, 20 nt, Artificial Sequence
  Antisense oligo
ucggaggaggauguuaggcc

SEQ ID NO: 12824 - RNA, 20 nt, Artificial Sequence
  Antisense oligo
cucggaggaggauguuaggc

SEQ ID NO: 12825 - RNA, 20 nt, Artificial Sequence
  Antisense oligo
ucucggaggaggauguuagg

SEQ ID NO: 12826 - RNA, 20 nt, Artificial Sequence
  Antisense oligo
cucucggaggaggauguuag

SEQ ID NO: 12827 - RNA, 20 nt, Artificial Sequence
  Antisense oligo
gcucucggaggaggauguua

SEQ ID NO: 12828 - RNA, 20 nt, Artificial Sequence
  Antisense oligo
ugcucucggaggaggauguu

SEQ ID NO: 12829 - RNA, 20 nt, Artificial Sequence
  Antisense oligo
gugcucucggaggaggaugu

SEQ ID NO: 12830 - RNA, 20 nt, Artificial Sequence
  Antisense oligo
uggugcucucggaggaggau

SEQ ID NO: 12831 - RNA, 20 nt, Artificial Sequence
  Antisense oligo
aggauggugcucucggagga

SEQ ID NO: 12832 - RNA, 20 nt, Artificial Sequence
  Antisense oligo
agguccgaggauggugcucu

SEQ ID NO: 12833 - RNA, 20 nt, Artificial Sequence
  Antisense oligo
aacgagguccgaggauggug

SEQ ID NO: 12834 - RNA, 20 nt, Artificial Sequence
  Antisense oligo
cuaacgagguccgaggaugg

SEQ ID NO: 12835 - RNA, 20 nt, Artificial Sequence
  Antisense oligo
ccuaacgagguccgaggaug

SEQ ID NO: 12836 - RNA, 20 nt, Artificial Sequence
  Antisense oligo
ggaggaaacccaaggaaugc

SEQ ID NO: 12837 - RNA, 20 nt, Artificial Sequence
  Antisense oligo
aagaaacagcuacucaggua

SEQ ID NO: 12838 - RNA, 20 nt, Artificial Sequence
  Antisense oligo
aaagaaacagcuacucaggu

SEQ ID NO: 12839 - RNA, 20 nt, Artificial Sequence
  Antisense oligo
caaagaaacagcuacucagg

SEQ ID NO: 12840 - RNA, 20 nt, Artificial Sequence
  Antisense oligo
acaaagaaacagcuacucag

SEQ ID NO: 12841 - RNA, 20 nt, Artificial Sequence
  Antisense oligo
gggaaacauaaaggcuacaa

SEQ ID NO: 12842 - RNA, 20 nt, Artificial Sequence
  Antisense oligo
ugggaaacauaaaggcuaca

SEQ ID NO: 12843 - RNA, 20 nt, Artificial Sequence
  Antisense oligo
augggaaacauaaaggcuac

SEQ ID NO: 12844 - RNA, 20 nt, Artificial Sequence
  Antisense oligo
ccaaagugaugggaaacaua

SEQ ID NO: 12845 - RNA, 20 nt, Artificial Sequence
  Antisense oligo
auucaagugaguucucuguc

SEQ ID NO: 12846 - RNA, 20 nt, Artificial Sequence
  Antisense oligo
cuacggauuccaucuucaaa

SEQ ID NO: 12847 - RNA, 20 nt, Artificial Sequence
  Antisense oligo
gcuacggauuccaucuucaa

SEQ ID NO: 12848 - RNA, 20 nt, Artificial Sequence
  Antisense oligo
cgcuacggauuccaucuuca

SEQ ID NO: 12849 - RNA, 20 nt, Artificial Sequence
  Antisense oligo
gcgcuacggauuccaucuuc

SEQ ID NO: 12850 - RNA, 20 nt, Artificial Sequence
  Antisense oligo
ggcgcuacggauuccaucuu

SEQ ID NO: 12851 - RNA, 20 nt, Artificial Sequence
  Antisense oligo
acuuagcugaggcaaugagc

SEQ ID NO: 12852 - RNA, 20 nt, Artificial Sequence
  Antisense oligo
uacuuagcugaggcaaugag

SEQ ID NO: 12853 - RNA, 20 nt, Artificial Sequence
  Antisense oligo
auacuuagcugaggcaauga

SEQ ID NO: 12854 - RNA, 20 nt, Artificial Sequence
  Antisense oligo
cauacuuagcugaggcaaug

SEQ ID NO: 12855 - RNA, 20 nt, Artificial Sequence
  Antisense oligo
acauacuuagcugaggcaau

SEQ ID NO: 12856 - RNA, 20 nt, Artificial Sequence
  Antisense oligo
aacauacuuagcugaggcaa

SEQ ID NO: 12857 - RNA, 20 nt, Artificial Sequence
  Antisense oligo
aaacauacuuagcugaggca

SEQ ID NO: 12858 - RNA, 20 nt, Artificial Sequence
  Antisense oligo
aaaacauacuuagcugaggc

SEQ ID NO: 12859 - RNA, 20 nt, Artificial Sequence
  Antisense oligo
cuuccuacguuuuggguuuu

SEQ ID NO: 12860 - RNA, 20 nt, Artificial Sequence
  Antisense oligo
acuuccuacguuuuggguuu

SEQ ID NO: 12861 - RNA, 20 nt, Artificial Sequence
  Antisense oligo
gacuuccuacguuuuggguu

SEQ ID NO: 12862 - RNA, 20 nt, Artificial Sequence
  Antisense oligo
ggacuuccuacguuuugggu

SEQ ID NO: 12863 - RNA, 20 nt, Artificial Sequence
  Antisense oligo
aggacuuccuacguuuuggg

SEQ ID NO: 12864 - RNA, 20 nt, Artificial Sequence
  Antisense oligo
caggcccauuccacuauuuu

SEQ ID NO: 12865 - RNA, 20 nt, Artificial Sequence
  Antisense oligo
ccaggcccauuccacuauuu

SEQ ID NO: 12866 - RNA, 20 nt, Artificial Sequence
  Antisense oligo
gcccaggcccauuccacuau

SEQ ID NO: 12867 - RNA, 20 nt, Artificial Sequence
  Antisense oligo
ugcccaggcccauuccacua

SEQ ID NO: 12868 - RNA, 20 nt, Artificial Sequence
  Antisense oligo
uugcccaggcccauuccacu

SEQ ID NO: 12869 - RNA, 20 nt, Artificial Sequence
  Antisense oligo
uguugcccaggcccauucca

SEQ ID NO: 12870 - RNA, 20 nt, Artificial Sequence
  Antisense oligo
ucuguugcccaggcccauuc

SEQ ID NO: 12871 - RNA, 20 nt, Artificial Sequence
  Antisense oligo
cucuguugcccaggcccauu

SEQ ID NO: 12872 - RNA, 20 nt, Artificial Sequence
  Antisense oligo
ucuugcucuguugcccaggc

SEQ ID NO: 12873 - RNA, 20 nt, Artificial Sequence
  Antisense oligo
gucuugcucuguugcccagg

SEQ ID NO: 12874 - RNA, 20 nt, Artificial Sequence
  Antisense oligo
ggucuugcucuguugcccag

SEQ ID NO: 12875 - RNA, 20 nt, Artificial Sequence
  Antisense oligo
aggucuugcucuguugccca

SEQ ID NO: 12876 - RNA, 20 nt, Artificial Sequence
  Antisense oligo
gaggucuugcucuguugccc

SEQ ID NO: 12877 - RNA, 20 nt, Artificial Sequence
  Antisense oligo
ugaggucuugcucuguugcc

SEQ ID NO: 12878 - RNA, 20 nt, Artificial Sequence
  Antisense oligo
augaggucuugcucuguugc

SEQ ID NO: 12879 - RNA, 20 nt, Artificial Sequence
  Antisense oligo
aaugaggucuugcucuguug

SEQ ID NO: 12880 - RNA, 20 nt, Artificial Sequence
  Antisense oligo
ugcacuguggaaggcuaauu

SEQ ID NO: 12881 - RNA, 20 nt, Artificial Sequence
  Antisense oligo
uccucccaccucagccuucu

SEQ ID NO: 12882 - RNA, 20 nt, Artificial Sequence
  Antisense oligo
auccucccaccucagccuuc

SEQ ID NO: 12883 - RNA, 20 nt, Artificial Sequence
  Antisense oligo
gauccucccaccucagccuu

SEQ ID NO: 12884 - RNA, 20 nt, Artificial Sequence
  Antisense oligo
uggugggaucgcaguucacu

SEQ ID NO: 12885 - RNA, 20 nt, Artificial Sequence
  Antisense oligo
guggugggaucgcaguucac

SEQ ID NO: 12886 - RNA, 20 nt, Artificial Sequence
  Antisense oligo
aguggugggaucgcaguuca

SEQ ID NO: 12887 - RNA, 20 nt, Artificial Sequence
  Antisense oligo
caguggugggaucgcaguuc

SEQ ID NO: 12888 - RNA, 20 nt, Artificial Sequence
  Antisense oligo
aggacaggcucuugcucugg

SEQ ID NO: 12889 - RNA, 20 nt, Artificial Sequence
  Antisense oligo
ccucucgcauuucaccuuuu

SEQ ID NO: 12890 - RNA, 20 nt, Artificial Sequence
  Antisense oligo
accucucgcauuucaccuuu

SEQ ID NO: 12891 - RNA, 20 nt, Artificial Sequence
  Antisense oligo
caccucucgcauuucaccuu

SEQ ID NO: 12892 - RNA, 20 nt, Artificial Sequence
  Antisense oligo
acaccucucgcauuucaccu

SEQ ID NO: 12893 - RNA, 20 nt, Artificial Sequence
  Antisense oligo
uacaccucucgcauuucacc

SEQ ID NO: 12894 - RNA, 20 nt, Artificial Sequence
  Antisense oligo
uuacaccucucgcauuucac

SEQ ID NO: 12895 - RNA, 20 nt, Artificial Sequence
  Antisense oligo
uuuacaccucucgcauuuca

SEQ ID NO: 12896 - RNA, 20 nt, Artificial Sequence
  Antisense oligo
auuuacaccucucgcauuuc

SEQ ID NO: 12897 - RNA, 20 nt, Artificial Sequence
  Antisense oligo
cauuauuuacaccucucgca

SEQ ID NO: 12898 - RNA, 20 nt, Artificial Sequence
  Antisense oligo
ccauuauuuacaccucucgc

SEQ ID NO: 12899 - RNA, 20 nt, Artificial Sequence
  Antisense oligo
uccauuauuuacaccucucg

SEQ ID NO: 12900 - RNA, 20 nt, Artificial Sequence
  Antisense oligo
aggcauccuuuuauagcuug

SEQ ID NO: 12901 - RNA, 20 nt, Artificial Sequence
  Antisense oligo
acaggcuucaaaggcauccu

SEQ ID NO: 12902 - RNA, 20 nt, Artificial Sequence
  Antisense oligo
caaacacaggcuucaaaggc

SEQ ID NO: 12903 - RNA, 20 nt, Artificial Sequence
  Antisense oligo
caugucuacaaacacaggcu

SEQ ID NO: 12904 - RNA, 20 nt, Artificial Sequence
  Antisense oligo
uuguuucccucgaacuugaa

SEQ ID NO: 12905 - RNA, 20 nt, Artificial Sequence
  Antisense oligo
guuguuucccucgaacuuga

SEQ ID NO: 12906 - RNA, 20 nt, Artificial Sequence
  Antisense oligo
uguuguuucccucgaacuug

SEQ ID NO: 12907 - RNA, 20 nt, Artificial Sequence
  Antisense oligo
cuguuguuucccucgaacuu

SEQ ID NO: 12908 - RNA, 20 nt, Artificial Sequence
  Antisense oligo
acuguuguuucccucgaacu

SEQ ID NO: 12909 - RNA, 20 nt, Artificial Sequence
  Antisense oligo
uacuguuguuucccucgaac

SEQ ID NO: 12910 - RNA, 20 nt, Artificial Sequence
  Antisense oligo
ccuacuguuguuucccucga

SEQ ID NO: 12911 - RNA, 20 nt, Artificial Sequence
  Antisense oligo
accuacuguuguuucccucg

SEQ ID NO: 12912 - RNA, 20 nt, Artificial Sequence
  Antisense oligo
cuaagagcaucagacuuccc

SEQ ID NO: 12913 - RNA, 20 nt, Artificial Sequence
  Antisense oligo
ucuaagagcaucagacuucc

SEQ ID NO: 12914 - RNA, 20 nt, Artificial Sequence
  Antisense oligo
acgaacugaaauauggcauc

SEQ ID NO: 12915 - RNA, 20 nt, Artificial Sequence
  Antisense oligo
agccacgaacugaaauaugg

SEQ ID NO: 12916 - RNA, 20 nt, Artificial Sequence
  Antisense oligo
aagccacgaacugaaauaug

SEQ ID NO: 12917 - RNA, 20 nt, Artificial Sequence
  Antisense oligo
gauuuaagccacgaacugaa

SEQ ID NO: 12918 - RNA, 20 nt, Artificial Sequence
  Antisense oligo
agauuuaagccacgaacuga

SEQ ID NO: 12919 - RNA, 20 nt, Artificial Sequence
  Antisense oligo
gagauuuaagccacgaacug

SEQ ID NO: 12920 - RNA, 20 nt, Artificial Sequence
  Antisense oligo
guugagauuuaagccacgaa

SEQ ID NO: 12921 - RNA, 20 nt, Artificial Sequence
  Antisense oligo
uguugagauuuaagccacga

SEQ ID NO: 12922 - RNA, 20 nt, Artificial Sequence
  Antisense oligo
uuguugagauuuaagccacg

SEQ ID NO: 12923 - RNA, 20 nt, Artificial Sequence
  Antisense oligo
cuuguugagauuuaagccac

SEQ ID NO: 12924 - RNA, 20 nt, Artificial Sequence
  Antisense oligo
caaagccaguuucuuguuga

SEQ ID NO: 12925 - RNA, 20 nt, Artificial Sequence
  Antisense oligo
cccuucagaugaccaauggc

SEQ ID NO: 12926 - RNA, 20 nt, Artificial Sequence
  Antisense oligo
ucccuucagaugaccaaugg

SEQ ID NO: 12927 - RNA, 20 nt, Artificial Sequence
  Antisense oligo
uucccuucagaugaccaaug

SEQ ID NO: 12928 - RNA, 20 nt, Artificial Sequence
  Antisense oligo
ccauucccuucagaugacca

SEQ ID NO: 12929 - RNA, 20 nt, Artificial Sequence
  Antisense oligo
uguacccaguggaccuuucc

SEQ ID NO: 12930 - RNA, 20 nt, Artificial Sequence
  Antisense oligo
cuguacccaguggaccuuuc

SEQ ID NO: 12931 - RNA, 20 nt, Artificial Sequence
  Antisense oligo
cccuguacccaguggaccuu

SEQ ID NO: 12932 - RNA, 20 nt, Artificial Sequence
  Antisense oligo
aacuccuggccucaaacgau

SEQ ID NO: 12933 - RNA, 20 nt, Artificial Sequence
  Antisense oligo
aaacuccuggccucaaacga

SEQ ID NO: 12934 - RNA, 20 nt, Artificial Sequence
  Antisense oligo
caaacuccuggccucaaacg

SEQ ID NO: 12935 - RNA, 20 nt, Artificial Sequence
  Antisense oligo
ucaaacuccuggccucaaac

SEQ ID NO: 12936 - RNA, 20 nt, Artificial Sequence
  Antisense oligo
cucaaacuccuggccucaaa

SEQ ID NO: 12937 - RNA, 20 nt, Artificial Sequence
  Antisense oligo
ucucaaacuccuggccucaa

SEQ ID NO: 12938 - RNA, 20 nt, Artificial Sequence
  Antisense oligo
gucucaaacuccuggccuca

SEQ ID NO: 12939 - RNA, 20 nt, Artificial Sequence
  Antisense oligo
ggucucaaacuccuggccuc

SEQ ID NO: 12940 - RNA, 20 nt, Artificial Sequence
  Antisense oligo
uggucucaaacuccuggccu

SEQ ID NO: 12941 - RNA, 20 nt, Artificial Sequence
  Antisense oligo
cuggucucaaacuccuggcc

SEQ ID NO: 12942 - RNA, 20 nt, Artificial Sequence
  Antisense oligo
ccuggucucaaacuccuggc

SEQ ID NO: 12943 - RNA, 20 nt, Artificial Sequence
  Antisense oligo
gccuggucucaaacuccugg

SEQ ID NO: 12944 - RNA, 20 nt, Artificial Sequence
  Antisense oligo
agccuggucucaaacuccug

SEQ ID NO: 12945 - RNA, 20 nt, Artificial Sequence
  Antisense oligo
cagccuggucucaaacuccu

SEQ ID NO: 12946 - RNA, 20 nt, Artificial Sequence
  Antisense oligo
ccagccuggucucaaacucc

SEQ ID NO: 12947 - RNA, 20 nt, Artificial Sequence
  Antisense oligo
cagcuaagggugaggacagc

SEQ ID NO: 12948 - RNA, 20 nt, Artificial Sequence
  Antisense oligo
gcagcuaagggugaggacag

SEQ ID NO: 12949 - RNA, 20 nt, Artificial Sequence
  Antisense oligo
uugugcuccucaaugggccu

SEQ ID NO: 12950 - RNA, 20 nt, Artificial Sequence
  Antisense oligo
cuugugcuccucaaugggcc

SEQ ID NO: 12951 - RNA, 20 nt, Artificial Sequence
  Antisense oligo
uaucuugugcuccucaaugg

SEQ ID NO: 12952 - RNA, 20 nt, Artificial Sequence
  Antisense oligo
cuaucuugugcuccucaaug

SEQ ID NO: 12953 - RNA, 20 nt, Artificial Sequence
  Antisense oligo
ccuaucuugugcuccucaau

SEQ ID NO: 12954 - RNA, 20 nt, Artificial Sequence
  Antisense oligo
cccuaucuugugcuccucaa

SEQ ID NO: 12955 - RNA, 20 nt, Artificial Sequence
  Antisense oligo
acccuaucuugugcuccuca

SEQ ID NO: 12956 - RNA, 20 nt, Artificial Sequence
  Antisense oligo
gaaacccuaucuugugcucc

SEQ ID NO: 12957 - RNA, 20 nt, Artificial Sequence
  Antisense oligo
agaaacccuaucuugugcuc

SEQ ID NO: 12958 - RNA, 20 nt, Artificial Sequence
  Antisense oligo
cagaaacccuaucuugugcu

SEQ ID NO: 12959 - RNA, 20 nt, Artificial Sequence
  Antisense oligo
ccagaaacccuaucuugugc

SEQ ID NO: 12960 - RNA, 20 nt, Artificial Sequence
  Antisense oligo
gaccagaaacccuaucuugu

SEQ ID NO: 12961 - RNA, 20 nt, Artificial Sequence
  Antisense oligo
ugaccagaaacccuaucuug

SEQ ID NO: 12962 - RNA, 20 nt, Artificial Sequence
  Antisense oligo
uugaccagaaacccuaucuu

SEQ ID NO: 12963 - RNA, 20 nt, Artificial Sequence
  Antisense oligo
guugaccagaaacccuaucu

SEQ ID NO: 12964 - RNA, 20 nt, Artificial Sequence
  Antisense oligo
cguugaccagaaacccuauc

SEQ ID NO: 12965 - RNA, 20 nt, Artificial Sequence
  Antisense oligo
ucguugaccagaaacccuau

SEQ ID NO: 12966 - RNA, 20 nt, Artificial Sequence
  Antisense oligo
uucguugaccagaaacccua

SEQ ID NO: 12967 - RNA, 20 nt, Artificial Sequence
  Antisense oligo
cuucguugaccagaaacccu

SEQ ID NO: 12968 - RNA, 20 nt, Artificial Sequence
  Antisense oligo
ccuucguugaccagaaaccc

SEQ ID NO: 12969 - RNA, 20 nt, Artificial Sequence
  Antisense oligo
uccuucguugaccagaaacc

SEQ ID NO: 12970 - RNA, 20 nt, Artificial Sequence
  Antisense oligo
uuccuucguugaccagaaac

SEQ ID NO: 12971 - RNA, 20 nt, Artificial Sequence
  Antisense oligo
auuccuucguugaccagaaa

SEQ ID NO: 12972 - RNA, 20 nt, Artificial Sequence
  Antisense oligo
cauuccuucguugaccagaa

SEQ ID NO: 12973 - RNA, 20 nt, Artificial Sequence
  Antisense oligo
gcauuccuucguugaccaga

SEQ ID NO: 12974 - RNA, 20 nt, Artificial Sequence
  Antisense oligo
ggcauuccuucguugaccag

SEQ ID NO: 12975 - RNA, 20 nt, Artificial Sequence
  Antisense oligo
uggcauuccuucguugacca

SEQ ID NO: 12976 - RNA, 20 nt, Artificial Sequence
  Antisense oligo
guggcauuccuucguugacc

SEQ ID NO: 12977 - RNA, 20 nt, Artificial Sequence
  Antisense oligo
aguggcauuccuucguugac

SEQ ID NO: 12978 - RNA, 20 nt, Artificial Sequence
  Antisense oligo
aaguggcauuccuucguuga

SEQ ID NO: 12979 - RNA, 20 nt, Artificial Sequence
  Antisense oligo
cucugcuuugaaguggcauu

SEQ ID NO: 12980 - RNA, 20 nt, Artificial Sequence
  Antisense oligo
aacuucagagcccugcgauc

SEQ ID NO: 12981 - RNA, 20 nt, Artificial Sequence
  Antisense oligo
aaacuucagagcccugcgau

SEQ ID NO: 12982 - RNA, 20 nt, Artificial Sequence
  Antisense oligo
auaaacuucagagcccugcg

SEQ ID NO: 12983 - RNA, 20 nt, Artificial Sequence
  Antisense oligo
uugguucggucucacggcca

SEQ ID NO: 12984 - RNA, 20 nt, Artificial Sequence
  Antisense oligo
uguugguucggucucacggc

SEQ ID NO: 12985 - RNA, 20 nt, Artificial Sequence
  Antisense oligo
cuguugguucggucucacgg

SEQ ID NO: 12986 - RNA, 20 nt, Artificial Sequence
  Antisense oligo
gcuguugguucggucucacg

SEQ ID NO: 12987 - RNA, 20 nt, Artificial Sequence
  Antisense oligo
agcuguugguucggucucac

SEQ ID NO: 12988 - RNA, 20 nt, Artificial Sequence
  Antisense oligo
gagcuguugguucggucuca

SEQ ID NO: 12989 - RNA, 20 nt, Artificial Sequence
  Antisense oligo
cgagcuguugguucggucuc

SEQ ID NO: 12990 - RNA, 20 nt, Artificial Sequence
  Antisense oligo
uucuccgagcuguugguucg

SEQ ID NO: 12991 - RNA, 20 nt, Artificial Sequence
  Antisense oligo
guucuccgagcuguugguuc

SEQ ID NO: 12992 - RNA, 20 nt, Artificial Sequence
  Antisense oligo
uguucuccgagcuguugguu

SEQ ID NO: 12993 - RNA, 20 nt, Artificial Sequence
  Antisense oligo
guguucuccgagcuguuggu

SEQ ID NO: 12994 - RNA, 20 nt, Artificial Sequence
  Antisense oligo
gguguucuccgagcuguugg

SEQ ID NO: 12995 - RNA, 20 nt, Artificial Sequence
  Antisense oligo
ggguguucuccgagcuguug

SEQ ID NO: 12996 - RNA, 20 nt, Artificial Sequence
  Antisense oligo
aggguguucuccgagcuguu

SEQ ID NO: 12997 - RNA, 20 nt, Artificial Sequence
  Antisense oligo
aaggguguucuccgagcugu

SEQ ID NO: 12998 - RNA, 20 nt, Artificial Sequence
  Antisense oligo
gaaggguguucuccgagcug

SEQ ID NO: 12999 - RNA, 20 nt, Artificial Sequence
  Antisense oligo
gguccucauuuucucguauu

SEQ ID NO: 13000 - RNA, 20 nt, Artificial Sequence
  Antisense oligo
cgguccucauuuucucguau

SEQ ID NO: 13001 - RNA, 20 nt, Artificial Sequence
  Antisense oligo
acgguccucauuuucucgua

SEQ ID NO: 13002 - RNA, 20 nt, Artificial Sequence
  Antisense oligo
uacgguccucauuuucucgu

SEQ ID NO: 13003 - RNA, 20 nt, Artificial Sequence
  Antisense oligo
auacgguccucauuuucucg

SEQ ID NO: 13004 - RNA, 20 nt, Artificial Sequence
  Antisense oligo
gauacgguccucauuuucuc

SEQ ID NO: 13005 - RNA, 20 nt, Artificial Sequence
  Antisense oligo
gaagauacgguccucauuuu

SEQ ID NO: 13006 - RNA, 20 nt, Artificial Sequence
  Antisense oligo
cgaagauacgguccucauuu

SEQ ID NO: 13007 - RNA, 20 nt, Artificial Sequence
  Antisense oligo
acgaagauacgguccucauu

SEQ ID NO: 13008 - RNA, 20 nt, Artificial Sequence
  Antisense oligo
gacgaagauacgguccucau

SEQ ID NO: 13009 - RNA, 20 nt, Artificial Sequence
  Antisense oligo
agacgaagauacgguccuca

SEQ ID NO: 13010 - RNA, 20 nt, Artificial Sequence
  Antisense oligo
uagacgaagauacgguccuc

SEQ ID NO: 13011 - RNA, 20 nt, Artificial Sequence
  Antisense oligo
auagacgaagauacgguccu

SEQ ID NO: 13012 - RNA, 20 nt, Artificial Sequence
  Antisense oligo
aauagacgaagauacggucc

SEQ ID NO: 13013 - RNA, 20 nt, Artificial Sequence
  Antisense oligo
aaauagacgaagauacgguc

SEQ ID NO: 13014 - RNA, 20 nt, Artificial Sequence
  Antisense oligo
gaaauagacgaagauacggu

SEQ ID NO: 13015 - RNA, 20 nt, Artificial Sequence
  Antisense oligo
ugaaauagacgaagauacgg

SEQ ID NO: 13016 - RNA, 20 nt, Artificial Sequence
  Antisense oligo
ccgggacaguuuugugauga

SEQ ID NO: 13017 - RNA, 20 nt, Artificial Sequence
  Antisense oligo
ccacauaggcuguuccucuu

SEQ ID NO: 13018 - RNA, 20 nt, Artificial Sequence
  Antisense oligo
cccacauaggcuguuccucu

SEQ ID NO: 13019 - RNA, 20 nt, Artificial Sequence
  Antisense oligo
gcccacauaggcuguuccuc

SEQ ID NO: 13020 - RNA, 20 nt, Artificial Sequence
  Antisense oligo
gaucucaccuccguggaagc

SEQ ID NO: 13021 - RNA, 20 nt, Artificial Sequence
  Antisense oligo
ugaucucaccuccguggaag

SEQ ID NO: 13022 - RNA, 20 nt, Artificial Sequence
  Antisense oligo
uucugaucucaccuccgugg

SEQ ID NO: 13023 - RNA, 20 nt, Artificial Sequence
  Antisense oligo
guucugaucucaccuccgug

SEQ ID NO: 13024 - RNA, 20 nt, Artificial Sequence
  Antisense oligo
uguucugaucucaccuccgu

SEQ ID NO: 13025 - RNA, 20 nt, Artificial Sequence
  Antisense oligo
auguucugaucucaccuccg

SEQ ID NO: 13026 - RNA, 20 nt, Artificial Sequence
  Antisense oligo
ugauguucugaucucaccuc

SEQ ID NO: 13027 - RNA, 20 nt, Artificial Sequence
  Antisense oligo
acugauguucugaucucacc

SEQ ID NO: 13028 - RNA, 20 nt, Artificial Sequence
  Antisense oligo
gacugauguucugaucucac

SEQ ID NO: 13029 - RNA, 20 nt, Artificial Sequence
  Antisense oligo
ugacugauguucugaucuca

SEQ ID NO: 13030 - RNA, 20 nt, Artificial Sequence
  Antisense oligo
cugacugauguucugaucuc

SEQ ID NO: 13031 - RNA, 20 nt, Artificial Sequence
  Antisense oligo
ccugacugauguucugaucu

SEQ ID NO: 13032 - RNA, 20 nt, Artificial Sequence
  Antisense oligo
cccugacugauguucugauc

SEQ ID NO: 13033 - RNA, 20 nt, Artificial Sequence
  Antisense oligo
auacccugacugauguucug

SEQ ID NO: 13034 - RNA, 20 nt, Artificial Sequence
  Antisense oligo
aauacccugacugauguucu

SEQ ID NO: 13035 - RNA, 20 nt, Artificial Sequence
  Antisense oligo
agcaagacuccaucucaaaa

SEQ ID NO: 13036 - RNA, 20 nt, Artificial Sequence
  Antisense oligo
gagcaagacuccaucucaaa

SEQ ID NO: 13037 - RNA, 20 nt, Artificial Sequence
  Antisense oligo
agagcaagacuccaucucaa

SEQ ID NO: 13038 - RNA, 20 nt, Artificial Sequence
  Antisense oligo
cagagcaagacuccaucuca

SEQ ID NO: 13039 - RNA, 20 nt, Artificial Sequence
  Antisense oligo
acagagcaagacuccaucuc

SEQ ID NO: 13040 - RNA, 20 nt, Artificial Sequence
  Antisense oligo
gacagagcaagacuccaucu

SEQ ID NO: 13041 - RNA, 20 nt, Artificial Sequence
  Antisense oligo
ugacagagcaagacuccauc

SEQ ID NO: 13042 - RNA, 20 nt, Artificial Sequence
  Antisense oligo
gugacagagcaagacuccau

SEQ ID NO: 13043 - RNA, 20 nt, Artificial Sequence
  Antisense oligo
ggugacagagcaagacucca

SEQ ID NO: 13044 - RNA, 20 nt, Artificial Sequence
  Antisense oligo
uggugacagagcaagacucc

SEQ ID NO: 13045 - RNA, 20 nt, Artificial Sequence
  Antisense oligo
cuggugacagagcaagacuc

SEQ ID NO: 13046 - RNA, 20 nt, Artificial Sequence
  Antisense oligo
ccuggugacagagcaagacu

SEQ ID NO: 13047 - RNA, 20 nt, Artificial Sequence
  Antisense oligo
gccuggugacagagcaagac

SEQ ID NO: 13048 - RNA, 20 nt, Artificial Sequence
  Antisense oligo
agccuggugacagagcaaga

SEQ ID NO: 13049 - RNA, 20 nt, Artificial Sequence
  Antisense oligo
ugcacuccagccuggugaca

SEQ ID NO: 13050 - RNA, 20 nt, Artificial Sequence
  Antisense oligo
acugcacuccagccugguga

SEQ ID NO: 13051 - RNA, 20 nt, Artificial Sequence
  Antisense oligo
guuguagugagcugagaucg

SEQ ID NO: 13052 - RNA, 20 nt, Artificial Sequence
  Antisense oligo
cuugaacccaggagauugag

SEQ ID NO: 13053 - RNA, 20 nt, Artificial Sequence
  Antisense oligo
gcuugaacccaggagauuga

SEQ ID NO: 13054 - RNA, 20 nt, Artificial Sequence
  Antisense oligo
cgcuugaacccaggagauug

SEQ ID NO: 13055 - RNA, 20 nt, Artificial Sequence
  Antisense oligo
ucgcuugaacccaggagauu

SEQ ID NO: 13056 - RNA, 20 nt, Artificial Sequence
  Antisense oligo
aucgcuugaacccaggagau

SEQ ID NO: 13057 - RNA, 20 nt, Artificial Sequence
  Antisense oligo
aaucgcuugaacccaggaga

SEQ ID NO: 13058 - RNA, 20 nt, Artificial Sequence
  Antisense oligo
gaaucgcuugaacccaggag

SEQ ID NO: 13059 - RNA, 20 nt, Artificial Sequence
  Antisense oligo
agaaucgcuugaacccagga

SEQ ID NO: 13060 - RNA, 20 nt, Artificial Sequence
  Antisense oligo
gagaaucgcuugaacccagg

SEQ ID NO: 13061 - RNA, 20 nt, Artificial Sequence
  Antisense oligo
ggagaaucgcuugaacccag

SEQ ID NO: 13062 - RNA, 20 nt, Artificial Sequence
  Antisense oligo
aggagaaucgcuugaaccca

SEQ ID NO: 13063 - RNA, 20 nt, Artificial Sequence
  Antisense oligo
caggagaaucgcuugaaccc

SEQ ID NO: 13064 - RNA, 20 nt, Artificial Sequence
  Antisense oligo
gcaggagaaucgcuugaacc

SEQ ID NO: 13065 - RNA, 20 nt, Artificial Sequence
  Antisense oligo
ggcaggagaaucgcuugaac

SEQ ID NO: 13066 - RNA, 20 nt, Artificial Sequence
  Antisense oligo
aggcaggagaaucgcuugaa

SEQ ID NO: 13067 - RNA, 20 nt, Artificial Sequence
  Antisense oligo
gaggcaggagaaucgcuuga

SEQ ID NO: 13068 - RNA, 20 nt, Artificial Sequence
  Antisense oligo
ugaggcaggagaaucgcuug

SEQ ID NO: 13069 - RNA, 20 nt, Artificial Sequence
  Antisense oligo
cugaggcaggagaaucgcuu

SEQ ID NO: 13070 - RNA, 20 nt, Artificial Sequence
  Antisense oligo
gcugaggcaggagaaucgcu

SEQ ID NO: 13071 - RNA, 20 nt, Artificial Sequence
  Antisense oligo
aggcugaggcaggagaaucg

SEQ ID NO: 13072 - RNA, 20 nt, Artificial Sequence
  Antisense oligo
gaggcugaggcaggagaauc

SEQ ID NO: 13073 - RNA, 20 nt, Artificial Sequence
  Antisense oligo
ggaggcugaggcaggagaau

SEQ ID NO: 13074 - RNA, 20 nt, Artificial Sequence
  Antisense oligo
uacuugggaggcugaggcag

SEQ ID NO: 13075 - RNA, 20 nt, Artificial Sequence
  Antisense oligo
cuacuugggaggcugaggca

SEQ ID NO: 13076 - RNA, 20 nt, Artificial Sequence
  Antisense oligo
agcuacuugggaggcugagg

SEQ ID NO: 13077 - RNA, 20 nt, Artificial Sequence
  Antisense oligo
ugccagcuacuugggaggcu

SEQ ID NO: 13078 - RNA, 20 nt, Artificial Sequence
  Antisense oligo
augccagcuacuugggaggc

SEQ ID NO: 13079 - RNA, 20 nt, Artificial Sequence
  Antisense oligo
aaugccagcuacuugggagg

SEQ ID NO: 13080 - RNA, 20 nt, Artificial Sequence
  Antisense oligo
uaaugccagcuacuugggag

SEQ ID NO: 13081 - RNA, 20 nt, Artificial Sequence
  Antisense oligo
auuagcugggcaugguggcg

SEQ ID NO: 13082 - RNA, 20 nt, Artificial Sequence
  Antisense oligo
aauuagcugggcaugguggc

SEQ ID NO: 13083 - RNA, 20 nt, Artificial Sequence
  Antisense oligo
aaauuagcugggcauggugg

SEQ ID NO: 13084 - RNA, 20 nt, Artificial Sequence
  Antisense oligo
aaaauuagcugggcauggug

SEQ ID NO: 13085 - RNA, 20 nt, Artificial Sequence
  Antisense oligo
gauugagaccaucuaggcca

SEQ ID NO: 13086 - RNA, 20 nt, Artificial Sequence
  Antisense oligo
ggauugagaccaucuaggcc

SEQ ID NO: 13087 - RNA, 20 nt, Artificial Sequence
  Antisense oligo
cggauugagaccaucuaggc

SEQ ID NO: 13088 - RNA, 20 nt, Artificial Sequence
  Antisense oligo
acggauugagaccaucuagg

SEQ ID NO: 13089 - RNA, 20 nt, Artificial Sequence
  Antisense oligo
aacggauugagaccaucuag

SEQ ID NO: 13090 - RNA, 20 nt, Artificial Sequence
  Antisense oligo
caacggauugagaccaucua

SEQ ID NO: 13091 - RNA, 20 nt, Artificial Sequence
  Antisense oligo
cuguaaucccagcacuuugg

SEQ ID NO: 13092 - RNA, 20 nt, Artificial Sequence
  Antisense oligo
ccuguaaucccagcacuuug

SEQ ID NO: 13093 - RNA, 20 nt, Artificial Sequence
  Antisense oligo
accuguaaucccagcacuuu

SEQ ID NO: 13094 - RNA, 20 nt, Artificial Sequence
  Antisense oligo
caccuguaaucccagcacuu

SEQ ID NO: 13095 - RNA, 20 nt, Artificial Sequence
  Antisense oligo
acaccuguaaucccagcacu

SEQ ID NO: 13096 - RNA, 20 nt, Artificial Sequence
  Antisense oligo
cacaccuguaaucccagcac

SEQ ID NO: 13097 - RNA, 20 nt, Artificial Sequence
  Antisense oligo
ucacaccuguaaucccagca

SEQ ID NO: 13098 - RNA, 20 nt, Artificial Sequence
  Antisense oligo
cucacaccuguaaucccagc

SEQ ID NO: 13099 - RNA, 20 nt, Artificial Sequence
  Antisense oligo
gcucacaccuguaaucccag

SEQ ID NO: 13100 - RNA, 20 nt, Artificial Sequence
  Antisense oligo
ggcucacaccuguaauccca

SEQ ID NO: 13101 - RNA, 20 nt, Artificial Sequence
  Antisense oligo
uggcucacaccuguaauccc

SEQ ID NO: 13102 - RNA, 20 nt, Artificial Sequence
  Antisense oligo
guggcucacaccuguaaucc

SEQ ID NO: 13103 - RNA, 20 nt, Artificial Sequence
  Antisense oligo
aauacacugacugggcuggg

SEQ ID NO: 13104 - RNA, 20 nt, Artificial Sequence
  Antisense oligo
gaaacaguuccaacaugacu

SEQ ID NO: 13105 - RNA, 20 nt, Artificial Sequence
  Antisense oligo
agaaacaguuccaacaugac

SEQ ID NO: 13106 - RNA, 20 nt, Artificial Sequence
  Antisense oligo
cagaaccaaaugagaaacag

SEQ ID NO: 13107 - RNA, 20 nt, Artificial Sequence
  Antisense oligo
caacacagaaccaaaugaga

SEQ ID NO: 13108 - RNA, 20 nt, Artificial Sequence
  Antisense oligo
guacaacacagaaccaaaug

SEQ ID NO: 13109 - RNA, 20 nt, Artificial Sequence
  Antisense oligo
caugguaaucagugguaaga

SEQ ID NO: 13110 - RNA, 20 nt, Artificial Sequence
  Antisense oligo
ucaugguaaucagugguaag

SEQ ID NO: 13111 - RNA, 20 nt, Artificial Sequence
  Antisense oligo
guuuucaugguaaucagugg

SEQ ID NO: 13112 - RNA, 20 nt, Artificial Sequence
  Antisense oligo
ugccuagagucaguccagga

SEQ ID NO: 13113 - RNA, 20 nt, Artificial Sequence
  Antisense oligo
uugccuagagucaguccagg

SEQ ID NO: 13114 - RNA, 20 nt, Artificial Sequence
  Antisense oligo
cuugccuagagucaguccag

SEQ ID NO: 13115 - RNA, 20 nt, Artificial Sequence
  Antisense oligo
gcuugccuagagucagucca

SEQ ID NO: 13116 - RNA, 20 nt, Artificial Sequence
  Antisense oligo
gagcuugccuagagucaguc

SEQ ID NO: 13117 - RNA, 20 nt, Artificial Sequence
  Antisense oligo
ggagcuugccuagagucagu

SEQ ID NO: 13118 - RNA, 20 nt, Artificial Sequence
  Antisense oligo
aggagcuugccuagagucag

SEQ ID NO: 13119 - RNA, 20 nt, Artificial Sequence
  Antisense oligo
gaggagcuugccuagaguca

SEQ ID NO: 13120 - RNA, 20 nt, Artificial Sequence
  Antisense oligo
ugaggagcuugccuagaguc

SEQ ID NO: 13121 - RNA, 20 nt, Artificial Sequence
  Antisense oligo
gugaggagcuugccuagagu

SEQ ID NO: 13122 - RNA, 20 nt, Artificial Sequence
  Antisense oligo
ggugaggagcuugccuagag

SEQ ID NO: 13123 - RNA, 20 nt, Artificial Sequence
  Antisense oligo
aggugaggagcuugccuaga

SEQ ID NO: 13124 - RNA, 20 nt, Artificial Sequence
  Antisense oligo
gaggugaggagcuugccuag

SEQ ID NO: 13125 - RNA, 20 nt, Artificial Sequence
  Antisense oligo
agaggugaggagcuugccua

SEQ ID NO: 13126 - RNA, 20 nt, Artificial Sequence
  Antisense oligo
aagaggugaggagcuugccu

SEQ ID NO: 13127 - RNA, 20 nt, Artificial Sequence
  Antisense oligo
uaagaggugaggagcuugcc

SEQ ID NO: 13128 - RNA, 20 nt, Artificial Sequence
  Antisense oligo
cuaagaggugaggagcuugc

SEQ ID NO: 13129 - RNA, 20 nt, Artificial Sequence
  Antisense oligo
gcuaagaggugaggagcuug

SEQ ID NO: 13130 - RNA, 20 nt, Artificial Sequence
  Antisense oligo
ugcuaagaggugaggagcuu

SEQ ID NO: 13131 - RNA, 20 nt, Artificial Sequence
  Antisense oligo
augcuaagaggugaggagcu

SEQ ID NO: 13132 - RNA, 20 nt, Artificial Sequence
  Antisense oligo
caugcuaagaggugaggagc

SEQ ID NO: 13133 - RNA, 20 nt, Artificial Sequence
  Antisense oligo
acaugcuaagaggugaggag

SEQ ID NO: 13134 - RNA, 20 nt, Artificial Sequence
  Antisense oligo
uacaugcuaagaggugagga

SEQ ID NO: 13135 - RNA, 20 nt, Artificial Sequence
  Antisense oligo
cuacaugcuaagaggugagg

SEQ ID NO: 13136 - RNA, 20 nt, Artificial Sequence
  Antisense oligo
ccuacaugcuaagaggugag

SEQ ID NO: 13137 - RNA, 20 nt, Artificial Sequence
  Antisense oligo
gugaccuacaugcuaagagg

SEQ ID NO: 13138 - RNA, 20 nt, Artificial Sequence
  Antisense oligo
ugugaccuacaugcuaagag

SEQ ID NO: 13139 - RNA, 20 nt, Artificial Sequence
  Antisense oligo
gugugaccuacaugcuaaga

SEQ ID NO: 13140 - RNA, 20 nt, Artificial Sequence
  Antisense oligo
cgugugaccuacaugcuaag

SEQ ID NO: 13141 - RNA, 20 nt, Artificial Sequence
  Antisense oligo
ccgugugaccuacaugcuaa

SEQ ID NO: 13142 - RNA, 20 nt, Artificial Sequence
  Antisense oligo
gccgugugaccuacaugcua

SEQ ID NO: 13143 - RNA, 20 nt, Artificial Sequence
  Antisense oligo
cgccgugugaccuacaugcu

SEQ ID NO: 13144 - RNA, 20 nt, Artificial Sequence
  Antisense oligo
acgccgugugaccuacaugc

SEQ ID NO: 13145 - RNA, 20 nt, Artificial Sequence
  Antisense oligo
cacgccgugugaccuacaug

SEQ ID NO: 13146 - RNA, 20 nt, Artificial Sequence
  Antisense oligo
ccacgccgugugaccuacau

SEQ ID NO: 13147 - RNA, 20 nt, Artificial Sequence
  Antisense oligo
ucuccacgccgugugaccua

SEQ ID NO: 13148 - RNA, 20 nt, Artificial Sequence
  Antisense oligo
ugcguuccugacagugucug

SEQ ID NO: 13149 - RNA, 20 nt, Artificial Sequence
  Antisense oligo
gugcguuccugacagugucu

SEQ ID NO: 13150 - RNA, 20 nt, Artificial Sequence
  Antisense oligo
ggugcguuccugacaguguc

SEQ ID NO: 13151 - RNA, 20 nt, Artificial Sequence
  Antisense oligo
cggugcguuccugacagugu

SEQ ID NO: 13152 - RNA, 20 nt, Artificial Sequence
  Antisense oligo
ucggugcguuccugacagug

SEQ ID NO: 13153 - RNA, 20 nt, Artificial Sequence
  Antisense oligo
aucggugcguuccugacagu

SEQ ID NO: 13154 - RNA, 20 nt, Artificial Sequence
  Antisense oligo
uaucggugcguuccugacag

SEQ ID NO: 13155 - RNA, 20 nt, Artificial Sequence
  Antisense oligo
guaucggugcguuccugaca

SEQ ID NO: 13156 - RNA, 20 nt, Artificial Sequence
  Antisense oligo
cguaucggugcguuccugac

SEQ ID NO: 13157 - RNA, 20 nt, Artificial Sequence
  Antisense oligo
gcguaucggugcguuccuga

SEQ ID NO: 13158 - RNA, 20 nt, Artificial Sequence
  Antisense oligo
aggcguaucggugcguuccu

SEQ ID NO: 13159 - RNA, 20 nt, Artificial Sequence
  Antisense oligo
acaggcguaucggugcguuc

SEQ ID NO: 13160 - RNA, 20 nt, Artificial Sequence
  Antisense oligo
aacaggcguaucggugcguu

SEQ ID NO: 13161 - RNA, 20 nt, Artificial Sequence
  Antisense oligo
aaacaggcguaucggugcgu

SEQ ID NO: 13162 - RNA, 20 nt, Artificial Sequence
  Antisense oligo
caaacaggcguaucggugcg

SEQ ID NO: 13163 - RNA, 20 nt, Artificial Sequence
  Antisense oligo
ccaaacaggcguaucggugc

SEQ ID NO: 13164 - RNA, 20 nt, Artificial Sequence
  Antisense oligo
gccaaacaggcguaucggug

SEQ ID NO: 13165 - RNA, 20 nt, Artificial Sequence
  Antisense oligo
ggugaccauuccuuggaaaa

SEQ ID NO: 13166 - RNA, 20 nt, Artificial Sequence
  Antisense oligo
gcuggugaccauuccuugga

SEQ ID NO: 13167 - RNA, 20 nt, Artificial Sequence
  Antisense oligo
agcuggugaccauuccuugg

SEQ ID NO: 13168 - RNA, 20 nt, Artificial Sequence
  Antisense oligo
auagcuggugaccauuccuu

SEQ ID NO: 13169 - RNA, 20 nt, Artificial Sequence
  Antisense oligo
aauagcuggugaccauuccu

SEQ ID NO: 13170 - RNA, 20 nt, Artificial Sequence
  Antisense oligo
aaauagcuggugaccauucc

SEQ ID NO: 13171 - RNA, 20 nt, Artificial Sequence
  Antisense oligo
uaaauagcuggugaccauuc

SEQ ID NO: 13172 - RNA, 20 nt, Artificial Sequence
  Antisense oligo
cauaaauagcuggugaccau

SEQ ID NO: 13173 - RNA, 20 nt, Artificial Sequence
  Antisense oligo
ucauaaauagcuggugacca

SEQ ID NO: 13174 - RNA, 20 nt, Artificial Sequence
  Antisense oligo
cuguuucuggaauaccaacu

SEQ ID NO: 13175 - RNA, 20 nt, Artificial Sequence
  Antisense oligo
cuuccauucuccacgaaauu

SEQ ID NO: 13176 - RNA, 20 nt, Artificial Sequence
  Antisense oligo
ccuuccauucuccacgaaau

SEQ ID NO: 13177 - RNA, 20 nt, Artificial Sequence
  Antisense oligo
gccuuccauucuccacgaaa

SEQ ID NO: 13178 - RNA, 20 nt, Artificial Sequence
  Antisense oligo
aggucugccuuccauucucc

SEQ ID NO: 13179 - RNA, 20 nt, Artificial Sequence
  Antisense oligo
gugguucuuucacccaugca

SEQ ID NO: 13180 - RNA, 20 nt, Artificial Sequence
  Antisense oligo
ggccugugguucuuucaccc

SEQ ID NO: 13181 - RNA, 20 nt, Artificial Sequence
  Antisense oligo
cgguaagaccugcaauggcc

SEQ ID NO: 13182 - RNA, 20 nt, Artificial Sequence
  Antisense oligo
acgguaagaccugcaauggc

SEQ ID NO: 13183 - RNA, 20 nt, Artificial Sequence
  Antisense oligo
aacgguaagaccugcaaugg

SEQ ID NO: 13184 - RNA, 20 nt, Artificial Sequence
  Antisense oligo
caacgguaagaccugcaaug

SEQ ID NO: 13185 - RNA, 20 nt, Artificial Sequence
  Antisense oligo
gcaacgguaagaccugcaau

SEQ ID NO: 13186 - RNA, 20 nt, Artificial Sequence
  Antisense oligo
agcaacgguaagaccugcaa

SEQ ID NO: 13187 - RNA, 20 nt, Artificial Sequence
  Antisense oligo
cagcaacgguaagaccugca

SEQ ID NO: 13188 - RNA, 20 nt, Artificial Sequence
  Antisense oligo
agcagcaacgguaagaccug

SEQ ID NO: 13189 - RNA, 20 nt, Artificial Sequence
  Antisense oligo
aagcagcaacgguaagaccu

SEQ ID NO: 13190 - RNA, 20 nt, Artificial Sequence
  Antisense oligo
uaagcagcaacgguaagacc

SEQ ID NO: 13191 - RNA, 20 nt, Artificial Sequence
  Antisense oligo
auaagcagcaacgguaagac

SEQ ID NO: 13192 - RNA, 20 nt, Artificial Sequence
  Antisense oligo
cauaagcagcaacgguaaga

SEQ ID NO: 13193 - RNA, 20 nt, Artificial Sequence
  Antisense oligo
ccauaagcagcaacgguaag

SEQ ID NO: 13194 - RNA, 20 nt, Artificial Sequence
  Antisense oligo
accauaagcagcaacgguaa

SEQ ID NO: 13195 - RNA, 20 nt, Artificial Sequence
  Antisense oligo
caccauaagcagcaacggua

SEQ ID NO: 13196 - RNA, 20 nt, Artificial Sequence
  Antisense oligo
ucaccauaagcagcaacggu

SEQ ID NO: 13197 - RNA, 20 nt, Artificial Sequence
  Antisense oligo
aucgacagcuucaccauaag

SEQ ID NO: 13198 - RNA, 20 nt, Artificial Sequence
  Antisense oligo
ccaucgacagcuucaccaua

SEQ ID NO: 13199 - RNA, 20 nt, Artificial Sequence
  Antisense oligo
cccaucgacagcuucaccau

SEQ ID NO: 13200 - RNA, 20 nt, Artificial Sequence
  Antisense oligo
gcccaucgacagcuucacca

SEQ ID NO: 13201 - RNA, 20 nt, Artificial Sequence
  Antisense oligo
cuauacacgacccgauucua

SEQ ID NO: 13202 - RNA, 20 nt, Artificial Sequence
  Antisense oligo
acuauacacgacccgauucu

SEQ ID NO: 13203 - RNA, 20 nt, Artificial Sequence
  Antisense oligo
uacuauacacgacccgauuc

SEQ ID NO: 13204 - RNA, 20 nt, Artificial Sequence
  Antisense oligo
auacuauacacgacccgauu

SEQ ID NO: 13205 - RNA, 20 nt, Artificial Sequence
  Antisense oligo
gauacuauacacgacccgau

SEQ ID NO: 13206 - RNA, 20 nt, Artificial Sequence
  Antisense oligo
cgauacuauacacgacccga

SEQ ID NO: 13207 - RNA, 20 nt, Artificial Sequence
  Antisense oligo
ccgauacuauacacgacccg

SEQ ID NO: 13208 - RNA, 20 nt, Artificial Sequence
  Antisense oligo
cccgauacuauacacgaccc

SEQ ID NO: 13209 - RNA, 20 nt, Artificial Sequence
  Antisense oligo
acccgauacuauacacgacc

SEQ ID NO: 13210 - RNA, 20 nt, Artificial Sequence
  Antisense oligo
aacccgauacuauacacgac

SEQ ID NO: 13211 - RNA, 20 nt, Artificial Sequence
  Antisense oligo
caacccgauacuauacacga

SEQ ID NO: 13212 - RNA, 20 nt, Artificial Sequence
  Antisense oligo
ccaacccgauacuauacacg

SEQ ID NO: 13213 - RNA, 20 nt, Artificial Sequence
  Antisense oligo
cccaacccgauacuauacac

SEQ ID NO: 13214 - RNA, 20 nt, Artificial Sequence
  Antisense oligo
acccaacccgauacuauaca

SEQ ID NO: 13215 - RNA, 20 nt, Artificial Sequence
  Antisense oligo
cacccaacccgauacuauac

SEQ ID NO: 13216 - RNA, 20 nt, Artificial Sequence
  Antisense oligo
ccacccaacccgauacuaua

SEQ ID NO: 13217 - RNA, 20 nt, Artificial Sequence
  Antisense oligo
accacccaacccgauacuau

SEQ ID NO: 13218 - RNA, 20 nt, Artificial Sequence
  Antisense oligo
aaccacccaacccgauacua

SEQ ID NO: 13219 - RNA, 20 nt, Artificial Sequence
  Antisense oligo
gaaaccacccaacccgauac

SEQ ID NO: 13220 - RNA, 20 nt, Artificial Sequence
  Antisense oligo
agaaaccacccaacccgaua

SEQ ID NO: 13221 - RNA, 20 nt, Artificial Sequence
  Antisense oligo
cagaaaccacccaacccgau

SEQ ID NO: 13222 - RNA, 20 nt, Artificial Sequence
  Antisense oligo
gaaacccuggaaugggccug

SEQ ID NO: 13223 - RNA, 20 nt, Artificial Sequence
  Antisense oligo
cgaaacccuggaaugggccu

SEQ ID NO: 13224 - RNA, 20 nt, Artificial Sequence
  Antisense oligo
agccgaaacccuggaauggg

SEQ ID NO: 13225 - RNA, 20 nt, Artificial Sequence
  Antisense oligo
aagccgaaacccuggaaugg

SEQ ID NO: 13226 - RNA, 20 nt, Artificial Sequence
  Antisense oligo
gaagccgaaacccuggaaug

SEQ ID NO: 13227 - RNA, 20 nt, Artificial Sequence
  Antisense oligo
ugaagccgaaacccuggaau

SEQ ID NO: 13228 - RNA, 20 nt, Artificial Sequence
  Antisense oligo
cugaagccgaaacccuggaa

SEQ ID NO: 13229 - RNA, 20 nt, Artificial Sequence
  Antisense oligo
ccugaagccgaaacccugga

SEQ ID NO: 13230 - RNA, 20 nt, Artificial Sequence
  Antisense oligo
acccugaagccgaaacccug

SEQ ID NO: 13231 - RNA, 20 nt, Artificial Sequence
  Antisense oligo
cacccugaagccgaaacccu

SEQ ID NO: 13232 - RNA, 20 nt, Artificial Sequence
  Antisense oligo
uggcacccugaagccgaaac

SEQ ID NO: 13233 - RNA, 20 nt, Artificial Sequence
  Antisense oligo
cuggcacccugaagccgaaa

SEQ ID NO: 13234 - RNA, 20 nt, Artificial Sequence
  Antisense oligo
augacuggcacccugaagcc

SEQ ID NO: 13235 - RNA, 20 nt, Artificial Sequence
  Antisense oligo
aaugacuggcacccugaagc

SEQ ID NO: 13236 - RNA, 20 nt, Artificial Sequence
  Antisense oligo
cgcaaugaaugacuggcacc

SEQ ID NO: 13237 - RNA, 20 nt, Artificial Sequence
  Antisense oligo
gcgcaaugaaugacuggcac

SEQ ID NO: 13238 - RNA, 20 nt, Artificial Sequence
  Antisense oligo
uugucauuaucuugcugcgc

SEQ ID NO: 13239 - RNA, 20 nt, Artificial Sequence
  Antisense oligo
cuugucauuaucuugcugcg

SEQ ID NO: 13240 - RNA, 20 nt, Artificial Sequence
  Antisense oligo
gcuugucauuaucuugcugc

SEQ ID NO: 13241 - RNA, 20 nt, Artificial Sequence
  Antisense oligo
uggcuugucauuaucuugcu

SEQ ID NO: 13242 - RNA, 20 nt, Artificial Sequence
  Antisense oligo
cuggcuugucauuaucuugc

SEQ ID NO: 13243 - RNA, 20 nt, Artificial Sequence
  Antisense oligo
ccuggcuugucauuaucuug

SEQ ID NO: 13244 - RNA, 20 nt, Artificial Sequence
  Antisense oligo
cccuggcuugucauuaucuu

SEQ ID NO: 13245 - RNA, 20 nt, Artificial Sequence
  Antisense oligo
acccuggcuugucauuaucu

SEQ ID NO: 13246 - RNA, 20 nt, Artificial Sequence
  Antisense oligo
cacccuggcuugucauuauc

SEQ ID NO: 13247 - RNA, 20 nt, Artificial Sequence
  Antisense oligo
acacccuggcuugucauuau

SEQ ID NO: 13248 - RNA, 20 nt, Artificial Sequence
  Antisense oligo
uugcacacccuggcuuguca

SEQ ID NO: 13249 - RNA, 20 nt, Artificial Sequence
  Antisense oligo
auugcacacccuggcuuguc

SEQ ID NO: 13250 - RNA, 20 nt, Artificial Sequence
  Antisense oligo
acauugcacacccuggcuug

SEQ ID NO: 13251 - RNA, 20 nt, Artificial Sequence
  Antisense oligo
gacauugcacacccuggcuu

SEQ ID NO: 13252 - RNA, 20 nt, Artificial Sequence
  Antisense oligo
ggacauugcacacccuggcu

SEQ ID NO: 13253 - RNA, 20 nt, Artificial Sequence
  Antisense oligo
gccacccacaacugucuuug

SEQ ID NO: 13254 - RNA, 20 nt, Artificial Sequence
  Antisense oligo
agccacccacaacugucuuu

SEQ ID NO: 13255 - RNA, 20 nt, Artificial Sequence
  Antisense oligo
aagccacccacaacugucuu

SEQ ID NO: 13256 - RNA, 20 nt, Artificial Sequence
  Antisense oligo
gaagccacccacaacugucu

SEQ ID NO: 13257 - RNA, 20 nt, Artificial Sequence
  Antisense oligo
ugaagccacccacaacuguc

SEQ ID NO: 13258 - RNA, 20 nt, Artificial Sequence
  Antisense oligo
agugaagccacccacaacug

SEQ ID NO: 13259 - RNA, 20 nt, Artificial Sequence
  Antisense oligo
gagugaagccacccacaacu

SEQ ID NO: 13260 - RNA, 20 nt, Artificial Sequence
  Antisense oligo
aagagugaagccacccacaa

SEQ ID NO: 13261 - RNA, 20 nt, Artificial Sequence
  Antisense oligo
gaagagugaagccacccaca

SEQ ID NO: 13262 - RNA, 20 nt, Artificial Sequence
  Antisense oligo
ugaagagugaagccacccac

SEQ ID NO: 13263 - RNA, 20 nt, Artificial Sequence
  Antisense oligo
gugaagagugaagccaccca

SEQ ID NO: 13264 - RNA, 20 nt, Artificial Sequence
  Antisense oligo
ugugaagagugaagccaccc

SEQ ID NO: 13265 - RNA, 20 nt, Artificial Sequence
  Antisense oligo
cugugaagagugaagccacc

SEQ ID NO: 13266 - RNA, 20 nt, Artificial Sequence
  Antisense oligo
gcccugugaagagugaagcc

SEQ ID NO: 13267 - RNA, 20 nt, Artificial Sequence
  Antisense oligo
ucgauguggacagacugcca

SEQ ID NO: 13268 - RNA, 20 nt, Artificial Sequence
  Antisense oligo
accaugaggguggaucuccg

SEQ ID NO: 13269 - RNA, 20 nt, Artificial Sequence
  Antisense oligo
aaccaugaggguggaucucc

SEQ ID NO: 13270 - RNA, 20 nt, Artificial Sequence
  Antisense oligo
agaaaccaugaggguggauc

SEQ ID NO: 13271 - RNA, 20 nt, Artificial Sequence
  Antisense oligo
caucagaaaccaugagggug

SEQ ID NO: 13272 - RNA, 20 nt, Artificial Sequence
  Antisense oligo
acaucagaaaccaugagggu

SEQ ID NO: 13273 - RNA, 20 nt, Artificial Sequence
  Antisense oligo
gccuggucacaucagaaacc

SEQ ID NO: 13274 - RNA, 20 nt, Artificial Sequence
  Antisense oligo
gcugauggugacaugcugca

SEQ ID NO: 13275 - RNA, 20 nt, Artificial Sequence
  Antisense oligo
cuggcugauggugacaugcu

SEQ ID NO: 13276 - RNA, 20 nt, Artificial Sequence
  Antisense oligo
gcuggcugauggugacaugc

SEQ ID NO: 13277 - RNA, 20 nt, Artificial Sequence
  Antisense oligo
agcuggcugauggugacaug

SEQ ID NO: 13278 - RNA, 20 nt, Artificial Sequence
  Antisense oligo
cucacgcucaggcaagucuc

SEQ ID NO: 13279 - RNA, 20 nt, Artificial Sequence
  Antisense oligo
acucacgcucaggcaagucu

SEQ ID NO: 13280 - RNA, 20 nt, Artificial Sequence
  Antisense oligo
ugacucacgcucaggcaagu

SEQ ID NO: 13281 - RNA, 20 nt, Artificial Sequence
  Antisense oligo
gugacucacgcucaggcaag

SEQ ID NO: 13282 - RNA, 20 nt, Artificial Sequence
  Antisense oligo
ugcuccuagugccaugugca

SEQ ID NO: 13283 - RNA, 20 nt, Artificial Sequence
  Antisense oligo
ccugcuccuagugccaugug

SEQ ID NO: 13284 - RNA, 20 nt, Artificial Sequence
  Antisense oligo
cccugcuccuagugccaugu

SEQ ID NO: 13285 - RNA, 20 nt, Artificial Sequence
  Antisense oligo
uccugccgagggacgaaaca

SEQ ID NO: 13286 - RNA, 20 nt, Artificial Sequence
  Antisense oligo
augagccaccagucaguucu

SEQ ID NO: 13287 - RNA, 20 nt, Artificial Sequence
  Antisense oligo
gaugagccaccagucaguuc

SEQ ID NO: 13288 - RNA, 20 nt, Artificial Sequence
  Antisense oligo
ugaugagccaccagucaguu

SEQ ID NO: 13289 - RNA, 20 nt, Artificial Sequence
  Antisense oligo
augaugagccaccagucagu

SEQ ID NO: 13290 - RNA, 20 nt, Artificial Sequence
  Antisense oligo
uaugaugagccaccagucag

SEQ ID NO: 13291 - RNA, 20 nt, Artificial Sequence
  Antisense oligo
cuaugaugagccaccaguca

SEQ ID NO: 13292 - RNA, 20 nt, Artificial Sequence
  Antisense oligo
ucuaugaugagccaccaguc

SEQ ID NO: 13293 - RNA, 20 nt, Artificial Sequence
  Antisense oligo
cucuaugaugagccaccagu

SEQ ID NO: 13294 - RNA, 20 nt, Artificial Sequence
  Antisense oligo
ugugguaagcgcaccugcuc

SEQ ID NO: 13295 - RNA, 20 nt, Artificial Sequence
  Antisense oligo
cugugguaagcgcaccugcu

SEQ ID NO: 13296 - RNA, 20 nt, Artificial Sequence
  Antisense oligo
agccugugguaagcgcaccu

SEQ ID NO: 13297 - RNA, 20 nt, Artificial Sequence
  Antisense oligo
ucagccugugguaagcgcac

SEQ ID NO: 13298 - RNA, 20 nt, Artificial Sequence
  Antisense oligo
accucagccugugguaagcg

SEQ ID NO: 13299 - RNA, 20 nt, Artificial Sequence
  Antisense oligo
gcucuaccucagccuguggu

SEQ ID NO: 13300 - RNA, 20 nt, Artificial Sequence
  Antisense oligo
agcucuaccucagccugugg

SEQ ID NO: 13301 - RNA, 20 nt, Artificial Sequence
  Antisense oligo
uucuaggugcucacuuccau

SEQ ID NO: 13302 - RNA, 20 nt, Artificial Sequence
  Antisense oligo
guucuaggugcucacuucca

SEQ ID NO: 13303 - RNA, 20 nt, Artificial Sequence
  Antisense oligo
guguucuaggugcucacuuc

SEQ ID NO: 13304 - RNA, 20 nt, Artificial Sequence
  Antisense oligo
cguguucuaggugcucacuu

SEQ ID NO: 13305 - RNA, 20 nt, Artificial Sequence
  Antisense oligo
gcguguucuaggugcucacu

SEQ ID NO: 13306 - RNA, 20 nt, Artificial Sequence
  Antisense oligo
uggcguguucuaggugcuca

SEQ ID NO: 13307 - RNA, 20 nt, Artificial Sequence
  Antisense oligo
cuggcguguucuaggugcuc

SEQ ID NO: 13308 - RNA, 20 nt, Artificial Sequence
  Antisense oligo
ucuggcguguucuaggugcu

SEQ ID NO: 13309 - RNA, 20 nt, Artificial Sequence
  Antisense oligo
cucuggcguguucuaggugc

SEQ ID NO: 13310 - RNA, 20 nt, Artificial Sequence
  Antisense oligo
ggcucuggcguguucuaggu

SEQ ID NO: 13311 - RNA, 20 nt, Artificial Sequence
  Antisense oligo
ugggcucuggcguguucuag

SEQ ID NO: 13312 - RNA, 20 nt, Artificial Sequence
  Antisense oligo
cugggcucuggcguguucua

SEQ ID NO: 13313 - RNA, 20 nt, Artificial Sequence
  Antisense oligo
uuccuuccagccugggcucu

SEQ ID NO: 13314 - RNA, 20 nt, Artificial Sequence
  Antisense oligo
cagaugagagaucacgguca

SEQ ID NO: 13315 - RNA, 20 nt, Artificial Sequence
  Antisense oligo
ccagaugagagaucacgguc

SEQ ID NO: 13316 - RNA, 20 nt, Artificial Sequence
  Antisense oligo
cccagaugagagaucacggu

SEQ ID NO: 13317 - RNA, 20 nt, Artificial Sequence
  Antisense oligo
agaagguggcacagggacug

SEQ ID NO: 13318 - RNA, 20 nt, Artificial Sequence
  Antisense oligo
ugcguuaccacucagaaggu

SEQ ID NO: 13319 - RNA, 20 nt, Artificial Sequence
  Antisense oligo
uugcguuaccacucagaagg

SEQ ID NO: 13320 - RNA, 20 nt, Artificial Sequence
  Antisense oligo
auugcguuaccacucagaag

SEQ ID NO: 13321 - RNA, 20 nt, Artificial Sequence
  Antisense oligo
gauugcguuaccacucagaa

SEQ ID NO: 13322 - RNA, 20 nt, Artificial Sequence
  Antisense oligo
ugauugcguuaccacucaga

SEQ ID NO: 13323 - RNA, 20 nt, Artificial Sequence
  Antisense oligo
gugauugcguuaccacucag

SEQ ID NO: 13324 - RNA, 20 nt, Artificial Sequence
  Antisense oligo
cgugauugcguuaccacuca

SEQ ID NO: 13325 - RNA, 20 nt, Artificial Sequence
  Antisense oligo
acgugauugcguuaccacuc

SEQ ID NO: 13326 - RNA, 20 nt, Artificial Sequence
  Antisense oligo
agucgaagcaaacgugauug

SEQ ID NO: 13327 - RNA, 20 nt, Artificial Sequence
  Antisense oligo
cagucgaagcaaacgugauu

SEQ ID NO: 13328 - RNA, 20 nt, Artificial Sequence
  Antisense oligo
gcagucgaagcaaacgugau

SEQ ID NO: 13329 - RNA, 20 nt, Artificial Sequence
  Antisense oligo
ugcagucgaagcaaacguga

SEQ ID NO: 13330 - RNA, 20 nt, Artificial Sequence
  Antisense oligo
gguguuccaagcccacugca

SEQ ID NO: 13331 - RNA, 20 nt, Artificial Sequence
  Antisense oligo
cgaguucagagguuuccuuu

SEQ ID NO: 13332 - RNA, 20 nt, Artificial Sequence
  Antisense oligo
cacugccuccgaguucagag

SEQ ID NO: 13333 - RNA, 20 nt, Artificial Sequence
  Antisense oligo
ucacugccuccgaguucaga

SEQ ID NO: 13334 - RNA, 20 nt, Artificial Sequence
  Antisense oligo
aucacugccuccgaguucag

SEQ ID NO: 13335 - RNA, 20 nt, Artificial Sequence
  Antisense oligo
caucacugccuccgaguuca

SEQ ID NO: 13336 - RNA, 20 nt, Artificial Sequence
  Antisense oligo
acaucacugccuccgaguuc

SEQ ID NO: 13337 - RNA, 20 nt, Artificial Sequence
  Antisense oligo
uacaucacugccuccgaguu

SEQ ID NO: 13338 - RNA, 20 nt, Artificial Sequence
  Antisense oligo
uuacaucacugccuccgagu

SEQ ID NO: 13339 - RNA, 20 nt, Artificial Sequence
  Antisense oligo
aacuuacaucacugccuccg

SEQ ID NO: 13340 - RNA, 20 nt, Artificial Sequence
  Antisense oligo
gaacuuacaucacugccucc

SEQ ID NO: 13341 - RNA, 20 nt, Artificial Sequence
  Antisense oligo
cagaacuuacaucacugccu

SEQ ID NO: 13342 - RNA, 20 nt, Artificial Sequence
  Antisense oligo
ccagaacuuacaucacugcc

SEQ ID NO: 13343 - RNA, 20 nt, Artificial Sequence
  Antisense oligo
accagaacuuacaucacugc

SEQ ID NO: 13344 - RNA, 20 nt, Artificial Sequence
  Antisense oligo
agaaccagaacuuacaucac

SEQ ID NO: 13345 - RNA, 20 nt, Artificial Sequence
  Antisense oligo
caagaaccagaacuuacauc

SEQ ID NO: 13346 - RNA, 20 nt, Artificial Sequence
  Antisense oligo
cccaagaaccagaacuuaca

SEQ ID NO: 13347 - RNA, 20 nt, Artificial Sequence
  Antisense oligo
ucccaagaaccagaacuuac

SEQ ID NO: 13348 - RNA, 20 nt, Artificial Sequence
  Antisense oligo
gucccaagaaccagaacuua

SEQ ID NO: 13349 - RNA, 20 nt, Artificial Sequence
  Antisense oligo
gaggucccaagaaccagaac

SEQ ID NO: 13350 - RNA, 20 nt, Artificial Sequence
  Antisense oligo
ggaggucccaagaaccagaa

SEQ ID NO: 13351 - RNA, 20 nt, Artificial Sequence
  Antisense oligo
gggaggucccaagaaccaga

SEQ ID NO: 13352 - RNA, 20 nt, Artificial Sequence
  Antisense oligo
caucaccagcagcacaaggg

SEQ ID NO: 13353 - RNA, 20 nt, Artificial Sequence
  Antisense oligo
agaagcaucaccagcagcac

SEQ ID NO: 13354 - RNA, 20 nt, Artificial Sequence
  Antisense oligo
gcucagaagcaucaccagca

SEQ ID NO: 13355 - RNA, 20 nt, Artificial Sequence
  Antisense oligo
agcucagaagcaucaccagc

SEQ ID NO: 13356 - RNA, 20 nt, Artificial Sequence
  Antisense oligo
cagcucagaagcaucaccag

SEQ ID NO: 13357 - RNA, 20 nt, Artificial Sequence
  Antisense oligo
uaaagaugcagcucagaagc

SEQ ID NO: 13358 - RNA, 20 nt, Artificial Sequence
  Antisense oligo
uuaaagaugcagcucagaag

SEQ ID NO: 13359 - RNA, 20 nt, Artificial Sequence
  Antisense oligo
aacaagaccgucacugugug

SEQ ID NO: 13360 - RNA, 20 nt, Artificial Sequence
  Antisense oligo
caacaagaccgucacugugu

SEQ ID NO: 13361 - RNA, 20 nt, Artificial Sequence
  Antisense oligo
gcaacaagaccgucacugug

SEQ ID NO: 13362 - RNA, 20 nt, Artificial Sequence
  Antisense oligo
agcaacaagaccgucacugu

SEQ ID NO: 13363 - RNA, 20 nt, Artificial Sequence
  Antisense oligo
cagcaacaagaccgucacug

SEQ ID NO: 13364 - RNA, 20 nt, Artificial Sequence
  Antisense oligo
ccagcaacaagaccgucacu

SEQ ID NO: 13365 - RNA, 20 nt, Artificial Sequence
  Antisense oligo
accagcaacaagaccgucac

SEQ ID NO: 13366 - RNA, 20 nt, Artificial Sequence
  Antisense oligo
aaccagcaacaagaccguca

SEQ ID NO: 13367 - RNA, 20 nt, Artificial Sequence
  Antisense oligo
uaaccagcaacaagaccguc

SEQ ID NO: 13368 - RNA, 20 nt, Artificial Sequence
  Antisense oligo
guaaccagcaacaagaccgu

SEQ ID NO: 13369 - RNA, 20 nt, Artificial Sequence
  Antisense oligo
aguaaccagcaacaagaccg

SEQ ID NO: 13370 - RNA, 20 nt, Artificial Sequence
  Antisense oligo
caguaaccagcaacaagacc

SEQ ID NO: 13371 - RNA, 20 nt, Artificial Sequence
  Antisense oligo
ccaguaaccagcaacaagac

SEQ ID NO: 13372 - RNA, 20 nt, Artificial Sequence
  Antisense oligo
aagaagagacgccgaccucc

SEQ ID NO: 13373 - RNA, 20 nt, Artificial Sequence
  Antisense oligo
aaagaagagacgccgaccuc

SEQ ID NO: 13374 - RNA, 20 nt, Artificial Sequence
  Antisense oligo
caaagaagagacgccgaccu

SEQ ID NO: 13375 - RNA, 20 nt, Artificial Sequence
  Antisense oligo
acaaagaagagacgccgacc

SEQ ID NO: 13376 - RNA, 20 nt, Artificial Sequence
  Antisense oligo
gacaaagaagagacgccgac

SEQ ID NO: 13377 - RNA, 20 nt, Artificial Sequence
  Antisense oligo
ggucucaaugcagcaaacag

SEQ ID NO: 13378 - RNA, 20 nt, Artificial Sequence
  Antisense oligo
gggucucaaugcagcaaaca

SEQ ID NO: 13379 - RNA, 20 nt, Artificial Sequence
  Antisense oligo
gagggucucaaugcagcaaa

SEQ ID NO: 13380 - RNA, 20 nt, Artificial Sequence
  Antisense oligo
ugggcaaaagccaaaccgcc

SEQ ID NO: 13381 - RNA, 20 nt, Artificial Sequence
  Antisense oligo
gugggcaaaagccaaaccgc

SEQ ID NO: 13382 - RNA, 20 nt, Artificial Sequence
  Antisense oligo
agugggcaaaagccaaaccg

SEQ ID NO: 13383 - RNA, 20 nt, Artificial Sequence
  Antisense oligo
cacagugggcaaaagccaaa

SEQ ID NO: 13384 - RNA, 20 nt, Artificial Sequence
  Antisense oligo
cauccguuucugccacugac

SEQ ID NO: 13385 - RNA, 20 nt, Artificial Sequence
  Antisense oligo
ggucauccguuucugccacu

SEQ ID NO: 13386 - RNA, 20 nt, Artificial Sequence
  Antisense oligo
gggucauccguuucugccac

SEQ ID NO: 13387 - RNA, 20 nt, Artificial Sequence
  Antisense oligo
ugggucauccguuucugcca

SEQ ID NO: 13388 - RNA, 20 nt, Artificial Sequence
  Antisense oligo
uugggucauccguuucugcc

SEQ ID NO: 13389 - RNA, 20 nt, Artificial Sequence
  Antisense oligo
guugggucauccguuucugc

SEQ ID NO: 13390 - RNA, 20 nt, Artificial Sequence
  Antisense oligo
gguugggucauccguuucug

SEQ ID NO: 13391 - RNA, 20 nt, Artificial Sequence
  Antisense oligo
cgguugggucauccguuucu

SEQ ID NO: 13392 - RNA, 20 nt, Artificial Sequence
  Antisense oligo
uggagacgguugggucaucc

SEQ ID NO: 13393 - RNA, 20 nt, Artificial Sequence
  Antisense oligo
guggagacgguugggucauc

SEQ ID NO: 13394 - RNA, 20 nt, Artificial Sequence
  Antisense oligo
gguggagacgguugggucau

SEQ ID NO: 13395 - RNA, 20 nt, Artificial Sequence
  Antisense oligo
ugguggagacgguuggguca

SEQ ID NO: 13396 - RNA, 20 nt, Artificial Sequence
  Antisense oligo
uugguggagacgguuggguc

SEQ ID NO: 13397 - RNA, 20 nt, Artificial Sequence
  Antisense oligo
guugguggagacgguugggu

SEQ ID NO: 13398 - RNA, 20 nt, Artificial Sequence
  Antisense oligo
uguugguggagacgguuggg

SEQ ID NO: 13399 - RNA, 20 nt, Artificial Sequence
  Antisense oligo
cuguugguggagacgguugg

SEQ ID NO: 13400 - RNA, 20 nt, Artificial Sequence
  Antisense oligo
ccuguugguggagacgguug

SEQ ID NO: 13401 - RNA, 20 nt, Artificial Sequence
  Antisense oligo
accuguugguggagacgguu

SEQ ID NO: 13402 - RNA, 20 nt, Artificial Sequence
  Antisense oligo
ucguucuggucucugagcau

SEQ ID NO: 13403 - RNA, 20 nt, Artificial Sequence
  Antisense oligo
cucguucuggucucugagca

SEQ ID NO: 13404 - RNA, 20 nt, Artificial Sequence
  Antisense oligo
ucucguucuggucucugagc

SEQ ID NO: 13405 - RNA, 20 nt, Artificial Sequence
  Antisense oligo
cucucguucuggucucugag

SEQ ID NO: 13406 - RNA, 20 nt, Artificial Sequence
  Antisense oligo
agcucucguucuggucucug

SEQ ID NO: 13407 - RNA, 20 nt, Artificial Sequence
  Antisense oligo
cagcucucguucuggucucu

SEQ ID NO: 13408 - RNA, 20 nt, Artificial Sequence
  Antisense oligo
gcagcucucguucuggucuc

SEQ ID NO: 13409 - RNA, 20 nt, Artificial Sequence
  Antisense oligo
gugcagcucucguucugguc

SEQ ID NO: 13410 - RNA, 20 nt, Artificial Sequence
  Antisense oligo
cgugcagcucucguucuggu

SEQ ID NO: 13411 - RNA, 20 nt, Artificial Sequence
  Antisense oligo
uugcgcgugcagcucucguu

SEQ ID NO: 13412 - RNA, 20 nt, Artificial Sequence
  Antisense oligo
auugcgcgugcagcucucgu

SEQ ID NO: 13413 - RNA, 20 nt, Artificial Sequence
  Antisense oligo
uauugcgcgugcagcucucg

SEQ ID NO: 13414 - RNA, 20 nt, Artificial Sequence
  Antisense oligo
auauugcgcgugcagcucuc

SEQ ID NO: 13415 - RNA, 20 nt, Artificial Sequence
  Antisense oligo
cauauugcgcgugcagcucu

SEQ ID NO: 13416 - RNA, 20 nt, Artificial Sequence
  Antisense oligo
gcauauugcgcgugcagcuc

SEQ ID NO: 13417 - RNA, 20 nt, Artificial Sequence
  Antisense oligo
caccacccuccgcauauugc

SEQ ID NO: 13418 - RNA, 20 nt, Artificial Sequence
  Antisense oligo
gcaccacccuccgcauauug

SEQ ID NO: 13419 - RNA, 20 nt, Artificial Sequence
  Antisense oligo
agcaccacccuccgcauauu

SEQ ID NO: 13420 - RNA, 20 nt, Artificial Sequence
  Antisense oligo
gagcaccacccuccgcauau

SEQ ID NO: 13421 - RNA, 20 nt, Artificial Sequence
  Antisense oligo
auucaagaggcccaggagga

SEQ ID NO: 13422 - RNA, 20 nt, Artificial Sequence
  Antisense oligo
gaaaugaugcccacuccuca

SEQ ID NO: 13423 - RNA, 20 nt, Artificial Sequence
  Antisense oligo
gugaaaugaugcccacuccu

SEQ ID NO: 13424 - RNA, 20 nt, Artificial Sequence
  Antisense oligo
acacagugaaaugaugccca

SEQ ID NO: 13425 - RNA, 20 nt, Artificial Sequence
  Antisense oligo
aacacacagugaaaugaugc

SEQ ID NO: 13426 - RNA, 20 nt, Artificial Sequence
  Antisense oligo
caacacacagugaaaugaug

SEQ ID NO: 13427 - RNA, 20 nt, Artificial Sequence
  Antisense oligo
cccaacacacagugaaauga

SEQ ID NO: 13428 - RNA, 20 nt, Artificial Sequence
  Antisense oligo
gaaaccugagaggguguccc

SEQ ID NO: 13429 - RNA, 20 nt, Artificial Sequence
  Antisense oligo
ggaaaccugagagggugucc

SEQ ID NO: 13430 - RNA, 20 nt, Artificial Sequence
  Antisense oligo
uggaaaccugagaggguguc

SEQ ID NO: 13431 - RNA, 20 nt, Artificial Sequence
  Antisense oligo
cacugcuucugcugagccau

SEQ ID NO: 13432 - RNA, 20 nt, Artificial Sequence
  Antisense oligo
ucacugcuucugcugagcca

SEQ ID NO: 13433 - RNA, 20 nt, Artificial Sequence
  Antisense oligo
ugugucacugcuucugcuga

SEQ ID NO: 13434 - RNA, 20 nt, Artificial Sequence
  Antisense oligo
cugugucacugcuucugcug

SEQ ID NO: 13435 - RNA, 20 nt, Artificial Sequence
  Antisense oligo
acugugucacugcuucugcu

SEQ ID NO: 13436 - RNA, 20 nt, Artificial Sequence
  Antisense oligo
auucccacugugucacugcu

SEQ ID NO: 13437 - RNA, 20 nt, Artificial Sequence
  Antisense oligo
agauucccacugugucacug

SEQ ID NO: 13438 - RNA, 20 nt, Artificial Sequence
  Antisense oligo
uagauucccacugugucacu

SEQ ID NO: 13439 - RNA, 20 nt, Artificial Sequence
  Antisense oligo
cuuagauucccacuguguca

SEQ ID NO: 13440 - RNA, 20 nt, Artificial Sequence
  Antisense oligo
ucuuagauucccacuguguc

SEQ ID NO: 13441 - RNA, 20 nt, Artificial Sequence
  Antisense oligo
cucuuagauucccacugugu

SEQ ID NO: 13442 - RNA, 20 nt, Artificial Sequence
  Antisense oligo
gcucuuagauucccacugug

SEQ ID NO: 13443 - RNA, 20 nt, Artificial Sequence
  Antisense oligo
ugcucuuagauucccacugu

SEQ ID NO: 13444 - RNA, 20 nt, Artificial Sequence
  Antisense oligo
gaugcucuuagauucccacu

SEQ ID NO: 13445 - RNA, 20 nt, Artificial Sequence
  Antisense oligo
agaugcucuuagauucccac

SEQ ID NO: 13446 - RNA, 20 nt, Artificial Sequence
  Antisense oligo
gagaugcucuuagauuccca

SEQ ID NO: 13447 - RNA, 20 nt, Artificial Sequence
  Antisense oligo
aggaagggaaguccguuggc

SEQ ID NO: 13448 - RNA, 20 nt, Artificial Sequence
  Antisense oligo
caggaagggaaguccguugg

SEQ ID NO: 13449 - RNA, 20 nt, Artificial Sequence
  Antisense oligo
ccaggaagggaaguccguug

SEQ ID NO: 13450 - RNA, 20 nt, Artificial Sequence
  Antisense oligo
cccaggaagggaaguccguu

SEQ ID NO: 13451 - RNA, 20 nt, Artificial Sequence
  Antisense oligo
agugcuucugucccaccucc

SEQ ID NO: 13452 - RNA, 20 nt, Artificial Sequence
  Antisense oligo
ggagugcuucugucccaccu

SEQ ID NO: 13453 - RNA, 20 nt, Artificial Sequence
  Antisense oligo
auggccguggcugagcuguu

SEQ ID NO: 13454 - RNA, 20 nt, Artificial Sequence
  Antisense oligo
agacguucagcauggccgug

SEQ ID NO: 13455 - RNA, 20 nt, Artificial Sequence
  Antisense oligo
cagacguucagcauggccgu

SEQ ID NO: 13456 - RNA, 20 nt, Artificial Sequence
  Antisense oligo
acagacguucagcauggccg

SEQ ID NO: 13457 - RNA, 20 nt, Artificial Sequence
  Antisense oligo
aacagacguucagcauggcc

SEQ ID NO: 13458 - RNA, 20 nt, Artificial Sequence
  Antisense oligo
aaacagacguucagcauggc

SEQ ID NO: 13459 - RNA, 20 nt, Artificial Sequence
  Antisense oligo
gaaacagacguucagcaugg

SEQ ID NO: 13460 - RNA, 20 nt, Artificial Sequence
  Antisense oligo
agaaacagacguucagcaug

SEQ ID NO: 13461 - RNA, 20 nt, Artificial Sequence
  Antisense oligo
cagaaacagacguucagcau

SEQ ID NO: 13462 - RNA, 20 nt, Artificial Sequence
  Antisense oligo
gcagaaacagacguucagca

SEQ ID NO: 13463 - RNA, 20 nt, Artificial Sequence
  Antisense oligo
ggcagaaacagacguucagc

SEQ ID NO: 13464 - RNA, 20 nt, Artificial Sequence
  Antisense oligo
aggcagaaacagacguucag

SEQ ID NO: 13465 - RNA, 20 nt, Artificial Sequence
  Antisense oligo
aaggcagaaacagacguuca

SEQ ID NO: 13466 - RNA, 20 nt, Artificial Sequence
  Antisense oligo
aaaggcagaaacagacguuc

SEQ ID NO: 13467 - RNA, 20 nt, Artificial Sequence
  Antisense oligo
uacccgcaagaaagaggcug

SEQ ID NO: 13468 - RNA, 20 nt, Artificial Sequence
  Antisense oligo
auacccgcaagaaagaggcu

SEQ ID NO: 13469 - RNA, 20 nt, Artificial Sequence
  Antisense oligo
gauacccgcaagaaagaggc

SEQ ID NO: 13470 - RNA, 20 nt, Artificial Sequence
  Antisense oligo
ggauacccgcaagaaagagg

SEQ ID NO: 13471 - RNA, 20 nt, Artificial Sequence
  Antisense oligo
uggauacccgcaagaaagag

SEQ ID NO: 13472 - RNA, 20 nt, Artificial Sequence
  Antisense oligo
uuggauacccgcaagaaaga

SEQ ID NO: 13473 - RNA, 20 nt, Artificial Sequence
  Antisense oligo
cgcaucuuggauacccgcaa

SEQ ID NO: 13474 - RNA, 20 nt, Artificial Sequence
  Antisense oligo
gcgcaucuuggauacccgca

SEQ ID NO: 13475 - RNA, 20 nt, Artificial Sequence
  Antisense oligo
aggcgcaucuuggauacccg

SEQ ID NO: 13476 - RNA, 20 nt, Artificial Sequence
  Antisense oligo
cugaggcgcaucuuggauac

SEQ ID NO: 13477 - RNA, 20 nt, Artificial Sequence
  Antisense oligo
acugaggcgcaucuuggaua

SEQ ID NO: 13478 - RNA, 20 nt, Artificial Sequence
  Antisense oligo
cacugaggcgcaucuuggau

SEQ ID NO: 13479 - RNA, 20 nt, Artificial Sequence
  Antisense oligo
acacugaggcgcaucuugga

SEQ ID NO: 13480 - RNA, 20 nt, Artificial Sequence
  Antisense oligo
gacacugaggcgcaucuugg

SEQ ID NO: 13481 - RNA, 20 nt, Artificial Sequence
  Antisense oligo
agacacugaggcgcaucuug

SEQ ID NO: 13482 - RNA, 20 nt, Artificial Sequence
  Antisense oligo
aaagacacugaggcgcaucu

SEQ ID NO: 13483 - RNA, 20 nt, Artificial Sequence
  Antisense oligo
aaaagacacugaggcgcauc

SEQ ID NO: 13484 - RNA, 20 nt, Artificial Sequence
  Antisense oligo
ccaaccacuccagaggguga

SEQ ID NO: 13485 - RNA, 20 nt, Artificial Sequence
  Antisense oligo
ugccaaccacuccagagggu

SEQ ID NO: 13486 - RNA, 20 nt, Artificial Sequence
  Antisense oligo
ccuugccaaccacuccagag

SEQ ID NO: 13487 - RNA, 20 nt, Artificial Sequence
  Antisense oligo
cccuugccaaccacuccaga

SEQ ID NO: 13488 - RNA, 20 nt, Artificial Sequence
  Antisense oligo
ucccuugccaaccacuccag

SEQ ID NO: 13489 - RNA, 20 nt, Artificial Sequence
  Antisense oligo
ggcuucccuugccaaccacu

SEQ ID NO: 13490 - RNA, 20 nt, Artificial Sequence
  Antisense oligo
aggcuucccuugccaaccac

SEQ ID NO: 13491 - RNA, 20 nt, Artificial Sequence
  Antisense oligo
caggcuucccuugccaacca

SEQ ID NO: 13492 - RNA, 20 nt, Artificial Sequence
  Antisense oligo
ugcaggcuucccuugccaac

SEQ ID NO: 13493 - RNA, 20 nt, Artificial Sequence
  Antisense oligo
uugcaggcuucccuugccaa

SEQ ID NO: 13494 - RNA, 20 nt, Artificial Sequence
  Antisense oligo
ugguugcaggcuucccuugc

SEQ ID NO: 13495 - RNA, 20 nt, Artificial Sequence
  Antisense oligo
cugguugcaggcuucccuug

SEQ ID NO: 13496 - RNA, 20 nt, Artificial Sequence
  Antisense oligo
uggagagcguccugguugca

SEQ ID NO: 13497 - RNA, 20 nt, Artificial Sequence
  Antisense oligo
acaguaccugaaugugcccg

SEQ ID NO: 13498 - RNA, 20 nt, Artificial Sequence
  Antisense oligo
uuagucacaguaccugaaug

SEQ ID NO: 13499 - RNA, 20 nt, Artificial Sequence
  Antisense oligo
uccuuuagucacaguaccug

SEQ ID NO: 13500 - RNA, 20 nt, Artificial Sequence
  Antisense oligo
uuccuuuagucacaguaccu

SEQ ID NO: 13501 - RNA, 20 nt, Artificial Sequence
  Antisense oligo
gcuuccuuuagucacaguac

SEQ ID NO: 13502 - RNA, 20 nt, Artificial Sequence
  Antisense oligo
ugcuuccuuuagucacagua

SEQ ID NO: 13503 - RNA, 20 nt, Artificial Sequence
  Antisense oligo
ccuugcuuccuuuagucaca

SEQ ID NO: 13504 - RNA, 20 nt, Artificial Sequence
  Antisense oligo
acuccuugcuuccuuuaguc

SEQ ID NO: 13505 - RNA, 20 nt, Artificial Sequence
  Antisense oligo
gagccacuccuugcuuccuu

SEQ ID NO: 13506 - RNA, 20 nt, Artificial Sequence
  Antisense oligo
ccaccagauuggagccacuc

SEQ ID NO: 13507 - RNA, 20 nt, Artificial Sequence
  Antisense oligo
gccaccagauuggagccacu

SEQ ID NO: 13508 - RNA, 20 nt, Artificial Sequence
  Antisense oligo
ugccaccagauuggagccac

SEQ ID NO: 13509 - RNA, 20 nt, Artificial Sequence
  Antisense oligo
cugccaccagauuggagcca

SEQ ID NO: 13510 - RNA, 20 nt, Artificial Sequence
  Antisense oligo
ugcugccaccagauuggagc

SEQ ID NO: 13511 - RNA, 20 nt, Artificial Sequence
  Antisense oligo
augcugccaccagauuggag

SEQ ID NO: 13512 - RNA, 20 nt, Artificial Sequence
  Antisense oligo
uggcugagagguuuggaaag

SEQ ID NO: 13513 - RNA, 20 nt, Artificial Sequence
  Antisense oligo
gaauggcugagagguuugga

SEQ ID NO: 13514 - RNA, 20 nt, Artificial Sequence
  Antisense oligo
ugaauggcugagagguuugg

SEQ ID NO: 13515 - RNA, 20 nt, Artificial Sequence
  Antisense oligo
uugaauggcugagagguuug

SEQ ID NO: 13516 - RNA, 20 nt, Artificial Sequence
  Antisense oligo
uuugaauggcugagagguuu

SEQ ID NO: 13517 - RNA, 20 nt, Artificial Sequence
  Antisense oligo
agcuuugaauggcugagagg

SEQ ID NO: 13518 - RNA, 20 nt, Artificial Sequence
  Antisense oligo
acuuuacagcuuugaauggc

SEQ ID NO: 13519 - RNA, 20 nt, Artificial Sequence
  Antisense oligo
ccuacugugugcuucuuggg

SEQ ID NO: 13520 - RNA, 20 nt, Artificial Sequence
  Antisense oligo
uccagaccuacugugugcuu

SEQ ID NO: 13521 - RNA, 20 nt, Artificial Sequence
  Antisense oligo
cuguccagaccuacugugug

SEQ ID NO: 13522 - RNA, 20 nt, Artificial Sequence
  Antisense oligo
cacuguccagaccuacugug

SEQ ID NO: 13523 - RNA, 20 nt, Artificial Sequence
  Antisense oligo
gccacuguccagaccuacug

SEQ ID NO: 13524 - RNA, 20 nt, Artificial Sequence
  Antisense oligo
ugucgguaaauguucuacuc

SEQ ID NO: 13525 - RNA, 20 nt, Artificial Sequence
  Antisense oligo
acugaaaacagcagcccuuu

SEQ ID NO: 13526 - RNA, 20 nt, Artificial Sequence
  Antisense oligo
acagcaggacugggaaaauc

SEQ ID NO: 13527 - RNA, 20 nt, Artificial Sequence
  Antisense oligo
aacagcaggacugggaaaau

SEQ ID NO: 13528 - RNA, 20 nt, Artificial Sequence
  Antisense oligo
ucuucaaacagcaggacugg

SEQ ID NO: 13529 - RNA, 20 nt, Artificial Sequence
  Antisense oligo
uucuucaaacagcaggacug

SEQ ID NO: 13530 - RNA, 20 nt, Artificial Sequence
  Antisense oligo
auucuucaaacagcaggacu

SEQ ID NO: 13531 - RNA, 20 nt, Artificial Sequence
  Antisense oligo
cauucuucaaacagcaggac

SEQ ID NO: 13532 - RNA, 20 nt, Artificial Sequence
  Antisense oligo
uaccauucuucaaacagcag

SEQ ID NO: 13533 - RNA, 20 nt, Artificial Sequence
  Antisense oligo
gcuguuaccauucuucaaac

SEQ ID NO: 13534 - RNA, 20 nt, Artificial Sequence
  Antisense oligo
gguuuugcuguuaccauucu

SEQ ID NO: 13535 - RNA, 20 nt, Artificial Sequence
  Antisense oligo
gguccugguuuugcuguuac

SEQ ID NO: 13536 - RNA, 20 nt, Artificial Sequence
  Antisense oligo
auacugcuggguccugguuu

SEQ ID NO: 13537 - RNA, 20 nt, Artificial Sequence
  Antisense oligo
aauauacugcuggguccugg

SEQ ID NO: 13538 - RNA, 20 nt, Artificial Sequence
  Antisense oligo
gaauauacugcuggguccug

SEQ ID NO: 13539 - RNA, 20 nt, Artificial Sequence
  Antisense oligo
ugaauauacugcuggguccu

SEQ ID NO: 13540 - RNA, 20 nt, Artificial Sequence
  Antisense oligo
gugaauauacugcugggucc

SEQ ID NO: 13541 - RNA, 20 nt, Artificial Sequence
  Antisense oligo
agugaauauacugcuggguc

SEQ ID NO: 13542 - RNA, 20 nt, Artificial Sequence
  Antisense oligo
gucucaugggugacagaaaa

SEQ ID NO: 13543 - RNA, 20 nt, Artificial Sequence
  Antisense oligo
agucucaugggugacagaaa

SEQ ID NO: 13544 - RNA, 20 nt, Artificial Sequence
  Antisense oligo
uagucucaugggugacagaa

SEQ ID NO: 13545 - RNA, 20 nt, Artificial Sequence
  Antisense oligo
uuagucucaugggugacaga

SEQ ID NO: 13546 - RNA, 20 nt, Artificial Sequence
  Antisense oligo
aagguuagucucauggguga

SEQ ID NO: 13547 - RNA, 20 nt, Artificial Sequence
  Antisense oligo
caagguuagucucaugggug

SEQ ID NO: 13548 - RNA, 20 nt, Artificial Sequence
  Antisense oligo
ucaagguuagucucaugggu

SEQ ID NO: 13549 - RNA, 20 nt, Artificial Sequence
  Antisense oligo
aaucaagguuagucucaugg

SEQ ID NO: 13550 - RNA, 20 nt, Artificial Sequence
  Antisense oligo
ggccacauccaagauaauca

SEQ ID NO: 13551 - RNA, 20 nt, Artificial Sequence
  Antisense oligo
cggccacauccaagauaauc

SEQ ID NO: 13552 - RNA, 20 nt, Artificial Sequence
  Antisense oligo
acggccacauccaagauaau

SEQ ID NO: 13553 - RNA, 20 nt, Artificial Sequence
  Antisense oligo
cacggccacauccaagauaa

SEQ ID NO: 13554 - RNA, 20 nt, Artificial Sequence
  Antisense oligo
acacggccacauccaagaua

SEQ ID NO: 13555 - RNA, 20 nt, Artificial Sequence
  Antisense oligo
uacacggccacauccaagau

SEQ ID NO: 13556 - RNA, 20 nt, Artificial Sequence
  Antisense oligo
auacacggccacauccaaga

SEQ ID NO: 13557 - RNA, 20 nt, Artificial Sequence
  Antisense oligo
aauacacggccacauccaag

SEQ ID NO: 13558 - RNA, 20 nt, Artificial Sequence
  Antisense oligo
caauacacggccacauccaa

SEQ ID NO: 13559 - RNA, 20 nt, Artificial Sequence
  Antisense oligo
ucaauacacggccacaucca

SEQ ID NO: 13560 - RNA, 20 nt, Artificial Sequence
  Antisense oligo
cucaauacacggccacaucc

SEQ ID NO: 13561 - RNA, 20 nt, Artificial Sequence
  Antisense oligo
ccucaauacacggccacauc

SEQ ID NO: 13562 - RNA, 20 nt, Artificial Sequence
  Antisense oligo
uccucaauacacggccacau

SEQ ID NO: 13563 - RNA, 20 nt, Artificial Sequence
  Antisense oligo
uuccucaauacacggccaca

SEQ ID NO: 13564 - RNA, 20 nt, Artificial Sequence
  Antisense oligo
ccuuccucaauacacggcca

SEQ ID NO: 13565 - RNA, 20 nt, Artificial Sequence
  Antisense oligo
uccuuccucaauacacggcc

SEQ ID NO: 13566 - RNA, 20 nt, Artificial Sequence
  Antisense oligo
cuccuuccucaauacacggc

SEQ ID NO: 13567 - RNA, 20 nt, Artificial Sequence
  Antisense oligo
cccuccuuccucaauacacg

SEQ ID NO: 13568 - RNA, 20 nt, Artificial Sequence
  Antisense oligo
caggaggucugagagucugu

SEQ ID NO: 13569 - RNA, 20 nt, Artificial Sequence
  Antisense oligo
gcaggaggucugagagucug

SEQ ID NO: 13570 - RNA, 20 nt, Artificial Sequence
  Antisense oligo
aggcaggaggucugagaguc

SEQ ID NO: 13571 - RNA, 20 nt, Artificial Sequence
  Antisense oligo
aggcuuucaggcaggagguc

SEQ ID NO: 13572 - RNA, 20 nt, Artificial Sequence
  Antisense oligo
uaggcuuucaggcaggaggu

SEQ ID NO: 13573 - RNA, 20 nt, Artificial Sequence
  Antisense oligo
uuaggcuuucaggcaggagg

SEQ ID NO: 13574 - RNA, 20 nt, Artificial Sequence
  Antisense oligo
ucuuaggcuuucaggcagga

SEQ ID NO: 13575 - RNA, 20 nt, Artificial Sequence
  Antisense oligo
uucuuaggcuuucaggcagg

SEQ ID NO: 13576 - RNA, 20 nt, Artificial Sequence
  Antisense oligo
uuucuuaggcuuucaggcag

SEQ ID NO: 13577 - RNA, 20 nt, Artificial Sequence
  Antisense oligo
guuucuuaggcuuucaggca

SEQ ID NO: 13578 - RNA, 20 nt, Artificial Sequence
  Antisense oligo
cacugguuucuuaggcuuuc

SEQ ID NO: 13579 - RNA, 20 nt, Artificial Sequence
  Antisense oligo
ucacugguuucuuaggcuuu

SEQ ID NO: 13580 - RNA, 20 nt, Artificial Sequence
  Antisense oligo
agucacugguuucuuaggcu

SEQ ID NO: 13581 - RNA, 20 nt, Artificial Sequence
  Antisense oligo
aagucacugguuucuuaggc

SEQ ID NO: 13582 - RNA, 20 nt, Artificial Sequence
  Antisense oligo
ccaagucacugguuucuuag

SEQ ID NO: 13583 - RNA, 20 nt, Artificial Sequence
  Antisense oligo
agagaugggaaaacugggcc

SEQ ID NO: 13584 - RNA, 20 nt, Artificial Sequence
  Antisense oligo
aaccuaucacuggcacagaa

SEQ ID NO: 13585 - RNA, 20 nt, Artificial Sequence
  Antisense oligo
gaaccuaucacuggcacaga

SEQ ID NO: 13586 - RNA, 20 nt, Artificial Sequence
  Antisense oligo
cgaaccuaucacuggcacag

SEQ ID NO: 13587 - RNA, 20 nt, Artificial Sequence
  Antisense oligo
gcgaaccuaucacuggcaca

SEQ ID NO: 13588 - RNA, 20 nt, Artificial Sequence
  Antisense oligo
agcgaaccuaucacuggcac

SEQ ID NO: 13589 - RNA, 20 nt, Artificial Sequence
  Antisense oligo
aagcgaaccuaucacuggca

SEQ ID NO: 13590 - RNA, 20 nt, Artificial Sequence
  Antisense oligo
aaagcgaaccuaucacuggc

SEQ ID NO: 13591 - RNA, 20 nt, Artificial Sequence
  Antisense oligo
caaagcgaaccuaucacugg

SEQ ID NO: 13592 - RNA, 20 nt, Artificial Sequence
  Antisense oligo
ccaaagcgaaccuaucacug

SEQ ID NO: 13593 - RNA, 20 nt, Artificial Sequence
  Antisense oligo
cccaaagcgaaccuaucacu

SEQ ID NO: 13594 - RNA, 20 nt, Artificial Sequence
  Antisense oligo
gcccaaagcgaaccuaucac

SEQ ID NO: 13595 - RNA, 20 nt, Artificial Sequence
  Antisense oligo
ugcagaucacaccuggcugu

SEQ ID NO: 13596 - RNA, 20 nt, Artificial Sequence
  Antisense oligo
uuccucacguucccuccugc

SEQ ID NO: 13597 - RNA, 20 nt, Artificial Sequence
  Antisense oligo
cuuccucacguucccuccug

SEQ ID NO: 13598 - RNA, 20 nt, Artificial Sequence
  Antisense oligo
cgcuucuuccucacguuccc

SEQ ID NO: 13599 - RNA, 20 nt, Artificial Sequence
  Antisense oligo
ccgcuucuuccucacguucc

SEQ ID NO: 13600 - RNA, 20 nt, Artificial Sequence
  Antisense oligo
cccgcuucuuccucacguuc

SEQ ID NO: 13601 - RNA, 20 nt, Artificial Sequence
  Antisense oligo
gucacgaggaaggugucugu

SEQ ID NO: 13602 - RNA, 20 nt, Artificial Sequence
  Antisense oligo
ggucacgaggaaggugucug

SEQ ID NO: 13603 - RNA, 20 nt, Artificial Sequence
  Antisense oligo
uggucacgaggaaggugucu

SEQ ID NO: 13604 - RNA, 20 nt, Artificial Sequence
  Antisense oligo
cuggucacgaggaagguguc

SEQ ID NO: 13605 - RNA, 20 nt, Artificial Sequence
  Antisense oligo
gaaacgaaggauaacuagag

SEQ ID NO: 13606 - RNA, 20 nt, Artificial Sequence
  Antisense oligo
aucuccuaaaaucccuucag

SEQ ID NO: 13607 - RNA, 20 nt, Artificial Sequence
  Antisense oligo
gaucuccuaaaaucccuuca

SEQ ID NO: 13608 - RNA, 20 nt, Artificial Sequence
  Antisense oligo
ugaucuccuaaaaucccuuc

SEQ ID NO: 13609 - RNA, 20 nt, Artificial Sequence
  Antisense oligo
ggaacggagggaaaugaaaa

SEQ ID NO: 13610 - RNA, 20 nt, Artificial Sequence
  Antisense oligo
aggaacggagggaaaugaaa

SEQ ID NO: 13611 - RNA, 20 nt, Artificial Sequence
  Antisense oligo
gaggaacggagggaaaugaa

SEQ ID NO: 13612 - RNA, 20 nt, Artificial Sequence
  Antisense oligo
aggaggaacggagggaaaug

SEQ ID NO: 13613 - RNA, 20 nt, Artificial Sequence
  Antisense oligo
gagaguccacaaggaggaac

SEQ ID NO: 13614 - RNA, 20 nt, Artificial Sequence
  Antisense oligo
agcaucaagagaguccacaa

SEQ ID NO: 13615 - RNA, 20 nt, Artificial Sequence
  Antisense oligo
aagcaucaagagaguccaca

SEQ ID NO: 13616 - RNA, 20 nt, Artificial Sequence
  Antisense oligo
aaagcaucaagagaguccac

SEQ ID NO: 13617 - RNA, 20 nt, Artificial Sequence
  Antisense oligo
aaaagcaucaagagagucca

SEQ ID NO: 13618 - RNA, 20 nt, Artificial Sequence
  Antisense oligo
cugggcgacagagugagacu

SEQ ID NO: 13619 - RNA, 20 nt, Artificial Sequence
  Antisense oligo
aucacugcacuccagccugg

SEQ ID NO: 13620 - RNA, 20 nt, Artificial Sequence
  Antisense oligo
caucacugcacuccagccug

SEQ ID NO: 13621 - RNA, 20 nt, Artificial Sequence
  Antisense oligo
gcaucacugcacuccagccu

SEQ ID NO: 13622 - RNA, 20 nt, Artificial Sequence
  Antisense oligo
ucgcaucacugcacuccagc

SEQ ID NO: 13623 - RNA, 20 nt, Artificial Sequence
  Antisense oligo
agugagcugagaucgcauca

SEQ ID NO: 13624 - RNA, 20 nt, Artificial Sequence
  Antisense oligo
cagugagcugagaucgcauc

SEQ ID NO: 13625 - RNA, 20 nt, Artificial Sequence
  Antisense oligo
aacccaggagguggaaguuu

SEQ ID NO: 13626 - RNA, 20 nt, Artificial Sequence
  Antisense oligo
gaacccaggagguggaaguu

SEQ ID NO: 13627 - RNA, 20 nt, Artificial Sequence
  Antisense oligo
ugaacccaggagguggaagu

SEQ ID NO: 13628 - RNA, 20 nt, Artificial Sequence
  Antisense oligo
uugaacccaggagguggaag

SEQ ID NO: 13629 - RNA, 20 nt, Artificial Sequence
  Antisense oligo
cuugaacccaggagguggaa

SEQ ID NO: 13630 - RNA, 20 nt, Artificial Sequence
  Antisense oligo
gcuugaacccaggaggugga

SEQ ID NO: 13631 - RNA, 20 nt, Artificial Sequence
  Antisense oligo
ucgcuugaacccaggaggug

SEQ ID NO: 13632 - RNA, 20 nt, Artificial Sequence
  Antisense oligo
aucgcuugaacccaggaggu

SEQ ID NO: 13633 - RNA, 20 nt, Artificial Sequence
  Antisense oligo
aaucgcuugaacccaggagg

SEQ ID NO: 13634 - RNA, 20 nt, Artificial Sequence
  Antisense oligo
gaaucgcuugaacccaggag

SEQ ID NO: 13635 - RNA, 20 nt, Artificial Sequence
  Antisense oligo
agaaucgcuugaacccagga

SEQ ID NO: 13636 - RNA, 20 nt, Artificial Sequence
  Antisense oligo
gagaaucgcuugaacccagg

SEQ ID NO: 13637 - RNA, 20 nt, Artificial Sequence
  Antisense oligo
ggagaaucgcuugaacccag

SEQ ID NO: 13638 - RNA, 20 nt, Artificial Sequence
  Antisense oligo
aggagaaucgcuugaaccca

SEQ ID NO: 13639 - RNA, 20 nt, Artificial Sequence
  Antisense oligo
caggagaaucgcuugaaccc

SEQ ID NO: 13640 - RNA, 20 nt, Artificial Sequence
  Antisense oligo
gcaggagaaucgcuugaacc

SEQ ID NO: 13641 - RNA, 20 nt, Artificial Sequence
  Antisense oligo
ggcaggagaaucgcuugaac

SEQ ID NO: 13642 - RNA, 20 nt, Artificial Sequence
  Antisense oligo
aggcaggagaaucgcuugaa

SEQ ID NO: 13643 - RNA, 20 nt, Artificial Sequence
  Antisense oligo
gaggcaggagaaucgcuuga

SEQ ID NO: 13644 - RNA, 20 nt, Artificial Sequence
  Antisense oligo
ugaggcaggagaaucgcuug

SEQ ID NO: 13645 - RNA, 20 nt, Artificial Sequence
  Antisense oligo
cugaggcaggagaaucgcuu

SEQ ID NO: 13646 - RNA, 20 nt, Artificial Sequence
  Antisense oligo
ucugaggcaggagaaucgcu

SEQ ID NO: 13647 - RNA, 20 nt, Artificial Sequence
  Antisense oligo
gucugaggcaggagaaucgc

SEQ ID NO: 13648 - RNA, 20 nt, Artificial Sequence
  Antisense oligo
agucugaggcaggagaaucg

SEQ ID NO: 13649 - RNA, 20 nt, Artificial Sequence
  Antisense oligo
gagucugaggcaggagaauc

SEQ ID NO: 13650 - RNA, 20 nt, Artificial Sequence
  Antisense oligo
ggagucugaggcaggagaau

SEQ ID NO: 13651 - RNA, 20 nt, Artificial Sequence
  Antisense oligo
aguuugagaccagccuggcc

SEQ ID NO: 13652 - RNA, 20 nt, Artificial Sequence
  Antisense oligo
gaguuugagaccagccuggc

SEQ ID NO: 13653 - RNA, 20 nt, Artificial Sequence
  Antisense oligo
ggaguuugagaccagccugg

SEQ ID NO: 13654 - RNA, 20 nt, Artificial Sequence
  Antisense oligo
aggaguuugagaccagccug

SEQ ID NO: 13655 - RNA, 20 nt, Artificial Sequence
  Antisense oligo
caggaguuugagaccagccu

SEQ ID NO: 13656 - RNA, 20 nt, Artificial Sequence
  Antisense oligo
ucaggaguuugagaccagcc

SEQ ID NO: 13657 - RNA, 20 nt, Artificial Sequence
  Antisense oligo
gucaggaguuugagaccagc

SEQ ID NO: 13658 - RNA, 20 nt, Artificial Sequence
  Antisense oligo
ugaggucaggaguuugagac

SEQ ID NO: 13659 - RNA, 20 nt, Artificial Sequence
  Antisense oligo
cugaggucaggaguuugaga

SEQ ID NO: 13660 - RNA, 20 nt, Artificial Sequence
  Antisense oligo
aguggaucaccugaggucag

SEQ ID NO: 13661 - RNA, 20 nt, Artificial Sequence
  Antisense oligo
gaguggaucaccugagguca

SEQ ID NO: 13662 - RNA, 20 nt, Artificial Sequence
  Antisense oligo
cgaguggaucaccugagguc

SEQ ID NO: 13663 - RNA, 20 nt, Artificial Sequence
  Antisense oligo
gcgaguggaucaccugaggu

SEQ ID NO: 13664 - RNA, 20 nt, Artificial Sequence
  Antisense oligo
ucagugacucagggcugguc

SEQ ID NO: 13665 - RNA, 20 nt, Artificial Sequence
  Antisense oligo
gguucagugacucagggcug

SEQ ID NO: 13666 - RNA, 20 nt, Artificial Sequence
  Antisense oligo
agguucagugacucagggcu

SEQ ID NO: 13667 - RNA, 20 nt, Artificial Sequence
  Antisense oligo
ggagguucagugacucaggg

SEQ ID NO: 13668 - RNA, 20 nt, Artificial Sequence
  Antisense oligo
aggagguucagugacucagg

SEQ ID NO: 13669 - RNA, 20 nt, Artificial Sequence
  Antisense oligo
gaggagguucagugacucag

SEQ ID NO: 13670 - RNA, 20 nt, Artificial Sequence
  Antisense oligo
aagagcagacugaggagguu

SEQ ID NO: 13671 - RNA, 20 nt, Artificial Sequence
  Antisense oligo
gggaagagcagacugaggag

SEQ ID NO: 13672 - RNA, 20 nt, Artificial Sequence
  Antisense oligo
acagaacacgacggagccag

SEQ ID NO: 13673 - RNA, 20 nt, Artificial Sequence
  Antisense oligo
agguagucagggugcugcug

SEQ ID NO: 13674 - RNA, 20 nt, Artificial Sequence
  Antisense oligo
gagguagucagggugcugcu

SEQ ID NO: 13675 - RNA, 20 nt, Artificial Sequence
  Antisense oligo
ucgagguagucagggugcug

SEQ ID NO: 13676 - RNA, 20 nt, Artificial Sequence
  Antisense oligo
aucgagguagucagggugcu

SEQ ID NO: 13677 - RNA, 20 nt, Artificial Sequence
  Antisense oligo
aaucgagguagucagggugc

SEQ ID NO: 13678 - RNA, 20 nt, Artificial Sequence
  Antisense oligo
gaaucgagguagucagggug

SEQ ID NO: 13679 - RNA, 20 nt, Artificial Sequence
  Antisense oligo
ugaaucgagguagucagggu

SEQ ID NO: 13680 - RNA, 20 nt, Artificial Sequence
  Antisense oligo
gugaaucgagguagucaggg

SEQ ID NO: 13681 - RNA, 20 nt, Artificial Sequence
  Antisense oligo
ggugaaucgagguagucagg

SEQ ID NO: 13682 - RNA, 20 nt, Artificial Sequence
  Antisense oligo
uggugaaucgagguagucag

SEQ ID NO: 13683 - RNA, 20 nt, Artificial Sequence
  Antisense oligo
guggugaaucgagguaguca

SEQ ID NO: 13684 - RNA, 20 nt, Artificial Sequence
  Antisense oligo
gguggugaaucgagguaguc

SEQ ID NO: 13685 - RNA, 20 nt, Artificial Sequence
  Antisense oligo
ugguggugaaucgagguagu

SEQ ID NO: 13686 - RNA, 20 nt, Artificial Sequence
  Antisense oligo
gugguggugaaucgagguag

SEQ ID NO: 13687 - RNA, 20 nt, Artificial Sequence
  Antisense oligo
agugguggugaaucgaggua

SEQ ID NO: 13688 - RNA, 20 nt, Artificial Sequence
  Antisense oligo
cagugguggugaaucgaggu

SEQ ID NO: 13689 - RNA, 20 nt, Artificial Sequence
  Antisense oligo
acagugguggugaaucgagg

SEQ ID NO: 13690 - RNA, 20 nt, Artificial Sequence
  Antisense oligo
cacagugguggugaaucgag

SEQ ID NO: 13691 - RNA, 20 nt, Artificial Sequence
  Antisense oligo
agaacacagugguggugaau

SEQ ID NO: 13692 - RNA, 20 nt, Artificial Sequence
  Antisense oligo
cagaacacagugguggugaa

SEQ ID NO: 13693 - RNA, 20 nt, Artificial Sequence
  Antisense oligo
ccagaacacaguggugguga

SEQ ID NO: 13694 - RNA, 20 nt, Artificial Sequence
  Antisense oligo
agagggcaaaggacuccagu

SEQ ID NO: 13695 - RNA, 20 nt, Artificial Sequence
  Antisense oligo
cgagagggcaaaggacucca

SEQ ID NO: 13696 - RNA, 20 nt, Artificial Sequence
  Antisense oligo
ucccgagagggcaaaggacu

SEQ ID NO: 13697 - RNA, 20 nt, Artificial Sequence
  Antisense oligo
aucccgagagggcaaaggac

SEQ ID NO: 13698 - RNA, 20 nt, Artificial Sequence
  Antisense oligo
aaucccgagagggcaaagga

SEQ ID NO: 13699 - RNA, 20 nt, Artificial Sequence
  Antisense oligo
uaaucccgagagggcaaagg

SEQ ID NO: 13700 - RNA, 20 nt, Artificial Sequence
  Antisense oligo
uuaaucccgagagggcaaag

SEQ ID NO: 13701 - RNA, 20 nt, Artificial Sequence
  Antisense oligo
uuuaaucccgagagggcaaa

SEQ ID NO: 13702 - RNA, 20 nt, Artificial Sequence
  Antisense oligo
guuuaaucccgagagggcaa

SEQ ID NO: 13703 - RNA, 20 nt, Artificial Sequence
  Antisense oligo
uguuuaaucccgagagggca

SEQ ID NO: 13704 - RNA, 20 nt, Artificial Sequence
  Antisense oligo
cuguuuaaucccgagagggc

SEQ ID NO: 13705 - RNA, 20 nt, Artificial Sequence
  Antisense oligo
gcuguuuaaucccgagaggg

SEQ ID NO: 13706 - RNA, 20 nt, Artificial Sequence
  Antisense oligo
ggcuguuuaaucccgagagg

SEQ ID NO: 13707 - RNA, 20 nt, Artificial Sequence
  Antisense oligo
gggcuguuuaaucccgagag

SEQ ID NO: 13708 - RNA, 20 nt, Artificial Sequence
  Antisense oligo
ugggcuguuuaaucccgaga

SEQ ID NO: 13709 - RNA, 20 nt, Artificial Sequence
  Antisense oligo
uugggcuguuuaaucccgag

SEQ ID NO: 13710 - RNA, 20 nt, Artificial Sequence
  Antisense oligo
uuugggcuguuuaaucccga

SEQ ID NO: 13711 - RNA, 20 nt, Artificial Sequence
  Antisense oligo
auuugggcuguuuaaucccg

SEQ ID NO: 13712 - RNA, 20 nt, Artificial Sequence
  Antisense oligo
caggauuugggcuguuuaau

SEQ ID NO: 13713 - RNA, 20 nt, Artificial Sequence
  Antisense oligo
ggacucucaggauuugggcu

SEQ ID NO: 13714 - RNA, 20 nt, Artificial Sequence
  Antisense oligo
aggacucucaggauuugggc

SEQ ID NO: 13715 - RNA, 20 nt, Artificial Sequence
  Antisense oligo
aaggacucucaggauuuggg

SEQ ID NO: 13716 - RNA, 20 nt, Artificial Sequence
  Antisense oligo
aaaggacucucaggauuugg

SEQ ID NO: 13717 - RNA, 20 nt, Artificial Sequence
  Antisense oligo
acaaaggacucucaggauuu

SEQ ID NO: 13718 - RNA, 20 nt, Artificial Sequence
  Antisense oligo
cacaaaggacucucaggauu

SEQ ID NO: 13719 - RNA, 20 nt, Artificial Sequence
  Antisense oligo
acacaaaggacucucaggau

SEQ ID NO: 13720 - RNA, 20 nt, Artificial Sequence
  Antisense oligo
ggacacaaaggacucucagg

SEQ ID NO: 13721 - RNA, 20 nt, Artificial Sequence
  Antisense oligo
gggacacaaaggacucucag

SEQ ID NO: 13722 - RNA, 20 nt, Artificial Sequence
  Antisense oligo
cgggacacaaaggacucuca

SEQ ID NO: 13723 - RNA, 20 nt, Artificial Sequence
  Antisense oligo
uucgggacacaaaggacucu

SEQ ID NO: 13724 - RNA, 20 nt, Artificial Sequence
  Antisense oligo
guucgggacacaaaggacuc

SEQ ID NO: 13725 - RNA, 20 nt, Artificial Sequence
  Antisense oligo
aguucgggacacaaaggacu

SEQ ID NO: 13726 - RNA, 20 nt, Artificial Sequence
  Antisense oligo
gaguucgggacacaaaggac

SEQ ID NO: 13727 - RNA, 20 nt, Artificial Sequence
  Antisense oligo
agaguucgggacacaaagga

SEQ ID NO: 13728 - RNA, 20 nt, Artificial Sequence
  Antisense oligo
cagaguucgggacacaaagg

SEQ ID NO: 13729 - RNA, 20 nt, Artificial Sequence
  Antisense oligo
gcagaguucgggacacaaag

SEQ ID NO: 13730 - RNA, 20 nt, Artificial Sequence
  Antisense oligo
caggcagaguucgggacaca

SEQ ID NO: 13731 - RNA, 20 nt, Artificial Sequence
  Antisense oligo
guaucuggacaggcaggcag

SEQ ID NO: 13732 - RNA, 20 nt, Artificial Sequence
  Antisense oligo
uguaucuggacaggcaggca

SEQ ID NO: 13733 - RNA, 20 nt, Artificial Sequence
  Antisense oligo
agccugguucugcuguaucu

SEQ ID NO: 13734 - RNA, 20 nt, Artificial Sequence
  Antisense oligo
gagccugguucugcuguauc

SEQ ID NO: 13735 - RNA, 20 nt, Artificial Sequence
  Antisense oligo
ugagccugguucugcuguau

SEQ ID NO: 13736 - RNA, 20 nt, Artificial Sequence
  Antisense oligo
gcugagccugguucugcugu

SEQ ID NO: 13737 - RNA, 20 nt, Artificial Sequence
  Antisense oligo
uaucuggagccgcugagccu

SEQ ID NO: 13738 - RNA, 20 nt, Artificial Sequence
  Antisense oligo
gcgaacacaaaaggcagaag

SEQ ID NO: 13739 - RNA, 20 nt, Artificial Sequence
  Antisense oligo
caaacuaggaaaagugucgc

SEQ ID NO: 13740 - RNA, 20 nt, Artificial Sequence
  Antisense oligo
gcaaacuaggaaaagugucg

SEQ ID NO: 13741 - RNA, 20 nt, Artificial Sequence
  Antisense oligo
aaaauaaagcaucccagugc

SEQ ID NO: 13742 - RNA, 20 nt, Artificial Sequence
  Antisense oligo
agcgaagccucucuuuugaa

SEQ ID NO: 13743 - RNA, 20 nt, Artificial Sequence
  Antisense oligo
aagcgaagccucucuuuuga

SEQ ID NO: 13744 - RNA, 20 nt, Artificial Sequence
  Antisense oligo
gggaaaagcgaagccucucu

SEQ ID NO: 13745 - RNA, 20 nt, Artificial Sequence
  Antisense oligo
guugcagugagccaaaaucg

SEQ ID NO: 13746 - RNA, 20 nt, Artificial Sequence
  Antisense oligo
aguugcagugagccaaaauc

SEQ ID NO: 13747 - RNA, 20 nt, Artificial Sequence
  Antisense oligo
aaguugcagugagccaaaau

SEQ ID NO: 13748 - RNA, 20 nt, Artificial Sequence
  Antisense oligo
gaaguugcagugagccaaaa

SEQ ID NO: 13749 - RNA, 20 nt, Artificial Sequence
  Antisense oligo
agaaguugcagugagccaaa

SEQ ID NO: 13750 - RNA, 20 nt, Artificial Sequence
  Antisense oligo
cagaaguugcagugagccaa

SEQ ID NO: 13751 - RNA, 20 nt, Artificial Sequence
  Antisense oligo
gcagaaguugcagugagcca

SEQ ID NO: 13752 - RNA, 20 nt, Artificial Sequence
  Antisense oligo
ggagaaucgcuugaacccgg

SEQ ID NO: 13753 - RNA, 20 nt, Artificial Sequence
  Antisense oligo
aggagaaucgcuugaacccg

SEQ ID NO: 13754 - RNA, 20 nt, Artificial Sequence
  Antisense oligo
caggagaaucgcuugaaccc

SEQ ID NO: 13755 - RNA, 20 nt, Artificial Sequence
  Antisense oligo
gcaggagaaucgcuugaacc

SEQ ID NO: 13756 - RNA, 20 nt, Artificial Sequence
  Antisense oligo
agcaggagaaucgcuugaac

SEQ ID NO: 13757 - RNA, 20 nt, Artificial Sequence
  Antisense oligo
gagcaggagaaucgcuugaa

SEQ ID NO: 13758 - RNA, 20 nt, Artificial Sequence
  Antisense oligo
ugagcaggagaaucgcuuga

SEQ ID NO: 13759 - RNA, 20 nt, Artificial Sequence
  Antisense oligo
cugagcaggagaaucgcuug

SEQ ID NO: 13760 - RNA, 20 nt, Artificial Sequence
  Antisense oligo
gcugagcaggagaaucgcuu

SEQ ID NO: 13761 - RNA, 20 nt, Artificial Sequence
  Antisense oligo
ucccagcuacucaggaggcu

SEQ ID NO: 13762 - RNA, 20 nt, Artificial Sequence
  Antisense oligo
aucccagcuacucaggaggc

SEQ ID NO: 13763 - RNA, 20 nt, Artificial Sequence
  Antisense oligo
aaucccagcuacucaggagg

SEQ ID NO: 13764 - RNA, 20 nt, Artificial Sequence
  Antisense oligo
uaaucccagcuacucaggag

SEQ ID NO: 13765 - RNA, 20 nt, Artificial Sequence
  Antisense oligo
guaaucccagcuacucagga

SEQ ID NO: 13766 - RNA, 20 nt, Artificial Sequence
  Antisense oligo
uguaaucccagcuacucagg

SEQ ID NO: 13767 - RNA, 20 nt, Artificial Sequence
  Antisense oligo
cuguaaucccagcuacucag

SEQ ID NO: 13768 - RNA, 20 nt, Artificial Sequence
  Antisense oligo
ccuguaaucccagcuacuca

SEQ ID NO: 13769 - RNA, 20 nt, Artificial Sequence
  Antisense oligo
accuguaaucccagcuacuc

SEQ ID NO: 13770 - RNA, 20 nt, Artificial Sequence
  Antisense oligo
caccuguaaucccagcuacu

SEQ ID NO: 13771 - RNA, 20 nt, Artificial Sequence
  Antisense oligo
gcaccuguaaucccagcuac

SEQ ID NO: 13772 - RNA, 20 nt, Artificial Sequence
  Antisense oligo
ggcaccuguaaucccagcua

SEQ ID NO: 13773 - RNA, 20 nt, Artificial Sequence
  Antisense oligo
aggcaccuguaaucccagcu

SEQ ID NO: 13774 - RNA, 20 nt, Artificial Sequence
  Antisense oligo
caggcaccuguaaucccagc

SEQ ID NO: 13775 - RNA, 20 nt, Artificial Sequence
  Antisense oligo
gcaggcaccuguaaucccag

SEQ ID NO: 13776 - RNA, 20 nt, Artificial Sequence
  Antisense oligo
ggcaggcaccuguaauccca

SEQ ID NO: 13777 - RNA, 20 nt, Artificial Sequence
  Antisense oligo
uggcaggcaccuguaauccc

SEQ ID NO: 13778 - RNA, 20 nt, Artificial Sequence
  Antisense oligo
guggcaggcaccuguaaucc

SEQ ID NO: 13779 - RNA, 20 nt, Artificial Sequence
  Antisense oligo
uacagucgugguggcaggca

SEQ ID NO: 13780 - RNA, 20 nt, Artificial Sequence
  Antisense oligo
uuacagucgugguggcaggc

SEQ ID NO: 13781 - RNA, 20 nt, Artificial Sequence
  Antisense oligo
auuacagucgugguggcagg

SEQ ID NO: 13782 - RNA, 20 nt, Artificial Sequence
  Antisense oligo
aauuacagucgugguggcag

SEQ ID NO: 13783 - RNA, 20 nt, Artificial Sequence
  Antisense oligo
aaauuacagucgugguggca

SEQ ID NO: 13784 - RNA, 20 nt, Artificial Sequence
  Antisense oligo
aaaauuacagucgugguggc

SEQ ID NO: 13785 - RNA, 20 nt, Artificial Sequence
  Antisense oligo
gaaaucccgucucuacuaaa

SEQ ID NO: 13786 - RNA, 20 nt, Artificial Sequence
  Antisense oligo
gccaacauggugaaaucccg

SEQ ID NO: 13787 - RNA, 20 nt, Artificial Sequence
  Antisense oligo
ggccaacauggugaaauccc

SEQ ID NO: 13788 - RNA, 20 nt, Artificial Sequence
  Antisense oligo
gcacgguggcucacgucuaa

SEQ ID NO: 13789 - RNA, 20 nt, Artificial Sequence
  Antisense oligo
gaauuaaaagguggcugggc

SEQ ID NO: 13790 - RNA, 20 nt, Artificial Sequence
  Antisense oligo
agaauuaaaagguggcuggg

SEQ ID NO: 13791 - RNA, 20 nt, Artificial Sequence
  Antisense oligo
gaaugcacagauaggcagac

SEQ ID NO: 13792 - RNA, 20 nt, Artificial Sequence
  Antisense oligo
ggaugaaugcacagauaggc

SEQ ID NO: 13793 - RNA, 20 nt, Artificial Sequence
  Antisense oligo
uggaugaaugcacagauagg

SEQ ID NO: 13794 - RNA, 20 nt, Artificial Sequence
  Antisense oligo
cggagggauggaugaaugca

SEQ ID NO: 13795 - RNA, 20 nt, Artificial Sequence
  Antisense oligo
gcggagggauggaugaaugc

SEQ ID NO: 13796 - RNA, 20 nt, Artificial Sequence
  Antisense oligo
acuaaacaagaaggcacaug

SEQ ID NO: 13797 - RNA, 20 nt, Artificial Sequence
  Antisense oligo
gucccagaucaaacuaaaca

SEQ ID NO: 13798 - RNA, 20 nt, Artificial Sequence
  Antisense oligo
gucaucgagguucucuaaau

SEQ ID NO: 13799 - RNA, 20 nt, Artificial Sequence
  Antisense oligo
agucaucgagguucucuaaa

SEQ ID NO: 13800 - RNA, 20 nt, Artificial Sequence
  Antisense oligo
aagucaucgagguucucuaa

SEQ ID NO: 13801 - RNA, 20 nt, Artificial Sequence
  Antisense oligo
caagucaucgagguucucua

SEQ ID NO: 13802 - RNA, 20 nt, Artificial Sequence
  Antisense oligo
acaagucaucgagguucucu

SEQ ID NO: 13803 - RNA, 20 nt, Artificial Sequence
  Antisense oligo
aacaagucaucgagguucuc

SEQ ID NO: 13804 - RNA, 20 nt, Artificial Sequence
  Antisense oligo
cagaacaagucaucgagguu

SEQ ID NO: 13805 - RNA, 20 nt, Artificial Sequence
  Antisense oligo
ucagaacaagucaucgaggu

SEQ ID NO: 13806 - RNA, 20 nt, Artificial Sequence
  Antisense oligo
uucagaacaagucaucgagg

SEQ ID NO: 13807 - RNA, 20 nt, Artificial Sequence
  Antisense oligo
uuucagaacaagucaucgag

SEQ ID NO: 13808 - RNA, 20 nt, Artificial Sequence
  Antisense oligo
ggauuacaggugugagccac

SEQ ID NO: 13809 - RNA, 20 nt, Artificial Sequence
  Antisense oligo
gggauuacaggugugagcca

SEQ ID NO: 13810 - RNA, 20 nt, Artificial Sequence
  Antisense oligo
ugggauuacaggugugagcc

SEQ ID NO: 13811 - RNA, 20 nt, Artificial Sequence
  Antisense oligo
uugggauuacaggugugagc

SEQ ID NO: 13812 - RNA, 20 nt, Artificial Sequence
  Antisense oligo
auugggauuacaggugugag

SEQ ID NO: 13813 - RNA, 20 nt, Artificial Sequence
  Antisense oligo
uauugggauuacagguguga

SEQ ID NO: 13814 - RNA, 20 nt, Artificial Sequence
  Antisense oligo
guauugggauuacaggugug

SEQ ID NO: 13815 - RNA, 20 nt, Artificial Sequence
  Antisense oligo
aguauugggauuacaggugu

SEQ ID NO: 13816 - RNA, 20 nt, Artificial Sequence
  Antisense oligo
aaguauugggauuacaggug

SEQ ID NO: 13817 - RNA, 20 nt, Artificial Sequence
  Antisense oligo
cucaaacuccugggcacaag

SEQ ID NO: 13818 - RNA, 20 nt, Artificial Sequence
  Antisense oligo
ucucaaacuccugggcacaa

SEQ ID NO: 13819 - RNA, 20 nt, Artificial Sequence
  Antisense oligo
gucucaaacuccugggcaca

SEQ ID NO: 13820 - RNA, 20 nt, Artificial Sequence
  Antisense oligo
ggucucaaacuccugggcac

SEQ ID NO: 13821 - RNA, 20 nt, Artificial Sequence
  Antisense oligo
uggucucaaacuccugggca

SEQ ID NO: 13822 - RNA, 20 nt, Artificial Sequence
  Antisense oligo
cuggucucaaacuccugggc

SEQ ID NO: 13823 - RNA, 20 nt, Artificial Sequence
  Antisense oligo
gcuggucucaaacuccuggg

SEQ ID NO: 13824 - RNA, 20 nt, Artificial Sequence
  Antisense oligo
ggcuggucucaaacuccugg

SEQ ID NO: 13825 - RNA, 20 nt, Artificial Sequence
  Antisense oligo
uggcuggucucaaacuccug

SEQ ID NO: 13826 - RNA, 20 nt, Artificial Sequence
  Antisense oligo
cuggcuggucucaaacuccu

SEQ ID NO: 13827 - RNA, 20 nt, Artificial Sequence
  Antisense oligo
gcuggcuggucucaaacucc

SEQ ID NO: 13828 - RNA, 20 nt, Artificial Sequence
  Antisense oligo
agcuggcuggucucaaacuc

SEQ ID NO: 13829 - RNA, 20 nt, Artificial Sequence
  Antisense oligo
uagcuggcuggucucaaacu

SEQ ID NO: 13830 - RNA, 20 nt, Artificial Sequence
  Antisense oligo
cuagcuggcuggucucaaac

SEQ ID NO: 13831 - RNA, 20 nt, Artificial Sequence
  Antisense oligo
acuauguugcccuagcuggc

SEQ ID NO: 13832 - RNA, 20 nt, Artificial Sequence
  Antisense oligo
cucacuauguugcccuagcu

SEQ ID NO: 13833 - RNA, 20 nt, Artificial Sequence
  Antisense oligo
ucucacuauguugcccuagc

SEQ ID NO: 13834 - RNA, 20 nt, Artificial Sequence
  Antisense oligo
gucucacuauguugcccuag

SEQ ID NO: 13835 - RNA, 20 nt, Artificial Sequence
  Antisense oligo
ggucucacuauguugcccua

SEQ ID NO: 13836 - RNA, 20 nt, Artificial Sequence
  Antisense oligo
gggucucacuauguugcccu

SEQ ID NO: 13837 - RNA, 20 nt, Artificial Sequence
  Antisense oligo
caacacacccagugccacca

SEQ ID NO: 13838 - RNA, 20 nt, Artificial Sequence
  Antisense oligo
acaacacacccagugccacc

SEQ ID NO: 13839 - RNA, 20 nt, Artificial Sequence
  Antisense oligo
aacaacacacccagugccac

SEQ ID NO: 13840 - RNA, 20 nt, Artificial Sequence
  Antisense oligo
gaacaacacacccagugcca

SEQ ID NO: 13841 - RNA, 20 nt, Artificial Sequence
  Antisense oligo
gcaaguagacaggaacaaca

SEQ ID NO: 13842 - RNA, 20 nt, Artificial Sequence
  Antisense oligo
ugcaaguagacaggaacaac

SEQ ID NO: 13843 - RNA, 20 nt, Artificial Sequence
  Antisense oligo
cgugcaaguagacaggaaca

SEQ ID NO: 13844 - RNA, 20 nt, Artificial Sequence
  Antisense oligo
ccgugcaaguagacaggaac

SEQ ID NO: 13845 - RNA, 20 nt, Artificial Sequence
  Antisense oligo
agccgugcaaguagacagga

SEQ ID NO: 13846 - RNA, 20 nt, Artificial Sequence
  Antisense oligo
cagccgugcaaguagacagg

SEQ ID NO: 13847 - RNA, 20 nt, Artificial Sequence
  Antisense oligo
ucagccgugcaaguagacag

SEQ ID NO: 13848 - RNA, 20 nt, Artificial Sequence
  Antisense oligo
cucagccgugcaaguagaca

SEQ ID NO: 13849 - RNA, 20 nt, Artificial Sequence
  Antisense oligo
accucagccgugcaaguaga

SEQ ID NO: 13850 - RNA, 20 nt, Artificial Sequence
  Antisense oligo
ccuggaauaccugggcucaa

SEQ ID NO: 13851 - RNA, 20 nt, Artificial Sequence
  Antisense oligo
accuggaauaccugggcuca

SEQ ID NO: 13852 - RNA, 20 nt, Artificial Sequence
  Antisense oligo
uaaccuggaauaccugggcu

SEQ ID NO: 13853 - RNA, 20 nt, Artificial Sequence
  Antisense oligo
auaaccuggaauaccugggc

SEQ ID NO: 13854 - RNA, 20 nt, Artificial Sequence
  Antisense oligo
cauaaccuggaauaccuggg

SEQ ID NO: 13855 - RNA, 20 nt, Artificial Sequence
  Antisense oligo
ucauaaccuggaauaccugg

SEQ ID NO: 13856 - RNA, 20 nt, Artificial Sequence
  Antisense oligo
gucauaaccuggaauaccug

SEQ ID NO: 13857 - RNA, 20 nt, Artificial Sequence
  Antisense oligo
ccaacugcgguguagugaca

SEQ ID NO: 13858 - RNA, 20 nt, Artificial Sequence
  Antisense oligo
gccaacugcgguguagugac

SEQ ID NO: 13859 - RNA, 20 nt, Artificial Sequence
  Antisense oligo
cgccaacugcgguguaguga

SEQ ID NO: 13860 - RNA, 20 nt, Artificial Sequence
  Antisense oligo
acgccaacugcgguguagug

SEQ ID NO: 13861 - RNA, 20 nt, Artificial Sequence
  Antisense oligo
cacgccaacugcgguguagu

SEQ ID NO: 13862 - RNA, 20 nt, Artificial Sequence
  Antisense oligo
ucacgccaacugcgguguag

SEQ ID NO: 13863 - RNA, 20 nt, Artificial Sequence
  Antisense oligo
gucacgccaacugcggugua

SEQ ID NO: 13864 - RNA, 20 nt, Artificial Sequence
  Antisense oligo
ugucacgccaacugcggugu

SEQ ID NO: 13865 - RNA, 20 nt, Artificial Sequence
  Antisense oligo
ucugucacgccaacugcggu

SEQ ID NO: 13866 - RNA, 20 nt, Artificial Sequence
  Antisense oligo
acucugucacgccaacugcg

SEQ ID NO: 13867 - RNA, 20 nt, Artificial Sequence
  Antisense oligo
cacucugucacgccaacugc

SEQ ID NO: 13868 - RNA, 20 nt, Artificial Sequence
  Antisense oligo
ucacucugucacgccaacug

SEQ ID NO: 13869 - RNA, 20 nt, Artificial Sequence
  Antisense oligo
cucacucugucacgccaacu

SEQ ID NO: 13870 - RNA, 20 nt, Artificial Sequence
  Antisense oligo
ucucacucugucacgccaac

SEQ ID NO: 13871 - RNA, 20 nt, Artificial Sequence
  Antisense oligo
gucucacucugucacgccaa

SEQ ID NO: 13872 - RNA, 20 nt, Artificial Sequence
  Antisense oligo
ggucucacucugucacgcca

SEQ ID NO: 13873 - RNA, 20 nt, Artificial Sequence
  Antisense oligo
agggucucacucugucacgc

SEQ ID NO: 13874 - RNA, 20 nt, Artificial Sequence
  Antisense oligo
gagggucucacucugucacg

SEQ ID NO: 13875 - RNA, 20 nt, Artificial Sequence
  Antisense oligo
ggugaaguaguguuugcuuu

SEQ ID NO: 13876 - RNA, 20 nt, Artificial Sequence
  Antisense oligo
gggugaaguaguguuugcuu

SEQ ID NO: 13877 - RNA, 20 nt, Artificial Sequence
  Antisense oligo
aagggugaaguaguguuugc

SEQ ID NO: 13878 - RNA, 20 nt, Artificial Sequence
  Antisense oligo
gaagggugaaguaguguuug

SEQ ID NO: 13879 - RNA, 20 nt, Artificial Sequence
  Antisense oligo
uggaagggugaaguaguguu

SEQ ID NO: 13880 - RNA, 20 nt, Artificial Sequence
  Antisense oligo
acuggaagggugaaguagug

SEQ ID NO: 13881 - RNA, 20 nt, Artificial Sequence
  Antisense oligo
uagguuacuggaagggugaa

SEQ ID NO: 13882 - RNA, 20 nt, Artificial Sequence
  Antisense oligo
auuagguuacuggaagggug

SEQ ID NO: 13883 - RNA, 20 nt, Artificial Sequence
  Antisense oligo
ucauuagguuacuggaaggg

SEQ ID NO: 13884 - RNA, 20 nt, Artificial Sequence
  Antisense oligo
ugucauuagguuacuggaag

SEQ ID NO: 13885 - RNA, 20 nt, Artificial Sequence
  Antisense oligo
aacugucauuagguuacugg

SEQ ID NO: 13886 - RNA, 20 nt, Artificial Sequence
  Antisense oligo
cggaacuggaauggaacuua

SEQ ID NO: 13887 - RNA, 20 nt, Artificial Sequence
  Antisense oligo
acggaacuggaauggaacuu

SEQ ID NO: 13888 - RNA, 20 nt, Artificial Sequence
  Antisense oligo
agacggaacuggaauggaac

SEQ ID NO: 13889 - RNA, 20 nt, Artificial Sequence
  Antisense oligo
gagacggaacuggaauggaa

SEQ ID NO: 13890 - RNA, 20 nt, Artificial Sequence
  Antisense oligo
agagacggaacuggaaugga

SEQ ID NO: 13891 - RNA, 20 nt, Artificial Sequence
  Antisense oligo
uagagacggaacuggaaugg

SEQ ID NO: 13892 - RNA, 20 nt, Artificial Sequence
  Antisense oligo
uuagagacggaacuggaaug

SEQ ID NO: 13893 - RNA, 20 nt, Artificial Sequence
  Antisense oligo
auuagagacggaacuggaau

SEQ ID NO: 13894 - RNA, 20 nt, Artificial Sequence
  Antisense oligo
agauuagagacggaacugga

SEQ ID NO: 13895 - RNA, 20 nt, Artificial Sequence
  Antisense oligo
aagauuagagacggaacugg

SEQ ID NO: 13896 - RNA, 20 nt, Artificial Sequence
  Antisense oligo
uaagauuagagacggaacug

SEQ ID NO: 13897 - RNA, 20 nt, Artificial Sequence
  Antisense oligo
cuaagauuagagacggaacu

SEQ ID NO: 13898 - RNA, 20 nt, Artificial Sequence
  Antisense oligo
ccuagaaaacagacucacaa

SEQ ID NO: 13899 - RNA, 20 nt, Artificial Sequence
  Antisense oligo
gcgacagcaauaacuugaca

SEQ ID NO: 13900 - RNA, 20 nt, Artificial Sequence
  Antisense oligo
guuccuucuugagcauuaac

SEQ ID NO: 13901 - RNA, 20 nt, Artificial Sequence
  Antisense oligo
gccaccuuuugacauuuugu

SEQ ID NO: 13902 - RNA, 20 nt, Artificial Sequence
  Antisense oligo
cugccaccuuuugacauuuu

SEQ ID NO: 13903 - RNA, 20 nt, Artificial Sequence
  Antisense oligo
ucugccaccuuuugacauuu

SEQ ID NO: 13904 - RNA, 20 nt, Artificial Sequence
  Antisense oligo
gucugccaccuuuugacauu

SEQ ID NO: 13905 - RNA, 20 nt, Artificial Sequence
  Antisense oligo
ggucugccaccuuuugacau

SEQ ID NO: 13906 - RNA, 20 nt, Artificial Sequence
  Antisense oligo
aggaaccagaguggcggucu

SEQ ID NO: 13907 - RNA, 20 nt, Artificial Sequence
  Antisense oligo
agaggaaccagaguggcggu

SEQ ID NO: 13908 - RNA, 20 nt, Artificial Sequence
  Antisense oligo
accacgggucagaggaacca

SEQ ID NO: 13909 - RNA, 20 nt, Artificial Sequence
  Antisense oligo
aagagagaugggccaccacg

SEQ ID NO: 13910 - RNA, 20 nt, Artificial Sequence
  Antisense oligo
agaagagagaugggccacca

SEQ ID NO: 13911 - RNA, 20 nt, Artificial Sequence
  Antisense oligo
cagaagagagaugggccacc

SEQ ID NO: 13912 - RNA, 20 nt, Artificial Sequence
  Antisense oligo
uuccagagggugugccugca

SEQ ID NO: 13913 - RNA, 20 nt, Artificial Sequence
  Antisense oligo
acagcaccuuggacccgcuu

SEQ ID NO: 13914 - RNA, 20 nt, Artificial Sequence
  Antisense oligo
gucucugucgaugaaugaua

SEQ ID NO: 13915 - RNA, 20 nt, Artificial Sequence
  Antisense oligo
cgucucugucgaugaaugau

SEQ ID NO: 13916 - RNA, 20 nt, Artificial Sequence
  Antisense oligo
ccgucucugucgaugaauga

SEQ ID NO: 13917 - RNA, 20 nt, Artificial Sequence
  Antisense oligo
ugccgucucugucgaugaau

SEQ ID NO: 13918 - RNA, 20 nt, Artificial Sequence
  Antisense oligo
uugccgucucugucgaugaa

SEQ ID NO: 13919 - RNA, 20 nt, Artificial Sequence
  Antisense oligo
guugccgucucugucgauga

SEQ ID NO: 13920 - RNA, 20 nt, Artificial Sequence
  Antisense oligo
gguugccgucucugucgaug

SEQ ID NO: 13921 - RNA, 20 nt, Artificial Sequence
  Antisense oligo
agguugccgucucugucgau

SEQ ID NO: 13922 - RNA, 20 nt, Artificial Sequence
  Antisense oligo
uagguugccgucucugucga

SEQ ID NO: 13923 - RNA, 20 nt, Artificial Sequence
  Antisense oligo
cuagguugccgucucugucg

SEQ ID NO: 13924 - RNA, 20 nt, Artificial Sequence
  Antisense oligo
ucuagguugccgucucuguc

SEQ ID NO: 13925 - RNA, 20 nt, Artificial Sequence
  Antisense oligo
cucuagguugccgucucugu

SEQ ID NO: 13926 - RNA, 20 nt, Artificial Sequence
  Antisense oligo
acucuagguugccgucucug

SEQ ID NO: 13927 - RNA, 20 nt, Artificial Sequence
  Antisense oligo
aacucuagguugccgucucu

SEQ ID NO: 13928 - RNA, 20 nt, Artificial Sequence
  Antisense oligo
uaacucuagguugccgucuc

SEQ ID NO: 13929 - RNA, 20 nt, Artificial Sequence
  Antisense oligo
guaacucuagguugccgucu

SEQ ID NO: 13930 - RNA, 20 nt, Artificial Sequence
  Antisense oligo
aguaacucuagguugccguc

SEQ ID NO: 13931 - RNA, 20 nt, Artificial Sequence
  Antisense oligo
caguaacucuagguugccgu

SEQ ID NO: 13932 - RNA, 20 nt, Artificial Sequence
  Antisense oligo
ucaguaacucuagguugccg

SEQ ID NO: 13933 - RNA, 20 nt, Artificial Sequence
  Antisense oligo
gucaguaacucuagguugcc

SEQ ID NO: 13934 - RNA, 20 nt, Artificial Sequence
  Antisense oligo
ggucaguaacucuagguugc

SEQ ID NO: 13935 - RNA, 20 nt, Artificial Sequence
  Antisense oligo
uggucaguaacucuagguug

SEQ ID NO: 13936 - RNA, 20 nt, Artificial Sequence
  Antisense oligo
cuggucaguaacucuagguu

SEQ ID NO: 13937 - RNA, 20 nt, Artificial Sequence
  Antisense oligo
gccuggucaguaacucuagg

SEQ ID NO: 13938 - RNA, 20 nt, Artificial Sequence
  Antisense oligo
ggccuggucaguaacucuag

SEQ ID NO: 13939 - RNA, 20 nt, Artificial Sequence
  Antisense oligo
uggccuggucaguaacucua

SEQ ID NO: 13940 - RNA, 20 nt, Artificial Sequence
  Antisense oligo
cuggccuggucaguaacucu

SEQ ID NO: 13941 - RNA, 20 nt, Artificial Sequence
  Antisense oligo
ucuggccuggucaguaacuc

SEQ ID NO: 13942 - RNA, 20 nt, Artificial Sequence
  Antisense oligo
uaucuggccuggucaguaac

SEQ ID NO: 13943 - RNA, 20 nt, Artificial Sequence
  Antisense oligo
guaucuggccuggucaguaa

SEQ ID NO: 13944 - RNA, 20 nt, Artificial Sequence
  Antisense oligo
aguaucuggccuggucagua

SEQ ID NO: 13945 - RNA, 20 nt, Artificial Sequence
  Antisense oligo
gaguaucuggccuggucagu

SEQ ID NO: 13946 - RNA, 20 nt, Artificial Sequence
  Antisense oligo
ggaguaucuggccuggucag

SEQ ID NO: 13947 - RNA, 20 nt, Artificial Sequence
  Antisense oligo
cggaguaucuggccugguca

SEQ ID NO: 13948 - RNA, 20 nt, Artificial Sequence
  Antisense oligo
gcaucgugucacugaaaaua

SEQ ID NO: 13949 - RNA, 20 nt, Artificial Sequence
  Antisense oligo
agcaucgugucacugaaaau

SEQ ID NO: 13950 - RNA, 20 nt, Artificial Sequence
  Antisense oligo
aagcaucgugucacugaaaa

SEQ ID NO: 13951 - RNA, 20 nt, Artificial Sequence
  Antisense oligo
gaagcaucgugucacugaaa

SEQ ID NO: 13952 - RNA, 20 nt, Artificial Sequence
  Antisense oligo
agaagcaucgugucacugaa

SEQ ID NO: 13953 - RNA, 20 nt, Artificial Sequence
  Antisense oligo
cagaagcaucgugucacuga

SEQ ID NO: 13954 - RNA, 20 nt, Artificial Sequence
  Antisense oligo
ucagaagcaucgugucacug

SEQ ID NO: 13955 - RNA, 20 nt, Artificial Sequence
  Antisense oligo
uucagaagcaucgugucacu

SEQ ID NO: 13956 - RNA, 20 nt, Artificial Sequence
  Antisense oligo
guucagaagcaucgugucac

SEQ ID NO: 13957 - RNA, 20 nt, Artificial Sequence
  Antisense oligo
uguucagaagcaucguguca

SEQ ID NO: 13958 - RNA, 20 nt, Artificial Sequence
  Antisense oligo
auguucagaagcaucguguc

SEQ ID NO: 13959 - RNA, 20 nt, Artificial Sequence
  Antisense oligo
aauguucagaagcaucgugu

SEQ ID NO: 13960 - RNA, 20 nt, Artificial Sequence
  Antisense oligo
gaauguucagaagcaucgug

SEQ ID NO: 13961 - RNA, 20 nt, Artificial Sequence
  Antisense oligo
ggaauguucagaagcaucgu

SEQ ID NO: 13962 - RNA, 20 nt, Artificial Sequence
  Antisense oligo
aggaauguucagaagcaucg

SEQ ID NO: 13963 - RNA, 20 nt, Artificial Sequence
  Antisense oligo
aagaggaauguucagaagca

SEQ ID NO: 13964 - RNA, 20 nt, Artificial Sequence
  Antisense oligo
caucacaagaggaauguuca

SEQ ID NO: 13965 - RNA, 20 nt, Artificial Sequence
  Antisense oligo
ucaucacaagaggaauguuc

SEQ ID NO: 13966 - RNA, 20 nt, Artificial Sequence
  Antisense oligo
agaaagccuuccacucaccu

SEQ ID NO: 13967 - RNA, 20 nt, Artificial Sequence
  Antisense oligo
aagaaagccuuccacucacc

SEQ ID NO: 13968 - RNA, 20 nt, Artificial Sequence
  Antisense oligo
aaagaaagccuuccacucac

SEQ ID NO: 13969 - RNA, 20 nt, Artificial Sequence
  Antisense oligo
gcuguguucugauaguuucu

SEQ ID NO: 13970 - RNA, 20 nt, Artificial Sequence
  Antisense oligo
ugcuguguucugauaguuuc

SEQ ID NO: 13971 - RNA, 20 nt, Artificial Sequence
  Antisense oligo
auauuaggguccugcugugu

SEQ ID NO: 13972 - RNA, 20 nt, Artificial Sequence
  Antisense oligo
cauauuaggguccugcugug

SEQ ID NO: 13973 - RNA, 20 nt, Artificial Sequence
  Antisense oligo
gcauauuaggguccugcugu

SEQ ID NO: 13974 - RNA, 20 nt, Artificial Sequence
  Antisense oligo
gagagcauauuaggguccug

SEQ ID NO: 13975 - RNA, 20 nt, Artificial Sequence
  Antisense oligo
ggagagcauauuaggguccu

SEQ ID NO: 13976 - RNA, 20 nt, Artificial Sequence
  Antisense oligo
gggagagcauauuagggucc

SEQ ID NO: 13977 - RNA, 20 nt, Artificial Sequence
  Antisense oligo
ugggagagcauauuaggguc

SEQ ID NO: 13978 - RNA, 20 nt, Artificial Sequence
  Antisense oligo
acuugggagagcauauuagg

SEQ ID NO: 13979 - RNA, 20 nt, Artificial Sequence
  Antisense oligo
cacuugggagagcauauuag

SEQ ID NO: 13980 - RNA, 20 nt, Artificial Sequence
  Antisense oligo
gcacuugggagagcauauua

SEQ ID NO: 13981 - RNA, 20 nt, Artificial Sequence
  Antisense oligo
agcacuugggagagcauauu

SEQ ID NO: 13982 - RNA, 20 nt, Artificial Sequence
  Antisense oligo
uugcucugaaguugagggcu

SEQ ID NO: 13983 - RNA, 20 nt, Artificial Sequence
  Antisense oligo
guugcucugaaguugagggc

SEQ ID NO: 13984 - RNA, 20 nt, Artificial Sequence
  Antisense oligo
cguugcucugaaguugaggg

SEQ ID NO: 13985 - RNA, 20 nt, Artificial Sequence
  Antisense oligo
acguugcucugaaguugagg

SEQ ID NO: 13986 - RNA, 20 nt, Artificial Sequence
  Antisense oligo
gccaaacuuccuauuguuac

SEQ ID NO: 13987 - RNA, 20 nt, Artificial Sequence
  Antisense oligo
ggccaaacuuccuauuguua

SEQ ID NO: 13988 - RNA, 20 nt, Artificial Sequence
  Antisense oligo
uacaggcgugagccaccaug

SEQ ID NO: 13989 - RNA, 20 nt, Artificial Sequence
  Antisense oligo
uuacaggcgugagccaccau

SEQ ID NO: 13990 - RNA, 20 nt, Artificial Sequence
  Antisense oligo
auuacaggcgugagccacca

SEQ ID NO: 13991 - RNA, 20 nt, Artificial Sequence
  Antisense oligo
gauuacaggcgugagccacc

SEQ ID NO: 13992 - RNA, 20 nt, Artificial Sequence
  Antisense oligo
ggauuacaggcgugagccac

SEQ ID NO: 13993 - RNA, 20 nt, Artificial Sequence
  Antisense oligo
gggauuacaggcgugagcca

SEQ ID NO: 13994 - RNA, 20 nt, Artificial Sequence
  Antisense oligo
ugggauuacaggcgugagcc

SEQ ID NO: 13995 - RNA, 20 nt, Artificial Sequence
  Antisense oligo
cugggauuacaggcgugagc

SEQ ID NO: 13996 - RNA, 20 nt, Artificial Sequence
  Antisense oligo
gcugggauuacaggcgugag

SEQ ID NO: 13997 - RNA, 20 nt, Artificial Sequence
  Antisense oligo
ugcugggauuacaggcguga

SEQ ID NO: 13998 - RNA, 20 nt, Artificial Sequence
  Antisense oligo
gugcugggauuacaggcgug

SEQ ID NO: 13999 - RNA, 20 nt, Artificial Sequence
  Antisense oligo
agugcugggauuacaggcgu

SEQ ID NO: 14000 - RNA, 20 nt, Artificial Sequence
  Antisense oligo
aagugcugggauuacaggcg

SEQ ID NO: 14001 - RNA, 20 nt, Artificial Sequence
  Antisense oligo
aaagugcugggauuacaggc

SEQ ID NO: 14002 - RNA, 20 nt, Artificial Sequence
  Antisense oligo
caaagugcugggauuacagg

SEQ ID NO: 14003 - RNA, 20 nt, Artificial Sequence
  Antisense oligo
ccaaagugcugggauuacag

SEQ ID NO: 14004 - RNA, 20 nt, Artificial Sequence
  Antisense oligo
caccacgcccagcuaauuuu

SEQ ID NO: 14005 - RNA, 20 nt, Artificial Sequence
  Antisense oligo
ccaccacgcccagcuaauuu

SEQ ID NO: 14006 - RNA, 20 nt, Artificial Sequence
  Antisense oligo
gccaccacgcccagcuaauu

SEQ ID NO: 14007 - RNA, 20 nt, Artificial Sequence
  Antisense oligo
ccucagccucccaaauagcu

SEQ ID NO: 14008 - RNA, 20 nt, Artificial Sequence
  Antisense oligo
gccucagccucccaaauagc

SEQ ID NO: 14009 - RNA, 20 nt, Artificial Sequence
  Antisense oligo
ugccucagccucccaaauag

SEQ ID NO: 14010 - RNA, 20 nt, Artificial Sequence
  Antisense oligo
cugccucagccucccaaaua

SEQ ID NO: 14011 - RNA, 20 nt, Artificial Sequence
  Antisense oligo
ccugccucagccucccaaau

SEQ ID NO: 14012 - RNA, 20 nt, Artificial Sequence
  Antisense oligo
uccugccucagccucccaaa

SEQ ID NO: 14013 - RNA, 20 nt, Artificial Sequence
  Antisense oligo
auucuccugccucagccucc

SEQ ID NO: 14014 - RNA, 20 nt, Artificial Sequence
  Antisense oligo
aauucuccugccucagccuc

SEQ ID NO: 14015 - RNA, 20 nt, Artificial Sequence
  Antisense oligo
caauucuccugccucagccu

SEQ ID NO: 14016 - RNA, 20 nt, Artificial Sequence
  Antisense oligo
gcaauucuccugccucagcc

SEQ ID NO: 14017 - RNA, 20 nt, Artificial Sequence
  Antisense oligo
agcaauucuccugccucagc

SEQ ID NO: 14018 - RNA, 20 nt, Artificial Sequence
  Antisense oligo
aagcaauucuccugccucag

SEQ ID NO: 14019 - RNA, 20 nt, Artificial Sequence
  Antisense oligo
caagcaauucuccugccuca

SEQ ID NO: 14020 - RNA, 20 nt, Artificial Sequence
  Antisense oligo
ucaagcaauucuccugccuc

SEQ ID NO: 14021 - RNA, 20 nt, Artificial Sequence
  Antisense oligo
uucaagcaauucuccugccu

SEQ ID NO: 14022 - RNA, 20 nt, Artificial Sequence
  Antisense oligo
guucaagcaauucuccugcc

SEQ ID NO: 14023 - RNA, 20 nt, Artificial Sequence
  Antisense oligo
gguucaagcaauucuccugc

SEQ ID NO: 14024 - RNA, 20 nt, Artificial Sequence
  Antisense oligo
agguucaagcaauucuccug

SEQ ID NO: 14025 - RNA, 20 nt, Artificial Sequence
  Antisense oligo
cagguucaagcaauucuccu

SEQ ID NO: 14026 - RNA, 20 nt, Artificial Sequence
  Antisense oligo
ccagguucaagcaauucucc

SEQ ID NO: 14027 - RNA, 20 nt, Artificial Sequence
  Antisense oligo
cccagguucaagcaauucuc

SEQ ID NO: 14028 - RNA, 20 nt, Artificial Sequence
  Antisense oligo
ucccagguucaagcaauucu

SEQ ID NO: 14029 - RNA, 20 nt, Artificial Sequence
  Antisense oligo
cucccagguucaagcaauuc

SEQ ID NO: 14030 - RNA, 20 nt, Artificial Sequence
  Antisense oligo
ccucccagguucaagcaauu

SEQ ID NO: 14031 - RNA, 20 nt, Artificial Sequence
  Antisense oligo
gccucccagguucaagcaau

SEQ ID NO: 14032 - RNA, 20 nt, Artificial Sequence
  Antisense oligo
cgccucccagguucaagcaa

SEQ ID NO: 14033 - RNA, 20 nt, Artificial Sequence
  Antisense oligo
ucucggcucacugcaaccuc

SEQ ID NO: 14034 - RNA, 20 nt, Artificial Sequence
  Antisense oligo
aucucggcucacugcaaccu

SEQ ID NO: 14035 - RNA, 20 nt, Artificial Sequence
  Antisense oligo
ucaccaggcuggagugcagu

SEQ ID NO: 14036 - RNA, 20 nt, Artificial Sequence
  Antisense oligo
ugucaccaggcuggagugca

SEQ ID NO: 14037 - RNA, 20 nt, Artificial Sequence
  Antisense oligo
ucuugcucugucaccaggcu

SEQ ID NO: 14038 - RNA, 20 nt, Artificial Sequence
  Antisense oligo
gucuugcucugucaccaggc

SEQ ID NO: 14039 - RNA, 20 nt, Artificial Sequence
  Antisense oligo
agucuugcucugucaccagg

SEQ ID NO: 14040 - RNA, 20 nt, Artificial Sequence
  Antisense oligo
gcuucguaaacuuccuauuc

SEQ ID NO: 14041 - RNA, 20 nt, Artificial Sequence
  Antisense oligo
gagcuucguaaacuuccuau

SEQ ID NO: 14042 - RNA, 20 nt, Artificial Sequence
  Antisense oligo
aggaggguggagauaaaaca

SEQ ID NO: 14043 - RNA, 20 nt, Artificial Sequence
  Antisense oligo
uagaaccagugcucugaaag

SEQ ID NO: 14044 - RNA, 20 nt, Artificial Sequence
  Antisense oligo
cuagaaccagugcucugaaa

SEQ ID NO: 14045 - RNA, 20 nt, Artificial Sequence
  Antisense oligo
gcugggucuggcuagaacca

SEQ ID NO: 14046 - RNA, 20 nt, Artificial Sequence
  Antisense oligo
uguucgcagcgcacugucuc

SEQ ID NO: 14047 - RNA, 20 nt, Artificial Sequence
  Antisense oligo
cuguucgcagcgcacugucu

SEQ ID NO: 14048 - RNA, 20 nt, Artificial Sequence
  Antisense oligo
ugagccgcacaucaucaggc

SEQ ID NO: 14049 - RNA, 20 nt, Artificial Sequence
  Antisense oligo
gccugagccgcacaucauca

SEQ ID NO: 14050 - RNA, 20 nt, Artificial Sequence
  Antisense oligo
agccugagccgcacaucauc

SEQ ID NO: 14051 - RNA, 20 nt, Artificial Sequence
  Antisense oligo
gagccugagccgcacaucau

SEQ ID NO: 14052 - RNA, 20 nt, Artificial Sequence
  Antisense oligo
ugagccugagccgcacauca

SEQ ID NO: 14053 - RNA, 20 nt, Artificial Sequence
  Antisense oligo
auugggagcugagccugagc

SEQ ID NO: 14054 - RNA, 20 nt, Artificial Sequence
  Antisense oligo
cuauugggagcugagccuga

SEQ ID NO: 14055 - RNA, 20 nt, Artificial Sequence
  Antisense oligo
gcuauugggagcugagccug

SEQ ID NO: 14056 - RNA, 20 nt, Artificial Sequence
  Antisense oligo
uacauccagaauugaagccc

SEQ ID NO: 14057 - RNA, 20 nt, Artificial Sequence
  Antisense oligo
cuacauccagaauugaagcc

SEQ ID NO: 14058 - RNA, 20 nt, Artificial Sequence
  Antisense oligo
ucuacauccagaauugaagc

SEQ ID NO: 14059 - RNA, 20 nt, Artificial Sequence
  Antisense oligo
gccugggcacauuuauuucu

SEQ ID NO: 14060 - RNA, 20 nt, Artificial Sequence
  Antisense oligo
ccgagccugggcacauuuau

SEQ ID NO: 14061 - RNA, 20 nt, Artificial Sequence
  Antisense oligo
accgagccugggcacauuua

SEQ ID NO: 14062 - RNA, 20 nt, Artificial Sequence
  Antisense oligo
caccgagccugggcacauuu

SEQ ID NO: 14063 - RNA, 20 nt, Artificial Sequence
  Antisense oligo
auaggcaugagccaccgagc

SEQ ID NO: 14064 - RNA, 20 nt, Artificial Sequence
  Antisense oligo
uauaggcaugagccaccgag

SEQ ID NO: 14065 - RNA, 20 nt, Artificial Sequence
  Antisense oligo
uuauaggcaugagccaccga

SEQ ID NO: 14066 - RNA, 20 nt, Artificial Sequence
  Antisense oligo
guuauaggcaugagccaccg

SEQ ID NO: 14067 - RNA, 20 nt, Artificial Sequence
  Antisense oligo
gguuauaggcaugagccacc

SEQ ID NO: 14068 - RNA, 20 nt, Artificial Sequence
  Antisense oligo
ggguuauaggcaugagccac

SEQ ID NO: 14069 - RNA, 20 nt, Artificial Sequence
  Antisense oligo
uuccugccucagccuacuaa

SEQ ID NO: 14070 - RNA, 20 nt, Artificial Sequence
  Antisense oligo
uuuccugccucagccuacua

SEQ ID NO: 14071 - RNA, 20 nt, Artificial Sequence
  Antisense oligo
cuuuccugccucagccuacu

SEQ ID NO: 14072 - RNA, 20 nt, Artificial Sequence
  Antisense oligo
acuuuccugccucagccuac

SEQ ID NO: 14073 - RNA, 20 nt, Artificial Sequence
  Antisense oligo
aacuuuccugccucagccua

SEQ ID NO: 14074 - RNA, 20 nt, Artificial Sequence
  Antisense oligo
aaacuuuccugccucagccu

SEQ ID NO: 14075 - RNA, 20 nt, Artificial Sequence
  Antisense oligo
gaaacuuuccugccucagcc

SEQ ID NO: 14076 - RNA, 20 nt, Artificial Sequence
  Antisense oligo
agaaacuuuccugccucagc

SEQ ID NO: 14077 - RNA, 20 nt, Artificial Sequence
  Antisense oligo
aagaaacuuuccugccucag

SEQ ID NO: 14078 - RNA, 20 nt, Artificial Sequence
  Antisense oligo
caagaaacuuuccugccuca

SEQ ID NO: 14079 - RNA, 20 nt, Artificial Sequence
  Antisense oligo
cuggguucaagaaacuuucc

SEQ ID NO: 14080 - RNA, 20 nt, Artificial Sequence
  Antisense oligo
ccuggguucaagaaacuuuc

SEQ ID NO: 14081 - RNA, 20 nt, Artificial Sequence
  Antisense oligo
ucacuauguugcccaagcug

SEQ ID NO: 14082 - RNA, 20 nt, Artificial Sequence
  Antisense oligo
cucacuauguugcccaagcu

SEQ ID NO: 14083 - RNA, 20 nt, Artificial Sequence
  Antisense oligo
ucucacuauguugcccaagc

SEQ ID NO: 14084 - RNA, 20 nt, Artificial Sequence
  Antisense oligo
gucucacuauguugcccaag

SEQ ID NO: 14085 - RNA, 20 nt, Artificial Sequence
  Antisense oligo
ggucucacuauguugcccaa

SEQ ID NO: 14086 - RNA, 20 nt, Artificial Sequence
  Antisense oligo
gggucucacuauguugccca

SEQ ID NO: 14087 - RNA, 20 nt, Artificial Sequence
  Antisense oligo
caccacguuaugccuaauuu

SEQ ID NO: 14088 - RNA, 20 nt, Artificial Sequence
  Antisense oligo
gcaccacguuaugccuaauu

SEQ ID NO: 14089 - RNA, 20 nt, Artificial Sequence
  Antisense oligo
cgcaccacguuaugccuaau

SEQ ID NO: 14090 - RNA, 20 nt, Artificial Sequence
  Antisense oligo
gcgcaccacguuaugccuaa

SEQ ID NO: 14091 - RNA, 20 nt, Artificial Sequence
  Antisense oligo
uagcugggacuacaggugcg

SEQ ID NO: 14092 - RNA, 20 nt, Artificial Sequence
  Antisense oligo
ugggcucaagcaauccuccc

SEQ ID NO: 14093 - RNA, 20 nt, Artificial Sequence
  Antisense oligo
cugggcucaagcaauccucc

SEQ ID NO: 14094 - RNA, 20 nt, Artificial Sequence
  Antisense oligo
ccugggcucaagcaauccuc

SEQ ID NO: 14095 - RNA, 20 nt, Artificial Sequence
  Antisense oligo
uccugggcucaagcaauccu

SEQ ID NO: 14096 - RNA, 20 nt, Artificial Sequence
  Antisense oligo
cuccugggcucaagcaaucc

SEQ ID NO: 14097 - RNA, 20 nt, Artificial Sequence
  Antisense oligo
acuccugggcucaagcaauc

SEQ ID NO: 14098 - RNA, 20 nt, Artificial Sequence
  Antisense oligo
aacuccugggcucaagcaau

SEQ ID NO: 14099 - RNA, 20 nt, Artificial Sequence
  Antisense oligo
aaacuccugggcucaagcaa

SEQ ID NO: 14100 - RNA, 20 nt, Artificial Sequence
  Antisense oligo
caaacuccugggcucaagca

SEQ ID NO: 14101 - RNA, 20 nt, Artificial Sequence
  Antisense oligo
ucaaacuccugggcucaagc

SEQ ID NO: 14102 - RNA, 20 nt, Artificial Sequence
  Antisense oligo
cucaaacuccugggcucaag

SEQ ID NO: 14103 - RNA, 20 nt, Artificial Sequence
  Antisense oligo
ccucaaacuccugggcucaa

SEQ ID NO: 14104 - RNA, 20 nt, Artificial Sequence
  Antisense oligo
accucaaacuccugggcuca

SEQ ID NO: 14105 - RNA, 20 nt, Artificial Sequence
  Antisense oligo
caccucaaacuccugggcuc

SEQ ID NO: 14106 - RNA, 20 nt, Artificial Sequence
  Antisense oligo
ucaccucaaacuccugggcu

SEQ ID NO: 14107 - RNA, 20 nt, Artificial Sequence
  Antisense oligo
cucaccucaaacuccugggc

SEQ ID NO: 14108 - RNA, 20 nt, Artificial Sequence
  Antisense oligo
ucucaccucaaacuccuggg

SEQ ID NO: 14109 - RNA, 20 nt, Artificial Sequence
  Antisense oligo
aucucaccucaaacuccugg

SEQ ID NO: 14110 - RNA, 20 nt, Artificial Sequence
  Antisense oligo
uaucucaccucaaacuccug

SEQ ID NO: 14111 - RNA, 20 nt, Artificial Sequence
  Antisense oligo
ccuaucucaccucaaacucc

SEQ ID NO: 14112 - RNA, 20 nt, Artificial Sequence
  Antisense oligo
auccuaucucaccucaaacu

SEQ ID NO: 14113 - RNA, 20 nt, Artificial Sequence
  Antisense oligo
gauccuaucucaccucaaac

SEQ ID NO: 14114 - RNA, 20 nt, Artificial Sequence
  Antisense oligo
ugaguggugugauccuaucu

SEQ ID NO: 14115 - RNA, 20 nt, Artificial Sequence
  Antisense oligo
gugaguggugugauccuauc

SEQ ID NO: 14116 - RNA, 20 nt, Artificial Sequence
  Antisense oligo
agugaguggugugauccuau

SEQ ID NO: 14117 - RNA, 20 nt, Artificial Sequence
  Antisense oligo
cagugaguggugugauccua

SEQ ID NO: 14118 - RNA, 20 nt, Artificial Sequence
  Antisense oligo
gcuagagugcagugaguggu

SEQ ID NO: 14119 - RNA, 20 nt, Artificial Sequence
  Antisense oligo
ggcuagagugcagugagugg

SEQ ID NO: 14120 - RNA, 20 nt, Artificial Sequence
  Antisense oligo
aggcuagagugcagugagug

SEQ ID NO: 14121 - RNA, 20 nt, Artificial Sequence
  Antisense oligo
caggcuagagugcagugagu

SEQ ID NO: 14122 - RNA, 20 nt, Artificial Sequence
  Antisense oligo
ccaggcuagagugcagugag

SEQ ID NO: 14123 - RNA, 20 nt, Artificial Sequence
  Antisense oligo
cccaggcuagagugcaguga

SEQ ID NO: 14124 - RNA, 20 nt, Artificial Sequence
  Antisense oligo
acccaggcuagagugcagug

SEQ ID NO: 14125 - RNA, 20 nt, Artificial Sequence
  Antisense oligo
cacccaggcuagagugcagu

SEQ ID NO: 14126 - RNA, 20 nt, Artificial Sequence
  Antisense oligo
accacccaggcuagagugca

SEQ ID NO: 14127 - RNA, 20 nt, Artificial Sequence
  Antisense oligo
ucaccacccaggcuagagug

SEQ ID NO: 14128 - RNA, 20 nt, Artificial Sequence
  Antisense oligo
gucaccacccaggcuagagu

SEQ ID NO: 14129 - RNA, 20 nt, Artificial Sequence
  Antisense oligo
ucucacucugucaccaccca

SEQ ID NO: 14130 - RNA, 20 nt, Artificial Sequence
  Antisense oligo
gucucacucugucaccaccc

SEQ ID NO: 14131 - RNA, 20 nt, Artificial Sequence
  Antisense oligo
agucucacucugucaccacc

SEQ ID NO: 14132 - RNA, 20 nt, Artificial Sequence
  Antisense oligo
cgcucuuucuuucucuuucu

SEQ ID NO: 14133 - RNA, 20 nt, Artificial Sequence
  Antisense oligo
ucgcucuuucuuucucuuuc

SEQ ID NO: 14134 - RNA, 20 nt, Artificial Sequence
  Antisense oligo
cucgcucuuucuuucucuuu

SEQ ID NO: 14135 - RNA, 20 nt, Artificial Sequence
  Antisense oligo
ucucgcucuuucuuucucuu

SEQ ID NO: 14136 - RNA, 20 nt, Artificial Sequence
  Antisense oligo
uuucucucuuucucucgcuc

SEQ ID NO: 14137 - RNA, 20 nt, Artificial Sequence
  Antisense oligo
cuuucucucuuucucucgcu

SEQ ID NO: 14138 - RNA, 20 nt, Artificial Sequence
  Antisense oligo
ucuuucucucuuucucucgc

SEQ ID NO: 14139 - RNA, 20 nt, Artificial Sequence
  Antisense oligo
uucuuucucucuuucucucg

SEQ ID NO: 14140 - RNA, 20 nt, Artificial Sequence
  Antisense oligo
ccacuggcaauucaaauucc

SEQ ID NO: 14141 - RNA, 20 nt, Artificial Sequence
  Antisense oligo
uccacuggcaauucaaauuc

SEQ ID NO: 14142 - RNA, 20 nt, Artificial Sequence
  Antisense oligo
uguuuccacuggcaauucaa

SEQ ID NO: 14143 - RNA, 20 nt, Artificial Sequence
  Antisense oligo
guguuuccacuggcaauuca

SEQ ID NO: 14144 - RNA, 20 nt, Artificial Sequence
  Antisense oligo
agcagcgccuugucuuuuaa

SEQ ID NO: 14145 - RNA, 20 nt, Artificial Sequence
  Antisense oligo
cagcagcgccuugucuuuua

SEQ ID NO: 14146 - RNA, 20 nt, Artificial Sequence
  Antisense oligo
ucagcagcgccuugucuuuu

SEQ ID NO: 14147 - RNA, 20 nt, Artificial Sequence
  Antisense oligo
aucagcagcgccuugucuuu

SEQ ID NO: 14148 - RNA, 20 nt, Artificial Sequence
  Antisense oligo
caucagcagcgccuugucuu

SEQ ID NO: 14149 - RNA, 20 nt, Artificial Sequence
  Antisense oligo
acaucagcagcgccuugucu

SEQ ID NO: 14150 - RNA, 20 nt, Artificial Sequence
  Antisense oligo
aacaucagcagcgccuuguc

SEQ ID NO: 14151 - RNA, 20 nt, Artificial Sequence
  Antisense oligo
gaacaucagcagcgccuugu

SEQ ID NO: 14152 - RNA, 20 nt, Artificial Sequence
  Antisense oligo
ugaacaucagcagcgccuug

SEQ ID NO: 14153 - RNA, 20 nt, Artificial Sequence
  Antisense oligo
augaacaucagcagcgccuu

SEQ ID NO: 14154 - RNA, 20 nt, Artificial Sequence
  Antisense oligo
caugaacaucagcagcgccu

SEQ ID NO: 14155 - RNA, 20 nt, Artificial Sequence
  Antisense oligo
cuuguuagagucuuugcuuc

SEQ ID NO: 14156 - RNA, 20 nt, Artificial Sequence
  Antisense oligo
caacuuguuagagucuuugc

SEQ ID NO: 14157 - RNA, 20 nt, Artificial Sequence
  Antisense oligo
gcacaacuuguuagagucuu

SEQ ID NO: 14158 - RNA, 20 nt, Artificial Sequence
  Antisense oligo
agcacaacuuguuagagucu

SEQ ID NO: 14159 - RNA, 20 nt, Artificial Sequence
  Antisense oligo
cagagcacaacuuguuagag

SEQ ID NO: 14160 - RNA, 20 nt, Artificial Sequence
  Antisense oligo
cacagagcacaacuuguuag

SEQ ID NO: 14161 - RNA, 20 nt, Artificial Sequence
  Antisense oligo
uaacacagagcacaacuugu

SEQ ID NO: 14162 - RNA, 20 nt, Artificial Sequence
  Antisense oligo
guaacacagagcacaacuug

SEQ ID NO: 14163 - RNA, 20 nt, Artificial Sequence
  Antisense oligo
uguaacacagagcacaacuu

SEQ ID NO: 14164 - RNA, 20 nt, Artificial Sequence
  Antisense oligo
aacuuguaacacagagcaca

SEQ ID NO: 14165 - RNA, 20 nt, Artificial Sequence
  Antisense oligo
uaacuuguaacacagagcac

SEQ ID NO: 14166 - RNA, 20 nt, Artificial Sequence
  Antisense oligo
aagucuucugguuccugaac

SEQ ID NO: 14167 - RNA, 20 nt, Artificial Sequence
  Antisense oligo
acaaaccaaggcugacaggg

SEQ ID NO: 14168 - RNA, 20 nt, Artificial Sequence
  Antisense oligo
aaacaaaccaaggcugacag

SEQ ID NO: 14169 - RNA, 20 nt, Artificial Sequence
  Antisense oligo
caaucuuuguuucacaggca

SEQ ID NO: 14170 - RNA, 20 nt, Artificial Sequence
  Antisense oligo
gcaaucuuuguuucacaggc

SEQ ID NO: 14171 - RNA, 20 nt, Artificial Sequence
  Antisense oligo
ggaacugucuuaugcaaucu

SEQ ID NO: 14172 - RNA, 20 nt, Artificial Sequence
  Antisense oligo
agcucuucucagaccucaaa

SEQ ID NO: 14173 - RNA, 20 nt, Artificial Sequence
  Antisense oligo
cagcucuucucagaccucaa

SEQ ID NO: 14174 - RNA, 20 nt, Artificial Sequence
  Antisense oligo
ccagcucuucucagaccuca

SEQ ID NO: 14175 - RNA, 20 nt, Artificial Sequence
  Antisense oligo
gccacugaugccagcucuuc

SEQ ID NO: 14176 - RNA, 20 nt, Artificial Sequence
  Antisense oligo
ugccacugaugccagcucuu

SEQ ID NO: 14177 - RNA, 20 nt, Artificial Sequence
  Antisense oligo
cugccacugaugccagcucu

SEQ ID NO: 14178 - RNA, 20 nt, Artificial Sequence
  Antisense oligo
acgucacucaaaacacaaga

SEQ ID NO: 14179 - RNA, 20 nt, Artificial Sequence
  Antisense oligo
gaagaggguuugugagacgu

SEQ ID NO: 14180 - RNA, 20 nt, Artificial Sequence
  Antisense oligo
agaagaggguuugugagacg

SEQ ID NO: 14181 - RNA, 20 nt, Artificial Sequence
  Antisense oligo
ucugcaauaaggugagggau

SEQ ID NO: 14182 - RNA, 20 nt, Artificial Sequence
  Antisense oligo
aucucaccuuuaugucugca

SEQ ID NO: 14183 - RNA, 20 nt, Artificial Sequence
  Antisense oligo
caucucaccuuuaugucugc

SEQ ID NO: 14184 - RNA, 20 nt, Artificial Sequence
  Antisense oligo
gccaucucaccuuuaugucu

SEQ ID NO: 14185 - RNA, 20 nt, Artificial Sequence
  Antisense oligo
uaggccaucucaccuuuaug

SEQ ID NO: 14186 - RNA, 20 nt, Artificial Sequence
  Antisense oligo
guaggccaucucaccuuuau

SEQ ID NO: 14187 - RNA, 20 nt, Artificial Sequence
  Antisense oligo
uguaggccaucucaccuuua

SEQ ID NO: 14188 - RNA, 20 nt, Artificial Sequence
  Antisense oligo
auguaggccaucucaccuuu

SEQ ID NO: 14189 - RNA, 20 nt, Artificial Sequence
  Antisense oligo
ugcaccacgauguaggccau

SEQ ID NO: 14190 - RNA, 20 nt, Artificial Sequence
  Antisense oligo
cugcaccacgauguaggcca

SEQ ID NO: 14191 - RNA, 20 nt, Artificial Sequence
  Antisense oligo
ucugcaccacgauguaggcc

SEQ ID NO: 14192 - RNA, 20 nt, Artificial Sequence
  Antisense oligo
uucugcaccacgauguaggc

SEQ ID NO: 14193 - RNA, 20 nt, Artificial Sequence
  Antisense oligo
guucugcaccacgauguagg

SEQ ID NO: 14194 - RNA, 20 nt, Artificial Sequence
  Antisense oligo
gguucugcaccacgauguag

SEQ ID NO: 14195 - RNA, 20 nt, Artificial Sequence
  Antisense oligo
agguucaugugguucugcac

SEQ ID NO: 14196 - RNA, 20 nt, Artificial Sequence
  Antisense oligo
aagguucaugugguucugca

SEQ ID NO: 14197 - RNA, 20 nt, Artificial Sequence
  Antisense oligo
aaagguucaugugguucugc

SEQ ID NO: 14198 - RNA, 20 nt, Artificial Sequence
  Antisense oligo
gaaagguucaugugguucug

SEQ ID NO: 14199 - RNA, 20 nt, Artificial Sequence
  Antisense oligo
ucggaaagguucaugugguu

SEQ ID NO: 14200 - RNA, 20 nt, Artificial Sequence
  Antisense oligo
uucucggaaagguucaugug

SEQ ID NO: 14201 - RNA, 20 nt, Artificial Sequence
  Antisense oligo
guucucggaaagguucaugu

SEQ ID NO: 14202 - RNA, 20 nt, Artificial Sequence
  Antisense oligo
cguucucggaaagguucaug

SEQ ID NO: 14203 - RNA, 20 nt, Artificial Sequence
  Antisense oligo
gcguucucggaaagguucau

SEQ ID NO: 14204 - RNA, 20 nt, Artificial Sequence
  Antisense oligo
agcguucucggaaagguuca

SEQ ID NO: 14205 - RNA, 20 nt, Artificial Sequence
  Antisense oligo
aagcguucucggaaagguuc

SEQ ID NO: 14206 - RNA, 20 nt, Artificial Sequence
  Antisense oligo
gaagcguucucggaaagguu

SEQ ID NO: 14207 - RNA, 20 nt, Artificial Sequence
  Antisense oligo
ggaagcguucucggaaaggu

SEQ ID NO: 14208 - RNA, 20 nt, Artificial Sequence
  Antisense oligo
uggaagcguucucggaaagg

SEQ ID NO: 14209 - RNA, 20 nt, Artificial Sequence
  Antisense oligo
uuggaagcguucucggaaag

SEQ ID NO: 14210 - RNA, 20 nt, Artificial Sequence
  Antisense oligo
guuggaagcguucucggaaa

SEQ ID NO: 14211 - RNA, 20 nt, Artificial Sequence
  Antisense oligo
uguuggaagcguucucggaa

SEQ ID NO: 14212 - RNA, 20 nt, Artificial Sequence
  Antisense oligo
uuguuggaagcguucucgga

SEQ ID NO: 14213 - RNA, 20 nt, Artificial Sequence
  Antisense oligo
uccuccagauaguccuugau

SEQ ID NO: 14214 - RNA, 20 nt, Artificial Sequence
  Antisense oligo
cuccuccagauaguccuuga

SEQ ID NO: 14215 - RNA, 20 nt, Artificial Sequence
  Antisense oligo
gcuccuccagauaguccuug

SEQ ID NO: 14216 - RNA, 20 nt, Artificial Sequence
  Antisense oligo
agcuccuccagauaguccuu

SEQ ID NO: 14217 - RNA, 20 nt, Artificial Sequence
  Antisense oligo
acagcuccuccagauagucc

SEQ ID NO: 14218 - RNA, 20 nt, Artificial Sequence
  Antisense oligo
cacagcuccuccagauaguc

SEQ ID NO: 14219 - RNA, 20 nt, Artificial Sequence
  Antisense oligo
uacugagccuggacccacag

SEQ ID NO: 14220 - RNA, 20 nt, Artificial Sequence
  Antisense oligo
uguacugagccuggacccac

SEQ ID NO: 14221 - RNA, 20 nt, Artificial Sequence
  Antisense oligo
gauguacugagccuggaccc

SEQ ID NO: 14222 - RNA, 20 nt, Artificial Sequence
  Antisense oligo
ugauguacugagccuggacc

SEQ ID NO: 14223 - RNA, 20 nt, Artificial Sequence
  Antisense oligo
gugauguacugagccuggac

SEQ ID NO: 14224 - RNA, 20 nt, Artificial Sequence
  Antisense oligo
ugugauguacugagccugga

SEQ ID NO: 14225 - RNA, 20 nt, Artificial Sequence
  Antisense oligo
cugugauguacugagccugg

SEQ ID NO: 14226 - RNA, 20 nt, Artificial Sequence
  Antisense oligo
gaaucugaccugucuugagg

SEQ ID NO: 14227 - RNA, 20 nt, Artificial Sequence
  Antisense oligo
ugaaucugaccugucuugag

SEQ ID NO: 14228 - RNA, 20 nt, Artificial Sequence
  Antisense oligo
ugcugaaucugaccugucuu

SEQ ID NO: 14229 - RNA, 20 nt, Artificial Sequence
  Antisense oligo
caccugugcugaaucugacc

SEQ ID NO: 14230 - RNA, 20 nt, Artificial Sequence
  Antisense oligo
uugugauucaccugugcuga

SEQ ID NO: 14231 - RNA, 20 nt, Artificial Sequence
  Antisense oligo
cuuugugauucaccugugcu

SEQ ID NO: 14232 - RNA, 20 nt, Artificial Sequence
  Antisense oligo
cuuacugcacaaacaaagug

SEQ ID NO: 14233 - RNA, 20 nt, Artificial Sequence
  Antisense oligo
gcuuacugcacaaacaaagu

SEQ ID NO: 14234 - RNA, 20 nt, Artificial Sequence
  Antisense oligo
gacgcuuacugcacaaacaa

SEQ ID NO: 14235 - RNA, 20 nt, Artificial Sequence
  Antisense oligo
ggacgcuuacugcacaaaca

SEQ ID NO: 14236 - RNA, 20 nt, Artificial Sequence
  Antisense oligo
uggacgcuuacugcacaaac

SEQ ID NO: 14237 - RNA, 20 nt, Artificial Sequence
  Antisense oligo
uuggacgcuuacugcacaaa

SEQ ID NO: 14238 - RNA, 20 nt, Artificial Sequence
  Antisense oligo
auuggacgcuuacugcacaa

SEQ ID NO: 14239 - RNA, 20 nt, Artificial Sequence
  Antisense oligo
aauuggacgcuuacugcaca

SEQ ID NO: 14240 - RNA, 20 nt, Artificial Sequence
  Antisense oligo
aaauuggacgcuuacugcac

SEQ ID NO: 14241 - RNA, 20 nt, Artificial Sequence
  Antisense oligo
uaaauuggacgcuuacugca

SEQ ID NO: 14242 - RNA, 20 nt, Artificial Sequence
  Antisense oligo
gaucgaaagguuucuggucc

SEQ ID NO: 14243 - RNA, 20 nt, Artificial Sequence
  Antisense oligo
ggaucgaaagguuucugguc

SEQ ID NO: 14244 - RNA, 20 nt, Artificial Sequence
  Antisense oligo
aggaucgaaagguuucuggu

SEQ ID NO: 14245 - RNA, 20 nt, Artificial Sequence
  Antisense oligo
uaggaucgaaagguuucugg

SEQ ID NO: 14246 - RNA, 20 nt, Artificial Sequence
  Antisense oligo
auaggaucgaaagguuucug

SEQ ID NO: 14247 - RNA, 20 nt, Artificial Sequence
  Antisense oligo
cauaggaucgaaagguuucu

SEQ ID NO: 14248 - RNA, 20 nt, Artificial Sequence
  Antisense oligo
ccauaggaucgaaagguuuc

SEQ ID NO: 14249 - RNA, 20 nt, Artificial Sequence
  Antisense oligo
gccauaggaucgaaagguuu

SEQ ID NO: 14250 - RNA, 20 nt, Artificial Sequence
  Antisense oligo
ugccauaggaucgaaagguu

SEQ ID NO: 14251 - RNA, 20 nt, Artificial Sequence
  Antisense oligo
cugccauaggaucgaaaggu

SEQ ID NO: 14252 - RNA, 20 nt, Artificial Sequence
  Antisense oligo
gcugccauaggaucgaaagg

SEQ ID NO: 14253 - RNA, 20 nt, Artificial Sequence
  Antisense oligo
ugcugccauaggaucgaaag

SEQ ID NO: 14254 - RNA, 20 nt, Artificial Sequence
  Antisense oligo
cugcugccauaggaucgaaa

SEQ ID NO: 14255 - RNA, 20 nt, Artificial Sequence
  Antisense oligo
ccugcugccauaggaucgaa

SEQ ID NO: 14256 - RNA, 20 nt, Artificial Sequence
  Antisense oligo
caucucacaggcuccugcug

SEQ ID NO: 14257 - RNA, 20 nt, Artificial Sequence
  Antisense oligo
accaucucacaggcuccugc

SEQ ID NO: 14258 - RNA, 20 nt, Artificial Sequence
  Antisense oligo
aaaaccaucucacaggcucc

SEQ ID NO: 14259 - RNA, 20 nt, Artificial Sequence
  Antisense oligo
cuccucuugccagaacacac

SEQ ID NO: 14260 - RNA, 20 nt, Artificial Sequence
  Antisense oligo
uccuccucuugccagaacac

SEQ ID NO: 14261 - RNA, 20 nt, Artificial Sequence
  Antisense oligo
guccuccucuugccagaaca

SEQ ID NO: 14262 - RNA, 20 nt, Artificial Sequence
  Antisense oligo
aguccuccucuugccagaac

SEQ ID NO: 14263 - RNA, 20 nt, Artificial Sequence
  Antisense oligo
acaguccuccucuugccaga

SEQ ID NO: 14264 - RNA, 20 nt, Artificial Sequence
  Antisense oligo
cgacaguccuccucuugcca

SEQ ID NO: 14265 - RNA, 20 nt, Artificial Sequence
  Antisense oligo
aggcgacaguccuccucuug

SEQ ID NO: 14266 - RNA, 20 nt, Artificial Sequence
  Antisense oligo
cugauagaggcgacaguccu

SEQ ID NO: 14267 - RNA, 20 nt, Artificial Sequence
  Antisense oligo
gcugauagaggcgacagucc

SEQ ID NO: 14268 - RNA, 20 nt, Artificial Sequence
  Antisense oligo
agcugauagaggcgacaguc

SEQ ID NO: 14269 - RNA, 20 nt, Artificial Sequence
  Antisense oligo
ccagaaugggaaugaccagc

SEQ ID NO: 14270 - RNA, 20 nt, Artificial Sequence
  Antisense oligo
ugccuucugagaacgccucu

SEQ ID NO: 14271 - RNA, 20 nt, Artificial Sequence
  Antisense oligo
gugccuucugagaacgccuc

SEQ ID NO: 14272 - RNA, 20 nt, Artificial Sequence
  Antisense oligo
cgugccuucugagaacgccu

SEQ ID NO: 14273 - RNA, 20 nt, Artificial Sequence
  Antisense oligo
ucgugccuucugagaacgcc

SEQ ID NO: 14274 - RNA, 20 nt, Artificial Sequence
  Antisense oligo
cucgugccuucugagaacgc

SEQ ID NO: 14275 - RNA, 20 nt, Artificial Sequence
  Antisense oligo
gcucgugccuucugagaacg

SEQ ID NO: 14276 - RNA, 20 nt, Artificial Sequence
  Antisense oligo
cgcucgugccuucugagaac

SEQ ID NO: 14277 - RNA, 20 nt, Artificial Sequence
  Antisense oligo
guugcguugucguugguuuu

SEQ ID NO: 14278 - RNA, 20 nt, Artificial Sequence
  Antisense oligo
uguugcguugucguugguuu

SEQ ID NO: 14279 - RNA, 20 nt, Artificial Sequence
  Antisense oligo
guguugcguugucguugguu

SEQ ID NO: 14280 - RNA, 20 nt, Artificial Sequence
  Antisense oligo
aguguugcguugucguuggu

SEQ ID NO: 14281 - RNA, 20 nt, Artificial Sequence
  Antisense oligo
aaguguugcguugucguugg

SEQ ID NO: 14282 - RNA, 20 nt, Artificial Sequence
  Antisense oligo
aaaguguugcguugucguug

SEQ ID NO: 14283 - RNA, 20 nt, Artificial Sequence
  Antisense oligo
aaaaguguugcguugucguu

SEQ ID NO: 14284 - RNA, 20 nt, Artificial Sequence
  Antisense oligo
uaaaaguguugcguugucgu

SEQ ID NO: 14285 - RNA, 20 nt, Artificial Sequence
  Antisense oligo
guaaaaguguugcguugucg

SEQ ID NO: 14286 - RNA, 20 nt, Artificial Sequence
  Antisense oligo
uguaaaaguguugcguuguc

SEQ ID NO: 14287 - RNA, 20 nt, Artificial Sequence
  Antisense oligo
gcauguaugaaagauggcuu

SEQ ID NO: 14288 - RNA, 20 nt, Artificial Sequence
  Antisense oligo
ugcauguaugaaagauggcu

SEQ ID NO: 14289 - RNA, 20 nt, Artificial Sequence
  Antisense oligo
uugcauguaugaaagauggc

SEQ ID NO: 14290 - RNA, 20 nt, Artificial Sequence
  Antisense oligo
acguggaaaagacuauugca

SEQ ID NO: 14291 - RNA, 20 nt, Artificial Sequence
  Antisense oligo
aacguggaaaagacuauugc

SEQ ID NO: 14292 - RNA, 20 nt, Artificial Sequence
  Antisense oligo
cugagucuuccaaaugguac

SEQ ID NO: 14293 - RNA, 20 nt, Artificial Sequence
  Antisense oligo
ccugagucuuccaaauggua

SEQ ID NO: 14294 - RNA, 20 nt, Artificial Sequence
  Antisense oligo
acccugagucuuccaaaugg

SEQ ID NO: 14295 - RNA, 20 nt, Artificial Sequence
  Antisense oligo
cacccugagucuuccaaaug

SEQ ID NO: 14296 - RNA, 20 nt, Artificial Sequence
  Antisense oligo
ggccacccugagucuuccaa

SEQ ID NO: 14297 - RNA, 20 nt, Artificial Sequence
  Antisense oligo
aggccacccugagucuucca

SEQ ID NO: 14298 - RNA, 20 nt, Artificial Sequence
  Antisense oligo
agaaggccacccugagucuu

SEQ ID NO: 14299 - RNA, 20 nt, Artificial Sequence
  Antisense oligo
aagaaggccacccugagucu

SEQ ID NO: 14300 - RNA, 20 nt, Artificial Sequence
  Antisense oligo
aaagaaggccacccugaguc

SEQ ID NO: 14301 - RNA, 20 nt, Artificial Sequence
  Antisense oligo
aaaagaaggccacccugagu

SEQ ID NO: 14302 - RNA, 20 nt, Artificial Sequence
  Antisense oligo
cuagaaaagaaggccacccu

SEQ ID NO: 14303 - RNA, 20 nt, Artificial Sequence
  Antisense oligo
guaaccuagaaaagaaggcc

SEQ ID NO: 14304 - RNA, 20 nt, Artificial Sequence
  Antisense oligo
gguaaccuagaaaagaaggc

SEQ ID NO: 14305 - RNA, 20 nt, Artificial Sequence
  Antisense oligo
gcagaaugguaaccuagaaa

SEQ ID NO: 14306 - RNA, 20 nt, Artificial Sequence
  Antisense oligo
ggcagaaugguaaccuagaa

SEQ ID NO: 14307 - RNA, 20 nt, Artificial Sequence
  Antisense oligo
uggcagaaugguaaccuaga

SEQ ID NO: 14308 - RNA, 20 nt, Artificial Sequence
  Antisense oligo
guggcagaaugguaaccuag

SEQ ID NO: 14309 - RNA, 20 nt, Artificial Sequence
  Antisense oligo
aguggcagaaugguaaccua

SEQ ID NO: 14310 - RNA, 20 nt, Artificial Sequence
  Antisense oligo
aaguggcagaaugguaaccu

SEQ ID NO: 14311 - RNA, 20 nt, Artificial Sequence
  Antisense oligo
aaaguggcagaaugguaacc

SEQ ID NO: 14312 - RNA, 20 nt, Artificial Sequence
  Antisense oligo
aaaaguggcagaaugguaac

SEQ ID NO: 14313 - RNA, 20 nt, Artificial Sequence
  Antisense oligo
gagagagacugcuuugagaa

SEQ ID NO: 14314 - RNA, 20 nt, Artificial Sequence
  Antisense oligo
ggguauuguccugagaaagg

SEQ ID NO: 14315 - RNA, 20 nt, Artificial Sequence
  Antisense oligo
gucauagaaaagcaggguca

SEQ ID NO: 14316 - RNA, 20 nt, Artificial Sequence
  Antisense oligo
cugucauagaaaagcagggu

SEQ ID NO: 14317 - RNA, 20 nt, Artificial Sequence
  Antisense oligo
gaucuggcuucuagugggcg

SEQ ID NO: 14318 - RNA, 20 nt, Artificial Sequence
  Antisense oligo
ggguccaaguaaauuaggaa

SEQ ID NO: 14319 - RNA, 20 nt, Artificial Sequence
  Antisense oligo
cggguccaaguaaauuagga

SEQ ID NO: 14320 - RNA, 20 nt, Artificial Sequence
  Antisense oligo
ccggguccaaguaaauuagg

SEQ ID NO: 14321 - RNA, 20 nt, Artificial Sequence
  Antisense oligo
guuguauguugcauggcuac

SEQ ID NO: 14322 - RNA, 20 nt, Artificial Sequence
  Antisense oligo
aguuguauguugcauggcua

SEQ ID NO: 14323 - RNA, 20 nt, Artificial Sequence
  Antisense oligo
gaguuguauguugcauggcu

SEQ ID NO: 14324 - RNA, 20 nt, Artificial Sequence
  Antisense oligo
ugaguuguauguugcauggc

SEQ ID NO: 14325 - RNA, 20 nt, Artificial Sequence
  Antisense oligo
cugaguuguauguugcaugg

SEQ ID NO: 14326 - RNA, 20 nt, Artificial Sequence
  Antisense oligo
acugaguuguauguugcaug

SEQ ID NO: 14327 - RNA, 20 nt, Artificial Sequence
  Antisense oligo
gacugaguuguauguugcau

SEQ ID NO: 14328 - RNA, 20 nt, Artificial Sequence
  Antisense oligo
agacugaguuguauguugca

SEQ ID NO: 14329 - RNA, 20 nt, Artificial Sequence
  Antisense oligo
aagacugaguuguauguugc

SEQ ID NO: 14330 - RNA, 20 nt, Artificial Sequence
  Antisense oligo
gucagaaacagccaagcuag

SEQ ID NO: 14331 - RNA, 20 nt, Artificial Sequence
  Antisense oligo
ggucagaaacagccaagcua

SEQ ID NO: 14332 - RNA, 20 nt, Artificial Sequence
  Antisense oligo
uuuaggucagaaacagccaa

SEQ ID NO: 14333 - RNA, 20 nt, Artificial Sequence
  Antisense oligo
aauuuaggucagaaacagcc

SEQ ID NO: 14334 - RNA, 20 nt, Artificial Sequence
  Antisense oligo
ggcggaaacagugucaaauu

SEQ ID NO: 14335 - RNA, 20 nt, Artificial Sequence
  Antisense oligo
aggcggaaacagugucaaau

SEQ ID NO: 14336 - RNA, 20 nt, Artificial Sequence
  Antisense oligo
gaaggcggaaacagugucaa

SEQ ID NO: 14337 - RNA, 20 nt, Artificial Sequence
  Antisense oligo
ggaaggcggaaacaguguca

SEQ ID NO: 14338 - RNA, 20 nt, Artificial Sequence
  Antisense oligo
aggaaggcggaaacaguguc

SEQ ID NO: 14339 - RNA, 20 nt, Artificial Sequence
  Antisense oligo
aaggaaggcggaaacagugu

SEQ ID NO: 14340 - RNA, 20 nt, Artificial Sequence
  Antisense oligo
aaaggaaggcggaaacagug

SEQ ID NO: 14341 - RNA, 20 nt, Artificial Sequence
  Antisense oligo
uaaaggaaggcggaaacagu

SEQ ID NO: 14342 - RNA, 20 nt, Artificial Sequence
  Antisense oligo
auaaaggaaggcggaaacag

SEQ ID NO: 14343 - RNA, 20 nt, Artificial Sequence
  Antisense oligo
aauaaaggaaggcggaaaca

SEQ ID NO: 14344 - RNA, 20 nt, Artificial Sequence
  Antisense oligo
aagguguugugaaccacugc

SEQ ID NO: 14345 - RNA, 20 nt, Artificial Sequence
  Antisense oligo
caagguguugugaaccacug

SEQ ID NO: 14346 - RNA, 20 nt, Artificial Sequence
  Antisense oligo
ccaagguguugugaaccacu

SEQ ID NO: 14347 - RNA, 20 nt, Artificial Sequence
  Antisense oligo
cccaagguguugugaaccac

SEQ ID NO: 14348 - RNA, 20 nt, Artificial Sequence
  Antisense oligo
ucccaagguguugugaacca

SEQ ID NO: 14349 - RNA, 20 nt, Artificial Sequence
  Antisense oligo
cucccaagguguugugaacc

SEQ ID NO: 14350 - RNA, 20 nt, Artificial Sequence
  Antisense oligo
ugaccucaggugaucugccg

SEQ ID NO: 14351 - RNA, 20 nt, Artificial Sequence
  Antisense oligo
cugaccucaggugaucugcc

SEQ ID NO: 14352 - RNA, 20 nt, Artificial Sequence
  Antisense oligo
ucucgaacuccugaccucag

SEQ ID NO: 14353 - RNA, 20 nt, Artificial Sequence
  Antisense oligo
gucucgaacuccugaccuca

SEQ ID NO: 14354 - RNA, 20 nt, Artificial Sequence
  Antisense oligo
gcuggucucgaacuccugac

SEQ ID NO: 14355 - RNA, 20 nt, Artificial Sequence
  Antisense oligo
ggcuggucucgaacuccuga

SEQ ID NO: 14356 - RNA, 20 nt, Artificial Sequence
  Antisense oligo
aggcuggucucgaacuccug

SEQ ID NO: 14357 - RNA, 20 nt, Artificial Sequence
  Antisense oligo
caggcuggucucgaacuccu

SEQ ID NO: 14358 - RNA, 20 nt, Artificial Sequence
  Antisense oligo
ucaggcuggucucgaacucc

SEQ ID NO: 14359 - RNA, 20 nt, Artificial Sequence
  Antisense oligo
gucaggcuggucucgaacuc

SEQ ID NO: 14360 - RNA, 20 nt, Artificial Sequence
  Antisense oligo
ggucaggcuggucucgaacu

SEQ ID NO: 14361 - RNA, 20 nt, Artificial Sequence
  Antisense oligo
uggucaggcuggucucgaac

SEQ ID NO: 14362 - RNA, 20 nt, Artificial Sequence
  Antisense oligo
uuggucaggcuggucucgaa

SEQ ID NO: 14363 - RNA, 20 nt, Artificial Sequence
  Antisense oligo
guuggucaggcuggucucga

SEQ ID NO: 14364 - RNA, 20 nt, Artificial Sequence
  Antisense oligo
uguuggucaggcuggucucg

SEQ ID NO: 14365 - RNA, 20 nt, Artificial Sequence
  Antisense oligo
auguuggucaggcuggucuc

SEQ ID NO: 14366 - RNA, 20 nt, Artificial Sequence
  Antisense oligo
cauguuggucaggcuggucu

SEQ ID NO: 14367 - RNA, 20 nt, Artificial Sequence
  Antisense oligo
ccauguuggucaggcugguc

SEQ ID NO: 14368 - RNA, 20 nt, Artificial Sequence
  Antisense oligo
caccacacccagcuaauuuu

SEQ ID NO: 14369 - RNA, 20 nt, Artificial Sequence
  Antisense oligo
ccaccacacccagcuaauuu

SEQ ID NO: 14370 - RNA, 20 nt, Artificial Sequence
  Antisense oligo
accaccacacccagcuaauu

SEQ ID NO: 14371 - RNA, 20 nt, Artificial Sequence
  Antisense oligo
caccaccacacccagcuaau

SEQ ID NO: 14372 - RNA, 20 nt, Artificial Sequence
  Antisense oligo
gcaccaccacacccagcuaa

SEQ ID NO: 14373 - RNA, 20 nt, Artificial Sequence
  Antisense oligo
ugauucuccugccucagccu

SEQ ID NO: 14374 - RNA, 20 nt, Artificial Sequence
  Antisense oligo
gugauucuccugccucagcc

SEQ ID NO: 14375 - RNA, 20 nt, Artificial Sequence
  Antisense oligo
agugauucuccugccucagc

SEQ ID NO: 14376 - RNA, 20 nt, Artificial Sequence
  Antisense oligo
aagugauucuccugccucag

SEQ ID NO: 14377 - RNA, 20 nt, Artificial Sequence
  Antisense oligo
caagugauucuccugccuca

SEQ ID NO: 14378 - RNA, 20 nt, Artificial Sequence
  Antisense oligo
ucaagugauucuccugccuc

SEQ ID NO: 14379 - RNA, 20 nt, Artificial Sequence
  Antisense oligo
uucaagugauucuccugccu

SEQ ID NO: 14380 - RNA, 20 nt, Artificial Sequence
  Antisense oligo
guucaagugauucuccugcc

SEQ ID NO: 14381 - RNA, 20 nt, Artificial Sequence
  Antisense oligo
gguucaagugauucuccugc

SEQ ID NO: 14382 - RNA, 20 nt, Artificial Sequence
  Antisense oligo
agguucaagugauucuccug

SEQ ID NO: 14383 - RNA, 20 nt, Artificial Sequence
  Antisense oligo
cagguucaagugauucuccu

SEQ ID NO: 14384 - RNA, 20 nt, Artificial Sequence
  Antisense oligo
ccagguucaagugauucucc

SEQ ID NO: 14385 - RNA, 20 nt, Artificial Sequence
  Antisense oligo
cccagguucaagugauucuc

SEQ ID NO: 14386 - RNA, 20 nt, Artificial Sequence
  Antisense oligo
ucccagguucaagugauucu

SEQ ID NO: 14387 - RNA, 20 nt, Artificial Sequence
  Antisense oligo
cucccagguucaagugauuc

SEQ ID NO: 14388 - RNA, 20 nt, Artificial Sequence
  Antisense oligo
ccucccagguucaagugauu

SEQ ID NO: 14389 - RNA, 20 nt, Artificial Sequence
  Antisense oligo
gccucccagguucaagugau

SEQ ID NO: 14390 - RNA, 20 nt, Artificial Sequence
  Antisense oligo
cgccucccagguucaaguga

SEQ ID NO: 14391 - RNA, 20 nt, Artificial Sequence
  Antisense oligo
uccgccucccagguucaagu

SEQ ID NO: 14392 - RNA, 20 nt, Artificial Sequence
  Antisense oligo
ucugcucacugcaaccuccg

SEQ ID NO: 14393 - RNA, 20 nt, Artificial Sequence
  Antisense oligo
cucugcucacugcaaccucc

SEQ ID NO: 14394 - RNA, 20 nt, Artificial Sequence
  Antisense oligo
ucucugcucacugcaaccuc

SEQ ID NO: 14395 - RNA, 20 nt, Artificial Sequence
  Antisense oligo
aucucugcucacugcaaccu

SEQ ID NO: 14396 - RNA, 20 nt, Artificial Sequence
  Antisense oligo
gguggguagcgugaucucug

SEQ ID NO: 14397 - RNA, 20 nt, Artificial Sequence
  Antisense oligo
cgguggguagcgugaucucu

SEQ ID NO: 14398 - RNA, 20 nt, Artificial Sequence
  Antisense oligo
ugcgguggguagcgugaucu

SEQ ID NO: 14399 - RNA, 20 nt, Artificial Sequence
  Antisense oligo
agugcgguggguagcgugau

SEQ ID NO: 14400 - RNA, 20 nt, Artificial Sequence
  Antisense oligo
uaccaacugccugauuuugu

SEQ ID NO: 14401 - RNA, 20 nt, Artificial Sequence
  Antisense oligo
guaccaacugccugauuuug

SEQ ID NO: 14402 - RNA, 20 nt, Artificial Sequence
  Antisense oligo
cgccuuguugaaugggagcu

SEQ ID NO: 14403 - RNA, 20 nt, Artificial Sequence
  Antisense oligo
acgccuuguugaaugggagc

SEQ ID NO: 14404 - RNA, 20 nt, Artificial Sequence
  Antisense oligo
gacgccuuguugaaugggag

SEQ ID NO: 14405 - RNA, 20 nt, Artificial Sequence
  Antisense oligo
ggacgccuuguugaauggga

SEQ ID NO: 14406 - RNA, 20 nt, Artificial Sequence
  Antisense oligo
gggacgccuuguugaauggg

SEQ ID NO: 14407 - RNA, 20 nt, Artificial Sequence
  Antisense oligo
gucuaagucauggcgcuccc

SEQ ID NO: 14408 - RNA, 20 nt, Artificial Sequence
  Antisense oligo
cgucuaagucauggcgcucc

SEQ ID NO: 14409 - RNA, 20 nt, Artificial Sequence
  Antisense oligo
gcgucuaagucauggcgcuc

SEQ ID NO: 14410 - RNA, 20 nt, Artificial Sequence
  Antisense oligo
ugcgucuaagucauggcgcu

SEQ ID NO: 14411 - RNA, 20 nt, Artificial Sequence
  Antisense oligo
gugcgucuaagucauggcgc

SEQ ID NO: 14412 - RNA, 20 nt, Artificial Sequence
  Antisense oligo
agugcgucuaagucauggcg

SEQ ID NO: 14413 - RNA, 20 nt, Artificial Sequence
  Antisense oligo
gagugcgucuaagucauggc

SEQ ID NO: 14414 - RNA, 20 nt, Artificial Sequence
  Antisense oligo
ggagugcgucuaagucaugg

SEQ ID NO: 14415 - RNA, 20 nt, Artificial Sequence
  Antisense oligo
uggagugcgucuaagucaug

SEQ ID NO: 14416 - RNA, 20 nt, Artificial Sequence
  Antisense oligo
cuggagugcgucuaagucau

SEQ ID NO: 14417 - RNA, 20 nt, Artificial Sequence
  Antisense oligo
ccuggagugcgucuaaguca

SEQ ID NO: 14418 - RNA, 20 nt, Artificial Sequence
  Antisense oligo
gccuggagugcgucuaaguc

SEQ ID NO: 14419 - RNA, 20 nt, Artificial Sequence
  Antisense oligo
ggccuggagugcgucuaagu

SEQ ID NO: 14420 - RNA, 20 nt, Artificial Sequence
  Antisense oligo
acuucuugggcaguccugca

SEQ ID NO: 14421 - RNA, 20 nt, Artificial Sequence
  Antisense oligo
aacuucuugggcaguccugc

SEQ ID NO: 14422 - RNA, 20 nt, Artificial Sequence
  Antisense oligo
gaacuucuugggcaguccug

SEQ ID NO: 14423 - RNA, 20 nt, Artificial Sequence
  Antisense oligo
cgaacuucuugggcaguccu

SEQ ID NO: 14424 - RNA, 20 nt, Artificial Sequence
  Antisense oligo
acgaacuucuugggcagucc

SEQ ID NO: 14425 - RNA, 20 nt, Artificial Sequence
  Antisense oligo
cacgaacuucuugggcaguc

SEQ ID NO: 14426 - RNA, 20 nt, Artificial Sequence
  Antisense oligo
ccacgaacuucuugggcagu

SEQ ID NO: 14427 - RNA, 20 nt, Artificial Sequence
  Antisense oligo
uccacgaacuucuugggcag

SEQ ID NO: 14428 - RNA, 20 nt, Artificial Sequence
  Antisense oligo
guccacgaacuucuugggca

SEQ ID NO: 14429 - RNA, 20 nt, Artificial Sequence
  Antisense oligo
uguccacgaacuucuugggc

SEQ ID NO: 14430 - RNA, 20 nt, Artificial Sequence
  Antisense oligo
auguccacgaacuucuuggg

SEQ ID NO: 14431 - RNA, 20 nt, Artificial Sequence
  Antisense oligo
gauguccacgaacuucuugg

SEQ ID NO: 14432 - RNA, 20 nt, Artificial Sequence
  Antisense oligo
agauguccacgaacuucuug

SEQ ID NO: 14433 - RNA, 20 nt, Artificial Sequence
  Antisense oligo
aaagauguccacgaacuucu

SEQ ID NO: 14434 - RNA, 20 nt, Artificial Sequence
  Antisense oligo
gaaagauguccacgaacuuc

SEQ ID NO: 14435 - RNA, 20 nt, Artificial Sequence
  Antisense oligo
ugaaagauguccacgaacuu

SEQ ID NO: 14436 - RNA, 20 nt, Artificial Sequence
  Antisense oligo
cugaaagauguccacgaacu

SEQ ID NO: 14437 - RNA, 20 nt, Artificial Sequence
  Antisense oligo
ugcugaaagauguccacgaa

SEQ ID NO: 14438 - RNA, 20 nt, Artificial Sequence
  Antisense oligo
ucugcugaaagauguccacg

SEQ ID NO: 14439 - RNA, 20 nt, Artificial Sequence
  Antisense oligo
agaggagucugcugaaagau

SEQ ID NO: 14440 - RNA, 20 nt, Artificial Sequence
  Antisense oligo
gaaaccugcccagaggaguc

SEQ ID NO: 14441 - RNA, 20 nt, Artificial Sequence
  Antisense oligo
agaaaccugcccagaggagu

SEQ ID NO: 14442 - RNA, 20 nt, Artificial Sequence
  Antisense oligo
caagaaaccugcccagagga

SEQ ID NO: 14443 - RNA, 20 nt, Artificial Sequence
  Antisense oligo
gcaagaaaccugcccagagg

SEQ ID NO: 14444 - RNA, 20 nt, Artificial Sequence
  Antisense oligo
uggagcugggcaagaaaccu

SEQ ID NO: 14445 - RNA, 20 nt, Artificial Sequence
  Antisense oligo
auggagcugggcaagaaacc

SEQ ID NO: 14446 - RNA, 20 nt, Artificial Sequence
  Antisense oligo
uaacacugaagaaguuccug

SEQ ID NO: 14447 - RNA, 20 nt, Artificial Sequence
  Antisense oligo
acgcauggucaagagaauga

SEQ ID NO: 14448 - RNA, 20 nt, Artificial Sequence
  Antisense oligo
acacgcauggucaagagaau

SEQ ID NO: 14449 - RNA, 20 nt, Artificial Sequence
  Antisense oligo
cacacgcauggucaagagaa

SEQ ID NO: 14450 - RNA, 20 nt, Artificial Sequence
  Antisense oligo
gacacacgcauggucaagag

SEQ ID NO: 14451 - RNA, 20 nt, Artificial Sequence
  Antisense oligo
ccguugacacacgcaugguc

SEQ ID NO: 14452 - RNA, 20 nt, Artificial Sequence
  Antisense oligo
uccguugacacacgcauggu

SEQ ID NO: 14453 - RNA, 20 nt, Artificial Sequence
  Antisense oligo
cuccguugacacacgcaugg

SEQ ID NO: 14454 - RNA, 20 nt, Artificial Sequence
  Antisense oligo
ccuccguugacacacgcaug

SEQ ID NO: 14455 - RNA, 20 nt, Artificial Sequence
  Antisense oligo
uccuccguugacacacgcau

SEQ ID NO: 14456 - RNA, 20 nt, Artificial Sequence
  Antisense oligo
cuccuccguugacacacgca

SEQ ID NO: 14457 - RNA, 20 nt, Artificial Sequence
  Antisense oligo
uccuccuccguugacacacg

SEQ ID NO: 14458 - RNA, 20 nt, Artificial Sequence
  Antisense oligo
uuccuccuccguugacacac

SEQ ID NO: 14459 - RNA, 20 nt, Artificial Sequence
  Antisense oligo
uaauuccuccuccguugaca

SEQ ID NO: 14460 - RNA, 20 nt, Artificial Sequence
  Antisense oligo
uuaauuccuccuccguugac

SEQ ID NO: 14461 - RNA, 20 nt, Artificial Sequence
  Antisense oligo
ccuuuaauuccuccuccguu

SEQ ID NO: 14462 - RNA, 20 nt, Artificial Sequence
  Antisense oligo
accuuuaauuccuccuccgu

SEQ ID NO: 14463 - RNA, 20 nt, Artificial Sequence
  Antisense oligo
uaccuuuaauuccuccuccg

SEQ ID NO: 14464 - RNA, 20 nt, Artificial Sequence
  Antisense oligo
ucuaccuuuaauuccuccuc

SEQ ID NO: 14465 - RNA, 20 nt, Artificial Sequence
  Antisense oligo
ccaguaucuaaacaucuacc

SEQ ID NO: 14466 - RNA, 20 nt, Artificial Sequence
  Antisense oligo
gccaguaucuaaacaucuac

SEQ ID NO: 14467 - RNA, 20 nt, Artificial Sequence
  Antisense oligo
ugacccuuagccaguaucua

SEQ ID NO: 14468 - RNA, 20 nt, Artificial Sequence
  Antisense oligo
ccugacccuuagccaguauc

SEQ ID NO: 14469 - RNA, 20 nt, Artificial Sequence
  Antisense oligo
accugacccuuagccaguau

SEQ ID NO: 14470 - RNA, 20 nt, Artificial Sequence
  Antisense oligo
acaccugacccuuagccagu

SEQ ID NO: 14471 - RNA, 20 nt, Artificial Sequence
  Antisense oligo
uacaccugacccuuagccag

SEQ ID NO: 14472 - RNA, 20 nt, Artificial Sequence
  Antisense oligo
uccgugucugcauccagucc

SEQ ID NO: 14473 - RNA, 20 nt, Artificial Sequence
  Antisense oligo
cuccgugucugcauccaguc

SEQ ID NO: 14474 - RNA, 20 nt, Artificial Sequence
  Antisense oligo
ucuccgugucugcauccagu

SEQ ID NO: 14475 - RNA, 20 nt, Artificial Sequence
  Antisense oligo
gucuccgugucugcauccag

SEQ ID NO: 14476 - RNA, 20 nt, Artificial Sequence
  Antisense oligo
cgucuccgugucugcaucca

SEQ ID NO: 14477 - RNA, 20 nt, Artificial Sequence
  Antisense oligo
acgucuccgugucugcaucc

SEQ ID NO: 14478 - RNA, 20 nt, Artificial Sequence
  Antisense oligo
aacgucuccgugucugcauc

SEQ ID NO: 14479 - RNA, 20 nt, Artificial Sequence
  Antisense oligo
aaacgucuccgugucugcau

SEQ ID NO: 14480 - RNA, 20 nt, Artificial Sequence
  Antisense oligo
gaaacgucuccgugucugca

SEQ ID NO: 14481 - RNA, 20 nt, Artificial Sequence
  Antisense oligo
ggaaacgucuccgugucugc

SEQ ID NO: 14482 - RNA, 20 nt, Artificial Sequence
  Antisense oligo
aggaaacgucuccgugucug

SEQ ID NO: 14483 - RNA, 20 nt, Artificial Sequence
  Antisense oligo
gaggaaacgucuccgugucu

SEQ ID NO: 14484 - RNA, 20 nt, Artificial Sequence
  Antisense oligo
ugaggaaacgucuccguguc

SEQ ID NO: 14485 - RNA, 20 nt, Artificial Sequence
  Antisense oligo
cugaggaaacgucuccgugu

SEQ ID NO: 14486 - RNA, 20 nt, Artificial Sequence
  Antisense oligo
gcugaggaaacgucuccgug

SEQ ID NO: 14487 - RNA, 20 nt, Artificial Sequence
  Antisense oligo
agcugaggaaacgucuccgu

SEQ ID NO: 14488 - RNA, 20 nt, Artificial Sequence
  Antisense oligo
cuucacagcaccagcuccag

SEQ ID NO: 14489 - RNA, 20 nt, Artificial Sequence
  Antisense oligo
gacuucacagcaccagcucc

SEQ ID NO: 14490 - RNA, 20 nt, Artificial Sequence
  Antisense oligo
agacuucacagcaccagcuc

SEQ ID NO: 14491 - RNA, 20 nt, Artificial Sequence
  Antisense oligo
cagacuucacagcaccagcu

SEQ ID NO: 14492 - RNA, 20 nt, Artificial Sequence
  Antisense oligo
ccagacuucacagcaccagc

SEQ ID NO: 14493 - RNA, 20 nt, Artificial Sequence
  Antisense oligo
ucccagacuucacagcacca

SEQ ID NO: 14494 - RNA, 20 nt, Artificial Sequence
  Antisense oligo
uucccagacuucacagcacc

SEQ ID NO: 14495 - RNA, 20 nt, Artificial Sequence
  Antisense oligo
guucccagacuucacagcac

SEQ ID NO: 14496 - RNA, 20 nt, Artificial Sequence
  Antisense oligo
ugaccauguucuguucccag

SEQ ID NO: 14497 - RNA, 20 nt, Artificial Sequence
  Antisense oligo
ucgcugaccauguucuguuc

SEQ ID NO: 14498 - RNA, 20 nt, Artificial Sequence
  Antisense oligo
uucgcugaccauguucuguu

SEQ ID NO: 14499 - RNA, 20 nt, Artificial Sequence
  Antisense oligo
ccuucgcugaccauguucug

SEQ ID NO: 14500 - RNA, 20 nt, Artificial Sequence
  Antisense oligo
cccuucgcugaccauguucu

SEQ ID NO: 14501 - RNA, 20 nt, Artificial Sequence
  Antisense oligo
acccuucgcugaccauguuc

SEQ ID NO: 14502 - RNA, 20 nt, Artificial Sequence
  Antisense oligo
cacccuucgcugaccauguu

SEQ ID NO: 14503 - RNA, 20 nt, Artificial Sequence
  Antisense oligo
gcacccuucgcugaccaugu

SEQ ID NO: 14504 - RNA, 20 nt, Artificial Sequence
  Antisense oligo
cugaggguguagcacugaau

SEQ ID NO: 14505 - RNA, 20 nt, Artificial Sequence
  Antisense oligo
gacugaggguguagcacuga

SEQ ID NO: 14506 - RNA, 20 nt, Artificial Sequence
  Antisense oligo
ggacugaggguguagcacug

SEQ ID NO: 14507 - RNA, 20 nt, Artificial Sequence
  Antisense oligo
uggacugaggguguagcacu

SEQ ID NO: 14508 - RNA, 20 nt, Artificial Sequence
  Antisense oligo
gaaagcuccguguuuuagga

SEQ ID NO: 14509 - RNA, 20 nt, Artificial Sequence
  Antisense oligo
agaaagcuccguguuuuagg

SEQ ID NO: 14510 - RNA, 20 nt, Artificial Sequence
  Antisense oligo
cagaaagcuccguguuuuag

SEQ ID NO: 14511 - RNA, 20 nt, Artificial Sequence
  Antisense oligo
acagaaagcuccguguuuua

SEQ ID NO: 14512 - RNA, 20 nt, Artificial Sequence
  Antisense oligo
cacagaaagcuccguguuuu

SEQ ID NO: 14513 - RNA, 20 nt, Artificial Sequence
  Antisense oligo
ucacagaaagcuccguguuu

SEQ ID NO: 14514 - RNA, 20 nt, Artificial Sequence
  Antisense oligo
uucacagaaagcuccguguu

SEQ ID NO: 14515 - RNA, 20 nt, Artificial Sequence
  Antisense oligo
uguucacagaaagcuccgug

SEQ ID NO: 14516 - RNA, 20 nt, Artificial Sequence
  Antisense oligo
ggaggucuucucauguucac

SEQ ID NO: 14517 - RNA, 20 nt, Artificial Sequence
  Antisense oligo
uggaggucuucucauguuca

SEQ ID NO: 14518 - RNA, 20 nt, Artificial Sequence
  Antisense oligo
uuggaggucuucucauguuc

SEQ ID NO: 14519 - RNA, 20 nt, Artificial Sequence
  Antisense oligo
gaaauuggaggucuucucau

SEQ ID NO: 14520 - RNA, 20 nt, Artificial Sequence
  Antisense oligo
ggaaauuggaggucuucuca

SEQ ID NO: 14521 - RNA, 20 nt, Artificial Sequence
  Antisense oligo
aaggaaauuggaggucuucu

SEQ ID NO: 14522 - RNA, 20 nt, Artificial Sequence
  Antisense oligo
caaggaaauuggaggucuuc

SEQ ID NO: 14523 - RNA, 20 nt, Artificial Sequence
  Antisense oligo
augucaaggaaauuggaggu

SEQ ID NO: 14524 - RNA, 20 nt, Artificial Sequence
  Antisense oligo
agcuaugucaaggaaauugg

SEQ ID NO: 14525 - RNA, 20 nt, Artificial Sequence
  Antisense oligo
cccuguaggguuaguuacgu

SEQ ID NO: 14526 - RNA, 20 nt, Artificial Sequence
  Antisense oligo
ccucuagucauauuagcugu

SEQ ID NO: 14527 - RNA, 20 nt, Artificial Sequence
  Antisense oligo
uccuggauguugauaugcuu

SEQ ID NO: 14528 - RNA, 20 nt, Artificial Sequence
  Antisense oligo
cgcguggccuggcuauuucu

SEQ ID NO: 14529 - RNA, 20 nt, Artificial Sequence
  Antisense oligo
ugcacgcuacacugucagcc

SEQ ID NO: 14530 - RNA, 20 nt, Artificial Sequence
  Antisense oligo
cucaacuguucugccacgca

SEQ ID NO: 14531 - RNA, 20 nt, Artificial Sequence
  Antisense oligo
gcucaacuguucugccacgc

SEQ ID NO: 14532 - RNA, 20 nt, Artificial Sequence
  Antisense oligo
ugcucaacuguucugccacg

SEQ ID NO: 14533 - RNA, 20 nt, Artificial Sequence
  Antisense oligo
gugcucaacuguucugccac

SEQ ID NO: 14534 - RNA, 20 nt, Artificial Sequence
  Antisense oligo
aggugcucaacuguucugcc

SEQ ID NO: 14535 - RNA, 20 nt, Artificial Sequence
  Antisense oligo
aaggugcucaacuguucugc

SEQ ID NO: 14536 - RNA, 20 nt, Artificial Sequence
  Antisense oligo
uaaggugcucaacuguucug

SEQ ID NO: 14537 - RNA, 20 nt, Artificial Sequence
  Antisense oligo
auaaggugcucaacuguucu

SEQ ID NO: 14538 - RNA, 20 nt, Artificial Sequence
  Antisense oligo
aggacagagucagcaguuca

SEQ ID NO: 14539 - RNA, 20 nt, Artificial Sequence
  Antisense oligo
ucaggacagagucagcaguu

SEQ ID NO: 14540 - RNA, 20 nt, Artificial Sequence
  Antisense oligo
uuccucaggacagagucagc

SEQ ID NO: 14541 - RNA, 20 nt, Artificial Sequence
  Antisense oligo
guuuccucaggacagaguca

SEQ ID NO: 14542 - RNA, 20 nt, Artificial Sequence
  Antisense oligo
uaguuuccucaggacagagu

SEQ ID NO: 14543 - RNA, 20 nt, Artificial Sequence
  Antisense oligo
aguaguuuccucaggacaga

SEQ ID NO: 14544 - RNA, 20 nt, Artificial Sequence
  Antisense oligo
caguaguuuccucaggacag

SEQ ID NO: 14545 - RNA, 20 nt, Artificial Sequence
  Antisense oligo
ccaguaguuuccucaggaca

SEQ ID NO: 14546 - RNA, 20 nt, Artificial Sequence
  Antisense oligo
uccaguaguuuccucaggac

SEQ ID NO: 14547 - RNA, 20 nt, Artificial Sequence
  Antisense oligo
cuccaguaguuuccucagga

SEQ ID NO: 14548 - RNA, 20 nt, Artificial Sequence
  Antisense oligo
ucuccaguaguuuccucagg

SEQ ID NO: 14549 - RNA, 20 nt, Artificial Sequence
  Antisense oligo
aucuccaguaguuuccucag

SEQ ID NO: 14550 - RNA, 20 nt, Artificial Sequence
  Antisense oligo
uuguccacaucuccaguagu

SEQ ID NO: 14551 - RNA, 20 nt, Artificial Sequence
  Antisense oligo
auuuguccacaucuccagua

SEQ ID NO: 14552 - RNA, 20 nt, Artificial Sequence
  Antisense oligo
uauuuguccacaucuccagu

SEQ ID NO: 14553 - RNA, 20 nt, Artificial Sequence
  Antisense oligo
acaucccugugaaccaaaua

SEQ ID NO: 14554 - RNA, 20 nt, Artificial Sequence
  Antisense oligo
gacaucccugugaaccaaau

SEQ ID NO: 14555 - RNA, 20 nt, Artificial Sequence
  Antisense oligo
aggacaucccugugaaccaa

SEQ ID NO: 14556 - RNA, 20 nt, Artificial Sequence
  Antisense oligo
aaggacaucccugugaacca

SEQ ID NO: 14557 - RNA, 20 nt, Artificial Sequence
  Antisense oligo
aaaggacaucccugugaacc

SEQ ID NO: 14558 - RNA, 20 nt, Artificial Sequence
  Antisense oligo
aaaaggacaucccugugaac

SEQ ID NO: 14559 - RNA, 20 nt, Artificial Sequence
  Antisense oligo
gaaaaggacaucccugugaa

SEQ ID NO: 14560 - RNA, 20 nt, Artificial Sequence
  Antisense oligo
ugaaaaggacaucccuguga

SEQ ID NO: 14561 - RNA, 20 nt, Artificial Sequence
  Antisense oligo
cugaaaaggacaucccugug

SEQ ID NO: 14562 - RNA, 20 nt, Artificial Sequence
  Antisense oligo
gcugaaaaggacaucccugu

SEQ ID NO: 14563 - RNA, 20 nt, Artificial Sequence
  Antisense oligo
agcugaaaaggacaucccug

SEQ ID NO: 14564 - RNA, 20 nt, Artificial Sequence
  Antisense oligo
aagcugaaaaggacaucccu

SEQ ID NO: 14565 - RNA, 20 nt, Artificial Sequence
  Antisense oligo
agcaaagcugaaaaggacau

SEQ ID NO: 14566 - RNA, 20 nt, Artificial Sequence
  Antisense oligo
cgaagcaaagcugaaaagga

SEQ ID NO: 14567 - RNA, 20 nt, Artificial Sequence
  Antisense oligo
ucgaagcaaagcugaaaagg

SEQ ID NO: 14568 - RNA, 20 nt, Artificial Sequence
  Antisense oligo
ugcccauccuguauuuccgg

SEQ ID NO: 14569 - RNA, 20 nt, Artificial Sequence
  Antisense oligo
uugcccauccuguauuuccg

SEQ ID NO: 14570 - RNA, 20 nt, Artificial Sequence
  Antisense oligo
uuugcccauccuguauuucc

SEQ ID NO: 14571 - RNA, 20 nt, Artificial Sequence
  Antisense oligo
ggccauacuuuaauuugccc

SEQ ID NO: 14572 - RNA, 20 nt, Artificial Sequence
  Antisense oligo
cggccauacuuuaauuugcc

SEQ ID NO: 14573 - RNA, 20 nt, Artificial Sequence
  Antisense oligo
acggccauacuuuaauuugc

SEQ ID NO: 14574 - RNA, 20 nt, Artificial Sequence
  Antisense oligo
caucauacggccauacuuua

SEQ ID NO: 14575 - RNA, 20 nt, Artificial Sequence
  Antisense oligo
ccaucauacggccauacuuu

SEQ ID NO: 14576 - RNA, 20 nt, Artificial Sequence
  Antisense oligo
cccaucauacggccauacuu

SEQ ID NO: 14577 - RNA, 20 nt, Artificial Sequence
  Antisense oligo
acccaucauacggccauacu

SEQ ID NO: 14578 - RNA, 20 nt, Artificial Sequence
  Antisense oligo
aacccaucauacggccauac

SEQ ID NO: 14579 - RNA, 20 nt, Artificial Sequence
  Antisense oligo
auaacccaucauacggccau

SEQ ID NO: 14580 - RNA, 20 nt, Artificial Sequence
  Antisense oligo
aauaacccaucauacggcca

SEQ ID NO: 14581 - RNA, 20 nt, Artificial Sequence
  Antisense oligo
gcucaauaacccaucauacg

SEQ ID NO: 14582 - RNA, 20 nt, Artificial Sequence
  Antisense oligo
ugcucaauaacccaucauac

SEQ ID NO: 14583 - RNA, 20 nt, Artificial Sequence
  Antisense oligo
uggcugcucaauaacccauc

SEQ ID NO: 14584 - RNA, 20 nt, Artificial Sequence
  Antisense oligo
uaauggcugcucaauaaccc

SEQ ID NO: 14585 - RNA, 20 nt, Artificial Sequence
  Antisense oligo
acuuucccuaugacugagua

SEQ ID NO: 14586 - RNA, 20 nt, Artificial Sequence
  Antisense oligo
ugaacuuucccuaugacuga

SEQ ID NO: 14587 - RNA, 20 nt, Artificial Sequence
  Antisense oligo
augaacuuucccuaugacug

SEQ ID NO: 14588 - RNA, 20 nt, Artificial Sequence
  Antisense oligo
caugaacuuucccuaugacu

SEQ ID NO: 14589 - RNA, 20 nt, Artificial Sequence
  Antisense oligo
gccacugaacaugacaucau

SEQ ID NO: 14590 - RNA, 20 nt, Artificial Sequence
  Antisense oligo
ugccacugaacaugacauca

SEQ ID NO: 14591 - RNA, 20 nt, Artificial Sequence
  Antisense oligo
accgugucgucugggcuuuu

SEQ ID NO: 14592 - RNA, 20 nt, Artificial Sequence
  Antisense oligo
caccgugucgucugggcuuu

SEQ ID NO: 14593 - RNA, 20 nt, Artificial Sequence
  Antisense oligo
ucaccgugucgucugggcuu

SEQ ID NO: 14594 - RNA, 20 nt, Artificial Sequence
  Antisense oligo
aaggucaccgugucgucugg

SEQ ID NO: 14595 - RNA, 20 nt, Artificial Sequence
  Antisense oligo
uaaggucaccgugucgucug

SEQ ID NO: 14596 - RNA, 20 nt, Artificial Sequence
  Antisense oligo
uuaaggucaccgugucgucu

SEQ ID NO: 14597 - RNA, 20 nt, Artificial Sequence
  Antisense oligo
guuaaggucaccgugucguc

SEQ ID NO: 14598 - RNA, 20 nt, Artificial Sequence
  Antisense oligo
cguuaaggucaccgugucgu

SEQ ID NO: 14599 - RNA, 20 nt, Artificial Sequence
  Antisense oligo
acguuaaggucaccgugucg

SEQ ID NO: 14600 - RNA, 20 nt, Artificial Sequence
  Antisense oligo
ucccacguuaaggucaccgu

SEQ ID NO: 14601 - RNA, 20 nt, Artificial Sequence
  Antisense oligo
cucccacguuaaggucaccg

SEQ ID NO: 14602 - RNA, 20 nt, Artificial Sequence
  Antisense oligo
uccucccacguuaaggucac

SEQ ID NO: 14603 - RNA, 20 nt, Artificial Sequence
  Antisense oligo
cuccucccacguuaagguca

SEQ ID NO: 14604 - RNA, 20 nt, Artificial Sequence
  Antisense oligo
ucuccucccacguuaagguc

SEQ ID NO: 14605 - RNA, 20 nt, Artificial Sequence
  Antisense oligo
ccucuccucccacguuaagg

SEQ ID NO: 14606 - RNA, 20 nt, Artificial Sequence
  Antisense oligo
gccucuccucccacguuaag

SEQ ID NO: 14607 - RNA, 20 nt, Artificial Sequence
  Antisense oligo
ugccucuccucccacguuaa

SEQ ID NO: 14608 - RNA, 20 nt, Artificial Sequence
  Antisense oligo
cccguuugcuucuguccagu

SEQ ID NO: 14609 - RNA, 20 nt, Artificial Sequence
  Antisense oligo
ucccguuugcuucuguccag

SEQ ID NO: 14610 - RNA, 20 nt, Artificial Sequence
  Antisense oligo
gucccguuugcuucugucca

SEQ ID NO: 14611 - RNA, 20 nt, Artificial Sequence
  Antisense oligo
ugucccguuugcuucugucc

SEQ ID NO: 14612 - RNA, 20 nt, Artificial Sequence
  Antisense oligo
cugucccguuugcuucuguc

SEQ ID NO: 14613 - RNA, 20 nt, Artificial Sequence
  Antisense oligo
ucugucccguuugcuucugu

SEQ ID NO: 14614 - RNA, 20 nt, Artificial Sequence
  Antisense oligo
uucugucccguuugcuucug

SEQ ID NO: 14615 - RNA, 20 nt, Artificial Sequence
  Antisense oligo
uauucugucccguuugcuuc

SEQ ID NO: 14616 - RNA, 20 nt, Artificial Sequence
  Antisense oligo
gcuauucugucccguuugcu

SEQ ID NO: 14617 - RNA, 20 nt, Artificial Sequence
  Antisense oligo
ugcuauucugucccguuugc

SEQ ID NO: 14618 - RNA, 20 nt, Artificial Sequence
  Antisense oligo
gugcuauucugucccguuug

SEQ ID NO: 14619 - RNA, 20 nt, Artificial Sequence
  Antisense oligo
gcagaaacugggauucaaaa

SEQ ID NO: 14620 - RNA, 20 nt, Artificial Sequence
  Antisense oligo
ugcagaaacugggauucaaa

SEQ ID NO: 14621 - RNA, 20 nt, Artificial Sequence
  Antisense oligo
agugcaggaccacagagcca

SEQ ID NO: 14622 - RNA, 20 nt, Artificial Sequence
  Antisense oligo
uagugcaggaccacagagcc

SEQ ID NO: 14623 - RNA, 20 nt, Artificial Sequence
  Antisense oligo
ccuagugcaggaccacagag

SEQ ID NO: 14624 - RNA, 20 nt, Artificial Sequence
  Antisense oligo
cgcuuucaguuuccuagugc

SEQ ID NO: 14625 - RNA, 20 nt, Artificial Sequence
  Antisense oligo
ccgcuuucaguuuccuagug

SEQ ID NO: 14626 - RNA, 20 nt, Artificial Sequence
  Antisense oligo
gccgcuuucaguuuccuagu

SEQ ID NO: 14627 - RNA, 20 nt, Artificial Sequence
  Antisense oligo
cacgguaaggaaaccucuuc

SEQ ID NO: 14628 - RNA, 20 nt, Artificial Sequence
  Antisense oligo
ccacgguaaggaaaccucuu

SEQ ID NO: 14629 - RNA, 20 nt, Artificial Sequence
  Antisense oligo
cccacgguaaggaaaccucu

SEQ ID NO: 14630 - RNA, 20 nt, Artificial Sequence
  Antisense oligo
acccacgguaaggaaaccuc

SEQ ID NO: 14631 - RNA, 20 nt, Artificial Sequence
  Antisense oligo
cacccacgguaaggaaaccu

SEQ ID NO: 14632 - RNA, 20 nt, Artificial Sequence
  Antisense oligo
gcacccacgguaaggaaacc

SEQ ID NO: 14633 - RNA, 20 nt, Artificial Sequence
  Antisense oligo
ugcacccacgguaaggaaac

SEQ ID NO: 14634 - RNA, 20 nt, Artificial Sequence
  Antisense oligo
gaaacgcugguaggcaaggu

SEQ ID NO: 14635 - RNA, 20 nt, Artificial Sequence
  Antisense oligo
ugaaacgcugguaggcaagg

SEQ ID NO: 14636 - RNA, 20 nt, Artificial Sequence
  Antisense oligo
cugaaacgcugguaggcaag

SEQ ID NO: 14637 - RNA, 20 nt, Artificial Sequence
  Antisense oligo
ucugaaacgcugguaggcaa

SEQ ID NO: 14638 - RNA, 20 nt, Artificial Sequence
  Antisense oligo
uucugaaacgcugguaggca

SEQ ID NO: 14639 - RNA, 20 nt, Artificial Sequence
  Antisense oligo
cuucugaaacgcugguaggc

SEQ ID NO: 14640 - RNA, 20 nt, Artificial Sequence
  Antisense oligo
gcuucugaaacgcugguagg

SEQ ID NO: 14641 - RNA, 20 nt, Artificial Sequence
  Antisense oligo
ggcuucugaaacgcugguag

SEQ ID NO: 14642 - RNA, 20 nt, Artificial Sequence
  Antisense oligo
cggcuucugaaacgcuggua

SEQ ID NO: 14643 - RNA, 20 nt, Artificial Sequence
  Antisense oligo
acggcuucugaaacgcuggu

SEQ ID NO: 14644 - RNA, 20 nt, Artificial Sequence
  Antisense oligo
gacggcuucugaaacgcugg

SEQ ID NO: 14645 - RNA, 20 nt, Artificial Sequence
  Antisense oligo
agacggcuucugaaacgcug

SEQ ID NO: 14646 - RNA, 20 nt, Artificial Sequence
  Antisense oligo
agauggucaggauucuggaa

SEQ ID NO: 14647 - RNA, 20 nt, Artificial Sequence
  Antisense oligo
uagauggucaggauucugga

SEQ ID NO: 14648 - RNA, 20 nt, Artificial Sequence
  Antisense oligo
guagauggucaggauucugg

SEQ ID NO: 14649 - RNA, 20 nt, Artificial Sequence
  Antisense oligo
gguagauggucaggauucug

SEQ ID NO: 14650 - RNA, 20 nt, Artificial Sequence
  Antisense oligo
ggguagauggucaggauucu

SEQ ID NO: 14651 - RNA, 20 nt, Artificial Sequence
  Antisense oligo
aggguagauggucaggauuc

SEQ ID NO: 14652 - RNA, 20 nt, Artificial Sequence
  Antisense oligo
ugaggguagauggucaggau

SEQ ID NO: 14653 - RNA, 20 nt, Artificial Sequence
  Antisense oligo
acgggcuuccaucaggcugu

SEQ ID NO: 14654 - RNA, 20 nt, Artificial Sequence
  Antisense oligo
aacgggcuuccaucaggcug

SEQ ID NO: 14655 - RNA, 20 nt, Artificial Sequence
  Antisense oligo
caacgggcuuccaucaggcu

SEQ ID NO: 14656 - RNA, 20 nt, Artificial Sequence
  Antisense oligo
uccaacgggcuuccaucagg

SEQ ID NO: 14657 - RNA, 20 nt, Artificial Sequence
  Antisense oligo
uuccaacgggcuuccaucag

SEQ ID NO: 14658 - RNA, 20 nt, Artificial Sequence
  Antisense oligo
guuccaacgggcuuccauca

SEQ ID NO: 14659 - RNA, 20 nt, Artificial Sequence
  Antisense oligo
gguuccaacgggcuuccauc

SEQ ID NO: 14660 - RNA, 20 nt, Artificial Sequence
  Antisense oligo
ugguuccaacgggcuuccau

SEQ ID NO: 14661 - RNA, 20 nt, Artificial Sequence
  Antisense oligo
augguuccaacgggcuucca

SEQ ID NO: 14662 - RNA, 20 nt, Artificial Sequence
  Antisense oligo
caugguuccaacgggcuucc

SEQ ID NO: 14663 - RNA, 20 nt, Artificial Sequence
  Antisense oligo
ucaugguuccaacgggcuuc

SEQ ID NO: 14664 - RNA, 20 nt, Artificial Sequence
  Antisense oligo
cucaugguuccaacgggcuu

SEQ ID NO: 14665 - RNA, 20 nt, Artificial Sequence
  Antisense oligo
gcucaugguuccaacgggcu

SEQ ID NO: 14666 - RNA, 20 nt, Artificial Sequence
  Antisense oligo
agcucaugguuccaacgggc

SEQ ID NO: 14667 - RNA, 20 nt, Artificial Sequence
  Antisense oligo
ccagcucaugguuccaacgg

SEQ ID NO: 14668 - RNA, 20 nt, Artificial Sequence
  Antisense oligo
gccagcucaugguuccaacg

SEQ ID NO: 14669 - RNA, 20 nt, Artificial Sequence
  Antisense oligo
agccagcucaugguuccaac

SEQ ID NO: 14670 - RNA, 20 nt, Artificial Sequence
  Antisense oligo
ccagccagcucaugguucca

SEQ ID NO: 14671 - RNA, 20 nt, Artificial Sequence
  Antisense oligo
uccagccagcucaugguucc

SEQ ID NO: 14672 - RNA, 20 nt, Artificial Sequence
  Antisense oligo
auccagccagcucaugguuc

SEQ ID NO: 14673 - RNA, 20 nt, Artificial Sequence
  Antisense oligo
ucucacauccagccagcuca

SEQ ID NO: 14674 - RNA, 20 nt, Artificial Sequence
  Antisense oligo
aucucacauccagccagcuc

SEQ ID NO: 14675 - RNA, 20 nt, Artificial Sequence
  Antisense oligo
accaucucacauccagccag

SEQ ID NO: 14676 - RNA, 20 nt, Artificial Sequence
  Antisense oligo
uaccaucucacauccagcca

SEQ ID NO: 14677 - RNA, 20 nt, Artificial Sequence
  Antisense oligo
auaccaucucacauccagcc

SEQ ID NO: 14678 - RNA, 20 nt, Artificial Sequence
  Antisense oligo
cauaccaucucacauccagc

SEQ ID NO: 14679 - RNA, 20 nt, Artificial Sequence
  Antisense oligo
ccauaccaucucacauccag

SEQ ID NO: 14680 - RNA, 20 nt, Artificial Sequence
  Antisense oligo
gccauaccaucucacaucca

SEQ ID NO: 14681 - RNA, 20 nt, Artificial Sequence
  Antisense oligo
ggccauaccaucucacaucc

SEQ ID NO: 14682 - RNA, 20 nt, Artificial Sequence
  Antisense oligo
gggccauaccaucucacauc

SEQ ID NO: 14683 - RNA, 20 nt, Artificial Sequence
  Antisense oligo
agggccauaccaucucacau

SEQ ID NO: 14684 - RNA, 20 nt, Artificial Sequence
  Antisense oligo
gagggccauaccaucucaca

SEQ ID NO: 14685 - RNA, 20 nt, Artificial Sequence
  Antisense oligo
ggagggccauaccaucucac

SEQ ID NO: 14686 - RNA, 20 nt, Artificial Sequence
  Antisense oligo
aggagggccauaccaucuca

SEQ ID NO: 14687 - RNA, 20 nt, Artificial Sequence
  Antisense oligo
gaggagggccauaccaucuc

SEQ ID NO: 14688 - RNA, 20 nt, Artificial Sequence
  Antisense oligo
ggaggagggccauaccaucu

SEQ ID NO: 14689 - RNA, 20 nt, Artificial Sequence
  Antisense oligo
acaaggcuugcucagggcag

SEQ ID NO: 14690 - RNA, 20 nt, Artificial Sequence
  Antisense oligo
cacaaggcuugcucagggca

SEQ ID NO: 14691 - RNA, 20 nt, Artificial Sequence
  Antisense oligo
accacaaggcuugcucaggg

SEQ ID NO: 14692 - RNA, 20 nt, Artificial Sequence
  Antisense oligo
guuggaagcaccacaaggcu

SEQ ID NO: 14693 - RNA, 20 nt, Artificial Sequence
  Antisense oligo
gaguuggaagcaccacaagg

SEQ ID NO: 14694 - RNA, 20 nt, Artificial Sequence
  Antisense oligo
ggaguuggaagcaccacaag

SEQ ID NO: 14695 - RNA, 20 nt, Artificial Sequence
  Antisense oligo
gaguggaguuggaagcacca

SEQ ID NO: 14696 - RNA, 20 nt, Artificial Sequence
  Antisense oligo
ccagaguggaguuggaagca

SEQ ID NO: 14697 - RNA, 20 nt, Artificial Sequence
  Antisense oligo
ucccagaguggaguuggaag

SEQ ID NO: 14698 - RNA, 20 nt, Artificial Sequence
  Antisense oligo
ucccacuuggaacacagccc

SEQ ID NO: 14699 - RNA, 20 nt, Artificial Sequence
  Antisense oligo
cucccacuuggaacacagcc

SEQ ID NO: 14700 - RNA, 20 nt, Artificial Sequence
  Antisense oligo
aaaucucccacuuggaacac

SEQ ID NO: 14701 - RNA, 20 nt, Artificial Sequence
  Antisense oligo
agaaaucucccacuuggaac

SEQ ID NO: 14702 - RNA, 20 nt, Artificial Sequence
  Antisense oligo
aagaaaucucccacuuggaa

SEQ ID NO: 14703 - RNA, 20 nt, Artificial Sequence
  Antisense oligo
gugaagaaaucucccacuug

SEQ ID NO: 14704 - RNA, 20 nt, Artificial Sequence
  Antisense oligo
ccuugugaagaaaucuccca

SEQ ID NO: 14705 - RNA, 20 nt, Artificial Sequence
  Antisense oligo
gccuugugaagaaaucuccc

SEQ ID NO: 14706 - RNA, 20 nt, Artificial Sequence
  Antisense oligo
ugccuugugaagaaaucucc

SEQ ID NO: 14707 - RNA, 20 nt, Artificial Sequence
  Antisense oligo
gugccuugugaagaaaucuc

SEQ ID NO: 14708 - RNA, 20 nt, Artificial Sequence
  Antisense oligo
uguguccuuaacaucucuga

SEQ ID NO: 14709 - RNA, 20 nt, Artificial Sequence
  Antisense oligo
agcgagauguguccuuaaca

SEQ ID NO: 14710 - RNA, 20 nt, Artificial Sequence
  Antisense oligo
cagcgagauguguccuuaac

SEQ ID NO: 14711 - RNA, 20 nt, Artificial Sequence
  Antisense oligo
ucagcgagauguguccuuaa

SEQ ID NO: 14712 - RNA, 20 nt, Artificial Sequence
  Antisense oligo
gucagcgagauguguccuua

SEQ ID NO: 14713 - RNA, 20 nt, Artificial Sequence
  Antisense oligo
cgucagcgagauguguccuu

SEQ ID NO: 14714 - RNA, 20 nt, Artificial Sequence
  Antisense oligo
gcgucagcgagauguguccu

SEQ ID NO: 14715 - RNA, 20 nt, Artificial Sequence
  Antisense oligo
agcgucagcgagaugugucc

SEQ ID NO: 14716 - RNA, 20 nt, Artificial Sequence
  Antisense oligo
aagcgucagcgagauguguc

SEQ ID NO: 14717 - RNA, 20 nt, Artificial Sequence
  Antisense oligo
gaagcgucagcgagaugugu

SEQ ID NO: 14718 - RNA, 20 nt, Artificial Sequence
  Antisense oligo
agaagcgucagcgagaugug

SEQ ID NO: 14719 - RNA, 20 nt, Artificial Sequence
  Antisense oligo
gagaagcgucagcgagaugu

SEQ ID NO: 14720 - RNA, 20 nt, Artificial Sequence
  Antisense oligo
ugagaagcgucagcgagaug

SEQ ID NO: 14721 - RNA, 20 nt, Artificial Sequence
  Antisense oligo
gugagaagcgucagcgagau

SEQ ID NO: 14722 - RNA, 20 nt, Artificial Sequence
  Antisense oligo
ugugagaagcgucagcgaga

SEQ ID NO: 14723 - RNA, 20 nt, Artificial Sequence
  Antisense oligo
augugagaagcgucagcgag

SEQ ID NO: 14724 - RNA, 20 nt, Artificial Sequence
  Antisense oligo
gaugugagaagcgucagcga

SEQ ID NO: 14725 - RNA, 20 nt, Artificial Sequence
  Antisense oligo
ggaugugagaagcgucagcg

SEQ ID NO: 14726 - RNA, 20 nt, Artificial Sequence
  Antisense oligo
aggaugugagaagcgucagc

SEQ ID NO: 14727 - RNA, 20 nt, Artificial Sequence
  Antisense oligo
uaggaugugagaagcgucag

SEQ ID NO: 14728 - RNA, 20 nt, Artificial Sequence
  Antisense oligo
cuaggaugugagaagcguca

SEQ ID NO: 14729 - RNA, 20 nt, Artificial Sequence
  Antisense oligo
gucuaggaugugagaagcgu

SEQ ID NO: 14730 - RNA, 20 nt, Artificial Sequence
  Antisense oligo
ucauugucuaggaugugaga

SEQ ID NO: 14731 - RNA, 20 nt, Artificial Sequence
  Antisense oligo
uucauugucuaggaugugag

SEQ ID NO: 14732 - RNA, 20 nt, Artificial Sequence
  Antisense oligo
cuuucauugucuaggaugug

SEQ ID NO: 14733 - RNA, 20 nt, Artificial Sequence
  Antisense oligo
cgaccuaaacuuucauuguc

SEQ ID NO: 14734 - RNA, 20 nt, Artificial Sequence
  Antisense oligo
gcgaccuaaacuuucauugu

SEQ ID NO: 14735 - RNA, 20 nt, Artificial Sequence
  Antisense oligo
ugcgaccuaaacuuucauug

SEQ ID NO: 14736 - RNA, 20 nt, Artificial Sequence
  Antisense oligo
gcuugcgaccuaaacuuuca

SEQ ID NO: 14737 - RNA, 20 nt, Artificial Sequence
  Antisense oligo
ggcuugcgaccuaaacuuuc

SEQ ID NO: 14738 - RNA, 20 nt, Artificial Sequence
  Antisense oligo
aggcuugcgaccuaaacuuu

SEQ ID NO: 14739 - RNA, 20 nt, Artificial Sequence
  Antisense oligo
caggcuugcgaccuaaacuu

SEQ ID NO: 14740 - RNA, 20 nt, Artificial Sequence
  Antisense oligo
ccaggcuugcgaccuaaacu

SEQ ID NO: 14741 - RNA, 20 nt, Artificial Sequence
  Antisense oligo
cccaggcuugcgaccuaaac

SEQ ID NO: 14742 - RNA, 20 nt, Artificial Sequence
  Antisense oligo
ucccaggcuugcgaccuaaa

SEQ ID NO: 14743 - RNA, 20 nt, Artificial Sequence
  Antisense oligo
gucccaggcuugcgaccuaa

SEQ ID NO: 14744 - RNA, 20 nt, Artificial Sequence
  Antisense oligo
ugucccaggcuugcgaccua

SEQ ID NO: 14745 - RNA, 20 nt, Artificial Sequence
  Antisense oligo
cuugugucccaggcuugcga

SEQ ID NO: 14746 - RNA, 20 nt, Artificial Sequence
  Antisense oligo
acuugugucccaggcuugcg

SEQ ID NO: 14747 - RNA, 20 nt, Artificial Sequence
  Antisense oligo
auacuugugucccaggcuug

SEQ ID NO: 14748 - RNA, 20 nt, Artificial Sequence
  Antisense oligo
ggcuguuagcugcauguaua

SEQ ID NO: 14749 - RNA, 20 nt, Artificial Sequence
  Antisense oligo
gcaaaugcguccagggucug

SEQ ID NO: 14750 - RNA, 20 nt, Artificial Sequence
  Antisense oligo
ggcaaaugcguccagggucu

SEQ ID NO: 14751 - RNA, 20 nt, Artificial Sequence
  Antisense oligo
uugcggcaaaugcguccagg

SEQ ID NO: 14752 - RNA, 20 nt, Artificial Sequence
  Antisense oligo
auugcggcaaaugcguccag

SEQ ID NO: 14753 - RNA, 20 nt, Artificial Sequence
  Antisense oligo
ugcaggccauugcggcaaau

SEQ ID NO: 14754 - RNA, 20 nt, Artificial Sequence
  Antisense oligo
gugcaggccauugcggcaaa

SEQ ID NO: 14755 - RNA, 20 nt, Artificial Sequence
  Antisense oligo
aucuccgugcaggccauugc

SEQ ID NO: 14756 - RNA, 20 nt, Artificial Sequence
  Antisense oligo
caucuccgugcaggccauug

SEQ ID NO: 14757 - RNA, 20 nt, Artificial Sequence
  Antisense oligo
gcaucuccgugcaggccauu

SEQ ID NO: 14758 - RNA, 20 nt, Artificial Sequence
  Antisense oligo
agcaucuccgugcaggccau

SEQ ID NO: 14759 - RNA, 20 nt, Artificial Sequence
  Antisense oligo
ucuugucagcaucuccgugc

SEQ ID NO: 14760 - RNA, 20 nt, Artificial Sequence
  Antisense oligo
uuucuugucagcaucuccgu

SEQ ID NO: 14761 - RNA, 20 nt, Artificial Sequence
  Antisense oligo
guuucuugucagcaucuccg

SEQ ID NO: 14762 - RNA, 20 nt, Artificial Sequence
  Antisense oligo
uguuucuugucagcaucucc

SEQ ID NO: 14763 - RNA, 20 nt, Artificial Sequence
  Antisense oligo
guguuucuugucagcaucuc

SEQ ID NO: 14764 - RNA, 20 nt, Artificial Sequence
  Antisense oligo
cuucaggguguuucuuguca

SEQ ID NO: 14765 - RNA, 20 nt, Artificial Sequence
  Antisense oligo
gcuucaggguguuucuuguc

SEQ ID NO: 14766 - RNA, 20 nt, Artificial Sequence
  Antisense oligo
ggcuucaggguguuucuugu

SEQ ID NO: 14767 - RNA, 20 nt, Artificial Sequence
  Antisense oligo
gggcuucaggguguuucuug

SEQ ID NO: 14768 - RNA, 20 nt, Artificial Sequence
  Antisense oligo
ugggcuucaggguguuucuu

SEQ ID NO: 14769 - RNA, 20 nt, Artificial Sequence
  Antisense oligo
acugggcuucaggguguuuc

SEQ ID NO: 14770 - RNA, 20 nt, Artificial Sequence
  Antisense oligo
ggacugggcuucaggguguu

SEQ ID NO: 14771 - RNA, 20 nt, Artificial Sequence
  Antisense oligo
accaacuguagccacgccug

SEQ ID NO: 14772 - RNA, 20 nt, Artificial Sequence
  Antisense oligo
caccaacuguagccacgccu

SEQ ID NO: 14773 - RNA, 20 nt, Artificial Sequence
  Antisense oligo
uucaccaacuguagccacgc

SEQ ID NO: 14774 - RNA, 20 nt, Artificial Sequence
  Antisense oligo
cuucaccaacuguagccacg

SEQ ID NO: 14775 - RNA, 20 nt, Artificial Sequence
  Antisense oligo
ucuucaccaacuguagccac

SEQ ID NO: 14776 - RNA, 20 nt, Artificial Sequence
  Antisense oligo
uucuucaccaacuguagcca

SEQ ID NO: 14777 - RNA, 20 nt, Artificial Sequence
  Antisense oligo
agauucuucaccaacuguag

SEQ ID NO: 14778 - RNA, 20 nt, Artificial Sequence
  Antisense oligo
gaaagauucuucaccaacug

SEQ ID NO: 14779 - RNA, 20 nt, Artificial Sequence
  Antisense oligo
ggaaagauucuucaccaacu

SEQ ID NO: 14780 - RNA, 20 nt, Artificial Sequence
  Antisense oligo
uggaaagauucuucaccaac

SEQ ID NO: 14781 - RNA, 20 nt, Artificial Sequence
  Antisense oligo
agcggcauggaaagauucuu

SEQ ID NO: 14782 - RNA, 20 nt, Artificial Sequence
  Antisense oligo
cagcggcauggaaagauucu

SEQ ID NO: 14783 - RNA, 20 nt, Artificial Sequence
  Antisense oligo
ccagcggcauggaaagauuc

SEQ ID NO: 14784 - RNA, 20 nt, Artificial Sequence
  Antisense oligo
cuugcaugugcucaucggag

SEQ ID NO: 14785 - RNA, 20 nt, Artificial Sequence
  Antisense oligo
ccuugcaugugcucaucgga

SEQ ID NO: 14786 - RNA, 20 nt, Artificial Sequence
  Antisense oligo
gccuugcaugugcucaucgg

SEQ ID NO: 14787 - RNA, 20 nt, Artificial Sequence
  Antisense oligo
cgcugccuugcaugugcuca

SEQ ID NO: 14788 - RNA, 20 nt, Artificial Sequence
  Antisense oligo
gaugaagcagugggugaggg

SEQ ID NO: 14789 - RNA, 20 nt, Artificial Sequence
  Antisense oligo
agaugaagcagugggugagg

SEQ ID NO: 14790 - RNA, 20 nt, Artificial Sequence
  Antisense oligo
cagaugaagcagugggugag

SEQ ID NO: 14791 - RNA, 20 nt, Artificial Sequence
  Antisense oligo
cgccagaugaagcagugggu

SEQ ID NO: 14792 - RNA, 20 nt, Artificial Sequence
  Antisense oligo
cauggacaugccuggcacuu

SEQ ID NO: 14793 - RNA, 20 nt, Artificial Sequence
  Antisense oligo
ucucauggacaugccuggca

SEQ ID NO: 14794 - RNA, 20 nt, Artificial Sequence
  Antisense oligo
uucucauggacaugccuggc

SEQ ID NO: 14795 - RNA, 20 nt, Artificial Sequence
  Antisense oligo
cuucucauggacaugccugg

SEQ ID NO: 14796 - RNA, 20 nt, Artificial Sequence
  Antisense oligo
gucuucucauggacaugccu

SEQ ID NO: 14797 - RNA, 20 nt, Artificial Sequence
  Antisense oligo
cgucuucucauggacaugcc

SEQ ID NO: 14798 - RNA, 20 nt, Artificial Sequence
  Antisense oligo
ccgucuucucauggacaugc

SEQ ID NO: 14799 - RNA, 20 nt, Artificial Sequence
  Antisense oligo
cccgucuucucauggacaug

SEQ ID NO: 14800 - RNA, 20 nt, Artificial Sequence
  Antisense oligo
gcccgucuucucauggacau

SEQ ID NO: 14801 - RNA, 20 nt, Artificial Sequence
  Antisense oligo
ugcccgucuucucauggaca

SEQ ID NO: 14802 - RNA, 20 nt, Artificial Sequence
  Antisense oligo
cugcccgucuucucauggac

SEQ ID NO: 14803 - RNA, 20 nt, Artificial Sequence
  Antisense oligo
agugaacgggugaggacgga

SEQ ID NO: 14804 - RNA, 20 nt, Artificial Sequence
  Antisense oligo
augcggagugaacgggugag

SEQ ID NO: 14805 - RNA, 20 nt, Artificial Sequence
  Antisense oligo
aaugcggagugaacggguga

SEQ ID NO: 14806 - RNA, 20 nt, Artificial Sequence
  Antisense oligo
aaaugcggagugaacgggug

SEQ ID NO: 14807 - RNA, 20 nt, Artificial Sequence
  Antisense oligo
caaaugcggagugaacgggu

SEQ ID NO: 14808 - RNA, 20 nt, Artificial Sequence
  Antisense oligo
cuggcacucacuaaggguuc

SEQ ID NO: 14809 - RNA, 20 nt, Artificial Sequence
  Antisense oligo
ccuggcacucacuaaggguu

SEQ ID NO: 14810 - RNA, 20 nt, Artificial Sequence
  Antisense oligo
gccuggcacucacuaagggu

SEQ ID NO: 14811 - RNA, 20 nt, Artificial Sequence
  Antisense oligo
gucuccagcacccuaaugag

SEQ ID NO: 14812 - RNA, 20 nt, Artificial Sequence
  Antisense oligo
ugucuccagcacccuaauga

SEQ ID NO: 14813 - RNA, 20 nt, Artificial Sequence
  Antisense oligo
cgugucuccagcacccuaau

SEQ ID NO: 14814 - RNA, 20 nt, Artificial Sequence
  Antisense oligo
ucgugucuccagcacccuaa

SEQ ID NO: 14815 - RNA, 20 nt, Artificial Sequence
  Antisense oligo
ugcgcucccugaaugcacag

SEQ ID NO: 14816 - RNA, 20 nt, Artificial Sequence
  Antisense oligo
cagugcgcucccugaaugca

SEQ ID NO: 14817 - RNA, 20 nt, Artificial Sequence
  Antisense oligo
acagugcgcucccugaaugc

SEQ ID NO: 14818 - RNA, 20 nt, Artificial Sequence
  Antisense oligo
cacagugcgcucccugaaug

SEQ ID NO: 14819 - RNA, 20 nt, Artificial Sequence
  Antisense oligo
acacagugcgcucccugaau

SEQ ID NO: 14820 - RNA, 20 nt, Artificial Sequence
  Antisense oligo
uacacagugcgcucccugaa

SEQ ID NO: 14821 - RNA, 20 nt, Artificial Sequence
  Antisense oligo
guacacagugcgcucccuga

SEQ ID NO: 14822 - RNA, 20 nt, Artificial Sequence
  Antisense oligo
aguacacagugcgcucccug

SEQ ID NO: 14823 - RNA, 20 nt, Artificial Sequence
  Antisense oligo
caguacacagugcgcucccu

SEQ ID NO: 14824 - RNA, 20 nt, Artificial Sequence
  Antisense oligo
caucacaauagcccgucugc

SEQ ID NO: 14825 - RNA, 20 nt, Artificial Sequence
  Antisense oligo
gcaucacaauagcccgucug

SEQ ID NO: 14826 - RNA, 20 nt, Artificial Sequence
  Antisense oligo
ggcaucacaauagcccgucu

SEQ ID NO: 14827 - RNA, 20 nt, Artificial Sequence
  Antisense oligo
gguguccuuucuaccacagc

SEQ ID NO: 14828 - RNA, 20 nt, Artificial Sequence
  Antisense oligo
ggguguccuuucuaccacag

SEQ ID NO: 14829 - RNA, 20 nt, Artificial Sequence
  Antisense oligo
uagggaaguggacucuggcc

SEQ ID NO: 14830 - RNA, 20 nt, Artificial Sequence
  Antisense oligo
uuagggaaguggacucuggc

SEQ ID NO: 14831 - RNA, 20 nt, Artificial Sequence
  Antisense oligo
uuuagggaaguggacucugg

SEQ ID NO: 14832 - RNA, 20 nt, Artificial Sequence
  Antisense oligo
cuuuagggaaguggacucug

SEQ ID NO: 14833 - RNA, 20 nt, Artificial Sequence
  Antisense oligo
ccuuuagggaaguggacucu

SEQ ID NO: 14834 - RNA, 20 nt, Artificial Sequence
  Antisense oligo
accuuuagggaaguggacuc

SEQ ID NO: 14835 - RNA, 20 nt, Artificial Sequence
  Antisense oligo
agucccaccucaccuuuagg

SEQ ID NO: 14836 - RNA, 20 nt, Artificial Sequence
  Antisense oligo
aagucccaccucaccuuuag

SEQ ID NO: 14837 - RNA, 20 nt, Artificial Sequence
  Antisense oligo
cugucaagucccaccucacc

SEQ ID NO: 14838 - RNA, 20 nt, Artificial Sequence
  Antisense oligo
gccugucaagucccaccuca

SEQ ID NO: 14839 - RNA, 20 nt, Artificial Sequence
  Antisense oligo
auccugcgccugucaagucc

SEQ ID NO: 14840 - RNA, 20 nt, Artificial Sequence
  Antisense oligo
gauccugcgccugucaaguc

SEQ ID NO: 14841 - RNA, 20 nt, Artificial Sequence
  Antisense oligo
ugauccugcgccugucaagu

SEQ ID NO: 14842 - RNA, 20 nt, Artificial Sequence
  Antisense oligo
augauccugcgccugucaag

SEQ ID NO: 14843 - RNA, 20 nt, Artificial Sequence
  Antisense oligo
cugcaugauccugcgccugu

SEQ ID NO: 14844 - RNA, 20 nt, Artificial Sequence
  Antisense oligo
acugcaugauccugcgccug

SEQ ID NO: 14845 - RNA, 20 nt, Artificial Sequence
  Antisense oligo
cacugcaugauccugcgccu

SEQ ID NO: 14846 - RNA, 20 nt, Artificial Sequence
  Antisense oligo
ucacugcaugauccugcgcc

SEQ ID NO: 14847 - RNA, 20 nt, Artificial Sequence
  Antisense oligo
gcucacugcaugauccugcg

SEQ ID NO: 14848 - RNA, 20 nt, Artificial Sequence
  Antisense oligo
cgcucacugcaugauccugc

SEQ ID NO: 14849 - RNA, 20 nt, Artificial Sequence
  Antisense oligo
acccgcucacugcaugaucc

SEQ ID NO: 14850 - RNA, 20 nt, Artificial Sequence
  Antisense oligo
aacccgcucacugcaugauc

SEQ ID NO: 14851 - RNA, 20 nt, Artificial Sequence
  Antisense oligo
acaacccgcucacugcauga

SEQ ID NO: 14852 - RNA, 20 nt, Artificial Sequence
  Antisense oligo
accacaacccgcucacugca

SEQ ID NO: 14853 - RNA, 20 nt, Artificial Sequence
  Antisense oligo
accaccacaacccgcucacu

SEQ ID NO: 14854 - RNA, 20 nt, Artificial Sequence
  Antisense oligo
uaccaccacaacccgcucac

SEQ ID NO: 14855 - RNA, 20 nt, Artificial Sequence
  Antisense oligo
guaccaccacaacccgcuca

SEQ ID NO: 14856 - RNA, 20 nt, Artificial Sequence
  Antisense oligo
ucccacugugaugccucugc

SEQ ID NO: 14857 - RNA, 20 nt, Artificial Sequence
  Antisense oligo
gucccacugugaugccucug

SEQ ID NO: 14858 - RNA, 20 nt, Artificial Sequence
  Antisense oligo
ugucccacugugaugccucu

SEQ ID NO: 14859 - RNA, 20 nt, Artificial Sequence
  Antisense oligo
gugucccacugugaugccuc

SEQ ID NO: 14860 - RNA, 20 nt, Artificial Sequence
  Antisense oligo
ggugucccacugugaugccu

SEQ ID NO: 14861 - RNA, 20 nt, Artificial Sequence
  Antisense oligo
ucggugucccacugugaugc

SEQ ID NO: 14862 - RNA, 20 nt, Artificial Sequence
  Antisense oligo
cucggugucccacugugaug

SEQ ID NO: 14863 - RNA, 20 nt, Artificial Sequence
  Antisense oligo
acucggugucccacugugau

SEQ ID NO: 14864 - RNA, 20 nt, Artificial Sequence
  Antisense oligo
gacucggugucccacuguga

SEQ ID NO: 14865 - RNA, 20 nt, Artificial Sequence
  Antisense oligo
cuuagcugggacucgguguc

SEQ ID NO: 14866 - RNA, 20 nt, Artificial Sequence
  Antisense oligo
gcuuagcugggacucggugu

SEQ ID NO: 14867 - RNA, 20 nt, Artificial Sequence
  Antisense oligo
cucagacgcucagcuuagcu

SEQ ID NO: 14868 - RNA, 20 nt, Artificial Sequence
  Antisense oligo
ucucagacgcucagcuuagc

SEQ ID NO: 14869 - RNA, 20 nt, Artificial Sequence
  Antisense oligo
cucucagacgcucagcuuag

SEQ ID NO: 14870 - RNA, 20 nt, Artificial Sequence
  Antisense oligo
gcucucagacgcucagcuua

SEQ ID NO: 14871 - RNA, 20 nt, Artificial Sequence
  Antisense oligo
ucgcucucagacgcucagcu

SEQ ID NO: 14872 - RNA, 20 nt, Artificial Sequence
  Antisense oligo
ucucgcucucagacgcucag

SEQ ID NO: 14873 - RNA, 20 nt, Artificial Sequence
  Antisense oligo
cucucgcucucagacgcuca

SEQ ID NO: 14874 - RNA, 20 nt, Artificial Sequence
  Antisense oligo
agcucucgcucucagacgcu

SEQ ID NO: 14875 - RNA, 20 nt, Artificial Sequence
  Antisense oligo
acgggagaagagaugcggga

SEQ ID NO: 14876 - RNA, 20 nt, Artificial Sequence
  Antisense oligo
gagacgggagaagagaugcg

SEQ ID NO: 14877 - RNA, 20 nt, Artificial Sequence
  Antisense oligo
agggagacgggagaagagau

SEQ ID NO: 14878 - RNA, 20 nt, Artificial Sequence
  Antisense oligo
gagggagacgggagaagaga

SEQ ID NO: 14879 - RNA, 20 nt, Artificial Sequence
  Antisense oligo
caaggaacccaagggugaaa

SEQ ID NO: 14880 - RNA, 20 nt, Artificial Sequence
  Antisense oligo
ccaaggaacccaagggugaa

SEQ ID NO: 14881 - RNA, 20 nt, Artificial Sequence
  Antisense oligo
accaaggaacccaaggguga

SEQ ID NO: 14882 - RNA, 20 nt, Artificial Sequence
  Antisense oligo
acucggcucccaccaaggaa

SEQ ID NO: 14883 - RNA, 20 nt, Artificial Sequence
  Antisense oligo
acucacucggcucccaccaa

SEQ ID NO: 14884 - RNA, 20 nt, Artificial Sequence
  Antisense oligo
acucacucacucggcuccca

SEQ ID NO: 14885 - RNA, 20 nt, Artificial Sequence
  Antisense oligo
cucacucacucacucggcuc

SEQ ID NO: 14886 - RNA, 20 nt, Artificial Sequence
  Antisense oligo
acucacucacucacucggcu

SEQ ID NO: 14887 - RNA, 20 nt, Artificial Sequence
  Antisense oligo
gcgccacucacucacucacu

SEQ ID NO: 14888 - RNA, 20 nt, Artificial Sequence
  Antisense oligo
cacugggcucugucaaaaga

SEQ ID NO: 14889 - RNA, 20 nt, Artificial Sequence
  Antisense oligo
ccacugggcucugucaaaag

SEQ ID NO: 14890 - RNA, 20 nt, Artificial Sequence
  Antisense oligo
acuccacugggcucugucaa

SEQ ID NO: 14891 - RNA, 20 nt, Artificial Sequence
  Antisense oligo
gacuccacugggcucuguca

SEQ ID NO: 14892 - RNA, 20 nt, Artificial Sequence
  Antisense oligo
auccgacuccacugggcucu

SEQ ID NO: 14893 - RNA, 20 nt, Artificial Sequence
  Antisense oligo
aauccgacuccacugggcuc

SEQ ID NO: 14894 - RNA, 20 nt, Artificial Sequence
  Antisense oligo
agaaaauccgacuccacugg

SEQ ID NO: 14895 - RNA, 20 nt, Artificial Sequence
  Antisense oligo
gagaaaauccgacuccacug

SEQ ID NO: 14896 - RNA, 20 nt, Artificial Sequence
  Antisense oligo
cgguggagaaaauccgacuc

SEQ ID NO: 14897 - RNA, 20 nt, Artificial Sequence
  Antisense oligo
gcgguggagaaaauccgacu

SEQ ID NO: 14898 - RNA, 20 nt, Artificial Sequence
  Antisense oligo
ugcgguggagaaaauccgac

SEQ ID NO: 14899 - RNA, 20 nt, Artificial Sequence
  Antisense oligo
gugcgguggagaaaauccga

SEQ ID NO: 14900 - RNA, 20 nt, Artificial Sequence
  Antisense oligo
gagugcgguggagaaaaucc

SEQ ID NO: 14901 - RNA, 20 nt, Artificial Sequence
  Antisense oligo
aagagugcgguggagaaaau

SEQ ID NO: 14902 - RNA, 20 nt, Artificial Sequence
  Antisense oligo
gaagagugcgguggagaaaa

SEQ ID NO: 14903 - RNA, 20 nt, Artificial Sequence
  Antisense oligo
cgaagagugcgguggagaaa

SEQ ID NO: 14904 - RNA, 20 nt, Artificial Sequence
  Antisense oligo
acgaagagugcgguggagaa

SEQ ID NO: 14905 - RNA, 20 nt, Artificial Sequence
  Antisense oligo
cacgaagagugcgguggaga

SEQ ID NO: 14906 - RNA, 20 nt, Artificial Sequence
  Antisense oligo
ugcuccacgaagagugcggu

SEQ ID NO: 14907 - RNA, 20 nt, Artificial Sequence
  Antisense oligo
acucaccuugucuaguaaga

SEQ ID NO: 14908 - RNA, 20 nt, Artificial Sequence
  Antisense oligo
gauccgugcaugugcugagg

SEQ ID NO: 14909 - RNA, 20 nt, Artificial Sequence
  Antisense oligo
agugcuguucuuccuuucgg

SEQ ID NO: 14910 - RNA, 20 nt, Artificial Sequence
  Antisense oligo
cagugcuguucuuccuuucg

SEQ ID NO: 14911 - RNA, 20 nt, Artificial Sequence
  Antisense oligo
ucagugcuguucuuccuuuc

SEQ ID NO: 14912 - RNA, 20 nt, Artificial Sequence
  Antisense oligo
agccgcagaucacugucagu

SEQ ID NO: 14913 - RNA, 20 nt, Artificial Sequence
  Antisense oligo
ucccagccgcagaucacugu

SEQ ID NO: 14914 - RNA, 20 nt, Artificial Sequence
  Antisense oligo
ucucccagccgcagaucacu

SEQ ID NO: 14915 - RNA, 20 nt, Artificial Sequence
  Antisense oligo
aaaagagcgucucccagccg

SEQ ID NO: 14916 - RNA, 20 nt, Artificial Sequence
  Antisense oligo
caaaagagcgucucccagcc

SEQ ID NO: 14917 - RNA, 20 nt, Artificial Sequence
  Antisense oligo
ccaaaagagcgucucccagc

SEQ ID NO: 14918 - RNA, 20 nt, Artificial Sequence
  Antisense oligo
gccaaaagagcgucucccag

SEQ ID NO: 14919 - RNA, 20 nt, Artificial Sequence
  Antisense oligo
agccaaaagagcgucuccca

SEQ ID NO: 14920 - RNA, 20 nt, Artificial Sequence
  Antisense oligo
gagccaaaagagcgucuccc

SEQ ID NO: 14921 - RNA, 20 nt, Artificial Sequence
  Antisense oligo
agagccaaaagagcgucucc

SEQ ID NO: 14922 - RNA, 20 nt, Artificial Sequence
  Antisense oligo
cagagccaaaagagcgucuc

SEQ ID NO: 14923 - RNA, 20 nt, Artificial Sequence
  Antisense oligo
ucagagccaaaagagcgucu

SEQ ID NO: 14924 - RNA, 20 nt, Artificial Sequence
  Antisense oligo
gucagagccaaaagagcguc

SEQ ID NO: 14925 - RNA, 20 nt, Artificial Sequence
  Antisense oligo
ggucagagccaaaagagcgu

SEQ ID NO: 14926 - RNA, 20 nt, Artificial Sequence
  Antisense oligo
cggucagagccaaaagagcg

SEQ ID NO: 14927 - RNA, 20 nt, Artificial Sequence
  Antisense oligo
acggucagagccaaaagagc

SEQ ID NO: 14928 - RNA, 20 nt, Artificial Sequence
  Antisense oligo
aacggucagagccaaaagag

SEQ ID NO: 14929 - RNA, 20 nt, Artificial Sequence
  Antisense oligo
aaacggucagagccaaaaga

SEQ ID NO: 14930 - RNA, 20 nt, Artificial Sequence
  Antisense oligo
aaaacggucagagccaaaag

SEQ ID NO: 14931 - RNA, 20 nt, Artificial Sequence
  Antisense oligo
caaaacggucagagccaaaa

SEQ ID NO: 14932 - RNA, 20 nt, Artificial Sequence
  Antisense oligo
acaaaacggucagagccaaa

SEQ ID NO: 14933 - RNA, 20 nt, Artificial Sequence
  Antisense oligo
gacaaaacggucagagccaa

SEQ ID NO: 14934 - RNA, 20 nt, Artificial Sequence
  Antisense oligo
agacaaaacggucagagcca

SEQ ID NO: 14935 - RNA, 20 nt, Artificial Sequence
  Antisense oligo
uagacaaaacggucagagcc

SEQ ID NO: 14936 - RNA, 20 nt, Artificial Sequence
  Antisense oligo
cuagacaaaacggucagagc

SEQ ID NO: 14937 - RNA, 20 nt, Artificial Sequence
  Antisense oligo
accuuccuuugcaugucuag

SEQ ID NO: 14938 - RNA, 20 nt, Artificial Sequence
  Antisense oligo
aaucaccuuccuuugcaugu

SEQ ID NO: 14939 - RNA, 20 nt, Artificial Sequence
  Antisense oligo
aaaucaccuuccuuugcaug

SEQ ID NO: 14940 - RNA, 20 nt, Artificial Sequence
  Antisense oligo
gaugaaaucaccuuccuuug

SEQ ID NO: 14941 - RNA, 20 nt, Artificial Sequence
  Antisense oligo
guaauggccuagugaugaaa

SEQ ID NO: 14942 - RNA, 20 nt, Artificial Sequence
  Antisense oligo
uguaauggccuagugaugaa

SEQ ID NO: 14943 - RNA, 20 nt, Artificial Sequence
  Antisense oligo
auguaauggccuagugauga

SEQ ID NO: 14944 - RNA, 20 nt, Artificial Sequence
  Antisense oligo
aauguaauggccuagugaug

SEQ ID NO: 14945 - RNA, 20 nt, Artificial Sequence
  Antisense oligo
uuagcaaucagcagagggua

SEQ ID NO: 14946 - RNA, 20 nt, Artificial Sequence
  Antisense oligo
acuuagcaaucagcagaggg

SEQ ID NO: 14947 - RNA, 20 nt, Artificial Sequence
  Antisense oligo
ugacuuagcaaucagcagag

SEQ ID NO: 14948 - RNA, 20 nt, Artificial Sequence
  Antisense oligo
augauaugcucugacuuagc

SEQ ID NO: 14949 - RNA, 20 nt, Artificial Sequence
  Antisense oligo
ccuggaaucacuucuaaaug

SEQ ID NO: 14950 - RNA, 20 nt, Artificial Sequence
  Antisense oligo
cacaguuccuggaaucacuu

SEQ ID NO: 14951 - RNA, 20 nt, Artificial Sequence
  Antisense oligo
gcacacaguuccuggaauca

SEQ ID NO: 14952 - RNA, 20 nt, Artificial Sequence
  Antisense oligo
ugcacacaguuccuggaauc

SEQ ID NO: 14953 - RNA, 20 nt, Artificial Sequence
  Antisense oligo
cugcacacaguuccuggaau

SEQ ID NO: 14954 - RNA, 20 nt, Artificial Sequence
  Antisense oligo
ucugcacacaguuccuggaa

SEQ ID NO: 14955 - RNA, 20 nt, Artificial Sequence
  Antisense oligo
uucugcacacaguuccugga

SEQ ID NO: 14956 - RNA, 20 nt, Artificial Sequence
  Antisense oligo
ccuuucugcacacaguuccu

SEQ ID NO: 14957 - RNA, 20 nt, Artificial Sequence
  Antisense oligo
cccuuucugcacacaguucc

SEQ ID NO: 14958 - RNA, 20 nt, Artificial Sequence
  Antisense oligo
uuucacaagcauguucccug

SEQ ID NO: 14959 - RNA, 20 nt, Artificial Sequence
  Antisense oligo
guuucacaagcauguucccu

SEQ ID NO: 14960 - RNA, 20 nt, Artificial Sequence
  Antisense oligo
gguuucacaagcauguuccc

SEQ ID NO: 14961 - RNA, 20 nt, Artificial Sequence
  Antisense oligo
aagguuucacaagcauguuc

SEQ ID NO: 14962 - RNA, 20 nt, Artificial Sequence
  Antisense oligo
gaagguuucacaagcauguu

SEQ ID NO: 14963 - RNA, 20 nt, Artificial Sequence
  Antisense oligo
cgaagguuucacaagcaugu

SEQ ID NO: 14964 - RNA, 20 nt, Artificial Sequence
  Antisense oligo
ccgaagguuucacaagcaug

SEQ ID NO: 14965 - RNA, 20 nt, Artificial Sequence
  Antisense oligo
ugccgaagguuucacaagca

SEQ ID NO: 14966 - RNA, 20 nt, Artificial Sequence
  Antisense oligo
cugccgaagguuucacaagc

SEQ ID NO: 14967 - RNA, 20 nt, Artificial Sequence
  Antisense oligo
ccugccgaagguuucacaag

SEQ ID NO: 14968 - RNA, 20 nt, Artificial Sequence
  Antisense oligo
cccugccgaagguuucacaa

SEQ ID NO: 14969 - RNA, 20 nt, Artificial Sequence
  Antisense oligo
ucccugccgaagguuucaca

SEQ ID NO: 14970 - RNA, 20 nt, Artificial Sequence
  Antisense oligo
aucccugccgaagguuucac

SEQ ID NO: 14971 - RNA, 20 nt, Artificial Sequence
  Antisense oligo
ggucacuccaaaggccaggu

SEQ ID NO: 14972 - RNA, 20 nt, Artificial Sequence
  Antisense oligo
ggcuaguggucuguucuggg

SEQ ID NO: 14973 - RNA, 20 nt, Artificial Sequence
  Antisense oligo
aggcuaguggucuguucugg

SEQ ID NO: 14974 - RNA, 20 nt, Artificial Sequence
  Antisense oligo
caggcuaguggucuguucug

SEQ ID NO: 14975 - RNA, 20 nt, Artificial Sequence
  Antisense oligo
ccaggcuaguggucuguucu

SEQ ID NO: 14976 - RNA, 20 nt, Artificial Sequence
  Antisense oligo
gccaggcuaguggucuguuc

SEQ ID NO: 14977 - RNA, 20 nt, Artificial Sequence
  Antisense oligo
ggccaggcuaguggucuguu

SEQ ID NO: 14978 - RNA, 20 nt, Artificial Sequence
  Antisense oligo
guaacagcuuccacagaugg

SEQ ID NO: 14979 - RNA, 20 nt, Artificial Sequence
  Antisense oligo
aaaugguaacagcuuccaca

SEQ ID NO: 14980 - RNA, 20 nt, Artificial Sequence
  Antisense oligo
acagcacuguuuugaagacc

SEQ ID NO: 14981 - RNA, 20 nt, Artificial Sequence
  Antisense oligo
guugacagcacuguuuugaa

SEQ ID NO: 14982 - RNA, 20 nt, Artificial Sequence
  Antisense oligo
gguucuguugacagcacugu

SEQ ID NO: 14983 - RNA, 20 nt, Artificial Sequence
  Antisense oligo
uugguucuguugacagcacu

SEQ ID NO: 14984 - RNA, 20 nt, Artificial Sequence
  Antisense oligo
cuugguucuguugacagcac

SEQ ID NO: 14985 - RNA, 20 nt, Artificial Sequence
  Antisense oligo
guuccuugguucuguugaca

SEQ ID NO: 14986 - RNA, 20 nt, Artificial Sequence
  Antisense oligo
cuguuccuugguucuguuga

SEQ ID NO: 14987 - RNA, 20 nt, Artificial Sequence
  Antisense oligo
ccuguuccuugguucuguug

SEQ ID NO: 14988 - RNA, 20 nt, Artificial Sequence
  Antisense oligo
guggcuuccuguuccuuggu

SEQ ID NO: 14989 - RNA, 20 nt, Artificial Sequence
  Antisense oligo
gcaugguggcuuccuguucc

SEQ ID NO: 14990 - RNA, 20 nt, Artificial Sequence
  Antisense oligo
ggcaugguggcuuccuguuc

SEQ ID NO: 14991 - RNA, 20 nt, Artificial Sequence
  Antisense oligo
aggcaugguggcuuccuguu

SEQ ID NO: 14992 - RNA, 20 nt, Artificial Sequence
  Antisense oligo
ugacaggcaugguggcuucc

SEQ ID NO: 14993 - RNA, 20 nt, Artificial Sequence
  Antisense oligo
gugacaggcaugguggcuuc

SEQ ID NO: 14994 - RNA, 20 nt, Artificial Sequence
  Antisense oligo
gagugacaggcaugguggcu

SEQ ID NO: 14995 - RNA, 20 nt, Artificial Sequence
  Antisense oligo
ugagugacaggcaugguggc

SEQ ID NO: 14996 - RNA, 20 nt, Artificial Sequence
  Antisense oligo
uugagugacaggcauggugg

SEQ ID NO: 14997 - RNA, 20 nt, Artificial Sequence
  Antisense oligo
guugagugacaggcauggug

SEQ ID NO: 14998 - RNA, 20 nt, Artificial Sequence
  Antisense oligo
uguugagugacaggcauggu

SEQ ID NO: 14999 - RNA, 20 nt, Artificial Sequence
  Antisense oligo
guguugagugacaggcaugg

SEQ ID NO: 15000 - RNA, 20 nt, Artificial Sequence
  Antisense oligo
gguguugagugacaggcaug

SEQ ID NO: 15001 - RNA, 20 nt, Artificial Sequence
  Antisense oligo
ggguguugagugacaggcau

SEQ ID NO: 15002 - RNA, 20 nt, Artificial Sequence
  Antisense oligo
aggguguugagugacaggca

SEQ ID NO: 15003 - RNA, 20 nt, Artificial Sequence
  Antisense oligo
aaggguguugagugacaggc

SEQ ID NO: 15004 - RNA, 20 nt, Artificial Sequence
  Antisense oligo
augaaggguguugagugaca

SEQ ID NO: 15005 - RNA, 20 nt, Artificial Sequence
  Antisense oligo
uaugaaggguguugagugac

SEQ ID NO: 15006 - RNA, 20 nt, Artificial Sequence
  Antisense oligo
uuuaugaaggguguugagug

SEQ ID NO: 15007 - RNA, 20 nt, Artificial Sequence
  Antisense oligo
agcuuuaugaaggguguuga

SEQ ID NO: 15008 - RNA, 20 nt, Artificial Sequence
  Antisense oligo
guagcuuuaugaaggguguu

SEQ ID NO: 15009 - RNA, 20 nt, Artificial Sequence
  Antisense oligo
agggucacagguuucuuucu

SEQ ID NO: 15010 - RNA, 20 nt, Artificial Sequence
  Antisense oligo
guagggucacagguuucuuu

SEQ ID NO: 15011 - RNA, 20 nt, Artificial Sequence
  Antisense oligo
uguagggucacagguuucuu

SEQ ID NO: 15012 - RNA, 20 nt, Artificial Sequence
  Antisense oligo
gggcaucacuguagggucac

SEQ ID NO: 15013 - RNA, 20 nt, Artificial Sequence
  Antisense oligo
uugcuggacaccacugcgug

SEQ ID NO: 15014 - RNA, 20 nt, Artificial Sequence
  Antisense oligo
guugcuggacaccacugcgu

SEQ ID NO: 15015 - RNA, 20 nt, Artificial Sequence
  Antisense oligo
uguugcuggacaccacugcg

SEQ ID NO: 15016 - RNA, 20 nt, Artificial Sequence
  Antisense oligo
cacuguugcuggacaccacu

SEQ ID NO: 15017 - RNA, 20 nt, Artificial Sequence
  Antisense oligo
cuguguuuggcugaguggcc

SEQ ID NO: 15018 - RNA, 20 nt, Artificial Sequence
  Antisense oligo
gcuguguuuggcugaguggc

SEQ ID NO: 15019 - RNA, 20 nt, Artificial Sequence
  Antisense oligo
ggcuguguuuggcugagugg

SEQ ID NO: 15020 - RNA, 20 nt, Artificial Sequence
  Antisense oligo
ugaggcuguguuuggcugag

SEQ ID NO: 15021 - RNA, 20 nt, Artificial Sequence
  Antisense oligo
cugaggcuguguuuggcuga

SEQ ID NO: 15022 - RNA, 20 nt, Artificial Sequence
  Antisense oligo
agaggcugaggcuguguuug

SEQ ID NO: 15023 - RNA, 20 nt, Artificial Sequence
  Antisense oligo
aguaaaccuuccugugcucc

SEQ ID NO: 15024 - RNA, 20 nt, Artificial Sequence
  Antisense oligo
uaguaaaccuuccugugcuc

SEQ ID NO: 15025 - RNA, 20 nt, Artificial Sequence
  Antisense oligo
uuaguaaaccuuccugugcu

SEQ ID NO: 15026 - RNA, 20 nt, Artificial Sequence
  Antisense oligo
ccuuuuaguaaaccuuccug

SEQ ID NO: 15027 - RNA, 20 nt, Artificial Sequence
  Antisense oligo
cuccuuuuaguaaaccuucc

SEQ ID NO: 15028 - RNA, 20 nt, Artificial Sequence
  Antisense oligo
aacacauccagcauccaugc

SEQ ID NO: 15029 - RNA, 20 nt, Artificial Sequence
  Antisense oligo
caacacauccagcauccaug

SEQ ID NO: 15030 - RNA, 20 nt, Artificial Sequence
  Antisense oligo
ucaacacauccagcauccau

SEQ ID NO: 15031 - RNA, 20 nt, Artificial Sequence
  Antisense oligo
gucaacacauccagcaucca

SEQ ID NO: 15032 - RNA, 20 nt, Artificial Sequence
  Antisense oligo
agucaacacauccagcaucc

SEQ ID NO: 15033 - RNA, 20 nt, Artificial Sequence
  Antisense oligo
ucagagucaacacauccagc

SEQ ID NO: 15034 - RNA, 20 nt, Artificial Sequence
  Antisense oligo
aagccgcugauguuuugaua

SEQ ID NO: 15035 - RNA, 20 nt, Artificial Sequence
  Antisense oligo
uaagccgcugauguuuugau

SEQ ID NO: 15036 - RNA, 20 nt, Artificial Sequence
  Antisense oligo
cuaagccgcugauguuuuga

SEQ ID NO: 15037 - RNA, 20 nt, Artificial Sequence
  Antisense oligo
ucuaagccgcugauguuuug

SEQ ID NO: 15038 - RNA, 20 nt, Artificial Sequence
  Antisense oligo
gucuaagccgcugauguuuu

SEQ ID NO: 15039 - RNA, 20 nt, Artificial Sequence
  Antisense oligo
ugucuaagccgcugauguuu

SEQ ID NO: 15040 - RNA, 20 nt, Artificial Sequence
  Antisense oligo
gugucuaagccgcugauguu

SEQ ID NO: 15041 - RNA, 20 nt, Artificial Sequence
  Antisense oligo
ugugucuaagccgcugaugu

SEQ ID NO: 15042 - RNA, 20 nt, Artificial Sequence
  Antisense oligo
cugugucuaagccgcugaug

SEQ ID NO: 15043 - RNA, 20 nt, Artificial Sequence
  Antisense oligo
acugugucuaagccgcugau

SEQ ID NO: 15044 - RNA, 20 nt, Artificial Sequence
  Antisense oligo
uacugugucuaagccgcuga

SEQ ID NO: 15045 - RNA, 20 nt, Artificial Sequence
  Antisense oligo
auacugugucuaagccgcug

SEQ ID NO: 15046 - RNA, 20 nt, Artificial Sequence
  Antisense oligo
gauacugugucuaagccgcu

SEQ ID NO: 15047 - RNA, 20 nt, Artificial Sequence
  Antisense oligo
ugauacugugucuaagccgc

SEQ ID NO: 15048 - RNA, 20 nt, Artificial Sequence
  Antisense oligo
cugauacugugucuaagccg

SEQ ID NO: 15049 - RNA, 20 nt, Artificial Sequence
  Antisense oligo
gcugauacugugucuaagcc

SEQ ID NO: 15050 - RNA, 20 nt, Artificial Sequence
  Antisense oligo
agcugauacugugucuaagc

SEQ ID NO: 15051 - RNA, 20 nt, Artificial Sequence
  Antisense oligo
gcugcucauacccauccugg

SEQ ID NO: 15052 - RNA, 20 nt, Artificial Sequence
  Antisense oligo
aagggacaagacggagcgug

SEQ ID NO: 15053 - RNA, 20 nt, Artificial Sequence
  Antisense oligo
gaagggacaagacggagcgu

SEQ ID NO: 15054 - RNA, 20 nt, Artificial Sequence
  Antisense oligo
ugaagggacaagacggagcg

SEQ ID NO: 15055 - RNA, 20 nt, Artificial Sequence
  Antisense oligo
augaagggacaagacggagc

SEQ ID NO: 15056 - RNA, 20 nt, Artificial Sequence
  Antisense oligo
ggaagcugaacauuagggac

SEQ ID NO: 15057 - RNA, 20 nt, Artificial Sequence
  Antisense oligo
gguggaagcugaacauuagg

SEQ ID NO: 15058 - RNA, 20 nt, Artificial Sequence
  Antisense oligo
ggguggaagcugaacauuag

SEQ ID NO: 15059 - RNA, 20 nt, Artificial Sequence
  Antisense oligo
aacggccuguccucuaccuc

SEQ ID NO: 15060 - RNA, 20 nt, Artificial Sequence
  Antisense oligo
aaacggccuguccucuaccu

SEQ ID NO: 15061 - RNA, 20 nt, Artificial Sequence
  Antisense oligo
aaaacggccuguccucuacc

SEQ ID NO: 15062 - RNA, 20 nt, Artificial Sequence
  Antisense oligo
gaaaacggccuguccucuac

SEQ ID NO: 15063 - RNA, 20 nt, Artificial Sequence
  Antisense oligo
uuaaggaaaacggccugucc

SEQ ID NO: 15064 - RNA, 20 nt, Artificial Sequence
  Antisense oligo
guccgggauugggcucuuaa

SEQ ID NO: 15065 - RNA, 20 nt, Artificial Sequence
  Antisense oligo
uguccgggauugggcucuua

SEQ ID NO: 15066 - RNA, 20 nt, Artificial Sequence
  Antisense oligo
guguccgggauugggcucuu

SEQ ID NO: 15067 - RNA, 20 nt, Artificial Sequence
  Antisense oligo
aggaccacgagacacgagcu

SEQ ID NO: 15068 - RNA, 20 nt, Artificial Sequence
  Antisense oligo
uaggaccacgagacacgagc

SEQ ID NO: 15069 - RNA, 20 nt, Artificial Sequence
  Antisense oligo
uuaggaccacgagacacgag

SEQ ID NO: 15070 - RNA, 20 nt, Artificial Sequence
  Antisense oligo
uuuaggaccacgagacacga

SEQ ID NO: 15071 - RNA, 20 nt, Artificial Sequence
  Antisense oligo
guuuaggaccacgagacacg

SEQ ID NO: 15072 - RNA, 20 nt, Artificial Sequence
  Antisense oligo
aguuuaggaccacgagacac

SEQ ID NO: 15073 - RNA, 20 nt, Artificial Sequence
  Antisense oligo
aaguuuaggaccacgagaca

SEQ ID NO: 15074 - RNA, 20 nt, Artificial Sequence
  Antisense oligo
uaaguuuaggaccacgagac

SEQ ID NO: 15075 - RNA, 20 nt, Artificial Sequence
  Antisense oligo
cuaaguuuaggaccacgaga

SEQ ID NO: 15076 - RNA, 20 nt, Artificial Sequence
  Antisense oligo
ggccgagugccuaaguuuag

SEQ ID NO: 15077 - RNA, 20 nt, Artificial Sequence
  Antisense oligo
accagauaaggccgagugcc

SEQ ID NO: 15078 - RNA, 20 nt, Artificial Sequence
  Antisense oligo
aaccagauaaggccgagugc

SEQ ID NO: 15079 - RNA, 20 nt, Artificial Sequence
  Antisense oligo
gcaaccagauaaggccgagu

SEQ ID NO: 15080 - RNA, 20 nt, Artificial Sequence
  Antisense oligo
ugcaaccagauaaggccgag

SEQ ID NO: 15081 - RNA, 20 nt, Artificial Sequence
  Antisense oligo
acaugaccaugccacgaaaa

SEQ ID NO: 15082 - RNA, 20 nt, Artificial Sequence
  Antisense oligo
aacaugaccaugccacgaaa

SEQ ID NO: 15083 - RNA, 20 nt, Artificial Sequence
  Antisense oligo
accuggaacaugaccaugcc

SEQ ID NO: 15084 - RNA, 20 nt, Artificial Sequence
  Antisense oligo
caccuggaacaugaccaugc

SEQ ID NO: 15085 - RNA, 20 nt, Artificial Sequence
  Antisense oligo
ccaccuggaacaugaccaug

SEQ ID NO: 15086 - RNA, 20 nt, Artificial Sequence
  Antisense oligo
ucagcagaagaacucaaguu

SEQ ID NO: 15087 - RNA, 20 nt, Artificial Sequence
  Antisense oligo
uucagcagaagaacucaagu

SEQ ID NO: 15088 - RNA, 20 nt, Artificial Sequence
  Antisense oligo
ccucucuccgccuuuuccuu

SEQ ID NO: 15089 - RNA, 20 nt, Artificial Sequence
  Antisense oligo
uccucucuccgccuuuuccu

SEQ ID NO: 15090 - RNA, 20 nt, Artificial Sequence
  Antisense oligo
auccucucuccgccuuuucc

SEQ ID NO: 15091 - RNA, 20 nt, Artificial Sequence
  Antisense oligo
uauccucucuccgccuuuuc

SEQ ID NO: 15092 - RNA, 20 nt, Artificial Sequence
  Antisense oligo
cuauccucucuccgccuuuu

SEQ ID NO: 15093 - RNA, 20 nt, Artificial Sequence
  Antisense oligo
acuauccucucuccgccuuu

SEQ ID NO: 15094 - RNA, 20 nt, Artificial Sequence
  Antisense oligo
uacuauccucucuccgccuu

SEQ ID NO: 15095 - RNA, 20 nt, Artificial Sequence
  Antisense oligo
ccuacuauccucucuccgcc

SEQ ID NO: 15096 - RNA, 20 nt, Artificial Sequence
  Antisense oligo
guccuacuauccucucuccg

SEQ ID NO: 15097 - RNA, 20 nt, Artificial Sequence
  Antisense oligo
uguccuacuauccucucucc

SEQ ID NO: 15098 - RNA, 20 nt, Artificial Sequence
  Antisense oligo
guguccuacuauccucucuc

SEQ ID NO: 15099 - RNA, 20 nt, Artificial Sequence
  Antisense oligo
uguguccuacuauccucucu

SEQ ID NO: 15100 - RNA, 20 nt, Artificial Sequence
  Antisense oligo
uuaugacccacgcuggaccu

SEQ ID NO: 15101 - RNA, 20 nt, Artificial Sequence
  Antisense oligo
ccuuaugacccacgcuggac

SEQ ID NO: 15102 - RNA, 20 nt, Artificial Sequence
  Antisense oligo
cccuuaugacccacgcugga

SEQ ID NO: 15103 - RNA, 20 nt, Artificial Sequence
  Antisense oligo
ccuuuaccuuuggguuuaug

SEQ ID NO: 15104 - RNA, 20 nt, Artificial Sequence
  Antisense oligo
cuccuuuaccuuuggguuua

SEQ ID NO: 15105 - RNA, 20 nt, Artificial Sequence
  Antisense oligo
gcuccuuuaccuuuggguuu

SEQ ID NO: 15106 - RNA, 20 nt, Artificial Sequence
  Antisense oligo
agcuccuuuaccuuuggguu

SEQ ID NO: 15107 - RNA, 20 nt, Artificial Sequence
  Antisense oligo
cagcuccuuuaccuuugggu

SEQ ID NO: 15108 - RNA, 20 nt, Artificial Sequence
  Antisense oligo
ggccagcuccuuuaccuuug

SEQ ID NO: 15109 - RNA, 20 nt, Artificial Sequence
  Antisense oligo
ugugggcaugugagcaggca

SEQ ID NO: 15110 - RNA, 20 nt, Artificial Sequence
  Antisense oligo
auccugugggcaugugagca

SEQ ID NO: 15111 - RNA, 20 nt, Artificial Sequence
  Antisense oligo
aauccugugggcaugugagc

SEQ ID NO: 15112 - RNA, 20 nt, Artificial Sequence
  Antisense oligo
aaauccugugggcaugugag

SEQ ID NO: 15113 - RNA, 20 nt, Artificial Sequence
  Antisense oligo
caaauccugugggcauguga

SEQ ID NO: 15114 - RNA, 20 nt, Artificial Sequence
  Antisense oligo
cguuccuaaccucccaaauc

SEQ ID NO: 15115 - RNA, 20 nt, Artificial Sequence
  Antisense oligo
acguuccuaaccucccaaau

SEQ ID NO: 15116 - RNA, 20 nt, Artificial Sequence
  Antisense oligo
cacguuccuaaccucccaaa

SEQ ID NO: 15117 - RNA, 20 nt, Artificial Sequence
  Antisense oligo
ccacguuccuaaccucccaa

SEQ ID NO: 15118 - RNA, 20 nt, Artificial Sequence
  Antisense oligo
cccacguuccuaaccuccca

SEQ ID NO: 15119 - RNA, 20 nt, Artificial Sequence
  Antisense oligo
gaggccauuuuaucgccaaa

SEQ ID NO: 15120 - RNA, 20 nt, Artificial Sequence
  Antisense oligo
ugaggccauuuuaucgccaa

SEQ ID NO: 15121 - RNA, 20 nt, Artificial Sequence
  Antisense oligo
cugaggccauuuuaucgcca

SEQ ID NO: 15122 - RNA, 20 nt, Artificial Sequence
  Antisense oligo
ucugaggccauuuuaucgcc

SEQ ID NO: 15123 - RNA, 20 nt, Artificial Sequence
  Antisense oligo
aguaaguuucugaggccauu

SEQ ID NO: 15124 - RNA, 20 nt, Artificial Sequence
  Antisense oligo
caguaaguuucugaggccau

SEQ ID NO: 15125 - RNA, 20 nt, Artificial Sequence
  Antisense oligo
ccaguaaguuucugaggcca

SEQ ID NO: 15126 - RNA, 20 nt, Artificial Sequence
  Antisense oligo
acccaguaaguuucugaggc

SEQ ID NO: 15127 - RNA, 20 nt, Artificial Sequence
  Antisense oligo
aacccaguaaguuucugagg

SEQ ID NO: 15128 - RNA, 20 nt, Artificial Sequence
  Antisense oligo
ugguuaccugcacagagauc

SEQ ID NO: 15129 - RNA, 20 nt, Artificial Sequence
  Antisense oligo
uuggcugugguuaccugcac

SEQ ID NO: 15130 - RNA, 20 nt, Artificial Sequence
  Antisense oligo
uuuggcugugguuaccugca

SEQ ID NO: 15131 - RNA, 20 nt, Artificial Sequence
  Antisense oligo
ggucuuuggcugugguuacc

SEQ ID NO: 15132 - RNA, 20 nt, Artificial Sequence
  Antisense oligo
aggucuuuggcugugguuac

SEQ ID NO: 15133 - RNA, 20 nt, Artificial Sequence
  Antisense oligo
agcaggaaaacuaacgaggu

SEQ ID NO: 15134 - RNA, 20 nt, Artificial Sequence
  Antisense oligo
cagcaggaaaacuaacgagg

SEQ ID NO: 15135 - RNA, 20 nt, Artificial Sequence
  Antisense oligo
uccagcaggaaaacuaacga

SEQ ID NO: 15136 - RNA, 20 nt, Artificial Sequence
  Antisense oligo
aagucaggcuuccagcagga

SEQ ID NO: 15137 - RNA, 20 nt, Artificial Sequence
  Antisense oligo
acaagucaggcuuccagcag

SEQ ID NO: 15138 - RNA, 20 nt, Artificial Sequence
  Antisense oligo
uacaagucaggcuuccagca

SEQ ID NO: 15139 - RNA, 20 nt, Artificial Sequence
  Antisense oligo
guacaagucaggcuuccagc

SEQ ID NO: 15140 - RNA, 20 nt, Artificial Sequence
  Antisense oligo
ggguacaagucaggcuucca

SEQ ID NO: 15141 - RNA, 20 nt, Artificial Sequence
  Antisense oligo
auggucccaagggcugcucu

SEQ ID NO: 15142 - RNA, 20 nt, Artificial Sequence
  Antisense oligo
ucaaauggucccaagggcug

SEQ ID NO: 15143 - RNA, 20 nt, Artificial Sequence
  Antisense oligo
uguuucaaauggucccaagg

SEQ ID NO: 15144 - RNA, 20 nt, Artificial Sequence
  Antisense oligo
uuguuucaaauggucccaag

SEQ ID NO: 15145 - RNA, 20 nt, Artificial Sequence
  Antisense oligo
cuuguuucaaauggucccaa

SEQ ID NO: 15146 - RNA, 20 nt, Artificial Sequence
  Antisense oligo
ucuuguuucaaaugguccca

SEQ ID NO: 15147 - RNA, 20 nt, Artificial Sequence
  Antisense oligo
cucuuguuucaaaugguccc

SEQ ID NO: 15148 - RNA, 20 nt, Artificial Sequence
  Antisense oligo
cuaaaagccagccaugcccg

SEQ ID NO: 15149 - RNA, 20 nt, Artificial Sequence
  Antisense oligo
caaaacaacuaaaagccagc

SEQ ID NO: 15150 - RNA, 20 nt, Artificial Sequence
  Antisense oligo
ccaaaacaacuaaaagccag

SEQ ID NO: 15151 - RNA, 20 nt, Artificial Sequence
  Antisense oligo
gaguuaucaaaugauccagg

SEQ ID NO: 15152 - RNA, 20 nt, Artificial Sequence
  Antisense oligo
agugccucugcauaaaguua

SEQ ID NO: 15153 - RNA, 20 nt, Artificial Sequence
  Antisense oligo
cagugccucugcauaaaguu

SEQ ID NO: 15154 - RNA, 20 nt, Artificial Sequence
  Antisense oligo
gauguaagaaagaugcugca

SEQ ID NO: 15155 - RNA, 20 nt, Artificial Sequence
  Antisense oligo
ggauguaagaaagaugcugc

SEQ ID NO: 15156 - RNA, 20 nt, Artificial Sequence
  Antisense oligo
gggauguaagaaagaugcug

SEQ ID NO: 15157 - RNA, 20 nt, Artificial Sequence
  Antisense oligo
ggagaaauucagacccuggu

SEQ ID NO: 15158 - RNA, 20 nt, Artificial Sequence
  Antisense oligo
uggagaaauucagacccugg

SEQ ID NO: 15159 - RNA, 20 nt, Artificial Sequence
  Antisense oligo
guggagaaauucagacccug

SEQ ID NO: 15160 - RNA, 20 nt, Artificial Sequence
  Antisense oligo
uguggagaaauucagacccu

SEQ ID NO: 15161 - RNA, 20 nt, Artificial Sequence
  Antisense oligo
auguggagaaauucagaccc

SEQ ID NO: 15162 - RNA, 20 nt, Artificial Sequence
  Antisense oligo
gauguggagaaauucagacc

SEQ ID NO: 15163 - RNA, 20 nt, Artificial Sequence
  Antisense oligo
ugauguggagaaauucagac

SEQ ID NO: 15164 - RNA, 20 nt, Artificial Sequence
  Antisense oligo
caugauguggagaaauucag

SEQ ID NO: 15165 - RNA, 20 nt, Artificial Sequence
  Antisense oligo
cccaugauguggagaaauuc

SEQ ID NO: 15166 - RNA, 20 nt, Artificial Sequence
  Antisense oligo
ugcccaugauguggagaaau

SEQ ID NO: 15167 - RNA, 20 nt, Artificial Sequence
  Antisense oligo
uugcccaugauguggagaaa

SEQ ID NO: 15168 - RNA, 20 nt, Artificial Sequence
  Antisense oligo
guugcccaugauguggagaa

SEQ ID NO: 15169 - RNA, 20 nt, Artificial Sequence
  Antisense oligo
gguguugcccaugaugugga

SEQ ID NO: 15170 - RNA, 20 nt, Artificial Sequence
  Antisense oligo
agguguugcccaugaugugg

SEQ ID NO: 15171 - RNA, 20 nt, Artificial Sequence
  Antisense oligo
cagguguugcccaugaugug

SEQ ID NO: 15172 - RNA, 20 nt, Artificial Sequence
  Antisense oligo
acagguguugcccaugaugu

SEQ ID NO: 15173 - RNA, 20 nt, Artificial Sequence
  Antisense oligo
aacagguguugcccaugaug

SEQ ID NO: 15174 - RNA, 20 nt, Artificial Sequence
  Antisense oligo
uaacagguguugcccaugau

SEQ ID NO: 15175 - RNA, 20 nt, Artificial Sequence
  Antisense oligo
guaacagguguugcccauga

SEQ ID NO: 15176 - RNA, 20 nt, Artificial Sequence
  Antisense oligo
aguaacagguguugcccaug

SEQ ID NO: 15177 - RNA, 20 nt, Artificial Sequence
  Antisense oligo
uaguaacagguguugcccau

SEQ ID NO: 15178 - RNA, 20 nt, Artificial Sequence
  Antisense oligo
agauaguaacagguguugcc

SEQ ID NO: 15179 - RNA, 20 nt, Artificial Sequence
  Antisense oligo
cagauaguaacagguguugc

SEQ ID NO: 15180 - RNA, 20 nt, Artificial Sequence
  Antisense oligo
ucagauaguaacagguguug

SEQ ID NO: 15181 - RNA, 20 nt, Artificial Sequence
  Antisense oligo
aaugaauuaucacgguggcc

SEQ ID NO: 15182 - RNA, 20 nt, Artificial Sequence
  Antisense oligo
caaugaauuaucacgguggc

SEQ ID NO: 15183 - RNA, 20 nt, Artificial Sequence
  Antisense oligo
acaaugaauuaucacggugg

SEQ ID NO: 15184 - RNA, 20 nt, Artificial Sequence
  Antisense oligo
aggaugcucaucauaacuag

SEQ ID NO: 15185 - RNA, 20 nt, Artificial Sequence
  Antisense oligo
ugaaggaugcucaucauaac

SEQ ID NO: 15186 - RNA, 20 nt, Artificial Sequence
  Antisense oligo
gacagcaaaugcccaacaag

SEQ ID NO: 15187 - RNA, 20 nt, Artificial Sequence
  Antisense oligo
agacagcaaaugcccaacaa

SEQ ID NO: 15188 - RNA, 20 nt, Artificial Sequence
  Antisense oligo
gaagacagcaaaugcccaac

SEQ ID NO: 15189 - RNA, 20 nt, Artificial Sequence
  Antisense oligo
agaagacagcaaaugcccaa

SEQ ID NO: 15190 - RNA, 20 nt, Artificial Sequence
  Antisense oligo
uuacuuggaagugaugugug

SEQ ID NO: 15191 - RNA, 20 nt, Artificial Sequence
  Antisense oligo
ucuuacuuggaagugaugug

SEQ ID NO: 15192 - RNA, 20 nt, Artificial Sequence
  Antisense oligo
ccauccuugaauugcuggga

SEQ ID NO: 15193 - RNA, 20 nt, Artificial Sequence
  Antisense oligo
gccauccuugaauugcuggg

SEQ ID NO: 15194 - RNA, 20 nt, Artificial Sequence
  Antisense oligo
gacaaggguauuucuuucca

SEQ ID NO: 15195 - RNA, 20 nt, Artificial Sequence
  Antisense oligo
ccaaguuugacaaggguauu

SEQ ID NO: 15196 - RNA, 20 nt, Artificial Sequence
  Antisense oligo
uuccaaguuugacaagggua

SEQ ID NO: 15197 - RNA, 20 nt, Artificial Sequence
  Antisense oligo
uguuccaaguuugacaaggg

SEQ ID NO: 15198 - RNA, 20 nt, Artificial Sequence
  Antisense oligo
cuguuccaaguuugacaagg

SEQ ID NO: 15199 - RNA, 20 nt, Artificial Sequence
  Antisense oligo
uaccuugggcauugugagcu

SEQ ID NO: 15200 - RNA, 20 nt, Artificial Sequence
  Antisense oligo
cuaccuugggcauugugagc

SEQ ID NO: 15201 - RNA, 20 nt, Artificial Sequence
  Antisense oligo
ugucuaccuugggcauugug

SEQ ID NO: 15202 - RNA, 20 nt, Artificial Sequence
  Antisense oligo
auauuaugucuaccuugggc

SEQ ID NO: 15203 - RNA, 20 nt, Artificial Sequence
  Antisense oligo
ggcaugauguugguauagac

SEQ ID NO: 15204 - RNA, 20 nt, Artificial Sequence
  Antisense oligo
caggcaugauguugguauag

SEQ ID NO: 15205 - RNA, 20 nt, Artificial Sequence
  Antisense oligo
gcaggcaugauguugguaua

SEQ ID NO: 15206 - RNA, 20 nt, Artificial Sequence
  Antisense oligo
ggcaggcaugauguugguau

SEQ ID NO: 15207 - RNA, 20 nt, Artificial Sequence
  Antisense oligo
gggcaggcaugauguuggua

SEQ ID NO: 15208 - RNA, 20 nt, Artificial Sequence
  Antisense oligo
ugggcaggcaugauguuggu

SEQ ID NO: 15209 - RNA, 20 nt, Artificial Sequence
  Antisense oligo
gaugggcaggcaugauguug

SEQ ID NO: 15210 - RNA, 20 nt, Artificial Sequence
  Antisense oligo
ugaugggcaggcaugauguu

SEQ ID NO: 15211 - RNA, 20 nt, Artificial Sequence
  Antisense oligo
uugaugggcaggcaugaugu

SEQ ID NO: 15212 - RNA, 20 nt, Artificial Sequence
  Antisense oligo
aauuugaugggcaggcauga

SEQ ID NO: 15213 - RNA, 20 nt, Artificial Sequence
  Antisense oligo
auggaauuugaugggcaggc

SEQ ID NO: 15214 - RNA, 20 nt, Artificial Sequence
  Antisense oligo
cuaauggaauuugaugggca

SEQ ID NO: 15215 - RNA, 20 nt, Artificial Sequence
  Antisense oligo
acuaauggaauuugaugggc

SEQ ID NO: 15216 - RNA, 20 nt, Artificial Sequence
  Antisense oligo
aggcaauacacaucaucacu

SEQ ID NO: 15217 - RNA, 20 nt, Artificial Sequence
  Antisense oligo
uaggcaauacacaucaucac

SEQ ID NO: 15218 - RNA, 20 nt, Artificial Sequence
  Antisense oligo
gagagcaaaugagaaguuuc

SEQ ID NO: 15219 - RNA, 20 nt, Artificial Sequence
  Antisense oligo
cugagagcaaaugagaaguu

SEQ ID NO: 15220 - RNA, 20 nt, Artificial Sequence
  Antisense oligo
caguccuguauucaacauuc

SEQ ID NO: 15221 - RNA, 20 nt, Artificial Sequence
  Antisense oligo
gacaguccuguauucaacau

SEQ ID NO: 15222 - RNA, 20 nt, Artificial Sequence
  Antisense oligo
ugacaguccuguauucaaca

SEQ ID NO: 15223 - RNA, 20 nt, Artificial Sequence
  Antisense oligo
cugacaguccuguauucaac

SEQ ID NO: 15224 - RNA, 20 nt, Artificial Sequence
  Antisense oligo
uccugacaguccuguauuca

SEQ ID NO: 15225 - RNA, 20 nt, Artificial Sequence
  Antisense oligo
auuccugacaguccuguauu

SEQ ID NO: 15226 - RNA, 20 nt, Artificial Sequence
  Antisense oligo
ucugcugguuaaugggcauu

SEQ ID NO: 15227 - RNA, 20 nt, Artificial Sequence
  Antisense oligo
gucugcugguuaaugggcau

SEQ ID NO: 15228 - RNA, 20 nt, Artificial Sequence
  Antisense oligo
ugucugcugguuaaugggca

SEQ ID NO: 15229 - RNA, 20 nt, Artificial Sequence
  Antisense oligo
cugucugcugguuaaugggc

SEQ ID NO: 15230 - RNA, 20 nt, Artificial Sequence
  Antisense oligo
accugucugcugguuaaugg

SEQ ID NO: 15231 - RNA, 20 nt, Artificial Sequence
  Antisense oligo
guuaccugucugcugguuaa

SEQ ID NO: 15232 - RNA, 20 nt, Artificial Sequence
  Antisense oligo
caguuaccugucugcugguu

SEQ ID NO: 15233 - RNA, 20 nt, Artificial Sequence
  Antisense oligo
caccaguuaccugucugcug

SEQ ID NO: 15234 - RNA, 20 nt, Artificial Sequence
  Antisense oligo
acaccaguuaccugucugcu

SEQ ID NO: 15235 - RNA, 20 nt, Artificial Sequence
  Antisense oligo
uaaagacaccaguuaccugu

SEQ ID NO: 15236 - RNA, 20 nt, Artificial Sequence
  Antisense oligo
gauaaagacaccaguuaccu

SEQ ID NO: 15237 - RNA, 20 nt, Artificial Sequence
  Antisense oligo
acccacugauaaagacacca

SEQ ID NO: 15238 - RNA, 20 nt, Artificial Sequence
  Antisense oligo
uacccacugauaaagacacc

SEQ ID NO: 15239 - RNA, 20 nt, Artificial Sequence
  Antisense oligo
guacccacugauaaagacac

SEQ ID NO: 15240 - RNA, 20 nt, Artificial Sequence
  Antisense oligo
uguacccacugauaaagaca

SEQ ID NO: 15241 - RNA, 20 nt, Artificial Sequence
  Antisense oligo
cuguacccacugauaaagac

SEQ ID NO: 15242 - RNA, 20 nt, Artificial Sequence
  Antisense oligo
ccuguacccacugauaaaga

SEQ ID NO: 15243 - RNA, 20 nt, Artificial Sequence
  Antisense oligo
acuccuguacccacugauaa

SEQ ID NO: 15244 - RNA, 20 nt, Artificial Sequence
  Antisense oligo
aucacuccuguacccacuga

SEQ ID NO: 15245 - RNA, 20 nt, Artificial Sequence
  Antisense oligo
gaucacuccuguacccacug

SEQ ID NO: 15246 - RNA, 20 nt, Artificial Sequence
  Antisense oligo
agaucacuccuguacccacu

SEQ ID NO: 15247 - RNA, 20 nt, Artificial Sequence
  Antisense oligo
cagaucacuccuguacccac

SEQ ID NO: 15248 - RNA, 20 nt, Artificial Sequence
  Antisense oligo
ccagaucacuccuguaccca

SEQ ID NO: 15249 - RNA, 20 nt, Artificial Sequence
  Antisense oligo
guccagaucacuccuguacc

SEQ ID NO: 15250 - RNA, 20 nt, Artificial Sequence
  Antisense oligo
gguccagaucacuccuguac

SEQ ID NO: 15251 - RNA, 20 nt, Artificial Sequence
  Antisense oligo
agguccagaucacuccugua

SEQ ID NO: 15252 - RNA, 20 nt, Artificial Sequence
  Antisense oligo
uagguccagaucacuccugu

SEQ ID NO: 15253 - RNA, 20 nt, Artificial Sequence
  Antisense oligo
uuagguccagaucacuccug

SEQ ID NO: 15254 - RNA, 20 nt, Artificial Sequence
  Antisense oligo
cuuagguccagaucacuccu

SEQ ID NO: 15255 - RNA, 20 nt, Artificial Sequence
  Antisense oligo
ccuuagguccagaucacucc

SEQ ID NO: 15256 - RNA, 20 nt, Artificial Sequence
  Antisense oligo
accuuagguccagaucacuc

SEQ ID NO: 15257 - RNA, 20 nt, Artificial Sequence
  Antisense oligo
auaccuuagguccagaucac

SEQ ID NO: 15258 - RNA, 20 nt, Artificial Sequence
  Antisense oligo
gauaccuuagguccagauca

SEQ ID NO: 15259 - RNA, 20 nt, Artificial Sequence
  Antisense oligo
cuucugcaacucauucucuu

SEQ ID NO: 15260 - RNA, 20 nt, Artificial Sequence
  Antisense oligo
aggcuucugcaacucauucu

SEQ ID NO: 15261 - RNA, 20 nt, Artificial Sequence
  Antisense oligo
aaggcuucugcaacucauuc

SEQ ID NO: 15262 - RNA, 20 nt, Artificial Sequence
  Antisense oligo
aaaggcuucugcaacucauu

SEQ ID NO: 15263 - RNA, 20 nt, Artificial Sequence
  Antisense oligo
uguauaaaggcuucugcaac

SEQ ID NO: 15264 - RNA, 20 nt, Artificial Sequence
  Antisense oligo
guuguauaaaggcuucugca

SEQ ID NO: 15265 - RNA, 20 nt, Artificial Sequence
  Antisense oligo
cguuguauaaaggcuucugc

SEQ ID NO: 15266 - RNA, 20 nt, Artificial Sequence
  Antisense oligo
acguuguauaaaggcuucug

SEQ ID NO: 15267 - RNA, 20 nt, Artificial Sequence
  Antisense oligo
uaccacguuguauaaaggcu

SEQ ID NO: 15268 - RNA, 20 nt, Artificial Sequence
  Antisense oligo
gcauaucugaacauggaguu

SEQ ID NO: 15269 - RNA, 20 nt, Artificial Sequence
  Antisense oligo
agcauaucugaacauggagu

SEQ ID NO: 15270 - RNA, 20 nt, Artificial Sequence
  Antisense oligo
guaagcauaucugaacaugg

SEQ ID NO: 15271 - RNA, 20 nt, Artificial Sequence
  Antisense oligo
gcuguaagcauaucugaaca

SEQ ID NO: 15272 - RNA, 20 nt, Artificial Sequence
  Antisense oligo
agcuguaagcauaucugaac

SEQ ID NO: 15273 - RNA, 20 nt, Artificial Sequence
  Antisense oligo
cugcuuuuaggauagcugua

SEQ ID NO: 15274 - RNA, 20 nt, Artificial Sequence
  Antisense oligo
ucugcuuuuaggauagcugu

SEQ ID NO: 15275 - RNA, 20 nt, Artificial Sequence
  Antisense oligo
gucugcuuuuaggauagcug

SEQ ID NO: 15276 - RNA, 20 nt, Artificial Sequence
  Antisense oligo
ugucugcuuuuaggauagcu

SEQ ID NO: 15277 - RNA, 20 nt, Artificial Sequence
  Antisense oligo
augucugcuuuuaggauagc

SEQ ID NO: 15278 - RNA, 20 nt, Artificial Sequence
  Antisense oligo
acaacuucacaucccuccgu

SEQ ID NO: 15279 - RNA, 20 nt, Artificial Sequence
  Antisense oligo
uacaacuucacaucccuccg

SEQ ID NO: 15280 - RNA, 20 nt, Artificial Sequence
  Antisense oligo
uuacaacuucacaucccucc

SEQ ID NO: 15281 - RNA, 20 nt, Artificial Sequence
  Antisense oligo
guuacaacuucacaucccuc

SEQ ID NO: 15282 - RNA, 20 nt, Artificial Sequence
  Antisense oligo
uaguuacaacuucacauccc

SEQ ID NO: 15283 - RNA, 20 nt, Artificial Sequence
  Antisense oligo
cugcugcgauagaucauuuu

SEQ ID NO: 15284 - RNA, 20 nt, Artificial Sequence
  Antisense oligo
gcugcugcgauagaucauuu

SEQ ID NO: 15285 - RNA, 20 nt, Artificial Sequence
  Antisense oligo
agcugcugcgauagaucauu

SEQ ID NO: 15286 - RNA, 20 nt, Artificial Sequence
  Antisense oligo
aagcugcugcgauagaucau

SEQ ID NO: 15287 - RNA, 20 nt, Artificial Sequence
  Antisense oligo
caagcugcugcgauagauca

SEQ ID NO: 15288 - RNA, 20 nt, Artificial Sequence
  Antisense oligo
ccaagcugcugcgauagauc

SEQ ID NO: 15289 - RNA, 20 nt, Artificial Sequence
  Antisense oligo
cccaagcugcugcgauagau

SEQ ID NO: 15290 - RNA, 20 nt, Artificial Sequence
  Antisense oligo
ucccaagcugcugcgauaga

SEQ ID NO: 15291 - RNA, 20 nt, Artificial Sequence
  Antisense oligo
cucccaagcugcugcgauag

SEQ ID NO: 15292 - RNA, 20 nt, Artificial Sequence
  Antisense oligo
ccucccaagcugcugcgaua

SEQ ID NO: 15293 - RNA, 20 nt, Artificial Sequence
  Antisense oligo
uuuucuuucagccucccaag

SEQ ID NO: 15294 - RNA, 20 nt, Artificial Sequence
  Antisense oligo
aauuuucuuucagccuccca

SEQ ID NO: 15295 - RNA, 20 nt, Artificial Sequence
  Antisense oligo
cgcucucacuaagauauuuc

SEQ ID NO: 15296 - RNA, 20 nt, Artificial Sequence
  Antisense oligo
cuccgcucucacuaagauau

SEQ ID NO: 15297 - RNA, 20 nt, Artificial Sequence
  Antisense oligo
ccuccgcucucacuaagaua

SEQ ID NO: 15298 - RNA, 20 nt, Artificial Sequence
  Antisense oligo
uccuccgcucucacuaagau

SEQ ID NO: 15299 - RNA, 20 nt, Artificial Sequence
  Antisense oligo
cuccuccgcucucacuaaga

SEQ ID NO: 15300 - RNA, 20 nt, Artificial Sequence
  Antisense oligo
ucuccuccgcucucacuaag

SEQ ID NO: 15301 - RNA, 20 nt, Artificial Sequence
  Antisense oligo
gucuccuccgcucucacuaa

SEQ ID NO: 15302 - RNA, 20 nt, Artificial Sequence
  Antisense oligo
ggucuccuccgcucucacua

SEQ ID NO: 15303 - RNA, 20 nt, Artificial Sequence
  Antisense oligo
aggucuccuccgcucucacu

SEQ ID NO: 15304 - RNA, 20 nt, Artificial Sequence
  Antisense oligo
aaggucuccuccgcucucac

SEQ ID NO: 15305 - RNA, 20 nt, Artificial Sequence
  Antisense oligo
uaaggucuccuccgcucuca

SEQ ID NO: 15306 - RNA, 20 nt, Artificial Sequence
  Antisense oligo
uuaaggucuccuccgcucuc

SEQ ID NO: 15307 - RNA, 20 nt, Artificial Sequence
  Antisense oligo
uuuaaggucuccuccgcucu

SEQ ID NO: 15308 - RNA, 20 nt, Artificial Sequence
  Antisense oligo
uuuuaaggucuccuccgcuc

SEQ ID NO: 15309 - RNA, 20 nt, Artificial Sequence
  Antisense oligo
cuuuuaaggucuccuccgcu

SEQ ID NO: 15310 - RNA, 20 nt, Artificial Sequence
  Antisense oligo
ucuuuuaaggucuccuccgc

SEQ ID NO: 15311 - RNA, 20 nt, Artificial Sequence
  Antisense oligo
uucuuuuaaggucuccuccg

SEQ ID NO: 15312 - RNA, 20 nt, Artificial Sequence
  Antisense oligo
aguuacgauuuucccucuuc

SEQ ID NO: 15313 - RNA, 20 nt, Artificial Sequence
  Antisense oligo
caaguuacgauuuucccucu

SEQ ID NO: 15314 - RNA, 20 nt, Artificial Sequence
  Antisense oligo
ucaaguuacgauuuucccuc

SEQ ID NO: 15315 - RNA, 20 nt, Artificial Sequence
  Antisense oligo
cucaaguuacgauuuucccu

SEQ ID NO: 15316 - RNA, 20 nt, Artificial Sequence
  Antisense oligo
ucucaaguuacgauuuuccc

SEQ ID NO: 15317 - RNA, 20 nt, Artificial Sequence
  Antisense oligo
gacuacauucucaaguuacg

SEQ ID NO: 15318 - RNA, 20 nt, Artificial Sequence
  Antisense oligo
ggacuacauucucaaguuac

SEQ ID NO: 15319 - RNA, 20 nt, Artificial Sequence
  Antisense oligo
gggacuacauucucaaguua

SEQ ID NO: 15320 - RNA, 20 nt, Artificial Sequence
  Antisense oligo
gauuaugcugcuugucaggg

SEQ ID NO: 15321 - RNA, 20 nt, Artificial Sequence
  Antisense oligo
gugauuaugcugcuugucag

SEQ ID NO: 15322 - RNA, 20 nt, Artificial Sequence
  Antisense oligo
uugugauuaugcugcuuguc

SEQ ID NO: 15323 - RNA, 20 nt, Artificial Sequence
  Antisense oligo
cguuuugugauuaugcugcu

SEQ ID NO: 15324 - RNA, 20 nt, Artificial Sequence
  Antisense oligo
ucguuuugugauuaugcugc

SEQ ID NO: 15325 - RNA, 20 nt, Artificial Sequence
  Antisense oligo
cucguuuugugauuaugcug

SEQ ID NO: 15326 - RNA, 20 nt, Artificial Sequence
  Antisense oligo
gcucguuuugugauuaugcu

SEQ ID NO: 15327 - RNA, 20 nt, Artificial Sequence
  Antisense oligo
ugcucguuuugugauuaugc

SEQ ID NO: 15328 - RNA, 20 nt, Artificial Sequence
  Antisense oligo
cugaaugcucguuuugugau

SEQ ID NO: 15329 - RNA, 20 nt, Artificial Sequence
  Antisense oligo
ucugaaugcucguuuuguga

SEQ ID NO: 15330 - RNA, 20 nt, Artificial Sequence
  Antisense oligo
cucugaaugcucguuuugug

SEQ ID NO: 15331 - RNA, 20 nt, Artificial Sequence
  Antisense oligo
gaacucugaaugcucguuuu

SEQ ID NO: 15332 - RNA, 20 nt, Artificial Sequence
  Antisense oligo
ugaacucugaaugcucguuu

SEQ ID NO: 15333 - RNA, 20 nt, Artificial Sequence
  Antisense oligo
cuugaacucugaaugcucgu

SEQ ID NO: 15334 - RNA, 20 nt, Artificial Sequence
  Antisense oligo
acauucagggccaaggcugc

SEQ ID NO: 15335 - RNA, 20 nt, Artificial Sequence
  Antisense oligo
cacauucagggccaaggcug

SEQ ID NO: 15336 - RNA, 20 nt, Artificial Sequence
  Antisense oligo
ccacauucagggccaaggcu

SEQ ID NO: 15337 - RNA, 20 nt, Artificial Sequence
  Antisense oligo
accacauucagggccaaggc

SEQ ID NO: 15338 - RNA, 20 nt, Artificial Sequence
  Antisense oligo
caccacauucagggccaagg

SEQ ID NO: 15339 - RNA, 20 nt, Artificial Sequence
  Antisense oligo
agcaccacauucagggccaa

SEQ ID NO: 15340 - RNA, 20 nt, Artificial Sequence
  Antisense oligo
agggagcaccacauucaggg

SEQ ID NO: 15341 - RNA, 20 nt, Artificial Sequence
  Antisense oligo
gagggagcaccacauucagg

SEQ ID NO: 15342 - RNA, 20 nt, Artificial Sequence
  Antisense oligo
agagggagcaccacauucag

SEQ ID NO: 15343 - RNA, 20 nt, Artificial Sequence
  Antisense oligo
cagagggagcaccacauuca

SEQ ID NO: 15344 - RNA, 20 nt, Artificial Sequence
  Antisense oligo
acagagggagcaccacauuc

SEQ ID NO: 15345 - RNA, 20 nt, Artificial Sequence
  Antisense oligo
gacaggagucauuagcaggg

SEQ ID NO: 15346 - RNA, 20 nt, Artificial Sequence
  Antisense oligo
ggacaggagucauuagcagg

SEQ ID NO: 15347 - RNA, 20 nt, Artificial Sequence
  Antisense oligo
gggacaggagucauuagcag

SEQ ID NO: 15348 - RNA, 20 nt, Artificial Sequence
  Antisense oligo
agggacaggagucauuagca

SEQ ID NO: 15349 - RNA, 20 nt, Artificial Sequence
  Antisense oligo
ggcagggacaggagucauua

SEQ ID NO: 15350 - RNA, 20 nt, Artificial Sequence
  Antisense oligo
ucgaagacacugaagaaagg

SEQ ID NO: 15351 - RNA, 20 nt, Artificial Sequence
  Antisense oligo
cucgaagacacugaagaaag

SEQ ID NO: 15352 - RNA, 20 nt, Artificial Sequence
  Antisense oligo
cucucgaagacacugaagaa

SEQ ID NO: 15353 - RNA, 20 nt, Artificial Sequence
  Antisense oligo
ucucucgaagacacugaaga

SEQ ID NO: 15354 - RNA, 20 nt, Artificial Sequence
  Antisense oligo
uucucucgaagacacugaag

SEQ ID NO: 15355 - RNA, 20 nt, Artificial Sequence
  Antisense oligo
guucucucgaagacacugaa

SEQ ID NO: 15356 - RNA, 20 nt, Artificial Sequence
  Antisense oligo
aguucucucgaagacacuga

SEQ ID NO: 15357 - RNA, 20 nt, Artificial Sequence
  Antisense oligo
gaguucucucgaagacacug

SEQ ID NO: 15358 - RNA, 20 nt, Artificial Sequence
  Antisense oligo
agaguucucucgaagacacu

SEQ ID NO: 15359 - RNA, 20 nt, Artificial Sequence
  Antisense oligo
cagaguucucucgaagacac

SEQ ID NO: 15360 - RNA, 20 nt, Artificial Sequence
  Antisense oligo
ucagaguucucucgaagaca

SEQ ID NO: 15361 - RNA, 20 nt, Artificial Sequence
  Antisense oligo
gucagaguucucucgaagac

SEQ ID NO: 15362 - RNA, 20 nt, Artificial Sequence
  Antisense oligo
cgucagaguucucucgaaga

SEQ ID NO: 15363 - RNA, 20 nt, Artificial Sequence
  Antisense oligo
acgucagaguucucucgaag

SEQ ID NO: 15364 - RNA, 20 nt, Artificial Sequence
  Antisense oligo
cacgucagaguucucucgaa

SEQ ID NO: 15365 - RNA, 20 nt, Artificial Sequence
  Antisense oligo
ucacgucagaguucucucga

SEQ ID NO: 15366 - RNA, 20 nt, Artificial Sequence
  Antisense oligo
uucacgucagaguucucucg

SEQ ID NO: 15367 - RNA, 20 nt, Artificial Sequence
  Antisense oligo
cuucacgucagaguucucuc

SEQ ID NO: 15368 - RNA, 20 nt, Artificial Sequence
  Antisense oligo
ucuucacgucagaguucucu

SEQ ID NO: 15369 - RNA, 20 nt, Artificial Sequence
  Antisense oligo
gucuucacgucagaguucuc

SEQ ID NO: 15370 - RNA, 20 nt, Artificial Sequence
  Antisense oligo
cgucuucacgucagaguucu

SEQ ID NO: 15371 - RNA, 20 nt, Artificial Sequence
  Antisense oligo
gcgucuucacgucagaguuc

SEQ ID NO: 15372 - RNA, 20 nt, Artificial Sequence
  Antisense oligo
ugcgucuucacgucagaguu

SEQ ID NO: 15373 - RNA, 20 nt, Artificial Sequence
  Antisense oligo
gugcgucuucacgucagagu

SEQ ID NO: 15374 - RNA, 20 nt, Artificial Sequence
  Antisense oligo
cgcaucacggccucaaaagg

SEQ ID NO: 15375 - RNA, 20 nt, Artificial Sequence
  Antisense oligo
gcgcaucacggccucaaaag

SEQ ID NO: 15376 - RNA, 20 nt, Artificial Sequence
  Antisense oligo
ugcauucacagagagugcgc

SEQ ID NO: 15377 - RNA, 20 nt, Artificial Sequence
  Antisense oligo
cuugcauucacagagagugc

SEQ ID NO: 15378 - RNA, 20 nt, Artificial Sequence
  Antisense oligo
cuccuugcauucacagagag

SEQ ID NO: 15379 - RNA, 20 nt, Artificial Sequence
  Antisense oligo
gucuccuugcauucacagag

SEQ ID NO: 15380 - RNA, 20 nt, Artificial Sequence
  Antisense oligo
ugucuccuugcauucacaga

SEQ ID NO: 15381 - RNA, 20 nt, Artificial Sequence
  Antisense oligo
gcugucuccuugcauucaca

SEQ ID NO: 15382 - RNA, 20 nt, Artificial Sequence
  Antisense oligo
ugagggucuugcuggcuguc

SEQ ID NO: 15383 - RNA, 20 nt, Artificial Sequence
  Antisense oligo
cugagggucuugcuggcugu

SEQ ID NO: 15384 - RNA, 20 nt, Artificial Sequence
  Antisense oligo
ugcugagggucuugcuggcu

SEQ ID NO: 15385 - RNA, 20 nt, Artificial Sequence
  Antisense oligo
caccugcugagggucuugcu

SEQ ID NO: 15386 - RNA, 20 nt, Artificial Sequence
  Antisense oligo
cuucacagauccaaaccuaa

SEQ ID NO: 15387 - RNA, 20 nt, Artificial Sequence
  Antisense oligo
ccuucacagauccaaaccua

SEQ ID NO: 15388 - RNA, 20 nt, Artificial Sequence
  Antisense oligo
gccuucacagauccaaaccu

SEQ ID NO: 15389 - RNA, 20 nt, Artificial Sequence
  Antisense oligo
cgccuucacagauccaaacc

SEQ ID NO: 15390 - RNA, 20 nt, Artificial Sequence
  Antisense oligo
ucgccuucacagauccaaac

SEQ ID NO: 15391 - RNA, 20 nt, Artificial Sequence
  Antisense oligo
cucgccuucacagauccaaa

SEQ ID NO: 15392 - RNA, 20 nt, Artificial Sequence
  Antisense oligo
ucucgccuucacagauccaa

SEQ ID NO: 15393 - RNA, 20 nt, Artificial Sequence
  Antisense oligo
uucucgccuucacagaucca

SEQ ID NO: 15394 - RNA, 20 nt, Artificial Sequence
  Antisense oligo
auucucgccuucacagaucc

SEQ ID NO: 15395 - RNA, 20 nt, Artificial Sequence
  Antisense oligo
gaagugaaaaccacgagagg

SEQ ID NO: 15396 - RNA, 20 nt, Artificial Sequence
  Antisense oligo
agaagugaaaaccacgagag

SEQ ID NO: 15397 - RNA, 20 nt, Artificial Sequence
  Antisense oligo
gaagaagugaaaaccacgag

SEQ ID NO: 15398 - RNA, 20 nt, Artificial Sequence
  Antisense oligo
agaagaagugaaaaccacga

SEQ ID NO: 15399 - RNA, 20 nt, Artificial Sequence
  Antisense oligo
ccagaagaagugaaaaccac

SEQ ID NO: 15400 - RNA, 20 nt, Artificial Sequence
  Antisense oligo
ggccagaagaagugaaaacc

SEQ ID NO: 15401 - RNA, 20 nt, Artificial Sequence
  Antisense oligo
ggcaaucaguucugaagcag

SEQ ID NO: 15402 - RNA, 20 nt, Artificial Sequence
  Antisense oligo
gggcaaucaguucugaagca

SEQ ID NO: 15403 - RNA, 20 nt, Artificial Sequence
  Antisense oligo
gaagggcaaucaguucugaa

SEQ ID NO: 15404 - RNA, 20 nt, Artificial Sequence
  Antisense oligo
ccaagaagggcaaucaguuc

SEQ ID NO: 15405 - RNA, 20 nt, Artificial Sequence
  Antisense oligo
uccaagaagggcaaucaguu

SEQ ID NO: 15406 - RNA, 20 nt, Artificial Sequence
  Antisense oligo
auccaagaagggcaaucagu

SEQ ID NO: 15407 - RNA, 20 nt, Artificial Sequence
  Antisense oligo
gaauccaagaagggcaauca

SEQ ID NO: 15408 - RNA, 20 nt, Artificial Sequence
  Antisense oligo
agaauccaagaagggcaauc

SEQ ID NO: 15409 - RNA, 20 nt, Artificial Sequence
  Antisense oligo
uagaauccaagaagggcaau

SEQ ID NO: 15410 - RNA, 20 nt, Artificial Sequence
  Antisense oligo
cuagaauccaagaagggcaa

SEQ ID NO: 15411 - RNA, 20 nt, Artificial Sequence
  Antisense oligo
ccuagaauccaagaagggca

SEQ ID NO: 15412 - RNA, 20 nt, Artificial Sequence
  Antisense oligo
cccaaaccuagaauccaaga

SEQ ID NO: 15413 - RNA, 20 nt, Artificial Sequence
  Antisense oligo
ucccaaaccuagaauccaag

SEQ ID NO: 15414 - RNA, 20 nt, Artificial Sequence
  Antisense oligo
gaaucccaaaccuagaaucc

SEQ ID NO: 15415 - RNA, 20 nt, Artificial Sequence
  Antisense oligo
gcugaaucccaaaccuagaa

SEQ ID NO: 15416 - RNA, 20 nt, Artificial Sequence
  Antisense oligo
ggcugaaucccaaaccuaga

SEQ ID NO: 15417 - RNA, 20 nt, Artificial Sequence
  Antisense oligo
guccuuugcaucucccaggc

SEQ ID NO: 15418 - RNA, 20 nt, Artificial Sequence
  Antisense oligo
gguccuuugcaucucccagg

SEQ ID NO: 15419 - RNA, 20 nt, Artificial Sequence
  Antisense oligo
ggguccuuugcaucucccag

SEQ ID NO: 15420 - RNA, 20 nt, Artificial Sequence
  Antisense oligo
ugaggcaaaccaggcccuga

SEQ ID NO: 15421 - RNA, 20 nt, Artificial Sequence
  Antisense oligo
ugcucugaggcaaaccaggc

SEQ ID NO: 15422 - RNA, 20 nt, Artificial Sequence
  Antisense oligo
auaucaucugcucugaggca

SEQ ID NO: 15423 - RNA, 20 nt, Artificial Sequence
  Antisense oligo
cauaucaucugcucugaggc

SEQ ID NO: 15424 - RNA, 20 nt, Artificial Sequence
  Antisense oligo
gggcauaucaucugcucuga

SEQ ID NO: 15425 - RNA, 20 nt, Artificial Sequence
  Antisense oligo
aaggcaguuaaacaguaggg

SEQ ID NO: 15426 - RNA, 20 nt, Artificial Sequence
  Antisense oligo
caaggcaguuaaacaguagg

SEQ ID NO: 15427 - RNA, 20 nt, Artificial Sequence
  Antisense oligo
gcaaggcaguuaaacaguag

SEQ ID NO: 15428 - RNA, 20 nt, Artificial Sequence
  Antisense oligo
ggcaaggcaguuaaacagua

SEQ ID NO: 15429 - RNA, 20 nt, Artificial Sequence
  Antisense oligo
gucuggcaaggcaguuaaac

SEQ ID NO: 15430 - RNA, 20 nt, Artificial Sequence
  Antisense oligo
cgucuggcaaggcaguuaaa

SEQ ID NO: 15431 - RNA, 20 nt, Artificial Sequence
  Antisense oligo
ucgucuggcaaggcaguuaa

SEQ ID NO: 15432 - RNA, 20 nt, Artificial Sequence
  Antisense oligo
uucgucuggcaaggcaguua

SEQ ID NO: 15433 - RNA, 20 nt, Artificial Sequence
  Antisense oligo
auucgucuggcaaggcaguu

SEQ ID NO: 15434 - RNA, 20 nt, Artificial Sequence
  Antisense oligo
aauucgucuggcaaggcagu

SEQ ID NO: 15435 - RNA, 20 nt, Artificial Sequence
  Antisense oligo
ugugcgcuugggaaacagcu

SEQ ID NO: 15436 - RNA, 20 nt, Artificial Sequence
  Antisense oligo
accugugcgcuugggaaaca

SEQ ID NO: 15437 - RNA, 20 nt, Artificial Sequence
  Antisense oligo
uaccugugcgcuugggaaac

SEQ ID NO: 15438 - RNA, 20 nt, Artificial Sequence
  Antisense oligo
guaccugugcgcuugggaaa

SEQ ID NO: 15439 - RNA, 20 nt, Artificial Sequence
  Antisense oligo
uguaccugugcgcuugggaa

SEQ ID NO: 15440 - RNA, 20 nt, Artificial Sequence
  Antisense oligo
uuguaccugugcgcuuggga

SEQ ID NO: 15441 - RNA, 20 nt, Artificial Sequence
  Antisense oligo
guuguaccugugcgcuuggg

SEQ ID NO: 15442 - RNA, 20 nt, Artificial Sequence
  Antisense oligo
uguuguaccugugcgcuugg

SEQ ID NO: 15443 - RNA, 20 nt, Artificial Sequence
  Antisense oligo
guguuguaccugugcgcuug

SEQ ID NO: 15444 - RNA, 20 nt, Artificial Sequence
  Antisense oligo
gguguuguaccugugcgcuu

SEQ ID NO: 15445 - RNA, 20 nt, Artificial Sequence
  Antisense oligo
aaaggguguuguaccugugc

SEQ ID NO: 15446 - RNA, 20 nt, Artificial Sequence
  Antisense oligo
gaaaggguguuguaccugug

SEQ ID NO: 15447 - RNA, 20 nt, Artificial Sequence
  Antisense oligo
agaaaggguguuguaccugu

SEQ ID NO: 15448 - RNA, 20 nt, Artificial Sequence
  Antisense oligo
gagaaaggguguuguaccug

SEQ ID NO: 15449 - RNA, 20 nt, Artificial Sequence
  Antisense oligo
agagaaaggguguuguaccu

SEQ ID NO: 15450 - RNA, 20 nt, Artificial Sequence
  Antisense oligo
gagagaaaggguguuguacc

SEQ ID NO: 15451 - RNA, 20 nt, Artificial Sequence
  Antisense oligo
ugagagaaaggguguuguac

SEQ ID NO: 15452 - RNA, 20 nt, Artificial Sequence
  Antisense oligo
uugagagaaaggguguugua

SEQ ID NO: 15453 - RNA, 20 nt, Artificial Sequence
  Antisense oligo
cuugagagaaaggguguugu

SEQ ID NO: 15454 - RNA, 20 nt, Artificial Sequence
  Antisense oligo
gguuuucuaccaaaugaagg

SEQ ID NO: 15455 - RNA, 20 nt, Artificial Sequence
  Antisense oligo
gucagguuuucuaccaaaug

SEQ ID NO: 15456 - RNA, 20 nt, Artificial Sequence
  Antisense oligo
ggucagguuuucuaccaaau

SEQ ID NO: 15457 - RNA, 20 nt, Artificial Sequence
  Antisense oligo
guuccucugaauuuguuguc

SEQ ID NO: 15458 - RNA, 20 nt, Artificial Sequence
  Antisense oligo
gcuuaguuccucugaauuug

SEQ ID NO: 15459 - RNA, 20 nt, Artificial Sequence
  Antisense oligo
uggcuuaguuccucugaauu

SEQ ID NO: 15460 - RNA, 20 nt, Artificial Sequence
  Antisense oligo
ucuggcuuaguuccucugaa

SEQ ID NO: 15461 - RNA, 20 nt, Artificial Sequence
  Antisense oligo
uucuggcuuaguuccucuga

SEQ ID NO: 15462 - RNA, 20 nt, Artificial Sequence
  Antisense oligo
uuucuggcuuaguuccucug

SEQ ID NO: 15463 - RNA, 20 nt, Artificial Sequence
  Antisense oligo
gacuuucuggcuuaguuccu

SEQ ID NO: 15464 - RNA, 20 nt, Artificial Sequence
  Antisense oligo
agacuuucuggcuuaguucc

SEQ ID NO: 15465 - RNA, 20 nt, Artificial Sequence
  Antisense oligo
ccuuuguuaagacuuucugg

SEQ ID NO: 15466 - RNA, 20 nt, Artificial Sequence
  Antisense oligo
ugaggaccuuuguuaagacu

SEQ ID NO: 15467 - RNA, 20 nt, Artificial Sequence
  Antisense oligo
gugaggaccuuuguuaagac

SEQ ID NO: 15468 - RNA, 20 nt, Artificial Sequence
  Antisense oligo
ggugaggaccuuuguuaaga

SEQ ID NO: 15469 - RNA, 20 nt, Artificial Sequence
  Antisense oligo
auuccuugggccucugguga

SEQ ID NO: 15470 - RNA, 20 nt, Artificial Sequence
  Antisense oligo
cauuccuugggccucuggug

SEQ ID NO: 15471 - RNA, 20 nt, Artificial Sequence
  Antisense oligo
acauuccuugggccucuggu

SEQ ID NO: 15472 - RNA, 20 nt, Artificial Sequence
  Antisense oligo
uacauuccuugggccucugg

SEQ ID NO: 15473 - RNA, 20 nt, Artificial Sequence
  Antisense oligo
cuacauuccuugggccucug

SEQ ID NO: 15474 - RNA, 20 nt, Artificial Sequence
  Antisense oligo
ucuacauuccuugggccucu

SEQ ID NO: 15475 - RNA, 20 nt, Artificial Sequence
  Antisense oligo
ugggcaacagagugaaacac

SEQ ID NO: 15476 - RNA, 20 nt, Artificial Sequence
  Antisense oligo
cugggcaacagagugaaaca

SEQ ID NO: 15477 - RNA, 20 nt, Artificial Sequence
  Antisense oligo
ccugggcaacagagugaaac

SEQ ID NO: 15478 - RNA, 20 nt, Artificial Sequence
  Antisense oligo
gccugggcaacagagugaaa

SEQ ID NO: 15479 - RNA, 20 nt, Artificial Sequence
  Antisense oligo
agccugggcaacagagugaa

SEQ ID NO: 15480 - RNA, 20 nt, Artificial Sequence
  Antisense oligo
cagccugggcaacagaguga

SEQ ID NO: 15481 - RNA, 20 nt, Artificial Sequence
  Antisense oligo
uccagccugggcaacagagu

SEQ ID NO: 15482 - RNA, 20 nt, Artificial Sequence
  Antisense oligo
acuccagccugggcaacaga

SEQ ID NO: 15483 - RNA, 20 nt, Artificial Sequence
  Antisense oligo
uacuccagccugggcaacag

SEQ ID NO: 15484 - RNA, 20 nt, Artificial Sequence
  Antisense oligo
guacuccagccugggcaaca

SEQ ID NO: 15485 - RNA, 20 nt, Artificial Sequence
  Antisense oligo
uguacuccagccugggcaac

SEQ ID NO: 15486 - RNA, 20 nt, Artificial Sequence
  Antisense oligo
cuguacuccagccugggcaa

SEQ ID NO: 15487 - RNA, 20 nt, Artificial Sequence
  Antisense oligo
acuguacuccagccugggca

SEQ ID NO: 15488 - RNA, 20 nt, Artificial Sequence
  Antisense oligo
ugccacuguacuccagccug

SEQ ID NO: 15489 - RNA, 20 nt, Artificial Sequence
  Antisense oligo
gugccacuguacuccagccu

SEQ ID NO: 15490 - RNA, 20 nt, Artificial Sequence
  Antisense oligo
ucgugccacuguacuccagc

SEQ ID NO: 15491 - RNA, 20 nt, Artificial Sequence
  Antisense oligo
aucgugccacuguacuccag

SEQ ID NO: 15492 - RNA, 20 nt, Artificial Sequence
  Antisense oligo
gaucgugccacuguacucca

SEQ ID NO: 15493 - RNA, 20 nt, Artificial Sequence
  Antisense oligo
agaucgugccacuguacucc

SEQ ID NO: 15494 - RNA, 20 nt, Artificial Sequence
  Antisense oligo
gagaucgugccacuguacuc

SEQ ID NO: 15495 - RNA, 20 nt, Artificial Sequence
  Antisense oligo
ugagaucgugccacuguacu

SEQ ID NO: 15496 - RNA, 20 nt, Artificial Sequence
  Antisense oligo
cugagaucgugccacuguac

SEQ ID NO: 15497 - RNA, 20 nt, Artificial Sequence
  Antisense oligo
gcugagaucgugccacugua

SEQ ID NO: 15498 - RNA, 20 nt, Artificial Sequence
  Antisense oligo
agcugagaucgugccacugu

SEQ ID NO: 15499 - RNA, 20 nt, Artificial Sequence
  Antisense oligo
gagcugagaucgugccacug

SEQ ID NO: 15500 - RNA, 20 nt, Artificial Sequence
  Antisense oligo
ugagcugagaucgugccacu

SEQ ID NO: 15501 - RNA, 20 nt, Artificial Sequence
  Antisense oligo
gugagcugagaucgugccac

SEQ ID NO: 15502 - RNA, 20 nt, Artificial Sequence
  Antisense oligo
agugagcugagaucgugcca

SEQ ID NO: 15503 - RNA, 20 nt, Artificial Sequence
  Antisense oligo
cagugagcugagaucgugcc

SEQ ID NO: 15504 - RNA, 20 nt, Artificial Sequence
  Antisense oligo
gcagugagcugagaucgugc

SEQ ID NO: 15505 - RNA, 20 nt, Artificial Sequence
  Antisense oligo
ugcagugagcugagaucgug

SEQ ID NO: 15506 - RNA, 20 nt, Artificial Sequence
  Antisense oligo
uugcagugagcugagaucgu

SEQ ID NO: 15507 - RNA, 20 nt, Artificial Sequence
  Antisense oligo
guugcagugagcugagaucg

SEQ ID NO: 15508 - RNA, 20 nt, Artificial Sequence
  Antisense oligo
gguugcagugagcugagauc

SEQ ID NO: 15509 - RNA, 20 nt, Artificial Sequence
  Antisense oligo
agguugcagugagcugagau

SEQ ID NO: 15510 - RNA, 20 nt, Artificial Sequence
  Antisense oligo
aagguugcagugagcugaga

SEQ ID NO: 15511 - RNA, 20 nt, Artificial Sequence
  Antisense oligo
gaagguugcagugagcugag

SEQ ID NO: 15512 - RNA, 20 nt, Artificial Sequence
  Antisense oligo
ugaagguugcagugagcuga

SEQ ID NO: 15513 - RNA, 20 nt, Artificial Sequence
  Antisense oligo
gugaagguugcagugagcug

SEQ ID NO: 15514 - RNA, 20 nt, Artificial Sequence
  Antisense oligo
ggugaagguugcagugagcu

SEQ ID NO: 15515 - RNA, 20 nt, Artificial Sequence
  Antisense oligo
ugaacccaggaggugaaggu

SEQ ID NO: 15516 - RNA, 20 nt, Artificial Sequence
  Antisense oligo
cugaacccaggaggugaagg

SEQ ID NO: 15517 - RNA, 20 nt, Artificial Sequence
  Antisense oligo
ggcugaggcaggagaauugc

SEQ ID NO: 15518 - RNA, 20 nt, Artificial Sequence
  Antisense oligo
aggcugaggcaggagaauug

SEQ ID NO: 15519 - RNA, 20 nt, Artificial Sequence
  Antisense oligo
gaggcugaggcaggagaauu

SEQ ID NO: 15520 - RNA, 20 nt, Artificial Sequence
  Antisense oligo
ccuguaaucccagcuacuug

SEQ ID NO: 15521 - RNA, 20 nt, Artificial Sequence
  Antisense oligo
gccuguaaucccagcuacuu

SEQ ID NO: 15522 - RNA, 20 nt, Artificial Sequence
  Antisense oligo
ugccuguaaucccagcuacu

SEQ ID NO: 15523 - RNA, 20 nt, Artificial Sequence
  Antisense oligo
augccuguaaucccagcuac

SEQ ID NO: 15524 - RNA, 20 nt, Artificial Sequence
  Antisense oligo
caugccuguaaucccagcua

SEQ ID NO: 15525 - RNA, 20 nt, Artificial Sequence
  Antisense oligo
gaaacccugucucuacuaaa

SEQ ID NO: 15526 - RNA, 20 nt, Artificial Sequence
  Antisense oligo
ugaaacccugucucuacuaa

SEQ ID NO: 15527 - RNA, 20 nt, Artificial Sequence
  Antisense oligo
gugaaacccugucucuacua

SEQ ID NO: 15528 - RNA, 20 nt, Artificial Sequence
  Antisense oligo
ggugaaacccugucucuacu

SEQ ID NO: 15529 - RNA, 20 nt, Artificial Sequence
  Antisense oligo
uggugaaacccugucucuac

SEQ ID NO: 15530 - RNA, 20 nt, Artificial Sequence
  Antisense oligo
auggugaaacccugucucua

SEQ ID NO: 15531 - RNA, 20 nt, Artificial Sequence
  Antisense oligo
cauggugaaacccugucucu

SEQ ID NO: 15532 - RNA, 20 nt, Artificial Sequence
  Antisense oligo
acauggugaaacccugucuc

SEQ ID NO: 15533 - RNA, 20 nt, Artificial Sequence
  Antisense oligo
aacauggugaaacccugucu

SEQ ID NO: 15534 - RNA, 20 nt, Artificial Sequence
  Antisense oligo
caacauggugaaacccuguc

SEQ ID NO: 15535 - RNA, 20 nt, Artificial Sequence
  Antisense oligo
ccaacauggugaaacccugu

SEQ ID NO: 15536 - RNA, 20 nt, Artificial Sequence
  Antisense oligo
gccaacauggugaaacccug

SEQ ID NO: 15537 - RNA, 20 nt, Artificial Sequence
  Antisense oligo
ggccaacauggugaaacccu

SEQ ID NO: 15538 - RNA, 20 nt, Artificial Sequence
  Antisense oligo
aggaguucgagaccagccug

SEQ ID NO: 15539 - RNA, 20 nt, Artificial Sequence
  Antisense oligo
caggaguucgagaccagccu

SEQ ID NO: 15540 - RNA, 20 nt, Artificial Sequence
  Antisense oligo
ucaggaguucgagaccagcc

SEQ ID NO: 15541 - RNA, 20 nt, Artificial Sequence
  Antisense oligo
gucaggaguucgagaccagc

SEQ ID NO: 15542 - RNA, 20 nt, Artificial Sequence
  Antisense oligo
ugaggucaggaguucgagac

SEQ ID NO: 15543 - RNA, 20 nt, Artificial Sequence
  Antisense oligo
cugaggucaggaguucgaga

SEQ ID NO: 15544 - RNA, 20 nt, Artificial Sequence
  Antisense oligo
caugccuguaaucccugcac

SEQ ID NO: 15545 - RNA, 20 nt, Artificial Sequence
  Antisense oligo
ucaugccuguaaucccugca

SEQ ID NO: 15546 - RNA, 20 nt, Artificial Sequence
  Antisense oligo
cucaugccuguaaucccugc

SEQ ID NO: 15547 - RNA, 20 nt, Artificial Sequence
  Antisense oligo
acucaugccuguaaucccug

SEQ ID NO: 15548 - RNA, 20 nt, Artificial Sequence
  Antisense oligo
cacucaugccuguaaucccu

SEQ ID NO: 15549 - RNA, 20 nt, Artificial Sequence
  Antisense oligo
ucacucaugccuguaauccc

SEQ ID NO: 15550 - RNA, 20 nt, Artificial Sequence
  Antisense oligo
gucacucaugccuguaaucc

SEQ ID NO: 15551 - RNA, 20 nt, Artificial Sequence
  Antisense oligo
ggucacucaugccuguaauc

SEQ ID NO: 15552 - RNA, 20 nt, Artificial Sequence
  Antisense oligo
auuaaaaccaguggcgucgg

SEQ ID NO: 15553 - RNA, 20 nt, Artificial Sequence
  Antisense oligo
cauuaaaaccaguggcgucg

SEQ ID NO: 15554 - RNA, 20 nt, Artificial Sequence
  Antisense oligo
gcauuaaaaccaguggcguc

SEQ ID NO: 15555 - RNA, 20 nt, Artificial Sequence
  Antisense oligo
ugcauuaaaaccaguggcgu

SEQ ID NO: 15556 - RNA, 20 nt, Artificial Sequence
  Antisense oligo
cugugaaugauacugaugca

SEQ ID NO: 15557 - RNA, 20 nt, Artificial Sequence
  Antisense oligo
acugugaaugauacugaugc

SEQ ID NO: 15558 - RNA, 20 nt, Artificial Sequence
  Antisense oligo
gacugugaaugauacugaug

SEQ ID NO: 15559 - RNA, 20 nt, Artificial Sequence
  Antisense oligo
gugacugugaaugauacuga

SEQ ID NO: 15560 - RNA, 20 nt, Artificial Sequence
  Antisense oligo
agugacugugaaugauacug

SEQ ID NO: 15561 - RNA, 20 nt, Artificial Sequence
  Antisense oligo
ucagugacugugaaugauac

SEQ ID NO: 15562 - RNA, 20 nt, Artificial Sequence
  Antisense oligo
gucagugacugugaaugaua

SEQ ID NO: 15563 - RNA, 20 nt, Artificial Sequence
  Antisense oligo
ggucagugacugugaaugau

SEQ ID NO: 15564 - RNA, 20 nt, Artificial Sequence
  Antisense oligo
uugauccucaggucagugac

SEQ ID NO: 15565 - RNA, 20 nt, Artificial Sequence
  Antisense oligo
ggguugauccucaggucagu

SEQ ID NO: 15566 - RNA, 20 nt, Artificial Sequence
  Antisense oligo
uggguugauccucaggucag

SEQ ID NO: 15567 - RNA, 20 nt, Artificial Sequence
  Antisense oligo
aguggguugauccucagguc

SEQ ID NO: 15568 - RNA, 20 nt, Artificial Sequence
  Antisense oligo
aaguggguugauccucaggu

SEQ ID NO: 15569 - RNA, 20 nt, Artificial Sequence
  Antisense oligo
agaaguggguugauccucag

SEQ ID NO: 15570 - RNA, 20 nt, Artificial Sequence
  Antisense oligo
aagaaguggguugauccuca

SEQ ID NO: 15571 - RNA, 20 nt, Artificial Sequence
  Antisense oligo
gacaagaaguggguugaucc

SEQ ID NO: 15572 - RNA, 20 nt, Artificial Sequence
  Antisense oligo
ugcuuuuaaccagcuccaaa

SEQ ID NO: 15573 - RNA, 20 nt, Artificial Sequence
  Antisense oligo
cugcuuuuaaccagcuccaa

SEQ ID NO: 15574 - RNA, 20 nt, Artificial Sequence
  Antisense oligo
ccagagcugcuuuuaaccag

SEQ ID NO: 15575 - RNA, 20 nt, Artificial Sequence
  Antisense oligo
agccagagcugcuuuuaacc

SEQ ID NO: 15576 - RNA, 20 nt, Artificial Sequence
  Antisense oligo
gagagccagagcugcuuuua

SEQ ID NO: 15577 - RNA, 20 nt, Artificial Sequence
  Antisense oligo
agagagccagagcugcuuuu

SEQ ID NO: 15578 - RNA, 20 nt, Artificial Sequence
  Antisense oligo
accaaccacucacagagccg

SEQ ID NO: 15579 - RNA, 20 nt, Artificial Sequence
  Antisense oligo
aaaccaaccacucacagagc

SEQ ID NO: 15580 - RNA, 20 nt, Artificial Sequence
  Antisense oligo
aaaaccaaccacucacagag

SEQ ID NO: 15581 - RNA, 20 nt, Artificial Sequence
  Antisense oligo
agaaaaccaaccacucacag

SEQ ID NO: 15582 - RNA, 20 nt, Artificial Sequence
  Antisense oligo
aagaaaaccaaccacucaca

SEQ ID NO: 15583 - RNA, 20 nt, Artificial Sequence
  Antisense oligo
aaagaaaaccaaccacucac

SEQ ID NO: 15584 - RNA, 20 nt, Artificial Sequence
  Antisense oligo
ggaaagaaaaccaaccacuc

SEQ ID NO: 15585 - RNA, 20 nt, Artificial Sequence
  Antisense oligo
aaggaaagaaaaccaaccac

SEQ ID NO: 15586 - RNA, 20 nt, Artificial Sequence
  Antisense oligo
gaaggaaagaaaaccaacca

SEQ ID NO: 15587 - RNA, 20 nt, Artificial Sequence
  Antisense oligo
ggaaggaaagaaaaccaacc

SEQ ID NO: 15588 - RNA, 20 nt, Artificial Sequence
  Antisense oligo
ucaaagaacccauccacugg

SEQ ID NO: 15589 - RNA, 20 nt, Artificial Sequence
  Antisense oligo
gucaaagaacccauccacug

SEQ ID NO: 15590 - RNA, 20 nt, Artificial Sequence
  Antisense oligo
ugucaaagaacccauccacu

SEQ ID NO: 15591 - RNA, 20 nt, Artificial Sequence
  Antisense oligo
augucaaagaacccauccac

SEQ ID NO: 15592 - RNA, 20 nt, Artificial Sequence
  Antisense oligo
uaugucaaagaacccaucca

SEQ ID NO: 15593 - RNA, 20 nt, Artificial Sequence
  Antisense oligo
guaugucaaagaacccaucc

SEQ ID NO: 15594 - RNA, 20 nt, Artificial Sequence
  Antisense oligo
aguaugucaaagaacccauc

SEQ ID NO: 15595 - RNA, 20 nt, Artificial Sequence
  Antisense oligo
acaauacccuucaauauccc

SEQ ID NO: 15596 - RNA, 20 nt, Artificial Sequence
  Antisense oligo
ggcaacaauacccuucaaua

SEQ ID NO: 15597 - RNA, 20 nt, Artificial Sequence
  Antisense oligo
cggcaacaauacccuucaau

SEQ ID NO: 15598 - RNA, 20 nt, Artificial Sequence
  Antisense oligo
ccggcaacaauacccuucaa

SEQ ID NO: 15599 - RNA, 20 nt, Artificial Sequence
  Antisense oligo
ccucagcagaugauauuuac

SEQ ID NO: 15600 - RNA, 20 nt, Artificial Sequence
  Antisense oligo
caaaaccucagcagaugaua

SEQ ID NO: 15601 - RNA, 20 nt, Artificial Sequence
  Antisense oligo
cuucaaaaccucagcagaug

SEQ ID NO: 15602 - RNA, 20 nt, Artificial Sequence
  Antisense oligo
gcuagucuucaaaaccucag

SEQ ID NO: 15603 - RNA, 20 nt, Artificial Sequence
  Antisense oligo
gagcuagucuucaaaaccuc

SEQ ID NO: 15604 - RNA, 20 nt, Artificial Sequence
  Antisense oligo
agagcuagucuucaaaaccu

SEQ ID NO: 15605 - RNA, 20 nt, Artificial Sequence
  Antisense oligo
uagagcuagucuucaaaacc

SEQ ID NO: 15606 - RNA, 20 nt, Artificial Sequence
  Antisense oligo
cguuagagcuagucuucaaa

SEQ ID NO: 15607 - RNA, 20 nt, Artificial Sequence
  Antisense oligo
ccguuagagcuagucuucaa

SEQ ID NO: 15608 - RNA, 20 nt, Artificial Sequence
  Antisense oligo
cccguuagagcuagucuuca

SEQ ID NO: 15609 - RNA, 20 nt, Artificial Sequence
  Antisense oligo
acccguuagagcuagucuuc

SEQ ID NO: 15610 - RNA, 20 nt, Artificial Sequence
  Antisense oligo
cacccguuagagcuagucuu

SEQ ID NO: 15611 - RNA, 20 nt, Artificial Sequence
  Antisense oligo
ucacccguuagagcuagucu

SEQ ID NO: 15612 - RNA, 20 nt, Artificial Sequence
  Antisense oligo
cucacccguuagagcuaguc

SEQ ID NO: 15613 - RNA, 20 nt, Artificial Sequence
  Antisense oligo
ucucacccguuagagcuagu

SEQ ID NO: 15614 - RNA, 20 nt, Artificial Sequence
  Antisense oligo
cacuccucucacccguuaga

SEQ ID NO: 15615 - RNA, 20 nt, Artificial Sequence
  Antisense oligo
ucacuccucucacccguuag

SEQ ID NO: 15616 - RNA, 20 nt, Artificial Sequence
  Antisense oligo
gucacuccucucacccguua

SEQ ID NO: 15617 - RNA, 20 nt, Artificial Sequence
  Antisense oligo
aagucacuccucucacccgu

SEQ ID NO: 15618 - RNA, 20 nt, Artificial Sequence
  Antisense oligo
ucaagucacuccucucaccc

SEQ ID NO: 15619 - RNA, 20 nt, Artificial Sequence
  Antisense oligo
agauucaagucacuccucuc

SEQ ID NO: 15620 - RNA, 20 nt, Artificial Sequence
  Antisense oligo
ccuggcuggcauuuuacuuu

SEQ ID NO: 15621 - RNA, 20 nt, Artificial Sequence
  Antisense oligo
uacaggcgugagccaccaug

SEQ ID NO: 15622 - RNA, 20 nt, Artificial Sequence
  Antisense oligo
uuacaggcgugagccaccau

SEQ ID NO: 15623 - RNA, 20 nt, Artificial Sequence
  Antisense oligo
auuacaggcgugagccacca

SEQ ID NO: 15624 - RNA, 20 nt, Artificial Sequence
  Antisense oligo
gauuacaggcgugagccacc

SEQ ID NO: 15625 - RNA, 20 nt, Artificial Sequence
  Antisense oligo
ggauuacaggcgugagccac

SEQ ID NO: 15626 - RNA, 20 nt, Artificial Sequence
  Antisense oligo
gggauuacaggcgugagcca

SEQ ID NO: 15627 - RNA, 20 nt, Artificial Sequence
  Antisense oligo
ugggauuacaggcgugagcc

SEQ ID NO: 15628 - RNA, 20 nt, Artificial Sequence
  Antisense oligo
cugggauuacaggcgugagc

SEQ ID NO: 15629 - RNA, 20 nt, Artificial Sequence
  Antisense oligo
gcugggauuacaggcgugag

SEQ ID NO: 15630 - RNA, 20 nt, Artificial Sequence
  Antisense oligo
ugcugggauuacaggcguga

SEQ ID NO: 15631 - RNA, 20 nt, Artificial Sequence
  Antisense oligo
gugcugggauuacaggcgug

SEQ ID NO: 15632 - RNA, 20 nt, Artificial Sequence
  Antisense oligo
agugcugggauuacaggcgu

SEQ ID NO: 15633 - RNA, 20 nt, Artificial Sequence
  Antisense oligo
gagugcugggauuacaggcg

SEQ ID NO: 15634 - RNA, 20 nt, Artificial Sequence
  Antisense oligo
agagugcugggauuacaggc

SEQ ID NO: 15635 - RNA, 20 nt, Artificial Sequence
  Antisense oligo
cagagugcugggauuacagg

SEQ ID NO: 15636 - RNA, 20 nt, Artificial Sequence
  Antisense oligo
accucaggugauccacacac

SEQ ID NO: 15637 - RNA, 20 nt, Artificial Sequence
  Antisense oligo
gaccucaggugauccacaca

SEQ ID NO: 15638 - RNA, 20 nt, Artificial Sequence
  Antisense oligo
ugaccucaggugauccacac

SEQ ID NO: 15639 - RNA, 20 nt, Artificial Sequence
  Antisense oligo
cugaccucaggugauccaca

SEQ ID NO: 15640 - RNA, 20 nt, Artificial Sequence
  Antisense oligo
gcugaccucaggugauccac

SEQ ID NO: 15641 - RNA, 20 nt, Artificial Sequence
  Antisense oligo
ugcugaccucaggugaucca

SEQ ID NO: 15642 - RNA, 20 nt, Artificial Sequence
  Antisense oligo
cugcugaccucaggugaucc

SEQ ID NO: 15643 - RNA, 20 nt, Artificial Sequence
  Antisense oligo
acugcugaccucaggugauc

SEQ ID NO: 15644 - RNA, 20 nt, Artificial Sequence
  Antisense oligo
aacugcugaccucaggugau

SEQ ID NO: 15645 - RNA, 20 nt, Artificial Sequence
  Antisense oligo
cgccuggcuaauuuuguauu

SEQ ID NO: 15646 - RNA, 20 nt, Artificial Sequence
  Antisense oligo
acgccuggcuaauuuuguau

SEQ ID NO: 15647 - RNA, 20 nt, Artificial Sequence
  Antisense oligo
cacgccuggcuaauuuugua

SEQ ID NO: 15648 - RNA, 20 nt, Artificial Sequence
  Antisense oligo
ucacgccuggcuaauuuugu

SEQ ID NO: 15649 - RNA, 20 nt, Artificial Sequence
  Antisense oligo
aucacgccuggcuaauuuug

SEQ ID NO: 15650 - RNA, 20 nt, Artificial Sequence
  Antisense oligo
caucacgccuggcuaauuuu

SEQ ID NO: 15651 - RNA, 20 nt, Artificial Sequence
  Antisense oligo
ccaucacgccuggcuaauuu

SEQ ID NO: 15652 - RNA, 20 nt, Artificial Sequence
  Antisense oligo
accaucacgccuggcuaauu

SEQ ID NO: 15653 - RNA, 20 nt, Artificial Sequence
  Antisense oligo
ugggauuacaggcacgcacc

SEQ ID NO: 15654 - RNA, 20 nt, Artificial Sequence
  Antisense oligo
cugggauuacaggcacgcac

SEQ ID NO: 15655 - RNA, 20 nt, Artificial Sequence
  Antisense oligo
gcugggauuacaggcacgca

SEQ ID NO: 15656 - RNA, 20 nt, Artificial Sequence
  Antisense oligo
agcugggauuacaggcacgc

SEQ ID NO: 15657 - RNA, 20 nt, Artificial Sequence
  Antisense oligo
uagcugggauuacaggcacg

SEQ ID NO: 15658 - RNA, 20 nt, Artificial Sequence
  Antisense oligo
guagcugggauuacaggcac

SEQ ID NO: 15659 - RNA, 20 nt, Artificial Sequence
  Antisense oligo
aguagcugggauuacaggca

SEQ ID NO: 15660 - RNA, 20 nt, Artificial Sequence
  Antisense oligo
aaguagcugggauuacaggc

SEQ ID NO: 15661 - RNA, 20 nt, Artificial Sequence
  Antisense oligo
caaguagcugggauuacagg

SEQ ID NO: 15662 - RNA, 20 nt, Artificial Sequence
  Antisense oligo
ccaaguagcugggauuacag

SEQ ID NO: 15663 - RNA, 20 nt, Artificial Sequence
  Antisense oligo
ccucagccucccaaguagcu

SEQ ID NO: 15664 - RNA, 20 nt, Artificial Sequence
  Antisense oligo
ugccucagccucccaaguag

SEQ ID NO: 15665 - RNA, 20 nt, Artificial Sequence
  Antisense oligo
cugccucagccucccaagua

SEQ ID NO: 15666 - RNA, 20 nt, Artificial Sequence
  Antisense oligo
ugauccuccugccucagccu

SEQ ID NO: 15667 - RNA, 20 nt, Artificial Sequence
  Antisense oligo
agugauccuccugccucagc

SEQ ID NO: 15668 - RNA, 20 nt, Artificial Sequence
  Antisense oligo
aagugauccuccugccucag

SEQ ID NO: 15669 - RNA, 20 nt, Artificial Sequence
  Antisense oligo
caagugauccuccugccuca

SEQ ID NO: 15670 - RNA, 20 nt, Artificial Sequence
  Antisense oligo
ucaagugauccuccugccuc

SEQ ID NO: 15671 - RNA, 20 nt, Artificial Sequence
  Antisense oligo
uucaagugauccuccugccu

SEQ ID NO: 15672 - RNA, 20 nt, Artificial Sequence
  Antisense oligo
guucaagugauccuccugcc

SEQ ID NO: 15673 - RNA, 20 nt, Artificial Sequence
  Antisense oligo
gguucaagugauccuccugc

SEQ ID NO: 15674 - RNA, 20 nt, Artificial Sequence
  Antisense oligo
agguucaagugauccuccug

SEQ ID NO: 15675 - RNA, 20 nt, Artificial Sequence
  Antisense oligo
cagguucaagugauccuccu

SEQ ID NO: 15676 - RNA, 20 nt, Artificial Sequence
  Antisense oligo
ccagguucaagugauccucc

SEQ ID NO: 15677 - RNA, 20 nt, Artificial Sequence
  Antisense oligo
cccagguucaagugauccuc

SEQ ID NO: 15678 - RNA, 20 nt, Artificial Sequence
  Antisense oligo
ucccagguucaagugauccu

SEQ ID NO: 15679 - RNA, 20 nt, Artificial Sequence
  Antisense oligo
cucccagguucaagugaucc

SEQ ID NO: 15680 - RNA, 20 nt, Artificial Sequence
  Antisense oligo
ccucccagguucaagugauc

SEQ ID NO: 15681 - RNA, 20 nt, Artificial Sequence
  Antisense oligo
acugcaaccuccaccuccca

SEQ ID NO: 15682 - RNA, 20 nt, Artificial Sequence
  Antisense oligo
ucacugcaaccuccaccucc

SEQ ID NO: 15683 - RNA, 20 nt, Artificial Sequence
  Antisense oligo
cucacugcaaccuccaccuc

SEQ ID NO: 15684 - RNA, 20 nt, Artificial Sequence
  Antisense oligo
gcucacugcaaccuccaccu

SEQ ID NO: 15685 - RNA, 20 nt, Artificial Sequence
  Antisense oligo
uccgcucacugcaaccucca

SEQ ID NO: 15686 - RNA, 20 nt, Artificial Sequence
  Antisense oligo
ucuccgcucacugcaaccuc

SEQ ID NO: 15687 - RNA, 20 nt, Artificial Sequence
  Antisense oligo
ugcccaggcuggaguacagu

SEQ ID NO: 15688 - RNA, 20 nt, Artificial Sequence
  Antisense oligo
uugcccaggcuggaguacag

SEQ ID NO: 15689 - RNA, 20 nt, Artificial Sequence
  Antisense oligo
guugcccaggcuggaguaca

SEQ ID NO: 15690 - RNA, 20 nt, Artificial Sequence
  Antisense oligo
uguugcccaggcuggaguac

SEQ ID NO: 15691 - RNA, 20 nt, Artificial Sequence
  Antisense oligo
uuguugcccaggcuggagua

SEQ ID NO: 15692 - RNA, 20 nt, Artificial Sequence
  Antisense oligo
cuuguugcccaggcuggagu

SEQ ID NO: 15693 - RNA, 20 nt, Artificial Sequence
  Antisense oligo
ucuuguugcccaggcuggag

SEQ ID NO: 15694 - RNA, 20 nt, Artificial Sequence
  Antisense oligo
cucuuguugcccaggcugga

SEQ ID NO: 15695 - RNA, 20 nt, Artificial Sequence
  Antisense oligo
acucuuguugcccaggcugg

SEQ ID NO: 15696 - RNA, 20 nt, Artificial Sequence
  Antisense oligo
cacucuuguugcccaggcug

SEQ ID NO: 15697 - RNA, 20 nt, Artificial Sequence
  Antisense oligo
ucacucuuguugcccaggcu

SEQ ID NO: 15698 - RNA, 20 nt, Artificial Sequence
  Antisense oligo
uucacucuuguugcccaggc

SEQ ID NO: 15699 - RNA, 20 nt, Artificial Sequence
  Antisense oligo
uuucacucuuguugcccagg

SEQ ID NO: 15700 - RNA, 20 nt, Artificial Sequence
  Antisense oligo
guuucacucuuguugcccag

SEQ ID NO: 15701 - RNA, 20 nt, Artificial Sequence
  Antisense oligo
aguuucacucuuguugccca

SEQ ID NO: 15702 - RNA, 20 nt, Artificial Sequence
  Antisense oligo
uuuugagacggaguuucacu

SEQ ID NO: 15703 - RNA, 20 nt, Artificial Sequence
  Antisense oligo
gauuugcacagcauuucacu

SEQ ID NO: 15704 - RNA, 20 nt, Artificial Sequence
  Antisense oligo
agauuugcacagcauuucac

SEQ ID NO: 15705 - RNA, 20 nt, Artificial Sequence
  Antisense oligo
gagauuugcacagcauuuca

SEQ ID NO: 15706 - RNA, 20 nt, Artificial Sequence
  Antisense oligo
ugagauuugcacagcauuuc

SEQ ID NO: 15707 - RNA, 20 nt, Artificial Sequence
  Antisense oligo
gaaugacuugagauuugcac

SEQ ID NO: 15708 - RNA, 20 nt, Artificial Sequence
  Antisense oligo
cuccuuacagaaugacuuga

SEQ ID NO: 15709 - RNA, 20 nt, Artificial Sequence
  Antisense oligo
ccuccuuacagaaugacuug

SEQ ID NO: 15710 - RNA, 20 nt, Artificial Sequence
  Antisense oligo
augccuccuuacagaaugac

SEQ ID NO: 15711 - RNA, 20 nt, Artificial Sequence
  Antisense oligo
aaugccuccuuacagaauga

SEQ ID NO: 15712 - RNA, 20 nt, Artificial Sequence
  Antisense oligo
cccaaaugccuccuuacaga

SEQ ID NO: 15713 - RNA, 20 nt, Artificial Sequence
  Antisense oligo
uggaugguguuucccaaaug

SEQ ID NO: 15714 - RNA, 20 nt, Artificial Sequence
  Antisense oligo
guggaugguguuucccaaau

SEQ ID NO: 15715 - RNA, 20 nt, Artificial Sequence
  Antisense oligo
gguggaugguguuucccaaa

SEQ ID NO: 15716 - RNA, 20 nt, Artificial Sequence
  Antisense oligo
cagguggaugguguuuccca

SEQ ID NO: 15717 - RNA, 20 nt, Artificial Sequence
  Antisense oligo
acagguggaugguguuuccc

SEQ ID NO: 15718 - RNA, 20 nt, Artificial Sequence
  Antisense oligo
aagacagguggaugguguuu

SEQ ID NO: 15719 - RNA, 20 nt, Artificial Sequence
  Antisense oligo
acagaagacagguggauggu

SEQ ID NO: 15720 - RNA, 20 nt, Artificial Sequence
  Antisense oligo
aacagaagacagguggaugg

SEQ ID NO: 15721 - RNA, 20 nt, Artificial Sequence
  Antisense oligo
acgagaaacagaagacaggu

SEQ ID NO: 15722 - RNA, 20 nt, Artificial Sequence
  Antisense oligo
gaacacgagaaacagaagac

SEQ ID NO: 15723 - RNA, 20 nt, Artificial Sequence
  Antisense oligo
agaacacgagaaacagaaga

SEQ ID NO: 15724 - RNA, 20 nt, Artificial Sequence
  Antisense oligo
uagaacacgagaaacagaag

SEQ ID NO: 15725 - RNA, 20 nt, Artificial Sequence
  Antisense oligo
cuuagaacacgagaaacaga

SEQ ID NO: 15726 - RNA, 20 nt, Artificial Sequence
  Antisense oligo
ccuuagaacacgagaaacag

SEQ ID NO: 15727 - RNA, 20 nt, Artificial Sequence
  Antisense oligo
cccuuagaacacgagaaaca

SEQ ID NO: 15728 - RNA, 20 nt, Artificial Sequence
  Antisense oligo
ucccuuagaacacgagaaac

SEQ ID NO: 15729 - RNA, 20 nt, Artificial Sequence
  Antisense oligo
auggcuucccuuagaacacg

SEQ ID NO: 15730 - RNA, 20 nt, Artificial Sequence
  Antisense oligo
caauggcuucccuuagaaca

SEQ ID NO: 15731 - RNA, 20 nt, Artificial Sequence
  Antisense oligo
augcuuuucaauggcuuccc

SEQ ID NO: 15732 - RNA, 20 nt, Artificial Sequence
  Antisense oligo
caugcuuuucaauggcuucc

SEQ ID NO: 15733 - RNA, 20 nt, Artificial Sequence
  Antisense oligo
uugcacaucugccggaagcg

SEQ ID NO: 15734 - RNA, 20 nt, Artificial Sequence
  Antisense oligo
guugcacaucugccggaagc

SEQ ID NO: 15735 - RNA, 20 nt, Artificial Sequence
  Antisense oligo
uguugcacaucugccggaag

SEQ ID NO: 15736 - RNA, 20 nt, Artificial Sequence
  Antisense oligo
cuguugcacaucugccggaa

SEQ ID NO: 15737 - RNA, 20 nt, Artificial Sequence
  Antisense oligo
acuguugcacaucugccgga

SEQ ID NO: 15738 - RNA, 20 nt, Artificial Sequence
  Antisense oligo
aacuguugcacaucugccgg

SEQ ID NO: 15739 - RNA, 20 nt, Artificial Sequence
  Antisense oligo
aaacuguugcacaucugccg

SEQ ID NO: 15740 - RNA, 20 nt, Artificial Sequence
  Antisense oligo
gaaacuguugcacaucugcc

SEQ ID NO: 15741 - RNA, 20 nt, Artificial Sequence
  Antisense oligo
cgaagaaacuguugcacauc

SEQ ID NO: 15742 - RNA, 20 nt, Artificial Sequence
  Antisense oligo
acgaagaaacuguugcacau

SEQ ID NO: 15743 - RNA, 20 nt, Artificial Sequence
  Antisense oligo
uacgaagaaacuguugcaca

SEQ ID NO: 15744 - RNA, 20 nt, Artificial Sequence
  Antisense oligo
gucuacgaagaaacuguugc

SEQ ID NO: 15745 - RNA, 20 nt, Artificial Sequence
  Antisense oligo
ggucuacgaagaaacuguug

SEQ ID NO: 15746 - RNA, 20 nt, Artificial Sequence
  Antisense oligo
aggucuacgaagaaacuguu

SEQ ID NO: 15747 - RNA, 20 nt, Artificial Sequence
  Antisense oligo
caggucuacgaagaaacugu

SEQ ID NO: 15748 - RNA, 20 nt, Artificial Sequence
  Antisense oligo
ccaggucuacgaagaaacug

SEQ ID NO: 15749 - RNA, 20 nt, Artificial Sequence
  Antisense oligo
accaggucuacgaagaaacu

SEQ ID NO: 15750 - RNA, 20 nt, Artificial Sequence
  Antisense oligo
caccaggucuacgaagaaac

SEQ ID NO: 15751 - RNA, 20 nt, Artificial Sequence
  Antisense oligo
acaccaggucuacgaagaaa

SEQ ID NO: 15752 - RNA, 20 nt, Artificial Sequence
  Antisense oligo
ggacaccaggucuacgaaga

SEQ ID NO: 15753 - RNA, 20 nt, Artificial Sequence
  Antisense oligo
uggacaccaggucuacgaag

SEQ ID NO: 15754 - RNA, 20 nt, Artificial Sequence
  Antisense oligo
cuugaagcaaaugguggaca

SEQ ID NO: 15755 - RNA, 20 nt, Artificial Sequence
  Antisense oligo
ccuugaagcaaaugguggac

SEQ ID NO: 15756 - RNA, 20 nt, Artificial Sequence
  Antisense oligo
uguccuugaagcaaauggug

SEQ ID NO: 15757 - RNA, 20 nt, Artificial Sequence
  Antisense oligo
uuguccuugaagcaaauggu

SEQ ID NO: 15758 - RNA, 20 nt, Artificial Sequence
  Antisense oligo
guuguccuugaagcaaaugg

SEQ ID NO: 15759 - RNA, 20 nt, Artificial Sequence
  Antisense oligo
gagcguuguccuugaagcaa

SEQ ID NO: 15760 - RNA, 20 nt, Artificial Sequence
  Antisense oligo
ggagcguuguccuugaagca

SEQ ID NO: 15761 - RNA, 20 nt, Artificial Sequence
  Antisense oligo
cggagcguuguccuugaagc

SEQ ID NO: 15762 - RNA, 20 nt, Artificial Sequence
  Antisense oligo
gcggagcguuguccuugaag

SEQ ID NO: 15763 - RNA, 20 nt, Artificial Sequence
  Antisense oligo
ggcggagcguuguccuugaa

SEQ ID NO: 15764 - RNA, 20 nt, Artificial Sequence
  Antisense oligo
aggcggagcguuguccuuga

SEQ ID NO: 15765 - RNA, 20 nt, Artificial Sequence
  Antisense oligo
ucaggcggagcguuguccuu

SEQ ID NO: 15766 - RNA, 20 nt, Artificial Sequence
  Antisense oligo
uucucaggcggagcguuguc

SEQ ID NO: 15767 - RNA, 20 nt, Artificial Sequence
  Antisense oligo
cuucucaggcggagcguugu

SEQ ID NO: 15768 - RNA, 20 nt, Artificial Sequence
  Antisense oligo
uccuucucaggcggagcguu

SEQ ID NO: 15769 - RNA, 20 nt, Artificial Sequence
  Antisense oligo
uuccuucucaggcggagcgu

SEQ ID NO: 15770 - RNA, 20 nt, Artificial Sequence
  Antisense oligo
acuuccuucucaggcggagc

SEQ ID NO: 15771 - RNA, 20 nt, Artificial Sequence
  Antisense oligo
cacuuccuucucaggcggag

SEQ ID NO: 15772 - RNA, 20 nt, Artificial Sequence
  Antisense oligo
caaucacuuccuucucaggc

SEQ ID NO: 15773 - RNA, 20 nt, Artificial Sequence
  Antisense oligo
ucaaucacuuccuucucagg

SEQ ID NO: 15774 - RNA, 20 nt, Artificial Sequence
  Antisense oligo
ggcucucaaucacuuccuuc

SEQ ID NO: 15775 - RNA, 20 nt, Artificial Sequence
  Antisense oligo
aggcucucaaucacuuccuu

SEQ ID NO: 15776 - RNA, 20 nt, Artificial Sequence
  Antisense oligo
caggcucucaaucacuuccu

SEQ ID NO: 15777 - RNA, 20 nt, Artificial Sequence
  Antisense oligo
uggacgaagaggagagagag

SEQ ID NO: 15778 - RNA, 20 nt, Artificial Sequence
  Antisense oligo
uuuggacgaagaggagagag

SEQ ID NO: 15779 - RNA, 20 nt, Artificial Sequence
  Antisense oligo
uuuuggacgaagaggagaga

SEQ ID NO: 15780 - RNA, 20 nt, Artificial Sequence
  Antisense oligo
cuuuuggacgaagaggagag

SEQ ID NO: 15781 - RNA, 20 nt, Artificial Sequence
  Antisense oligo
ccuuuuggacgaagaggaga

SEQ ID NO: 15782 - RNA, 20 nt, Artificial Sequence
  Antisense oligo
cccuuuuggacgaagaggag

SEQ ID NO: 15783 - RNA, 20 nt, Artificial Sequence
  Antisense oligo
cuacucugggcagcaucucu

SEQ ID NO: 15784 - RNA, 20 nt, Artificial Sequence
  Antisense oligo
ccuacucugggcagcaucuc

SEQ ID NO: 15785 - RNA, 20 nt, Artificial Sequence
  Antisense oligo
accuacucugggcagcaucu

SEQ ID NO: 15786 - RNA, 20 nt, Artificial Sequence
  Antisense oligo
aagcaaccuacucugggcag

SEQ ID NO: 15787 - RNA, 20 nt, Artificial Sequence
  Antisense oligo
gaaagcaaccuacucugggc

SEQ ID NO: 15788 - RNA, 20 nt, Artificial Sequence
  Antisense oligo
gaagaaagcaaccuacucug

SEQ ID NO: 15789 - RNA, 20 nt, Artificial Sequence
  Antisense oligo
ggaagaaagcaaccuacucu

SEQ ID NO: 15790 - RNA, 20 nt, Artificial Sequence
  Antisense oligo
aggaagaaagcaaccuacuc

SEQ ID NO: 15791 - RNA, 20 nt, Artificial Sequence
  Antisense oligo
caggaagaaagcaaccuacu

SEQ ID NO: 15792 - RNA, 20 nt, Artificial Sequence
  Antisense oligo
aagcgagaugaagaaaugag

SEQ ID NO: 15793 - RNA, 20 nt, Artificial Sequence
  Antisense oligo
gaagcgagaugaagaaauga

SEQ ID NO: 15794 - RNA, 20 nt, Artificial Sequence
  Antisense oligo
agaagcgagaugaagaaaug

SEQ ID NO: 15795 - RNA, 20 nt, Artificial Sequence
  Antisense oligo
ugcagaagcgagaugaagaa

SEQ ID NO: 15796 - RNA, 20 nt, Artificial Sequence
  Antisense oligo
augcagaagcgagaugaaga

SEQ ID NO: 15797 - RNA, 20 nt, Artificial Sequence
  Antisense oligo
caugcagaagcgagaugaag

SEQ ID NO: 15798 - RNA, 20 nt, Artificial Sequence
  Antisense oligo
gacaugcagaagcgagauga

SEQ ID NO: 15799 - RNA, 20 nt, Artificial Sequence
  Antisense oligo
gagacaugcagaagcgagau

SEQ ID NO: 15800 - RNA, 20 nt, Artificial Sequence
  Antisense oligo
ugagacaugcagaagcgaga

SEQ ID NO: 15801 - RNA, 20 nt, Artificial Sequence
  Antisense oligo
aguguccuuaaaccagaaag

SEQ ID NO: 15802 - RNA, 20 nt, Artificial Sequence
  Antisense oligo
acaguguccuuaaaccagaa

SEQ ID NO: 15803 - RNA, 20 nt, Artificial Sequence
  Antisense oligo
cacaguguccuuaaaccaga

SEQ ID NO: 15804 - RNA, 20 nt, Artificial Sequence
  Antisense oligo
ucacaguguccuuaaaccag

SEQ ID NO: 15805 - RNA, 20 nt, Artificial Sequence
  Antisense oligo
uucacaguguccuuaaacca

SEQ ID NO: 15806 - RNA, 20 nt, Artificial Sequence
  Antisense oligo
guucacaguguccuuaaacc

SEQ ID NO: 15807 - RNA, 20 nt, Artificial Sequence
  Antisense oligo
uguucacaguguccuuaaac

SEQ ID NO: 15808 - RNA, 20 nt, Artificial Sequence
  Antisense oligo
guguucacaguguccuuaaa

SEQ ID NO: 15809 - RNA, 20 nt, Artificial Sequence
  Antisense oligo
gaauggagagagagauuuug

SEQ ID NO: 15810 - RNA, 20 nt, Artificial Sequence
  Antisense oligo
caucauugaauggagagaga

SEQ ID NO: 15811 - RNA, 20 nt, Artificial Sequence
  Antisense oligo
caacaucauugaauggagag

SEQ ID NO: 15812 - RNA, 20 nt, Artificial Sequence
  Antisense oligo
cacaacaucauugaauggag

SEQ ID NO: 15813 - RNA, 20 nt, Artificial Sequence
  Antisense oligo
uccacaacaucauugaaugg

SEQ ID NO: 15814 - RNA, 20 nt, Artificial Sequence
  Antisense oligo
gagucuuauccacaacauca

SEQ ID NO: 15815 - RNA, 20 nt, Artificial Sequence
  Antisense oligo
ggagucuuauccacaacauc

SEQ ID NO: 15816 - RNA, 20 nt, Artificial Sequence
  Antisense oligo
aggagucuuauccacaacau

SEQ ID NO: 15817 - RNA, 20 nt, Artificial Sequence
  Antisense oligo
caggagucuuauccacaaca

SEQ ID NO: 15818 - RNA, 20 nt, Artificial Sequence
  Antisense oligo
gacaggagucuuauccacaa

SEQ ID NO: 15819 - RNA, 20 nt, Artificial Sequence
  Antisense oligo
ugacaggagucuuauccaca

SEQ ID NO: 15820 - RNA, 20 nt, Artificial Sequence
  Antisense oligo
augacaggagucuuauccac

SEQ ID NO: 15821 - RNA, 20 nt, Artificial Sequence
  Antisense oligo
gaugacaggagucuuaucca

SEQ ID NO: 15822 - RNA, 20 nt, Artificial Sequence
  Antisense oligo
cggaugacaggagucuuauc

SEQ ID NO: 15823 - RNA, 20 nt, Artificial Sequence
  Antisense oligo
gcggaugacaggagucuuau

SEQ ID NO: 15824 - RNA, 20 nt, Artificial Sequence
  Antisense oligo
agcggaugacaggagucuua

SEQ ID NO: 15825 - RNA, 20 nt, Artificial Sequence
  Antisense oligo
gagcggaugacaggagucuu

SEQ ID NO: 15826 - RNA, 20 nt, Artificial Sequence
  Antisense oligo
ugagcggaugacaggagucu

SEQ ID NO: 15827 - RNA, 20 nt, Artificial Sequence
  Antisense oligo
cugagcggaugacaggaguc

SEQ ID NO: 15828 - RNA, 20 nt, Artificial Sequence
  Antisense oligo
acugagcggaugacaggagu

SEQ ID NO: 15829 - RNA, 20 nt, Artificial Sequence
  Antisense oligo
aucacugagcggaugacagg

SEQ ID NO: 15830 - RNA, 20 nt, Artificial Sequence
  Antisense oligo
uaucacugagcggaugacag

SEQ ID NO: 15831 - RNA, 20 nt, Artificial Sequence
  Antisense oligo
guaucacugagcggaugaca

SEQ ID NO: 15832 - RNA, 20 nt, Artificial Sequence
  Antisense oligo
aguaucacugagcggaugac

SEQ ID NO: 15833 - RNA, 20 nt, Artificial Sequence
  Antisense oligo
accuguacuucaaaagcagu

SEQ ID NO: 15834 - RNA, 20 nt, Artificial Sequence
  Antisense oligo
ccauguuguucuuaccugua

SEQ ID NO: 15835 - RNA, 20 nt, Artificial Sequence
  Antisense oligo
uccauguuguucuuaccugu

SEQ ID NO: 15836 - RNA, 20 nt, Artificial Sequence
  Antisense oligo
cuccauguuguucuuaccug

SEQ ID NO: 15837 - RNA, 20 nt, Artificial Sequence
  Antisense oligo
ucuccauguuguucuuaccu

SEQ ID NO: 15838 - RNA, 20 nt, Artificial Sequence
  Antisense oligo
gucuccauguuguucuuacc

SEQ ID NO: 15839 - RNA, 20 nt, Artificial Sequence
  Antisense oligo
agucuccauguuguucuuac

SEQ ID NO: 15840 - RNA, 20 nt, Artificial Sequence
  Antisense oligo
aagcaagucuccauguuguu

SEQ ID NO: 15841 - RNA, 20 nt, Artificial Sequence
  Antisense oligo
gaagcaagucuccauguugu

SEQ ID NO: 15842 - RNA, 20 nt, Artificial Sequence
  Antisense oligo
agaagcaagucuccauguug

SEQ ID NO: 15843 - RNA, 20 nt, Artificial Sequence
  Antisense oligo
cagaagcaagucuccauguu

SEQ ID NO: 15844 - RNA, 20 nt, Artificial Sequence
  Antisense oligo
ccagaagcaagucuccaugu

SEQ ID NO: 15845 - RNA, 20 nt, Artificial Sequence
  Antisense oligo
uuuccagaagcaagucucca

SEQ ID NO: 15846 - RNA, 20 nt, Artificial Sequence
  Antisense oligo
cuuuccagaagcaagucucc

SEQ ID NO: 15847 - RNA, 20 nt, Artificial Sequence
  Antisense oligo
acgcugcgaugaagagaaaa

SEQ ID NO: 15848 - RNA, 20 nt, Artificial Sequence
  Antisense oligo
aacgcugcgaugaagagaaa

SEQ ID NO: 15849 - RNA, 20 nt, Artificial Sequence
  Antisense oligo
aaacgcugcgaugaagagaa

SEQ ID NO: 15850 - RNA, 20 nt, Artificial Sequence
  Antisense oligo
aaaacgcugcgaugaagaga

SEQ ID NO: 15851 - RNA, 20 nt, Artificial Sequence
  Antisense oligo
caaaacgcugcgaugaagag

SEQ ID NO: 15852 - RNA, 20 nt, Artificial Sequence
  Antisense oligo
acaaaacgcugcgaugaaga

SEQ ID NO: 15853 - RNA, 20 nt, Artificial Sequence
  Antisense oligo
aacaaaacgcugcgaugaag

SEQ ID NO: 15854 - RNA, 20 nt, Artificial Sequence
  Antisense oligo
uaacaaaacgcugcgaugaa

SEQ ID NO: 15855 - RNA, 20 nt, Artificial Sequence
  Antisense oligo
guaacaaaacgcugcgauga

SEQ ID NO: 15856 - RNA, 20 nt, Artificial Sequence
  Antisense oligo
gguaacaaaacgcugcgaug

SEQ ID NO: 15857 - RNA, 20 nt, Artificial Sequence
  Antisense oligo
ugguaacaaaacgcugcgau

SEQ ID NO: 15858 - RNA, 20 nt, Artificial Sequence
  Antisense oligo
uugguaacaaaacgcugcga

SEQ ID NO: 15859 - RNA, 20 nt, Artificial Sequence
  Antisense oligo
cuugguaacaaaacgcugcg

SEQ ID NO: 15860 - RNA, 20 nt, Artificial Sequence
  Antisense oligo
acuugguaacaaaacgcugc

SEQ ID NO: 15861 - RNA, 20 nt, Artificial Sequence
  Antisense oligo
gacuugguaacaaaacgcug

SEQ ID NO: 15862 - RNA, 20 nt, Artificial Sequence
  Antisense oligo
agacuugguaacaaaacgcu

SEQ ID NO: 15863 - RNA, 20 nt, Artificial Sequence
  Antisense oligo
aagacuugguaacaaaacgc

SEQ ID NO: 15864 - RNA, 20 nt, Artificial Sequence
  Antisense oligo
aggcugugucucaccgaaaa

SEQ ID NO: 15865 - RNA, 20 nt, Artificial Sequence
  Antisense oligo
caggcugugucucaccgaaa

SEQ ID NO: 15866 - RNA, 20 nt, Artificial Sequence
  Antisense oligo
accaggcugugucucaccga

SEQ ID NO: 15867 - RNA, 20 nt, Artificial Sequence
  Antisense oligo
aaccaggcugugucucaccg

SEQ ID NO: 15868 - RNA, 20 nt, Artificial Sequence
  Antisense oligo
acaaguaaccaggcuguguc

SEQ ID NO: 15869 - RNA, 20 nt, Artificial Sequence
  Antisense oligo
uacaaguaaccaggcugugu

SEQ ID NO: 15870 - RNA, 20 nt, Artificial Sequence
  Antisense oligo
guacaaguaaccaggcugug

SEQ ID NO: 15871 - RNA, 20 nt, Artificial Sequence
  Antisense oligo
aguacaaguaaccaggcugu

SEQ ID NO: 15872 - RNA, 20 nt, Artificial Sequence
  Antisense oligo
caguacaaguaaccaggcug

SEQ ID NO: 15873 - RNA, 20 nt, Artificial Sequence
  Antisense oligo
ccaguacaaguaaccaggcu

SEQ ID NO: 15874 - RNA, 20 nt, Artificial Sequence
  Antisense oligo
accaguacaaguaaccaggc

SEQ ID NO: 15875 - RNA, 20 nt, Artificial Sequence
  Antisense oligo
aaccaguacaaguaaccagg

SEQ ID NO: 15876 - RNA, 20 nt, Artificial Sequence
  Antisense oligo
caaccaguacaaguaaccag

SEQ ID NO: 15877 - RNA, 20 nt, Artificial Sequence
  Antisense oligo
acaaccaguacaaguaacca

SEQ ID NO: 15878 - RNA, 20 nt, Artificial Sequence
  Antisense oligo
cucaugugccuauaugugaa

SEQ ID NO: 15879 - RNA, 20 nt, Artificial Sequence
  Antisense oligo
aacucaugugccuauaugug

SEQ ID NO: 15880 - RNA, 20 nt, Artificial Sequence
  Antisense oligo
ggaauacuaaacucaugugc

SEQ ID NO: 15881 - RNA, 20 nt, Artificial Sequence
  Antisense oligo
gcuugugggaauacuaaacu

SEQ ID NO: 15882 - RNA, 20 nt, Artificial Sequence
  Antisense oligo
ugcuugugggaauacuaaac

SEQ ID NO: 15883 - RNA, 20 nt, Artificial Sequence
  Antisense oligo
gugcuugugggaauacuaaa

SEQ ID NO: 15884 - RNA, 20 nt, Artificial Sequence
  Antisense oligo
ugugcuugugggaauacuaa

SEQ ID NO: 15885 - RNA, 20 nt, Artificial Sequence
  Antisense oligo
gugugcuugugggaauacua

SEQ ID NO: 15886 - RNA, 20 nt, Artificial Sequence
  Antisense oligo
cgugugcuugugggaauacu

SEQ ID NO: 15887 - RNA, 20 nt, Artificial Sequence
  Antisense oligo
gcgugugcuugugggaauac

SEQ ID NO: 15888 - RNA, 20 nt, Artificial Sequence
  Antisense oligo
ugcgugugcuugugggaaua

SEQ ID NO: 15889 - RNA, 20 nt, Artificial Sequence
  Antisense oligo
augcgugugcuugugggaau

SEQ ID NO: 15890 - RNA, 20 nt, Artificial Sequence
  Antisense oligo
agaugcgugugcuuguggga

SEQ ID NO: 15891 - RNA, 20 nt, Artificial Sequence
  Antisense oligo
uagaugcgugugcuuguggg

SEQ ID NO: 15892 - RNA, 20 nt, Artificial Sequence
  Antisense oligo
gcuagaugcgugugcuugug

SEQ ID NO: 15893 - RNA, 20 nt, Artificial Sequence
  Antisense oligo
ugcuagaugcgugugcuugu

SEQ ID NO: 15894 - RNA, 20 nt, Artificial Sequence
  Antisense oligo
uugcuagaugcgugugcuug

SEQ ID NO: 15895 - RNA, 20 nt, Artificial Sequence
  Antisense oligo
cuugcuagaugcgugugcuu

SEQ ID NO: 15896 - RNA, 20 nt, Artificial Sequence
  Antisense oligo
ucuugcuagaugcgugugcu

SEQ ID NO: 15897 - RNA, 20 nt, Artificial Sequence
  Antisense oligo
uucuugcuagaugcgugugc

SEQ ID NO: 15898 - RNA, 20 nt, Artificial Sequence
  Antisense oligo
cuucuugcuagaugcgugug

SEQ ID NO: 15899 - RNA, 20 nt, Artificial Sequence
  Antisense oligo
gcuucuugcuagaugcgugu

SEQ ID NO: 15900 - RNA, 20 nt, Artificial Sequence
  Antisense oligo
ggcuucuugcuagaugcgug

SEQ ID NO: 15901 - RNA, 20 nt, Artificial Sequence
  Antisense oligo
uggcuucuugcuagaugcgu

SEQ ID NO: 15902 - RNA, 20 nt, Artificial Sequence
  Antisense oligo
uuggcuucuugcuagaugcg

SEQ ID NO: 15903 - RNA, 20 nt, Artificial Sequence
  Antisense oligo
guuggcuucuugcuagaugc

SEQ ID NO: 15904 - RNA, 20 nt, Artificial Sequence
  Antisense oligo
uguuggcuucuugcuagaug

SEQ ID NO: 15905 - RNA, 20 nt, Artificial Sequence
  Antisense oligo
cuguuggcuucuugcuagau

SEQ ID NO: 15906 - RNA, 20 nt, Artificial Sequence
  Antisense oligo
acuguuggcuucuugcuaga

SEQ ID NO: 15907 - RNA, 20 nt, Artificial Sequence
  Antisense oligo
cacuguuggcuucuugcuag

SEQ ID NO: 15908 - RNA, 20 nt, Artificial Sequence
  Antisense oligo
gcacuguuggcuucuugcua

SEQ ID NO: 15909 - RNA, 20 nt, Artificial Sequence
  Antisense oligo
acggcacuguuggcuucuug

SEQ ID NO: 15910 - RNA, 20 nt, Artificial Sequence
  Antisense oligo
cacggcacuguuggcuucuu

SEQ ID NO: 15911 - RNA, 20 nt, Artificial Sequence
  Antisense oligo
ucacggcacuguuggcuucu

SEQ ID NO: 15912 - RNA, 20 nt, Artificial Sequence
  Antisense oligo
uucacggcacuguuggcuuc

SEQ ID NO: 15913 - RNA, 20 nt, Artificial Sequence
  Antisense oligo
cuucacggcacuguuggcuu

SEQ ID NO: 15914 - RNA, 20 nt, Artificial Sequence
  Antisense oligo
ccuucacggcacuguuggcu

SEQ ID NO: 15915 - RNA, 20 nt, Artificial Sequence
  Antisense oligo
ucccuucacggcacuguugg

SEQ ID NO: 15916 - RNA, 20 nt, Artificial Sequence
  Antisense oligo
ccucuugaguuccauguccc

SEQ ID NO: 15917 - RNA, 20 nt, Artificial Sequence
  Antisense oligo
gccucuugaguuccaugucc

SEQ ID NO: 15918 - RNA, 20 nt, Artificial Sequence
  Antisense oligo
ggccucuugaguuccauguc

SEQ ID NO: 15919 - RNA, 20 nt, Artificial Sequence
  Antisense oligo
ucuggccucuugaguuccau

SEQ ID NO: 15920 - RNA, 20 nt, Artificial Sequence
  Antisense oligo
uucuggccucuugaguucca

SEQ ID NO: 15921 - RNA, 20 nt, Artificial Sequence
  Antisense oligo
agauucuggccucuugaguu

SEQ ID NO: 15922 - RNA, 20 nt, Artificial Sequence
  Antisense oligo
acagauucuggccucuugag

SEQ ID NO: 15923 - RNA, 20 nt, Artificial Sequence
  Antisense oligo
cacagauucuggccucuuga

SEQ ID NO: 15924 - RNA, 20 nt, Artificial Sequence
  Antisense oligo
accacagauucuggccucuu

SEQ ID NO: 15925 - RNA, 20 nt, Artificial Sequence
  Antisense oligo
caccacagauucuggccucu

SEQ ID NO: 15926 - RNA, 20 nt, Artificial Sequence
  Antisense oligo
gcaccacagauucuggccuc

SEQ ID NO: 15927 - RNA, 20 nt, Artificial Sequence
  Antisense oligo
cagcaccacagauucuggcc

SEQ ID NO: 15928 - RNA, 20 nt, Artificial Sequence
  Antisense oligo
ucagcaccacagauucuggc

SEQ ID NO: 15929 - RNA, 20 nt, Artificial Sequence
  Antisense oligo
cucagcaccacagauucugg

SEQ ID NO: 15930 - RNA, 20 nt, Artificial Sequence
  Antisense oligo
gcucagcaccacagauucug

SEQ ID NO: 15931 - RNA, 20 nt, Artificial Sequence
  Antisense oligo
ggcucagcaccacagauucu

SEQ ID NO: 15932 - RNA, 20 nt, Artificial Sequence
  Antisense oligo
uguggaaccaggcucagcac

SEQ ID NO: 15933 - RNA, 20 nt, Artificial Sequence
  Antisense oligo
ugcuguggaaccaggcucag

SEQ ID NO: 15934 - RNA, 20 nt, Artificial Sequence
  Antisense oligo
guugcgcugcuguggaacca

SEQ ID NO: 15935 - RNA, 20 nt, Artificial Sequence
  Antisense oligo
aguugcgcugcuguggaacc

SEQ ID NO: 15936 - RNA, 20 nt, Artificial Sequence
  Antisense oligo
aaguugcgcugcuguggaac

SEQ ID NO: 15937 - RNA, 20 nt, Artificial Sequence
  Antisense oligo
aaaguugcgcugcuguggaa

SEQ ID NO: 15938 - RNA, 20 nt, Artificial Sequence
  Antisense oligo
gaaaguugcgcugcugugga

SEQ ID NO: 15939 - RNA, 20 nt, Artificial Sequence
  Antisense oligo
agaaaguugcgcugcugugg

SEQ ID NO: 15940 - RNA, 20 nt, Artificial Sequence
  Antisense oligo
cagaaaguugcgcugcugug

SEQ ID NO: 15941 - RNA, 20 nt, Artificial Sequence
  Antisense oligo
ucagaaaguugcgcugcugu

SEQ ID NO: 15942 - RNA, 20 nt, Artificial Sequence
  Antisense oligo
aucagaaaguugcgcugcug

SEQ ID NO: 15943 - RNA, 20 nt, Artificial Sequence
  Antisense oligo
aaucagaaaguugcgcugcu

SEQ ID NO: 15944 - RNA, 20 nt, Artificial Sequence
  Antisense oligo
aaaucagaaaguugcgcugc

SEQ ID NO: 15945 - RNA, 20 nt, Artificial Sequence
  Antisense oligo
aaaaucagaaaguugcgcug

SEQ ID NO: 15946 - RNA, 20 nt, Artificial Sequence
  Antisense oligo
gauucuaagcuaccaucuga

SEQ ID NO: 15947 - RNA, 20 nt, Artificial Sequence
  Antisense oligo
ggauucuaagcuaccaucug

SEQ ID NO: 15948 - RNA, 20 nt, Artificial Sequence
  Antisense oligo
aggauucuaagcuaccaucu

SEQ ID NO: 15949 - RNA, 20 nt, Artificial Sequence
  Antisense oligo
caggauucuaagcuaccauc

SEQ ID NO: 15950 - RNA, 20 nt, Artificial Sequence
  Antisense oligo
gcaggauucuaagcuaccau

SEQ ID NO: 15951 - RNA, 20 nt, Artificial Sequence
  Antisense oligo
agcaggauucuaagcuacca

SEQ ID NO: 15952 - RNA, 20 nt, Artificial Sequence
  Antisense oligo
gagcaggauucuaagcuacc

SEQ ID NO: 15953 - RNA, 20 nt, Artificial Sequence
  Antisense oligo
ugagcaggauucuaagcuac

SEQ ID NO: 15954 - RNA, 20 nt, Artificial Sequence
  Antisense oligo
gugagcaggauucuaagcua

SEQ ID NO: 15955 - RNA, 20 nt, Artificial Sequence
  Antisense oligo
ggugagcaggauucuaagcu

SEQ ID NO: 15956 - RNA, 20 nt, Artificial Sequence
  Antisense oligo
gggugagcaggauucuaagc

SEQ ID NO: 15957 - RNA, 20 nt, Artificial Sequence
  Antisense oligo
agggugagcaggauucuaag

SEQ ID NO: 15958 - RNA, 20 nt, Artificial Sequence
  Antisense oligo
ucagggugagcaggauucua

SEQ ID NO: 15959 - RNA, 20 nt, Artificial Sequence
  Antisense oligo
uucagggugagcaggauucu

SEQ ID NO: 15960 - RNA, 20 nt, Artificial Sequence
  Antisense oligo
auucagggugagcaggauuc

SEQ ID NO: 15961 - RNA, 20 nt, Artificial Sequence
  Antisense oligo
cauucagggugagcaggauu

SEQ ID NO: 15962 - RNA, 20 nt, Artificial Sequence
  Antisense oligo
acauucagggugagcaggau

SEQ ID NO: 15963 - RNA, 20 nt, Artificial Sequence
  Antisense oligo
gacauucagggugagcagga

SEQ ID NO: 15964 - RNA, 20 nt, Artificial Sequence
  Antisense oligo
aggacauucagggugagcag

SEQ ID NO: 15965 - RNA, 20 nt, Artificial Sequence
  Antisense oligo
cuaggacauucagggugagc

SEQ ID NO: 15966 - RNA, 20 nt, Artificial Sequence
  Antisense oligo
caucuaggacauucagggug

SEQ ID NO: 15967 - RNA, 20 nt, Artificial Sequence
  Antisense oligo
acaucuaggacauucagggu

SEQ ID NO: 15968 - RNA, 20 nt, Artificial Sequence
  Antisense oligo
gacaucuaggacauucaggg

SEQ ID NO: 15969 - RNA, 20 nt, Artificial Sequence
  Antisense oligo
agacaucuaggacauucagg

SEQ ID NO: 15970 - RNA, 20 nt, Artificial Sequence
  Antisense oligo
gagacaucuaggacauucag

SEQ ID NO: 15971 - RNA, 20 nt, Artificial Sequence
  Antisense oligo
ggagacaucuaggacauuca

SEQ ID NO: 15972 - RNA, 20 nt, Artificial Sequence
  Antisense oligo
aggagacaucuaggacauuc

SEQ ID NO: 15973 - RNA, 20 nt, Artificial Sequence
  Antisense oligo
acuuaggagacaucuaggac

SEQ ID NO: 15974 - RNA, 20 nt, Artificial Sequence
  Antisense oligo
aacuuaggagacaucuagga

SEQ ID NO: 15975 - RNA, 20 nt, Artificial Sequence
  Antisense oligo
gaaacuuaggagacaucuag

SEQ ID NO: 15976 - RNA, 20 nt, Artificial Sequence
  Antisense oligo
gggaauagaaacuuaggaga

SEQ ID NO: 15977 - RNA, 20 nt, Artificial Sequence
  Antisense oligo
aauagagcccauguucaggg

SEQ ID NO: 15978 - RNA, 20 nt, Artificial Sequence
  Antisense oligo
aaauagagcccauguucagg

SEQ ID NO: 15979 - RNA, 20 nt, Artificial Sequence
  Antisense oligo
gaaauagagcccauguucag

SEQ ID NO: 15980 - RNA, 20 nt, Artificial Sequence
  Antisense oligo
ccaaggaaauagagcccaug

SEQ ID NO: 15981 - RNA, 20 nt, Artificial Sequence
  Antisense oligo
uccaaggaaauagagcccau

SEQ ID NO: 15982 - RNA, 20 nt, Artificial Sequence
  Antisense oligo
augucaacauccuuuccaag

SEQ ID NO: 15983 - RNA, 20 nt, Artificial Sequence
  Antisense oligo
ggugauacuauucuuggaug

SEQ ID NO: 15984 - RNA, 20 nt, Artificial Sequence
  Antisense oligo
caggugauacuauucuugga

SEQ ID NO: 15985 - RNA, 20 nt, Artificial Sequence
  Antisense oligo
acaggugauacuauucuugg

SEQ ID NO: 15986 - RNA, 20 nt, Artificial Sequence
  Antisense oligo
cacaggugauacuauucuug

SEQ ID NO: 15987 - RNA, 20 nt, Artificial Sequence
  Antisense oligo
uaccacaggugauacuauuc

SEQ ID NO: 15988 - RNA, 20 nt, Artificial Sequence
  Antisense oligo
guaccacaggugauacuauu

SEQ ID NO: 15989 - RNA, 20 nt, Artificial Sequence
  Antisense oligo
acaaguaccacaggugauac

SEQ ID NO: 15990 - RNA, 20 nt, Artificial Sequence
  Antisense oligo
uacaaguaccacaggugaua

SEQ ID NO: 15991 - RNA, 20 nt, Artificial Sequence
  Antisense oligo
gauccauacaaguaccacag

SEQ ID NO: 15992 - RNA, 20 nt, Artificial Sequence
  Antisense oligo
agauccauacaaguaccaca

SEQ ID NO: 15993 - RNA, 20 nt, Artificial Sequence
  Antisense oligo
caacacuuugagaacugcaa

SEQ ID NO: 15994 - RNA, 20 nt, Artificial Sequence
  Antisense oligo
ccaacacuuugagaacugca

SEQ ID NO: 15995 - RNA, 20 nt, Artificial Sequence
  Antisense oligo
cauaccaacacuuugagaac

SEQ ID NO: 15996 - RNA, 20 nt, Artificial Sequence
  Antisense oligo
ggguccauaccaacacuuug

SEQ ID NO: 15997 - RNA, 20 nt, Artificial Sequence
  Antisense oligo
aggguccauaccaacacuuu

SEQ ID NO: 15998 - RNA, 20 nt, Artificial Sequence
  Antisense oligo
aaggguccauaccaacacuu

SEQ ID NO: 15999 - RNA, 20 nt, Artificial Sequence
  Antisense oligo
caaggguccauaccaacacu

SEQ ID NO: 16000 - RNA, 20 nt, Artificial Sequence
  Antisense oligo
acccaaggguccauaccaac

SEQ ID NO: 16001 - RNA, 20 nt, Artificial Sequence
  Antisense oligo
cacccaaggguccauaccaa

SEQ ID NO: 16002 - RNA, 20 nt, Artificial Sequence
  Antisense oligo
acacccaaggguccauacca

SEQ ID NO: 16003 - RNA, 20 nt, Artificial Sequence
  Antisense oligo
cacacccaaggguccauacc

SEQ ID NO: 16004 - RNA, 20 nt, Artificial Sequence
  Antisense oligo
ucacacccaaggguccauac

SEQ ID NO: 16005 - RNA, 20 nt, Artificial Sequence
  Antisense oligo
cucacacccaaggguccaua

SEQ ID NO: 16006 - RNA, 20 nt, Artificial Sequence
  Antisense oligo
ccucacacccaaggguccau

SEQ ID NO: 16007 - RNA, 20 nt, Artificial Sequence
  Antisense oligo
accucacacccaagggucca

SEQ ID NO: 16008 - RNA, 20 nt, Artificial Sequence
  Antisense oligo
cuaccucacacccaaggguc

SEQ ID NO: 16009 - RNA, 20 nt, Artificial Sequence
  Antisense oligo
ccuaccucacacccaagggu

SEQ ID NO: 16010 - RNA, 20 nt, Artificial Sequence
  Antisense oligo
gaccuaccucacacccaagg

SEQ ID NO: 16011 - RNA, 20 nt, Artificial Sequence
  Antisense oligo
agaccuaccucacacccaag

SEQ ID NO: 16012 - RNA, 20 nt, Artificial Sequence
  Antisense oligo
gagaccuaccucacacccaa

SEQ ID NO: 16013 - RNA, 20 nt, Artificial Sequence
  Antisense oligo
agagaccuaccucacaccca

SEQ ID NO: 16014 - RNA, 20 nt, Artificial Sequence
  Antisense oligo
cagagaccuaccucacaccc

SEQ ID NO: 16015 - RNA, 20 nt, Artificial Sequence
  Antisense oligo
cucagagaccuaccucacac

SEQ ID NO: 16016 - RNA, 20 nt, Artificial Sequence
  Antisense oligo
accucagagaccuaccucac

SEQ ID NO: 16017 - RNA, 20 nt, Artificial Sequence
  Antisense oligo
aaccucagagaccuaccuca

SEQ ID NO: 16018 - RNA, 20 nt, Artificial Sequence
  Antisense oligo
uaaccucagagaccuaccuc

SEQ ID NO: 16019 - RNA, 20 nt, Artificial Sequence
  Antisense oligo
uuaaccucagagaccuaccu

SEQ ID NO: 16020 - RNA, 20 nt, Artificial Sequence
  Antisense oligo
uuuaaccucagagaccuacc

SEQ ID NO: 16021 - RNA, 20 nt, Artificial Sequence
  Antisense oligo
guuuuaaccucagagaccua

SEQ ID NO: 16022 - RNA, 20 nt, Artificial Sequence
  Antisense oligo
aguuuuaaccucagagaccu

SEQ ID NO: 16023 - RNA, 20 nt, Artificial Sequence
  Antisense oligo
uaguuuuaaccucagagacc

SEQ ID NO: 16024 - RNA, 20 nt, Artificial Sequence
  Antisense oligo
guuuaacucaucaccgcuuu

SEQ ID NO: 16025 - RNA, 20 nt, Artificial Sequence
  Antisense oligo
aguuuaacucaucaccgcuu

SEQ ID NO: 16026 - RNA, 20 nt, Artificial Sequence
  Antisense oligo
caguuuaacucaucaccgcu

SEQ ID NO: 16027 - RNA, 20 nt, Artificial Sequence
  Antisense oligo
gcaguuuaacucaucaccgc

SEQ ID NO: 16028 - RNA, 20 nt, Artificial Sequence
  Antisense oligo
agcaguuuaacucaucaccg

SEQ ID NO: 16029 - RNA, 20 nt, Artificial Sequence
  Antisense oligo
ccagcaguuuaacucaucac

SEQ ID NO: 16030 - RNA, 20 nt, Artificial Sequence
  Antisense oligo
ggccagcaguuuaacucauc

SEQ ID NO: 16031 - RNA, 20 nt, Artificial Sequence
  Antisense oligo
gggccagcaguuuaacucau

SEQ ID NO: 16032 - RNA, 20 nt, Artificial Sequence
  Antisense oligo
cagcuacugugucuucacgu

SEQ ID NO: 16033 - RNA, 20 nt, Artificial Sequence
  Antisense oligo
ccagcuacugugucuucacg

SEQ ID NO: 16034 - RNA, 20 nt, Artificial Sequence
  Antisense oligo
cuccagcuacugugucuuca

SEQ ID NO: 16035 - RNA, 20 nt, Artificial Sequence
  Antisense oligo
accuccagcuacugugucuu

SEQ ID NO: 16036 - RNA, 20 nt, Artificial Sequence
  Antisense oligo
uaccuccagcuacugugucu

SEQ ID NO: 16037 - RNA, 20 nt, Artificial Sequence
  Antisense oligo
gcauggcggugaagaaaaca

SEQ ID NO: 16038 - RNA, 20 nt, Artificial Sequence
  Antisense oligo
ugcauggcggugaagaaaac

SEQ ID NO: 16039 - RNA, 20 nt, Artificial Sequence
  Antisense oligo
gugcauggcggugaagaaaa

SEQ ID NO: 16040 - RNA, 20 nt, Artificial Sequence
  Antisense oligo
ugugcauggcggugaagaaa

SEQ ID NO: 16041 - RNA, 20 nt, Artificial Sequence
  Antisense oligo
cgugugcauggcggugaaga

SEQ ID NO: 16042 - RNA, 20 nt, Artificial Sequence
  Antisense oligo
acgugugcauggcggugaag

SEQ ID NO: 16043 - RNA, 20 nt, Artificial Sequence
  Antisense oligo
caaauccucaagagucaaga

SEQ ID NO: 16044 - RNA, 20 nt, Artificial Sequence
  Antisense oligo
ucaaauccucaagagucaag

SEQ ID NO: 16045 - RNA, 20 nt, Artificial Sequence
  Antisense oligo
gucaaauccucaagagucaa

SEQ ID NO: 16046 - RNA, 20 nt, Artificial Sequence
  Antisense oligo
agucaaauccucaagaguca

SEQ ID NO: 16047 - RNA, 20 nt, Artificial Sequence
  Antisense oligo
guguuuugugugugcuuccc

SEQ ID NO: 16048 - RNA, 20 nt, Artificial Sequence
  Antisense oligo
gugggaguguuuugugugug

SEQ ID NO: 16049 - RNA, 20 nt, Artificial Sequence
  Antisense oligo
uagugggaguguuuugugug

SEQ ID NO: 16050 - RNA, 20 nt, Artificial Sequence
  Antisense oligo
guagugggaguguuuugugu

SEQ ID NO: 16051 - RNA, 20 nt, Artificial Sequence
  Antisense oligo
uguagugggaguguuuugug

SEQ ID NO: 16052 - RNA, 20 nt, Artificial Sequence
  Antisense oligo
guguagugggaguguuuugu

SEQ ID NO: 16053 - RNA, 20 nt, Artificial Sequence
  Antisense oligo
ugaggcaacugucuacuccg

SEQ ID NO: 16054 - RNA, 20 nt, Artificial Sequence
  Antisense oligo
gugaggcaacugucuacucc

SEQ ID NO: 16055 - RNA, 20 nt, Artificial Sequence
  Antisense oligo
ugugaggcaacugucuacuc

SEQ ID NO: 16056 - RNA, 20 nt, Artificial Sequence
  Antisense oligo
cugugaggcaacugucuacu

SEQ ID NO: 16057 - RNA, 20 nt, Artificial Sequence
  Antisense oligo
uucugugaggcaacugucua

SEQ ID NO: 16058 - RNA, 20 nt, Artificial Sequence
  Antisense oligo
gauuuucugugaggcaacug

SEQ ID NO: 16059 - RNA, 20 nt, Artificial Sequence
  Antisense oligo
ugauuuucugugaggcaacu

SEQ ID NO: 16060 - RNA, 20 nt, Artificial Sequence
  Antisense oligo
gagugauuuucugugaggca

SEQ ID NO: 16061 - RNA, 20 nt, Artificial Sequence
  Antisense oligo
ugauaacccagggcuuguca

SEQ ID NO: 16062 - RNA, 20 nt, Artificial Sequence
  Antisense oligo
cugauaacccagggcuuguc

SEQ ID NO: 16063 - RNA, 20 nt, Artificial Sequence
  Antisense oligo
gcugauaacccagggcuugu

SEQ ID NO: 16064 - RNA, 20 nt, Artificial Sequence
  Antisense oligo
ggcugauaacccagggcuug

SEQ ID NO: 16065 - RNA, 20 nt, Artificial Sequence
  Antisense oligo
cggcugauaacccagggcuu

SEQ ID NO: 16066 - RNA, 20 nt, Artificial Sequence
  Antisense oligo
ugugcauccuuccucccagc

SEQ ID NO: 16067 - RNA, 20 nt, Artificial Sequence
  Antisense oligo
accuguaucaugugcauccu

SEQ ID NO: 16068 - RNA, 20 nt, Artificial Sequence
  Antisense oligo
caccuguaucaugugcaucc

SEQ ID NO: 16069 - RNA, 20 nt, Artificial Sequence
  Antisense oligo
gacaccuguaucaugugcau

SEQ ID NO: 16070 - RNA, 20 nt, Artificial Sequence
  Antisense oligo
ggacaccuguaucaugugca

SEQ ID NO: 16071 - RNA, 20 nt, Artificial Sequence
  Antisense oligo
uggacaccuguaucaugugc

SEQ ID NO: 16072 - RNA, 20 nt, Artificial Sequence
  Antisense oligo
cuggacaccuguaucaugug

SEQ ID NO: 16073 - RNA, 20 nt, Artificial Sequence
  Antisense oligo
ccuggacaccuguaucaugu

SEQ ID NO: 16074 - RNA, 20 nt, Artificial Sequence
  Antisense oligo
cccuggacaccuguaucaug

SEQ ID NO: 16075 - RNA, 20 nt, Artificial Sequence
  Antisense oligo
gcccuggacaccuguaucau

SEQ ID NO: 16076 - RNA, 20 nt, Artificial Sequence
  Antisense oligo
agcccuggacaccuguauca

SEQ ID NO: 16077 - RNA, 20 nt, Artificial Sequence
  Antisense oligo
cuuugcugauuuccaggaga

SEQ ID NO: 16078 - RNA, 20 nt, Artificial Sequence
  Antisense oligo
cacuuugcugauuuccagga

SEQ ID NO: 16079 - RNA, 20 nt, Artificial Sequence
  Antisense oligo
cucacuuugcugauuuccag

SEQ ID NO: 16080 - RNA, 20 nt, Artificial Sequence
  Antisense oligo
ggcuggcucacuuugcugau

SEQ ID NO: 16081 - RNA, 20 nt, Artificial Sequence
  Antisense oligo
caguuguuuggcugaggcug

SEQ ID NO: 16082 - RNA, 20 nt, Artificial Sequence
  Antisense oligo
accaaccaacauugucaguu

SEQ ID NO: 16083 - RNA, 20 nt, Artificial Sequence
  Antisense oligo
ucaccaaccaacauugucag

SEQ ID NO: 16084 - RNA, 20 nt, Artificial Sequence
  Antisense oligo
ucaucaccaaccaacauugu

SEQ ID NO: 16085 - RNA, 20 nt, Artificial Sequence
  Antisense oligo
aucaucaccaaccaacauug

SEQ ID NO: 16086 - RNA, 20 nt, Artificial Sequence
  Antisense oligo
guuaucaucaccaaccaaca

SEQ ID NO: 16087 - RNA, 20 nt, Artificial Sequence
  Antisense oligo
uguuaucaucaccaaccaac

SEQ ID NO: 16088 - RNA, 20 nt, Artificial Sequence
  Antisense oligo
gcuugaauguuaucaucacc

SEQ ID NO: 16089 - RNA, 20 nt, Artificial Sequence
  Antisense oligo
caagcucauaguggagaaua

SEQ ID NO: 16090 - RNA, 20 nt, Artificial Sequence
  Antisense oligo
acaagcucauaguggagaau

SEQ ID NO: 16091 - RNA, 20 nt, Artificial Sequence
  Antisense oligo
gcucacaagcucauagugga

SEQ ID NO: 16092 - RNA, 20 nt, Artificial Sequence
  Antisense oligo
guauucaaaagcucacaagc

SEQ ID NO: 16093 - RNA, 20 nt, Artificial Sequence
  Antisense oligo
gcaggucuuguaaagguuga

SEQ ID NO: 16094 - RNA, 20 nt, Artificial Sequence
  Antisense oligo
ugcaggucuuguaaagguug

SEQ ID NO: 16095 - RNA, 20 nt, Artificial Sequence
  Antisense oligo
gugcaggucuuguaaagguu

SEQ ID NO: 16096 - RNA, 20 nt, Artificial Sequence
  Antisense oligo
aucaggcauuggucauuugg

SEQ ID NO: 16097 - RNA, 20 nt, Artificial Sequence
  Antisense oligo
caucaggcauuggucauuug

SEQ ID NO: 16098 - RNA, 20 nt, Artificial Sequence
  Antisense oligo
acaucaggcauuggucauuu

SEQ ID NO: 16099 - RNA, 20 nt, Artificial Sequence
  Antisense oligo
gacaucaggcauuggucauu

SEQ ID NO: 16100 - RNA, 20 nt, Artificial Sequence
  Antisense oligo
caugacaucaggcauugguc

SEQ ID NO: 16101 - RNA, 20 nt, Artificial Sequence
  Antisense oligo
guggagccugaaacuguauc

SEQ ID NO: 16102 - RNA, 20 nt, Artificial Sequence
  Antisense oligo
uguggagccugaaacuguau

SEQ ID NO: 16103 - RNA, 20 nt, Artificial Sequence
  Antisense oligo
cagugauaaauggucauguc

SEQ ID NO: 16104 - RNA, 20 nt, Artificial Sequence
  Antisense oligo
ugcccacagugauaaauggu

SEQ ID NO: 16105 - RNA, 20 nt, Artificial Sequence
  Antisense oligo
uauuccuuaaugcugugccc

SEQ ID NO: 16106 - RNA, 20 nt, Artificial Sequence
  Antisense oligo
ggaauagcgaggaacauuuu

SEQ ID NO: 16107 - RNA, 20 nt, Artificial Sequence
  Antisense oligo
cggaauagcgaggaacauuu

SEQ ID NO: 16108 - RNA, 20 nt, Artificial Sequence
  Antisense oligo
ucggaauagcgaggaacauu

SEQ ID NO: 16109 - RNA, 20 nt, Artificial Sequence
  Antisense oligo
ucauauacucggaauagcga

SEQ ID NO: 16110 - RNA, 20 nt, Artificial Sequence
  Antisense oligo
cucauauacucggaauagcg

SEQ ID NO: 16111 - RNA, 20 nt, Artificial Sequence
  Antisense oligo
ccucauauacucggaauagc

SEQ ID NO: 16112 - RNA, 20 nt, Artificial Sequence
  Antisense oligo
uccucauauacucggaauag

SEQ ID NO: 16113 - RNA, 20 nt, Artificial Sequence
  Antisense oligo
guccucauauacucggaaua

SEQ ID NO: 16114 - RNA, 20 nt, Artificial Sequence
  Antisense oligo
uguccucauauacucggaau

SEQ ID NO: 16115 - RNA, 20 nt, Artificial Sequence
  Antisense oligo
cuguccucauauacucggaa

SEQ ID NO: 16116 - RNA, 20 nt, Artificial Sequence
  Antisense oligo
ucuguccucauauacucgga

SEQ ID NO: 16117 - RNA, 20 nt, Artificial Sequence
  Antisense oligo
aucuguccucauauacucgg

SEQ ID NO: 16118 - RNA, 20 nt, Artificial Sequence
  Antisense oligo
aaucuguccucauauacucg

SEQ ID NO: 16119 - RNA, 20 nt, Artificial Sequence
  Antisense oligo
ucuuccauuccugugcuggc

SEQ ID NO: 16120 - RNA, 20 nt, Artificial Sequence
  Antisense oligo
gucuuccauuccugugcugg

SEQ ID NO: 16121 - RNA, 20 nt, Artificial Sequence
  Antisense oligo
cgugagaagagugguuuggu

SEQ ID NO: 16122 - RNA, 20 nt, Artificial Sequence
  Antisense oligo
aauccgugagaagagugguu

SEQ ID NO: 16123 - RNA, 20 nt, Artificial Sequence
  Antisense oligo
gaauccgugagaagaguggu

SEQ ID NO: 16124 - RNA, 20 nt, Artificial Sequence
  Antisense oligo
ugaauccgugagaagagugg

SEQ ID NO: 16125 - RNA, 20 nt, Artificial Sequence
  Antisense oligo
augaauccgugagaagagug

SEQ ID NO: 16126 - RNA, 20 nt, Artificial Sequence
  Antisense oligo
caugaauccgugagaagagu

SEQ ID NO: 16127 - RNA, 20 nt, Artificial Sequence
  Antisense oligo
acaugaauccgugagaagag

SEQ ID NO: 16128 - RNA, 20 nt, Artificial Sequence
  Antisense oligo
aacaugaauccgugagaaga

SEQ ID NO: 16129 - RNA, 20 nt, Artificial Sequence
  Antisense oligo
aaacaugaauccgugagaag

SEQ ID NO: 16130 - RNA, 20 nt, Artificial Sequence
  Antisense oligo
ccaaaacaugaauccgugag

SEQ ID NO: 16131 - RNA, 20 nt, Artificial Sequence
  Antisense oligo
uccaaaacaugaauccguga

SEQ ID NO: 16132 - RNA, 20 nt, Artificial Sequence
  Antisense oligo
gaagagcuuuuauguggguu

SEQ ID NO: 16133 - RNA, 20 nt, Artificial Sequence
  Antisense oligo
cgaagagcuuuuaugugggu

SEQ ID NO: 16134 - RNA, 20 nt, Artificial Sequence
  Antisense oligo
ccgaagagcuuuuauguggg

SEQ ID NO: 16135 - RNA, 20 nt, Artificial Sequence
  Antisense oligo
cccgaagagcuuuuaugugg

SEQ ID NO: 16136 - RNA, 20 nt, Artificial Sequence
  Antisense oligo
guguguguguguguauaaac

SEQ ID NO: 16137 - RNA, 20 nt, Artificial Sequence
  Antisense oligo
cuguguguguguguguauaa

SEQ ID NO: 16138 - RNA, 20 nt, Artificial Sequence
  Antisense oligo
ccuguguguguguguguaua

SEQ ID NO: 16139 - RNA, 20 nt, Artificial Sequence
  Antisense oligo
uccuguguguguguguguau

SEQ ID NO: 16140 - RNA, 20 nt, Artificial Sequence
  Antisense oligo
guccugugugugugugugua

SEQ ID NO: 16141 - RNA, 20 nt, Artificial Sequence
  Antisense oligo
uguccugugugugugugugu

SEQ ID NO: 16142 - RNA, 20 nt, Artificial Sequence
  Antisense oligo
cuguccugugugugugugug

SEQ ID NO: 16143 - RNA, 20 nt, Artificial Sequence
  Antisense oligo
cuggagacauaccuuacuaa

SEQ ID NO: 16144 - RNA, 20 nt, Artificial Sequence
  Antisense oligo
ucuggagacauaccuuacua

SEQ ID NO: 16145 - RNA, 20 nt, Artificial Sequence
  Antisense oligo
aucuggagacauaccuuacu

SEQ ID NO: 16146 - RNA, 20 nt, Artificial Sequence
  Antisense oligo
gaucuggagacauaccuuac

SEQ ID NO: 16147 - RNA, 20 nt, Artificial Sequence
  Antisense oligo
uuauuccugguucucucaga

SEQ ID NO: 16148 - RNA, 20 nt, Artificial Sequence
  Antisense oligo
auuauuccugguucucucag

SEQ ID NO: 16149 - RNA, 20 nt, Artificial Sequence
  Antisense oligo
aguugaugaagagcauguac

SEQ ID NO: 16150 - RNA, 20 nt, Artificial Sequence
  Antisense oligo
caguugaugaagagcaugua

SEQ ID NO: 16151 - RNA, 20 nt, Artificial Sequence
  Antisense oligo
ccaggcaguugaugaagagc

SEQ ID NO: 16152 - RNA, 20 nt, Artificial Sequence
  Antisense oligo
uccaggcaguugaugaagag

SEQ ID NO: 16153 - RNA, 20 nt, Artificial Sequence
  Antisense oligo
ccuccaggcaguugaugaag

SEQ ID NO: 16154 - RNA, 20 nt, Artificial Sequence
  Antisense oligo
accuccaggcaguugaugaa

SEQ ID NO: 16155 - RNA, 20 nt, Artificial Sequence
  Antisense oligo
uaccuccaggcaguugauga

SEQ ID NO: 16156 - RNA, 20 nt, Artificial Sequence
  Antisense oligo
acuuaccuccaggcaguuga

SEQ ID NO: 16157 - RNA, 20 nt, Artificial Sequence
  Antisense oligo
cacuuaccuccaggcaguug

SEQ ID NO: 16158 - RNA, 20 nt, Artificial Sequence
  Antisense oligo
ucacuuaccuccaggcaguu

SEQ ID NO: 16159 - RNA, 20 nt, Artificial Sequence
  Antisense oligo
uucacuuaccuccaggcagu

SEQ ID NO: 16160 - RNA, 20 nt, Artificial Sequence
  Antisense oligo
aguucacuuaccuccaggca

SEQ ID NO: 16161 - RNA, 20 nt, Artificial Sequence
  Antisense oligo
agagaguucacuuaccucca

SEQ ID NO: 16162 - RNA, 20 nt, Artificial Sequence
  Antisense oligo
agagagaguucacuuaccuc

SEQ ID NO: 16163 - RNA, 20 nt, Artificial Sequence
  Antisense oligo
gaagagagaguucacuuacc

SEQ ID NO: 16164 - RNA, 20 nt, Artificial Sequence
  Antisense oligo
ggaagagagaguucacuuac

SEQ ID NO: 16165 - RNA, 20 nt, Artificial Sequence
  Antisense oligo
gggaagagagaguucacuua

SEQ ID NO: 16166 - RNA, 20 nt, Artificial Sequence
  Antisense oligo
ugugguucagauaguuucca

SEQ ID NO: 16167 - RNA, 20 nt, Artificial Sequence
  Antisense oligo
augugguucagauaguuucc

SEQ ID NO: 16168 - RNA, 20 nt, Artificial Sequence
  Antisense oligo
caugugguucagauaguuuc

SEQ ID NO: 16169 - RNA, 20 nt, Artificial Sequence
  Antisense oligo
ccaugugguucagauaguuu

SEQ ID NO: 16170 - RNA, 20 nt, Artificial Sequence
  Antisense oligo
ggaacagagcauucguuaau

SEQ ID NO: 16171 - RNA, 20 nt, Artificial Sequence
  Antisense oligo
cggaacagagcauucguuaa

SEQ ID NO: 16172 - RNA, 20 nt, Artificial Sequence
  Antisense oligo
gcacggaacagagcauucgu

SEQ ID NO: 16173 - RNA, 20 nt, Artificial Sequence
  Antisense oligo
ugcacggaacagagcauucg

SEQ ID NO: 16174 - RNA, 20 nt, Artificial Sequence
  Antisense oligo
cugcacggaacagagcauuc

SEQ ID NO: 16175 - RNA, 20 nt, Artificial Sequence
  Antisense oligo
aauauacguugcugaaggca

SEQ ID NO: 16176 - RNA, 20 nt, Artificial Sequence
  Antisense oligo
aaauauacguugcugaaggc

SEQ ID NO: 16177 - RNA, 20 nt, Artificial Sequence
  Antisense oligo
gccaaaauauacguugcuga

SEQ ID NO: 16178 - RNA, 20 nt, Artificial Sequence
  Antisense oligo
ugccaaaauauacguugcug

SEQ ID NO: 16179 - RNA, 20 nt, Artificial Sequence
  Antisense oligo
uuggcaguauauucuccuag

SEQ ID NO: 16180 - RNA, 20 nt, Artificial Sequence
  Antisense oligo
acuuuggcaguauauucucc

SEQ ID NO: 16181 - RNA, 20 nt, Artificial Sequence
  Antisense oligo
cacucaaugauaaccacugu

SEQ ID NO: 16182 - RNA, 20 nt, Artificial Sequence
  Antisense oligo
ccacucaaugauaaccacug

SEQ ID NO: 16183 - RNA, 20 nt, Artificial Sequence
  Antisense oligo
cccacucaaugauaaccacu

SEQ ID NO: 16184 - RNA, 20 nt, Artificial Sequence
  Antisense oligo
ucgccaaugugacuguggag

SEQ ID NO: 16185 - RNA, 20 nt, Artificial Sequence
  Antisense oligo
gucgccaaugugacugugga

SEQ ID NO: 16186 - RNA, 20 nt, Artificial Sequence
  Antisense oligo
ucuacagucgccaaugugac

SEQ ID NO: 16187 - RNA, 20 nt, Artificial Sequence
  Antisense oligo
uucuacagucgccaauguga

SEQ ID NO: 16188 - RNA, 20 nt, Artificial Sequence
  Antisense oligo
cuucuacagucgccaaugug

SEQ ID NO: 16189 - RNA, 20 nt, Artificial Sequence
  Antisense oligo
gcuucuacagucgccaaugu

SEQ ID NO: 16190 - RNA, 20 nt, Artificial Sequence
  Antisense oligo
agcuucuacagucgccaaug

SEQ ID NO: 16191 - RNA, 20 nt, Artificial Sequence
  Antisense oligo
cugaggaacaaggaacaaga

SEQ ID NO: 16192 - RNA, 20 nt, Artificial Sequence
  Antisense oligo
auugaauccugaggaacaag

SEQ ID NO: 16193 - RNA, 20 nt, Artificial Sequence
  Antisense oligo
guauugaauccugaggaaca

SEQ ID NO: 16194 - RNA, 20 nt, Artificial Sequence
  Antisense oligo
aguauugaauccugaggaac

SEQ ID NO: 16195 - RNA, 20 nt, Artificial Sequence
  Antisense oligo
caaguauugaauccugagga

SEQ ID NO: 16196 - RNA, 20 nt, Artificial Sequence
  Antisense oligo
acuggucuucucaaguauug

SEQ ID NO: 16197 - RNA, 20 nt, Artificial Sequence
  Antisense oligo
gcacuggucuucucaaguau

SEQ ID NO: 16198 - RNA, 20 nt, Artificial Sequence
  Antisense oligo
agcacuggucuucucaagua

SEQ ID NO: 16199 - RNA, 20 nt, Artificial Sequence
  Antisense oligo
aagcacuggucuucucaagu

SEQ ID NO: 16200 - RNA, 20 nt, Artificial Sequence
  Antisense oligo
uaagcacuggucuucucaag

SEQ ID NO: 16201 - RNA, 20 nt, Artificial Sequence
  Antisense oligo
gaguaagcacuggucuucuc

SEQ ID NO: 16202 - RNA, 20 nt, Artificial Sequence
  Antisense oligo
ggaguaagcacuggucuucu

SEQ ID NO: 16203 - RNA, 20 nt, Artificial Sequence
  Antisense oligo
cuggaguaagcacuggucuu

SEQ ID NO: 16204 - RNA, 20 nt, Artificial Sequence
  Antisense oligo
uuucuggaguaagcacuggu

SEQ ID NO: 16205 - RNA, 20 nt, Artificial Sequence
  Antisense oligo
cauuucuggaguaagcacug

SEQ ID NO: 16206 - RNA, 20 nt, Artificial Sequence
  Antisense oligo
ucauuucuggaguaagcacu

SEQ ID NO: 16207 - RNA, 20 nt, Artificial Sequence
  Antisense oligo
caucauuucuggaguaagca

SEQ ID NO: 16208 - RNA, 20 nt, Artificial Sequence
  Antisense oligo
ucaucauuucuggaguaagc

SEQ ID NO: 16209 - RNA, 20 nt, Artificial Sequence
  Antisense oligo
gguucaguucaucauuucug

SEQ ID NO: 16210 - RNA, 20 nt, Artificial Sequence
  Antisense oligo
ggugguucaguucaucauuu

SEQ ID NO: 16211 - RNA, 20 nt, Artificial Sequence
  Antisense oligo
cuaggugguucaguucauca

SEQ ID NO: 16212 - RNA, 20 nt, Artificial Sequence
  Antisense oligo
ucuaggugguucaguucauc

SEQ ID NO: 16213 - RNA, 20 nt, Artificial Sequence
  Antisense oligo
uucuaggugguucaguucau

SEQ ID NO: 16214 - RNA, 20 nt, Artificial Sequence
  Antisense oligo
cuucuaggugguucaguuca

SEQ ID NO: 16215 - RNA, 20 nt, Artificial Sequence
  Antisense oligo
ucuucuaggugguucaguuc

SEQ ID NO: 16216 - RNA, 20 nt, Artificial Sequence
  Antisense oligo
uccucuucuaggugguucag

SEQ ID NO: 16217 - RNA, 20 nt, Artificial Sequence
  Antisense oligo
uuccucuucuaggugguuca

SEQ ID NO: 16218 - RNA, 20 nt, Artificial Sequence
  Antisense oligo
ccuuccucuucuaggugguu

SEQ ID NO: 16219 - RNA, 20 nt, Artificial Sequence
  Antisense oligo
aacgaccuuccucuucuagg

SEQ ID NO: 16220 - RNA, 20 nt, Artificial Sequence
  Antisense oligo
aaacgaccuuccucuucuag

SEQ ID NO: 16221 - RNA, 20 nt, Artificial Sequence
  Antisense oligo
gaaacgaccuuccucuucua

SEQ ID NO: 16222 - RNA, 20 nt, Artificial Sequence
  Antisense oligo
gcuugcuggagaauaugccu

SEQ ID NO: 16223 - RNA, 20 nt, Artificial Sequence
  Antisense oligo
ggcuugcuggagaauaugcc

SEQ ID NO: 16224 - RNA, 20 nt, Artificial Sequence
  Antisense oligo
gcagguauucaaccgaggcc

SEQ ID NO: 16225 - RNA, 20 nt, Artificial Sequence
  Antisense oligo
ugcagguauucaaccgaggc

SEQ ID NO: 16226 - RNA, 20 nt, Artificial Sequence
  Antisense oligo
uugcagguauucaaccgagg

SEQ ID NO: 16227 - RNA, 20 nt, Artificial Sequence
  Antisense oligo
cuugcagguauucaaccgag

SEQ ID NO: 16228 - RNA, 20 nt, Artificial Sequence
  Antisense oligo
ucuugcagguauucaaccga

SEQ ID NO: 16229 - RNA, 20 nt, Artificial Sequence
  Antisense oligo
cucuugcagguauucaaccg

SEQ ID NO: 16230 - RNA, 20 nt, Artificial Sequence
  Antisense oligo
gcuccgagaggaaaucugca

SEQ ID NO: 16231 - RNA, 20 nt, Artificial Sequence
  Antisense oligo
ggcuccgagaggaaaucugc

SEQ ID NO: 16232 - RNA, 20 nt, Artificial Sequence
  Antisense oligo
aggcuccgagaggaaaucug

SEQ ID NO: 16233 - RNA, 20 nt, Artificial Sequence
  Antisense oligo
caggcuccgagaggaaaucu

SEQ ID NO: 16234 - RNA, 20 nt, Artificial Sequence
  Antisense oligo
ucaggcuccgagaggaaauc

SEQ ID NO: 16235 - RNA, 20 nt, Artificial Sequence
  Antisense oligo
cucaggcuccgagaggaaau

SEQ ID NO: 16236 - RNA, 20 nt, Artificial Sequence
  Antisense oligo
ucccauacuuccugaauuuc

SEQ ID NO: 16237 - RNA, 20 nt, Artificial Sequence
  Antisense oligo
guuucccauacuuccugaau

SEQ ID NO: 16238 - RNA, 20 nt, Artificial Sequence
  Antisense oligo
aguuucccauacuuccugaa

SEQ ID NO: 16239 - RNA, 20 nt, Artificial Sequence
  Antisense oligo
uaguuucccauacuuccuga

SEQ ID NO: 16240 - RNA, 20 nt, Artificial Sequence
  Antisense oligo
cccaguaguagucuauucga

SEQ ID NO: 16241 - RNA, 20 nt, Artificial Sequence
  Antisense oligo
gcccaguaguagucuauucg

SEQ ID NO: 16242 - RNA, 20 nt, Artificial Sequence
  Antisense oligo
agcccaguaguagucuauuc

SEQ ID NO: 16243 - RNA, 20 nt, Artificial Sequence
  Antisense oligo
aagcccaguaguagucuauu

SEQ ID NO: 16244 - RNA, 20 nt, Artificial Sequence
  Antisense oligo
aaagcccaguaguagucuau

SEQ ID NO: 16245 - RNA, 20 nt, Artificial Sequence
  Antisense oligo
aaaagcccaguaguagucua

SEQ ID NO: 16246 - RNA, 20 nt, Artificial Sequence
  Antisense oligo
gaaaagcccaguaguagucu

SEQ ID NO: 16247 - RNA, 20 nt, Artificial Sequence
  Antisense oligo
agaaaagcccaguaguaguc

SEQ ID NO: 16248 - RNA, 20 nt, Artificial Sequence
  Antisense oligo
uagaaaagcccaguaguagu

SEQ ID NO: 16249 - RNA, 20 nt, Artificial Sequence
  Antisense oligo
guagaaaagcccaguaguag

SEQ ID NO: 16250 - RNA, 20 nt, Artificial Sequence
  Antisense oligo
uguagaaaagcccaguagua

SEQ ID NO: 16251 - RNA, 20 nt, Artificial Sequence
  Antisense oligo
ggauguagaaaagcccagua

SEQ ID NO: 16252 - RNA, 20 nt, Artificial Sequence
  Antisense oligo
gggauguagaaaagcccagu

SEQ ID NO: 16253 - RNA, 20 nt, Artificial Sequence
  Antisense oligo
gcauucacagaaacacaucc

SEQ ID NO: 16254 - RNA, 20 nt, Artificial Sequence
  Antisense oligo
acaggcauucacagaaacac

SEQ ID NO: 16255 - RNA, 20 nt, Artificial Sequence
  Antisense oligo
cacaggcauucacagaaaca

SEQ ID NO: 16256 - RNA, 20 nt, Artificial Sequence
  Antisense oligo
ccuacccacaggcauucaca

SEQ ID NO: 16257 - RNA, 20 nt, Artificial Sequence
  Antisense oligo
accuacccacaggcauucac

SEQ ID NO: 16258 - RNA, 20 nt, Artificial Sequence
  Antisense oligo
gaccuacccacaggcauuca

SEQ ID NO: 16259 - RNA, 20 nt, Artificial Sequence
  Antisense oligo
aaggccaaccagagggcauc

SEQ ID NO: 16260 - RNA, 20 nt, Artificial Sequence
  Antisense oligo
acaaggccaaccagagggca

SEQ ID NO: 16261 - RNA, 20 nt, Artificial Sequence
  Antisense oligo
acacaaggccaaccagaggg

SEQ ID NO: 16262 - RNA, 20 nt, Artificial Sequence
  Antisense oligo
gacacaaggccaaccagagg

SEQ ID NO: 16263 - RNA, 20 nt, Artificial Sequence
  Antisense oligo
ggacacaaggccaaccagag

SEQ ID NO: 16264 - RNA, 20 nt, Artificial Sequence
  Antisense oligo
aggacacaaggccaaccaga

SEQ ID NO: 16265 - RNA, 20 nt, Artificial Sequence
  Antisense oligo
uaggacacaaggccaaccag

SEQ ID NO: 16266 - RNA, 20 nt, Artificial Sequence
  Antisense oligo
guaggacacaaggccaacca

SEQ ID NO: 16267 - RNA, 20 nt, Artificial Sequence
  Antisense oligo
uguaggacacaaggccaacc

SEQ ID NO: 16268 - RNA, 20 nt, Artificial Sequence
  Antisense oligo
gugacuuagggcauuuauug

SEQ ID NO: 16269 - RNA, 20 nt, Artificial Sequence
  Antisense oligo
ggcuggugacuuagggcauu

SEQ ID NO: 16270 - RNA, 20 nt, Artificial Sequence
  Antisense oligo
uggcuggugacuuagggcau

SEQ ID NO: 16271 - RNA, 20 nt, Artificial Sequence
  Antisense oligo
guggcuggugacuuagggca

SEQ ID NO: 16272 - RNA, 20 nt, Artificial Sequence
  Antisense oligo
aguggcuggugacuuagggc

SEQ ID NO: 16273 - RNA, 20 nt, Artificial Sequence
  Antisense oligo
gugaguggcuggugacuuag

SEQ ID NO: 16274 - RNA, 20 nt, Artificial Sequence
  Antisense oligo
gggugaguggcuggugacuu

SEQ ID NO: 16275 - RNA, 20 nt, Artificial Sequence
  Antisense oligo
aaagcgggugaguggcuggu

SEQ ID NO: 16276 - RNA, 20 nt, Artificial Sequence
  Antisense oligo
agaaagcgggugaguggcug

SEQ ID NO: 16277 - RNA, 20 nt, Artificial Sequence
  Antisense oligo
gagaaagcgggugaguggcu

SEQ ID NO: 16278 - RNA, 20 nt, Artificial Sequence
  Antisense oligo
aacgagaaagcgggugagug

SEQ ID NO: 16279 - RNA, 20 nt, Artificial Sequence
  Antisense oligo
caacgagaaagcgggugagu

SEQ ID NO: 16280 - RNA, 20 nt, Artificial Sequence
  Antisense oligo
ccaacgagaaagcgggugag

SEQ ID NO: 16281 - RNA, 20 nt, Artificial Sequence
  Antisense oligo
gccaacgagaaagcggguga

SEQ ID NO: 16282 - RNA, 20 nt, Artificial Sequence
  Antisense oligo
aggccaacgagaaagcgggu

SEQ ID NO: 16283 - RNA, 20 nt, Artificial Sequence
  Antisense oligo
agaggccaacgagaaagcgg

SEQ ID NO: 16284 - RNA, 20 nt, Artificial Sequence
  Antisense oligo
gagaggccaacgagaaagcg

SEQ ID NO: 16285 - RNA, 20 nt, Artificial Sequence
  Antisense oligo
ugagaggccaacgagaaagc

SEQ ID NO: 16286 - RNA, 20 nt, Artificial Sequence
  Antisense oligo
cugagaggccaacgagaaag

SEQ ID NO: 16287 - RNA, 20 nt, Artificial Sequence
  Antisense oligo
aucucugagaggccaacgag

SEQ ID NO: 16288 - RNA, 20 nt, Artificial Sequence
  Antisense oligo
caucucugagaggccaacga

SEQ ID NO: 16289 - RNA, 20 nt, Artificial Sequence
  Antisense oligo
ccaucucugagaggccaacg

SEQ ID NO: 16290 - RNA, 20 nt, Artificial Sequence
  Antisense oligo
gccaucucugagaggccaac

SEQ ID NO: 16291 - RNA, 20 nt, Artificial Sequence
  Antisense oligo
uagcacugcuucuccuuggc

SEQ ID NO: 16292 - RNA, 20 nt, Artificial Sequence
  Antisense oligo
gguagcacugcuucuccuug

SEQ ID NO: 16293 - RNA, 20 nt, Artificial Sequence
  Antisense oligo
cagguagcacugcuucuccu

SEQ ID NO: 16294 - RNA, 20 nt, Artificial Sequence
  Antisense oligo
gaacugcuugacuugcugca

SEQ ID NO: 16295 - RNA, 20 nt, Artificial Sequence
  Antisense oligo
agaacugcuugacuugcugc

SEQ ID NO: 16296 - RNA, 20 nt, Artificial Sequence
  Antisense oligo
auacagaacugcuugacuug

SEQ ID NO: 16297 - RNA, 20 nt, Artificial Sequence
  Antisense oligo
gauacagaacugcuugacuu

SEQ ID NO: 16298 - RNA, 20 nt, Artificial Sequence
  Antisense oligo
cggauacagaacugcuugac

SEQ ID NO: 16299 - RNA, 20 nt, Artificial Sequence
  Antisense oligo
aggcccugcacgaacuccau

SEQ ID NO: 16300 - RNA, 20 nt, Artificial Sequence
  Antisense oligo
aacguccuugggaaacaccc

SEQ ID NO: 16301 - RNA, 20 nt, Artificial Sequence
  Antisense oligo
caacguccuugggaaacacc

SEQ ID NO: 16302 - RNA, 20 nt, Artificial Sequence
  Antisense oligo
acaacguccuugggaaacac

SEQ ID NO: 16303 - RNA, 20 nt, Artificial Sequence
  Antisense oligo
gacaacguccuugggaaaca

SEQ ID NO: 16304 - RNA, 20 nt, Artificial Sequence
  Antisense oligo
ugacaacguccuugggaaac

SEQ ID NO: 16305 - RNA, 20 nt, Artificial Sequence
  Antisense oligo
uugacaacguccuugggaaa

SEQ ID NO: 16306 - RNA, 20 nt, Artificial Sequence
  Antisense oligo
cuugacaacguccuugggaa

SEQ ID NO: 16307 - RNA, 20 nt, Artificial Sequence
  Antisense oligo
gcuugacaacguccuuggga

SEQ ID NO: 16308 - RNA, 20 nt, Artificial Sequence
  Antisense oligo
ugcuugacaacguccuuggg

SEQ ID NO: 16309 - RNA, 20 nt, Artificial Sequence
  Antisense oligo
cugcuugacaacguccuugg

SEQ ID NO: 16310 - RNA, 20 nt, Artificial Sequence
  Antisense oligo
gcugcuugacaacguccuug

SEQ ID NO: 16311 - RNA, 20 nt, Artificial Sequence
  Antisense oligo
ugcugcuugacaacguccuu

SEQ ID NO: 16312 - RNA, 20 nt, Artificial Sequence
  Antisense oligo
cugcugcuugacaacguccu

SEQ ID NO: 16313 - RNA, 20 nt, Artificial Sequence
  Antisense oligo
ccugcugcuugacaacgucc

SEQ ID NO: 16314 - RNA, 20 nt, Artificial Sequence
  Antisense oligo
accugcugcuugacaacguc

SEQ ID NO: 16315 - RNA, 20 nt, Artificial Sequence
  Antisense oligo
caccugcugcuugacaacgu

SEQ ID NO: 16316 - RNA, 20 nt, Artificial Sequence
  Antisense oligo
ggguaugaggguauguggug

SEQ ID NO: 16317 - RNA, 20 nt, Artificial Sequence
  Antisense oligo
augcuaagggcaggcggaac

SEQ ID NO: 16318 - RNA, 20 nt, Artificial Sequence
  Antisense oligo
agguuuccuuccuggcucug

SEQ ID NO: 16319 - RNA, 20 nt, Artificial Sequence
  Antisense oligo
aagcggcagguuuccuuccu

SEQ ID NO: 16320 - RNA, 20 nt, Artificial Sequence
  Antisense oligo
caagcggcagguuuccuucc

SEQ ID NO: 16321 - RNA, 20 nt, Artificial Sequence
  Antisense oligo
gacaagcggcagguuuccuu

SEQ ID NO: 16322 - RNA, 20 nt, Artificial Sequence
  Antisense oligo
agacaagcggcagguuuccu

SEQ ID NO: 16323 - RNA, 20 nt, Artificial Sequence
  Antisense oligo
cagacaagcggcagguuucc

SEQ ID NO: 16324 - RNA, 20 nt, Artificial Sequence
  Antisense oligo
gacagacaagcggcagguuu

SEQ ID NO: 16325 - RNA, 20 nt, Artificial Sequence
  Antisense oligo
agacagacaagcggcagguu

SEQ ID NO: 16326 - RNA, 20 nt, Artificial Sequence
  Antisense oligo
aggaccagacagacaagcgg

SEQ ID NO: 16327 - RNA, 20 nt, Artificial Sequence
  Antisense oligo
aaggaccagacagacaagcg

SEQ ID NO: 16328 - RNA, 20 nt, Artificial Sequence
  Antisense oligo
acaaaggaccagacagacaa

SEQ ID NO: 16329 - RNA, 20 nt, Artificial Sequence
  Antisense oligo
caggcaguguaaacaugauc

SEQ ID NO: 16330 - RNA, 20 nt, Artificial Sequence
  Antisense oligo
gcaggcaguguaaacaugau

SEQ ID NO: 16331 - RNA, 20 nt, Artificial Sequence
  Antisense oligo
agcaggcaguguaaacauga

SEQ ID NO: 16332 - RNA, 20 nt, Artificial Sequence
  Antisense oligo
cagcaggcaguguaaacaug

SEQ ID NO: 16333 - RNA, 20 nt, Artificial Sequence
  Antisense oligo
ucaccuuggcccuacagcag

SEQ ID NO: 16334 - RNA, 20 nt, Artificial Sequence
  Antisense oligo
cucaccuuggcccuacagca

SEQ ID NO: 16335 - RNA, 20 nt, Artificial Sequence
  Antisense oligo
aaagaagcucugaggugagu

SEQ ID NO: 16336 - RNA, 20 nt, Artificial Sequence
  Antisense oligo
uaaagaagcucugaggugag

SEQ ID NO: 16337 - RNA, 20 nt, Artificial Sequence
  Antisense oligo
uuaaagaagcucugagguga

SEQ ID NO: 16338 - RNA, 20 nt, Artificial Sequence
  Antisense oligo
auuaaagaagcucugaggug

SEQ ID NO: 16339 - RNA, 20 nt, Artificial Sequence
  Antisense oligo
guucuacuuuccuugaguga

SEQ ID NO: 16340 - RNA, 20 nt, Artificial Sequence
  Antisense oligo
uguucuacuuuccuugagug

SEQ ID NO: 16341 - RNA, 20 nt, Artificial Sequence
  Antisense oligo
gccacaagaauguucuacuu

SEQ ID NO: 16342 - RNA, 20 nt, Artificial Sequence
  Antisense oligo
caaaggccacaagaauguuc

SEQ ID NO: 16343 - RNA, 20 nt, Artificial Sequence
  Antisense oligo
gcaaaggccacaagaauguu

SEQ ID NO: 16344 - RNA, 20 nt, Artificial Sequence
  Antisense oligo
aagcaaaggccacaagaaug

SEQ ID NO: 16345 - RNA, 20 nt, Artificial Sequence
  Antisense oligo
gaaagcaaaggccacaagaa

SEQ ID NO: 16346 - RNA, 20 nt, Artificial Sequence
  Antisense oligo
cugaacuacguuuaauucgc

SEQ ID NO: 16347 - RNA, 20 nt, Artificial Sequence
  Antisense oligo
gcugaacuacguuuaauucg

SEQ ID NO: 16348 - RNA, 20 nt, Artificial Sequence
  Antisense oligo
gcaagcugaacuacguuuaa

SEQ ID NO: 16349 - RNA, 20 nt, Artificial Sequence
  Antisense oligo
ugcaagcugaacuacguuua

SEQ ID NO: 16350 - RNA, 20 nt, Artificial Sequence
  Antisense oligo
aguucuugcucuugccuguc

SEQ ID NO: 16351 - RNA, 20 nt, Artificial Sequence
  Antisense oligo
uuccuaguucuugcucuugc

SEQ ID NO: 16352 - RNA, 20 nt, Artificial Sequence
  Antisense oligo
cuauuccuaguucuugcucu

SEQ ID NO: 16353 - RNA, 20 nt, Artificial Sequence
  Antisense oligo
gccucuucugcaauucuucu

SEQ ID NO: 16354 - RNA, 20 nt, Artificial Sequence
  Antisense oligo
agccucuucugcaauucuuc

SEQ ID NO: 16355 - RNA, 20 nt, Artificial Sequence
  Antisense oligo
agccuggccuugaagccucu

SEQ ID NO: 16356 - RNA, 20 nt, Artificial Sequence
  Antisense oligo
ugcuggaauuacaggugaga

SEQ ID NO: 16357 - RNA, 20 nt, Artificial Sequence
  Antisense oligo
gugcuggaauuacaggugag

SEQ ID NO: 16358 - RNA, 20 nt, Artificial Sequence
  Antisense oligo
agugcuggaauuacagguga

SEQ ID NO: 16359 - RNA, 20 nt, Artificial Sequence
  Antisense oligo
aagugcuggaauuacaggug

SEQ ID NO: 16360 - RNA, 20 nt, Artificial Sequence
  Antisense oligo
aaagugcuggaauuacaggu

SEQ ID NO: 16361 - RNA, 20 nt, Artificial Sequence
  Antisense oligo
caaagugcuggaauuacagg

SEQ ID NO: 16362 - RNA, 20 nt, Artificial Sequence
  Antisense oligo
ccaaagugcuggaauuacag

SEQ ID NO: 16363 - RNA, 20 nt, Artificial Sequence
  Antisense oligo
cccaaagugcuggaauuaca

SEQ ID NO: 16364 - RNA, 20 nt, Artificial Sequence
  Antisense oligo
ucccaaagugcuggaauuac

SEQ ID NO: 16365 - RNA, 20 nt, Artificial Sequence
  Antisense oligo
cucccaaagugcuggaauua

SEQ ID NO: 16366 - RNA, 20 nt, Artificial Sequence
  Antisense oligo
ccucccaaagugcuggaauu

SEQ ID NO: 16367 - RNA, 20 nt, Artificial Sequence
  Antisense oligo
gccucccaaagugcuggaau

SEQ ID NO: 16368 - RNA, 20 nt, Artificial Sequence
  Antisense oligo
ggccucccaaagugcuggaa

SEQ ID NO: 16369 - RNA, 20 nt, Artificial Sequence
  Antisense oligo
acaagugauccgccugccuc

SEQ ID NO: 16370 - RNA, 20 nt, Artificial Sequence
  Antisense oligo
cacaagugauccgccugccu

SEQ ID NO: 16371 - RNA, 20 nt, Artificial Sequence
  Antisense oligo
ugacaaacuccugaccacaa

SEQ ID NO: 16372 - RNA, 20 nt, Artificial Sequence
  Antisense oligo
uugacaaacuccugaccaca

SEQ ID NO: 16373 - RNA, 20 nt, Artificial Sequence
  Antisense oligo
cuugacaaacuccugaccac

SEQ ID NO: 16374 - RNA, 20 nt, Artificial Sequence
  Antisense oligo
ucuugacaaacuccugacca

SEQ ID NO: 16375 - RNA, 20 nt, Artificial Sequence
  Antisense oligo
gucuugacaaacuccugacc

SEQ ID NO: 16376 - RNA, 20 nt, Artificial Sequence
  Antisense oligo
ggucuugacaaacuccugac

SEQ ID NO: 16377 - RNA, 20 nt, Artificial Sequence
  Antisense oligo
uggucuugacaaacuccuga

SEQ ID NO: 16378 - RNA, 20 nt, Artificial Sequence
  Antisense oligo
cuggucuugacaaacuccug

SEQ ID NO: 16379 - RNA, 20 nt, Artificial Sequence
  Antisense oligo
gcuggucuugacaaacuccu

SEQ ID NO: 16380 - RNA, 20 nt, Artificial Sequence
  Antisense oligo
ggcuggucuugacaaacucc

SEQ ID NO: 16381 - RNA, 20 nt, Artificial Sequence
  Antisense oligo
aggcuggucuugacaaacuc

SEQ ID NO: 16382 - RNA, 20 nt, Artificial Sequence
  Antisense oligo
caggcuggucuugacaaacu

SEQ ID NO: 16383 - RNA, 20 nt, Artificial Sequence
  Antisense oligo
ccaggcuggucuugacaaac

SEQ ID NO: 16384 - RNA, 20 nt, Artificial Sequence
  Antisense oligo
gccaggcuggucuugacaaa

SEQ ID NO: 16385 - RNA, 20 nt, Artificial Sequence
  Antisense oligo
ggccaggcuggucuugacaa

SEQ ID NO: 16386 - RNA, 20 nt, Artificial Sequence
  Antisense oligo
aagguuucaccauguuggcc

SEQ ID NO: 16387 - RNA, 20 nt, Artificial Sequence
  Antisense oligo
caagguuucaccauguuggc

SEQ ID NO: 16388 - RNA, 20 nt, Artificial Sequence
  Antisense oligo
acaagguuucaccauguugg

SEQ ID NO: 16389 - RNA, 20 nt, Artificial Sequence
  Antisense oligo
gacaagguuucaccauguug

SEQ ID NO: 16390 - RNA, 20 nt, Artificial Sequence
  Antisense oligo
agacaagguuucaccauguu

SEQ ID NO: 16391 - RNA, 20 nt, Artificial Sequence
  Antisense oligo
agcugggauuacaagcaccc

SEQ ID NO: 16392 - RNA, 20 nt, Artificial Sequence
  Antisense oligo
uagcugggauuacaagcacc

SEQ ID NO: 16393 - RNA, 20 nt, Artificial Sequence
  Antisense oligo
cuagcugggauuacaagcac

SEQ ID NO: 16394 - RNA, 20 nt, Artificial Sequence
  Antisense oligo
acuagcugggauuacaagca

SEQ ID NO: 16395 - RNA, 20 nt, Artificial Sequence
  Antisense oligo
gacuagcugggauuacaagc

SEQ ID NO: 16396 - RNA, 20 nt, Artificial Sequence
  Antisense oligo
cgacuagcugggauuacaag

SEQ ID NO: 16397 - RNA, 20 nt, Artificial Sequence
  Antisense oligo
ccgacuagcugggauuacaa

SEQ ID NO: 16398 - RNA, 20 nt, Artificial Sequence
  Antisense oligo
caagugauucuccugccuca

SEQ ID NO: 16399 - RNA, 20 nt, Artificial Sequence
  Antisense oligo
ucaagugauucuccugccuc

SEQ ID NO: 16400 - RNA, 20 nt, Artificial Sequence
  Antisense oligo
uucaagugauucuccugccu

SEQ ID NO: 16401 - RNA, 20 nt, Artificial Sequence
  Antisense oligo
guucaagugauucuccugcc

SEQ ID NO: 16402 - RNA, 20 nt, Artificial Sequence
  Antisense oligo
gguucaagugauucuccugc

SEQ ID NO: 16403 - RNA, 20 nt, Artificial Sequence
  Antisense oligo
ggguucaagugauucuccug

SEQ ID NO: 16404 - RNA, 20 nt, Artificial Sequence
  Antisense oligo
cggguucaagugauucuccu

SEQ ID NO: 16405 - RNA, 20 nt, Artificial Sequence
  Antisense oligo
ccggguucaagugauucucc

SEQ ID NO: 16406 - RNA, 20 nt, Artificial Sequence
  Antisense oligo
ucacugcaaccucugccucc

SEQ ID NO: 16407 - RNA, 20 nt, Artificial Sequence
  Antisense oligo
cucacugcaaccucugccuc

SEQ ID NO: 16408 - RNA, 20 nt, Artificial Sequence
  Antisense oligo
gcucacugcaaccucugccu

SEQ ID NO: 16409 - RNA, 20 nt, Artificial Sequence
  Antisense oligo
ucggcucacugcaaccucug

SEQ ID NO: 16410 - RNA, 20 nt, Artificial Sequence
  Antisense oligo
cucggcucacugcaaccucu

SEQ ID NO: 16411 - RNA, 20 nt, Artificial Sequence
  Antisense oligo
ucucggcucacugcaaccuc

SEQ ID NO: 16412 - RNA, 20 nt, Artificial Sequence
  Antisense oligo
aucucggcucacugcaaccu

SEQ ID NO: 16413 - RNA, 20 nt, Artificial Sequence
  Antisense oligo
aaucucggcucacugcaacc

SEQ ID NO: 16414 - RNA, 20 nt, Artificial Sequence
  Antisense oligo
caaucucggcucacugcaac

SEQ ID NO: 16415 - RNA, 20 nt, Artificial Sequence
  Antisense oligo
gcaaucucggcucacugcaa

SEQ ID NO: 16416 - RNA, 20 nt, Artificial Sequence
  Antisense oligo
gugcaaucucggcucacugc

SEQ ID NO: 16417 - RNA, 20 nt, Artificial Sequence
  Antisense oligo
ggugcaaucucggcucacug

SEQ ID NO: 16418 - RNA, 20 nt, Artificial Sequence
  Antisense oligo
uggugcaaucucggcucacu

SEQ ID NO: 16419 - RNA, 20 nt, Artificial Sequence
  Antisense oligo
guggugcaaucucggcucac

SEQ ID NO: 16420 - RNA, 20 nt, Artificial Sequence
  Antisense oligo
aguggugcaaucucggcuca

SEQ ID NO: 16421 - RNA, 20 nt, Artificial Sequence
  Antisense oligo
caguggugcaaucucggcuc

SEQ ID NO: 16422 - RNA, 20 nt, Artificial Sequence
  Antisense oligo
gcaguggugcaaucucggcu

SEQ ID NO: 16423 - RNA, 20 nt, Artificial Sequence
  Antisense oligo
acggagucucgcucuaucgc

SEQ ID NO: 16424 - RNA, 20 nt, Artificial Sequence
  Antisense oligo
gacggagucucgcucuaucg

SEQ ID NO: 16425 - RNA, 20 nt, Artificial Sequence
  Antisense oligo
uaucuggaaaggaccacuga

SEQ ID NO: 16426 - RNA, 20 nt, Artificial Sequence
  Antisense oligo
guaucuggaaaggaccacug

SEQ ID NO: 16427 - RNA, 20 nt, Artificial Sequence
  Antisense oligo
ggguaucuggaaaggaccac

SEQ ID NO: 16428 - RNA, 20 nt, Artificial Sequence
  Antisense oligo
cuggguaucuggaaaggacc

SEQ ID NO: 16429 - RNA, 20 nt, Artificial Sequence
  Antisense oligo
ucuggguaucuggaaaggac

SEQ ID NO: 16430 - RNA, 20 nt, Artificial Sequence
  Antisense oligo
uucuggguaucuggaaagga

SEQ ID NO: 16431 - RNA, 20 nt, Artificial Sequence
  Antisense oligo
cccuggacaauaagaauuug

SEQ ID NO: 16432 - RNA, 20 nt, Artificial Sequence
  Antisense oligo
ugguagucaaacagugccgg

SEQ ID NO: 16433 - RNA, 20 nt, Artificial Sequence
  Antisense oligo
gugguagucaaacagugccg

SEQ ID NO: 16434 - RNA, 20 nt, Artificial Sequence
  Antisense oligo
caggugguagucaaacagug

SEQ ID NO: 16435 - RNA, 20 nt, Artificial Sequence
  Antisense oligo
ccaggugguagucaaacagu

SEQ ID NO: 16436 - RNA, 20 nt, Artificial Sequence
  Antisense oligo
cccaggugguagucaaacag

SEQ ID NO: 16437 - RNA, 20 nt, Artificial Sequence
  Antisense oligo
gucaugucaacucuaaaccc

SEQ ID NO: 16438 - RNA, 20 nt, Artificial Sequence
  Antisense oligo
ggcucaagucaugucaacuc

SEQ ID NO: 16439 - RNA, 20 nt, Artificial Sequence
  Antisense oligo
uggcucaagucaugucaacu

SEQ ID NO: 16440 - RNA, 20 nt, Artificial Sequence
  Antisense oligo
guggcucaagucaugucaac

SEQ ID NO: 16441 - RNA, 20 nt, Artificial Sequence
  Antisense oligo
gguggcucaagucaugucaa

SEQ ID NO: 16442 - RNA, 20 nt, Artificial Sequence
  Antisense oligo
cggguggcucaagucauguc

SEQ ID NO: 16443 - RNA, 20 nt, Artificial Sequence
  Antisense oligo
ccggguggcucaagucaugu

SEQ ID NO: 16444 - RNA, 20 nt, Artificial Sequence
  Antisense oligo
gugcuugcuuccuccguuug

SEQ ID NO: 16445 - RNA, 20 nt, Artificial Sequence
  Antisense oligo
ugcaagugcagggaaugccu

SEQ ID NO: 16446 - RNA, 20 nt, Artificial Sequence
  Antisense oligo
ggugcaagugcagggaaugc

SEQ ID NO: 16447 - RNA, 20 nt, Artificial Sequence
  Antisense oligo
aggugcaagugcagggaaug

SEQ ID NO: 16448 - RNA, 20 nt, Artificial Sequence
  Antisense oligo
gaggugcaagugcagggaau

SEQ ID NO: 16449 - RNA, 20 nt, Artificial Sequence
  Antisense oligo
uagacgaagaggugcaagug

SEQ ID NO: 16450 - RNA, 20 nt, Artificial Sequence
  Antisense oligo
guagacgaagaggugcaagu

SEQ ID NO: 16451 - RNA, 20 nt, Artificial Sequence
  Antisense oligo
aguagacgaagaggugcaag

SEQ ID NO: 16452 - RNA, 20 nt, Artificial Sequence
  Antisense oligo
caguagacgaagaggugcaa

SEQ ID NO: 16453 - RNA, 20 nt, Artificial Sequence
  Antisense oligo
ucaguagacgaagaggugca

SEQ ID NO: 16454 - RNA, 20 nt, Artificial Sequence
  Antisense oligo
cucaguagacgaagaggugc

SEQ ID NO: 16455 - RNA, 20 nt, Artificial Sequence
  Antisense oligo
ccuccucaguagacgaagag

SEQ ID NO: 16456 - RNA, 20 nt, Artificial Sequence
  Antisense oligo
uccuccucaguagacgaaga

SEQ ID NO: 16457 - RNA, 20 nt, Artificial Sequence
  Antisense oligo
ucuucgcagggagcuuccuc

SEQ ID NO: 16458 - RNA, 20 nt, Artificial Sequence
  Antisense oligo
cucuucgcagggagcuuccu

SEQ ID NO: 16459 - RNA, 20 nt, Artificial Sequence
  Antisense oligo
aggacagucuggugcccucu

SEQ ID NO: 16460 - RNA, 20 nt, Artificial Sequence
  Antisense oligo
auucccugaccuggccugag

SEQ ID NO: 16461 - RNA, 20 nt, Artificial Sequence
  Antisense oligo
gauucccugaccuggccuga

SEQ ID NO: 16462 - RNA, 20 nt, Artificial Sequence
  Antisense oligo
ggguacaggaaccagguggu

SEQ ID NO: 16463 - RNA, 20 nt, Artificial Sequence
  Antisense oligo
acggguacaggaaccaggug

SEQ ID NO: 16464 - RNA, 20 nt, Artificial Sequence
  Antisense oligo
aacggguacaggaaccaggu

SEQ ID NO: 16465 - RNA, 20 nt, Artificial Sequence
  Antisense oligo
gaacggguacaggaaccagg

SEQ ID NO: 16466 - RNA, 20 nt, Artificial Sequence
  Antisense oligo
ugaacggguacaggaaccag

SEQ ID NO: 16467 - RNA, 20 nt, Artificial Sequence
  Antisense oligo
cugaacggguacaggaacca

SEQ ID NO: 16468 - RNA, 20 nt, Artificial Sequence
  Antisense oligo
ucugaacggguacaggaacc

SEQ ID NO: 16469 - RNA, 20 nt, Artificial Sequence
  Antisense oligo
gucugaacggguacaggaac

SEQ ID NO: 16470 - RNA, 20 nt, Artificial Sequence
  Antisense oligo
cgucugaacggguacaggaa

SEQ ID NO: 16471 - RNA, 20 nt, Artificial Sequence
  Antisense oligo
ugcaaagaaccgucugaacg

SEQ ID NO: 16472 - RNA, 20 nt, Artificial Sequence
  Antisense oligo
caaugggaggaaugucuugc

SEQ ID NO: 16473 - RNA, 20 nt, Artificial Sequence
  Antisense oligo
acaaugggaggaaugucuug

SEQ ID NO: 16474 - RNA, 20 nt, Artificial Sequence
  Antisense oligo
gugaacaaugggaggaaugu

SEQ ID NO: 16475 - RNA, 20 nt, Artificial Sequence
  Antisense oligo
ggugaacaaugggaggaaug

SEQ ID NO: 16476 - RNA, 20 nt, Artificial Sequence
  Antisense oligo
guaccuauccaucuggccug

SEQ ID NO: 16477 - RNA, 20 nt, Artificial Sequence
  Antisense oligo
ucaucgccguacaccaggua

SEQ ID NO: 16478 - RNA, 20 nt, Artificial Sequence
  Antisense oligo
uucaucgccguacaccaggu

SEQ ID NO: 16479 - RNA, 20 nt, Artificial Sequence
  Antisense oligo
auucaucgccguacaccagg

SEQ ID NO: 16480 - RNA, 20 nt, Artificial Sequence
  Antisense oligo
uauucaucgccguacaccag

SEQ ID NO: 16481 - RNA, 20 nt, Artificial Sequence
  Antisense oligo
guauucaucgccguacacca

SEQ ID NO: 16482 - RNA, 20 nt, Artificial Sequence
  Antisense oligo
ccuuguauucaucgccguac

SEQ ID NO: 16483 - RNA, 20 nt, Artificial Sequence
  Antisense oligo
gccuuguauucaucgccgua

SEQ ID NO: 16484 - RNA, 20 nt, Artificial Sequence
  Antisense oligo
agccuuguauucaucgccgu

SEQ ID NO: 16485 - RNA, 20 nt, Artificial Sequence
  Antisense oligo
gagccuuguauucaucgccg

SEQ ID NO: 16486 - RNA, 20 nt, Artificial Sequence
  Antisense oligo
agagccuuguauucaucgcc

SEQ ID NO: 16487 - RNA, 20 nt, Artificial Sequence
  Antisense oligo
gagagccuuguauucaucgc

SEQ ID NO: 16488 - RNA, 20 nt, Artificial Sequence
  Antisense oligo
ggagagccuuguauucaucg

SEQ ID NO: 16489 - RNA, 20 nt, Artificial Sequence
  Antisense oligo
cggagagccuuguauucauc

SEQ ID NO: 16490 - RNA, 20 nt, Artificial Sequence
  Antisense oligo
acggagagccuuguauucau

SEQ ID NO: 16491 - RNA, 20 nt, Artificial Sequence
  Antisense oligo
cacggagagccuuguauuca

SEQ ID NO: 16492 - RNA, 20 nt, Artificial Sequence
  Antisense oligo
ucacggagagccuuguauuc

SEQ ID NO: 16493 - RNA, 20 nt, Artificial Sequence
  Antisense oligo
aucacggagagccuuguauu

SEQ ID NO: 16494 - RNA, 20 nt, Artificial Sequence
  Antisense oligo
caucacggagagccuuguau

SEQ ID NO: 16495 - RNA, 20 nt, Artificial Sequence
  Antisense oligo
agcaucacggagagccuugu

SEQ ID NO: 16496 - RNA, 20 nt, Artificial Sequence
  Antisense oligo
cagcaucacggagagccuug

SEQ ID NO: 16497 - RNA, 20 nt, Artificial Sequence
  Antisense oligo
acagcaucacggagagccuu

SEQ ID NO: 16498 - RNA, 20 nt, Artificial Sequence
  Antisense oligo
cuuaaugcccaguggcuugc

SEQ ID NO: 16499 - RNA, 20 nt, Artificial Sequence
  Antisense oligo
ucuuaaugcccaguggcuug

SEQ ID NO: 16500 - RNA, 20 nt, Artificial Sequence
  Antisense oligo
gucuuaaugcccaguggcuu

SEQ ID NO: 16501 - RNA, 20 nt, Artificial Sequence
  Antisense oligo
gcagucuuaaugcccagugg

SEQ ID NO: 16502 - RNA, 20 nt, Artificial Sequence
  Antisense oligo
agcagucuuaaugcccagug

SEQ ID NO: 16503 - RNA, 20 nt, Artificial Sequence
  Antisense oligo
gagcagucuuaaugcccagu

SEQ ID NO: 16504 - RNA, 20 nt, Artificial Sequence
  Antisense oligo
cagagcagucuuaaugccca

SEQ ID NO: 16505 - RNA, 20 nt, Artificial Sequence
  Antisense oligo
ccuucagagcagucuuaaug

SEQ ID NO: 16506 - RNA, 20 nt, Artificial Sequence
  Antisense oligo
accuucagagcagucuuaau

SEQ ID NO: 16507 - RNA, 20 nt, Artificial Sequence
  Antisense oligo
uaccuucagagcagucuuaa

SEQ ID NO: 16508 - RNA, 20 nt, Artificial Sequence
  Antisense oligo
cuaccuucagagcagucuua

SEQ ID NO: 16509 - RNA, 20 nt, Artificial Sequence
  Antisense oligo
ccuaccuucagagcagucuu

SEQ ID NO: 16510 - RNA, 20 nt, Artificial Sequence
  Antisense oligo
uccuaccuucagagcagucu

SEQ ID NO: 16511 - RNA, 20 nt, Artificial Sequence
  Antisense oligo
auccuaccuucagagcaguc

SEQ ID NO: 16512 - RNA, 20 nt, Artificial Sequence
  Antisense oligo
cauccuaccuucagagcagu

SEQ ID NO: 16513 - RNA, 20 nt, Artificial Sequence
  Antisense oligo
ccauccuaccuucagagcag

SEQ ID NO: 16514 - RNA, 20 nt, Artificial Sequence
  Antisense oligo
cccauccuaccuucagagca

SEQ ID NO: 16515 - RNA, 20 nt, Artificial Sequence
  Antisense oligo
gcccauccuaccuucagagc

SEQ ID NO: 16516 - RNA, 20 nt, Artificial Sequence
  Antisense oligo
guaucagagagaagccacgg

SEQ ID NO: 16517 - RNA, 20 nt, Artificial Sequence
  Antisense oligo
ugguaucagagagaagccac

SEQ ID NO: 16518 - RNA, 20 nt, Artificial Sequence
  Antisense oligo
cugguaucagagagaagcca

SEQ ID NO: 16519 - RNA, 20 nt, Artificial Sequence
  Antisense oligo
ugccaccugguaucagagag

SEQ ID NO: 16520 - RNA, 20 nt, Artificial Sequence
  Antisense oligo
augccaccugguaucagaga

SEQ ID NO: 16521 - RNA, 20 nt, Artificial Sequence
  Antisense oligo
caagggaugccaccugguau

SEQ ID NO: 16522 - RNA, 20 nt, Artificial Sequence
  Antisense oligo
ccaagggaugccaccuggua

SEQ ID NO: 16523 - RNA, 20 nt, Artificial Sequence
  Antisense oligo
acaugcaggcuccaagggau

SEQ ID NO: 16524 - RNA, 20 nt, Artificial Sequence
  Antisense oligo
aacaugcaggcuccaaggga

SEQ ID NO: 16525 - RNA, 20 nt, Artificial Sequence
  Antisense oligo
ggaacaugcaggcuccaagg

SEQ ID NO: 16526 - RNA, 20 nt, Artificial Sequence
  Antisense oligo
gggaacaugcaggcuccaag

SEQ ID NO: 16527 - RNA, 20 nt, Artificial Sequence
  Antisense oligo
accagggaacaugcaggcuc

SEQ ID NO: 16528 - RNA, 20 nt, Artificial Sequence
  Antisense oligo
aaaccagggaacaugcaggc

SEQ ID NO: 16529 - RNA, 20 nt, Artificial Sequence
  Antisense oligo
auaaaccagggaacaugcag

SEQ ID NO: 16530 - RNA, 20 nt, Artificial Sequence
  Antisense oligo
gacauaaaccagggaacaug

SEQ ID NO: 16531 - RNA, 20 nt, Artificial Sequence
  Antisense oligo
ugacauaaaccagggaacau

SEQ ID NO: 16532 - RNA, 20 nt, Artificial Sequence
  Antisense oligo
uuugacauaaaccagggaac

SEQ ID NO: 16533 - RNA, 20 nt, Artificial Sequence
  Antisense oligo
cauuugacauaaaccaggga

SEQ ID NO: 16534 - RNA, 20 nt, Artificial Sequence
  Antisense oligo
ucauuugacauaaaccaggg

SEQ ID NO: 16535 - RNA, 20 nt, Artificial Sequence
  Antisense oligo
acccugcaucauuugacaua

SEQ ID NO: 16536 - RNA, 20 nt, Artificial Sequence
  Antisense oligo
cacccugcaucauuugacau

SEQ ID NO: 16537 - RNA, 20 nt, Artificial Sequence
  Antisense oligo
ucacccugcaucauuugaca

SEQ ID NO: 16538 - RNA, 20 nt, Artificial Sequence
  Antisense oligo
aucacccugcaucauuugac

SEQ ID NO: 16539 - RNA, 20 nt, Artificial Sequence
  Antisense oligo
caucacccugcaucauuuga

SEQ ID NO: 16540 - RNA, 20 nt, Artificial Sequence
  Antisense oligo
ccaucacccugcaucauuug

SEQ ID NO: 16541 - RNA, 20 nt, Artificial Sequence
  Antisense oligo
uccaucacccugcaucauuu

SEQ ID NO: 16542 - RNA, 20 nt, Artificial Sequence
  Antisense oligo
gugguccaucacccugcauc

SEQ ID NO: 16543 - RNA, 20 nt, Artificial Sequence
  Antisense oligo
agugguccaucacccugcau

SEQ ID NO: 16544 - RNA, 20 nt, Artificial Sequence
  Antisense oligo
ucagugguccaucacccugc

SEQ ID NO: 16545 - RNA, 20 nt, Artificial Sequence
  Antisense oligo
aucagugguccaucacccug

SEQ ID NO: 16546 - RNA, 20 nt, Artificial Sequence
  Antisense oligo
caucagugguccaucacccu

SEQ ID NO: 16547 - RNA, 20 nt, Artificial Sequence
  Antisense oligo
gcaucagugguccaucaccc

SEQ ID NO: 16548 - RNA, 20 nt, Artificial Sequence
  Antisense oligo
cuuccaauacagugucacgu

SEQ ID NO: 16549 - RNA, 20 nt, Artificial Sequence
  Antisense oligo
gacuuccaauacagugucac

SEQ ID NO: 16550 - RNA, 20 nt, Artificial Sequence
  Antisense oligo
gguucacgcacacuagccag

SEQ ID NO: 16551 - RNA, 20 nt, Artificial Sequence
  Antisense oligo
ugguucacgcacacuagcca

SEQ ID NO: 16552 - RNA, 20 nt, Artificial Sequence
  Antisense oligo
cugguucacgcacacuagcc

SEQ ID NO: 16553 - RNA, 20 nt, Artificial Sequence
  Antisense oligo
acugguucacgcacacuagc

SEQ ID NO: 16554 - RNA, 20 nt, Artificial Sequence
  Antisense oligo
cacugguucacgcacacuag

SEQ ID NO: 16555 - RNA, 20 nt, Artificial Sequence
  Antisense oligo
ccacugguucacgcacacua

SEQ ID NO: 16556 - RNA, 20 nt, Artificial Sequence
  Antisense oligo
gccacugguucacgcacacu

SEQ ID NO: 16557 - RNA, 20 nt, Artificial Sequence
  Antisense oligo
agccacugguucacgcacac

SEQ ID NO: 16558 - RNA, 20 nt, Artificial Sequence
  Antisense oligo
cagccacugguucacgcaca

SEQ ID NO: 16559 - RNA, 20 nt, Artificial Sequence
  Antisense oligo
gucauagcuguccuguucca

SEQ ID NO: 16560 - RNA, 20 nt, Artificial Sequence
  Antisense oligo
cugucauagcuguccuguuc

SEQ ID NO: 16561 - RNA, 20 nt, Artificial Sequence
  Antisense oligo
caacugucauagcuguccug

SEQ ID NO: 16562 - RNA, 20 nt, Artificial Sequence
  Antisense oligo
ucaacugucauagcuguccu

SEQ ID NO: 16563 - RNA, 20 nt, Artificial Sequence
  Antisense oligo
cucaacugucauagcugucc

SEQ ID NO: 16564 - RNA, 20 nt, Artificial Sequence
  Antisense oligo
gcucaacugucauagcuguc

SEQ ID NO: 16565 - RNA, 20 nt, Artificial Sequence
  Antisense oligo
cccagcucaacugucauagc

SEQ ID NO: 16566 - RNA, 20 nt, Artificial Sequence
  Antisense oligo
acccagcucaacugucauag

SEQ ID NO: 16567 - RNA, 20 nt, Artificial Sequence
  Antisense oligo
aacccagcucaacugucaua

SEQ ID NO: 16568 - RNA, 20 nt, Artificial Sequence
  Antisense oligo
ucaacccagcucaacuguca

SEQ ID NO: 16569 - RNA, 20 nt, Artificial Sequence
  Antisense oligo
gucaacccagcucaacuguc

SEQ ID NO: 16570 - RNA, 20 nt, Artificial Sequence
  Antisense oligo
ugucaacccagcucaacugu

SEQ ID NO: 16571 - RNA, 20 nt, Artificial Sequence
  Antisense oligo
cugucaacccagcucaacug

SEQ ID NO: 16572 - RNA, 20 nt, Artificial Sequence
  Antisense oligo
ucugucaacccagcucaacu

SEQ ID NO: 16573 - RNA, 20 nt, Artificial Sequence
  Antisense oligo
aucugucaacccagcucaac

SEQ ID NO: 16574 - RNA, 20 nt, Artificial Sequence
  Antisense oligo
aaucugucaacccagcucaa

SEQ ID NO: 16575 - RNA, 20 nt, Artificial Sequence
  Antisense oligo
agcaaaucugucaacccagc

SEQ ID NO: 16576 - RNA, 20 nt, Artificial Sequence
  Antisense oligo
cagcaaaucugucaacccag

SEQ ID NO: 16577 - RNA, 20 nt, Artificial Sequence
  Antisense oligo
cagaucagcaagacacagca

SEQ ID NO: 16578 - RNA, 20 nt, Artificial Sequence
  Antisense oligo
gcagaucagcaagacacagc

SEQ ID NO: 16579 - RNA, 20 nt, Artificial Sequence
  Antisense oligo
ggcagaucagcaagacacag

SEQ ID NO: 16580 - RNA, 20 nt, Artificial Sequence
  Antisense oligo
uggcagaucagcaagacaca

SEQ ID NO: 16581 - RNA, 20 nt, Artificial Sequence
  Antisense oligo
auggacuuggcagaucagca

SEQ ID NO: 16582 - RNA, 20 nt, Artificial Sequence
  Antisense oligo
gauggacuuggcagaucagc

SEQ ID NO: 16583 - RNA, 20 nt, Artificial Sequence
  Antisense oligo
gcugauggacuuggcagauc

SEQ ID NO: 16584 - RNA, 20 nt, Artificial Sequence
  Antisense oligo
cgcugcugauggacuuggca

SEQ ID NO: 16585 - RNA, 20 nt, Artificial Sequence
  Antisense oligo
aggcgcugcugauggacuug

SEQ ID NO: 16586 - RNA, 20 nt, Artificial Sequence
  Antisense oligo
aaggcgcugcugauggacuu

SEQ ID NO: 16587 - RNA, 20 nt, Artificial Sequence
  Antisense oligo
aaaggcgcugcugauggacu

SEQ ID NO: 16588 - RNA, 20 nt, Artificial Sequence
  Antisense oligo
aaaaggcgcugcugauggac

SEQ ID NO: 16589 - RNA, 20 nt, Artificial Sequence
  Antisense oligo
caaaaggcgcugcugaugga

SEQ ID NO: 16590 - RNA, 20 nt, Artificial Sequence
  Antisense oligo
ucaaaaggcgcugcugaugg

SEQ ID NO: 16591 - RNA, 20 nt, Artificial Sequence
  Antisense oligo
aaaucaaaaggcgcugcuga

SEQ ID NO: 16592 - RNA, 20 nt, Artificial Sequence
  Antisense oligo
uaaaucaaaaggcgcugcug

SEQ ID NO: 16593 - RNA, 20 nt, Artificial Sequence
  Antisense oligo
auaaaucaaaaggcgcugcu

SEQ ID NO: 16594 - RNA, 20 nt, Artificial Sequence
  Antisense oligo
cauaaaucaaaaggcgcugc

SEQ ID NO: 16595 - RNA, 20 nt, Artificial Sequence
  Antisense oligo
gcauaaaucaaaaggcgcug

SEQ ID NO: 16596 - RNA, 20 nt, Artificial Sequence
  Antisense oligo
gggcauaaaucaaaaggcgc

SEQ ID NO: 16597 - RNA, 20 nt, Artificial Sequence
  Antisense oligo
ugggcauaaaucaaaaggcg

SEQ ID NO: 16598 - RNA, 20 nt, Artificial Sequence
  Antisense oligo
ggaaguaaugggcauaaauc

SEQ ID NO: 16599 - RNA, 20 nt, Artificial Sequence
  Antisense oligo
caaaggaaguaaugggcaua

SEQ ID NO: 16600 - RNA, 20 nt, Artificial Sequence
  Antisense oligo
ucaaaggaaguaaugggcau

SEQ ID NO: 16601 - RNA, 20 nt, Artificial Sequence
  Antisense oligo
ucucaaaggaaguaaugggc

SEQ ID NO: 16602 - RNA, 20 nt, Artificial Sequence
  Antisense oligo
agggucucaaaggaaguaau

SEQ ID NO: 16603 - RNA, 20 nt, Artificial Sequence
  Antisense oligo
uuuccagcagggucucaaag

SEQ ID NO: 16604 - RNA, 20 nt, Artificial Sequence
  Antisense oligo
uuuuccagcagggucucaaa

SEQ ID NO: 16605 - RNA, 20 nt, Artificial Sequence
  Antisense oligo
guuuuccagcagggucucaa

SEQ ID NO: 16606 - RNA, 20 nt, Artificial Sequence
  Antisense oligo
acuguuuuccagcagggucu

SEQ ID NO: 16607 - RNA, 20 nt, Artificial Sequence
  Antisense oligo
uagacuguuuuccagcaggg

SEQ ID NO: 16608 - RNA, 20 nt, Artificial Sequence
  Antisense oligo
uuagacuguuuuccagcagg

SEQ ID NO: 16609 - RNA, 20 nt, Artificial Sequence
  Antisense oligo
cuuagacuguuuuccagcag

SEQ ID NO: 16610 - RNA, 20 nt, Artificial Sequence
  Antisense oligo
ucuuagacuguuuuccagca

SEQ ID NO: 16611 - RNA, 20 nt, Artificial Sequence
  Antisense oligo
gucagcaucuuucuuagacu

SEQ ID NO: 16612 - RNA, 20 nt, Artificial Sequence
  Antisense oligo
aguugugucagcaucuuucu

SEQ ID NO: 16613 - RNA, 20 nt, Artificial Sequence
  Antisense oligo
cccacacuacaccaacauau

SEQ ID NO: 16614 - RNA, 20 nt, Artificial Sequence
  Antisense oligo
gcaagaccagaccaauuuaa

SEQ ID NO: 16615 - RNA, 20 nt, Artificial Sequence
  Antisense oligo
agcaagaccagaccaauuua

SEQ ID NO: 16616 - RNA, 20 nt, Artificial Sequence
  Antisense oligo
aggaagcaagaccagaccaa

SEQ ID NO: 16617 - RNA, 20 nt, Artificial Sequence
  Antisense oligo
cuuagaaacuucugagcaga

SEQ ID NO: 16618 - RNA, 20 nt, Artificial Sequence
  Antisense oligo
gucuuagaaacuucugagca

SEQ ID NO: 16619 - RNA, 20 nt, Artificial Sequence
  Antisense oligo
acuggucuuagaaacuucug

SEQ ID NO: 16620 - RNA, 20 nt, Artificial Sequence
  Antisense oligo
ucacuggucuuagaaacuuc

SEQ ID NO: 16621 - RNA, 20 nt, Artificial Sequence
  Antisense oligo
cuucacuggucuuagaaacu

SEQ ID NO: 16622 - RNA, 20 nt, Artificial Sequence
  Antisense oligo
ccuucacuggucuuagaaac

SEQ ID NO: 16623 - RNA, 20 nt, Artificial Sequence
  Antisense oligo
uccuucacuggucuuagaaa

SEQ ID NO: 16624 - RNA, 20 nt, Artificial Sequence
  Antisense oligo
cuccuucacuggucuuagaa

SEQ ID NO: 16625 - RNA, 20 nt, Artificial Sequence
  Antisense oligo
gacuccuucacuggucuuag

SEQ ID NO: 16626 - RNA, 20 nt, Artificial Sequence
  Antisense oligo
ugacuccuucacuggucuua

SEQ ID NO: 16627 - RNA, 20 nt, Artificial Sequence
  Antisense oligo
aucaccaucuguucuucuga

SEQ ID NO: 16628 - RNA, 20 nt, Artificial Sequence
  Antisense oligo
cggaaucaccaucuguucuu

SEQ ID NO: 16629 - RNA, 20 nt, Artificial Sequence
  Antisense oligo
aacggaaucaccaucuguuc

SEQ ID NO: 16630 - RNA, 20 nt, Artificial Sequence
  Antisense oligo
caacggaaucaccaucuguu

SEQ ID NO: 16631 - RNA, 20 nt, Artificial Sequence
  Antisense oligo
gcaacggaaucaccaucugu

SEQ ID NO: 16632 - RNA, 20 nt, Artificial Sequence
  Antisense oligo
agcaacggaaucaccaucug

SEQ ID NO: 16633 - RNA, 20 nt, Artificial Sequence
  Antisense oligo
aagcaacggaaucaccaucu

SEQ ID NO: 16634 - RNA, 20 nt, Artificial Sequence
  Antisense oligo
gaagcaacggaaucaccauc

SEQ ID NO: 16635 - RNA, 20 nt, Artificial Sequence
  Antisense oligo
agaagcaacggaaucaccau

SEQ ID NO: 16636 - RNA, 20 nt, Artificial Sequence
  Antisense oligo
cagaagcaacggaaucacca

SEQ ID NO: 16637 - RNA, 20 nt, Artificial Sequence
  Antisense oligo
acagaagcaacggaaucacc

SEQ ID NO: 16638 - RNA, 20 nt, Artificial Sequence
  Antisense oligo
gacagaagcaacggaaucac

SEQ ID NO: 16639 - RNA, 20 nt, Artificial Sequence
  Antisense oligo
ugacagaagcaacggaauca

SEQ ID NO: 16640 - RNA, 20 nt, Artificial Sequence
  Antisense oligo
augacagaagcaacggaauc

SEQ ID NO: 16641 - RNA, 20 nt, Artificial Sequence
  Antisense oligo
aaugacagaagcaacggaau

SEQ ID NO: 16642 - RNA, 20 nt, Artificial Sequence
  Antisense oligo
uaaugacagaagcaacggaa

SEQ ID NO: 16643 - RNA, 20 nt, Artificial Sequence
  Antisense oligo
uuaaugacagaagcaacgga

SEQ ID NO: 16644 - RNA, 20 nt, Artificial Sequence
  Antisense oligo
agccagcuuaaugacagaag

SEQ ID NO: 16645 - RNA, 20 nt, Artificial Sequence
  Antisense oligo
gcagccagcuuaaugacaga

SEQ ID NO: 16646 - RNA, 20 nt, Artificial Sequence
  Antisense oligo
agcagccagcuuaaugacag

SEQ ID NO: 16647 - RNA, 20 nt, Artificial Sequence
  Antisense oligo
uagcagccagcuuaaugaca

SEQ ID NO: 16648 - RNA, 20 nt, Artificial Sequence
  Antisense oligo
uuagcagccagcuuaaugac

SEQ ID NO: 16649 - RNA, 20 nt, Artificial Sequence
  Antisense oligo
uuuagcagccagcuuaauga

SEQ ID NO: 16650 - RNA, 20 nt, Artificial Sequence
  Antisense oligo
auuuagcagccagcuuaaug

SEQ ID NO: 16651 - RNA, 20 nt, Artificial Sequence
  Antisense oligo
cauauuuagcagccagcuua

SEQ ID NO: 16652 - RNA, 20 nt, Artificial Sequence
  Antisense oligo
gagcaacuuuugggcuacaa

SEQ ID NO: 16653 - RNA, 20 nt, Artificial Sequence
  Antisense oligo
cgagcaacuuuugggcuaca

SEQ ID NO: 16654 - RNA, 20 nt, Artificial Sequence
  Antisense oligo
gcgagcaacuuuugggcuac

SEQ ID NO: 16655 - RNA, 20 nt, Artificial Sequence
  Antisense oligo
ggcgagcaacuuuugggcua

SEQ ID NO: 16656 - RNA, 20 nt, Artificial Sequence
  Antisense oligo
uggcgagcaacuuuugggcu

SEQ ID NO: 16657 - RNA, 20 nt, Artificial Sequence
  Antisense oligo
cuggcgagcaacuuuugggc

SEQ ID NO: 16658 - RNA, 20 nt, Artificial Sequence
  Antisense oligo
ucuggcgagcaacuuuuggg

SEQ ID NO: 16659 - RNA, 20 nt, Artificial Sequence
  Antisense oligo
uucuggcgagcaacuuuugg

SEQ ID NO: 16660 - RNA, 20 nt, Artificial Sequence
  Antisense oligo
cuucuggcgagcaacuuuug

SEQ ID NO: 16661 - RNA, 20 nt, Artificial Sequence
  Antisense oligo
ucuucuggcgagcaacuuuu

SEQ ID NO: 16662 - RNA, 20 nt, Artificial Sequence
  Antisense oligo
gucuucuggcgagcaacuuu

SEQ ID NO: 16663 - RNA, 20 nt, Artificial Sequence
  Antisense oligo
agucuucuggcgagcaacuu

SEQ ID NO: 16664 - RNA, 20 nt, Artificial Sequence
  Antisense oligo
cagucuucuggcgagcaacu

SEQ ID NO: 16665 - RNA, 20 nt, Artificial Sequence
  Antisense oligo
gcagucuucuggcgagcaac

SEQ ID NO: 16666 - RNA, 20 nt, Artificial Sequence
  Antisense oligo
ggcagucuucuggcgagcaa

SEQ ID NO: 16667 - RNA, 20 nt, Artificial Sequence
  Antisense oligo
augggcagucuucuggcgag

SEQ ID NO: 16668 - RNA, 20 nt, Artificial Sequence
  Antisense oligo
acaugggcagucuucuggcg

SEQ ID NO: 16669 - RNA, 20 nt, Artificial Sequence
  Antisense oligo
caccaaaagggaaggagccu

SEQ ID NO: 16670 - RNA, 20 nt, Artificial Sequence
  Antisense oligo
ccaccaaaagggaaggagcc

SEQ ID NO: 16671 - RNA, 20 nt, Artificial Sequence
  Antisense oligo
cccaccaaaagggaaggagc

SEQ ID NO: 16672 - RNA, 20 nt, Artificial Sequence
  Antisense oligo
acccaccaaaagggaaggag

SEQ ID NO: 16673 - RNA, 20 nt, Artificial Sequence
  Antisense oligo
agcccucaacccaccaaaag

SEQ ID NO: 16674 - RNA, 20 nt, Artificial Sequence
  Antisense oligo
cagcccucaacccaccaaaa

SEQ ID NO: 16675 - RNA, 20 nt, Artificial Sequence
  Antisense oligo
ucagcccucaacccaccaaa

SEQ ID NO: 16676 - RNA, 20 nt, Artificial Sequence
  Antisense oligo
cucagcccucaacccaccaa

SEQ ID NO: 16677 - RNA, 20 nt, Artificial Sequence
  Antisense oligo
acaugccucagcccucaacc

SEQ ID NO: 16678 - RNA, 20 nt, Artificial Sequence
  Antisense oligo
cacaugccucagcccucaac

SEQ ID NO: 16679 - RNA, 20 nt, Artificial Sequence
  Antisense oligo
ucacaugccucagcccucaa

SEQ ID NO: 16680 - RNA, 20 nt, Artificial Sequence
  Antisense oligo
uuucacaugccucagcccuc

SEQ ID NO: 16681 - RNA, 20 nt, Artificial Sequence
  Antisense oligo
aacuuuucacaugccucagc

SEQ ID NO: 16682 - RNA, 20 nt, Artificial Sequence
  Antisense oligo
aaacuuuucacaugccucag

SEQ ID NO: 16683 - RNA, 20 nt, Artificial Sequence
  Antisense oligo
cacgaaguuugcaugugaaa

SEQ ID NO: 16684 - RNA, 20 nt, Artificial Sequence
  Antisense oligo
gcccacgaaguuugcaugug

SEQ ID NO: 16685 - RNA, 20 nt, Artificial Sequence
  Antisense oligo
ggcccacgaaguuugcaugu

SEQ ID NO: 16686 - RNA, 20 nt, Artificial Sequence
  Antisense oligo
aggcccacgaaguuugcaug

SEQ ID NO: 16687 - RNA, 20 nt, Artificial Sequence
  Antisense oligo
gaggcccacgaaguuugcau

SEQ ID NO: 16688 - RNA, 20 nt, Artificial Sequence
  Antisense oligo
cagaggcccacgaaguuugc

SEQ ID NO: 16689 - RNA, 20 nt, Artificial Sequence
  Antisense oligo
ccagaggcccacgaaguuug

SEQ ID NO: 16690 - RNA, 20 nt, Artificial Sequence
  Antisense oligo
gccagaggcccacgaaguuu

SEQ ID NO: 16691 - RNA, 20 nt, Artificial Sequence
  Antisense oligo
ucuaccuaagggccagaggc

SEQ ID NO: 16692 - RNA, 20 nt, Artificial Sequence
  Antisense oligo
aucuaccuaagggccagagg

SEQ ID NO: 16693 - RNA, 20 nt, Artificial Sequence
  Antisense oligo
gaucuaccuaagggccagag

SEQ ID NO: 16694 - RNA, 20 nt, Artificial Sequence
  Antisense oligo
gugcuaggauuauaggauag

SEQ ID NO: 16695 - RNA, 20 nt, Artificial Sequence
  Antisense oligo
caaagugcuaggauuauagg

SEQ ID NO: 16696 - RNA, 20 nt, Artificial Sequence
  Antisense oligo
ccaaagugcuaggauuauag

SEQ ID NO: 16697 - RNA, 20 nt, Artificial Sequence
  Antisense oligo
ccugaccuugugaucugcau

SEQ ID NO: 16698 - RNA, 20 nt, Artificial Sequence
  Antisense oligo
uccugaccuugugaucugca

SEQ ID NO: 16699 - RNA, 20 nt, Artificial Sequence
  Antisense oligo
cuccugaccuugugaucugc

SEQ ID NO: 16700 - RNA, 20 nt, Artificial Sequence
  Antisense oligo
acuccugaccuugugaucug

SEQ ID NO: 16701 - RNA, 20 nt, Artificial Sequence
  Antisense oligo
aacuccugaccuugugaucu

SEQ ID NO: 16702 - RNA, 20 nt, Artificial Sequence
  Antisense oligo
aaacuccugaccuugugauc

SEQ ID NO: 16703 - RNA, 20 nt, Artificial Sequence
  Antisense oligo
caaacuccugaccuugugau

SEQ ID NO: 16704 - RNA, 20 nt, Artificial Sequence
  Antisense oligo
ucaaacuccugaccuuguga

SEQ ID NO: 16705 - RNA, 20 nt, Artificial Sequence
  Antisense oligo
cucaaacuccugaccuugug

SEQ ID NO: 16706 - RNA, 20 nt, Artificial Sequence
  Antisense oligo
ucucaaacuccugaccuugu

SEQ ID NO: 16707 - RNA, 20 nt, Artificial Sequence
  Antisense oligo
gucucaaacuccugaccuug

SEQ ID NO: 16708 - RNA, 20 nt, Artificial Sequence
  Antisense oligo
gcuggucucaaacuccugac

SEQ ID NO: 16709 - RNA, 20 nt, Artificial Sequence
  Antisense oligo
ggcuggucucaaacuccuga

SEQ ID NO: 16710 - RNA, 20 nt, Artificial Sequence
  Antisense oligo
aggcuggucucaaacuccug

SEQ ID NO: 16711 - RNA, 20 nt, Artificial Sequence
  Antisense oligo
caggcuggucucaaacuccu

SEQ ID NO: 16712 - RNA, 20 nt, Artificial Sequence
  Antisense oligo
ccaggcuggucucaaacucc

SEQ ID NO: 16713 - RNA, 20 nt, Artificial Sequence
  Antisense oligo
gccaggcuggucucaaacuc

SEQ ID NO: 16714 - RNA, 20 nt, Artificial Sequence
  Antisense oligo
ugccaggcuggucucaaacu

SEQ ID NO: 16715 - RNA, 20 nt, Artificial Sequence
  Antisense oligo
uugccaggcuggucucaaac

SEQ ID NO: 16716 - RNA, 20 nt, Artificial Sequence
  Antisense oligo
guuugccaggcuggucucaa

SEQ ID NO: 16717 - RNA, 20 nt, Artificial Sequence
  Antisense oligo
uguuugccaggcuggucuca

SEQ ID NO: 16718 - RNA, 20 nt, Artificial Sequence
  Antisense oligo
ggguuucaccauguuugcca

SEQ ID NO: 16719 - RNA, 20 nt, Artificial Sequence
  Antisense oligo
gggacuacaggcacacgcaa

SEQ ID NO: 16720 - RNA, 20 nt, Artificial Sequence
  Antisense oligo
ugggacuacaggcacacgca

SEQ ID NO: 16721 - RNA, 20 nt, Artificial Sequence
  Antisense oligo
agcugggacuacaggcacac

SEQ ID NO: 16722 - RNA, 20 nt, Artificial Sequence
  Antisense oligo
uagcugggacuacaggcaca

SEQ ID NO: 16723 - RNA, 20 nt, Artificial Sequence
  Antisense oligo
cggguucaagcgauucuaac

SEQ ID NO: 16724 - RNA, 20 nt, Artificial Sequence
  Antisense oligo
ucggguucaagcgauucuaa

SEQ ID NO: 16725 - RNA, 20 nt, Artificial Sequence
  Antisense oligo
cucggguucaagcgauucua

SEQ ID NO: 16726 - RNA, 20 nt, Artificial Sequence
  Antisense oligo
ucucggguucaagcgauucu

SEQ ID NO: 16727 - RNA, 20 nt, Artificial Sequence
  Antisense oligo
cucucggguucaagcgauuc

SEQ ID NO: 16728 - RNA, 20 nt, Artificial Sequence
  Antisense oligo
ccucucggguucaagcgauu

SEQ ID NO: 16729 - RNA, 20 nt, Artificial Sequence
  Antisense oligo
acugcaaccucugccucucg

SEQ ID NO: 16730 - RNA, 20 nt, Artificial Sequence
  Antisense oligo
cacugcaaccucugccucuc

SEQ ID NO: 16731 - RNA, 20 nt, Artificial Sequence
  Antisense oligo
ucacugcaaccucugccucu

SEQ ID NO: 16732 - RNA, 20 nt, Artificial Sequence
  Antisense oligo
cucacugcaaccucugccuc

SEQ ID NO: 16733 - RNA, 20 nt, Artificial Sequence
  Antisense oligo
gcucacugcaaccucugccu

SEQ ID NO: 16734 - RNA, 20 nt, Artificial Sequence
  Antisense oligo
ggagugcaguggcaugaucu

SEQ ID NO: 16735 - RNA, 20 nt, Artificial Sequence
  Antisense oligo
uggagugcaguggcaugauc

SEQ ID NO: 16736 - RNA, 20 nt, Artificial Sequence
  Antisense oligo
cuggagugcaguggcaugau

SEQ ID NO: 16737 - RNA, 20 nt, Artificial Sequence
  Antisense oligo
gcuggagugcaguggcauga

SEQ ID NO: 16738 - RNA, 20 nt, Artificial Sequence
  Antisense oligo
aggcuggagugcaguggcau

SEQ ID NO: 16739 - RNA, 20 nt, Artificial Sequence
  Antisense oligo
ucugucacccaggcuggagu

SEQ ID NO: 16740 - RNA, 20 nt, Artificial Sequence
  Antisense oligo
uugcucugucacccaggcug

SEQ ID NO: 16741 - RNA, 20 nt, Artificial Sequence
  Antisense oligo
cuugcucugucacccaggcu

SEQ ID NO: 16742 - RNA, 20 nt, Artificial Sequence
  Antisense oligo
ucuugcucugucacccaggc

SEQ ID NO: 16743 - RNA, 20 nt, Artificial Sequence
  Antisense oligo
gucuugcucugucacccagg

SEQ ID NO: 16744 - RNA, 20 nt, Artificial Sequence
  Antisense oligo
agucuugcucugucacccag

SEQ ID NO: 16745 - RNA, 20 nt, Artificial Sequence
  Antisense oligo
gagucuugcucugucaccca

SEQ ID NO: 16746 - RNA, 20 nt, Artificial Sequence
  Antisense oligo
ggagucuugcucugucaccc

SEQ ID NO: 16747 - RNA, 20 nt, Artificial Sequence
  Antisense oligo
uggagucuugcucugucacc

SEQ ID NO: 16748 - RNA, 20 nt, Artificial Sequence
  Antisense oligo
auggagucuugcucugucac

SEQ ID NO: 16749 - RNA, 20 nt, Artificial Sequence
  Antisense oligo
gauggagucuugcucuguca

SEQ ID NO: 16750 - RNA, 20 nt, Artificial Sequence
  Antisense oligo
agauggagucuugcucuguc

SEQ ID NO: 16751 - RNA, 20 nt, Artificial Sequence
  Antisense oligo
gagauggagucuugcucugu

SEQ ID NO: 16752 - RNA, 20 nt, Artificial Sequence
  Antisense oligo
ugagauggagucuugcucug

SEQ ID NO: 16753 - RNA, 20 nt, Artificial Sequence
  Antisense oligo
uugagauggagucuugcucu

SEQ ID NO: 16754 - RNA, 20 nt, Artificial Sequence
  Antisense oligo
uuugagauggagucuugcuc

SEQ ID NO: 16755 - RNA, 20 nt, Artificial Sequence
  Antisense oligo
uuuugagauggagucuugcu

SEQ ID NO: 16756 - RNA, 20 nt, Artificial Sequence
  Antisense oligo
gcaaaaucaaggguaucaag

SEQ ID NO: 16757 - RNA, 20 nt, Artificial Sequence
  Antisense oligo
cugcaaaaucaaggguauca

SEQ ID NO: 16758 - RNA, 20 nt, Artificial Sequence
  Antisense oligo
ccugcaaaaucaaggguauc

SEQ ID NO: 16759 - RNA, 20 nt, Artificial Sequence
  Antisense oligo
gccugcaaaaucaaggguau

SEQ ID NO: 16760 - RNA, 20 nt, Artificial Sequence
  Antisense oligo
aggcugacugcuggcuuugg

SEQ ID NO: 16761 - RNA, 20 nt, Artificial Sequence
  Antisense oligo
aguaggcugacugcuggcuu

SEQ ID NO: 16762 - RNA, 20 nt, Artificial Sequence
  Antisense oligo
acaggaaguaggcugacugc

SEQ ID NO: 16763 - RNA, 20 nt, Artificial Sequence
  Antisense oligo
uaacaggaaguaggcugacu

SEQ ID NO: 16764 - RNA, 20 nt, Artificial Sequence
  Antisense oligo
uuaacaggaaguaggcugac

SEQ ID NO: 16765 - RNA, 20 nt, Artificial Sequence
  Antisense oligo
caccucucuaaacaguguua

SEQ ID NO: 16766 - RNA, 20 nt, Artificial Sequence
  Antisense oligo
gccaccucucuaaacagugu

SEQ ID NO: 16767 - RNA, 20 nt, Artificial Sequence
  Antisense oligo
agccaccucucuaaacagug

SEQ ID NO: 16768 - RNA, 20 nt, Artificial Sequence
  Antisense oligo
aauagccaccucucuaaaca

SEQ ID NO: 16769 - RNA, 20 nt, Artificial Sequence
  Antisense oligo
aaauagccaccucucuaaac

SEQ ID NO: 16770 - RNA, 20 nt, Artificial Sequence
  Antisense oligo
caaaauagccaccucucuaa

SEQ ID NO: 16771 - RNA, 20 nt, Artificial Sequence
  Antisense oligo
cuugcauugugggaucugua

SEQ ID NO: 16772 - RNA, 20 nt, Artificial Sequence
  Antisense oligo
gaggcuugcauugugggauc

SEQ ID NO: 16773 - RNA, 20 nt, Artificial Sequence
  Antisense oligo
gguggaggcuugcauugugg

SEQ ID NO: 16774 - RNA, 20 nt, Artificial Sequence
  Antisense oligo
aggcgguuacucaccucugg

SEQ ID NO: 16775 - RNA, 20 nt, Artificial Sequence
  Antisense oligo
ccuccaaauacugagacuuu

SEQ ID NO: 16776 - RNA, 20 nt, Artificial Sequence
  Antisense oligo
ucccuccaaauacugagacu

SEQ ID NO: 16777 - RNA, 20 nt, Artificial Sequence
  Antisense oligo
aaucccuccaaauacugaga

SEQ ID NO: 16778 - RNA, 20 nt, Artificial Sequence
  Antisense oligo
guugagaaccucuauccuag

SEQ ID NO: 16779 - RNA, 20 nt, Artificial Sequence
  Antisense oligo
cacauaacaagguugagaac

SEQ ID NO: 16780 - RNA, 20 nt, Artificial Sequence
  Antisense oligo
cuccacauaacaagguugag

SEQ ID NO: 16781 - RNA, 20 nt, Artificial Sequence
  Antisense oligo
ccuccacauaacaagguuga

SEQ ID NO: 16782 - RNA, 20 nt, Artificial Sequence
  Antisense oligo
guuccuccacauaacaaggu

SEQ ID NO: 16783 - RNA, 20 nt, Artificial Sequence
  Antisense oligo
gcuugguuauguguuccucc

SEQ ID NO: 16784 - RNA, 20 nt, Artificial Sequence
  Antisense oligo
agcuugguuauguguuccuc

SEQ ID NO: 16785 - RNA, 20 nt, Artificial Sequence
  Antisense oligo
gguuaaacagcuugguuaug

SEQ ID NO: 16786 - RNA, 20 nt, Artificial Sequence
  Antisense oligo
ggguuaaacagcuugguuau

SEQ ID NO: 16787 - RNA, 20 nt, Artificial Sequence
  Antisense oligo
uggguuaaacagcuugguua

SEQ ID NO: 16788 - RNA, 20 nt, Artificial Sequence
  Antisense oligo
uuggguuaaacagcuugguu

SEQ ID NO: 16789 - RNA, 20 nt, Artificial Sequence
  Antisense oligo
uuuggguuaaacagcuuggu

SEQ ID NO: 16790 - RNA, 20 nt, Artificial Sequence
  Antisense oligo
cuuuggguuaaacagcuugg

SEQ ID NO: 16791 - RNA, 20 nt, Artificial Sequence
  Antisense oligo
caaacacagcauccacauac

SEQ ID NO: 16792 - RNA, 20 nt, Artificial Sequence
  Antisense oligo
auacaaacacagcauccaca

SEQ ID NO: 16793 - RNA, 20 nt, Artificial Sequence
  Antisense oligo
uauacaaacacagcauccac

SEQ ID NO: 16794 - RNA, 20 nt, Artificial Sequence
  Antisense oligo
cauauacaaacacagcaucc

SEQ ID NO: 16795 - RNA, 20 nt, Artificial Sequence
  Antisense oligo
cacugacaccaaauacacau

SEQ ID NO: 16796 - RNA, 20 nt, Artificial Sequence
  Antisense oligo
uacacugacaccaaauacac

SEQ ID NO: 16797 - RNA, 20 nt, Artificial Sequence
  Antisense oligo
cauacacugacaccaaauac

SEQ ID NO: 16798 - RNA, 20 nt, Artificial Sequence
  Antisense oligo
uuagacauacacugacacca

SEQ ID NO: 16799 - RNA, 20 nt, Artificial Sequence
  Antisense oligo
cuuagacauacacugacacc

SEQ ID NO: 16800 - RNA, 20 nt, Artificial Sequence
  Antisense oligo
cucuuagacauacacugaca

SEQ ID NO: 16801 - RNA, 20 nt, Artificial Sequence
  Antisense oligo
gcucuuagacauacacugac

SEQ ID NO: 16802 - RNA, 20 nt, Artificial Sequence
  Antisense oligo
uugcucuuagacauacacug

SEQ ID NO: 16803 - RNA, 20 nt, Artificial Sequence
  Antisense oligo
gugugaauugcucuuagaca

SEQ ID NO: 16804 - RNA, 20 nt, Artificial Sequence
  Antisense oligo
ucgccaaugaauuugcucac

SEQ ID NO: 16805 - RNA, 20 nt, Artificial Sequence
  Antisense oligo
uucgccaaugaauuugcuca

SEQ ID NO: 16806 - RNA, 20 nt, Artificial Sequence
  Antisense oligo
aggaucuugcauucgccaau

SEQ ID NO: 16807 - RNA, 20 nt, Artificial Sequence
  Antisense oligo
aaggaucuugcauucgccaa

SEQ ID NO: 16808 - RNA, 20 nt, Artificial Sequence
  Antisense oligo
aaaggaucuugcauucgcca

SEQ ID NO: 16809 - RNA, 20 nt, Artificial Sequence
  Antisense oligo
gaaaggaucuugcauucgcc

SEQ ID NO: 16810 - RNA, 20 nt, Artificial Sequence
  Antisense oligo
ugaaaggaucuugcauucgc

SEQ ID NO: 16811 - RNA, 20 nt, Artificial Sequence
  Antisense oligo
gugaaaggaucuugcauucg

SEQ ID NO: 16812 - RNA, 20 nt, Artificial Sequence
  Antisense oligo
ggugaaaggaucuugcauuc

SEQ ID NO: 16813 - RNA, 20 nt, Artificial Sequence
  Antisense oligo
gaggugaaaggaucuugcau

SEQ ID NO: 16814 - RNA, 20 nt, Artificial Sequence
  Antisense oligo
ggaggugaaaggaucuugca

SEQ ID NO: 16815 - RNA, 20 nt, Artificial Sequence
  Antisense oligo
uguccacgagcgauguugca

SEQ ID NO: 16816 - RNA, 20 nt, Artificial Sequence
  Antisense oligo
uuguccacgagcgauguugc

SEQ ID NO: 16817 - RNA, 20 nt, Artificial Sequence
  Antisense oligo
auuguccacgagcgauguug

SEQ ID NO: 16818 - RNA, 20 nt, Artificial Sequence
  Antisense oligo
aauuguccacgagcgauguu

SEQ ID NO: 16819 - RNA, 20 nt, Artificial Sequence
  Antisense oligo
gaauuguccacgagcgaugu

SEQ ID NO: 16820 - RNA, 20 nt, Artificial Sequence
  Antisense oligo
agaauuguccacgagcgaug

SEQ ID NO: 16821 - RNA, 20 nt, Artificial Sequence
  Antisense oligo
cagaauuguccacgagcgau

SEQ ID NO: 16822 - RNA, 20 nt, Artificial Sequence
  Antisense oligo
acagaauuguccacgagcga

SEQ ID NO: 16823 - RNA, 20 nt, Artificial Sequence
  Antisense oligo
cacagaauuguccacgagcg

SEQ ID NO: 16824 - RNA, 20 nt, Artificial Sequence
  Antisense oligo
gcacagaauuguccacgagc

SEQ ID NO: 16825 - RNA, 20 nt, Artificial Sequence
  Antisense oligo
ggcacagaauuguccacgag

SEQ ID NO: 16826 - RNA, 20 nt, Artificial Sequence
  Antisense oligo
uggcacagaauuguccacga

SEQ ID NO: 16827 - RNA, 20 nt, Artificial Sequence
  Antisense oligo
auggcacagaauuguccacg

SEQ ID NO: 16828 - RNA, 20 nt, Artificial Sequence
  Antisense oligo
aauggcacagaauuguccac

SEQ ID NO: 16829 - RNA, 20 nt, Artificial Sequence
  Antisense oligo
cccucaacaauggcacagaa

SEQ ID NO: 16830 - RNA, 20 nt, Artificial Sequence
  Antisense oligo
cgcccucaacaauggcacag

SEQ ID NO: 16831 - RNA, 20 nt, Artificial Sequence
  Antisense oligo
caccguuccaucaagguugc

SEQ ID NO: 16832 - RNA, 20 nt, Artificial Sequence
  Antisense oligo
ucaccguuccaucaagguug

SEQ ID NO: 16833 - RNA, 20 nt, Artificial Sequence
  Antisense oligo
gucaccguuccaucaagguu

SEQ ID NO: 16834 - RNA, 20 nt, Artificial Sequence
  Antisense oligo
ugucaccguuccaucaaggu

SEQ ID NO: 16835 - RNA, 20 nt, Artificial Sequence
  Antisense oligo
ucugucaccguuccaucaag

SEQ ID NO: 16836 - RNA, 20 nt, Artificial Sequence
  Antisense oligo
uucugucaccguuccaucaa

SEQ ID NO: 16837 - RNA, 20 nt, Artificial Sequence
  Antisense oligo
auuucugucaccguuccauc

SEQ ID NO: 16838 - RNA, 20 nt, Artificial Sequence
  Antisense oligo
cauuucugucaccguuccau

SEQ ID NO: 16839 - RNA, 20 nt, Artificial Sequence
  Antisense oligo
gccauuucugucaccguucc

SEQ ID NO: 16840 - RNA, 20 nt, Artificial Sequence
  Antisense oligo
ggccauuucugucaccguuc

SEQ ID NO: 16841 - RNA, 20 nt, Artificial Sequence
  Antisense oligo
cacacagaaggacggcugca

SEQ ID NO: 16842 - RNA, 20 nt, Artificial Sequence
  Antisense oligo
uccacacagaaggacggcug

SEQ ID NO: 16843 - RNA, 20 nt, Artificial Sequence
  Antisense oligo
aagaguucauucuguccaca

SEQ ID NO: 16844 - RNA, 20 nt, Artificial Sequence
  Antisense oligo
caagaguucauucuguccac

SEQ ID NO: 16845 - RNA, 20 nt, Artificial Sequence
  Antisense oligo
ccaagaguucauucugucca

SEQ ID NO: 16846 - RNA, 20 nt, Artificial Sequence
  Antisense oligo
gaaggccagauucuuuaggg

SEQ ID NO: 16847 - RNA, 20 nt, Artificial Sequence
  Antisense oligo
ggccuacucuuaccgccaug

SEQ ID NO: 16848 - RNA, 20 nt, Artificial Sequence
  Antisense oligo
uguggccuacucuuaccgcc

SEQ ID NO: 16849 - RNA, 20 nt, Artificial Sequence
  Antisense oligo
auuguggccuacucuuaccg

SEQ ID NO: 16850 - RNA, 20 nt, Artificial Sequence
  Antisense oligo
aauuguggccuacucuuacc

SEQ ID NO: 16851 - RNA, 20 nt, Artificial Sequence
  Antisense oligo
gaauuguggccuacucuuac

SEQ ID NO: 16852 - RNA, 20 nt, Artificial Sequence
  Antisense oligo
ggaauuguggccuacucuua

SEQ ID NO: 16853 - RNA, 20 nt, Artificial Sequence
  Antisense oligo
uggaauuguggccuacucuu

SEQ ID NO: 16854 - RNA, 20 nt, Artificial Sequence
  Antisense oligo
gauggaauuguggccuacuc

SEQ ID NO: 16855 - RNA, 20 nt, Artificial Sequence
  Antisense oligo
cgauggaauuguggccuacu

SEQ ID NO: 16856 - RNA, 20 nt, Artificial Sequence
  Antisense oligo
ccgauggaauuguggccuac

SEQ ID NO: 16857 - RNA, 20 nt, Artificial Sequence
  Antisense oligo
gccgauggaauuguggccua

SEQ ID NO: 16858 - RNA, 20 nt, Artificial Sequence
  Antisense oligo
aaggccgauggaauuguggc

SEQ ID NO: 16859 - RNA, 20 nt, Artificial Sequence
  Antisense oligo
gaaggccgauggaauugugg

SEQ ID NO: 16860 - RNA, 20 nt, Artificial Sequence
  Antisense oligo
ugaaggccgauggaauugug

SEQ ID NO: 16861 - RNA, 20 nt, Artificial Sequence
  Antisense oligo
gugaaggccgauggaauugu

SEQ ID NO: 16862 - RNA, 20 nt, Artificial Sequence
  Antisense oligo
agugaaggccgauggaauug

SEQ ID NO: 16863 - RNA, 20 nt, Artificial Sequence
  Antisense oligo
cagugaaggccgauggaauu

SEQ ID NO: 16864 - RNA, 20 nt, Artificial Sequence
  Antisense oligo
ccagugaaggccgauggaau

SEQ ID NO: 16865 - RNA, 20 nt, Artificial Sequence
  Antisense oligo
guuccagugaaggccgaugg

SEQ ID NO: 16866 - RNA, 20 nt, Artificial Sequence
  Antisense oligo
cuacagugacaagcucuggg

SEQ ID NO: 16867 - RNA, 20 nt, Artificial Sequence
  Antisense oligo
ggucucuacagugacaagcu

SEQ ID NO: 16868 - RNA, 20 nt, Artificial Sequence
  Antisense oligo
cggucucuacagugacaagc

SEQ ID NO: 16869 - RNA, 20 nt, Artificial Sequence
  Antisense oligo
ucggucucuacagugacaag

SEQ ID NO: 16870 - RNA, 20 nt, Artificial Sequence
  Antisense oligo
cucggucucuacagugacaa

SEQ ID NO: 16871 - RNA, 20 nt, Artificial Sequence
  Antisense oligo
gcucggucucuacagugaca

SEQ ID NO: 16872 - RNA, 20 nt, Artificial Sequence
  Antisense oligo
agcucggucucuacagugac

SEQ ID NO: 16873 - RNA, 20 nt, Artificial Sequence
  Antisense oligo
cagcucggucucuacaguga

SEQ ID NO: 16874 - RNA, 20 nt, Artificial Sequence
  Antisense oligo
gcagcucggucucuacagug

SEQ ID NO: 16875 - RNA, 20 nt, Artificial Sequence
  Antisense oligo
ugcagcucggucucuacagu

SEQ ID NO: 16876 - RNA, 20 nt, Artificial Sequence
  Antisense oligo
gcucaagaguucccacagcu

SEQ ID NO: 16877 - RNA, 20 nt, Artificial Sequence
  Antisense oligo
ugcucaagaguucccacagc

SEQ ID NO: 16878 - RNA, 20 nt, Artificial Sequence
  Antisense oligo
gaugcucaagaguucccaca

SEQ ID NO: 16879 - RNA, 20 nt, Artificial Sequence
  Antisense oligo
agaugcucaagaguucccac

SEQ ID NO: 16880 - RNA, 20 nt, Artificial Sequence
  Antisense oligo
aagaugcucaagaguuccca

SEQ ID NO: 16881 - RNA, 20 nt, Artificial Sequence
  Antisense oligo
uaaagaugcucaagaguucc

SEQ ID NO: 16882 - RNA, 20 nt, Artificial Sequence
  Antisense oligo
cugaggagauaaagaugcuc

SEQ ID NO: 16883 - RNA, 20 nt, Artificial Sequence
  Antisense oligo
gugacacaaaggcagagaac

SEQ ID NO: 16884 - RNA, 20 nt, Artificial Sequence
  Antisense oligo
ucaggugacacaaaggcaga

SEQ ID NO: 16885 - RNA, 20 nt, Artificial Sequence
  Antisense oligo
aucaggugacacaaaggcag

SEQ ID NO: 16886 - RNA, 20 nt, Artificial Sequence
  Antisense oligo
aaucaggugacacaaaggca

SEQ ID NO: 16887 - RNA, 20 nt, Artificial Sequence
  Antisense oligo
gaaucaggugacacaaaggc

SEQ ID NO: 16888 - RNA, 20 nt, Artificial Sequence
  Antisense oligo
agaaucaggugacacaaagg

SEQ ID NO: 16889 - RNA, 20 nt, Artificial Sequence
  Antisense oligo
caagaaucaggugacacaaa

SEQ ID NO: 16890 - RNA, 20 nt, Artificial Sequence
  Antisense oligo
ucaagaaucaggugacacaa

SEQ ID NO: 16891 - RNA, 20 nt, Artificial Sequence
  Antisense oligo
gcucaagaaucaggugacac

SEQ ID NO: 16892 - RNA, 20 nt, Artificial Sequence
  Antisense oligo
gugcucaagaaucaggugac

SEQ ID NO: 16893 - RNA, 20 nt, Artificial Sequence
  Antisense oligo
ugugcucaagaaucagguga

SEQ ID NO: 16894 - RNA, 20 nt, Artificial Sequence
  Antisense oligo
gugugcucaagaaucaggug

SEQ ID NO: 16895 - RNA, 20 nt, Artificial Sequence
  Antisense oligo
ugugugcucaagaaucaggu

SEQ ID NO: 16896 - RNA, 20 nt, Artificial Sequence
  Antisense oligo
ucacuaucuugugugcucaa

SEQ ID NO: 16897 - RNA, 20 nt, Artificial Sequence
  Antisense oligo
gucacuaucuugugugcuca

SEQ ID NO: 16898 - RNA, 20 nt, Artificial Sequence
  Antisense oligo
ugucacuaucuugugugcuc

SEQ ID NO: 16899 - RNA, 20 nt, Artificial Sequence
  Antisense oligo
gucugucacuaucuugugug

SEQ ID NO: 16900 - RNA, 20 nt, Artificial Sequence
  Antisense oligo
agucugucacuaucuugugu

SEQ ID NO: 16901 - RNA, 20 nt, Artificial Sequence
  Antisense oligo
aagucugucacuaucuugug

SEQ ID NO: 16902 - RNA, 20 nt, Artificial Sequence
  Antisense oligo
ggcaagucugucacuaucuu

SEQ ID NO: 16903 - RNA, 20 nt, Artificial Sequence
  Antisense oligo
aaggcaagucugucacuauc

SEQ ID NO: 16904 - RNA, 20 nt, Artificial Sequence
  Antisense oligo
gcaaggcaagucugucacua

SEQ ID NO: 16905 - RNA, 20 nt, Artificial Sequence
  Antisense oligo
ggcaaggcaagucugucacu

SEQ ID NO: 16906 - RNA, 20 nt, Artificial Sequence
  Antisense oligo
gggcaaggcaagucugucac

SEQ ID NO: 16907 - RNA, 20 nt, Artificial Sequence
  Antisense oligo
agggcaaggcaagucuguca

SEQ ID NO: 16908 - RNA, 20 nt, Artificial Sequence
  Antisense oligo
aagggcaaggcaagucuguc

SEQ ID NO: 16909 - RNA, 20 nt, Artificial Sequence
  Antisense oligo
aaagggcaaggcaagucugu

SEQ ID NO: 16910 - RNA, 20 nt, Artificial Sequence
  Antisense oligo
uaacaaagggcaaggcaagu

SEQ ID NO: 16911 - RNA, 20 nt, Artificial Sequence
  Antisense oligo
auaacaaagggcaaggcaag

SEQ ID NO: 16912 - RNA, 20 nt, Artificial Sequence
  Antisense oligo
aauaacaaagggcaaggcaa

SEQ ID NO: 16913 - RNA, 20 nt, Artificial Sequence
  Antisense oligo
ugaaauaacaaagggcaagg

SEQ ID NO: 16914 - RNA, 20 nt, Artificial Sequence
  Antisense oligo
gugaaauaacaaagggcaag

SEQ ID NO: 16915 - RNA, 20 nt, Artificial Sequence
  Antisense oligo
cugugaaauaacaaagggca

SEQ ID NO: 16916 - RNA, 20 nt, Artificial Sequence
  Antisense oligo
ccugugaaauaacaaagggc

SEQ ID NO: 16917 - RNA, 20 nt, Artificial Sequence
  Antisense oligo
uccugugaaauaacaaaggg

SEQ ID NO: 16918 - RNA, 20 nt, Artificial Sequence
  Antisense oligo
agcugucugugaagaaaaca

SEQ ID NO: 16919 - RNA, 20 nt, Artificial Sequence
  Antisense oligo
aagcugucugugaagaaaac

SEQ ID NO: 16920 - RNA, 20 nt, Artificial Sequence
  Antisense oligo
caagcugucugugaagaaaa

SEQ ID NO: 16921 - RNA, 20 nt, Artificial Sequence
  Antisense oligo
ucaagcugucugugaagaaa

SEQ ID NO: 16922 - RNA, 20 nt, Artificial Sequence
  Antisense oligo
cucaagcugucugugaagaa

SEQ ID NO: 16923 - RNA, 20 nt, Artificial Sequence
  Antisense oligo
gacuucucaagcugucugug

SEQ ID NO: 16924 - RNA, 20 nt, Artificial Sequence
  Antisense oligo
ggacuucucaagcugucugu

SEQ ID NO: 16925 - RNA, 20 nt, Artificial Sequence
  Antisense oligo
uggacuucucaagcugucug

SEQ ID NO: 16926 - RNA, 20 nt, Artificial Sequence
  Antisense oligo
cuggacuucucaagcugucu

SEQ ID NO: 16927 - RNA, 20 nt, Artificial Sequence
  Antisense oligo
cugcuggacuucucaagcug

SEQ ID NO: 16928 - RNA, 20 nt, Artificial Sequence
  Antisense oligo
ucugcuggacuucucaagcu

SEQ ID NO: 16929 - RNA, 20 nt, Artificial Sequence
  Antisense oligo
uucugcuggacuucucaagc

SEQ ID NO: 16930 - RNA, 20 nt, Artificial Sequence
  Antisense oligo
cuucugcuggacuucucaag

SEQ ID NO: 16931 - RNA, 20 nt, Artificial Sequence
  Antisense oligo
ccuucugcuggacuucucaa

SEQ ID NO: 16932 - RNA, 20 nt, Artificial Sequence
  Antisense oligo
gcuuuccuucugcuggacuu

SEQ ID NO: 16933 - RNA, 20 nt, Artificial Sequence
  Antisense oligo
gaagaaagggaacucugcuu

SEQ ID NO: 16934 - RNA, 20 nt, Artificial Sequence
  Antisense oligo
gagcuugucaccugggugcu

SEQ ID NO: 16935 - RNA, 20 nt, Artificial Sequence
  Antisense oligo
ugagcuugucaccugggugc

SEQ ID NO: 16936 - RNA, 20 nt, Artificial Sequence
  Antisense oligo
cuagauaagugagcuuguca

SEQ ID NO: 16937 - RNA, 20 nt, Artificial Sequence
  Antisense oligo
augguuggaagaaaagcaug

SEQ ID NO: 16938 - RNA, 20 nt, Artificial Sequence
  Antisense oligo
gucuucaggcaugguuggaa

SEQ ID NO: 16939 - RNA, 20 nt, Artificial Sequence
  Antisense oligo
caagucuucaggcaugguug

SEQ ID NO: 16940 - RNA, 20 nt, Artificial Sequence
  Antisense oligo
gcaagucuucaggcaugguu

SEQ ID NO: 16941 - RNA, 20 nt, Artificial Sequence
  Antisense oligo
agcaagucuucaggcauggu

SEQ ID NO: 16942 - RNA, 20 nt, Artificial Sequence
  Antisense oligo
agccagcaagucuucaggca

SEQ ID NO: 16943 - RNA, 20 nt, Artificial Sequence
  Antisense oligo
gagccagcaagucuucaggc

SEQ ID NO: 16944 - RNA, 20 nt, Artificial Sequence
  Antisense oligo
cuccgagcuugagccagcaa

SEQ ID NO: 16945 - RNA, 20 nt, Artificial Sequence
  Antisense oligo
uuccaccuccgagcuugagc

SEQ ID NO: 16946 - RNA, 20 nt, Artificial Sequence
  Antisense oligo
cuuccaccuccgagcuugag

SEQ ID NO: 16947 - RNA, 20 nt, Artificial Sequence
  Antisense oligo
ccuuccaccuccgagcuuga

SEQ ID NO: 16948 - RNA, 20 nt, Artificial Sequence
  Antisense oligo
acccuuccaccuccgagcuu

SEQ ID NO: 16949 - RNA, 20 nt, Artificial Sequence
  Antisense oligo
uguaccaguggacucgcucc

SEQ ID NO: 16950 - RNA, 20 nt, Artificial Sequence
  Antisense oligo
gaagcucaaaggaguguggg

SEQ ID NO: 16951 - RNA, 20 nt, Artificial Sequence
  Antisense oligo
ugaagcucaaaggagugugg

SEQ ID NO: 16952 - RNA, 20 nt, Artificial Sequence
  Antisense oligo
uggacacccuuugaagcuca

SEQ ID NO: 16953 - RNA, 20 nt, Artificial Sequence
  Antisense oligo
agcaucuggacacccuuuga

SEQ ID NO: 16954 - RNA, 20 nt, Artificial Sequence
  Antisense oligo
uagcaucuggacacccuuug

SEQ ID NO: 16955 - RNA, 20 nt, Artificial Sequence
  Antisense oligo
auagcaucuggacacccuuu

SEQ ID NO: 16956 - RNA, 20 nt, Artificial Sequence
  Antisense oligo
uucauagcaucuggacaccc

SEQ ID NO: 16957 - RNA, 20 nt, Artificial Sequence
  Antisense oligo
cuucauagcaucuggacacc

SEQ ID NO: 16958 - RNA, 20 nt, Artificial Sequence
  Antisense oligo
gcuucauagcaucuggacac

SEQ ID NO: 16959 - RNA, 20 nt, Artificial Sequence
  Antisense oligo
cccugaggcacaaaccacgu

SEQ ID NO: 16960 - RNA, 20 nt, Artificial Sequence
  Antisense oligo
uggacccugaggcacaaacc

SEQ ID NO: 16961 - RNA, 20 nt, Artificial Sequence
  Antisense oligo
uuggacccugaggcacaaac

SEQ ID NO: 16962 - RNA, 20 nt, Artificial Sequence
  Antisense oligo
uuuuggacccugaggcacaa

SEQ ID NO: 16963 - RNA, 20 nt, Artificial Sequence
  Antisense oligo
guuuuggacccugaggcaca

SEQ ID NO: 16964 - RNA, 20 nt, Artificial Sequence
  Antisense oligo
ugguuuuggacccugaggca

SEQ ID NO: 16965 - RNA, 20 nt, Artificial Sequence
  Antisense oligo
gugguuuuggacccugaggc

SEQ ID NO: 16966 - RNA, 20 nt, Artificial Sequence
  Antisense oligo
augcaggugguuuuggaccc

SEQ ID NO: 16967 - RNA, 20 nt, Artificial Sequence
  Antisense oligo
aaugcaggugguuuuggacc

SEQ ID NO: 16968 - RNA, 20 nt, Artificial Sequence
  Antisense oligo
gaaugcaggugguuuuggac

SEQ ID NO: 16969 - RNA, 20 nt, Artificial Sequence
  Antisense oligo
uagaaugcaggugguuuugg

SEQ ID NO: 16970 - RNA, 20 nt, Artificial Sequence
  Antisense oligo
guagaaugcaggugguuuug

SEQ ID NO: 16971 - RNA, 20 nt, Artificial Sequence
  Antisense oligo
gguagaaugcaggugguuuu

SEQ ID NO: 16972 - RNA, 20 nt, Artificial Sequence
  Antisense oligo
cgguagaaugcaggugguuu

SEQ ID NO: 16973 - RNA, 20 nt, Artificial Sequence
  Antisense oligo
ccgguagaaugcaggugguu

SEQ ID NO: 16974 - RNA, 20 nt, Artificial Sequence
  Antisense oligo
caagccauucgucuucugca

SEQ ID NO: 16975 - RNA, 20 nt, Artificial Sequence
  Antisense oligo
ucaagccauucgucuucugc

SEQ ID NO: 16976 - RNA, 20 nt, Artificial Sequence
  Antisense oligo
uucaagccauucgucuucug

SEQ ID NO: 16977 - RNA, 20 nt, Artificial Sequence
  Antisense oligo
cuucaagccauucgucuucu

SEQ ID NO: 16978 - RNA, 20 nt, Artificial Sequence
  Antisense oligo
ccuucaagccauucgucuuc

SEQ ID NO: 16979 - RNA, 20 nt, Artificial Sequence
  Antisense oligo
uccuucaagccauucgucuu

SEQ ID NO: 16980 - RNA, 20 nt, Artificial Sequence
  Antisense oligo
cuccuucaagccauucgucu

SEQ ID NO: 16981 - RNA, 20 nt, Artificial Sequence
  Antisense oligo
gcuccuucaagccauucguc

SEQ ID NO: 16982 - RNA, 20 nt, Artificial Sequence
  Antisense oligo
cagcuccuucaagccauucg

SEQ ID NO: 16983 - RNA, 20 nt, Artificial Sequence
  Antisense oligo
gccagcuccuucaagccauu

SEQ ID NO: 16984 - RNA, 20 nt, Artificial Sequence
  Antisense oligo
gagugccagcuccuucaagc

SEQ ID NO: 16985 - RNA, 20 nt, Artificial Sequence
  Antisense oligo
gguuuggaucaucuagccgg

SEQ ID NO: 16986 - RNA, 20 nt, Artificial Sequence
  Antisense oligo
ugguuuggaucaucuagccg

SEQ ID NO: 16987 - RNA, 20 nt, Artificial Sequence
  Antisense oligo
augguuuggaucaucuagcc

SEQ ID NO: 16988 - RNA, 20 nt, Artificial Sequence
  Antisense oligo
aaugguuuggaucaucuagc

SEQ ID NO: 16989 - RNA, 20 nt, Artificial Sequence
  Antisense oligo
gcaucacagagggccuuuuc

SEQ ID NO: 16990 - RNA, 20 nt, Artificial Sequence
  Antisense oligo
gaagugcaucacagagggcc

SEQ ID NO: 16991 - RNA, 20 nt, Artificial Sequence
  Antisense oligo
agaagugcaucacagagggc

SEQ ID NO: 16992 - RNA, 20 nt, Artificial Sequence
  Antisense oligo
acagaagugcaucacagagg

SEQ ID NO: 16993 - RNA, 20 nt, Artificial Sequence
  Antisense oligo
aacagaagugcaucacagag

SEQ ID NO: 16994 - RNA, 20 nt, Artificial Sequence
  Antisense oligo
cagagaacagaagugcauca

SEQ ID NO: 16995 - RNA, 20 nt, Artificial Sequence
  Antisense oligo
gcauauuccagagaacagaa

SEQ ID NO: 16996 - RNA, 20 nt, Artificial Sequence
  Antisense oligo
ggcauauuccagagaacaga

SEQ ID NO: 16997 - RNA, 20 nt, Artificial Sequence
  Antisense oligo
aauggcauauuccagagaac

SEQ ID NO: 16998 - RNA, 20 nt, Artificial Sequence
  Antisense oligo
caaaauggcauauuccagag

SEQ ID NO: 16999 - RNA, 20 nt, Artificial Sequence
  Antisense oligo
ucccaaaauggcauauucca

SEQ ID NO: 17000 - RNA, 20 nt, Artificial Sequence
  Antisense oligo
cucccaaaauggcauauucc

SEQ ID NO: 17001 - RNA, 20 nt, Artificial Sequence
  Antisense oligo
ugaugugguucccagucccu

SEQ ID NO: 17002 - RNA, 20 nt, Artificial Sequence
  Antisense oligo
cgucucugaugugguuccca

SEQ ID NO: 17003 - RNA, 20 nt, Artificial Sequence
  Antisense oligo
augcgucucugaugugguuc

SEQ ID NO: 17004 - RNA, 20 nt, Artificial Sequence
  Antisense oligo
aaugcgucucugaugugguu

SEQ ID NO: 17005 - RNA, 20 nt, Artificial Sequence
  Antisense oligo
ugaaugcgucucugaugugg

SEQ ID NO: 17006 - RNA, 20 nt, Artificial Sequence
  Antisense oligo
uugaaugcgucucugaugug

SEQ ID NO: 17007 - RNA, 20 nt, Artificial Sequence
  Antisense oligo
uuugaaugcgucucugaugu

SEQ ID NO: 17008 - RNA, 20 nt, Artificial Sequence
  Antisense oligo
ggccuuugaaugcgucucug

SEQ ID NO: 17009 - RNA, 20 nt, Artificial Sequence
  Antisense oligo
gggccuuugaaugcgucucu

SEQ ID NO: 17010 - RNA, 20 nt, Artificial Sequence
  Antisense oligo
ugggccuuugaaugcgucuc

SEQ ID NO: 17011 - RNA, 20 nt, Artificial Sequence
  Antisense oligo
gugggccuuugaaugcgucu

SEQ ID NO: 17012 - RNA, 20 nt, Artificial Sequence
  Antisense oligo
ggugggccuuugaaugcguc

SEQ ID NO: 17013 - RNA, 20 nt, Artificial Sequence
  Antisense oligo
guggugggccuuugaaugcg

SEQ ID NO: 17014 - RNA, 20 nt, Artificial Sequence
  Antisense oligo
uuguggugggccuuugaaug

SEQ ID NO: 17015 - RNA, 20 nt, Artificial Sequence
  Antisense oligo
uuuguggugggccuuugaau

SEQ ID NO: 17016 - RNA, 20 nt, Artificial Sequence
  Antisense oligo
guuuuguggugggccuuuga

SEQ ID NO: 17017 - RNA, 20 nt, Artificial Sequence
  Antisense oligo
uguuuuguggugggccuuug

SEQ ID NO: 17018 - RNA, 20 nt, Artificial Sequence
  Antisense oligo
cucccgguucuauauuucau

SEQ ID NO: 17019 - RNA, 20 nt, Artificial Sequence
  Antisense oligo
ucucccgguucuauauuuca

SEQ ID NO: 17020 - RNA, 20 nt, Artificial Sequence
  Antisense oligo
gucucccgguucuauauuuc

SEQ ID NO: 17021 - RNA, 20 nt, Artificial Sequence
  Antisense oligo
agucucccgguucuauauuu

SEQ ID NO: 17022 - RNA, 20 nt, Artificial Sequence
  Antisense oligo
cagucucccgguucuauauu

SEQ ID NO: 17023 - RNA, 20 nt, Artificial Sequence
  Antisense oligo
ucagucucccgguucuauau

SEQ ID NO: 17024 - RNA, 20 nt, Artificial Sequence
  Antisense oligo
gucagucucccgguucuaua

SEQ ID NO: 17025 - RNA, 20 nt, Artificial Sequence
  Antisense oligo
agucagucucccgguucuau

SEQ ID NO: 17026 - RNA, 20 nt, Artificial Sequence
  Antisense oligo
gagucagucucccgguucua

SEQ ID NO: 17027 - RNA, 20 nt, Artificial Sequence
  Antisense oligo
ugagucagucucccgguucu

SEQ ID NO: 17028 - RNA, 20 nt, Artificial Sequence
  Antisense oligo
augagucagucucccgguuc

SEQ ID NO: 17029 - RNA, 20 nt, Artificial Sequence
  Antisense oligo
uauaugagucagucucccgg

SEQ ID NO: 17030 - RNA, 20 nt, Artificial Sequence
  Antisense oligo
uuauaugagucagucucccg

SEQ ID NO: 17031 - RNA, 20 nt, Artificial Sequence
  Antisense oligo
guuauaugagucagucuccc

SEQ ID NO: 17032 - RNA, 20 nt, Artificial Sequence
  Antisense oligo
gguuauaugagucagucucc

SEQ ID NO: 17033 - RNA, 20 nt, Artificial Sequence
  Antisense oligo
uggguuauaugagucagucu

SEQ ID NO: 17034 - RNA, 20 nt, Artificial Sequence
  Antisense oligo
cauggguuauaugagucagu

SEQ ID NO: 17035 - RNA, 20 nt, Artificial Sequence
  Antisense oligo
auuuacucaggcaacagcaa

SEQ ID NO: 17036 - RNA, 20 nt, Artificial Sequence
  Antisense oligo
uauuuacucaggcaacagca

SEQ ID NO: 17037 - RNA, 20 nt, Artificial Sequence
  Antisense oligo
auauuuacucaggcaacagc

SEQ ID NO: 17038 - RNA, 20 nt, Artificial Sequence
  Antisense oligo
caagguggacaggauucuag

SEQ ID NO: 17039 - RNA, 20 nt, Artificial Sequence
  Antisense oligo
gcaagguggacaggauucua

SEQ ID NO: 17040 - RNA, 20 nt, Artificial Sequence
  Antisense oligo
ggaggcaagguggacaggau

SEQ ID NO: 17041 - RNA, 20 nt, Artificial Sequence
  Antisense oligo
uggaggcaagguggacagga

SEQ ID NO: 17042 - RNA, 20 nt, Artificial Sequence
  Antisense oligo
aauauaggcccauaccaggg

SEQ ID NO: 17043 - RNA, 20 nt, Artificial Sequence
  Antisense oligo
gaauauaggcccauaccagg

SEQ ID NO: 17044 - RNA, 20 nt, Artificial Sequence
  Antisense oligo
agaauauaggcccauaccag

SEQ ID NO: 17045 - RNA, 20 nt, Artificial Sequence
  Antisense oligo
uagaauauaggcccauacca

SEQ ID NO: 17046 - RNA, 20 nt, Artificial Sequence
  Antisense oligo
uuagaauauaggcccauacc

SEQ ID NO: 17047 - RNA, 20 nt, Artificial Sequence
  Antisense oligo
gcaauuagaauauaggccca

SEQ ID NO: 17048 - RNA, 20 nt, Artificial Sequence
  Antisense oligo
agcaauuagaauauaggccc

SEQ ID NO: 17049 - RNA, 20 nt, Artificial Sequence
  Antisense oligo
caugacaccugccugaagcu

SEQ ID NO: 17050 - RNA, 20 nt, Artificial Sequence
  Antisense oligo
uuacaugacaccugccugaa

SEQ ID NO: 17051 - RNA, 20 nt, Artificial Sequence
  Antisense oligo
guuacaugacaccugccuga

SEQ ID NO: 17052 - RNA, 20 nt, Artificial Sequence
  Antisense oligo
aguuacaugacaccugccug

SEQ ID NO: 17053 - RNA, 20 nt, Artificial Sequence
  Antisense oligo
aaguuacaugacaccugccu

SEQ ID NO: 17054 - RNA, 20 nt, Artificial Sequence
  Antisense oligo
uaaguuacaugacaccugcc

SEQ ID NO: 17055 - RNA, 20 nt, Artificial Sequence
  Antisense oligo
uuaaguuacaugacaccugc

SEQ ID NO: 17056 - RNA, 20 nt, Artificial Sequence
  Antisense oligo
cccacgcuaauuuguuaagu

SEQ ID NO: 17057 - RNA, 20 nt, Artificial Sequence
  Antisense oligo
ucccacgcuaauuuguuaag

SEQ ID NO: 17058 - RNA, 20 nt, Artificial Sequence
  Antisense oligo
caucccacgcuaauuuguua

SEQ ID NO: 17059 - RNA, 20 nt, Artificial Sequence
  Antisense oligo
gcaucccacgcuaauuuguu

SEQ ID NO: 17060 - RNA, 20 nt, Artificial Sequence
  Antisense oligo
agcaucccacgcuaauuugu

SEQ ID NO: 17061 - RNA, 20 nt, Artificial Sequence
  Antisense oligo
gagcaucccacgcuaauuug

SEQ ID NO: 17062 - RNA, 20 nt, Artificial Sequence
  Antisense oligo
agagcaucccacgcuaauuu

SEQ ID NO: 17063 - RNA, 20 nt, Artificial Sequence
  Antisense oligo
cagagcaucccacgcuaauu

SEQ ID NO: 17064 - RNA, 20 nt, Artificial Sequence
  Antisense oligo
ccagagcaucccacgcuaau

SEQ ID NO: 17065 - RNA, 20 nt, Artificial Sequence
  Antisense oligo
uccagagcaucccacgcuaa

SEQ ID NO: 17066 - RNA, 20 nt, Artificial Sequence
  Antisense oligo
guccagagcaucccacgcua

SEQ ID NO: 17067 - RNA, 20 nt, Artificial Sequence
  Antisense oligo
uguccagagcaucccacgcu

SEQ ID NO: 17068 - RNA, 20 nt, Artificial Sequence
  Antisense oligo
acuguccagagcaucccacg

SEQ ID NO: 17069 - RNA, 20 nt, Artificial Sequence
  Antisense oligo
gacuguccagagcaucccac

SEQ ID NO: 17070 - RNA, 20 nt, Artificial Sequence
  Antisense oligo
ugacuguccagagcauccca

SEQ ID NO: 17071 - RNA, 20 nt, Artificial Sequence
  Antisense oligo
aaugacuguccagagcaucc

SEQ ID NO: 17072 - RNA, 20 nt, Artificial Sequence
  Antisense oligo
gaaugacuguccagagcauc

SEQ ID NO: 17073 - RNA, 20 nt, Artificial Sequence
  Antisense oligo
uaugagaaugacuguccaga

SEQ ID NO: 17074 - RNA, 20 nt, Artificial Sequence
  Antisense oligo
auaugagaaugacuguccag

SEQ ID NO: 17075 - RNA, 20 nt, Artificial Sequence
  Antisense oligo
ccacaauaugagaaugacug

SEQ ID NO: 17076 - RNA, 20 nt, Artificial Sequence
  Antisense oligo
gaccacaauaugagaaugac

SEQ ID NO: 17077 - RNA, 20 nt, Artificial Sequence
  Antisense oligo
cugaccacaauaugagaaug

SEQ ID NO: 17078 - RNA, 20 nt, Artificial Sequence
  Antisense oligo
ccugaccacaauaugagaau

SEQ ID NO: 17079 - RNA, 20 nt, Artificial Sequence
  Antisense oligo
cccugaccacaauaugagaa

SEQ ID NO: 17080 - RNA, 20 nt, Artificial Sequence
  Antisense oligo
gcccugaccacaauaugaga

SEQ ID NO: 17081 - RNA, 20 nt, Artificial Sequence
  Antisense oligo
ggcccugaccacaauaugag

SEQ ID NO: 17082 - RNA, 20 nt, Artificial Sequence
  Antisense oligo
uggcccugaccacaauauga

SEQ ID NO: 17083 - RNA, 20 nt, Artificial Sequence
  Antisense oligo
cucuggcccugaccacaaua

SEQ ID NO: 17084 - RNA, 20 nt, Artificial Sequence
  Antisense oligo
uacucucuggcccugaccac

SEQ ID NO: 17085 - RNA, 20 nt, Artificial Sequence
  Antisense oligo
cuaacucucuacucucuggc

SEQ ID NO: 17086 - RNA, 20 nt, Artificial Sequence
  Antisense oligo
gcuaacucucuacucucugg

SEQ ID NO: 17087 - RNA, 20 nt, Artificial Sequence
  Antisense oligo
aagcuaacucucuacucucu

SEQ ID NO: 17088 - RNA, 20 nt, Artificial Sequence
  Antisense oligo
aaagcuaacucucuacucuc

SEQ ID NO: 17089 - RNA, 20 nt, Artificial Sequence
  Antisense oligo
gaaagcuaacucucuacucu

SEQ ID NO: 17090 - RNA, 20 nt, Artificial Sequence
  Antisense oligo
ggaaagcuaacucucuacuc

SEQ ID NO: 17091 - RNA, 20 nt, Artificial Sequence
  Antisense oligo
gggaaagcuaacucucuacu

SEQ ID NO: 17092 - RNA, 20 nt, Artificial Sequence
  Antisense oligo
guuucacccaaugacccaca

SEQ ID NO: 17093 - RNA, 20 nt, Artificial Sequence
  Antisense oligo
augagguuucacccaaugac

SEQ ID NO: 17094 - RNA, 20 nt, Artificial Sequence
  Antisense oligo
aaugagguuucacccaauga

SEQ ID NO: 17095 - RNA, 20 nt, Artificial Sequence
  Antisense oligo
uaaugagguuucacccaaug

SEQ ID NO: 17096 - RNA, 20 nt, Artificial Sequence
  Antisense oligo
cuaaugagguuucacccaau

SEQ ID NO: 17097 - RNA, 20 nt, Artificial Sequence
  Antisense oligo
gcuaaugagguuucacccaa

SEQ ID NO: 17098 - RNA, 20 nt, Artificial Sequence
  Antisense oligo
ggcuaaugagguuucaccca

SEQ ID NO: 17099 - RNA, 20 nt, Artificial Sequence
  Antisense oligo
uggcuaaugagguuucaccc

SEQ ID NO: 17100 - RNA, 20 nt, Artificial Sequence
  Antisense oligo
caggacacacauuggcuaau

SEQ ID NO: 17101 - RNA, 20 nt, Artificial Sequence
  Antisense oligo
acaggacacacauuggcuaa

SEQ ID NO: 17102 - RNA, 20 nt, Artificial Sequence
  Antisense oligo
aacaggacacacauuggcua

SEQ ID NO: 17103 - RNA, 20 nt, Artificial Sequence
  Antisense oligo
gaacaggacacacauuggcu

SEQ ID NO: 17104 - RNA, 20 nt, Artificial Sequence
  Antisense oligo
agaacaggacacacauuggc

SEQ ID NO: 17105 - RNA, 20 nt, Artificial Sequence
  Antisense oligo
gaagagaacaggacacacau

SEQ ID NO: 17106 - RNA, 20 nt, Artificial Sequence
  Antisense oligo
gugaagagaacaggacacac

SEQ ID NO: 17107 - RNA, 20 nt, Artificial Sequence
  Antisense oligo
gggacaagcugugaagagaa

SEQ ID NO: 17108 - RNA, 20 nt, Artificial Sequence
  Antisense oligo
uugggacaagcugugaagag

SEQ ID NO: 17109 - RNA, 20 nt, Artificial Sequence
  Antisense oligo
cguugggacaagcugugaag

SEQ ID NO: 17110 - RNA, 20 nt, Artificial Sequence
  Antisense oligo
ccguugggacaagcugugaa

SEQ ID NO: 17111 - RNA, 20 nt, Artificial Sequence
  Antisense oligo
gccguugggacaagcuguga

SEQ ID NO: 17112 - RNA, 20 nt, Artificial Sequence
  Antisense oligo
uggccguugggacaagcugu

SEQ ID NO: 17113 - RNA, 20 nt, Artificial Sequence
  Antisense oligo
auggccguugggacaagcug

SEQ ID NO: 17114 - RNA, 20 nt, Artificial Sequence
  Antisense oligo
gauggccguugggacaagcu

SEQ ID NO: 17115 - RNA, 20 nt, Artificial Sequence
  Antisense oligo
aggauggccguugggacaag

SEQ ID NO: 17116 - RNA, 20 nt, Artificial Sequence
  Antisense oligo
aaggauggccguugggacaa

SEQ ID NO: 17117 - RNA, 20 nt, Artificial Sequence
  Antisense oligo
caaggauggccguugggaca

SEQ ID NO: 17118 - RNA, 20 nt, Artificial Sequence
  Antisense oligo
agacucaccucucccacgga

SEQ ID NO: 17119 - RNA, 20 nt, Artificial Sequence
  Antisense oligo
aagacucaccucucccacgg

SEQ ID NO: 17120 - RNA, 20 nt, Artificial Sequence
  Antisense oligo
uaccaagacucaccucuccc

SEQ ID NO: 17121 - RNA, 20 nt, Artificial Sequence
  Antisense oligo
auaccaagacucaccucucc

SEQ ID NO: 17122 - RNA, 20 nt, Artificial Sequence
  Antisense oligo
aauaccaagacucaccucuc

SEQ ID NO: 17123 - RNA, 20 nt, Artificial Sequence
  Antisense oligo
aaauaccaagacucaccucu

SEQ ID NO: 17124 - RNA, 20 nt, Artificial Sequence
  Antisense oligo
uaaauaccaagacucaccuc

SEQ ID NO: 17125 - RNA, 20 nt, Artificial Sequence
  Antisense oligo
cuuaaauaccaagacucacc

SEQ ID NO: 17126 - RNA, 20 nt, Artificial Sequence
  Antisense oligo
cccucaaacccuaucuuaaa

SEQ ID NO: 17127 - RNA, 20 nt, Artificial Sequence
  Antisense oligo
acucuccugacccacgaucc

SEQ ID NO: 17128 - RNA, 20 nt, Artificial Sequence
  Antisense oligo
cacucuccugacccacgauc

SEQ ID NO: 17129 - RNA, 20 nt, Artificial Sequence
  Antisense oligo
ucacucuccugacccacgau

SEQ ID NO: 17130 - RNA, 20 nt, Artificial Sequence
  Antisense oligo
cucacucuccugacccacga

SEQ ID NO: 17131 - RNA, 20 nt, Artificial Sequence
  Antisense oligo
aaacccuuagcgccauuggc

SEQ ID NO: 17132 - RNA, 20 nt, Artificial Sequence
  Antisense oligo
gaaacccuuagcgccauugg

SEQ ID NO: 17133 - RNA, 20 nt, Artificial Sequence
  Antisense oligo
agaaacccuuagcgccauug

SEQ ID NO: 17134 - RNA, 20 nt, Artificial Sequence
  Antisense oligo
uagaaacccuuagcgccauu

SEQ ID NO: 17135 - RNA, 20 nt, Artificial Sequence
  Antisense oligo
cuagaaacccuuagcgccau

SEQ ID NO: 17136 - RNA, 20 nt, Artificial Sequence
  Antisense oligo
ccugggcuagaaacccuuag

SEQ ID NO: 17137 - RNA, 20 nt, Artificial Sequence
  Antisense oligo
cccugggcuagaaacccuua

SEQ ID NO: 17138 - RNA, 20 nt, Artificial Sequence
  Antisense oligo
cugagucugagaagcccugg

SEQ ID NO: 17139 - RNA, 20 nt, Artificial Sequence
  Antisense oligo
ugcugagucugagaagcccu

SEQ ID NO: 17140 - RNA, 20 nt, Artificial Sequence
  Antisense oligo
agugcugagucugagaagcc

SEQ ID NO: 17141 - RNA, 20 nt, Artificial Sequence
  Antisense oligo
ccacagugcugagucugaga

SEQ ID NO: 17142 - RNA, 20 nt, Artificial Sequence
  Antisense oligo
uccacagugcugagucugag

SEQ ID NO: 17143 - RNA, 20 nt, Artificial Sequence
  Antisense oligo
cguccacagugcugagucug

SEQ ID NO: 17144 - RNA, 20 nt, Artificial Sequence
  Antisense oligo
acguccacagugcugagucu

SEQ ID NO: 17145 - RNA, 20 nt, Artificial Sequence
  Antisense oligo
cacguccacagugcugaguc

SEQ ID NO: 17146 - RNA, 20 nt, Artificial Sequence
  Antisense oligo
agccacguccacagugcuga

SEQ ID NO: 17147 - RNA, 20 nt, Artificial Sequence
  Antisense oligo
agagccacguccacagugcu

SEQ ID NO: 17148 - RNA, 20 nt, Artificial Sequence
  Antisense oligo
auacugccagacagccugca

SEQ ID NO: 17149 - RNA, 20 nt, Artificial Sequence
  Antisense oligo
guuuuagcugucacacuggg

SEQ ID NO: 17150 - RNA, 20 nt, Artificial Sequence
  Antisense oligo
gguuuuagcugucacacugg

SEQ ID NO: 17151 - RNA, 20 nt, Artificial Sequence
  Antisense oligo
cugguuuuagcugucacacu

SEQ ID NO: 17152 - RNA, 20 nt, Artificial Sequence
  Antisense oligo
gucugguuuuagcugucaca

SEQ ID NO: 17153 - RNA, 20 nt, Artificial Sequence
  Antisense oligo
caguggcuagaaagaauggc

SEQ ID NO: 17154 - RNA, 20 nt, Artificial Sequence
  Antisense oligo
aagacaaggcucacugaccc

SEQ ID NO: 17155 - RNA, 20 nt, Artificial Sequence
  Antisense oligo
caagacaaggcucacugacc

SEQ ID NO: 17156 - RNA, 20 nt, Artificial Sequence
  Antisense oligo
ucaagacaaggcucacugac

SEQ ID NO: 17157 - RNA, 20 nt, Artificial Sequence
  Antisense oligo
aucaagacaaggcucacuga

SEQ ID NO: 17158 - RNA, 20 nt, Artificial Sequence
  Antisense oligo
cuaucaagacaaggcucacu

SEQ ID NO: 17159 - RNA, 20 nt, Artificial Sequence
  Antisense oligo
ucuaucaagacaaggcucac

SEQ ID NO: 17160 - RNA, 20 nt, Artificial Sequence
  Antisense oligo
uucuaucaagacaaggcuca

SEQ ID NO: 17161 - RNA, 20 nt, Artificial Sequence
  Antisense oligo
auucuaucaagacaaggcuc

SEQ ID NO: 17162 - RNA, 20 nt, Artificial Sequence
  Antisense oligo
cauucuaucaagacaaggcu

SEQ ID NO: 17163 - RNA, 20 nt, Artificial Sequence
  Antisense oligo
ccauucuaucaagacaaggc

SEQ ID NO: 17164 - RNA, 20 nt, Artificial Sequence
  Antisense oligo
gccauucuaucaagacaagg

SEQ ID NO: 17165 - RNA, 20 nt, Artificial Sequence
  Antisense oligo
ugccauucuaucaagacaag

SEQ ID NO: 17166 - RNA, 20 nt, Artificial Sequence
  Antisense oligo
acaccuugccauucuaucaa

SEQ ID NO: 17167 - RNA, 20 nt, Artificial Sequence
  Antisense oligo
aacaccuugccauucuauca

SEQ ID NO: 17168 - RNA, 20 nt, Artificial Sequence
  Antisense oligo
caacaccuugccauucuauc

SEQ ID NO: 17169 - RNA, 20 nt, Artificial Sequence
  Antisense oligo
gugguccaggcaacaccuug

SEQ ID NO: 17170 - RNA, 20 nt, Artificial Sequence
  Antisense oligo
ugugguccaggcaacaccuu

SEQ ID NO: 17171 - RNA, 20 nt, Artificial Sequence
  Antisense oligo
cugugguccaggcaacaccu

SEQ ID NO: 17172 - RNA, 20 nt, Artificial Sequence
  Antisense oligo
auaaugcagccuguggucca

SEQ ID NO: 17173 - RNA, 20 nt, Artificial Sequence
  Antisense oligo
uaauaaugcagccugugguc

SEQ ID NO: 17174 - RNA, 20 nt, Artificial Sequence
  Antisense oligo
cuaauaaugcagccuguggu

SEQ ID NO: 17175 - RNA, 20 nt, Artificial Sequence
  Antisense oligo
gcuaauaaugcagccugugg

SEQ ID NO: 17176 - RNA, 20 nt, Artificial Sequence
  Antisense oligo
uggcaucuggaccacaccuc

SEQ ID NO: 17177 - RNA, 20 nt, Artificial Sequence
  Antisense oligo
uuggcaucuggaccacaccu

SEQ ID NO: 17178 - RNA, 20 nt, Artificial Sequence
  Antisense oligo
uuuggcaucuggaccacacc

SEQ ID NO: 17179 - RNA, 20 nt, Artificial Sequence
  Antisense oligo
cuuuggcaucuggaccacac

SEQ ID NO: 17180 - RNA, 20 nt, Artificial Sequence
  Antisense oligo
uuccuuuggcaucuggacca

SEQ ID NO: 17181 - RNA, 20 nt, Artificial Sequence
  Antisense oligo
auggcgcacagccuacacgu

SEQ ID NO: 17182 - RNA, 20 nt, Artificial Sequence
  Antisense oligo
ccagagaggaauaaucaaca

SEQ ID NO: 17183 - RNA, 20 nt, Artificial Sequence
  Antisense oligo
uccagagaggaauaaucaac

SEQ ID NO: 17184 - RNA, 20 nt, Artificial Sequence
  Antisense oligo
gcuugggaauccagagagga

SEQ ID NO: 17185 - RNA, 20 nt, Artificial Sequence
  Antisense oligo
uagaugcuugggaauccaga

SEQ ID NO: 17186 - RNA, 20 nt, Artificial Sequence
  Antisense oligo
cuagaugcuugggaauccag

SEQ ID NO: 17187 - RNA, 20 nt, Artificial Sequence
  Antisense oligo
gcuagaugcuugggaaucca

SEQ ID NO: 17188 - RNA, 20 nt, Artificial Sequence
  Antisense oligo
ggcuagaugcuugggaaucc

SEQ ID NO: 17189 - RNA, 20 nt, Artificial Sequence
  Antisense oligo
aggcuagaugcuugggaauc

SEQ ID NO: 17190 - RNA, 20 nt, Artificial Sequence
  Antisense oligo
uaggcuagaugcuugggaau

SEQ ID NO: 17191 - RNA, 20 nt, Artificial Sequence
  Antisense oligo
uauggagggcucuaggcuag

SEQ ID NO: 17192 - RNA, 20 nt, Artificial Sequence
  Antisense oligo
guauggagggcucuaggcua

SEQ ID NO: 17193 - RNA, 20 nt, Artificial Sequence
  Antisense oligo
uguauggagggcucuaggcu

SEQ ID NO: 17194 - RNA, 20 nt, Artificial Sequence
  Antisense oligo
uguguauggagggcucuagg

SEQ ID NO: 17195 - RNA, 20 nt, Artificial Sequence
  Antisense oligo
cuguguauggagggcucuag

SEQ ID NO: 17196 - RNA, 20 nt, Artificial Sequence
  Antisense oligo
acuguguauggagggcucua

SEQ ID NO: 17197 - RNA, 20 nt, Artificial Sequence
  Antisense oligo
caccagccucuugcucagca

SEQ ID NO: 17198 - RNA, 20 nt, Artificial Sequence
  Antisense oligo
acccaccagccucuugcuca

SEQ ID NO: 17199 - RNA, 20 nt, Artificial Sequence
  Antisense oligo
gcucaacccaccagccucuu

SEQ ID NO: 17200 - RNA, 20 nt, Artificial Sequence
  Antisense oligo
gugucagcucaacccaccag

SEQ ID NO: 17201 - RNA, 20 nt, Artificial Sequence
  Antisense oligo
cgugucagcucaacccacca

SEQ ID NO: 17202 - RNA, 20 nt, Artificial Sequence
  Antisense oligo
acgugucagcucaacccacc

SEQ ID NO: 17203 - RNA, 20 nt, Artificial Sequence
  Antisense oligo
cagacauaucucaaccaagu

SEQ ID NO: 17204 - RNA, 20 nt, Artificial Sequence
  Antisense oligo
gccagacauaucucaaccaa

SEQ ID NO: 17205 - RNA, 20 nt, Artificial Sequence
  Antisense oligo
agccagacauaucucaacca

SEQ ID NO: 17206 - RNA, 20 nt, Artificial Sequence
  Antisense oligo
gagccagacauaucucaacc

SEQ ID NO: 17207 - RNA, 20 nt, Artificial Sequence
  Antisense oligo
agagccagacauaucucaac

SEQ ID NO: 17208 - RNA, 20 nt, Artificial Sequence
  Antisense oligo
uaagagagccagacauaucu

SEQ ID NO: 17209 - RNA, 20 nt, Artificial Sequence
  Antisense oligo
cacuccagccuggguaagag

SEQ ID NO: 17210 - RNA, 20 nt, Artificial Sequence
  Antisense oligo
gcacuccagccuggguaaga

SEQ ID NO: 17211 - RNA, 20 nt, Artificial Sequence
  Antisense oligo
ugcacuccagccuggguaag

SEQ ID NO: 17212 - RNA, 20 nt, Artificial Sequence
  Antisense oligo
cugcacuccagccuggguaa

SEQ ID NO: 17213 - RNA, 20 nt, Artificial Sequence
  Antisense oligo
ucugcacuccagccugggua

SEQ ID NO: 17214 - RNA, 20 nt, Artificial Sequence
  Antisense oligo
ucacucugcacuccagccug

SEQ ID NO: 17215 - RNA, 20 nt, Artificial Sequence
  Antisense oligo
cccaggaguucaauguuuau

SEQ ID NO: 17216 - RNA, 20 nt, Artificial Sequence
  Antisense oligo
gcccaggaguucaauguuua

SEQ ID NO: 17217 - RNA, 20 nt, Artificial Sequence
  Antisense oligo
agcccaggaguucaauguuu

SEQ ID NO: 17218 - RNA, 20 nt, Artificial Sequence
  Antisense oligo
gagcccaggaguucaauguu

SEQ ID NO: 17219 - RNA, 20 nt, Artificial Sequence
  Antisense oligo
ugagcccaggaguucaaugu

SEQ ID NO: 17220 - RNA, 20 nt, Artificial Sequence
  Antisense oligo
cgcuugagcccaggaguuca

SEQ ID NO: 17221 - RNA, 20 nt, Artificial Sequence
  Antisense oligo
ucgcuugagcccaggaguuc

SEQ ID NO: 17222 - RNA, 20 nt, Artificial Sequence
  Antisense oligo
aucgcuugagcccaggaguu

SEQ ID NO: 17223 - RNA, 20 nt, Artificial Sequence
  Antisense oligo
gaucgcuugagcccaggagu

SEQ ID NO: 17224 - RNA, 20 nt, Artificial Sequence
  Antisense oligo
aggaucgcuugagcccagga

SEQ ID NO: 17225 - RNA, 20 nt, Artificial Sequence
  Antisense oligo
aacacuuugggaggccgagg

SEQ ID NO: 17226 - RNA, 20 nt, Artificial Sequence
  Antisense oligo
caacacuuugggaggccgag

SEQ ID NO: 17227 - RNA, 20 nt, Artificial Sequence
  Antisense oligo
cucauaaucccaacacuuug

SEQ ID NO: 17228 - RNA, 20 nt, Artificial Sequence
  Antisense oligo
gcucauaaucccaacacuuu

SEQ ID NO: 17229 - RNA, 20 nt, Artificial Sequence
  Antisense oligo
ggcucauaaucccaacacuu

SEQ ID NO: 17230 - RNA, 20 nt, Artificial Sequence
  Antisense oligo
uggcucauaaucccaacacu

SEQ ID NO: 17231 - RNA, 20 nt, Artificial Sequence
  Antisense oligo
augacguguaucaggcuggg

SEQ ID NO: 17232 - RNA, 20 nt, Artificial Sequence
  Antisense oligo
aaugacguguaucaggcugg

SEQ ID NO: 17233 - RNA, 20 nt, Artificial Sequence
  Antisense oligo
aaaugacguguaucaggcug

SEQ ID NO: 17234 - RNA, 20 nt, Artificial Sequence
  Antisense oligo
uaaaugacguguaucaggcu

SEQ ID NO: 17235 - RNA, 20 nt, Artificial Sequence
  Antisense oligo
uuaaaugacguguaucaggc

SEQ ID NO: 17236 - RNA, 20 nt, Artificial Sequence
  Antisense oligo
ucccuccguaucucuuauau

SEQ ID NO: 17237 - RNA, 20 nt, Artificial Sequence
  Antisense oligo
uucucccuccguaucucuua

SEQ ID NO: 17238 - RNA, 20 nt, Artificial Sequence
  Antisense oligo
uuucucccuccguaucucuu

SEQ ID NO: 17239 - RNA, 20 nt, Artificial Sequence
  Antisense oligo
uuuucucccuccguaucucu

SEQ ID NO: 17240 - RNA, 20 nt, Artificial Sequence
  Antisense oligo
gaagugauugaagcucagaa

SEQ ID NO: 17241 - RNA, 20 nt, Artificial Sequence
  Antisense oligo
ggaagugauugaagcucaga

SEQ ID NO: 17242 - RNA, 20 nt, Artificial Sequence
  Antisense oligo
aggaagugauugaagcucag

SEQ ID NO: 17243 - RNA, 20 nt, Artificial Sequence
  Antisense oligo
gacaaggaagugauugaagc

SEQ ID NO: 17244 - RNA, 20 nt, Artificial Sequence
  Antisense oligo
ggacaaggaagugauugaag

SEQ ID NO: 17245 - RNA, 20 nt, Artificial Sequence
  Antisense oligo
uggacaaggaagugauugaa

SEQ ID NO: 17246 - RNA, 20 nt, Artificial Sequence
  Antisense oligo
auggacaaggaagugauuga

SEQ ID NO: 17247 - RNA, 20 nt, Artificial Sequence
  Antisense oligo
ucauggacaaggaagugauu

SEQ ID NO: 17248 - RNA, 20 nt, Artificial Sequence
  Antisense oligo
uucauggacaaggaagugau

SEQ ID NO: 17249 - RNA, 20 nt, Artificial Sequence
  Antisense oligo
gcauucuuggauagacucua

SEQ ID NO: 17250 - RNA, 20 nt, Artificial Sequence
  Antisense oligo
ggagcauucuuggauagacu

SEQ ID NO: 17251 - RNA, 20 nt, Artificial Sequence
  Antisense oligo
gggagcauucuuggauagac

SEQ ID NO: 17252 - RNA, 20 nt, Artificial Sequence
  Antisense oligo
ugggagcauucuuggauaga

SEQ ID NO: 17253 - RNA, 20 nt, Artificial Sequence
  Antisense oligo
cugggagcauucuuggauag

SEQ ID NO: 17254 - RNA, 20 nt, Artificial Sequence
  Antisense oligo
ccacaauauacugagaguca

SEQ ID NO: 17255 - RNA, 20 nt, Artificial Sequence
  Antisense oligo
gccacaauauacugagaguc

SEQ ID NO: 17256 - RNA, 20 nt, Artificial Sequence
  Antisense oligo
gugccacaauauacugagag

SEQ ID NO: 17257 - RNA, 20 nt, Artificial Sequence
  Antisense oligo
ugugccacaauauacugaga

SEQ ID NO: 17258 - RNA, 20 nt, Artificial Sequence
  Antisense oligo
cauaaucuacuuccaaaggc

SEQ ID NO: 17259 - RNA, 20 nt, Artificial Sequence
  Antisense oligo
cacaccuggcuuggacuuuu

SEQ ID NO: 17260 - RNA, 20 nt, Artificial Sequence
  Antisense oligo
ccacaccuggcuuggacuuu

SEQ ID NO: 17261 - RNA, 20 nt, Artificial Sequence
  Antisense oligo
accacaccuggcuuggacuu

SEQ ID NO: 17262 - RNA, 20 nt, Artificial Sequence
  Antisense oligo
ccuaccacaccuggcuugga

SEQ ID NO: 17263 - RNA, 20 nt, Artificial Sequence
  Antisense oligo
accuaccacaccuggcuugg

SEQ ID NO: 17264 - RNA, 20 nt, Artificial Sequence
  Antisense oligo
gugaccuaccacaccuggcu

SEQ ID NO: 17265 - RNA, 20 nt, Artificial Sequence
  Antisense oligo
cugggauuacaggugugacc

SEQ ID NO: 17266 - RNA, 20 nt, Artificial Sequence
  Antisense oligo
gcugggauuacaggugugac

SEQ ID NO: 17267 - RNA, 20 nt, Artificial Sequence
  Antisense oligo
ugcugggauuacagguguga

SEQ ID NO: 17268 - RNA, 20 nt, Artificial Sequence
  Antisense oligo
gugcugggauuacaggugug

SEQ ID NO: 17269 - RNA, 20 nt, Artificial Sequence
  Antisense oligo
agugcugggauuacaggugu

SEQ ID NO: 17270 - RNA, 20 nt, Artificial Sequence
  Antisense oligo
aagugcugggauuacaggug

SEQ ID NO: 17271 - RNA, 20 nt, Artificial Sequence
  Antisense oligo
gaagugcugggauuacaggu

SEQ ID NO: 17272 - RNA, 20 nt, Artificial Sequence
  Antisense oligo
ugaagugcugggauuacagg

SEQ ID NO: 17273 - RNA, 20 nt, Artificial Sequence
  Antisense oligo
cugaagugcugggauuacag

SEQ ID NO: 17274 - RNA, 20 nt, Artificial Sequence
  Antisense oligo
ccugaagugcugggauuaca

SEQ ID NO: 17275 - RNA, 20 nt, Artificial Sequence
  Antisense oligo
uccugaagugcugggauuac

SEQ ID NO: 17276 - RNA, 20 nt, Artificial Sequence
  Antisense oligo
aauccaccugccucagccuc

SEQ ID NO: 17277 - RNA, 20 nt, Artificial Sequence
  Antisense oligo
caauccaccugccucagccu

SEQ ID NO: 17278 - RNA, 20 nt, Artificial Sequence
  Antisense oligo
agcaauccaccugccucagc

SEQ ID NO: 17279 - RNA, 20 nt, Artificial Sequence
  Antisense oligo
uagcaauccaccugccucag

SEQ ID NO: 17280 - RNA, 20 nt, Artificial Sequence
  Antisense oligo
ucucaaacuccugggaucua

SEQ ID NO: 17281 - RNA, 20 nt, Artificial Sequence
  Antisense oligo
gucucaaacuccugggaucu

SEQ ID NO: 17282 - RNA, 20 nt, Artificial Sequence
  Antisense oligo
agucucaaacuccugggauc

SEQ ID NO: 17283 - RNA, 20 nt, Artificial Sequence
  Antisense oligo
cagucucaaacuccugggau

SEQ ID NO: 17284 - RNA, 20 nt, Artificial Sequence
  Antisense oligo
ugcccugcugaugcuuugug

SEQ ID NO: 17285 - RNA, 20 nt, Artificial Sequence
  Antisense oligo
augcccugcugaugcuuugu

SEQ ID NO: 17286 - RNA, 20 nt, Artificial Sequence
  Antisense oligo
uuagccucccaaguagcugg

SEQ ID NO: 17287 - RNA, 20 nt, Artificial Sequence
  Antisense oligo
cuuagccucccaaguagcug

SEQ ID NO: 17288 - RNA, 20 nt, Artificial Sequence
  Antisense oligo
ccuuagccucccaaguagcu

SEQ ID NO: 17289 - RNA, 20 nt, Artificial Sequence
  Antisense oligo
accuuagccucccaaguagc

SEQ ID NO: 17290 - RNA, 20 nt, Artificial Sequence
  Antisense oligo
ucaagcaauccuccuaccuu

SEQ ID NO: 17291 - RNA, 20 nt, Artificial Sequence
  Antisense oligo
cucaagcaauccuccuaccu

SEQ ID NO: 17292 - RNA, 20 nt, Artificial Sequence
  Antisense oligo
gcucaagcaauccuccuacc

SEQ ID NO: 17293 - RNA, 20 nt, Artificial Sequence
  Antisense oligo
ggcucaagcaauccuccuac

SEQ ID NO: 17294 - RNA, 20 nt, Artificial Sequence
  Antisense oligo
aggcucaagcaauccuccua

SEQ ID NO: 17295 - RNA, 20 nt, Artificial Sequence
  Antisense oligo
caggcucaagcaauccuccu

SEQ ID NO: 17296 - RNA, 20 nt, Artificial Sequence
  Antisense oligo
ccaggcucaagcaauccucc

SEQ ID NO: 17297 - RNA, 20 nt, Artificial Sequence
  Antisense oligo
cccaggcucaagcaauccuc

SEQ ID NO: 17298 - RNA, 20 nt, Artificial Sequence
  Antisense oligo
agcuuccaaacugacuuccu

SEQ ID NO: 17299 - RNA, 20 nt, Artificial Sequence
  Antisense oligo
gagcuuccaaacugacuucc

SEQ ID NO: 17300 - RNA, 20 nt, Artificial Sequence
  Antisense oligo
aagagcuuccaaacugacuu

SEQ ID NO: 17301 - RNA, 20 nt, Artificial Sequence
  Antisense oligo
acuagaagagcuuccaaacu

SEQ ID NO: 17302 - RNA, 20 nt, Artificial Sequence
  Antisense oligo
uacuagaagagcuuccaaac

SEQ ID NO: 17303 - RNA, 20 nt, Artificial Sequence
  Antisense oligo
gaauacuagaagagcuucca

SEQ ID NO: 17304 - RNA, 20 nt, Artificial Sequence
  Antisense oligo
agaauacuagaagagcuucc

SEQ ID NO: 17305 - RNA, 20 nt, Artificial Sequence
  Antisense oligo
ccaagaauacuagaagagcu

SEQ ID NO: 17306 - RNA, 20 nt, Artificial Sequence
  Antisense oligo
accaagaauacuagaagagc

SEQ ID NO: 17307 - RNA, 20 nt, Artificial Sequence
  Antisense oligo
cuagccuguggcacuucaug

SEQ ID NO: 17308 - RNA, 20 nt, Artificial Sequence
  Antisense oligo
acuagccuguggcacuucau

SEQ ID NO: 17309 - RNA, 20 nt, Artificial Sequence
  Antisense oligo
cacuagccuguggcacuuca

SEQ ID NO: 17310 - RNA, 20 nt, Artificial Sequence
  Antisense oligo
acacuagccuguggcacuuc

SEQ ID NO: 17311 - RNA, 20 nt, Artificial Sequence
  Antisense oligo
caucuaucacacuagccugu

SEQ ID NO: 17312 - RNA, 20 nt, Artificial Sequence
  Antisense oligo
ccaucuaucacacuagccug

SEQ ID NO: 17313 - RNA, 20 nt, Artificial Sequence
  Antisense oligo
uccaucuaucacacuagccu

SEQ ID NO: 17314 - RNA, 20 nt, Artificial Sequence
  Antisense oligo
cuccaucuaucacacuagcc

SEQ ID NO: 17315 - RNA, 20 nt, Artificial Sequence
  Antisense oligo
uuccaucccuccaucuauca

SEQ ID NO: 17316 - RNA, 20 nt, Artificial Sequence
  Antisense oligo
ccagagugacacuuuauaga

SEQ ID NO: 17317 - RNA, 20 nt, Artificial Sequence
  Antisense oligo
cccagagugacacuuuauag

SEQ ID NO: 17318 - RNA, 20 nt, Artificial Sequence
  Antisense oligo
ucccagagugacacuuuaua

SEQ ID NO: 17319 - RNA, 20 nt, Artificial Sequence
  Antisense oligo
auucccagagugacacuuua

SEQ ID NO: 17320 - RNA, 20 nt, Artificial Sequence
  Antisense oligo
uauucccagagugacacuuu

SEQ ID NO: 17321 - RNA, 20 nt, Artificial Sequence
  Antisense oligo
uuauucccagagugacacuu

SEQ ID NO: 17322 - RNA, 20 nt, Artificial Sequence
  Antisense oligo
agcuuuauucccagagugac

SEQ ID NO: 17323 - RNA, 20 nt, Artificial Sequence
  Antisense oligo
gugggcaaacuggaacuguu

SEQ ID NO: 17324 - RNA, 20 nt, Artificial Sequence
  Antisense oligo
cgugggcaaacuggaacugu

SEQ ID NO: 17325 - RNA, 20 nt, Artificial Sequence
  Antisense oligo
acgugggcaaacuggaacug

SEQ ID NO: 17326 - RNA, 20 nt, Artificial Sequence
  Antisense oligo
uacucacuaauguugcacgu

SEQ ID NO: 17327 - RNA, 20 nt, Artificial Sequence
  Antisense oligo
guacucacuaauguugcacg

SEQ ID NO: 17328 - RNA, 20 nt, Artificial Sequence
  Antisense oligo
uagguacucacuaauguugc

SEQ ID NO: 17329 - RNA, 20 nt, Artificial Sequence
  Antisense oligo
ggguagguacucacuaaugu

SEQ ID NO: 17330 - RNA, 20 nt, Artificial Sequence
  Antisense oligo
gaacaggguagguacucacu

SEQ ID NO: 17331 - RNA, 20 nt, Artificial Sequence
  Antisense oligo
ggaacaggguagguacucac

SEQ ID NO: 17332 - RNA, 20 nt, Artificial Sequence
  Antisense oligo
gggaacaggguagguacuca

SEQ ID NO: 17333 - RNA, 20 nt, Artificial Sequence
  Antisense oligo
ugggaacaggguagguacuc

SEQ ID NO: 17334 - RNA, 20 nt, Artificial Sequence
  Antisense oligo
augggaacaggguagguacu

SEQ ID NO: 17335 - RNA, 20 nt, Artificial Sequence
  Antisense oligo
guuucggguggguggagaac

SEQ ID NO: 17336 - RNA, 20 nt, Artificial Sequence
  Antisense oligo
uguuucggguggguggagaa

SEQ ID NO: 17337 - RNA, 20 nt, Artificial Sequence
  Antisense oligo
uuguuucggguggguggaga

SEQ ID NO: 17338 - RNA, 20 nt, Artificial Sequence
  Antisense oligo
cuuguuucggguggguggag

SEQ ID NO: 17339 - RNA, 20 nt, Artificial Sequence
  Antisense oligo
gcuuguuucgggugggugga

SEQ ID NO: 17340 - RNA, 20 nt, Artificial Sequence
  Antisense oligo
ugcuuguuucgggugggugg

SEQ ID NO: 17341 - RNA, 20 nt, Artificial Sequence
  Antisense oligo
gugcuuguuucgggugggug

SEQ ID NO: 17342 - RNA, 20 nt, Artificial Sequence
  Antisense oligo
ugugcuuguuucgggugggu

SEQ ID NO: 17343 - RNA, 20 nt, Artificial Sequence
  Antisense oligo
gugugcuuguuucggguggg

SEQ ID NO: 17344 - RNA, 20 nt, Artificial Sequence
  Antisense oligo
ugugugcuuguuucgggugg

SEQ ID NO: 17345 - RNA, 20 nt, Artificial Sequence
  Antisense oligo
gugugugcuuguuucgggug

SEQ ID NO: 17346 - RNA, 20 nt, Artificial Sequence
  Antisense oligo
agugugugcuuguuucgggu

SEQ ID NO: 17347 - RNA, 20 nt, Artificial Sequence
  Antisense oligo
cagugugugcuuguuucggg

SEQ ID NO: 17348 - RNA, 20 nt, Artificial Sequence
  Antisense oligo
ccagugugugcuuguuucgg

SEQ ID NO: 17349 - RNA, 20 nt, Artificial Sequence
  Antisense oligo
ucccagugugugcuuguuuc

SEQ ID NO: 17350 - RNA, 20 nt, Artificial Sequence
  Antisense oligo
gucccagugugugcuuguuu

SEQ ID NO: 17351 - RNA, 20 nt, Artificial Sequence
  Antisense oligo
uugucccagugugugcuugu

SEQ ID NO: 17352 - RNA, 20 nt, Artificial Sequence
  Antisense oligo
auugucccagugugugcuug

SEQ ID NO: 17353 - RNA, 20 nt, Artificial Sequence
  Antisense oligo
agauugucccagugugugcu

SEQ ID NO: 17354 - RNA, 20 nt, Artificial Sequence
  Antisense oligo
cucagauugucccagugugu

SEQ ID NO: 17355 - RNA, 20 nt, Artificial Sequence
  Antisense oligo
ccucagauugucccagugug

SEQ ID NO: 17356 - RNA, 20 nt, Artificial Sequence
  Antisense oligo
agcacccucagauuguccca

SEQ ID NO: 17357 - RNA, 20 nt, Artificial Sequence
  Antisense oligo
gagcacccucagauuguccc

SEQ ID NO: 17358 - RNA, 20 nt, Artificial Sequence
  Antisense oligo
ccuuaucaccggcagacgug

SEQ ID NO: 17359 - RNA, 20 nt, Artificial Sequence
  Antisense oligo
uccuuaucaccggcagacgu

SEQ ID NO: 17360 - RNA, 20 nt, Artificial Sequence
  Antisense oligo
cuccuuaucaccggcagacg

SEQ ID NO: 17361 - RNA, 20 nt, Artificial Sequence
  Antisense oligo
ccuccuuaucaccggcagac

SEQ ID NO: 17362 - RNA, 20 nt, Artificial Sequence
  Antisense oligo
accuccuuaucaccggcaga

SEQ ID NO: 17363 - RNA, 20 nt, Artificial Sequence
  Antisense oligo
caccuccuuaucaccggcag

SEQ ID NO: 17364 - RNA, 20 nt, Artificial Sequence
  Antisense oligo
acaccuccuuaucaccggca

SEQ ID NO: 17365 - RNA, 20 nt, Artificial Sequence
  Antisense oligo
aacaccuccuuaucaccggc

SEQ ID NO: 17366 - RNA, 20 nt, Artificial Sequence
  Antisense oligo
gaacaccuccuuaucaccgg

SEQ ID NO: 17367 - RNA, 20 nt, Artificial Sequence
  Antisense oligo
ugaacaccuccuuaucaccg

SEQ ID NO: 17368 - RNA, 20 nt, Artificial Sequence
  Antisense oligo
aaugaacaccuccuuaucac

SEQ ID NO: 17369 - RNA, 20 nt, Artificial Sequence
  Antisense oligo
caaaugaacaccuccuuauc

SEQ ID NO: 17370 - RNA, 20 nt, Artificial Sequence
  Antisense oligo
gcaaaugaacaccuccuuau

SEQ ID NO: 17371 - RNA, 20 nt, Artificial Sequence
  Antisense oligo
ugcaaaugaacaccuccuua

SEQ ID NO: 17372 - RNA, 20 nt, Artificial Sequence
  Antisense oligo
cacaaaugccaucaugcaaa

SEQ ID NO: 17373 - RNA, 20 nt, Artificial Sequence
  Antisense oligo
augcacaaaugccaucaugc

SEQ ID NO: 17374 - RNA, 20 nt, Artificial Sequence
  Antisense oligo
uaugcacaaaugccaucaug

SEQ ID NO: 17375 - RNA, 20 nt, Artificial Sequence
  Antisense oligo
ggagcaguaccauuuuaugc

SEQ ID NO: 17376 - RNA, 20 nt, Artificial Sequence
  Antisense oligo
uggagcaguaccauuuuaug

SEQ ID NO: 17377 - RNA, 20 nt, Artificial Sequence
  Antisense oligo
cuggagcaguaccauuuuau

SEQ ID NO: 17378 - RNA, 20 nt, Artificial Sequence
  Antisense oligo
ucuggagcaguaccauuuua

SEQ ID NO: 17379 - RNA, 20 nt, Artificial Sequence
  Antisense oligo
uucuggagcaguaccauuuu

SEQ ID NO: 17380 - RNA, 20 nt, Artificial Sequence
  Antisense oligo
cuucuggagcaguaccauuu

SEQ ID NO: 17381 - RNA, 20 nt, Artificial Sequence
  Antisense oligo
acuucuggagcaguaccauu

SEQ ID NO: 17382 - RNA, 20 nt, Artificial Sequence
  Antisense oligo
cacuucuggagcaguaccau

SEQ ID NO: 17383 - RNA, 20 nt, Artificial Sequence
  Antisense oligo
ccacuucuggagcaguacca

SEQ ID NO: 17384 - RNA, 20 nt, Artificial Sequence
  Antisense oligo
accacuucuggagcaguacc

SEQ ID NO: 17385 - RNA, 20 nt, Artificial Sequence
  Antisense oligo
cagggcacuagaaccacuuc

SEQ ID NO: 17386 - RNA, 20 nt, Artificial Sequence
  Antisense oligo
acagggcacuagaaccacuu

SEQ ID NO: 17387 - RNA, 20 nt, Artificial Sequence
  Antisense oligo
gacagggcacuagaaccacu

SEQ ID NO: 17388 - RNA, 20 nt, Artificial Sequence
  Antisense oligo
agacagggcacuagaaccac

SEQ ID NO: 17389 - RNA, 20 nt, Artificial Sequence
  Antisense oligo
aagacagggcacuagaacca

SEQ ID NO: 17390 - RNA, 20 nt, Artificial Sequence
  Antisense oligo
gaagacagggcacuagaacc

SEQ ID NO: 17391 - RNA, 20 nt, Artificial Sequence
  Antisense oligo
ugaagacagggcacuagaac

SEQ ID NO: 17392 - RNA, 20 nt, Artificial Sequence
  Antisense oligo
cacacuagggugaagacagg

SEQ ID NO: 17393 - RNA, 20 nt, Artificial Sequence
  Antisense oligo
ccacacuagggugaagacag

SEQ ID NO: 17394 - RNA, 20 nt, Artificial Sequence
  Antisense oligo
gccacacuagggugaagaca

SEQ ID NO: 17395 - RNA, 20 nt, Artificial Sequence
  Antisense oligo
ugccacacuagggugaagac

SEQ ID NO: 17396 - RNA, 20 nt, Artificial Sequence
  Antisense oligo
cugccacacuagggugaaga

SEQ ID NO: 17397 - RNA, 20 nt, Artificial Sequence
  Antisense oligo
uuccaucggccugccacacu

SEQ ID NO: 17398 - RNA, 20 nt, Artificial Sequence
  Antisense oligo
uguuccaucggccugccaca

SEQ ID NO: 17399 - RNA, 20 nt, Artificial Sequence
  Antisense oligo
ucuguuccaucggccugcca

SEQ ID NO: 17400 - RNA, 20 nt, Artificial Sequence
  Antisense oligo
ugcucuguuccaucggccug

SEQ ID NO: 17401 - RNA, 20 nt, Artificial Sequence
  Antisense oligo
augcucuguuccaucggccu

SEQ ID NO: 17402 - RNA, 20 nt, Artificial Sequence
  Antisense oligo
ggcagucaaugcagaugcuc

SEQ ID NO: 17403 - RNA, 20 nt, Artificial Sequence
  Antisense oligo
auggcagucaaugcagaugc

SEQ ID NO: 17404 - RNA, 20 nt, Artificial Sequence
  Antisense oligo
uggucaaugccuccaaucgg

SEQ ID NO: 17405 - RNA, 20 nt, Artificial Sequence
  Antisense oligo
guggucaaugccuccaaucg

SEQ ID NO: 17406 - RNA, 20 nt, Artificial Sequence
  Antisense oligo
uguggucaaugccuccaauc

SEQ ID NO: 17407 - RNA, 20 nt, Artificial Sequence
  Antisense oligo
uuguggucaaugccuccaau

SEQ ID NO: 17408 - RNA, 20 nt, Artificial Sequence
  Antisense oligo
ccgagguuuguggucaaugc

SEQ ID NO: 17409 - RNA, 20 nt, Artificial Sequence
  Antisense oligo
cccgagguuuguggucaaug

SEQ ID NO: 17410 - RNA, 20 nt, Artificial Sequence
  Antisense oligo
ucccgagguuuguggucaau

SEQ ID NO: 17411 - RNA, 20 nt, Artificial Sequence
  Antisense oligo
gucccgagguuuguggucaa

SEQ ID NO: 17412 - RNA, 20 nt, Artificial Sequence
  Antisense oligo
cgucccgagguuugugguca

SEQ ID NO: 17413 - RNA, 20 nt, Artificial Sequence
  Antisense oligo
aagccgucccgagguuugug

SEQ ID NO: 17414 - RNA, 20 nt, Artificial Sequence
  Antisense oligo
aaagccgucccgagguuugu

SEQ ID NO: 17415 - RNA, 20 nt, Artificial Sequence
  Antisense oligo
gaaagccgucccgagguuug

SEQ ID NO: 17416 - RNA, 20 nt, Artificial Sequence
  Antisense oligo
ugaaagccgucccgagguuu

SEQ ID NO: 17417 - RNA, 20 nt, Artificial Sequence
  Antisense oligo
augaaagccgucccgagguu

SEQ ID NO: 17418 - RNA, 20 nt, Artificial Sequence
  Antisense oligo
gaugaaagccgucccgaggu

SEQ ID NO: 17419 - RNA, 20 nt, Artificial Sequence
  Antisense oligo
agaugaaagccgucccgagg

SEQ ID NO: 17420 - RNA, 20 nt, Artificial Sequence
  Antisense oligo
cagaugaaagccgucccgag

SEQ ID NO: 17421 - RNA, 20 nt, Artificial Sequence
  Antisense oligo
ccagaugaaagccgucccga

SEQ ID NO: 17422 - RNA, 20 nt, Artificial Sequence
  Antisense oligo
accagaugaaagccgucccg

SEQ ID NO: 17423 - RNA, 20 nt, Artificial Sequence
  Antisense oligo
gaccagaugaaagccguccc

SEQ ID NO: 17424 - RNA, 20 nt, Artificial Sequence
  Antisense oligo
ugaccagaugaaagccgucc

SEQ ID NO: 17425 - RNA, 20 nt, Artificial Sequence
  Antisense oligo
uugaccagaugaaagccguc

SEQ ID NO: 17426 - RNA, 20 nt, Artificial Sequence
  Antisense oligo
cuugaccagaugaaagccgu

SEQ ID NO: 17427 - RNA, 20 nt, Artificial Sequence
  Antisense oligo
uacuugaccagaugaaagcc

SEQ ID NO: 17428 - RNA, 20 nt, Artificial Sequence
  Antisense oligo
auacuugaccagaugaaagc

SEQ ID NO: 17429 - RNA, 20 nt, Artificial Sequence
  Antisense oligo
cauacuugaccagaugaaag

SEQ ID NO: 17430 - RNA, 20 nt, Artificial Sequence
  Antisense oligo
cacauacuugaccagaugaa

SEQ ID NO: 17431 - RNA, 20 nt, Artificial Sequence
  Antisense oligo
ccacauacuugaccagauga

SEQ ID NO: 17432 - RNA, 20 nt, Artificial Sequence
  Antisense oligo
cccacauacuugaccagaug

SEQ ID NO: 17433 - RNA, 20 nt, Artificial Sequence
  Antisense oligo
acccacauacuugaccagau

SEQ ID NO: 17434 - RNA, 20 nt, Artificial Sequence
  Antisense oligo
gacccacauacuugaccaga

SEQ ID NO: 17435 - RNA, 20 nt, Artificial Sequence
  Antisense oligo
ugacccacauacuugaccag

SEQ ID NO: 17436 - RNA, 20 nt, Artificial Sequence
  Antisense oligo
cugacccacauacuugacca

SEQ ID NO: 17437 - RNA, 20 nt, Artificial Sequence
  Antisense oligo
ccugacccacauacuugacc

SEQ ID NO: 17438 - RNA, 20 nt, Artificial Sequence
  Antisense oligo
gaauccugacccacauacuu

SEQ ID NO: 17439 - RNA, 20 nt, Artificial Sequence
  Antisense oligo
aauagaauccugacccacau

SEQ ID NO: 17440 - RNA, 20 nt, Artificial Sequence
  Antisense oligo
ggaaauagaauccugaccca

SEQ ID NO: 17441 - RNA, 20 nt, Artificial Sequence
  Antisense oligo
gggacuuuggcauugcuauu

SEQ ID NO: 17442 - RNA, 20 nt, Artificial Sequence
  Antisense oligo
ugggacuuuggcauugcuau

SEQ ID NO: 17443 - RNA, 20 nt, Artificial Sequence
  Antisense oligo
cugggacuuuggcauugcua

SEQ ID NO: 17444 - RNA, 20 nt, Artificial Sequence
  Antisense oligo
ugcugggacuuuggcauugc

SEQ ID NO: 17445 - RNA, 20 nt, Artificial Sequence
  Antisense oligo
cugcugggacuuuggcauug

SEQ ID NO: 17446 - RNA, 20 nt, Artificial Sequence
  Antisense oligo
ugugacugcugggacuuugg

SEQ ID NO: 17447 - RNA, 20 nt, Artificial Sequence
  Antisense oligo
ugugugacugcugggacuuu

SEQ ID NO: 17448 - RNA, 20 nt, Artificial Sequence
  Antisense oligo
cugugugacugcugggacuu

SEQ ID NO: 17449 - RNA, 20 nt, Artificial Sequence
  Antisense oligo
gcugugugacugcugggacu

SEQ ID NO: 17450 - RNA, 20 nt, Artificial Sequence
  Antisense oligo
ugcugugugacugcugggac

SEQ ID NO: 17451 - RNA, 20 nt, Artificial Sequence
  Antisense oligo
cugcugugugacugcuggga

SEQ ID NO: 17452 - RNA, 20 nt, Artificial Sequence
  Antisense oligo
ucccugcugugugacugcug

SEQ ID NO: 17453 - RNA, 20 nt, Artificial Sequence
  Antisense oligo
gaucagaugccucccugcug

SEQ ID NO: 17454 - RNA, 20 nt, Artificial Sequence
  Antisense oligo
agaucagaugccucccugcu

SEQ ID NO: 17455 - RNA, 20 nt, Artificial Sequence
  Antisense oligo
acagaucagaugccucccug

SEQ ID NO: 17456 - RNA, 20 nt, Artificial Sequence
  Antisense oligo
caacagaucagaugccuccc

SEQ ID NO: 17457 - RNA, 20 nt, Artificial Sequence
  Antisense oligo
acaacagaucagaugccucc

SEQ ID NO: 17458 - RNA, 20 nt, Artificial Sequence
  Antisense oligo
aacaacagaucagaugccuc

SEQ ID NO: 17459 - RNA, 20 nt, Artificial Sequence
  Antisense oligo
caacaacagaucagaugccu

SEQ ID NO: 17460 - RNA, 20 nt, Artificial Sequence
  Antisense oligo
ccaacaacagaucagaugcc

SEQ ID NO: 17461 - RNA, 20 nt, Artificial Sequence
  Antisense oligo
ggguagccugcuuugcauuu

SEQ ID NO: 17462 - RNA, 20 nt, Artificial Sequence
  Antisense oligo
aggguagccugcuuugcauu

SEQ ID NO: 17463 - RNA, 20 nt, Artificial Sequence
  Antisense oligo
aaggguagccugcuuugcau

SEQ ID NO: 17464 - RNA, 20 nt, Artificial Sequence
  Antisense oligo
uguuaaaggguagccugcuu

SEQ ID NO: 17465 - RNA, 20 nt, Artificial Sequence
  Antisense oligo
cuguuaaaggguagccugcu

SEQ ID NO: 17466 - RNA, 20 nt, Artificial Sequence
  Antisense oligo
gcuguuaaaggguagccugc

SEQ ID NO: 17467 - RNA, 20 nt, Artificial Sequence
  Antisense oligo
agcuguuaaaggguagccug

SEQ ID NO: 17468 - RNA, 20 nt, Artificial Sequence
  Antisense oligo
caaaaggaagacaccuguau

SEQ ID NO: 17469 - RNA, 20 nt, Artificial Sequence
  Antisense oligo
gcccaaaaggaagacaccug

SEQ ID NO: 17470 - RNA, 20 nt, Artificial Sequence
  Antisense oligo
ugcacccaaggcccaaaagg

SEQ ID NO: 17471 - RNA, 20 nt, Artificial Sequence
  Antisense oligo
gcauauuucuacagaaggug

SEQ ID NO: 17472 - RNA, 20 nt, Artificial Sequence
  Antisense oligo
uccucgugaauuagaucauc

SEQ ID NO: 17473 - RNA, 20 nt, Artificial Sequence
  Antisense oligo
uguccucgugaauuagauca

SEQ ID NO: 17474 - RNA, 20 nt, Artificial Sequence
  Antisense oligo
auguccucgugaauuagauc

SEQ ID NO: 17475 - RNA, 20 nt, Artificial Sequence
  Antisense oligo
gauguccucgugaauuagau

SEQ ID NO: 17476 - RNA, 20 nt, Artificial Sequence
  Antisense oligo
agauguccucgugaauuaga

SEQ ID NO: 17477 - RNA, 20 nt, Artificial Sequence
  Antisense oligo
uagauguccucgugaauuag

SEQ ID NO: 17478 - RNA, 20 nt, Artificial Sequence
  Antisense oligo
cauagauguccucgugaauu

SEQ ID NO: 17479 - RNA, 20 nt, Artificial Sequence
  Antisense oligo
acauagauguccucgugaau

SEQ ID NO: 17480 - RNA, 20 nt, Artificial Sequence
  Antisense oligo
acggaugcccagguuuuggu

SEQ ID NO: 17481 - RNA, 20 nt, Artificial Sequence
  Antisense oligo
gacggaugcccagguuuugg

SEQ ID NO: 17482 - RNA, 20 nt, Artificial Sequence
  Antisense oligo
agacggaugcccagguuuug

SEQ ID NO: 17483 - RNA, 20 nt, Artificial Sequence
  Antisense oligo
cagacggaugcccagguuuu

SEQ ID NO: 17484 - RNA, 20 nt, Artificial Sequence
  Antisense oligo
acagacggaugcccagguuu

SEQ ID NO: 17485 - RNA, 20 nt, Artificial Sequence
  Antisense oligo
gacagacggaugcccagguu

SEQ ID NO: 17486 - RNA, 20 nt, Artificial Sequence
  Antisense oligo
agacagacggaugcccaggu

SEQ ID NO: 17487 - RNA, 20 nt, Artificial Sequence
  Antisense oligo
ugagacagacggaugcccag

SEQ ID NO: 17488 - RNA, 20 nt, Artificial Sequence
  Antisense oligo
cugagacagacggaugccca

SEQ ID NO: 17489 - RNA, 20 nt, Artificial Sequence
  Antisense oligo
gauggcaucugcugagacag

SEQ ID NO: 17490 - RNA, 20 nt, Artificial Sequence
  Antisense oligo
uaagauugcuggcaagugag

SEQ ID NO: 17491 - RNA, 20 nt, Artificial Sequence
  Antisense oligo
cuaagauugcuggcaaguga

SEQ ID NO: 17492 - RNA, 20 nt, Artificial Sequence
  Antisense oligo
gcuaagauugcuggcaagug

SEQ ID NO: 17493 - RNA, 20 nt, Artificial Sequence
  Antisense oligo
agcuaagauugcuggcaagu

SEQ ID NO: 17494 - RNA, 20 nt, Artificial Sequence
  Antisense oligo
aagcuaagauugcuggcaag

SEQ ID NO: 17495 - RNA, 20 nt, Artificial Sequence
  Antisense oligo
aaagcuaagauugcuggcaa

SEQ ID NO: 17496 - RNA, 20 nt, Artificial Sequence
  Antisense oligo
ggagaaagcuaagauugcug

SEQ ID NO: 17497 - RNA, 20 nt, Artificial Sequence
  Antisense oligo
uggagaaagcuaagauugcu

SEQ ID NO: 17498 - RNA, 20 nt, Artificial Sequence
  Antisense oligo
auggagaaagcuaagauugc

SEQ ID NO: 17499 - RNA, 20 nt, Artificial Sequence
  Antisense oligo
uggauucugaagucugguau

SEQ ID NO: 17500 - RNA, 20 nt, Artificial Sequence
  Antisense oligo
guaccuggauucugaagucu

SEQ ID NO: 17501 - RNA, 20 nt, Artificial Sequence
  Antisense oligo
uuguaccuggauucugaagu

SEQ ID NO: 17502 - RNA, 20 nt, Artificial Sequence
  Antisense oligo
ucucagcaugggauuguggg

SEQ ID NO: 17503 - RNA, 20 nt, Artificial Sequence
  Antisense oligo
aucucagcaugggauugugg

SEQ ID NO: 17504 - RNA, 20 nt, Artificial Sequence
  Antisense oligo
caucucagcaugggauugug

SEQ ID NO: 17505 - RNA, 20 nt, Artificial Sequence
  Antisense oligo
ucaucucagcaugggauugu

SEQ ID NO: 17506 - RNA, 20 nt, Artificial Sequence
  Antisense oligo
uucaucucagcaugggauug

SEQ ID NO: 17507 - RNA, 20 nt, Artificial Sequence
  Antisense oligo
cacauucaucucagcauggg

SEQ ID NO: 17508 - RNA, 20 nt, Artificial Sequence
  Antisense oligo
aaccacauucaucucagcau

SEQ ID NO: 17509 - RNA, 20 nt, Artificial Sequence
  Antisense oligo
gagcauuuagaaccacauuc

SEQ ID NO: 17510 - RNA, 20 nt, Artificial Sequence
  Antisense oligo
ucucugaaaggagcauuuag

SEQ ID NO: 17511 - RNA, 20 nt, Artificial Sequence
  Antisense oligo
cacucucugaaaggagcauu

SEQ ID NO: 17512 - RNA, 20 nt, Artificial Sequence
  Antisense oligo
acucacucucugaaaggagc

SEQ ID NO: 17513 - RNA, 20 nt, Artificial Sequence
  Antisense oligo
ccacucacucucugaaagga

SEQ ID NO: 17514 - RNA, 20 nt, Artificial Sequence
  Antisense oligo
ggucccacucacucucugaa

SEQ ID NO: 17515 - RNA, 20 nt, Artificial Sequence
  Antisense oligo
aggucccacucacucucuga

SEQ ID NO: 17516 - RNA, 20 nt, Artificial Sequence
  Antisense oligo
aacagucagaaugugaggcc

SEQ ID NO: 17517 - RNA, 20 nt, Artificial Sequence
  Antisense oligo
gaacagucagaaugugaggc

SEQ ID NO: 17518 - RNA, 20 nt, Artificial Sequence
  Antisense oligo
ggaacagucagaaugugagg

SEQ ID NO: 17519 - RNA, 20 nt, Artificial Sequence
  Antisense oligo
gggaacagucagaaugugag

SEQ ID NO: 17520 - RNA, 20 nt, Artificial Sequence
  Antisense oligo
agggaacagucagaauguga

SEQ ID NO: 17521 - RNA, 20 nt, Artificial Sequence
  Antisense oligo
cagggaacagucagaaugug

SEQ ID NO: 17522 - RNA, 20 nt, Artificial Sequence
  Antisense oligo
guauuuuaagcugugacugc

SEQ ID NO: 17523 - RNA, 20 nt, Artificial Sequence
  Antisense oligo
caguuucuggagauaacaug

SEQ ID NO: 17524 - RNA, 20 nt, Artificial Sequence
  Antisense oligo
ugacaguuucuggagauaac

SEQ ID NO: 17525 - RNA, 20 nt, Artificial Sequence
  Antisense oligo
cugugacaguuucuggagau

SEQ ID NO: 17526 - RNA, 20 nt, Artificial Sequence
  Antisense oligo
uagaggauggaggacacugu

SEQ ID NO: 17527 - RNA, 20 nt, Artificial Sequence
  Antisense oligo
uuagaggauggaggacacug

SEQ ID NO: 17528 - RNA, 20 nt, Artificial Sequence
  Antisense oligo
auuagaggauggaggacacu

SEQ ID NO: 17529 - RNA, 20 nt, Artificial Sequence
  Antisense oligo
uauuagaggauggaggacac

SEQ ID NO: 17530 - RNA, 20 nt, Artificial Sequence
  Antisense oligo
cuauuagaggauggaggaca

SEQ ID NO: 17531 - RNA, 20 nt, Artificial Sequence
  Antisense oligo
acuauuagaggauggaggac

SEQ ID NO: 17532 - RNA, 20 nt, Artificial Sequence
  Antisense oligo
gcaaaacuauuagaggaugg

SEQ ID NO: 17533 - RNA, 20 nt, Artificial Sequence
  Antisense oligo
guggcaaaacuauuagagga

SEQ ID NO: 17534 - RNA, 20 nt, Artificial Sequence
  Antisense oligo
gcucucaguggcaaaacuau

SEQ ID NO: 17535 - RNA, 20 nt, Artificial Sequence
  Antisense oligo
cgaugcucucaguggcaaaa

SEQ ID NO: 17536 - RNA, 20 nt, Artificial Sequence
  Antisense oligo
ccgaugcucucaguggcaaa

SEQ ID NO: 17537 - RNA, 20 nt, Artificial Sequence
  Antisense oligo
gccgaugcucucaguggcaa

SEQ ID NO: 17538 - RNA, 20 nt, Artificial Sequence
  Antisense oligo
uguggccgaugcucucagug

SEQ ID NO: 17539 - RNA, 20 nt, Artificial Sequence
  Antisense oligo
guguggccgaugcucucagu

SEQ ID NO: 17540 - RNA, 20 nt, Artificial Sequence
  Antisense oligo
aguguggccgaugcucucag

SEQ ID NO: 17541 - RNA, 20 nt, Artificial Sequence
  Antisense oligo
caguguggccgaugcucuca

SEQ ID NO: 17542 - RNA, 20 nt, Artificial Sequence
  Antisense oligo
ugcaguguggccgaugcucu

SEQ ID NO: 17543 - RNA, 20 nt, Artificial Sequence
  Antisense oligo
augcaguguggccgaugcuc

SEQ ID NO: 17544 - RNA, 20 nt, Artificial Sequence
  Antisense oligo
gaugcaguguggccgaugcu

SEQ ID NO: 17545 - RNA, 20 nt, Artificial Sequence
  Antisense oligo
gagaugcaguguggccgaug

SEQ ID NO: 17546 - RNA, 20 nt, Artificial Sequence
  Antisense oligo
cggcagagaggagaugcagu

SEQ ID NO: 17547 - RNA, 20 nt, Artificial Sequence
  Antisense oligo
aaaguccggcagagaggaga

SEQ ID NO: 17548 - RNA, 20 nt, Artificial Sequence
  Antisense oligo
ucuaaaguccggcagagagg

SEQ ID NO: 17549 - RNA, 20 nt, Artificial Sequence
  Antisense oligo
aucuaaaguccggcagagag

SEQ ID NO: 17550 - RNA, 20 nt, Artificial Sequence
  Antisense oligo
gaucuaaaguccggcagaga

SEQ ID NO: 17551 - RNA, 20 nt, Artificial Sequence
  Antisense oligo
ggaucuaaaguccggcagag

SEQ ID NO: 17552 - RNA, 20 nt, Artificial Sequence
  Antisense oligo
cgggaucuaaaguccggcag

SEQ ID NO: 17553 - RNA, 20 nt, Artificial Sequence
  Antisense oligo
aaaccgggaucuaaaguccg

SEQ ID NO: 17554 - RNA, 20 nt, Artificial Sequence
  Antisense oligo
aaaaccgggaucuaaagucc

SEQ ID NO: 17555 - RNA, 20 nt, Artificial Sequence
  Antisense oligo
ccauauuguucucaucuccc

SEQ ID NO: 17556 - RNA, 20 nt, Artificial Sequence
  Antisense oligo
aggacagucggcaucccaug

SEQ ID NO: 17557 - RNA, 20 nt, Artificial Sequence
  Antisense oligo
gaggacagucggcaucccau

SEQ ID NO: 17558 - RNA, 20 nt, Artificial Sequence
  Antisense oligo
uugggaggacagucggcauc

SEQ ID NO: 17559 - RNA, 20 nt, Artificial Sequence
  Antisense oligo
uuugggaggacagucggcau

SEQ ID NO: 17560 - RNA, 20 nt, Artificial Sequence
  Antisense oligo
aguuugggaggacagucggc

SEQ ID NO: 17561 - RNA, 20 nt, Artificial Sequence
  Antisense oligo
gaguuugggaggacagucgg

SEQ ID NO: 17562 - RNA, 20 nt, Artificial Sequence
  Antisense oligo
uagaguuugggaggacaguc

SEQ ID NO: 17563 - RNA, 20 nt, Artificial Sequence
  Antisense oligo
agcuagaguuugggaggaca

SEQ ID NO: 17564 - RNA, 20 nt, Artificial Sequence
  Antisense oligo
cagcuagaguuugggaggac

SEQ ID NO: 17565 - RNA, 20 nt, Artificial Sequence
  Antisense oligo
aacagcuagaguuugggagg

SEQ ID NO: 17566 - RNA, 20 nt, Artificial Sequence
  Antisense oligo
gaacagcuagaguuugggag

SEQ ID NO: 17567 - RNA, 20 nt, Artificial Sequence
  Antisense oligo
agaacagcuagaguuuggga

SEQ ID NO: 17568 - RNA, 20 nt, Artificial Sequence
  Antisense oligo
aagaacagcuagaguuuggg

SEQ ID NO: 17569 - RNA, 20 nt, Artificial Sequence
  Antisense oligo
cuaagaacagcuagaguuug

SEQ ID NO: 17570 - RNA, 20 nt, Artificial Sequence
  Antisense oligo
gcuaagaacagcuagaguuu

SEQ ID NO: 17571 - RNA, 20 nt, Artificial Sequence
  Antisense oligo
gggcuaagaacagcuagagu

SEQ ID NO: 17572 - RNA, 20 nt, Artificial Sequence
  Antisense oligo
ugggcuaagaacagcuagag

SEQ ID NO: 17573 - RNA, 20 nt, Artificial Sequence
  Antisense oligo
uugggcuaagaacagcuaga

SEQ ID NO: 17574 - RNA, 20 nt, Artificial Sequence
  Antisense oligo
guugggcuaagaacagcuag

SEQ ID NO: 17575 - RNA, 20 nt, Artificial Sequence
  Antisense oligo
cgguugggcuaagaacagcu

SEQ ID NO: 17576 - RNA, 20 nt, Artificial Sequence
  Antisense oligo
gcgguugggcuaagaacagc

SEQ ID NO: 17577 - RNA, 20 nt, Artificial Sequence
  Antisense oligo
agcgguugggcuaagaacag

SEQ ID NO: 17578 - RNA, 20 nt, Artificial Sequence
  Antisense oligo
gagcgguugggcuaagaaca

SEQ ID NO: 17579 - RNA, 20 nt, Artificial Sequence
  Antisense oligo
ggagcgguugggcuaagaac

SEQ ID NO: 17580 - RNA, 20 nt, Artificial Sequence
  Antisense oligo
aggagcgguugggcuaagaa

SEQ ID NO: 17581 - RNA, 20 nt, Artificial Sequence
  Antisense oligo
gaggagcgguugggcuaaga

SEQ ID NO: 17582 - RNA, 20 nt, Artificial Sequence
  Antisense oligo
agaggagcgguugggcuaag

SEQ ID NO: 17583 - RNA, 20 nt, Artificial Sequence
  Antisense oligo
gagaggagcgguugggcuaa

SEQ ID NO: 17584 - RNA, 20 nt, Artificial Sequence
  Antisense oligo
aagucuuugucaggagagga

SEQ ID NO: 17585 - RNA, 20 nt, Artificial Sequence
  Antisense oligo
acccgucuuuuccacugaag

SEQ ID NO: 17586 - RNA, 20 nt, Artificial Sequence
  Antisense oligo
gacccgucuuuuccacugaa

SEQ ID NO: 17587 - RNA, 20 nt, Artificial Sequence
  Antisense oligo
ggacccgucuuuuccacuga

SEQ ID NO: 17588 - RNA, 20 nt, Artificial Sequence
  Antisense oligo
aggguguuaagacgcaggcc

SEQ ID NO: 17589 - RNA, 20 nt, Artificial Sequence
  Antisense oligo
caggguguuaagacgcaggc

SEQ ID NO: 17590 - RNA, 20 nt, Artificial Sequence
  Antisense oligo
gcaggguguuaagacgcagg

SEQ ID NO: 17591 - RNA, 20 nt, Artificial Sequence
  Antisense oligo
ggcaggguguuaagacgcag

SEQ ID NO: 17592 - RNA, 20 nt, Artificial Sequence
  Antisense oligo
gggcaggguguuaagacgca

SEQ ID NO: 17593 - RNA, 20 nt, Artificial Sequence
  Antisense oligo
gugguauugaugcugauccc

SEQ ID NO: 17594 - RNA, 20 nt, Artificial Sequence
  Antisense oligo
ugugguauugaugcugaucc

SEQ ID NO: 17595 - RNA, 20 nt, Artificial Sequence
  Antisense oligo
gugugguauugaugcugauc

SEQ ID NO: 17596 - RNA, 20 nt, Artificial Sequence
  Antisense oligo
ugugugguauugaugcugau

SEQ ID NO: 17597 - RNA, 20 nt, Artificial Sequence
  Antisense oligo
cugugugguauugaugcuga

SEQ ID NO: 17598 - RNA, 20 nt, Artificial Sequence
  Antisense oligo
gcugugugguauugaugcug

SEQ ID NO: 17599 - RNA, 20 nt, Artificial Sequence
  Antisense oligo
gcgcugugugguauugaugc

SEQ ID NO: 17600 - RNA, 20 nt, Artificial Sequence
  Antisense oligo
ugcgcugugugguauugaug

SEQ ID NO: 17601 - RNA, 20 nt, Artificial Sequence
  Antisense oligo
gcugcgcugugugguauuga

SEQ ID NO: 17602 - RNA, 20 nt, Artificial Sequence
  Antisense oligo
ggcugcgcugugugguauug

SEQ ID NO: 17603 - RNA, 20 nt, Artificial Sequence
  Antisense oligo
uggcugcgcugugugguauu

SEQ ID NO: 17604 - RNA, 20 nt, Artificial Sequence
  Antisense oligo
guggcugcgcugugugguau

SEQ ID NO: 17605 - RNA, 20 nt, Artificial Sequence
  Antisense oligo
auucucagcgucagguggcu

SEQ ID NO: 17606 - RNA, 20 nt, Artificial Sequence
  Antisense oligo
cauucucagcgucagguggc

SEQ ID NO: 17607 - RNA, 20 nt, Artificial Sequence
  Antisense oligo
gcauucucagcgucaggugg

SEQ ID NO: 17608 - RNA, 20 nt, Artificial Sequence
  Antisense oligo
cgcauucucagcgucaggug

SEQ ID NO: 17609 - RNA, 20 nt, Artificial Sequence
  Antisense oligo
ccgcauucucagcgucaggu

SEQ ID NO: 17610 - RNA, 20 nt, Artificial Sequence
  Antisense oligo
accgcauucucagcgucagg

SEQ ID NO: 17611 - RNA, 20 nt, Artificial Sequence
  Antisense oligo
gaccgcauucucagcgucag

SEQ ID NO: 17612 - RNA, 20 nt, Artificial Sequence
  Antisense oligo
cgaccgcauucucagcguca

SEQ ID NO: 17613 - RNA, 20 nt, Artificial Sequence
  Antisense oligo
agacccgaccgcauucucag

SEQ ID NO: 17614 - RNA, 20 nt, Artificial Sequence
  Antisense oligo
cagacccgaccgcauucuca

SEQ ID NO: 17615 - RNA, 20 nt, Artificial Sequence
  Antisense oligo
accagacccgaccgcauucu

SEQ ID NO: 17616 - RNA, 20 nt, Artificial Sequence
  Antisense oligo
agacucgccuuuccggugga

SEQ ID NO: 17617 - RNA, 20 nt, Artificial Sequence
  Antisense oligo
uagacucgccuuuccggugg

SEQ ID NO: 17618 - RNA, 20 nt, Artificial Sequence
  Antisense oligo
auagacucgccuuuccggug

SEQ ID NO: 17619 - RNA, 20 nt, Artificial Sequence
  Antisense oligo
gauagacucgccuuuccggu

SEQ ID NO: 17620 - RNA, 20 nt, Artificial Sequence
  Antisense oligo
ugauagacucgccuuuccgg

SEQ ID NO: 17621 - RNA, 20 nt, Artificial Sequence
  Antisense oligo
augauagacucgccuuuccg

SEQ ID NO: 17622 - RNA, 20 nt, Artificial Sequence
  Antisense oligo
caugauagacucgccuuucc

SEQ ID NO: 17623 - RNA, 20 nt, Artificial Sequence
  Antisense oligo
gaccauguuccuaagagucu

SEQ ID NO: 17624 - RNA, 20 nt, Artificial Sequence
  Antisense oligo
ggaccauguuccuaagaguc

SEQ ID NO: 17625 - RNA, 20 nt, Artificial Sequence
  Antisense oligo
uggaccauguuccuaagagu

SEQ ID NO: 17626 - RNA, 20 nt, Artificial Sequence
  Antisense oligo
ccuggaccauguuccuaaga

SEQ ID NO: 17627 - RNA, 20 nt, Artificial Sequence
  Antisense oligo
agccuggaccauguuccuaa

SEQ ID NO: 17628 - RNA, 20 nt, Artificial Sequence
  Antisense oligo
aagccuggaccauguuccua

SEQ ID NO: 17629 - RNA, 20 nt, Artificial Sequence
  Antisense oligo
caaagccuggaccauguucc

SEQ ID NO: 17630 - RNA, 20 nt, Artificial Sequence
  Antisense oligo
acaaagccuggaccauguuc

SEQ ID NO: 17631 - RNA, 20 nt, Artificial Sequence
  Antisense oligo
cacaaagccuggaccauguu

SEQ ID NO: 17632 - RNA, 20 nt, Artificial Sequence
  Antisense oligo
ccacaaagccuggaccaugu

SEQ ID NO: 17633 - RNA, 20 nt, Artificial Sequence
  Antisense oligo
guacuugcuguuccacaaag

SEQ ID NO: 17634 - RNA, 20 nt, Artificial Sequence
  Antisense oligo
gagaguuaugugaagaguac

SEQ ID NO: 17635 - RNA, 20 nt, Artificial Sequence
  Antisense oligo
gaagagaguuaugugaagag

SEQ ID NO: 17636 - RNA, 20 nt, Artificial Sequence
  Antisense oligo
cugagaagagaguuauguga

SEQ ID NO: 17637 - RNA, 20 nt, Artificial Sequence
  Antisense oligo
gcugagaagagaguuaugug

SEQ ID NO: 17638 - RNA, 20 nt, Artificial Sequence
  Antisense oligo
cggcugagaagagaguuaug

SEQ ID NO: 17639 - RNA, 20 nt, Artificial Sequence
  Antisense oligo
uacggcugagaagagaguua

SEQ ID NO: 17640 - RNA, 20 nt, Artificial Sequence
  Antisense oligo
uuacggcugagaagagaguu

SEQ ID NO: 17641 - RNA, 20 nt, Artificial Sequence
  Antisense oligo
cuuacggcugagaagagagu

SEQ ID NO: 17642 - RNA, 20 nt, Artificial Sequence
  Antisense oligo
gcuuacggcugagaagagag

SEQ ID NO: 17643 - RNA, 20 nt, Artificial Sequence
  Antisense oligo
aggcuuacggcugagaagag

SEQ ID NO: 17644 - RNA, 20 nt, Artificial Sequence
  Antisense oligo
gaggcuuacggcugagaaga

SEQ ID NO: 17645 - RNA, 20 nt, Artificial Sequence
  Antisense oligo
ugaggcuuacggcugagaag

SEQ ID NO: 17646 - RNA, 20 nt, Artificial Sequence
  Antisense oligo
gugaggcuuacggcugagaa

SEQ ID NO: 17647 - RNA, 20 nt, Artificial Sequence
  Antisense oligo
agugaggcuuacggcugaga

SEQ ID NO: 17648 - RNA, 20 nt, Artificial Sequence
  Antisense oligo
gagugaggcuuacggcugag

SEQ ID NO: 17649 - RNA, 20 nt, Artificial Sequence
  Antisense oligo
ggagugaggcuuacggcuga

SEQ ID NO: 17650 - RNA, 20 nt, Artificial Sequence
  Antisense oligo
acuuggagugaggcuuacgg

SEQ ID NO: 17651 - RNA, 20 nt, Artificial Sequence
  Antisense oligo
acuuucucagcacuuggagu

SEQ ID NO: 17652 - RNA, 20 nt, Artificial Sequence
  Antisense oligo
cacuuucucagcacuuggag

SEQ ID NO: 17653 - RNA, 20 nt, Artificial Sequence
  Antisense oligo
cugcacuuucucagcacuug

SEQ ID NO: 17654 - RNA, 20 nt, Artificial Sequence
  Antisense oligo
ggcacgcugcacuuucucag

SEQ ID NO: 17655 - RNA, 20 nt, Artificial Sequence
  Antisense oligo
uggcacgcugcacuuucuca

SEQ ID NO: 17656 - RNA, 20 nt, Artificial Sequence
  Antisense oligo
acaagacagaggcugaggcu

SEQ ID NO: 17657 - RNA, 20 nt, Artificial Sequence
  Antisense oligo
uugucucuggaaagaacgag

SEQ ID NO: 17658 - RNA, 20 nt, Artificial Sequence
  Antisense oligo
cuugucucuggaaagaacga

SEQ ID NO: 17659 - RNA, 20 nt, Artificial Sequence
  Antisense oligo
ccuugucucuggaaagaacg

SEQ ID NO: 17660 - RNA, 20 nt, Artificial Sequence
  Antisense oligo
ugucugccuugucucuggaa

SEQ ID NO: 17661 - RNA, 20 nt, Artificial Sequence
  Antisense oligo
cugucugccuugucucugga

SEQ ID NO: 17662 - RNA, 20 nt, Artificial Sequence
  Antisense oligo
gucugcguucugucugccuu

SEQ ID NO: 17663 - RNA, 20 nt, Artificial Sequence
  Antisense oligo
ggucugcguucugucugccu

SEQ ID NO: 17664 - RNA, 20 nt, Artificial Sequence
  Antisense oligo
ugucaccacgucucuccgcu

SEQ ID NO: 17665 - RNA, 20 nt, Artificial Sequence
  Antisense oligo
augucaccacgucucuccgc

SEQ ID NO: 17666 - RNA, 20 nt, Artificial Sequence
  Antisense oligo
caugucaccacgucucuccg

SEQ ID NO: 17667 - RNA, 20 nt, Artificial Sequence
  Antisense oligo
auaaggaggaagaccacugg

SEQ ID NO: 17668 - RNA, 20 nt, Artificial Sequence
  Antisense oligo
gauaaggaggaagaccacug

SEQ ID NO: 17669 - RNA, 20 nt, Artificial Sequence
  Antisense oligo
uagccggauaaggaggaaga

SEQ ID NO: 17670 - RNA, 20 nt, Artificial Sequence
  Antisense oligo
guagccggauaaggaggaag

SEQ ID NO: 17671 - RNA, 20 nt, Artificial Sequence
  Antisense oligo
aguagccggauaaggaggaa

SEQ ID NO: 17672 - RNA, 20 nt, Artificial Sequence
  Antisense oligo
gaguagccggauaaggagga

SEQ ID NO: 17673 - RNA, 20 nt, Artificial Sequence
  Antisense oligo
ugaguagccggauaaggagg

SEQ ID NO: 17674 - RNA, 20 nt, Artificial Sequence
  Antisense oligo
gugaguagccggauaaggag

SEQ ID NO: 17675 - RNA, 20 nt, Artificial Sequence
  Antisense oligo
agugaguagccggauaagga

SEQ ID NO: 17676 - RNA, 20 nt, Artificial Sequence
  Antisense oligo
gagugaguagccggauaagg

SEQ ID NO: 17677 - RNA, 20 nt, Artificial Sequence
  Antisense oligo
ugagugaguagccggauaag

SEQ ID NO: 17678 - RNA, 20 nt, Artificial Sequence
  Antisense oligo
gugagugaguagccggauaa

SEQ ID NO: 17679 - RNA, 20 nt, Artificial Sequence
  Antisense oligo
agugagugaguagccggaua

SEQ ID NO: 17680 - RNA, 20 nt, Artificial Sequence
  Antisense oligo
aagugagugaguagccggau

SEQ ID NO: 17681 - RNA, 20 nt, Artificial Sequence
  Antisense oligo
caagugagugaguagccgga

SEQ ID NO: 17682 - RNA, 20 nt, Artificial Sequence
  Antisense oligo
ccaagugagugaguagccgg

SEQ ID NO: 17683 - RNA, 20 nt, Artificial Sequence
  Antisense oligo
uuauaccugggaacucuggg

SEQ ID NO: 17684 - RNA, 20 nt, Artificial Sequence
  Antisense oligo
guuauaccugggaacucugg

SEQ ID NO: 17685 - RNA, 20 nt, Artificial Sequence
  Antisense oligo
gguuauaccugggaacucug

SEQ ID NO: 17686 - RNA, 20 nt, Artificial Sequence
  Antisense oligo
uggguuauaccugggaacuc

SEQ ID NO: 17687 - RNA, 20 nt, Artificial Sequence
  Antisense oligo
acuggguuauaccugggaac

SEQ ID NO: 17688 - RNA, 20 nt, Artificial Sequence
  Antisense oligo
cacuggguuauaccugggaa

SEQ ID NO: 17689 - RNA, 20 nt, Artificial Sequence
  Antisense oligo
gcacuggguuauaccuggga

SEQ ID NO: 17690 - RNA, 20 nt, Artificial Sequence
  Antisense oligo
agcacuggguuauaccuggg

SEQ ID NO: 17691 - RNA, 20 nt, Artificial Sequence
  Antisense oligo
cagcacuggguuauaccugg

SEQ ID NO: 17692 - RNA, 20 nt, Artificial Sequence
  Antisense oligo
gcagcacuggguuauaccug

SEQ ID NO: 17693 - RNA, 20 nt, Artificial Sequence
  Antisense oligo
ggcagcacuggguuauaccu

SEQ ID NO: 17694 - RNA, 20 nt, Artificial Sequence
  Antisense oligo
cauuguuuggcagcacuggg

SEQ ID NO: 17695 - RNA, 20 nt, Artificial Sequence
  Antisense oligo
ccauuguuuggcagcacugg

SEQ ID NO: 17696 - RNA, 20 nt, Artificial Sequence
  Antisense oligo
cccauuguuuggcagcacug

SEQ ID NO: 17697 - RNA, 20 nt, Artificial Sequence
  Antisense oligo
gcccauuguuuggcagcacu

SEQ ID NO: 17698 - RNA, 20 nt, Artificial Sequence
  Antisense oligo
agcccauuguuuggcagcac

SEQ ID NO: 17699 - RNA, 20 nt, Artificial Sequence
  Antisense oligo
gagcccauuguuuggcagca

SEQ ID NO: 17700 - RNA, 20 nt, Artificial Sequence
  Antisense oligo
ugagcccauuguuuggcagc

SEQ ID NO: 17701 - RNA, 20 nt, Artificial Sequence
  Antisense oligo
cugagcccauuguuuggcag

SEQ ID NO: 17702 - RNA, 20 nt, Artificial Sequence
  Antisense oligo
uaacugagcccauuguuugg

SEQ ID NO: 17703 - RNA, 20 nt, Artificial Sequence
  Antisense oligo
uuaacugagcccauuguuug

SEQ ID NO: 17704 - RNA, 20 nt, Artificial Sequence
  Antisense oligo
cuuaacugagcccauuguuu

SEQ ID NO: 17705 - RNA, 20 nt, Artificial Sequence
  Antisense oligo
ucuuaacugagcccauuguu

SEQ ID NO: 17706 - RNA, 20 nt, Artificial Sequence
  Antisense oligo
uucuuaacugagcccauugu

SEQ ID NO: 17707 - RNA, 20 nt, Artificial Sequence
  Antisense oligo
guucuuaacugagcccauug

SEQ ID NO: 17708 - RNA, 20 nt, Artificial Sequence
  Antisense oligo
gguucuuaacugagcccauu

SEQ ID NO: 17709 - RNA, 20 nt, Artificial Sequence
  Antisense oligo
agguucuuaacugagcccau

SEQ ID NO: 17710 - RNA, 20 nt, Artificial Sequence
  Antisense oligo
cagguucuuaacugagccca

SEQ ID NO: 17711 - RNA, 20 nt, Artificial Sequence
  Antisense oligo
gcagguucuuaacugagccc

SEQ ID NO: 17712 - RNA, 20 nt, Artificial Sequence
  Antisense oligo
agcagguucuuaacugagcc

SEQ ID NO: 17713 - RNA, 20 nt, Artificial Sequence
  Antisense oligo
aagcagguucuuaacugagc

SEQ ID NO: 17714 - RNA, 20 nt, Artificial Sequence
  Antisense oligo
aaagcagguucuuaacugag

SEQ ID NO: 17715 - RNA, 20 nt, Artificial Sequence
  Antisense oligo
gcgaaagcagguucuuaacu

SEQ ID NO: 17716 - RNA, 20 nt, Artificial Sequence
  Antisense oligo
agcgaaagcagguucuuaac

SEQ ID NO: 17717 - RNA, 20 nt, Artificial Sequence
  Antisense oligo
aagcgaaagcagguucuuaa

SEQ ID NO: 17718 - RNA, 20 nt, Artificial Sequence
  Antisense oligo
gaagcgaaagcagguucuua

SEQ ID NO: 17719 - RNA, 20 nt, Artificial Sequence
  Antisense oligo
gaagaagcgaaagcagguuc

SEQ ID NO: 17720 - RNA, 20 nt, Artificial Sequence
  Antisense oligo
gggaagaagcgaaagcaggu

SEQ ID NO: 17721 - RNA, 20 nt, Artificial Sequence
  Antisense oligo
ugggaagaagcgaaagcagg

SEQ ID NO: 17722 - RNA, 20 nt, Artificial Sequence
  Antisense oligo
cccugggaagaagcgaaagc

SEQ ID NO: 17723 - RNA, 20 nt, Artificial Sequence
  Antisense oligo
cucccugggaagaagcgaaa

SEQ ID NO: 17724 - RNA, 20 nt, Artificial Sequence
  Antisense oligo
acucccugggaagaagcgaa

SEQ ID NO: 17725 - RNA, 20 nt, Artificial Sequence
  Antisense oligo
aaggacucccugggaagaag

SEQ ID NO: 17726 - RNA, 20 nt, Artificial Sequence
  Antisense oligo
caaaaggacucccugggaag

SEQ ID NO: 17727 - RNA, 20 nt, Artificial Sequence
  Antisense oligo
acaaaaggacucccugggaa

SEQ ID NO: 17728 - RNA, 20 nt, Artificial Sequence
  Antisense oligo
cucaagacaaaaggacuccc

SEQ ID NO: 17729 - RNA, 20 nt, Artificial Sequence
  Antisense oligo
acucaagacaaaaggacucc

SEQ ID NO: 17730 - RNA, 20 nt, Artificial Sequence
  Antisense oligo
gacucaagacaaaaggacuc

SEQ ID NO: 17731 - RNA, 20 nt, Artificial Sequence
  Antisense oligo
ggacucaagacaaaaggacu

SEQ ID NO: 17732 - RNA, 20 nt, Artificial Sequence
  Antisense oligo
aggacucaagacaaaaggac

SEQ ID NO: 17733 - RNA, 20 nt, Artificial Sequence
  Antisense oligo
cuaggacucaagacaaaagg

SEQ ID NO: 17734 - RNA, 20 nt, Artificial Sequence
  Antisense oligo
gcuaggacucaagacaaaag

SEQ ID NO: 17735 - RNA, 20 nt, Artificial Sequence
  Antisense oligo
agcuaggacucaagacaaaa

SEQ ID NO: 17736 - RNA, 20 nt, Artificial Sequence
  Antisense oligo
gcagcuaggacucaagacaa

SEQ ID NO: 17737 - RNA, 20 nt, Artificial Sequence
  Antisense oligo
ggcagcuaggacucaagaca

SEQ ID NO: 17738 - RNA, 20 nt, Artificial Sequence
  Antisense oligo
uggcagcuaggacucaagac

SEQ ID NO: 17739 - RNA, 20 nt, Artificial Sequence
  Antisense oligo
auggcagcuaggacucaaga

SEQ ID NO: 17740 - RNA, 20 nt, Artificial Sequence
  Antisense oligo
gauggcagcuaggacucaag

SEQ ID NO: 17741 - RNA, 20 nt, Artificial Sequence
  Antisense oligo
uagauggcagcuaggacuca

SEQ ID NO: 17742 - RNA, 20 nt, Artificial Sequence
  Antisense oligo
auagauggcagcuaggacuc

SEQ ID NO: 17743 - RNA, 20 nt, Artificial Sequence
  Antisense oligo
cauagauggcagcuaggacu

SEQ ID NO: 17744 - RNA, 20 nt, Artificial Sequence
  Antisense oligo
cgcauagauggcagcuagga

SEQ ID NO: 17745 - RNA, 20 nt, Artificial Sequence
  Antisense oligo
acgcauagauggcagcuagg

SEQ ID NO: 17746 - RNA, 20 nt, Artificial Sequence
  Antisense oligo
aacgcauagauggcagcuag

SEQ ID NO: 17747 - RNA, 20 nt, Artificial Sequence
  Antisense oligo
aaacgcauagauggcagcua

SEQ ID NO: 17748 - RNA, 20 nt, Artificial Sequence
  Antisense oligo
caaaacgcauagauggcagc

SEQ ID NO: 17749 - RNA, 20 nt, Artificial Sequence
  Antisense oligo
ccaaaacgcauagauggcag

SEQ ID NO: 17750 - RNA, 20 nt, Artificial Sequence
  Antisense oligo
uccaaaacgcauagauggca

SEQ ID NO: 17751 - RNA, 20 nt, Artificial Sequence
  Antisense oligo
ucuccaaaacgcauagaugg

SEQ ID NO: 17752 - RNA, 20 nt, Artificial Sequence
  Antisense oligo
uaccaucauacgccacaggg

SEQ ID NO: 17753 - RNA, 20 nt, Artificial Sequence
  Antisense oligo
auaccaucauacgccacagg

SEQ ID NO: 17754 - RNA, 20 nt, Artificial Sequence
  Antisense oligo
cauaccaucauacgccacag

SEQ ID NO: 17755 - RNA, 20 nt, Artificial Sequence
  Antisense oligo
ccauaccaucauacgccaca

SEQ ID NO: 17756 - RNA, 20 nt, Artificial Sequence
  Antisense oligo
cccauaccaucauacgccac

SEQ ID NO: 17757 - RNA, 20 nt, Artificial Sequence
  Antisense oligo
guggaccagagacacagagu

SEQ ID NO: 17758 - RNA, 20 nt, Artificial Sequence
  Antisense oligo
guuaugcagugugcucuuuc

SEQ ID NO: 17759 - RNA, 20 nt, Artificial Sequence
  Antisense oligo
uugguuaugcagugugcucu

SEQ ID NO: 17760 - RNA, 20 nt, Artificial Sequence
  Antisense oligo
cuugguuaugcagugugcuc

SEQ ID NO: 17761 - RNA, 20 nt, Artificial Sequence
  Antisense oligo
ucuugguuaugcagugugcu

SEQ ID NO: 17762 - RNA, 20 nt, Artificial Sequence
  Antisense oligo
aucuugguuaugcagugugc

SEQ ID NO: 17763 - RNA, 20 nt, Artificial Sequence
  Antisense oligo
caucuugguuaugcagugug

SEQ ID NO: 17764 - RNA, 20 nt, Artificial Sequence
  Antisense oligo
ccaucuugguuaugcagugu

SEQ ID NO: 17765 - RNA, 20 nt, Artificial Sequence
  Antisense oligo
gccaucuugguuaugcagug

SEQ ID NO: 17766 - RNA, 20 nt, Artificial Sequence
  Antisense oligo
ggccaucuugguuaugcagu

SEQ ID NO: 17767 - RNA, 20 nt, Artificial Sequence
  Antisense oligo
uccagauuguacuguuggcc

SEQ ID NO: 17768 - RNA, 20 nt, Artificial Sequence
  Antisense oligo
auccagauuguacuguuggc

SEQ ID NO: 17769 - RNA, 20 nt, Artificial Sequence
  Antisense oligo
uauccagauuguacuguugg

SEQ ID NO: 17770 - RNA, 20 nt, Artificial Sequence
  Antisense oligo
cuggcuuuucuguuguuaca

SEQ ID NO: 17771 - RNA, 20 nt, Artificial Sequence
  Antisense oligo
uccaggugaaaggaaggcua

SEQ ID NO: 17772 - RNA, 20 nt, Artificial Sequence
  Antisense oligo
cggagugauccaggugaaag

SEQ ID NO: 17773 - RNA, 20 nt, Artificial Sequence
  Antisense oligo
gcggagugauccaggugaaa

SEQ ID NO: 17774 - RNA, 20 nt, Artificial Sequence
  Antisense oligo
ggcggagugauccaggugaa

SEQ ID NO: 17775 - RNA, 20 nt, Artificial Sequence
  Antisense oligo
aaggcgguuucuaagaugaa

SEQ ID NO: 17776 - RNA, 20 nt, Artificial Sequence
  Antisense oligo
gaaggcgguuucuaagauga

SEQ ID NO: 17777 - RNA, 20 nt, Artificial Sequence
  Antisense oligo
ggaaggcgguuucuaagaug

SEQ ID NO: 17778 - RNA, 20 nt, Artificial Sequence
  Antisense oligo
cggaaggcgguuucuaagau

SEQ ID NO: 17779 - RNA, 20 nt, Artificial Sequence
  Antisense oligo
ucggaaggcgguuucuaaga

SEQ ID NO: 17780 - RNA, 20 nt, Artificial Sequence
  Antisense oligo
gucggaaggcgguuucuaag

SEQ ID NO: 17781 - RNA, 20 nt, Artificial Sequence
  Antisense oligo
agucggaaggcgguuucuaa

SEQ ID NO: 17782 - RNA, 20 nt, Artificial Sequence
  Antisense oligo
gagucggaaggcgguuucua

SEQ ID NO: 17783 - RNA, 20 nt, Artificial Sequence
  Antisense oligo
agagucggaaggcgguuucu

SEQ ID NO: 17784 - RNA, 20 nt, Artificial Sequence
  Antisense oligo
uagagucggaaggcgguuuc

SEQ ID NO: 17785 - RNA, 20 nt, Artificial Sequence
  Antisense oligo
auagagucggaaggcgguuu

SEQ ID NO: 17786 - RNA, 20 nt, Artificial Sequence
  Antisense oligo
cauagagucggaaggcgguu

SEQ ID NO: 17787 - RNA, 20 nt, Artificial Sequence
  Antisense oligo
gcauagagucggaaggcggu

SEQ ID NO: 17788 - RNA, 20 nt, Artificial Sequence
  Antisense oligo
agcauagagucggaaggcgg

SEQ ID NO: 17789 - RNA, 20 nt, Artificial Sequence
  Antisense oligo
cagcauagagucggaaggcg

SEQ ID NO: 17790 - RNA, 20 nt, Artificial Sequence
  Antisense oligo
ccagcauagagucggaaggc

SEQ ID NO: 17791 - RNA, 20 nt, Artificial Sequence
  Antisense oligo
accagcauagagucggaagg

SEQ ID NO: 17792 - RNA, 20 nt, Artificial Sequence
  Antisense oligo
caccagcauagagucggaag

SEQ ID NO: 17793 - RNA, 20 nt, Artificial Sequence
  Antisense oligo
gcaccagcauagagucggaa

SEQ ID NO: 17794 - RNA, 20 nt, Artificial Sequence
  Antisense oligo
agcaccagcauagagucgga

SEQ ID NO: 17795 - RNA, 20 nt, Artificial Sequence
  Antisense oligo
gagcaccagcauagagucgg

SEQ ID NO: 17796 - RNA, 20 nt, Artificial Sequence
  Antisense oligo
ggagcaccagcauagagucg

SEQ ID NO: 17797 - RNA, 20 nt, Artificial Sequence
  Antisense oligo
uggagcaccagcauagaguc

SEQ ID NO: 17798 - RNA, 20 nt, Artificial Sequence
  Antisense oligo
guggagcaccagcauagagu

SEQ ID NO: 17799 - RNA, 20 nt, Artificial Sequence
  Antisense oligo
aguggagcaccagcauagag

SEQ ID NO: 17800 - RNA, 20 nt, Artificial Sequence
  Antisense oligo
gaguggagcaccagcauaga

SEQ ID NO: 17801 - RNA, 20 nt, Artificial Sequence
  Antisense oligo
ggaguggagcaccagcauag

SEQ ID NO: 17802 - RNA, 20 nt, Artificial Sequence
  Antisense oligo
gggaguggagcaccagcaua

SEQ ID NO: 17803 - RNA, 20 nt, Artificial Sequence
  Antisense oligo
uugggaguggagcaccagca

SEQ ID NO: 17804 - RNA, 20 nt, Artificial Sequence
  Antisense oligo
auugggaguggagcaccagc

SEQ ID NO: 17805 - RNA, 20 nt, Artificial Sequence
  Antisense oligo
cauugggaguggagcaccag

SEQ ID NO: 17806 - RNA, 20 nt, Artificial Sequence
  Antisense oligo
ccauugggaguggagcacca

SEQ ID NO: 17807 - RNA, 20 nt, Artificial Sequence
  Antisense oligo
aggccauugggaguggagca

SEQ ID NO: 17808 - RNA, 20 nt, Artificial Sequence
  Antisense oligo
guagaggccauugggagugg

SEQ ID NO: 17809 - RNA, 20 nt, Artificial Sequence
  Antisense oligo
gguagaggccauugggagug

SEQ ID NO: 17810 - RNA, 20 nt, Artificial Sequence
  Antisense oligo
cugguagaggccauugggag

SEQ ID NO: 17811 - RNA, 20 nt, Artificial Sequence
  Antisense oligo
ccugguagaggccauuggga

SEQ ID NO: 17812 - RNA, 20 nt, Artificial Sequence
  Antisense oligo
aagauggugagccugguaga

SEQ ID NO: 17813 - RNA, 20 nt, Artificial Sequence
  Antisense oligo
gaagauggugagccugguag

SEQ ID NO: 17814 - RNA, 20 nt, Artificial Sequence
  Antisense oligo
agaagauggugagccuggua

SEQ ID NO: 17815 - RNA, 20 nt, Artificial Sequence
  Antisense oligo
gagaagauggugagccuggu

SEQ ID NO: 17816 - RNA, 20 nt, Artificial Sequence
  Antisense oligo
agagaagauggugagccugg

SEQ ID NO: 17817 - RNA, 20 nt, Artificial Sequence
  Antisense oligo
uagagaagauggugagccug

SEQ ID NO: 17818 - RNA, 20 nt, Artificial Sequence
  Antisense oligo
guagagaagauggugagccu

SEQ ID NO: 17819 - RNA, 20 nt, Artificial Sequence
  Antisense oligo
uguagagaagauggugagcc

SEQ ID NO: 17820 - RNA, 20 nt, Artificial Sequence
  Antisense oligo
guuuguagagaagaugguga

SEQ ID NO: 17821 - RNA, 20 nt, Artificial Sequence
  Antisense oligo
ggaucugguuuguagagaag

SEQ ID NO: 17822 - RNA, 20 nt, Artificial Sequence
  Antisense oligo
gggaucugguuuguagagaa

SEQ ID NO: 17823 - RNA, 20 nt, Artificial Sequence
  Antisense oligo
uguuuaucagagccuguggg

SEQ ID NO: 17824 - RNA, 20 nt, Artificial Sequence
  Antisense oligo
cacuggaggcuuaaugaugu

SEQ ID NO: 17825 - RNA, 20 nt, Artificial Sequence
  Antisense oligo
ucacuggaggcuuaaugaug

SEQ ID NO: 17826 - RNA, 20 nt, Artificial Sequence
  Antisense oligo
cucacuggaggcuuaaugau

SEQ ID NO: 17827 - RNA, 20 nt, Artificial Sequence
  Antisense oligo
ugugucccagcaucuuggcc

SEQ ID NO: 17828 - RNA, 20 nt, Artificial Sequence
  Antisense oligo
uggucucgucggcacugugu

SEQ ID NO: 17829 - RNA, 20 nt, Artificial Sequence
  Antisense oligo
auggucucgucggcacugug

SEQ ID NO: 17830 - RNA, 20 nt, Artificial Sequence
  Antisense oligo
gauggucucgucggcacugu

SEQ ID NO: 17831 - RNA, 20 nt, Artificial Sequence
  Antisense oligo
uucugcuagagagcuggugc

SEQ ID NO: 17832 - RNA, 20 nt, Artificial Sequence
  Antisense oligo
acuucugcuagagagcuggu

SEQ ID NO: 17833 - RNA, 20 nt, Artificial Sequence
  Antisense oligo
ucacuucugcuagagagcug

SEQ ID NO: 17834 - RNA, 20 nt, Artificial Sequence
  Antisense oligo
cucacuucugcuagagagcu

SEQ ID NO: 17835 - RNA, 20 nt, Artificial Sequence
  Antisense oligo
uugcgcugccguugugcugu

SEQ ID NO: 17836 - RNA, 20 nt, Artificial Sequence
  Antisense oligo
aagacagcgagccugcuugc

SEQ ID NO: 17837 - RNA, 20 nt, Artificial Sequence
  Antisense oligo
acaagacagcgagccugcuu

SEQ ID NO: 17838 - RNA, 20 nt, Artificial Sequence
  Antisense oligo
cacaagacagcgagccugcu

SEQ ID NO: 17839 - RNA, 20 nt, Artificial Sequence
  Antisense oligo
ccagcaacagcacagacaga

SEQ ID NO: 17840 - RNA, 20 nt, Artificial Sequence
  Antisense oligo
cauucuuuccagcaacagca

SEQ ID NO: 17841 - RNA, 20 nt, Artificial Sequence
  Antisense oligo
gacacgguuuucucucugug

SEQ ID NO: 17842 - RNA, 20 nt, Artificial Sequence
  Antisense oligo
agacacgguuuucucucugu

SEQ ID NO: 17843 - RNA, 20 nt, Artificial Sequence
  Antisense oligo
uagacacgguuuucucucug

SEQ ID NO: 17844 - RNA, 20 nt, Artificial Sequence
  Antisense oligo
cuagacacgguuuucucucu

SEQ ID NO: 17845 - RNA, 20 nt, Artificial Sequence
  Antisense oligo
ccuagacacgguuuucucuc

SEQ ID NO: 17846 - RNA, 20 nt, Artificial Sequence
  Antisense oligo
cccuagacacgguuuucucu

SEQ ID NO: 17847 - RNA, 20 nt, Artificial Sequence
  Antisense oligo
ucccuagacacgguuuucuc

SEQ ID NO: 17848 - RNA, 20 nt, Artificial Sequence
  Antisense oligo
uucccuagacacgguuuucu

SEQ ID NO: 17849 - RNA, 20 nt, Artificial Sequence
  Antisense oligo
cuucccuagacacgguuuuc

SEQ ID NO: 17850 - RNA, 20 nt, Artificial Sequence
  Antisense oligo
ccuucccuagacacgguuuu

SEQ ID NO: 17851 - RNA, 20 nt, Artificial Sequence
  Antisense oligo
gccuucccuagacacgguuu

SEQ ID NO: 17852 - RNA, 20 nt, Artificial Sequence
  Antisense oligo
cgccuucccuagacacgguu

SEQ ID NO: 17853 - RNA, 20 nt, Artificial Sequence
  Antisense oligo
ucgccuucccuagacacggu

SEQ ID NO: 17854 - RNA, 20 nt, Artificial Sequence
  Antisense oligo
aucgccuucccuagacacgg

SEQ ID NO: 17855 - RNA, 20 nt, Artificial Sequence
  Antisense oligo
caucgccuucccuagacacg

SEQ ID NO: 17856 - RNA, 20 nt, Artificial Sequence
  Antisense oligo
gcaucgccuucccuagacac

SEQ ID NO: 17857 - RNA, 20 nt, Artificial Sequence
  Antisense oligo
ggcaucgccuucccuagaca

SEQ ID NO: 17858 - RNA, 20 nt, Artificial Sequence
  Antisense oligo
gugaauggagggaacagagc

SEQ ID NO: 17859 - RNA, 20 nt, Artificial Sequence
  Antisense oligo
auaccgcaggucuuagccag

SEQ ID NO: 17860 - RNA, 20 nt, Artificial Sequence
  Antisense oligo
aauaccgcaggucuuagcca

SEQ ID NO: 17861 - RNA, 20 nt, Artificial Sequence
  Antisense oligo
gaauaccgcaggucuuagcc

SEQ ID NO: 17862 - RNA, 20 nt, Artificial Sequence
  Antisense oligo
cgaauaccgcaggucuuagc

SEQ ID NO: 17863 - RNA, 20 nt, Artificial Sequence
  Antisense oligo
ccgaauaccgcaggucuuag

SEQ ID NO: 17864 - RNA, 20 nt, Artificial Sequence
  Antisense oligo
cccgaauaccgcaggucuua

SEQ ID NO: 17865 - RNA, 20 nt, Artificial Sequence
  Antisense oligo
ucccgaauaccgcaggucuu

SEQ ID NO: 17866 - RNA, 20 nt, Artificial Sequence
  Antisense oligo
cucccgaauaccgcaggucu

SEQ ID NO: 17867 - RNA, 20 nt, Artificial Sequence
  Antisense oligo
agacgcucccgaauaccgca

SEQ ID NO: 17868 - RNA, 20 nt, Artificial Sequence
  Antisense oligo
ugcagacgcucccgaauacc

SEQ ID NO: 17869 - RNA, 20 nt, Artificial Sequence
  Antisense oligo
gugcagacgcucccgaauac

SEQ ID NO: 17870 - RNA, 20 nt, Artificial Sequence
  Antisense oligo
cgugcagacgcucccgaaua

SEQ ID NO: 17871 - RNA, 20 nt, Artificial Sequence
  Antisense oligo
ugaacacuugcgugcagacg

SEQ ID NO: 17872 - RNA, 20 nt, Artificial Sequence
  Antisense oligo
cugaacacuugcgugcagac

SEQ ID NO: 17873 - RNA, 20 nt, Artificial Sequence
  Antisense oligo
acugaacacuugcgugcaga

SEQ ID NO: 17874 - RNA, 20 nt, Artificial Sequence
  Antisense oligo
cacugaacacuugcgugcag

SEQ ID NO: 17875 - RNA, 20 nt, Artificial Sequence
  Antisense oligo
acacugaacacuugcgugca

SEQ ID NO: 17876 - RNA, 20 nt, Artificial Sequence
  Antisense oligo
cacacugaacacuugcgugc

SEQ ID NO: 17877 - RNA, 20 nt, Artificial Sequence
  Antisense oligo
augcacacugaacacuugcg

SEQ ID NO: 17878 - RNA, 20 nt, Artificial Sequence
  Antisense oligo
gggcugacuucggaacugaa

SEQ ID NO: 17879 - RNA, 20 nt, Artificial Sequence
  Antisense oligo
auggugauugauccuuugac

SEQ ID NO: 17880 - RNA, 20 nt, Artificial Sequence
  Antisense oligo
gauggugauugauccuuuga

SEQ ID NO: 17881 - RNA, 20 nt, Artificial Sequence
  Antisense oligo
ugauggugauugauccuuug

SEQ ID NO: 17882 - RNA, 20 nt, Artificial Sequence
  Antisense oligo
gugauggugauugauccuuu

SEQ ID NO: 17883 - RNA, 20 nt, Artificial Sequence
  Antisense oligo
acaacugugauggugauuga

SEQ ID NO: 17884 - RNA, 20 nt, Artificial Sequence
  Antisense oligo
cacaacugugauggugauug

SEQ ID NO: 17885 - RNA, 20 nt, Artificial Sequence
  Antisense oligo
accacucacagauaaccaua

SEQ ID NO: 17886 - RNA, 20 nt, Artificial Sequence
  Antisense oligo
caccacucacagauaaccau

SEQ ID NO: 17887 - RNA, 20 nt, Artificial Sequence
  Antisense oligo
cucuuaauuccaccacucac

SEQ ID NO: 17888 - RNA, 20 nt, Artificial Sequence
  Antisense oligo
ggcaggacuucuucuugcua

SEQ ID NO: 17889 - RNA, 20 nt, Artificial Sequence
  Antisense oligo
gcagauuuucuugucauggg

SEQ ID NO: 17890 - RNA, 20 nt, Artificial Sequence
  Antisense oligo
gagcagauuuucuugucaug

SEQ ID NO: 17891 - RNA, 20 nt, Artificial Sequence
  Antisense oligo
ugaggugggagcagauuuuc

SEQ ID NO: 17892 - RNA, 20 nt, Artificial Sequence
  Antisense oligo
guaccugaggugggagcaga

SEQ ID NO: 17893 - RNA, 20 nt, Artificial Sequence
  Antisense oligo
gaaguaccugaggugggagc

SEQ ID NO: 17894 - RNA, 20 nt, Artificial Sequence
  Antisense oligo
agaaguaccugaggugggag

SEQ ID NO: 17895 - RNA, 20 nt, Artificial Sequence
  Antisense oligo
aagaaguaccugagguggga

SEQ ID NO: 17896 - RNA, 20 nt, Artificial Sequence
  Antisense oligo
caaagaaguaccugaggugg

SEQ ID NO: 17897 - RNA, 20 nt, Artificial Sequence
  Antisense oligo
gcaaagaaguaccugaggug

SEQ ID NO: 17898 - RNA, 20 nt, Artificial Sequence
  Antisense oligo
aguuucaggcaaagaaguac

SEQ ID NO: 17899 - RNA, 20 nt, Artificial Sequence
  Antisense oligo
ucccaccagaauaagaggcu

SEQ ID NO: 17900 - RNA, 20 nt, Artificial Sequence
  Antisense oligo
aaucccaccagaauaagagg

SEQ ID NO: 17901 - RNA, 20 nt, Artificial Sequence
  Antisense oligo
aaaucccaccagaauaagag

SEQ ID NO: 17902 - RNA, 20 nt, Artificial Sequence
  Antisense oligo
gaaaucccaccagaauaaga

SEQ ID NO: 17903 - RNA, 20 nt, Artificial Sequence
  Antisense oligo
uuugcugaaaucccaccaga

SEQ ID NO: 17904 - RNA, 20 nt, Artificial Sequence
  Antisense oligo
caucagugugacucugggug

SEQ ID NO: 17905 - RNA, 20 nt, Artificial Sequence
  Antisense oligo
ucaucagugugacucugggu

SEQ ID NO: 17906 - RNA, 20 nt, Artificial Sequence
  Antisense oligo
cauuucaucagugugacucu

SEQ ID NO: 17907 - RNA, 20 nt, Artificial Sequence
  Antisense oligo
ucauuucaucagugugacuc

SEQ ID NO: 17908 - RNA, 20 nt, Artificial Sequence
  Antisense oligo
cugucauuucaucaguguga

SEQ ID NO: 17909 - RNA, 20 nt, Artificial Sequence
  Antisense oligo
gaacuguccaccugcuucca

SEQ ID NO: 17910 - RNA, 20 nt, Artificial Sequence
  Antisense oligo
gggaacuguccaccugcuuc

SEQ ID NO: 17911 - RNA, 20 nt, Artificial Sequence
  Antisense oligo
cgggaacuguccaccugcuu

SEQ ID NO: 17912 - RNA, 20 nt, Artificial Sequence
  Antisense oligo
agugcugcgggaacugucca

SEQ ID NO: 17913 - RNA, 20 nt, Artificial Sequence
  Antisense oligo
uggagugcugcgggaacugu

SEQ ID NO: 17914 - RNA, 20 nt, Artificial Sequence
  Antisense oligo
uguggagugcugcgggaacu

SEQ ID NO: 17915 - RNA, 20 nt, Artificial Sequence
  Antisense oligo
auguggagugcugcgggaac

SEQ ID NO: 17916 - RNA, 20 nt, Artificial Sequence
  Antisense oligo
gauguggagugcugcgggaa

SEQ ID NO: 17917 - RNA, 20 nt, Artificial Sequence
  Antisense oligo
agauguggagugcugcggga

SEQ ID NO: 17918 - RNA, 20 nt, Artificial Sequence
  Antisense oligo
acagauguggagugcugcgg

SEQ ID NO: 17919 - RNA, 20 nt, Artificial Sequence
  Antisense oligo
cacagauguggagugcugcg

SEQ ID NO: 17920 - RNA, 20 nt, Artificial Sequence
  Antisense oligo
acacagauguggagugcugc

SEQ ID NO: 17921 - RNA, 20 nt, Artificial Sequence
  Antisense oligo
gaggcagaccacacagaugu

SEQ ID NO: 17922 - RNA, 20 nt, Artificial Sequence
  Antisense oligo
cugaggcagaccacacagau

SEQ ID NO: 17923 - RNA, 20 nt, Artificial Sequence
  Antisense oligo
aacccugaggcagaccacac

SEQ ID NO: 17924 - RNA, 20 nt, Artificial Sequence
  Antisense oligo
acccaaacccugaggcagac

SEQ ID NO: 17925 - RNA, 20 nt, Artificial Sequence
  Antisense oligo
uaagaguggcccaggcuacc

SEQ ID NO: 17926 - RNA, 20 nt, Artificial Sequence
  Antisense oligo
guaagaguggcccaggcuac

SEQ ID NO: 17927 - RNA, 20 nt, Artificial Sequence
  Antisense oligo
aauaguaagaguggcccagg

SEQ ID NO: 17928 - RNA, 20 nt, Artificial Sequence
  Antisense oligo
ucaauaguaagaguggccca

SEQ ID NO: 17929 - RNA, 20 nt, Artificial Sequence
  Antisense oligo
cucaauaguaagaguggccc

SEQ ID NO: 17930 - RNA, 20 nt, Artificial Sequence
  Antisense oligo
gcucaauaguaagaguggcc

SEQ ID NO: 17931 - RNA, 20 nt, Artificial Sequence
  Antisense oligo
agcucaauaguaagaguggc

SEQ ID NO: 17932 - RNA, 20 nt, Artificial Sequence
  Antisense oligo
ccaccaacuuaaugaccuuu

SEQ ID NO: 17933 - RNA, 20 nt, Artificial Sequence
  Antisense oligo
accaccaacuuaaugaccuu

SEQ ID NO: 17934 - RNA, 20 nt, Artificial Sequence
  Antisense oligo
uaccaccaacuuaaugaccu

SEQ ID NO: 17935 - RNA, 20 nt, Artificial Sequence
  Antisense oligo
uuaccaccaacuuaaugacc

SEQ ID NO: 17936 - RNA, 20 nt, Artificial Sequence
  Antisense oligo
guuaccaccaacuuaaugac

SEQ ID NO: 17937 - RNA, 20 nt, Artificial Sequence
  Antisense oligo
guuccuguuguuaccaccaa

SEQ ID NO: 17938 - RNA, 20 nt, Artificial Sequence
  Antisense oligo
aaguaguuccuguuguuacc

SEQ ID NO: 17939 - RNA, 20 nt, Artificial Sequence
  Antisense oligo
gaaguaguuccuguuguuac

SEQ ID NO: 17940 - RNA, 20 nt, Artificial Sequence
  Antisense oligo
acucguuuugagguaauagc

SEQ ID NO: 17941 - RNA, 20 nt, Artificial Sequence
  Antisense oligo
cacucguuuugagguaauag

SEQ ID NO: 17942 - RNA, 20 nt, Artificial Sequence
  Antisense oligo
gucugcguauaauaaacccu

SEQ ID NO: 17943 - RNA, 20 nt, Artificial Sequence
  Antisense oligo
agucugcguauaauaaaccc

SEQ ID NO: 17944 - RNA, 20 nt, Artificial Sequence
  Antisense oligo
cagucugcguauaauaaacc

SEQ ID NO: 17945 - RNA, 20 nt, Artificial Sequence
  Antisense oligo
gcagucugcguauaauaaac

SEQ ID NO: 17946 - RNA, 20 nt, Artificial Sequence
  Antisense oligo
cagcagucugcguauaauaa

SEQ ID NO: 17947 - RNA, 20 nt, Artificial Sequence
  Antisense oligo
acagcagucugcguauaaua

SEQ ID NO: 17948 - RNA, 20 nt, Artificial Sequence
  Antisense oligo
cacagcagucugcguauaau

SEQ ID NO: 17949 - RNA, 20 nt, Artificial Sequence
  Antisense oligo
acacagcagucugcguauaa

SEQ ID NO: 17950 - RNA, 20 nt, Artificial Sequence
  Antisense oligo
aacacagcagucugcguaua

SEQ ID NO: 17951 - RNA, 20 nt, Artificial Sequence
  Antisense oligo
gaacacagcagucugcguau

SEQ ID NO: 17952 - RNA, 20 nt, Artificial Sequence
  Antisense oligo
ggcacaaagaacacagcagu

SEQ ID NO: 17953 - RNA, 20 nt, Artificial Sequence
  Antisense oligo
agguuacccaaggcacaaag

SEQ ID NO: 17954 - RNA, 20 nt, Artificial Sequence
  Antisense oligo
guagguuacccaaggcacaa

SEQ ID NO: 17955 - RNA, 20 nt, Artificial Sequence
  Antisense oligo
uguagguuacccaaggcaca

SEQ ID NO: 17956 - RNA, 20 nt, Artificial Sequence
  Antisense oligo
guguagguuacccaaggcac

SEQ ID NO: 17957 - RNA, 20 nt, Artificial Sequence
  Antisense oligo
uguguagguuacccaaggca

SEQ ID NO: 17958 - RNA, 20 nt, Artificial Sequence
  Antisense oligo
auguguagguuacccaaggc

SEQ ID NO: 17959 - RNA, 20 nt, Artificial Sequence
  Antisense oligo
aauguguagguuacccaagg

SEQ ID NO: 17960 - RNA, 20 nt, Artificial Sequence
  Antisense oligo
aaauguguagguuacccaag

SEQ ID NO: 17961 - RNA, 20 nt, Artificial Sequence
  Antisense oligo
caaauguguagguuacccaa

SEQ ID NO: 17962 - RNA, 20 nt, Artificial Sequence
  Antisense oligo
ccaaauguguagguuaccca

SEQ ID NO: 17963 - RNA, 20 nt, Artificial Sequence
  Antisense oligo
uccaaauguguagguuaccc

SEQ ID NO: 17964 - RNA, 20 nt, Artificial Sequence
  Antisense oligo
cuccaaauguguagguuacc

SEQ ID NO: 17965 - RNA, 20 nt, Artificial Sequence
  Antisense oligo
acuccaaauguguagguuac

SEQ ID NO: 17966 - RNA, 20 nt, Artificial Sequence
  Antisense oligo
caguucaggagaaaucacag

SEQ ID NO: 17967 - RNA, 20 nt, Artificial Sequence
  Antisense oligo
ccaguucaggagaaaucaca

SEQ ID NO: 17968 - RNA, 20 nt, Artificial Sequence
  Antisense oligo
cacuuacugcuuaccuccag

SEQ ID NO: 17969 - RNA, 20 nt, Artificial Sequence
  Antisense oligo
uucuggaccgaggagcaacc

SEQ ID NO: 17970 - RNA, 20 nt, Artificial Sequence
  Antisense oligo
uuucuggaccgaggagcaac

SEQ ID NO: 17971 - RNA, 20 nt, Artificial Sequence
  Antisense oligo
ccuuccuuucuggaccgagg

SEQ ID NO: 17972 - RNA, 20 nt, Artificial Sequence
  Antisense oligo
cccuuccuuucuggaccgag

SEQ ID NO: 17973 - RNA, 20 nt, Artificial Sequence
  Antisense oligo
acccuuccuuucuggaccga

SEQ ID NO: 17974 - RNA, 20 nt, Artificial Sequence
  Antisense oligo
ggacccuuccuuucuggacc

SEQ ID NO: 17975 - RNA, 20 nt, Artificial Sequence
  Antisense oligo
cgggacccuuccuuucugga

SEQ ID NO: 17976 - RNA, 20 nt, Artificial Sequence
  Antisense oligo
aggagcauucagcagacgcc

SEQ ID NO: 17977 - RNA, 20 nt, Artificial Sequence
  Antisense oligo
aaggagcauucagcagacgc

SEQ ID NO: 17978 - RNA, 20 nt, Artificial Sequence
  Antisense oligo
ggcaaggagcauucagcaga

SEQ ID NO: 17979 - RNA, 20 nt, Artificial Sequence
  Antisense oligo
aggcaaggagcauucagcag

SEQ ID NO: 17980 - RNA, 20 nt, Artificial Sequence
  Antisense oligo
aacaggcaaggagcauucag

SEQ ID NO: 17981 - RNA, 20 nt, Artificial Sequence
  Antisense oligo
caacaggcaaggagcauuca

SEQ ID NO: 17982 - RNA, 20 nt, Artificial Sequence
  Antisense oligo
gcaacaggcaaggagcauuc

SEQ ID NO: 17983 - RNA, 20 nt, Artificial Sequence
  Antisense oligo
ucuugcuggcaccgcuacga

SEQ ID NO: 17984 - RNA, 20 nt, Artificial Sequence
  Antisense oligo
aaaggcucuugcuggcaccg

SEQ ID NO: 17985 - RNA, 20 nt, Artificial Sequence
  Antisense oligo
caaaggcucuugcuggcacc

SEQ ID NO: 17986 - RNA, 20 nt, Artificial Sequence
  Antisense oligo
cagucaaaggcucuugcugg

SEQ ID NO: 17987 - RNA, 20 nt, Artificial Sequence
  Antisense oligo
ucagucaaaggcucuugcug

SEQ ID NO: 17988 - RNA, 20 nt, Artificial Sequence
  Antisense oligo
cucagucaaaggcucuugcu

SEQ ID NO: 17989 - RNA, 20 nt, Artificial Sequence
  Antisense oligo
gcucagucaaaggcucuugc

SEQ ID NO: 17990 - RNA, 20 nt, Artificial Sequence
  Antisense oligo
uuccucggacugacuucaug

SEQ ID NO: 17991 - RNA, 20 nt, Artificial Sequence
  Antisense oligo
auuccucggacugacuucau

SEQ ID NO: 17992 - RNA, 20 nt, Artificial Sequence
  Antisense oligo
aauuccucggacugacuuca

SEQ ID NO: 17993 - RNA, 20 nt, Artificial Sequence
  Antisense oligo
gccugcacuugcuggauucc

SEQ ID NO: 17994 - RNA, 20 nt, Artificial Sequence
  Antisense oligo
ugccugcacuugcuggauuc

SEQ ID NO: 17995 - RNA, 20 nt, Artificial Sequence
  Antisense oligo
cugccugcacuugcuggauu

SEQ ID NO: 17996 - RNA, 20 nt, Artificial Sequence
  Antisense oligo
acugccugcacuugcuggau

SEQ ID NO: 17997 - RNA, 20 nt, Artificial Sequence
  Antisense oligo
acacugccugcacuugcugg

SEQ ID NO: 17998 - RNA, 20 nt, Artificial Sequence
  Antisense oligo
aacacugccugcacuugcug

SEQ ID NO: 17999 - RNA, 20 nt, Artificial Sequence
  Antisense oligo
cguacauuacauucugcugu

SEQ ID NO: 18000 - RNA, 20 nt, Artificial Sequence
  Antisense oligo
cucguacauuacauucugcu

SEQ ID NO: 18001 - RNA, 20 nt, Artificial Sequence
  Antisense oligo
ccucguacauuacauucugc

SEQ ID NO: 18002 - RNA, 20 nt, Artificial Sequence
  Antisense oligo
accucguacauuacauucug

SEQ ID NO: 18003 - RNA, 20 nt, Artificial Sequence
  Antisense oligo
cuaccucguacauuacauuc

SEQ ID NO: 18004 - RNA, 20 nt, Artificial Sequence
  Antisense oligo
cucuaccucguacauuacau

SEQ ID NO: 18005 - RNA, 20 nt, Artificial Sequence
  Antisense oligo
ucucuaccucguacauuaca

SEQ ID NO: 18006 - RNA, 20 nt, Artificial Sequence
  Antisense oligo
uucucuaccucguacauuac

SEQ ID NO: 18007 - RNA, 20 nt, Artificial Sequence
  Antisense oligo
ucuggcugcuagaugaauaa

SEQ ID NO: 18008 - RNA, 20 nt, Artificial Sequence
  Antisense oligo
uucuggcugcuagaugaaua

SEQ ID NO: 18009 - RNA, 20 nt, Artificial Sequence
  Antisense oligo
cauucuggcugcuagaugaa

SEQ ID NO: 18010 - RNA, 20 nt, Artificial Sequence
  Antisense oligo
acauucuggcugcuagauga

SEQ ID NO: 18011 - RNA, 20 nt, Artificial Sequence
  Antisense oligo
acuaacauucuggcugcuag

SEQ ID NO: 18012 - RNA, 20 nt, Artificial Sequence
  Antisense oligo
uacuaacauucuggcugcua

SEQ ID NO: 18013 - RNA, 20 nt, Artificial Sequence
  Antisense oligo
uuacuaacauucuggcugcu

SEQ ID NO: 18014 - RNA, 20 nt, Artificial Sequence
  Antisense oligo
cuuacuaacauucuggcugc

SEQ ID NO: 18015 - RNA, 20 nt, Artificial Sequence
  Antisense oligo
cucuuacuaacauucuggcu

SEQ ID NO: 18016 - RNA, 20 nt, Artificial Sequence
  Antisense oligo
ucucuuacuaacauucuggc

SEQ ID NO: 18017 - RNA, 20 nt, Artificial Sequence
  Antisense oligo
gguauucccuuugaucuucu

SEQ ID NO: 18018 - RNA, 20 nt, Artificial Sequence
  Antisense oligo
cagguauucccuuugaucuu

SEQ ID NO: 18019 - RNA, 20 nt, Artificial Sequence
  Antisense oligo
guaaucagguauucccuuug

SEQ ID NO: 18020 - RNA, 20 nt, Artificial Sequence
  Antisense oligo
gcauguaaucagguauuccc

SEQ ID NO: 18021 - RNA, 20 nt, Artificial Sequence
  Antisense oligo
agcauguaaucagguauucc

SEQ ID NO: 18022 - RNA, 20 nt, Artificial Sequence
  Antisense oligo
gagcauguaaucagguauuc

SEQ ID NO: 18023 - RNA, 20 nt, Artificial Sequence
  Antisense oligo
cauauuagggcguuuguccc

SEQ ID NO: 18024 - RNA, 20 nt, Artificial Sequence
  Antisense oligo
gcauauuagggcguuugucc

SEQ ID NO: 18025 - RNA, 20 nt, Artificial Sequence
  Antisense oligo
ugcauauuagggcguuuguc

SEQ ID NO: 18026 - RNA, 20 nt, Artificial Sequence
  Antisense oligo
cugcauauuagggcguuugu

SEQ ID NO: 18027 - RNA, 20 nt, Artificial Sequence
  Antisense oligo
ucugcauauuagggcguuug

SEQ ID NO: 18028 - RNA, 20 nt, Artificial Sequence
  Antisense oligo
gucugcauauuagggcguuu

SEQ ID NO: 18029 - RNA, 20 nt, Artificial Sequence
  Antisense oligo
ugucugcauauuagggcguu

SEQ ID NO: 18030 - RNA, 20 nt, Artificial Sequence
  Antisense oligo
gugucugcauauuagggcgu

SEQ ID NO: 18031 - RNA, 20 nt, Artificial Sequence
  Antisense oligo
ggugucugcauauuagggcg

SEQ ID NO: 18032 - RNA, 20 nt, Artificial Sequence
  Antisense oligo
gggugucugcauauuagggc

SEQ ID NO: 18033 - RNA, 20 nt, Artificial Sequence
  Antisense oligo
ugggugucugcauauuaggg

SEQ ID NO: 18034 - RNA, 20 nt, Artificial Sequence
  Antisense oligo
gugggugucugcauauuagg

SEQ ID NO: 18035 - RNA, 20 nt, Artificial Sequence
  Antisense oligo
agugggugucugcauauuag

SEQ ID NO: 18036 - RNA, 20 nt, Artificial Sequence
  Antisense oligo
cagugggugucugcauauua

SEQ ID NO: 18037 - RNA, 20 nt, Artificial Sequence
  Antisense oligo
caguaacuccaccagugggu

SEQ ID NO: 18038 - RNA, 20 nt, Artificial Sequence
  Antisense oligo
ccaguaacuccaccaguggg

SEQ ID NO: 18039 - RNA, 20 nt, Artificial Sequence
  Antisense oligo
cccaguaacuccaccagugg

SEQ ID NO: 18040 - RNA, 20 nt, Artificial Sequence
  Antisense oligo
acccaguaacuccaccagug

SEQ ID NO: 18041 - RNA, 20 nt, Artificial Sequence
  Antisense oligo
acacccaguaacuccaccag

SEQ ID NO: 18042 - RNA, 20 nt, Artificial Sequence
  Antisense oligo
aacacccaguaacuccacca

SEQ ID NO: 18043 - RNA, 20 nt, Artificial Sequence
  Antisense oligo
guaacacccaguaacuccac

SEQ ID NO: 18044 - RNA, 20 nt, Artificial Sequence
  Antisense oligo
uguaacacccaguaacucca

SEQ ID NO: 18045 - RNA, 20 nt, Artificial Sequence
  Antisense oligo
uuguaacacccaguaacucc

SEQ ID NO: 18046 - RNA, 20 nt, Artificial Sequence
  Antisense oligo
gauuguaacacccaguaacu

SEQ ID NO: 18047 - RNA, 20 nt, Artificial Sequence
  Antisense oligo
agauuguaacacccaguaac

SEQ ID NO: 18048 - RNA, 20 nt, Artificial Sequence
  Antisense oligo
cagauuguaacacccaguaa

SEQ ID NO: 18049 - RNA, 20 nt, Artificial Sequence
  Antisense oligo
acagauuguaacacccagua

SEQ ID NO: 18050 - RNA, 20 nt, Artificial Sequence
  Antisense oligo
aacagauuguaacacccagu

SEQ ID NO: 18051 - RNA, 20 nt, Artificial Sequence
  Antisense oligo
aaacagauuguaacacccag

SEQ ID NO: 18052 - RNA, 20 nt, Artificial Sequence
  Antisense oligo
auucuggaagugagguauug

SEQ ID NO: 18053 - RNA, 20 nt, Artificial Sequence
  Antisense oligo
ggugggaaggguuuuaucua

SEQ ID NO: 18054 - RNA, 20 nt, Artificial Sequence
  Antisense oligo
cauggugggaaggguuuuau

SEQ ID NO: 18055 - RNA, 20 nt, Artificial Sequence
  Antisense oligo
uucauggugggaaggguuuu

SEQ ID NO: 18056 - RNA, 20 nt, Artificial Sequence
  Antisense oligo
uauucauggugggaaggguu

SEQ ID NO: 18057 - RNA, 20 nt, Artificial Sequence
  Antisense oligo
auuauucauggugggaaggg

SEQ ID NO: 18058 - RNA, 20 nt, Artificial Sequence
  Antisense oligo
agauuauucauggugggaag

SEQ ID NO: 18059 - RNA, 20 nt, Artificial Sequence
  Antisense oligo
gagauuauucauggugggaa

SEQ ID NO: 18060 - RNA, 20 nt, Artificial Sequence
  Antisense oligo
ugagauuauucaugguggga

SEQ ID NO: 18061 - RNA, 20 nt, Artificial Sequence
  Antisense oligo
cuuggcugaugagauuauuc

SEQ ID NO: 18062 - RNA, 20 nt, Artificial Sequence
  Antisense oligo
cgcuuaucuuggcugaugag

SEQ ID NO: 18063 - RNA, 20 nt, Artificial Sequence
  Antisense oligo
acgcuuaucuuggcugauga

SEQ ID NO: 18064 - RNA, 20 nt, Artificial Sequence
  Antisense oligo
uacgcuuaucuuggcugaug

SEQ ID NO: 18065 - RNA, 20 nt, Artificial Sequence
  Antisense oligo
auacgcuuaucuuggcugau

SEQ ID NO: 18066 - RNA, 20 nt, Artificial Sequence
  Antisense oligo
guuagagcugauacgcuuau

SEQ ID NO: 18067 - RNA, 20 nt, Artificial Sequence
  Antisense oligo
gguuagagcugauacgcuua

SEQ ID NO: 18068 - RNA, 20 nt, Artificial Sequence
  Antisense oligo
ggguuagagcugauacgcuu

SEQ ID NO: 18069 - RNA, 20 nt, Artificial Sequence
  Antisense oligo
aggguuagagcugauacgcu

SEQ ID NO: 18070 - RNA, 20 nt, Artificial Sequence
  Antisense oligo
caggguuagagcugauacgc

SEQ ID NO: 18071 - RNA, 20 nt, Artificial Sequence
  Antisense oligo
acaggguuagagcugauacg

SEQ ID NO: 18072 - RNA, 20 nt, Artificial Sequence
  Antisense oligo
ccacaggguuagagcugaua

SEQ ID NO: 18073 - RNA, 20 nt, Artificial Sequence
  Antisense oligo
gccacaggguuagagcugau

SEQ ID NO: 18074 - RNA, 20 nt, Artificial Sequence
  Antisense oligo
ggucacugggucaccauaua

SEQ ID NO: 18075 - RNA, 20 nt, Artificial Sequence
  Antisense oligo
aggucacugggucaccauau

SEQ ID NO: 18076 - RNA, 20 nt, Artificial Sequence
  Antisense oligo
aaggucacugggucaccaua

SEQ ID NO: 18077 - RNA, 20 nt, Artificial Sequence
  Antisense oligo
gaaggucacugggucaccau

SEQ ID NO: 18078 - RNA, 20 nt, Artificial Sequence
  Antisense oligo
agagcaauggaccacacuuu

SEQ ID NO: 18079 - RNA, 20 nt, Artificial Sequence
  Antisense oligo
uagagcaauggaccacacuu

SEQ ID NO: 18080 - RNA, 20 nt, Artificial Sequence
  Antisense oligo
uuagagcaauggaccacacu

SEQ ID NO: 18081 - RNA, 20 nt, Artificial Sequence
  Antisense oligo
cuuagagcaauggaccacac

SEQ ID NO: 18082 - RNA, 20 nt, Artificial Sequence
  Antisense oligo
ucuuagagcaauggaccaca

SEQ ID NO: 18083 - RNA, 20 nt, Artificial Sequence
  Antisense oligo
aucuuagagcaauggaccac

SEQ ID NO: 18084 - RNA, 20 nt, Artificial Sequence
  Antisense oligo
aaaucuuagagcaauggacc

SEQ ID NO: 18085 - RNA, 20 nt, Artificial Sequence
  Antisense oligo
caaaucuuagagcaauggac

SEQ ID NO: 18086 - RNA, 20 nt, Artificial Sequence
  Antisense oligo
ccaaaucuuagagcaaugga

SEQ ID NO: 18087 - RNA, 20 nt, Artificial Sequence
  Antisense oligo
gagguacucaacuguaauuc

SEQ ID NO: 18088 - RNA, 20 nt, Artificial Sequence
  Antisense oligo
ggagguacucaacuguaauu

SEQ ID NO: 18089 - RNA, 20 nt, Artificial Sequence
  Antisense oligo
uggagguacucaacuguaau

SEQ ID NO: 18090 - RNA, 20 nt, Artificial Sequence
  Antisense oligo
cuggagguacucaacuguaa

SEQ ID NO: 18091 - RNA, 20 nt, Artificial Sequence
  Antisense oligo
gcuggagguacucaacugua

SEQ ID NO: 18092 - RNA, 20 nt, Artificial Sequence
  Antisense oligo
ugcuggagguacucaacugu

SEQ ID NO: 18093 - RNA, 20 nt, Artificial Sequence
  Antisense oligo
gugcuggagguacucaacug

SEQ ID NO: 18094 - RNA, 20 nt, Artificial Sequence
  Antisense oligo
ugugcuggagguacucaacu

SEQ ID NO: 18095 - RNA, 20 nt, Artificial Sequence
  Antisense oligo
augugcuggagguacucaac

SEQ ID NO: 18096 - RNA, 20 nt, Artificial Sequence
  Antisense oligo
acaaugugcuggagguacuc

SEQ ID NO: 18097 - RNA, 20 nt, Artificial Sequence
  Antisense oligo
ccacaaugugcuggagguac

SEQ ID NO: 18098 - RNA, 20 nt, Artificial Sequence
  Antisense oligo
ucuguuccacaaugugcugg

SEQ ID NO: 18099 - RNA, 20 nt, Artificial Sequence
  Antisense oligo
uuuucuguuccacaaugugc

SEQ ID NO: 18100 - RNA, 20 nt, Artificial Sequence
  Antisense oligo
gaugggcacucuuucuuugc

SEQ ID NO: 18101 - RNA, 20 nt, Artificial Sequence
  Antisense oligo
caggaaaugccagaggaugg

SEQ ID NO: 18102 - RNA, 20 nt, Artificial Sequence
  Antisense oligo
ugcaggaaaugccagaggau

SEQ ID NO: 18103 - RNA, 20 nt, Artificial Sequence
  Antisense oligo
aguaagccagacauaccuuc

SEQ ID NO: 18104 - RNA, 20 nt, Artificial Sequence
  Antisense oligo
caguaagccagacauaccuu

SEQ ID NO: 18105 - RNA, 20 nt, Artificial Sequence
  Antisense oligo
acaguaagccagacauaccu

SEQ ID NO: 18106 - RNA, 20 nt, Artificial Sequence
  Antisense oligo
cacaguaagccagacauacc

SEQ ID NO: 18107 - RNA, 20 nt, Artificial Sequence
  Antisense oligo
ccacaguaagccagacauac

SEQ ID NO: 18108 - RNA, 20 nt, Artificial Sequence
  Antisense oligo
gccacaguaagccagacaua

SEQ ID NO: 18109 - RNA, 20 nt, Artificial Sequence
  Antisense oligo
agccacaguaagccagacau

SEQ ID NO: 18110 - RNA, 20 nt, Artificial Sequence
  Antisense oligo
gagccacaguaagccagaca

SEQ ID NO: 18111 - RNA, 20 nt, Artificial Sequence
  Antisense oligo
ggagccacaguaagccagac

SEQ ID NO: 18112 - RNA, 20 nt, Artificial Sequence
  Antisense oligo
gggagccacaguaagccaga

SEQ ID NO: 18113 - RNA, 20 nt, Artificial Sequence
  Antisense oligo
agggagccacaguaagccag

SEQ ID NO: 18114 - RNA, 20 nt, Artificial Sequence
  Antisense oligo
agagggagggagccacagua

SEQ ID NO: 18115 - RNA, 20 nt, Artificial Sequence
  Antisense oligo
ugcaccgaaagagggaggga

SEQ ID NO: 18116 - RNA, 20 nt, Artificial Sequence
  Antisense oligo
ucugcaccgaaagagggagg

SEQ ID NO: 18117 - RNA, 20 nt, Artificial Sequence
  Antisense oligo
gggaacucugcaccgaaaga

SEQ ID NO: 18118 - RNA, 20 nt, Artificial Sequence
  Antisense oligo
acguaaaagcccagggccuu

SEQ ID NO: 18119 - RNA, 20 nt, Artificial Sequence
  Antisense oligo
cacuggaauagucuguuaag

SEQ ID NO: 18120 - RNA, 20 nt, Artificial Sequence
  Antisense oligo
gcacuggaauagucuguuaa

SEQ ID NO: 18121 - RNA, 20 nt, Artificial Sequence
  Antisense oligo
ccaaagcacuggaauagucu

SEQ ID NO: 18122 - RNA, 20 nt, Artificial Sequence
  Antisense oligo
accaaagcacuggaauaguc

SEQ ID NO: 18123 - RNA, 20 nt, Artificial Sequence
  Antisense oligo
ccuauucaaaaccaaagcac

SEQ ID NO: 18124 - RNA, 20 nt, Artificial Sequence
  Antisense oligo
gagucuucugcuacauccua

SEQ ID NO: 18125 - RNA, 20 nt, Artificial Sequence
  Antisense oligo
ugagucuucugcuacauccu

SEQ ID NO: 18126 - RNA, 20 nt, Artificial Sequence
  Antisense oligo
cugagucuucugcuacaucc

SEQ ID NO: 18127 - RNA, 20 nt, Artificial Sequence
  Antisense oligo
gcccugagucuucugcuaca

SEQ ID NO: 18128 - RNA, 20 nt, Artificial Sequence
  Antisense oligo
agcccugagucuucugcuac

SEQ ID NO: 18129 - RNA, 20 nt, Artificial Sequence
  Antisense oligo
gaucucuagcccugagucuu

SEQ ID NO: 18130 - RNA, 20 nt, Artificial Sequence
  Antisense oligo
cuggcaaucauacaguuuga

SEQ ID NO: 18131 - RNA, 20 nt, Artificial Sequence
  Antisense oligo
ucuggcaaucauacaguuug

SEQ ID NO: 18132 - RNA, 20 nt, Artificial Sequence
  Antisense oligo
cuucuggcaaucauacaguu

SEQ ID NO: 18133 - RNA, 20 nt, Artificial Sequence
  Antisense oligo
gcuucuggcaaucauacagu

SEQ ID NO: 18134 - RNA, 20 nt, Artificial Sequence
  Antisense oligo
cgcuucuggcaaucauacag

SEQ ID NO: 18135 - RNA, 20 nt, Artificial Sequence
  Antisense oligo
acgcuucuggcaaucauaca

SEQ ID NO: 18136 - RNA, 20 nt, Artificial Sequence
  Antisense oligo
uacgcuucuggcaaucauac

SEQ ID NO: 18137 - RNA, 20 nt, Artificial Sequence
  Antisense oligo
uuacgcuucuggcaaucaua

SEQ ID NO: 18138 - RNA, 20 nt, Artificial Sequence
  Antisense oligo
uuuacgcuucuggcaaucau

SEQ ID NO: 18139 - RNA, 20 nt, Artificial Sequence
  Antisense oligo
cuuuacgcuucuggcaauca

SEQ ID NO: 18140 - RNA, 20 nt, Artificial Sequence
  Antisense oligo
acuuuacgcuucuggcaauc

SEQ ID NO: 18141 - RNA, 20 nt, Artificial Sequence
  Antisense oligo
gacuuuacgcuucuggcaau

SEQ ID NO: 18142 - RNA, 20 nt, Artificial Sequence
  Antisense oligo
ugacuuuacgcuucuggcaa

SEQ ID NO: 18143 - RNA, 20 nt, Artificial Sequence
  Antisense oligo
gugacuuuacgcuucuggca

SEQ ID NO: 18144 - RNA, 20 nt, Artificial Sequence
  Antisense oligo
ugugacuuuacgcuucuggc

SEQ ID NO: 18145 - RNA, 20 nt, Artificial Sequence
  Antisense oligo
ucugugacuuuacgcuucug

SEQ ID NO: 18146 - RNA, 20 nt, Artificial Sequence
  Antisense oligo
gucugugacuuuacgcuucu

SEQ ID NO: 18147 - RNA, 20 nt, Artificial Sequence
  Antisense oligo
cacugcuaaucccaacgugg

SEQ ID NO: 18148 - RNA, 20 nt, Artificial Sequence
  Antisense oligo
ucacugcuaaucccaacgug

SEQ ID NO: 18149 - RNA, 20 nt, Artificial Sequence
  Antisense oligo
gucacugcuaaucccaacgu

SEQ ID NO: 18150 - RNA, 20 nt, Artificial Sequence
  Antisense oligo
ggucacugcuaaucccaacg

SEQ ID NO: 18151 - RNA, 20 nt, Artificial Sequence
  Antisense oligo
aggucacugcuaaucccaac

SEQ ID NO: 18152 - RNA, 20 nt, Artificial Sequence
  Antisense oligo
caggucacugcuaaucccaa

SEQ ID NO: 18153 - RNA, 20 nt, Artificial Sequence
  Antisense oligo
acaggucacugcuaauccca

SEQ ID NO: 18154 - RNA, 20 nt, Artificial Sequence
  Antisense oligo
cacaggucacugcuaauccc

SEQ ID NO: 18155 - RNA, 20 nt, Artificial Sequence
  Antisense oligo
ccacaggucacugcuaaucc

SEQ ID NO: 18156 - RNA, 20 nt, Artificial Sequence
  Antisense oligo
cugucuggcugagugaugag

SEQ ID NO: 18157 - RNA, 20 nt, Artificial Sequence
  Antisense oligo
uucugucuggcugagugaug

SEQ ID NO: 18158 - RNA, 20 nt, Artificial Sequence
  Antisense oligo
gcugcauccuuuucugucug

SEQ ID NO: 18159 - RNA, 20 nt, Artificial Sequence
  Antisense oligo
cugggaaagagcugcauccu

SEQ ID NO: 18160 - RNA, 20 nt, Artificial Sequence
  Antisense oligo
gcugggaaagagcugcaucc

SEQ ID NO: 18161 - RNA, 20 nt, Artificial Sequence
  Antisense oligo
ggcugggaaagagcugcauc

SEQ ID NO: 18162 - RNA, 20 nt, Artificial Sequence
  Antisense oligo
cauuguggacagagaggaac

SEQ ID NO: 18163 - RNA, 20 nt, Artificial Sequence
  Antisense oligo
gaucugcccaugcuccagca

SEQ ID NO: 18164 - RNA, 20 nt, Artificial Sequence
  Antisense oligo
ugaucugcccaugcuccagc

SEQ ID NO: 18165 - RNA, 20 nt, Artificial Sequence
  Antisense oligo
uugaucugcccaugcuccag

SEQ ID NO: 18166 - RNA, 20 nt, Artificial Sequence
  Antisense oligo
uuugaucugcccaugcucca

SEQ ID NO: 18167 - RNA, 20 nt, Artificial Sequence
  Antisense oligo
uguuugaucugcccaugcuc

SEQ ID NO: 18168 - RNA, 20 nt, Artificial Sequence
  Antisense oligo
uuguuugaucugcccaugcu

SEQ ID NO: 18169 - RNA, 20 nt, Artificial Sequence
  Antisense oligo
uuuguuugaucugcccaugc

SEQ ID NO: 18170 - RNA, 20 nt, Artificial Sequence
  Antisense oligo
uuuuguuugaucugcccaug

SEQ ID NO: 18171 - RNA, 20 nt, Artificial Sequence
  Antisense oligo
guuuuguuugaucugcccau

SEQ ID NO: 18172 - RNA, 20 nt, Artificial Sequence
  Antisense oligo
aggaguuuuguuugaucugc

SEQ ID NO: 18173 - RNA, 20 nt, Artificial Sequence
  Antisense oligo
ggaggaguuuuguuugaucu

SEQ ID NO: 18174 - RNA, 20 nt, Artificial Sequence
  Antisense oligo
gggaggaguuuuguuugauc

SEQ ID NO: 18175 - RNA, 20 nt, Artificial Sequence
  Antisense oligo
cagggaggaguuuuguuuga

SEQ ID NO: 18176 - RNA, 20 nt, Artificial Sequence
  Antisense oligo
aggcacagggaggaguuuug

SEQ ID NO: 18177 - RNA, 20 nt, Artificial Sequence
  Antisense oligo
uuaggcacagggaggaguuu

SEQ ID NO: 18178 - RNA, 20 nt, Artificial Sequence
  Antisense oligo
gcuuaggcacagggaggagu

SEQ ID NO: 18179 - RNA, 20 nt, Artificial Sequence
  Antisense oligo
augcuuaggcacagggagga

SEQ ID NO: 18180 - RNA, 20 nt, Artificial Sequence
  Antisense oligo
cgaugcuuaggcacagggag

SEQ ID NO: 18181 - RNA, 20 nt, Artificial Sequence
  Antisense oligo
ucgaugcuuaggcacaggga

SEQ ID NO: 18182 - RNA, 20 nt, Artificial Sequence
  Antisense oligo
cucgaugcuuaggcacaggg

SEQ ID NO: 18183 - RNA, 20 nt, Artificial Sequence
  Antisense oligo
ccucgaugcuuaggcacagg

SEQ ID NO: 18184 - RNA, 20 nt, Artificial Sequence
  Antisense oligo
cacucccgucuuccacguac

SEQ ID NO: 18185 - RNA, 20 nt, Artificial Sequence
  Antisense oligo
ucacucccgucuuccacgua

SEQ ID NO: 18186 - RNA, 20 nt, Artificial Sequence
  Antisense oligo
acucacucccgucuuccacg

SEQ ID NO: 18187 - RNA, 20 nt, Artificial Sequence
  Antisense oligo
cacucacucccgucuuccac

SEQ ID NO: 18188 - RNA, 20 nt, Artificial Sequence
  Antisense oligo
ccacucacucccgucuucca

SEQ ID NO: 18189 - RNA, 20 nt, Artificial Sequence
  Antisense oligo
cacccacucacucccgucuu

SEQ ID NO: 18190 - RNA, 20 nt, Artificial Sequence
  Antisense oligo
ccaauuccaacagauguggc

SEQ ID NO: 18191 - RNA, 20 nt, Artificial Sequence
  Antisense oligo
uuccaauuccaacagaugug

SEQ ID NO: 18192 - RNA, 20 nt, Artificial Sequence
  Antisense oligo
gcaaaugggugaaaguuagg

SEQ ID NO: 18193 - RNA, 20 nt, Artificial Sequence
  Antisense oligo
ugcaaaugggugaaaguuag

SEQ ID NO: 18194 - RNA, 20 nt, Artificial Sequence
  Antisense oligo
aagugcaaaugggugaaagu

SEQ ID NO: 18195 - RNA, 20 nt, Artificial Sequence
  Antisense oligo
aaugaaagugcaaaugggug

SEQ ID NO: 18196 - RNA, 20 nt, Artificial Sequence
  Antisense oligo
cuucauccuugcuagacagc

SEQ ID NO: 18197 - RNA, 20 nt, Artificial Sequence
  Antisense oligo
ucuucauccuugcuagacag

SEQ ID NO: 18198 - RNA, 20 nt, Artificial Sequence
  Antisense oligo
ucgucuucauccuugcuaga

SEQ ID NO: 18199 - RNA, 20 nt, Artificial Sequence
  Antisense oligo
cucgucuucauccuugcuag

SEQ ID NO: 18200 - RNA, 20 nt, Artificial Sequence
  Antisense oligo
caacucgucuucauccuugc

SEQ ID NO: 18201 - RNA, 20 nt, Artificial Sequence
  Antisense oligo
ccaacucgucuucauccuug

SEQ ID NO: 18202 - RNA, 20 nt, Artificial Sequence
  Antisense oligo
uccaacucgucuucauccuu

SEQ ID NO: 18203 - RNA, 20 nt, Artificial Sequence
  Antisense oligo
uuccaacucgucuucauccu

SEQ ID NO: 18204 - RNA, 20 nt, Artificial Sequence
  Antisense oligo
uuuccaacucgucuucaucc

SEQ ID NO: 18205 - RNA, 20 nt, Artificial Sequence
  Antisense oligo
guuuccaacucgucuucauc

SEQ ID NO: 18206 - RNA, 20 nt, Artificial Sequence
  Antisense oligo
acugaccaacagaaguuucc

SEQ ID NO: 18207 - RNA, 20 nt, Artificial Sequence
  Antisense oligo
cucaacugaccaacagaagu

SEQ ID NO: 18208 - RNA, 20 nt, Artificial Sequence
  Antisense oligo
ccucaacugaccaacagaag

SEQ ID NO: 18209 - RNA, 20 nt, Artificial Sequence
  Antisense oligo
acuccucaacugaccaacag

SEQ ID NO: 18210 - RNA, 20 nt, Artificial Sequence
  Antisense oligo
uacuccucaacugaccaaca

SEQ ID NO: 18211 - RNA, 20 nt, Artificial Sequence
  Antisense oligo
auacuccucaacugaccaac

SEQ ID NO: 18212 - RNA, 20 nt, Artificial Sequence
  Antisense oligo
cauacuccucaacugaccaa

SEQ ID NO: 18213 - RNA, 20 nt, Artificial Sequence
  Antisense oligo
ucauacuccucaacugacca

SEQ ID NO: 18214 - RNA, 20 nt, Artificial Sequence
  Antisense oligo
guauugacaggaaguccuuc

SEQ ID NO: 18215 - RNA, 20 nt, Artificial Sequence
  Antisense oligo
aguauugacaggaaguccuu

SEQ ID NO: 18216 - RNA, 20 nt, Artificial Sequence
  Antisense oligo
acaguauugacaggaagucc

SEQ ID NO: 18217 - RNA, 20 nt, Artificial Sequence
  Antisense oligo
cacaguauugacaggaaguc

SEQ ID NO: 18218 - RNA, 20 nt, Artificial Sequence
  Antisense oligo
ccacaguauugacaggaagu

SEQ ID NO: 18219 - RNA, 20 nt, Artificial Sequence
  Antisense oligo
gaggccacaguauugacagg

SEQ ID NO: 18220 - RNA, 20 nt, Artificial Sequence
  Antisense oligo
agaggccacaguauugacag

SEQ ID NO: 18221 - RNA, 20 nt, Artificial Sequence
  Antisense oligo
ugaaacugcaucugagagag

SEQ ID NO: 18222 - RNA, 20 nt, Artificial Sequence
  Antisense oligo
cguagugaaacugcaucuga

SEQ ID NO: 18223 - RNA, 20 nt, Artificial Sequence
  Antisense oligo
acguagugaaacugcaucug

SEQ ID NO: 18224 - RNA, 20 nt, Artificial Sequence
  Antisense oligo
cgacguagugaaacugcauc

SEQ ID NO: 18225 - RNA, 20 nt, Artificial Sequence
  Antisense oligo
ucgacguagugaaacugcau

SEQ ID NO: 18226 - RNA, 20 nt, Artificial Sequence
  Antisense oligo
uucgacguagugaaacugca

SEQ ID NO: 18227 - RNA, 20 nt, Artificial Sequence
  Antisense oligo
cuucgacguagugaaacugc

SEQ ID NO: 18228 - RNA, 20 nt, Artificial Sequence
  Antisense oligo
ucuucgacguagugaaacug

SEQ ID NO: 18229 - RNA, 20 nt, Artificial Sequence
  Antisense oligo
aucuucgacguagugaaacu

SEQ ID NO: 18230 - RNA, 20 nt, Artificial Sequence
  Antisense oligo
caucuucgacguagugaaac

SEQ ID NO: 18231 - RNA, 20 nt, Artificial Sequence
  Antisense oligo
gcaucuucgacguagugaaa

SEQ ID NO: 18232 - RNA, 20 nt, Artificial Sequence
  Antisense oligo
agcaucuucgacguagugaa

SEQ ID NO: 18233 - RNA, 20 nt, Artificial Sequence
  Antisense oligo
aagcaucuucgacguaguga

SEQ ID NO: 18234 - RNA, 20 nt, Artificial Sequence
  Antisense oligo
uaagcaucuucgacguagug

SEQ ID NO: 18235 - RNA, 20 nt, Artificial Sequence
  Antisense oligo
cuaagcaucuucgacguagu

SEQ ID NO: 18236 - RNA, 20 nt, Artificial Sequence
  Antisense oligo
ucuaagcaucuucgacguag

SEQ ID NO: 18237 - RNA, 20 nt, Artificial Sequence
  Antisense oligo
aucuaagcaucuucgacgua

SEQ ID NO: 18238 - RNA, 20 nt, Artificial Sequence
  Antisense oligo
ggaucuaagcaucuucgacg

SEQ ID NO: 18239 - RNA, 20 nt, Artificial Sequence
  Antisense oligo
aggaucuaagcaucuucgac

SEQ ID NO: 18240 - RNA, 20 nt, Artificial Sequence
  Antisense oligo
uaggaucuaagcaucuucga

SEQ ID NO: 18241 - RNA, 20 nt, Artificial Sequence
  Antisense oligo
cuaggaucuaagcaucuucg

SEQ ID NO: 18242 - RNA, 20 nt, Artificial Sequence
  Antisense oligo
guguccuuccgaagaccuag

SEQ ID NO: 18243 - RNA, 20 nt, Artificial Sequence
  Antisense oligo
gguguccuuccgaagaccua

SEQ ID NO: 18244 - RNA, 20 nt, Artificial Sequence
  Antisense oligo
ggguguccuuccgaagaccu

SEQ ID NO: 18245 - RNA, 20 nt, Artificial Sequence
  Antisense oligo
uggguguccuuccgaagacc

SEQ ID NO: 18246 - RNA, 20 nt, Artificial Sequence
  Antisense oligo
cuggguguccuuccgaagac

SEQ ID NO: 18247 - RNA, 20 nt, Artificial Sequence
  Antisense oligo
ccuggguguccuuccgaaga

SEQ ID NO: 18248 - RNA, 20 nt, Artificial Sequence
  Antisense oligo
uuccuggguguccuuccgaa

SEQ ID NO: 18249 - RNA, 20 nt, Artificial Sequence
  Antisense oligo
uuauuccuggguguccuucc

SEQ ID NO: 18250 - RNA, 20 nt, Artificial Sequence
  Antisense oligo
cuuauuccuggguguccuuc

SEQ ID NO: 18251 - RNA, 20 nt, Artificial Sequence
  Antisense oligo
gccuuauuccuggguguccu

SEQ ID NO: 18252 - RNA, 20 nt, Artificial Sequence
  Antisense oligo
ggccuuauuccugggugucc

SEQ ID NO: 18253 - RNA, 20 nt, Artificial Sequence
  Antisense oligo
cuggccuuauuccugggugu

SEQ ID NO: 18254 - RNA, 20 nt, Artificial Sequence
  Antisense oligo
gcuggccuuauuccugggug

SEQ ID NO: 18255 - RNA, 20 nt, Artificial Sequence
  Antisense oligo
ggcuggccuuauuccugggu

SEQ ID NO: 18256 - RNA, 20 nt, Artificial Sequence
  Antisense oligo
agggcuggccuuauuccugg

SEQ ID NO: 18257 - RNA, 20 nt, Artificial Sequence
  Antisense oligo
gagggcuggccuuauuccug

SEQ ID NO: 18258 - RNA, 20 nt, Artificial Sequence
  Antisense oligo
agcgagggcuggccuuauuc

SEQ ID NO: 18259 - RNA, 20 nt, Artificial Sequence
  Antisense oligo
gagacccagagcuuaggcag

SEQ ID NO: 18260 - RNA, 20 nt, Artificial Sequence
  Antisense oligo
ggagagaagcugcugaaaga

SEQ ID NO: 18261 - RNA, 20 nt, Artificial Sequence
  Antisense oligo
cggagagaagcugcugaaag

SEQ ID NO: 18262 - RNA, 20 nt, Artificial Sequence
  Antisense oligo
gguacggagagaagcugcug

SEQ ID NO: 18263 - RNA, 20 nt, Artificial Sequence
  Antisense oligo
ggguacggagagaagcugcu

SEQ ID NO: 18264 - RNA, 20 nt, Artificial Sequence
  Antisense oligo
cuggguacggagagaagcug

SEQ ID NO: 18265 - RNA, 20 nt, Artificial Sequence
  Antisense oligo
gcuggguacggagagaagcu

SEQ ID NO: 18266 - RNA, 20 nt, Artificial Sequence
  Antisense oligo
uggcuggguacggagagaag

SEQ ID NO: 18267 - RNA, 20 nt, Artificial Sequence
  Antisense oligo
cuggcuggguacggagagaa

SEQ ID NO: 18268 - RNA, 20 nt, Artificial Sequence
  Antisense oligo
acuggcuggguacggagaga

SEQ ID NO: 18269 - RNA, 20 nt, Artificial Sequence
  Antisense oligo
aacuggcuggguacggagag

SEQ ID NO: 18270 - RNA, 20 nt, Artificial Sequence
  Antisense oligo
uguaacuggcuggguacgga

SEQ ID NO: 18271 - RNA, 20 nt, Artificial Sequence
  Antisense oligo
auguaacuggcuggguacgg

SEQ ID NO: 18272 - RNA, 20 nt, Artificial Sequence
  Antisense oligo
cauguaacuggcuggguacg

SEQ ID NO: 18273 - RNA, 20 nt, Artificial Sequence
  Antisense oligo
ccauguaacuggcuggguac

SEQ ID NO: 18274 - RNA, 20 nt, Artificial Sequence
  Antisense oligo
gaugaaggaaaucugucccu

SEQ ID NO: 18275 - RNA, 20 nt, Artificial Sequence
  Antisense oligo
ccgcguccaucaaaggcuga

SEQ ID NO: 18276 - RNA, 20 nt, Artificial Sequence
  Antisense oligo
gacagugcagugugcuagaa

SEQ ID NO: 18277 - RNA, 20 nt, Artificial Sequence
  Antisense oligo
acagacagugcagugugcua

SEQ ID NO: 18278 - RNA, 20 nt, Artificial Sequence
  Antisense oligo
cuacagacagugcagugugc

SEQ ID NO: 18279 - RNA, 20 nt, Artificial Sequence
  Antisense oligo
ucuacagacagugcagugug

SEQ ID NO: 18280 - RNA, 20 nt, Artificial Sequence
  Antisense oligo
gucuacagacagugcagugu

SEQ ID NO: 18281 - RNA, 20 nt, Artificial Sequence
  Antisense oligo
agucuacagacagugcagug

SEQ ID NO: 18282 - RNA, 20 nt, Artificial Sequence
  Antisense oligo
acaagucuacagacagugca

SEQ ID NO: 18283 - RNA, 20 nt, Artificial Sequence
  Antisense oligo
cacaagucuacagacagugc

SEQ ID NO: 18284 - RNA, 20 nt, Artificial Sequence
  Antisense oligo
cccacaagucuacagacagu

SEQ ID NO: 18285 - RNA, 20 nt, Artificial Sequence
  Antisense oligo
cuucccacaagucuacagac

SEQ ID NO: 18286 - RNA, 20 nt, Artificial Sequence
  Antisense oligo
ucuucccacaagucuacaga

SEQ ID NO: 18287 - RNA, 20 nt, Artificial Sequence
  Antisense oligo
uucuucccacaagucuacag

SEQ ID NO: 18288 - RNA, 20 nt, Artificial Sequence
  Antisense oligo
guucuucccacaagucuaca

SEQ ID NO: 18289 - RNA, 20 nt, Artificial Sequence
  Antisense oligo
aaaguucuucccacaagucu

SEQ ID NO: 18290 - RNA, 20 nt, Artificial Sequence
  Antisense oligo
aaaaguucuucccacaaguc

SEQ ID NO: 18291 - RNA, 20 nt, Artificial Sequence
  Antisense oligo
gaaaaguucuucccacaagu

SEQ ID NO: 18292 - RNA, 20 nt, Artificial Sequence
  Antisense oligo
gaaaacgggaaaaguucuuc

SEQ ID NO: 18293 - RNA, 20 nt, Artificial Sequence
  Antisense oligo
gcuugaaaacgggaaaaguu

SEQ ID NO: 18294 - RNA, 20 nt, Artificial Sequence
  Antisense oligo
gagcuugaaaacgggaaaag

SEQ ID NO: 18295 - RNA, 20 nt, Artificial Sequence
  Antisense oligo
ggagcuugaaaacgggaaaa

SEQ ID NO: 18296 - RNA, 20 nt, Artificial Sequence
  Antisense oligo
uggagcuugaaaacgggaaa

SEQ ID NO: 18297 - RNA, 20 nt, Artificial Sequence
  Antisense oligo
guggagcuugaaaacgggaa

SEQ ID NO: 18298 - RNA, 20 nt, Artificial Sequence
  Antisense oligo
cguggagcuugaaaacggga

SEQ ID NO: 18299 - RNA, 20 nt, Artificial Sequence
  Antisense oligo
gcguggagcuugaaaacggg

SEQ ID NO: 18300 - RNA, 20 nt, Artificial Sequence
  Antisense oligo
agcguggagcuugaaaacgg

SEQ ID NO: 18301 - RNA, 20 nt, Artificial Sequence
  Antisense oligo
cagcguggagcuugaaaacg

SEQ ID NO: 18302 - RNA, 20 nt, Artificial Sequence
  Antisense oligo
gcagcguggagcuugaaaac

SEQ ID NO: 18303 - RNA, 20 nt, Artificial Sequence
  Antisense oligo
ugcagcguggagcuugaaaa

SEQ ID NO: 18304 - RNA, 20 nt, Artificial Sequence
  Antisense oligo
augcagcguggagcuugaaa

SEQ ID NO: 18305 - RNA, 20 nt, Artificial Sequence
  Antisense oligo
gaugcagcguggagcuugaa

SEQ ID NO: 18306 - RNA, 20 nt, Artificial Sequence
  Antisense oligo
ugaugcagcguggagcuuga

SEQ ID NO: 18307 - RNA, 20 nt, Artificial Sequence
  Antisense oligo
gugaugcagcguggagcuug

SEQ ID NO: 18308 - RNA, 20 nt, Artificial Sequence
  Antisense oligo
ugugaugcagcguggagcuu

SEQ ID NO: 18309 - RNA, 20 nt, Artificial Sequence
  Antisense oligo
cugugaugcagcguggagcu

SEQ ID NO: 18310 - RNA, 20 nt, Artificial Sequence
  Antisense oligo
uccugugaugcagcguggag

SEQ ID NO: 18311 - RNA, 20 nt, Artificial Sequence
  Antisense oligo
uuccugugaugcagcgugga

SEQ ID NO: 18312 - RNA, 20 nt, Artificial Sequence
  Antisense oligo
uuuccugugaugcagcgugg

SEQ ID NO: 18313 - RNA, 20 nt, Artificial Sequence
  Antisense oligo
auuuccugugaugcagcgug

SEQ ID NO: 18314 - RNA, 20 nt, Artificial Sequence
  Antisense oligo
gucauuuccugugaugcagc

SEQ ID NO: 18315 - RNA, 20 nt, Artificial Sequence
  Antisense oligo
gucagugucauuuccuguga

SEQ ID NO: 18316 - RNA, 20 nt, Artificial Sequence
  Antisense oligo
cuuaaucuggucagugucau

SEQ ID NO: 18317 - RNA, 20 nt, Artificial Sequence
  Antisense oligo
gcuuaaucuggucaguguca

SEQ ID NO: 18318 - RNA, 20 nt, Artificial Sequence
  Antisense oligo
agcuuaaucuggucaguguc

SEQ ID NO: 18319 - RNA, 20 nt, Artificial Sequence
  Antisense oligo
uagcuuaaucuggucagugu

SEQ ID NO: 18320 - RNA, 20 nt, Artificial Sequence
  Antisense oligo
guagcuuaaucuggucagug

SEQ ID NO: 18321 - RNA, 20 nt, Artificial Sequence
  Antisense oligo
uuguagcuuaaucuggucag

SEQ ID NO: 18322 - RNA, 20 nt, Artificial Sequence
  Antisense oligo
cgagacuuguauuuguagcu

SEQ ID NO: 18323 - RNA, 20 nt, Artificial Sequence
  Antisense oligo
gcgagacuuguauuuguagc

SEQ ID NO: 18324 - RNA, 20 nt, Artificial Sequence
  Antisense oligo
ugcgagacuuguauuuguag

SEQ ID NO: 18325 - RNA, 20 nt, Artificial Sequence
  Antisense oligo
cugcgagacuuguauuugua

SEQ ID NO: 18326 - RNA, 20 nt, Artificial Sequence
  Antisense oligo
gcugcgagacuuguauuugu

SEQ ID NO: 18327 - RNA, 20 nt, Artificial Sequence
  Antisense oligo
ggcugcgagacuuguauuug

SEQ ID NO: 18328 - RNA, 20 nt, Artificial Sequence
  Antisense oligo
uggcugcgagacuuguauuu

SEQ ID NO: 18329 - RNA, 20 nt, Artificial Sequence
  Antisense oligo
cuggcugcgagacuuguauu

SEQ ID NO: 18330 - RNA, 20 nt, Artificial Sequence
  Antisense oligo
acuggcugcgagacuuguau

SEQ ID NO: 18331 - RNA, 20 nt, Artificial Sequence
  Antisense oligo
gacuggcugcgagacuugua

SEQ ID NO: 18332 - RNA, 20 nt, Artificial Sequence
  Antisense oligo
agacuggcugcgagacuugu

SEQ ID NO: 18333 - RNA, 20 nt, Artificial Sequence
  Antisense oligo
gagacuggcugcgagacuug

SEQ ID NO: 18334 - RNA, 20 nt, Artificial Sequence
  Antisense oligo
ugagacuggcugcgagacuu

SEQ ID NO: 18335 - RNA, 20 nt, Artificial Sequence
  Antisense oligo
uugagacuggcugcgagacu

SEQ ID NO: 18336 - RNA, 20 nt, Artificial Sequence
  Antisense oligo
uuugagacuggcugcgagac

SEQ ID NO: 18337 - RNA, 20 nt, Artificial Sequence
  Antisense oligo
cuuugagacuggcugcgaga

SEQ ID NO: 18338 - RNA, 20 nt, Artificial Sequence
  Antisense oligo
acuuugagacuggcugcgag

SEQ ID NO: 18339 - RNA, 20 nt, Artificial Sequence
  Antisense oligo
gacuuugagacuggcugcga

SEQ ID NO: 18340 - RNA, 20 nt, Artificial Sequence
  Antisense oligo
agacuuugagacuggcugcg

SEQ ID NO: 18341 - RNA, 20 nt, Artificial Sequence
  Antisense oligo
agaccacccaguaacaauuu

SEQ ID NO: 18342 - RNA, 20 nt, Artificial Sequence
  Antisense oligo
aagaccacccaguaacaauu

SEQ ID NO: 18343 - RNA, 20 nt, Artificial Sequence
  Antisense oligo
ggaagaccacccaguaacaa

SEQ ID NO: 18344 - RNA, 20 nt, Artificial Sequence
  Antisense oligo
gggaagaccacccaguaaca

SEQ ID NO: 18345 - RNA, 20 nt, Artificial Sequence
  Antisense oligo
gaagggaagaccacccagua

SEQ ID NO: 18346 - RNA, 20 nt, Artificial Sequence
  Antisense oligo
gaacuuuaccagccucagcu

SEQ ID NO: 18347 - RNA, 20 nt, Artificial Sequence
  Antisense oligo
ggaacuuuaccagccucagc

SEQ ID NO: 18348 - RNA, 20 nt, Artificial Sequence
  Antisense oligo
aggaacuuuaccagccucag

SEQ ID NO: 18349 - RNA, 20 nt, Artificial Sequence
  Antisense oligo
caggaacuuuaccagccuca

SEQ ID NO: 18350 - RNA, 20 nt, Artificial Sequence
  Antisense oligo
gcaggaacuuuaccagccuc

SEQ ID NO: 18351 - RNA, 20 nt, Artificial Sequence
  Antisense oligo
ggcaggaacuuuaccagccu

SEQ ID NO: 18352 - RNA, 20 nt, Artificial Sequence
  Antisense oligo
cucaggcaggaacuuuacca

SEQ ID NO: 18353 - RNA, 20 nt, Artificial Sequence
  Antisense oligo
ucucaggcaggaacuuuacc

SEQ ID NO: 18354 - RNA, 20 nt, Artificial Sequence
  Antisense oligo
aucucaggcaggaacuuuac

SEQ ID NO: 18355 - RNA, 20 nt, Artificial Sequence
  Antisense oligo
aggccaaaaucucaggcagg

SEQ ID NO: 18356 - RNA, 20 nt, Artificial Sequence
  Antisense oligo
aaggccaaaaucucaggcag

SEQ ID NO: 18357 - RNA, 20 nt, Artificial Sequence
  Antisense oligo
caaggccaaaaucucaggca

SEQ ID NO: 18358 - RNA, 20 nt, Artificial Sequence
  Antisense oligo
cuucacuagaucccuuugca

SEQ ID NO: 18359 - RNA, 20 nt, Artificial Sequence
  Antisense oligo
gcuucacuagaucccuuugc

SEQ ID NO: 18360 - RNA, 20 nt, Artificial Sequence
  Antisense oligo
ugcuucacuagaucccuuug

SEQ ID NO: 18361 - RNA, 20 nt, Artificial Sequence
  Antisense oligo
cugcuucacuagaucccuuu

SEQ ID NO: 18362 - RNA, 20 nt, Artificial Sequence
  Antisense oligo
acugcuucacuagaucccuu

SEQ ID NO: 18363 - RNA, 20 nt, Artificial Sequence
  Antisense oligo
gaacugcuucacuagauccc

SEQ ID NO: 18364 - RNA, 20 nt, Artificial Sequence
  Antisense oligo
ggaacugcuucacuagaucc

SEQ ID NO: 18365 - RNA, 20 nt, Artificial Sequence
  Antisense oligo
uggaacugcuucacuagauc

SEQ ID NO: 18366 - RNA, 20 nt, Artificial Sequence
  Antisense oligo
cuggaacugcuucacuagau

SEQ ID NO: 18367 - RNA, 20 nt, Artificial Sequence
  Antisense oligo
guucuggaacugcuucacua

SEQ ID NO: 18368 - RNA, 20 nt, Artificial Sequence
  Antisense oligo
cguucuggaacugcuucacu

SEQ ID NO: 18369 - RNA, 20 nt, Artificial Sequence
  Antisense oligo
gacguucuggaacugcuuca

SEQ ID NO: 18370 - RNA, 20 nt, Artificial Sequence
  Antisense oligo
ggacguucuggaacugcuuc

SEQ ID NO: 18371 - RNA, 20 nt, Artificial Sequence
  Antisense oligo
uggacguucuggaacugcuu

SEQ ID NO: 18372 - RNA, 20 nt, Artificial Sequence
  Antisense oligo
cuggacguucuggaacugcu

SEQ ID NO: 18373 - RNA, 20 nt, Artificial Sequence
  Antisense oligo
gcuggacguucuggaacugc

SEQ ID NO: 18374 - RNA, 20 nt, Artificial Sequence
  Antisense oligo
ugcuggacguucuggaacug

SEQ ID NO: 18375 - RNA, 20 nt, Artificial Sequence
  Antisense oligo
uugcuggacguucuggaacu

SEQ ID NO: 18376 - RNA, 20 nt, Artificial Sequence
  Antisense oligo
cuugcuggacguucuggaac

SEQ ID NO: 18377 - RNA, 20 nt, Artificial Sequence
  Antisense oligo
acuugcuggacguucuggaa

SEQ ID NO: 18378 - RNA, 20 nt, Artificial Sequence
  Antisense oligo
aacuugcuggacguucugga

SEQ ID NO: 18379 - RNA, 20 nt, Artificial Sequence
  Antisense oligo
caacuugcuggacguucugg

SEQ ID NO: 18380 - RNA, 20 nt, Artificial Sequence
  Antisense oligo
uucaacuugcuggacguucu

SEQ ID NO: 18381 - RNA, 20 nt, Artificial Sequence
  Antisense oligo
uauucaacuugcuggacguu

SEQ ID NO: 18382 - RNA, 20 nt, Artificial Sequence
  Antisense oligo
guauucaacuugcuggacgu

SEQ ID NO: 18383 - RNA, 20 nt, Artificial Sequence
  Antisense oligo
uguauucaacuugcuggacg

SEQ ID NO: 18384 - RNA, 20 nt, Artificial Sequence
  Antisense oligo
cuguauucaacuugcuggac

SEQ ID NO: 18385 - RNA, 20 nt, Artificial Sequence
  Antisense oligo
agcuguauucaacuugcugg

SEQ ID NO: 18386 - RNA, 20 nt, Artificial Sequence
  Antisense oligo
gagcuguauucaacuugcug

SEQ ID NO: 18387 - RNA, 20 nt, Artificial Sequence
  Antisense oligo
uggagcuguauucaacuugc

SEQ ID NO: 18388 - RNA, 20 nt, Artificial Sequence
  Antisense oligo
auggagcuguauucaacuug

SEQ ID NO: 18389 - RNA, 20 nt, Artificial Sequence
  Antisense oligo
gauggagcuguauucaacuu

SEQ ID NO: 18390 - RNA, 20 nt, Artificial Sequence
  Antisense oligo
ugauggagcuguauucaacu

SEQ ID NO: 18391 - RNA, 20 nt, Artificial Sequence
  Antisense oligo
agccucugauggagcuguau

SEQ ID NO: 18392 - RNA, 20 nt, Artificial Sequence
  Antisense oligo
gaagccucugauggagcugu

SEQ ID NO: 18393 - RNA, 20 nt, Artificial Sequence
  Antisense oligo
ggaagccucugauggagcug

SEQ ID NO: 18394 - RNA, 20 nt, Artificial Sequence
  Antisense oligo
aggaagccucugauggagcu

SEQ ID NO: 18395 - RNA, 20 nt, Artificial Sequence
  Antisense oligo
agagcagagccacaccugag

SEQ ID NO: 18396 - RNA, 20 nt, Artificial Sequence
  Antisense oligo
cagagcagagccacaccuga

SEQ ID NO: 18397 - RNA, 20 nt, Artificial Sequence
  Antisense oligo
ucagagcagagccacaccug

SEQ ID NO: 18398 - RNA, 20 nt, Artificial Sequence
  Antisense oligo
gucagagcagagccacaccu

SEQ ID NO: 18399 - RNA, 20 nt, Artificial Sequence
  Antisense oligo
guccugucagagcagagcca

SEQ ID NO: 18400 - RNA, 20 nt, Artificial Sequence
  Antisense oligo
ugguccugucagagcagagc

SEQ ID NO: 18401 - RNA, 20 nt, Artificial Sequence
  Antisense oligo
cugguccugucagagcagag

SEQ ID NO: 18402 - RNA, 20 nt, Artificial Sequence
  Antisense oligo
ccugguccugucagagcaga

SEQ ID NO: 18403 - RNA, 20 nt, Artificial Sequence
  Antisense oligo
guccugguccugucagagca

SEQ ID NO: 18404 - RNA, 20 nt, Artificial Sequence
  Antisense oligo
cuaugcagugauccuuucga

SEQ ID NO: 18405 - RNA, 20 nt, Artificial Sequence
  Antisense oligo
ccuaugcagugauccuuucg

SEQ ID NO: 18406 - RNA, 20 nt, Artificial Sequence
  Antisense oligo
cccuaugcagugauccuuuc

SEQ ID NO: 18407 - RNA, 20 nt, Artificial Sequence
  Antisense oligo
uagagcacccaucagcgccu

SEQ ID NO: 18408 - RNA, 20 nt, Artificial Sequence
  Antisense oligo
auagagcacccaucagcgcc

SEQ ID NO: 18409 - RNA, 20 nt, Artificial Sequence
  Antisense oligo
uauagagcacccaucagcgc

SEQ ID NO: 18410 - RNA, 20 nt, Artificial Sequence
  Antisense oligo
ugguaagggcuuaggcuaua

SEQ ID NO: 18411 - RNA, 20 nt, Artificial Sequence
  Antisense oligo
augguaagggcuuaggcuau

SEQ ID NO: 18412 - RNA, 20 nt, Artificial Sequence
  Antisense oligo
gcaugguaagggcuuaggcu

SEQ ID NO: 18413 - RNA, 20 nt, Artificial Sequence
  Antisense oligo
cgcaugguaagggcuuaggc

SEQ ID NO: 18414 - RNA, 20 nt, Artificial Sequence
  Antisense oligo
ccgcaugguaagggcuuagg

SEQ ID NO: 18415 - RNA, 20 nt, Artificial Sequence
  Antisense oligo
accgcaugguaagggcuuag

SEQ ID NO: 18416 - RNA, 20 nt, Artificial Sequence
  Antisense oligo
caccgcaugguaagggcuua

SEQ ID NO: 18417 - RNA, 20 nt, Artificial Sequence
  Antisense oligo
ucaccgcaugguaagggcuu

SEQ ID NO: 18418 - RNA, 20 nt, Artificial Sequence
  Antisense oligo
uucaccgcaugguaagggcu

SEQ ID NO: 18419 - RNA, 20 nt, Artificial Sequence
  Antisense oligo
cuucaccgcaugguaagggc

SEQ ID NO: 18420 - RNA, 20 nt, Artificial Sequence
  Antisense oligo
acccuucaccgcaugguaag

SEQ ID NO: 18421 - RNA, 20 nt, Artificial Sequence
  Antisense oligo
cacccuucaccgcaugguaa

SEQ ID NO: 18422 - RNA, 20 nt, Artificial Sequence
  Antisense oligo
gcacccuucaccgcauggua

SEQ ID NO: 18423 - RNA, 20 nt, Artificial Sequence
  Antisense oligo
agcacccuucaccgcauggu

SEQ ID NO: 18424 - RNA, 20 nt, Artificial Sequence
  Antisense oligo
aagcacccuucaccgcaugg

SEQ ID NO: 18425 - RNA, 20 nt, Artificial Sequence
  Antisense oligo
caagcacccuucaccgcaug

SEQ ID NO: 18426 - RNA, 20 nt, Artificial Sequence
  Antisense oligo
ucaagcacccuucaccgcau

SEQ ID NO: 18427 - RNA, 20 nt, Artificial Sequence
  Antisense oligo
guucaagcacccuucaccgc

SEQ ID NO: 18428 - RNA, 20 nt, Artificial Sequence
  Antisense oligo
gguucaagcacccuucaccg

SEQ ID NO: 18429 - RNA, 20 nt, Artificial Sequence
  Antisense oligo
gagggaggugcuuuucagcu

SEQ ID NO: 18430 - RNA, 20 nt, Artificial Sequence
  Antisense oligo
agagggaggugcuuuucagc

SEQ ID NO: 18431 - RNA, 20 nt, Artificial Sequence
  Antisense oligo
gagagggaggugcuuuucag

SEQ ID NO: 18432 - RNA, 20 nt, Artificial Sequence
  Antisense oligo
cuagagagggaggugcuuuu

SEQ ID NO: 18433 - RNA, 20 nt, Artificial Sequence
  Antisense oligo
gcuagagagggaggugcuuu

SEQ ID NO: 18434 - RNA, 20 nt, Artificial Sequence
  Antisense oligo
aguuugaggagcuagagagg

SEQ ID NO: 18435 - RNA, 20 nt, Artificial Sequence
  Antisense oligo
gaguuugaggagcuagagag

SEQ ID NO: 18436 - RNA, 20 nt, Artificial Sequence
  Antisense oligo
ccgaguuugaggagcuagag

SEQ ID NO: 18437 - RNA, 20 nt, Artificial Sequence
  Antisense oligo
gccgaguuugaggagcuaga

SEQ ID NO: 18438 - RNA, 20 nt, Artificial Sequence
  Antisense oligo
agccgaguuugaggagcuag

SEQ ID NO: 18439 - RNA, 20 nt, Artificial Sequence
  Antisense oligo
ugagccgaguuugaggagcu

SEQ ID NO: 18440 - RNA, 20 nt, Artificial Sequence
  Antisense oligo
aggagugagccgaguuugag

SEQ ID NO: 18441 - RNA, 20 nt, Artificial Sequence
  Antisense oligo
aaggagugagccgaguuuga

SEQ ID NO: 18442 - RNA, 20 nt, Artificial Sequence
  Antisense oligo
uugaaggagugagccgaguu

SEQ ID NO: 18443 - RNA, 20 nt, Artificial Sequence
  Antisense oligo
uuugaaggagugagccgagu

SEQ ID NO: 18444 - RNA, 20 nt, Artificial Sequence
  Antisense oligo
guuugaaggagugagccgag

SEQ ID NO: 18445 - RNA, 20 nt, Artificial Sequence
  Antisense oligo
ugcuguuugaaggagugagc

SEQ ID NO: 18446 - RNA, 20 nt, Artificial Sequence
  Antisense oligo
gugcuguuugaaggagugag

SEQ ID NO: 18447 - RNA, 20 nt, Artificial Sequence
  Antisense oligo
ucugaggugcuguuugaagg

SEQ ID NO: 18448 - RNA, 20 nt, Artificial Sequence
  Antisense oligo
ucacaagcaugucugaggug

SEQ ID NO: 18449 - RNA, 20 nt, Artificial Sequence
  Antisense oligo
gucacaagcaugucugaggu

SEQ ID NO: 18450 - RNA, 20 nt, Artificial Sequence
  Antisense oligo
agucacaagcaugucugagg

SEQ ID NO: 18451 - RNA, 20 nt, Artificial Sequence
  Antisense oligo
ugcagucacaagcaugucug

SEQ ID NO: 18452 - RNA, 20 nt, Artificial Sequence
  Antisense oligo
gugcagucacaagcaugucu

SEQ ID NO: 18453 - RNA, 20 nt, Artificial Sequence
  Antisense oligo
ccaucuuuccugcuuugugc

SEQ ID NO: 18454 - RNA, 20 nt, Artificial Sequence
  Antisense oligo
gagcccaucuuuccugcuuu

SEQ ID NO: 18455 - RNA, 20 nt, Artificial Sequence
  Antisense oligo
ugccgagagcccaucuuucc

SEQ ID NO: 18456 - RNA, 20 nt, Artificial Sequence
  Antisense oligo
cugccgagagcccaucuuuc

SEQ ID NO: 18457 - RNA, 20 nt, Artificial Sequence
  Antisense oligo
ucugccgagagcccaucuuu

SEQ ID NO: 18458 - RNA, 20 nt, Artificial Sequence
  Antisense oligo
aguuacaugcucugccgaga

SEQ ID NO: 18459 - RNA, 20 nt, Artificial Sequence
  Antisense oligo
uaguuacaugcucugccgag

SEQ ID NO: 18460 - RNA, 20 nt, Artificial Sequence
  Antisense oligo
cuaguuacaugcucugccga

SEQ ID NO: 18461 - RNA, 20 nt, Artificial Sequence
  Antisense oligo
ccuaguuacaugcucugccg

SEQ ID NO: 18462 - RNA, 20 nt, Artificial Sequence
  Antisense oligo
accacccuaguuacaugcuc

SEQ ID NO: 18463 - RNA, 20 nt, Artificial Sequence
  Antisense oligo
aaccacccuaguuacaugcu

SEQ ID NO: 18464 - RNA, 20 nt, Artificial Sequence
  Antisense oligo
aaaccacccuaguuacaugc

SEQ ID NO: 18465 - RNA, 20 nt, Artificial Sequence
  Antisense oligo
caaaccacccuaguuacaug

SEQ ID NO: 18466 - RNA, 20 nt, Artificial Sequence
  Antisense oligo
ccaaaccacccuaguuacau

SEQ ID NO: 18467 - RNA, 20 nt, Artificial Sequence
  Antisense oligo
gccaaaccacccuaguuaca

SEQ ID NO: 18468 - RNA, 20 nt, Artificial Sequence
  Antisense oligo
ggccaaaccacccuaguuac

SEQ ID NO: 18469 - RNA, 20 nt, Artificial Sequence
  Antisense oligo
cagaauacuugguaagaacc

SEQ ID NO: 18470 - RNA, 20 nt, Artificial Sequence
  Antisense oligo
gcugccucaacccaucuguu

SEQ ID NO: 18471 - RNA, 20 nt, Artificial Sequence
  Antisense oligo
agcugccucaacccaucugu

SEQ ID NO: 18472 - RNA, 20 nt, Artificial Sequence
  Antisense oligo
gauccuguugugaagcagcu

SEQ ID NO: 18473 - RNA, 20 nt, Artificial Sequence
  Antisense oligo
ugauccuguugugaagcagc

SEQ ID NO: 18474 - RNA, 20 nt, Artificial Sequence
  Antisense oligo
gugauccuguugugaagcag

SEQ ID NO: 18475 - RNA, 20 nt, Artificial Sequence
  Antisense oligo
cugugauccuguugugaagc

SEQ ID NO: 18476 - RNA, 20 nt, Artificial Sequence
  Antisense oligo
gacugugauccuguugugaa

SEQ ID NO: 18477 - RNA, 20 nt, Artificial Sequence
  Antisense oligo
agacugugauccuguuguga

SEQ ID NO: 18478 - RNA, 20 nt, Artificial Sequence
  Antisense oligo
aagacugugauccuguugug

SEQ ID NO: 18479 - RNA, 20 nt, Artificial Sequence
  Antisense oligo
cagaaagacugugauccugu

SEQ ID NO: 18480 - RNA, 20 nt, Artificial Sequence
  Antisense oligo
caguuuguuccauguggaca

SEQ ID NO: 18481 - RNA, 20 nt, Artificial Sequence
  Antisense oligo
ucaguuuguuccauguggac

SEQ ID NO: 18482 - RNA, 20 nt, Artificial Sequence
  Antisense oligo
cucaguuuguuccaugugga

SEQ ID NO: 18483 - RNA, 20 nt, Artificial Sequence
  Antisense oligo
ccucaguuuguuccaugugg

SEQ ID NO: 18484 - RNA, 20 nt, Artificial Sequence
  Antisense oligo
cuccucaguuuguuccaugu

SEQ ID NO: 18485 - RNA, 20 nt, Artificial Sequence
  Antisense oligo
ucuccucaguuuguuccaug

SEQ ID NO: 18486 - RNA, 20 nt, Artificial Sequence
  Antisense oligo
aucuccucaguuuguuccau

SEQ ID NO: 18487 - RNA, 20 nt, Artificial Sequence
  Antisense oligo
gaucuccucaguuuguucca

SEQ ID NO: 18488 - RNA, 20 nt, Artificial Sequence
  Antisense oligo
cgaucuccucaguuuguucc

SEQ ID NO: 18489 - RNA, 20 nt, Artificial Sequence
  Antisense oligo
gcgaucuccucaguuuguuc

SEQ ID NO: 18490 - RNA, 20 nt, Artificial Sequence
  Antisense oligo
aagcgaucuccucaguuugu

SEQ ID NO: 18491 - RNA, 20 nt, Artificial Sequence
  Antisense oligo
caagcgaucuccucaguuug

SEQ ID NO: 18492 - RNA, 20 nt, Artificial Sequence
  Antisense oligo
ucaagcgaucuccucaguuu

SEQ ID NO: 18493 - RNA, 20 nt, Artificial Sequence
  Antisense oligo
cucaagcgaucuccucaguu

SEQ ID NO: 18494 - RNA, 20 nt, Artificial Sequence
  Antisense oligo
ucucaagcgaucuccucagu

SEQ ID NO: 18495 - RNA, 20 nt, Artificial Sequence
  Antisense oligo
gucucaagcgaucuccucag

SEQ ID NO: 18496 - RNA, 20 nt, Artificial Sequence
  Antisense oligo
cgucucaagcgaucuccuca

SEQ ID NO: 18497 - RNA, 20 nt, Artificial Sequence
  Antisense oligo
ucgucucaagcgaucuccuc

SEQ ID NO: 18498 - RNA, 20 nt, Artificial Sequence
  Antisense oligo
uucgucucaagcgaucuccu

SEQ ID NO: 18499 - RNA, 20 nt, Artificial Sequence
  Antisense oligo
guucgucucaagcgaucucc

SEQ ID NO: 18500 - RNA, 20 nt, Artificial Sequence
  Antisense oligo
cguucgucucaagcgaucuc

SEQ ID NO: 18501 - RNA, 20 nt, Artificial Sequence
  Antisense oligo
ccguucgucucaagcgaucu

SEQ ID NO: 18502 - RNA, 20 nt, Artificial Sequence
  Antisense oligo
accguucgucucaagcgauc

SEQ ID NO: 18503 - RNA, 20 nt, Artificial Sequence
  Antisense oligo
aaccguucgucucaagcgau

SEQ ID NO: 18504 - RNA, 20 nt, Artificial Sequence
  Antisense oligo
uaaccguucgucucaagcga

SEQ ID NO: 18505 - RNA, 20 nt, Artificial Sequence
  Antisense oligo
cuaaccguucgucucaagcg

SEQ ID NO: 18506 - RNA, 20 nt, Artificial Sequence
  Antisense oligo
acuaaccguucgucucaagc

SEQ ID NO: 18507 - RNA, 20 nt, Artificial Sequence
  Antisense oligo
uacuaaccguucgucucaag

SEQ ID NO: 18508 - RNA, 20 nt, Artificial Sequence
  Antisense oligo
auacuaaccguucgucucaa

SEQ ID NO: 18509 - RNA, 20 nt, Artificial Sequence
  Antisense oligo
gauacuaaccguucgucuca

SEQ ID NO: 18510 - RNA, 20 nt, Artificial Sequence
  Antisense oligo
ggauacuaaccguucgucuc

SEQ ID NO: 18511 - RNA, 20 nt, Artificial Sequence
  Antisense oligo
aggauacuaaccguucgucu

SEQ ID NO: 18512 - RNA, 20 nt, Artificial Sequence
  Antisense oligo
caggauacuaaccguucguc

SEQ ID NO: 18513 - RNA, 20 nt, Artificial Sequence
  Antisense oligo
acaggauacuaaccguucgu

SEQ ID NO: 18514 - RNA, 20 nt, Artificial Sequence
  Antisense oligo
gacaggauacuaaccguucg

SEQ ID NO: 18515 - RNA, 20 nt, Artificial Sequence
  Antisense oligo
ggacaggauacuaaccguuc

SEQ ID NO: 18516 - RNA, 20 nt, Artificial Sequence
  Antisense oligo
gggacaggauacuaaccguu

SEQ ID NO: 18517 - RNA, 20 nt, Artificial Sequence
  Antisense oligo
gaacgcuuagugguacaggg

SEQ ID NO: 18518 - RNA, 20 nt, Artificial Sequence
  Antisense oligo
ggaacgcuuagugguacagg

SEQ ID NO: 18519 - RNA, 20 nt, Artificial Sequence
  Antisense oligo
uggaacgcuuagugguacag

SEQ ID NO: 18520 - RNA, 20 nt, Artificial Sequence
  Antisense oligo
cuggaacgcuuagugguaca

SEQ ID NO: 18521 - RNA, 20 nt, Artificial Sequence
  Antisense oligo
ccuggaacgcuuagugguac

SEQ ID NO: 18522 - RNA, 20 nt, Artificial Sequence
  Antisense oligo
uccuggaacgcuuaguggua

SEQ ID NO: 18523 - RNA, 20 nt, Artificial Sequence
  Antisense oligo
cuccuggaacgcuuaguggu

SEQ ID NO: 18524 - RNA, 20 nt, Artificial Sequence
  Antisense oligo
ggcucuccuggaacgcuuag

SEQ ID NO: 18525 - RNA, 20 nt, Artificial Sequence
  Antisense oligo
aggcucuccuggaacgcuua

SEQ ID NO: 18526 - RNA, 20 nt, Artificial Sequence
  Antisense oligo
gaggcucuccuggaacgcuu

SEQ ID NO: 18527 - RNA, 20 nt, Artificial Sequence
  Antisense oligo
agacgaggcucuccuggaac

SEQ ID NO: 18528 - RNA, 20 nt, Artificial Sequence
  Antisense oligo
cagacgaggcucuccuggaa

SEQ ID NO: 18529 - RNA, 20 nt, Artificial Sequence
  Antisense oligo
ucagacgaggcucuccugga

SEQ ID NO: 18530 - RNA, 20 nt, Artificial Sequence
  Antisense oligo
uucagacgaggcucuccugg

SEQ ID NO: 18531 - RNA, 20 nt, Artificial Sequence
  Antisense oligo
uuucagacgaggcucuccug

SEQ ID NO: 18532 - RNA, 20 nt, Artificial Sequence
  Antisense oligo
gcuuucagacgaggcucucc

SEQ ID NO: 18533 - RNA, 20 nt, Artificial Sequence
  Antisense oligo
agcuuucagacgaggcucuc

SEQ ID NO: 18534 - RNA, 20 nt, Artificial Sequence
  Antisense oligo
aagagcuuucagacgaggcu

SEQ ID NO: 18535 - RNA, 20 nt, Artificial Sequence
  Antisense oligo
gaagagcuuucagacgaggc

SEQ ID NO: 18536 - RNA, 20 nt, Artificial Sequence
  Antisense oligo
agaagagcuuucagacgagg

SEQ ID NO: 18537 - RNA, 20 nt, Artificial Sequence
  Antisense oligo
cgagaagagcuuucagacga

SEQ ID NO: 18538 - RNA, 20 nt, Artificial Sequence
  Antisense oligo
acgagaagagcuuucagacg

SEQ ID NO: 18539 - RNA, 20 nt, Artificial Sequence
  Antisense oligo
ugacgagaagagcuuucaga

SEQ ID NO: 18540 - RNA, 20 nt, Artificial Sequence
  Antisense oligo
gcugacgagaagagcuuuca

SEQ ID NO: 18541 - RNA, 20 nt, Artificial Sequence
  Antisense oligo
ggcugacgagaagagcuuuc

SEQ ID NO: 18542 - RNA, 20 nt, Artificial Sequence
  Antisense oligo
aggcugacgagaagagcuuu

SEQ ID NO: 18543 - RNA, 20 nt, Artificial Sequence
  Antisense oligo
caggcugacgagaagagcuu

SEQ ID NO: 18544 - RNA, 20 nt, Artificial Sequence
  Antisense oligo
ucaggcugacgagaagagcu

SEQ ID NO: 18545 - RNA, 20 nt, Artificial Sequence
  Antisense oligo
uggguguugacagggauggg

SEQ ID NO: 18546 - RNA, 20 nt, Artificial Sequence
  Antisense oligo
cuggguguugacagggaugg

SEQ ID NO: 18547 - RNA, 20 nt, Artificial Sequence
  Antisense oligo
gcuggguguugacagggaug

SEQ ID NO: 18548 - RNA, 20 nt, Artificial Sequence
  Antisense oligo
agugcuggguguugacaggg

SEQ ID NO: 18549 - RNA, 20 nt, Artificial Sequence
  Antisense oligo
cagugcuggguguugacagg

SEQ ID NO: 18550 - RNA, 20 nt, Artificial Sequence
  Antisense oligo
aacaaacacagugcugggug

SEQ ID NO: 18551 - RNA, 20 nt, Artificial Sequence
  Antisense oligo
aaacaaacacagugcugggu

SEQ ID NO: 18552 - RNA, 20 nt, Artificial Sequence
  Antisense oligo
caaacaaacacagugcuggg

SEQ ID NO: 18553 - RNA, 20 nt, Artificial Sequence
  Antisense oligo
acaaacaaacacagugcugg

SEQ ID NO: 18554 - RNA, 20 nt, Artificial Sequence
  Antisense oligo
aacaaacaaacacagugcug

SEQ ID NO: 18555 - RNA, 20 nt, Artificial Sequence
  Antisense oligo
agcaagacuccaucucaaaa

SEQ ID NO: 18556 - RNA, 20 nt, Artificial Sequence
  Antisense oligo
gagcaagacuccaucucaaa

SEQ ID NO: 18557 - RNA, 20 nt, Artificial Sequence
  Antisense oligo
agagcaagacuccaucucaa

SEQ ID NO: 18558 - RNA, 20 nt, Artificial Sequence
  Antisense oligo
cagagcaagacuccaucuca

SEQ ID NO: 18559 - RNA, 20 nt, Artificial Sequence
  Antisense oligo
acagagcaagacuccaucuc

SEQ ID NO: 18560 - RNA, 20 nt, Artificial Sequence
  Antisense oligo
gacagagcaagacuccaucu

SEQ ID NO: 18561 - RNA, 20 nt, Artificial Sequence
  Antisense oligo
cgacagagcaagacuccauc

SEQ ID NO: 18562 - RNA, 20 nt, Artificial Sequence
  Antisense oligo
gcgacagagcaagacuccau

SEQ ID NO: 18563 - RNA, 20 nt, Artificial Sequence
  Antisense oligo
ggcgacagagcaagacucca

SEQ ID NO: 18564 - RNA, 20 nt, Artificial Sequence
  Antisense oligo
uggcgacagagcaagacucc

SEQ ID NO: 18565 - RNA, 20 nt, Artificial Sequence
  Antisense oligo
cuggcgacagagcaagacuc

SEQ ID NO: 18566 - RNA, 20 nt, Artificial Sequence
  Antisense oligo
ccuggcgacagagcaagacu

SEQ ID NO: 18567 - RNA, 20 nt, Artificial Sequence
  Antisense oligo
agccuggcgacagagcaaga

SEQ ID NO: 18568 - RNA, 20 nt, Artificial Sequence
  Antisense oligo
ugcagugagccgagauggug

SEQ ID NO: 18569 - RNA, 20 nt, Artificial Sequence
  Antisense oligo
uugcagugagccgagauggu

SEQ ID NO: 18570 - RNA, 20 nt, Artificial Sequence
  Antisense oligo
guugcagugagccgagaugg

SEQ ID NO: 18571 - RNA, 20 nt, Artificial Sequence
  Antisense oligo
gguugcagugagccgagaug

SEQ ID NO: 18572 - RNA, 20 nt, Artificial Sequence
  Antisense oligo
agguugcagugagccgagau

SEQ ID NO: 18573 - RNA, 20 nt, Artificial Sequence
  Antisense oligo
gagguugcagugagccgaga

SEQ ID NO: 18574 - RNA, 20 nt, Artificial Sequence
  Antisense oligo
agagguugcagugagccgag

SEQ ID NO: 18575 - RNA, 20 nt, Artificial Sequence
  Antisense oligo
cagagguugcagugagccga

SEQ ID NO: 18576 - RNA, 20 nt, Artificial Sequence
  Antisense oligo
aggcagagguugcagugagc

SEQ ID NO: 18577 - RNA, 20 nt, Artificial Sequence
  Antisense oligo
gaggcagagguugcagugag

SEQ ID NO: 18578 - RNA, 20 nt, Artificial Sequence
  Antisense oligo
ggaggcagagguugcaguga

SEQ ID NO: 18579 - RNA, 20 nt, Artificial Sequence
  Antisense oligo
aauccgggaggcagagguug

SEQ ID NO: 18580 - RNA, 20 nt, Artificial Sequence
  Antisense oligo
gaauccgggaggcagagguu

SEQ ID NO: 18581 - RNA, 20 nt, Artificial Sequence
  Antisense oligo
ugaauccgggaggcagaggu

SEQ ID NO: 18582 - RNA, 20 nt, Artificial Sequence
  Antisense oligo
ggagaauugcuugaauccgg

SEQ ID NO: 18583 - RNA, 20 nt, Artificial Sequence
  Antisense oligo
aggagaauugcuugaauccg

SEQ ID NO: 18584 - RNA, 20 nt, Artificial Sequence
  Antisense oligo
caggagaauugcuugaaucc

SEQ ID NO: 18585 - RNA, 20 nt, Artificial Sequence
  Antisense oligo
gcaggagaauugcuugaauc

SEQ ID NO: 18586 - RNA, 20 nt, Artificial Sequence
  Antisense oligo
ggcaggagaauugcuugaau

SEQ ID NO: 18587 - RNA, 20 nt, Artificial Sequence
  Antisense oligo
aggcaggagaauugcuugaa

SEQ ID NO: 18588 - RNA, 20 nt, Artificial Sequence
  Antisense oligo
gaggcaggagaauugcuuga

SEQ ID NO: 18589 - RNA, 20 nt, Artificial Sequence
  Antisense oligo
ugaggcaggagaauugcuug

SEQ ID NO: 18590 - RNA, 20 nt, Artificial Sequence
  Antisense oligo
cugaggcaggagaauugcuu

SEQ ID NO: 18591 - RNA, 20 nt, Artificial Sequence
  Antisense oligo
gcugaggcaggagaauugcu

SEQ ID NO: 18592 - RNA, 20 nt, Artificial Sequence
  Antisense oligo
ggcugaggcaggagaauugc

SEQ ID NO: 18593 - RNA, 20 nt, Artificial Sequence
  Antisense oligo
gggcugaggcaggagaauug

SEQ ID NO: 18594 - RNA, 20 nt, Artificial Sequence
  Antisense oligo
gaaacccugucucuacuagg

SEQ ID NO: 18595 - RNA, 20 nt, Artificial Sequence
  Antisense oligo
ugaaacccugucucuacuag

SEQ ID NO: 18596 - RNA, 20 nt, Artificial Sequence
  Antisense oligo
gugaaacccugucucuacua

SEQ ID NO: 18597 - RNA, 20 nt, Artificial Sequence
  Antisense oligo
ggugaaacccugucucuacu

SEQ ID NO: 18598 - RNA, 20 nt, Artificial Sequence
  Antisense oligo
uggugaaacccugucucuac

SEQ ID NO: 18599 - RNA, 20 nt, Artificial Sequence
  Antisense oligo
auggugaaacccugucucua

SEQ ID NO: 18600 - RNA, 20 nt, Artificial Sequence
  Antisense oligo
cauggugaaacccugucucu

SEQ ID NO: 18601 - RNA, 20 nt, Artificial Sequence
  Antisense oligo
acauggugaaacccugucuc

SEQ ID NO: 18602 - RNA, 20 nt, Artificial Sequence
  Antisense oligo
aacauggugaaacccugucu

SEQ ID NO: 18603 - RNA, 20 nt, Artificial Sequence
  Antisense oligo
caacauggugaaacccuguc

SEQ ID NO: 18604 - RNA, 20 nt, Artificial Sequence
  Antisense oligo
gcaacauggugaaacccugu

SEQ ID NO: 18605 - RNA, 20 nt, Artificial Sequence
  Antisense oligo
ggcaacauggugaaacccug

SEQ ID NO: 18606 - RNA, 20 nt, Artificial Sequence
  Antisense oligo
gggcaacauggugaaacccu

SEQ ID NO: 18607 - RNA, 20 nt, Artificial Sequence
  Antisense oligo
ugggcaacauggugaaaccc

SEQ ID NO: 18608 - RNA, 20 nt, Artificial Sequence
  Antisense oligo
cugggcaacauggugaaacc

SEQ ID NO: 18609 - RNA, 20 nt, Artificial Sequence
  Antisense oligo
ccugggcaacauggugaaac

SEQ ID NO: 18610 - RNA, 20 nt, Artificial Sequence
  Antisense oligo
gccugggcaacauggugaaa

SEQ ID NO: 18611 - RNA, 20 nt, Artificial Sequence
  Antisense oligo
agccugggcaacauggugaa

SEQ ID NO: 18612 - RNA, 20 nt, Artificial Sequence
  Antisense oligo
cagccugggcaacaugguga

SEQ ID NO: 18613 - RNA, 20 nt, Artificial Sequence
  Antisense oligo
agaccagccugggcaacaug

SEQ ID NO: 18614 - RNA, 20 nt, Artificial Sequence
  Antisense oligo
gagaccagccugggcaacau

SEQ ID NO: 18615 - RNA, 20 nt, Artificial Sequence
  Antisense oligo
ugagaccagccugggcaaca

SEQ ID NO: 18616 - RNA, 20 nt, Artificial Sequence
  Antisense oligo
uugagaccagccugggcaac

SEQ ID NO: 18617 - RNA, 20 nt, Artificial Sequence
  Antisense oligo
uuugagaccagccugggcaa

SEQ ID NO: 18618 - RNA, 20 nt, Artificial Sequence
  Antisense oligo
guuugagaccagccugggca

SEQ ID NO: 18619 - RNA, 20 nt, Artificial Sequence
  Antisense oligo
aguuugagaccagccugggc

SEQ ID NO: 18620 - RNA, 20 nt, Artificial Sequence
  Antisense oligo
gaguuugagaccagccuggg

SEQ ID NO: 18621 - RNA, 20 nt, Artificial Sequence
  Antisense oligo
ggaguuugagaccagccugg

SEQ ID NO: 18622 - RNA, 20 nt, Artificial Sequence
  Antisense oligo
gggaguuugagaccagccug

SEQ ID NO: 18623 - RNA, 20 nt, Artificial Sequence
  Antisense oligo
ugggaguuugagaccagccu

SEQ ID NO: 18624 - RNA, 20 nt, Artificial Sequence
  Antisense oligo
uugggaguuugagaccagcc

SEQ ID NO: 18625 - RNA, 20 nt, Artificial Sequence
  Antisense oligo
cuugggaguuugagaccagc

SEQ ID NO: 18626 - RNA, 20 nt, Artificial Sequence
  Antisense oligo
gcuugggaguuugagaccag

SEQ ID NO: 18627 - RNA, 20 nt, Artificial Sequence
  Antisense oligo
uagcacuuugggaggccgag

SEQ ID NO: 18628 - RNA, 20 nt, Artificial Sequence
  Antisense oligo
cuagcacuuugggaggccga

SEQ ID NO: 18629 - RNA, 20 nt, Artificial Sequence
  Antisense oligo
uccuagcacuuugggaggcc

SEQ ID NO: 18630 - RNA, 20 nt, Artificial Sequence
  Antisense oligo
auccuagcacuuugggaggc

SEQ ID NO: 18631 - RNA, 20 nt, Artificial Sequence
  Antisense oligo
aauccuagcacuuugggagg

SEQ ID NO: 18632 - RNA, 20 nt, Artificial Sequence
  Antisense oligo
uaauccuagcacuuugggag

SEQ ID NO: 18633 - RNA, 20 nt, Artificial Sequence
  Antisense oligo
guaauccuagcacuuuggga

SEQ ID NO: 18634 - RNA, 20 nt, Artificial Sequence
  Antisense oligo
uguaauccuagcacuuuggg

SEQ ID NO: 18635 - RNA, 20 nt, Artificial Sequence
  Antisense oligo
uuguaauccuagcacuuugg

SEQ ID NO: 18636 - RNA, 20 nt, Artificial Sequence
  Antisense oligo
cuuguaauccuagcacuuug

SEQ ID NO: 18637 - RNA, 20 nt, Artificial Sequence
  Antisense oligo
gcuuguaauccuagcacuuu

SEQ ID NO: 18638 - RNA, 20 nt, Artificial Sequence
  Antisense oligo
cgcuuguaauccuagcacuu

SEQ ID NO: 18639 - RNA, 20 nt, Artificial Sequence
  Antisense oligo
ccgcuuguaauccuagcacu

SEQ ID NO: 18640 - RNA, 20 nt, Artificial Sequence
  Antisense oligo
cccgcuuguaauccuagcac

SEQ ID NO: 18641 - RNA, 20 nt, Artificial Sequence
  Antisense oligo
ucccgcuuguaauccuagca

SEQ ID NO: 18642 - RNA, 20 nt, Artificial Sequence
  Antisense oligo
cucccgcuuguaauccuagc

SEQ ID NO: 18643 - RNA, 20 nt, Artificial Sequence
  Antisense oligo
caccaucaaaagagacacaa

SEQ ID NO: 18644 - RNA, 20 nt, Artificial Sequence
  Antisense oligo
ccaccaucaaaagagacaca

SEQ ID NO: 18645 - RNA, 20 nt, Artificial Sequence
  Antisense oligo
acaccaccaucaaaagagac

SEQ ID NO: 18646 - RNA, 20 nt, Artificial Sequence
  Antisense oligo
uuauccagacaccaccauca

SEQ ID NO: 18647 - RNA, 20 nt, Artificial Sequence
  Antisense oligo
uuacuuauccagacaccacc

SEQ ID NO: 18648 - RNA, 20 nt, Artificial Sequence
  Antisense oligo
uuuacuuauccagacaccac

SEQ ID NO: 18649 - RNA, 20 nt, Artificial Sequence
  Antisense oligo
ggguuuauuuuccugacaca

SEQ ID NO: 18650 - RNA, 20 nt, Artificial Sequence
  Antisense oligo
guacugaggguuuauuuucc

SEQ ID NO: 18651 - RNA, 20 nt, Artificial Sequence
  Antisense oligo
gccauauuuagggacugaag

SEQ ID NO: 18652 - RNA, 20 nt, Artificial Sequence
  Antisense oligo
augccauauuuagggacuga

SEQ ID NO: 18653 - RNA, 20 nt, Artificial Sequence
  Antisense oligo
gaugccauauuuagggacug

SEQ ID NO: 18654 - RNA, 20 nt, Artificial Sequence
  Antisense oligo
ugaugccauauuuagggacu

SEQ ID NO: 18655 - RNA, 20 nt, Artificial Sequence
  Antisense oligo
uugaugccauauuuagggac

SEQ ID NO: 18656 - RNA, 20 nt, Artificial Sequence
  Antisense oligo
uucagcucccuuuugaugcc

SEQ ID NO: 18657 - RNA, 20 nt, Artificial Sequence
  Antisense oligo
uuucagcucccuuuugaugc

SEQ ID NO: 18658 - RNA, 20 nt, Artificial Sequence
  Antisense oligo
gcuuucagcucccuuuugau

SEQ ID NO: 18659 - RNA, 20 nt, Artificial Sequence
  Antisense oligo
augcuuucagcucccuuuug

SEQ ID NO: 18660 - RNA, 20 nt, Artificial Sequence
  Antisense oligo
aaugcuuucagcucccuuuu

SEQ ID NO: 18661 - RNA, 20 nt, Artificial Sequence
  Antisense oligo
aaaugcuuucagcucccuuu

SEQ ID NO: 18662 - RNA, 20 nt, Artificial Sequence
  Antisense oligo
aucagcuccacacacagccg

SEQ ID NO: 18663 - RNA, 20 nt, Artificial Sequence
  Antisense oligo
caucagcuccacacacagcc

SEQ ID NO: 18664 - RNA, 20 nt, Artificial Sequence
  Antisense oligo
ccaucagcuccacacacagc

SEQ ID NO: 18665 - RNA, 20 nt, Artificial Sequence
  Antisense oligo
agccaucagcuccacacaca

SEQ ID NO: 18666 - RNA, 20 nt, Artificial Sequence
  Antisense oligo
aagccaucagcuccacacac

SEQ ID NO: 18667 - RNA, 20 nt, Artificial Sequence
  Antisense oligo
gaagccaucagcuccacaca

SEQ ID NO: 18668 - RNA, 20 nt, Artificial Sequence
  Antisense oligo
cagaagccaucagcuccaca

SEQ ID NO: 18669 - RNA, 20 nt, Artificial Sequence
  Antisense oligo
ugcagaagccaucagcucca

SEQ ID NO: 18670 - RNA, 20 nt, Artificial Sequence
  Antisense oligo
aacgacaggguuaugcuuaa

SEQ ID NO: 18671 - RNA, 20 nt, Artificial Sequence
  Antisense oligo
aaacgacaggguuaugcuua

SEQ ID NO: 18672 - RNA, 20 nt, Artificial Sequence
  Antisense oligo
uaaacgacaggguuaugcuu

SEQ ID NO: 18673 - RNA, 20 nt, Artificial Sequence
  Antisense oligo
uuaaacgacaggguuaugcu

SEQ ID NO: 18674 - RNA, 20 nt, Artificial Sequence
  Antisense oligo
uuggguagguugaucucacc

SEQ ID NO: 18675 - RNA, 20 nt, Artificial Sequence
  Antisense oligo
uuuggguagguugaucucac

SEQ ID NO: 18676 - RNA, 20 nt, Artificial Sequence
  Antisense oligo
cuuuggguagguugaucuca

SEQ ID NO: 18677 - RNA, 20 nt, Artificial Sequence
  Antisense oligo
guagucuuuggguagguuga

SEQ ID NO: 18678 - RNA, 20 nt, Artificial Sequence
  Antisense oligo
aguagucuuuggguagguug

SEQ ID NO: 18679 - RNA, 20 nt, Artificial Sequence
  Antisense oligo
caguagucuuuggguagguu

SEQ ID NO: 18680 - RNA, 20 nt, Artificial Sequence
  Antisense oligo
gcaguagucuuuggguaggu

SEQ ID NO: 18681 - RNA, 20 nt, Artificial Sequence
  Antisense oligo
agauccaagucagugcugca

SEQ ID NO: 18682 - RNA, 20 nt, Artificial Sequence
  Antisense oligo
cagauccaagucagugcugc

SEQ ID NO: 18683 - RNA, 20 nt, Artificial Sequence
  Antisense oligo
uguccagauccaagucagug

SEQ ID NO: 18684 - RNA, 20 nt, Artificial Sequence
  Antisense oligo
uggcaagaggaucucaaacu

SEQ ID NO: 18685 - RNA, 20 nt, Artificial Sequence
  Antisense oligo
ggcguggcaagaggaucuca

SEQ ID NO: 18686 - RNA, 20 nt, Artificial Sequence
  Antisense oligo
ucggcguggcaagaggaucu

SEQ ID NO: 18687 - RNA, 20 nt, Artificial Sequence
  Antisense oligo
acgagagcgguagcacagag

SEQ ID NO: 18688 - RNA, 20 nt, Artificial Sequence
  Antisense oligo
gacgagagcgguagcacaga

SEQ ID NO: 18689 - RNA, 20 nt, Artificial Sequence
  Antisense oligo
ugacgagagcgguagcacag

SEQ ID NO: 18690 - RNA, 20 nt, Artificial Sequence
  Antisense oligo
cugacgagagcgguagcaca

SEQ ID NO: 18691 - RNA, 20 nt, Artificial Sequence
  Antisense oligo
agcugacgagagcgguagca

SEQ ID NO: 18692 - RNA, 20 nt, Artificial Sequence
  Antisense oligo
uagcugacgagagcgguagc

SEQ ID NO: 18693 - RNA, 20 nt, Artificial Sequence
  Antisense oligo
guagcugacgagagcgguag

SEQ ID NO: 18694 - RNA, 20 nt, Artificial Sequence
  Antisense oligo
aguagcugacgagagcggua

SEQ ID NO: 18695 - RNA, 20 nt, Artificial Sequence
  Antisense oligo
aaguagcugacgagagcggu

SEQ ID NO: 18696 - RNA, 20 nt, Artificial Sequence
  Antisense oligo
caaguagcugacgagagcgg

SEQ ID NO: 18697 - RNA, 20 nt, Artificial Sequence
  Antisense oligo
ucaaguagcugacgagagcg

SEQ ID NO: 18698 - RNA, 20 nt, Artificial Sequence
  Antisense oligo
aucaaguagcugacgagagc

SEQ ID NO: 18699 - RNA, 20 nt, Artificial Sequence
  Antisense oligo
aaucaaguagcugacgagag

SEQ ID NO: 18700 - RNA, 20 nt, Artificial Sequence
  Antisense oligo
gaaucaaguagcugacgaga

SEQ ID NO: 18701 - RNA, 20 nt, Artificial Sequence
  Antisense oligo
cgaaucaaguagcugacgag

SEQ ID NO: 18702 - RNA, 20 nt, Artificial Sequence
  Antisense oligo
gcgaaucaaguagcugacga

SEQ ID NO: 18703 - RNA, 20 nt, Artificial Sequence
  Antisense oligo
ggcgaaucaaguagcugacg

SEQ ID NO: 18704 - RNA, 20 nt, Artificial Sequence
  Antisense oligo
aggcgaaucaaguagcugac

SEQ ID NO: 18705 - RNA, 20 nt, Artificial Sequence
  Antisense oligo
uaggcgaaucaaguagcuga

SEQ ID NO: 18706 - RNA, 20 nt, Artificial Sequence
  Antisense oligo
guaggcgaaucaaguagcug

SEQ ID NO: 18707 - RNA, 20 nt, Artificial Sequence
  Antisense oligo
uguaggcgaaucaaguagcu

SEQ ID NO: 18708 - RNA, 20 nt, Artificial Sequence
  Antisense oligo
uguguaggcgaaucaaguag

SEQ ID NO: 18709 - RNA, 20 nt, Artificial Sequence
  Antisense oligo
uuguguaggcgaaucaagua

SEQ ID NO: 18710 - RNA, 20 nt, Artificial Sequence
  Antisense oligo
auuguguaggcgaaucaagu

SEQ ID NO: 18711 - RNA, 20 nt, Artificial Sequence
  Antisense oligo
cauuguguaggcgaaucaag

SEQ ID NO: 18712 - RNA, 20 nt, Artificial Sequence
  Antisense oligo
ucauuguguaggcgaaucaa

SEQ ID NO: 18713 - RNA, 20 nt, Artificial Sequence
  Antisense oligo
uucauuguguaggcgaauca

SEQ ID NO: 18714 - RNA, 20 nt, Artificial Sequence
  Antisense oligo
uuucauuguguaggcgaauc

SEQ ID NO: 18715 - RNA, 20 nt, Artificial Sequence
  Antisense oligo
acggcguagacaauuucauu

SEQ ID NO: 18716 - RNA, 20 nt, Artificial Sequence
  Antisense oligo
cacggcguagacaauuucau

SEQ ID NO: 18717 - RNA, 20 nt, Artificial Sequence
  Antisense oligo
ccacggcguagacaauuuca

SEQ ID NO: 18718 - RNA, 20 nt, Artificial Sequence
  Antisense oligo
uccacggcguagacaauuuc

SEQ ID NO: 18719 - RNA, 20 nt, Artificial Sequence
  Antisense oligo
uuccacggcguagacaauuu

SEQ ID NO: 18720 - RNA, 20 nt, Artificial Sequence
  Antisense oligo
uuuccacggcguagacaauu

SEQ ID NO: 18721 - RNA, 20 nt, Artificial Sequence
  Antisense oligo
uuuuccacggcguagacaau

SEQ ID NO: 18722 - RNA, 20 nt, Artificial Sequence
  Antisense oligo
accuguuguuuuccuuggag

SEQ ID NO: 18723 - RNA, 20 nt, Artificial Sequence
  Antisense oligo
gugagugucuguuagggaag

SEQ ID NO: 18724 - RNA, 20 nt, Artificial Sequence
  Antisense oligo
agugagugucuguuagggaa

SEQ ID NO: 18725 - RNA, 20 nt, Artificial Sequence
  Antisense oligo
gagugagugucuguuaggga

SEQ ID NO: 18726 - RNA, 20 nt, Artificial Sequence
  Antisense oligo
aaaacccuacccaaguaugg

SEQ ID NO: 18727 - RNA, 20 nt, Artificial Sequence
  Antisense oligo
gaaaacccuacccaaguaug

SEQ ID NO: 18728 - RNA, 20 nt, Artificial Sequence
  Antisense oligo
ggaaaacccuacccaaguau

SEQ ID NO: 18729 - RNA, 20 nt, Artificial Sequence
  Antisense oligo
uggaaaacccuacccaagua

SEQ ID NO: 18730 - RNA, 20 nt, Artificial Sequence
  Antisense oligo
guggaaaacccuacccaagu

SEQ ID NO: 18731 - RNA, 20 nt, Artificial Sequence
  Antisense oligo
aguggaaaacccuacccaag

SEQ ID NO: 18732 - RNA, 20 nt, Artificial Sequence
  Antisense oligo
caguggaaaacccuacccaa

SEQ ID NO: 18733 - RNA, 20 nt, Artificial Sequence
  Antisense oligo
gcaguggaaaacccuaccca

SEQ ID NO: 18734 - RNA, 20 nt, Artificial Sequence
  Antisense oligo
agcaguggaaaacccuaccc

SEQ ID NO: 18735 - RNA, 20 nt, Artificial Sequence
  Antisense oligo
gagcaguggaaaacccuacc

SEQ ID NO: 18736 - RNA, 20 nt, Artificial Sequence
  Antisense oligo
acaguuggagcaguggaaaa

SEQ ID NO: 18737 - RNA, 20 nt, Artificial Sequence
  Antisense oligo
cacaguuggagcaguggaaa

SEQ ID NO: 18738 - RNA, 20 nt, Artificial Sequence
  Antisense oligo
ucucacaguuggagcagugg

SEQ ID NO: 18739 - RNA, 20 nt, Artificial Sequence
  Antisense oligo
uucucacaguuggagcagug

SEQ ID NO: 18740 - RNA, 20 nt, Artificial Sequence
  Antisense oligo
cauuucucacaguuggagca

SEQ ID NO: 18741 - RNA, 20 nt, Artificial Sequence
  Antisense oligo
ccauuucucacaguuggagc

SEQ ID NO: 18742 - RNA, 20 nt, Artificial Sequence
  Antisense oligo
ucccauuucucacaguugga

SEQ ID NO: 18743 - RNA, 20 nt, Artificial Sequence
  Antisense oligo
cucccauuucucacaguugg

SEQ ID NO: 18744 - RNA, 20 nt, Artificial Sequence
  Antisense oligo
ggcucccauuucucacaguu

SEQ ID NO: 18745 - RNA, 20 nt, Artificial Sequence
  Antisense oligo
aggcucccauuucucacagu

SEQ ID NO: 18746 - RNA, 20 nt, Artificial Sequence
  Antisense oligo
caggcucccauuucucacag

SEQ ID NO: 18747 - RNA, 20 nt, Artificial Sequence
  Antisense oligo
gcaggcucccauuucucaca

SEQ ID NO: 18748 - RNA, 20 nt, Artificial Sequence
  Antisense oligo
agcaggcucccauuucucac

SEQ ID NO: 18749 - RNA, 20 nt, Artificial Sequence
  Antisense oligo
gagcaggcucccauuucuca

SEQ ID NO: 18750 - RNA, 20 nt, Artificial Sequence
  Antisense oligo
ucuauguugcagggagcagg

SEQ ID NO: 18751 - RNA, 20 nt, Artificial Sequence
  Antisense oligo
cucuauguugcagggagcag

SEQ ID NO: 18752 - RNA, 20 nt, Artificial Sequence
  Antisense oligo
gggcucuauguugcagggag

SEQ ID NO: 18753 - RNA, 20 nt, Artificial Sequence
  Antisense oligo
agggcucuauguugcaggga

SEQ ID NO: 18754 - RNA, 20 nt, Artificial Sequence
  Antisense oligo
uagggcucuauguugcaggg

SEQ ID NO: 18755 - RNA, 20 nt, Artificial Sequence
  Antisense oligo
cuagggcucuauguugcagg

SEQ ID NO: 18756 - RNA, 20 nt, Artificial Sequence
  Antisense oligo
auccacggaauagcugaggg

SEQ ID NO: 18757 - RNA, 20 nt, Artificial Sequence
  Antisense oligo
cauccacggaauagcugagg

SEQ ID NO: 18758 - RNA, 20 nt, Artificial Sequence
  Antisense oligo
gcauccacggaauagcugag

SEQ ID NO: 18759 - RNA, 20 nt, Artificial Sequence
  Antisense oligo
ggcauccacggaauagcuga

SEQ ID NO: 18760 - RNA, 20 nt, Artificial Sequence
  Antisense oligo
cggcauccacggaauagcug

SEQ ID NO: 18761 - RNA, 20 nt, Artificial Sequence
  Antisense oligo
gcggcauccacggaauagcu

SEQ ID NO: 18762 - RNA, 20 nt, Artificial Sequence
  Antisense oligo
ugcaguucagugaccucggc

SEQ ID NO: 18763 - RNA, 20 nt, Artificial Sequence
  Antisense oligo
acaugcaguucagugaccuc

SEQ ID NO: 18764 - RNA, 20 nt, Artificial Sequence
  Antisense oligo
ugacaugcaguucagugacc

SEQ ID NO: 18765 - RNA, 20 nt, Artificial Sequence
  Antisense oligo
ugaugacaugcaguucagug

SEQ ID NO: 18766 - RNA, 20 nt, Artificial Sequence
  Antisense oligo
gcuccacuucauaacugaug

SEQ ID NO: 18767 - RNA, 20 nt, Artificial Sequence
  Antisense oligo
cgcuccacuucauaacugau

SEQ ID NO: 18768 - RNA, 20 nt, Artificial Sequence
  Antisense oligo
ccgcuccacuucauaacuga

SEQ ID NO: 18769 - RNA, 20 nt, Artificial Sequence
  Antisense oligo
cccgcuccacuucauaacug

SEQ ID NO: 18770 - RNA, 20 nt, Artificial Sequence
  Antisense oligo
ucccgcuccacuucauaacu

SEQ ID NO: 18771 - RNA, 20 nt, Artificial Sequence
  Antisense oligo
ggagagaaucaguggaguca

SEQ ID NO: 18772 - RNA, 20 nt, Artificial Sequence
  Antisense oligo
uuggagagaaucaguggagu

SEQ ID NO: 18773 - RNA, 20 nt, Artificial Sequence
  Antisense oligo
guuggagagaaucaguggag

SEQ ID NO: 18774 - RNA, 20 nt, Artificial Sequence
  Antisense oligo
gcaguuggagagaaucagug

SEQ ID NO: 18775 - RNA, 20 nt, Artificial Sequence
  Antisense oligo
ggcaguuggagagaaucagu

SEQ ID NO: 18776 - RNA, 20 nt, Artificial Sequence
  Antisense oligo
acuggcaguuggagagaauc

SEQ ID NO: 18777 - RNA, 20 nt, Artificial Sequence
  Antisense oligo
ugguacuggcaguuggagag

SEQ ID NO: 18778 - RNA, 20 nt, Artificial Sequence
  Antisense oligo
cugguacuggcaguuggaga

SEQ ID NO: 18779 - RNA, 20 nt, Artificial Sequence
  Antisense oligo
caccugguacuggcaguugg

SEQ ID NO: 18780 - RNA, 20 nt, Artificial Sequence
  Antisense oligo
ccaccugguacuggcaguug

SEQ ID NO: 18781 - RNA, 20 nt, Artificial Sequence
  Antisense oligo
uccuccaccugguacuggca

SEQ ID NO: 18782 - RNA, 20 nt, Artificial Sequence
  Antisense oligo
acuccugcacggucucucug

SEQ ID NO: 18783 - RNA, 20 nt, Artificial Sequence
  Antisense oligo
aacuccugcacggucucucu

SEQ ID NO: 18784 - RNA, 20 nt, Artificial Sequence
  Antisense oligo
gaacuccugcacggucucuc

SEQ ID NO: 18785 - RNA, 20 nt, Artificial Sequence
  Antisense oligo
cgaacuccugcacggucucu

SEQ ID NO: 18786 - RNA, 20 nt, Artificial Sequence
  Antisense oligo
ucgaacuccugcacggucuc

SEQ ID NO: 18787 - RNA, 20 nt, Artificial Sequence
  Antisense oligo
aucgaacuccugcacggucu

SEQ ID NO: 18788 - RNA, 20 nt, Artificial Sequence
  Antisense oligo
gaucgaacuccugcacgguc

SEQ ID NO: 18789 - RNA, 20 nt, Artificial Sequence
  Antisense oligo
cagaucgaacuccugcacgg

SEQ ID NO: 18790 - RNA, 20 nt, Artificial Sequence
  Antisense oligo
ccagaucgaacuccugcacg

SEQ ID NO: 18791 - RNA, 20 nt, Artificial Sequence
  Antisense oligo
uccagaucgaacuccugcac

SEQ ID NO: 18792 - RNA, 20 nt, Artificial Sequence
  Antisense oligo
ucuccagaucgaacuccugc

SEQ ID NO: 18793 - RNA, 20 nt, Artificial Sequence
  Antisense oligo
uucuccagaucgaacuccug

SEQ ID NO: 18794 - RNA, 20 nt, Artificial Sequence
  Antisense oligo
cuucuccagaucgaacuccu

SEQ ID NO: 18795 - RNA, 20 nt, Artificial Sequence
  Antisense oligo
ucuucuccagaucgaacucc

SEQ ID NO: 18796 - RNA, 20 nt, Artificial Sequence
  Antisense oligo
gccgcugaaucuucuccaga

SEQ ID NO: 18797 - RNA, 20 nt, Artificial Sequence
  Antisense oligo
ugccgcugaaucuucuccag

SEQ ID NO: 18798 - RNA, 20 nt, Artificial Sequence
  Antisense oligo
cugccgcugaaucuucucca

SEQ ID NO: 18799 - RNA, 20 nt, Artificial Sequence
  Antisense oligo
ucugccgcugaaucuucucc

SEQ ID NO: 18800 - RNA, 20 nt, Artificial Sequence
  Antisense oligo
aucugccgcugaaucuucuc

SEQ ID NO: 18801 - RNA, 20 nt, Artificial Sequence
  Antisense oligo
gaucugccgcugaaucuucu

SEQ ID NO: 18802 - RNA, 20 nt, Artificial Sequence
  Antisense oligo
cgaucugccgcugaaucuuc

SEQ ID NO: 18803 - RNA, 20 nt, Artificial Sequence
  Antisense oligo
acgaucugccgcugaaucuu

SEQ ID NO: 18804 - RNA, 20 nt, Artificial Sequence
  Antisense oligo
gacgaucugccgcugaaucu

SEQ ID NO: 18805 - RNA, 20 nt, Artificial Sequence
  Antisense oligo
ugacgaucugccgcugaauc

SEQ ID NO: 18806 - RNA, 20 nt, Artificial Sequence
  Antisense oligo
cugacgaucugccgcugaau

SEQ ID NO: 18807 - RNA, 20 nt, Artificial Sequence
  Antisense oligo
gcugacgaucugccgcugaa

SEQ ID NO: 18808 - RNA, 20 nt, Artificial Sequence
  Antisense oligo
aggaagcggcugacgaucug

SEQ ID NO: 18809 - RNA, 20 nt, Artificial Sequence
  Antisense oligo
gaggaagcggcugacgaucu

SEQ ID NO: 18810 - RNA, 20 nt, Artificial Sequence
  Antisense oligo
uggaggaagcggcugacgau

SEQ ID NO: 18811 - RNA, 20 nt, Artificial Sequence
  Antisense oligo
agucagcccuaccuugaggc

SEQ ID NO: 18812 - RNA, 20 nt, Artificial Sequence
  Antisense oligo
gagucagcccuaccuugagg

SEQ ID NO: 18813 - RNA, 20 nt, Artificial Sequence
  Antisense oligo
aggagucagcccuaccuuga

SEQ ID NO: 18814 - RNA, 20 nt, Artificial Sequence
  Antisense oligo
caggagucagcccuaccuug

SEQ ID NO: 18815 - RNA, 20 nt, Artificial Sequence
  Antisense oligo
gcaggagucagcccuaccuu

SEQ ID NO: 18816 - RNA, 20 nt, Artificial Sequence
  Antisense oligo
aguggcaggagucagcccua

SEQ ID NO: 18817 - RNA, 20 nt, Artificial Sequence
  Antisense oligo
aaaugagcagcaguggcagg

SEQ ID NO: 18818 - RNA, 20 nt, Artificial Sequence
  Antisense oligo
ccaaaugagcagcaguggca

SEQ ID NO: 18819 - RNA, 20 nt, Artificial Sequence
  Antisense oligo
gacacaccaaaugagcagca

SEQ ID NO: 18820 - RNA, 20 nt, Artificial Sequence
  Antisense oligo
agacacaccaaaugagcagc

SEQ ID NO: 18821 - RNA, 20 nt, Artificial Sequence
  Antisense oligo
caacagacacaccaaaugag

SEQ ID NO: 18822 - RNA, 20 nt, Artificial Sequence
  Antisense oligo
aagggcugcuuguucacaac

SEQ ID NO: 18823 - RNA, 20 nt, Artificial Sequence
  Antisense oligo
aaacacaccaagggcugcuu

SEQ ID NO: 18824 - RNA, 20 nt, Artificial Sequence
  Antisense oligo
gaaacacaccaagggcugcu

SEQ ID NO: 18825 - RNA, 20 nt, Artificial Sequence
  Antisense oligo
agaaacacaccaagggcugc

SEQ ID NO: 18826 - RNA, 20 nt, Artificial Sequence
  Antisense oligo
gagaaacacaccaagggcug

SEQ ID NO: 18827 - RNA, 20 nt, Artificial Sequence
  Antisense oligo
cgagaaacacaccaagggcu

SEQ ID NO: 18828 - RNA, 20 nt, Artificial Sequence
  Antisense oligo
ucgagaaacacaccaagggc

SEQ ID NO: 18829 - RNA, 20 nt, Artificial Sequence
  Antisense oligo
aggugcugcuucccucucuc

SEQ ID NO: 18830 - RNA, 20 nt, Artificial Sequence
  Antisense oligo
gagauacagaccagacugca

SEQ ID NO: 18831 - RNA, 20 nt, Artificial Sequence
  Antisense oligo
ggagauacagaccagacugc

SEQ ID NO: 18832 - RNA, 20 nt, Artificial Sequence
  Antisense oligo
gaggagauacagaccagacu

SEQ ID NO: 18833 - RNA, 20 nt, Artificial Sequence
  Antisense oligo
ggaggagauacagaccagac

SEQ ID NO: 18834 - RNA, 20 nt, Artificial Sequence
  Antisense oligo
ugugagggaggagauacaga

SEQ ID NO: 18835 - RNA, 20 nt, Artificial Sequence
  Antisense oligo
gugugagggaggagauacag

SEQ ID NO: 18836 - RNA, 20 nt, Artificial Sequence
  Antisense oligo
caggugugagggaggagaua

SEQ ID NO: 18837 - RNA, 20 nt, Artificial Sequence
  Antisense oligo
gcaggugugagggaggagau

SEQ ID NO: 18838 - RNA, 20 nt, Artificial Sequence
  Antisense oligo
agaccucaacaguuccuugg

SEQ ID NO: 18839 - RNA, 20 nt, Artificial Sequence
  Antisense oligo
aagaccucaacaguuccuug

SEQ ID NO: 18840 - RNA, 20 nt, Artificial Sequence
  Antisense oligo
aaagaccucaacaguuccuu

SEQ ID NO: 18841 - RNA, 20 nt, Artificial Sequence
  Antisense oligo
aaaagaccucaacaguuccu

SEQ ID NO: 18842 - RNA, 20 nt, Artificial Sequence
  Antisense oligo
ggugacagagugagacccug

SEQ ID NO: 18843 - RNA, 20 nt, Artificial Sequence
  Antisense oligo
cggugacagagugagacccu

SEQ ID NO: 18844 - RNA, 20 nt, Artificial Sequence
  Antisense oligo
ucggugacagagugagaccc

SEQ ID NO: 18845 - RNA, 20 nt, Artificial Sequence
  Antisense oligo
cucggugacagagugagacc

SEQ ID NO: 18846 - RNA, 20 nt, Artificial Sequence
  Antisense oligo
ccucggugacagagugagac

SEQ ID NO: 18847 - RNA, 20 nt, Artificial Sequence
  Antisense oligo
gccucggugacagagugaga

SEQ ID NO: 18848 - RNA, 20 nt, Artificial Sequence
  Antisense oligo
aggaucgcuugagcccagag

SEQ ID NO: 18849 - RNA, 20 nt, Artificial Sequence
  Antisense oligo
gaggaucgcuugagcccaga

SEQ ID NO: 18850 - RNA, 20 nt, Artificial Sequence
  Antisense oligo
agaggaucgcuugagcccag

SEQ ID NO: 18851 - RNA, 20 nt, Artificial Sequence
  Antisense oligo
gagaggaucgcuugagccca

SEQ ID NO: 18852 - RNA, 20 nt, Artificial Sequence
  Antisense oligo
ugagaggaucgcuugagccc

SEQ ID NO: 18853 - RNA, 20 nt, Artificial Sequence
  Antisense oligo
gugagaggaucgcuugagcc

SEQ ID NO: 18854 - RNA, 20 nt, Artificial Sequence
  Antisense oligo
ugugagaggaucgcuugagc

SEQ ID NO: 18855 - RNA, 20 nt, Artificial Sequence
  Antisense oligo
auuugggaagcugaugugag

SEQ ID NO: 18856 - RNA, 20 nt, Artificial Sequence
  Antisense oligo
uugugaucucagcuauuugg

SEQ ID NO: 18857 - RNA, 20 nt, Artificial Sequence
  Antisense oligo
acacuugugaucucagcuau

SEQ ID NO: 18858 - RNA, 20 nt, Artificial Sequence
  Antisense oligo
gcacacuugugaucucagcu

SEQ ID NO: 18859 - RNA, 20 nt, Artificial Sequence
  Antisense oligo
uagcugggcaugguggugca

SEQ ID NO: 18860 - RNA, 20 nt, Artificial Sequence
  Antisense oligo
uuagcugggcaugguggugc

SEQ ID NO: 18861 - RNA, 20 nt, Artificial Sequence
  Antisense oligo
auuagcugggcaugguggug

SEQ ID NO: 18862 - RNA, 20 nt, Artificial Sequence
  Antisense oligo
aauuagcugggcaugguggu

SEQ ID NO: 18863 - RNA, 20 nt, Artificial Sequence
  Antisense oligo
aaauuagcugggcauggugg

SEQ ID NO: 18864 - RNA, 20 nt, Artificial Sequence
  Antisense oligo
caaauuagcugggcauggug

SEQ ID NO: 18865 - RNA, 20 nt, Artificial Sequence
  Antisense oligo
acaaauuagcugggcauggu

SEQ ID NO: 18866 - RNA, 20 nt, Artificial Sequence
  Antisense oligo
cacaaauuagcugggcaugg

SEQ ID NO: 18867 - RNA, 20 nt, Artificial Sequence
  Antisense oligo
acacaaauuagcugggcaug

SEQ ID NO: 18868 - RNA, 20 nt, Artificial Sequence
  Antisense oligo
uacacaaauuagcugggcau

SEQ ID NO: 18869 - RNA, 20 nt, Artificial Sequence
  Antisense oligo
aagaguucgagaccagccgg

SEQ ID NO: 18870 - RNA, 20 nt, Artificial Sequence
  Antisense oligo
caagaguucgagaccagccg

SEQ ID NO: 18871 - RNA, 20 nt, Artificial Sequence
  Antisense oligo
ccaagaguucgagaccagcc

SEQ ID NO: 18872 - RNA, 20 nt, Artificial Sequence
  Antisense oligo
cccaagaguucgagaccagc

SEQ ID NO: 18873 - RNA, 20 nt, Artificial Sequence
  Antisense oligo
cuauaaucccagcacuuugg

SEQ ID NO: 18874 - RNA, 20 nt, Artificial Sequence
  Antisense oligo
ccuauaaucccagcacuuug

SEQ ID NO: 18875 - RNA, 20 nt, Artificial Sequence
  Antisense oligo
gccuauaaucccagcacuuu

SEQ ID NO: 18876 - RNA, 20 nt, Artificial Sequence
  Antisense oligo
cgccuauaaucccagcacuu

SEQ ID NO: 18877 - RNA, 20 nt, Artificial Sequence
  Antisense oligo
acgccuauaaucccagcacu

SEQ ID NO: 18878 - RNA, 20 nt, Artificial Sequence
  Antisense oligo
cacgccuauaaucccagcac

SEQ ID NO: 18879 - RNA, 20 nt, Artificial Sequence
  Antisense oligo
ucacgccuauaaucccagca

SEQ ID NO: 18880 - RNA, 20 nt, Artificial Sequence
  Antisense oligo
cucacgccuauaaucccagc

SEQ ID NO: 18881 - RNA, 20 nt, Artificial Sequence
  Antisense oligo
gcucacgccuauaaucccag

SEQ ID NO: 18882 - RNA, 20 nt, Artificial Sequence
  Antisense oligo
ggcucacgccuauaauccca

SEQ ID NO: 18883 - RNA, 20 nt, Artificial Sequence
  Antisense oligo
uggcucacgccuauaauccc

SEQ ID NO: 18884 - RNA, 20 nt, Artificial Sequence
  Antisense oligo
guggcucacgccuauaaucc

SEQ ID NO: 18885 - RNA, 20 nt, Artificial Sequence
  Antisense oligo
aguggcucacgccuauaauc

SEQ ID NO: 18886 - RNA, 20 nt, Artificial Sequence
  Antisense oligo
caguggcucacgccuauaau

SEQ ID NO: 18887 - RNA, 20 nt, Artificial Sequence
  Antisense oligo
gcaguggcucacgccuauaa

SEQ ID NO: 18888 - RNA, 20 nt, Artificial Sequence
  Antisense oligo
ugcaguggcucacgccuaua

SEQ ID NO: 18889 - RNA, 20 nt, Artificial Sequence
  Antisense oligo
gugcaguggcucacgccuau

SEQ ID NO: 18890 - RNA, 20 nt, Artificial Sequence
  Antisense oligo
guagaaucaagaccucaaca

SEQ ID NO: 18891 - RNA, 20 nt, Artificial Sequence
  Antisense oligo
gguagaaucaagaccucaac

SEQ ID NO: 18892 - RNA, 20 nt, Artificial Sequence
  Antisense oligo
uaacugguagaaucaagacc

SEQ ID NO: 18893 - RNA, 20 nt, Artificial Sequence
  Antisense oligo
gugccauuaacugguagaau

SEQ ID NO: 18894 - RNA, 20 nt, Artificial Sequence
  Antisense oligo
ggugccauuaacugguagaa

SEQ ID NO: 18895 - RNA, 20 nt, Artificial Sequence
  Antisense oligo
cugcuggcagguuacccaug

SEQ ID NO: 18896 - RNA, 20 nt, Artificial Sequence
  Antisense oligo
ucugcuggcagguuacccau

SEQ ID NO: 18897 - RNA, 20 nt, Artificial Sequence
  Antisense oligo
uaauggcaucugcuggcagg

SEQ ID NO: 18898 - RNA, 20 nt, Artificial Sequence
  Antisense oligo
cuaauggcaucugcuggcag

SEQ ID NO: 18899 - RNA, 20 nt, Artificial Sequence
  Antisense oligo
agcuaauggcaucugcuggc

SEQ ID NO: 18900 - RNA, 20 nt, Artificial Sequence
  Antisense oligo
cacagcuaauggcaucugcu

SEQ ID NO: 18901 - RNA, 20 nt, Artificial Sequence
  Antisense oligo
gcacagcuaauggcaucugc

SEQ ID NO: 18902 - RNA, 20 nt, Artificial Sequence
  Antisense oligo
gcagucaggugaggacacac

SEQ ID NO: 18903 - RNA, 20 nt, Artificial Sequence
  Antisense oligo
uggcagucaggugaggacac

SEQ ID NO: 18904 - RNA, 20 nt, Artificial Sequence
  Antisense oligo
uuggcagucaggugaggaca

SEQ ID NO: 18905 - RNA, 20 nt, Artificial Sequence
  Antisense oligo
gugggcuuuggcagucaggu

SEQ ID NO: 18906 - RNA, 20 nt, Artificial Sequence
  Antisense oligo
cguacaggaugcuuuuaacu

SEQ ID NO: 18907 - RNA, 20 nt, Artificial Sequence
  Antisense oligo
acguacaggaugcuuuuaac

SEQ ID NO: 18908 - RNA, 20 nt, Artificial Sequence
  Antisense oligo
caacguacaggaugcuuuua

SEQ ID NO: 18909 - RNA, 20 nt, Artificial Sequence
  Antisense oligo
ccaacguacaggaugcuuuu

SEQ ID NO: 18910 - RNA, 20 nt, Artificial Sequence
  Antisense oligo
uccaacguacaggaugcuuu

SEQ ID NO: 18911 - RNA, 20 nt, Artificial Sequence
  Antisense oligo
guccaacguacaggaugcuu

SEQ ID NO: 18912 - RNA, 20 nt, Artificial Sequence
  Antisense oligo
aguccaacguacaggaugcu

SEQ ID NO: 18913 - RNA, 20 nt, Artificial Sequence
  Antisense oligo
caguccaacguacaggaugc

SEQ ID NO: 18914 - RNA, 20 nt, Artificial Sequence
  Antisense oligo
gcaguccaacguacaggaug

SEQ ID NO: 18915 - RNA, 20 nt, Artificial Sequence
  Antisense oligo
agcaguccaacguacaggau

SEQ ID NO: 18916 - RNA, 20 nt, Artificial Sequence
  Antisense oligo
uagcaguccaacguacagga

SEQ ID NO: 18917 - RNA, 20 nt, Artificial Sequence
  Antisense oligo
cuagcaguccaacguacagg

SEQ ID NO: 18918 - RNA, 20 nt, Artificial Sequence
  Antisense oligo
caccaguuaggaguggcuag

SEQ ID NO: 18919 - RNA, 20 nt, Artificial Sequence
  Antisense oligo
gcaccaguuaggaguggcua

SEQ ID NO: 18920 - RNA, 20 nt, Artificial Sequence
  Antisense oligo
ggcaccaguuaggaguggcu

SEQ ID NO: 18921 - RNA, 20 nt, Artificial Sequence
  Antisense oligo
ugggcaccaguuaggagugg

SEQ ID NO: 18922 - RNA, 20 nt, Artificial Sequence
  Antisense oligo
gugggcaccaguuaggagug

SEQ ID NO: 18923 - RNA, 20 nt, Artificial Sequence
  Antisense oligo
gaggugggcaccaguuagga

SEQ ID NO: 18924 - RNA, 20 nt, Artificial Sequence
  Antisense oligo
uggaggugggcaccaguuag

SEQ ID NO: 18925 - RNA, 20 nt, Artificial Sequence
  Antisense oligo
ugaagaaccuggaggugggc

SEQ ID NO: 18926 - RNA, 20 nt, Artificial Sequence
  Antisense oligo
gccagauguggguuuuaggc

SEQ ID NO: 18927 - RNA, 20 nt, Artificial Sequence
  Antisense oligo
agccagauguggguuuuagg

SEQ ID NO: 18928 - RNA, 20 nt, Artificial Sequence
  Antisense oligo
agagccagauguggguuuua

SEQ ID NO: 18929 - RNA, 20 nt, Artificial Sequence
  Antisense oligo
augaagagagccagaugugg

SEQ ID NO: 18930 - RNA, 20 nt, Artificial Sequence
  Antisense oligo
caggaugaagagagccagau

SEQ ID NO: 18931 - RNA, 20 nt, Artificial Sequence
  Antisense oligo
acaggaugaagagagccaga

SEQ ID NO: 18932 - RNA, 20 nt, Artificial Sequence
  Antisense oligo
cacaggaugaagagagccag

SEQ ID NO: 18933 - RNA, 20 nt, Artificial Sequence
  Antisense oligo
ccggcacaggaugaagagag

SEQ ID NO: 18934 - RNA, 20 nt, Artificial Sequence
  Antisense oligo
uaugccaugagaggccaggc

SEQ ID NO: 18935 - RNA, 20 nt, Artificial Sequence
  Antisense oligo
auaugccaugagaggccagg

SEQ ID NO: 18936 - RNA, 20 nt, Artificial Sequence
  Antisense oligo
acagagugucggcuuuaucc

SEQ ID NO: 18937 - RNA, 20 nt, Artificial Sequence
  Antisense oligo
aacagagugucggcuuuauc

SEQ ID NO: 18938 - RNA, 20 nt, Artificial Sequence
  Antisense oligo
caacagagugucggcuuuau

SEQ ID NO: 18939 - RNA, 20 nt, Artificial Sequence
  Antisense oligo
acaacagagugucggcuuua

SEQ ID NO: 18940 - RNA, 20 nt, Artificial Sequence
  Antisense oligo
cucccauaccagacaacaga

SEQ ID NO: 18941 - RNA, 20 nt, Artificial Sequence
  Antisense oligo
ccucccauaccagacaacag

SEQ ID NO: 18942 - RNA, 20 nt, Artificial Sequence
  Antisense oligo
gccucccauaccagacaaca

SEQ ID NO: 18943 - RNA, 20 nt, Artificial Sequence
  Antisense oligo
ggccucccauaccagacaac

SEQ ID NO: 18944 - RNA, 20 nt, Artificial Sequence
  Antisense oligo
gggccucccauaccagacaa

SEQ ID NO: 18945 - RNA, 20 nt, Artificial Sequence
  Antisense oligo
agggccucccauaccagaca

SEQ ID NO: 18946 - RNA, 20 nt, Artificial Sequence
  Antisense oligo
acagggccucccauaccaga

SEQ ID NO: 18947 - RNA, 20 nt, Artificial Sequence
  Antisense oligo
uacagggccucccauaccag

SEQ ID NO: 18948 - RNA, 20 nt, Artificial Sequence
  Antisense oligo
agcuacagggccucccauac

SEQ ID NO: 18949 - RNA, 20 nt, Artificial Sequence
  Antisense oligo
gagcuacagggccucccaua

SEQ ID NO: 18950 - RNA, 20 nt, Artificial Sequence
  Antisense oligo
augggcuaaguggcuggagg

SEQ ID NO: 18951 - RNA, 20 nt, Artificial Sequence
  Antisense oligo
aaaugggcuaaguggcugga

SEQ ID NO: 18952 - RNA, 20 nt, Artificial Sequence
  Antisense oligo
gaaaugggcuaaguggcugg

SEQ ID NO: 18953 - RNA, 20 nt, Artificial Sequence
  Antisense oligo
ggaaaugggcuaaguggcug

SEQ ID NO: 18954 - RNA, 20 nt, Artificial Sequence
  Antisense oligo
gggaaaugggcuaaguggcu

SEQ ID NO: 18955 - RNA, 20 nt, Artificial Sequence
  Antisense oligo
cagggaaaugggcuaagugg

SEQ ID NO: 18956 - RNA, 20 nt, Artificial Sequence
  Antisense oligo
uucagggaaaugggcuaagu

SEQ ID NO: 18957 - RNA, 20 nt, Artificial Sequence
  Antisense oligo
caguucagggaaaugggcua

SEQ ID NO: 18958 - RNA, 20 nt, Artificial Sequence
  Antisense oligo
gaugcaguucagggaaaugg

SEQ ID NO: 18959 - RNA, 20 nt, Artificial Sequence
  Antisense oligo
ggaugcaguucagggaaaug

SEQ ID NO: 18960 - RNA, 20 nt, Artificial Sequence
  Antisense oligo
acgggaugcaguucagggaa

SEQ ID NO: 18961 - RNA, 20 nt, Artificial Sequence
  Antisense oligo
cacgggaugcaguucaggga

SEQ ID NO: 18962 - RNA, 20 nt, Artificial Sequence
  Antisense oligo
ucacgggaugcaguucaggg

SEQ ID NO: 18963 - RNA, 20 nt, Artificial Sequence
  Antisense oligo
gucacgggaugcaguucagg

SEQ ID NO: 18964 - RNA, 20 nt, Artificial Sequence
  Antisense oligo
ggucacgggaugcaguucag

SEQ ID NO: 18965 - RNA, 20 nt, Artificial Sequence
  Antisense oligo
aggucacgggaugcaguuca

SEQ ID NO: 18966 - RNA, 20 nt, Artificial Sequence
  Antisense oligo
gaggucacgggaugcaguuc

SEQ ID NO: 18967 - RNA, 20 nt, Artificial Sequence
  Antisense oligo
ugaggucacgggaugcaguu

SEQ ID NO: 18968 - RNA, 20 nt, Artificial Sequence
  Antisense oligo
augaggucacgggaugcagu

SEQ ID NO: 18969 - RNA, 20 nt, Artificial Sequence
  Antisense oligo
caugaggucacgggaugcag

SEQ ID NO: 18970 - RNA, 20 nt, Artificial Sequence
  Antisense oligo
gugcaugaggucacgggaug

SEQ ID NO: 18971 - RNA, 20 nt, Artificial Sequence
  Antisense oligo
agugcaugaggucacgggau

SEQ ID NO: 18972 - RNA, 20 nt, Artificial Sequence
  Antisense oligo
cagugcaugaggucacggga

SEQ ID NO: 18973 - RNA, 20 nt, Artificial Sequence
  Antisense oligo
ugggaaagugccugcugugu

SEQ ID NO: 18974 - RNA, 20 nt, Artificial Sequence
  Antisense oligo
gaugggaaagugccugcugu

SEQ ID NO: 18975 - RNA, 20 nt, Artificial Sequence
  Antisense oligo
agaugggaaagugccugcug

SEQ ID NO: 18976 - RNA, 20 nt, Artificial Sequence
  Antisense oligo
gagaugggaaagugccugcu

SEQ ID NO: 18977 - RNA, 20 nt, Artificial Sequence
  Antisense oligo
cguccagucaaagaacagag

SEQ ID NO: 18978 - RNA, 20 nt, Artificial Sequence
  Antisense oligo
gcguccagucaaagaacaga

SEQ ID NO: 18979 - RNA, 20 nt, Artificial Sequence
  Antisense oligo
ugcguccagucaaagaacag

SEQ ID NO: 18980 - RNA, 20 nt, Artificial Sequence
  Antisense oligo
gugcguccagucaaagaaca

SEQ ID NO: 18981 - RNA, 20 nt, Artificial Sequence
  Antisense oligo
agugcguccagucaaagaac

SEQ ID NO: 18982 - RNA, 20 nt, Artificial Sequence
  Antisense oligo
aagugcguccagucaaagaa

SEQ ID NO: 18983 - RNA, 20 nt, Artificial Sequence
  Antisense oligo
caagugcguccagucaaaga

SEQ ID NO: 18984 - RNA, 20 nt, Artificial Sequence
  Antisense oligo
acaagugcguccagucaaag

SEQ ID NO: 18985 - RNA, 20 nt, Artificial Sequence
  Antisense oligo
aacaagugcguccagucaaa

SEQ ID NO: 18986 - RNA, 20 nt, Artificial Sequence
  Antisense oligo
gaacaagugcguccagucaa

SEQ ID NO: 18987 - RNA, 20 nt, Artificial Sequence
  Antisense oligo
ggaacaagugcguccaguca

SEQ ID NO: 18988 - RNA, 20 nt, Artificial Sequence
  Antisense oligo
aggaacaagugcguccaguc

SEQ ID NO: 18989 - RNA, 20 nt, Artificial Sequence
  Antisense oligo
aaggaacaagugcguccagu

SEQ ID NO: 18990 - RNA, 20 nt, Artificial Sequence
  Antisense oligo
gaaggaacaagugcguccag

SEQ ID NO: 18991 - RNA, 20 nt, Artificial Sequence
  Antisense oligo
ggaaggaacaagugcgucca

SEQ ID NO: 18992 - RNA, 20 nt, Artificial Sequence
  Antisense oligo
uggaaggaacaagugcgucc

SEQ ID NO: 18993 - RNA, 20 nt, Artificial Sequence
  Antisense oligo
cuggaaggaacaagugcguc

SEQ ID NO: 18994 - RNA, 20 nt, Artificial Sequence
  Antisense oligo
agcuggaaggaacaagugcg

SEQ ID NO: 18995 - RNA, 20 nt, Artificial Sequence
  Antisense oligo
ugacagagcgagacuccguc

SEQ ID NO: 18996 - RNA, 20 nt, Artificial Sequence
  Antisense oligo
gugacagagcgagacuccgu

SEQ ID NO: 18997 - RNA, 20 nt, Artificial Sequence
  Antisense oligo
ugggugacagagcgagacuc

SEQ ID NO: 18998 - RNA, 20 nt, Artificial Sequence
  Antisense oligo
cugggugacagagcgagacu

SEQ ID NO: 18999 - RNA, 20 nt, Artificial Sequence
  Antisense oligo
auccagccugggugacagag

SEQ ID NO: 19000 - RNA, 20 nt, Artificial Sequence
  Antisense oligo
aauccagccugggugacaga

SEQ ID NO: 19001 - RNA, 20 nt, Artificial Sequence
  Antisense oligo
caauccagccugggugacag

SEQ ID NO: 19002 - RNA, 20 nt, Artificial Sequence
  Antisense oligo
gcaauccagccugggugaca

SEQ ID NO: 19003 - RNA, 20 nt, Artificial Sequence
  Antisense oligo
ugcaauccagccugggugac

SEQ ID NO: 19004 - RNA, 20 nt, Artificial Sequence
  Antisense oligo
gcugagauugcgccacugca

SEQ ID NO: 19005 - RNA, 20 nt, Artificial Sequence
  Antisense oligo
agcugagauugcgccacugc

SEQ ID NO: 19006 - RNA, 20 nt, Artificial Sequence
  Antisense oligo
aagcugagauugcgccacug

SEQ ID NO: 19007 - RNA, 20 nt, Artificial Sequence
  Antisense oligo
gaauggcaugagugaacccg

SEQ ID NO: 19008 - RNA, 20 nt, Artificial Sequence
  Antisense oligo
agaauggcaugagugaaccc

SEQ ID NO: 19009 - RNA, 20 nt, Artificial Sequence
  Antisense oligo
ggagaauggcaugagugaac

SEQ ID NO: 19010 - RNA, 20 nt, Artificial Sequence
  Antisense oligo
aggagaauggcaugagugaa

SEQ ID NO: 19011 - RNA, 20 nt, Artificial Sequence
  Antisense oligo
caggagaauggcaugaguga

SEQ ID NO: 19012 - RNA, 20 nt, Artificial Sequence
  Antisense oligo
gcaggagaauggcaugagug

SEQ ID NO: 19013 - RNA, 20 nt, Artificial Sequence
  Antisense oligo
ggcaggagaauggcaugagu

SEQ ID NO: 19014 - RNA, 20 nt, Artificial Sequence
  Antisense oligo
cggcaggagaauggcaugag

SEQ ID NO: 19015 - RNA, 20 nt, Artificial Sequence
  Antisense oligo
gcggcaggagaauggcauga

SEQ ID NO: 19016 - RNA, 20 nt, Artificial Sequence
  Antisense oligo
ugcggcaggagaauggcaug

SEQ ID NO: 19017 - RNA, 20 nt, Artificial Sequence
  Antisense oligo
cugcggcaggagaauggcau

SEQ ID NO: 19018 - RNA, 20 nt, Artificial Sequence
  Antisense oligo
uggcuaacauggugaaaccc

SEQ ID NO: 19019 - RNA, 20 nt, Artificial Sequence
  Antisense oligo
cuggcuaacauggugaaacc

SEQ ID NO: 19020 - RNA, 20 nt, Artificial Sequence
  Antisense oligo
ccuggcuaacauggugaaac

SEQ ID NO: 19021 - RNA, 20 nt, Artificial Sequence
  Antisense oligo
uccuggcuaacauggugaaa

SEQ ID NO: 19022 - RNA, 20 nt, Artificial Sequence
  Antisense oligo
auccuggcuaacauggugaa

SEQ ID NO: 19023 - RNA, 20 nt, Artificial Sequence
  Antisense oligo
cauccuggcuaacaugguga

SEQ ID NO: 19024 - RNA, 20 nt, Artificial Sequence
  Antisense oligo
agaccauccuggcuaacaug

SEQ ID NO: 19025 - RNA, 20 nt, Artificial Sequence
  Antisense oligo
gagaccauccuggcuaacau

SEQ ID NO: 19026 - RNA, 20 nt, Artificial Sequence
  Antisense oligo
cgagaccauccuggcuaaca

SEQ ID NO: 19027 - RNA, 20 nt, Artificial Sequence
  Antisense oligo
ucgagaccauccuggcuaac

SEQ ID NO: 19028 - RNA, 20 nt, Artificial Sequence
  Antisense oligo
aucgagaccauccuggcuaa

SEQ ID NO: 19029 - RNA, 20 nt, Artificial Sequence
  Antisense oligo
gaucgagaccauccuggcua

SEQ ID NO: 19030 - RNA, 20 nt, Artificial Sequence
  Antisense oligo
agaucgagaccauccuggcu

SEQ ID NO: 19031 - RNA, 20 nt, Artificial Sequence
  Antisense oligo
gagaucgagaccauccuggc

SEQ ID NO: 19032 - RNA, 20 nt, Artificial Sequence
  Antisense oligo
agagaucgagaccauccugg

SEQ ID NO: 19033 - RNA, 20 nt, Artificial Sequence
  Antisense oligo
aagagaucgagaccauccug

SEQ ID NO: 19034 - RNA, 20 nt, Artificial Sequence
  Antisense oligo
caagagaucgagaccauccu

SEQ ID NO: 19035 - RNA, 20 nt, Artificial Sequence
  Antisense oligo
ucaagagaucgagaccaucc

SEQ ID NO: 19036 - RNA, 20 nt, Artificial Sequence
  Antisense oligo
gucaagagaucgagaccauc

SEQ ID NO: 19037 - RNA, 20 nt, Artificial Sequence
  Antisense oligo
acgggcagaucacgaaguca

SEQ ID NO: 19038 - RNA, 20 nt, Artificial Sequence
  Antisense oligo
gacgggcagaucacgaaguc

SEQ ID NO: 19039 - RNA, 20 nt, Artificial Sequence
  Antisense oligo
agacgggcagaucacgaagu

SEQ ID NO: 19040 - RNA, 20 nt, Artificial Sequence
  Antisense oligo
gagacgggcagaucacgaag

SEQ ID NO: 19041 - RNA, 20 nt, Artificial Sequence
  Antisense oligo
agagacgggcagaucacgaa

SEQ ID NO: 19042 - RNA, 20 nt, Artificial Sequence
  Antisense oligo
accaugcacaggcagucacu

SEQ ID NO: 19043 - RNA, 20 nt, Artificial Sequence
  Antisense oligo
gaccaugcacaggcagucac

SEQ ID NO: 19044 - RNA, 20 nt, Artificial Sequence
  Antisense oligo
acagaccaugcacaggcagu

SEQ ID NO: 19045 - RNA, 20 nt, Artificial Sequence
  Antisense oligo
ccacuaaaggcacagaccau

SEQ ID NO: 19046 - RNA, 20 nt, Artificial Sequence
  Antisense oligo
gccacuaaaggcacagacca

SEQ ID NO: 19047 - RNA, 20 nt, Artificial Sequence
  Antisense oligo
agccacuaaaggcacagacc

SEQ ID NO: 19048 - RNA, 20 nt, Artificial Sequence
  Antisense oligo
uucagccacuaaaggcacag

SEQ ID NO: 19049 - RNA, 20 nt, Artificial Sequence
  Antisense oligo
auucagccacuaaaggcaca

SEQ ID NO: 19050 - RNA, 20 nt, Artificial Sequence
  Antisense oligo
cauucagccacuaaaggcac

SEQ ID NO: 19051 - RNA, 20 nt, Artificial Sequence
  Antisense oligo
uucauucagccacuaaaggc

SEQ ID NO: 19052 - RNA, 20 nt, Artificial Sequence
  Antisense oligo
gguauuugugcauaucccau

SEQ ID NO: 19053 - RNA, 20 nt, Artificial Sequence
  Antisense oligo
cagguauuugugcauauccc

SEQ ID NO: 19054 - RNA, 20 nt, Artificial Sequence
  Antisense oligo
gcaacagguauuugugcaua

SEQ ID NO: 19055 - RNA, 20 nt, Artificial Sequence
  Antisense oligo
agggcaacagguauuugugc

SEQ ID NO: 19056 - RNA, 20 nt, Artificial Sequence
  Antisense oligo
gcuagggcaacagguauuug

SEQ ID NO: 19057 - RNA, 20 nt, Artificial Sequence
  Antisense oligo
gcgcuagggcaacagguauu

SEQ ID NO: 19058 - RNA, 20 nt, Artificial Sequence
  Antisense oligo
aggcgcuagggcaacaggua

SEQ ID NO: 19059 - RNA, 20 nt, Artificial Sequence
  Antisense oligo
aucaucguggccugcuucgc

SEQ ID NO: 19060 - RNA, 20 nt, Artificial Sequence
  Antisense oligo
acaucaucguggccugcuuc

SEQ ID NO: 19061 - RNA, 20 nt, Artificial Sequence
  Antisense oligo
cacaucaucguggccugcuu

SEQ ID NO: 19062 - RNA, 20 nt, Artificial Sequence
  Antisense oligo
ucacaucaucguggccugcu

SEQ ID NO: 19063 - RNA, 20 nt, Artificial Sequence
  Antisense oligo
gucacaucaucguggccugc

SEQ ID NO: 19064 - RNA, 20 nt, Artificial Sequence
  Antisense oligo
ugucacaucaucguggccug

SEQ ID NO: 19065 - RNA, 20 nt, Artificial Sequence
  Antisense oligo
uugucacaucaucguggccu

SEQ ID NO: 19066 - RNA, 20 nt, Artificial Sequence
  Antisense oligo
auugucacaucaucguggcc

SEQ ID NO: 19067 - RNA, 20 nt, Artificial Sequence
  Antisense oligo
uauugucacaucaucguggc

SEQ ID NO: 19068 - RNA, 20 nt, Artificial Sequence
  Antisense oligo
auauugucacaucaucgugg

SEQ ID NO: 19069 - RNA, 20 nt, Artificial Sequence
  Antisense oligo
gauauugucacaucaucgug

SEQ ID NO: 19070 - RNA, 20 nt, Artificial Sequence
  Antisense oligo
cagccaauuacaugacaaga

SEQ ID NO: 19071 - RNA, 20 nt, Artificial Sequence
  Antisense oligo
acagccaauuacaugacaag

SEQ ID NO: 19072 - RNA, 20 nt, Artificial Sequence
  Antisense oligo
cacagccaauuacaugacaa

SEQ ID NO: 19073 - RNA, 20 nt, Artificial Sequence
  Antisense oligo
ucacagccaauuacaugaca

SEQ ID NO: 19074 - RNA, 20 nt, Artificial Sequence
  Antisense oligo
cucacagccaauuacaugac

SEQ ID NO: 19075 - RNA, 20 nt, Artificial Sequence
  Antisense oligo
ccucacagccaauuacauga

SEQ ID NO: 19076 - RNA, 20 nt, Artificial Sequence
  Antisense oligo
uccucacagccaauuacaug

SEQ ID NO: 19077 - RNA, 20 nt, Artificial Sequence
  Antisense oligo
guccucacagccaauuacau

SEQ ID NO: 19078 - RNA, 20 nt, Artificial Sequence
  Antisense oligo
aguccucacagccaauuaca

SEQ ID NO: 19079 - RNA, 20 nt, Artificial Sequence
  Antisense oligo
acccaccaucuauggaaaua

SEQ ID NO: 19080 - RNA, 20 nt, Artificial Sequence
  Antisense oligo
aacccaccaucuauggaaau

SEQ ID NO: 19081 - RNA, 20 nt, Artificial Sequence
  Antisense oligo
uaacccaccaucuauggaaa

SEQ ID NO: 19082 - RNA, 20 nt, Artificial Sequence
  Antisense oligo
uuaacccaccaucuauggaa

SEQ ID NO: 19083 - RNA, 20 nt, Artificial Sequence
  Antisense oligo
auuaacccaccaucuaugga

SEQ ID NO: 19084 - RNA, 20 nt, Artificial Sequence
  Antisense oligo
cauuaacccaccaucuaugg

SEQ ID NO: 19085 - RNA, 20 nt, Artificial Sequence
  Antisense oligo
gucauuaacccaccaucuau

SEQ ID NO: 19086 - RNA, 20 nt, Artificial Sequence
  Antisense oligo
uaucccuuggcuaagagcgc

SEQ ID NO: 19087 - RNA, 20 nt, Artificial Sequence
  Antisense oligo
guaucccuuggcuaagagcg

SEQ ID NO: 19088 - RNA, 20 nt, Artificial Sequence
  Antisense oligo
uguaucccuuggcuaagagc

SEQ ID NO: 19089 - RNA, 20 nt, Artificial Sequence
  Antisense oligo
gaugacaaacagaaucugca

SEQ ID NO: 19090 - RNA, 20 nt, Artificial Sequence
  Antisense oligo
agcagaugacaaacagaauc

SEQ ID NO: 19091 - RNA, 20 nt, Artificial Sequence
  Antisense oligo
cagcagaugacaaacagaau

SEQ ID NO: 19092 - RNA, 20 nt, Artificial Sequence
  Antisense oligo
ccagcagaugacaaacagaa

SEQ ID NO: 19093 - RNA, 20 nt, Artificial Sequence
  Antisense oligo
uccagcagaugacaaacaga

SEQ ID NO: 19094 - RNA, 20 nt, Artificial Sequence
  Antisense oligo
uuccagcagaugacaaacag

SEQ ID NO: 19095 - RNA, 20 nt, Artificial Sequence
  Antisense oligo
gacauuuccagcagaugaca

SEQ ID NO: 19096 - RNA, 20 nt, Artificial Sequence
  Antisense oligo
ggacauuuccagcagaugac

SEQ ID NO: 19097 - RNA, 20 nt, Artificial Sequence
  Antisense oligo
uggguauucccuaaauuggg

SEQ ID NO: 19098 - RNA, 20 nt, Artificial Sequence
  Antisense oligo
guggguauucccuaaauugg

SEQ ID NO: 19099 - RNA, 20 nt, Artificial Sequence
  Antisense oligo
aguggguauucccuaaauug

SEQ ID NO: 19100 - RNA, 20 nt, Artificial Sequence
  Antisense oligo
gaguggguauucccuaaauu

SEQ ID NO: 19101 - RNA, 20 nt, Artificial Sequence
  Antisense oligo
agaguggguauucccuaaau

SEQ ID NO: 19102 - RNA, 20 nt, Artificial Sequence
  Antisense oligo
cagaguggguauucccuaaa

SEQ ID NO: 19103 - RNA, 20 nt, Artificial Sequence
  Antisense oligo
ccagaguggguauucccuaa

SEQ ID NO: 19104 - RNA, 20 nt, Artificial Sequence
  Antisense oligo
accagaguggguauucccua

SEQ ID NO: 19105 - RNA, 20 nt, Artificial Sequence
  Antisense oligo
caccagaguggguauucccu

SEQ ID NO: 19106 - RNA, 20 nt, Artificial Sequence
  Antisense oligo
acaccagaguggguauuccc

SEQ ID NO: 19107 - RNA, 20 nt, Artificial Sequence
  Antisense oligo
uacaccagaguggguauucc

SEQ ID NO: 19108 - RNA, 20 nt, Artificial Sequence
  Antisense oligo
guacaccagaguggguauuc

SEQ ID NO: 19109 - RNA, 20 nt, Artificial Sequence
  Antisense oligo
aguuccagucgugucuguac

SEQ ID NO: 19110 - RNA, 20 nt, Artificial Sequence
  Antisense oligo
uaguuccagucgugucugua

SEQ ID NO: 19111 - RNA, 20 nt, Artificial Sequence
  Antisense oligo
auaguuccagucgugucugu

SEQ ID NO: 19112 - RNA, 20 nt, Artificial Sequence
  Antisense oligo
cauaguuccagucgugucug

SEQ ID NO: 19113 - RNA, 20 nt, Artificial Sequence
  Antisense oligo
ucauaguuccagucgugucu

SEQ ID NO: 19114 - RNA, 20 nt, Artificial Sequence
  Antisense oligo
uucauaguuccagucguguc

SEQ ID NO: 19115 - RNA, 20 nt, Artificial Sequence
  Antisense oligo
guucauaguuccagucgugu

SEQ ID NO: 19116 - RNA, 20 nt, Artificial Sequence
  Antisense oligo
uguucauaguuccagucgug

SEQ ID NO: 19117 - RNA, 20 nt, Artificial Sequence
  Antisense oligo
gauguucauaguuccagucg

SEQ ID NO: 19118 - RNA, 20 nt, Artificial Sequence
  Antisense oligo
agauguucauaguuccaguc

SEQ ID NO: 19119 - RNA, 20 nt, Artificial Sequence
  Antisense oligo
agagauguucauaguuccag

SEQ ID NO: 19120 - RNA, 20 nt, Artificial Sequence
  Antisense oligo
ccugugccauuuuguucuug

SEQ ID NO: 19121 - RNA, 20 nt, Artificial Sequence
  Antisense oligo
gaucaccugugccauuuugu

SEQ ID NO: 19122 - RNA, 20 nt, Artificial Sequence
  Antisense oligo
ucgggaucaccugugccauu

SEQ ID NO: 19123 - RNA, 20 nt, Artificial Sequence
  Antisense oligo
aucgggaucaccugugccau

SEQ ID NO: 19124 - RNA, 20 nt, Artificial Sequence
  Antisense oligo
uaucgggaucaccugugcca

SEQ ID NO: 19125 - RNA, 20 nt, Artificial Sequence
  Antisense oligo
uuaucgggaucaccugugcc

SEQ ID NO: 19126 - RNA, 20 nt, Artificial Sequence
  Antisense oligo
uuuaucgggaucaccugugc

SEQ ID NO: 19127 - RNA, 20 nt, Artificial Sequence
  Antisense oligo
guuuaucgggaucaccugug

SEQ ID NO: 19128 - RNA, 20 nt, Artificial Sequence
  Antisense oligo
gguuuaucgggaucaccugu

SEQ ID NO: 19129 - RNA, 20 nt, Artificial Sequence
  Antisense oligo
ucagguuuaucgggaucacc

SEQ ID NO: 19130 - RNA, 20 nt, Artificial Sequence
  Antisense oligo
aucagguuuaucgggaucac

SEQ ID NO: 19131 - RNA, 20 nt, Artificial Sequence
  Antisense oligo
cacaggaucagguuuaucgg

SEQ ID NO: 19132 - RNA, 20 nt, Artificial Sequence
  Antisense oligo
ugcacaggaucagguuuauc

SEQ ID NO: 19133 - RNA, 20 nt, Artificial Sequence
  Antisense oligo
gaaacacacugagaaggcag

SEQ ID NO: 19134 - RNA, 20 nt, Artificial Sequence
  Antisense oligo
gggaaacacacugagaaggc

SEQ ID NO: 19135 - RNA, 20 nt, Artificial Sequence
  Antisense oligo
acggagggaaacacacugag

SEQ ID NO: 19136 - RNA, 20 nt, Artificial Sequence
  Antisense oligo
cacggagggaaacacacuga

SEQ ID NO: 19137 - RNA, 20 nt, Artificial Sequence
  Antisense oligo
acacggagggaaacacacug

SEQ ID NO: 19138 - RNA, 20 nt, Artificial Sequence
  Antisense oligo
aacacggagggaaacacacu

SEQ ID NO: 19139 - RNA, 20 nt, Artificial Sequence
  Antisense oligo
uaacacggagggaaacacac

SEQ ID NO: 19140 - RNA, 20 nt, Artificial Sequence
  Antisense oligo
cuaacacggagggaaacaca

SEQ ID NO: 19141 - RNA, 20 nt, Artificial Sequence
  Antisense oligo
ccuaacacggagggaaacac

SEQ ID NO: 19142 - RNA, 20 nt, Artificial Sequence
  Antisense oligo
gccuaacacggagggaaaca

SEQ ID NO: 19143 - RNA, 20 nt, Artificial Sequence
  Antisense oligo
ggccuaacacggagggaaac

SEQ ID NO: 19144 - RNA, 20 nt, Artificial Sequence
  Antisense oligo
ugggcucacagcaaacaccc

SEQ ID NO: 19145 - RNA, 20 nt, Artificial Sequence
  Antisense oligo
gugggcucacagcaaacacc

SEQ ID NO: 19146 - RNA, 20 nt, Artificial Sequence
  Antisense oligo
ugcucucuguaagggaggcc

SEQ ID NO: 19147 - RNA, 20 nt, Artificial Sequence
  Antisense oligo
uugcucucuguaagggaggc

SEQ ID NO: 19148 - RNA, 20 nt, Artificial Sequence
  Antisense oligo
cuugcucucuguaagggagg

SEQ ID NO: 19149 - RNA, 20 nt, Artificial Sequence
  Antisense oligo
gcuugcucucuguaagggag

SEQ ID NO: 19150 - RNA, 20 nt, Artificial Sequence
  Antisense oligo
ugcuugcucucuguaaggga

SEQ ID NO: 19151 - RNA, 20 nt, Artificial Sequence
  Antisense oligo
uugcuugcucucuguaaggg

SEQ ID NO: 19152 - RNA, 20 nt, Artificial Sequence
  Antisense oligo
cuugcuugcucucuguaagg

SEQ ID NO: 19153 - RNA, 20 nt, Artificial Sequence
  Antisense oligo
ugucuugcuugcucucugua

SEQ ID NO: 19154 - RNA, 20 nt, Artificial Sequence
  Antisense oligo
uuugcugucuugcuugcucu

SEQ ID NO: 19155 - RNA, 20 nt, Artificial Sequence
  Antisense oligo
auuugcugucuugcuugcuc

SEQ ID NO: 19156 - RNA, 20 nt, Artificial Sequence
  Antisense oligo
ugauuugcugucuugcuugc

SEQ ID NO: 19157 - RNA, 20 nt, Artificial Sequence
  Antisense oligo
ugcugauuugcugucuugcu

SEQ ID NO: 19158 - RNA, 20 nt, Artificial Sequence
  Antisense oligo
caaacccacaagaugucaau

SEQ ID NO: 19159 - RNA, 20 nt, Artificial Sequence
  Antisense oligo
ucaaacccacaagaugucaa

SEQ ID NO: 19160 - RNA, 20 nt, Artificial Sequence
  Antisense oligo
uccuaagaaucaaacccaca

SEQ ID NO: 19161 - RNA, 20 nt, Artificial Sequence
  Antisense oligo
uuccuaagaaucaaacccac

SEQ ID NO: 19162 - RNA, 20 nt, Artificial Sequence
  Antisense oligo
gcaucaacaucauuccuaag

SEQ ID NO: 19163 - RNA, 20 nt, Artificial Sequence
  Antisense oligo
uucccgcuucagcaggcaug

SEQ ID NO: 19164 - RNA, 20 nt, Artificial Sequence
  Antisense oligo
cuucccgcuucagcaggcau

SEQ ID NO: 19165 - RNA, 20 nt, Artificial Sequence
  Antisense oligo
acuucccgcuucagcaggca

SEQ ID NO: 19166 - RNA, 20 nt, Artificial Sequence
  Antisense oligo
uggacuucccgcuucagcag

SEQ ID NO: 19167 - RNA, 20 nt, Artificial Sequence
  Antisense oligo
auggacuucccgcuucagca

SEQ ID NO: 19168 - RNA, 20 nt, Artificial Sequence
  Antisense oligo
cauggacuucccgcuucagc

SEQ ID NO: 19169 - RNA, 20 nt, Artificial Sequence
  Antisense oligo
agagcaggaacaaaucgguu

SEQ ID NO: 19170 - RNA, 20 nt, Artificial Sequence
  Antisense oligo
ggagagcaggaacaaaucgg

SEQ ID NO: 19171 - RNA, 20 nt, Artificial Sequence
  Antisense oligo
cggagagcaggaacaaaucg

SEQ ID NO: 19172 - RNA, 20 nt, Artificial Sequence
  Antisense oligo
gcggagagcaggaacaaauc

SEQ ID NO: 19173 - RNA, 20 nt, Artificial Sequence
  Antisense oligo
caggucuaccuaucaguacc

SEQ ID NO: 19174 - RNA, 20 nt, Artificial Sequence
  Antisense oligo
acaggucuaccuaucaguac

SEQ ID NO: 19175 - RNA, 20 nt, Artificial Sequence
  Antisense oligo
cacaggucuaccuaucagua

SEQ ID NO: 19176 - RNA, 20 nt, Artificial Sequence
  Antisense oligo
acacacaggucuaccuauca

SEQ ID NO: 19177 - RNA, 20 nt, Artificial Sequence
  Antisense oligo
gacacacaggucuaccuauc

SEQ ID NO: 19178 - RNA, 20 nt, Artificial Sequence
  Antisense oligo
acggugugcaggcaguuccu

SEQ ID NO: 19179 - RNA, 20 nt, Artificial Sequence
  Antisense oligo
gggccaacucucuaacagcu

SEQ ID NO: 19180 - RNA, 20 nt, Artificial Sequence
  Antisense oligo
accugguaagagagccgagc

SEQ ID NO: 19181 - RNA, 20 nt, Artificial Sequence
  Antisense oligo
caccugguaagagagccgag

SEQ ID NO: 19182 - RNA, 20 nt, Artificial Sequence
  Antisense oligo
ccaccugguaagagagccga

SEQ ID NO: 19183 - RNA, 20 nt, Artificial Sequence
  Antisense oligo
accaccugguaagagagccg

SEQ ID NO: 19184 - RNA, 20 nt, Artificial Sequence
  Antisense oligo
cucaccaccugguaagagag

SEQ ID NO: 19185 - RNA, 20 nt, Artificial Sequence
  Antisense oligo
ggaugucugugggcuggguu

SEQ ID NO: 19186 - RNA, 20 nt, Artificial Sequence
  Antisense oligo
aggagagggaugucuguggg

SEQ ID NO: 19187 - RNA, 20 nt, Artificial Sequence
  Antisense oligo
caggagagggaugucugugg

SEQ ID NO: 19188 - RNA, 20 nt, Artificial Sequence
  Antisense oligo
gcaggagagggaugucugug

SEQ ID NO: 19189 - RNA, 20 nt, Artificial Sequence
  Antisense oligo
ugaaaagcaggagagggaug

SEQ ID NO: 19190 - RNA, 20 nt, Artificial Sequence
  Antisense oligo
aaugaaaagcaggagaggga

SEQ ID NO: 19191 - RNA, 20 nt, Artificial Sequence
  Antisense oligo
gcacuaaugaccgagcuggg

SEQ ID NO: 19192 - RNA, 20 nt, Artificial Sequence
  Antisense oligo
ggcacuaaugaccgagcugg

SEQ ID NO: 19193 - RNA, 20 nt, Artificial Sequence
  Antisense oligo
uggcacuaaugaccgagcug

SEQ ID NO: 19194 - RNA, 20 nt, Artificial Sequence
  Antisense oligo
auggcacuaaugaccgagcu

SEQ ID NO: 19195 - RNA, 20 nt, Artificial Sequence
  Antisense oligo
gauggcacuaaugaccgagc

SEQ ID NO: 19196 - RNA, 20 nt, Artificial Sequence
  Antisense oligo
ugauggcacuaaugaccgag

SEQ ID NO: 19197 - RNA, 20 nt, Artificial Sequence
  Antisense oligo
cugauggcacuaaugaccga

SEQ ID NO: 19198 - RNA, 20 nt, Artificial Sequence
  Antisense oligo
acugauggcacuaaugaccg

SEQ ID NO: 19199 - RNA, 20 nt, Artificial Sequence
  Antisense oligo
cacugauggcacuaaugacc

SEQ ID NO: 19200 - RNA, 20 nt, Artificial Sequence
  Antisense oligo
ccacugauggcacuaaugac

SEQ ID NO: 19201 - RNA, 20 nt, Artificial Sequence
  Antisense oligo
uccacugauggcacuaauga

SEQ ID NO: 19202 - RNA, 20 nt, Artificial Sequence
  Antisense oligo
cuguccacugauggcacuaa

SEQ ID NO: 19203 - RNA, 20 nt, Artificial Sequence
  Antisense oligo
agcuguccacugauggcacu

SEQ ID NO: 19204 - RNA, 20 nt, Artificial Sequence
  Antisense oligo
ggcaucgcuguaggacugca

SEQ ID NO: 19205 - RNA, 20 nt, Artificial Sequence
  Antisense oligo
aggcaucgcuguaggacugc

SEQ ID NO: 19206 - RNA, 20 nt, Artificial Sequence
  Antisense oligo
caggcaucgcuguaggacug

SEQ ID NO: 19207 - RNA, 20 nt, Artificial Sequence
  Antisense oligo
acagacagcacuucacaggc

SEQ ID NO: 19208 - RNA, 20 nt, Artificial Sequence
  Antisense oligo
ugcaggaugucuugaguaua

SEQ ID NO: 19209 - RNA, 20 nt, Artificial Sequence
  Antisense oligo
uugcaggaugucuugaguau

SEQ ID NO: 19210 - RNA, 20 nt, Artificial Sequence
  Antisense oligo
uuugcaggaugucuugagua

SEQ ID NO: 19211 - RNA, 20 nt, Artificial Sequence
  Antisense oligo
auuugcaggaugucuugagu

SEQ ID NO: 19212 - RNA, 20 nt, Artificial Sequence
  Antisense oligo
cauuugcaggaugucuugag

SEQ ID NO: 19213 - RNA, 20 nt, Artificial Sequence
  Antisense oligo
ccauuugcaggaugucuuga

SEQ ID NO: 19214 - RNA, 20 nt, Artificial Sequence
  Antisense oligo
acccauuugcaggaugucuu

SEQ ID NO: 19215 - RNA, 20 nt, Artificial Sequence
  Antisense oligo
cacccauuugcaggaugucu

SEQ ID NO: 19216 - RNA, 20 nt, Artificial Sequence
  Antisense oligo
ucacccauuugcaggauguc

SEQ ID NO: 19217 - RNA, 20 nt, Artificial Sequence
  Antisense oligo
aucacccauuugcaggaugu

SEQ ID NO: 19218 - RNA, 20 nt, Artificial Sequence
  Antisense oligo
gaucacccauuugcaggaug

SEQ ID NO: 19219 - RNA, 20 nt, Artificial Sequence
  Antisense oligo
gagacccaccuuuaacacgu

SEQ ID NO: 19220 - RNA, 20 nt, Artificial Sequence
  Antisense oligo
ugagacccaccuuuaacacg

SEQ ID NO: 19221 - RNA, 20 nt, Artificial Sequence
  Antisense oligo
gugagacccaccuuuaacac

SEQ ID NO: 19222 - RNA, 20 nt, Artificial Sequence
  Antisense oligo
ugugagacccaccuuuaaca

SEQ ID NO: 19223 - RNA, 20 nt, Artificial Sequence
  Antisense oligo
cuuuucggugugagacccac

SEQ ID NO: 19224 - RNA, 20 nt, Artificial Sequence
  Antisense oligo
ccuuuucggugugagaccca

SEQ ID NO: 19225 - RNA, 20 nt, Artificial Sequence
  Antisense oligo
uccuuuucggugugagaccc

SEQ ID NO: 19226 - RNA, 20 nt, Artificial Sequence
  Antisense oligo
uuccuuuucggugugagacc

SEQ ID NO: 19227 - RNA, 20 nt, Artificial Sequence
  Antisense oligo
uuuccuuuucggugugagac

SEQ ID NO: 19228 - RNA, 20 nt, Artificial Sequence
  Antisense oligo
auuuccuuuucggugugaga

SEQ ID NO: 19229 - RNA, 20 nt, Artificial Sequence
  Antisense oligo
gauuuccuuuucggugugag

SEQ ID NO: 19230 - RNA, 20 nt, Artificial Sequence
  Antisense oligo
ugauuuccuuuucgguguga

SEQ ID NO: 19231 - RNA, 20 nt, Artificial Sequence
  Antisense oligo
cugauuuccuuuucggugug

SEQ ID NO: 19232 - RNA, 20 nt, Artificial Sequence
  Antisense oligo
gcugauuuccuuuucggugu

SEQ ID NO: 19233 - RNA, 20 nt, Artificial Sequence
  Antisense oligo
ugcugauuuccuuuucggug

SEQ ID NO: 19234 - RNA, 20 nt, Artificial Sequence
  Antisense oligo
uucaggagcgccuagagugg

SEQ ID NO: 19235 - RNA, 20 nt, Artificial Sequence
  Antisense oligo
uuucaggagcgccuagagug

SEQ ID NO: 19236 - RNA, 20 nt, Artificial Sequence
  Antisense oligo
uuuucaggagcgccuagagu

SEQ ID NO: 19237 - RNA, 20 nt, Artificial Sequence
  Antisense oligo
cuuuucaggagcgccuagag

SEQ ID NO: 19238 - RNA, 20 nt, Artificial Sequence
  Antisense oligo
ccuuuucaggagcgccuaga

SEQ ID NO: 19239 - RNA, 20 nt, Artificial Sequence
  Antisense oligo
agcaguuguucuugucuccc

SEQ ID NO: 19240 - RNA, 20 nt, Artificial Sequence
  Antisense oligo
gagcaguuguucuugucucc

SEQ ID NO: 19241 - RNA, 20 nt, Artificial Sequence
  Antisense oligo
ugagcaguuguucuugucuc

SEQ ID NO: 19242 - RNA, 20 nt, Artificial Sequence
  Antisense oligo
gugagcaguuguucuugucu

SEQ ID NO: 19243 - RNA, 20 nt, Artificial Sequence
  Antisense oligo
ggugagcaguuguucuuguc

SEQ ID NO: 19244 - RNA, 20 nt, Artificial Sequence
  Antisense oligo
gggugagcaguuguucuugu

SEQ ID NO: 19245 - RNA, 20 nt, Artificial Sequence
  Antisense oligo
uggacugacugggugagcag

SEQ ID NO: 19246 - RNA, 20 nt, Artificial Sequence
  Antisense oligo
cuggacugacugggugagca

SEQ ID NO: 19247 - RNA, 20 nt, Artificial Sequence
  Antisense oligo
ugcuggacugacugggugag

SEQ ID NO: 19248 - RNA, 20 nt, Artificial Sequence
  Antisense oligo
augcuggacugacuggguga

SEQ ID NO: 19249 - RNA, 20 nt, Artificial Sequence
  Antisense oligo
ccuguuuaugcuggacugac

SEQ ID NO: 19250 - RNA, 20 nt, Artificial Sequence
  Antisense oligo
uccuguuuaugcuggacuga

SEQ ID NO: 19251 - RNA, 20 nt, Artificial Sequence
  Antisense oligo
guguguccuguuuaugcugg

SEQ ID NO: 19252 - RNA, 20 nt, Artificial Sequence
  Antisense oligo
ccugguguguccuguuuaug

SEQ ID NO: 19253 - RNA, 20 nt, Artificial Sequence
  Antisense oligo
ucccugguguguccuguuua

SEQ ID NO: 19254 - RNA, 20 nt, Artificial Sequence
  Antisense oligo
gucccugguguguccuguuu

SEQ ID NO: 19255 - RNA, 20 nt, Artificial Sequence
  Antisense oligo
ugucccugguguguccuguu

SEQ ID NO: 19256 - RNA, 20 nt, Artificial Sequence
  Antisense oligo
ugucucuacugucccuggug

SEQ ID NO: 19257 - RNA, 20 nt, Artificial Sequence
  Antisense oligo
cugucucuacugucccuggu

SEQ ID NO: 19258 - RNA, 20 nt, Artificial Sequence
  Antisense oligo
acugcuggcauuucuagcgc

SEQ ID NO: 19259 - RNA, 20 nt, Artificial Sequence
  Antisense oligo
agacugcuggcauuucuagc

SEQ ID NO: 19260 - RNA, 20 nt, Artificial Sequence
  Antisense oligo
cacauuugggcucuaucuag

SEQ ID NO: 19261 - RNA, 20 nt, Artificial Sequence
  Antisense oligo
ucacauuugggcucuaucua

SEQ ID NO: 19262 - RNA, 20 nt, Artificial Sequence
  Antisense oligo
gucacauuugggcucuaucu

SEQ ID NO: 19263 - RNA, 20 nt, Artificial Sequence
  Antisense oligo
agucacauuugggcucuauc

SEQ ID NO: 19264 - RNA, 20 nt, Artificial Sequence
  Antisense oligo
uacucagucacauuugggcu

SEQ ID NO: 19265 - RNA, 20 nt, Artificial Sequence
  Antisense oligo
gccucauguacucagucaca

SEQ ID NO: 19266 - RNA, 20 nt, Artificial Sequence
  Antisense oligo
ggccucauguacucagucac

SEQ ID NO: 19267 - RNA, 20 nt, Artificial Sequence
  Antisense oligo
acaucacgcuguuugcaggg

SEQ ID NO: 19268 - RNA, 20 nt, Artificial Sequence
  Antisense oligo
cacaucacgcuguuugcagg

SEQ ID NO: 19269 - RNA, 20 nt, Artificial Sequence
  Antisense oligo
ucacaucacgcuguuugcag

SEQ ID NO: 19270 - RNA, 20 nt, Artificial Sequence
  Antisense oligo
cucacaucacgcuguuugca

SEQ ID NO: 19271 - RNA, 20 nt, Artificial Sequence
  Antisense oligo
gcucacaucacgcuguuugc

SEQ ID NO: 19272 - RNA, 20 nt, Artificial Sequence
  Antisense oligo
cgcucacaucacgcuguuug

SEQ ID NO: 19273 - RNA, 20 nt, Artificial Sequence
  Antisense oligo
ccgcucacaucacgcuguuu

SEQ ID NO: 19274 - RNA, 20 nt, Artificial Sequence
  Antisense oligo
cccgcucacaucacgcuguu

SEQ ID NO: 19275 - RNA, 20 nt, Artificial Sequence
  Antisense oligo
ucuaccaguucccuccugcg

SEQ ID NO: 19276 - RNA, 20 nt, Artificial Sequence
  Antisense oligo
uaucuaccaguucccuccug

SEQ ID NO: 19277 - RNA, 20 nt, Artificial Sequence
  Antisense oligo
cuaucuaccaguucccuccu

SEQ ID NO: 19278 - RNA, 20 nt, Artificial Sequence
  Antisense oligo
ccuaucuaccaguucccucc

SEQ ID NO: 19279 - RNA, 20 nt, Artificial Sequence
  Antisense oligo
guccuaucuaccaguucccu

SEQ ID NO: 19280 - RNA, 20 nt, Artificial Sequence
  Antisense oligo
uguccuaucuaccaguuccc

SEQ ID NO: 19281 - RNA, 20 nt, Artificial Sequence
  Antisense oligo
cuguccuaucuaccaguucc

SEQ ID NO: 19282 - RNA, 20 nt, Artificial Sequence
  Antisense oligo
ucuguccuaucuaccaguuc

SEQ ID NO: 19283 - RNA, 20 nt, Artificial Sequence
  Antisense oligo
cucuguccuaucuaccaguu

SEQ ID NO: 19284 - RNA, 20 nt, Artificial Sequence
  Antisense oligo
ucucuguccuaucuaccagu

SEQ ID NO: 19285 - RNA, 20 nt, Artificial Sequence
  Antisense oligo
caucucuguccuaucuacca

SEQ ID NO: 19286 - RNA, 20 nt, Artificial Sequence
  Antisense oligo
ccaucucuguccuaucuacc

SEQ ID NO: 19287 - RNA, 20 nt, Artificial Sequence
  Antisense oligo
gccaucucuguccuaucuac

SEQ ID NO: 19288 - RNA, 20 nt, Artificial Sequence
  Antisense oligo
aaggccaucucuguccuauc

SEQ ID NO: 19289 - RNA, 20 nt, Artificial Sequence
  Antisense oligo
gaaggccaucucuguccuau

SEQ ID NO: 19290 - RNA, 20 nt, Artificial Sequence
  Antisense oligo
ugaaggccaucucuguccua

SEQ ID NO: 19291 - RNA, 20 nt, Artificial Sequence
  Antisense oligo
gugaaggccaucucuguccu

SEQ ID NO: 19292 - RNA, 20 nt, Artificial Sequence
  Antisense oligo
ugugaaggccaucucugucc

SEQ ID NO: 19293 - RNA, 20 nt, Artificial Sequence
  Antisense oligo
uugugaaggccaucucuguc

SEQ ID NO: 19294 - RNA, 20 nt, Artificial Sequence
  Antisense oligo
cuugugaaggccaucucugu

SEQ ID NO: 19295 - RNA, 20 nt, Artificial Sequence
  Antisense oligo
ugaucucccuccuugugaag

SEQ ID NO: 19296 - RNA, 20 nt, Artificial Sequence
  Antisense oligo
gugaucucccuccuugugaa

SEQ ID NO: 19297 - RNA, 20 nt, Artificial Sequence
  Antisense oligo
uaaugugaucucccuccuug

SEQ ID NO: 19298 - RNA, 20 nt, Artificial Sequence
  Antisense oligo
uacuaaugugaucucccucc

SEQ ID NO: 19299 - RNA, 20 nt, Artificial Sequence
  Antisense oligo
guacuaaugugaucucccuc

SEQ ID NO: 19300 - RNA, 20 nt, Artificial Sequence
  Antisense oligo
uguacuaaugugaucucccu

SEQ ID NO: 19301 - RNA, 20 nt, Artificial Sequence
  Antisense oligo
cuguacuaaugugaucuccc

SEQ ID NO: 19302 - RNA, 20 nt, Artificial Sequence
  Antisense oligo
guucugcccuguacuaaugu

SEQ ID NO: 19303 - RNA, 20 nt, Artificial Sequence
  Antisense oligo
ucguucugcccuguacuaau

SEQ ID NO: 19304 - RNA, 20 nt, Artificial Sequence
  Antisense oligo
uucguucugcccuguacuaa

SEQ ID NO: 19305 - RNA, 20 nt, Artificial Sequence
  Antisense oligo
cuucguucugcccuguacua

SEQ ID NO: 19306 - RNA, 20 nt, Artificial Sequence
  Antisense oligo
ucuucguucugcccuguacu

SEQ ID NO: 19307 - RNA, 20 nt, Artificial Sequence
  Antisense oligo
cucuucguucugcccuguac

SEQ ID NO: 19308 - RNA, 20 nt, Artificial Sequence
  Antisense oligo
ucucuucguucugcccugua

SEQ ID NO: 19309 - RNA, 20 nt, Artificial Sequence
  Antisense oligo
uucucuucguucugcccugu

SEQ ID NO: 19310 - RNA, 20 nt, Artificial Sequence
  Antisense oligo
cuucucuucguucugcccug

SEQ ID NO: 19311 - RNA, 20 nt, Artificial Sequence
  Antisense oligo
ucuucucuucguucugcccu

SEQ ID NO: 19312 - RNA, 20 nt, Artificial Sequence
  Antisense oligo
auucuucucuucguucugcc

SEQ ID NO: 19313 - RNA, 20 nt, Artificial Sequence
  Antisense oligo
cauucuucucuucguucugc

SEQ ID NO: 19314 - RNA, 20 nt, Artificial Sequence
  Antisense oligo
gcauucuucucuucguucug

SEQ ID NO: 19315 - RNA, 20 nt, Artificial Sequence
  Antisense oligo
aggcauucuucucuucguuc

SEQ ID NO: 19316 - RNA, 20 nt, Artificial Sequence
  Antisense oligo
acaggcauucuucucuucgu

SEQ ID NO: 19317 - RNA, 20 nt, Artificial Sequence
  Antisense oligo
cacaggcauucuucucuucg

SEQ ID NO: 19318 - RNA, 20 nt, Artificial Sequence
  Antisense oligo
acuggcaucuguuuaaggcc

SEQ ID NO: 19319 - RNA, 20 nt, Artificial Sequence
  Antisense oligo
aacuggcaucuguuuaaggc

SEQ ID NO: 19320 - RNA, 20 nt, Artificial Sequence
  Antisense oligo
uaacuggcaucuguuuaagg

SEQ ID NO: 19321 - RNA, 20 nt, Artificial Sequence
  Antisense oligo
guguuuuaacuggcaucugu

SEQ ID NO: 19322 - RNA, 20 nt, Artificial Sequence
  Antisense oligo
uguguuuuaacuggcaucug

SEQ ID NO: 19323 - RNA, 20 nt, Artificial Sequence
  Antisense oligo
gguguguuuuaacuggcauc

SEQ ID NO: 19324 - RNA, 20 nt, Artificial Sequence
  Antisense oligo
caaugguguguuuuaacugg

SEQ ID NO: 19325 - RNA, 20 nt, Artificial Sequence
  Antisense oligo
gggcaaugguguguuuuaac

SEQ ID NO: 19326 - RNA, 20 nt, Artificial Sequence
  Antisense oligo
agagggcaaugguguguuuu

SEQ ID NO: 19327 - RNA, 20 nt, Artificial Sequence
  Antisense oligo
cagagggcaaugguguguuu

SEQ ID NO: 19328 - RNA, 20 nt, Artificial Sequence
  Antisense oligo
gacuuaugagcagacaggaa

SEQ ID NO: 19329 - RNA, 20 nt, Artificial Sequence
  Antisense oligo
agacuuaugagcagacagga

SEQ ID NO: 19330 - RNA, 20 nt, Artificial Sequence
  Antisense oligo
cagacuuaugagcagacagg

SEQ ID NO: 19331 - RNA, 20 nt, Artificial Sequence
  Antisense oligo
uucagacuuaugagcagaca

SEQ ID NO: 19332 - RNA, 20 nt, Artificial Sequence
  Antisense oligo
guucagacuuaugagcagac

SEQ ID NO: 19333 - RNA, 20 nt, Artificial Sequence
  Antisense oligo
uguucagacuuaugagcaga

SEQ ID NO: 19334 - RNA, 20 nt, Artificial Sequence
  Antisense oligo
cuguucagacuuaugagcag

SEQ ID NO: 19335 - RNA, 20 nt, Artificial Sequence
  Antisense oligo
gcuguucagacuuaugagca

SEQ ID NO: 19336 - RNA, 20 nt, Artificial Sequence
  Antisense oligo
agcuguucagacuuaugagc

SEQ ID NO: 19337 - RNA, 20 nt, Artificial Sequence
  Antisense oligo
agagaccagacuuacuuugu

SEQ ID NO: 19338 - RNA, 20 nt, Artificial Sequence
  Antisense oligo
aagagaccagacuuacuuug

SEQ ID NO: 19339 - RNA, 20 nt, Artificial Sequence
  Antisense oligo
gaagagaccagacuuacuuu

SEQ ID NO: 19340 - RNA, 20 nt, Artificial Sequence
  Antisense oligo
ggaagagaccagacuuacuu

SEQ ID NO: 19341 - RNA, 20 nt, Artificial Sequence
  Antisense oligo
aggaagagaccagacuuacu

SEQ ID NO: 19342 - RNA, 20 nt, Artificial Sequence
  Antisense oligo
gaggaagagaccagacuuac

SEQ ID NO: 19343 - RNA, 20 nt, Artificial Sequence
  Antisense oligo
augaagcauuaaagccugca

SEQ ID NO: 19344 - RNA, 20 nt, Artificial Sequence
  Antisense oligo
cggaagagcaaaugaagcau

SEQ ID NO: 19345 - RNA, 20 nt, Artificial Sequence
  Antisense oligo
aaacgacggaagagcaaaug

SEQ ID NO: 19346 - RNA, 20 nt, Artificial Sequence
  Antisense oligo
aaaacgacggaagagcaaau

SEQ ID NO: 19347 - RNA, 20 nt, Artificial Sequence
  Antisense oligo
uaaaacgacggaagagcaaa

SEQ ID NO: 19348 - RNA, 20 nt, Artificial Sequence
  Antisense oligo
cuaaaacgacggaagagcaa

SEQ ID NO: 19349 - RNA, 20 nt, Artificial Sequence
  Antisense oligo
ccuaaaacgacggaagagca

SEQ ID NO: 19350 - RNA, 20 nt, Artificial Sequence
  Antisense oligo
uccuaaaacgacggaagagc

SEQ ID NO: 19351 - RNA, 20 nt, Artificial Sequence
  Antisense oligo
cuccuaaaacgacggaagag

SEQ ID NO: 19352 - RNA, 20 nt, Artificial Sequence
  Antisense oligo
gcuccuaaaacgacggaaga

SEQ ID NO: 19353 - RNA, 20 nt, Artificial Sequence
  Antisense oligo
ggcuccuaaaacgacggaag

SEQ ID NO: 19354 - RNA, 20 nt, Artificial Sequence
  Antisense oligo
auggcuccuaaaacgacgga

SEQ ID NO: 19355 - RNA, 20 nt, Artificial Sequence
  Antisense oligo
aauggcuccuaaaacgacgg

SEQ ID NO: 19356 - RNA, 20 nt, Artificial Sequence
  Antisense oligo
aaauggcuccuaaaacgacg

SEQ ID NO: 19357 - RNA, 20 nt, Artificial Sequence
  Antisense oligo
caaauggcuccuaaaacgac

SEQ ID NO: 19358 - RNA, 20 nt, Artificial Sequence
  Antisense oligo
guaccuugaacugauuuccc

SEQ ID NO: 19359 - RNA, 20 nt, Artificial Sequence
  Antisense oligo
uguaccuugaacugauuucc

SEQ ID NO: 19360 - RNA, 20 nt, Artificial Sequence
  Antisense oligo
gaggagcuuagcauuuuccg

SEQ ID NO: 19361 - RNA, 20 nt, Artificial Sequence
  Antisense oligo
aaugugcugaggagcuuagc

SEQ ID NO: 19362 - RNA, 20 nt, Artificial Sequence
  Antisense oligo
uaggaaugugcugaggagcu

SEQ ID NO: 19363 - RNA, 20 nt, Artificial Sequence
  Antisense oligo
uuuaggaaugugcugaggag

SEQ ID NO: 19364 - RNA, 20 nt, Artificial Sequence
  Antisense oligo
ugauuuaggaaugugcugag

SEQ ID NO: 19365 - RNA, 20 nt, Artificial Sequence
  Antisense oligo
cugauuuaggaaugugcuga

SEQ ID NO: 19366 - RNA, 20 nt, Artificial Sequence
  Antisense oligo
agucugauuuaggaaugugc

SEQ ID NO: 19367 - RNA, 20 nt, Artificial Sequence
  Antisense oligo
cagucugauuuaggaaugug

SEQ ID NO: 19368 - RNA, 20 nt, Artificial Sequence
  Antisense oligo
ccagucugauuuaggaaugu

SEQ ID NO: 19369 - RNA, 20 nt, Artificial Sequence
  Antisense oligo
uaggccagucugauuuagga

SEQ ID NO: 19370 - RNA, 20 nt, Artificial Sequence
  Antisense oligo
cuaggccagucugauuuagg

SEQ ID NO: 19371 - RNA, 20 nt, Artificial Sequence
  Antisense oligo
ucuaggccagucugauuuag

SEQ ID NO: 19372 - RNA, 20 nt, Artificial Sequence
  Antisense oligo
gucuaggccagucugauuua

SEQ ID NO: 19373 - RNA, 20 nt, Artificial Sequence
  Antisense oligo
cgucuaggccagucugauuu

SEQ ID NO: 19374 - RNA, 20 nt, Artificial Sequence
  Antisense oligo
gcgucuaggccagucugauu

SEQ ID NO: 19375 - RNA, 20 nt, Artificial Sequence
  Antisense oligo
ggcgucuaggccagucugau

SEQ ID NO: 19376 - RNA, 20 nt, Artificial Sequence
  Antisense oligo
aggcgucuaggccagucuga

SEQ ID NO: 19377 - RNA, 20 nt, Artificial Sequence
  Antisense oligo
aaggcgucuaggccagucug

SEQ ID NO: 19378 - RNA, 20 nt, Artificial Sequence
  Antisense oligo
gaaggcgucuaggccagucu

SEQ ID NO: 19379 - RNA, 20 nt, Artificial Sequence
  Antisense oligo
aggaaggcgucuaggccagu

SEQ ID NO: 19380 - RNA, 20 nt, Artificial Sequence
  Antisense oligo
uagcaggaaggcgucuaggc

SEQ ID NO: 19381 - RNA, 20 nt, Artificial Sequence
  Antisense oligo
cucuagcaggaaggcgucua

SEQ ID NO: 19382 - RNA, 20 nt, Artificial Sequence
  Antisense oligo
gcucuagcaggaaggcgucu

SEQ ID NO: 19383 - RNA, 20 nt, Artificial Sequence
  Antisense oligo
agcucuagcaggaaggcguc

SEQ ID NO: 19384 - RNA, 20 nt, Artificial Sequence
  Antisense oligo
cagcucuagcaggaaggcgu

SEQ ID NO: 19385 - RNA, 20 nt, Artificial Sequence
  Antisense oligo
gugcagcucuagcaggaagg

SEQ ID NO: 19386 - RNA, 20 nt, Artificial Sequence
  Antisense oligo
ucgugcagcucuagcaggaa

SEQ ID NO: 19387 - RNA, 20 nt, Artificial Sequence
  Antisense oligo
uucgugcagcucuagcagga

SEQ ID NO: 19388 - RNA, 20 nt, Artificial Sequence
  Antisense oligo
uuucgugcagcucuagcagg

SEQ ID NO: 19389 - RNA, 20 nt, Artificial Sequence
  Antisense oligo
auuucgugcagcucuagcag

SEQ ID NO: 19390 - RNA, 20 nt, Artificial Sequence
  Antisense oligo
cauuucgugcagcucuagca

SEQ ID NO: 19391 - RNA, 20 nt, Artificial Sequence
  Antisense oligo
ucauuucgugcagcucuagc

SEQ ID NO: 19392 - RNA, 20 nt, Artificial Sequence
  Antisense oligo
aucauuucgugcagcucuag

SEQ ID NO: 19393 - RNA, 20 nt, Artificial Sequence
  Antisense oligo
uaucauuucgugcagcucua

SEQ ID NO: 19394 - RNA, 20 nt, Artificial Sequence
  Antisense oligo
uuaucauuucgugcagcucu

SEQ ID NO: 19395 - RNA, 20 nt, Artificial Sequence
  Antisense oligo
auuaucauuucgugcagcuc

SEQ ID NO: 19396 - RNA, 20 nt, Artificial Sequence
  Antisense oligo
gauuaucauuucgugcagcu

SEQ ID NO: 19397 - RNA, 20 nt, Artificial Sequence
  Antisense oligo
agauuaucauuucgugcagc

SEQ ID NO: 19398 - RNA, 20 nt, Artificial Sequence
  Antisense oligo
cuccucgguuuggguuuggg

SEQ ID NO: 19399 - RNA, 20 nt, Artificial Sequence
  Antisense oligo
gcuccucgguuuggguuugg

SEQ ID NO: 19400 - RNA, 20 nt, Artificial Sequence
  Antisense oligo
cgcuccucgguuuggguuug

SEQ ID NO: 19401 - RNA, 20 nt, Artificial Sequence
  Antisense oligo
gcgcuccucgguuuggguuu

SEQ ID NO: 19402 - RNA, 20 nt, Artificial Sequence
  Antisense oligo
caaauccauaccuccacuga

SEQ ID NO: 19403 - RNA, 20 nt, Artificial Sequence
  Antisense oligo
ugcaaauccauaccuccacu

SEQ ID NO: 19404 - RNA, 20 nt, Artificial Sequence
  Antisense oligo
gugcaaauccauaccuccac

SEQ ID NO: 19405 - RNA, 20 nt, Artificial Sequence
  Antisense oligo
ggugugcaaauccauaccuc

SEQ ID NO: 19406 - RNA, 20 nt, Artificial Sequence
  Antisense oligo
uaggugugcaaauccauacc

SEQ ID NO: 19407 - RNA, 20 nt, Artificial Sequence
  Antisense oligo
gagagacagcacaacauugu

SEQ ID NO: 19408 - RNA, 20 nt, Artificial Sequence
  Antisense oligo
ggagagacagcacaacauug

SEQ ID NO: 19409 - RNA, 20 nt, Artificial Sequence
  Antisense oligo
aaugggauucugugguaaga

SEQ ID NO: 19410 - RNA, 20 nt, Artificial Sequence
  Antisense oligo
gcaggaaaugggauucugug

SEQ ID NO: 19411 - RNA, 20 nt, Artificial Sequence
  Antisense oligo
ggugcccugguaaugacaaa

SEQ ID NO: 19412 - RNA, 20 nt, Artificial Sequence
  Antisense oligo
aggugcccugguaaugacaa

SEQ ID NO: 19413 - RNA, 20 nt, Artificial Sequence
  Antisense oligo
acccaguagagauuaaaacc

SEQ ID NO: 19414 - RNA, 20 nt, Artificial Sequence
  Antisense oligo
cacuccagccuggguaacag

SEQ ID NO: 19415 - RNA, 20 nt, Artificial Sequence
  Antisense oligo
gcacuccagccuggguaaca

SEQ ID NO: 19416 - RNA, 20 nt, Artificial Sequence
  Antisense oligo
ugcacuccagccuggguaac

SEQ ID NO: 19417 - RNA, 20 nt, Artificial Sequence
  Antisense oligo
cugcacuccagccuggguaa

SEQ ID NO: 19418 - RNA, 20 nt, Artificial Sequence
  Antisense oligo
acugcacuccagccugggua

SEQ ID NO: 19419 - RNA, 20 nt, Artificial Sequence
  Antisense oligo
acuccacugcacuccagccu

SEQ ID NO: 19420 - RNA, 20 nt, Artificial Sequence
  Antisense oligo
uacuccacugcacuccagcc

SEQ ID NO: 19421 - RNA, 20 nt, Artificial Sequence
  Antisense oligo
uuacuccacugcacuccagc

SEQ ID NO: 19422 - RNA, 20 nt, Artificial Sequence
  Antisense oligo
uugcagugagccaagguugc

SEQ ID NO: 19423 - RNA, 20 nt, Artificial Sequence
  Antisense oligo
guugcagugagccaagguug

SEQ ID NO: 19424 - RNA, 20 nt, Artificial Sequence
  Antisense oligo
gguugcagugagccaagguu

SEQ ID NO: 19425 - RNA, 20 nt, Artificial Sequence
  Antisense oligo
agguugcagugagccaaggu

SEQ ID NO: 19426 - RNA, 20 nt, Artificial Sequence
  Antisense oligo
gagguugcagugagccaagg

SEQ ID NO: 19427 - RNA, 20 nt, Artificial Sequence
  Antisense oligo
agagguugcagugagccaag

SEQ ID NO: 19428 - RNA, 20 nt, Artificial Sequence
  Antisense oligo
cagagguugcagugagccaa

SEQ ID NO: 19429 - RNA, 20 nt, Artificial Sequence
  Antisense oligo
gcagagguugcagugagcca

SEQ ID NO: 19430 - RNA, 20 nt, Artificial Sequence
  Antisense oligo
aggcagagguugcagugagc

SEQ ID NO: 19431 - RNA, 20 nt, Artificial Sequence
  Antisense oligo
gaggcagagguugcagugag

SEQ ID NO: 19432 - RNA, 20 nt, Artificial Sequence
  Antisense oligo
ggaggcagagguugcaguga

SEQ ID NO: 19433 - RNA, 20 nt, Artificial Sequence
  Antisense oligo
ugggaggcagagguugcagu

SEQ ID NO: 19434 - RNA, 20 nt, Artificial Sequence
  Antisense oligo
uugaaccugggaggcagagg

SEQ ID NO: 19435 - RNA, 20 nt, Artificial Sequence
  Antisense oligo
cuugaaccugggaggcagag

SEQ ID NO: 19436 - RNA, 20 nt, Artificial Sequence
  Antisense oligo
ugggaagcugaggcaugaga

SEQ ID NO: 19437 - RNA, 20 nt, Artificial Sequence
  Antisense oligo
uugggaagcugaggcaugag

SEQ ID NO: 19438 - RNA, 20 nt, Artificial Sequence
  Antisense oligo
uuugggaagcugaggcauga

SEQ ID NO: 19439 - RNA, 20 nt, Artificial Sequence
  Antisense oligo
auuugggaagcugaggcaug

SEQ ID NO: 19440 - RNA, 20 nt, Artificial Sequence
  Antisense oligo
uauuugggaagcugaggcau

SEQ ID NO: 19441 - RNA, 20 nt, Artificial Sequence
  Antisense oligo
cuauuugggaagcugaggca

SEQ ID NO: 19442 - RNA, 20 nt, Artificial Sequence
  Antisense oligo
gcuauuugggaagcugaggc

SEQ ID NO: 19443 - RNA, 20 nt, Artificial Sequence
  Antisense oligo
cuguagucccagcuauuugg

SEQ ID NO: 19444 - RNA, 20 nt, Artificial Sequence
  Antisense oligo
ccuguagucccagcuauuug

SEQ ID NO: 19445 - RNA, 20 nt, Artificial Sequence
  Antisense oligo
gccuguagucccagcuauuu

SEQ ID NO: 19446 - RNA, 20 nt, Artificial Sequence
  Antisense oligo
cgccuguagucccagcuauu

SEQ ID NO: 19447 - RNA, 20 nt, Artificial Sequence
  Antisense oligo
acgccuguagucccagcuau

SEQ ID NO: 19448 - RNA, 20 nt, Artificial Sequence
  Antisense oligo
cacgccuguagucccagcua

SEQ ID NO: 19449 - RNA, 20 nt, Artificial Sequence
  Antisense oligo
acacgccuguagucccagcu

SEQ ID NO: 19450 - RNA, 20 nt, Artificial Sequence
  Antisense oligo
agccaggcauggugguacac

SEQ ID NO: 19451 - RNA, 20 nt, Artificial Sequence
  Antisense oligo
uagccaggcauggugguaca

SEQ ID NO: 19452 - RNA, 20 nt, Artificial Sequence
  Antisense oligo
uuagccaggcauggugguac

SEQ ID NO: 19453 - RNA, 20 nt, Artificial Sequence
  Antisense oligo
auuagccaggcaugguggua

SEQ ID NO: 19454 - RNA, 20 nt, Artificial Sequence
  Antisense oligo
aauuagccaggcaugguggu

SEQ ID NO: 19455 - RNA, 20 nt, Artificial Sequence
  Antisense oligo
aaauuagccaggcauggugg

SEQ ID NO: 19456 - RNA, 20 nt, Artificial Sequence
  Antisense oligo
aaaauuagccaggcauggug

SEQ ID NO: 19457 - RNA, 20 nt, Artificial Sequence
  Antisense oligo
gugaaacucugucucuacua

SEQ ID NO: 19458 - RNA, 20 nt, Artificial Sequence
  Antisense oligo
agugaaacucugucucuacu

SEQ ID NO: 19459 - RNA, 20 nt, Artificial Sequence
  Antisense oligo
cagugaaacucugucucuac

SEQ ID NO: 19460 - RNA, 20 nt, Artificial Sequence
  Antisense oligo
ucaggccaggaguucgagac

SEQ ID NO: 19461 - RNA, 20 nt, Artificial Sequence
  Antisense oligo
uucaggccaggaguucgaga

SEQ ID NO: 19462 - RNA, 20 nt, Artificial Sequence
  Antisense oligo
uuucaggccaggaguucgag

SEQ ID NO: 19463 - RNA, 20 nt, Artificial Sequence
  Antisense oligo
auuucaggccaggaguucga

SEQ ID NO: 19464 - RNA, 20 nt, Artificial Sequence
  Antisense oligo
cuagcacuuugagaggccaa

SEQ ID NO: 19465 - RNA, 20 nt, Artificial Sequence
  Antisense oligo
ucuagcacuuugagaggcca

SEQ ID NO: 19466 - RNA, 20 nt, Artificial Sequence
  Antisense oligo
uucuagcacuuugagaggcc

SEQ ID NO: 19467 - RNA, 20 nt, Artificial Sequence
  Antisense oligo
auucuagcacuuugagaggc

SEQ ID NO: 19468 - RNA, 20 nt, Artificial Sequence
  Antisense oligo
cauucuagcacuuugagagg

SEQ ID NO: 19469 - RNA, 20 nt, Artificial Sequence
  Antisense oligo
ucauucuagcacuuugagag

SEQ ID NO: 19470 - RNA, 20 nt, Artificial Sequence
  Antisense oligo
acgccuuuucauucuagcac

SEQ ID NO: 19471 - RNA, 20 nt, Artificial Sequence
  Antisense oligo
ucacgccuuuucauucuagc

SEQ ID NO: 19472 - RNA, 20 nt, Artificial Sequence
  Antisense oligo
cucacgccuuuucauucuag

SEQ ID NO: 19473 - RNA, 20 nt, Artificial Sequence
  Antisense oligo
gcucacgccuuuucauucua

SEQ ID NO: 19474 - RNA, 20 nt, Artificial Sequence
  Antisense oligo
ggcucacgccuuuucauucu

SEQ ID NO: 19475 - RNA, 20 nt, Artificial Sequence
  Antisense oligo
uggcucacgccuuuucauuc

SEQ ID NO: 19476 - RNA, 20 nt, Artificial Sequence
  Antisense oligo
guggcucacgccuuuucauu

SEQ ID NO: 19477 - RNA, 20 nt, Artificial Sequence
  Antisense oligo
aguggcucacgccuuuucau

SEQ ID NO: 19478 - RNA, 20 nt, Artificial Sequence
  Antisense oligo
uguaguggcucacgccuuuu

SEQ ID NO: 19479 - RNA, 20 nt, Artificial Sequence
  Antisense oligo
uaccucucuuugacauaguc

SEQ ID NO: 19480 - RNA, 20 nt, Artificial Sequence
  Antisense oligo
guaccucucuuugacauagu

SEQ ID NO: 19481 - RNA, 20 nt, Artificial Sequence
  Antisense oligo
uguaccucucuuugacauag

SEQ ID NO: 19482 - RNA, 20 nt, Artificial Sequence
  Antisense oligo
ucuugaacuccugaccucag

SEQ ID NO: 19483 - RNA, 20 nt, Artificial Sequence
  Antisense oligo
gucuugaacuccugaccuca

SEQ ID NO: 19484 - RNA, 20 nt, Artificial Sequence
  Antisense oligo
gcuggucuugaacuccugac

SEQ ID NO: 19485 - RNA, 20 nt, Artificial Sequence
  Antisense oligo
ggcuggucuugaacuccuga

SEQ ID NO: 19486 - RNA, 20 nt, Artificial Sequence
  Antisense oligo
aggcuggucuugaacuccug

SEQ ID NO: 19487 - RNA, 20 nt, Artificial Sequence
  Antisense oligo
caggcuggucuugaacuccu

SEQ ID NO: 19488 - RNA, 20 nt, Artificial Sequence
  Antisense oligo
ccaggcuggucuugaacucc

SEQ ID NO: 19489 - RNA, 20 nt, Artificial Sequence
  Antisense oligo
gccaggcuggucuugaacuc

SEQ ID NO: 19490 - RNA, 20 nt, Artificial Sequence
  Antisense oligo
ggccaggcuggucuugaacu

SEQ ID NO: 19491 - RNA, 20 nt, Artificial Sequence
  Antisense oligo
uucuccugccucagccuccu

SEQ ID NO: 19492 - RNA, 20 nt, Artificial Sequence
  Antisense oligo
auucuccugccucagccucc

SEQ ID NO: 19493 - RNA, 20 nt, Artificial Sequence
  Antisense oligo
aauucuccugccucagccuc

SEQ ID NO: 19494 - RNA, 20 nt, Artificial Sequence
  Antisense oligo
caauucuccugccucagccu

SEQ ID NO: 19495 - RNA, 20 nt, Artificial Sequence
  Antisense oligo
gcaauucuccugccucagcc

SEQ ID NO: 19496 - RNA, 20 nt, Artificial Sequence
  Antisense oligo
agcaauucuccugccucagc

SEQ ID NO: 19497 - RNA, 20 nt, Artificial Sequence
  Antisense oligo
aagcaauucuccugccucag

SEQ ID NO: 19498 - RNA, 20 nt, Artificial Sequence
  Antisense oligo
aaagcaauucuccugccuca

SEQ ID NO: 19499 - RNA, 20 nt, Artificial Sequence
  Antisense oligo
uaaagcaauucuccugccuc

SEQ ID NO: 19500 - RNA, 20 nt, Artificial Sequence
  Antisense oligo
uuaaagcaauucuccugccu

SEQ ID NO: 19501 - RNA, 20 nt, Artificial Sequence
  Antisense oligo
guuaaagcaauucuccugcc

SEQ ID NO: 19502 - RNA, 20 nt, Artificial Sequence
  Antisense oligo
gguuaaagcaauucuccugc

SEQ ID NO: 19503 - RNA, 20 nt, Artificial Sequence
  Antisense oligo
cucagcucacugcaaucucc

SEQ ID NO: 19504 - RNA, 20 nt, Artificial Sequence
  Antisense oligo
ucucagcucacugcaaucuc

SEQ ID NO: 19505 - RNA, 20 nt, Artificial Sequence
  Antisense oligo
aucucagcucacugcaaucu

SEQ ID NO: 19506 - RNA, 20 nt, Artificial Sequence
  Antisense oligo
gaucucagcucacugcaauc

SEQ ID NO: 19507 - RNA, 20 nt, Artificial Sequence
  Antisense oligo
cgaucucagcucacugcaau

SEQ ID NO: 19508 - RNA, 20 nt, Artificial Sequence
  Antisense oligo
gcgaucucagcucacugcaa

SEQ ID NO: 19509 - RNA, 20 nt, Artificial Sequence
  Antisense oligo
ugcgaucucagcucacugca

SEQ ID NO: 19510 - RNA, 20 nt, Artificial Sequence
  Antisense oligo
gugcgaucucagcucacugc

SEQ ID NO: 19511 - RNA, 20 nt, Artificial Sequence
  Antisense oligo
ggugcgaucucagcucacug

SEQ ID NO: 19512 - RNA, 20 nt, Artificial Sequence
  Antisense oligo
uggugcgaucucagcucacu

SEQ ID NO: 19513 - RNA, 20 nt, Artificial Sequence
  Antisense oligo
guggugcgaucucagcucac

SEQ ID NO: 19514 - RNA, 20 nt, Artificial Sequence
  Antisense oligo
aguggugcgaucucagcuca

SEQ ID NO: 19515 - RNA, 20 nt, Artificial Sequence
  Antisense oligo
caguggugcgaucucagcuc

SEQ ID NO: 19516 - RNA, 20 nt, Artificial Sequence
  Antisense oligo
gcaguggugcgaucucagcu

SEQ ID NO: 19517 - RNA, 20 nt, Artificial Sequence
  Antisense oligo
ugcaguggugcgaucucagc

SEQ ID NO: 19518 - RNA, 20 nt, Artificial Sequence
  Antisense oligo
gugcaguggugcgaucucag

SEQ ID NO: 19519 - RNA, 20 nt, Artificial Sequence
  Antisense oligo
agugcaguggugcgaucuca

SEQ ID NO: 19520 - RNA, 20 nt, Artificial Sequence
  Antisense oligo
gagugcaguggugcgaucuc

SEQ ID NO: 19521 - RNA, 20 nt, Artificial Sequence
  Antisense oligo
ggagugcaguggugcgaucu

SEQ ID NO: 19522 - RNA, 20 nt, Artificial Sequence
  Antisense oligo
uggagugcaguggugcgauc

SEQ ID NO: 19523 - RNA, 20 nt, Artificial Sequence
  Antisense oligo
cuggagugcaguggugcgau

SEQ ID NO: 19524 - RNA, 20 nt, Artificial Sequence
  Antisense oligo
ucuguugcccaggcuggagu

SEQ ID NO: 19525 - RNA, 20 nt, Artificial Sequence
  Antisense oligo
ggcaacuauguaaaagaugg

SEQ ID NO: 19526 - RNA, 20 nt, Artificial Sequence
  Antisense oligo
ccuuuagauuggcaacuaug

SEQ ID NO: 19527 - RNA, 20 nt, Artificial Sequence
  Antisense oligo
ggccuuuagauuggcaacua

SEQ ID NO: 19528 - RNA, 20 nt, Artificial Sequence
  Antisense oligo
uggccuuuagauuggcaacu

SEQ ID NO: 19529 - RNA, 20 nt, Artificial Sequence
  Antisense oligo
uuggccuuuagauuggcaac

SEQ ID NO: 19530 - RNA, 20 nt, Artificial Sequence
  Antisense oligo
uuuggccuuuagauuggcaa

SEQ ID NO: 19531 - RNA, 20 nt, Artificial Sequence
  Antisense oligo
auuuuggccuuuagauuggc

SEQ ID NO: 19532 - RNA, 20 nt, Artificial Sequence
  Antisense oligo
cauuuuggccuuuagauugg

SEQ ID NO: 19533 - RNA, 20 nt, Artificial Sequence
  Antisense oligo
ccauuuuggccuuuagauug

SEQ ID NO: 19534 - RNA, 20 nt, Artificial Sequence
  Antisense oligo
gauaccauuuuggccuuuag

SEQ ID NO: 19535 - RNA, 20 nt, Artificial Sequence
  Antisense oligo
gagauaccauuuuggccuuu

SEQ ID NO: 19536 - RNA, 20 nt, Artificial Sequence
  Antisense oligo
ugagauaccauuuuggccuu

SEQ ID NO: 19537 - RNA, 20 nt, Artificial Sequence
  Antisense oligo
augagauaccauuuuggccu

SEQ ID NO: 19538 - RNA, 20 nt, Artificial Sequence
  Antisense oligo
ucagccucacgguaaauggg

SEQ ID NO: 19539 - RNA, 20 nt, Artificial Sequence
  Antisense oligo
uucagccucacgguaaaugg

SEQ ID NO: 19540 - RNA, 20 nt, Artificial Sequence
  Antisense oligo
uguucagccucacgguaaau

SEQ ID NO: 19541 - RNA, 20 nt, Artificial Sequence
  Antisense oligo
auguucagccucacgguaaa

SEQ ID NO: 19542 - RNA, 20 nt, Artificial Sequence
  Antisense oligo
cauguucagccucacgguaa

SEQ ID NO: 19543 - RNA, 20 nt, Artificial Sequence
  Antisense oligo
uaaaggcaauucagaggaug

SEQ ID NO: 19544 - RNA, 20 nt, Artificial Sequence
  Antisense oligo
cagcuugggugggagugaga

SEQ ID NO: 19545 - RNA, 20 nt, Artificial Sequence
  Antisense oligo
uguaaucccagcuacuaggg

SEQ ID NO: 19546 - RNA, 20 nt, Artificial Sequence
  Antisense oligo
cuguaaucccagcuacuagg

SEQ ID NO: 19547 - RNA, 20 nt, Artificial Sequence
  Antisense oligo
ccuguaaucccagcuacuag

SEQ ID NO: 19548 - RNA, 20 nt, Artificial Sequence
  Antisense oligo
accuguaaucccagcuacua

SEQ ID NO: 19549 - RNA, 20 nt, Artificial Sequence
  Antisense oligo
caccuguaaucccagcuacu

SEQ ID NO: 19550 - RNA, 20 nt, Artificial Sequence
  Antisense oligo
gcaccuguaaucccagcuac

SEQ ID NO: 19551 - RNA, 20 nt, Artificial Sequence
  Antisense oligo
ggcaccuguaaucccagcua

SEQ ID NO: 19552 - RNA, 20 nt, Artificial Sequence
  Antisense oligo
uggcaccuguaaucccagcu

SEQ ID NO: 19553 - RNA, 20 nt, Artificial Sequence
  Antisense oligo
uuggcaccuguaaucccagc

SEQ ID NO: 19554 - RNA, 20 nt, Artificial Sequence
  Antisense oligo
guuggcaccuguaaucccag

SEQ ID NO: 19555 - RNA, 20 nt, Artificial Sequence
  Antisense oligo
gguuggcaccuguaauccca

SEQ ID NO: 19556 - RNA, 20 nt, Artificial Sequence
  Antisense oligo
ugguuggcaccuguaauccc

SEQ ID NO: 19557 - RNA, 20 nt, Artificial Sequence
  Antisense oligo
augguuggcaccuguaaucc

SEQ ID NO: 19558 - RNA, 20 nt, Artificial Sequence
  Antisense oligo
gaugguuggcaccuguaauc

SEQ ID NO: 19559 - RNA, 20 nt, Artificial Sequence
  Antisense oligo
uagcugggcgugaugguugg

SEQ ID NO: 19560 - RNA, 20 nt, Artificial Sequence
  Antisense oligo
uuagcugggcgugaugguug

SEQ ID NO: 19561 - RNA, 20 nt, Artificial Sequence
  Antisense oligo
auuagcugggcgugaugguu

SEQ ID NO: 19562 - RNA, 20 nt, Artificial Sequence
  Antisense oligo
aauuagcugggcgugauggu

SEQ ID NO: 19563 - RNA, 20 nt, Artificial Sequence
  Antisense oligo
aaauuagcugggcgugaugg

SEQ ID NO: 19564 - RNA, 20 nt, Artificial Sequence
  Antisense oligo
aaaauuagcugggcgugaug

SEQ ID NO: 19565 - RNA, 20 nt, Artificial Sequence
  Antisense oligo
ccgucucuguacuaaaauag

SEQ ID NO: 19566 - RNA, 20 nt, Artificial Sequence
  Antisense oligo
cccgucucuguacuaaaaua

SEQ ID NO: 19567 - RNA, 20 nt, Artificial Sequence
  Antisense oligo
aucacuugaggucaggagcu

SEQ ID NO: 19568 - RNA, 20 nt, Artificial Sequence
  Antisense oligo
aaucacuugaggucaggagc

SEQ ID NO: 19569 - RNA, 20 nt, Artificial Sequence
  Antisense oligo
gaaucacuugaggucaggag

SEQ ID NO: 19570 - RNA, 20 nt, Artificial Sequence
  Antisense oligo
ugaaucacuugaggucagga

SEQ ID NO: 19571 - RNA, 20 nt, Artificial Sequence
  Antisense oligo
gugaaucacuugaggucagg

SEQ ID NO: 19572 - RNA, 20 nt, Artificial Sequence
  Antisense oligo
ugugaaucacuugaggucag

SEQ ID NO: 19573 - RNA, 20 nt, Artificial Sequence
  Antisense oligo
uugugaaucacuugagguca

SEQ ID NO: 19574 - RNA, 20 nt, Artificial Sequence
  Antisense oligo
cuugugaaucacuugagguc

SEQ ID NO: 19575 - RNA, 20 nt, Artificial Sequence
  Antisense oligo
gcuugugaaucacuugaggu

SEQ ID NO: 19576 - RNA, 20 nt, Artificial Sequence
  Antisense oligo
agcuugugaaucacuugagg

SEQ ID NO: 19577 - RNA, 20 nt, Artificial Sequence
  Antisense oligo
uuuaggcugggugugguggc

SEQ ID NO: 19578 - RNA, 20 nt, Artificial Sequence
  Antisense oligo
agagguaauuuaggcugggu

SEQ ID NO: 19579 - RNA, 20 nt, Artificial Sequence
  Antisense oligo
aagagguaauuuaggcuggg

SEQ ID NO: 19580 - RNA, 20 nt, Artificial Sequence
  Antisense oligo
gaagagguaauuuaggcugg

SEQ ID NO: 19581 - RNA, 20 nt, Artificial Sequence
  Antisense oligo
cgaagagguaauuuaggcug

SEQ ID NO: 19582 - RNA, 20 nt, Artificial Sequence
  Antisense oligo
acgaagagguaauuuaggcu

SEQ ID NO: 19583 - RNA, 20 nt, Artificial Sequence
  Antisense oligo
gagacaaagcgcaaaagaaa

SEQ ID NO: 19584 - RNA, 20 nt, Artificial Sequence
  Antisense oligo
agagacaaagcgcaaaagaa

SEQ ID NO: 19585 - RNA, 20 nt, Artificial Sequence
  Antisense oligo
cagagacaaagcgcaaaaga

SEQ ID NO: 19586 - RNA, 20 nt, Artificial Sequence
  Antisense oligo
acagagacaaagcgcaaaag

SEQ ID NO: 19587 - RNA, 20 nt, Artificial Sequence
  Antisense oligo
uacagagacaaagcgcaaaa

SEQ ID NO: 19588 - RNA, 20 nt, Artificial Sequence
  Antisense oligo
uuacagagacaaagcgcaaa

SEQ ID NO: 19589 - RNA, 20 nt, Artificial Sequence
  Antisense oligo
accauuacagagacaaagcg

SEQ ID NO: 19590 - RNA, 20 nt, Artificial Sequence
  Antisense oligo
aaccauuacagagacaaagc

SEQ ID NO: 19591 - RNA, 20 nt, Artificial Sequence
  Antisense oligo
caaccauuacagagacaaag

SEQ ID NO: 19592 - RNA, 20 nt, Artificial Sequence
  Antisense oligo
cacaaccauuacagagacaa

SEQ ID NO: 19593 - RNA, 20 nt, Artificial Sequence
  Antisense oligo
cucacaaccauuacagagac

SEQ ID NO: 19594 - RNA, 20 nt, Artificial Sequence
  Antisense oligo
agcucucacaaccauuacag

SEQ ID NO: 19595 - RNA, 20 nt, Artificial Sequence
  Antisense oligo
ccuguucuaugcaaagagcu

SEQ ID NO: 19596 - RNA, 20 nt, Artificial Sequence
  Antisense oligo
cccuguucuaugcaaagagc

SEQ ID NO: 19597 - RNA, 20 nt, Artificial Sequence
  Antisense oligo
acggcagagaagaugaaccc

SEQ ID NO: 19598 - RNA, 20 nt, Artificial Sequence
  Antisense oligo
cacggcagagaagaugaacc

SEQ ID NO: 19599 - RNA, 20 nt, Artificial Sequence
  Antisense oligo
acacggcagagaagaugaac

SEQ ID NO: 19600 - RNA, 20 nt, Artificial Sequence
  Antisense oligo
cacacggcagagaagaugaa

SEQ ID NO: 19601 - RNA, 20 nt, Artificial Sequence
  Antisense oligo
gcacacggcagagaagauga

SEQ ID NO: 19602 - RNA, 20 nt, Artificial Sequence
  Antisense oligo
ggcacacggcagagaagaug

SEQ ID NO: 19603 - RNA, 20 nt, Artificial Sequence
  Antisense oligo
uggcacacggcagagaagau

SEQ ID NO: 19604 - RNA, 20 nt, Artificial Sequence
  Antisense oligo
aaaggcugaaauagagcacu

SEQ ID NO: 19605 - RNA, 20 nt, Artificial Sequence
  Antisense oligo
uaaaggcugaaauagagcac

SEQ ID NO: 19606 - RNA, 20 nt, Artificial Sequence
  Antisense oligo
ggaagauccuaguaaguguu

SEQ ID NO: 19607 - RNA, 20 nt, Artificial Sequence
  Antisense oligo
agcaagacuccaucucaaaa

SEQ ID NO: 19608 - RNA, 20 nt, Artificial Sequence
  Antisense oligo
cagcaagacuccaucucaaa

SEQ ID NO: 19609 - RNA, 20 nt, Artificial Sequence
  Antisense oligo
acagcaagacuccaucucaa

SEQ ID NO: 19610 - RNA, 20 nt, Artificial Sequence
  Antisense oligo
cacagcaagacuccaucuca

SEQ ID NO: 19611 - RNA, 20 nt, Artificial Sequence
  Antisense oligo
acacagcaagacuccaucuc

SEQ ID NO: 19612 - RNA, 20 nt, Artificial Sequence
  Antisense oligo
gacacagcaagacuccaucu

SEQ ID NO: 19613 - RNA, 20 nt, Artificial Sequence
  Antisense oligo
ugcacucuagccuggaugac

SEQ ID NO: 19614 - RNA, 20 nt, Artificial Sequence
  Antisense oligo
uugcacucuagccuggauga

SEQ ID NO: 19615 - RNA, 20 nt, Artificial Sequence
  Antisense oligo
auugcacucuagccuggaug

SEQ ID NO: 19616 - RNA, 20 nt, Artificial Sequence
  Antisense oligo
cauugcacucuagccuggau

SEQ ID NO: 19617 - RNA, 20 nt, Artificial Sequence
  Antisense oligo
ccauugcacucuagccugga

SEQ ID NO: 19618 - RNA, 20 nt, Artificial Sequence
  Antisense oligo
accauugcacucuagccugg

SEQ ID NO: 19619 - RNA, 20 nt, Artificial Sequence
  Antisense oligo
caccauugcacucuagccug

SEQ ID NO: 19620 - RNA, 20 nt, Artificial Sequence
  Antisense oligo
gguugcagugagcuaagaug

SEQ ID NO: 19621 - RNA, 20 nt, Artificial Sequence
  Antisense oligo
agguugcagugagcuaagau

SEQ ID NO: 19622 - RNA, 20 nt, Artificial Sequence
  Antisense oligo
gagguugcagugagcuaaga

SEQ ID NO: 19623 - RNA, 20 nt, Artificial Sequence
  Antisense oligo
agagguugcagugagcuaag

SEQ ID NO: 19624 - RNA, 20 nt, Artificial Sequence
  Antisense oligo
cagagguugcagugagcuaa

SEQ ID NO: 19625 - RNA, 20 nt, Artificial Sequence
  Antisense oligo
gcagagguugcagugagcua

SEQ ID NO: 19626 - RNA, 20 nt, Artificial Sequence
  Antisense oligo
ggcagagguugcagugagcu

SEQ ID NO: 19627 - RNA, 20 nt, Artificial Sequence
  Antisense oligo
aggcagagguugcagugagc

SEQ ID NO: 19628 - RNA, 20 nt, Artificial Sequence
  Antisense oligo
gaggcagagguugcagugag

SEQ ID NO: 19629 - RNA, 20 nt, Artificial Sequence
  Antisense oligo
ggaggcagagguugcaguga

SEQ ID NO: 19630 - RNA, 20 nt, Artificial Sequence
  Antisense oligo
aggaggcagagguugcagug

(The sequence listing continues in the following parts.)
